United States Patent Application Publication US 2018/0305689 A1 - sequence listing, part 23

SEQ ID NO: 315885 - DNA, 4001 bp, Homo sapiens
gccaaactaatctagtatttaaaaaaaaaacaattagaaaactagttgcctggggtgggcaggagactggcacaggacaggagggaacgtctggagatgtgggaacgttctatgttgtgatgggttgtatgctttatgtggatgtgcatggatacatttgtggcatttcaatatatgtaaattttaccaaaaaacttcaaaagaacagtaactcaagtagggggctgcggaatggctgaaagtatatgaaacaagaatggcggaaccttaaagctaggtgttaaagctaggtgatgggtccatgcgggttcattaaattattctgatgttgtttgtaccggcgtaataaaaggtaaaaacaaaacttacaggctttagttgagaaccagttaaaaagtaaaactgttttgtagctccccaacaccaccaaaaccaaaaaagttatgtaatttcctgtagcattgaacagaggtatagtcattagcgtaactacagtgaacactgtagctcctggctatactccgtgtccaggttaaaacaaggagaatagtgaggacgacagggtatttatatactctatgaggaactagcgaaacgtattagggaccaggactctttctcttattttaatccaaattaaaagagagaagtgcagggttttgtgggaaattttttttaaagaattcagcgaaaatgcagcatgataaaagctgcaaaaaagctataaactccgaagttaatattttggctcacttggttatgaagagtatgcatgtaacattttgggaaattaccataaaaatgagtgtctttagatttctgggctgaattgaacatgtgtaggtgtatcagcatgcagccctgccccaggtactctccctttctcaaagaatatggattatcgtggacccacctctgacctaaatactgtgaaggaatcaaagtatgaaacacaaaccttatcccacggaaccttataatctaactgcaaaggcaagatacgcctaaaaaataagccattatcccatagcagtacttggttaaatgccaggagggagtacagacacgatgtactttttaatgaaaagaatattgcgctgtggtggtttcagcaggctgccttgaggttagggaatttgaaatgagacaaagaatttaagcagagagaaaaatgggatgggaggcgggcaggcacttccagagcagaggaaccgggtaaagcaaacaaagtgacgacataacgtgaaaagaaacctgaattttgtctccagtgagcccccaacgtcccaccaacgcctctatctggctctccgttcaatgtcttcccgaaacttcaggtcagcggttcctaaagtggtccccggacaagcatatctcaccaaccagctgggaacgtaaactgtcaactctggggactcatcccagacctactgagtcactaagtgggggactgagggcggcaatccgtgttgtaccatgtgcgtcgggtgactgtgatgcacgctcaagtttgaaaaccactcctcgagggctactgctaagcacaaccctccgcacagaagtgatactgttctgagcgcctaacagccaacttgcagggtgtagggagctgagagcgggtcccaggcctgtaagagtcaggctctgccccaatttcgctttctcatccaggacaccttctcccagtcactatctcctacgcctgctccttctgggtgactttaccctgagagggcccgctcccgcccatgtcgccctacctcagtgtcagaggggacgtggtgccggcagggaggggaactgcccaaggagacgggagtagatgtggcgctggcccggagcccgcccaacaggagtaaaacgcttcggacccacacagacccgctccagcgccaccggctccggcccgggcctgagcccgagtaacccactcctccgccccattcggccgccatcttcgggccgagcgtcgttaccatggagtgcgtgacgcctctgcgcccgcgccggccccgcccctcgccgctgggggtagacggagggcccagccggcggaaaggcgctttccgattggacagcgtcacccgctagaagttcgccgcagaagatgagggcggcgatcacgtccatcgcgtctcgtggcgcgaagccggccaataaatgctgtttggaggcccacgtgagtggggctgtgggaggaagaaaggctagcgggcgttggccgtatgtgggtgtcttgaggcagtttttcagttctttcatttaccaaagtgacatgcacctactaggtgccaggtgtttagacgtacatacaaccctctgcaaaatctttcagtgtagtcctctgtatgaaaaggtgagtggaatactttcatttacttatcctgagtcaccaactttaggcccattacttaactaacgccatttcctataaaaatctatgatacaccgtttactgttttactcaactccatcttttagtttccagccaagaattgccactgcacctgagataagggggatcctggccattaaggaaaccttgccttcgaaactgagccgtgaggaactatacaaaatgggaaattgggacaaatcccagtggctcatgacactaagaagtaaaattacgaactcactgagctggaagtcattcaacgggaattgaataggtaagctactatactgggaaatgaaggagtaggaaagaaggaaaacctcaagttacaaactatgggtggagattcagctacgaggatggggtggtgttttaagtattaccattttacaagtaaatactcactaaatgtgtgtatcatcccacaactagtggaaggtgggattccaaaccacatttgtaacttaggaaacgtgccctttccactacaataccacaaataaattgctattgtgaataaagaatggaaccagtcatcctaagctcctggctgtaacaatagtgttatgctgaggaaaggctgtttcttttttttttgagacggagtttcactcgtcgcccaggctggagtgcagtgacacaatctcggctcaatgcaacctctgcctcccgggatcaagctattcccctgcctcagcctcccgagtagccgggattacaggcacccgccaccacgcccggccaatttttatgtttttagtagagacgtagtttcaccacgttggccaggctggtctcaacctcatgacctcaggtgatccgcccgcctccgcctcccaaagtgttgggattacaggcgtgagccaccgcgcccagccaggaggcaaagctgtttcaatggtgtagtggacaagttaccagccacgcaagccctttcctgtaaaccacaggactcctcctttggcaacggtgacttgagtacttttgacttaatttccatatgggaggagaaaaacataaaaacatacatttattatttacaaatgctgcatcatctcagtaaggaagagcatgtatttgcttttgagtctcatttgccattgcacatgtaagttactcgagttaaagtctcaaccgtttgttttcccccgctttgctcagatgcctaccacttaccgtgtgtctgttccactcagaataccatccacttctccatatgcctaacccagacctgaaatacccatctgtcttcatggatatgtccacaggttaacatcttacagcttcctcaaattcaactttagctcctcccacaaaaccatctcctgattccccaactttgtaaatgcaccattatccatccagcccccaaagccagaaacatgttagaattctccatttgagactgaaaagcccacctaattttcccttgtttatgctgggatgccattgggatttgaaataatctgagctggtggctcatatctgtaatcccagtactttaggagaacaaggcagggggatcacttgaggccaggaatcgagaccagcctgggaccccgaaaaaacattttaattggctggacgtgcctggcatgcacca

SEQ ID NO: 315886 - DNA, 4001 bp, Homo sapiens
tggaatatatatatatttaaaaacctcaattttgattttgaatatatatatatacatatatatatttaaaacctcaattttgattctattttttcagttctttgacaactgccatgatactctgtctaggacaagtttactatcccagtttcttgtgaaagaaagtgcctaggaaccagggccagctgtaagatgaaacaggattatgcagacattgagaaataattgcttagtctgggaaataaaatgggccttttatcaataatatgtattagattcttgcacatcaattataatgcttttctatgcaacttgtgggcctcatagatatcattttgaaagccagtatagcaagttgagacacaggttcatttgagcaaaaatttcatgctcataacataggtcagaagagacagtgacaagtcaccttaaccacctgaagtcttcaccactgcatttctcaccttgaccagaagggggagccaaccatcaagctgttcaagttataccagaggaaggaaaaacatgttgcaagtactcgtttttaccccctgaaactggcattcacatagaattggcttttcatccattgatctccagttgtaaaaaatctgcaaattgtaccttgaactctaacctgatcaatccagctgtttcttttcttaatcttagcacatgtttaaactctactgactgtaaaaccaattgacaactttccttaattacagccagcttcagagtaatttaacaagatgtatctttgtaaacaggcataacctaaagagactttacctaggaggcatctctgtcctctttttgttaagtcattttcaagtggaacataaaaaaaaaaattatgctcatgcacagtaagtttgcagagttaacaattctagctttcaggttttagaaagtgaagaactagcttcaaaaccacttaatagccatcgatttctaaatgtcatcactgacagccaatacatagtaataatataagacattttctggttattcgacttggtttaattgcaggttgtgtggccagacttcaggaggactgaaatgtttgacactgtgtgcgaaacactgcgtatgtttggatgtgccagagagacagaggctacagagctgtcattactttctcaaaggggcctgcaataaaaaagaaagagagaggtaaggacaactgcctctgggttatgagttaagtcactaagtatcgtggcaatagaacacaggctttctgacacagcaaacccgacagcaatttttaaaaagagacatttgcaagaaattacccaattttccccttgtaaatataaatgtgtttcagaaagttccagtcggagtaggattaaatattatggtttaatctagatatggcaaaaacaaagcagaaccaaaccctggagtcttgagaaatcacagttacaacagagagacctaacagcccatcccaggcagccatttctcggttgtacacaaatctctggttacctcggatttcacaaaggtgacaggaactcgttcctcttccagcatgcgcctggatgccttttcccaatacatataatcaacaagagatttatgattgaagtttcctgtcggtggcttgtcagtttgatctttctgaatcattcccacgggaaggctggggtcaggggccatgacttccatttccgactgcagttctttcagttcttcagcagacaagttggccaagatttcatcttcattaatctcctcatcgagaagttcttcttgatctgaatttctgctgtgctctgacattattttttctaaatattattttactagaaaagaagaataatcaaagatgatttttaaaaagaaggaaaaaagcctcaagaaggtcccccagttaacgagtgtcccaagttaacacacccttgagatatttttttttttttcccaggaacctcagtggtttgctgagcagctaggagtgatcacagctaagctcttgccggatctatattaagcagggcttggctggatggggtcaatttatggaacaactatgctgctctctttttggcaacttgagtcagctgcgcaaatccatctgacatttcagtacagctgctatgtttgccagagactagcagagactacagaatctctgcaggaataaaattaattatcttcctatatgccatcatattgccatacacaaattcatgcagctcatacatacataccccaatactccaggggattccacttgtttttatttaaatattaaagcaacttacaatatttcagaagggaaatccaaccagcaacctgagttgtttctgaagtaaagaattcacttgaaggtagaaatcaagctcttagggtctgcctcttccctacaaggtgagtgtggaagcaaataaagtggtgcacagtggaacagaggtcttgctatgtcactcatcctctgtgtaagccgaacctttgcaagatgtcctgtttgcatctagatcctgtgatctaacagatggggacaaccagcacttggatttccactataagtgagtttaatattttaaattatttgcttttcttattaagtatccattaagccaatatcaatgaaaatggctctaaagtgaagtgttaaaaaagaaatccagaccactaatatactaaaagaaactatgagaagattttgttttcaaaccctgaaggggcaatatgcaacatttgtccaaattacaaatgcccatttcctttgacccagcaattccactttgagaagtgtatcctacagatatacccctacatgggtgaaacaacgtgtgtacaaggttacacaatatagcaaagtacaaaacagtgtgttttacatgccattatttgtgtgacaaagggtacaataatatataatatacaagttttattatatatatatttaagacagggtctggctctgtcacccaggctggagggcagtgctgcgatctcagctcactgcaacctctgcctcccaggatcaagctgggaccacaggcatgcaccactacacccagctaattgtattttttgtagagacagggttttgccatattgctcaggctggtctcgaatttctgagttcaagcaatccacctgcctcggtgtcccaaagttctgggattacaggcgtgagccaccgtgcctggctcgtaaatatattcttattccgaaatatacattcattgtacaagagttaggataacatagaaaggcacagaacaaaatcttccccttacctcactgtgaagctaccactattaacatttcagttttttcattccagtcctttcttttaggcatacaaactctatcattttttctcatctgtttttttgactgagaaagtcaggattctttttttctaggcaactgtgtactctactactaaataattttttattgccctctgttaggattctttatatggatgtaccataatttgtataaccaatcctcaattgttggatatttagaatgttttcaattctcacaagcacaaatagttctttaataaatatccctatacctaaatagtttataaacacacaagtttatttctttagagtaaattgaacaaattctaaaaagtgaaattgctaggtcacagaatacgaagaaattaaatactttttatatgtagattaaagtaacagcaaaaatcacaattacttttgcaccaacctactaggacccatctccaatctacttatattaaatatttacaaatactatacatgttggccgggcgccgtgctcatgcctgtaatcccagcactttgggaggccgaggcgggcagatcacctgaggtcaggagttcaagaccagcctggccaatatagcaaaactctatctctactaaaaatacaaaaattagccaggcgtggtagcaggcacctgtagccccagctacccgggaagctgaggcagagaatcacctgaacctgggaggcagaggctgcagtgagctgagatcaca

SEQ ID NO: 315887 - DNA, 4001 bp, Homo sapiens
aatctttactatagcctgagaggtagatgttttcaccatttcacagattagaaaaacatgcatcagatcagtaaggtcccaaagccagtaagcgacactctatttggctctacagtaccatcaattaggaaatggaggagaaaatgagagaatagcataggctagagaatggaaatgagatgtttatcaaagtataaaagtaaccagaacagattcgtttactaatgccaaccttaaaaataaagccaaacaaaatcaggcctttagataaatattaatccaaaaaatgtttcaagaaaataacaccgattccctttggagaggggaactgtgcagctgaggacagggactgaaggaagacttttcacagtaaactctgtaacttttggagtttaaccgtaacagtgtattgcttactccaataaataagaaaaaggtttaaaaaaaaaacttcaaatatgttttagttcctatcaagtttgtaattgttagcactctacaatcctccaagaggccacagcaaaactgaaatttcagaaaaaaaaaaaaatcctaacttgtgttctgaaaaaggcaaggcagagcttatattaaggggcagaaaatttgcctttggggattgggggatcaggaggggagaaaagcctattgcctgcaacgatcaactcaattccactgctatttttagcccatttttttagtctgttgctaagaaaccctattgcctgaaggcaatttactaataggaacttacatgaagcaggagaaaccggtgatcctgaaattctttccaattaggccattctattttaatcagtccattctggtgccacttgataaaatatctcctttcaatctttatgtagctctactgtgatgttgttgcacttaacagcaaaacaatcatttatgaaatcttaatgtaaggcttctgcaaaccagtataccagaaatggagaaccatagttctggactctgatttttctattaatagttgtcttcatgaaaataccgtgtattccaaacaataccttgcaaggtaattttatattttaagagatctggtgcagagcatcggaaaaagagttgataaagctattatagataaaaagctgtgaactgaaattacgatttgggaatgagacgagaagagggctgagactgctactgcaaaacaacccggggggcgtgcggatcagagcgagatgtgggctgacgcagaaatcagctcaagatacaaatacgccaagaaaggctcgaagccggcgggaaccctgacgcttcgcatttctaccaactcagtttaagaaacccctaacaacgcagatgtcatcgcttcgttaattggtgccgacgatgagccacagcgaccacgctcaaaccgtttcgactgcagccaacctagatgtgccatttccacctagtcttctgccatcgctatctcccctataacctcaaattcgtccaaactaaaatctcgctatgttagtgataagaagttcagtgatgcagcagccttcttcagcggtgagctctttcctcacacatctttaaaagtccttctaatccgttggtttctcgggcacgcgggcagaaaaccgtgctaacggccacagaggttcaagaggtgccaacgtggctataactggaaaactggatccgaaatcgaccagtaaactgggtagctcggtctacgccccgcccaccacccttgctagccaatagccttcacaactcttctgccactcccgcccattccagtgctgtgccgctgctttttcttccactcggatctcttgagcgcccttagcccgctgtatacgcgcccctcctcggcttcagtaggcaagagggccatctgcccttctttcctgaaggtagaggggacaacaccagctacgacggggactccagaagtccatctcccgaacagcagcggggcgaaaagaaagaaaaagggtttccgaagactcctactcacacccacgctttcccttaacccggaagtgatttccgcccctcctctccctcttcggttgatactggaggagaaggacggccaggtctggcccggcatgccctgggcttccggtgacctctggcccttttctgtcgtccgctctctctgcctagcgtgctcgctcgctcattgctttccttccctccctcggtcttccttcgcacgctgtttggtgattgtggcgctcgcgacagacagggaggcggtggcagaggacacttgtcatggccgcctctaaacctgtggaggcagcggtggtcgcagccgctgtaccgagctccgggagtggggtgggcggcggcgggactgcgggcccgggcacgggggggctgccgcgatggcagctggctctggcggtcggggcacccctgctgctgggcgcgggtgccatatacctgtggagtcggcagcaacggcgccgggaggccagaggccggggcgacgccagcggcctgaagcgcaacagcgaacggaagaccccggagggcagggccagtccggccccgggcagcggacaccctgaaggtcccggtgctcacttggacatggtgagaagcagccccaggccgtagaggaggaaactggctcgtgcagcttttccttggcgggttgtgtcagtgagggggcttcccatcagacggaagctgccaagcggcagcacaacacttgggtttagggagactcatttctggctgccagtggagggcatagagtagctcgatgacaggttactggcattctttgacagtttgcttttggtttcagaaaaatcctttgcttttcttctcagtgacacagcatttatccctagtgttgtagatgggagtggggcatttgcaaatgtgatgattgtatttaataagtgaaggaagctaaattcgattaacaattggtacatcgtgatacgaactgtttctgtgatttccaaagcctacaacctaatcgctaagagccttttaataatgagccactcccccttttggagtgtgtttttgctgggggtaagtgggcaactacagtgacggttagttgacaaaagcaaaacaaaaacaaaaacgattagatggctttctacatagaaaaagaaagactacacaggttctaaagagtgaaatggtgttcagtggcatttgttttacagcctctgaactgtaagcagaactgtcaagctcccaaggctcgtcctctctcagcaaccccgaagcccccttggctgcaagcactcagcgcccgtaacctctcctgccatgccccagccccaaggtgtccttttgcactccggaccccttggcctttgtcagaaaacgctctgcactgcactgtcccctcttgctgcacaagagtagcggccacagcaatgctcaccaggcttggttgcacacagccccctgccccaggtccaggcctacacacacatacaaaaaaaaaaaaaaaaaaaatgggagtgacttcttaaactttttgattggaagcatcttaaattcagtttttccatttcacctggaaatgtacatgaccaagcctaatatgcatgatacagtttctctgatgtgaggccaagcattggattatttagtgaactgctttgtatggttttggtgaactgactgttaaatccttttggtatctgacagctgtgcagagaattagtctggctgcatttgacaatactgggattgggtgtggtggattttctctgggtctggagttgttcaatggtagtaccagagtaagtcgaggtcagagaaacgtttggtcaaatatctcccagttttatacataagtatatacagttggtcaagtaacttctaattgtatccaagtgtatacacttaaatatgtatgcaagtcatttccatattatactattcaggttgaattttttttttttttttgagatggagtctcactttgttgcccaggctggagtgcagtggtgcgatctcagctcaccaccacctccgcctcctgggttcaagca

SEQ ID NO: 315888 - DNA, 4001 bp, Homo sapiens
aaacaagtaaaatctctaagaaaaaatgcatttcacttttaaacaaactaccttgtcttcttaacttgttttagtcattgtcctcactatgagcagaactgtagtggctactatcaccaattttgtagcttcaaagaaacacaattaatgataactttagaaatacacttttaggaaaagataaggcagaaagaggggattaaatatatttaggccgggtgcagtggctcacacctgtaatcccagcactttgggaggctgaggctggaggatcacttgatcccagtagtttgagaccaggctgggcaacatacagagatcctgtctctataaaaataaaaaataaaaaattagctgggcgtagtgctacgtgcctgtggtcccagctactcaggaggctgaggtagaaagattgcttgagcccaagaggtcaaggctaaagtgagccatgtttgtaccactgcactccagcctgggggacaaagcgagaccctgtctcaaacaaacaaacaaacaaacaaacaaatatctaataccccatccttcttcactctaaacggctgacactgggataagacagggcccctcctcaggggacttcagataacagggagtgaggcactggcacttcacgtgataggcactgaaatgggacacacaaggagggtgccctgacctggccgagggtttggggctccttctagggggagggacttgcaggatgagcgggcaggagcacccagggtgcaggaagtgacctgtgcagagacctgcagtggaaatcttgcagaacaaagagttgcagaaacagattggggattggctgaggtcgagttgggggaggggactgagggcaaaggagcatgggggcactttttagggtaatggaaatgttctgtgtcttgttttttatttatttatttatttatttatttatttatttagaaggagtttcactctgtcacccaggctggattgcagtggcacgatctcagctcactgcaacctccacctcctgggttcaagtgattctcctgcttcagcctccccagtatctgggattacaggtgcctgctaccacgccgggctaatttttgtatttttagtagagacagggtttcgccatgttggccaggctggtctcaaactcctgacctcaggtgatccaccggccttggtcttcaaaagtgctgggattacaggtgtgagccactgtgcccagcctgtgtcttgtttatagtgttgattatatagcagtgtacaattgctaaaacttaccaaactctacattttatatgagtgaatttcactacacataagttattcctcagtaaacataggtaaaaagcttcttctgtctttggactagaagttcaagttccctggctctaacctactgggagactgttagcatcttgtcattagggtttagcccattccttcacaggtaacgtgtttccgtgagtatttgtgtttcggtttcctggtgtctacaatgaggacaactgctcctcctagtagaagtgtgatgaggagactgtccatagttggaaagctcttgataagtaaatagctctattcctctgtatcccctctgcccaaaacgccatctaatcttgtacttgagagaattcgtgctgctgcgtccagtgaatcagcaccaacttggacaaaccataacctccataaccattaggaattttacttcacaaaatcaacaaattaattaacacttacagagaacaaccgcatgaagggatgtgaagacatcgattcagtcgaaccaaatgtgtcgcacttgaccgcctgtgaggcatctgtgctgccccaggagccaattcacgttcagcaaatcaacaagaacaaaggaacatttgtccctcgcaagccttaacgctgtgccagcaatttgatttcccaagtctcagttacccagagtattaaactcaaattgagaaatctgagagttgcttttttaaaagaggcttttggcttacactgagcgtgcttgtggctcttggctagggaggttcaatgcacaccagctgactgtgcacactgctcatgtacttcttgcctattcaacacctcctgagagcaagtatttcatgattatgtttcacatatccaaaagtatgtttaaccgccttttacatttttctttatgattggggcttgaaatagaacagaagggttccagttccaagtaagatggaggaagcataccctaacctgtccctccaaagaatgcagcctggacagaatgtgtggcgcagctgtttcaggactctgaaaagtaaacagcagcaggtagattagaggaaaaaccccagaattccaattaccattgaacagtgctaaattttctatttttactgtggtatccccagtttagactcaaggcaacccagaagtggggacaagggtagaaagagctctgagaagccctctggttccagggagaaagggaattggaactctcacacattgctggcaggactgcagaatggtacaggtattattgtgaaaaacagtttggcagcagtttcttttcttttttatttaattaattaatttatttattttgagaggaagtttccctcttgttgcccaggctggagtgcaatggtgcaatctcggctcactgcaacatccacctcccaggttcaagcgattctcctgcctcagcctcccaagtagctgggattacaggcacccaccaccacacctggctaattttttatatttttagtagagacggggtttcaccatattggccaggttgatctcgaactcctgaccttcgggtgatccacccacctaggcctcccaaagtgctgggattacaagcgtgagccactacgcccaaccggctgtagtttcttataaagttaaactatactcaccatatgacacagcaattctacttctaggtatttagactagagaaatgtaaacttgtattcaagcaaaaacttgcacacctgtacacagctctattcgtgattgccaaaaagaaacaacctgatagttcttcaatggatgaatggataaaaatctgtcagacattcatacaatggaatattgtgcagcaataagagggaacaaacttcaacacatgcaataacttggatggatctcaaaggcattatgctcggtagaacaaggcaatctcaaaatggtatatattttctttcttacttttcttttctttccttttttttttttaaactgagacagagtctcactctgctgcacagtctggagtgcaggggcacgatcacggctaactgcagctttgacctcctccagctccaggtgatcctcccatctcagcctccagagtggctgggactacaggtgtgcactaccacacctgggtaattttggtattttttgtagagacggggtcttgccatgttgcccgggctggttggtatatgttttctgtgacctcatttatatggtattcttgaaaagacaaaactatcatgactgcctgggattagaggttggggagggtatgactgcagaggcaaagcatgaaggaactgtggagaacctgatggaattgttctgcattcttcatggcggtggttacgtgaagctgtatgtatgttaaaattcatagaactgagtacacacaaaagaatcattttttactgtgtgttaatttaaaaataaaaactttaaaaacagaacagaaaatgcttttggtaaaatgcattttgactctgctgatttgataagattcaggcatggaaaagtctcaaagattatatactgtcactaagaccccagtgagccctgccacccgattgtcccgtgaaccagcagcactggcatcaccacggagttggtacaagtgcagaatttatcaaggcccagataggaatcaaaccctgcattttcatctcatccccagatgactcctgtgcatgactcctgtgcagtttaagcagctctgctttagaattacaaaggccgaagctaaggtacag

SEQ ID NO: 315889 - DNA, 4001 bp, Homo sapiens
gttgcaataatgaaataaaatcccttctttacttttgtttcttcataaatgcatataccacataaagcaagcacttccaaaatgtgccattctgcttacaaacaatatttactcttctgatgtagtttggatacctggtgttagaaaagagttaaaggccagacagtctttaactgccaatggaaaagcatagccagttgctaggtggaaagagacctttagctgagtattgctcactcttcttttcttacctcaactgtctcctaacaccagtcctaaccacaaccctaacccaccacttagtggtagagacatctgtttcacaacagttgaagagaagatggctctttttaaaatgtacagtctactaacatactaaggcattgccactcataattcatatgcgtccttttgttcttttacaagacatttgttagaggttgagtaggcacagccaaaatggcaactgaaaggaccagtgtggggaaacccattaaatgtagccaaaacaggatggctatttcaatccataagatccctcttttcctaactgattatttcagtcttttgcacaggcctttttcgtgagtgaaaatgaaattcatatacgtactttcaccaagaaacaaaatggggctttaatgaagaaaaagttttcttgcttttcaaattggcccgctgtggattttagctctctgtgtatcacaggaaataaagctgtaggcaagacaaagatgttcacacctctgccaaaaattaatatatttttaaatggtaaattatcatcaaaagttttatacatattagtgatggtctgacctccaactgttcacagccatgtccaatccacacacacagaaggagaaaatctgtctactatgaatgttcaatttgttcaattccctgtcatgtcttttcagctgctaatgctgctctgtgaacagataatgactttaatgggaaaggaaaaccaacagggataaactactttaatttttggaggtgataatgtgtaacttagatatgctttaccatcacgtttaccagagtatatatacgtgtatacagtgttaaagcaacaacccacttccggaagttgatagcatttcaaaataaagtcttctgttattttgaaagtagcatctgccatattagaaagggaacctcttccaactcaactgaacaaacatttactgaatacctactatgtgctaggtttgcatgtgttgagggtttttgtgtgtgtgtttgtgtgtgtgttgagggtttgtgtgtgtcgagtgatggcaggaacttgcaaaaccaacatagtgagtttgatgaaattcaattgagaacctaaaaaagtgccttccaatccagtttcatattcaaaatacaggacaattagaaaccatcctgaaatctatcaaagtgcaagccaaggctaagttaccaatgagaagctggccattccatcacatttctatatgttctttctctagaatcctttttattgcaacagaaacagcaaaaagacctcagacaggaaaaatggaggtcttaagtcacattcagtcccatgataattataaccccagcaaagacaaaaagggacaattgaccaagggaccatccctacccacaaggagagtcaaaacaacagaggtaagacctttacagaaaccaggttaaaatatgcacatttacgtcctacaaaatcttaacttacacatcacttggtcttggaaattgtgaagggtttctcctctgaacagaatttttgttattacaaaatgtatacattagaaaactaattcaatagccctcattttaggcttacatttatagaaatttcaaaaattatacatttacaggagtgtatgaaagatcactcaccatgtgcatgtggctgcaggatgccagccccctggttctcctaggtcactggtggtagctttttctccatctttttgcttgttcctccccttctccccattggagtctcccagtgctcagtccttggtcttcttctcttctctacacacattcactccctgaattttaaataccgcctctatgctaactactcccaaatttgtacctcctccccagagccctgttctgaactccaactgcctactcaatattatcacttgtgtgtttaaattcgacaggtccaaaactcttgatcttttaccccaaacctatctcacccatggtctttctatcaactggtaacaactccattcctctagttgttagtaacataactgatgcctctctttctttcagaagccatgtctgtactgttagcaaatcctgttggctcaatcttcaaaatctttctggaatccagtcacttctcaccacctctactgctactagacttaatcaaaacaatcaataacctgggttattgtaactgcctcttcataggtctctctacttctatccttgccccatgcctgttctcaacacagcagccagagacatccttttagaatgtaagtcagattgtgtcgttcttcagctcaaaattctccagtggctcccacttcactcagaggaaaaaccaaaatccttataatagcctacaaggctttatactttggcctccagctgcctccctaaattcatctcctctcaccctctcactttattcccaccacttggactccttaggaccttagcacatgctgttctctctgtctgaaatgttcttttcccagacacccacccagcttttgtatcactttctcaataaggcctaatctattctattcaaaattgcaacctgtccctccccactattccaccttacttttctttttccattgccatatgacctttcaccatactctataatttatttatgtggtatgcttattatttaatgtctatccacccctttagaacgtaagaactacgaggcaggaatctttatttgttcatttcatgtatgtatcctcagcacctagaacagtgtctggctcatagcaggtattcaatacatattattttaatgaattttatgtgataaatgtatattgaatatttaaactatctaggcactggtcacatattaataaatcatctccccgttctatggagctaatatcttagtaggaagagagagataattaacaagtaaactaataaataagataatttcagatggcagtaagtactgtgaaaaacaaccagggtgatgtgaaattgtggatgggcaacttcagatggaatagtcaaggaggtcttctctgaaaaagtgacatttgtgttgaaatatgaatgatagatggaactaggccacaaagattttggaagagaacattttaggcacaggagacagatcaataaaagatctaaggcaaggatatgatcggcctgtgaaggaagagaatgagagacaatgtggatgatgaaagtcggtgtggaggataggtggaaggtgagtttgaagaggtaggcatggccaggtcacataggccttgtgtaccaagttaaagagtttaattttattcttgtataacatgacttgattgatactgtaaaaatattattccagttactttatggagaatgaattgaggaagaaaaagagtggaaacagaggctgattaagaatctattgcaagatgggagtcttccacttctggcaatatgatggcttaaatattctaagggaaaaagatggtccattgcaaaataccttctgctgaatatagtacaataaacttgtttttaaatacattattgagctcacaataaaataaagggaaatcactggggcaaaaataaaataagattaaacaaagaattgaaatcagagtgctaagaaaacttggtagtcaagacagtcctgggggtaaaagtcaacatgtgaacctagagatgtggaaatcaatggtctccaccaaaatgaaagactaggccacaagactgaacaatgtaaataagctgaattcaaacccctacataataattggaccctcaaagaggccacaatctcgatgaga

SEQ ID NO: 315890 - DNA, 4001 bp, Homo sapiens
tccgcttacgggtctctggctctacctcccagttccggctccgactcagcccagcctgggcggggccgttggccgttgggagccacgccccccgctgcgtcactgccacctggtcccgcccctgtctccatgaccgctggaccagatgtcagcagctgctccagagcctggtgcatatatatcttctatatacttgctagtatctgtcccctttccccccagacctcctcctgtgcaacacggaatgatgaaaatctagaaacaggaatctcactcccggcctagccaggactcaggttttgtgaaggggtatgaggcgggaggaaaagcaaaccccaccaaaccaacacctagtctagagcctgatcaaagtgccactcaaagcacgattcctccctttactttcctataacccgagaattcttcctgaaaaaggtggcccctgagaaccatctagaagcatcacggggtggaggggcaagggccctgagagctgctcttgccatcccttgtcccagttttcttgaagccgagttccagagaagaggcggggcccgtggggcgtttggattacactcccagtccaattcacagtccagcaatcctgccctcagaggctcccttcatctgtccacttggcaaaggaaggggcgggtcagcccacgccccctgtctggctgcagacgacaaccatcagaagggtgtctgtgtagccggggccccagaaccatgtctgcgtggaaagggcccaagaacctggagccctttcggttcaagaagagcgtgagggacccagcccccttctgaaacctataccgcattctggcctgtgccctagaaggttgtgaaggcctctaagtgggtcctcctgcttccccatcttctaaggcccaggcctttttcagagcctccgtgggtcccacccctgcacccatcacatggtgtctggtcccccctgcctgcctggctcacaccccccgccttcacctactgccctatttttatccctgggacaccccactgggcactgctcttccctatcttaaaagactttcggccgggcgcggtggctcacgcctgtaatcccagcactttgggaggccgaggcaggcggatcacaaggtcaggagatcgagaccatcctggctaacacggtgaaaccccgtctctactaaaaatacaaaaaaattagctgggcgtggtggcgggctcctgtagtcccagctactccggaggctgaggcggagcttgcagcgagccgagatcgcgccactgcactccatcctgggcaacagagcgagactcgtctaaaaaaaaaaaaaaactttcacaggccttgatcatcccttttgtcaatctagttaatgtcacctcctcagagaagccctccctgagcaccccatctgcagtaggtcacccccatcttccaccatcacttttcctggtgtttccgtcatagcccccacctctatggggagttttctgcactgatagactagactccctcccccactcagtggccagcgtgtctgtcttctctgtccctgcacacagcaaatgctcaatgttcacttgttggcatgaatgaaacaggaaggcccctgaggtgctaggactgggagcccttcaccccaggtgaggaaggagccttagggggagaggacccgagttagtgccccctccccaccctgagggtcagcccggggcagggctggtcactgcgccttgaggagcctctcccctatgcccttgatgggtggcccgcaggggacgcggccgcactcggtcacctgtggtcctggagcagccgcgcccggcgggcggcacttaacgaaggacaaactccaaaacccaggcctccaaaggacccatgggaagatccgggggctcaggggagtgaccccaagctgcggggggtgaccctcacctgaggcctctggaggcgctgagtgggccggaagccgcgggagccgcgggacccgcagagagtgcccgcctgtgttggggcagcagcgcctggaaggaggcggccccggccgcccgcagagctccgcctcccaggccgcgctctgtgtctttgtccaggctgggaggggccgatggccgttaaaagccccgcccgccgccgctcgccgccgcctggccccacccccgtatccatggagacccgacgccgccggactgcctgtcagctgcagctcggtagcctggggcccgccccgttcgcccggtctgtcttccgcgggccatgctacccaagctgactccgactggagtcactgggatacctgtccacgcctcctctcctgggccacttccctgcggggcgggcagtagggcagggcggggtgggaatctgttgtactcagggaagggaattgcccccaggcccagagagtttggagcctggggtactgccaccaacagcccagaactctcccagctgggcaccacccccccacacccgccgccagagtcttcctgcagcaaggctctcttcaggaggggctgtgaatgtttccccggggtggggctaagccagagcccagaggttagcccctggggcacggatcccccaggtcactcacttcccacgggctgcagtgaaggaggctctgaggggaggatggccggtttttcccctgcaagggaaggcattcctgctctggggactgcctccctctccctcttctgccagccaccgcagaaacttggccaagctgaccactctgtcagtgatctctgccagggaggctgaaaaacatccagccccacccgtggtcccttcctgcctcaggctatgtgacagtatgactgcccacctatttcttcgtttccactggaaacactagtaaaacaattcctcagcctcgaccccagggagtggcccccactaaaccagctgacgtgggacccctgggtcaatgctggccagaagacactgctgacaccatacagagaccctggacacctatgccccctacaaccctggtaatggtggccatgggattccaagcagcacacatctcggaatcaatattctccccaacaaaaaatacatatgtgattatcccatggccacgtacctaatcctggggtagagaaaagtacagaggaggaagcgctccatcattggagcacagcccttcctcctgggggtcccacctgttcttccccatctgacaaagtctgccttccttgtggaaccaaagagggctcaaagggagccagctgttcccacttttaatttttgactgcccaaggacggcgagaagtgaaggcagaagaccaccattcctgctcagaactcttcctgggctgggggtaccagtgccctgccatggacatatggggccttggcgtcatactctaccatatggtggccggggccctacccttctattcagggaacacgatggacctcaagaatcaaattttcacaggaagctaccacgcctcaccattttttttcccttcaacttgaaagattcattcaaaagttactaacactagaacccagggagtggcccccactgaaagaagttttgagggactggtgggtgaactgtggttaggagatgccacggacaacatacaaagagccatgagccaacataccacccagctcatggtggccatgggattccaggccaagaacatctctgtgccaatcaaagaaaaagcgtttcactatcctatggccacctacctcattttagaacaaacaaaagaagcagtccaccatcagaccatggtcccttcctcctggggttcccacctgtccttctctatccactgaagtttccaccttctctctcccactgaagcaggctcacagcgagccagcttgtcccatattcagcattcagcagaagaccactgttcctgccagtgcccctgccagcctgcagaggaagccggacagttttggcaaagccccccagcgtgacgctgtggcctctacctccacccacaccaccagcagcagtggcagagaccca

SEQ ID NO: 315891 - DNA, 4001 bp, Homo sapiens
aacaatgagaacacatggacacaggaaggggaacatcacactttggggactgttgtggggtggggggaggggggagggatagcattaggagatatacctaatgctagatgacgagttagtgggtgcagcacaccagcatggcacatgtatacatatgtaactaacctgcacattgtgcacaggtaccctaaaacttaaagtataaataataataaataaataaaaaataaaaataaaataaataaataaaagtctcttccagtctgctcttgttaaggaaatctctccctttctatcattacacacttgatttttttaagtccaagtgcaaagcttcatacttatcacagtttaattataaacactgaaaaaactcaagacatagaggaggtgacaaagatttttcatttgatacttaaacgtatgctagggggaatatattccagatcatgtttgaaattttaacagacactaaggtttaagcatcaaaccagtggtttccagccttttatgtaatatagatcaataggcacacagtcagttgtacttttaagatacactgattaagaaaagacagagagacaaaacacatctataaactcagtcacacttttaaatgaagttagttttttttcaatcacaatggcatcatctctgttttggaaaactacaccacaaatatgtcaaggtgtattaattactcagtacaaagccaatgctgggggcatatatgaattggcctcagccaatggggaccatcgaatcaggatcctaagtggaagtcgcacccagaattcccttactaatttcctcagctttccttagagcccagggtattccacactgttgattctttttaccaccccgattttttagaacataatgttctactctacccattaagtacagaggtacaccaaaacacaagggaaagtttaccttacctggtcacaattctcctttctgagcacataacaggatttgcacctcacatcctggtggagctctggcaggccctttaaaacaaaggctcacaccctttgcctaagcaaatttagcctgctctgccccaaagggttgttatagaaataaaatgaggctgggcgcagtggctcacacctataatcccagcaatttgggaggctgaggcgggtggattacctgaggtcaggagttcaagaccagcctggccatcatggtgaaaccccatctctactgaaaatacaaaaattagccaggcatggtggtatgtgcctgtagtcccagctgctcgggaggctgaggcaggagaatcgcttgaacctgggaggtggaggttgcagtgagccaagatggcaccactgcaccccagaatgggcaacagagcaagactccatctcaaaaaaataaatacataaaatgaaatgagatcacaaaagaagcagcactttgcacaagggcaaacaagagacactcaataatactgctttctttccttgtaaatgcccaaacactgttcagtgacattttcattttggtctttccatttcatgaacactttcttccatgccaaatgagaaagaaggaggcaatacaattgctggcaacctgaaatcatcgttactccaaattttcctccaagttcaatgctaccaccttccaagagctgagctctgcctttgctttgccacacattttattagcatggttatatattgtctattgccataaaagcaactcaagaaagaaggaagggcatttcagttcttctcttattcttaatgcatcctagttactgatgcccatactttaagtggaaaacactgatgtttaaaactcattaaaacatatacattgattttaaaaggcaaatgtgttctttttgtgtgcgggactcaccaattgaggaaaaagatcttccctctgatgagcgtccagtggaacaatgaaaaaagcagaacacagggaatcagaagaccaggttctgtcttctgctctgtctctgagcctcaaagttcccacctatgaaaaacagaagggtgttgcttatgtatctctagggtcttaaccagcttcagaaattcccaggcttataaagtctctgactgggccgtggtttacttctatacctcctaaactcctagtcagatcctggcactcttatttcactaatttgactcagaatgatggggaaagagaatgctgatgcctcagtgttcatatctcagctctcctagttctcctgggaaaacagcttcatcttaataatggaggtgaaagaggcaagtcagttagatactcaaattgtagggaagaaaaaaattaacagataaacctaaactataccaaataaaaaaagaaaaggaatatgagtttggagacaaatttctaactataggacctaatgttctttgaactttagtttccttgcctgaaaagtgagaatcagtgagcagcagagggataaacaatcttgacatttcccagtaagccgtccttgatatcatttggatatgtgtcccctctgaatttcatgttgagttgtaatacctgctgttggaggtggggcctgcagaggtgattggatgatgggggcggatttctcatgaatggtttagcaccatcctcttggtgctgtcctcacgatcacgagtgtgttctcatgatatctggtcatttaaaagtgtgtggcaactcctctgcctactccctctcttgctcctgcttttgccatctgagacacctgctcctcctttgccttcagccatgagtaaaagctccctgaggtcttcccagaagccaagcagatgccagtgccatgcttatacagactgcagaaccatgacccaattacaccttctttcttatagattaccgagcctcagctatttctttatggcaatgctagaatagcctaatacagcccttattacaggttttatttcattagcaactattattgttttgctaatgattacacagtatgtatgccaacagacaagtatcccaaggcaagggctgttataaaacttgtctttcatgtatgcaggagaaatccacatacgagaaactaccatgcccatttcattgttgtcactgtaaacattacctagccaatcatacaattgttttgtgtacaaaacaattccaagttcaaagttgggagggattttttaaatgacccacctcaacttttccaactgacaagagaacccggtggcctgggtaaggaggtgacctcttcaggagccacttgatccactggatcaagtgactgcttgctttgacaaaggacaacaaaacacactgggcagagggacttgtgcttggtcacatgagtcacacctagagccaaaccaggacttacaaatccaggcctcgaacacctatttcaacgctctcccagtaacctcaacagcagacagaaattaagtaggcaaaatggagtataatcactatcagcccagaaaagcaaggagtttcctgagacctagtggtcttcaaggacattggaattctgaaagccatttccactgaaaggagagagaggcataatttcaaacttactgagaaatgggttgttaggaagccaacattagacctgtgaacaatgcaatttcataaaacaaacgaaaaaggttgtccctaccctcacccgcaagctgcataaaaccaaagcttctccttgcagagagagatacaaatcacaacagtttctacaacagcagcaaagggcatctgacttcccagatttttaaacttcactgaaaggaagagctctccacccttggccctgagggagtctcactcacactctccagcttccctccaggcacaaatgaaagtggtctccattttccatagccaacttctcttttaataattttttcttattttccataaagagaacaagcagctttgctaaagaaccactgtgaaatgattgaagttcccatgcaaacaaaccattagcagagttcaaacgcaatttaaattaccagttgttaaagtgcttctcaatt

SEQ ID NO: 315892 - DNA, 4001 bp, Homo sapiens
ccagctaattttttgtatttttagtagagacagggttttgccatgttgcccaggctggtttctaactcctgagctcaggcaatccgcccgccttggcctcccaaagtgctgggattacaggcgtgagccaccgtgcctggcccacacactttttcctttaactgccccctggtgctggcaggaactgtgcaagcagaaaaactggtgacgaagtggagaaaaccatattggatgtcctaaccccccactgtccaccattattgaccataggctctaggtctagcacccaccttcgtggacctttacctattcttctatctataagagttgaggaagggggaggatgggagagggagctagatgctttgtaaaggtgcctagccacactttccccttcttcactttaggctttcttaaaatgcacatgtgcagggaaaggtaagccattaagtcatcaacaccttagtgagagtgaattttacaggaaaggcaagagatttagtaaaaggggaaggaatggaaagagaaaggggactggaaacacagttaagtgagtttggtactagcaaaagccccagagaagaccctgagttctcgctagttgttttgtgttgggggagggaaagcagtggatcccttctaagggaagggaagccagagagatttttcagttctcctacgactccgaggttccaaagactctgccctgtccaagcacccaggcacaattccactgattagctcatctcatatcacaacctcccccatccccaaccccttgcctccaactaaagaatatttatactttcatctccatttcccacactacttagtcttctctggcccacggttccctcgaagagatgtcttcctccaagccgctagctggcttcaggaaactcctcaacctccaaaaaccccattcagtgcaggactctccaaaaggccgtcccagggaccagaaaatcaaaccccctccctggaacttcctttaactttgtccacgcctttgctccagcacttagcattttctaccctaggccaggtttgactcccaggttcaactgagttccttgagggcaacgtccaatacacccagcacagggtctgccacacacagggtgctagagaaatgcttagagaaagggaacttaagtccggagccaactatttgaattatggtctggcctctagtaaataacttccgggcgaccctccttctctctgggcctcagctgccccaactgtaaaatgggaggacttggaggactgggtctaggccctttccgctgtgacaactgtgattccgcgaaagctctaagcggatgggcgtggccccgccccctgggcgcccagaaaagtccgggcagggggcgcgcaaggctccaaccccgcctagcctggggtcgacgcttttggaaaaactctgggtccccctcccccatggcgtgcaccccgtgattgggccgcggccggcacttccgcacagcgggccaggccagagcagggcgcgcgccctgcgctcttgccaccccggaggcgctcgcgccgggggagggctgggggttcccgaggcgcccgcgggtggagggtgaggggaaggaaggatttgcaacaatacctcagggaggaggcagccggggcagcggcggtggtggtggcggcggcggcggcggcggcggcggctggaggcggaggcagaggcagaggaggaggtgcccgggcactccccctcccattgtccccagccccggacaggcccggccccgcgccccacactggcctcctcgagcgcgccgcccgcgcccagcgccccacgccccgcgccccgggccgtgcagccagcccttaccttgcagcgcccggctgtctcccgatcgctaaagctacttatcccgggaaagctcgcgcgggacccgggaacgaacccacagacaaaaagtgaaacttcggcagggctggagcggctgctggttggtgcctttccccctccttcctccccaccgtccccaccccctccccttggtctcccgtgcggtgccctgagcgctggaggctgacgtcaggggcctgaattcctgactttgcctgcacgcatttgtccatgtaaggtatgggaaggcgtgtgcccgcgaagccgccgcgcagagctcgcctggcgggggaggggaaacccgcagccggcagtggctttgccaaaaggtgggcgcactgagggcattgcatttcctgggaggaagaggaggagacgcgggaatgcagggagcttgcaaaggaggaagagaaagagggagatgtggagactttgcccctgctagaggaagaggaaggagacgtaggaggaagcggccgcgtcagggggctcctggaaaatggaaaagcctgcgtctactattaaggcgtcaaattagggcactgagcttgagtggaagagatccagccatgaaatccccttccaagattttcctcgtgagccccgccctggattcccagcaagactcaaaacttacaaggtgtcagagctggcaaagaccaacttccaacccgtccgcttggcacgtgaggaaactgaagctctcggaagagaaatgacttgtacagggtcgtcactcagcagatcgaggagcgggcccaggcgctctgcctcccacttgggttcccgcctccaggaagggccctggctcccttttagccctgagccttgaagcaggttagatgcccgcgagctgtgcggaccacccagtgatttctactgctcttggcccagagccagttcctggaaggtcctggttgacagcgagccctgaatatcaatgacaatcagttgcttcagggcaacttcctctgtcctgtgctcaaataaatgaatccctggagtttaacgtttacttctgagccccgcccagaaagcttgctctgtgcttatagcttcaaaaaagtctgcgaacgagatgaactggtttgaatacagacaagcctgtcattggaagttttgagttggatttttctttcccctctgacatctgtaagggtgaacgacgatgagaaccaccacttaactgtgttaggggattatgacgcgcagcagccatggccaggaaagcattccataccctgagacttcctttccttgcacttctctcctattaatatctaaagtaatccctcacgttagcacataatgaaagcagtctctcacccggctattgcatcttcaggtgagttagataggacagagcgtagtcccccctttacacctcagacaaaaacttaagaaacgttactcgcccaacacaaaacaactgactgaccaagcacctgtcttcccctcctcccatccaggtctcctgactaatcccttcatctttccatacctggccctgacctctagcaggacctaattccattcataactgttgagagtacaccatgagctactgattcataaaaactccaaaaagtggttcttctgaggatggactttagtgggattcttttgaccaggaattaaggaaataatgtaaaaacacatgttattggatttattaagcaccttccttgtgcttaataagtgtttgaattcagacatttcaggggtaagactacttaacctctgtgttcctctcaactatctaatgtacacatacaaaaatatgaacatggctgggcgcggtggcttacacctgtaattccagcactttgggacgccgaggcgggcaaatcacctgaggtcaggagctcgagccagcctggccaacatggcaaaaccccatctctaccaaaaatacaaaaaactagctgggcgtggcggcgagcgcctgtaatcccaggtattccggaagctgaggcaggagaattgcctgaacccgggaggcaaaggttttagtgagccgagattgcgccactgcactccagcctgggggacagagcaagactgttgtcaaaaaaaaaaaatatatatatatacaaacacatatatatacacatatatatacatatat

SEQ ID NO: 315893 - DNA, 4001 bp, Homo sapiens
tcaaaggcagctatagtgccacaataatttaggtaaagtgtttagccctgtgcttggcacccattaagcaaccaatgcttgtcagctgtccttattcagagtattagtattcatactggtattatttactccaacctcttactgtccctgtccctcagcaccacagaaaaacaccccaggctttccttcttcaaggctctctcctcctgtctcatgaacagggcttacagtcaccacccagcctcagctggtcacagaaggagacagattgtgtacaggttcctgggagtcctgtgcaacttccctcctcccacttgcttcaaagcagattagagagtcgcttcccctctctttaaaactggccagaacaaacataggtctcagagcacttcctctgctctattacatctgccacctaatgccactggtaataaaatgcttccccaaaacatatttctaccatcttccctgcactggaaaataaggccctcaagttgatccgaggccaggtgcagcagctcatgcctgtaatcccagcactttgggaggccaaggcaggcagatcacctgaggtcaggagtttgagaccagcctggccaacgtggtgaaaccctgtctctactaaaaatacaaaaattagccaggcctagtggtgcatgcctgtaatcccagttactcaggaggctgaggcaggagaatcgcttgaacccaggaggcggaggttgcagtgagccgagatcgcgccattgcactccagccagcctgggcgatagagcaagactctgtctaaaaaagaaagaaagaaaaaaaaaaaagttgatctgaaactgagctgactacaaagagttactcctgatggctgtgaaacatctgaggtgacgtaataggtcggtgtcttctgggtctctatcctgctttggtaggcttaaaaagtgtgtgtgtgtgtgtgtgtgtgtgtgtgtgtgtgtgtgtttaaaatctaatcagaatcaggactcacctttgaatgggcataatattccagaattcttacagcttcaagaatagtggtagaggctcagatgggaagccttgctgaatttctctcagggaaaattgcataattttcacttccatggatagaaaggaagttccacactattcattctgccttttggacaagtgatcatcccctttcgtgaaagagaaagatatagggagcaaaggagagcagaaggttgcattcatacgacattcacatgaacaaaagaagggaaaggtaagtaaaaatcaaagaacaaaaagaaaagaaaagagcctcatacaaaaacaacaaatctaggcatctgagcccatatatcctaacgggaagaggtctgaactagaagtaggttctagtcctcaatttcccaccaactagattagtaagtgtggacagttctaacatctcccaatttcctcatctcgcaatagagggggcagcttaagtctaggggaaggagaacgaactgagagagaagatctgggttctaatcccacataatgagccatctgtcttcagggcctgggtctctgctgcccattatctcacactgtgaaattagacagatgtgctgaaaactctgcaggactcttccaactctgacaactcatcaaatctacacagtgacctgcacacaaggtattccagaccgtggatgctgtgcaaatgctacacatcaacattttgcatactcttaaatcccaccataactgttttcaagctaaaactacccctccctacatgtccacagacatcccgacatcccttccagcttgttgctttagccttaatcatcagacaacagcactcccaaattgtctttctacccaactcaagttaggcctcagatgagaggaaatacctactttttaaaaaatatacaaatataatttttcttcaggccgatcttgtcttgaaatcccactgtaagaagtactcccctgggaaagcagctgtccacacccccaaataaaagtgaccagcactcccagcaacgtgtcccatcaccatgcaagtgagccagcccacaggctgtaagccccaggtctgtgagcagaaatggcagtaatgatgtactcacacgatgtccagcccccacaggcagctggccctccactagccctcactccctcttgcaggccctcagtccactacgggacacagcaaggcggtggtctcgaagcctgaagggaacagaactgagacattctcgcctcagcttccagaacaagggacagaggaatgaagggggaagggtgggggcagggtggggggacgactttgtttctggaaacaagaattcaaatcctgcttctcctaaaccctgagtcacctccctctcttccaatagatcagcctggtgggtaaacatttccaaatatggagaagcaggctggaggatgtcagaaaaatcacccttctctcttctctggcacttgaagaacatgccccactttaacaaagaattccttactcggagtaaattattaaccgctaaagaagtggattctcaacccttccatacactgtcctattccaggaaaaaacctcctccaccccaaacaaggaagtgactggtctgaaaggctttaagctcatcttaagaatgagaccatccagaatgcaactaaatttatgaaataaatcattaatttggtggaggggagatattttgggagatgcacctgaaaaggtcacaagaatttaagctatggttcctatgatggcaggtgagtctcaaaacaactcctctcggccgggcacagtggctcacacctgtaatcccagcactttgggagaccaaggcgggaggatcacctgaggtcaggagttcaagaccagcctggccaacatggtgaaaactggtctctactaaaaatacaaaaattagccaggcatggtggtgtgtgcctgtaatcccagctacttgggaggctgaggcaggagtatcacttgaacccgggaggcggaggttgcagtgagccatgactgtgccattgcactccagcctgggcaataagagtgaaactccatgtcagcctgggcaataagagtgaaacttcttctcaaaaaaaaaaaaagaaaaagaacagccccaagtctctcacgcccaagcccagagtctcttggtctgggagtcctcctgagaatgtaatttggcatgagtccttcatgggcacagacaccgggctggaagactcagaataaaaccagactctcaagagaacactgttgtcaggaaaagtgggggtgaattgctcagtttaacttgtaacatggattccaaccctaaggttctgtgatgactaagttggagcagtgaagccaatcaggaatgaatctgatctaaaatgactccagactgaattaaaggaggagaaagagagatcagacactaggggaaatggtgtgtcgggatataggaggtgctccgagatgggaatccaagtaccacatcttggcttcccggtggttctgtttcttagtgatctcgttctactgttggttgtaaaggctttctggaggtcagatgagtcctttttcaaaatcgtcacccatttcctggctttggactgcaccaagaggttgcttgttctcacccccaggaagtcttcaagctataaacagctctgatcagggcatgaaggacccaagccccaaaccccaagcccaaatcagtcagtcgttaagattttagacgagtcagtgctccttgtgtagcttacatatttttcatttacaaattaggcagatatctagaaatggtccaatcatgtgtcctaaaagcagcttctacttggtctatccaaagggtcattacacattcattttgattatttgttttatacttaacaagcatgccgtaagcaaacatttattatttattgtacatttaatgaaggaacacaaatataagttactattaaaataggtaaggaaacagaatcagagggccttccactgcatgccagaaccagaa

SEQ ID NO: 315894 - DNA, 4001 bp, Homo sapiens
ttaatttcttctattttaaactacagcaaaagtttctttggaaagaatcgcttctttagtttaacagttctgtttatttttccaaaatgagtgaatcatatgtaatacttataaatttttaatgactgcaaagcatagaaaatgtgctcaatctaagattttaaaataaaataagacaccaagtactgccagccgcagtggctcacgcctgtaatctcaaccttttgtaaggccgaggtcggcggatagcttgagcccaggagttggagaccagcctgggcaacatagcaaaaccccgtctctacaaaaaaatacaaaatattggccggacgcggtggctcacgcctgtaatcccagcactttgggaggccgaggcgggcgaatcacctgaggtcaggagttcgagacctgcctggccaacatggtgaaatcccgtctctaataaaaatccaaaaattagccgggtgtggtggcgggcgcctgtagtcccagctactcgggaggctgaggtgggaggatcacctgagcctgggaggcagaggttgcaatgagcagagattgtgtcattccactccagcctgggagacaagagcgagataccgtctcgaaaaaatatatatatattttatatataatatttatatgtatattatatatatatgtatattttatatatatatatatatatatatatataaaattagctgggcgtggtggcggctgcctgtagtcccagctactcaggaggctgaggtgggaggatcacctgagcccgggaggtcgaggctgcagtgagcagtgatgacggcactgcaaacatgatgatgaacaactcgggcaccagacactgttcgccacaactaagaaagccaaataatacctactttcttattctctttcctgtgttcgaaaacatacataacacgaagtaatgctttaaaaaggaatagcaagtacaaatatgttagactatcttttctaagtagtttgcttcaacttttttttggaggacatgaggagtggaagaggaaactaatgggagtcggaaagtgggctctagttatttttacaagcgtatttattttgtaagtcaactagatggaggcgaagaaagacgttccagcgttcgggttcacttcacacacaccccagcacttctttggggttcactttaaacacacacacaccccaacacttctctcgggttcactttaaacacacacacaccccaacacttctttcgggtccactttaaacacacgctccccaacacttctttcgaaaaaactccagggctgagaccgacccttcctgacaatgcagctcgtccagacacccctgctactctgatctgtgaagagctcgcgctaacgttcccgtcttagcaggtccattcggcaccccaaatccgaaagggcctgcagaaaccggggcggggcaagggtctacctccgccgtggcagaaactgattttcctcagaaagcctaaaaaatcatccatcaatcactccggcccccttccccgagagatgccgccgcccgccgcctctccccaggctctgggtctggcgcaggcccggagggctggcgccgtcggcttctccccgttacccgggtccggacccggcgcctacgggacgagctgctgtaactcccccgcatccgcctcccccggccggggcggctcccggcgccgggtctccgacgggcagagacgccccccgccccgctcacccgcccgggtggtgtccgtcaggtcgtggttggccgctccccggggaaactccctcagtttccggccgctcaggctcagcaccccagtgaccgccgcctcctccagggctcgatcgagagagcggctccacgagcccgggccaaaaccagggcctgccccggagcttgggccgcagtgaacaccagggaggttacctcccgacgctaccgtgccagagtactcggcagccgctgccacagcgaccaagcccgcggccgccatttcccagccgacaacactcgggcccgccagctcagcgcatgcgcggccggaccgctgggtgggcggagaaaggggctcacggaccgaccccggacggttcccgtgatgggcagcaccgtggtgccccccggcgcagccaggcgcttgcccccgcccacatgatgcgcttttcaagggaagttaaaacggacctcacaaatccagagcagccccctactctaacctcccaggggcatttctaaaatgcctctacaaaaacatctttcaggcaacgctccgcatcaaaacttctccgccttgctccctcagtagtggaggagtcgactaagcattaaattaagaattttttttttttgagacagagtctcgctctgtcgcccaggctggagtgcagtggcgcgatctcggctcactgcaacctctgcttcctgggttcaagctattctcctgcctcaggctcccgagtagctgggactacaggcacgcaccaccacacccggttaatttttgtatttttagtagagacggggtttcaccatgttggccaggatggtctcgatctcctgacctcaagtgatccgcccgcctctgcctcccaaagtgctgggattacaggcgtgacctaccgcgcccggcaaggaatctttcttaacactgctgctgcagaaacttggatggtgagaggagcggaccctctgagatacgacctaaaccgtttcccaacttcattgtattaccagatgatctaaatcaaggtttggtggacttactatggttgctggagagaaaacaaacaaacaaacgtgctaattgggctcaaaattctcattaaaaacgtattattttatatcatccatcccttttataaaatagcttttcttaatgaaaatacaacaaatatcttcaatagtacttgtacttttggcaagattttattgttggataaagcaagattatagtagtattaaaatctaaaatgttggtctggaaccaaaattgaggaacagaaaatgatctcactgtaatctaaatgtgggaattaaaggtagaaccgaagagatgctctaaattgaaaccactcaagaaatgaaagagtggaaaatacttcatttaaaaccaattagacctcacttatattgcagccagtctctagcatattcttcagtctgttttactgaagaagccatttctgctatatgatgtaaattttaccaacaattaatcaactagttttactatgggaaatagaagaggctgtcaggtacaatcctttcctagaggatcacaatctaattatggaacccagacaggcccacaaaaaagggctaagagtgatggggcttacttatgagtccagagaaaagaaagctatatcatggataaattcggttttgaattaaacctgaaggattataaagtaggacaaactggaaggtgagactagaagatggatcagcatgaacacatccagatacgacttaaagtggtaacatgtggaggatacgaaggccacagatcagaaagttcgtgtcagagagcaaaagaaaaataaggatggagagatcctctcattcaagccccaactcttcaatgacacctcaattggcatgaattgctaaatgctagaaggtataaaaatgtttaatcccagtgccaaagttgattagtaacagctgcccagagagctgttctataaactctcaatacattctagttacttcagcaacaagttccatgatacataaccatacatatgttatgagctcatacatgttatgagcgtgggtcacaatggcaggtgacgtatttgtcatccccagcaaataacatttatccaatgcatatatagctttttgttatcctgggcttcctaaaactgttattcttcgaaagatattaagctatttaagggcagtttttttactttttagggagatttcaactacaatgactgattatctattcatatactccacactaatgctacaatgctgtagaattagtt

SEQ ID NO: 315895 - DNA, 4001 bp, Homo sapiens
gacaccctgccctctctgggaagttacttctgtggaactaagtgctttccccacaatgccactgacacatggcattgggagtcactcttccaacaggtgaacacttaagaagttaatctgattttgcccacatgattctatttaaaaaaaaaaaaaaaaactaccgtatgtaagggaaaaatcacaataccccagactaaataagagactacctaaggacaatactgggctctatctcccagtacttcacaaaagctctgcctccaccctacgaccactgattttcactaactcagtaaattccacagaagaagtagatattgaaaacctaactgtaactaaagggttcctggttgtcttcagaactctgtagtacttgttcatggagcagtgtctcgggccaagttaaagattcgtgccccattttgagaggtacaggatctttacatttaaaaggaattaacttttcttcccttcacggtagtcagaacacaggccacattttcttcgatcaagccacaggtgctggttacaacttgtgacaccagttttctctttttaaaacagccatagtcatgcctaaggttactgctgtgcctttcctatgttctaggaaaaatgtccaattattcaaccgaaatgcggactatttaagctaggccttttctggaaaggtactaatggttctacagagatgctaattacccataactgaacgggatttgactcatgcaccagatttgttagaagtaaaagaagactattctattctaccatgtttacacagaagtctaatgccttttttttcctgtcaaatctcctgtaagaagtgtcccactaagtcctaataagcccacatcctgacagcacagaaaagaacctctttcgggtgaaacaaacagcttaaatcagccaagcccctggcaccctctcctgaagcagcacttctccaaaactcatttgcaccatttatggaggagagagtcttgagggtgggccccaccccactggatcatcaagcccaatggggccccagggaacacacaggaagggtctggaacacagttccgtaaaatgccaaacaggcgtaaaaggacaaactcccagcactcacaggtcgccaggaactgtcaaagccctctaactcaggggtcctcgggggaagactgccttctgccccgcacagagaggcaagtcaggccaccacggtcttcggggatcaggagacggctacacacactatcaactaataaataatgtaaacgaaagactggacccaacagtcaccttcattcattacccactggaagaccaaggagctcagacaccaaatagttggattacaggagaggaaaaggaaacgcacccacatacccccacagacttcttcacactcttctccagacgtttcccacccacccacccgcaaacacactcagctccagactcccactcactcacccccagatggcccgcacgacgcgtgctggctaacccccaaatctctacgacccacgctcgctcgtctccagaccccacgaggcacgctcttcttctccaggctctctcgcacgcctactcccccggacctccacgcagaatctcccttccgccactccaacctgacagtcttccaacacgcacaagcacgcacaactccacacacacaacccagtccgcaccccctccctgagtacgaacccccgccgctccatccccaagtgacagagccccggggcgcagagagggcggaaagggcggcactcacaggctccgcgtccaggagggcaggtccccgggcaacgcagccagcccgcgcccaccgcagtccagcgagtccccagcgcaagtgcaggcggccgcgcagggcgcccgcgggccggccgcggcggtcaccggctccagccgaagcaaaagcagccagagaaggagaaggcaaggcgagcggcgcggggccccgagccctccccggaccggccgcgccatcttgtctggagcgcgctgcgaactccgggcgcggggactgtgaggacccgaacggccgcagacgcgggcgggcccgcggggcgctccgctcggctctagactccgcaccggggcatggcccccgccccaagttctctctgcggccgcggctccggcactcagcgtgcccccggtgcccgggccgctccggagcacccggcgggggccgcaaaccccgcgcccatccgggccggccggcccgcccgcgctagctgcgaactccgccgattcgggcaaggtgtacccagcctgcgctcttcgtccgcccggggcacgccgagtgccgctaccgacaccggccgagggcagtgctgccgctgcgcctggaagacaggcgttcagccccgcagcccgagctcggtgccggcaggcatcttcctctgggctcggagcgcaaagccgtagacctcgggctggacggcgcggccggccccgcgctgggaggccccagtgcgcctcgctgtccccacgccgcggccagagagcgcgcgcgcgcgcgcagcctcgggttccgcacggctcctccgcgcagcaagagtcccgccgacctcgcagccgaacaatcagccgcttgctgttcgcctccccgcggcccagccccggccggtcccccaagccccgcccccggccgctcgcccgcacacaccccctaggctccgcgctccgcggccgcctgctggcccacgttggatgctttgcaacagcgccccgccacgcctccccgcctgctgctcattggctgccggagtccaccgtggccagcctcgagggccattggagcgctcgctgtgatcccgcccctcccgcttcaccggctaccccgcccccacactcttttcccacccaaggtgtgaagggcgggagactgggaggagaaagggagggacggcccccgcctcttaaaggagacacgcaggttgttgttggagaacgggaacgcgggctggggaaaggaggcgtgaagatacgccctctgcgtcaagaaggggagagaaagttaagagggtaaaacgcccccgttttggggctgtctggccccaaggctttttacgtcctcctcaggctgcaagcaggactgcagattagaagcaaacccgcgtccgttttccaggttccttccaaaagcgaagacacaggtttaaaacttaacacatttcttcctgactgggacatccttggttatttcattaggcgtggtccccttcctcctcgagcagcctggagcatctgctcctgacttgttcttcacgtcctaaatccagcaatatgtccttgattactaaaatgaatgtgtgctgcagaaacctagtctcaaaggtgcaccctcggccaggagtggtggctcacgcctgtaatcccagcagtttggcaggccaaggcgggcggatcacctgaggtcaggaattcgagaccagcctggccaacatggtaaaaccccgtctgtactaaaaatgaaaaataaaaaaattagccaggtgtggtggtgcacacctgtaataccagctacgggaggctgggacaggagagctgcttgaaccccggaggcggaggctgcaatgagcagagacttgtcactgaattgtcactgaattccagcctgggtgacagagcgaaactccgtctcaaaaaaaaaaaaaagtgcactctccttcccagctagtgagttgaagggtacttctagaaatgctgcagcctttgataaaggggttgctttgttgttgtcattgggtttttgttttaatcagagtctttttaagataattttcaagaagccattgtgtattcgtaagagacagagttaaaggagaaataatagttaacaaagcttctaacttttgctcttaaagatcagaccatagtagtagtgtgttacgatagtacgtggtaacattaagcagacatacacacattgagaaaaaaagaaaaagattaccactgtaacatatagctgccctctgggcgttttggtttgctag

SEQ ID NO: 315896 - DNA, 4001 bp, Homo sapiens
aaagcaagactggccacaccctcaccgtccaccttgatcaagcggggacccgcgtctctcatctctcatggcccttcaaagccaacatgttgcttattgtttgaaaacagaaaatcagttaaaaagcgcaattcctttccagcccttctgttggggatcctcccaggtctggcttcctgcagaggccagagcaggactgtcattagcctggcaagggtggcaggagaaactgacaaaccgcccagcagaacaggagaactgccccaaaagggctcttatgacagcagccacgggctacaaacagcccccttctcaggcgggcacctgggatcccaaagtagagagaaatggatcagcccctgatcaaagcatctggaagcaggttctaatttctgtgtccaaaagccaagacaggccataaatctgaagcagcagtgactccttcgtggtcaggattcagggcagcaaattgccatgtgtgatcacagtctgcttactggcaggactgagtcgggacagctcctcccccaccccttattctccacggctggatctattctacctcgcctcaccaccccgccatttactgagcgagctaagggagtgttccctagccctgggaagaaccttccatgacctgactgtctgtcgaatctatccagaacttaccctggccccgaaccctctcacatgcctgcctcatcactgctgagcccgcccagctgactcaagaccacaggcaaattgggctgtctggccctgaatttactccagatgttcagtctctgcagaatgaaggaagtgccagccgttagagcacttctaaattaaggagccagtggcagcaacacatctgagagctgcccaaggtaaagtgacgcatcccagataaccccaaaggagaagctggcacgtggcagacaggcacctggcacctgcgactggagcacacgtgtcatctcagagagagtgcagctgcaccgaggtgatgccctgggcccgggaggtggaatggctcttgcactttggcaggggtgggagagtcctgaaagctctggttttccacagttggtttcttggccccaggtcctgcctctacgtttgagcagagacacgggtcaaggtgcagccgtcacaatttcaaatccacataccacctcatcacaaatccatctcctgccctgactccctgctcaaagcctccaggctccacagaggccgacgcttccagcaggagagaggggaaactgccagcatagtgtcccctaagccacactgttagagcctgaacaatgctgagcccatgtccgaattccaaattggaactgcaaaccagggaccagcacatctgctgaagttacacttgcaggagttatccatctatgcaaagcagacagctctcttgcctgggaaacccccatgaaggaaggtcttgggcagaaccaaatgcggggcagaccactgggagccaccagggcaagtgccaggaaagatggcacaggcgcaaataatctgaaccttaaaaagagaagttcttcccccagtggatctagattccagaacggtcaatccagtgacaaggggggtgataatttagtccactttcagcccaacttgctggtctcagacatctcagcaccccaggttgacatcatgagccgctcagggcaaggggcataagaggctgttgaggcatcagcagaggggctggtggtcctggtgtccaggcagtgagggagacaggcttgcacccctccagcacaggctgcttctgtccctgtcccgagagcatccccaggcacatgtcagctctgccccttctggggtctccgaggggagcaggtccagcagaaatgggaaggggctggccgggccctctaagcagagaggagggatgggggtggcttgcctacttaccagcagctcggcgcccgcccgccgtggacaagagggagcctgagaggaggacgagggacggctcaaggctgcagcatgagtgtggctcgcctaagctgtcccggtatttaaactatcccgggcgtgagtcactgcagagggcagtgttggccctgggaggggggactgtgggccacagtgcagtgcctgcatgtcccgggctgacactacagggtacacatagctggcatccctaaatgtaaggggtttgcttcaaccgtatttaaaaactcaggacacattttcctctttccttctttcccccagtgtatcttttggattccttcactgcattggccaccgtgagaggggagtttacaacgacccggtaaacccctccctaagtgactgtggaccccctgctgccctgccctggccaaggagacaaggaccccgagaaagggatggagcaggattcaggggcgtttctttgctcctagaagtattggcaagtgcttctccctgtggttctagaaaacttattcattcttctctttctttctttctttctttcttattttaaactttttatttggctttaaatttacagacaattaatgtgtttcatctgttgttaacattttggaagaagcatttactttagattccaaggaaaaatataattacgaccactgtgtcccctctaaaaacagcatttccgatttccttgtgatgctggggtctttgccattactgctgctctgagaggtgcaggcacacacatctctggcttggggacgggcaatcaaggggcatatttgggcgtgaggagcttccctatgcccctcacctctgcattacagcccacacactgctgccctctctacccccgtccccagtggggacaaaactgtttctatttgtggtatccccaaaaaggcctggggaagaggatacaggaatcatagttggaggggcgggaaggcttccaaaccccggcttctcctccgagatggagcctcaacaaggcctgagctgccccaggctgaagccaccctgcctttgcctggctcggtttaccctctcagctaagtggggagagtgatatttacacacagtgcctcatggagtgccaagaggcttaattaatatttgcgctgtgttttgagatctgcgatgaaaggaagatataaaagtgcgtagtgttattactgaaatagttgcttgggtggcttgtcatggtcaagacctacagcctgaatcacgccacattcctcctcactgtggcaccgtgattcagagccggaaacaaaaagtgtcttgtccactaaataacaggagcccaggaggggcaggcactgcttggagtggctccacacagcttgaagccccatcccttcccccaccagccttgttcccacgtgcagaacaccttccctcttacggccctgattcctccacgttcccaaatcaggtactttaacttttctcttttttttttttttttgagacggagtctcactctgtcacccaggctggagtgcaatggcgcgatctcggctcaccgcagcctccgcctcctgggttcaagcgattctcctgcctcagcctcctgagtagctgggattacaggcacgcaccaccaggctcagctaatttttgtattttttgtagagatggggtttcaccgtgttagccaggatggtcttgatctcctggtctcatgattctcgtgatccacccgcctcagcctcccaaagtgctgggattacagacgtgagccaccgcgcctggccactttaactttctttccatagaacctacaagaataagaatatccctctttttcctcttccatcctccctaatcctagcacccaagcgctctgtgtcgggcactgtgctgggagtggtggacaacacagggatgaatcggctgcatttaaagatggctatttgggaagcacctgctgtgaaccagagaccccttgggtacctcactgcagctctccatcatttcacctccaccagctttctcggcctcaccacgtgacatttggaggcagataattcttcattgcaggagctgttctacgtgtcgcggga

SEQ ID NO: 315897 - DNA, 4001 bp, Homo sapiens
gaggagactcaacaaagtctgggaggagactcacctcatcatgcaggtgccaagccattcttggcactcccactgggaggctgggagggggacaggagcaagggatggagcaggagaggaggacggagctgatgccagaggtcaccttaaccagccatgcagagagaggctctctcctccacacctgcccctcagaactcccaggacccctccaccccaggctgcccagctccaagccctccacagcacccttccaggcgtgtcatcaatgtaaggaaaacctctatcatcagccttgctgtatccaagagaaccactgtaacccatgggaatttctgggggcaccaagatacaatgggcaataatatgacaaccaaggagctttggtgactcacaaattccattctatcctcacataaggccactgcctggacaccagcgttggaatgaacgcagtgagttttctgatagaaacgggggtaaataggagctaaatagtcaagtaaggtcagtatagtcagccaaattctgaattaaatgacatttatgccacatgatcagagtttccctggggacttctgattaattttattgtaatttgtttagctagaaaatccagccaggggaggcagagggtccagacgggattaagagggcaattccaaggccaagctgcctgggcgggagccctgcctacccactctctggccacatgtccctgagaacacagcctaacctctctgagcctgatgttctcatgtggacgtgatggagcaaacagcactgagctcacaggttggcgagaacatcacataggatcattgtgtcaagagcttaagacagtacctggcacctagcaagatcaaaaaaaagttcaatcatttaaagaaaaaagaaaggaaactaagaatccctgtcaccaattaaatgtaagacaaaaacaagaggtatgtgagcatccgagggtttttcctccacctggcatgattagcagaggttctttgggtgaataatgggtgaaccccccagtccctgagttctgggagagggtttggtccagcagaagagctagcaacagggcagagccgctaacaagccagacaattcctcctcctctgggtctccagtcactttccgcccttgcctcaggcctgtccccaccccaagccagggggcgtgagacgctggaagaaaagacttccccgccagggccatgtgtcaatcataccattcaggacacaaacaaagttgatttatctcccctggacagcgctttggaccagaaagctttgggctcagccttgggcgccggagcagtacgcgcaggggaactgctaagccggagcaagattcactcgcggggacccctgcctccccacgctctctcctttctcgccttcccaccatagtcctggacctcagataacggtggatgcctaagccccagccgctgtccggttagggacgtttacccctgtcgctccggcagattgcaggtcaccaaggcacagaggaaggattaaacaactgagcgcccggggcaccggccatccgcccgcgtcctcccacggggagcgcaaggcccccgctcccgccccccggccacctcggacgcccagcgcttacctgccccgaggggcgggcactgacagtcctggcctgcccgccgcggctgtttacaccgcagaggctgtttacaccgcagaggctgtttacacccgctgagcagcacggccgagccggaagaagcctcccgtgcctgtgcgctaacaggctatatttgtaggcggataatatgatctggaggacatgtgctaaatcaactatctatctattctatgtgactcagcccagcctgagacaaaacagacttcgtaggggagggcttggcaccctgcgcgctgcagccggccagcgcgagccccggcccagggactatctgcagcctcctacccagggccagacattttcacactggagatcccggagggtgtggaatggaagggagctggttccgagtgctcagcacgctaagctgggaacccagccagacgcaggctttgaaagccatatgaccaagggaatgtaaaagtgttttcgatgttggaagcagcagacatcgaaggtctcaatttcaccgttacattttatctttttaatatcctaaaatgtatgtgagtttaggttctctttagatactttactaattggccaaatatgttttgctgatagccgacatcgtgaaaatatgacaagttaataatcagtaatcaactccctggctgctcccaggagtccatgtgaacacgtcctgatccttaatggcaatggctcctcatatcccttagcctaaactgaaaaataccttttgtgtgatatatgtgtcatacttctaaaattcatttccttaaaaatcattattttcttttcttttctttttttttttttttttttgagaggagtctcactgtcgcccacgctggagtgcagtggtgtgatctcggctcactgcaacctgcgcctcccgggttcaagcgatcctcctgcctcagcctccccagtagctgggattacaggcgcctgccaccacgcgcggctaatttttgtatttttgtagagatggggtttcaccatgttggccaggctggtctagaattcctgacctcaggtgacccgcccacctcggcctcccaaagtgctggaattacaggcatgagccaccgtgcctggccttttgaaaataatgctttttggtggggcacggtggctcacgcctgtaatcccagcactttgggaggccgaggcaggtggatcacctgaggtcgggagtttgagaccagcctggccaacagggagaaaccccgtctctactaaaaatataaaattagctgggcgtagtggcaggcgcctgcaatcccagctactggggaggctgaggcaggagaattgcttgaacccgggaggccgaggttgcagtgagccgagatcgcaccattgcactccagcctgagcaacaagagcgaaattctgtctcaaaaaaaaaaggacttttatctgagaaatgcaagtttttttcattatcaggcccaaggagacattaaaatgaaactgcactcatgccctactcccctctttgagctatatgtcttcatctcttgaaattacttgctattgtcacaagtagctgtaaattagcctaatagcaacacgccagacactataaccacaccctatagctaaaggatatatagccaatcacttatcaatgttatttctgtaaaccaatgaaaattcataacaaataactttatatcaatccctctctgtctccttcttttacttttaaaaatccactcattgagcaactgtatgccaataaattggaaagtctagaagaaatgaacaaacttctaggtacatacaacctacaaagattgaatcaggaagaaattcaaaacctgaacagaccaataacaagtaacaagatcaaggctgtaataaaaagtctcccagtaaaaaaatgcccagaacctgatggcttcactgctgaattctaccaaacatttaaagaagagctaataccaatcctacccaaactattccagaaaatagaggaggaagggatacttgcaaactcattttataggccagtattaccctgataccaaaaccagagaaagacacatcaaaaaaaaagaaaactacaggtcaaaattcatctctgatgaatattgatgcaaaaatcttcaacaaaaatactggcaagccgaattcagcactacattagaaagatcattcaccatgaccaagtggaatttatgcctgggatacaaggatagttcaacatacacaaatcaattgacacaatacatcagattaacagaataaaggataaaaatcatatgatcattttaactgatgctgaaaaagcactggataaaattcaacattcctttatgataaaaaccctcaaaaaaactgagttttgaaggaacatacct

SEQ ID NO: 315898 - DNA, 4001 bp, Homo sapiens
aaggacaaacaaggaactcactgagtaattaagacatatgaatgtgatggaatattatgcaaccatgaaaattatgcatatgagcatcatgtagcaatgtgggaattgagcaatataataatatgttctagaagtaggatcacagctccacataaactcaggaggaatctgtaagctattacaactgtggaaaagatgccaatctggccccagcgacctctctgacttgtcttccactaccccttcctctccatgtctcccatcctgctttagcatccctgacttcctgactctctctcaagcactctaggctcagtcgtatctaaagcctttgcatgtacagtctctttgcctggaaagctatttgcacaaatacctaagtggctcgctttattcattcattcagcaaagctgattttattcagattgctgctcaaatgcctccaaatcgaagacttctttcctccacccccatctaaatagcaccccatcccatcattctttgtctccttagcctgcattatttttcttcatatcacttatcaccacctgaagttatatctgcatttggtccttttcatggctgtatttctaacacttagagcaggggttactacatagcaagcactcaataaagatttattgactgctgactgacagaacataaatgcatgcatatgaaaagaaaagactgaaaagaatcttaaagaaatgatcgtttgtgttataatgaaaggaaattcagtattttccctacatttttctgtagtgttatattgcttttaacaatttaaaagtaaaattatgaatcatttaaagcatgtaagtaacataataaatgattagcacagagactcatagttgagtctttagtctcaaaagtcttaaagtctttagtttaacccataagatcactttagaagaaaactctaaaaaataaagaaacatagaggctgggaagggtgtgtgtgttgttggtgggggaggtgtggatggttaatgggtacagaaaaaatagaatatataagatctactgtttgatagcacaacagggtgactatatttatcctttgtttacaaacaacccgttgtgctcttttagttatttttaaatgtgcaataatttattgcacatttaaaaataactaaaagaggcctggtgtgatggcttacacctgtaatcccagcagtttgggaggccaaggcaggaaaatcacctgaggtcaggaattcgagaccaccctggccaatgcagtgaaaccccatctctactaaaaacacaaaaattagctgggcatggtggtgcgcatctgtaatcccagctactcgggaggctgaggcaggagaatcgcttgaacccgggaggcagaggttactatgagctgagatcacgccattgcactccagcctgggtgacaagagtgaaactctgtctcaaaataaataaataaataaataaaactaaaggtataatgggattgtttgtaacacaaaggataaatgcttgaggggatggataccccattctccacaatatgattattaggcattgcatgcctgtattgaaacatctcatataccccataaatatatacacctactatgtacccacaaaaattaaaaataaaaatattttaaatgtggaagtaaaaacaaaacaaatacaacagcaaaaacaccagcagccagcagcttaccagtctctgaggtggctgtcttctgtatccagtcgctgggttgggaatcacttgttttaaggtcattgtcctcttttctgctttcagcattggagcccctgagaaatttgttgacagttgaagtctggggcttagtttctccttctgaggaagttttcttccttgtttgactcatggtgaagttgatgggggtagttcccaataagacatcttcctgttgctttctgttttctaggatttctaagaagaaaagaagattctgtcaagcctgtgttcaatcaaaatatcctcccctacatgactgccccccactccctgccgcaccacctttctttttctgtttttttattgctgttaatgtttaacatgaaaataagaatgatgtaacccaggatccagaagccaatacaaactcaaagcaatttgagtttttaactttgccctatttcattgtgtgagatacaagtcattaagcatgactttggcaagcacatcaagtgtgtcaacacatcttaaattacagctgtcaattagttacctgaagacttaatatgcctttaaaagggactggccatttgcaaagctgtccccagaggagtttgccttcagcgacctctgccttctggtgacccccacctccttcctttgcacataagctcctttttctctttgcatattcatattttctctacccccaaccctgcaccaccaccccactgaaacatgttggcagtaaagaattcattcattccataaatagttttaaagaatctactgtgggccagttaatgttctaaatgcaaaagattcaatgacgaacaagagacagttcttgtctttgatgggatcttaacctggtgggaagatggacctgtatgccattgattgagtgggacaagagccaagagatgggaggtggtcagggaacccacagtaaactaagcatgccttggagaacagacttggaacagtgagtgacattgcctgggttttgaaggactgcgagttagctttttaagagagggaagagtatcccaggcagaagaaagggtaagctcaagagctcccaggcaggaacggctggaagagcctagcattggaggtggggatgtgggtcagggggtgtggaggttaggggtgaggtctggtatgaattgaagctaaaaaggattcgtaaaggtcaatctattatctctcctgaaatttgcttatattttatgggagggctaaggacttaaactaaagggatacacagaagtgttttgttttgttttgacatagagatggattttcaccatgttggccaggctcgtcttgaatttctggcctcaagtgatccgcccacctcgacctcccaaagtgctgggcttaaaggtgtgaaccatcatgcccagcagaagtattcttgaaattacagttttcatagtctcctctctaataaaatagctctttctgtaacattatgttccagaatggtccaagaaacattttacacagggaatcctaaaaatggaccttgcagagcccacctccactcgtgagggctggaatgttccatgcacttggagcactgctttggaagtcacaattggacattccatttttcttttaaaatcttcctttcatattagagcagggcccagccctggtttacccagcaacagacagcagtggaactaaacaattactccatgcacagcagcacagctgactagagtctcagggggttaggtggaaaagaagaaggaaaggggcgctaactcataaatctaaacatgacctgcagccctggctgcctcaccctgattccaccatcaccccaggcctttctcaatttgctactcttctggccccccacccaggacacctccatggtcattttcagccaatttcaccatttggagatttagacagggctattctctggggagctagctcagtaaatggtttcacttttttatcctccccccaaatgcactgactccaactccccaagtcctaagaaaacagtgctggagggtgctccaggatgtggtaatttacccaggtgaaaccacacccagcttctgaggcccagccagttctctgtgaagatcagtacactaaggaacaggggagccaggaagccaagaaacacaagaaccaaggaacagaagaggatgtgaaggagaggaaaggaacaggagaatagaaagcaaccaggaggctaataaggcaacaagaaaggaccatgccagaggaaggaaggcttttgaatgaaaagggggaagcatttgcacatttcttcatgtatagtagttaagt

SEQ ID NO: 315899 - DNA, 4001 bp, Homo sapiens
gggtgcggtggcttacgcctgtaatcccagcactttgggaggccgaggcgagcggatcacttgaggccaggagttcgagaccagcctggccaatatggtgaaaccctatctctaccaaaaatacaaaaattagctggtgtggtggcgcatgcctgtagtcccagctacttcggaggctgaggcgacagaatcgcttgaatgcgggaggtggaggttacaaggttgcagtgggcagagatcgcgccactgcactccagcctgggcgacagaggagactccatctcaaaaacaaaacaaaacaaaaacctcacttggaatgcaatctagaaaatgctgctttagcgtcctccccaggaaacaaagcaagtagatcccaaatagaagttggagctgggctcccactgggcttctttcttccctactgtcttccttggtattaagagaaaaattgccctgagaatctccgagggcacagaaatgtgtcagactacaattcattttcgcgaaggcatgaaggaatcttagactacgagctaaatacagctaaacaaagttatggaaatattcttatttaacaagctagccagagatttacagtatttaaaagtttctgctacccttcctttgatttaaaattcacctacgtattttgtatgccaggattttgtggcaccaatgaatttatttcctatattgtattcatattagaaggaaaatagccttcaaattgtaaagcaaaaactaggaaataacccagctacgcaggaaaatgtcaagaacctaacccaaatttcattttttcatccacgcctctggcagccacgttttaacaatttccagagagaggacttacttaggaggtagatccctccaaaacatgcttttctatacttagccaagcactgggaaatctaagcgataagcatgagtcagaacgtgggtgccctatccagaatccgcagtgtgtacatttgaacaagttgttatgccagcttaaatttcctctcatgctaaaggcagagcctaacactgcccatctcctggatgcagtattattaagccagcctccgaacacagttccgtatccacaaacagactttaaaaccagcatataaaacggaaatggcgggtagggggtggccgttcagggtaggtgcttaacttgctaatcatgggcgcagaaatatttaaaacggagatagtacagaggtgcaaagtcagaaacagtatcaagaccctcatgcccccctgtgacctgctctctgggactttcacaaaaagggggctgagaagagcccccccgccaccccctcccggagaccctgagagcacggcgacagacaccatctgcacaacctatcgcgcaaagggcggacccacgggaactcctctccgtggactcctctcctgcccccggtcgcaaagggcgaccggggactcttctcctgccctcgtttctgggcgccccaaacctctggccacagctggggttcccaggggcccccctcccgcctcgacgccttgggctggcgggctgctgggaggactcctgccgtgcgaccccggcgcccctcgcgcgttttgtctgggccaggccgcgcagacgtgctccctacttcttaccgcgctggaccgccagggccgcgcccggagtactggcctgagtggaggcccaagccggggacctggccggcgcacgggcggcctcccgggagctccccatgctcctctcacccactggccgcggcggctgcgctgccatggcgaccgcgcgcgcacttacagtccgcctgcagctgtgaggcggctacacgagcctcggcgccagcctgcttcgagtcccgctggctgtgcctgcccgggccctgaggcctcactgctaaggcagtgaccgcctactctgtggaggtcctttgtcaccctgccctggttaaaggcagcctgagggagggcgtcctggctcctttgcagggaggagttcccgaggtttgaggggctccgctgctgagctagggctggggctacaaagaagattatgacaaagcccgctcctacaaagtgtgcaccggcctgccgggccagcgaagaagcagagtagcatcagcacatgataaaggcgttgggctttgggagcataaagggttttgtgctcccaaagggcggggccaccagggagggcttcctgaaggaggtgacatctggatggtccgaaggaggctgccagaggacagaatgcttggtgcgttctgggcatgcgcaggtacttgaatgtactcagatcagtacagacagcggggaggcgggcagggccagatccacatgtgttactaaaaggccaggggttccgtctagatccagctgctcctggcacagaatgccaatcactgaaacaatgagaattgccagggaggaaggctttaatctggtgctgcagccgaggagatcagtctcaaatctgtctccccaaccaactagaatcaagggtttacatagcaagaaagaaatgtgactacttgcaggaaatcaggaattagggaggggtaaggaagaggagttggtcaacaggaatcaggtggtcgtttagggaatcatggtgggtgagggatctggtgtctcattgtccagatgtgacgatctggtaagtttcatttccttgatactgaaatggtaatagtttccttatcccccttgcagggcatgcgatggtgaggcaggaaaatagggtctggaggtagggaacataaggccgattcgcacttcggctataacaggaaatatcctctccatagggtgtacaccataaacgactttgtaaccttacttcatcctcttcatttacacagggcgtactctaagtaaccaatggaatcctctaagggatatttaaactcccaaaaaatttgtaacggggtctttgagcccctgtgctcggcccactcccacactgtggagtatactttcattttcagtaaatcccttcattccttccttgctttgtgcgttttgtccaattctttgttcaagacgccaagaacctggacaccttctaccggtaacaatgggggtgtggcttgcttctttggtgctccgctgctcaaacctctagggggagcatgcagacgggcaggttgtggggcacgtgggctccgaactcaccgcagcgtctaggggtgaatgcttacagctgctgaagcaaagccccagtaggcgtgtgttacagggtgctctttcagttttgctgtgtataggcggcttgcgtcaatcagctcagttagaccctctgtcttaccgcaaggacagagggctttctgtttcctggggttctggccttggtgtaccggaaaaatcggatcacacagtgggcttggagaatgagtgcaaggttttattgattggtggaagtggctctcaacagatggatggggagccagaaagggaatggagtggaaaggtggttttcccctggagtccggccgctcagcagccagactctccactgactgccctggccaaattcccctcggtctacacatcgtgctgcttgtcggtgacctggcagcgtccgctggtgcctgtcggtgtgctcttctgctcctctgttcctctcaatgtccagccacctgtgtgctcctccgccggtgtgttcctctcaacatccagccgcttgtgtctgtgcctactagggtcttggggtgtttgtttgtttgtttgttttttgagacagagtctcgctctgtggtccaggctgaagtgcagtggcctgatcttggctcactgcaacctctgcctccgagcttcaagcaattctcccacctcagcctccagaatagccgggattacaggcgccccccactacgcccagctaattttgtatttttagtagagacagggtttcaccatgttggccaggctggtctcaaactcctgacctcaagtgatctacctgcctctgccgcccaaagtgctgggattacaggcgtgaggcactatgcctggccctt

SEQ ID NO: 315900 - DNA, 4001 bp, Homo sapiens
tgcattcgccagagcatctggagccacaagaagaatctacctgggagctgcaaggtgggcagatccacctctgtctgggctcccaggtctaagagctgggtctcccctcacccgaggcccacacctcctagctctgcgtttccctgcacgccctccagctctgcgctccccagcctcccgggcgcagcacagggctccccccactccctcgctccgcccaggtgcgatttgtggaggggcgggggaaagtggctcccaccgcagcctccgctcctgcgctctcctccaaccactttggacccctgtttactcgccgcgcgctggggactcccctctaccccgcacacacgtctccccctgggaggcaggagtccccttcctacactgcggctgtggaaacatccttgactcctgagtgcctggcagggaaggtgggcgtgggtctaccgacctggctgcagaggtgaaggagcgtagaagcaagcgggtgccagagaagagagcagactatggtcctcttagagcttggagaagcatccctagtccacgatctgaccattcagtcaccacccaagatgccaacgcattcagattctcgcggggaggtttgtttgcttctggggaggaagatcgccccatcccaggcactcagcagcctgccttcccaagtacccaagggcccggcattccggggctccattccttgtctccacgcgcccccaggtacccagcccctcccccatctgtatttacatacccaggccagcgccctccggactcaaatcccttttcctcttcgtcagatggcctctcagggctggccgctcgcccacattagcagtaccttttcatttccctcaaccgtgggcagatctacccgaccctcagcttcctcctccaccgcacgagcagcctttccctccctgagccacttacttcacccacccatatctgcacttgcagttcccacggcgcacagccgcaagccactccaaaggtttcattgccgagttgggggtggcgtgtgcaaggatggactgactcccatcgcgctggacgaagcttcaggggtggccgcagccatcctccatgtcccacctctcttatttcaccttctctgtccctacccagctcctagaggcaggacgagcactgctgggtcccaaaccctcgcctcaggagccagagctgcggggagtgaaaagtcgactggcaagaacacacagagagaaatgggcagatgcatatggcaagaggggctgggggaagggcaagaactaaacctgcaagttgcacagcacggggtgagcaccgcgcagggaaggggtcacaaaagtttgcagactattgtatagcagccggctgaacaggagcgaagagggtcgactctctctctccaggaggaggtctctcccagggtctgcgcaaaagggatcagggaggcttagacaggcacggcttagaactggtgtaatagttctcctctacttgttccttggagggacggcctaggtacccgggcagagggatgatcccgcgctctgcgaaaagcaacaggcggctgcaccttaccttgcgccagtcccgggccggggtggctgctccatcctcgtggctcagggaggaggcgttgggtgcgtatgcttaggggtgtgcccgctgccagggctgcagcggccgccacctccaaccagctgcaagccgagctgcccacctgggaccgggccggcccggcgggcttggctcccggcgaaggcggcggcgttggtgcgcggcggctggggcgcgggacgcaggcagtgcgtggcgcggctggcgtcttcgggcgccgccaccgagcgagggtgcggccccgggcggccgtgcggggcacgacttggctcgcgttgctgcggcggccgctgcagaccctgctccaggcgccgtagccttgcaggaagagcagacaaagacaggagagaggcaaagcgccgcttgcccagagatgcagtcggctcagtcaatagagggaaatcgcctccaaacccaggctgggaatgagggaggaggggcgaggcggctggggactagaaaaagcagcagggaattaacgtgacagtcagagcccagccagtgcctcgccggcgctgctctctcgcctcgcggttgcggggtccggaatggagagaggaggcgggggctgagcgttggctgccggagaccagctgaggtaggagtattaactccctctgctgctctcgcctgccttcctcgcacccccttacacagctctacttgcagcaggctatggccccattctttctcctatttttctaactactgagatcagagctgaattaagctggtgaaaggagcaaaacgtgcaagggattgattgccctccttgggggaaaagcggaggcttaaaatcaattcgacaaatgagtgtttactgggtgctgagtactgtgctccgctattgtgagggagggttatgaataaggtacccccctcccgccccagggtccgttgtctgatctcagaatcagtttcccctgcagttctggaagcccaaagtttcggggttgagttgtggtccctgatcccgatcctcaaccaatctagctttctaaatcagaagaaggtggaattcaattttcctttctccttcctgggatgactttaacctgcagccgaaatggagtctataggccccttaaaaaagcgcgcgcacgccagtgtgtgtgtgtgcgagcgcgctcgcgtgcgcgcgtgtgttttaagagtaagtcaaattaatggttttagtgatgttcttatttcatgattttaattatttaccatatctgcagtagacaccagtttggggcagaggaacccgcctctccagactctacaaataccacctttttttctaaagcttttttccgctaccccagtcctctgactcgaggcagaaatctttcccctctctttgccctctcagaattttatttgccaatcacttgcggaacttatatatttatagatttatctcttcactcacatatgagtattccctgtgctttttgtttgtttgttctcactgcaacatccagcagtgttttgtatctaatgggtactcaaggaaagcttatccagttgaaggtcattttctccttctgtatgagctaaatctcagtgtctctagaattaaagagactccagggatggaacttttgatttagggtgtggtggagggaaccacacatacagttagactcacagcccctttactggaaaggtaataaagtatttaattcattttggtctctagacaatcaaccttctcccactgaccacccacctctgtttcctgaattcccaaaagcaaaagaaaaccaaactgctaagcaactgcctagagcaagacatgtatgttcagctgccaacacctagagcaaacccattccaagtggagaatgaccaaaaaatcttgattatttcttgacctgtgtcaagtatgttgaaagcctgccaaagtttcctcatttctattgaagcactcttattctggatgcattttagaacagtttgaacagtgttacattgctcagaggtgaagaaaattgctttgtagtttaaggatatttaagatttgtttgtttgtttgtttgttttctgtcccaccttctacaaattgcacgatagatacctcagatcaggaatgctgcatgaaaaagtatgtccataatgcaggagattagactaaatgactcttaagatatcttctgtctcttagacgttatgatactgtgatttaaaagattgcggtttaaagttttttttttttttaatttttgtttttgttttttaaaggagattttagaacacaaacatagatacatgtggatagcaggtatgtaatttggtgtcgtttttctgaagggaaatttggcatgctattgaaagcataacatttttgcatttcatttttccagtgactctaattcttcaaattcatcctcaggaaataactaagg

SEQ ID NO: 315901 - DNA, 4001 bp, Homo sapiens
gctggagcaccaagagttcttttttcccaggccaatattctttttttttttttttttttttttgagacagagtctcgctctgtcgcccaggccggactgcggactgcagtggcgcaatctcggctcactgcaagctccgcttcccgggttcacgccattctcctgcctcagcctcccgagtagctgggactacaggcgcccgccaccgcgcccggctaattttttgtatttttagtagagacggggtttcaccttgttagccaggatggtctcgatctcctgacctcatgatccacctgccttggcctcccaaagtgctgggattacaggcgtgagccaccgcgcccggccttcccaggccaatattcttttgctccacttaactctgaggtcccttctacctttaacgttctgttatctctgaaaatacaataaagtgtgaaaatatcttacagatggaagatacctctttttcgttttgtacaatacatttggctctatttcccactcccccaccgggcacttttattatcctgtttctctgcttcctcctaaagttaaatttaacatatttactgcataatctagtaggtgaagcagataattcctgtaaacaaggaatcatatccaataaggtaaatgcaaaggcaagatgaatgaagcacagagaaagtacagcataggctgtacttttttgtgcagggagtagtaacgaaaaaaattgttgtgcagggagtagtaaaaaaggaatcacagagatgattaacttgagatagcttttgaaggatgataggcgtttgccaggtgaaggaaacattccaagcaagggaaacagcacgtgtacagaggcactgcatccattcaacacatactgagtgcctaccagcaactccaagctgctttctctacgtgggaaaatgcataggtcactgaactccacaaatggtagttggtactgccacagagaagaggaagctgcaaatgtagtggaaagcaagggttagatcagagcaccttgtacgccacgctcaaaggcacgtactttgatctatagagatggaaatccacggaagacttttgagcaaagaagtgacaacctctgatttacatctgttttgagtttccactcagtttggatcacgccccagattcaataaggaagacagaaaaaatgcctcgagaatctgcataggccaaacacaacacaccaaacagtcacacatgcgaacatactaggtatttacaacaacttgctgagatggttgggcagaactcactaccgcacagttaaagagaaagcttggaaatagttacgtgacaaacgttgaggtgcccaggcccggcgccccagggttcccggacaccgcccgaggcctccccaccctccggcacacacccgctcacctctgcaagttctcgatctcagccgggatgctctgcagttggttgccgcccaggctcagggtctgcagcgcgcgcagctctaagagcgaggcaggcacctcctggaaacagttgccgctgaggttgagcacctggaggctgcggcagagcggcgactgggccaggcccttgggcagcgcactgggcccgccgagccggttgttcttggccagcagcgtgcgcaggccgcgcagagcgagcagctccggcccgagcgcggtcaacgcgttgccgctcacgtccagcagctggaggtgcgggaagccgctgcccagcgcccgtggcagcgacaccagacggttgtgaggcagcagcagccgcagcagcgcctcccgcgccccgcgccgctcctccccccgcgcctccagctcagactccagcgtctcggtggacacgctgaggcgggaccagttcagttcggcctccccggccgtgaccaccgctgctccggcctcctccatcctggccaccgcacggcgcgtggcgccggattccccagagcgccgcgcgcggtccagaggccgggagctctgcggcgccccggaacctgaaccgagggctgagtcggaagtggcgcgggcgggcgcaaaccctgcgcgccttggccgagtcacgcgacgcgagtcctggggtgcgcgcgccgctccggggcgggctctgcctcacgaggcgcggggcgcggagtggcaagagcgcagcatgggctgcgcagaactgaggcagacacccagaggctgccaaattgtcatctgagccggaccgggtttcggcggccgcgctttatagtcgctggagcctggtgacctattccagggctacaagactgcctcggcaaacagcccaaggatgttcggttatctcgccttgagggttcgcgcgtcacgtgccccccccgtcccccgcttgtttttcagtttaaaagtggggcccgtgtctgcaggactctgtgagcacacagtaatttagtggtgatttagctccatgacagaaaaccgcaggaatttaaagtccgaggattaacaaagccgacctcgaaatgtgaacgcagctggactagacctcagaacccccggacccttactggaggttccgctgttaaatagcctagggcagggatttgatttcagttgccccatgcataaaatatgggtaacacccgcactacttgccccacagaattatttttttcttttttaaggcagaaatgtgtatcaagtaaggacgttttgcccgttttaattgtagaagcacatacgtggcttttggtgtaagttgtgtctaggagtgaatttgggagatatggaggcggttgcatgatttgagatagctcaaattaatgagttagtttaaaaactcaaagcatagagtttgtactgcaggtcaaaactacagtttgggaaaatcctgatctggtactaatttagtaattctaattaacgtatttttcatccttgtcccaaactcaatcttttctgaaattacattttatgattttgaaaagtaatgaatagaaatgagaaaaaatgcttagctttttttttttttaacaaagcttatacataagaaagttaagtggtcgtgtataatcaacgacattaaattgctttcctccttaaaaaaggaaagtcgtttttttcttgccagtcatttatttgtatgagaaactatgcctttactctgcagtcaaactttaatttctgattgagtggtagtcctagaaggacgtactttgtatgtttaagctaatggtggaatgctttttaaaactgatgagtcatctgttttgaaagagtccttttaagaacagaccttattttgggtcaagccagcattctaacagtagtcctaatatctgaaaataacaaatatttaaaataatagttgtttttgctttaaaatatttatcttggattttaaaaagtgataggaacgtaatgtaaaatgagaaaaagaaaggattcaaacataattcagaaataagagttggccaggtgccatggctcatgcctgtaatcccagtgctttggcccaggccagcagatcgctgaggtcaggagttccagaccagcctggccaacatggggaaaccccgtctctacaaaaaatacaaaaattagccgggcctagtggcgctcgcctgtggtgccaactactacacaggctgctgggaggattgtttcagcctaagaggtagaggttgcagagagccatgattgtgccactgccctgcacttttttttttttttgtctcaagaaaaataaaataagaggtaagattacaaatcagtggaattaaagggaaaaagataacctcaataatagcaaatgaggcttcctagtagaaagtttggaaaaaaatacttagtatgggaactccacattatatagaataaaggaaaggaagtagaaaaaaagtggtgtaggtaaagaaatgagtaacctgacaaattttgaaaacctactgcttgcaacgctgtactaggagcttttaatttaataaagtctccaactatttggttgttgaatttaggataaatgtaaccagaccattgagcagc

SEQ ID NO: 315902 - DNA, 4001 bp, Homo sapiens
tttaaagtgaatccattccaatcacaacttcaatacacactttcttctagaacagaacttaataactcatgtagtttcattctacatttttaaagacagaatcacaaaaatgggtgatgctttccactcaaaagactattttgtatagtgcaaattctttcagtgaacattttcataccttagtgatggtagctctcctttccactgacatttacatctagaccccttcatttatcttcccacatctggcaaaaaaaaaagggggggaaggagtaaaatcaaagcaatcacttataaaccaacaaactattctaaattccagcattctgcaaatacttcaacttttatttcattaccattcttcacgatgataaatatccagcaacagacctaacaaaacataatacaacacttcctataaaatgagtaaagaatgccatctcattaggcagatacgaacttaggtttcctctatttcaattttcagattcatagcaatgattcacaaagtgagtgatctaccttcgaaatgaatcacactttctgaaattcttattctacatattataatactaggtcattatctctgcatctgttaaacagagcatgacgttggttaaacagggttagtgctgcaagatattcaaaccacaacaaccgtggagtccctgccaactaattctatttgcaacactgcattctccaataactgcactttttcatatagatttatcctcaaaataaaatgttatcttgaaaaaatattattttaaacactgattaagaacttatacatccataccccgctctccttctctcttgtttcattactacatccacattctcttcccattatgacaacataaaaaaattaagtcacctttatccttacatatcatttttagtcaatcaatccactctacaatttttctgtttatagtagaaacgctgagtcactaaatggaaactcaaagaaaaccagctactaacagttaaggtttaggatacaatatttatctagccatgtctcagcagcctgtatttgtatctcccacggtgaaaaaagtaaagcaaacacttgaacttttttccctctaagaaagaaaaagaagtgggtttccttaggtcctcctgcatgctgctggttactcacaggcagggctgactggagttctgtaacttaacaatctgggtgtcaataacgcctcgtattagtcaagtattaacccagctagcgcctgttaaacccgcgcgatccagctcaggtcaaggaggaagaagtaaaattcccaaaaaatgctacgccctacaccgtcctgacaccgttccctgggggtgctcgtcctgggacagaaccgtagtgtggcgtctaaggaggaagagaaggcgcctagggcacccgaaacggagggacagctgcccaatttaatttctcccacagtgggaataacacgtaccttttccccagcgcggtggaagggtgagcgttagaaatcagacgggatgtctgagaacgccgcaggcagggggcgaccccagcccgggagcccgccgcgggccggccagtccccagggaagcccggccccctagccgaggtcggaggcggcgcggatcccacgggactgcggaggccgggaaaaaggttcccaactccccgctccctgctcccaccgggctggcgggaggagcggcccttacctgtgttagggcgcgcgctgcgactgcgtcgctgtccgggaagggccgaagagctgctcgcccgcccggcgcccgctggggctatgggcgaggggcgcagctggacgactcagtcctgggtccccggccaggcgggcggggatggacgcggcggctcccggcactggcagccggctagtcggtcaggccgatgtgccctctgcgccgcggctgagacagcgggaaccggccccgggaggagccgcagcctgagcggccgactgaggaggcgaaggatgggcggggccacagggtcgacgacccactcacccggaagcagttgtggccgcgactgcccgggagtggcgcttgccgcggtccgggcttgcaccccgctgggcaaagtacccggggctgtcacacggcgagctgagccctgggccggcgggtgaggttccccaagcggcgatgcccctggctccctgttccgccattgcgagccgttagggccaagctggagggagggcggcgaggcgcggctgccggtagggcggggccctgggctgctggcggggcggaggccggaggcggccttgggcgggtggcttctctgggtcccacggttcctgcccaggctcttcgaaccaggaccagtgcgggtaatgtgaattgacacttgttccggttcagggctgccccacccctggttgccccaaaccctgcggcctggtgggcttgggcaagtgggctggagtagcgctctgttaggaaacgagtatgcgagggagggagggtgggtgtggtcgaaatgcccaagcctcgtttcaaaaatgaagacgcatgaccttaaaattatttctggagaagaatgcttgcgcgagaggtgtgggggggggggcggggagcgggatggagggaggagtatagagtctgttaaaaatctgatagacacggacttgttatttattccggaaatatctaacgaggcccaccaggttcaaggcactggggaaggaccagggtcgtgcatttgaaaagcttaccttagtggaatagactggctgaagcaaacaaacaaggtaatgacaggtgtagtatggctttgcaggaaacacacagagtgatgaaaaagattttgtagacgaagcctctggctggataggatggctaaaaaagacctctaggaggaagtgatagttgaggagcctcctgacaaaaaaggcacgaaatacacctaaccacgactttacatacagggactgcagattccagaaccccctgaataagcccactaattccatgttgagcacctgtctctaaagccttctaagggctgtttctgtgctgcccacttcccctgcaatttcagaaggcttgatcacccttacagtttatgggggctggcactgtggcactaatgggggaggttcgagagacagggagaattatacccatcagctttgagagacaaattctttaccttttcactgtttctatgtcactatatttctcagagtcatgagtaaacattaaaactatgatttttacgttggcatgttgtgatctgaataaaatgattaatgacatcttttgccaaatttgttgaagacaaagtgagaggatctattcagatgcagtacctgaataataccaaaaacccaacacgtattaaatattaacgacataattaatagattgtctggataatacattagattctcttgcccttttaatttttctccttagccacttgttttgattcatgcaaaccagcagaaatattttgcattgtgtttctgggaaaagggactgggaggtagctaacacttaatcaccttctatttacacagcattgtgcttccagtattaggactaaccttgagatatgggtatcattatacccactttagtaacaaagacattgagattcagagagattgtgacatacctaaggtagcaaaactagtagctggaagagccaaaatttgaactcagatctctctggccctactaaatgcatcaccataaattatttcatgggcaatctttccctgcaccttaattgatttatttctgccaaatgtatgtgttcctagatctttatggaatattctgacatgggaatgcccccaggtctgtgaggactggcttctctggggttgtatcaatagatgaaggaaaattttgcagttgtttatacagtttggggggttgaggtggtacaatttgtacatttttgttcctttcatagcaaattcttcagttttctttgatgaggccaagcaataaattttttcctttcttaagagcaaatacttatttt

SEQ ID NO: 315903 - DNA, 4001 bp, Homo sapiens
tttcatttatttattcttgagacagggtctcaccctgtctccctggctggagtgcagtggtgttttcagggctcactgcagaactcatgtggtcttcccatctcagcctcacaagcagctgggactgcagggacacaccaccagctaatttttttgtagagacagggtctcactatgttgcccagactggtcttaaactcctgggctcaagcaatccttctgccttggcttccaaaagttgagttttaaatgatgatcacagattatattctttatttgcagactgaacaaagtagtacattttccctattaaaggaccatctctcaatttagatgttccacatagaaagcaactacctaaaaggaaaaagctacgaaacagcctgtattttgcaggtgcaatggatgatgatcctaagataaagacagaagaattttatttccttctgaatgatcctcatcaacattcccagcacactgcaagaattatttttttctatatatcatcaactctgttgcttctcacactaggaacagggtaaacaatccacaaagagttcttcaagaaattgctccctccctcttgctaaattcatttctaataaagatttgtttttgttttgagagacagagatactttgccaaatatattctccatattaccttttcctttcgttaacggagatacttaaatcctgacctaggaaggtttcccttgcatatttacctatcaagactgtcagttacggtgatttccaaaagggattttccaaaagggaatctgtgttcacagggaactgaaactcttaagtcactatttaaattagctggacaaaaatcaaaagcaacattagggaacactctgaatataatggatatccaaagtaaaaaaaagatgccaaaatttagtgaaagaagtaaaggaatttagtaagctagaccaacaggatagacttgccattattttttaactaaagttctttataaatgaaaatcaaggtaaaaatcagctgaactctaacagaaggaaaagaaaaacaagggtaagggtattaagaactctgtgatttcaaccttattttacttaacatttttaaagtcaaaaatgagcaaattacatttcagcaataaaaagctatttctagtttaaagtgaatccattccaatcacaacttcaatacacactttcttctagaacagaacttaataactcatgtagtttcattctacatttttaaagacagaatcacaaaaatgggtgatgctttccactcaaaagactattttgtatagtgcaaattctttcagtgaacattttcataccttagtgatggtagctctcctttccactgacatttacatctagaccccttcatttatcttcccacatctggcaaaaaaaaaagggggggaaggagtaaaatcaaagcaatcacttataaaccaacaaactattctaaattccagcattctgcaaatacttcaacttttatttcattaccattcttcacgatgataaatatccagcaacagacctaacaaaacataatacaacacttcctataaaatgagtaaagaatgccatctcattaggcagatacgaacttaggtttcctctatttcaattttcagattcatagcaatgattcacaaagtgagtgatctaccttcgaaatgaatcacactttctgaaattcttattctacatattataatactaggtcattatctctgcatctgttaaacagagcatgacgttggttaaacagggttagtgctgcaagatattcaaaccacaacaaccgtggagtccctgccaactaattctatttgcaacactgcattctccaataactgcactttttcatatagatttatcctcaaaataaaatgttatcttgaaaaaatattattttaaacactgattaagaacttatacatccataccccgctctccttctctcttgtttcattactacatccacattctcttcccattatgacaacataaaaaaattaagtcacctttatccttacatatcatttttagtcaatcaatccactctacaatttttctgtttatagtagaaacgctgagtcactaaatggaaactcaaagaaaaccagctactaacagttaaggtttaggatacaatatttatctagccatgtctcagcagcctgtatttgtatctcccacggtgaaaaaagtaaagcaaacacttgaacttttttccctctaagaaagaaaaagaagtgggtttccttaggtcctcctgcatgctgctggttactcacaggcagggctgactggagttctgtaacttaacaatctgggtgtcaataacgcctcgtattagtcaagtattaacccagctagcgcctgttaaacccgcgcgatccagctcaggtcaaggaggaagaagtaaaattcccaaaaaatgctacgccctacaccgtcctgacaccgttccctgggggtgctcgtcctgggacagaaccgtagtgtggcgtctaaggaggaagagaaggcgcctagggcacccgaaacggagggacagctgcccaatttaatttctcccacagtgggaataacacgtaccttttccccagcgcggtggaagggtgagcgttagaaatcagacgggatgtctgagaacgccgcaggcagggggcgaccccagcccgggagcccgccgcgggccggccagtccccagggaagcccggccccctagccgaggtcggaggcggcgcggatcccacgggactgcggaggccgggaaaaaggttcccaactccccgctccctgctcccaccgggctggcgggaggagcggcccttacctgtgttagggcgcgcgctgcgactgcgtcgctgtccgggaagggccgaagagctgctcgcccgcccggcgcccgctggggctatgggcgaggggcgcagctggacgactcagtcctgggtccccggccaggcgggcggggatggacgcggcggctcccggcactggcagccggctagtcggtcaggccgatgtgccctctgcgccgcggctgagacagcgggaaccggccccgggaggagccgcagcctgagcggccgactgaggaggcgaaggatgggcggggccacagggtcgacgacccactcacccggaagcagttgtggccgcgactgcccgggagtggcgcttgccgcggtccgggcttgcaccccgctgggcaaagtacccggggctgtcacacggcgagctgagccctgggccggcgggtgaggttccccaagcggcgatgcccctggctccctgttccgccattgcgagccgttagggccaagctggagggagggcggcgaggcgcggctgccggtagggcggggccctgggctgctggcggggcggaggccggaggcggccttgggcgggtggcttctctgggtcccacggttcctgcccaggctcttcgaaccaggaccagtgcgggtaatgtgaattgacacttgttccggttcagggctgccccacccctggttgccccaaaccctgcggcctggtgggcttgggcaagtgggctggagtagcgctctgttaggaaacgagtatgcgagggagggagggtgggtgtggtcgaaatgcccaagcctcgtttcaaaaatgaagacgcatgaccttaaaattatttctggagaagaatgcttgcgcgagaggtgtgggggggggggcggggagcgggatggagggaggagtatagagtctgttaaaaatctgatagacacggacttgttatttattccggaaatatctaacgaggcccaccaggttcaaggcactggggaaggaccagggtcgtgcatttgaaaagcttaccttagtggaatagactggctgaagcaaacaaacaaggtaatgacaggtgtagtatggctttgcaggaaacacacagagtgatgaaaaagattttgtagacgaagcctctggctggataggatggctaaaaaagac

SEQ ID NO: 315904 - DNA, 4001 bp, Homo sapiens
tccttctataatgccatttcttccccttccctaattatctctacttttatctactgctctccctaccactaggctaaaacaaatgcatacatatgttccctatgaagtggaattatctcttgacctccccatcaaaataaatgaataatgaactaatgaagaagtataacacatgatcaacccagtttttagcctagttgtttgactcctttgaagtccagcataatttattataagccaaaaagttcacaaggcaagttttgttcaattccttccttctgaagttttaaaagttgagttttattggccgggcgtggtggctcatccctgtaatcccagcactttgggaggccaaggcgggcagatcacgaggtcaggagatcgaagccatcctggctaacagggtgaaaccccgtctctactaaaaaataaaaaataaaaaattagctgggcatggtggcgggcgcctgtagtcaaagctactgggtaggctgaggcaggagaatggcatgaacccagaaggcggagcttgcagtgagccgagattgcgccactgcactccagcctgggcgacagagcgagactccacctaaaaaaaaaaaaagttgagtttcatttatttattcttgagacagggtctcaccctgtctccctggctggagtgcagtggtgttttcagggctcactgcagaactcatgtggtcttcccatctcagcctcacaagcagctgggactgcagggacacaccaccagctaatttttttgtagagacagggtctcactatgttgcccagactggtcttaaactcctgggctcaagcaatccttctgccttggcttccaaaagttgagttttaaatgatgatcacagattatattctttatttgcagactgaacaaagtagtacattttccctattaaaggaccatctctcaatttagatgttccacatagaaagcaactacctaaaaggaaaaagctacgaaacagcctgtattttgcaggtgcaatggatgatgatcctaagataaagacagaagaattttatttccttctgaatgatcctcatcaacattcccagcacactgcaagaattatttttttctatatatcatcaactctgttgcttctcacactaggaacagggtaaacaatccacaaagagttcttcaagaaattgctccctccctcttgctaaattcatttctaataaagatttgtttttgttttgagagacagagatactttgccaaatatattctccatattaccttttcctttcgttaacggagatacttaaatcctgacctaggaaggtttcccttgcatatttacctatcaagactgtcagttacggtgatttccaaaagggattttccaaaagggaatctgtgttcacagggaactgaaactcttaagtcactatttaaattagctggacaaaaatcaaaagcaacattagggaacactctgaatataatggatatccaaagtaaaaaaaagatgccaaaatttagtgaaagaagtaaaggaatttagtaagctagaccaacaggatagacttgccattattttttaactaaagttctttataaatgaaaatcaaggtaaaaatcagctgaactctaacagaaggaaaagaaaaacaagggtaagggtattaagaactctgtgatttcaaccttattttacttaacatttttaaagtcaaaaatgagcaaattacatttcagcaataaaaagctatttctagtttaaagtgaatccattccaatcacaacttcaatacacactttcttctagaacagaacttaataactcatgtagtttcattctacatttttaaagacagaatcacaaaaatgggtgatgctttccactcaaaagactattttgtatagtgcaaattctttcagtgaacattttcataccttagtgatggtagctctcctttccactgacatttacatctagaccccttcatttatcttcccacatctggcaaaaaaaaaagggggggaaggagtaaaatcaaagcaatcacttataaaccaacaaactattctaaattccagcattctgcaaatacttcaacttttatttcattaccattcttcacgatgataaatatccagcaacagacctaacaaaacataatacaacacttcctataaaatgagtaaagaatgccatctcattaggcagatacgaacttaggtttcctctatttcaattttcagattcatagcaatgattcacaaagtgagtgatctaccttcgaaatgaatcacactttctgaaattcttattctacatattataatactaggtcattatctctgcatctgttaaacagagcatgacgttggttaaacagggttagtgctgcaagatattcaaaccacaacaaccgtggagtccctgccaactaattctatttgcaacactgcattctccaataactgcactttttcatatagatttatcctcaaaataaaatgttatcttgaaaaaatattattttaaacactgattaagaacttatacatccataccccgctctccttctctcttgtttcattactacatccacattctcttcccattatgacaacataaaaaaattaagtcacctttatccttacatatcatttttagtcaatcaatccactctacaatttttctgtttatagtagaaacgctgagtcactaaatggaaactcaaagaaaaccagctactaacagttaaggtttaggatacaatatttatctagccatgtctcagcagcctgtatttgtatctcccacggtgaaaaaagtaaagcaaacacttgaacttttttccctctaagaaagaaaaagaagtgggtttccttaggtcctcctgcatgctgctggttactcacaggcagggctgactggagttctgtaacttaacaatctgggtgtcaataacgcctcgtattagtcaagtattaacccagctagcgcctgttaaacccgcgcgatccagctcaggtcaaggaggaagaagtaaaattcccaaaaaatgctacgccctacaccgtcctgacaccgttccctgggggtgctcgtcctgggacagaaccgtagtgtggcgtctaaggaggaagagaaggcgcctagggcacccgaaacggagggacagctgcccaatttaatttctcccacagtgggaataacacgtaccttttccccagcgcggtggaagggtgagcgttagaaatcagacgggatgtctgagaacgccgcaggcagggggcgaccccagcccgggagcccgccgcgggccggccagtccccagggaagcccggccccctagccgaggtcggaggcggcgcggatcccacgggactgcggaggccgggaaaaaggttcccaactccccgctccctgctcccaccgggctggcgggaggagcggcccttacctgtgttagggcgcgcgctgcgactgcgtcgctgtccgggaagggccgaagagctgctcgcccgcccggcgcccgctggggctatgggcgaggggcgcagctggacgactcagtcctgggtccccggccaggcgggcggggatggacgcggcggctcccggcactggcagccggctagtcggtcaggccgatgtgccctctgcgccgcggctgagacagcgggaaccggccccgggaggagccgcagcctgagcggccgactgaggaggcgaaggatgggcggggccacagggtcgacgacccactcacccggaagcagttgtggccgcgactgcccgggagtggcgcttgccgcggtccgggcttgcaccccgctgggcaaagtacccggggctgtcacacggcgagctgagccctgggccggcgggtgaggttccccaagcggcgatgcccctggctccctgttccgccattgcgagccgttagggccaagctggagggagggcggcgaggcgcggctgccggtagggcggggccctgggctgct

SEQ ID NO: 315905 - DNA, 4001 bp, Homo sapiens
atataacttcgttttatgaatatattgaagtttatttgcccactcccctactgacatttagattgtctcccataatttcatgattatcaacaatgctaaatgaccatttttgaatatgccaccctgcacacacgggacagtttctgttgggacaagtctggttttgcagtttcctatggatggaactttaggcttctaaggctgttgtgtattagaaacatctgctgttaacggaaactctgtcaggagattgtctttgttaagaatatagaccctgggccgtgcgcggtggctcacgcttgtaatcccagcactttgggaggccgaggcgggcggaacacaaggtcaggagttcgagaccagcctggacaacaccgtgaaaccccgtctctactaaaaatacaaaaattagctgggcatgatggcaggtgcctgtaatcccagctattcgaaaggctgaggcaggagaaccgcttgaacccgggaggtggacgttgcagtgagccgagatcacaccactgcactccagcctgtgcaatagagctagactccgtctcggggaagagaaaaaaaaaaaaaaaagaatgtagaccctggagcctggcagctgtgggctggaatcgcggctgcagcacttacaggctgtgtaaccttggatatgttagttaagctccctgcccctcacttccttcatataccattgaggacacagtcgttgtgaggtaaatgagatgatccatgtaaacacttagctcagtgactggcacatacaccctctaaataaacattagctactattatgattactgctgctgttagggaaaaagagagtaatacaaagtatcaccttgttggatatttagtaatcttggattttcgcccataaagtcagttcaaatttgctgtttagatacagaaccaacttagggcaggaaggaccctggatgagagcatagtgacagccagaaaaggaatccgtacctgtcctattttattgtcatccagtcccaggacttcaaggttcttcagtgcacagatctgcagcgggcagtggtgcagatggttctggcttaggtccaggaagcgcaagttgaccaggcacctgaaggagccccgcagcctgtgcaggccggtgtttcccaggtagagcaggtgcagcgaggtccacctgcaaatgaggcgtggcaccttctccaggcggttcccgctcagcccgatttccgtcatcttcctgagctcggcgaagctcttcgggatggagtggaggaggttgtgggataaatcgagcaccgacagttggctacactggcacaaggacgcgggcagaacgggaaggttgttagaagccatatagaacttctgcagccccgtcaggtgtccgatctcttctgggatggcacctattttgttctcgtccaggtcaatgatttccagggtgtagagaacacagagctcctgggggaaaacttcaaactggtttcgcttcaggtagatctccctcagcttggtctggttcactatttccttgggcagacatttcaggtggtttccggtcagtccgagcagctcgagatggtggaggtttttaaagatgacgacgggaatttccttcaggtcggtctggtagagccggagctcgcgcagggcgtggaggaagctgacaacgacaagggaggaggagaagatggggttgtagctcaggtccaggctctccaggctgctcagcagccccagcgccgggcacaggctcctcaggttgttcttatccaggtagaggaccctgatgttctttaaacgctgaatctcctggggaatttcttcaatctggttattctccaaatgcacttcttctaattctgtgaatgtgaagatctccaaaggaatggcagtcaagctctgattagaggcatcaatgaaaaatgttctatcattgacgtgctgtggatcatttctctgatgaattttaggtgaatgttctactgattttatgtcttttgacattattgtgaagaaaagctcaaatattcaaaatctgaaatattgtgaaaaggatgaaaaaaaatagaatttacctgccaccagacttgctatccttaagaaaaataaaattaaaacctagttgattaaacttagtgcttgaaattatgacagaacataaaatttaggtttttgcatttcatgttagaagaattaaagtgtagactccttcccctaacacgtagactcacatgaaaaaaaaaaagagattaacttcagttttatttatttatttatttatttttgagacggagtttcgcttttgttgcccaggctggagtgcaatggtgtgatctcggcttactacaacctccgcctcctgggctcaagtgattcgattctcctgcttcagcctcccgagtagctgggattacaggcacccaccaccatgcccagctaaatttttttgtaattttagtagagacggggtttcaccatgttggccaggctggtctcaaactcccgacctcaggtccacccgccttggcctcccaaaatgctggaattacaggcatgagccgccgtgcccagcctaatttcagttaaaaaaaaatgcctattctgaatgtttccagtaggatgtagaaggttgcaaaagatccttgctcttaccataacactgagaaaacactagggaaaaacctcatcttttaaaatacagtatttttccttaaaaccaccagagagtcgaagatacaaagaaagctaaaacaaaaacaaaaacaacaacaaaaacactatattctagagatgcaccaaccttttctaaataactagagacccgtgagtagaccctctcatgcctgatggcatttgcaagtttgaggactgtcaggcagagaaacaaccctttaataggcacaggcaaaggaacttctgggagaagaataaacctgccaaacttttaacagtcatgtgtgggctggcatagtggattagaatctggagtagccccaaatgcaaagtcagttctccccactaactagtttttcccattagtctttggctggttaaacggccacagggaaaattgcaggctggactaaagaacagagacaggtcctgaagtttcatggtcttaagtaccgaagcctggctggaaggagcttaactctgtctaagtgagacatttggaactgcggttaattgaatgaactaaagcccaacccagaaacaaattaaagtctctgataaatggagggacaaatcatgtccatggattagaattctcagtaatgctaagatgtcgtgaacccggggggcggagcttgcagtaagccgagatcgcgccactgcactccagcctgggcgacagagcgagactccgtctcaaaaaaaaaaaaaaaaaaagatgtcaatattcccctaattggatctatagtttttatgcaatgttagtcaaaattttagcaaacttttttttttcttttttggtagaagttgacaagctgattctaaaatttatatgaaaatgcaaaggagctaaagataatctttagtgaaaacaaaatcagcagacttacactactaggcttataaatcttataaaatgcaagatgtgaatattgtatttcagaagagtaagtctttagtacacacacacacacacacacacacacacacacacacacacacagagtctatggggaaaggcagagaacaacatgacatgatagtggcaaggttggcggtagcgtctttgaacttctttttagaatgaaggcagtcctgctggagtatctgggcctctcatccatcacagaggcccagtgcctagatgaaggggatacatttctagccccatacataatactgctattcctcaaaacacaacactatgtgcttcaggtgcttgttgctttatgcctggactcaaaaccagctctgagacaatgttatttaaagaaaaggaaagatttaacactgattttgtttaaaactagctgtctccagcatttttgtca

SEQ ID NO: 315906 - DNA, 4001 bp, Homo sapiens
tagcttttaaaaatgaaataatgagcctattccactaacatgatttagattgtcatggcaagacaaaacaaaacatgttgtcttttagaaaatcctccacgcaaaagccagagtcggcagcacctgttccctcacccaattagaattccacttttcctttacgatttaggtttgggaatgaaaatacttacggcgggatgggatttagactcttagcctttgcctgtgagcttcaagtgcttcagaaccatttgtaccccggccagtcgttcactcacggccaggctctgttcttggcgctggggccgcggcggtggacacggcaagcgaggtccccttctcctggatccggcatccgggccgaagcgcctggtccgcgtttccgcgcgggctcccctggaaccgtcccgggacacgcggccctctcgctgctggacttttccccgagccccagcttgccaggcagggactccctgggcgggcggcggggaagcgccgagtcggcggccgcccacacccctctccacgcagcacaaaggacactcgccggcaaactttcctcgcttctgacccgggccgagccgggaactcagcgccagctctgttcctggcggggctgaggcttccctcacattccaggccacctggcaaacgtcctgaggctgccactccttctgggctcaaggctcacgggctgaggtctgtccccgcgtggagctcaaggctcacgggctgaggtctgtccccgcgtggagctcaaggctcacgggctgaggtctgtccccgcgtggagctcaaggctcacgggctgaggtctgtccccgcgtggagctcaaggctcacgggctgaggtctgtccccgcgtggagctcaaggctcacgggctgaggtctgtccccgcgtggaccgccgagagttcggtagatccttcccaaggctctgacttcaatactttcagtgccttgtcaattataccccttgcccctttctcttaccaaggccaccgccaagacaccctttttctttcctctccccgtcgcccgccaccttccttgccctcctcttggccctctttccagctccctgggccccctttccgcgctgctctccagccccagctgccttccccggttcacatcccggcagccctcctccctccccgtccccgggcacctccctcccctggtcggcccctgaaatccagcaggctcggctccggtcactgcctttttttgcctgtttctatctggcctgccttcccaactatcgctctcccacacctttttttttttttttttggcaagggggacggggggaaacggggcactatattctcgtttcccgacttcgtcattttccccagctccgtgagccgcgccccctcgtccccctcaggcccgcgatcttaccctgaggttccccagaccccgtagggtctcccacgccaccaagtttgcctcgacttcccctcgctgcctcccacacctcctgccgcggcgcggccggccagggacttaccccgaggcccagctggtgggggtgttggggtgcgcgcggacccggcacccacggcggcggcggcggcagcagcagcaggaggaggagaaagacgaggaggaggaggaggactagctgagcggcgcctccttcccagcccgcagcgcgcactggctccttggggcacccccgggagagcaccaagaccggagactaggcggcgacacaggcaaccgctgctgcacggggctgggctcagtcggctctcagaggccagggcagggggaggcaggactgggaaggagggtcggagaagtggggtgcagagggcggggcagcgagcggccaggtccggaggaaggcgccccaggcgcctagggatgccgccgcccgggctgacgccgtcggcccctctccccgccaggcgggcgcttgcagccgcgggcgcacgggcctcgcctcgttcaccggctcgttgccggcgcccgcggtgcgccccgctttgtgctccccgcagccggcgtgcacctggtgtaagcaaaggcggtcagctgatgggccgcgcgcggattggctgctccgccgtctcctcccctcccgcccgaccctcttcgcggcctcccgcccccgccctcggcgcggccccgtgctgggcaccatctgtggaccgcccaacaaaggcgcagcgcggcggggctcgggtggccgggccgcggtcgccgctttttgtctaggggacggcaggctgcggctgggcagggaggcgaagcgcactgccggtttttagcaaaagacagaccaaaagaaaatacacgtccgtgctaggaggccagctaggcacaatggggccccatctctttgcggcgtagaactcgggctcgggggctgagaaccagacacagttcggcctggggctgtgggagccaagtttcggggtgaaatccgaccctgcgtcttaaaatacagggcgcgtcctcgggctgtgtgtgcgcgcccgggggcgtcctccgcagacctggcccgggccggtgtccctgccgcgggaaggaggattcggacgcttaactcagcggcgaagtcgcttcccattggaggaggctttccgaaaacgtttctgaaactttgaaattacagctttctgatttgtgaggggtggaagttgtgtttaaacaggcggcgagggactgagaaggcagtgttaagtggaggtgtctccgaggaaggggaggagggtggggacggaataggtcttcggaaactgcgcgtgaacctgcgtctcagcttcaaagtcgccagccggaagcagggcttcagaaaagccttggcaccctttattgggggaatcggctttaagcgaaagcatcattagcccctcagtactgaacaacttctggcagaggaacgtggtgacatttcattatgatgtctaaacttagaacttctggagaatttggaaggatacattattcgagaatcatcctttggattcttcaaagccacaggatacattcaatgtcagtaaccatattcttgatccctgtaacatttattggcgtttcgcttaggtctctgataaatgtttgacgtctttgtgtgtcttcacactttgttatcctgaaactgtgtcatgtagacataaatggtcacagtttgtcttaaaagtctttaggaaaaggtgatactagcacttgggctagaaggtcgtgcagagcagaggaagaaaaaggcccactgctgtctacaaatgaatgggaagatttaagatctttcaaagcaagttgagtctagacccttgcccaagttttgtaacatgattttgtctctttccccccttttcatgcagattatccatggagttagcatgcagatagcatggagtttgtctgatagaagttgggctctggtggaagtacggaaattgaatggtcagggaaagatagaatgcaggtttcttagggagtctctattaggtttccagcctgccttcctgggagtggaagagagatgaggttgtgcccttcaaggaggagctttacagaggtaggtcttggaggagcagtcggagcaattaatgatggtgagagttgctcttgggaggccagatctagaacagcctccaggttttggaagagacttcatgagaatggtgtgagtcagggaccaaggtgtgaattttgaaaccaggccaacactgcttaggtcccagccctgcaatttatgagctgtgtccctaatggcaagtcactttatctctttaaggcttaatttccttggctctaaagtagggttaatatcagtacttatcccaaaggattgtgatggttaagtgggagtaaacatgtaaaatgcttaggacagtgcttagtatatagtaagcattcaacgacagatgtaagctctaggcattattaggcaggtattgaagactaaaacaagacatcaattcagacaggtgggataatgattccgcatgtgacagaatatctcaaaggcactagctgctc

SEQ ID NO: 315907 - DNA, 4001 bp, Homo sapiens
gaagagcaatgcattacttatgcagttgaacttactttgattcatgcccaatttctattttccagcataagcccttttcctcacaccattactgatgtatccctccagacattttaaaaacaatcattagtaatgacaaaaatctcaaataaacatatagcatgcattttgagccacctaccattctaagtgctttataaatatgtatattaattaatcctcataaccttgtaaatatggttccattattatccccatttgaaagatgaggaagctaggcacagaaaagctgaatcacttgcccaagttcacacagagtattatagtagagctgtgataaggaccaaggctgtcttcctccctccagagtctgtcagagttcttatctactgtgctccacttttcctccctccagagtctgtcagagttcttatctactgtgctccactgcctgtcaaatacacacacacacacacacacacacacacacacacacacacacacacactctgttttacataacactttttaaaaatccagataaatgtaatcatcaatatgtctcattctgcaatttgctctgttcactgaaaactgatctatccacatggatacgtggaaagctaattcattccttttaactgttgtagcatattccatggtgagagcatgccacatttagtattaatatttacccccactcttatgaggggtagttgaacggttgcagtttttttcttcattctaaatgatgctgtaaaacagcatccttgttcagactgccttggctgtgcaggaactgggagagggtctctggaatccagagaaatcttctcacagggctcagagaggagattaagttcacattttcttagatactgctctgtcattcaccaaagtagctgtaacactcccttctttttttttgagacttgaatttcaaaatatgacaaacatctgccaagggcattttactataaagtggtagaggaattcatgagccacacagtaatatccaaaactcaaaatagttatctactcaaagtggaagctcttgaaaggggctttgtttgattgattgtttgcttgcttgcttgttttgggccttaactagggaaatacacagcatggctgtcatgcacttgagccttttcccctttcttccttaaattctctactgaggctaacagtgctctagggcaatagggaagatgtttagagagccttctgaaagagagtcttctcagtttaatttagtttaagggatgcagaacatcacagtccccttcccctttccagaatatcaaagagcaaaaccactgttttcctttctataattttgcaaataatctaaatgactcctttcaaagccaaaacatcttcccctcagtaatgaacggacacccctcatttttagctgtggggctcaagcattaattagttgcaggaaattaattcttaaaccagagaacatgtttgccgcagaatccactgatctattaatgaaaggcttgcctctctgagattgtagccaatttgttcattctttctttggttccacttttccccccaaaggaataatatacgaactccaactacaagcaccatgtttcctatgaaatggcccgtgacatgccaactacatattcatgtcatgactgcatacatttctctccaccctcttcctctgcacccaacatgcgcaaacataaatcattccatgcagagacatttttcatatctgtccagtcttttaagacagacgacttgaaaatagatttcccgcagatacctttgtgaggggataccatctttctcccagacaagaacttttccaacgggaattgatcagggctcacctttcatgactgagtctccttgggcgtccttgctgacctcgtagaccctttaattaatgtgcagagcaacacacgaagggcatggcagactcagagcccagctttacattcagtctttctgaaccctgcccttgcttttcttcaatgcagaaaacagttgttgctttcaaaagaccatttatttaagcagcccttccccttgtctccatctggctgggatcagtttccataagaggatcttgggatcgtgcccctcttctttcttaaaatgttggcctccccaggatcatccctgcctttcccattcagacgatgagccgcgtaaagaatgtttgtcaaaccttggtgaacagctgtagcattcaaacatgaccccagtgcctcggcctttttgattatttaatctgcttgaagtacagggcaccaaaataaaactgccttcttaatccggctgtggcttctgaattctgttgacttattaaccatgccgggtcacccctctttgggttgggggatgctggacgggaccctcacctgggggtcgagcagcagagcccgcagagtgtgtaatatgaggacaaattggcctgctggaggctgacacggtttgcaccgtgcacttctttggtcatcgaagtcttattcagccaacatctgtggggattagctgtgttgacagggtcttgatgccctgaaattcatagccatggtttcctttagtggacatcacaaccttccttctggtgccacaaataacttctcagctgcttgcttgcttgcttgcttgctgcccccacaccccacccactccccagcccccgagttgaattgaccttttggttagtgtgacttaagaaatacttcttaatctttcttcgtttccctgatgctgaggtcctggcccttccctcacttttcacatataaaacaataaagccgccccctgtgagcatcaggcgtcagtcgactgtgactcttctctaattgaagcttcagggaactttcccaccagggactggaaccgtttctttgaatgtggaaatcccctgccatttgctgaggtggggtttcaacccctgaagctgcccttctagataaaacaaaatgttctgctgtgtgtaactgtgtgtacgcttttatggaagcagcatgaagtgcaatccttggctccaggaggtataattgagccattgggtttgggctctggaatcaggtgggtccagagtcgatatttggctccaccatcaccagctgcgtgtctccaggcaagtgacttacccacccagagccccatctctgacatggggacaacattagcccttactttaccaggctgtgcccaggattaaatatggcagtacacgacatggcccagagtgtcttcataagtgttcacaattttgcatgagaaaggctttcaggatttgtatgctgccaacttctgaggacaacctggaccggtcagcaggaggaatgtcctgagggaggtcttgacagagggccatggaacctggcccttcgtgccactctgcaggtacaaagggaagaggccctttgtgaatggaagttgaaaacatcaaattttgattattttcaacaacctgtactttgtggactctttcatcctttggccaagccccttgtcaccccacataacccagtatattcatcctgcctcttccagaaagcccactttacgcaacctgccatcttttgtccttctctccaacatttttttgagcatcacacatacaatgggcaaaagtcaggtgtaggtgacaaagcaagtcaggtgatgaagagccacttaaatcttaagaactcaatgatttcttccctccttccttccaatccctccttcctatccatctgtttcaggtgcacagaatttaatgacaataatttccattattaatggaaatacatacataaccatcaatggcccccattagcattcaatcattaatttatcataacacaacaaacacttgtgaacttaacactccttctaagaactagaaagttactaataactcatatctacctgtgtgcctctctctttccctggggtcagaaacatttttttgtgaaggccagatagtaaacattttagaccttaagagccatcagtctccattgcaa

SEQ ID NO: 315908 - DNA, 4001 bp, Homo sapiens
aggacactgtgacagccaaccaaatttatttctgagaaaaggaaagaaaactttgctgctgtcggcagctctgctagagaactgctccctgatgccccagggtttatgcactatcagctccttgcacacagattagaggtttattttctattgtatactgtgtttttattgccacaacaagcaatattacctagatagacagactgacactgggtcattttatttggaggaaatgagatttttaaaagatctccaaggagagtgattctttctttttgttagcatctgccagaaattcaaggaaagctagaaaaaagaacaaggggtaggtacagttggtggagaggaggaagagaaaagagaagcacaaaaaataaccttggagcattttagaaataaaaatatgactaggtctcatttgagtctctctagctcacagtacctgataggggtcaaactcccaaggacttgggactcttctttccaaatttcaatctcaaattattttagagtttgccagagctgcacagaaaaaaagactttgaagtcaataatcaatttgaaatatccattttatgccaggttaattctctcccaacctctgtgtttaacactcctactcttaaatatcagcaatttggcaaattccttttctttctgctcttcatatcttgtgttgatttatatccacattccaggaaaggctcagtaaccaaccaaagttctaagattgatttattgccctccatgtcaattagaagatccttacagaaagtcttctatcagaaaccctcacacacaaccttgatatgtgtgtgtgtgtgtgtatgtgtgtgtgtgtgttggcatgaaaaacacacacacacacacacagacacgggaggagcaaggagaatgcagtactgtgtactactctctgagagccataatccaacaacctttctttcagaattaaggacccccaacaaaactctcaagtgcaatgccacagcaattacaatagtgagaatactgcccagaagtcactaatgccatgggtgaagttaggcttccttgataagagaaacaaggtcctaagaaccgaacaacatttaaccaacaccactgctgcttgacagggaccagaattcccttgaattttgttagctataatgccaaccagtcagtaaaacagggacacacacacacacaccacacacacacacaccacaagcctgcagcatcaggagctggagttcaaggagatcagacacacacacacacacacacacaaacacacacacacacacacacacacgtgtagacgcgcgcagcagaaaagttgcccgaaagccctacctgaggatggctgtgtccccctgcctcacggtgatgttgtccgtgcctcggttaaaatccacgctgcgaacaggcagtcctgtgggaagaaggcagagcaatctcagtaggaccagtggcaactgtttccgatccggctgaactctcctgaccatggtggccacgccgaggtgcgggtccgcggggtgctctggaggggtgcgcgctgctcgcgaggagaggcttcaccaacacggggctttcatccacagcgagcgcagagcgggctttgccagtttatggtcctttccactttgcctctctctttccctcgctcagtctcttttccctctaagacttaacaaagccctcataaaacccaagcagaagggtgaaaagtaaaagcaacacaatttcaaaagagagagtgcaaatagcaagccctctggaagagctgaagaggaagccaaaggaaagggttcttgtttggtctctctgtgactggatgctcctctgccagtgtctgagctgagctccttcgctctgtaacccactttcccaggctggcgggcgggcgggcgagggagccggcaccaagcctgccagtgagtgtacagaaacagccacacagcagcagcagcagcagaagcagcagcaacccagagcctctctccccctcctccctttcctgtttctcccagtccctggcgctctctcagctcagcacctcccccccacccccccaccctccccccaccctgctggttttcaacagcccctccacgtcatcccctccgccctcccctcgacgtggcccctcgctttgcacaactgcccccttcagcagcagccagcctcaatgaaagcctgatgcgcctttgggttgtcaggacgacagctccatctgaggcctggctgatttccttaagaagggggaacggagcttagaggtactgttcaggagagaggggagaaggagagggacttaagttataaaagaacaggagaaagagtccaggaaaggagagggaaggggtgaggaaagaagaaaaaggaggtgggaaggagagttgcaaatgaggggagtgggacagaggacaggaaagctttgaggtggggagtgagggtggggaatgtcctgaaagatgggagaaggaaactgaggagaaacttgacagtggagtctaagattaaaagccaaagttgatttcaaacgaaacattcttggcaactggctttgcgtgttcaagtcttgttcattctttcctctttcctgcactttctcttacaggattaaaatggtttattttctctccttccttcatcccctccccctcttggaacccctttatgaaagatggattggagacaatgctggtattgagtggtctggggtgtgaatgcttggcttgttttttccaagtgccagcctcagcagctgatccctgatccctaaatcaacttcactctccaggaaactctcactcaatcctacacatgagtaatggtattaaggattactatttaaagggcacattgaattgctacccaagttcctcctggcacttacttctcaaaatgttcatatgcaaggaaggagatttgtaaatcagaaagcttgtcatttgcaaggagacactaagtaaggttgtgtgcagtactcctgctaatggcagacaggttaccatcatttgtcactccttttattccatgagccaagcaagtgatgaggaccataaagaccactgatagtcactcaagtgacagccccacactcttggacatctccctcattactgatgttgaggataaaaaatgtgtttgtaccagccaaggactttatttttctcttctttgattatatttatttaaataatgaaagtattcatatggtacaaaaaccaaatggtacaagatgctatagagtgaattgcagttttcttcttctttttttttttttttttttttttgagacagagtctcactttattgcccaggctggagtgcagtggctcaatctcggctcactgcaagctccgcctcccgggttcacgccattctcctgcctcagcctcccgagtagctgggactacaggcgcccgctaccacgcctaattttttctgtattttttttagtagagacgggttttcactgtgtcagccaggatggtctcgatctcctgatctcgtgatccacccgcctcgtcctcccaaactgctgggatcccaaactgctgggattacaggcgtgagccacggcgcccggccgtagttttcttcttattcccgtctttaggcaacccatttctcttttttggaggcaacatatattttaagtttgttatatatctttccataaatattccatatatataaaaataaatatgtacatagatattatacccatccctcttatgtaagcaaatgtttagcctaggacatttgccaaaaataaaataaaaagaaagaaagaaacatgtttaggaatccttatcaaaccccaccagagcacaagccttaaagaaacactgtgctgaaactggcttgtcctcagaatactcaaagcactttttctgcgcatgttttcagtttaaaagatagatgaactcttacagattacgtgaggaaaaaaaggaagacctattttgcttttaagaaaacacggaggattggaacctgaattg

SEQ ID NO: 315909 - DNA, 4001 bp, Homo sapiens
agtcaaaattagtcaaaactttatttgatataatcccacaataagaaatacattttacatagtgacccaaaggtgtatgtacatataatgatacaagcattcaagtaccgttcagtacagtaaaatggcaatagaagaatactgaaaccacaccctattacatgcaacattctgatatttctctatcttgctggggaaaaaataaaaacaaaacaaaacagctagctgcagaccactaaattgacttccagacacaacccagagtttgataaccatcaccctaagctatatacttagtatagatacaaataaaaaaaaattgccaggcgtggtggtttgtgcctgtaaccccagctcctcaagaggctaaggcaggaggattgcttgaggccaggagtttgtgatcagcttgggcaacacagcaagaccctgtctctccaaaacaaacaaacaaaaccaaacaaccaggcctgatggtgtgcacctgtaatgccagctactcaagagactgaggcagggggattatttgtgcccagaagtttgagactgtagtgaattggtgagttatgatcacaccactggcactctagcctgggtgacagagtgtgaccctgtctctaaaaatgaataactgaatgatgaatgaatttcctaaataaatattaagggccaaaagtttaagtgggcatagaatcagcaaaaataaggaattaggatccaattctttaccattcatgttcaatcttcccacagtttcctaaaaggcttcattagtaacaagttgcttcaaagctaataaaaattaccagtaatctaatgtccagagtaactctgacctgatgaatactgataagcactccatgctgtttactctgcagactatatggatgaaagtcagctggtgtgacagtggcacacgcttacttagctccagggacatatttaactaaatttagcacacgatcttagcactcaacatgttctcattcattcccgggggaatgaatggtgaaaataacgactagaatgatgaacacaagccaaatcacttcattcatttttttaaagatccttctataacctagtaaaatattaggtcttgtcacacctgaaaaatcaatgatttatctttgagctaaaccactagggggtgcttcgcaaggatgaggcaaggatctgaattattttatatttctggcagtaaccaaccgcttctggaggatccattctttgaacaaatcaatacaaaaatacgttttgtctttttcctgctctggaagttccaagcacttcagtggcttctagggcaaaacccaaacgtactcaagacctggcattgaagactcttcagattctcactccacgcctcatcaccacactaactcttctttcaagcttctcctacctttgtgttctgggccttgccaggaggagggcctgctactcagcttggcagaaactccaactcatccttcaaaacccggctgaggcgtccctcctgcaaaacttatctgacttttgaccccgaattttgcagcactcaggctagacagaaaagataagaaagatgacatggtctgtcttacccaggagtcagtgtgacgatggcttcggctccgctgagtctgatggcgcataagggcccgtcccagcgacccaccggccggggctctcctccggcccatggcaacacgaccgctggacgaagcttcccggctcggcgcgtgcagtttccgggattcacagttcgatccccggaagtgacgataagcgagcccaagtagttcaggctcaaacttgagaggggaaagcagaatgacttgttctcaagttctccttttacgtctcgattttaccagtattatagaatataagtgaaaaaatggttctgggaaattttcgatagatttcctggcgaatgtctcgagtttggataaatgactgagttaaaagaatggtccattcttaatttgtgcgtcggtctttagcgtccggcgagaaactagagcacgtcggaaacatggcggttcctattcgcggcactagctccgccttccgctgcttccgtcaggaggacgcggagactcggaggaagagtgtttcggtggcgctgggacgggggcgtttcccagcgctggttttctgctggcgtcccgaggtgtggtctctccgaggtccagcacagcaactaactttttgtttatctagccgaccccagctgcgaactggggagaaaagtcttcgcctggatgtgaatttggaatgagaggctgaatagtatttccagagcttggcaaggttgtaggaaaagccaacaggaagtgacttacgctttatttcaaagaaaaaaaaaatgtttaaacagttctaattatattttcattaccctttttaaaaataattaaaatgaaagtgaaaacagtgagccagctccactcctagaggcctgggcttttgttcctcacttgaatgtttgatttccctataatgggaataatagaaagtcagcttagagtggctggtgaactacattctcattgatccagagaaccatctctttgttttgatgcttggagagaggaagcagcttgagcaagtcgtagattgagtgcgtgcagtgtcaggaataaacccaagtcttgtcactagcctgtacacccctggggagagtggggaatgagggttgttaacatgtattatttatttatttttatcttttgagacagagtctcgctgtcccccaggtggagtgcaaaggcatgatctcggctcactgcaacctctgcttcccgggttcaagtgattctcctgccttagcctcccgagtagcgggaattacagacacgtgccaccgcacccagctaatttttgtatttttagtagagacagggtttgactattttggccaggctggtctcgaactcctgacctcaggtgatcgcccgcctcggcctcccaaagtgctaggattacaggtatgagccactgcgcctggccaaacatgtatttttaaatcataggatcgaggtaatgcatatattacctagcatagcttgatttagccattccacaatgtacacatatatcaaaacattatgcggtacaacgtaagtaataaacaatttttagttgtcaattaaaacaacagccaaaaagaaataaataggatcaagaatctgtttaacctagggcttttcacactttaatgtgcatataaatcccctgggaatcttgttaacatgcagattctgattcataagctctggggtgaggcctgtggctctaacaagcttccaggtgatacccatagtactggtccttgggtcacactttgagtagcaagcgtagtccactctttcctggtgcaaatgaagacacagaagtggactggctaaaggtcagtcatagcaagttagcatcaggcgaaactgggtccagactcccacccattctgaattccctgccagggtttctgtgtgctgcaccttacccctcttactgaattgaagtgagttttgggaaatgcccaagggactgctggcaagctgtgaagcagttggcaacgctttgagaaggcagtgctcacagatgagcaaaggaatgcatcagaacatcatttctcccatttctcaatttagaaacagtgtatctttaaaatcctacacataatctccagaagtaagatatgaagaagacccacgaaatagaattagcagacagctcccggcattctctccagagctaagtggttaaaggtcaaactaactcatgaagtaagatttcacattttaataataatactaggaggtgagataaagaaactcaccatctcattcctagagctcaaccaggaacttgggacttcatctagtttctttttccagattttgtcacctctggagaaaataaacactttggttttccactgttacttttctaagggcttaaaaaatcttgaccaaataagaccaggcgtggtggctcacgcctgaaatcccagc

SEQ ID NO: 315910 - DNA, 4001 bp, Homo sapiens
ctgtaattctcagattcttcatttgtaattgagaaagccacaaccttctttctgggttcttatgaggattaaactagttaatgcatttaaaaacagtgccaggaaaacagaaaatattaatatttagaaatggttcctattggccgggcgtggtggctcacgcttgaatcccagcactttgggcggctgagaaaggcagatcacctgaggttaggagtttgagaccagcctggccaacatggtgaaaccccatctctacgaaaaatacaaaaattagccaggtgtggcggcacgcacctgtagtcccagctacttgggaggctgagacaggagaatcacttgaacccaggaggcagaggttgcagtgagctgagatcacgccactgcactccagcctgggcgatagagtgagactccatccaaaaaaaagaaaagaatagaaaaaaaaaggaaaagaaaagattcctattaatattatattattacagaactgctggaaacattggttttagaggtcagggctaggatgacttggggtcacccacatggaagggatggttgcagccgctaagagttagaaagattattcaaggagagcttcttcagtaagtacacaaggccagtggaggaaggtaactgaattggtaacaggctctgaagattcaaaaggcctgatgagagaaaaaaataacctaactcaactggtccctatgtccctcagttcaacaagtgtttgttaaaggatcagataaccaactgttagattacaatgatagagaagtcacaatccccaccctcaaggagctcattctactgtggagaggcatacaaataattataatactgtaagaatatgcacatgaaaaagccctactgctacctaagcctctgtctgggatgcccactgtctgctcttttcatcctgtagctttaaatattggcttctcaaagaggcttcctctgatcatctaactcattcactcaaatattttttgagtgtttccagcactgttctaaaccccaaagacaaaagaatgaacaaaacaaaatccctgctcttatggcatttacattctagtggggagagattcacattaaacaaagatgcatacatttaatatgaaaaaataactctctatgaagaaaaatgaggcagggtaaccagagtagcgggagtgctatttgggcagaagtcctctctgaggaggtcagatttcagtagaaagtttaagttgtggcatgatctccaaagatatttgaggaagaaaaagaccaggtgaaaaagcttctaggaccatctgttattctgcataccagttccttgtttccttcacagcacatcacagttcctggaagtcttacatatttatatttacttttatctgttctcctcgcaaatataagctccaagtaatggcaaggatctcttatatgtcgatgtcagtgtccctggcccttagaacagtgcctaaccatacaaagctgatgttcactctatctgctgaatgaataaataattgttgcgctcactaatgataacaactcctaactttattacctggctttctattggaatcctgacagctccatgaggtagctaaggataataatctacagatttaaaaaaatgaagcgaagagtgtgagaatagtcatcaggtgggcttctaacaggaaaaggtctcagggcctacggcaaaattcggagggggggttacggaaaggacagggtggattaggccatggtgacttggagagaggaggcacgactggccatttttcctgagtctggaaaaagcagcctagtacaagaagctccttcgagcgacctccttaaaatacacttacctggtctacgtcgtccgccatgtttcaaaccctgcgccctttcccgcctctcgcgagaacacaagagcaacgtcaatctccggaaacgtgaggatacaatacaccggaaatagagagaaacctgttgtgctctttcctgcttcccgcagttttttagtggccacgggtatggggtggagcttcctttaggggcgtgactaggcctccaacgaaggggcgtggccaagcgcaccgcctcggggcggggccggcgttctagcgcatcgcggccgggtgcgtcactcgcgaagtggaatttgcccagacaagcaacatggctcggaaacgcgcggccggcggggagccgcggggacgcgaactgcgcagccagaaatccaaggccaagagcaaggcccggcgtgaggaggaggaggagggtgagagcgaggcccagcgggcttcgcgggagacgccgccggtgggcggaggaggcccagaggcagggcgggagtccagacgcggaggcctggtggaggttgctgcgcgcgttccgcgccgtgggggcagcccggcaggctgcggccggccctccccgctgtccccgcgtctttgtcctgcgcacccagagcggtttcccgcgagcttcgcccgatccaagctcctgcgtagcttttttcccgctccccgttgtccagaggatacagatgttcagggttgaactcggagaaggcagttatttgtgtcccaggaagacagacggacggaccaggacgtagagtgatgcagtgtgctgactcccgaatgataacttcagctgagtctcacccagagttccacagtgggatcccacctgacttcccctcatggatatttgataggcttcttacatttgtcatgggcaatgcagaactcatggttttcctctttaaatctatgctttcctccgtttttccagtctcaatacttgttataaagcaaagcccacctttttcttatgtccacacatccagtccgtcagcaagtccagtcagttcagcctcaagagtgtatttcaaatttgtccacttctcttcatttccatgaccacagcccctgtccaagtcatcatcacctttcagttgagtgactgcagtttcctctttactggcctcccagctctgcatccagcaacccaaataatcttaaaaaaaaaaaaaatcatgccctgctcctgctttaaactccccttggttttccattgctcttagcttaaaatccagttgttttatcctggcctacaagatactacatgttttggctcttgctacctctcctgtttctcttaccacttgtttccttgccagataccctccttattggcctcctttctcttcctcaaatatgccaagttattccttgagtcttttcctttgatgttccttctgcctagagtgaaccccccatggcttttaccagggctgattttttctatttcttcaaaactcaagttagacattccttgagcaaactaaggtggtccttcccagataccccgcggatactaaaacctgtgatgctcaagtaccttatatcaaatggcctagtgtttccatgtaacctatgcacatcctccgacatactttaaatcatctctagatcactaataatacctaatacaatgtggatactatggaaatagttgtcatgctgtattttttaaatttgtattttttttcccgaaatatattcatctgtggttggttgaatctgtggatgcagggcccgtggattggtagggctaaatgctaaataaatattttatttattttttatttttttcgagacagtgtctcactctgtcgctgaggctggagtgcagtggcgtgacctccgcctcctaggttcaagtgattctcctgcctcagcctcccgagtagctggtgttacaggtgcctgacaccatgtccggctaatttttgtatttttgtatagatggggtttcgccatgttggccaggctggtctcaaactcctgacctcaggtgatccgtttgcctcggcctcccgaagtgttgggattacaggcatgagccactgcgcccggctagtaaatattttaaataattgcaaaatgcaggctgtagaaggaatttctgggtctcctgaaaaaactgggtagattagactaggtaaccgg

SEQ ID NO: 315911 - DNA, 4001 bp, Homo sapiens
caagactctgtctcaaaaaaaaaaaaaaatttccctctttgtactttgttgtgcttttctcacactttctaaattgaatgtgaattgtttattacaggaaaaacacacagtaaatgttattgttaagatcccaaaagagggtaggcacagtggcttatgcctctaatcccagcactttgaaaggccaaggtggctggccgggcgcggtagctcacacctgtaatcccagcactttgggaggccgaagtgggtggatcacgaggtcagaagatcgagaccatgccggctaacacagtgaaaccccatctctactaaaaatacaaaaaattagccaggcgtagtggcgggctcctgtagtcccagctactcaggaggctgaggcaggagaatggcgtgaacccggaaggcggagcttgcagtgagctgagatcgcgccactgcactccagcctgggcgacagagcgagactccatctcaaaaaaaaaaaaaaaagaaaagaaaggccaaggtgggaggattggattggttgaggccaggagttcaagaccagggagacccttctctacacacacacatgcatgaaagtaaacatttccccctaccaggggcaaggcccctctcctgcaatgttgaaaatgttggcagtggctcacgcctgtaatcccaacaatttgggaggccaaggtgggtggatcacctgaggtcaggagtttgagaccagcctggccaacacggtgaaaccttgtctctactaaaaatacaaaaattagccgggcatggtagcacatgcctgtaatcccagctacttgggagcctgagacaggagaatagcttgaatctgggaggcagaggttgcagtgagccgagaccgcaccactgcactccagcctgggtgacaaaaaaaaaaaaagttgaggccaggcgcggtggctcacccctgtaatcccaacactttgggaggctgaggtgggtggcttacgaggtcaggagttcaagaccagcctggccaagatggtgaacccccgtctctactaaaaatacaaaaattagctaggcatggtggcaggcgcctgtaatcccagctacttgggaggctgaggcagagaattgcttgaatctgggaggcggaggttgcagtgagccgagatcacgccactgtactccggcctgggtgacagagcgagattccatctcaaaaaaaaaaaaaaagttgaaaatgtgataagaggagcttgctagctgggccatgctctgtcatgggccataacatggagccatggagcagacagtcctacgtcctggccagtactggacctgtagcttcctagattcctgctgccctggcccctctgagcatcagtacttcttatatgcagtggtgcagttaggtgagtggccaccaagctcttgactagctgagtctctgtctgaccaggccaagggacccccaaccctaggcagttggggatatttagacccaagtcaggggaggccagaggcctaactacttttcagtccatgggacaggtacccaaatgctttctggaaccactacccaccccaatcccagcttccttccttaagagctgaaccggccaggcagctgaccggatgcccacacccacctgagcacagcctgtagttgacccactcctaactgggtagcttctcccatccctccttgatgtccccagcaggggaaactgaagcagggcctgaggtgacaaggggctccaggcatggcaggcttttcctccctgcacagggggcaggtccttttactggagctggagcatgaaaatgggtaactaactactcaagacagtgaggtcagtgggacagagggtgggtctctccatggtccacaaggtcacaggactgaggccttgccctccctcatggtcaccctctcctaccttcttgggtctcctcaggcatggcaagcagtgggcagtcgggggccaatgatggcatccagtagcaggactggacaaatgcagcagtggctcctttgtgagcccagggaaggcctggctgcctcccagccttggcctaaaataggcctgagctcagcccactgggctatatttagagggggcagccctcagccatgggaaggggcagagtgatccacgtgggccagcctgaactatctacctggtgagggagccagccaggagcctgcctccactagtccaggtgcccagggaccttcaaggggaagcacacctcccccatacatccagaatggccactccaggctcagcaaggccccatgtggcagccaagacagacaaaggaagcctgtgcatctctatttggccacccctctacccctgcagactcctacccacagcccagtcatctctcctcccagcaaacacagcagcctccactgcatgacctgctagcacacaatgctattgttgtgtgtgtcttatagagggtgatggacaactgaatcccaatgccatgagggctctgatagcttcacaagtgggcagatacaccaacagcacccatgctggccagtgggtggacctaggttggaggctggttcatttgttactaagcttgcaaccttaggtaaagggtctcccctctctgaactcagtttgctcatgtgtaaagtcggaataacagtggctcctccctggcagtgtacactgagaacaacatctggagcatttagcacaatccacggttttggtcttcccctgctcccatctccacaagggcagacaggtcccataaggttgtgtaaggatgcgcatcactgcttaccttgaaaggaggaggtggtccagcttccagctttccctctgtggttggatccctgtgcccttccttcccagtgggggcaaagcaagactgtgggctctacttcctacacacctcaaacctgtcactccgttgtctcacactggcctccctgatgttcctcaaagtcaacaagcttgttaccacctcaggggcttggtggtggctgttccctcctggaatgctctgctcccagatagccctgtggccagccccgtcttgtcagcgaactcaaatgccaccccttcagtgaggccttctgtgtacattcttttccacatcacccagttttcttttctttgagacagagtctcgctctgttgcccaggctggagtgcagtggggcgatctcggctcactgcaacctctgcctccctggttcaagcaattatcttacctcagcctcctgagtagctgggattaaaggcgcgtgccatcacacccacctaagttttgtatttttagtagagacagggtttcaccatgttggtcaggctggtcttgaactcctgacttcatgatccgactgcttcggcctcccaaaatgctgggattacaggcgtgagccactgcgcccggtccagttttattttcttcctagcacttagtcctgaagttatattatgcacaatgtaccctgcgtgtcactattcccaaaggccctacagaacctgttcagtcacgcggaaccacctttttttttttttttttttttttttttggagtctcgctctgtcgcccaggctggagtgcagcggcgagatctaggctcattgcaacctccacctcccaggttcaagcaattctcctgcctcagcctcctgagtagctaggattacaggcgcccgccaccacgcccgactaattttttgtatttttagtacagacggggtttcaccgtgttagccgggatggtttccatctcctgacctcgtgatccgtccgcctgggcctccgaaagtgttgggattacaggcgtgagccaccgcgcctggccggaaccacctttaatcctcaccaggcaaccttggacaggagaaactcgggccctgacaccgctagtaaggtgcccaagaccacatagcaaggccgaggactggggttttctgctggggccattccagctttggctgataatgcgtttattgcgttactttagtacagtcggcctgcctcgcccc

SEQ ID NO: 315912 - DNA, 4001 bp, Homo sapiens
tgggggggataaaagtgttctaaaacagatttatggtgatagttgcacactcggtaaggttactgaaactcattgaattgtacgcaaataggtgattttttatgatatggaaaatgtacctcagtaaagctgttaccaaaaactaaaacaaaaaacaaacaaacaaaaaaacaaaataaacacacagttgtaaaagccctctgccctttggatgtgctatggggtagaatgttcagcctctgctgtctcctgtttctgagccatccccttatggcgagagccacccatggcccttgggtgggcaagaggcctgtagctccctggctgagtctgcagaggtttggggacacctagctgccatactcccccttcatccaccctcatcccggggaaatcccagggaatataatcttgccttggaagcctttatagaactatcccacactgagaattaacccaatcagatgcagccatttgtgacccagtgagcattaactggatgcctgctgtacaaacagcactgtgtgtcacgcaaggaatgtgtaagcggacaggaccagatttcacttctcactggagaggcaaaaatccaaaaagaggaagctaagaatggtggatgtgttaaaagagaacaaataccaaacaaataccagctaatggagacatacgtgtctccattagttgccacagctcctctgtattgtgaattctgccaacctctccattctccaggggagggagctatggctttaactagttatgtggcttgtggaagttcccatagctaataagtaagtgttggatctaggactccaacctaagcagtcaggcactaaactcccctactcttaccactgggctagcctgcctatttaggttggcaaagttagagacaggttggagatggggctagaaaagggtctgggtcagatcctggaaagtctccaatgctgatccagggaggtcttattcaggatgcagtgaagctgtgactcacgggagactctccctagggcaggggcagagtgaactgagacctgggaacaggcagagaagctgtggccaacgaaggcaccagggaagggctagtctgagtggagagaggggacagcactgagaacagagaagggggcagggagctggtatcagaaatcagcttggtaatgggtgggttctgggggtgaagggagagagtaaaatggaagaccatgcctcaagccggaggtgggggctgagcaatgacgggaacctgtgggcagagttcatttcttcccctaagaggagctgaaccagagtgactaaaggaccgctgagctcccttccaggattcccagtccccagccccccaaacaccaggtgaagtctccacgctcttacctcccagctctggagctgtgtgacccacaagctcttacctcccagctctggagctatgtgaccccctgaagcaggtctaggtctggcccctccaaaatcttcaaccccacacttgtattcagtgtcaggcactcagatgctgcccactggacctggctggacactggccaaaacacacattctgggcagacatgcagtgcgctggcctccaaggcaggggccaggacaggagttactctccccacctacccacacagctcatgatagggcccaagcagactgctcagactgatgggaaacctcatgagtgcctcccagcccatggctccagggctaagcagacagactcctccacccaatgctcacacggcttagatccagctggccccactcacccaacttctgtcagcctggacacccacggggagcagggcaggaattccacagggcaactgccaccctttcctcaggaaggacaagggttgcaatggcactttggggtacaagccaccatcccaattgactgcaggattcaaacttcagacctcagtaggcgccaaaacaactaaagatccaagtgaatataaaacccagtggtgcaactctgagccagaatcctggaccacagcccatgaccacttccaggaaggcaaggcttccttcctctcctgcccctcccaggtggccctaaccctgtgcaacaggccactcgccagggagcttgaggggaagagaacagtcgggtcctggccagtcccaatctgtcttagagaagagaaggatgaccaacacccatgggaaggaatttggagcaggagaccagaagggcagggacaaggatgggtttgggctcccactgctgctctctatccaccgccacctcttccatccaggaagctcccagccttaggtagatgccgtaagacaagtggaggctgcactgggctggggaggtgtgacacctgggctttcactgtgcccctcccactgcctaggtcctgatgcccatcacagccctttctgctgcggcctgggaccttcccctcccggtgctgcagggagctccgcactcacgcatttaggtcactaatgtgcagcgctggggagtgccctctgagcacccgagaaattactttggttatggaactgacaattgtttccttccttctactccttccttctgtttggctgacatttccctctcaaaccctctgacacagggttccatcaggagcaccgcacccctccacaaccctctgccacggaaggtgtgcgaatgccccatctcctcctcacaaccctgtggacccatggttaggccgtttctttaagtgaagaaactaagtctcataaaggctcggtcttgctggggtctcacagtcctcgcaggagctaggatctggactagggtccttgagctagtcgctcaccctctctgagcctcactttcctcccaggtaaaacgcatgtcacaatacaatggggaccaaatccttaggcgggacacaaagggacaggggcctgggaggccttttgagaagctctgagcagagctaggcgtgccccgatccggcttgaggagcccagctcctgttcctccccatgtgggaaagagactggccccgcgtccgggccgcctcccggctgtaggcgctgggaccgcggggcgcagagaccccgcgcccagccaaccggacacagggaccaaagcgcctagcagacagggcgcaggagacgcccatcaggcggctcgcgcccccaggcacctgcactcaccgagggccccgaggaacagcaggacgaggaagacaagtttcatgtctgcggtctggaggcgacttggcaaacgaaggctctgccacttgcgcctgccctgcgcccctttattcagggctttgccccgccctgttgcccaatagacaccccttccctccccactccccgcggccaggtctacttgttccttgaggatccaggctccgaaaagccctgaggcaggacaggactccacaccgcgctgcgagaggaaagccagcctgcacctcacctgtcctggttctgcctggctgctgcgatgttctttctctcccactagtctgcaagcccctaggagtcgcagccccctgagccctgtcccagctctggtctcagtgccttctagagggcaggacacagagcagagggtctttacttgaagatcgccttgacctgtgagactgctatcttcttcagcagatgaccttgaaggtgcctaggagccagttagggcaggtggatttgctttcaccttggctcagcagtgagctgagagttgaaaagatgacccgaccacccccagcagcagcctagggacagctgacagagaaaagagaggctgcccagagtctcaggcaagctgcccatggggtatctccctgccctgctgagacccacaatacagctcccagaaaacagacagggacctcagaggggaatggccaccacccaaggctggttccatgttcttatttgccaatgagaaagatgccctatggctaagatgccctaccacttttttttttttttgtcttttttttctccatctcctccttcttcttttttggtgttgatagtattcagtagga

SEQ ID NO: 315913 - DNA, 4001 bp, Homo sapiens
aaatcttcaaccccacacttgtattcagtgtcaggcactcagatgctgcccactggacctggctggacactggccaaaacacacattctgggcagacatgcagtgcgctggcctccaaggcaggggccaggacaggagttactctccccacctacccacacagctcatgatagggcccaagcagactgctcagactgatgggaaacctcatgagtgcctcccagcccatggctccagggctaagcagacagactcctccacccaatgctcacacggcttagatccagctggccccactcacccaacttctgtcagcctggacacccacggggagcagggcaggaattccacagggcaactgccaccctttcctcaggaaggacaagggttgcaatggcactttggggtacaagccaccatcccaattgactgcaggattcaaacttcagacctcagtaggcgccaaaacaactaaagatccaagtgaatataaaacccagtggtgcaactctgagccagaatcctggaccacagcccatgaccacttccaggaaggcaaggcttccttcctctcctgcccctcccaggtggccctaaccctgtgcaacaggccactcgccagggagcttgaggggaagagaacagtcgggtcctggccagtcccaatctgtcttagagaagagaaggatgaccaacacccatgggaaggaatttggagcaggagaccagaagggcagggacaaggatgggtttgggctcccactgctgctctctatccaccgccacctcttccatccaggaagctcccagccttaggtagatgccgtaagacaagtggaggctgcactgggctggggaggtgtgacacctgggctttcactgtgcccctcccactgcctaggtcctgatgcccatcacagccctttctgctgcggcctgggaccttcccctcccggtgctgcagggagctccgcactcacgcatttaggtcactaatgtgcagcgctggggagtgccctctgagcacccgagaaattactttggttatggaactgacaattgtttccttccttctactccttccttctgtttggctgacatttccctctcaaaccctctgacacagggttccatcaggagcaccgcacccctccacaaccctctgccacggaaggtgtgcgaatgccccatctcctcctcacaaccctgtggacccatggttaggccgtttctttaagtgaagaaactaagtctcataaaggctcggtcttgctggggtctcacagtcctcgcaggagctaggatctggactagggtccttgagctagtcgctcaccctctctgagcctcactttcctcccaggtaaaacgcatgtcacaatacaatggggaccaaatccttaggcgggacacaaagggacaggggcctgggaggccttttgagaagctctgagcagagctaggcgtgccccgatccggcttgaggagcccagctcctgttcctccccatgtgggaaagagactggccccgcgtccgggccgcctcccggctgtaggcgctgggaccgcggggcgcagagaccccgcgcccagccaaccggacacagggaccaaagcgcctagcagacagggcgcaggagacgcccatcaggcggctcgcgcccccaggcacctgcactcaccgagggccccgaggaacagcaggacgaggaagacaagtttcatgtctgcggtctggaggcgacttggcaaacgaaggctctgccacttgcgcctgccctgcgcccctttattcagggctttgccccgccctgttgcccaatagacaccccttccctccccactccccgcggccaggtctacttgttccttgaggatccaggctccgaaaagccctgaggcaggacaggactccacaccgcgctgcgagaggaaagccagcctgcacctcacctgtcctggttctgcctggctgctgcgatgttctttctctcccactagtctgcaagcccctaggagtcgcagccccctgagccctgtcccagctctggtctcagtgccttctagagggcaggacacagagcagagggtctttacttgaagatcgccttgacctgtgagactgctatcttcttcagcagatgaccttgaaggtgcctaggagccagttagggcaggtggatttgctttcaccttggctcagcagtgagctgagagttgaaaagatgacccgaccacccccagcagcagcctagggacagctgacagagaaaagagaggctgcccagagtctcaggcaagctgcccatggggtatctccctgccctgctgagacccacaatacagctcccagaaaacagacagggacctcagaggggaatggccaccacccaaggctggttccatgttcttatttgccaatgagaaagatgccctatggctaagatgccctaccacttttttttttttttgtcttttttttctccatctcctccttcttcttttttggtgttgatagtattcagtaggaaatggtaacctcattttaacaatcgccataaatgtcagattttaaaattcaaaagctagaatactgcttctaagaatacatctcgtaaatacattcccatgacacacagcaccccaggtacaaatgtttccaggcaccactgcatgccattaatcagttggaagcaaactaaacatccatctctaggggagtgtcacatacagcatggtgcctgtgggacacattgggggcctcagaaagaatatcctgtgtgtatggatgtgaacttagcccaagagtaactaggcagggcacagtggctcatgcctgtaatcccagcactttgggaggccaagatgggaggatcgcttgagcccaggagttcaagactagcctgggcaacatagggaaacccccatctctacaaaaaatacaaaaattagcccagcatggtggtgtatgcctatggtcccagctacttgggaggctaaagtgggaggaccatttgagcctgggagatgaaggtggcagtgagccatgatcatgtcactgcactgcagcctgggcaatagagtaagactctgtaacccccaccaaaaaaaaaaagggtaactaagtgaagaaaaaaggtactaacagtgagggaaataataggtcacctgaacacctttcttggcaggtgagtctgaccaatatgtgactctgaaatctgcttattctgaaaagctggtcttgactctgcttagactacttggtactaaaaagcatttcctggagcagataggcaatgccccagggagccagctctgccaagagtgagcatgcagtgggcacctagccatggagaagcaggctcagcccaaggtggagaggccattaaggaggctggggagcccctccatttctgggcatgatcctgccaaggcacagggtggaggctaatcagggatcatgcttgcctgccatgagactggggtctgagatttggtgctagaatcaccagctgggttttggggtgacagatccaaggtctctcattgtttggaaacatgatattgcaccatttaaagttgccatcatcaataattgcaataagttctttcaaaaatactgaagaaatacaaaattgactaattcccaggagtgctgaagcatctttgtacctaaattggcaacaagactttgccttttcatcattataaaagaattaagaaacatcataacccgtgtctctttttctgagtccaaattttaaaaaaggatgactgggaggtcagagggccctgggccctcttaagtatgttacagtgttggcaagaacacagagaacctggggccactaccaagaggctcagcttaaggagtgccctgaaggcagcatgggtaggcaacagggcagactgttttcctgctgtgcctgttggaacagcccagccccagggcagggatgtgagcatctggacacaggcagagcagcccctcaaggccattt

SEQ ID NO: 315914 - DNA, 4001 bp, Homo sapiens
tttgtttaataagaacattttggctgggcttggtagctcatgcttgtaatcctagcactttgggaggcagaggcaggaggatcacaaaaattagccaggtgtagtggcatgcacctgtggtcccagctatttggggaggctgaggtgggaagatggcctgagcccgggaagttgaggctgcagtgagccatgttctgccactgcacttcagcctgggtgatagagtgagaccctgtctcaaagaaaaaagaaatttaacttactttttgtataatttcttcaacagcaaatttaaggtgatacttatgtcctcttcctggaatatcctaaaattaagaaaatgtagtggagacaagaaaatattataacaacattatacttgcattgttagaagtatgcatctcatttggttggaggggctggctgaaggggaatggtgaaagccttaggtcttgaaaaaggcatgtcaccatgaatgtaacatctaatttagcaagtcccctatcaagtttattttggatgaaaacaaaagagtaggataaaagcatacaaattgggcacaattcactttcaatcatcaaaagactttatttaacccctggatctgtgatcttaaagtctctacataagaaagtttgaaacagcgtttaattctaaagatgacaatatcacctttgaaaagattttttcataaagctcagtgtaccctccaaataatgttcaatgaatgtgaatttcattttgaggcagattactgcaaagcaattggagacttaatacaattaagtattgtttttacttatacattagtgaaactgcaaaatgattaacaaattatataagactaagaaatggtatttcacttttaaatcaagatacagattgaaaatttatacctaattctgttatctggtacagtttcaaaataagatctactgtgtcacctctaaaagactgttagcagttaaaattctgtcagataaataagggataatctcaaatccagtagattttcgtaaaatgaaaacaaacctcgttagtgattgctgaggccttaaacatttaattcaagcctttagcagagggtgcacatcatttaaggcagtcatgtggtagcggtgtttgggtggctaaaggccagcgtcagcccacagtgcttttattctttgactttgattgtcagtttctcttgctgtttgtttcccccttcattttggtcaaagggtctgataaggatttgtcttaaaatgtaggcaatagagtcttggaagatgggagcttttgttggtccagatcagagtagcagatgagaaacgtggcagccttagtagtcttttgaatggtttctacagtttacacttaaggaaagtgctgccccttacctagagcgtgttcccgttttcttgtaactgtgtgcgtaaaaactttgtctctgccttaaggtgaaaacagtcccgggctgtctccagagactggagtatagacattcccccagaaaccttaatatctcaagaccagataccagcagtgtgtcctaaaacagaaggtgggtagggggtggcacggagtgtctgcacccaaaggctgagaccgcgggtgagtggagggagcgcaatcctgaagcctctgctgtccaccaccccctgctaaactcacctccatgctggcttgtttgaccttctgcacctcaaacaccctgtgcggggtcccctgctggtagttgatgtagttctgtgccaccaaggccgccctggaggctgggtagttggtcggcgggatttccattccggatgagcagtgacttcagggcttgggctactctggcttaacgggaccagtagcagagcgccgcccgtcctgcttgctgctgggtccggttgccgaggcggaaaagtcgcaagctccttcagtcagtcttcttcctcagctccttccgactccggaagctgctgtttgggcccaggctccctgcatccgagagccctgggctgactgcttctgaggccccgccccactactgcctgcagcgggcttccttactccgcctgctggttcctactggaggagaggccagcatgcttgtcaggcaccagcaggtggaggtgtggggagggagtcagtgggctaggttcgctgggattgcatctttcgtttcattaacctttatagaagtgcagggtggggctttcgctgatataggacatctctgaagactctagtttcctgtccatgggaaaaaagtctggttgcttcgcttgcatactggagcacaacttccttatacaccgcatgcagcgtccctggcagggcaaggtacacagtactccaggtagtgattcgattccttcatttcccttccccttatgagagtccaggaagaggcttgctcatcctcagctttttgtgggtttggaccagttctgcccaaatcaaagtatgagaatctgcaaactatagtattaaattgggagattatgtaatttggatcaggagaaataaaaaaatgcacctgtacccctctcctttactaatcttaaaatgataagttttgatgtaacgccatgcttccaacttgagtcattttgaatattttacttcaaggattaaaataaacttaaaaactgaacttatacaaagcactctctctggtatgtggtctacctcattgcaatgggcctataaacctgactttgtagaagtacaggtttatccttggtggtcttaggttaattgggctaggataacttggagattctaccaaagtttggccaaggtcttcgctgcctggattgagacctttttttcttttcttttcttttttttttttttttttttgagatggaatttcactcttgttgcctaggctggagtgcaatggtgctatctcggctcactgcaacgtccgcctcctgggttcaagcagttctcctgcctcagcctccagagtagctgggattacaggtgcccaccacaatgcccggctagttttttgtatttttagtagagacgggtttaggctaggctggtctcaaactcctgacctcaggtgatccacccaccttagcctcccaaagtgctgggattacaggcataagccaccatgcctggccaggacctttaacttggtagtaatgcacacacccaagactcttgaggtgtatctctttctgattatgtagattctgcagtaaatctggattctggactttggcctcagtttcatgcttattattgtctcctgggatttgggggttctgattgactttgcctttaaataccatctgtctgcttgcccatcatcttgtatcaaatgtcaatgaaacttttctcagtcttgtccgtgtatgagaaatttgctttgcgagacactgtctttcacacatgacctttttttttttttttttggagacagagtttcgctctgttgcctaggctgcagtgcagtggcgtgatctcggctcactgcaacctccacctcccaggttcaagcatttctcctgcctcagcctccctagtatctgggactacaggtgcacttcaccacacctggctaatttttttgtattttagtagagatggggtttcaccatgttgagttcaggcaatcctccctcctctgcctcccaaagtgttaggattacaggcatgagccaccgtgcctggcctctccacgtttcttagttcagcatttgttaaaccctgacccacccatggcaatatttttgcaaatacagaatatcagccaattttcgatggggttgtcagatacgaacttacactgtctcctgggataaatttaccaaagaattggtgaaatttggggaactttgacatgaagaagactgttcatttgagagacactttagaagaacaccagaaataaaaaaataagactttcggagaacagtatttgtcttatttgtctaagagcattttaagtagaagactgcccatattttatttccatacttcaaggttttttattaataacatggcttata

SEQ ID NO: 315915 - DNA, 4001 bp, Homo sapiens
atgattgtcctgttttgtgctctgtcccattcctcagactagaatgtgcaattggaaattggaactcatcttcctcctggaataccccatagcccctagcactccatcgttatatatcaattggacaattcattgcaccctcctgtttgtcaccgttcacaggtgcatgtcttcctggctgtatacacctacaccgggggttctcaaccttggcacttgggctggaatatgcttagttctgggaacatcctgtgcattggattgtttaggagtacacctggcctctagatgctagtagctctgcctccaaattatgtcagacaaaaatgttcctatgggacaaaattgccccctgttgagaaatgtctaacttgggcaaaagttagaaataagtgtattcatgaattagaagaatcatactttcaaacgtttgttcaaactctcaagctgtatgattagttgcagacatgaccagtacaccaaatacagtatctaggagggccttgcatttaagagctcagacttgggaatcagattgcctgggtccaagttccagctttacccctcagtggctgagatatcagtgatcccagcagtaatcttagacaaattgctcaacctcttgattcctcagtttcctcatctgtaacacagattaaaacagtacttaattaattgtgttgatttgaagagtaagtgaattaaatatgcacagcactagattttacttgtatggacatttttcttagctctggttgcacccctgcccttttatactgatgtatcaaacctgtacattgtgcacatgtaccctggaacttaaattataataattaaaaaaagtgaatctcaatgcatgtttcatttcccaacagagcaaacaacattttctggtaatgtctgtcttccacagggcaggcatcatctcaactcgtagaaggcatactgagtcctctcctcccctctcccccagaagccagttcatcaggttcatcagggtgtgccatctacagttcttccagaacctattcgcctctcatcttttctgccatcatcctaatccagaccaccatcacctctaaggtggagactttctaactacactcctctactacatactcctctctgttcccctaaacccactgcccacacagcagttggaaaggcattttataaagcatgtgtccagtcacatcactaatctccagtggattccccttgcactttgaataaggtcccaactcctcaacctggctgacaagactttctgatgcagccactgagcacctctccagtctgaatttacatcactctctcctttgttcaccttcactctgccatagtcaccttgcacatttcttttccttgaatatgccaatttcattcccaccacaggtcctttgcaccagccattccttctacctggaacatgactgccctgaccaccacatacgagctcactacctcaaagaagattccttgatcactgccccatcaaagaagacggtctttattttcttcataccattaatcaatatcaggaattccattgctcatttatctgttcacttgcttattttctctctcccatacctgagtgtaagcaccaggaatgcagaaacctggtctggttttttctcttcattatccccagaactcagaacagaacctaatacagagtaggtgctcaatgaaactttgttgaatgaatgaatgaacaaaaacctcctcttcccaactgaactgtcatcaaataagcaataagtgaatttgctgatgagcttctcctgcagctgggtattgtcatgcccgttaccctcctgcccaccatatacccgcctaccagtccaccagcccttccaaaggctggcttttggtgcctttccaaggggaggggaagaacagccactgcagcagcttcgacgtgtgttgcagggaagttgctccacctacatttggttccttgggtttttcagatgctacttcattaatcatccacttgtctgcacccaagagttctccatgacatgctcttctagaatcctttctatgacatcagttgctatgcaccaggatattctgaaaaagggagggtctgtcactgtcacatttgtattagttttctattgctgctgaaatacattaccacaaatttagtggcttaaacaacacaatttattatcttaaagttctatagccctgaagtcagaaatgggtctcacaggcctaaaattaaggtgtcagcagggctgtgctccttcccaaaggctttagaagaggattcattcccttgctcattgaggttgttggcagaataaagtttctgcagtcacagggctgagttccctgtttccttgctggctgtcggctaagggccattcccagctgctaagcactgtctgcatttcttagctctgttgccttcctctatcttcaaagccagcaagggtgagtcaaaccctctcacactttgaatttctcttgcctcttcttctgtcattgtatctttctgaccctcttttcttcctccccttccctgtctaaggactcatgattagattggtccagccggaccatccaggataacctctgcttctcaaagtctttaaccttaaacacatctgcaaagtctcttttgccatgcaaactaacacattcagaggttccaggggtgagtgttaccgaacaaaagtgattcaatgcattggaagccaacgctatgacactgggtgtttgagaaaaggctttttattgaaatataaatatttaattttaaatatataatcaatatattgtcgattttcaaggagacagcagtgtcaacctcaaatctgtctcctgtgatgcagtatttttattagaaaaagtttaggggattctaagattagtaggtgatttggtggaagaaagggaagggctggaaagtcctgggtcatatgcagttatctcttcatactattttatgggtcccctgggcaattatggggaaagttagtataaagcacatggtggaaatttagtctgtgacatcagcaagctggttctgcctagactctggtcggccatcttggttccagctgatttcagccagttcttatatctcataagcagagggagtttcagtatttcagcaagttgtttcttttcttacctgccatcctgcaaactcaagaatttctgttagtcattggtttttttaactctttggggcatggcttcattaggacacctttgggagatcagtattctgcctgctacagcattcttccgggccctcataggactgccttctaggtggaacagtgggagaagcccttatgtagctttcctagtcaccagagggccatggtcaaagacatcctctcttggggcctgggcatcttcatctgtgacttgagggcatcagactgggttatctttaaggtccttttcagctccaaaagttaagagatattgagatgattgagggcaaattggccttttgaaaacacattagtctgtctggctgactcaattagaactggtaattagtcgattaattgaaaattaataatgtaaagaatcataaaagaaaaactaaaaccaggccataaacgctgaggcttaaatccatacatgcctattttctcaacagtctttagtgttggctcagctggaggctggttggcagaaaactaaggtgttttcacagaaatcagttaatcgagaaacattccatctgcagaaactcccacctctgaaggcataatagtggaaatattctcctcatccacagcggtagacagtttgaaaaaaaaaaaaaaaaggccacaattttacagtcttctctgtatctgtgccccttggctttgcaacttagctgctcccatcaagggatgccatccactccccaccccaggggttgggttggcctgtcttgctctgacaatagatcacagtggaatgaggtagtactaatcctaggcctcaggaagcctgatggcctctgctcaccctgagct

SEQ ID NO: 315916 - DNA, 4001 bp, Homo sapiens
acccattttcaaagacctttgattctgtgtaccgaccagcttaggaactccctcctaaactgacctccccaacgcataccccctggatactttctccatttcttaaaatttggacatgtatggaactcttctggatttggggaaggggatgtttttccactcagaaatgatctgccagttggcaccagaacccttgaataaaaatataagccataaaaaagttatggttgtaaactattttacccttagaatagttttataccaggggattcatttagaaacatcctcctctccaagactgaaatttccatcattgcgccctagtgcttgggctaatggatttgaggaagacggcctggttccaagattcaaggatcacaggtagagttaaattaggagacagatcaattagttcatttcctcctttcctcaaattctaatcaaaacagtggtgacacagcaacgttcaccaggaccacctgctccagcatcacctggaggacctgtgaatggaccagacctgatgaaccagaattggaatgggtggtgcccatggatctgcatttttttttttttttttgagacagggtctcactctgtcccccaggctggagtgcagtggggcaatcacagttgcagcctcaaactcccaggcttaagggattctgccacctcagcctccccagtggctgggactagaggcgcctggctaatatttgaattttttttggtagagacggggtctccctatgttatgcaggttggccttgaactcctggcctcaagtgatcctcctgcctcggccacccaaaatgctgggattataggcatgagccaccacacctggctggatctgcattttaatatgccttcaggtaactaaagcaagagaaccttctcctaagaatctctctgcaacttccttttatttactgacacctaataaatgaacagttgactctggagcaaaactgagccctgggtgagtcttgggcttttcctgatggctcaatacctgaaactttcataaccaaagaagatgggggcctgatccaggaccagttctggtctccttgtccttcttccactggtcaccttcagggcatgaatgtgtggtcctctttctgagaccacccaacagctgggtggcgtccctgctggtgcagaggagctgcctcttccaagaccttgggttccacataggaaccctgtcgctcattcacaagcgtcgtgggaggactggactgaggctgctgcccctgctgcttgtgaaagcatgcagggccctgtttgtgaaagcttgcagggccctgaagccacctctgaggcagaggaacaaaccggcttgtctttccacatcagcagtcactgcctttggtgtctgttccctcaatggtccaggcttccttacattaaagtgctgcctccaccagatgcatggggcagcttcagccacaccgacaccgtcatttctcactgcccctttcttccaatgagaaagatggcttctgctaagcagccctgggtccagccctccttgcagcctttagggaggccctttctgttacccctcttttctcatcactgctttgctctccgatcttttatccccgcaccgcccacctccgccccacccttctccctcaccagctttcctctctcaagccagggagaagacagcacctgccccactgacctggaagacggacgttttggcctcccagaaatggcttccttctctcctccgaggctcagtcagagtcggccttgggagcagaaagcgggggagacctcctgaaatcattttttctgtgatgattctatggacccacaggcccgaagacagacctgtcctagaaacaaggacttccttttggtaaggacactcatgcatctcaggttttgttcattttttagctaaaaaagacttaattcattcaaggctttagatggggctgtcaactcttagataacctcagtgccagcatggtgggaggtgtgaggaaaccacactagtctccgacctccccagagcttgcaggatgggggcgggaggaggggacacacatcaaagcccagaggttggccatcacccttctgctcgcattaccatccttcttcagaaaacagcgggtgtgggaaaagtaaaaggctgacctttccctcacccctaacccactttgaatgtctttcataattgctatgctttccccccgcccggcttttgaggcttcagcttcaactgctgtctcaaaaaaagtccgttttctcatcttgggctactggtttcaccatctgtttgctcttcagatgtgtgtgggtggcaagaggagatttttcccacgcgtcttcaaactgaaagggctgaccttgctgtgaggagccttctgagtcacccaggagtctctgcatcctcagccctcacccggcagagtggcagggaggggcggggcacctctttgtgccacagagcctgtgaacactgaactgggcccggattacctggaatcaagcgtggggcttggaaaccctccagcaaagacttgggtcatcttgagttattctgcagtttagcagggtggggtgaggtggaatggaggattttgacctggaggtccccagatcccagccccagatgcacagcacacacatatatgtatgtctcaactgtttcttgttctagcccccagcccatgaggcccccaagcctcaggaaggactgttgtattaacaaagaaactctctggctctgtcatttggggcaggtggagtaactatctgccattactgcaatctggttactagatagatacttgatctgagggtacctttttatttttttgagacagggcctcactctgtcactcgtggagtggcatgatcttggctcactgcagcctctactgagttgggactatagacatgcactaccacacctggctaattaaagaaaaaaaaatgtagagacggggtctcactgtgttgcccaggtggtcttgaacccctgggctcaagcaatcctcctgccttggactcccaaagtgttgggattacaggcgtgagccactgcgcccagcccaagggcatctttgacataagagggggtgcagggggtgggactgagtgaccagctatcattgcctgtatctcctcctgcaggcccaccctttccctcctctgccaccggagtgtttcaggagcctctattcctggcagagttagtcgccagtgggaatgctgatgactttttggcgacccagggcactgggactgacccgagaggtcaattcagtattttttgagtcccttcctgcctggcatgttgctcgatgctgcggtggggagagaagggaggagggagatgaagataaagatgaaggattcactgtcttttatccttgggagagaaccagagttacagaaaatgtgacttcttccatggagtaacagattaaagaagaggccaaacgaaagtctggcagcaggagagggctggcggaggaagggcggtgaaggggtggtgtggggaggtgttcttttgaggtgcagagcactgcagggacagagccctggtcatccctggagtgggggtgtgaggtgagtgtgggtgggctgcccagcctgagctcagtccaacatccagcagtgaccagggcatgcccctctgggcctctgtccaggctctttgctgacccagccagagaaaggtatgcgggaatgggagggctgacttcttcctctgccagccatctcagcctggcagtcttgcccagctttgtacctcatattgaccaatcatggttttaggccatccatgatgcttctccccagccccattgttccggtaaactcagaagtctgctctttgctcaacatgctctgtgggtgccctgggagatctggacatttgagctgaggctagaagcccatagggcacaacagcatggattgaaagacaggctgtctcaggcaggtctaaacaccaccctcacagcaggcca

SEQ ID NO: 315917 - DNA, 4001 bp, Homo sapiens
ctgtcccaggaccaagaaggaaaaattactcaaactgagaagggtaaatgacagaaaagttcctttaaaatggattggaatgaagaaagggggtaaaagtggacagctgagttcaaaaggaaaaatagcatcagcctaggaaacggctattcacaaacctttacttccacacatatactatatgtatctatgtcaaatcattagagaggaaatggaataggtagatatgtggtataatagacaaagcactggattagaaaccaggtttaggtctagctatgcaactatctaccttggtaacagtctgttaccaagtcacttaaccccaatgacattagttttactatctgctaaatgagaggtagatatgatgatcagtcctaaaatggttagaaacaatgggaggtatccaagtggggaagtcagaatttgtttgaattttattgtagaaatattccgttaaaataataataaaaagagctgaaaacatacagcaagaaatcctgccagagcattgccaagctagtgtcttgaaattgtaccacaaattgtgtatgtgtgtttagggggaaggggatagaagagaaatgggtaaggtaccagaaagggttccctgttcttaaccatgcccacaaatccatatacaatttaagataagtacaaggaggaaactgtaatgataaaaatgagcacagtttaataatacctatcagatactgaatgcttaatattttcacaggtactgcactgtttacacgcattatcttacttatcatattaacagtcttgtgtagttattatctgcaatttactaatgaagaacctgagcctgattccaaagcctcagttgttaactgatggaaaggaatgacagaagatagaacaggaagagataccaatttttttgtgatttgttttcaacgtgttctcctgatattttagggaaatcaagagaatgagtggagaggctctaaactcaagaaggggagggagcaatctgtttagctcacaggtgtcttctcagctcccagacagcgcttggaacacagtgtggactaaatagaaattctggttgctgaagtatttcagtagctatttcaggtggtgctctcaaccctggtttcatccgttttcctgaacatttcagtgctgtgcactgttctaagtatgactggtatttaagatggcatgctatattcgctggagggattaatgatattttttgagcaagccaaaacaaaggaaatgtcacccaaattcctcagctgtaatacggggtgctgggattcttaaagtcacctccacatcagaaagttggatttcaatcacacagaaagctggattcgttctccctgctcctctggttaccgcgcgcgcgcgtgtgtctgtgtaaaccttagagcttcctgaaactgagtgagaaccctgcgtatgtgttaatgtgtgtgtgtgcgtaaacttggagcttcttgaaatagagttaagaaccctgccgtgcaccttaggccggcagcagtttcctctatctctcctcacctgccacctaagagttgtgccttggctccagcccccgcaggcaggagagaaacgaagcgatgcggcggagctgggctgctgggaaaaggcttcacccaggattaccccagaagggcttgggctgcggttaaccgaatctctcgcgcccggcgcagctccccttctcagggaggctgaggtgcggccagacccaacgaggccacgtaatcattccgggcccacccgctcagtgtctccagccccggccgcgctctctcctgtgcgcggtgcggcgcctgagggtcggttactcaccatggcggcaggcagcggcggcagcctaaaggaacgggagaggccaggcggtgccccgccaagcctgggatcgccgagggtagttggaccacagaaaatggggaaggagggtaggttgtttagaagcctctggttgctaacggaaaccgaggcacgtggactgcaattatgcattttcattggtcctcaggatcacgcgacaggaagtattgcgtaaccggttgactgccacatgcgcattggcttccagggccggaagtcccacctttttgtgccagttcacttttgggagctgactgcagttgcagaaggtagcgggagggttgggctgcctggagttgcgtgtggccaccaacgcgcttcgcgcctcgtggcgtccgcttatggattgttgggaagttcttgtccagaacttcctgtggcataggtgaccccaaggatgaatggacatcccagacctttcaatggtctcatagggcgcggcccagacatttttttttttcaggagttcctacctgagcatcagggtggctgagacaggccaacaacaccaatgccagcaggttctcaaatagagcttcaaacgacccctccccatgactccgcccattattattactgtgttgttattatcttctcttatatttccagctaaaagtctctagcaacatttttccatttaaaaaaaatgcaaaaagcatgggttttctccgagagcagtgaatttcaaaaggttccatatgcctggaactactatggaagcttgttgaacaaattcctgggccttatctccagaaattctgattcacaagtctagcttgggtccttgggatctgcactttttaaccgatgttccaggagtgatcacagatcaggaccactcttagaaacactggcttggaaggacaagtgtaggatgagatcgattattgcaaataccagggactcagagtccttcactcacatgatacagaggtgatgtgcaggcatttgcccacagaaggatctcaagccttgggtcaagaacagtaaacaaggttctcctgtgtgtcacctggagcattccaatgcacggaatgatggcctgaaggcagtggcgtgggtatgcccaacttcagctttggctaggctccctacccttggcactgcaatggcatttgggcaggatccctgtcttcttgaaagattcctaagggcagattctctcaaccctgaatattaaccccttccaagctcagttaaacttcccctttaccatcccacctccccatttctgtttagtgagtgttgttgaatttggttgccattatttagtgcctactatgagctattaatagacacattccattccagtagttaatcctcataatacgtggttctttcctctgtagacattcgttgtgttcacatagtgagagggtcactttacaaggtgttgtgggtgcgagatgaagttcataaaaacttttatgactgatcagtaaacaaagttggtcatcagcttgcactgctgaaaagctcgtttattttctcccaggccaaatcttgtgattgcgaagtgttatcaattcaagggaatgaaaggagcgtgtgtataatgcaaatattacatttgtggcttggggattttaaaatttgttctgcaaaactccatcagctagttattgtaatttaaaattctgctttaatctaaaatcttctataccaaggaggttaatcaccattagccaatctacccaacagagttgagtgttgttacataagctgtctaaatagtgtcagcaaatctgaacatgaattttagtctcaaaagtgatgaatttggctcatgaaaaggctgaacttgtacttcaggttgtttactagtgcgggttggtcaccaaagcaaacaattcgagccgtgagggagaacagctccatcctactttactagtgatcttcttaggctctgtttttatttattttaattgctgtgacagttttttaaaatgtgtgtatgtgtgagtgtatgtgtgtgtgtaaatttggagggaggcacacaagtccattttttaccttttagcagagttcaacataaataaaatgaagataaattctttttatattattatgaaatgagacttatgactttataagttcccagtcatcatactaagaccaccagtttcagg

SEQ ID NO: 315918 - DNA, 4001 bp, Homo sapiens
atcgttgtgtaaatatcagagggtacttaacataaacctagctggtatagcctactccacacctaggctatatagtatagcctattgctcctaggctacaaacccatacagcatgttattgtactgaatactgtagacagttgtaacacaatggtatttgtatatctaaacacagaaaaagtgatgcattgggctacaatgttatgacagctacaatgtcacgaagtaattggagtttttcaacttcattataatcttatgggaccatccttatacatgtagtccactgttgaccgaaatatcattacttggggcttgattatacatagaaagaaggctagagttgccagataaaatacaggatgcccagttaaatttaaattcagatacacaatgaataattttttagtataaatgtgttccaaaatattgcacaggacaaaaatttatactaaaatattattcattatctgaaattcaagcttaacggtgcctcttgtatttttatttgctaaatgtggcaaccctaacaaggtgaaaggtcataaggtcaaagaaagaaagcaggagagcacagcatcttagttctgattttccccatccaggttctcatccgccctggctatacttcgcttcctgtccatgactagcggcgagattgttttataacaatccaaacttttatttgatctactctgagtgaatttctgttcttagcaagggacatggaaacatttagcaattcctctgcaaaagagacacttcggcatcaaagaaacaaccagcttaataaatactttggggagatgtttgtcctccttctcaaattacccgtgaaaaaaaaacatggtgatgtgtttacaggagctaacttgatttatttcacaaaaccaagagtaaatacagaaaaacactggccagaatatgtcagcaatcattacacagcctctatctaggaatgtgtaccctagattcccacacaaaggagactgggattcccagaggcaacaccacattgctgaaagcaatgcaaggttcaggtgaaaaacctgggattgcagagggcaaaattggaaaaaatcatgcttatagctggttacagttcttgccacggcaaattcaataaacatttatttattgaagcgcctagtatatgtatcagcactagaataggtgctcagaaggctacaaaaatgtgtagaacaggaacttaaggaactcaaggagcgtggagagagagaaaacataaaatggacaaccaagccgttaaaataaactggggttttattggcccaagaggagccagcggacccagtctataagcaatgctttgacgcagaagttaaaaaaaacaaacaacaacaacaacaaaaaacctaaaaacaagcatgggataaactggcacttcttttcgcccaacttggatttgcccagagagttggagagaaaagatcatttttgtagggcattttatgcaggaacgttgagtgaatctccgagtgtacaaatcgttgcacactttctgggtaccaaaacgcccggaacaggtttcaggaaaatcgccccccgaagcggagcgcacccgcgcctttcgatgtacccgaacccccgaccccaacctgagtgcggccacctggagggctcggagctgcccccacccgaccaaggacaaccgtgggcaagaggtcagtccagagggtcgtgtttcgttcgccatgcccctggccaggtcccaccatctgggagcccacctggcctaggaggcgacggacgcggaggaaggtctgcggcggtccttaccgtacagaaaatcatacgctcgattggaggagatgtggctcccagcccgcgacctctcccggtaccgagtttgagacacctgcggctgggcctggggctcctcgatggttactgcgtggctcatggtgccgcctctttcctcccgccagcaagggaccagcgggtcaggcctggctactgcgtgcacgtcgctatggtaacggccgccggcgcgcagggatagggggcggggcaaggaggagggaggaggccgcggggcggggccgaagaggagtggagagaagtgaaagcaggagtggccaggccagggtcaggaggagagtggaggggaagatgagaagagaggggaggggcaggatgggggaggaaaaggctggcttccctctatactccagagccagcggggaggctgggagaaagctactcttaagtcattgatttgccagttacacctcgtagcctctcggaaatccctgggagatctcagaaccttctagaataattgggtgcctccccgcccctccccccagcccttttccagggggcttgtcccgagagctgcggaatccagtcaggttcctaaatgttgctccttagcacgctgtgaactttgccccacactcattagcatcagtgtttaggatgggttaggacatcagtaactgttgatctgagactgctgaccctttctgagtcctgggcattaaataacagaagatgatgtggggtaggcactggctctgcttttgaaaactatttataatggaaaattttaaacataagcaaaagtgattctacttttaataacaaaccctcaagtaacccatccctcagaatcaacatttagcaacattttgccaatcaagtttcagtttccttcccctcttttttaaagaaatcctagacataatattattttacccttaaattagtctgcatctcaaactgacatagattttaaaaatttaactaccgttatcatatctaacaaaattaacaataattccttagtactataaataattccaattttcctgtttgagtccaaattatcttttatagttggtttgttccagtcaagatccaaaaaaagtcctcatgttgcattttggtatgtctcttaagtcttttatcctagagcagtgaatttctaatcctttcaataattctctattattaccagaggttcttctataaaaggaatcttttcataccaactcattggttatcctgagataaccaggataatctcatagaggaaagactgggtaaatgctggatttgttctttttaattatgaaatttcagagacatgagttggtgccctaccaaactccagagttaaccacaaagtttttgtttgtttgatatcattatgaatgcatgcattttttacagatctgatgttttaatccgttatgatcattattatttattacactcagattattaaagctaatggcatgccttagagttggcttctttgtcctttaatgttgagacgagaagtcttcttccgatcaaaggtttttctcgatcgaagggttcatggtctcacaggcttcaaggaatgaagccgtggaccacagtggcaagtgttacagcttcactagagaaatgcgtggacccaaagactgtgcggtggcaagatttattaaagccaaagcaaaagtaaagggaaagcgaaagtaaagcttccacgtggtggaagggaacctggaagggttgccatttctggtttgggtatcttatgtttatatccccttatgactcctccccttttcctttttctgtcccataggattaggttattttctatccacttgtgggtttgtagccggacgagccacagacaagaaccgctcagacaccgagttatggaaggaaagggctttattcagctgggagcattggcggactcacatcttcgaaaaccgagctcccggagtgagcaattcctgtcccttttaagggcatacaactctaagagggtctgcgtgagtgggtcgtgatcgattgagcaagtagtgggtatgtgactgggagctgcatgcactggtaatcggaacagaacagaataggacagggattttcacaatgcttttccatacaatgtctggaatctatagataacatatcggttaggtcaggggtcaatctgtaactaccaggcccagagcacagtgctgggctgtctgcct

SEQ ID NO: 315919 - DNA, 4001 bp, Homo sapiens
ttacaggtgtgtgccaccacgcctggttaatttttgtaattttagtagaaacagggtttcaccatgttggccaggctggtcttgaactcctgactccggtgatcagtccgcctcggcctcccaaagtgctgggattacagcaaacctcactcaatcatcccagctgggttaagtatccctttgtagacttcaactcattgcactgctaatttcttgtttatttacttactcttcaattctgaaaaaaagtaggacctttatcttgtttagtattctatccccaagtgcccacacagtgcatcacagaaaacaagatgctccacaaatgtttaatttattaagtgtgccagggtatactgctaactcattgcattttaatttttctctagatactcaaatagctaagcaaatgaaggtacatgccagtctttcttcttttatacacaacagacaaaagtgttggggggctagacaccaaccagctatttttttcccctggaaccagatcatcatactgctgagttccttcaaaccatcaaagtacagccttccttccaatgttgcataatctgttcaaaatcacagtataaatacaaagttcttccatccattttacaaaaccagcaaaactctacaataaaatcctacaggaaaaagtagaccaatctcatttacaaacagcattttaacagtaattattaaatgttacaaaacataagatacaaaatctaaatccttaaagtcacacgatttctacagaaataagaccctcgccccacccatattacttatgactcaggacagtagttcgtcctcacggggacccactggccaacttttcaccaaccctcaccagaggtggatgccggccctagcactggccctggccctcatactggcttcagctctggccttggctctggccctgtcggcctcgtctgctagggcctcacggtactgcactggccagtgctgcggttccttcttatgcagtttggccacgaaccccaggacttccatcttgctgatttccaggttgcttcggggaccccaagagaattcatattctggtggattggtgtgaggcacccgcctgtaactgagatatcgctgctgcacaaaatcttccataataagcctcttcggatacccaaagaggaaatgatactttgagggttgcacccccaaccgacgcagcatctcccagacctgggcctccctggcgctattacctctcatatagataaggcccaggatcatcattaacagacccaatctggggccatctcctcccagatcctcctcctcctcctcctccagaggttttagtttgttgatcaggatgtaagtgtggtgcttgcggtcaaactgtttcagctcaaaaccaaagacataccgcagatgctctgcggcccttgcgatgatgtccgggaacagaatcttcaagtctccaataacgtatttcaccatctccgagcgtgtgatgggactcttcttcttgtctttcaccaggaggaactgcaccaactccgccaccgtccgattcagccggcggtaggccctgcgccttgccaaggctttggccgccaaggccctcgcgcctttccgggtgagggcgggctccgcagccccctcctccctcccggcgccaagctcctccttggggcgctcctgcgaggcggtcggggcccgggtctcaccatcatggccgccatccttctccccctcggcctgcgggaccgggagccccctgctctctggtgtctgcaacatgttttcgggcaggcaggtgcagagcgcgtacacgggccgaggggtgtgggagccgccgcgcaagccccgggggaggggttggacagcggcagtgacggcgggagtacaaggagcaatggcagcgggagctttgtggctgctgggccgcaccgcacgggagtcaaacctgcggccgcaacgccgccagcagccggaacctgcggcgcgcagcctcagtccgcgcccgcgcgaggggccacttccggccacctcagccaggacggcgaccctagtgccgcgcgcagcccctccttttccggtcccttctgggttgggggtgtgcccaggctgctataagtggaaatgccctggagggtggggacgggggtgcgccctgtgacggattttaggcttgaaaagtcgggggcgggggaatgtaaccaggactctcccatccaaggcatgcagactggggaatgtttcggtgtacaagagatgaaatagggatggagtgccccccacgttctttctgcaagtgcctatttgtgagtgtgtgtatctgggattttcagtgctttaccggggctcttgtgcagagtgcacggtgaaggctgcgaggtaagactgtgcgaaccaattagtaaaggatgctagggagactgaaatttattctggacgtaaagagaaaatactgcagcgggatttaagcaagtgagtgtccagaccagatctgtgtcttcggttctggcggtattgtggaagatagattggagttcggccggctaaaagctagaatccagtttggaggattattatagtgcaaactaggaactgggacccggcctatttactgggttgtatcctcggtgcctagagcagtgcctgacacggagaggaactcaataaatattcaatggatcattatgatgagggagtaaggacagcagattccatggggataagaggaaaatactgagaagtacagcaggaatagggactggttggaagaaaggggaagtttgttcttttttttttttttttttgcgcaagtcaaatttgactactcccatgtatttcttttctttttctctttttacacactctgagctttcttctgcttcttgctccttccttccttctttccttccctccttccttccttcctccctcccttccctccttcccttcctgccttccttccttccttctttccttccttccttccttccttctttccttccttccttccttccttcttccctccctccctcccttccttccctgtcagaaatgccctctctatcacctccatttctccaaatcctgtccactattcagggcccagtttaaacatcaccttcccaagccttccttagtcaccacgcatagaagttatttactgtcatctctgaatcaccttagcaattgttaacatccacatatataggctttattaggtgccaggctccgttctaatcacttttcaaatattaattcatcagattctcactaatgtaggtactaataccatcatccccattttatagatgattgtatcttttctgtgacacagtttgctacttactagctatgtaatcttgggcaagttacctaaacttctgcccttctgttaccttatcagtaaaatgagtataatagtagtaacagcattgtggagattatgtgaagtaatgcacataagcatttaacacagtgcttggcacatattgatattcaatacatgttagctgttaattaatgcatatttttatatgcaatatacaatattagaattgcaagatgaactgtcctggaatgcctagcactctgtggagatgcggaggaggtgtcctgggacatagcactgaaccgggtcagtactcacccattctgtgaccttgtacaggatgctcaaacaccctgggccacttttttctgatactgtagccctgctaggtaagtggtattagccccattttccaggtgaggttacacacaaggaggttaagtaacttgcccaacatcacacagctgggatgtgaacccatatagtatgactccagagactgtgctcttaaccactacattcatagatgttaattattattattatcatttactatattttgtattataatttgttgtgcttatcttattaccctccccaaaccaaacatcctaaaagctagggctatgtttttaactcttttgaagagcttctcttagtcaatactcgatatataattgcc

SEQ ID NO: 315920 - DNA, 4001 bp, Homo sapiens
cttgcacaagggagccctttaagggcctcagctggtctccattgggttgacatgaggacagccccttgtctgtaccaaagtgagatgtaagggacctacatcaccagcagccagcaaatgcatcttttaaaaggcctctacagatttctgagagaggaatttgcttccactccctcctcaggaatcagccccttcagtgcggtagggtcatccccccactccttcctcctccatacttaaggctctgcagcaagggctcaaaccctcgcttttggcaactgtgtgaccttgagcaagtcacttaaccagtatcaatcccagtttccttatctctaatttggggtatataaataagaacaactcgttcttagaactgttgtgaatcggagtgagatagtgcaagtaaagtattttacacagagccgggcatgtagtaaaccaacaatgaatagtagcttcattttcatcatcaataatgacgatgatggtggtggtgggagggtaaacttggacccgattcgagctaaaagcaagcaccccttccccctctccccctcccaagtgtatggctgagccacacggtggagacacatgcgtcatccggctgaggggtgaatgcaggctcttctggcggcgggctcaggaaccgccaggcagtggtgtcctagctcacctggaggggtcgcggggtgaagcagattttctgatgggggaggtccaataaactacagaccctctctttctgtatacccactcagcaggtatggaaactgactcgtggccaaagaacgccagctgcatccctcccccaaggagccaggacagcgtccaccatgcccctgactcagttccccaactctctctcgggtgcaggcgagactgcgctgcacttagtggcggagataacaggttggccagccaggcctgagaaacgtccccccgctaccttgcgcaaacccagccccctcttcgaaacgcaggtgggcaaacaaccctcaacctcgcaacaactttgtgtatttcaccgccaccacagggcgcacggcctcaacttctcttcactgcgctccgaggagggaagcaggaaatcgagaataaggggcagcccacagaccaccctccttttctcggggcgccccccaaaggcgcgccctgccttaccttgtctgacggccttgaaggtgacggcctccttgcagctgtcgatgacccccagcacgtcatagcggggcaagccggacacccggaccccctgcacctccagaagcagctccccttcgcccagcctcgggccctcgccgccgccgggaagccccgctgcctcgaccgccgccaccgctccgacgtacggaaactccccgtgctccgcgcctcccagcaccgtcacccccagctcgccctggggtccccgcttcacggtgcattcgtgaaccctgctagtccagtggttcttcttctggatcactttggacatgatgagttacacccctcctccaaaaaaataaaacgagagacaggtgccccccacagcacgagcccccaagcctccgcttgttcatgggagaaacatctctccccaaatcacaaaacaggagagagaaacttggcagcctcgctcccctgcacacgctcgcgcactcaagccatcataaaacaaactttctgggcttccccgcgagccccgcacaggcgcccgcgagctttgtttgcattccggtgcctctgggtccacgttccggcgcccgcccgtgctctcccggaccagagtccactctgcgccgctcgggttatttttttttccttccttcctttctctcttgccttttacaaatgcggtgcctcctctttgcctcccgcccggctcgcctctcctcgctggcaggctgttactgagggtgagggaagcccttccagccagttgccgggagccctgaagacgcggtggcggggcggcggggagcagggcgggaggtaagtgctcgcggcccctttaagcagatacaaaggctcggcttgttttgttacagttcattctattccgcgccgcggagcgcagcggccggcgacaggagacgcgcgcgcatgcgccccgcggccgccagccggccggcccacccctcccctcctccccgaagggagagattccaacgtgcttcccgatgggtcctaaaaccgacctgccgggagaaggcaactcccccccaacccttcctgaacccctatcctctctccttttctttcagtgccctggactccgcggattcctttggggctggagggccgcacacgtgttttactccaactgtttgcaacttttgaaacccgggcaatctggctttggcatttgaaaaccatttcaaacaggtgggggttggggaggctgccacactcaccctggcgctcacactcacgcacacgcgcacgcactcgcgccggccctaagcctcctaaccgccctcggccagtggctggccaggctgtcggtcacccagcccggctggttcgccgccccccttgccgcaggtcccactgaaacccccgagacccgccccggggcgctcgccgcctccctgcctgccctgcgcttgcgggttcgggtcctggcgcggggtctgccagggtctctgcgacccgggggagggggacggtgggatcctccggttccccaactgggatccctgtgcgggtcacacgcgctcttacacacacccgcatccttaaactttgggaccaactttttaggacacgggaaactacaggcaagagagagaagccatggtgctagtgtgggttcaggtattcaaccaaaaaagagatccctctagcttttcaactgccctgccagcagagactgctggacccagtcaatcatctgccccggcctcaagttcctggcagggccgagaagcctgcggacctactccggggccaggagataaggatccccgccgggcgcggacatgccctgcgtcctggcgcccgcgggggcgtgagagaactcggaattcgcagcccgggggtagctgcggcctccggaggtcgcccgggggtgcggatggagtgacttctgtcccggcgaggtggcggacagaaagactcccataccacaggaaggctgcccttcccaaatactcctcaaatcaggctgctgagtagtctccccagcagtttgttttcctctttagtgatgtataattttgttcatctttggtcacaggagagattccaagaaatgaggggggtacgttgaaacgatgaagaaaggatggacacagcagtcgaggttgagaggtaggctcaggggtccacccttgtgtgaccttgagcaagcttggtgacctccgcgcctccgtttctcgctgatcaaataagtagaacaagacctcacagggttcttggaagtattacgtgggaaaacacttataaagtggcaaataataaaaactcattatattcttaatagtagtattactatttgggaagaaaattgggaaatcatttggggattcaagttagtaagtatgataatttatcctctcctttctagaacttagaaaatatgggcatactttgtgtgtttgttttttgatggtggtggtggtgtttttagaaacgtggtcttgctttgtccccaagctggagtgcagtagctcgactagctgattgtaacctcgaacttctggactcaagcaatcctaccacctcagcctcctgagtatctggaattataggcacatgccaccatgcccagctagttttatttttttgattttttgtagacatgggggggtctccctatgttgattgcccaggctggtctcaaactcctgggctcaagccaacctcctgactcagcttcccaaagtgctggggttatagatgtgagccaccatacctggtttaggcatacgtttaaacatccttttaaagcattgtagggtgctattctaagctaataaaagtaaggagggatgttgatgcttctctcttgggatatccag

SEQ ID NO: 315921 - DNA, 4001 bp, Homo sapiens
ggtgatccacccacctcggtctcccaaagtgctgagattacaggtgtgagccaccacgcctagcctaaaaatttttttgtgcagacaggatttcaccactttgcccaggctgatctcaaactcctaagttcaagcaatcctcccaccttggcctcccaaagtgctaggaagacaggcatgagccaccgcacctggcccacagcggcatttttcggtgccctgcctgtactggtagtcagattcagccagtgtaaaccctggactcttaacacatgctcagtccaagctgacagccaccaaatgaatttaagtgtcaccagggttcaaacctttaacagagagaaaagccagagactgtcagagaaattcaagttagaaaacccattgcttcactagggcttttgtcttggattcggcccttgcctatcctgtaggcaccctgtcaccttctcctgtccacatacatgccacactctttcaggcctctgggcactcacactgctgttccctgtatgggatggtcttaccccacttcaatgataacccttcctcagagacttcttggccactctaaatcagcacctgctggtccattttcttcatgacacccagacattgcattatttgtgtgtccgactgtcacttctttcccctgatattcccagtgcctagcacatagtaggtgcttaataaagactaacaggataaaaaaaaatcacagttgcagaacacatgctgctttgggaaggacatagaagcacttcagtcttctcacattagtttatggagagagtagctggcttcctgaacagagaggtgggcaaggccttttatcaaacggctggtgaagccgagggttaacatgagccagggccagttggggaggatcaccagctacttaccaaccgattctctttgcctcttgcttcccggcagaactttataagttcgttttcaatagtggctggtgagaatgtgacatctctgtctttgaggtcctggtaaaatcttcccagataagaaatacaaactggaaaagagagggacgggagatgctcagcaatcaccaagctgttccaatccaccagaaaagaactccgccagcaattttaataggagacacggagatgaatcattagaggtgagcttttccatcaccgatttttctcaggtgtctacaggtagacagaacccggttccaagtggcgggggtcccctggtacacccagggcatcaaaggaccaagcatcacccaatgacctataaacgacttctccctgctcctttcatcaagtttaagcccatggtgaacacgtgtccttgagacgggactcactgtgacctcataaatggagagactggaaggtgaagagaaaaatgatcaaaatgctgctgctaatttccaaatacaacagcggacccagaggtgcagcttcgtgatcccaacagacagggcgcagcacccacggccagccctggagctcccgacgccgaacggggagcggtaacctctagatggtggtggggacaataactcaggagtgatggagatttcaggacaagttttcaacgggatctagtctcaacttttcttcgtcggaccaatgttttctaggcccaagaaagatttactagggcgggcgccggagcctcctcatgcaggccccgcggggacctgctgtcgcccccgcccccgcccccgccctcgccctcttggccccggccgtctggtgatgttgtggggttcagcgccgccgccagaacggtcacggagcgcggcccccggccccctatcccgcaccttcgcagtcgcccggccgcagcgcccggctgcccggcagcacgctcagagccagcgccaccgccagcccctgcgtggcccacatcctcctcatcctcctcatcctcctcctcctcctcctcctccgctgccgccgccgaccgactgaaccgcacccgccgcgccgcaccgcctccaagtcccggccgcgcgccgtagctccccattggcggggggccccccggcgccctcccacatgccacttccccattggtccaggagccgcgagcccagacgggcggctccacgctgccctccctcattggctggtggtgtctgagccctagacagttgtcggccgctgattgaacccgggctggccgcaggaagcgactacagcagcgacggaagcggtgtgggccgccatcttgggtaagggcagcgactgtggctgaggctgggtactgctagctgaatggggttcggccacgccttacatctgttgagttgacccgcgtacccctgccctgggccccaggctccctcgaaaacccctgctgatctcctcgcccggactccgactcgtggtgcaggagttctggggtcagccaagacaacaggttaggcaggaagggcgggcggccgcaggcaaggctcaaagaggtttcttttttcttctttcattcgcgtgggcaacggatccaacctttgaaagcccacctgctgatcctccacctgaccggagcccgccgtgcataggctgataggagacgtgcggggtggacggactgcgggacatctgaaggaagggctcaaggcgcgccaagctcaaagctgggccgccactctagaccgtggagggaagcgcccgggccagatcatcggtcgaggacatggggtcgcctcagagtgggaaggtgaggggctcgggaggtgcccttacaagctctgaatcgtggcttggtggctggccagcctcctcctgcctccccggctaggccctcggggtcccccgctgccgtgggacctcctgagtggggtcccgggaatcaccagagaagcactggaggatgtttccttttcgactgccctcctttcaagtgccctcctggctgcctgccttcaaggcaggatgcgggaaccgttggctctactcagtgcaaaaaggacatgtctatagggctaaaaagggcttggagcccggcgacaagggttggagaggggcacatcctctgctcccattcagtgaattcagtggatcagtatcacgtatttatctttaattcacatcacagcagtcaaggaagtggggaaagggggaaaaaaaatcaagtggcagatatttacatctaaaattcacattacttgttggattttgaacatgctaccacaatatatacagtaaaatacctcttgggacaatggtacaaattttgtttcctttaactttgcttttctggtacaggtaagatcatttttaaatcactttttttctttaaacatgaatacacaaaagaaatggttagaagtttccttgttttaaataagcacagaatgcgggaggttaaaaacacatttatagtgctgaataccaattggacatcacactctatacattttttgctcaaattcctgtacaaatacacagcattcaaataggtatttacaaataagcttgaaagaatgaaaatcagtattttacaatcttttcaaagggttctcatctctggcctcccatttcccctcagactgacttattctccaacaaaagggatttcagaatgtgtccttttcatttagttagggaaaatggagagggaaaacaaacggtttcaccttgcataatgcgaagccaaatgaacccatactcccctccctacctcttgtgccaccaagtggagaaggtagctgttcttatgtgatgactgccttgtccagggattgactttcagaagtgccttaaaatctaagccctcctacctatgaatcaaatccaaaactagcccctaacccctaaccctctaacacctgtgaacaccagatggtccagagattgaagcttgcaaatgaatgtaggctgagaagcaggccagccctttgaggtgagggctgctgtaactgacccatatcctcagcagccttccgccccactctgcctggagtgaacctggtggtatcagaagggacccacactggtgataaacccccagaaaaaccctgg

SEQ ID NO: 315922 - DNA, 4001 bp, Homo sapiens
ccatcaacattcacctcactggactaggtagtaattcatgccaagatttcattacatagcctgacgacagtctcatctgcactttttttccatttgacaaccaaaaccaatctggttacagtagttgttttttaggtccctgcccactttttatcacatttttaaaattaatttttattttttaaattttatttatttatttatattttatatttatttatttatagttcctgaggagttaactctgtcgcccaggctggagtgcagtggcacaacctctgctcctgcaacctccccctcccggcttcaagcgattctcgcgcctcagctcccaagtagctgggattacaggctcgagccccgcccggctaattttttccatatttttagtagagatggggtttcaccatgttggccaggctggtctcgaactcctgacctcaagtgatccgcccaccttggcctcgcaaagtgctgggattacaggtgtgagccaccgtgcccggccccacactttatcacatttaagacacctaagcaagtacttccaacaaaggaaacagtttaatcttcttttggggaccctctattaatacaactgttcagaaggagttaaccttacttataaacaccagctgtaatctctggatttttataaattactattttcatttttataatggaaaatataagatatattctcaattataacatatttttagtgagttaaaattctcacatctcaaatgtaagtagtacacttacttataagataaggaagaaaacattaagaaaaaggaaagtggccgcgcgtagtggttcacgcccgtaatcccagcactttgggaggccgaggctctactaaaaatacaaaaattagctgggggtggtggcgcgtgcctgtaatcccagctactcgggaggctgagggaggagaatcacttgaaccagggggtcggaggttgcagtgagccgagatcgccactgtacttcagcctggcgacagagcgagactccgtctcagaaaaaaaaaaaaaaaaaaagaaagaaagaaagaaaaaggaaagtaagtttactttgcttaaaagaaagcattaagaacagtcagtgctacaacagcagtttatttacaacggtccaactcctccctggtatcatttccctacaagttcttcccagaaaagtaaaggaacctgaaagaagccaaagtaaatgactcatcctctccacccggataagaatactaagacacatttctgaatttcaataaccataaaaaacaaaactaacaaaaaccaacaatgtactgggtatctcctgcaccagcatcctcataaacccctggttagcaaactaaactggagtcatttctacattcagaggttagaatactgaaatttgggagaggttctgccgggaagccagaaacaggttggttggttcattcattcattcattcattcattccttcgacaacatctaaagcatgcctacttgtcgcaaggcactatgctacgagttaagagacaaaaagtcgaggtccctgtcccctattagcagaacaggtcggggtaggtgaaccctaggtcaactcatctcagtgccccaggctccgtctctccaacataagcgccagtgatcggaaacccatgacccccagccatgtctgattcctagaagactcaacctgtctgtatttcctcgacgacttcgggccccaagaccaagttcccaagagttctccatatcctcaacccctcagagagtctaatgccaaggagccttttcttcagccgccacctaatgctgtccattacctaacctgtgtccacccgcgcttagggccccgagcgatctaggccatcaactccagctgccaccctcgccccccgttcagatccgcccgcaggttacctgtcggggatcctaggctcccagcgcatcccagacgctccgccccacccatggcgtcaccctccacaaccaggtaccgcctcccgtgcgtaacttcctgtgcgccacgtccggccggaattccaccggacccgcagtcccgctgagcgcccgactcggctagtgacgtcacttccgacctgtctttgagttcacctggcatcctgatgcgctccagatcttgcttgtcggattttatttcgccggtttgcttctccgcctgtgtatctagcctggaaaagtgcatgttatctttttgcaaacttctttagccttcttttcggcagccacttccctctgctccttctgtagcttggactcatcactggtcaaattcacctggcctcttggagaaatcatgattgttactatgatttttcttatttatctacctagtggagtgctaagagtgcaggcagtgaggttgtgctatctggtttcaagtgctgcctctcacttctaacagtgttacctgggcatgatacttaacctctctgtgcccacttcaagtgtgaaacataatactagtacctagaaaataggacgattgtattacttgagataatacgtggaaagcactggcatattgaaagcattcgatgagtgttaaccattactttttgcactactatgcactcttattccctgttggaacatacctgtgcttaaggacaactggaaccagatttcctgctaccctttatgtcccccctacttttttttatgtttatggatactcggcttttaattaattgatgatgcctggcaccctcttcggaactgtgagcccctccagacaaagttggaatcttatatagaaaacaactttaaccctgctggaaataacctgcttagttattgtgctagttaatgggggaaagttgaataaaacccaggccctaccctcaagaacgtggagatactcaataaatgatagtgggaggaaggaagtcaacccaggaaaaagcagaagggaccagctgagctgaagatttatctttgcccaaaaatttcgcagaatgacagaactgaaaggaacttttagaggcaatcacttagtcaacctcttgctgttacaggtaaggaaaattggatccaaagaagcgtctaaatgtcacacaatgagtttcaatgctagcaccaaaagtagagtctcaaaatgcttgccacctctcccattcccaaaatctgcctcaaaatgttaataaggtaagggtagattcacttttaaatccttccctctcaagtgaaaaggattaggaaaatcccagtcctggagagacaagggcaatgtaacctagatgccgcctaattgtgatgaacatctgaatgtttggtgtggccattgcattcatttgaaacacagtatttccgttcccctggcaaacttcttatatttacccagaaataaagagtaaagtatcagctcctgtgagctctaccttcaattttaactggctggacaggaataagtaacagatccaacaaactccagaaggtaacatagactctgaatgtacggtcaatgatgtggcataattgcatttagtttaattggaagcaatttctcttaataactattcaacctttgtttaggaatatgacagagctagcataggcattattattattattattatggaaatgttggtagtgggaccatgtaatggaaaataattcaatgttaatattatctcataggcccatcttgttccctcattcaaccaatggcactttttctcctttgatactaatatactataacttaatacaactaaatacaaaacaggatgatactttaatcaaatttaaaatcatttgaatgacatatttacgtttcaaacaatcacaatttacgcaggtcttaaagtcaacttgtttgggttctatgccaagccctgctattaactagccatatgaccttaaatcactttacccctctggccttaatttcctgtttgttccatagaacaaaccatgtattaatctgtttagtagaaaacatgcatgttacttatcactgtgaccactagatggcaggtgttaag

SEQ ID NO: 315923 - DNA, 4001 bp, Homo sapiens
tctgatgaacattttttaagatgagtttgattattaaacaacattttttaaatatcctaagaatttgacctttcgtgctagtagacttcaataatttaaaattacttggaaattgctactttcaacaaactctctgaagatatacaaaaaaggaaaatgctgaaataagtcaagatgtttacaaatattatgtctaaaatgttatctcatttgttaaacccagaaaataaaaaataataaaatatgaaaccataattgtccgagtataggacaaagatctgatttagaatcaggcagaggttttccctctattactccagcaagttcaaatgtactcagaaatacaaaatgattgacggtaatatcaagatgagaaacaaaagacaatgttacatcctcaggtatgataagtttgaaattagatgagtttacagttggaagattcattaagaacaacaattcaaaagatattatagccataatttagaagtcttgcttcacgagaaaagataatataaaaatctaaaaattaagtattgattttacaaggtaaacatggcagcctggattataagaaatatcaggcattttgctttctcaggagaaagaacaactgggtacatgctgcagactggcatataaatcgctcaaagtgaagcagttgggaaatgctgtcagattattcgggttgaggagctgccccaggggcagaacatgtcacaatgtcacatccctcttctttactctcacaactttcaccagaataaacagacccttggaaaacaaattcaatcacaaatagtaactttttgttaaaactacagtagcaaactaccaaaccaactttatacatggaacatatcagaacttttccatgtttccccaacacagtggaataaactattttcagctaataagttcatcttaggaaaacactcatgtgcatttctatgcaatataattgtggaacattgtaaccacttcttagttttcattagaggatattgaaaaacccaagtttaaggataattccccctttccctcgaatgcagctttttaagtttttgacactataaagtgtagagagtgacataaagaagagctatgaatatatataaatacaccactatggctcccgtcataagagcttttgaaaaatggttgaacaagtattcatcttcaccaaattgcaatcgcaagatactgactgttacacaatatgaaacaaaggcaaggtgaagggtgaggaacggcagaaaggacggtcgcaaggaagacaagtgccccacaggatagaacctgctctgtcttgcgggccccgcttttctcagcacctttctggtgttctgggcttttctgctaataccatccacatcatctctcagagaaatgaatctccctttaaggaaagccaagcaggcatccgaggtaacgtgcagaaccgtaaatgaaaaatgtccacgtctagcaggcagacaagcaaaggaaaaccagctgtcagtttcagaggctcctagctgtaacggggtttcgggtttctctccgcctctgtctctctgtctctctcacggtgtcgccctcaataatatcagctttctaatcacctcaaatcacacattctctgtctgtccttgtgaaataaatactgaagaaacaggaaaaacagagtgcaatactcacaacaacgaagaattcctacacatgctgttccattttcttgctttgaaaagatgtaaggtgaattttaaaagccttgcagaattggaaaaataaaggggagggggattccacccacacaatcctccagcccaccgcaaaggagcccaaaggcttgctgacgtcacagattcatgaatggatgtaaattgggctggtttaggattccgcacagacttcgctgtggtgtgtgtcatgaaaaaaaaaagaggggcgggtccagagtaggcccagccaataggcttcaggcagacatggccttccttcttttagaaggaatctggtcacagaataaacagagcccgccaatcaggcatctgccactgccttaagacagactggcagcttgagtgtgtgtgtgtgtgtgtgtgtgtgcgtgtgtgtgtgtgtgtgtgtgtgtgtttcaagctgtgatagtcataaaaacattattattgttattgaatgaaggaatcaaaatagaatttctgtggaatcaaggataacaaaaatgcatatagaagaaatcccatcttttattcattagaactcttttcttcaacccttttcttactgttcagcaatatgcctgatgcgatcaaaacaaatcaaagtcaggaaaaccatttctaaaactagcagactagtggacatgtatgccctgctcaccacgacttgtaaaagcaaaattgtcgggacttgtaaaagcaaaattgtcgggaagaacgcatgggaacaataatctagtaactaagaaaacagacatatggaaaataatattacacgaatgtagctgttttgcacagcagtaacatcttgctgaccttcatgatgtatcaaaagtggatatggaagaaaaatttactgctacttttaagtagggtacagtgtttcctcattggtttattcaacttctggcagtcgattaagacacagctccaaaagggcacttaatgaaactttgaacaaattttggtttcagtaagatgttttattattaacagcaaaaacagctgtattaaattcactcaagaggcatctctttcttctttatttttacacttttcagttatacaaaattggagatgaatatatttattgtccctactccccatcactacacttcacaatgactaatacttgacaaatactgatcatgatttttctgaacttgggaaatggcctcaatccttgaaactagaacgatcgtggttaatataaagcctcagttatgaggtgtccagtgaccaagaacattctgaacagagatctgctctatttctcaatcagattatttatacaactgtgagagaaggaaagtggtggcctgtttctaagtggttctggagggtctaaacctgaccactagtaagtattgcacacttcttagctcatttggaaaaggaaaacttttcaggataattttacacacagcaaagatattcagtgtactgtctatattgaagcaatagaatatcgttggcaaacaacatagttaacaaacttctctaaaggagcttattgtggaatatcactacaaaaaagatagaccaaagaagtttacacatgtaacatgggagtgctcaaggcaaatacggcattggtacacgcccagtaggcctcagtgtaccacattatttaagaacgaacatgcaaggcacggtggctcatgcctgtaatcccaacactttgggaggccaaggtgggcggatcacgaggtcagggatcgagaccatcctggctaacatggtgaaaccccgtctctactaaaaatacaaaaacaaaattagccgggcgtgatggtgggcgcctgtagccccagctactcgggaggctgaggcaggagaatggcgtgaacccgggaggcggagcttgcagtgagccgagatcttgccactgcactccagcctgggtgacagagcaagactccgtctcaaagaaaaaagaaaaaaaaaaaacaaaaaacgaacaaatggaaagctgaagaatatacatctctatttaacaacaaccaaagccaatcaggatacattaaaagaatcagatttatggaaaacatttttttcttccaaaacaatacagactaactaatggaaagaggcaaactttttgtggactatgtcaataaaatagccaagaaacatcaatttgtgtgtgtgtgtatatatatatataatatatacacacacatataaaatctgtatatatgtatatgtatatatgtgtgtatacacacacacacacacacacacacatatatatatatacacatacacatatacatataaaatctgaggtcaggagtt

SEQ ID NO: 315924 - DNA, 4001 bp, Homo sapiens
agatgggagtctcctgcttagcaactttaatgttgtctaccaaacacccagcttgtaatagagcatgacaactgttcactctaaatccatgtgctcagcttggattcaggattgatttataaaaatagctgctggtggtgctctttgaatctctttgggctgatgactgggcagtgttaccccaaaggcctagagcagctgtattccctcaccacacccatttctctgtctacccagccaagctgacggcaccctgcccccgccccccatctctacagcatactattcaccctcctcctgggctgagtgagcaaattacaagcacaaatatcccctgatgcaatgccacaaccatccctgggaaagagcagaggcagttgccaaaagcacagcagcagggaaatgggcgggagacgcgcgcgcgcgcacacacacatacacacgcacgcgcacacacacgcacgcgcacacacacacacacacacacacacacacacactgcaagaaacactgcaatgctatgcaaccagggagagagaatcgagaggccctggggagcaatactgtaacaggaccagagaaggcaaaggagaaaagggggtttccagtagaaagctgggtaacactaaccttcgcgaggaacacgtatttcatccgagcttgggtcctaaagcacaaacctaaaggtaatcaatcactgcctcttccccaaagcagcaaatgcatttaatttacccgttcctggaagtgagcaaaaccctcacaactcctccacaggacaatttcaccaaagggatctaactcacaccggcggagaacttgttccatgtgctaaatcacaatctctgttctgggtaatgtttccaactgcctctcctagtccctgtaccctccccacccccaccctaatgtgaccctttcgcactcccactgccagacacacgctttagtccccacacagtgtcggggcctttgcaagggggaagagccccgcctagggcccggttctccagaccacccctcagccccacccataatccctgactggacatactaaggctcacctcagcctcacatcaactgacccccacaaagcctcagaaaacgacccctgagttctcctacacctccgaaccccacccagggccccagactgcggccgaccctcgctccgcggctcagccccatccagagcccaaggcatgtcgctcggccccaccgccccgaccctcaaaagctggacctctcagcccccctcactccaaagacccccctagatcgcgcctcaaagactccgaaggtcaaagccgccagccccccgcctggccccctccctcggacgcccccgcgtctcgcaggccggcggccaccgcccttccacgcctcgggcgggccccgtggggtacccagctgccgcagggcaaggctcgggcagccccgggacagtgaggaggccgcccctccaatcggaccccgcctgcggctgcacctacccgccgccgccgagacggagctggggcagaagggagccaggagagcgccgggaagagccgtgaggaggtaggagacgtcgggaggagccgggagccagcgagctagccggaggggcggggcgcagggaggcggccgcttcctcgtcgcctcttgagggccggcgcaagggagggacgccgccaccgcctacccggcgagcgccgccgctccggccaataagcgtggcgagggggagggcggagggctgtggcggaccaatgggtgctggccctgccgccacgacgtctctgcagagctgcccgagccgcgggcggttggggcgaggtgcgcctgggggctctagcctcccgcctgcggcctgcgaatgccgaagcggaccgcaggccgatcgactgccttcgctgttctatgatggccgtcgctctctctcagagtctgggcgcccggagcgaggagagtgcgagagtcggcgcacacgcggaccgggccaccagcgggtggggcctgtgggctctgtgatgtaacttgggaggggcgcggggcggggcctaggtcgcgggccatctgggctctggaaggaacccttagaggagcgggaggacgccacaggtcctcggcggggctccgctcccgtgagccgcatgtggctggtgagctctgaaacgtggctggcccaagttgagatgtgctgtaagtgtacaatacacaccaaatttccaagacttagtaccgaaaaaaaaaaaaaaactcatctataatttttaaatggttacaagtgggataattaattataacaaaattgatgacagttggggtatatttggttaactaagaaatattgaggccgggcgcggtggctcacgcctgtaatcccagcactctggaaggcacttgaggtccggagttggagaccaccctgaccaacatggtgaaacttcgtctctactaaaaatacaaaaattagccgggcgtggtggcaagtgcctgtaatcccagttacttcggaacgtgaggcaggagaattgcttgaacccgggaggcggaggttgcagtgagctgagatcgcaccactgcactccagcctgggcaacagagtgagaccctgtctcaaataaaaaaaataggtttccttttctgttgaaattaacattacttcattccaaagccccagattttgtagaatccttaacttactgttgtaggaaaacacacaggtgggagctttaaagttactttgatcattcttcctgctgcctggagtagccagcatattcctgtcccagacttcaggaatagaattggctttgagctcctttgtagttagatggctaggaaaactcaaaagtattggaatcttccatcccttctgtaaaccaagaagtatctgagacaggtctcaattgatttagaaatttattttgccaaggtgaaggacattcctgaaaggaaaaaacacagaatcacagaaacagtctgtggtctctgcctttctccaaagatgaatttgaggaattcagtatttaaaggggaaaagtgggctggagggaaaatagggagggaacaagagaaaaggagcaggtaggggaatagtcaattgtgtattatgtcaagtatgtctgcttaggaatgaaaggcagtttgtgcatgactcagctttcaacttaattttttccttttggaatagtgaattggggtccgaagtgtttttgttttttgttttttgtttttttgagatggagtcttgctctgtcgcccagagtggagtgcagtggaacaatctcagctcactgcaacctctgcctccccggttcaagcaattctcctgcctcagcttcccgagtagctgggactacaggcgcacgcttccacgcccagctaattttttttgtattttagtagagacgtgtcaccgtgttgcccaggctgttctcgaattcctgaactcaggcaatccgcccgcctcggcttcccaaagtgctaggatttacaggcgtgagctaccatgcctgcccctaagtgttttgttttttgtttgttttttttttttgagacggagtctccctttgtcgcccaggctggagtgcagtggcacgatctaagttcactgcaacctctgcctcccaggttcgagcagttctctgcctcagcctccgaagtagctgggattgcaggcgcctgccaccgtgcctggctaatttttgtttttttagtagagacagggtttcaccatcttggccaggctggtcttgaactcctgacttcgtgattcacccgcctcagcctcccaaagtgctgggattacagggatgagccaccgtgcctggctgaagggtccgaaatttctttaatatttatttttccccagggccaggcagtggctcacagctgtaatcccagcattttggaggccaaggtgggaggatcgcttaagcccagtgggagggtctcactctgttgcccagactggagtgcagtggtacggtcatggcttgctgcagcctctacct

SEQ ID NO: 315925 - DNA, 4001 bp, Homo sapiens
agaaaaaaatcaaaaataaaaataaaaataaaaattaactgggcatggtggcacaagcctgtaatcccagctactcgggaggctgaggcaggagaattgctggaaccagggaggcagacattgcagtgagccgagattgcaccactgcactccagcctgggtgacagagcgagactccgtctccaaaaaaaaaagttaaaaagataggcaatacatggacatgttacaaaggcaaaaaaagcaatcgttcaaaagagcagagtgaaaagccttccacccctggcagtccctatcaagttcctctccctaacggtaccatctcctcagacatccatcagggcatcctgtgcttatttgagcatatgtgtgtatattaatacccctttttaaaacacaaatagcctacgtgctgctgggcaccttgcttttttggtatgcgtatatttaagatccgctgggtttcagtatcccatttcatggctgtgctataattaaccagttccctacatcagcaggacaaggggtttgttgtacaatgtctccacctatcttacgctcctgagctcccaccctaccttgtaggatacctgtagggaaaattcctagtagtgaaatagctgcatcaaaggaaaagtagtgcttttaatagtcccacattagaaacaccctaaatagtcaatggtaaggaagtagataaataaaacttgaagatataaaggcatatccataggataaaatactgcacgtttattaaaattcatgttgcagaacatgtagtaacacggacagacttctacaactggtgaaaaaagtgtacagtaagaatctaaccacgtaaaaatatatcagtgcatatgcaccaaatgcacattacggagtagaaagaactcgtctggggagggatcaaggagatacgtattttgttgtaatttctgtactttcccatttttctacagtatgaattacttttgtggtaagaggaaaaaagggagaaagccctcggctgtccaggagcagagctgggctgggaggtggggagggcccgcggacccgttctccctgaaagcccctgtcacagtgggactctgaagggctcacccacacgggaccctgcgctcggtcctcaccaccaacgcccgcacactaggcagtgaccggagagagctgggggacatggcctgcgcgcacccctcgcacggctaggcccggcggtgggagttaaagggaggccggttccaactcggctgaaggcaggccattctgacggctgcccccaggagggcggctgcgagggcagcggtgcgctcccggcacgggggtgctcgagcactgagtccgggcatggagcagcgaaggcgccgcctgcagtgcccacggaccaaacgggggtgacctctgaggccgccggcagctccgaggtcgcgtgggatccgggctccaggcgcctccgctctgccgcccaccccatccctctggctccgggcctccgcgtcctcccaccacagggtggggactcgttgcggtccctacccagcccatacctgtacgacgtggtcactgctgcagccgcgtccgcgtcgccgatgggcagcacgtagaccccgcgggcgccgggcgcaggtggcgcggaggactgcgcggaggatttgcccctgcggccgcccgcccccggtccgcgccccggcggcggatccttgggcccggcgggcgtggtccacaagccgaagtcccgctggtactgagtgagcggcacgtcccggccggaatcccgggcgcccgcgggaggctggcccctgcgcgaggcggcgccgcccgtgcccggctcctcgctgtcgaggtccgagtagccgtgcagagtgagcggcaccgccacgtcggagcggtccagctggttccagcgccgcgccaggcagcacaggcggctgatacagggccacgccatgccagccccggcgcccgccgccccgctcccggcgcgcggcgctcccggccgcgcctcctgcgcccagcgtccccgcccccgcggcccgccccgcgccgccgcagcaccgccccccggcacgagggtgggcgtcccgggagggggcgcactcggcggcagccccacttggccggggccggctgcgcacggctggagctggagggagcgcggatgggggaaaggctgcaccgtcgccagggggcaccggaaaccgcctgcattcatttacaagtgtccatctcgaagaatgcctcagaattgaatccaaagttccctcagtgtcatcttataaatggccccggcttcgcagaggccaagggcccgatggtcgcagctgggagcagtccgccagccgggaggttctccatgtggcctcgggacgcccagcgactgctgcatttgtgccaggctgcaccgcatggactccgcgggcacaggggcaggtgcagcaatgagggtgtcagagaagactcggggccctgcttcccggagaacacgtgtttcagtcagcctgtgagtcgccgcctatttgcctttaggatgctagtctacatttgtgacaaccaatccacttttcattagaattggcattagccaccaatcgacctttccctgggttctgaaattcctaattttaaagcatggccatttgcaaaagctttagtttgataaagcggccacagaactggccacaaggctatcaagttcctttcctcctgtgcatgcatggctgttttcaggcagagctgttgagggatcctccagcgtaaaggcaggtctgttcaatgcaggacaccgtctcaaacaactccctgaccacccacaaacgcttttctgaatatttgacacatgctctcggtatacactgcagaccaattactaataacactactgagacagcattaattacccagagctccatttcaaggttgtacttggaaggtatccagtctgcgcctgggaggggactgcagcacatccctggccagtcagaaaacagattcatctcccaaaacattgcctgtcttagcttgaagttgtagcaaagtgacatgacggctgcctagaagtggcagcaggtcagctgagcaggccaggccatgtcccagcaggcagcaggcgaggcgccaggtgtagagggagatcctggaaaatgacacacaggggccgggtcagagtgaactctttgtggactgtccgccacggccctgggttagccagcctggcagatggcgcttgggactaaaattctccatctcgcaggaaaagagagcagctctctttttattacttcattgatcaaacaacagtcaaagagcagttgctatgtgctaggaataattctgggtgccttcaggaggtttagtgtggtagtgagggacggaaggaagtgtaattgaactgacaaggccaggtcagcatgagagggaggcaggctggggaaagctggactcgccacctgttgtgagggagggtggttgggccaggtgggaatgtaggtcacgggggaggagggttcagctgaggtagcagaccatggagggtcttggtggccacactaaggaattttagcttttcatatggccgggtgcagatggctcatgcgtggaatcccagcactttgggaggctgaggcaagaggactgcttgagcccaggagtttgagaactgcctgggcaacacagtgagaccctgtctctacaaaaaacttttaaaaattagccaggcgtggtagtgtgtgcctgcagtgccagctacttggaggctgaggcttgagcccaggacttcaaggctacagtgagctatgattgcaccactgaactccagcctggacgagagagagagagagagaccctgtctcaaataaataaaagtttttcacaggtgacaacaaaggaatgacagacatgtttttagcactctggcaggcatatggagaagcacagggttgctttggagaccagctggaagaacaggctcaacagtccagggactaagaagtgaggaccaccacggagtc

SEQ ID NO: 315926 - DNA, 4001 bp, Homo sapiens
atctttccccatgaatagatgcagaaacctggcttccagagtctaggatatcatccaaggtcatgaaactggcaaacacaggatagctattagccatatctagaggactctgcacttggactcataattaaaacttgtgtaaaggccgggcacggtggctcacgcctgtaatcccagcactttgggaggccaaggcaggcagatcacgaggtcaagagatcgagaccatcctggccaacatggtgaaaccctgtctctactaaaaatacaaaaaattagctgggcgtggtggcgcacgcctgtagtcccagctactcaggaggctgaggcagtaaaatcgcttgaacctgggaggtggaggttgcagtgagctgagattgtgccactgcactccagcctggcgacagagtgagactctgcctcaaaaaaaaaaaatcttttgtaaaatgagaagggcctttgctgtacttctagcctccaggagccactatccctgccatgctctacccatccattggcacaagctacaaatgagtaaagaccccagagatgacagattcaagggattctgggtatggggtgtggccctaggcccagaactgtatgccttaagctggaaccaggtacccgcccccagcatccccctgacccccaccatgccacctatatcagcatgccaggtctccagggagcctatagtctgaggtggctagatggctggcccgccctctgcccaggaaccaggggtgggttggcccagggcctgtccctttcaacacgggaccagcgactcgtcaggagtctatcagcagcctcctgaggctccacaggtgcagtgggcatcagccttgtcctctggccagccctgggaggctcacaccactccagcccagacaggcaggggccacagggaagaagcagtcccacccaagccttggtggggtctcagcttccagcaaagggaaacagatccattccagtcagaggagcttcacatggaaggggcagccaagctgaacaagagatcccctttgggcctgaacacatgggtccagccagaatcccagagtcaggagtcaccccttccctgcttccggatacagcatctctagccatagtgactccaccccttgctcactgggacactcaaagcttagctaggctacgcctcagtttccccatctgtgaagtagggaggaccacaagcctgaccttacaggacagtatgacgatgaaacatgttgctgagcataggaagcttagcaggggcgctagacatagcttcactcacaggcttccgctgtggaccctccaggataccccaggcctcagtgagggctcactgaccttcagggcacacttctgtccagtgcgccgatggaagcactccagcactttgccgttcacacccaggcccagcacctgcttggacaactggtagtcgtcggtcactgcgtacttcttgggctcccgccgcccccccggagcaccgcccaagccgggtccgccgggtgcaactggcgggggcacagggcccccctgctcctctgctgtttcaccatccatggcccccgcggggcgctcagaggcggccccagcctggcgcttctagtggcacctgggggaaaggggaagagtgagtcccgcccagacttttccaacacaccccagccttggagcctctgaactgggctgggctgcgagcccggggcaagctgggagtgcgggacgaacggcctgagagtacagacgtgcagcaaggggcggtggtcgcgcggcggggtacaagcgagcaccgcccgggcacgtgtcaagaagggaaggggccgggcgcctaatggccgcgaggtccccggaggaggccgcagagggggcccagcgagggcgtacctggcggcaacgcaccttgctgaggtaccggcgaggggcaggagaggcggtcgcgggagctggcggccgcagaaatcccagggccgagagtcgcgctgccggcgcccacgtgacctcccccccctccccacccccccctcccccactcccccactccaccccccgctccctgcgcgtcatcccaacttggggccccgctaggtcagccttaaagggccaggcgggccccggctgggtcccgcccccgagccggaacaaaataggaggcgtggcttcccgagggggcggttacttcctcggtttccagggacacccagggaggcccctgtactggcagtccgctactgtgcgggtcccgggttttactcgcaacctagaacgtgacagcgcaggacgtcttatttctcttgaaagctctccttgagtcgggtgtttgctctgcacgctgccaggtggccctccagtatggcttgctaggcttccgacttgcctagtgttggccaaccctcagcgtactcaactttttaaacatgccgagggaggtggcatcttgtcgttgttgaattcgccactctttagtctctggtggctctgggagtctccagcactggcgactgccccctttttgcagctcccgcttatgcccttgactcgctgcttccctttggtatatacagcatcctggggaccagaaatcccgagttgccatttgatcagatccgccaacatttcaccttatggtttgggcttttggcgtcgtgtttaaaaagtctctgtctcccatccgagtgacagatattctccattagctttctagttttgccttgcacatataagtctctgttaagcccatcttagactaccttacgtattttgagccagttttcccaacaccggctgttaagcaactctcatttcacagatgaggaaactgggacccctggggagaaaacaacttgtctagagccatagggagggtggctgtggctgtcttctgggacagatctgaactacttgcgcacatcacatcactcccccaatccggaagctgagggacctgagcgagctggctcacttggaactgggaaggtgcggctcagcgcaggggctctgcatgggcctctgctgtcatctacaggccatctacaggactgcaggtaccaggacctcggttccactcagaggcgtcttccagccatcctactcttggctccggaatttaggcccagtgagcgcctccccctcagcccctctggttaacacacgcacactcacggacccctgggctgcatgtgcaggctcatcagagaagtagctcttggaaagatgatcttctgtcaatgaatgagtgaatgagtgactgaaagggtgctacaacttattagtgggtacccactgtgtgcagatgttgagtggagatggggttggggctctgcccctatttctttcaggcaaccttcaagctagcagtgttcagtgaagcaggaggctccagacaatagcctcagctggccatagtgaacacttcttgcagaccagatgctgggaatgtgctctccctgcaaccccctgaccttacagagcctagaggaggtcacactatcccttctgccccacactacagacacacaggacagaaaagcccagagaggttaagtgacctgtctgaggtcagcagctgtcatgacagagcccccattccaactccaaagcacaacctcagggctgggctcttatcctcaaaccatggcctcctctcctagtcctttctggctcctcacacagccacatgtgcaaacatactctcacacatgtacacatgcagtcacacctttacacatgtgcacacacatgcatataacacgtataaacacacatgcatataacacacatgcacacagatacacatgcacatgtgcacacacacatgcatttatgcccagctggacccaggattgatgtccctgagcccaacctgagaatctgattcaagatctcagagcctctttgaaagccctatgatctggaatcttctactgctggggggagccaaagaaggctctctgctctctgaaggcaactagtttgagcctggtgaacctgaggctgag

SEQ ID NO: 315927 - DNA, 4001 bp, Homo sapiens
gcttaaaccattacttgccagctgggagatctaagttatattgtaacctctccatgcctcagttttctcacctgtaaagaggagataatatgtggtagttgtgacaatgacatgaggctgcaaattgctgagagtgcttgacacatagtaagtgttcagttgaatagtcatggtgagggggaagaagtatagttttggtagagagcttgggatttggccccataagagacccaagttcaaaattgtaactctgttgcctggcagcggcaaagtccttttgtcttcatagtaatgagacagtggacagttcctactggcaagtcagtggtccacacaggggccgcatatcaggctatccaggtatcccagccctcaaagtgggttataaggtatccatcccccctacccccattccaagaaagtggcttctggccaactcaggagggggctggcagagttgcactcatgaagcccggcttcccttcaggaaagctacagagaagtgactgccctgaaatctgaaacttaacgttttttccccagtttcacagggttttgctttcaggtttcttttgccctctgccattctgggcagagcaaactgagccctgtcttccctggatgctatcgttcaggcccttcaacaaggccaggggtctgtcatccctgcccaggatctcagagctagactcctttctggggaccctgggggcacacactgggagggggatgggggtggggagtggaccctgcaacctctccaaatcccacagttcttctggcccaagggtttggaggagattcacagaccctacagtccttcaagatgctccatagtgaatccagtgaactgaaaaaaggtggagagggtcctggtaggagcgtgggcttctgattcagagctgggaccaagctcttaccctgccatttcctagcatttgttccctggggctgtcttctgtccgcataacgggagcaacaccagttgtagaggatcaaatgcagcaagtactccctgtagataagagcgagtgttactactctgcccccgccatcccgccccaacctctatcaccctactcccagattatctccctatgttttgagttgcaggactctctctcagcattttttttctggcggggggtgggggtggtaccaacccagagtccgggccatctggggctgtctctgcttgctttctcaaatctgtagtctcttctcccctgactggcagggccggccagaaaccagtgccagccaagactggatggtctgcctgattcgaaaagttggggcgtgctttctccttcaactctttcaaagaaaacgttcttgtctggatctttctggctgtggtgaccgccggcttgacctcagtggacccactcatttctggaactgtcctctgcaccccgccctgccctaagtcccgctccagatctcaccccatgccacccaatccgacacccgacacacagagtcctagggtccaggagcggccgtcccaacacggggcgcttgcacacgccgacagacctccttggaggagccgctcgcagggaggacaagcccgggactccgccccccgccctgccacgagttccaccgcgagataagagggcccttccccaacgacgcagaatgccagaaggcaatctgggcgcgggttgctgagcccgggcccctccttaacttccccgacccggtctttccccactgatctctccgacctgcccctctgggtagcttcagccccgggtccacgcgctgctattggccctccccgaccgctcggctccaccttcagcgtcgcgattggtcagctcgcggggccccgccccgttttcctggaaagttcttggaaatctgtcaaagtatttcctttcactgctcagggccccagacccggcgacggggcccgcgcaccccgcccgggccccaccgctcagcccgcggttctaggaagacgctgcttccgggaagggctggaacgcggcagacaaaggattaggcagcagctcgccccgccccgctcgtctggcccgcccccctcgccctcgcaggcggtccgcgccactgcctctcagtccctgtcctgcgcccgcgcgccccgggagcctacccagcacgcgctccgcgcccactggttccctccagccgccgccgtccagccgagtccccactccggagtcgccgctgccgcggggacatggtcctctgcgttcaggggtaagcgcggctctctgcccccttcccggccaccacgaggggcgcacgggagaacaggggcttcgtgctagctgccgggcattgggagggcttgacgggccagaggtgactgagcgcagacggacctcaggagcaaggctctgtgtggggctgtgacactcccactccccgcccccacacacttacctcaattcccactgtggattgggaaaccgggggctggccggctaaaggaggaactcacagggtgggctcagcctgggttctcattggagcagatggatgctaacggcacggcgtcccccaagatgtggccaacaatcccagatattcttctgggcccagagcactctacgctagcctgcctgctgccctgcctgctagtaaccttggaccagcccctggccccctctgtcctggtgtcccctctcctgccccaggctagcaagtaggctcttcttgggaagccagccgcagatccttgcctttcctcaggctggcacctgatggtctgcaactctcgggaggccctgggtttggcctggtcctgcttggggtacccccacaatcgtctcacaaccctgtctcagcccagtctgggatcccaatgtgagaaggaccttggctcctgcctctcatcttcaaatttcccagacttgaggtaagggacagtggagaggggatgctgataagacagagtcttgacctgagctgagcattcctggccatccactctgtcctgaacctcagcaaccccttcaaccaaagggtctgatgctggccatggtgatgtgacaggagctcaggaagctccaaggagagaggaagaaggtataaatgggtgttctgcactcagggaggactgggtggctgtgcttatcgcaactggcctggtgccaagtgagggagggtggaaggtgaggccaaggaagaggacatggaggtgctgggaagactacttctcccttgctgtctccagcaagttccttcctcctgtctgcattctgggactcctgaatacctgccccaccactgccttccaccccaggagcctccccctgcattccggggtcccatagcctctttcactttttaccctaggtgagcacccccttgtaagctcagggctactgttgggtgtcagggaacaaagttttagactgctgcgctccaaagcgggcacacacatgtacctagaacacaccagccactgtccccaccatgatgatgacacagccatggacacacccctgcccaggtacacactcaccaggagcttgtggtgatcaacacagctattcatacacccagctaccacatcagccccaaaggtgcccacacctacatgtgggatctgaggaccggctaagctatctggacgtggccacccacagaggttccagcctgactggctagccaccaaccatgctcctgggaaggtagctctgggccccagcaagcaggtcatctcaaaatttggcctccagctctccaagagggatttccaagatcccacagtacagccagggtaggtgtggaaaagtttttgtcaggctgtggtgtgccagagttgtgtggccctttctcactgtgagtggtcatagggccatgatttgttagaacctagagggtcacctataacctacacaggagtcaggtctggctcctgccaccagctcctgcctgcgccttcctgcctcacaagcaatactggcgctgtttgcccatgctgtcctctctacctggggtcccttcccccagctccttcc

SEQ ID NO: 315928 - DNA, 4001 bp, Homo sapiens
tcaattcaacaaataggtattgaatggctggtaggaaatagacattatgctaggtgctggccatacaaagatgaagacatagatcatgtaacttaaggagtgctgagacttgtaaggggaggtggacatttaaacaaggggatactacaaggacaataagagatgcagcttcaagggacagaaacagaacaaaggacaaaggaggggatgctcactctggaatatggtggtcaggagagagaaagagatatttgtgccagcttgaacaatcaggtcttctaggtggaaaataaagaagaaggttgctccaggttgagggatgagcatatgcaaagatacagaattgttactcagccaagtagtttgatatgggctggggcactgaatggtagggtgggattcagaccagatcattgacagataaatgagattatcattcaatgtagattgacataaatcacttttttttggagaaagaaaaatgatgtttaatggcaggtttaaaattactatggctttaagaagaacagaattattgcactcactttttaaggacctggttatctctctgaaccacaggtaatcggagttcaaagagttaacatagtctgaagcctctcattggtctcaggtccagaaaagttgctaggttactttgcagaagagaaacaaataaaaacactttcccaagtgaaaagaaaattaatagtaaaagatgtgtttagggacttacacatctgcagagcattgtgtgtgtgtgtgtgtgtgtgtgtgtgtgtaacagcattaacacttaactaataaaaataactagggtggttgggttttcagacttgcaggatagaacttgtatgaaaggtctggtaaggagtgtcaagtataatgaggaataagaaaggttaaagagtttaaaaccaattagaatttgaagttcttgatttcagaactctaaaatcctttttttttttttaagtatgatatctctttaagagccatttggtgtacttcatagcctgattcatgccaccagctgcctctgatttcaatgagaaatgcagaaaatttatagggaactgtaaaatggggacagatttttagttttctaaattgaggtttaactggcaaacttgtaaaggttgaagaaaccacagagccaagctatgggaagctggtttcttttctggtcagaaggaatgaacacacaaacacatatctaactcacaaagtgctggaagagagaaagcaatgctctttccagaggaggaacacggaaaaatcagccttgtgggtgaacaggaggagagtcacattcgccagcaggcagcaccctgtgcaggcagtgggagaaatctgagcttcagcagcgtccggagcaggatttgcacgaagtctcccgtttcaagttttatgtctcctggagtcctggggaaggcacccagcccacccacagctcccttctcagagccctaagaattgatgagaaagcccctcactaccacatgcaggacacgcaggtgagtctgtcagtgacaaggtcagaccttccctgctatttgacactggtccccaaaagggaaccgtgccctctcctcccctggcacgtacctcattttcctgccttgggtgctcccggctgcccggccttggtcctcccagcttgacttgcctgtgagctcgtgcccggtgtggtgtccgtgatgccttatctttgttctgaggtccctgtgtgtctctggaattggctggcattctccattcaggtcacgccttcccctgcctgcaacagatcccctctccccctctctccctctggcttttcctctctcctctctctctcctttgacttgctcttgcactcccaggaacctgacaacaaaatctgtcttcctaccgaaaagatctgctccttcccttccctcctttatcctgtgtggctgacttcagcccttgagagaaaataactgaggggctcaagcaggtatttgtatcactctgtgtgtgtgtgtgtgtgtgtgtgtgtgtgtgtagagagagagagagagagagagtgaaaggggacaaagtctaatttctctttagtcttttttgccagatgactataattttctgcttttcttcaggacacccatgaaagaaaagcaattaaatagaaacaaccaactaagaaggcaattctagcacctacactagaagaaaaaaaaaaggtctaaatcccagagcgtctgtctgcaaataactacaggtttccttgtgagcagagccccaaataactacaggttttctcgtgatcagagtcacacacaacgacaggttttcctgtgaacagagccacgggcccggaactggggaagcaccaagtcctgaagttggctggttgttcctccccatgagcaatacctgtggcactgtttacttgctcggagtgtgtgcggctctactccagcccagaaagggcccatcgcagcaagaaatctcacctccccaggggtgtagaaagacctgggcctgtatatatgtctatacccatggcttccggagaaatcaacactagatctaagatgagctgaataataagaaaattaccccctccacaacaacaacaaccaacactgaatagggagaggtgtatctgggtgtaaaagttaagtttgactgtgcaccttttctgtgttagacacagtactagtcattaacatcatctcaagttacttttgcaaactggtgaaagtgctgctgttatactcattttacaagtgaggacactaaggctcagagagaatatgccacttgccaagatcatccagttatttatgactccccactgccactagcactagaagctaacagctattgagtgctacgtgtcaggcactgctctaagcacttaatatatgaattcttttcagtcatctttatatgttgtatacatggctggcaatattctcatttttcagaggaaattgcccagagaggttaagtaactttcccaagttcacacagctagaaagtaatagaggcagaatttgaagtgttagccactgtattacactgctactcattaacattttataatgcatatggaatttcaaatgcacacacacagacggcattcatagagaaactcaatctgagtcattttgaaaagaagattagactcagagtttagctgtaatctttcctttctacccaagacagctgtgtactttgggcacaatacttaaggtatctgattctgtgtcttcatttggaaaatgggagttactatgaggcttaaataagactgtgcttgtagaagtgtccaggggagtaccagagagagggctgccagccacactcaccaaagcggcagacacatgcactgtctaccctcagataacgttcctttggcacgttctggggaacagtggcttgactctcactgtacttcttactccattttctctccagtttctctaattttcacacttttgaatgccagccttgccaagcttggcattatcaagaggctgtggttgataaagcaggtacaagtatatgagatgggaggatatgtttgaactcaggcactgttttagcaaaatgtgttctgtctcagtcagcacaggaaaaaaagcttttaacattcccgttaagaagactcacaggctccgcacacattaaataactctcacaaaacaacattttaatgatttacgtgtaaatgaatcagaaacacatggacgacatttctcttggaatacacaagggttttaaaactgaaggagaaagagcttggcaaaatgcacactgtgctgggaagagggcccctgcccagtaaagacattccctcaattcatgctgccacggagtttgccctctcctaatttagggcatatactgggaactgcagtcatttgttctgggtacagagggaagagcttgggcgagaaagccatcagcttctccttggaaagtgtcacagagcaattaggcctcctggaataattttctagccatgtttc

SEQ ID NO: 315929 - DNA, 4001 bp, Homo sapiens
tctcaatagtttttcaacctcatacgcaacgtaagacacacttgaagagtgcggcgcaaaaggtaaaaaccagcctagagttttaacatgtttcatctaacttcccaacgcgtgaacaactaccagcggacacagacacgttcagtctgtattaccccgtccttgggcagtgaggaagaagaaaacctagaaggaagaaggtatcccaggatagaagcagcaacagccggctgaaacccaattagattgcaggagaaagagaaaagccctgtcttagtctgtggccaaaagacctttcccaatcaaatttttcaacacctggaaaattggcttatctatttgtagagagcacccagagacgagcgttagagcagcgctaccctggagtaccagttcttcggaatgttgaccgccggccacgcaccgcttgacagccacggatccgctggcggagccgcaagttacaacccaggcgcctggcaaactcacactacacctcagtagcaataatcccaacggcaggacacctggggagggtgggctcggtctcccgggcctggctcaattatgttcctttacacagcattcaatcatgtttcaggagccgtaggtgaggggctggaggtgggagtgggggacacattttctagcccccgacgtctccgcggttggaaactctgggcacctctttcggccagcgctaagacaatacacaaagagcagggaaccggcgctcctctgcggccagagctccgcgcctagtcacggaagagctgggaattaagaattccgagctcagcgagagccctgaagaagcaccggaaatgcttccgatcgcttcataagagaagtcaatttgcaaatcaaagttgcaggaactccggacgcctagactacttcagcgggttactcgggaacacccaacaagtttggccaccgggggctcggcatgacagcgccgcgccgcgagacgacagaagcaacttgtcgctcgggcgccaagccagagccctgagccgtctccgctcccaagctcgggagagcacccaagagccggcgtcgggaaagcggaggtccctgcctccggcagccaaatccctcaactgaaggcacctcaggggctcacctggactgcactcgcttccaggggcttcccccaacagtgcaacgcttcaccgcgaacgcctcacctgcctgccagccccaggtggcggagaaattaacaaaagagcaagcgaacagggggaaagggagacccggcgtaaagtatagtaaggaggggagggcaggcagctcggctttcggcggagaaagaagagagaggcggaacagagatggcttatacccaaggcaccggctcgggaaggcaacccagaagggaagaggtcgagaagcggcaatgggttttctactccgcttcccatcacacacacacacgcacacacacctccccctttttcctccttacccagcatggaaaagatgaaatccttggctgtgtgaatctccagcgctctctggtcgtcgtattcccgctggtcgtgcttcgtaaattcttggatgagtttgttcaattcctccacccgagctcccgacctgaaatccagctccgggaacgcaggcttgttgttacagcccagggaggctgccttgttggcggtgggagccgccatcttcatgcaaaacgcgccgagtagcagctccgcggcagcgcggcacccacccccgccccccaccccgcccccctgggcctcctcccctcgcaggctcccaggctttggccccggctcgtgggcgggttggcgggcgggcgtctgggcgggcagtcccccgctccgtgcgctctgggcgtgcgagcttcgggaggagctggactgcagcgagggtgcgtgtgtggccccgacacccttttctccggccccacgcccgccccgatgctgcgcgtccctgccctgccctggccctctctggcagcggcaacggcggtcgtagagccaactggagcctcccccgggcgaggaaagtgaagtggaaacaatgtgaaattcaccagctctgaaatcaacaagctgccggctccggtgttacggagccagcaccagcgtctccatttaaagggacagcgcacccagtggaaaggaaaataaataaatgacagaggtctgcacgcatataccacttgccaatccgtacttgggaagacgcgcgaggtgtggatgcattctttctccacctccacggccgtccccccatcccctttctgggcagggtttgccaagcgcattcaaggagaagaaagtcttcctccgtttgattttaagggcggtgtcctgggggaggacatctctgtgcgcgtttacctctctatcccaagaactccaatacctttaaatagtaaaggaaactgccttaaggaatatgaaacctgtcttctacccttttcctcttggattgccaagatgataggattgagcgtataaaaaaagagggtccacatctaacccagtattggcactcccactaacccctagatatccctacctttgcccaaggtaattaatgacctgaataacagcttatttatcttaacatataatgagttaatgagattcaacctactctaatataaagatagggaaactgaagtgtgggtgtgggagaggggaaacaatgtattgccccaggttccaagaaatgttggatgacaagatgaaaattttctcattcaacagataaaatttgagtacgcaccatttgccagatggagtgacagaatgtgacagtgataaccaaaagacatggctcctaccatggagttaggcttacatgacaaggcaggttcaatctaagtcatagtcctttaggcagaatagagtctcagaggtggttttagtgtttatggggtgtatcattcaaacacttaggaggcccattggctgtgagaaacataggttatcttcctccctaattctccaaaatctctcttctctatcccacagtccctgatttagatcaggtctgtttcactttcttacccgagttctcatggccaagaatacaaattgttttgttagacatggaaggaagtacggactcttccatgccttcccctataaaatgggaataataattcctgtctcacaggttgttttaaggattacgtgagataaaacaggtcaagcacttagttcaaggactgacataataagtacttagctattatcagcttctactattattgttattaattctttcactgttcctcaatctagtaacaacttgttgccagagtgatctttagaaaacacagacctgaccactgacctccccctggaattcctctcttctttactccgtttacaccaaaaccaatccgcgtctgcctttttcttacagctttccggagaccctcccctcaagctggtggcaacttttccttcctcagaacctactctcagaagctttcatatgatgctaatgaattttgaccttgcttcatcattgctttttgttttgggttgtgtgtgtgtgtgtttgtttgtttctgaaacagggtcttcctctgtagcccaggccagagtgcagtggcacaatcgtggctcacagcaacctcaacctcctgggattaaacagtccttgcatctagatctctcaaagggattacaggcgtgagccaccacacctgaccacttcatcattgttaatgcaagttttagactaaaagattcttggggatgagggctacatcttattcatctttgtatttcctgcagcatatggtcctaccgaagggtcctctatgtttattgaatcaagtaatgagtgaagaattgtggcataaccagttaatttctcttacttttcgtttccttctctttgaaacacacttcctcacccactcagtatgaaagagagaggatccatgcctagataaatgctggtggactgatgaggaagtgacttaaaaactctggtttttaggcagggcgtggtggttcacg

SEQ ID NO: 315930 - DNA, 4001 bp, Homo sapiens
aaaagtcaagctagaaacttttcggattaatcactgagtagggctattataaagatttctgggggcacttaccataaatttgagaatatgaaccaatagctaagctcttaagcaccagaaaatgcttaaataaatcagtgagttacactgtcttctctgcaaataaatgaggtaaaagttttacataatgtaaaatttctgggagagagtgtgtatcactttcatcagatgtaatcctccagaaggtaaataatttgatacagaatttttgaatcttcttcattcttgatcctcatggtaaccttgtaggtacaataaggtttactctcaatttattgataaaattgagtgacaggttaaattacttgcagaacagacacgagaacccaagtctaccaaatcttggtctaatacttctcccccatactgttattgaaaaaagctggcaaggcaaggtggctcattcctgtaatgctagcactttgggaggaggaagtgggaagatcacctgatcccaagagtttgagaccagcctggagagcacagtgagatcctcgtctttgcaaaaaatgaaaaaaaaaacccaaaaaaacaaaaaaaaacaagcaaccgggcgtggtggagcatacctgtggtcccagctactaaggaggccggggtaggaggactgcttaagtccggcaggtcaaggcttcagggagctatgattgtgccactgcactccagcctgggtgacagagcgagacctcatctcaaaaaaaaacccactaaactaaaacttcattaaagttccaatgtgtcttctatgatgaaaacatacttttaaaattaaaaaaaaaatttcagtaaagtgtatcctaatcactaaaccacagattgtaaaaggtggatgggtctagagagatcatttaacccaagttcttttctacaaatagggaaactgcaagaactagaattagaatcaaggttttctgatgtaatttggggtaaaataattttgaggagctggatggatcttatgaaatgatattgtttacaattttagagataaaaatactgaagcctggtggaatcagcacaaactcttaagagactggggctcaaattccagctctaccagctgtaagtttagcagcaagttacttaacatctcaaagtctcggtaaaagactctgtaaaaagaaggtgatgcctctttcaaagtagttcttagtattaaattttgaaaaaagtaggtaaatcttaacctcctatcacacacgtagtctaatgacttcctaggatcctccaaccccaaggggacctctttcacaaaacctcccggctcccccccagtctccctagtcatcttagatgaggaagtcgagcgcaccccagggctgatcgcacaggaagagcacctgggctccagaccctagtaactaaacccgtgggcttcgaggtttctgccgaccctctgtcaaaggttagaaaggcccacacactgtccactctcccgataccattttacaggtggtgaaactgaggcccaaaaggggacagtaacttaccggaggtcattcggcgggtctgggactaggcgctcactagaggtgacggtgggggcagctccgcggtcccccagactcagactctccagcccagtcgtgcccatcgagcagggtccggctgcagcaacgagcccagcgccgcaacgcccagggtgtggggcggagtaagatgtgaaacctcttcagctcacggcaccgggctgcaaccgaggtctgaatgttgcgaaagcgccccagacgccgccgctgctttccggccgccccctcggctacagccgccatttccacgctccaccaatcaaatccattctcgaggaagacgcaccgcccccacacgccccgaccaatcgctcgcgctctggttgcgctggcgccttaggggctccagtgccaccattgcttttgctgcttttctggctttccctttcggacatgcgcgctcggagcaaggcgccctcgcactcagcttaccgcgcatgtacgttgccaggggtaacgcaggtagccaaagtggcttgtggagtggcgaccgttagtgaggcggttgctgagacagacgctgaggcgggtaggaggagcccgagccgtaagggaagccgtgatgagggccgtgttgacgtggagagataaagccgagcactggtgaggagcggggcggttcgcgaagagcaggaggtcgagtcctcgcggggagtgcgcgagccgctgcagcgtgtttgaggggggcagcgggcttgctgcctgggccgagggcactgaaccccggcctgggagactgcagggtcgccctcccgccccttggcggttggagaaactcccgagggttggagagcggcaaagggaggtgccgcgcctgaggtggtggcgggtggaggcggctcttccctcacggtctggccctgtcgctgccttggattcatctcacacccacgagacagcacgaagctgctcaagcttcacagttcttgccacatccacatagtacccatactcttgttttcttgacgtttttctctaaattgtctcatttattttaattatgatttcacattttacaaggaaactttattactccatttatgaaaaccagtgtcacttgctctaaatgttaagataaaatcagcgtcgcttgctctaagtgtaaaagtaaaacttaaagtagggagaaacaaaactgaacaagctgtagctagctattgttgctagggagcctttaaacctgagatctcgtttctctaaaactggagatgggcaggtatgatcagaaaggtgctcaaaatgagcaccaaacacaagctctcctaattgggaagtctgaaaaagaactgaaggggaatgactttgtcaccttttgattcagttatttaatgtcctattccattgttatcgcctaaatctataacatagcagtctgttttgtcatattcttacttatgggataggtcttggcctgactttgaaaatcattcagcattgttgtgaagcctctgttctggccactggagcaggttacttgtctttggttctgtcccttctgagatctttctctgtgtaaagcatgccgtctctcctcatctcacacggaaatcctgaacatccttcaaggctcacgttggagacgggtcctctcttttgtgttcggcactagtggtagctgacactatgtgccaggtgctggctaagcacttcatatcctttatctcgttgtgtcttcaccactctctaaggtaggtactataatttcctctattttatgtatgaggaaactgaagcccagagagggtggataatttgccagcgtcacacagtgaggggtggaaccagctttcaagctcaggtcttcctcactccaacgtcaacgctctcagccactacattaatttttccttatgttacagacgtggcaaactcaaatgtctgcaggagacaggcaggtaacataaatgggagatgtttatttgcatcttcaacactaggaattgtatgttttccctaggaatagtcttgtattctgtaccccatttttcttgaaacacagccgtatcagtgaatctttcatttgtacttttaatagagatttgagttttaaaaaatcattttacttttaactttattataaacgtacctatagcacaagctgatgatagctggcaactgaacatttggcttcaatgtcagagtaatagagtgtggcaaactgcagagctcatgctcggcctaaaaggggcagctgctgctcagctcctgccaattaccaccatgcaggaatttggcctagtgtgctcagctcttcctgtttttaccagaagctaggaatctgggtttttatgtgaaatggcctaatttttaaatgttagcatccactctgaaaaaaaaacaaaacaccgtgtgggccaaataaaacatttgctggccgaatgcagcctgatttgctctgttttcaacccctgg

SEQ ID NO: 315931 - DNA, 4001 bp, Homo sapiens
cgaggggaaggcataagcgccaccatatacctgctcgtgttacaggctctggaatcaaagtattctcacatgacacattactaccaataacagattccggctccgtttaaaaaaaaaaaaaaaagttggggggtggctacatatttgtcctgcttttgtctaaaaaccagaacccaagtactaactacttttcattcttttcaacctttcatgaaagcaattcaaccaactgcggctccacccaaagagcttctatacttacttttcttacagtttttgagtgacgcactacaaaacgatgaaaaaaaaaagaagaagaagaaaaggaggaggcagccctctcctacagggcgtcttccgccctgtaaacttggcaaaaggcaaactggcctgaaatacagcactctccatataaggcagcccagctaaacatgtcatgcgtaatttatgggtagcaagcagagaattaacctttgcgtgcacatatttggcccagatgaaaaccgggcgggatggcagccccggggccagggatgcgggagccgccgggaagacccgcgcgccgctcgactcagagggactcacaccttcccccgacaaaggtcattaagttgtgagtacacttgcacgcacctgtttctcttctcgcccccctgtttctccctgggtcccgctgggctgccaagccgtgcgcgggctgtgccgtgacagcgtccgcagagcccgcggcagggaagggcgcaggagcggctgcggctcaccctcccgccttcccccgggcaggaggtgctgagggacgcgaaaccaactaccgcgagcggcccgcccctgcccgggagaaccgcggccggcgagcacctcctcgcacttcctccttcagccacgggcagacccgccggagtccgaacaatgaagcggcgcggggaaactgtgaaaatggaaacttacctctcacatttttttttcagaggcggccccactgtcgaccaagtgcccaaggcattgtgggagtcatgattccaagatgcccgcgacggaaaatggaacttgtcagctccttgtcatgggagcattgtgggcgccacaactcattcagctgcagtgaaaagactgttgcatgtcgctgtgcagcctcttatcgccgaggtctggcttccgctgctgctgcgcggcccctcccccgcccgcccagccccaccaggaagcccagggcggactcgtcgagctcctaatgcacgcggcggcgagaaaaacgctcttcaactttccgccggcgccctcccgcgcttccccgggccacagggtcgcctgtcaaccggacagagcccgcaagagcgggtcatgggcggtcgcccagcggcgccgagagcaggaggaagccggagcccgcgcgggcgccgtggatcccctcggcctcccgttggtatcttccatctcatgcgttcagcattgtaacctcgcggcgggcgtgcagaccggacgccctcccgcttcttctaccgactgctaggcacaccagtgggttcattttgaaagaggcccttgcaccgggctttgcaaggaagccggcaaggttagattgaaggttagaagccaattagactagaatcctgcgatctggtgagactgccgccttaaaatgcaccaaacagtttttgaacctggagggctaacaggcgggaaaaacatctgcaagactgccaccgtgtatttttctcaagtaacaggctatccacagttttggaattccttagtgaaactgtcacacaggcacaaacacatgtcagctttccttctagtttgtaaataatatttgtaatttacaggccactgtattcccaactttgcaccatgtgatttagagaaagcaaagctccctctttaaaaataatatgttacttctgaaataccgggatattccacggcaagtaagccatattgtcgccagagcaaataaaccgcagccccatatcataattcactgggtgctataagatgtaacttggctttgctttgaatggaaagaatcctgaacgtctgtgatgtgatgaagttttggagactgggggcaggatttcctttgaatgtaaggaattcggataacttgttcaaggatgattctagtgaaaaacgtttgtcccatgtttgttgggacaaaaatgctggatatggtacaacattcttcctgcaggttcggttttgttgaagagagtgaggccagctcgaggtgaaggaaaaacatcagaaaggtgctaaagtgcagaaatatcttccagaggcactaatagccgactttagttcttgacctttagctagatccacaaagcactgagttaaaattgtacactgatcccttccagaacaaattaattaattaaatggtgcctcttcccagcgttaatcgtttaaaaggactcaagtacccacacagtttaagcaaactaaaagaacactgacactttctcagagaacagggatgggaactttctatctgcccattagtatctaccccaagctacgaagacttccattcctcttattaagcattcagcaactacatttagtgcctactatgccagtgatgcaagaatggataagacagtccctacactcaaggataacgcctctagtaggtgagagacaaaccgattaattctgcataagggataagtgctgtatgtgggaagcaatccaatgagggctctgaggatggcaaaggaagggttcctggaggatttacatttaactggtgccttgaaaggtgtgtagaagttggcaagatcaaaagggagtagagtccaggtggagaagagaaaagagcagggcaggctggatggcatggctcacacctgtaatcccagcactttgggaggccatggagggaggattgaggccaggagtttgagaccagcctgggtgacattaaaagaccctgtctcaaagaaaacgaaaggagcagggtatatacaaggggtctgccagccttctcagcctttctgtgagaagcgagggtagggtagtacaggagagtggcaggagatgacactaaaagtaggtctgtgttgatctaacgagtctcaactttactgccaaaactaatgaactaggaaagtttaggcagcaagggccagagatggagtctggacttgtattgcagaaagttcctgtgacggcagcttggagggtgaatgagagtgtgggatggaggggtgaatgggtgtggacagactggaaaaatgactcatgcagggaatgaggaagggaggagccttgggagactctcaaatccctggcttagcctactgaattgcttgctacttgcctttttatgtcttcattttgcctcccattgtctgtgatattaaaggcctaacttcttagtagagcaaactttgcatctgctagcaggttggtgccctagctagcttccatgcccctctgcttagaatgcctgcgaaccactaaggactaatcctagtggtagaaatttattttcaattgttctcaaacccttgtagaattccaagttagaactgtagtgttcttttttcatgtgggttagaaaatttgctgtttggagcaacatggtgaaacacaggacttttgaacctgcttatggtgcaaaaggggaaattatatttctacttcaacactggaggaggggggacttctgggagcaaaagagaaatggaaactgagatgagacatgttttttactccatgacagaatacaaagaaatacaaggatgatcctttaatgttagaaacagtagaataaccatcctggtaaataaaaaaggagaaaaaatgttattttacattagatacagaaaaacagaatggctaagaaaactcacaaagcaatggtcaatctataactcgagtccaaataaattgtgatataacactaaattaccactgatttggcctaattgactatcactggataacattataacatgaatgataatatttaaaattttaaagcactgtaacaaaca

SEQ ID NO: 315932 - DNA, 4001 bp, Homo sapiens
ttctctacatatgtagaagtgatagtgtcctcccctcaaaggtccaaagaattaaattaggacattcatattcaaaagcaatttgattaaaccaagtaggctgaaagtacccaggaacacatttctagtcttgaccttgtgtgtcaaaataaagatatttatgttatcttttaaaagactcattttcaaatatgatacctgaattacaaatccaatgacatttttgaatgtcaagaaacactaaagtaaatattttagtattatggtgcccacaaaagctaacttttaacatttctagctaagactattacaaataaaaaaaaatcatgatctaacagaaaataaactgctaattcacattagaatttttgaagctggaaaaatccaataaacaatagtacttatgagtttctacttatttatataactcacatgcaacaaagtttgtgcctcaggtaaggtgctgtagcagcagttcagcaccttacttctagttacattttccataaaatgcgtggctctggcctgaaaataaaatgcccacaaaataaaaagaaaatctaaaatgtcaaaatattaaaagagtaaaaagtctatccaagtttagctgattttaaatctgcttctcttttgcaactgtacaatgcctttaccaacaaataaaaatcatcctcattcagctattgccatggccttatatataatatatgcatatgctaaacactcacaggtagctacatttaccatttccagggacagacagacactttgccattactaagtgaaaaatatgtcaacactttctgccctagcaaaaaaaaacatgcagtgaaaggactgataaagttattcataacaaagtttggccagacttgattctactgcttctcgtaaagttccccagcccaacatcatcaacacactgtataactaaactatgaacaaagcaatccataatcccatatgcagagaactgtatgtccatatacccctcattcaatcattgaatatccttaaaagaatataatagttactcactttcaatgaatcaaagcaggcgattactcgtccattttcaacttggcagcttttcgaaggatgtgcaaatttacattccgtgtctggccgtgagcaagtccccctctggaactctctacatacttccagtgttagccattttgtgtcccgaattggtgtgacactaacagccatgtttagattttacaggtagttaaatgtttcagtgaaaccaacaaacccaacccccccaaaaaagagcaacaaccaaaaaaaaaaagctgaactgatgatgaaaatgtcccctcaaaatacttttccccactccctgctttaaaagtacatggaaaattgtgtcgtcaatatcaaggaaaagatctcccactagaaattcacagcatgaaactgttaattcaaagaggttttggtttttagagaaatactaggattgtaagtagatgaacgtttaaaagtagggcctggtatcagccttgtgctctcagtaaccccttcccagtgccaatttggagcccaaaatgcaagcatgaaaacgtggcagacccttcgacaccgaatttccaagctgctttcagcaaagttgtctgaaagggaatctcctcacagctgaatttgcaatggagtttggtggtgcaatcggtattgattagtttggcatagacagatgcagcagtttagagcaaaatcgagaaaatgattttttttttcctccttgatttcctggcagaagatatcttactttttcagcaaacttttcttttaacactaaagcagcctagggcaatgccagatacttagagcttttctcttgattataagtagaaatgggggtgtctgggctagaggtggagggtggatgtgctgtcgtcacagtctagctggcagcaagcaaggcaaaagcagagactgctctagaagcggttccaagcagcagagacgtcaggaaaggcacttcttagtaccaacctgtagaaaaaagagataggttaagatttactaagtagcacttcactgatgtcctacagtatcacaaccttgccatgtgataccagactaagtaatattcaagtcagcctctctctctctctcccacacatacatacacaaaatacttacagtgaggcatattgcagccagccatcgtagatttattaaaaaaaggggccgtttccccttgtgaagcaatgcatgatagagagataaccaatcacagatagtgttgcagcaatattctgggcagaaagccaatagtgtgggttgtcttatgaaaggtcgcgcctgtcagacgttcattactatgctataagcacagaaaatgtccatcagatgtgacttattccactgcaagaggacgagcatgtgggttttgaatttacccaacatgcagttagtggactaaaccatgttagtttcaaaacagcttctcagacaagtctaagcacttgaagatcattaccagggaataaaaagcaaggtttaaaaattgcagctgacttccaagctgctttccctccggctctgcgcagggacgggcactgaacagcctgctcctgctgtcctgacacgtgaataaaaaaggaaaggggtgtttacaaatggtacattctcctgacctatccaattcacttccttctaaagcccaagtcctgcccctccactgaaaacagcactcatactgtaaaactattccattgagcccgcagacactttgtcaatatatcacaggcaggcaagatatgaacaaaagcatcctttattcgtacatttttaaagcagaagctgaggtcatgtggggaaaataaggagtacagtgttgtcagtgtgtctggtaaatctgaagtcaacctcaagggagaaagtgattccatcgcagaaacattaaatattaagtgagcaatttgatttgagcagcgtgatgcacttcagaagtacaattccaaacaaagctggagggtgggggatgagggatcccctgttgcctgatgatcagttaactcagcaccacaagactacttcttagagcagggcatttttacttttaacaacttactttttctatcaggatttttcttctttattttttgtttgaatgttgccaatgaggaaaacaaggctttaaaaagtaaaattttcacattttaaagaggcaatgacacagtatgataactagtatttgatgatacttcttcatgagccaaaattgctctattggcatatggtatatttataatttttggaaactagagtataggatataaatacatacgtacattaaaaaacacgaacatctagaacttaaattgtttaagattaatattgccattttaacactaaatttcgtttaaaaaactactttccaaaactatttggaaaatactacagtacgactacaacttttgatagagatttaaaaaatcaatcaagcttggtggatcacgcctgtaatccccgcactttgggaggctgaggtgggtggatcacaaggtcaggagttcaagaccagcctggccaacatggtaaaaccccatatctattaaaaatacaaaaattagctgggcgtggtggtggcacctataatcccagctactcaggaggctgaggcagaagaatcacttgaacccgggaggcggaagctgcagtgagctgagattgcaccactgcactccagcttgggtgacagagcaagactctgtctaaaaaaaatttaaaaaacccatggctgggcacagtggctcatacctgtaatcccagcactttgggaggccgaggcaggcagatcacgaggtcaggtgttcgagaccaacctggtcaacatggcaaaaccctgtctctaaaaatactgaaatacaaaaaattagccgggcatggtggcaggcacctgtaatcccagctccttgggaggctgggtgattctcctggaatcacttagaacctgggaggtgaatgttgcagtgagccgagattgc

SEQ ID NO: 315933 - DNA, 4001 bp, Homo sapiens
cctcactgtgttgcccaggctggtcttgaactcttgaactcaagcaatcctcccaccttggatcccacagtgctgagaaactgctgaaaatacaggcatgaaccaagtctcctggcaaagagttttacttctataagccattaacaactctaacactctccagagtgacatacttgaggatagttctttagacaatagctaagctttgaaagggaagacaggaaatgggtctatggtactatcctgaagagccctggaggcctaagaaaagaaaaaccagaagaacaagaagaacattaacattacttacaccaacttttttttttatttttttattttttatttgagacggagtcttactctgtcgcccaggctggagtgcagtggcgtgatcttagctcactgcaagctccgcctcctgggttcacaccattctcctgcctcagcctcccgagtagctgggactaacaggcgggactataggcgcgtgtcaccacgcccggctaaattttttgtattttttagtacagacggggtttcaccgtgttatccaggttggtctcgatctcctgacctcgtgatctgcccgcctcggcgtcccaaagtgctgcgattacaggcgtgagctaccgcgccccgccaacttccaacaactttcttatgtttctctggggcactcctacaattaagtaactaaaaagggcatctacaatatttctggaaaataaaagcaagcaaacgttcatataaatggttgagtttgcatttatagactgatcttatgtaccagattgtgcttaaacctcattccatgaattaattcatttagttttcacaacccaaggtactcgtatcatctccaaggtgaggaaattaaagaagaaatattaagtaacttacccaaagtcacacacctagtgagtagctaactaagacctcagccttgactgcagagtctgtgcccttgaacactaaactgtcaatctttccagaatgatgaaggatgataacgatgaagcaaaagaagacaaagaagcaaagctatctacaagcctgagggttttttcactgccagagttattgccaccaaagcttagagctcaaaatttgaaacagagctggagtcaggtgagctagactgagtcatctgatagcgttgttcaaacttgggtacaagagtttttgacaaaataatttcccagctctgtggaaggtacatttgctcttcttgacaacttcactcttctaacaatgagaaggaactccaggagtctttctctgaactggacacctgatggggcacagctgaactgaaaaatggctttgagggcatcccggccccatttcttactagctgtgtttcgttgaggaagtcgttgatccctttgggcttccccggaaccggattataacaacgctcccacctaaggggtgctgcgaaagcccgatgtaaacggctacgagctgcagcgacggcgaggggagcctggaggatggcgggcccagtcctcagaaatggaaaaacagaagccaaaggcgcgctgaagcgtggatgtgcggaagcggggagaaagggaagggctggtggggatgtcttcctcccgacgccgtgactgccggcagaacccctccgaaagtgcctggggttttcctaccgtcctccccacaccgaccctgggttccgccgcacctcccaccgctcacgcgggtccgtgcacccctcgctcccgcctctgcccactgagccatggcccctccacccacctcggcggcaggagcaggctcgggagacgatgccaccggttcctctccgccgccaccagcagcaccgacaccgcagaggccgccgccatgtccctggagcccggccactccgtgactccccagtacagaggcagctgcgtcccacacgccaaacccgttcctccactacgaagcctcgtgacccccgccggccaccgtcggagcctgagcctacctttgggctgatccaagaatgtgagggcgtctccacgaacaccaatcaaagaccagagcccggcttcagtagcgacgattgggcagtctggccacgtgctcgtgggggtgtggcctttgtttctgcgtcccctggggcctgctctgactaaggcaagggttttctccatcctccccctcttggttgcctgtcactgtttcttcctgcatcccgtggggtttcttcgctctcgtcaccttctgggagaagaaccctggggaagaagccaaatgcggatggacagcaggatacacaattctctagtgctctcagggatgaaaaaataaataagctaaagtgaaaatctttaaaccacctgagcttaaaacaggtattctaactgactattgggaaaaagaggaagtcaaagagcaaactgaggaacatctagagaataaagaaactgtaaacactacatgtagatgcttcatgaggaaagcaggagggagaaattagggaagataaaggaataaataaatgaattcaggaaaccagtgtcaaaggactaataaacccacaggttcacaaaaaataaaatagttatctaatcagaaatagagaaaaatgcacatttgacatgatttaaaaaacaagcaggggaaaatcacagacacaggaaacaaattatagatttgtaagatgctaattttgcttaacttcaagtgaacttaaaactctggatgaaatggatgatgttacaagaaaatacaatttatcaaaatagatcctggaagagacaaaatttaagcaaaccgttaccacagaaaaaatagagaagtttatcaaagaactatccttgctaccaccatggcccactttcaccttcaccttcacccctaaaagttacaaaagccctccatgtcttgcaagaaaattccacacaaatgagtaattgactcaaatgctattaattctgtcccagagcacaaaaaagatggaagtcttccaaactctttttaaaaagtaaacataactttgataccaaaatcaacaaagatatcacgcacacacacacgacagaccaatttcacatgtaagtatcagtggaaaaattctaaataaaatattaactacgctgggtgctgtggctcatgtcttgtaaccccccattgagatgtgacagcgtgctggcagtcctcagaaccctcgcttgctctcggcacctcccctgcctgggctcccactttggtggcatttgaggagcccttcagtcccccactgcactgtgggagcccctttctgggctggccaaggccggagcccactccctcagcttgcagggaggtgtggagggagagacacgagcgggaactggggctgtgtgcggcacttgcgggccagctggagttccgggtgggcgtgggcttggtgggccccgcactcggaacagccagccagccctgctgaccccgggcaatgggggacttagcacccgggccagtggctgcggagggtgtactgagtcccccagcagtgctggcccaccggcgctgcgctcgatttctcgccgggccttggctgccttcccacggggcagggctcgggacctgcagcccgccatgcctgaacctcccacccactccatgggctcctgtgcggcccaagcctccccgatgagcgccaccccctgctccacggcgcccagtcccatcgaccacccaagagctgaggaatgcgagcgcacggcggcgcaggactggcaggcagctccacctgcagccccggtgcgggatccactaggtgaagccagctgggctcctgagtctggtggggacgtggagagtctttatatctagctcagggattgtaaatacaccagtcagcaccctgtgtttagctcaaggtttgtgaatgcaccaatcgacactctgtatctagctgctctggtggggccttggagaacctgtgtgtcgaaactctgtatctaactaatctgatggggacgtggagaacctttgtatctagctcagggattgtaaacgca

SEQ ID NO: 315934 - DNA, 4001 bp, Homo sapiens
agagcctgctccagagaaataggagggacctttaaaatcatccaggtcaacccctcgtttaacagatgggaggcttcgccctgagagaggcccagtaacccaccaaagatctttagtggcgtgacagagggaccagggatatgtctaataactgaaatgtctgtataatcacagtgtacacagtatttctacccaaattatcttacttatcttcacaagtagcctttgagctgagtgggaaagtactattaaaattcctatttttcaacctgaggtcgaatgacttgtccagggaaagattcaaatccagacggtcacaccccgagtccactgctctttctctataccacaacttcatgcctgtgctgggttttagcacaatcatttcaactttcatcatattgcagattccgaattctgtttcattacaagttctttttcctcttatttcacactgccttcagcaatatttcacattcaaccttacctggtaggatcctactgatcttttgtcgtaaaagttcagtgcccacaattggcaccagaaacttttttctaaacttgaattatcaaaactgggccttcccatataaatcatctttacaaagtatgtcctcacaagtgtatcatttgagatgtgcacgattattacagcaaacacgttggactaattgaggcaacatttaacatgcaagtaccaagaaagcagctttcacaaatgtgtagaaaaccaaggcaaatagttcctggctttatcaataaaagctgatttgcattcatgggaggacctccaagcacagtcagcaacagagaaaatgatcccgataattccagttgcccacatccagaggttctgaacctgaatgtgtgtctttactgagggaggtccagggaaggccaaggggaagaaagtgctaagaaaaaactgactgggaactgtctcaatgtcctcttgcccttacttagtctgtggggcctgacgttccatcacaacccttatttcaggagcaagcaatgcatgttttgctcctcttttcaactcagggaagaagattaaaattgctcagtctccttggcttgcagagatttctcgcggggatcatcaggggtgtgcttaaccctccaggcagcacagtaaaacaggcctagcggccgagctgcgcaggggcgctcccatgtaacctgcctctccctgcactttcttataaacaagccttcagtggcgtggcaatcatttctgctgaaaagcactggcattcgttcctcttatgccctctcctttctcactatccccaaaaccagaacataacttcccacccaccctactcccgtcagaagcagctaacggatggtaacagcccagcagccctcggtttggagctcaacggactcggcaaccacctggtgaaggcaccagcctcggccccccgacccccaccagcggcgcgccccagggatgccccccgctgggcaccgcaggcaggacccagagcagcgaggcccagatgccgggcaaccccccaggaagcgcgctgccccggggcagcgggtgaggccaggagccagatgaagcccagagaccatcctcacccgccattaataaaacgcaggaaaaattaaagcttcgtttaccgacatgagtgatcactgtggccagtcgccgggtgagctcctggggaggcatctcttcttttaagcaagacagcatttcactgaaaaaccattccgtataaataaagccaaacaaaactgtttctaccgctgcggtggatgattttttaaaggcatctccgcccaaggatgctctgccctcgccctcttcctggctctccaggcaagaaacgagagtccctcgcagcctaggccagctctccctcgccacgccccgcgggggctcccgtgacagaccaagtctggcgctttcccagcgtcgcagctggaccgagagaggagcggccgttctgcaaaaggaagcaagtcgccaatctcgccggaaccgcgccccggctcctccggccgggcgagctccggggcttccagaatcgcggtcccggccgccaggtttccggcgccgcctccagggactgtagagtgagggatgctccgccaggtgcaggggaggcggcaggtggccgtggcttctctgcgccgccggccccacgccccagcgcccacctcgtccagcccacgggtggcgcccggggctctcggggaggcacgcacgctcccaagcgccgctcgttttggggtcgggaacgctgcgcacctttccctgcggggagcccgcgctccacccccggagtggagctccggtccttactcggaaccgtggggcggggagacagtgactgaggcgctccagtcgcaccggggtccggatcatcagacgcgcgccggccaggtctccgcccctccttcttccgcgccgggtgtctgcggaggagccgcggagagaagggggctggcccggagagctgccgccatccggcaggacccggagcgggaggctgggtgaggcgccgctgcttgccccacctcctgaccccgggggcggctggcgtgtgttttcccccacttggggttgttccacgcagttcttgacctccgctggccacacctgcactgggagcccggcgcccgggctgcgctccgacaaggctgagcacgcgtgggcgcgctcaccccctatgtgggcgttttccttcgtgcagctgcgcccttgcctctgctccgtctgtcacctgtcaggcacgccagtgctaccttctggaggggctgtggcacatcctccatgctggtcctcctccccatcagcccattatcccgtggtttccctagttgggcccagacactttctgactggcagcaaaagactaaccccagttcagcagagcgctacgggaaacgcctgagcaaatgcgaattcggtcaggttgtcccccaatcctttctacagcgggagtccctgaatactcagcaggcggaatggcgggaccacccaggcggatgttctcagccatctctttcctcttcgatatgtaaaaagccaagccgcaaacaccctggatccaaattctaggagtagccacccatcacagggggctgagggtatttttttaatgctttctcttttcttcttttttttggagactgagtctggctctgtcgcccaggctggagtgcaatggcgcgatctcagctcactgcaagctccgcctcccgggttcacgccattctcctgcctcagcctcccgagtagctgggactacaggcgcccgccaccacgcccggctaattttttgtattttttagtagagatggggtttgtttcaccgtgttagccaaggatggtctcgatctcctgacctcgtgatccgcccaccttggcctcccaaagtgctgggattacaggcgtgagccaccgcgcccagccctttttaatgctttctctaacaattgtgggctgtgattgagaagcgaggtcagttcacctgtgtcatgagatttgtggagaggttcttccccctgtgaagtttgggcactttgcactctgcctgcaaaacagagcaaggattttctttttcttttctttcttttttttttttttcgtttttagagatggagtttcaccatattgcccaggctggtctcaaacacatggactcaagtgatcatgcccggccactgagcaaccattttcacaaccaccttttgcaagagattcaaaaaagggttaaaaggccgggcgtagtggcccacgcctgtaatcccagcactttgggagaccaaggcgagcggatcacaaggtcaggcattcaagaccagcctggccaacatagtgaaaccccattttactaaaaatacaaaaattagctgggtatgatgtcacgcacctgtaatcccagctactcgggaggctgaggcaggagaattgcttgaacctaggaggcggaggttgcagtgagccaagaccgtgccattgcactccagcctgggcaaca

SEQ ID NO: 315935 - DNA, 4001 bp, Homo sapiens
tagccttgcttatgcgcagagcttactccactctcctagcattaagtcttgctaacttatttatttatttatttttgaaacagagtttcactcttttcgcccaggctggagtgcagtggtgtgatctcagctcactgcaacctatgcctcctgggttgaagtgattctcctgccttagcctcccaagtagctgggactacaagcacgcaccaccatgcacagctaattttttgtatttttagcagagacggggtttcaccctgttgaccaggctggtttcaaactcctgacctcaggtgatccgcccacctcggcctcccaaagtgctgggattacaggtgtgagccaccacatgtttactaataaacaagaccattcctaacaaagggcatggtgcacattaggtacaataaatgtttgctgattgactctaaaactttatttatcagatccctcctcccccatgcacctttcctttgaaaagttactgggaaacactgggcttcctgcttcctgtctttttgagttggagtattccagattagagacccctacattctctggggtgcttatggagtcggggcttatcctcagcttagggtctagtctttccaagttacatgcagtaagttaaagagacctgtgtcatggctctgtaaacctgtctcctcagaaccctggatcaagctgtgctcaaaggcaagaatgccatcgattcatctgctcccagctcccaaagccaggccaccaggcacacaatgggctctctgcaaaactatctgctgagtccagggccttgaatgaaattacctttccatgccatctccaatgagctcctctccatcctcttcttcctccaggggcccctctgtgcctaggagcccctcggactcatcctcaaatggtggaaggtcacggccagggctggaggtgagggcatcagtacgccgggagcttcggccagggctggaggtgagaggatcattgcctcgccgacgctgggccgggctggatgccatggtgaaggattccgatgattcctgcaagagaaggtgcggttgtcagaaacctaggaagctggtgaggcatgatacagcttcctttttaccatcaggggccttcccttctttctctccacctgtgactcttgtcctccaacacaccaaaccccttccagcctccagatctttgcccttgctgttctctcacctggaatgctctcagctgagcaatctgagtcagtggcttccaaacaaatagaagccagctcaaatatcggggtcacccacatcaccgtgctttctccatgaaaaaccactgaggttatgtcatttgcctatttacctgtttactgtctattatctccccttaagcattagacctatttcagcacacacagtgcgcaaggtattgtgatagagatggcatagaagagccaccaaaacaagaggtctggaactcagatgtggaacagacagtatacaagacaaagggacaagaaggtaatacaaaagtaagtgtagtgtttggaacaaggatcattgggaaattaaaaaaaaaaaaagtttaaaggagtgtagtgaaatgggggcctgtcttttgtacgctcagcgccacacagatggcgcccaataagtatgtgtggggtgaataaaggacagaggctgaacgggccgagctcgccttagggagcccagggccccaggtcagtggtaggtaggcgagtcgcctcacgcagggtgcaggcgagaaagtagctgcgccccagagcctggggcccagcctcacccagagcgccgccctgggccggggccagagtacgggaagcgcgcagcctccgcacccatgtccccggcgcccgcccgccacgcgccagcgcgctcaccgccatagcagtaccacgatcctctccgccactacagcaacaaccaggtttcgcgcgaaaagtggttcacgtgacccaccaaagcccgggaagagccctacggaacgcgacgtcatgacgtcggcgtccactggcgaccagaagggacacggaggggcgggccagagggtccggtcccgcctacaacgcccgaggcgctccgcccagagcccggaggtgtgcggcccggcgctgtgcgcgtgcgctcgcctgcgctgtggtgggagctggagcggaggtagaagctgaggctccaggggacccgacgacacttgctggctgcgtgacctcggtcacaccagggccattttgctgacaagacaacagaggccgggcgcggtggctcacgcctgtaatcccagcactttgggaagccgaggtgggcggatcacaagctcaggagttcgagaccagcctgactaacatggtgaaacccagtctttactaaaaatacaaaaattagttgggcatggtggcacgggcctgtaatcccagctactcgggaggctgaggcagaagaatcgcttgaacctgggaggtggaggttgcggtgagccgagatcccgccactgcactccagcctgggtgacagagtgagactccgtctcaaaaaaaaaaaaagacagcagaggttcagagcctggttttctgacgcttcttaccgtcttaggagcacaatggtttaacttctcccaaagctcaaaggctcaatacttcaagcagctggacaactctgggattttgtaggaggtcacatctgaggctttagtaggagttatctttgcccaggggagcgaagacgcagggaggatgttacagatagaaggatgccatgtgcaaagctgcagaggtcatggcagggcccggatgtgcaagcccctccctaagaactaaccctaggagcttatgatgccgggcaacagacaagacttgagggagagaaaatccggatcaaaaaagagctagatgtttttctagagagtttgactattctgtattctgaaagcaatggaaggccatggaagcattttgagcagggtgagacgtgaactagtgtgggttttagaatccctctggctgctaccaggtggaagtggattgaacgaggttgaaggcagcaaacgaggaggttgctgtggttcttgtctagttccaggcagccttagtgagcagaggcagggctgaatcgcaaccctcttagccaggcactttgtgcagtgaacaagcatctctgcctgggacccagggtagggaggcaggagtgatggagagaactggaaatacaagatgtttaggaggtggaatcttttttttttttttgagacagagtcactctgtcacccaggctggagtgcagtggtgcaacctcagctcactgcaacctccacctcccaagttcaagcgattctcgtgccttagcctcccgagtagctgggattagagatgcacgccattgtgcccggttaatttttgtatttttagtagagatgggatttcaccattgttagctaggctggtctccaactcctgacaagtggatccgcctgccttggcctcccatagtgctaggattacaggcgtgagccaccacgcccggccaggaagtggggtctataggtgttggtgattgaggacagcaaaagaggcatgcaggatgacaccaggatcctggcttagctaggtggatgatagctgagataggagcgcacaggaagaccagcaatttaagggggaagaagatgagtttgtttctggctgtgctgaatttgggccgaggggacatatccaggaagctgttggatatccatgtatgggactcaagggcgtgtttggactgaagctgtagattgccttgggagtggttgtataatccagagtgagtgcagggagatgagaaggtctaagcctgggacctgggaaaccccaacagttaagagacaccaacaaaggatgtgaaggatgcacctcggatgctaggagctgctgacaggaaagctgaagagactctgcatgggcttgtgttatctattgctgcataaaaaattatcctgggatggccaggcatggtggctcacac

SEQ ID NO: 315936 - DNA, 4001 bp, Homo sapiens
aatcacactcttaattgaaggagataataagatttgtcttataggtgcttccaaacaaactaaagaaaaacaaattaaaataatgaattcggaaacactcatgcaaagtatggcaaactcaggttttagttaacacatgtcaacgcatgtttcaatattttgtctagtaagcaaaataaagctggctccttgtgaacaaataaaaaatatattaaaatactgtaatgaactgccatcattaggtatacttgtatcttgttatttttcatgaaattttacatttggcccatctaaatgttaatcattagttaggacacactaaacaaaaattgaagagggaaacttccatttttaagatcatgtgtacttaaaccaagctattctgattcactaacagcaataatgtcttaaacatcaatattaaaagctgtagagttgttgacctgatggtgaataactacaaaggatggtaatgttatgtcaatcagttaatacaaacgaggaagtttcctatcaaagactaagcaatatacctagaacaaaaattattgaattaaataactcctacagatctctgctgtatgcataaccacataaaagttaaaattaaactcttgagtactgagaccaaaagcaattttgcatagaattcaggcaatcacccaattgcagattcaagtcattaactcaccatatacttcaagaaaaacccagtgctccaagggctttagtcaagaagccctatgaataagcctttggccatgaggaaattgaagggcaataagtcgtcccaaaatttaaaaaagaaaaatcgaacataagatagggatattattaaacacacacacacacacacacacacacacacacacacacacacacacagagagaaatcaaactcttctttttcaaggatgcctcttcacactaacaacgacagaagtgtacacttaaacatcctttctattaagaggacaaattctaaaaatttgttatcaataaaattacaaactttaagatgtttcttcaactctcagtgctgagtaactcaaatggcaacttgagatttccccccatcccagatgttgagaaggtacataaataatagcaatgcacatttttaaatagtaaaaagttggagtttgttgctgggttttgttggtttgttcagtctgtttggtttctggttgatcttttgttgtttgtttccttgactggcaaaaaaaagaaaaaaaagaaaaaaagaaaaagaaaaggcagttctcctgacacaccaaagaaatatttaataaaggacatagaataaagccagtgaaatgcaatactaattccatttcatatttgcagagagacgtggaaaacttgttaatttcaaagtcaagaagcatccatccccttagctttcaagcataccctttcacaggggcagggagttaagtattacatacactgcacataaaaattgtaggtgtaattttattccgtgttaacattattagcattgccactgtcaacagcaaaattaatttttaaaaaggttcatttccaaagaatgtctttttactaatctgttatacgattattcaaagatttcaccatcatattaacattcttcctctcaatattcttgccccaagacaaaagcttagctttctccagaaacgtttgccccctgggtgaattattcacttttgatttgctagcagaactgcatttgtctcccaaatgtcttaatcgtgtcggaaatctcgaataaaataaagtaacgacacatcttcagtcatttcatataacacactcctgtgtttttaaaagctgtcaacctccaaagatagcttaaaaaaaaaccgtttaggtagactttagagaaaggccctttcaaaaaaccaacagcaaaaggaaaaaaaaaaaaatccccacaatctagccaaagggtccgaatgtgactttctcgcgaagcagcacacgatgttggacagcaaagctgttacttggcaaggtggaactcggccgagagcggctccaaagtcgcgtggccagtgccaggaattcagattttggcaaccgcaccttgtgcgtccccgaaaccgacggacagagacacacggagggaggggaaggaggagaagagcgcaaggaaaagaggccgacaagccggcagagaaacccaccgaaggccggacgacccaccccggagacgtgtccagaccgcaccgtttcgcaggaggaacaaggaaatcgcccggcttagcaacgtagataagcagcagggctccgcgagactgcgggcgaggaggaaagaaggctgggggcggggggcgcccgtagaaacggtgccccggcaggaaactgtccgaagtgacaaactttcacatcgcccagactttttttccttttaaagtgaggagttctcttacctttagatttctatggcctcaactcagcaataataggcattcacagaagaatcaaaataaacaaaataaaataatcagcagcccccaacgctcctgcacgaaaatcctttcaaacgatcccgagcaacatttagagatgtttaaaaataataataataattttttaaaagcctcgcgtctcgatttccaaatgggtctctgacaactttgtccgtctctaggatctgctctccaggaccacgcgtttcggatttattgtccgccaacagtgtatttttaatacaagaaatgaagtcttctttcgtctgggtgacccgggtttggtgtgttttggctttttcccccttcctaaatgagctcggagctattccttctggttcacatcacctccctcttttctcactttctcttgctcttatcagcccgatgtgtaatgaaagttatctgaaacccactaaaacttctacttctccttcccagttccaatgggggaaaacaagcaggaggaggagagtttgaaaaggtggggggcctggggaggcgaggggagctctatccccctttcagatcctccgcagcgccttcgcgggtcctggaccctcacgggatcgtcccctttcgcaactccaagctcagccgccgggtttctatttcatgaactgtctctttaaagaggatctgctcggccatccagaaagaacccggggcgagggagaaagggagctatctcccgccgcccagagtgatctgatcggaagccagacgggctcctcttttaaatttttaaagtgacagcagcctcctctggcgggagaggtcacaaaaaggtcgccaagacccaagtcctatagggacagactgattatggatgcaccatcccccttaaacatgtagatttctccgggtaaacaaccaatggggagatctcgccaggcaggatttctttccccagggaaatagcctccgtttcgatgtcttgaaagcacaagtgtggtgtgtgtgtgtgtgtgtgcgcgcgagtgtgtgtgtgcatgtgtgtgtgtgagagagagagagatgggggatgggagggatggggaagggtagagaagtgctttcaggggtgtgagggtgtgtgcaccgaggcaggagggggcgggggtaggggggagaggtagtgctggagtggggaggataaagcttagggtatagggacgctagttcagactaaatataaatagtttagaaattctcagaaaacagcaacctcaagagtgaaaagttgacatgtacatttccagttttctgctaagcattaaaaaaaatttttttaattgaaactcatactctaatttattcccttcattcttgtagctaggtcagaggaagggcgtgcaaaattttcaaaccatatttttctttaaagatattttaaaatctgaaaaattattggcatataacccgcccaaacagcatattatgggtttagagagattgatgactgtctggtgagtctttgccattttctttgatacattaattaaaacaccttgaacgccaaaacgtgcaataagcaatttgacgactcagattatttttgaacgt

SEQ ID NO: 315937 - DNA, 4001 bp, Homo sapiens
gttaggacacactaaacaaaaattgaagagggaaacttccatttttaagatcatgtgtacttaaaccaagctattctgattcactaacagcaataatgtcttaaacatcaatattaaaagctgtagagttgttgacctgatggtgaataactacaaaggatggtaatgttatgtcaatcagttaatacaaacgaggaagtttcctatcaaagactaagcaatatacctagaacaaaaattattgaattaaataactcctacagatctctgctgtatgcataaccacataaaagttaaaattaaactcttgagtactgagaccaaaagcaattttgcatagaattcaggcaatcacccaattgcagattcaagtcattaactcaccatatacttcaagaaaaacccagtgctccaagggctttagtcaagaagccctatgaataagcctttggccatgaggaaattgaagggcaataagtcgtcccaaaatttaaaaaagaaaaatcgaacataagatagggatattattaaacacacacacacacacacacacacacacacacacacacacacacacagagagaaatcaaactcttctttttcaaggatgcctcttcacactaacaacgacagaagtgtacacttaaacatcctttctattaagaggacaaattctaaaaatttgttatcaataaaattacaaactttaagatgtttcttcaactctcagtgctgagtaactcaaatggcaacttgagatttccccccatcccagatgttgagaaggtacataaataatagcaatgcacatttttaaatagtaaaaagttggagtttgttgctgggttttgttggtttgttcagtctgtttggtttctggttgatcttttgttgtttgtttccttgactggcaaaaaaaagaaaaaaaagaaaaaaagaaaaagaaaaggcagttctcctgacacaccaaagaaatatttaataaaggacatagaataaagccagtgaaatgcaatactaattccatttcatatttgcagagagacgtggaaaacttgttaatttcaaagtcaagaagcatccatccccttagctttcaagcataccctttcacaggggcagggagttaagtattacatacactgcacataaaaattgtaggtgtaattttattccgtgttaacattattagcattgccactgtcaacagcaaaattaatttttaaaaaggttcatttccaaagaatgtctttttactaatctgttatacgattattcaaagatttcaccatcatattaacattcttcctctcaatattcttgccccaagacaaaagcttagctttctccagaaacgtttgccccctgggtgaattattcacttttgatttgctagcagaactgcatttgtctcccaaatgtcttaatcgtgtcggaaatctcgaataaaataaagtaacgacacatcttcagtcatttcatataacacactcctgtgtttttaaaagctgtcaacctccaaagatagcttaaaaaaaaaccgtttaggtagactttagagaaaggccctttcaaaaaaccaacagcaaaaggaaaaaaaaaaaaatccccacaatctagccaaagggtccgaatgtgactttctcgcgaagcagcacacgatgttggacagcaaagctgttacttggcaaggtggaactcggccgagagcggctccaaagtcgcgtggccagtgccaggaattcagattttggcaaccgcaccttgtgcgtccccgaaaccgacggacagagacacacggagggaggggaaggaggagaagagcgcaaggaaaagaggccgacaagccggcagagaaacccaccgaaggccggacgacccaccccggagacgtgtccagaccgcaccgtttcgcaggaggaacaaggaaatcgcccggcttagcaacgtagataagcagcagggctccgcgagactgcgggcgaggaggaaagaaggctgggggcggggggcgcccgtagaaacggtgccccggcaggaaactgtccgaagtgacaaactttcacatcgcccagactttttttccttttaaagtgaggagttctcttacctttagatttctatggcctcaactcagcaataataggcattcacagaagaatcaaaataaacaaaataaaataatcagcagcccccaacgctcctgcacgaaaatcctttcaaacgatcccgagcaacatttagagatgtttaaaaataataataataattttttaaaagcctcgcgtctcgatttccaaatgggtctctgacaactttgtccgtctctaggatctgctctccaggaccacgcgtttcggatttattgtccgccaacagtgtatttttaatacaagaaatgaagtcttctttcgtctgggtgacccgggtttggtgtgttttggctttttcccccttcctaaatgagctcggagctattccttctggttcacatcacctccctcttttctcactttctcttgctcttatcagcccgatgtgtaatgaaagttatctgaaacccactaaaacttctacttctccttcccagttccaatgggggaaaacaagcaggaggaggagagtttgaaaaggtggggggcctggggaggcgaggggagctctatccccctttcagatcctccgcagcgccttcgcgggtcctggaccctcacgggatcgtcccctttcgcaactccaagctcagccgccgggtttctatttcatgaactgtctctttaaagaggatctgctcggccatccagaaagaacccggggcgagggagaaagggagctatctcccgccgcccagagtgatctgatcggaagccagacgggctcctcttttaaatttttaaagtgacagcagcctcctctggcgggagaggtcacaaaaaggtcgccaagacccaagtcctatagggacagactgattatggatgcaccatcccccttaaacatgtagatttctccgggtaaacaaccaatggggagatctcgccaggcaggatttctttccccagggaaatagcctccgtttcgatgtcttgaaagcacaagtgtggtgtgtgtgtgtgtgtgtgcgcgcgagtgtgtgtgtgcatgtgtgtgtgtgagagagagagagatgggggatgggagggatggggaagggtagagaagtgctttcaggggtgtgagggtgtgtgcaccgaggcaggagggggcgggggtaggggggagaggtagtgctggagtggggaggataaagcttagggtatagggacgctagttcagactaaatataaatagtttagaaattctcagaaaacagcaacctcaagagtgaaaagttgacatgtacatttccagttttctgctaagcattaaaaaaaatttttttaattgaaactcatactctaatttattcccttcattcttgtagctaggtcagaggaagggcgtgcaaaattttcaaaccatatttttctttaaagatattttaaaatctgaaaaattattggcatataacccgcccaaacagcatattatgggtttagagagattgatgactgtctggtgagtctttgccattttctttgatacattaattaaaacaccttgaacgccaaaacgtgcaataagcaatttgacgactcagattatttttgaacgtttaacatcataaatgctgcttttagtaatcggtactatcctatgtttaataactttctaatataccttgggtacatttaaaccaatacattgtagaaaagacattggaagaaagaatacaggggatacatagcaaaacaaaagggtctacagatttattcatggccaactttgtaagatttagtaaatcccactggctaaatggaagtaaacgcgtttttatcacaaaactccattcataaaaacaaatggacaaaatccaactccccagctcaacaatggaaagttaagcaaagtaagcgagtcta

SEQ ID NO: 315938 - DNA, 4001 bp, Homo sapiens
ggagttaagtattacatacactgcacataaaaattgtaggtgtaattttattccgtgttaacattattagcattgccactgtcaacagcaaaattaatttttaaaaaggttcatttccaaagaatgtctttttactaatctgttatacgattattcaaagatttcaccatcatattaacattcttcctctcaatattcttgccccaagacaaaagcttagctttctccagaaacgtttgccccctgggtgaattattcacttttgatttgctagcagaactgcatttgtctcccaaatgtcttaatcgtgtcggaaatctcgaataaaataaagtaacgacacatcttcagtcatttcatataacacactcctgtgtttttaaaagctgtcaacctccaaagatagcttaaaaaaaaaccgtttaggtagactttagagaaaggccctttcaaaaaaccaacagcaaaaggaaaaaaaaaaaaatccccacaatctagccaaagggtccgaatgtgactttctcgcgaagcagcacacgatgttggacagcaaagctgttacttggcaaggtggaactcggccgagagcggctccaaagtcgcgtggccagtgccaggaattcagattttggcaaccgcaccttgtgcgtccccgaaaccgacggacagagacacacggagggaggggaaggaggagaagagcgcaaggaaaagaggccgacaagccggcagagaaacccaccgaaggccggacgacccaccccggagacgtgtccagaccgcaccgtttcgcaggaggaacaaggaaatcgcccggcttagcaacgtagataagcagcagggctccgcgagactgcgggcgaggaggaaagaaggctgggggcggggggcgcccgtagaaacggtgccccggcaggaaactgtccgaagtgacaaactttcacatcgcccagactttttttccttttaaagtgaggagttctcttacctttagatttctatggcctcaactcagcaataataggcattcacagaagaatcaaaataaacaaaataaaataatcagcagcccccaacgctcctgcacgaaaatcctttcaaacgatcccgagcaacatttagagatgtttaaaaataataataataattttttaaaagcctcgcgtctcgatttccaaatgggtctctgacaactttgtccgtctctaggatctgctctccaggaccacgcgtttcggatttattgtccgccaacagtgtatttttaatacaagaaatgaagtcttctttcgtctgggtgacccgggtttggtgtgttttggctttttcccccttcctaaatgagctcggagctattccttctggttcacatcacctccctcttttctcactttctcttgctcttatcagcccgatgtgtaatgaaagttatctgaaacccactaaaacttctacttctccttcccagttccaatgggggaaaacaagcaggaggaggagagtttgaaaaggtggggggcctggggaggcgaggggagctctatccccctttcagatcctccgcagcgccttcgcgggtcctggaccctcacgggatcgtcccctttcgcaactccaagctcagccgccgggtttctatttcatgaactgtctctttaaagaggatctgctcggccatccagaaagaacccggggcgagggagaaagggagctatctcccgccgcccagagtgatctgatcggaagccagacgggctcctcttttaaatttttaaagtgacagcagcctcctctggcgggagaggtcacaaaaaggtcgccaagacccaagtcctatagggacagactgattatggatgcaccatcccccttaaacatgtagatttctccgggtaaacaaccaatggggagatctcgccaggcaggatttctttccccagggaaatagcctccgtttcgatgtcttgaaagcacaagtgtggtgtgtgtgtgtgtgtgtgcgcgcgagtgtgtgtgtgcatgtgtgtgtgtgagagagagagagatgggggatgggagggatggggaagggtagagaagtgctttcaggggtgtgagggtgtgtgcaccgaggcaggagggggcgggggtaggggggagaggtagtgctggagtggggaggataaagcttagggtatagggacgctagttcagactaaatataaatagtttagaaattctcagaaaacagcaacctcaagagtgaaaagttgacatgtacatttccagttttctgctaagcattaaaaaaaatttttttaattgaaactcatactctaatttattcccttcattcttgtagctaggtcagaggaagggcgtgcaaaattttcaaaccatatttttctttaaagatattttaaaatctgaaaaattattggcatataacccgcccaaacagcatattatgggtttagagagattgatgactgtctggtgagtctttgccattttctttgatacattaattaaaacaccttgaacgccaaaacgtgcaataagcaatttgacgactcagattatttttgaacgtttaacatcataaatgctgcttttagtaatcggtactatcctatgtttaataactttctaatataccttgggtacatttaaaccaatacattgtagaaaagacattggaagaaagaatacaggggatacatagcaaaacaaaagggtctacagatttattcatggccaactttgtaagatttagtaaatcccactggctaaatggaagtaaacgcgtttttatcacaaaactccattcataaaaacaaatggacaaaatccaactccccagctcaacaatggaaagttaagcaaagtaagcgagtctagggacacttgcgggggagaggtggggcaagaggggctggaaagtgtgctgacggttaaactttagctgcaaacgggataacacaagtgccacccactttttgttttctccaagtgcaaataaacgtgtaaatccagtagaactatattttcccaaaatattgatttaaaaacaaaaatagtagcaaaagggagggattgggggagagaaaatgacaagaggtggtgactaatttgtttcggtggcctgttatctgtgacattgaactgttatttcagataatggccattgtttgagagaaaatcgcacagcagtggtaggtaggacaggaaaaatcctttgtaaataacctaaaacccggtcagatattcccgtagagttgggcgcttgagaacctttaagagctcctggttcgtggccattgatttcctgccctccctcaacttgcccattgtcggagctttcttttttttttttttttttttaatttagccataaattggaccggctcgagctatgagctgttctattttcttcctgtcaggatgagggatttgttttatgatgcattgtgtattaaatacaagtaatctggggaaccgattgcttcagacagtgcggcctgatcagggggtctgggagctcagcgccccaaccctgcggcccccacctccttgccctttacaaaactgctttcaaaacgaggaaacgtcggtaggaaaacaaaaggtcgtctggaatcattggcaggtcctggctaaattaggatttcgtggaaagggcctccgagttttttcccctatattggcttcgggtggggggaggcggagcgactttcaaggtctggatacttgcaggtacggcaggacgccggtagatggcattgcgctccgaaataaagcgcagcgccggcggctccagccacccaggtgaacccgcctctgcccgccaggcgccggcaacacagctctgccttccgcctcgcccgccgttccgcgtccttccgagctacgagaggaaggcacactgcagtccaggcatgtagacatcagcctgagagaaggctattcctacgtctgagcttctcttccccaaatacaaccaagagtgaacgcttaccctc

SEQ ID NO: 315939 - DNA, 4001 bp, Homo sapiens
tctaatgtgcgagggtcgcgcggggggagactgggatttcactggggagaagcatcccacccatctccgatctctcatttctgcgttccgtaaacaacacaattagagagttttgttttcggcgagtgcgagtgtgggagagagaaccgcggcctgtccactcccgaggcagctccagccccgcctattgacacctcaaggaagagcgctcccagccgctccggggctcagtgtccctgagtccccttcaactcgaagtagaagcatttggacaaacgcagtcctgtcgtctacagtcctggcggagcatcacaccgtgtgggaaagtgtgggccccgccggcaaagccaggcgagtcatccaacacttttgctgtaagagtgggggatgggactcccaccgccccctccccaaaccccttagcccacatcccgccagaccaaggccgctccgcgccgggcaggcagggggcgccggggagggttattgaccctggacccaggctgcacccagacgaagcgccggaggctgcgctgcgccctctccgcggcccaacgctctggcagcccgccccctggggtttgctcggcgcccagcaagcccgaggtgcgcgggtcgcagcgcgccctctctgcctcctgctcctaggctgccgccgctggctgtgtgccctccactcccggctctccgagcgctcgctgggcctcttctctccccacgtccgagcgctcgctgggcctctttcctccccacctgcgcgtggctgtgcggagccggtagctctgctctgcccgtgcccccgcccccaccccgcgatcacagcccccaccttggtgtcccctactccccgccgcagtcctcccgccgcgcagcgccgcgccggagagcatggccgagcgcacagcgcccactaccgcagccgcggctcggcgcagtccacccgcccgcccgcgcaacttccagcggccgcctcgcaacttttcccaagtccaccacagccgcccgccgccgccgccactgtggctccctctgagccgcctaccctacccaaaccccagaaacaaaccgaggctcgaaaaggctcccttctcctgccggccccccatcccccgcgcccccctcctcccacacccgggactagctggttggccagaggcaactctcccccgcctggggggaaggggaggggagggggagactttctcctcttctcttcccccccaccccaccccttcgcgctcactctcgcgctctctcctccctcccacccctagtctttgctgcccccacccccacccccaccccggggttgccacagctggtcggtgcgcgggactgagggctgcccaggctcctccggcgcccaacccgggagcgagagcgcgggcgaccgggagcagagactggaaccggcaggttgctggggctgcgctccgcctgccctccacccggggccccggcgcaagaggcagcccgcgctccctcccggagcgctagagacagatatgcaagatggcagaggagggggaaaagccaatagaaaagggatattgcacctacttgtggccagtttccttgccctgcctttggatctcatgctgtgcccagtcctgcagccgctggtgtgtggttggggcttttttttcttggatcctttccttcttttgctctccctctcgctccctccctctctctcctgtctctctctctctctctctctctctctctctctctctctctctctctctctctctccctccctcctgtttctctcctgtttctctctctcttccacacactcactctctgtattttcttctttcactctctctccctccctctctccctttctctcaatccacactcgctatctctccagcattgtcagtttggacaccttcgcacatgcgcgctagacgcccctccaacatctcagcgccgccaaaaaaagtttggagcgatttatcactttgatttggagatcttgtcagatggcaatcgccgaggaggcggagaaagggagccgcggggagggcggcggggggcggggagcgaacgcagggagccagaggggagcagacacctcgcccaaaaaaaggggaggggggaattgaaaaggcttgggcagaggattgattccatgttagaatcgccaacaagcttgtatcatgattattgttattgtttttcccaccataaattgcagacatttttctataccatctacgagggaagcaagaagccaggggggaaaaaaactttaaaaacattttttaaaaacccttctcctgttaaagaactagaagggctggaccctcggctaataatccaggagaaagtgagaatcatcctgaacttgagaaatctactgctgccgctgctactgctactgaagctattgcagcttccgctttcagggttgtaagcagaataaataactggttttttcctcgattttagctgtaataccaatgcttgctgccatccttgggacatttcagtattctttccctaccaagtagtaatgatcacccttgattcccgggtccgggccggcgctggcatttgacatccaaagacctcctgctttctcagaggtcggctgtcaccttccggcctcccccactgctgccccggtcgcctcccgatgcagctctgcttgcctgccattttcactcactcgcttaaacctacaacctcggggtcaaaagaaagaggagtagggaggaaaatcacacactcttaaaaaaatacattgttgaaatttcctttaattacaggatttaccaatgaagtgccactcagaaatgggaattcctaaaggggctagctgtgtacaaggtatgaatcaatcccaactaggtatagattttcttttggtacaaccttcttgcattaaacagttttgttcaataccttccatgtgctatttatgtccccattaatatctgttgcaaatcctgccagacaccataaaagaaaattacaatcttttcagtctccgtgctgcaacaatacatccttgatgttcaagttaaaggaaaagaaaagcaggtcctgggcatgagtttggcaaaggctgtggagggaaaggggaatcattgagaatgcccagtcgtacctgttggtatttattatcaaatctaggactgcagacatgagagagcaaataacaaggttcaaccccaaagggtatcaatggcctgcaaatctctttattcaagagaatcaaagttcaaagaatttgtccttgttaaggatgcctaccattttcctttatccagagctgtgtaattctgggggcatttggctgtaagatagaggtccctggagaaccaagctacaggtctcaagggagacagatgtataaggttgaaatgtgaggaagggaagtaggaaggtaaaggagggaattactcacaacaggagtaaaacaacttccaaaagagaaggctctagtgcccacacgcgtgggcacaagagaactctattatccactctgaattaaagaggcacctgggtttttttccagacctagaattcccgctgtcctgtgcataaaggtgagtgtgctaacacatttggtgtgtgcaaaagcaccagccattccaacattctgttaggttcacacaggtctttgactctgaaacttcccccaaaatgtgactccaccagcttccctcagtttagatggagaggtgcctaccctctgaccagcaaatgtcctccgaggaaacggagaaatgggtcttgagaggctttggaaggggggacaaaatctctagggagagacaaacactaggctgactggcaagaagttcataaggctgcttctgatcggtgtaagagactctctagggaccatcccctaggccaggggacagaccagcagcacctgaagatcccagctgtcaaaatctaggtcttgtccctccaatcctcaccttccctgccaggcaccccaggggtggctgagcaccttgccttggtgcccaaccgcc

SEQ ID NO: 315940 - DNA, 4001 bp, Homo sapiens
cacctatacaccttggttaaacgagtcaagctttcccaggcctgtttcacttagtcaaaaggaagttatagaaagtagtccctaaggtcgcttccagttttagaactccataaaatgttgtgagaccctgaaatccaaaattactctttccagaatcagaggccccagtcgtgaaatgagcattggcctgaagaacaaatgctaaataagcccacacagcaccccaagccatcatgccatcaattatgctgccctctggaaagacagagtaagacattaattacaagatgataaagttcaaccaacaaaatatccctgtccctatcaaaactttaagaatttcctcccaataatttttaagctattaactgtacacttgatcctcagcttctctattatttccagtccttaaccattaacttcattctaagttggggtagcagggtggggtaacgggtaggaaaaaaaatctgggaaatcttctcaaacctctaccatcctgtaaagctggtgctggaaaccacctgtaaaaccttcccagctttcatctgcgtgactccactgatgctagagcatatttagtgtgctaaacctctaaaaggagttgctgttccttacttctcagacactttataagcaagacagtttagccagaacaagcacttactctcctaatgaaagatacacttatcaaaaggaaagtcttaaggacccctccttgcctggtttacaaggccctttctgtgctatcagtgggcccacaaacttttaatggagggtttttagattctcagaaaggtaagttttgaaatatggtcagttcgtgtttagctgaacagaagatgggtggactgcagctggcaaactcagaaagcactgctgggtagcaggtgatcaaaaaaaaaacaaaaaaaaggcaagtccctgggcaaatggtgtagccaaaggtgatcattataactagagacttgttacataattacttgttaactcctgacaaacagatacacagctacaaaatgccatggttaccctagccattgaagctaatgtagctggtgcaagagtcaaggtgtctccaattaatctcattcaaagaaataagcaatcctgggaactattccctcccaaggtaactcgcctgcttttacgtatacaaaacagcctctagcaattaagcccattgcctctagagacgaaaatcagtgtttctccttaattttaatttttaaagggcagaagggttacagaggtatattcagagagctaaatatttatcacttcgataaaaacgacttccattccaaactggaaaatttgaaaagcttccccctcaccttcgtccctggccagcaaaagcaaaacgcaagacctcagtgtaggatgcactgcattccaacatttttcaaaaagtttacgacgatttaccgaagcggcaagaagaaaaataaagcaggcagaaacgggtgagagcgagcaaggtttcggcagggaagaagcccgagaagcgcccggcggcgccgtgcaaggcccggcaacgggaaagcgaccggcacatggaaagcgagcgccccagtggagcgcggggactgacagccgctcggtctccgccgccggggggtcgcccagcacccccagcctggcccccgcctctaatccccctccccgacctcttccaccgcagcgccggcgatgcccgctgggccaacttggccccgggtcagtgctgcagagcgcggccccggttgccggggaggccgccggcgcccttacctccttctgcttggggtcctgtgggtagacgtcgggcggcccgagccgggggcgcttcagcggtctctgctcatagctgagaagcccgaaggcggccatgatctctcatgttaaccggcgaaatgaatgagagttggagctggagcagccgcctctgagcaccagggagcagcactttgcagacagactccctctctccccctcctcgctcgctcgctcgctgtggcgctgcaggcaggaggaataaagcaggttggatgctgccgctgcccggcagcagacacgcactgatggggacagccttcggcgggtactcggctgcgctcgagccccgggacgcaccgctccggtggcggcggcggagggactagaggtcggccagggtcctccgcggcgcctgcctcctctgctcccccctaccttgtctccagggggaggagcagctgatgggaacgtgtgacttttttcaccaatggacccaaacccaccccagctgggcgcaggatgggggtgggggtggggcactggaaaaaaaaaaaaaaaaacttttcttggcgcctaggctggtggctgaagtgctcgcccaaggcgagggtggccctcccctcccgggaagaagctgtggagcggaccgcccccgcctctcttccccggcagggacccttcccccgccgccacgcgccccgcagaccccgccacctggacacggaccgggccagtgcaggcagaggcaggtctggagggggcgcgagacgcagggatgcggccggtgggaagcggccggtgcctcctagacgcccgccaggttccagtggcgcatccgcagctacggtcccctcggcggctccgggcaggcgccgaggcgcgctgctggcggtcgcggcggctggagggggccgtgctcacggtggcgtggggccgacttaaccctttacagtccctccaggggctggggaagggggtgaggagcgatggctgtgagcgccgacgggggcagccagcccgcaggcgtctcgggctcctccagcccgccgcctccccacggccccagctcctcttcccttccgcccccaacccccaacactttacctgttggtccgcggctagcgggctggggctggcggcggcggggtcactccggccgccgcagcctccatcattcgggttgggatgggggacttggatttgattttatttgtgcggtatctgcctcgcccggacgagctccgggaacgccgcgaagtttgccactgtctgggggcggcgagcgacgccggctcgccgccggcgttctcgcccccacggcccgggagcgcgagcttccgagttggcggacggcggcgcggcgtccgcactgagcatgcccagctcggcggccggaccgcggaggagttggctgagagcgcggtgagcgcgctccaatccgcctctccgggttttcgcagccgcagagcgcgcagcccgcgggccccggcgccgaggctggccctggggtgaacctgggcgagggagggagcgccctctggagccctgctccaagccccccgctgcaccctccgcctcgacctccccagaggtcgcggtccccgtggcctgggccgaaaacctcacctgcgccgggagcgtggaaggggcggggggggtgatcctccagggcagaccttggtcatccaacccgccctcgctcctcgcttcggggcgcgggcaccaagatgctgggccacctggcgcgagctctgcgagaccggagccgcggaggcgggctcggcctgtcctgagggaccccgcgggaggcgtgcccgggagaatgcgcccgcacttggccaagaatgatggctgccatttatggagccttcgctacgtgccaggatcttgatagtcagaatctctggtccttacaaccttccacggtcttactgtaccctttttatggatggagaaattgagccagctcagagaggaccactcacttgccgaaagccacgaaacgagtcggaatttgaacccacgactgattctaagtttctgacctgttttccctgacttggacttggagggactgggttcctaacctgtccttgcctgatggactcacgttctccacggcttgaggcattctcggccttccctctctgtaaggtggtaaaggcagattctaaccggaagcctttgatacatagtaggtgctctggaaatgctggttgaatctgaacatcaactttgatgtt

SEQ ID NO: 315941 - DNA, 4001 bp, Homo sapiens
catgaatttatatttttgtttttaaaatttttaatgtttaaaattttaaaattcagaacatagggtctcactatgctgcctaggcttggctaattcatgttgactattcacaggcacaagccgcctgcctcagcctctggagtagctggcaatagccaccagacctggctcttgaatttaatatataatgtttacaactatcagatcagcttaaagaaatagaaaacacccactaaagttctctctcctatatgttaaccaaaccagaaactgctaaaactttggtgttaagaccaaacagtatatttctctcctaaaacgcaaagcattttgataggcttcttaaattctctacttcgcactctccctaggaatgcaatacagcacacctcttcacatttttttttcttttgagacagagtctcgttctgtcaccaggctggagtgcagtggcacaatctcggctcactgctatctccgcctcccgggttcaagcgattctcctgcctcagccttccaagtagctgggactacaggcgagcaccaccacacccagctaatttttgtatttttagtaaagacggggtttcatcatgttggccaggatggtctcgatctcttgacttcgtgatccgcctgccttggcctccccaagtactgggattacaggcatgagccatggcaccctcttcacattttaaatgaagaacagctcagataaggcgtaatattagcttacctctctacatgatcttagctcctcaaactctctggtggtccagtgtctgtctttgaagaaattagtgctatttcttttgtaaaaaagatcccaatttttctgagcctcttgttccaatttctgctgtttaaaatcagacaccaaagtttggtctcttttcagtttctcctcttcttcagaggtgagaatccttgcctgcagccctttcctttgcaaagaagccatctctgaaactgacggtaacacttaacacagctgaagattctccatcaccaaataatatgaatccacgctaatggatcagatacatttcctgaggtgagtttcacgcctcaaacagcacagggggcttcgcagagaaaagaattagattctggttagtggttacagttcaagacgccaggttcaattcaccaaatgtttatgagatgcagactgtacaaaaaaaaatccttcccgctatatgagaggtcacaaagaagacaaacacacagtccctaccttcagtgggcttacattcatttcagtggccagactatctcatgcaccatacttttattcaaaccagatgagtcaactattacaataaatcgatttagtttacgaaaaaggacgctctcaagaactgactgggaaaccttgcgaagaaaatattcctcaattttcggtgcccgcgaaaggggtgacttaaaaaccacaatggccttagctggaagcgggtggtcaattgtcagatacaagtgaggtcatcgtttcccaagggtcggacctccgttttttcgggggaaatgaagctaagcctgggtgggctcatttcctgatcacactcacaagaggctgtcataggaaccagagggagcgtcactttgcagggactgagaccctcgcaccgccatcaccgggcaaagtggagaaagagacccaatgacgcgtggctgaggtcccgaggatccatctcaggaccctcaggatagactaggctgcatgggcccctagaccctgaggagggcgtccatgatggctagccgacccgcgttaatttagtcagccacgctcagggctcaccgtcatcagttcctaaattcacctgcagggctagggccaggcgcactcaccccacagccagccccactgggcctcggaggcagaatacgggaagaaccgcgaaacaaccctaaaccaattctgaggaccacgaattcggattatccgggagttcttttgccatggcaccgcccccgccacttccgctaggaacccggaagttcctacccgacgccggaagtcccacggccttgcctcctcagattcctctctcacccccacgcagaggagagaacttgcttctggacccgggtgggtgccggctcggctctccttgtcttccagagcggtggcccggaagcacagtcctcccagacgccagcgccagaagctcggatcgcggctgcaccgggagagcgccgatctgggtgcgaggcaggtgcggggccatgaatgggaccgcaaacccgctgctggaccgcgaggaacattgcctgaggctcggggagagcttcgagaagcggccgcgggcctccttccacactattcgttgtaagtcagcgctccccacggttcccttcggccgctccagccgccacatatcaaccttgactccttcctttcttccctcggcccttcagattccagggaaccccctgccagcgtcagttactttctctcgaaccccaaatcctttgggacatcgatttgtcccttcttttacccagattatttctcccaaatcttcgtcactccctactattcttctacctcacagtctcaaacactagttccaaaggtctttggcctctttccatttccatccctccccgcccccaacctcgcccctaaggcaaacctccctcccccaaggcaaacctcccccctcttatccgggtccacttctccctcgaaacccctcccctcctttccgatgctcccatcagggttctccacatttaaaagacgcttcttgtttgttatgagcctcatccactgccttagaacccattctcttccctgcttttctcctccgacttggtcctggactcccaaatactgtgctttgtcccctctacagccaaagaattggcatcctctctgcgcctcatcagagtcttcttccatctcctttctgtgcttcatttgacttggatgtcttttgaggtcacctataccacccgggcttttcctccagaccaagttccttgtgggtaaagagtcaaatcagagttcgtgagcctgggataggttaaagattggtctacgtttggaagcagaagagagcaggcgtaaggaatgtccaaatagtcattatgccggacctttttctacataattatagacgctgttgagagagtgcacttccaccctatgtcctgggtgaaggtttggcagttaggaattggctgacagagcatccctccgtgattcatgaacttctggtttccgtggtgctaacgctgttgttaagacttgtttttgtcagaggacctaatagatgtgactcaacacatgtgaagagggcgttttagataatgaaatcccatctttgtgtagtcacttgccatgccattgctatgcttcctactgacagcagatccagctctttcagagagaagagatgggaataagataagaacatcatttcctgaagagtttactaagttgatgttttcttttggtgaagggcaatgtggaatttaaatcatatagttcatgtgtgcacctgtcctgcagtttgaggcaggtgtgaatgtgaattaagatggctattatgttgtattctaactgcagtttagaaacacgagcaggataacttgcggagatacagttcagttgtctgctatgaacatctacgaagtgtctttgttaaagctgtggaactggctgagagtggtggctgacactataatcccagtactttgggaggccgaggtcgacagatagcttgagcccaggagtttgagaccagcctgggcagcatagtgagaccccatcactattaaaaaaaaaaaaaaacaaaaaacagctatggaacttgagtatggcaaatcctaattttgacagtttctatgcggaatgaaatcagcttttgatgatgctgtggcctttcatatttcatatagagtttacagtcacagaatctgtttcatatgctgttacttttgatcctcacaaccctaaaaaagcaacttattatggatgatgagacaat

SEQ ID NO: 315942 - DNA, 4001 bp, Homo sapiens
atgcccgcttcccggaaggcctcgctcatgttgccgcacttgtgctgctctgggtccgaggtggcgcaccaccgcacctccatgccaccgagcactgcgggcaggggaccgtgaggcccggctcccccgccctgcccagccccggcccaccatggagggtggctccagcagttctgtgtgagcccattcgcctggacagccagtcctctagggcagccctgccctcccacagggaggcactaggcgcagagacaggggaagggctggtattcctgtgctcagggcctctctgaccaggagcacggctgctggcaaatggaatggctcagaacccggccctttatggaggaatgggagggtctacaggtcgcttctcagctacccccacctggtgggagcactggctagggagtctcggcaggccctggaagtggaagcttcttcccctctccaggcctcccgaagagggtgctcgtgtaggttccctcacccagcagtgtccctgggccttcctcatgaactgggacgggagagtgaggtgagggggctgtgggtgggctgccctccaggagccctgtcccctcggggagtgtctgcgatgatgctggctgcaaagccaccctcggtgggcacagtgccaggccctgccaagggaagacggcaggcacagaggggaggctgaggacccatcagggtaggttcaagcctctctgagcctgcttcatcttctgagagagcagataaaaaccccaccttctgtgttgaaagtaaacccccttgtagagagcctgagacacccacatcctcagtggacttctgcttatgcctcaggatctgaccgggtcagagtccccgagagctcccaggctaggggcccagaggaaggggtgctggagccccttggggccgatgactttcaggcctgagctcctctgccattcaccctgccccagccagcactgccagaggcctgtgcaggagggagggaaacgcatgactccgcccgaaaccaggtcaccctcccgtggcagccccaccagcccaagggccgagactgaagcttccgccacagccctcccctccccactcctggcggaggcctgggaagtcgaactgccctcccctccgcagcgctccaagccccccaccacccaggcgggaaactgcaaagttcagacggggcgggggtggcggtggcttcatcgtttgcattgatgagtgcgtcgcctgcggccacagcggtgccacgaactccatcccctcggcggtcgccgcccgcgatccccgcgagccgctccccgaggtcccgcctcccgtcccaccatcccgggccctgactccccggggcgccgacgcgaggggacccggcctccgtctccacctccatccctgcatgtgccagaaacccccgggcggactcccgcgcctgccggtcagtccctctgaatcttctcccgcgggggctcgggagaaagagctgctccgagcccccaaagtcttcctgagttcctgcgcccgtcgggaggggccgccctccgggagctcctctccacaccccgaggcctccccaccacgcctcagcccgcgcttctccttggagcgtcggaagcctcgggtgttcgaggccgcctcctccaagaagccttccagacttccccgtctgcgcttcagtgctagttccctccgccgtcctcactcgaccccgagcccctgcctcccccgtctcactgccccggagccgcaggctcaggcacatttccagccccgggacctgctcagccgggccgcggcgccccgggacccccgcccgcctttggctctcacagcggggcctcaccggtgcgcagagccaggagcagccacagagccccgctcggaccccgcatggcgccgtcggggctggctggggccgggctggggctgggtccgggtccgaggaggtccgcagcagccgggcttcctccctgctccccctcgcgctggcccgagctccttaagtgcggccgcgagttcccgggcggaatccacgcccctggggcgcaggtcacctcccgccgaccccggaccccgcccctgggcggccccggcgcgccccctgctggaggcctcccgctcgggcccgggcgccgctgctcggggctctcgcctcagcctcctaccccgcgttccagggtatcctcccctcctcgcgccctagaaagactccagataccgtgtctaactggagagagaaaagctcagacgtggaaggaaggagaggtcagaatcccagagtcggggctggagggcagctggaggatgatctcattcacgcagcagctccctcccagcacagctgcacagaggatctgggatacgggggagcccaggccgagcgccctggcgaggggggagccgggcaggggcatctcggccacagctgcacagaggatctgggatacgggggagcccaggccgagcgccctggcgaggggggagccgggcaggggcatctcggccacagctgcacagaggatctgggatacgggggagcccaggccgagcgccctggcgaggggggagccgggcaggggcatctcggccacagctgcacagaggatctgggatacgggggagcccaggccgagcgccctggcgaggggggagccgggcaggggcatctcggcctagccgactgcctctcctcgggcctagagacgggaggtgacttgcccgagtcaggcatccagtcagtggcagagccagctgattggaaggtgagaagaggaccagagaggaattggaggaagcggaaaaggagaaacaggcggagaaggggaggaagagagtgaagaaggtgagggaggaaagggtgggttgaccgtatttctaggacagtggttctcagtgtggtccctaggccagcaacgtgagcatcaccctggaacttgctggaaatgcaagtgctcaggccccacctccgacccactggatcgacagctctgggggcggggcccacaatctgtttttatttcggggcacagcaaatgttgagaaccactgtcgcaggcgggcaaaagcggcactccccatgtggttggggatgcggggaatgaactgaagacattgttagtcacctgcctccatttaggcctcacctttatgtcatcagcccctctgagactcagaaatgatgtctctctctgacatgggtaagtacaacagtgagagagaagacatccctctgagtttgtctgtccttgagcttgctctgcgccctggggaaggaaggcctccctcctatggggccatgaagctactgcttatcacacactggatcaggggaaggaacatgggctgggcttcaggagactcgagctctactttttaaaaaccagcgacttacagaccctgggcgagttcgtcgccctctctgggcttgttccccacatgtaaaaggtaggtcatgatggccgtgacgtgccatactttccgtctcctgtctgctctggaggacttgtgctgtggaagctgtttctccatccccccagatggatcccttcttcctagtttgcacaaaggtgccgaatggactagcaggcagccttgctagaggggctgatggcttgtcctaagaagatggaataaatagaagagtccttaacaagcctcgttctcctgaccacgaggatagaaaggctcagttggcacactccaggagccaccagatgactggcaggatctgtttgatgactaagtccttcctttggcaaaactccacgtgacgctgatagggagtgagaacaaccataacctaagaggtttgctgggctctttcacaatgaagttcttcccttatctcttgggtgtcattcagctgtgactcatcagtgaacttgctgcctctgggttctcagggattctacatcgggcccgttggcccagggttggcatgaacgcgcatcacctttgtggaatggggaagtctgcctcagcttgagccaggattctgccatttctgg

SEQ ID NO: 315943 - DNA, 4001 bp, Homo sapiens
gatgcccgcttcccggaaggcctcgctcatgttgccgcacttgtgctgctctgggtccgaggtggcgcaccaccgcacctccatgccaccgagcactgcgggcaggggaccgtgaggcccggctcccccgccctgcccagccccggcccaccatggagggtggctccagcagttctgtgtgagcccattcgcctggacagccagtcctctagggcagccctgccctcccacagggaggcactaggcgcagagacaggggaagggctggtattcctgtgctcagggcctctctgaccaggagcacggctgctggcaaatggaatggctcagaacccggccctttatggaggaatgggagggtctacaggtcgcttctcagctacccccacctggtgggagcactggctagggagtctcggcaggccctggaagtggaagcttcttcccctctccaggcctcccgaagagggtgctcgtgtaggttccctcacccagcagtgtccctgggccttcctcatgaactgggacgggagagtgaggtgagggggctgtgggtgggctgccctccaggagccctgtcccctcggggagtgtctgcgatgatgctggctgcaaagccaccctcggtgggcacagtgccaggccctgccaagggaagacggcaggcacagaggggaggctgaggacccatcagggtaggttcaagcctctctgagcctgcttcatcttctgagagagcagataaaaaccccaccttctgtgttgaaagtaaacccccttgtagagagcctgagacacccacatcctcagtggacttctgcttatgcctcaggatctgaccgggtcagagtccccgagagctcccaggctaggggcccagaggaaggggtgctggagccccttggggccgatgactttcaggcctgagctcctctgccattcaccctgccccagccagcactgccagaggcctgtgcaggagggagggaaacgcatgactccgcccgaaaccaggtcaccctcccgtggcagccccaccagcccaagggccgagactgaagcttccgccacagccctcccctccccactcctggcggaggcctgggaagtcgaactgccctcccctccgcagcgctccaagccccccaccacccaggcgggaaactgcaaagttcagacggggcgggggtggcggtggcttcatcgtttgcattgatgagtgcgtcgcctgcggccacagcggtgccacgaactccatcccctcggcggtcgccgcccgcgatccccgcgagccgctccccgaggtcccgcctcccgtcccaccatcccgggccctgactccccggggcgccgacgcgaggggacccggcctccgtctccacctccatccctgcatgtgccagaaacccccgggcggactcccgcgcctgccggtcagtccctctgaatcttctcccgcgggggctcgggagaaagagctgctccgagcccccaaagtcttcctgagttcctgcgcccgtcgggaggggccgccctccgggagctcctctccacaccccgaggcctccccaccacgcctcagcccgcgcttctccttggagcgtcggaagcctcgggtgttcgaggccgcctcctccaagaagccttccagacttccccgtctgcgcttcagtgctagttccctccgccgtcctcactcgaccccgagcccctgcctcccccgtctcactgccccggagccgcaggctcaggcacatttccagccccgggacctgctcagccgggccgcggcgccccgggacccccgcccgcctttggctctcacagcggggcctcaccggtgcgcagagccaggagcagccacagagccccgctcggaccccgcatggcgccgtcggggctggctggggccgggctggggctgggtccgggtccgaggaggtccgcagcagccgggcttcctccctgctccccctcgcgctggcccgagctccttaagtgcggccgcgagttcccgggcggaatccacgcccctggggcgcaggtcacctcccgccgaccccggaccccgcccctgggcggccccggcgcgccccctgctggaggcctcccgctcgggcccgggcgccgctgctcggggctctcgcctcagcctcctaccccgcgttccagggtatcctcccctcctcgcgccctagaaagactccagataccgtgtctaactggagagagaaaagctcagacgtggaaggaaggagaggtcagaatcccagagtcggggctggagggcagctggaggatgatctcattcacgcagcagctccctcccagcacagctgcacagaggatctgggatacgggggagcccaggccgagcgccctggcgaggggggagccgggcaggggcatctcggccacagctgcacagaggatctgggatacgggggagcccaggccgagcgccctggcgaggggggagccgggcaggggcatctcggccacagctgcacagaggatctgggatacgggggagcccaggccgagcgccctggcgaggggggagccgggcaggggcatctcggccacagctgcacagaggatctgggatacgggggagcccaggccgagcgccctggcgaggggggagccgggcaggggcatctcggcctagccgactgcctctcctcgggcctagagacgggaggtgacttgcccgagtcaggcatccagtcagtggcagagccagctgattggaaggtgagaagaggaccagagaggaattggaggaagcggaaaaggagaaacaggcggagaaggggaggaagagagtgaagaaggtgagggaggaaagggtgggttgaccgtatttctaggacagtggttctcagtgtggtccctaggccagcaacgtgagcatcaccctggaacttgctggaaatgcaagtgctcaggccccacctccgacccactggatcgacagctctgggggcggggcccacaatctgtttttatttcggggcacagcaaatgttgagaaccactgtcgcaggcgggcaaaagcggcactccccatgtggttggggatgcggggaatgaactgaagacattgttagtcacctgcctccatttaggcctcacctttatgtcatcagcccctctgagactcagaaatgatgtctctctctgacatgggtaagtacaacagtgagagagaagacatccctctgagtttgtctgtccttgagcttgctctgcgccctggggaaggaaggcctccctcctatggggccatgaagctactgcttatcacacactggatcaggggaaggaacatgggctgggcttcaggagactcgagctctactttttaaaaaccagcgacttacagaccctgggcgagttcgtcgccctctctgggcttgttccccacatgtaaaaggtaggtcatgatggccgtgacgtgccatactttccgtctcctgtctgctctggaggacttgtgctgtggaagctgtttctccatccccccagatggatcccttcttcctagtttgcacaaaggtgccgaatggactagcaggcagccttgctagaggggctgatggcttgtcctaagaagatggaataaatagaagagtccttaacaagcctcgttctcctgaccacgaggatagaaaggctcagttggcacactccaggagccaccagatgactggcaggatctgtttgatgactaagtccttcctttggcaaaactccacgtgacgctgatagggagtgagaacaaccataacctaagaggtttgctgggctctttcacaatgaagttcttcccttatctcttgggtgtcattcagctgtgactcatcagtgaacttgctgcctctgggttctcagggattctacatcgggcccgttggcccagggttggcatgaacgcgcatcacctttgtggaatggggaagtctgcctcagcttgagccaggattctgccatttctg

SEQ ID NO: 315944 - DNA, 4001 bp, Homo sapiens
actaaaaacacaaaaattagtcaggcatggtggcacgtgcactgtagtcccatttacttgggaggctgaggcagaagaatcgcttgaacccaggaagtggaggctgcagtgagccaagaacatgccactgcactccagcctgggcaacaagacaagactctgtctcaaaaaaaaaaaaaagaagtattccctagtaagacatgacattcctcatcacctttaacagttatgaaactcctttttccccctttccactgcaattcagcctcatttgagagaatgagatatgtctgaggtcttggcttaactgctaaattggggaggagacaagtataatggttaaatgtggactgcctgattttttgtctgggcacttattagctgtgtgatcttgggcaaactgtttaacttttctttgacttcgtctcttcatctttaaaatgacagatggtggtgatgaaaattaaatgaactattaacatagctatttctcatcacctagtggtgatgaaaattaaatgagctattaatatactaaagttcttagttgttattaataccatttaattttccccttctggaggttagaaaggggttttattcattatggtacttctcatagtatacagtataatgccctatacatgtgttcaataactaacgttgaaagaataagcacttttatatattttcaacagtaattactttaaaaacttaagaagaactaaccttcaacaaaatgtgatccttcagtaacaaactccagtaactggtcaaagattgcagtaatcgccttcttagccagcacaaagtgcttcagtggagaaacaggttctgccattatgctactagagggagataaagttagaaaagcaccaactaaagtggatgatagacatgcaaactgatgacacaccagtgacattcatcaactccccaatgaaataaattatgctggcaaaatgtttttaggtaattcttttttgggagtgttctagtcagacagttagagacgacttttgaatgatatttcactaaaataagtgaaatctattagccaaaatcttggttgcaatttctactcaatttccctttggtgaagacgaaactaattgtgactaagtttgtcactgcatgtgactctaaagtacatcagggaacagggttagtgaggcgaagccaaattcacacacaataaggaagttactaagtttctcaacctgaagctctaggtgagtaggagtggatatgcagagtgaggaaataaaattctaagatcacaatgtgaggctgacatttagaaaggtaaggcttcaagagggcattaacgcttccagccaaagtaccagaaacttcaaggactataagtttaagaaagcataggtggtttctcaagaaaaagacaccaaagacaaacaatcacggtctaatcctggtgtgtacatggaaaggaacagtggccataaagaaggcggattcttccagagagtcaagaaatgaccgcgcgaaggagctgcgtgggaaaagccgggtgggggtaacgccccggtccggccggtgtgaacacctgccttagaaaaggcctcccaccttcccacaccgggcgcaggagtcagggccagagcccacccccgccccgcgcacgaccgtctaggtccggatcccccaatcccacccccgagcacggcctcgtgggctccgtgggctcgactcggccgccagccccgttcgcccgacagctggctctctcctttcccacaggaccgcggcgggcggcgcctcgtcacacaacgctgcatgcacgactcccgcccccggtccccagtcgctcgaaggtcactccgagcgtcgcaaacgtgctgtcgaggcagccggcactcacagtctccgctccaactatcacccggcaacagcaactcggccacagatgccaaactgcctcatcttcccgagaagttaaaggcggagaggaggcagggggagtggcaaagggcggtcacttccggcctcttgcctcctctgttctgtttggctccgtggccggaagcgcatctatgccaggcgccattttccttaagggcagaaggcaaggtttgttgtgggcagagactgctaccaggagagtggttttccgttcccccttccaacttcttcccctcccttctcccctcaaagtgtccaagtatctgcccagcctaggcttagctagcttccaatgatggtggtggctgacgcctataatcccagcactttgggagaccgaaggggtgggatatctcttaagcccaggagttcgagactaggctgggcaacatagggaggcgcccccccccccgcccccgaccctcttcctcctccccgtctctacaaaattaaaaaatgaaaaattaaaaaaattttaaaaacttagcgaggcgtggtggcacacacctgtggtcccagctacttcggagactgaggcggggggattgtttgggcccggggctgcagcgaactgtgatttatcgtgccactgcactccagcctgggcaagagagcgagacattttttcaaataaataaataaataaataaaagaaaagaaatccagatcgtattactttccgaacttaaaaagctttccaggccgggcggggtggctcacgcctgtaatcccagcactttgggaggccgaggcgggcggatcacaaggtcaggagatcgggagcatcctggctaacacggtgaacgcccgtctctactaaaaatacaagaagtagccgggcgtggtggtggcgggcgcctgtagttccagctactcaggagcctgaggcagagaattgcttgaacccgggaggcggaggttacagtgagccgagatcgcgccactgcactccagcctgggcgacagagccagactccatctcaaaaaaaaaaaaaaaaaaaaaaaaaaaaaaaaaaaagctttccaacagcttgccattatacttaaaattaaagcttcggatggtaaccgcccaaggaaagccttcaccttgcccgctgactagccagaactgatacaagacagggggattgcaaataaagacttagtcacgcaaagccggctgtatgggagactggagttttattattactgaaatcagtctccccgagcagcactggggagcagaatttttaaggacaatttggtgggttgggggaggccactgagccaggagtgctgattggtcagggatgaaatcgcagggagtggaagctgtctttctgcacgagtcagttcctgggttgggggacactaggtcagatgagccagtttatcggtctgggtcgtgccagctaatccatcagttctgagcataggtagtctcaaagggaacatttactctgtttgaattttaaaaatcatgatggtatccttttattagttctgtacttaataattatatttaatataattactgcattttaaagcaagagtgacatattacaggctataaattatagcacggtaattaaatgtttaatatagtaagtaataagaaatttaatccattgcttttgtgtgtgtgtggaacacacatattaccaaaaagccaggagagtaaacacaaagaaggaaaagaattaaaatataaacgctaaaaccaacatagatattaacaaaaactaacgttatttgaaagaaattatcaatttgatgtatcactgccaaatctgttcaagaacataaaaaatgaaaggacacaaattaaggggagaataactatagatatatatataaatgccaacaaattgaaaagcttagatgaagtataaaatctgggaaaacatcaaataccaaaattagaccgagaaaaaatagaaaactcgaataggctaagtttcccacatattcaaaactagccaggtctagatgattttcggggtaactttctattacatgtttaacgaaaagattaatcttgccgggtgcgatggctcacgcctgtaatcccagcagtttggatcatgaggcgtgtg

SEQ ID NO: 315945 - DNA, 4001 bp, Homo sapiens
agcttaaggacaaaggaatggagtgtaaccattctgacaaaaccaatatttgaaacaagttctctaattctacaaactacccaaaatcaaataatttagtgaatacagggccaggagtgaaaaaaaaatgaaactgagaattctaaaggattaaattaaaacatgtctttgggggaactggaaagagagaagtagggagagatctgaccatgcactcggatttattttaaagataaaataattgagattccttcgtaggctacaagaaaatattgcctccatagctctactaactctacaagtgcacgaggctattggttctaatgacaataaaaactgtcattagaaaggaatgaatctggcttctgaattctaggcagataaccagaatttaccaaaaactgtctgtctgcttgagtggggaccattttttttaatgttttattgttgttctttctttgttgtggtggtggttgtttctaaaccctgctttaatctcttttaaggattcaacgtcctgctttaaagctaatggatgggcatcatcttttaaaaaacaggggaggggggaaaaaggagttgcaaggaaaccaaagcccaaagcatccttcatgtctacttatatgttcagcgctagaatagttatccaccataatgttcttaaacctgctgattacacgggctccagctagcctcctgaaaaacacattcataccaaattaatattagaattttgcttaataaattaaaaactgtaacataggaaggaaaatttttttctaattatcaagaaactgttttcggagacatcagatttcataagagaaaccaaccactgtcaagactaccacaagtcccgtccaatatgattgcttcacagtggcagagtggaagattaagagaacaatatctattcactgaagctatcagcaagacacactcatacattttctcaaagagggtgaaaaatatatagaagactgccgacgaaatcattcacgttttttaaaagctggacaacattgtaagaccctgtgtctaaaaataataataataataaagccgggtgtggtggcgccccatctgtggtcccagctactcgggaggctgaggcgggaggattgcttgaacccaggaggtggaggctgcagtaagccactttcacaacactgcactccgggctgggtgacagagcaagcccctgtctcacctaaaaccaaacaaacaaaagttgtttaggaacagttaaagctttctgaatttcctccgaccacgtgtgccaaaagaggaaccttgaaaatctggagttaccttcatatctatcgcctctagggcgagtcgctagcccctgggacttactgaagagcaaaggagtgccacaaaactcgcccagctcagtccctcgacctccacgttccggacgcggagtaactagcaacatccacaggtgtggctggaatcgatcgcaaaggggaaaataaggaggcccaggagcttaagacagaagctgcgctgaggccccgtggcaccagtgaccacgatgacgatctacctcgaagagaaagtcgggaattccttaaagatcagccccaacccacccggccggctcaccaaagccaaggaagcacatcagtaacagcaccaaaagccggtgcgccaggcgactggggtcgcagagggccggcagggctccaggggcggccggggcacctctgtcggcctcgtcagggccgcctgccaggagcgcccgcgcttcctcatcctcctcctccattgcgcccgcaggagacggagaggggaaagtggtgacaactccaaacccaggcaggaagcagcgcccgtggaacactgtcaagacggcggtcacatgactccgggagctcacgtgacgccccggcaggtcacgcagggccacgcccatgtgagcggccgcgagcgctgggaggacggacccagcggtcgatgacagggcctggcgcggttcgcttttcctgggtgactgtgttcgtggggctgaggccctcgaggtgcccacttccagctttccaccaattactgcactgtctttccgtttcctgccccgctgacgcgtacacctatttcagactcagcgcagctccgcggggagaaaagtgcggggctccctctcggctccacaccagactccggagtagttcgaactgcgctggggtcgccaagacgcgcgctgcccttctcccagcactgccctccccagcgtctttgaccactcttaatacccacaaacttgatcggacaatttctggtgtgtccagccatgtgtcacgtactgggaatacaaaatagaatgaggcaagctccctgacctcaaagatttcagagttcagttggagaaatcgacagaatctggtacttttaaaactaaacatgatgaatgaatgtggtgagaacagcggcagaaaatggcactgaattccatagaaatatctggaaaggtcatttcaaaaggggagaaaaggtgcgtagtttagccagctttcagggcaagggagtgaggggcgctgaagctccttgaagttgaaacccaggctagaatgagtaagaatgcgccagtcagggtgcttgtttgagcgggttggttgcagggcgggcagttacgagggataataaagacaaaagcgtgaaacagaactgggtgtgtatgtgtttgtgttgaacgacagagaaggaactcgagtagaaacactaaacctgtttcaagaagagccatgcaaggattttgagcacagcagcaggactgcaagctttgtgttttaaaaaacattcggtctgccagcacagcaccatcgtcgctttctgggagccctcaggctttactaacagaattttgagggcgtcaaagctagaggctgaaaactgtgaggattattaggaagatgctgcagtcgtaacgattagagatgacgagggcctgttagcaataaaaagcaggaatggcacagaagaaaatcagtaattatttaggaggtaaaatgggaataactgtaaataatagcctatgcgatctgaaagagaggaaagacttgagagtgtctcccagatttctagcttgggccgccaatagagatcaaaatttagagagagaaggaggtaggagagagtgtcaaggatcaggtgctgcctttgagatgtctatacatatctccactttcacagtccattctctcttcagctccagtggaggagctcccgatctaataaaactgtcttgccgagaggagtaataactccatctttccaaatacattagtcacttctctgtcatcttactcaacttctatcaattgatggaattgacagccactcctttttagcctccttggcaccatacttgccttgtgttcctcccactttgctggcctatctcatttgctgtctcatttgtcagctcctcctcttctattcaaaatctagatgttcaatgatgcaagacccattcctgagctctcttccactcatccattcccataactttaaataccctccctctgctgtccagtaggtagccatgtgtggctgttgatcatttgtaatgtggatagttggaaaggagatgtgcaatacgtataaaatacacaccagatttcaaagacttgtatgaaaaatagaataacctcctaatttgaatactgattacatgttgaaataatattttgcagatattaggttaaatgtatatatattaaaactggccgggcacagtgactcacgcctgtaatcccagcactttgggaggccgaggtgggtggatcacctgaggtcaagagatcgagaccatcctggccaacatggtgaaaccccatctctactaaaaatacaaaatttagctgggcgtagtggcacccgcctgtagtcccagctactcaggaggctgagacaggagaatcacttgaacccgggaggcagaggttgcagtgagccgagatcgcgccactgcactccagcctggtgacagagggaga

SEQ ID NO: 315946 - DNA, 4001 bp, Homo sapiens
gtgacacatgtatgccatcttcagaagctcagaaacaagcaggaaaagtgagcaaaggtgaagatatatgtattacttcgggtttctcatccatctaggggattttccttaattgtcgggtttgattttaaatgaatgcctgtacaaccggaaatcaactccagtacaaaaaataaagtcatgtggaatttttgaaaattgccatacggtaggatccatatctgagttgttataatgaaaaaagaattcctgcttcttaaatttaaaaattataaagtatacattttagctttgttaacattgctcagcctaacattaaaacggcaggggaagtaggtcatagagaaagcggccccgccccagatggcacatgataacgaccagaggagaagcaggggccatgctcccctgtcacctggggtgactttctggggaagacttacttgggtgtgcctgtgggtttccagtacctgcagaagaggtactgtccgtctgcattgaccaggtgagggaggtcctggtagggaatgctctgcggggtccgcctgggggaactttcctctggcatgctggaagggtcttcaggtcctagaaggaaaagtgacatattccaaagtcagaaatatctcaagaacatgtatggataggagagaaaagtctagttcagagtcagtaacatttttttaaaagcagtttaaaaaacccctctgtttcaaaggtttaaaacatacatacatttcttgcaaacctctccaagactgaaaaatcccatttgttcttaagaaaatgctcactttattttttaagtgcctcattacagtttttcccccttcccatctgtgtttattttaaatcatttcaggaaacttcatcttaaagactattttagctgtaatcaagtggaaattatagtcagctctatgggtacaaagacccagctgcaagaagacccatctatcttaaaatctccaaggaacagtttcaagtgggcacaataatgaggtggatgatactcagattattcctcccatctgaaattccaaggatacatgacaaacctgtttccattatgtgctggcgtttgcattccacaaccacgacagcctggagaatcagaaccaggcaaatcgggctgttccctcatctgggcggccccaaggcagcaggaaggcagctccgagccctcttcccgcacccagaccctgcctttcgggctggggcgctcagccgggagcctgcttccagctcccaccggcaggctctccggggctcccctccctccccagggcggggagcggcgctgcgattctccactactagttcatgtcatcacttttcctaaacaaatcgctagaggggctcggagaagggaggggcccgggaaactgggaaactagctccgcgcacaccgaggcacctcgcagacgcacaaatgcgggtgcccaaggcaaagtcgcccccaaggcttctcacaaactttgcttcctgtgcgtctccgacagcacaggacacgtagccccgaagctgtcatcggaaatgccgctgggaaaaccgggtgggcttcgccgggtgtctgcaccggggaaggtggggactagaaagatggagttgatggggacaagttggtttgggggctggtgcgaaggagcagggagggcgcgcgcgcgcgcacacgcgcgcacactcggacacgcgcgcacacacaccgtgcacacacacacacgcacacatgggtagcgggagcccacgccgggcgtgtccgggaccccagtgctgctccccacccctgacggcggcactggcgggctggggcaggggccgggaggcagttaccggggccacgagcgccgctgtcgcgttccccgagcgcagcggatcctcgtttgcggcgggccagggccgggacgagctgcgcgcgaccggcttcgcggcgacagggtgcggcgtctgcgccgccactttatccctgggccggctcggcggcgggggcggcccgaggtgggtggggacgcgcgggacccggcgggcggcgggcggcgcggggaggcggcgcccggggcccacgtgtgcccggcccgcggggaggagcgggggcgccgcccgccgacccagccacgcactcctctcctccgcgcctcgtggacagccgcgccccggggtggccgcccgaggactgtcagggaggcctgaactgagctgggttcatgggagcctcagcgcgggaggacacaccacacccacgggcacacgcgcgcacacagacccacaggcaccacacgtacacagacaactcgcgcagggccgcacactcaccacacgtgtacacatgtgcactcccaaagtcactacactgcacgcagggacatacagacacacatcccagagataccacatgcatacagacacacacagaccacacatgcatgcacacacacaagccgagacataggcacagacaacccacagagacacagaggtgcacagacatatgcagactatacacctggcccccacatagacacagacacactcacatcatacacacacagtcgcacacagacacactcacacttcattgcagtcagacacatacaatgctggaggggcaattaaccggtcgtggtggcatgcgcctgtagtcccagctactcaggagaatcgcttgaacccgggaggcagaggttgcagtgagccgataccacaccattgcacttcagcctgggtgacagagtgagactccatctcggggaaaaaaaaatgctggagggggtccacttgactctagggtagtgtaaaagcagatggtgcatggctacaaatgccttgtcccttcctggcaatccccagcaactctcccgttcccagcggctgtgacccccagataaaacctctggtgcatctacacaggccagggcacagtctgagctctgtccagtataactagcaacgtggccgtggagggtaaggccactggactgagactccacaccacctgggttgaacattagctcctccgcttgctctttgagcctcagtctacctaccttcaacctgtgagtgatatacctatgccccagtggagtgtccctgtctcacactgacctcaagaggccttcctgtctttctccgcaaaaaattctacaccatagcagcgttgaggactgtgtctcagcgtcacactgtgtgtgtccaaggaggcccaagttgctacagagcctgtggtctaacttgagaaataaaacaacagcctttgagcagtggcttgagttgtaggcactgctgagcgtgacttacccactgtctggcctccagcaggccacgaggcctggagcagaggagtggctaagtgacttctggtcggggcagctctacagaatccatgcaagagaggtttaggggcggcagtctcaggggcaggaagcttgggggcttcactcaaagctggacatgctaagtgcaccggatttccgttggttataattcatggaaaggaagggtgctcgggggtctgatggacgcttttatcaaggcattatttcaaatgttcctggctctaacattttatgatttaaaatacacagcttgaaaatttggaggagaggccgggctcagtggctcacgcctgtaatcccagtcctttgggaggccaggcaggtggatcatctgaggtcaggagctggagaccagcctgaccaacatggtgaaaccccatctctactaaaaatacaaaaattagctgggcatggtagcgggcacctgtaatcccagctactcgggaggctgaggcaggagaatcgcttgaacccgggagacagaggttgcagtgattgcactccagcctgagcgacagagcaaggctctgtctcaaaaaaaaaaaaaaaaaaaaaaagctttgaggagagacttcactgaagttgtcagagggatctcagtagaagtgacatttgcaaacttgaagagatcccccaaacttggttatggacagaactgagactgtggtg

SEQ ID NO: 315947 - DNA, 4001 bp, Homo sapiens
agagaagaaattttacacctgtgtgagggttgggtgattactggagcacaaagagagacataatccaaccacacaatgatccctaggagacaagaggcctacaaaacaggtaaaatgtccctggaacaggaaatgttcttgtcaccaggccaattggttaccacaaataaattctttttccaaataacacaaacaagcagggttttcctgcttcatccaagaggagggagcagcagcaggagaccagctgtcttgtgtatagtcccaatgtttgcttctaatagcaagacaaatccttgatggaaaatgtacaaagtaattgagctggcaaggaatcagaaggaaatacccaggcccctttcttcctggtgacacatgtatgccatcttcagaagctcagaaacaagcaggaaaagtgagcaaaggtgaagatatatgtattacttcgggtttctcatccatctaggggattttccttaattgtcgggtttgattttaaatgaatgcctgtacaaccggaaatcaactccagtacaaaaaataaagtcatgtggaatttttgaaaattgccatacggtaggatccatatctgagttgttataatgaaaaaagaattcctgcttcttaaatttaaaaattataaagtatacattttagctttgttaacattgctcagcctaacattaaaacggcaggggaagtaggtcatagagaaagcggccccgccccagatggcacatgataacgaccagaggagaagcaggggccatgctcccctgtcacctggggtgactttctggggaagacttacttgggtgtgcctgtgggtttccagtacctgcagaagaggtactgtccgtctgcattgaccaggtgagggaggtcctggtagggaatgctctgcggggtccgcctgggggaactttcctctggcatgctggaagggtcttcaggtcctagaaggaaaagtgacatattccaaagtcagaaatatctcaagaacatgtatggataggagagaaaagtctagttcagagtcagtaacatttttttaaaagcagtttaaaaaacccctctgtttcaaaggtttaaaacatacatacatttcttgcaaacctctccaagactgaaaaatcccatttgttcttaagaaaatgctcactttattttttaagtgcctcattacagtttttcccccttcccatctgtgtttattttaaatcatttcaggaaacttcatcttaaagactattttagctgtaatcaagtggaaattatagtcagctctatgggtacaaagacccagctgcaagaagacccatctatcttaaaatctccaaggaacagtttcaagtgggcacaataatgaggtggatgatactcagattattcctcccatctgaaattccaaggatacatgacaaacctgtttccattatgtgctggcgtttgcattccacaaccacgacagcctggagaatcagaaccaggcaaatcgggctgttccctcatctgggcggccccaaggcagcaggaaggcagctccgagccctcttcccgcacccagaccctgcctttcgggctggggcgctcagccgggagcctgcttccagctcccaccggcaggctctccggggctcccctccctccccagggcggggagcggcgctgcgattctccactactagttcatgtcatcacttttcctaaacaaatcgctagaggggctcggagaagggaggggcccgggaaactgggaaactagctccgcgcacaccgaggcacctcgcagacgcacaaatgcgggtgcccaaggcaaagtcgcccccaaggcttctcacaaactttgcttcctgtgcgtctccgacagcacaggacacgtagccccgaagctgtcatcggaaatgccgctgggaaaaccgggtgggcttcgccgggtgtctgcaccggggaaggtggggactagaaagatggagttgatggggacaagttggtttgggggctggtgcgaaggagcagggagggcgcgcgcgcgcgcacacgcgcgcacactcggacacgcgcgcacacacaccgtgcacacacacacacgcacacatgggtagcgggagcccacgccgggcgtgtccgggaccccagtgctgctccccacccctgacggcggcactggcgggctggggcaggggccgggaggcagttaccggggccacgagcgccgctgtcgcgttccccgagcgcagcggatcctcgtttgcggcgggccagggccgggacgagctgcgcgcgaccggcttcgcggcgacagggtgcggcgtctgcgccgccactttatccctgggccggctcggcggcgggggcggcccgaggtgggtggggacgcgcgggacccggcgggcggcgggcggcgcggggaggcggcgcccggggcccacgtgtgcccggcccgcggggaggagcgggggcgccgcccgccgacccagccacgcactcctctcctccgcgcctcgtggacagccgcgccccggggtggccgcccgaggactgtcagggaggcctgaactgagctgggttcatgggagcctcagcgcgggaggacacaccacacccacgggcacacgcgcgcacacagacccacaggcaccacacgtacacagacaactcgcgcagggccgcacactcaccacacgtgtacacatgtgcactcccaaagtcactacactgcacgcagggacatacagacacacatcccagagataccacatgcatacagacacacacagaccacacatgcatgcacacacacaagccgagacataggcacagacaacccacagagacacagaggtgcacagacatatgcagactatacacctggcccccacatagacacagacacactcacatcatacacacacagtcgcacacagacacactcacacttcattgcagtcagacacatacaatgctggaggggcaattaaccggtcgtggtggcatgcgcctgtagtcccagctactcaggagaatcgcttgaacccgggaggcagaggttgcagtgagccgataccacaccattgcacttcagcctgggtgacagagtgagactccatctcggggaaaaaaaaatgctggagggggtccacttgactctagggtagtgtaaaagcagatggtgcatggctacaaatgccttgtcccttcctggcaatccccagcaactctcccgttcccagcggctgtgacccccagataaaacctctggtgcatctacacaggccagggcacagtctgagctctgtccagtataactagcaacgtggccgtggagggtaaggccactggactgagactccacaccacctgggttgaacattagctcctccgcttgctctttgagcctcagtctacctaccttcaacctgtgagtgatatacctatgccccagtggagtgtccctgtctcacactgacctcaagaggccttcctgtctttctccgcaaaaaattctacaccatagcagcgttgaggactgtgtctcagcgtcacactgtgtgtgtccaaggaggcccaagttgctacagagcctgtggtctaacttgagaaataaaacaacagcctttgagcagtggcttgagttgtaggcactgctgagcgtgacttacccactgtctggcctccagcaggccacgaggcctggagcagaggagtggctaagtgacttctggtcggggcagctctacagaatccatgcaagagaggtttaggggcggcagtctcaggggcaggaagcttgggggcttcactcaaagctggacatgctaagtgcaccggatttccgttggttataattcatggaaaggaagggtgctcgggggtctgatggacgcttttatcaaggcattatttcaaatgttcctggctctaacattttatgatttaaaatacacagcttgaaaatttggaggagaggccgggctcagtggctcacgcctgtaatccca

SEQ ID NO: 315948 - DNA, 4001 bp, Homo sapiens
gagcagaggggagaatagatgaagcatcctaccacattaaacatacaaaagtcttaaggtacatatcataatttcggaaacagcaagaagtaaaacacatatcttagaatccaatactatagtaattaaagaagacaatgctttgtctagaatagtacagccaacacaaccttgcccataagccttagagaccaccccaataggagtaaatatttctgtaaaatcacagaaaagtttttgaagagcaattgttttccatttgagttgactataagcattaaatgtaaaaagactaaaagatttacagttcatactttggtgactaccccacagataaaccctataagaaaatcaatgttgacaaccatactataggcaacagacagacagtcactatattttaaaggtaccctaacctccttttctataatatttgaggacatgaagacgtgaggaagctcttgaaggaaaggatttgtatatccccggaaacaagcacggtgtggtacataggaggtcctcaagaaatgtctgctgaatttttcacattttcatcttttgtctgtatacaattttggagacaaaccacaaaggccttacacaaaacagttacggaaaaaacagatggcctgtgcagaggggattatttttctgattgcagctgtcacttcaggattcaagagtatcgtaaaagctaaaaggcactttagacatcagtagttattactaaatcggggagggaagtatgaatttctacatcccctgggcagttttacagaatgtagttcagagttaccagcaaggttgttagcatgcaaatttctgggccctcatcaagcccactggattgccacttctgatggctgaggcccataatctgcattaacgtaatacgctctctagatgaattttaggtccactaatggaggacaacagtcaaacgcagctcagttaaacacacggctgtcagaaattatatattgcttgtaacaaggttgcccagactgatctaaaacatttctttttggctcagagatatgttaatcaatccagagggaaaactggttctcctattgacctaaaggagtgatcagcagttatctttttagtctgattttagagaggaaacggactatacctcaatgtattttcgtgaccatgaggttacaaagcttgatgtccaggaggcaaaaaccagtaccagcagaagaagctgagtaaatcaggttcctctgctcaaagatgagcccagtgacatgaaacccgaggcaccagatttacagctaatgagtggcgaaatcagatcctcttcctcccagtctatccttcctgaaaacagtgaataacctggtctcagtaacctgttggacaacccagctgtcggccaatcgttgcggaattatttgctggtaaatgaattggaagcatatgatgtaatgcagctgcccttctccccacacacctgaacttcagatttcacagctgtagagcgtgtctcttaggcccgacatgacgcccggcggcgcagcccacgtggaagccgtgctcgcacaggcagttctgccaccaccgggcggaggccggcaccaccctccttgctaagcctccaaactttccgtgcgctcgtcaccggtgtcgcgaccattagcaggccacgtgtgcgactctctgtaaccaaggcttccgcgaccctacccctagatccgggccccacccaccctgccccagtctccggggaggtgggacgcctgggagcgcgtcccaggtcccgcaaccacagcgccggccaccgaggcttctcgccgaccgacaggtctcccagacccgcacccgagcccgggtgcctaaagcagcagcgcgcgccccgcgggatcgggcactacccggcctgccccggcgctgggatgcccacgagagcgccccactcacccggcacggcctgttgctcgcggccgcgagcccactgcgttgcggcgcagcggctggaggcggggcagcgtgggcacgctccgggccgtgctccagcccccgccccgccccgccacgccggcccgcaagtggtggcagcccggaggcctggctacccggcggtgttccgcgttcacgcccgggcgtttctttagtccatatggaaggaaataaatggccttttttttcctctttttttttttttttttttttttttttttttttttatggtatgtgagacaaggtctcactctcgcccaggctggagtgcagtggtagcgatcttggctcactgcaacctttacctcccgggctcaagcgatcctcctgcctcggcctcccaaagtgctggattataggtgtgagccacccacccggctctccttttttttcttttaacttggggcggcaggagaggatttgagagagcgttttggtgcaactccgttccttttatgaatagagaagcaggcctgaagaggaataccagcggtgcaagtttagggagttggtggtccgggttctcccatggctttcttatgggctgtgtggctacacaatgctgatttgtacaagccgagtgtcatttatatcatctcgctccgggagagagagtcaatcctagttttaaaagatactggaaattcgttgcgactatggctatagaaacagaagaaatgcagttatctgagtcctttcagcctaacactccctgctttggaacatttggttccagtcaggaggcacaaatgagggagcagggaaatcagtggcgggcctgtgcctttctttgctctgtagacagccagaggacccagaggaagtcgacatttcgttccgtcaaggtgactgagaccagtggctgcttctaaggatcaagtggcacatgaacaaatgggaacaaagtacacccttgtctagtatttgtctaaaactaacaataatagcaagtcttgaattgagttcttcctggctataaggcaccacgctaggtgtttcaaatactcctcacttcatcctcactacaaccttgcaattacctccattttacagttgaggaaactgagtcaggagaggttaactaacttgcacaagatcacacagctaggaagatgcagaaacaagattagagccaaaccagtcagtcaactgttggtctttttcacgttttactaatactcgtataactagtaagtttcctggcaggttccagttggaaaaactcgagggtaacatcaaatttagcccttacagggtaaaaaagaatagtcaacagcaaaaatctctagttgatatgatattggtaatgtacttcgctctttattttgactgcaagacatctactcaagataatatagaataatattgctgttcccgggattcagataaaggtaaattctcacacgtccaccacttggaaaagcagtacggttgtagaaaaaagttataatgtcaacacaaaataccattttctcagcatataaaatggccgcaggatgtctaacagaacaaaagtacatatggaagtcagctttgcagggggaaatcatacatcttgtgtaggagttcctctaatgcaaaattagtatatcagtatgttctctctgatttttttcattataattccgatttcttagcatagcaagcaaaaaagtcatgatagttccattttcagacctaaacagtgcccatcattcctgtgaagaaaaggagaaggggccaggtgcggtagctcacgcctataatcccaggactttgggaggctgacgccggtggatcacccgaggtcaggagttcaagaccaccctggccaacatggtgaaacccccgtctctaacaaaaatacaaaaaaattactcaagcatggtggtgcctgcctgtaatcccagctactcaggaggctgaggcaggagaattggttgaaccagggaggcggggttgcagtgagctgagattgcaccactgcactccagcttgggcaacaagagcaaaactctgtttcggaaaagaaaaagaaaaagagaaggaaagtt

SEQ ID NO: 315949 - DNA, 4001 bp, Homo sapiens
attatgaaacagaatgtatccagcaattaaacctttgcgtttccgttaaagtctcatgtgctatatgattcaaatccatccatgcatattccattctttcttcccccaactcagggagaaataaaaataatattccagacattcacaacaagcggaacttctaaacagcatgtcccacacctcttctatttttgcttttccttttccacctccccttctcctctctctgcattctcactgcttcataaactgaaaggcatggaagagaagagagcactcagctaaggaagaagaagcaagtggcaaaagtgtcctcgcctccacatttcacttggagagggccaggtctcccgtcatgtgctctacacccaataacccagcgatggagacaacaggctggaatgccacagccacgatggtgaatcggggacaaaggctggtaaatgtggccacaaggacaaactagagtccacagttaagtgtgggaatcatattcaacagacaagttatttagcataagaaaacaggagaggagaggagacatgaattacctctttttcacagttggagttaagcgtaagcatagccatggggctgttgggtgcgctgctccccggcaccggtggcatgacatgatcgccaggctggtttggacatggcaagctcaggacttggttggcatgtttatttgctaaagtggtagaaaggtactgctttacctgctgccgttgggcttgctgtatgtggtacttggtggggttttcgaggtgggtctgcacctgaacatagccatggagggaaaagaaaacagcgctgttatttgtgagtttcagacggctcttccttcaggcacaaacatgaaactgaccaggccaccaacagaataaattattaagcctttgttatgtaccaggcactgtgctaacggattttgatattactgaagtttaaagtctaactagtaggatttggtgtaatactttgccctattttatttccctgctaattaactatacgtctctttcaaaccttgtatccttcttctcatatctaataattaaaagtttgaaattatcttagggcaaaaatttccccaacacacatgaaagggtttattaagatcaaacaacaatgtagaagtggcataattgtttgtttcactttccttggcgaacagaacagctttctttttaaaacacacacacacacacacacacacacacacacacacacacctccttaagaaccaactgtgtaaaatggctgtagaaaataaatataaatcttccaatgattaaatcaactagttgtggattaattctcccacttttcatttggacatgattattcaacattgtaattaagaaaaaactcaacataaaaagcaattctacattaagtagtttctttcaaatgcataacacttacacgtatgtgttttaaaagacatgactattaacaagccaacaggatgttttttctcctttcctacagacattaattcagaacgagaaatacttttccccaaaaaacaacattattcaattttaagtcacttttttcttgataaagacaatttaatcttatgagcaatgaacaggagctgatgaagatagtttagccacacactaggccaaaaaaaaaaaaaaaaaagaatcctactaatatttactttgttcaaaactacattgaattacttcttatggcatcaaataataaacagcattaaaagagcagatttatacttattgaaaacagtatgtctattacaataacaaaaagtggattaaatcaatttattgcattatatttcaaagactgaatatgagtcagaataaatctcacctgatagtgattatattctagcatttccagcataacaatgttttaggtggcaccaatccagtgagagacggtagactatccctccctctactttctataattccaatttgaagatggactggcaaagagaaggtactataaacaaggtatcccgagacaccaccggaaactttatcacagaagccctgcttataataacctaagctaattagttatgcatgtaaaaaaaaacgttcacataagggccttttttttggaagccctacgagtttggtcttaaatgttgatatcaatttttccccctggcttgacgtcatgctttttttcataaatataaaagaacctttttaagtgacgagctatcaaagtcaaactcactgtcagatcaaggccaattcactattcatctttagttccagtagtattaatagacaatggtatttctctttcagcaataggttaatagcagaatgcccctttggaggagacatcatctaaaagctactattacatgagacttttccaatggccgaataactgccacttccgactgcaggatgactatcttttagtatagaagagaagagactctgtgctgaatgttcaagttcaacagcctcttcttgcatcctggtcttaatatgcaccttattcttagctacatagatgtgtaacctgcctattgacctcacatcaggaagaccgggcactatcctaaatagaacatagcacacacagaagtggatatatatttatgtggataataagaaataaatatctcccctatttaattctcaaatgaaaaaagcatgagcatttttgctgagaatttttacatattattcttaagattacagaagaatgagttatcatatacaacactgatatatttacatatttattcctttattcattcattattgactgttaagtgctaaacactgtacaaagcatagaatatacattgtgaacaaacagatatagtttccagctttatgaaacttatattctggggtgaggcaaaaaaagaaaagaggcaagcaaatatatacttataaattatgataaatgcttaatatctactgctgacaaatgttatgttaagctaaaaatttgaagttcaataatgttgtctaaatgcccaggataatgcagtccgttaggttgacaatctcatattgtttcaaatgactgatttaatatgtacacagaggttcacagagattttttttttataaagggtccagacatgataatgatgacagtagacattactaaaataaacataaaatgagggcaatgagtagaatgtgcttatttcactattacacttaaaaagaaaagagattcatgtttaaaaataaatgttaattcactggcagatcctaattctttaatgaatcagaatattatgctttagtaaagaaagaagcaatttgctttctatgtggcactgtcagtgaggtctttattacatccaggtttgggtaagcagaatgggatatatttggctcttttactgttaataactttttatttttcacgtaagttgaaagcagatggcctataaacactatgcagtagacagaacatctccagctgtttctaacccaaatacctcaaacaggcaacataaatgaggaacatgagctacgaggaaggtaataaggagtagtgaggtctgtggcaaaccagaggacacacatctatctagcaggaacagcagataaaaactgcagctgattgtggccatgtgggaatatgagtccagcctagctcaaaatctccaaatttttcaagggtagctggcaatccaaacttcttttttaagtaaaatcctccaggtttaaagatccgatgctcaactgttttgtgtttcacagagtacaagcctcggcccacaaactactagaaaataatctctattttacactgtctataaggataatcttcatatttacattcccttggagatagcctaggttatgggaagaagtttctcttctgagaaattagtccaaatccaggcatttcctggtgcttctttgaaagacaatgtgcctgacaacacagacagtggagttcttaacttgaaacctgggttcagattctatctttgcaacttaacaacccgtgtaccttctgcaattcattaa

SEQ ID NO: 315950 - DNA, 4001 bp, Homo sapiens
agggaaattaatttgtgggaaaattaaccaggaaaagaggttcctctgaaatcttaaacaattttgtcaaaaaaaaatttttcacagaaagtaaatgatccaagatggaaatatctataattttcactaaagagtttctattttgactctggaataaacatatgacttttcaaattcatgttggtttgcaaaattccaaacaccaagtaagcactcatttccataaagtaaaaagacacattctggtcttattctaaacaggctaccagaaaacaaaactaatactgtgaacaaacaaatcttcgctaaaactcattgaaataatccaaatggtttccattccagggaaaatagtaagtcagcagtttgcatatggctaccttttctaaatacacaaaataagcaaaaatgccaccagaggaaagtgggaatgctgaaccctttctatttctgtttccacgggactgcagttcaatcaataccacccagcagcacccagccatcctgtgtgcacacttccagatggcttccagcgtccagcacaggagcccagagaactcccaggaaaaggttcatggaaccatcactcaaaccacaaaccaagtgataagaaagcctgaggcccagactcccactgttaaaacaaggagaggcaagccagaaaaattaatgtgtagagggctggagcaatcaaaattgtcacaaataacacagatcctaaacaagaaaatgatgaggacagagctaagcattccttaaaggagcaaaggctctgaacaaacaaataaattaatcacaacctttcacataataccagtaacggccttgagtcggagaaaaactgttgagtaaaaatattctatataaggaaacttacttaagggaagtattcaaaacccttcacccagggtagaagacagtccaaagtgcaaaatcaggagtgagactcctctgtctggggttattaaagggcacatcagaaaagcatcctaagcgctacattatttttgaagtataacagaaaaaggaaaaggaaaattgctgtttaaactgcaagacaaagaattcattttcaaatccctatgttcctacagtacttgaaaagacaataattagtcaagaaaatagcaaaatgaggaagtggtattcttttacaatttctgttaatccccaccagctgtaatttaagaaattcagtgacatcagcatttatgtttgagccagcagaatgacagaaggacaactgcagaatcatctgagaagaggaaaagaaatttggggaccactggaaaatgcatttggaaatgtggaaaattaatgcactttgcagtgaatcacttctacagcttcaaataccaacactgccaaaaataacataaaaagtggaaaaggaagcataagcactccaaacctaatcaaatgatccagtggaacttctgaaaaaatgttcactgaaacaagtgaactgaacatttccgaaaacaaacagaaagcaatctagccatttatgaacaagaaccaaagatttcatacgatataaagattgacatcccttaaaaaacatgctatataagaacctgtaaactgaggtactttggttatcatctgtattaccttcttgaaaacaggcacagagtcaatttcctggtttccttttcacagagagagaaaatagctcgtgggaaaaccactgaagtattttcaaggtgtcccatttgacttcagagatggagcggaataggtctgaattcccaagattaatgccaaccattagcttttacttaggtcagaagcaaaaggagaggacaatcacaccaaactcgactgaccaaacaagctacagaagagagctgaaaacactcaccagggctgccttggccctttggcggaacattgagtccactgaaccgtctcagaaaggagattattacaaagatgcgattgcagacgttctgccacacgcttacgtgcaccttctctcaacactaggaaggctaaattagagatagagtgataattaacaggatccttggcagcaggagctggcttctttagcaaaccagtaattgctgcctacttaaaatgacagggaattcagccaggaaggagggaggtgctagatggtaatcataaaaggtaaaatagactttacatcaacaggttacttggctccaaaactacctctttatctatagattcagttaataacattaaataaattcaacaccttacatatgaagactagagatcaataatcctcgcaaggaaaggacgcaaggacatctgatgaaaatctatgtcctccttcccacaaatcttccaacccccaaaatgtcatcaattactacttaaaccatgaaaataattatcaacttcataagatatcatattggaaaagaagatacttcccataagtgatatattttgacttggaattcttttgaaaatacccagatgagaaatttttaacagcagccataaacactgtttatgccccctgttctgacatcaaagccttttcctttgttggtaacctctccagaaaagaaaaggtatttaactcagaggttgtttaccaggacgactgaggattgctggcaaggtaaagagcagagttagcacagggtgtcctggtttaaacctccaaccccaggaaataagacagcccatcaacctattaaactgattattaaacattcatctagacactattcccagaagaccagtacccactacacattccccagcaagaatcaaaccaatgtacctctaacatctttagatgctcagactcatggagagatgaggattcaatcttctgctgtagggagatgactgtcgagataaaccagggcaggaggcccatggtttcacaatgactaatgctgaccaaaactcttcataaaatcagctccataggtaaagacctagtttgtttgctcaggaaagccctgactctctgataaaggtgcaaagaattccctgattgtcctccaaaaagagatcattacaaggctaaaggctttcaatcaggcttatgatgcagcccaggagtccctgtcgataatatctcaatggaaatcttaaacatttcttgtggtagttaaagacacatgcaaggtaatgaatcagggttagaatcactgggaacttggatgtttacacttttcttggtatggatgagaatcaagtcctttttttcttattattgtttttctttctcctctctcattaattaaaagtaagaatgcttttacattcattctgtgaatctctaactcatcactgatagaacccactaaatatatggctcaccattaaagccattaactaggattttttataacttcttctctgctagatcattatatccttttattgaaaatatttaactcaatactttgcactgactaatgctcttaacacccacaagtcaaggcagaagttatgctcattacacaacattatgatgtttaaagacctctggcatgccaaagataaacagtccagaatggaacagactggctataaatttatgaagacacacaaaaatagcaatcaacaagtcaggttagcagaaaaaagagagagggaaaaagagatgagtgaaaaacatccagatgttatgagctacatgttcatgttcagtagtagaacacaaggatgggtatgtagacaagacaacttgatgtcatcaagtagcaacatttgaagattattaataagaaattaggaaaatctaccacttacttatataccacacccttgtgaatgattaagtatccaccatcccatcttttcctacctttcttggaggattcacagcctacctcctttcctccttcagaagcagctttagaaacaaaggactatgcagacaggcatgctgtgagcacctttaatagatataactatttgttttggatttgaatgtgcaaccacaccctgagtcttctgcctttacttcataagaaacctagtctcctttccattcaaaaatc

SEQ ID NO: 315951 - DNA, 4001 bp, Homo sapiens
taatacaaattttcccgagactgaataatcataacttatcctcagcaatgcaaatcagtgcttaaaaggtcttatggtaagggaatcatatttgtattcctaatccaaaccttaactactaacagttaaactaaatccactctcttatgaaagataacagcaaagaatcagtcaccagcttacagcaaatattccagcacatatgagcttggtctgcaattcttcagtttaatcttatttttctttttaaaaatgagggaaattaatttgtgggaaaattaaccaggaaaagaggttcctctgaaatcttaaacaattttgtcaaaaaaaaatttttcacagaaagtaaatgatccaagatggaaatatctataattttcactaaagagtttctattttgactctggaataaacatatgacttttcaaattcatgttggtttgcaaaattccaaacaccaagtaagcactcatttccataaagtaaaaagacacattctggtcttattctaaacaggctaccagaaaacaaaactaatactgtgaacaaacaaatcttcgctaaaactcattgaaataatccaaatggtttccattccagggaaaatagtaagtcagcagtttgcatatggctaccttttctaaatacacaaaataagcaaaaatgccaccagaggaaagtgggaatgctgaaccctttctatttctgtttccacgggactgcagttcaatcaataccacccagcagcacccagccatcctgtgtgcacacttccagatggcttccagcgtccagcacaggagcccagagaactcccaggaaaaggttcatggaaccatcactcaaaccacaaaccaagtgataagaaagcctgaggcccagactcccactgttaaaacaaggagaggcaagccagaaaaattaatgtgtagagggctggagcaatcaaaattgtcacaaataacacagatcctaaacaagaaaatgatgaggacagagctaagcattccttaaaggagcaaaggctctgaacaaacaaataaattaatcacaacctttcacataataccagtaacggccttgagtcggagaaaaactgttgagtaaaaatattctatataaggaaacttacttaagggaagtattcaaaacccttcacccagggtagaagacagtccaaagtgcaaaatcaggagtgagactcctctgtctggggttattaaagggcacatcagaaaagcatcctaagcgctacattatttttgaagtataacagaaaaaggaaaaggaaaattgctgtttaaactgcaagacaaagaattcattttcaaatccctatgttcctacagtacttgaaaagacaataattagtcaagaaaatagcaaaatgaggaagtggtattcttttacaatttctgttaatccccaccagctgtaatttaagaaattcagtgacatcagcatttatgtttgagccagcagaatgacagaaggacaactgcagaatcatctgagaagaggaaaagaaatttggggaccactggaaaatgcatttggaaatgtggaaaattaatgcactttgcagtgaatcacttctacagcttcaaataccaacactgccaaaaataacataaaaagtggaaaaggaagcataagcactccaaacctaatcaaatgatccagtggaacttctgaaaaaatgttcactgaaacaagtgaactgaacatttccgaaaacaaacagaaagcaatctagccatttatgaacaagaaccaaagatttcatacgatataaagattgacatcccttaaaaaacatgctatataagaacctgtaaactgaggtactttggttatcatctgtattaccttcttgaaaacaggcacagagtcaatttcctggtttccttttcacagagagagaaaatagctcgtgggaaaaccactgaagtattttcaaggtgtcccatttgacttcagagatggagcggaataggtctgaattcccaagattaatgccaaccattagcttttacttaggtcagaagcaaaaggagaggacaatcacaccaaactcgactgaccaaacaagctacagaagagagctgaaaacactcaccagggctgccttggccctttggcggaacattgagtccactgaaccgtctcagaaaggagattattacaaagatgcgattgcagacgttctgccacacgcttacgtgcaccttctctcaacactaggaaggctaaattagagatagagtgataattaacaggatccttggcagcaggagctggcttctttagcaaaccagtaattgctgcctacttaaaatgacagggaattcagccaggaaggagggaggtgctagatggtaatcataaaaggtaaaatagactttacatcaacaggttacttggctccaaaactacctctttatctatagattcagttaataacattaaataaattcaacaccttacatatgaagactagagatcaataatcctcgcaaggaaaggacgcaaggacatctgatgaaaatctatgtcctccttcccacaaatcttccaacccccaaaatgtcatcaattactacttaaaccatgaaaataattatcaacttcataagatatcatattggaaaagaagatacttcccataagtgatatattttgacttggaattcttttgaaaatacccagatgagaaatttttaacagcagccataaacactgtttatgccccctgttctgacatcaaagccttttcctttgttggtaacctctccagaaaagaaaaggtatttaactcagaggttgtttaccaggacgactgaggattgctggcaaggtaaagagcagagttagcacagggtgtcctggtttaaacctccaaccccaggaaataagacagcccatcaacctattaaactgattattaaacattcatctagacactattcccagaagaccagtacccactacacattccccagcaagaatcaaaccaatgtacctctaacatctttagatgctcagactcatggagagatgaggattcaatcttctgctgtagggagatgactgtcgagataaaccagggcaggaggcccatggtttcacaatgactaatgctgaccaaaactcttcataaaatcagctccataggtaaagacctagtttgtttgctcaggaaagccctgactctctgataaaggtgcaaagaattccctgattgtcctccaaaaagagatcattacaaggctaaaggctttcaatcaggcttatgatgcagcccaggagtccctgtcgataatatctcaatggaaatcttaaacatttcttgtggtagttaaagacacatgcaaggtaatgaatcagggttagaatcactgggaacttggatgtttacacttttcttggtatggatgagaatcaagtcctttttttcttattattgtttttctttctcctctctcattaattaaaagtaagaatgcttttacattcattctgtgaatctctaactcatcactgatagaacccactaaatatatggctcaccattaaagccattaactaggattttttataacttcttctctgctagatcattatatccttttattgaaaatatttaactcaatactttgcactgactaatgctcttaacacccacaagtcaaggcagaagttatgctcattacacaacattatgatgtttaaagacctctggcatgccaaagataaacagtccagaatggaacagactggctataaatttatgaagacacacaaaaatagcaatcaacaagtcaggttagcagaaaaaagagagagggaaaaagagatgagtgaaaaacatccagatgttatgagctacatgttcatgttcagtagtagaacacaaggatgggtatgtagacaagacaacttgatgtcatcaagtagcaacatttgaagattattaataagaaattaggaaaatctaccac

SEQ ID NO: 315952 - DNA, 4001 bp, Homo sapiens
aactgatttaatgttatgtatcagctaccatcagaaatgttccaaacagtccggttaatttatttctttcaggattccacacacacactcattccctcattctggccgtgtaagcatttgcttatagaagcaaaagcagagactgcccagtaaaacactggtcccttcagccgaatgcagataaagccctgatgagcataaccaacaatacccttcacacaatattactcaaaacccccagcccccaacacacacaatctatgctcacacacaaaacagccattatgaggaaaaaccaccaactaaaggctggttttatacgtccaactgcttaggcggtttccttccaatctgccgtgaagcatctacaaagagtcttcagcaatggcagtcagtaggaccgctgttcccagattttcttccccaacttggataaagagtcctgccacagccctgaaggaaataaacctggctgcactttccactagaaaaagaaccagcccagtgctcgccagaggccaagattacaccacttggctccccgttcagttgcccttctccactcaccctcatttcaagaccctctcccactctgccagccaggcccattcacccaggccccatccacagcgaagggcaaggcaggaagttacagccgagtgcagaagccctgctggatgcttccaatgatagccttatcctagctcacagcttagaggggtggaaataaacccttctcagctattccagcctccattgaccatgtcccttttaggaaacattgtaaacgagaagtacgaggcgtccagagtggctgccggacagagagaacggaagacacccaatccatttcgacagacaagtgggaatggaggcagcaaaaagggtggctcaagggaagtgggcactagaggggatggggcatcagagcagtggatgtcttcactcctcgtctaaaaagtttctgaagtccccagcgaattaaacacgtgtctctgccaagcggggtacactcccagtaacccccaagaccaaggctcatttcccctctgcaggtaaggcctggatttgaatgggactctatttccagagagtttaacttgaacaaggggacacgcccaccgctgccctggcccctcccgcgcccgctagcagcggtctggaggtgagaggcggagcccagagaaacctcacctgcaggagcccagaggctagtttccccacagagaccggactcccaagaggtgactccaagcgaactaattgcttccctccaatgtcgcatctcagtccacccaaagctctccctctccgagccctcaacccgctgggatcttcagaaagggggttcactagaactctttctcccccatcccaccgggacagcgtcccggcccggcgctcctcctcccccacatcgcgccaggtcgctccccagcccccaatcagtctcagcagctggcatcctcggccgagggtccccgcgcctggacgcttcgtccccggcgacccgccgcgcccccgcgaagtgcgctccatccgagcttcctaaaggcgcacttgggccgggcaggcgcggcccccaactgcgaggggcagttcgccctctgctccggggcaagggcactgggtccttgtcccagagctcccgcgacccgctctcctcgccccagagtggcagacgcagtgccccccagccgcccggtgcgcctctgcccagctgtcaccactcacctgctcttcagcggttgacttttgagttcgtaataggttttgggctcttcatgaaactcctccccgacttcgaaatccggcacgatccccgattcggactgcatggctcccgcttcccgtccttccactgctggaaagtgagaacagagcccgggggcggagggaaggtagctgggcctgggtcccccgagccgtgcgccccggcgcagtgccgagctctgcccgctcgccggctcgcggccgcccgccccagcgcggggagtttacactcgcacccgggcgggaggggctggcggccgagcgccgcctgggatctgtagttcggcccgggcggggcattcccagctcgcctggggagccgctcccacgaaaactacagctcccagaaggccaggcgggggagaggcaacgtggtggacaccgctagtgcaactcctgtttggattcattgtcaatgtcagcagctcctctccctcctctctccccacttgcttcaagggtacagacttggctacttaatatgaataagaatggacactgactgctcttctaccatcgccccgacctctcagctcagacatctgcgagggcacgccaagtgcttattttaaaaataaaatagtcaagggttttggcacaagaaagttttagcattcgagcctgtcttaaaataaaaggacttcctatcagctcgcatgcttccctgggctgctgcgacatatcagcttgtcctcggattggaacaacgaggaagaactttccttcgctctgtaatgaaaacgttattggagaaattgttcttgtgcgttccttttctagaactaagtctggacttttacaatagtattcatcagttgaatggctctttcccctttatccaagtagccacttctaatctacagcagcaattgaaagattcggttaattttaaaaggcacaaagttacaaaatagcgtcgttgctctctgcttttaatttctcagttgactgggagttcaaatgagatttgtcctagcatttcaggagtgaagatgtacaagtgaactgtacaagtgtccaccccttcccgagcttcccggaactcacttagggaagagaattttaaaactctccgttgtggctcatttgtacttctagttcttccctctgattagctccagtaggacgtgttccttcttttcaaaagtgttttgaggcatcagggaggcagtatagagttacagtggcatttaaaggtataagactcagagttgaaatccccagtccttctaagaagagctgtgcaatcctgagcatgtcacttggttcctagaagcctccatttcttcatccataaaagaagagattggcaaaccagttttagaagatgttgcaaggtcaaatgtaagagaaagtgatttgcaatctataaaaactctgctcagtggtcattctttattaggtcttgaagttattcctttcagattaacatctcattttggtgtttggcctttcagaattaataaactaaatgactgtcctaggagaaaattctaaagaggctacagtgacaactgggcacctcccaggagttacccctttgcatatcttgcctcccactgaaacattttaatttcacatcagaaaagacatccagtaggatggatcgatgttagggctggagttctcaaggtgatttggaaaaagtgcagaaggcacactatgttgcagtagcaattaccaaattttcagaataaaaattagtccccaacatacgacttttaggccctcccctgaaactattaaactatgtcagaatacctgagaacacccctaaggaaagtgggagttttgtgctcataaaagtgggatcctagattccttaatagatggactgctggaaattagctgtcaaaagcaaacaaagaaaacgtgtttccttcatgttctctgggagagaaagaagaaagatcaaacatgaaggaaacatgcagtctagacttctaatctcatctgggctctcaattatcagtgcttggaatatgggaggaggggttgtcataataacttatggatgttacagacgtttaaggggtatgggccagagacactacacatattgcacaataacaaattttcttgtccaaatttcagtggtatgtatccccattgagaaacatgggaagctgcctaatctttgggctcaccagaagttttttaatctgagggaagctacggatcctcttctcagaaaatacagatagaaacaaaactgtgcataattttgg

SEQ ID NO: 315953 - DNA, 4001 bp, Homo sapiens
gtgttaatacaagcacaatacttagcatagttcccacaaaccatgtggacatgagtaaaagttaggcaatgaattcttctagtctgtgttttaattcctgaaatggtatctgctgaacatcttaatatctaaaaacgagtcaaagctgacaagttactttctagggagccaaaattctagaatgctgccttctgctatcatgttccttttctttcctagaggaaaatacaaaacaattaattcacagtgtgtgctctcctaaaagaatacgcacagaaaagttaatgggcaataactcagtgaacaagttttgtcaaacgtgtttgtgaagaatttcattctgagagtgtataagggaagcatgctcttacgacaagtattttagttaactaaaagaatgaaattcaaaattaagaattaatttggctgtgaattcaggtttgacattactaccattcttacgtagaatcagaatagcaagtttcatttgttcatgccatccattattaatattaaaaaattagtaagttagagtatatttttgtagagaatgaatcacaaagagtagacatcatctccccagctagtatctcattaataaggcaaaaatttataacatttctagcatagtgacattttaaacacataattatatatactttgtttagaaaatgctctaacattttatagaggtgagtaattaagctgttatgacgacataaagaatgaaaaaaatctaaagtatctgttaaaacaaactgcagcagaaatagaagctcaagaagttagaaatcatttttaaaactaccttttataagaccttttaaagatgtatctactgaaaatgatgaactttaacccacacttaaacttatggtaattatatttatattttttaagaatcaaattctaaaaatagatctgctacatctagtatttttccattattcttgctgtctttaaacacaccttcacaagctgctgaacataatgcctttctgacttaatcagaacctctcccatgacccaggaacgttcagtaaataatgattaagctccagaggtagcttttgcataagttgatttgcttgaatgcctattcacttggggacacagcttttagcactgttttcaaatcttatcacctaacagtgaaagtaaatgttaaaggatgtggggggaactatactctgtttagtttttctccattttaatatttctttgaaattgccattttttaaacttgttctacatttatatgccaggcagacaattctgatgtttggatgtctgtttccccttccaagagaaaaaaatcaatatacaagaatgcaaagaagatgttcattaatgcaactgttaccattccacagtcaggaaaaaaaaaaaaaaaaggtggggggagaaaccaaaaattcacagtgtttacaatgggagagtttggacaaatgttactactgtattaaacacacagttttcctgaagaaaatcctgttttattcataacaaagctgggctgcagtctatcttgcaatcataaatcaagctctgctctaactcagatttttcaagcagtcgcggtatttttgtcattattaacttaagaccagtattcaattttaaaggagagggcaaggatattgggttagcatttctatctaccacccccacccccacccccaaattagttgttatccttgtcatagccacctaccagaggttacagctgaagctgattaaagccagtgagaagtaacagcttcagtatttttaactcccaataaacccttctcttcctttatcctcccccttaaagagaaaaaaaactgctcctcttaagtggtcccgggattatttccagaataaaacttcacttacagatacaagctttcaaaggagcatggcatgaacatctgaactctaagcgcctccatcttttttcctttaaggtgttctgcaagcccttggcgaagagtgaaagtcaaagttagttctggcactggctgtgtcactaggggtggctcctgataaggccctggaaactccaatccaaacacagctctgtgctagaacggtgcctggtttctgtctgcaacagcagacctgtttaatccagtacctactgtacctgcaggacaaaaacgctgcctcacaccacaatgagggctactcaaggacccaggcacggccagggaggcagcccagcagccaggcaagcacctcgggaagcttatttagccttacccagctccggtactggctgaggcttgcagagactgcacattattagagaacttaaaaggagaggtaatttcacataccagtgaattgtcaacacttactggagtcacagaatctaggagggaggactgtggaactgcttgtgtcccctctcagtttgggagctctcgggcatcaactcatcacacaactctaggtgttttgcatctgtgcacaggcatttttggagcttgataattgaatatgccctccttgctgacaggctagagatccaaaacagcattccttaccctcagaccccaagaatattaggagggttgtccttgcccggttctggtggaagtaaaacacaaactgctcctaattatggccaccatctttcaggacacacaaatcgttaggccataaactgtgtattcttaagactgtcatccaatctaattctgaacacattggtatacaagaagaaaaaacagcaatacatgttctcaaaaaacactttaaaatgcagacatgacaacatcaatattatcaaatattcatgcagctcctacaggactcagcacaccaaagatgccctacagagttgtgaaaatattgtatgtatgtttctccctacacacaattcaaaggtcataacaaagacatctgacactgactagctgcatacactgggcaagttacttcacctctctgtgcctacatttatctccaaagtaaatggttggaaaataatgcaacctcttcagccataatcaaactcaaattacgtgatataatgaaattatctttttttttaacttccctctaatgctaggaaatatctagccaggagtctcggccaaactatttctggttctgtttattctctgctcattttattcattctttctttcttttgttcaataaatatttatggaacaccaactgtgtcccaggcattgtgtaaattcgtggagtttacagtctaatgggaaacacatattaaataatcacataaatatgtaatgaaaaatgtcataactgctgcagagaggtgaaaaagttaaaatttaagggtcaggaaaggctttccttaggcagggacttctggtctgagatctgagttggggagaggaggagtatagaaaaaatgctttccaggcagcagtaacaacatatgtaagaactatgaggtgggaagttggcaggcagactcactatcactgaaggacatagtatgaaggaaaaacatggtgcccgtgagacctacacagtgaccaggaccagaccatgaaggatctggtaggccagggaaaggtcactgattctgtttcaagatgaacaagaaaccacagagagatggcaagcaggggaacgatgagctcagatttgagtttttagaaaggtctctctggttgctatgttgacagccaactagaaaactgtcagagttagctactgcaatagtcctggtaggaggtgatggtagctcatgggaagggcagatgtgcaaagtggagaaaagtgggcagattgctcgtaaaactaaggaccaataaatacgattagaggagaaagttcatcaacagcagtcattgagcactttctacatgccaggtactgtaccaggtattggggtaaacagatgactaagatgttacactatttatcttactaacctatcccacctctcttttcctgcctctagcacagtttggcatgaaaatcaagaacatagattctgacgtttatttatccaggttcaaatctcaccactt

SEQ ID NO: 315954 - DNA, 4001 bp, Homo sapiens
ccctacagtctatgagggcatgaactttgatttcacacctctgtcacttggaagctaaatgaccttaggcaagtcgcttcaatgctgaggctcagttttacgatctgtggaagagcgctggttgctggattatacactacagtacctaagagccgcagcacattgtaagtccccaacaaacatgactaaacacttaaacagaagtgatcccttctcaacattccaacccaatcttcatttatatggagcaacatcctacagaacacccctgtttgggaaacagaattaaagctttcaagtcaagctatctccaggtatacaaggaaaaaaccaagatgatcctgatttaggtccttgtgcctctactaaggtgtaaaattttaggcaaatttcaagtctttctgagcataagattccttatttgtaaaataagatactacagagttgagattcaattataaagcattattacataaatgtgtactgttttgtggacacttcttagatgaggtacgggaataaatggtagaattaaaccatagagcgaggggaggaatacagaggtttttctaggaggctacaagctgctttacagtgcacaatgacctaggaatacttcctccagcaggagaaactttatacaaataaaaatacgtaaacacacacaaacccgtcttcacaaaacaccttctagtacaaataacctagtaaaagtctttttatagacactaggtgcaaatttctgacaacagcttaacataagccacctgggccttggataaattgaacagtaaatgtacactaatgctaacagaaaacttactacacagtcacgtctcaactattcataccaatgaagagaagtaacaacatagaaaataaactgtttattacacaaactctataactgtttttaagcaatgtttcccataaaaattattaaatgaaatttgcattttccaagcatacaattcaatttgcgttttccaaacatacaattcaataggactagactccattaccagtaagccacaagctgaccaagcaatgagggtgttacacaaccacactattctatttcataggagcagtcgtagtgtagctatctggctattttctacaataaaccatccattaccgtcgcatttctcctcgtaaatggctctctcagtaagataaatgagtgtcaacgtctttcggtctcagtttcctgcactgtaaaatggtaataataactactaagttgtcttactgtgaagtctgatgataatgaatataaaggacttggaaatatgcagggcgcttcgccgatattcacaatatgctacctgtcgttattttccacacaacaacttttacttgttaactctctgcaagtttagattgcatctggattctccaaactttgaggccctcataatcgattaacaaattactcctatgtggtatccccatttgtaaccgtcctctcggcgtccctttactcaacttcaaatcttttccagttaaagcgtaagccccagagccttcccgacagcgccccggcatcctgcacggccctggctaggacgtccttcctcccagcccacaggggccacgcttcaaactcggggcgtagccccccgcgctggcctcgcccagcgtctcggccacgcatcccccggatccccggctgtggcggcagcgctcgctctgcctcgcaaagccccgccgcgaacagccgagtaactttccgagtcccgctctagcctcaggttcccggaccacagcactggcgcgcaccggcccccctgcggcctgggggagcggcccgaagctcctggctccagcgcactgacctgcaagtgatctgcttggtgctcatggtggctgggctgagggaccgtcgtcgtgccgccgcctctcgcagccgctgccgcctcggccttggccctggcccggcccatcccgcgtagccgcgtcacgccggcgcacgccggcgcacgccgcccctccggtgtggcacctttgtagcgccggcgggtaacctagccgtcgtcacaattggttccgcaccggggatcgggccggctgtcccggcatccctgctctcggtgtcccgcacttccaagcctccggggcggagcctggctggcatcttagtcctgccagtcttatcccgatgcctactgttagtgcctgcgattctgccccgatcgccaagagtattccttagggatctcccgcctccttcgaggcacttcaccactcctggggaaactccagcctctcctcttaatcccggatgcccctatccattcatactcgcactcactgggcacccttctcaggccctgcctcaactgttcccgccggacctcgcctcccacttaaggaaattccttagctctctcccaactgctctttccccaaatctctacttccacaagttttagtcttcattttctttcctgccagtcttgtgctgctcgtcttccatttcctatggtggaaaccccaaaagttatttttgacacttccctctagctctctataccctgcagattctgctcccacacctctgtccaatgcgtcctcttctgccccctttccaccgtcccttctacctagcaccatgcgatacctttttttttaattattattattttattttttatttttttgagacggagtttctctcttgttgcccaggctggagtgcagtggggcgatctcggctcactgcaacctccgcctcccgggttcaagcgattctcctgcctctcagccttccacgtagctggaattacaggcgtgcacgcctggccagccatgcgatagccttttaactggtcttctggcttccgttcctggtaaaaatctatttttaaaacataaatcggatcatgtcattcaccttttaatcttacaatggtttctcattgcttaaaaactcgagatacataacatgcacaatataagtgcaccaaacacattctatgaatttttgcacatgcatacactcatgaaactaccacccagatcaaaataaagaattttttgttttgttttgaggcagggtcttgctctgtcgcccaggctggagtgcagtggcgccatcatagttcaagcagtcctctgccttaacctccccagcagctgggaatacaggtgcgcgacaccatgctcgactaaacttcaaaatgctggagtaaggagaggttgagccggaaggatcctttgagcatagttcactgcagtcgaggctgcagggggtgggtgggggctggatattatcgacaccccagaagggcttccttatggtccttcccaggcaatactttacaaaggtcattgcttgggttcatctctatcactataaattagtttaactgttcttgactttcatataaataataattcagtacctacgcttttgtctgccttcttttgaccaacattttatctgtgagatctttccatgttatgtatgtatagctgtatgttctttttttactttgctataaaaatattgagtcttccaatgaatgagcatggtatatacttccaattatttagaacttttgaaatttttctcaggaatttggaagtatactggaaattttgttttcagtgtcttgaatattgcattttaactcataacacatttgatccatgcaattcatgctcataaaaattacacgtcttttttttttttttttttgagacggagtcttgctctgtcacccaggctggagtgcagtggcatgctcttggctcactgcaacctccacctcccgtgttcaagcgattctcctgtctcagcctccggagtagctgggattatacaggcgcacgctgccacgcccagctgattttttgtgttttagtagcgacggggtttcaccctgttgcccaggctggtctcgaacttctgagctcaggcaatccacccgcctcggcctcccaaagtgctgggattacgggcgagagccaccgcgcccagcccatgccacttattt

SEQ ID NO: 315955 - DNA, 4001 bp, Homo sapiens
tgatcccagctactcgggaggttgaggcacaagaatagcttgaacccgggaggtggagattgcagtgagccatgatcgcaccactgcactccaccctgggggatagaacgagagtctgtccaagaaaataaatagagccagctggatgcagtggctcacgcctgtaatctcagcactttgggaggctgaggtgggaggatcttttgaggccaggagttcgagaccagcctggaaaacattgcgaaacctcgtctctactaaaaaataaaatacaaaaattagctgggcatggtggagggcacctgtaatcccagctactcggatgactgagacacgagaatcgcttgaacctgggaggcggaggtggcagtgagccgagattgcaccactgcactccaccctgggcaacagagtaagaccctggtctcaaaaaaaaaaaaaaaaataacagttttaatctttgttttacagataaggaaccagagatacctggagctggttaaaagaaccaggataggaatcaggggctttatgacgccagagcctgtaatgtcctttctgcgttggctgcctccctgagcaaggcccagggatgctgtctatttagcacctaacagtatgaccaaaaccttttacatactttggttcatttaatcctcatagggaccagaaggaaattaaggaagttagtaggcaggaaggtgagtagtcaactcccattttcttattcaaaaccagcactcttgaggggacaggaagttaggagggtaaactctagggagcattagactaatgatacgcaggagctgaacatatttcctaaagcatacaccaacattctatgacccatgctcacctaaagcctggcttatgctgggccgatcctaatcctattggtaaactccacggggacaataaaatataaacctggcggggcacagtggctgatgcctgtaatcccaccactctgggaggctgaggcaggtggatcacctgaggtcaggaatttgagcccagcctggccaacatggtgaaaccccgtctctactaaaaatacaaaaattagccgggtgtggtggtgggcgcctgtaatcccagctactcgggagcctgaggcaggctcccgaaaatcgcttgaacccgggaggtggaggttgcagtaagctgagacaccattgcactccagcctgggcaacaagagcgaaactctgtctcggggaaaaaaaaaaggtataatcctttcttttgctttctaattcatcctttttgtttatgctagcgctctcagcaagagagaactgaatttgttcttaaagccaggtggtgtctacagtggaaatagatcagttctagtcttcagtttaatttgcctccatacaaaatagtctgcaagtgcccgttcatcgggccctgtaggttgtacctgtttgtcactgaaactacaaattaactgacagtaaaggtattatttagataagattagctgctgggtcattttcctggttagcctctgagcacatatttttctctctgaaaatcatatgagcaggtttactcttcatatattccacatatattcttgcacttgtcactgcaggaacatatgcacaccatctgtttttatgaagccagtaggactgcatctcaggatttaaagccaaagcaccgaaaaaattgtccaccaaacctcacacattatgtattaagaaaaggaaactttagtgactaaaacagaaggaaaagtttgcacaatgcaatttaacactgtaaaaaacactgtacctaagaaatgtcccctgagttggtctgaggaggaatgaacatttttcttgatgtccattagtaaatggattagcgatgctaacaggtgcgtcctccagcttcctcgagcccaggtcctgctggcagagagggcagcactggggcacactgaagctgtagatgtatttctcacagtggttgaatttaattaaagccttcccagcctctgcgcagtgcatagctttcgcctcctggaatgctaggggaggtttccggagacttccttttcctcattatacacctggcgaatgcacaccgccccaaggaacctgatcaatggtgatgtcatcctgactgatggcttcagaagccaaaccagataggattaaccagtagccaggcctccccatagactgtatcttaaagagctagtttctatttgtttatttccattgtttatggtaactgataactgccagctcctattcatcctttaaagcctcacttttctgtggaagttttgtcagcttcccccagtcttcccttgcagtggcagcgctggattcatatttccgtcagaactcttatttatttatttagagacagggtctcactctgtcacccaagctagagtgcagtggcacgatcttggctcactgcaacctccaccctcaggttcaagtgattctccccactcagcctcccggagtagctgggactacagacacacgccactatacccaactaattgttgtgttttttggtagagatgggggtttcaccatgttggccaggctggacttgaagaggccttcctcagcctcccaaagagctggaattacacgcatgagccactgcaccaagcctagaactgttatttaatcatttagttttgtttctcccgttagtctgtgagcttcttgaaattggagacctttacttttgtgttcccagaattggttagatcatttgttgttgcataaataaatccttatttaaggctattttattttgacattttatattataaaagtaattttgcttataaaaaaattaacatccagaatgttctggggatttttttaaaaagttaacagccctgttagaaataaggatagcggttacaggagggagatactgactgggagaggacagaggtggtttctcgggtccagggctgttgtgactcatctgggtgttaataatatgggagtattccatttgtgaaaaatcatcaagctgtgcattttattatatgcagtatataatttttcaattttaaaataattttttaattttcttatttttgtgggtacataatgggtgtatatatttaaagggtacatgggatttttttttttttttttttttttgagacagagtctcactcttgtcgccaggctggagtgcagtggtgtgatctcggctcactgcaacctccgcctcctgggttcaagtaattctgcctcagcctcctgagtagctgggattacaggtgcccgccaccacacccagctaatttttgtacttttagtagagatggggtttcaccatgtcggccaggctggtctcaaactcctgacctcaggtgatcctgctgcctcagcctcccaaagtgctgggattacaggcgtgagccaccgcacccagcctacatgggatattttgatacaggcatacaatgtgcaataatcacatcagggtagatggggtgtacaatttaaaaataatttttagctaggtgtgctggtgcacgcctgtagtcccagttactcaggtggctgagatgggaggagtgcttgagcctggaaggtcgagggtgccttgagccaagatcatcccactgtgctctagcctgggcgacagagtgggaccctgtctctaaataaataaataaataaataaaataagcaattccataaaaatatttggaaaaaaagtaatgccccttgtttctcacataacatttccacccaccatattctactttctggagaaaattaatggtatgttagattcttttaaagctcaatattggctgggcatggtggctcacacctataatcccagcactttgggaggctgaggcaggtggatcgcttgagcccaggagttcaagaccagcctgggcaacatgacaagacttcatctctacaaaaaatacaaaaattagccagatttggtggtgtgtacctgtagtcccagctacttgggaggctgaggtgggaggactgcttgag

SEQ ID NO: 315956 - DNA, 4001 bp, Homo sapiens
taaaaacttccccttttcaatgaactgtcatgctataaaatattacctgttcctatttggaatttaaagaggagctataaaatattccctgctcccatttgcaattatgtgaacataattctcaccataagtttcaccgagatggtagttatgtcacctgcaaagcccttgaagctgcaaaggccaactctgcacacaggaagccatgacgggcacccaaagtccggccaaatggaaagcagcaggcaccccgggagtgtgaggaagggccttctttccatctcatgcagccaaatcctcctccccctacctggggccctcaactctctacctcacgtcctcaaccatcctcctgcgacctcacgcccccaaaccctcctccccccactgcacgccatcaactctcctctgtccacctcacaccctcaaccctcctacccccacacctcatgcccctaaaccctcttccccacacctcatgcccccaaaccctcctccctccacctcacgccccaaccctccctcgtcccactacctctcaccctcaaacctcttccccctacctcacgccctcaaccctcctcccacatcatgctctcaagcccttcccaccaactcacgccctcaacccttctccccaaccctcctcccacacctcatgcccccaaatcctcctcagcccctaaatcctcctccatccacctcacaccctcaaccctcttaccgccacctcacgctcccaaaccatccccaccaactcatgccctcaatcctcccctgcacttcatactcccaaaccctccccaccaactcacgccctcaaccctcgtccctgcacttcaagctcttaactctcccctgcacctcatgctcccaaaccgtccccccacctcacgccctcaaccctcctccccccacctcgcggtccaaaaccctccttcccctcacctcacaccctcaaccctcccccacacctcatgctcccaaatcctcctcccacctcacgtcctcaaccctcctcctacacctcacaccttcaactctcccccacacctcatgctcccaaaccctccccccacctcacgccctcaaccctcctccaaacgcctcacacccccaaatcctccttcgtccatctcacaccctcaaccctcccccctccaccttactcccccaaaccctcctcctcccaccccacgctcccaaaccctccccccacctcacagcctcaaccctcctccccccacctcacgctttcaaacccttcccccacctcacgccctcaacccttcccctcacctcacgccctcaacccttcccctcacctcacgccctcaacccttcccctcacctcacaccctcaacccttcccctcacctcacgccctcaaccctcctccctcccacctcatgctcccaaacccttccctcacctcacgccctcaacctcttctccccacctcatgccctcaattctcctccccccacctcccggcctcaactcttctccccccactcccagccttaactctcctccccacacctcacgcccccaaacttccctccgcctacctcacgcgtccaaaccctcctctctccacctcatgcgcccaaatccgtctcttccctgtctcacacacccctaaatcctcctctctcttccctcccaggcctccaaatcctcgtctccttcaaaccgcctccagagttactccgaattctctctcgccctctaaaactcgctcttttcccttaaaatagctcccctcgataccttaattcccgcgcgaccccggactcctggctcccgtaactcacgagaagaaggggtcatcctcaaaactgctgttcagcatcctgaacattctggctctgtcttgggtggcggcagccgcggacagattggaaaaacgatgttaactcgccgcggccgcgacaagagctagcctccagtacggacgacgcctcactcgccgcggcgcaggcggtgcccgccgggataggaggtgcgtgacaccgagctgctttcccattggacattgctctgtgacgtcaccaggacgaggcggggagcaatgcgccgctgccctggcaaccgcaatcaacacagtggaggcgagaagtctggccttgcgccggccggggagcttttcgccaaggctcctgtgggatgggatagcttgttctctgggctgcaggaaccaaaacattagaccaccctttctgtgaccttgggcatgccgccctcggttccgagccgcaagtctttctttcggggaaaatgaaaaggggtcaagatttggaccagatgacacccaatgtcccattcaacggtcgcattctgtcatccacaggaattagtcctgtatccgaaacattctctggtagtcaaaagctgtgagcaaataataagaaaaaatgtgcaaaacgttttttagtacagttagcaaatagtgtactcagttgttgaaggaaatgggatgaagcctatcagatttcaacaaacttatttacctcttgagaaagctgctctcttttcggttgtccttctgtgtctctctttcaaagatcaagtctcactgcgatgctgatatgtttttaacacttctccagcatttcttaacctaacagcaggtttcaggcacaggcctgcagcaagcagccatatccaactaaaattccactactatatgtttttatttgcattacatttatcagggagctttctatttatggcaaggaaactgattttaaatttaaatcagtgatatacatcaagagctagattttgcatttttaagtgaaaaagtaagctatcaaatagaacaggtggaatttggatatggtggggcggaggggtaggcagagcaggggagaggaacatcgtgatagtggtactcaaattactaagttttagaaaacactatcacggggcctttcaggagcctggagacagatggaggggaagacagaagagagattaaggagaagaatggtaagagtataagaaaagagaaaatacatcttgcatgtccacccttaattcagtgagctccccagcttctctacgtggctgtcttgcagagataaaggggcgtccatagctcatcagggccccctgggatcaggccagaggggtggcactttgccagcatgaagaagtgtgcaagccctgatttggaggtgacaggagtagtcaggggttattttgagagctggaaatttaatcgtttggatcttttactccccatcccccttttttagccaagttctctggcagcttccttcccctgagactggtggcatggggtagggcagacttcacagcccaagatgagatggcacagcccatccaggaaagaggatattttcttttcctctggactcagaataaagctcagagaacatatacacaaaatttcgaaaatttctaaataaatttcaaggcaaacaaaattgttttataagaccttaaattgtttttctctttaaaatagtataagcacaagatgtgaaggaggccacacttaaaaaaaaacttgaaatggagtaagttatgtgataaaagatggtgttaaaatagttctggattaaggccaagtaaatttgtaatgttaccctctagtttctgtgggaacttttttagaatcacattgttataaaagctttagtccaggcacaggttagtcagggaattagctgaaccttgtgaaagcagtttggatctaatgacaaatgcaaaaaaaaaaaaaaaggagggcagagcagagttggcactgaagagaccttgacatcattttcagaactgatgggtaagaggtggaaatgaaagaaagcgtgggtcaggagagaatgaatactccagcatgggaggaatagagatgcagaacaggactgagaggagagggtcctggacttggctgtaaatataatcataatagctaatatttattgaatgtgtgccaggcactgttgtaggcactccatatgcattacctcatt

SEQ ID NO: 315957 - DNA, 4001 bp, Homo sapiens
tattacagacatttctcatgagcccctgtattgaagttgtattagtcatctcaacttatatattaaaaagagtataactggactccatataaaaatctccacttgagccgggcgcggtggctcatgcttgtaatcccagcactttgggaggccaaagcgggcagatcacctgaggtcaggaaatcgagaccatcctggctaacatggtgaaaccctgtctctattaaaaatacaaaaaactgcagggcgcggtggctcacgcctgtaatcccagcactttggaaggctgaggcaggcggttcacctgagatcgagagttttgacaccagcctgaccaacatggagaaatcccatctctactaaaaatacaaaattagccaggtgtggtggcacatgcctatagtcctagctactcgggaggctgaggcaggagaatctcccttgaacctgtgaggaggaggttgcagtcagctgagatcgcgccactgcactccagcctgggtgacaaagtgagactccgtctaaaaaaaaaataaaaaaaaaataaaaatctccacttaagtaattaattacaagccaccaagctagtatgtttagttttgttttacagtattctggcacagtacaataataggcccagttgtcctgtcaattcattctaacacagtagaaacaaaagccagtctgccattgcttctgttactactattacaagtgaaaaggaaaaaacatccccaggttcttgctccttctttcatctaccttccaattctcttcctttccttcagtggtcctttctacccactgttctctcagtcccattgccctgaatagtttatactttcacaataaatccctctagaaacctaccactccaaactgaagcattcttttttctattaacgtacggacgtcactaacaactgattttaacaaaataatctgacataacgtttaggtgtattttgggcttgtctttttggaagtttatagtctgcactcacttttccttccacatgtttcaaatctcttcccttcacattttttgtcacagttataagcttcaaaatccaaggatgacccataaaatctggtatcttcgaagtgcgtcctccgaaataaaggacaggaaaacactaagaggggtcactaatttaacaatagggtaatcagaagtcaagcccaaagtgcatcagcctgtcctaaaactacaaacgatttgttttgaaagaaactcaaaatgaattgtgcctttggatgtgaacagatgatttctggaatgaatgaaaagcaagaaaacagtaacacagtaccctctgaaaaaaggtttttctccccatcttaagcttttatacatcttttaacttcgcatgttctgcatacataattttaaattaagtggcttccttacttagttaacggtaccattaagacaacactacgtatattcctccacttacactccaaacaacccttaaaaggtctcgggggagagcggtaaagaaacacacggtctgcggaaaaggagaaggcctgactggcacgtcagggaacccggcggcctccgccgttgtgggcatgcgctgtacatgcctctgcccgggcaaagaggcgtgtccgcgccattgagtgacgcggcccgttaagtcgtagcccttaagtgagcccggctcgactccctccgtaccagttctcaatcatctctttgatagcattagctggccgctggataacttcccccgccgcgatgcggttcaccactgtctcgtccagccgccgaataacccctgccacgaacgacattttggcgccagaagagccaaggaaacgtctagatgctcaacggaagtgccttcagccaatcacctcagtgcctcgtgctcacgttcttccttcagctgtagcttacgccatccagccccacccttcagcggcagctattgattggacagcttgaatgccagtcaaatttctcaactctgtgggttgctgggtctcttcgtccctccctgaagcggctactgcccgctacctagaaggatatgcgcttgcgcgttagagatcgctgtccgctcttcctattggttcgtttttaggagctcggggaatacgaaatatccagccaataggagcagagatgccggaaccgggcttgtgtgcctctgctgaggtgatctggcgcagagcggaggaggtgcttggcgcttctcaggctcctcctctccccttgcggcctttctaacgttggccctgctcttgtggcctcccgcagaatgtggatgacgcccaaaagaagcaagatggaagtcgacgaggctctagttttccggcccgagtggacccagcgttatttggtggtggagcctccggagggcgatggggccctgtgcctggtctgtcgccgcctcatcgtagctacccgcgaacgcgacgtcaggcgccactacgaggctgagcacgaatactacgagcggtatgtggcggacggcgagcgcgcggccctggtggagcgtctgcgtcagggcgacttgcccgtggcctccttcactcctgaagagagagctgctcgtgcaggcctcgggctctgccgcctcttggccttgaagggtcgcggctggggtgagggggactttgtataccagtgcatggaggtgttgctgagagaggtactgcccgagcatgtaagcgtcctgcaaggcgttgacttatctccagatatcacaaggcagaggatcctgagcattgacaggaatctacgcaaccagctttttaaccgagccagggactttaaagcctattctcttgccttggacgaccaggcttttgtggcctatgagaactacctcctggtctttatccgcggtgtaggccctgagttggaggtgcaagaagatcttctgaccataatcaacctgactcatcatttcagtgttggtgcgctcatgtcggcaatcctagagtccctgcagacagcagggcttagcttgcagagaatggttggactgaccacgacccatactttgaggatgattggtgagaactcaggactcgtctcatacatgagagaaaaggccgtaagccccaactgttggaatgtcattcattattcaggatttcttcacttggaactgttgagctcctatgatgtagatgttaatcagatcataaataccatatccgaatggatagttttgattaagaccagaggcgttaggcgacctgaatttcagactttactaacggaatctgaatcagagcatggtgaaagggttaatggacgatgtctgaacaattggcttaggagagggaaaactttaaaactaatattctctctaagaaaagaaatggaagcgttcttggtttcagtaggggcaacaacagtccacttctcagacaaacaatggctttgtgactttggcttcttggtggacattatggaacaccttcgagaactcagtgaagaattacgagttagtaaagtctttgctgctgctgcctttgaccatatttgtactttcgaagttaagctgaatttatttcaaagacatattgaggaaaaaaatctaacagactttcctgccctcagagaagttgttgatgagctaaaacagcaaaataaggaagatgaaaaaatatttgatcctgataggtatcaaatggtgatctgtcgtctccaaaaagaatttgagagacattttaaggacctcaggttcattaaaaaggacttagaacttttttcaaatccatttaactttaaacctgaatatgcacctatttcagtgagggtggagctaacaaaacttcaggcaaacactaatctttggaatgaatacagaatcaaagacttggggcagttttatgctggattgtctgctgaatcctacccaattatcaaaggggttgcctgtaaggtggcatccttgtttgatagtaaccaaatctgtgaaaaggctttttcatatttgactcgaaaccaacacactttgagtcagccattaaca

SEQ ID NO: 315958 - DNA, 4001 bp, Homo sapiens
tataagcacagaccaactgctagagaaaacaaattttctagcaggggctgcatgagaaagagttatctattccccacacagacaattctttattcagaaataagataataggctgggcacgggggctcacacctgtaatcccaacacttggggaggctgaggtgggcggatcacctgaggtcaggagttcaagaccagcccggccaacatggagaaaccccgtctctactaaaaataaaaaaattagccgggtgtggtcatgcacgcctgtactcccagctactcgggaggctgaggcaggaagatcgcttgaaaccaggaggcagaggttgccctgagccaagatcacgccactgcacttccgcctgggcaacagagtaagacttcatcttaaaaaaaaaagaaagaagacaataagttacttaaatattacagacatttctcatgagcccctgtattgaagttgtattagtcatctcaacttatatattaaaaagagtataactggactccatataaaaatctccacttgagccgggcgcggtggctcatgcttgtaatcccagcactttgggaggccaaagcgggcagatcacctgaggtcaggaaatcgagaccatcctggctaacatggtgaaaccctgtctctattaaaaatacaaaaaactgcagggcgcggtggctcacgcctgtaatcccagcactttggaaggctgaggcaggcggttcacctgagatcgagagttttgacaccagcctgaccaacatggagaaatcccatctctactaaaaatacaaaattagccaggtgtggtggcacatgcctatagtcctagctactcgggaggctgaggcaggagaatctcccttgaacctgtgaggaggaggttgcagtcagctgagatcgcgccactgcactccagcctgggtgacaaagtgagactccgtctaaaaaaaaaataaaaaaaaaataaaaatctccacttaagtaattaattacaagccaccaagctagtatgtttagttttgttttacagtattctggcacagtacaataataggcccagttgtcctgtcaattcattctaacacagtagaaacaaaagccagtctgccattgcttctgttactactattacaagtgaaaaggaaaaaacatccccaggttcttgctccttctttcatctaccttccaattctcttcctttccttcagtggtcctttctacccactgttctctcagtcccattgccctgaatagtttatactttcacaataaatccctctagaaacctaccactccaaactgaagcattcttttttctattaacgtacggacgtcactaacaactgattttaacaaaataatctgacataacgtttaggtgtattttgggcttgtctttttggaagtttatagtctgcactcacttttccttccacatgtttcaaatctcttcccttcacattttttgtcacagttataagcttcaaaatccaaggatgacccataaaatctggtatcttcgaagtgcgtcctccgaaataaaggacaggaaaacactaagaggggtcactaatttaacaatagggtaatcagaagtcaagcccaaagtgcatcagcctgtcctaaaactacaaacgatttgttttgaaagaaactcaaaatgaattgtgcctttggatgtgaacagatgatttctggaatgaatgaaaagcaagaaaacagtaacacagtaccctctgaaaaaaggtttttctccccatcttaagcttttatacatcttttaacttcgcatgttctgcatacataattttaaattaagtggcttccttacttagttaacggtaccattaagacaacactacgtatattcctccacttacactccaaacaacccttaaaaggtctcgggggagagcggtaaagaaacacacggtctgcggaaaaggagaaggcctgactggcacgtcagggaacccggcggcctccgccgttgtgggcatgcgctgtacatgcctctgcccgggcaaagaggcgtgtccgcgccattgagtgacgcggcccgttaagtcgtagcccttaagtgagcccggctcgactccctccgtaccagttctcaatcatctctttgatagcattagctggccgctggataacttcccccgccgcgatgcggttcaccactgtctcgtccagccgccgaataacccctgccacgaacgacattttggcgccagaagagccaaggaaacgtctagatgctcaacggaagtgccttcagccaatcacctcagtgcctcgtgctcacgttcttccttcagctgtagcttacgccatccagccccacccttcagcggcagctattgattggacagcttgaatgccagtcaaatttctcaactctgtgggttgctgggtctcttcgtccctccctgaagcggctactgcccgctacctagaaggatatgcgcttgcgcgttagagatcgctgtccgctcttcctattggttcgtttttaggagctcggggaatacgaaatatccagccaataggagcagagatgccggaaccgggcttgtgtgcctctgctgaggtgatctggcgcagagcggaggaggtgcttggcgcttctcaggctcctcctctccccttgcggcctttctaacgttggccctgctcttgtggcctcccgcagaatgtggatgacgcccaaaagaagcaagatggaagtcgacgaggctctagttttccggcccgagtggacccagcgttatttggtggtggagcctccggagggcgatggggccctgtgcctggtctgtcgccgcctcatcgtagctacccgcgaacgcgacgtcaggcgccactacgaggctgagcacgaatactacgagcggtatgtggcggacggcgagcgcgcggccctggtggagcgtctgcgtcagggcgacttgcccgtggcctccttcactcctgaagagagagctgctcgtgcaggcctcgggctctgccgcctcttggccttgaagggtcgcggctggggtgagggggactttgtataccagtgcatggaggtgttgctgagagaggtactgcccgagcatgtaagcgtcctgcaaggcgttgacttatctccagatatcacaaggcagaggatcctgagcattgacaggaatctacgcaaccagctttttaaccgagccagggactttaaagcctattctcttgccttggacgaccaggcttttgtggcctatgagaactacctcctggtctttatccgcggtgtaggccctgagttggaggtgcaagaagatcttctgaccataatcaacctgactcatcatttcagtgttggtgcgctcatgtcggcaatcctagagtccctgcagacagcagggcttagcttgcagagaatggttggactgaccacgacccatactttgaggatgattggtgagaactcaggactcgtctcatacatgagagaaaaggccgtaagccccaactgttggaatgtcattcattattcaggatttcttcacttggaactgttgagctcctatgatgtagatgttaatcagatcataaataccatatccgaatggatagttttgattaagaccagaggcgttaggcgacctgaatttcagactttactaacggaatctgaatcagagcatggtgaaagggttaatggacgatgtctgaacaattggcttaggagagggaaaactttaaaactaatattctctctaagaaaagaaatggaagcgttcttggtttcagtaggggcaacaacagtccacttctcagacaaacaatggctttgtgactttggcttcttggtggacattatggaacaccttcgagaactcagtgaagaattacgagttagtaaagtctttgctgctgctgcctttgaccatatttgtactttcgaagttaagctgaatttatttcaaagacatattgaggaaaaaaatctaacagactt

SEQ ID NO: 315959 - DNA, 4001 bp, Homo sapiens
agtaaacaaaagaatacaaaaaaaaaaaaaataccaagttgaggcttatagtcccatataaagcagggtacgcaaaaacatacctgtattcttaaaatatttcacttcaactgaagatgtgttaaataaaaagtttaaacggaaaagtggacactgccacagacgagaatagagaattaggaggtctaagataacaagaacctgcaaacttcagctcgacaatattaccaacagaataaattactattttaagtgtaagcttaatttcaaagcaatgtaaagcagcaattcttataccagttgagcataagcattactatatcagacagtcaaagcaggaaacctggataactgatttgttaaaaaggaaatctcattgacttacagacttagacttagctaagcagttttcatcttcactgcacattataacattaacttatatctgcaggttcctgaagctgtgctatgcaattacagtttgttctatggaaactgaggcacaggaagaaggagaaacagtttccatatttaaactgtgtctgcagaagctgaggacagaggtactcaggataaatcatcttcttgtttcccagacattaattaggtgtttcccagcctgaaatacggagttctggacacgaagtgccaaccatattactcccctggttagtgctgctctacaaccaaagacacagggttaagtccaagaaattaccagacaattttttaaagtgctagaacccacaaaaatggcaggggatgaagctacacgccttcatacagtcgatttgccgacaagcactttccaaatgctgacgctgcaagtcaggtactagttttcagtttaataaaattgccatttgaatcatatatgggggaggaatcgacttgatcgagaagctaaagagggatatttggttgcaattacccttattttgaaaccagacaaatagactgaaaccagttaagaggtcttaaactttcatctacaaaaggacacaccagccccgcaccgaccaacccttgtgagatttaagcattaattatataataggaaatcaggttaaaagcaagatgaagaggtgggataatgaaaagatcttccggttaagaaaagtaaaaatagaaaagtgagttacaaatgagaaaatccgacagaaaccaaaatgaaaacaaaccttgctttttaaaaagaagaaaaaaaaatcagtgtctgtacagcagaatggcaaattcccagcccccaaatcagccccggtgcaatctggtagcgcggatctcggtaacaaaacataactccccaaggcagaggccgcagggaactatggaaatgaacctgaagagccaacctgacgtgacttccagagccctcctccaggtcaccctctgggcccctctccctcccctcactcttcaggtcccagtagcggctccttcccagggcacgcctcctccacggccgcagggtcctgggcgctcggatcgcgctggaccttagctgcggaccctgctcagcgcacctcccggcagccgctcccctcggctggctctgccctccccgtgcccgtcccacgggctcccagcgccctgggcgctcgcgccctttggacctttctccctcagctcgctctcctgggactcaccagtgggattcgggagaagttggaggctgctgagccgacacatcccgaccaatgagcgcacggggccgggtggcagtggcgggctgagagcccagccaagcgcctctcagtccgtgcatccgcccaaggcgcgcgggctccaggctgaggccggacttgggggaggttccggacccgcctccgcccgggccgtggggcgacgaggcacctgggcatccctccgacccgcacccacagagactcaccgtgacccctcagcagatcccgcgccaggagttgggcggctgctccagcctgctctcggtcaagcttcgccacttgcacatctccgcgccccgcgcgtctcggcgctctcacggcccaccccccccaccccctaccccgcctcgccgctgcaggaccagagagaggagcagttccctgggtgacctgaaggtttccgctaggtctcccaaatccagtcacttcatgtgagggggccggggagacggggggcgggcggtggcaatgaaaatgtcccatcctccccaccccccatctcaccattcccaaaagggctttgctaaacatttttagaattgcttagcttcggggctttcaagaaaacaatacacgggctcttcgggattctctagtcctgagggggctccatctctcccctgtggaccggagactataatgcttgcctcttctcacgctcttctttcgctctctttcccgctccctttcctccctgaatccaagcttccttccttcttcatttaaatgtcctctctccctccctccttcgttttcttttttcttactctccctccccgtttccttctttccttccttgctcctgctttctccaccccgcttccctctttcttccctttcttttccttggtcgaagtactctcatgtcaagatctgaactgaaactctccgctcccacctcctgacttcagggaatcttaaaacgtgtgtacatcggaggttgagggtggggagtgagaaagagaaaaataaactaaagtgtgtctgctctacctactgaaatcagccgtaatgcgcctggaccctcacagtttaatgcaagcaagcagcgtacccctttcactcaagacacagcgattcctcctcaaaggggtaaatacaaacaaggaaataaatactttaggcacaaaggcagtttctttgtaaaagctacctttagcagctataattgccaaggagctcagaggaactaaacttccttttttttttgcttccagtgtacaagtacctttaatactgatccctttcctcttttgaatcacaggtaattacacacacacacacacacacacacacacacacatacacacacatattcacactccactgcggaattcatactgaaataaaactgggtttgcaattatctgtttttaatatcaaaatgatttgctgcttgagaagagtccccttgtgctaaaaaattttccatctttttcatagcagagaaagctgaaaagcaaggagaaaaggtagttcatcctaataagtggaatacaatggagagacatttccccaaaaagctaaccaatctttaaataattcgattaatatagaggaaaaatggagtgtgtagacctaacaagtgctattgacgtctatttacgctttctctgtgcatcttacagacactatttagtcctcacaacaatcccgaaatattggtgttttcactcccacaaataagcatgcggggcttgactagcgccctggaaagcatctcaactggaatttttttttcctacagagtctcgtgctgtcgcccaggctggagtgcagtggtgtgatctctgcctcctgggttcaagcgattctcctgcctcagcctcctgagcaactggaaatacaggcacgcaccaccacaccgagctaattttgcttgcgtgtgtgtgtgtgtgtgtgtgtgtgtgtgtgtgtacttttactttcggggtttctccatattggccaggctggtctcaaactcctggcctcaagtgatctacacacctcggtctcccaaagtgctggaattacaggtgttagcaatcatgcctggcggtgaggactcttttaaaggaaaaaaaaggatttacttaaaatgtatgacaaaagaaaaaaaaaatgcctacttagagttaattttagactctgactttcagctgatagtcgacagtatggattggtaactggtttcccagaacaaatatttttttctttttctcttttctttctgttttttgttgttgttgctgttgttcgtttttttttgtttagatgagggtctgactgtgttgcccaggctggtctctaactctgggctcaagcaatccttca

SEQ ID NO: 315960 - DNA, 4001 bp, Homo sapiens
tgtaaatgccctgtaaattcttaaaggaagtcttttgctcttagtagccttttttcaaaagcattgagcaaaagcagaaatgatgcaagtttaatctcctaattaactttgtcgttcatttccagttaattctggaaggttcacaatttttctttaagacatcaggggacagtatctggaatctcactgtggaacatatgactaaaccccaaatacctgaatatccaacttaaccacacccaatcccatagagaagagtaagggggacaagtaaacaaaagaatacaaaaaaaaaaaaaataccaagttgaggcttatagtcccatataaagcagggtacgcaaaaacatacctgtattcttaaaatatttcacttcaactgaagatgtgttaaataaaaagtttaaacggaaaagtggacactgccacagacgagaatagagaattaggaggtctaagataacaagaacctgcaaacttcagctcgacaatattaccaacagaataaattactattttaagtgtaagcttaatttcaaagcaatgtaaagcagcaattcttataccagttgagcataagcattactatatcagacagtcaaagcaggaaacctggataactgatttgttaaaaaggaaatctcattgacttacagacttagacttagctaagcagttttcatcttcactgcacattataacattaacttatatctgcaggttcctgaagctgtgctatgcaattacagtttgttctatggaaactgaggcacaggaagaaggagaaacagtttccatatttaaactgtgtctgcagaagctgaggacagaggtactcaggataaatcatcttcttgtttcccagacattaattaggtgtttcccagcctgaaatacggagttctggacacgaagtgccaaccatattactcccctggttagtgctgctctacaaccaaagacacagggttaagtccaagaaattaccagacaattttttaaagtgctagaacccacaaaaatggcaggggatgaagctacacgccttcatacagtcgatttgccgacaagcactttccaaatgctgacgctgcaagtcaggtactagttttcagtttaataaaattgccatttgaatcatatatgggggaggaatcgacttgatcgagaagctaaagagggatatttggttgcaattacccttattttgaaaccagacaaatagactgaaaccagttaagaggtcttaaactttcatctacaaaaggacacaccagccccgcaccgaccaacccttgtgagatttaagcattaattatataataggaaatcaggttaaaagcaagatgaagaggtgggataatgaaaagatcttccggttaagaaaagtaaaaatagaaaagtgagttacaaatgagaaaatccgacagaaaccaaaatgaaaacaaaccttgctttttaaaaagaagaaaaaaaaatcagtgtctgtacagcagaatggcaaattcccagcccccaaatcagccccggtgcaatctggtagcgcggatctcggtaacaaaacataactccccaaggcagaggccgcagggaactatggaaatgaacctgaagagccaacctgacgtgacttccagagccctcctccaggtcaccctctgggcccctctccctcccctcactcttcaggtcccagtagcggctccttcccagggcacgcctcctccacggccgcagggtcctgggcgctcggatcgcgctggaccttagctgcggaccctgctcagcgcacctcccggcagccgctcccctcggctggctctgccctccccgtgcccgtcccacgggctcccagcgccctgggcgctcgcgccctttggacctttctccctcagctcgctctcctgggactcaccagtgggattcgggagaagttggaggctgctgagccgacacatcccgaccaatgagcgcacggggccgggtggcagtggcgggctgagagcccagccaagcgcctctcagtccgtgcatccgcccaaggcgcgcgggctccaggctgaggccggacttgggggaggttccggacccgcctccgcccgggccgtggggcgacgaggcacctgggcatccctccgacccgcacccacagagactcaccgtgacccctcagcagatcccgcgccaggagttgggcggctgctccagcctgctctcggtcaagcttcgccacttgcacatctccgcgccccgcgcgtctcggcgctctcacggcccaccccccccaccccctaccccgcctcgccgctgcaggaccagagagaggagcagttccctgggtgacctgaaggtttccgctaggtctcccaaatccagtcacttcatgtgagggggccggggagacggggggcgggcggtggcaatgaaaatgtcccatcctccccaccccccatctcaccattcccaaaagggctttgctaaacatttttagaattgcttagcttcggggctttcaagaaaacaatacacgggctcttcgggattctctagtcctgagggggctccatctctcccctgtggaccggagactataatgcttgcctcttctcacgctcttctttcgctctctttcccgctccctttcctccctgaatccaagcttccttccttcttcatttaaatgtcctctctccctccctccttcgttttcttttttcttactctccctccccgtttccttctttccttccttgctcctgctttctccaccccgcttccctctttcttccctttcttttccttggtcgaagtactctcatgtcaagatctgaactgaaactctccgctcccacctcctgacttcagggaatcttaaaacgtgtgtacatcggaggttgagggtggggagtgagaaagagaaaaataaactaaagtgtgtctgctctacctactgaaatcagccgtaatgcgcctggaccctcacagtttaatgcaagcaagcagcgtacccctttcactcaagacacagcgattcctcctcaaaggggtaaatacaaacaaggaaataaatactttaggcacaaaggcagtttctttgtaaaagctacctttagcagctataattgccaaggagctcagaggaactaaacttccttttttttttgcttccagtgtacaagtacctttaatactgatccctttcctcttttgaatcacaggtaattacacacacacacacacacacacacacacacacatacacacacatattcacactccactgcggaattcatactgaaataaaactgggtttgcaattatctgtttttaatatcaaaatgatttgctgcttgagaagagtccccttgtgctaaaaaattttccatctttttcatagcagagaaagctgaaaagcaaggagaaaaggtagttcatcctaataagtggaatacaatggagagacatttccccaaaaagctaaccaatctttaaataattcgattaatatagaggaaaaatggagtgtgtagacctaacaagtgctattgacgtctatttacgctttctctgtgcatcttacagacactatttagtcctcacaacaatcccgaaatattggtgttttcactcccacaaataagcatgcggggcttgactagcgccctggaaagcatctcaactggaatttttttttcctacagagtctcgtgctgtcgcccaggctggagtgcagtggtgtgatctctgcctcctgggttcaagcgattctcctgcctcagcctcctgagcaactggaaatacaggcacgcaccaccacaccgagctaattttgcttgcgtgtgtgtgtgtgtgtgtgtgtgtgtgtgtgtgtacttttactttcggggtttctccatattggccaggctggtctcaaactcctggcctcaagtgatctacacacctcggtctcccaaagtgctggaattacaggtgttagcaatcatgcctggcggtgagga

SEQ ID NO: 315961 - DNA, 4001 bp, Homo sapiens
ctgtggaaactccatgccttgtggtgtagtaaagctagtggataagcatttctttctccctgtaagttactttcccttggcttctcctccttacccttgagactgggtactgaagcagctgggctcttaatgggtcagcacccaagtttgcagaaacagttacagagaaatgaagacagtgacagaagctgcatcaaaacaatataatctttgaatcacctgcaaagtcttcctccatctccccctcttgtaaatgccctgtaaattcttaaaggaagtcttttgctcttagtagccttttttcaaaagcattgagcaaaagcagaaatgatgcaagtttaatctcctaattaactttgtcgttcatttccagttaattctggaaggttcacaatttttctttaagacatcaggggacagtatctggaatctcactgtggaacatatgactaaaccccaaatacctgaatatccaacttaaccacacccaatcccatagagaagagtaagggggacaagtaaacaaaagaatacaaaaaaaaaaaaaataccaagttgaggcttatagtcccatataaagcagggtacgcaaaaacatacctgtattcttaaaatatttcacttcaactgaagatgtgttaaataaaaagtttaaacggaaaagtggacactgccacagacgagaatagagaattaggaggtctaagataacaagaacctgcaaacttcagctcgacaatattaccaacagaataaattactattttaagtgtaagcttaatttcaaagcaatgtaaagcagcaattcttataccagttgagcataagcattactatatcagacagtcaaagcaggaaacctggataactgatttgttaaaaaggaaatctcattgacttacagacttagacttagctaagcagttttcatcttcactgcacattataacattaacttatatctgcaggttcctgaagctgtgctatgcaattacagtttgttctatggaaactgaggcacaggaagaaggagaaacagtttccatatttaaactgtgtctgcagaagctgaggacagaggtactcaggataaatcatcttcttgtttcccagacattaattaggtgtttcccagcctgaaatacggagttctggacacgaagtgccaaccatattactcccctggttagtgctgctctacaaccaaagacacagggttaagtccaagaaattaccagacaattttttaaagtgctagaacccacaaaaatggcaggggatgaagctacacgccttcatacagtcgatttgccgacaagcactttccaaatgctgacgctgcaagtcaggtactagttttcagtttaataaaattgccatttgaatcatatatgggggaggaatcgacttgatcgagaagctaaagagggatatttggttgcaattacccttattttgaaaccagacaaatagactgaaaccagttaagaggtcttaaactttcatctacaaaaggacacaccagccccgcaccgaccaacccttgtgagatttaagcattaattatataataggaaatcaggttaaaagcaagatgaagaggtgggataatgaaaagatcttccggttaagaaaagtaaaaatagaaaagtgagttacaaatgagaaaatccgacagaaaccaaaatgaaaacaaaccttgctttttaaaaagaagaaaaaaaaatcagtgtctgtacagcagaatggcaaattcccagcccccaaatcagccccggtgcaatctggtagcgcggatctcggtaacaaaacataactccccaaggcagaggccgcagggaactatggaaatgaacctgaagagccaacctgacgtgacttccagagccctcctccaggtcaccctctgggcccctctccctcccctcactcttcaggtcccagtagcggctccttcccagggcacgcctcctccacggccgcagggtcctgggcgctcggatcgcgctggaccttagctgcggaccctgctcagcgcacctcccggcagccgctcccctcggctggctctgccctccccgtgcccgtcccacgggctcccagcgccctgggcgctcgcgccctttggacctttctccctcagctcgctctcctgggactcaccagtgggattcgggagaagttggaggctgctgagccgacacatcccgaccaatgagcgcacggggccgggtggcagtggcgggctgagagcccagccaagcgcctctcagtccgtgcatccgcccaaggcgcgcgggctccaggctgaggccggacttgggggaggttccggacccgcctccgcccgggccgtggggcgacgaggcacctgggcatccctccgacccgcacccacagagactcaccgtgacccctcagcagatcccgcgccaggagttgggcggctgctccagcctgctctcggtcaagcttcgccacttgcacatctccgcgccccgcgcgtctcggcgctctcacggcccaccccccccaccccctaccccgcctcgccgctgcaggaccagagagaggagcagttccctgggtgacctgaaggtttccgctaggtctcccaaatccagtcacttcatgtgagggggccggggagacggggggcgggcggtggcaatgaaaatgtcccatcctccccaccccccatctcaccattcccaaaagggctttgctaaacatttttagaattgcttagcttcggggctttcaagaaaacaatacacgggctcttcgggattctctagtcctgagggggctccatctctcccctgtggaccggagactataatgcttgcctcttctcacgctcttctttcgctctctttcccgctccctttcctccctgaatccaagcttccttccttcttcatttaaatgtcctctctccctccctccttcgttttcttttttcttactctccctccccgtttccttctttccttccttgctcctgctttctccaccccgcttccctctttcttccctttcttttccttggtcgaagtactctcatgtcaagatctgaactgaaactctccgctcccacctcctgacttcagggaatcttaaaacgtgtgtacatcggaggttgagggtggggagtgagaaagagaaaaataaactaaagtgtgtctgctctacctactgaaatcagccgtaatgcgcctggaccctcacagtttaatgcaagcaagcagcgtacccctttcactcaagacacagcgattcctcctcaaaggggtaaatacaaacaaggaaataaatactttaggcacaaaggcagtttctttgtaaaagctacctttagcagctataattgccaaggagctcagaggaactaaacttccttttttttttgcttccagtgtacaagtacctttaatactgatccctttcctcttttgaatcacaggtaattacacacacacacacacacacacacacacacacatacacacacatattcacactccactgcggaattcatactgaaataaaactgggtttgcaattatctgtttttaatatcaaaatgatttgctgcttgagaagagtccccttgtgctaaaaaattttccatctttttcatagcagagaaagctgaaaagcaaggagaaaaggtagttcatcctaataagtggaatacaatggagagacatttccccaaaaagctaaccaatctttaaataattcgattaatatagaggaaaaatggagtgtgtagacctaacaagtgctattgacgtctatttacgctttctctgtgcatcttacagacactatttagtcctcacaacaatcccgaaatattggtgttttcactcccacaaataagcatgcggggcttgactagcgccctggaaagcatctcaactggaatttttttttcctacagagtctcgtgctgtcgcccaggctggagtgcagtggtgtgatctctgcctcct

SEQ ID NO: 315962 - DNA, 4001 bp, Homo sapiens
aatgttttactggtataaaaggacttttttttttcttagttcttccttagaaatgacagtcagtgtccctgtaaagtaaagcgaaggggtgaaccagggcagcctcagggttaaattacaggtgctctgtggaaactccatgccttgtggtgtagtaaagctagtggataagcatttctttctccctgtaagttactttcccttggcttctcctccttacccttgagactgggtactgaagcagctgggctcttaatgggtcagcacccaagtttgcagaaacagttacagagaaatgaagacagtgacagaagctgcatcaaaacaatataatctttgaatcacctgcaaagtcttcctccatctccccctcttgtaaatgccctgtaaattcttaaaggaagtcttttgctcttagtagccttttttcaaaagcattgagcaaaagcagaaatgatgcaagtttaatctcctaattaactttgtcgttcatttccagttaattctggaaggttcacaatttttctttaagacatcaggggacagtatctggaatctcactgtggaacatatgactaaaccccaaatacctgaatatccaacttaaccacacccaatcccatagagaagagtaagggggacaagtaaacaaaagaatacaaaaaaaaaaaaaataccaagttgaggcttatagtcccatataaagcagggtacgcaaaaacatacctgtattcttaaaatatttcacttcaactgaagatgtgttaaataaaaagtttaaacggaaaagtggacactgccacagacgagaatagagaattaggaggtctaagataacaagaacctgcaaacttcagctcgacaatattaccaacagaataaattactattttaagtgtaagcttaatttcaaagcaatgtaaagcagcaattcttataccagttgagcataagcattactatatcagacagtcaaagcaggaaacctggataactgatttgttaaaaaggaaatctcattgacttacagacttagacttagctaagcagttttcatcttcactgcacattataacattaacttatatctgcaggttcctgaagctgtgctatgcaattacagtttgttctatggaaactgaggcacaggaagaaggagaaacagtttccatatttaaactgtgtctgcagaagctgaggacagaggtactcaggataaatcatcttcttgtttcccagacattaattaggtgtttcccagcctgaaatacggagttctggacacgaagtgccaaccatattactcccctggttagtgctgctctacaaccaaagacacagggttaagtccaagaaattaccagacaattttttaaagtgctagaacccacaaaaatggcaggggatgaagctacacgccttcatacagtcgatttgccgacaagcactttccaaatgctgacgctgcaagtcaggtactagttttcagtttaataaaattgccatttgaatcatatatgggggaggaatcgacttgatcgagaagctaaagagggatatttggttgcaattacccttattttgaaaccagacaaatagactgaaaccagttaagaggtcttaaactttcatctacaaaaggacacaccagccccgcaccgaccaacccttgtgagatttaagcattaattatataataggaaatcaggttaaaagcaagatgaagaggtgggataatgaaaagatcttccggttaagaaaagtaaaaatagaaaagtgagttacaaatgagaaaatccgacagaaaccaaaatgaaaacaaaccttgctttttaaaaagaagaaaaaaaaatcagtgtctgtacagcagaatggcaaattcccagcccccaaatcagccccggtgcaatctggtagcgcggatctcggtaacaaaacataactccccaaggcagaggccgcagggaactatggaaatgaacctgaagagccaacctgacgtgacttccagagccctcctccaggtcaccctctgggcccctctccctcccctcactcttcaggtcccagtagcggctccttcccagggcacgcctcctccacggccgcagggtcctgggcgctcggatcgcgctggaccttagctgcggaccctgctcagcgcacctcccggcagccgctcccctcggctggctctgccctccccgtgcccgtcccacgggctcccagcgccctgggcgctcgcgccctttggacctttctccctcagctcgctctcctgggactcaccagtgggattcgggagaagttggaggctgctgagccgacacatcccgaccaatgagcgcacggggccgggtggcagtggcgggctgagagcccagccaagcgcctctcagtccgtgcatccgcccaaggcgcgcgggctccaggctgaggccggacttgggggaggttccggacccgcctccgcccgggccgtggggcgacgaggcacctgggcatccctccgacccgcacccacagagactcaccgtgacccctcagcagatcccgcgccaggagttgggcggctgctccagcctgctctcggtcaagcttcgccacttgcacatctccgcgccccgcgcgtctcggcgctctcacggcccaccccccccaccccctaccccgcctcgccgctgcaggaccagagagaggagcagttccctgggtgacctgaaggtttccgctaggtctcccaaatccagtcacttcatgtgagggggccggggagacggggggcgggcggtggcaatgaaaatgtcccatcctccccaccccccatctcaccattcccaaaagggctttgctaaacatttttagaattgcttagcttcggggctttcaagaaaacaatacacgggctcttcgggattctctagtcctgagggggctccatctctcccctgtggaccggagactataatgcttgcctcttctcacgctcttctttcgctctctttcccgctccctttcctccctgaatccaagcttccttccttcttcatttaaatgtcctctctccctccctccttcgttttcttttttcttactctccctccccgtttccttctttccttccttgctcctgctttctccaccccgcttccctctttcttccctttcttttccttggtcgaagtactctcatgtcaagatctgaactgaaactctccgctcccacctcctgacttcagggaatcttaaaacgtgtgtacatcggaggttgagggtggggagtgagaaagagaaaaataaactaaagtgtgtctgctctacctactgaaatcagccgtaatgcgcctggaccctcacagtttaatgcaagcaagcagcgtacccctttcactcaagacacagcgattcctcctcaaaggggtaaatacaaacaaggaaataaatactttaggcacaaaggcagtttctttgtaaaagctacctttagcagctataattgccaaggagctcagaggaactaaacttccttttttttttgcttccagtgtacaagtacctttaatactgatccctttcctcttttgaatcacaggtaattacacacacacacacacacacacacacacacacatacacacacatattcacactccactgcggaattcatactgaaataaaactgggtttgcaattatctgtttttaatatcaaaatgatttgctgcttgagaagagtccccttgtgctaaaaaattttccatctttttcatagcagagaaagctgaaaagcaaggagaaaaggtagttcatcctaataagtggaatacaatggagagacatttccccaaaaagctaaccaatctttaaataattcgattaatatagaggaaaaatggagtgtgtagacctaacaagtgctattgacgtctatttacgctttctctgtgcatcttacagacactatttagtcctcacaacaatcccgaaatattggtgttttca

SEQ ID NO: 315963 - DNA, 4001 bp, Homo sapiens
gactaaaggaggctgaggggacaggacaacaaaaggtcatgcatggttctcaattcgctccttggacaattgatgaaatctagatatctctagatttaaaaacagtattttctcaatagtaattttctaattttaattaattccaattaaaataaattttaattaattccaattaaaataaattttaattaattccaattaaaataaattttagttaattccaattaaaataaattttaattaaaattaattagatataaatatgtgtatatatacatatacacacatatgtatatatatctatacatatacacacacatatatgtatatatacacacacatatgtatatatgtatatacacacacatgtatatatgtatatacacacacacacatgtatatatgtatacacacacacatatgtatatatgtatatacacacacatatgtatatatgtatatatacacacacatatgtatatatgtatatacacacacacatatgtatatatgtatatacacacacatatgtatatatgtatatatatacacacatatgtatatatgtatatatacacacacatatgtatatatgtatatatacacacacatatgtatatatgtatatatacacacaatgtatatatgtatatatacacactcatatgtatatatgtatatatacacacacatatgtatatatgtatatatacacactcatgtatatatgtatatatacacacatatgtaatatgtatacacacacatatgtatatatacacacacatgtatatatgtatatatacacacacatgtatatatgtatatatacacacacatatgtatatatgtatatacacacacatatgtatatatgtatatacacacacatatttttatatatacacccatatgtatggatacagagagagagaaagagaatgataaaggaaatatggtaaaacaggaacatctgggtaatttggctgcacctgaaattttctgtattgtttgcaacttttctgaaaatctgaaacaatttttaaaactcactcaccaacaagtttcctgtcattctaaatacgaaacagcatatccgcacacctggcagcagcctgctctctgcctccctgatttattcacaaagaattaaaaagtcctttccccgttttcctgctagtactgtaggccaagttcattactcgcctccctgacacataatattttttcctttctctgtcatccatagaactgaaaactccctgttgtttctaagatattctgtatcagacaaagcattagcgcctttccatttaaggttgttggtctacagggggcagaattccgaaaagatttgggctttgttgttccattaagatcccccacacataaatccaactgtatgaggaaaaaaattgttcctagataagaagaaaaactcatttttaaatcatgacaaataataaaagaagaaataaattaaaaaaaaaaaagcagcagcagcagcagcatgtactaccatccatctagctccaggaacatggggctttgaatctgaggaaatctgagtaagggctcagagcctctctctgggctcagacgatttccaaacattagcaggaacattccaggaggccccctgcccacatcagaataaacatggtgtcctctgttcttgttttctccatccttgtatgtcctctcaatcttgactattcttacagaaagttttccctgggatataatgaaatggcccatacaaaaaagtacacttgtcatttaaagatgaaagtataaaatgaagtaaaataaaaaccaatggaatcctcttaccttcaaatagcagttgttgtgtgaaacagattctgcgtctataccaggtccctgagggtttgagcctacttcaatgcatgcagaatatatagggagaggttatagatctgggtttttcattacacaaggtgtttttgatgagtcctcagcgaagatccacttaaaaacaaaagctacacaaagactacaaaaaggccacacaaagtttaaacaaaaggctaaagaaagaccaaacaaaagccaaagaaagtttaaacaaagagcgaaacaaagataaaacaaaggccaaagacaaaaacaaagagcaaaagaaaatctaaacaaaagctaagctaagctataaccatatctcacacacacatacacacgcaccccacattcactctacagccccccaacattcacatattccagcctcccacctcccacataatcaacaccccatgtgaaaactcacccctcaaggttcattccacataaactccagttaagttccatgccaggtccaaccacaccacacaccagctcaccctaccaaaccacacacccttccaccaacatgctatgccaccacagcgccatcccacccagcaccccatacctcactcacacatcacaagccatacccataagccatgaacacagctgcaatcacattgacaaattccaggagtttttatactccatgtagattaaataccgatcacacttccttccctaaaacactcatgtatacccatagatacaccccaaaactaaaattcacacaagcatgcccttgtacacttgattagcaagagtctaatccagtctagttacaactaacattgaatttggaagtttccatgacaattaccctatgcattcacatttatgaaaacacgtataaatcatctcttatgttgaacagtttctgcgaatgataaatctcattcaattaacattttattggcttcagtcttagacaccggcattttcttataattttcctaacctaaaatgtggggccacacctttctgtgctctgttaaatgccatgggtcctgtaactctgcttctgctatttattttatatatgtagaactagaactacccactaatgatttgaaagatgaaagcttacttctgaaaccaatccaaccaacagcagccttgccttttgaattcccagcgccccctccatgacagtgtaatataaatgtcaacattaccaccaagtttctctttaggctcttgtctcagtaaagaatcagccagggaaccttgaaaaggtaatccagtgagactacaaacattgactataaatctctttgtacactaacatttttgtttttgtttttgttttgagacggaatctggttctgtcccccaggctggagtgcagtggcgctctcacctcactgcaacctccacctcctgggttcaagctattcttctgcctcggcctcccgagcagctgggactacaggcacccaccatcatgcctgaataatttttgtattttttagtagagacagggtttcgccatgttgcccaggctggtctcaaactcctgaccacaggtgatccgcctgccttggcttcccaaagtgctgggattacatgcttgagccaccgtgcctggcctcttcgtatactaactttatagttaattaaacattctctgagtaatgagttatagacgtatgctggttgattcactcccactgtgatgccagtattttgcttgtgttgtactgactgtgactgagggctggggagtagggtaagatggtttagagcttgagctctggaggcactgacactaggatcatcacaggacccacctcaaggatttgagtgaggactaaatcagttaatatgtgttcactggtggaaagaatgcctggcacacagagtcctgcaccaatgtcactcttatggccctggccctaaagaaggttaccaacaggggtgggtggcagttgtaaggacttgttttctattcacaaaataactggagactaattcaggctatttaaaaaatacaagatctagtagatatattataaagctctatctttattaaaagaccctctgcttctcaaatctttccaacaaaagttcttaatgacacattttggggaagtcccatctttgatcttctactccaccatatatagagtgat

SEQ ID NO: 315964 - DNA, 4001 bp, Homo sapiens
cacatcacaaataatctggattattcatttatggattgtttaggtcagcattgctcattgtgtagtctgcgtactgtctacataactgtacctttgcggggtgaatgcttactaaaaaggcacatacccaggccttagtggtgacccaaaaatcacattttctaggggcatctttaacattcttccccattgactcttcttcctactaaatcagtaaacatcatgtgatacctacacatagtagatgctacacaagtgctgggtatcagagtagatatgagaatctcaaatacaattaacacccactactaacttataaacagattcagttccaaatagtaaaaggtctaaaaagttggcatgctgatataccttcagaacagtaaaataaataaataaataaataaaaaattggccaggcatgtgtgtattggggcaagaatatagaggaaatctctgtaccttccccttaattttgctgtgaacctaaaactgctcaaaaaaaaaaaaaaatagcctacagagccaataactccctgcttatggttctcatggtcccatgtacatgcatattatgaaaacattagggcactgatccctacacgatgacacctattctcttatttggtcctggtaaatctcaaacaacacggcttcctcactgccatattcccttcccccagcacatcaaatggaactttacaggtatgcaataggatttgttgagtaagtgaatgagtgaatgaatgaatggtattgccactgagattgacatcagatgaagtgtgttgggagatggatgggtccaatggattaccctctccttttacttatacggatattgattagagtcaccattcgttatctccctgaggcataggcattgaggaactcatttattcaatctgttaccatggtcaataatctcaattgatagattaacaacttccagtcctattagacaacggaagcaatggccacagccacctgaagtatgcaccaatagcacctaggaggaaaccagaagccacactaggtatttcaaacagaggggatttaatggagggagctgattacacaggttgggtaataaggctgaagagggccatggagacagcccggtgttagtaaacacaggaagcaactactaaccttagggctggggaacaaaagggaagagatggtgttaccagaacctagaagctttgacgggggaccccccacggctggcgcctggccctctgagggggctgctgcgcggctgttgcttggacttctgagggggacgctgcttggctggcggtggtcggacctctgggcggggacgtggctgacgctcagacctcggaggggaccgtggctgacgctcagacctcggaggggaccgtggctgacgctcagacctcggaggggaccgtggctgacgctcagacctcggaggggaccgtggcttggctggcgctctgaccaccgcggggggcgcagctggctgttgcttgggcctctgaggggacttggcacggcggctggttctgagagggccaaaagaagctggaggcgggagccagggctctcctctgctgcttaagcgacgctggcaggagctggaaacaggtaggaaggccctgctcccccacccaccttccagtctccctggagtgccttccggtgtcggagcctaacccggagccgactagggggaagagtggggtgcggagcgggaggggcgtgctgggagccgagaccacgcgctgtgcccaactggtgccgcggggctgggcggccgcttacctggtcttctggcaggcgcagcagatccagtcctcctctttcttctggtagaagcagccgctcttacagatgctgtatttccgatccactatctccttcttggaattgaggaaggtgaacggcgggcagcagtgtatgctgaagtgttcggagtacttctggtttttggagagtctgggaccctccttggccggtttctgactcatctcactggaaatcgccgatgcaaggagacaggaggagacataaacgcacatcaggaaagggagccctctactctggaagccccctgctactcccataatccaaggtaacattcaggggggccctacagagcaacaccctggaagaccaacttccccccaactctgtggaaaggaactcaactaacagttcattaattttcatttgtgtatttttaaaaatcgtgtttttaaggagaaaaagaaacatgggctcttgttttccttatgttttagagacccatgtaagataggaaaacatttaaaaccaaacatatccttgactaaataatattctagagttaggaaaagccttttctctaaaaagcaaaataaaaaatttattattatttattattaaaacaatcatcattcatgcaataaaatactacacaaggaaaaagaacaaactgctgacctgctgacatacatcaacacattttgatctcacagacataccattgaacaaaagaagtcagacacaagaaaacaagctgtgtgtacaggaggttcaagaacaggcaaaactaatcgatggtgctagaaatcagagcatagttatatttggagaaggtgggttccgactcagaaggggcaacaggggagcttgctggagactgaaaacagtccttctaggaatgtgacagatgcagaaatagtcctacctaacactgcaaaacaccgaagcccacaggggacttacgtgactatcaatcaacaggaatcaacttagttaatgggcataaactggatactgagaatgtctctgctctcaacaaactcagggtcaggttggagatgcatatgtgcagtatgtaattacaaaacactgttatgttggccaatacaagtgtgtacaaagcatggaaaaaggatggattccttgaagacagaacctataatctgggtttttaaggatgagtacagaacaataactaaataactttgaggggatattttaatttttttgtctgttggtgtggttgtcttctactacaaatagaaatgacagctgagaagcaggtagaatgcagttacaaatacgttgtttttgcacctctgtttgtgatcatcaaaattgtgtgtcacatctgttatgtatgttaaaaatattctttcccaatgtttcacttgattttatcatgcaaaaatagttttatgtaattaagtatcttagatcttattaaaggttttgtatttttcccagaaagttttccccattctgtcagcttttaacatactcatgatgccccattttaaaagaaaatcctctctggatcctgctcccgtgtctttttgcttccctattaccctcctcttttgtataggtaaagttcttgaaaaggtattaatattttttccctccatctttacatcttccactcactcactcatcagtgcaccccactgtggctcctggccctttcctcccaaggaaaaatgactctacatagctccccacagacctccatgctgctaaaccaattgccttcatatttggtctctctccatctaaagtctttcctttcctgtgacaccacattctcctagatctcctcctctatctctagtctctccttgtccatttcccttataggctcatctgcttttggcaaatctttcatttttttaacactaaacttttaatgttagagttatttaaggtgtaataaatactaaataataaatgaagttaccttcacccatttaatttaacatttactatacactttggttttgcctggcacagtgctcagttcacatactggacacaaagctaaatcatgctgagtccagtcctcaagaaacttatccaccagtgggagatacaggcaagtaagtgattagaatgcacataatgtgctaatggccagaaaaacttcatttactgagaccaaataagtacaagtcactgagatgaggaagtgggtagagcagataaacatcctgctcacaatgagctcacct

SEQ ID NO: 315965 - DNA, 4001 bp, Homo sapiens
ttattctgtcctcagggcccactctccactgatcccttgtgggctttagctgactaagcccagtgtggctgagtggtacccagcacggtacctgcatggggaagggttggcgggggccagatcagctggccagagctagtggatgcttccttcacaatagttctcctgccacctgagatcatacagtatctcagcatctcctaggtcagtctggggtccagccagaggcctgatgaagcaaacagctctctgaatacttactctggaaactcagacagggaggctgagtgaatcacagcaaaatccaccccaacccccattggagccacaactgtgcaactgaagctcctgggaggctagaattgaagaagttaggcaaaggaggtctcttagaaccagccccagatgccccttctcagggaacccttctcagacaacccctctagaagccccaggccttgcttttcctagaagtgccctgctatgcctgtgagcaatgtcaccaaacaagttggctcaatcagcccttgtagtgtgcctctctcactcaggcagccttggagcagagaaggccttcagaagcccctccctactgactccctaccactcctgctccctcttcttgcttggatagcacttcatttcaccttaaccctttggagcggcctgtctggaaaggaggtgccaggatacaggatgtgtggcagacaaggcccaggtgaggctgtgctatggctgcttcagcaggatgcctactccatgctgagatcacagtctggtccttgtcacttctggcggttacttccctccctgacaaagggtgctcactctccctctgcaaacttgtgcccagaaagggtggctcacccagtacaagggacaacccagttgcaccaggcaaactggtgcaaagtccggccaggcgcagtggctcatgcctgtaatcccagcactttgggaagctgaggcaggcagatcacctgaggtcaggagttcaagacgagcctggccaacatggtgaaaccccgtctctactaaaaaaatacaaaaatacaaaaaattagctgggcgtggtggcgcatgcctgtaatcccagctactcgggaggctgaggcaggagaatcgcttgaacctgggaggcggaggttgcagagagctgagatcacaccactgcactccagactgggcaacaagagtgaaactccgtctaaaaacaacaaagcaaagacccaagccccttccaggtgctgccccgctcatcccagttacctctgttgctttttgagaagactctaccggccgaatatgtgtacgtttgttggcggggcgggggtgggggagtggggagagtcctacctggccactgccccctaccggatctcgccctcccagccaaaggatgggttccagatctcgccttttgtattccccagctggggactagccggctgagggaccgcagggagacacagtcttcccattgcaaacgatagcgttgatggctggaggcccccgtcttcaagcccctccctccaaagatgacagctctccagtctctaggtgcctccaggccacgtgggctggcagtcaactcacctgtttctcagaggagtccaggacgcacagaaggtgccggtcactgccctctgccggacccatggaggggtaagggtgtccggccggggccggcctgagggcacagcttcgcggggccccggccccctgcgtacacagacatggccacagcgcaggcaccgctccctcccaccgccctcacccggccgccggtgcaggaagatagctttcgccggcctctcgcggccaaggcccagctccagccgctcagcccgactcggcccgcccccggggtgcattgtgggaaatgtagtccttagcgtttggccgcctgcggcgccgagggactggttctgggctcctagtcccagcagagccgtgggcaggtcctgacccgggtccgcgattgcctcatccggcgccgccttctaggggcctgggcgcctcctccgagtctagagtcccacacagaacagccctggactctgggcctctccgtccgagccagctagcagttcatttcaagtgagagaaagggacgttaggattgtttctcccactgattgtggaaggacagtgcaagtttgggggactggataaatgtcattagtgggcccagccacacaggctgtaaaggatgtgggcatgcgcaaaagtcgcactaattgtttctaaaaacatatttgtagccacgttttaatgtatcagtataatgctctagaacggtagttctcaactctgacggcacatagaataagccgggaagctttaaaaaaaaaaaaaaagaactaggacgggcgaggcggctcacgcctgtaatcccaacacttgggagaccgaggtgggcggatcacttgaggtcaggagttccagaccagcctggccaacatggtgaaaccccatctctactaaaaatacaaaaactagccaggcttgatggcgtgtgcctgtagtcccagatactcgggaggctgaagtgggattccaggaggtcgaggttgctgtgagccatgatcatgccctgcactccagcctgagcaccagagcgagaccctgtctcaaaaacaacaacaaaaaaactaatgcctggacaccagccctagagattttgatttaattgaatttagagtagggtggagtgttggggagccaggcatcactattgttttaaaagctccccaggtgatttaccattgcaaagaatcattgtttgtaatttcctagacgcaaagcaataaaaacaacaggaaaacagtcaacaacaggctctcccaaaagacccttatttttagagatggttttaaaaagtaaaattagtgtttggcaccactgctcatgttcttttctgaagcaattaattcactttacagccttatggttaattctcccaaaagttaataggatgaaaaaaaaagtcagatcactcctctgactttccctgctgctccacaagcacctgggggcagtgtccttttcctctctaagccctacactggagttagggtagagctccgcccctgggcttttcttccagtctcagatggctgccacttgtagcctgcttccacaacactggcctgtgactgacatggtgacaaagctgtggcctttcactgaagatggctttgcataaggctatcaagttcttgcacatagtctaagggaagctttctcacccccatgtcccccacttttaggtaaggacataagaaaatgccctattccttaactgagagtctctccaggtctccacagatcactcagtattttatctcctcattagctcagaagtccaagttccctcccttagggcaagaatcatttatacagttgttttctctaattattacactataagagtttgagccatgagctgggcttggtggcacagccttgtaatcccaattactccacaggctgaagcaggaagaattacttgagcccaggagatcaagtctgaagtgagccatgatcatggacaacaagaaggagaaagttaagaaagaaggaaggaagggagggagggaggaaggaaggaaggaaggagagtttaagtcaagatataacattctctgcttggtacagaaatgtcctggctatgttcctttcctttttctttttctttttttattttttttttagagatggtggtttcactatgctatgttgacaaggctggtatcgaactcttggcctcaagcaattttcccatcttggcctcccaaagtactgtgattacaggcataagccaccatgcctggctaatatcctgcctatatttcattaacttgaatttacaccctatagaattcatctccatagaagacaaattaatttaatttacttattttttttcaaatgaagtctctatcatccaggctagagtgcagtggtgccatctcagctcactgcaacctctgccttct

SEQ ID NO: 315966 - DNA, 4001 bp, Homo sapiens
tacttggctgacatacaactggaaaccactgtagtgttttaagaaaaggggcgtaagttggtttacattttaaaaagctcactctggcagctttccaggaaaatggaccatctagcagccagaatgggaagcaaagaacccagttaagaggctgtctggagtagtctggacaagggacagtggtggcttggactaaagtcagtggcagtggagacagagagaaatggatgatttgaaacatatttagagaaagcatgcactctggattggacatagaggtaaagggagaaatttaaaaatcactccttttgcagtaggaagtctcaaacaaaaatctacctgggcagagctcagtggctcatgactgtaatcccagcactccgggaggccgaagtgggaggatcacctgagctcaggagttcaaggccagcctgagcaacatagccagaccccatctctactaaaaatttttttaaaaaaagaattagccgggcataggggtgcatgcgtgtagtcccagctactcggaaggctgaggctggaggatcacttgagccctggagttcaaggctacagagaactatgatcatatcactgcatcccagcctgggccacagagcaagaccctgtctccaaatccaaccaaccaatctagctggaggagctgagaagtcttccatttgtatctaattttgttgttactccatgtcactgtcacttgttaagttactacaccaccagttgaaaatggtactggggaagtggctaccacagggtggtttgggggaatggaggttgtgaagcagtagccacaaaatccatataaaactgaggctgaggaatttttctgagataaaattcacagtccttccagcactgccctgagcatttttcttaaactcactcgaaactattatttcttcatttgtcttccacctcagctaccttttaactttttgttccaccttttccagcttgacatcattctctaaagagagatgaaaactgagtatctgctgaatattgcctgtttaactctgctatgttaaaattatacagtctgtcccacagagcaagggtggccttccctggctttctttatacctccatttctgtggtttcaaatttggtacatccctgatatctgttcctatatttagtaaatccaaattaccaaaagatgtcaaaaaaaaaaaaaaaaaaaaaagaaacataaagaaaaacccggacgttccactgtgaattaaatagcactaactgctataatttgctgtatgggaaatggcagatgagagaaaaaacctctgtcattcccctctgcaatctgactatctgaaatgacacctgagaagctctaaaaggcagacaggcatggcagagaagaagaaatgaccaaataactaaaaggtgagattcctatccttagagaggttacatttttgaaaagactcaggaggccatagagtttgaaatcaatatatgcaaattactctgtttgaagggcaactttaatgtttaaattgtcagtgtgttaggcagactaaggttaggcaggattggtagaatcacagttctgctgaccaacaattaaacagttgtgttaaatgataaatgtagggccttccaaccacttggtgttcactgaagagcacctaaagggttcagcctggcccagaatatatctttattatgctttcatcgttttaaaaaaagcctatacagctcaaataaataaataaatccataaatcaagttcacttgctgagtattcctcaggggacgggcaaaacctttcttcatggcgggcgcagagaccctccccgaccccgaccccacctcggcactcacgagttggcgtggatgaaatccagacgcagctgggcccgctgaagcgcagggtacctgtcgtccatgccctcgaacacgacccgcgcaactcaaggggacaaggacacctgaccggcagccgttcgcctgcgcccgcgcccactcccacgcccacgctcacgcgcagagggcgggttcagcaaacacgtgctcccccttgcggcgggaccgcgaagctcccactgcgtcgtcgactcagttgtctcgcgaggtttgttgcttggtcttggagccacaatttgagaatgacgtatctgagttagagtctcctggaattgaggtttatgtaactttttcagacggttgttccccaccctgctcctctcaatcactccccagctggaaaatggagcccaaaactggtattaaaatttgattcgaaatgattacacattcacacaagatggtgggggaacgtgggcggcaaggcaggacagtgcggggaaggtgagtgggtagttctctttgcttgtccattgtgttacatagaaccagaggtaagagtgctctgtcctgtaatcctagcacttaccttcctgtgtctcttgagttgatcatgttttttctatttggaggaaaaaatgaaaaacaaaagtgacaagccggagagaaaacaaaaggaataactaaagacaatcagaacagaatttggactttaatatagcggcttgtccctaggtgagaatagctgcccccacctgaatggatcactaaccttttttacctgtcagctgacatgcgactattgcacttgctggcctggctcaatgcctagatattcggtattgctccaaaagatagaactaggcaggtagaaggtaggggtgcggggttggggcgggtagataaatatgaggaaggactgcgcagatgtgtagaacagctgtataaataaatggtgtttctctactcacaaagccctgagttcttaagtcaccaaaacccaagctgattcaatgtcttttgacttggaaaccaaggtagttcaataatactcagcaaagattttacatgatagtcataaagtcagaaacaaacatctattaaataaagaacttgaactagatgtgtttgtaatttccaggcatcatacaggcagtgaagctctcagaaaagaaaaaaaaaatagttttggagtagtcattctacttccaaagagaggagtttatcaactactacatttatgggaatcaggagaggaagagagaatttgaatggcaacccgaaggaacatgatgttctaatttcaaaactggaagtaaacataaacatttcaagtaattttcctgattgcatttttgttttaacagtggctgatgtggtgatgttttgacagcaaaattctctttactaagcaacttgagcgatctttccaatttttccttctatagaacttcacaaatacgatattttattttcattttatgagcaagaaaagcttgacaagtctcttctggatttattttactacccaatttccagctgctatctcaaagcaatttactatcggaagagcaccggagccaccagcctataattagtaaaggctgtaatatctaatttttatcagagggaagggtgtgattattgcagaagcactccttcttataatctgagcagagacttcctacagtaagtggccagccccaaagcaccagacagtactggttagcctggatgacagggacagagagaatccattagattgtgcttaaaaagaggcctgaaagtcactgcacagaatccaccaaaagccattccccgcctccccatttcaacactgtttagccactctgccatcataaaggcaaaccttgtttctccacaaggagtacttttgtgattgcttatttcagccatatccctcaaccctgcctcaagattcattttaacattatttcatggtaaaaaaaaaaatactgggggagtggcagggaggggaaatttaaaataagaatgccatttgatcatctaatgattggtactgatattaaggaaagcctgtttgggataaaagactcatcagctcttcctaacttaacatttcagatttgtaaaattcatattgtagtcacaaataatggctcaaatctttcagactacactttccctct

SEQ ID NO: 315967 - DNA, 4001 bp, Homo sapiens
taaagtgtcttatgtaggtgaaaacagaggtggaaattagcaactgtcttatggaggagcgaagctgacaacgctggagacaatcgcttgcttcaccaaagggccttgactaccgcctaccccagtcccgcccccagctttaggaaatgccgaggtcacatctagggggtcagtttccaccagagcacgaggcttgcccaacacctccctccccagaggctggcagacctcaaaaaccccagagcatgaaagccccatgcctcccaccccggcagaaaaaggacaaactacaccataaactacagagagaagctaactggctgctgggcagtgtgaacagacctaagggtgaaaaccattgcccgaaacattttcagccccactcagcagggacatgtgatttacaggaaattaggaggtttacaaaatgttagcagctcaagtttcttccccgggaaaagaagcaggagaagctctaagaaccgtatccgagaaagtgctttgttcactgctaagcttctgacacgagtcagttattaatacccacagctcactgcctcacacttcaacccaccagtgaatgtctatagtgaataattataaaacaatatattacaaaactctaacacaggctgcaccagagccttccgaagcccaggacagccacgtggccaaaagcatggacttcagatatgatcttgggcaagctgttggctctttttcaccccagttcctccatcctttacaataaacaaaatccttctggaggtgtcttgtcaagaggtgtcttgtcaaatgatgagcaaatccacttcaagtgcctggtctttggaagccctgttggttgctgttattacagtggagtttcagagctcttaaagtcatatctccatcttacttctgctgccagacaaacctctggaggccacgattccgagccttgtcagccaccctctctggtcaggtccaggacagagtgagtcctagaggagcaaggccagggaggttccacaccatcaggggccattggggagtaggggcaatggcagagctctatgatcaaggccccagtggccttgatggactctgtccacctctccagactccactttgccccaggccagaacagacctcagctctagccagagtctaactgggtgtccagtgtatacgctgcggccagccagacattaactcctctaggcggccttctctcacctcccactctgcagtagggacccctaggggctcccacaacccctgggcttaccgaatctcagcacttaccacactggcttgtcactttgtgctcttgtcttccccgcagggcaggactggcaccgtgtctgatgcctcagccagatcagttcaatgcatgagcccaggccctagttgtgaccacagctccagctccccaaacctccgggggcagtgaagggttgtttatgaagcaggctgcgttttattattcagatgaatttgtcaactccctggcggatccctcccctcgttaacgccatcttaaggcgggggggtaaagagtcccccacccacccacccatcccccgccgccccgtcctgccgcccatctatccaccgggttctcgcccaggcagccaaggaactgtaattaccatgaaagggtctctctgagcggcgcgcaggccctccccactggggtcttggtcgtggccgatttcacgaacgcacaccgttacgcgggagcccgcgatgggggcaaaacgccacgcacagccggtcccagggcgcaccccgcaagcggagagcgcggccgagcccggagggcggccacacctcccgccccggaacaaagcgacggccggggcgagaggcggcgcggccgggccccctcccctccaaggccgcccgaccactcaccgcgcgctccagccccggctcggctacggcactcaggccgccccctcctagcctgcgccggtgaggaggcagcgtcgcgcccgccgggccccgcggccgccggactgacggctccccgccagccggccactccggtccgtccccgccccggcgcctccttaaagcgaccgcgccgccagcgtgcgccccgagcgcctagcgcgccgcgcattccttatattgccacagcgcctgctaaaaatagagcgccgctgcgggcgcgccagtggggagcccgggccgggtgcctcgaccctgtcgcccccgcgtgcaccccggcccccaggacgcgcgcctacgaagtccagcccacccgcgccgagtcccctgggcccggcagggcgcgctagagcgccaggggctggggtcggcgccgcagcctctcccgcggcccagcacttacccgggtcagatccgtggtgccggggagctggctttaaggtggacgccgagtgggaattcgactcggcctctttaagagcctctgcgctccaacctttaaatctccgctccggccgggccaacttctgagcctagggacgcctccccagtcctaggcgaacctccgccgccaccttagctgcattcccttcgaatcctgagacgtctttcttccagatcatgccccagcgtctctccccgcaggccttctgggtgcaccgttccagggcccaaacttcgttgggatggatgcgacggggacaggcgacactcgcgcaccatttcattgtttcagttccgctaactcctctccagcggcgtcattttccccccgttaaaaaaataaagatataattcaacaccataaaattccaccttttgaagtgtacaattcaagccgggcgcggtggctcacgcctgtaatcctaacactttgggaggccgaggcgggtgaatcgcctgaggtcaggagttcaagaccagcctaggcaacatggtgaaaccccgtctctactaaaaatacaaaagtcaacccggcatggcggcacgtgcctgtgatctcatctactcgggaggctgaggcaggagaatcacgtgaacccgggaggcagaggttgtagtgagccgagattgcgctactgcactctagcctgggcaacagagtgagacgctgtctcaaaaaaaaaaaagtgtacgattcagtggtgtttagcatattcacaaagttttgcaaccatcaccatgagctaattccagaacattttcaccacttcccactcccctcccctgcccctcacaaaaagaactacccgttagcagtcactcctcattcacccctttcctccgcctctgggaaccactaatctactttcaatctctatggatttccctattcaggacattttctataaacggaatcatacaacatgtggccttttgtgactatgactagcttctttcagtaaccaatgtttaatgatctattcatgttgtaacatgtagcagtacttcattccttttcatgactgagtaatatttcactgtatgtctatacgttttgtttatccctgcatcacttgatggatatttagttttctgctttggggctactgtgaataaagctgctatgaatattcatgtacaagtctttgtatgaacatatgcttttctttctcttgggtatatacctaagagtggaattcctggatcatatgttaactccatgtttaacttttgggggaactgccaaactgttttccaaagcagctgcaccattttacattcccaccaacaacatatgagggttccaatatctccacatctttgcaaacacttgtaattgtgtgtctttttttattctagtcatcctattgggggcgaaatggcatttcattgtggttttgattgtcagcatcatttctgaggacattctttttctgggtggacctcaatgacttagaaccagctttacatgtccagggaacccactcccttctcaggtttgccccaggcctaagggagcctcacagtgctgctggctctgcctgccatgctgaggctcttaatcccatgcaggcttcctttggcatcccagccacccatgcagccatttggtgggagct

SEQ ID NO: 315968 - DNA, 4001 bp, Homo sapiens
agaactcactagatccaggaggctggtcaacatgtgattctgactgaggttaggaccagtcatcccaggagcctaatttatcagaggccaatagtcattcctggttccaggtgatcactagagcttaggaaccaaaccaaccccaagggtaactgacttgtcacttttttttttttttttttttttgagacagggtcttgctctgtcacccaagctggagtgcagtggcgtgatcatggctcactccaacctctgccttctgggcttaagcaatcctcccacctcagcctcccaagtagctaagactacaggtgcatgccaccaggcccagctaatttttgtagagacggagtttcaccatgttgccctggctggacttgtcactttataagtagctcagacgaactgagtatgaaataccagtggctagagctaataataacataaaagttaaacctgtcataaagtgtcttatgtaggtgaaaacagaggtggaaattagcaactgtcttatggaggagcgaagctgacaacgctggagacaatcgcttgcttcaccaaagggccttgactaccgcctaccccagtcccgcccccagctttaggaaatgccgaggtcacatctagggggtcagtttccaccagagcacgaggcttgcccaacacctccctccccagaggctggcagacctcaaaaaccccagagcatgaaagccccatgcctcccaccccggcagaaaaaggacaaactacaccataaactacagagagaagctaactggctgctgggcagtgtgaacagacctaagggtgaaaaccattgcccgaaacattttcagccccactcagcagggacatgtgatttacaggaaattaggaggtttacaaaatgttagcagctcaagtttcttccccgggaaaagaagcaggagaagctctaagaaccgtatccgagaaagtgctttgttcactgctaagcttctgacacgagtcagttattaatacccacagctcactgcctcacacttcaacccaccagtgaatgtctatagtgaataattataaaacaatatattacaaaactctaacacaggctgcaccagagccttccgaagcccaggacagccacgtggccaaaagcatggacttcagatatgatcttgggcaagctgttggctctttttcaccccagttcctccatcctttacaataaacaaaatccttctggaggtgtcttgtcaagaggtgtcttgtcaaatgatgagcaaatccacttcaagtgcctggtctttggaagccctgttggttgctgttattacagtggagtttcagagctcttaaagtcatatctccatcttacttctgctgccagacaaacctctggaggccacgattccgagccttgtcagccaccctctctggtcaggtccaggacagagtgagtcctagaggagcaaggccagggaggttccacaccatcaggggccattggggagtaggggcaatggcagagctctatgatcaaggccccagtggccttgatggactctgtccacctctccagactccactttgccccaggccagaacagacctcagctctagccagagtctaactgggtgtccagtgtatacgctgcggccagccagacattaactcctctaggcggccttctctcacctcccactctgcagtagggacccctaggggctcccacaacccctgggcttaccgaatctcagcacttaccacactggcttgtcactttgtgctcttgtcttccccgcagggcaggactggcaccgtgtctgatgcctcagccagatcagttcaatgcatgagcccaggccctagttgtgaccacagctccagctccccaaacctccgggggcagtgaagggttgtttatgaagcaggctgcgttttattattcagatgaatttgtcaactccctggcggatccctcccctcgttaacgccatcttaaggcgggggggtaaagagtcccccacccacccacccatcccccgccgccccgtcctgccgcccatctatccaccgggttctcgcccaggcagccaaggaactgtaattaccatgaaagggtctctctgagcggcgcgcaggccctccccactggggtcttggtcgtggccgatttcacgaacgcacaccgttacgcgggagcccgcgatgggggcaaaacgccacgcacagccggtcccagggcgcaccccgcaagcggagagcgcggccgagcccggagggcggccacacctcccgccccggaacaaagcgacggccggggcgagaggcggcgcggccgggccccctcccctccaaggccgcccgaccactcaccgcgcgctccagccccggctcggctacggcactcaggccgccccctcctagcctgcgccggtgaggaggcagcgtcgcgcccgccgggccccgcggccgccggactgacggctccccgccagccggccactccggtccgtccccgccccggcgcctccttaaagcgaccgcgccgccagcgtgcgccccgagcgcctagcgcgccgcgcattccttatattgccacagcgcctgctaaaaatagagcgccgctgcgggcgcgccagtggggagcccgggccgggtgcctcgaccctgtcgcccccgcgtgcaccccggcccccaggacgcgcgcctacgaagtccagcccacccgcgccgagtcccctgggcccggcagggcgcgctagagcgccaggggctggggtcggcgccgcagcctctcccgcggcccagcacttacccgggtcagatccgtggtgccggggagctggctttaaggtggacgccgagtgggaattcgactcggcctctttaagagcctctgcgctccaacctttaaatctccgctccggccgggccaacttctgagcctagggacgcctccccagtcctaggcgaacctccgccgccaccttagctgcattcccttcgaatcctgagacgtctttcttccagatcatgccccagcgtctctccccgcaggccttctgggtgcaccgttccagggcccaaacttcgttgggatggatgcgacggggacaggcgacactcgcgcaccatttcattgtttcagttccgctaactcctctccagcggcgtcattttccccccgttaaaaaaataaagatataattcaacaccataaaattccaccttttgaagtgtacaattcaagccgggcgcggtggctcacgcctgtaatcctaacactttgggaggccgaggcgggtgaatcgcctgaggtcaggagttcaagaccagcctaggcaacatggtgaaaccccgtctctactaaaaatacaaaagtcaacccggcatggcggcacgtgcctgtgatctcatctactcgggaggctgaggcaggagaatcacgtgaacccgggaggcagaggttgtagtgagccgagattgcgctactgcactctagcctgggcaacagagtgagacgctgtctcaaaaaaaaaaaagtgtacgattcagtggtgtttagcatattcacaaagttttgcaaccatcaccatgagctaattccagaacattttcaccacttcccactcccctcccctgcccctcacaaaaagaactacccgttagcagtcactcctcattcacccctttcctccgcctctgggaaccactaatctactttcaatctctatggatttccctattcaggacattttctataaacggaatcatacaacatgtggccttttgtgactatgactagcttctttcagtaaccaatgtttaatgatctattcatgttgtaacatgtagcagtacttcattccttttcatgactgagtaatatttcactgtatgtctatacgttttgtttatccctgcatcacttgatggatatttagttttctgctttggggctactgtgaataaagctgctatgaatattcatgtacaagtctttgtatgaacat

SEQ ID NO: 315969 - DNA, 4001 bp, Homo sapiens
aggggccattggggagtaggggcaatggcagagctctatgatcaaggccccagtggccttgatggactctgtccacctctccagactccactttgccccaggccagaacagacctcagctctagccagagtctaactgggtgtccagtgtatacgctgcggccagccagacattaactcctctaggcggccttctctcacctcccactctgcagtagggacccctaggggctcccacaacccctgggcttaccgaatctcagcacttaccacactggcttgtcactttgtgctcttgtcttccccgcagggcaggactggcaccgtgtctgatgcctcagccagatcagttcaatgcatgagcccaggccctagttgtgaccacagctccagctccccaaacctccgggggcagtgaagggttgtttatgaagcaggctgcgttttattattcagatgaatttgtcaactccctggcggatccctcccctcgttaacgccatcttaaggcgggggggtaaagagtcccccacccacccacccatcccccgccgccccgtcctgccgcccatctatccaccgggttctcgcccaggcagccaaggaactgtaattaccatgaaagggtctctctgagcggcgcgcaggccctccccactggggtcttggtcgtggccgatttcacgaacgcacaccgttacgcgggagcccgcgatgggggcaaaacgccacgcacagccggtcccagggcgcaccccgcaagcggagagcgcggccgagcccggagggcggccacacctcccgccccggaacaaagcgacggccggggcgagaggcggcgcggccgggccccctcccctccaaggccgcccgaccactcaccgcgcgctccagccccggctcggctacggcactcaggccgccccctcctagcctgcgccggtgaggaggcagcgtcgcgcccgccgggccccgcggccgccggactgacggctccccgccagccggccactccggtccgtccccgccccggcgcctccttaaagcgaccgcgccgccagcgtgcgccccgagcgcctagcgcgccgcgcattccttatattgccacagcgcctgctaaaaatagagcgccgctgcgggcgcgccagtggggagcccgggccgggtgcctcgaccctgtcgcccccgcgtgcaccccggcccccaggacgcgcgcctacgaagtccagcccacccgcgccgagtcccctgggcccggcagggcgcgctagagcgccaggggctggggtcggcgccgcagcctctcccgcggcccagcacttacccgggtcagatccgtggtgccggggagctggctttaaggtggacgccgagtgggaattcgactcggcctctttaagagcctctgcgctccaacctttaaatctccgctccggccgggccaacttctgagcctagggacgcctccccagtcctaggcgaacctccgccgccaccttagctgcattcccttcgaatcctgagacgtctttcttccagatcatgccccagcgtctctccccgcaggccttctgggtgcaccgttccagggcccaaacttcgttgggatggatgcgacggggacaggcgacactcgcgcaccatttcattgtttcagttccgctaactcctctccagcggcgtcattttccccccgttaaaaaaataaagatataattcaacaccataaaattccaccttttgaagtgtacaattcaagccgggcgcggtggctcacgcctgtaatcctaacactttgggaggccgaggcgggtgaatcgcctgaggtcaggagttcaagaccagcctaggcaacatggtgaaaccccgtctctactaaaaatacaaaagtcaacccggcatggcggcacgtgcctgtgatctcatctactcgggaggctgaggcaggagaatcacgtgaacccgggaggcagaggttgtagtgagccgagattgcgctactgcactctagcctgggcaacagagtgagacgctgtctcaaaaaaaaaaaagtgtacgattcagtggtgtttagcatattcacaaagttttgcaaccatcaccatgagctaattccagaacattttcaccacttcccactcccctcccctgcccctcacaaaaagaactacccgttagcagtcactcctcattcacccctttcctccgcctctgggaaccactaatctactttcaatctctatggatttccctattcaggacattttctataaacggaatcatacaacatgtggccttttgtgactatgactagcttctttcagtaaccaatgtttaatgatctattcatgttgtaacatgtagcagtacttcattccttttcatgactgagtaatatttcactgtatgtctatacgttttgtttatccctgcatcacttgatggatatttagttttctgctttggggctactgtgaataaagctgctatgaatattcatgtacaagtctttgtatgaacatatgcttttctttctcttgggtatatacctaagagtggaattcctggatcatatgttaactccatgtttaacttttgggggaactgccaaactgttttccaaagcagctgcaccattttacattcccaccaacaacatatgagggttccaatatctccacatctttgcaaacacttgtaattgtgtgtctttttttattctagtcatcctattgggggcgaaatggcatttcattgtggttttgattgtcagcatcatttctgaggacattctttttctgggtggacctcaatgacttagaaccagctttacatgtccagggaacccactcccttctcaggtttgccccaggcctaagggagcctcacagtgctgctggctctgcctgccatgctgaggctcttaatcccatgcaggcttcctttggcatcccagccacccatgcagccatttggtgggagctgctgtgcaccccctgtgcctccactcccacctgctgctccaaagaccctgtagaccccaagtgtcccccaggaaggggacagcaggttgggtgccatcaagagtatctctccttggcagtagggagtaaaagacctggttggggagaaggcttgagggacagtagtttacctcgactgtctaggtttgccctggaacctgactccctcaaccccctctatttaccacagaacttgggaaggcgggcagggatctgtacatcctggtggcctgtcagcccctcgtgggctccccatgtaagagatgtcctctcttgggccctgactggcacaagaccctgaccatgccctcagcttgagctgagccaacatctatgcaagagtcaaagagatgtctttatactgcttttatacacatatctgtaataatacctcttctcagaaatggaacttaaacagctaatagtcatacccaggtacctgggattctccttttttttttttttttttttttttttttttgagacagagtctcgctctgtcacccaggctataatgcagtcgcatgatcatagcatcatagctcactgcagcctcgacctcccggactcaagacatcttcttacctcagcatcctgagtagctgggactataggtgtgcaccaccatgcctggctacttcttgtactttttgtagagatgttcccgaggctgatctcgaactcctgggactcaagcaatccacctatctgggtctcccaaagtgctgggattacaagtgtgagacactgtgcttgacctacctaagattgcctaatggtgagagtaaatcttgcagattgcgattgcggatgggctgttccatttgagctgcctcctctgctctttgaaccttgaaatacaagttgtggctcagttgctggcaaatgggggcttagagaacagagccactgagcagaaaagcttcattcatccagtaaacactgccagagcatctactgagtaccgggcactggggca

SEQ ID NO: 315970 - DNA, 4001 bp, Homo sapiens
ccacctcagcctcccaagtagctaagactacaggtgcatgccaccaggcccagctaatttttgtagagacggagtttcaccatgttgccctggctggacttgtcactttataagtagctcagacgaactgagtatgaaataccagtggctagagctaataataacataaaagttaaacctgtcataaagtgtcttatgtaggtgaaaacagaggtggaaattagcaactgtcttatggaggagcgaagctgacaacgctggagacaatcgcttgcttcaccaaagggccttgactaccgcctaccccagtcccgcccccagctttaggaaatgccgaggtcacatctagggggtcagtttccaccagagcacgaggcttgcccaacacctccctccccagaggctggcagacctcaaaaaccccagagcatgaaagccccatgcctcccaccccggcagaaaaaggacaaactacaccataaactacagagagaagctaactggctgctgggcagtgtgaacagacctaagggtgaaaaccattgcccgaaacattttcagccccactcagcagggacatgtgatttacaggaaattaggaggtttacaaaatgttagcagctcaagtttcttccccgggaaaagaagcaggagaagctctaagaaccgtatccgagaaagtgctttgttcactgctaagcttctgacacgagtcagttattaatacccacagctcactgcctcacacttcaacccaccagtgaatgtctatagtgaataattataaaacaatatattacaaaactctaacacaggctgcaccagagccttccgaagcccaggacagccacgtggccaaaagcatggacttcagatatgatcttgggcaagctgttggctctttttcaccccagttcctccatcctttacaataaacaaaatccttctggaggtgtcttgtcaagaggtgtcttgtcaaatgatgagcaaatccacttcaagtgcctggtctttggaagccctgttggttgctgttattacagtggagtttcagagctcttaaagtcatatctccatcttacttctgctgccagacaaacctctggaggccacgattccgagccttgtcagccaccctctctggtcaggtccaggacagagtgagtcctagaggagcaaggccagggaggttccacaccatcaggggccattggggagtaggggcaatggcagagctctatgatcaaggccccagtggccttgatggactctgtccacctctccagactccactttgccccaggccagaacagacctcagctctagccagagtctaactgggtgtccagtgtatacgctgcggccagccagacattaactcctctaggcggccttctctcacctcccactctgcagtagggacccctaggggctcccacaacccctgggcttaccgaatctcagcacttaccacactggcttgtcactttgtgctcttgtcttccccgcagggcaggactggcaccgtgtctgatgcctcagccagatcagttcaatgcatgagcccaggccctagttgtgaccacagctccagctccccaaacctccgggggcagtgaagggttgtttatgaagcaggctgcgttttattattcagatgaatttgtcaactccctggcggatccctcccctcgttaacgccatcttaaggcgggggggtaaagagtcccccacccacccacccatcccccgccgccccgtcctgccgcccatctatccaccgggttctcgcccaggcagccaaggaactgtaattaccatgaaagggtctctctgagcggcgcgcaggccctccccactggggtcttggtcgtggccgatttcacgaacgcacaccgttacgcgggagcccgcgatgggggcaaaacgccacgcacagccggtcccagggcgcaccccgcaagcggagagcgcggccgagcccggagggcggccacacctcccgccccggaacaaagcgacggccggggcgagaggcggcgcggccgggccccctcccctccaaggccgcccgaccactcaccgcgcgctccagccccggctcggctacggcactcaggccgccccctcctagcctgcgccggtgaggaggcagcgtcgcgcccgccgggccccgcggccgccggactgacggctccccgccagccggccactccggtccgtccccgccccggcgcctccttaaagcgaccgcgccgccagcgtgcgccccgagcgcctagcgcgccgcgcattccttatattgccacagcgcctgctaaaaatagagcgccgctgcgggcgcgccagtggggagcccgggccgggtgcctcgaccctgtcgcccccgcgtgcaccccggcccccaggacgcgcgcctacgaagtccagcccacccgcgccgagtcccctgggcccggcagggcgcgctagagcgccaggggctggggtcggcgccgcagcctctcccgcggcccagcacttacccgggtcagatccgtggtgccggggagctggctttaaggtggacgccgagtgggaattcgactcggcctctttaagagcctctgcgctccaacctttaaatctccgctccggccgggccaacttctgagcctagggacgcctccccagtcctaggcgaacctccgccgccaccttagctgcattcccttcgaatcctgagacgtctttcttccagatcatgccccagcgtctctccccgcaggccttctgggtgcaccgttccagggcccaaacttcgttgggatggatgcgacggggacaggcgacactcgcgcaccatttcattgtttcagttccgctaactcctctccagcggcgtcattttccccccgttaaaaaaataaagatataattcaacaccataaaattccaccttttgaagtgtacaattcaagccgggcgcggtggctcacgcctgtaatcctaacactttgggaggccgaggcgggtgaatcgcctgaggtcaggagttcaagaccagcctaggcaacatggtgaaaccccgtctctactaaaaatacaaaagtcaacccggcatggcggcacgtgcctgtgatctcatctactcgggaggctgaggcaggagaatcacgtgaacccgggaggcagaggttgtagtgagccgagattgcgctactgcactctagcctgggcaacagagtgagacgctgtctcaaaaaaaaaaaagtgtacgattcagtggtgtttagcatattcacaaagttttgcaaccatcaccatgagctaattccagaacattttcaccacttcccactcccctcccctgcccctcacaaaaagaactacccgttagcagtcactcctcattcacccctttcctccgcctctgggaaccactaatctactttcaatctctatggatttccctattcaggacattttctataaacggaatcatacaacatgtggccttttgtgactatgactagcttctttcagtaaccaatgtttaatgatctattcatgttgtaacatgtagcagtacttcattccttttcatgactgagtaatatttcactgtatgtctatacgttttgtttatccctgcatcacttgatggatatttagttttctgctttggggctactgtgaataaagctgctatgaatattcatgtacaagtctttgtatgaacatatgcttttctttctcttgggtatatacctaagagtggaattcctggatcatatgttaactccatgtttaacttttgggggaactgccaaactgttttccaaagcagctgcaccattttacattcccaccaacaacatatgagggttccaatatctccacatctttgcaaacacttgtaattgtgtgtctttttttattctagtcatcctattgggggcgaaatggcatttcattgtggttttgattgtcagcatcatttctgaggacattctttttct

SEQ ID NO: 315971 - DNA, 4001 bp, Homo sapiens
taactatccaattcgactgtcacaataaaccctaaccagggaccacacacttaatagaaaaggccttattcctcttggtctggccacacatgggtttagcatccttctagacacaaagagctgatccaggggttatgcttcccaaatctacagtgctagagcatcccaagtgaacatccatgcaacacattacaatttacatcatactcttccagcctttctttcctgacttatattctttttagctgaagtaaacaagagaatctatgcagaatgattctcccttcacctataaaacagcttctcaaggaggtctttattatcatcagacattcactaaaactagactaggaagttggaaataaacatgcaaaacaaaccacaataaaacacacgcagcacatgaaaaataaattcaagaaatgataaattatcaagtagtcactatgattttaaatgtgtccagccacacagtaattaggaaatgagagctcatcaaatacaaaataatcacctggttcccaaggatgtataggccatggttcatctttcagaggacacagtttacttgctaattgggctttatcttcatcagagaccaactgcttaatgaatgggacattttcttcagaaagatgctcatcccaccatgtaccactctttccatgaagacctctaacaaaaagccagatgtgtgttctataaaaagaaaaaataaataaaaccaaaccacaatttaaaaacttcctccacttaatatagaaaagggaagtcacaaattggaaagtgtagtcagggccttgggaaagggcttggattctgtatacctttttttcaggtctccaaccttttcctcactccccacattccttcggataaggctcacatttaaactgttagtcgttaccctggagaaaaaaattcatcttctcctcgcagataaacatattccccaaaaaacagtcctacctatagacatgaaaagccactaacccatttggaagtgtaccttaatagttttacattcagtggaggtggcagaaggtggcatgttgatctttgtctaacaagctcacctcctccctgcaatgacatggcctaggttcagagaagtgaagaaactgggtgtgcaaagttaaaagatccacaaaaggcatgacctctgaacaggtgaacataccaagaaagaccttagtgggcggaggtcaggaagaaggggtgtaattcttgcatggagggtcagaacagaagtaaagctttctgcagtctactctccttttgtagtcagataaattcaggctagattcctaattttccacttattagttgagtgactttgggcaaattaactcacctccctaaccttcagttttatctgtaaaccttatgatagcagtttgctcccgtgaggctacataaggcacctaatacacttagcagagcgcttagtacctggcaaacgctcactaattgtaagatatgattgctgttaatagcgttcgctgctagtggctggctcataagcgttttttaaaaatcaccacttcaatccccttagaacgtgcttccttaggttaacggcccttattcttctgtgtcccacgtctcaacagagccccttcctcctccacccaggggaggcccaactgcaccaggccattccactgcttcaggacgcaactgtgcaggtaggacaccctcacaccttcctacctgttccccgggcccagggcagcacccaggccgtccccgagtcgacccagcacctgggcgccgacctgcgtcagcagcctccaacccggcatggattagcccgggaagactcgactcacgacttccgggcgccctgccgctctgctttcagggagtccccacgccaccgccacgtggacgcagtagccgtggggaagttttcgcaatggccgccggaacggtcgccggccgatgctctctgcgacggaaagaaagccgccggacccacttccggtgcgttttacaatgaactccgggcactcgagtcgctccccggaaactatagttctgcttccaccgttgtcctactttggatgtgagttggagtaggtaggggtgggaagggactgactcgcctctccaggggtaaaataaaagggatgttcagagtttaaactttagaagaataaggacagacttcctgaggacgctaaggaaaatgaagacacttctaaatagtgcccgttgtgaggcaatgcattatgctaagcagcgcttcataatcctatatttgttaatcataaaaaacggtcctgaaaggaagtatttatttttctattataaatgaggaaactgactcagaatttaggtgctggtccaaaacaacacatctggcagaggagcagagttggcactgaaacagggttggcatgtgttatcaatagactacacccatagaaatgatgtatgccttctagggctggatcataaaacatattgttacttcagtttttgtctcttggattgctccctgtggagaaagctagccttcatttcctgcagacactcaaacagctctgcagggaggaacatataaagaggaatcaactagccagtcatgactgagccacctaggaagtggatccaccagtcctcggctgcaactcatggagacgttaagcctgaatctcccagccaggccgctcatgaattactgactaggagaaattgccagagaaaataaatgattaccgtttttttgagtcattaagctttagggtaatttgttatgcaataatagatagctaatacacctgcacaaaaaatcccctgtcttgggttccagatctagcctaataaccatgtatgtgactaggacatttattcttctactaattcccttatttgtcagattactgtttgtagaaatttggaaataagaactttaaagtgtagctatttcaaccttctctttttactagagatctggctatcttggtttaacaggtccagacaatggtcaattcctggccattacttggactttagtgggctaaaaaatctttgctttgcttgtccattcattccactcattgctgttgcagttaccttagacacttttcaataatactttggaccttgaaggaaaaactacatctcttcattctagccatgctgcctggcttcccagatacttaaggatggctcttcattgaacaaacatgttttgaggtgtgctacatgcaagaagttgagaataagaagatttctgtactactgccaataactaacatttcttatccatatagtgtgctagagtatgtgctcagcattgtggaagcccataagccaaggctactagaagaaaacgtgaactcatacaaagtcaagtttaattagcttgatgcagcaaaagacagcatatgtctgaggatgtttccaaaagagtgacctgggaggggcttgaaatgaaatttggacttaaggctgagtgattttaaagtggcatcagagaagcaggaacttgttttagaatgggtgctgtcaagaagaaaggacagttcagcaattggatatcttgatagtctttgttctagagacaggaagaacagagaggaagtgggcatgatgttcataagaaagcaggaatcactcagaataaggaactgttagtcattttgctgcagtggtgtggcctacagtacggtctgtaagaaatattgtaatgatgggctgggcgtggtggctcagcactttgggatgccaaggcgggtggatcacgaggtcaggagattgagaccatcctggctgacatggtgaaaccccttctctactaaaaatacaaaaaaaaattagccgggcgtagtggcgggtgcctgtagtcccagctactcaggaggctgaggcaggagaatggtgtgaacctgggaggcgcagcttgcagtgagcgagattgagccactgcactccagcctgggtgacagagcaagactccgtctcaaaaaaaaaaaaaagaaatattgtattga

SEQ ID NO: 315972 - DNA, 4001 bp, Homo sapiens
ctcaccagattttactttttcttgcccccagttttttgggtcatcaaaaaattcttctagtcctttccttgacaatgtggtatgaagtaatctatattggtgaaaggatgtcacatttggtgtactcttaggcaacaaactaagaaaaaacctgcaattgaacacacataaacaagtaaaagttttataatatctggattttataagcaataaacattatcataataaacataatcattttgtcatcgataacattttaaaaagctactcagggtttctgcacaagaattaatttttttttcttatttagagactgggtctcactatgttgtccaggctggtctcgaactcctgggctcaagtgatcctcccaccttggcctcccaaagtgctggaattacagggatgagccaccatgcttggccacaataaattttgaaaatgctttagaaagtattgttaatactgcattatagaagctgctaccttataatttcagaggtaacatagttacacaattatattttaaggtaacatttttgggtccttcttacattgctaatgggtgcaagcgcaggtaaaaagagcagtcaattttgcaacatgtgggctgggcacggtggctcacacctgttatcccagaaatttggaaggccgaggtgggaggatcactttgagcccaggagctcaagaccagcctgggcaagatggcaaaacctcatctttaacaaaaatacaaaaattagccaggcatagtagcacgtgccttatagtcccaactactcgggaggctgaggtgggaggacgctttgagcctgggaggcagaggtttcagtgagctgagatcacaccattgcactccagcctgggcgacagagtcagtccctgtctcaaaaaacaaaaacaaaaaaacctcacaattttgcaacatgtatcaggagcctcaaatacttcctcctttaattcagtaattctgcatctagaagtttcaactgaaaaaattattatagatgggaatttataaattaagatgtttattaaagcactatataggatgtcaagtttttaattatgtaaatacgcagctaagaatggtttaaaaattactgtgcatctggatgataaattattatgcagtaattcaaaaatcctgtttttaaaaaatagttaacgacctgagatgatttgaaactaaataatgaagtttatcacaagtgttgtatccctaccaaaaatatttagcctaaatcttataatgaggaaacaatcagacaaatccaaatgaataagattcttaaaaagctaatctcatcaaaatgtcaacaacattaagaaaaaaaaaaaaaagaaattgttccggatagagactaaagagtcatggcaaccaatgtaataaatggatacttcactggatccaggaccaagaaaaataaataaataaaagaagttactaagttaccagttactttcattgtaacacatcctgtaaatacaaatatctcttcttttttaatccatccaaacttgacacagacttgagtatcacaacaaaaacatcttcggtaaagtttttcgcacctcacccagcccaagaggatgcttctgtacttatagatgtatttacttcaacaaatgctggacatctacaaaccccatatactgtcttgtccacagcaggcagcaacaaaatgaggaaggaatagaaatgtcggaggtgagcgacttctccaaggtcactcactcctcaccaaagtgggctccggctctgccatccaggcggccgttccattcttgagttgttctcggcatctcggcatctcggcaaccaaacaagatccaaagttggagaggtgggcaaacctactttatacatcacttaccctgtgcaggcagggacctgaggagttattaacgatcgggaagatttcagggcggatgaaactctcctacaaagaagggccaaaccggccgcagccatgttttcgcataactggcaaaacgcgtttccgccaacgatagcgtcacttccggcgtctcaagccggcggtgaggagaatagaaaacttgccctcacttaagatggccacatcctgcctttgtcctcattggtaaattggctctctcagcttccgtgacccgcctcccttcttcctcctgcccgtagtagccatggcggccatgagtttgttgcggcgggtttcggttactgcggtggcagctctgtctggccggccccttggcactcgcctcggatttgggggcttcctcactcgtggctttccgaaggctgctggtgggtgctggcctagggagaacgggcgtgaagcgggtgcggggcgagaaaagggaggacgcttccagggtgaccttggtgggatccggagggagccgggacaagttgtgggcttggggcttgacaggagagacggagcacgagctatatgaggggttttcctgaagtagccagatagatcgtgtttacattattagcatttctaaaacgttgttattcaccatcccaattaatgctaatttgcggatgaagctgagtctagaaaggtatagagctgagatctgtatctctagggcacaagcttattgttgcgttccacctgcccaaaggctaggttctagtcccacagatgcaaagtcatcttgccgagaagcccacctatgctaaggaatatgaagacaggtaatatgtagacaggtaaagaggctcagggccaacttattctttaggcacagtaagtaccgtgccgcccaataatgagatgcagatgaactggggaggaagagaggtttttgttttgttttgttttgtttgtttgttttttgagacagagtctcactctgttgcccaggctggagtgcagtggcgcgatcttggctcactgcaacctccgcctcctgggttcaagcgattctcctgcctgaacccatgatagttttaggggtctacgaaagtcttttaatttaaatttcttttttaaaaaaaccataatgtttatgaatatgataacgaatccagcctgtattatgttcgttttataccaatgcagtcataaaatattatttttaataacttagacgaaggggcccttgaaggcaaaagtgcctaggtctcaggaaagtcataatacagtctttttttttttttcttttgagacagtctcactctgtcacccaggctggagtgcagtggcaccatcttggctcactgcaatctccaccccccgggttcaagcgattctcccgcctcagcctccccagtagctgaggctacaggtgcacaccaccacgcctggctaatttttgtatatttagtagagatggggtttcaccatgttggccaggctggtctcgaactcctcacctcaaatgatccgcccacctcagcctcccaaagtgctgggattataggcgtaagccactgcacctgaccaatacagtcttaatagggctatttggacctccttggagacagtgagttgcatcatggcggtgtgaataatcatagcaaagatcaaatgcttgatattcagtgtactttattatctcagagactctgcaaagaaattacaatgttattttcattttacagatgaggaaactgactcaattattaaataatgtgtcactaaataatagccaacatttactgagcacctgttacgtgtcaagcatccttttttatttttatttttttcaagacggagtcttgctctgttgcccaggctggagtgcaatggcgtgatcttgggtcactgcaacctctgcctcctgcgttcaggcgattctcctgcctcagcctcttgagtagctgggattacagttgcacgcctccatgcccggctaattttatgtgtttttagtagagatggggtttcatcatgttggctaggctggtctcgaactcctgacctcgtgatccacctgccttggcctcccagagtgctgagatcacaggcgtgagccaccccacctgacctcaagcatca

SEQ ID NO: 315973 - DNA, 4001 bp, Homo sapiens
agaaaaagccatttgttcctagtcacctcttcttctcctataaatgttggtatccctacagattctgaacgatgtccttttctcccttctcagattcttactcgatgatttctcctatcctgccacgacttcaattacctttatatgccagaaactctaaaatctgaatctcctgccaagatcaccttccatccaattactcaacctctctcatgtacttgaatactgccaagtcagaacccatcaactttcccttgtctcaaacctgcattttctgttccctatctcagcatcatccagtaggccatacaggccagaaatcttacagccattcctaaattctccctgatcctccagatctagccaatagcagtagtaataacaacaacagtaatcaaatagctgtagtaataataacagtaattataagagctaccatttattagctatttactacatgccaatactgactgagctaagtactttacacattcagcccatttaatactcacaacaacccatgaggtaaacacgaagattatcccaattttacaaaaaaaaaaaaaaaacaaaaaaaaaaacaccactggcagagaacatactgattgtttgccttcataaatctcattttaatcctccatttcccactgccactactctagtcaaggctatcctcatctcttgcatcagcctccctttctccattctggccccactacagatcattctccacagagcaaccagagtaatctctttaaaatgtaatcaagattactcccaagcttaaaattcacgaatggcttccaacctcatttagaaaaaaagttaaggtggtctgcttacctacactatgtctctcactaagtgatgtgctctatgaagaccagaccttgtcttatactcatctctggcacccagggttcctcagggtatccagcacacagcaagtgctcagcactactctctcctcagtctcacccattcactcacctttagttaccatttttactccgatgttcctcactttatatttaactccatactaaacagttgactcttaaagtcacctcaaatttaatgtgtcccaaataggtttaattccgcctcctttcccatctcctgatctcatctactcctgcactacccccgcccccaaaataacggttccaacaattaattaatcttcttcatcttggtgtaaatgggacaaccctctattccaatcaaaaacttaagaaacaatcttaatttgtccctttaaactcatatccaaagccttaatcaagccttatcaatcctacctccaaaatgggttcccaaatatctgtgctcagtctcatttctggacatctgctactgtcccctatgcttgagaagcttcttgctttctccttagcatggctaaccagatctcagctttggtcatatttgccaggaacccttccctgaccttccaacctagtttgagtgcctctcctgtgtgcgtcccctataacaacccgggtcacactgcactgccaattccccatggacatgagttcccacagggaaatgtctgtgtcagtcttagtttgccatatcccacagagcttagcacagtgctctgcacggagcggaactcaggcactgtagttgagtgagtgaacgaatgaacagatatgcaggtgatgacaaactctacaggtacagaaggaagacagctgaatctgaggaagcgctaggatacgtgtcgcgggggctatcgcgtggttttcgcctgccagaaacaggatctacgtctcccagaagaacgccccagcgaaagtccggaaggtcacttaccggcctcggagctgaaccggcggcgtggcagccccatctcgaaagagcaaggtagcggttggagcaggccaccgtgccagggctggattcgagcccggaaacagacccgttccacgcccggagaactcctcaagaggctccacagcaatacagttgttccgaggggcgccatgattatcagaagccacttgcgccggaagtggttgggagggattccgagtcacacccagttcttgcagcactctgggaaatgtagtctagttaaaggcggaaagggccggaagtcttccgggcccttatagattgtttcttctaaactacttattcacaagtagacggtgtttatgtccttccctatgcataaagttaaaacttacacctttttccctatatgctctttttcctacccgtttccatcgttctaaataacaaatttccggccaggcgccgtggctcacgcctgtaatcccagcagtctgggaggccaaggcgggcggatcacctgaggtcaggagttcgagattagcctggccaacatggtgaaacccccgtctctactaaaaatataaaaattagccaagcatggtggcgggcgcctgtaccaggagaatcgcttgaaccgaggaggcaaaggttgcattgagccaagatcgtgccattgcactccagcctgagcaacaaagcaagactccatctcaaataaacaaacaaacaaacactctagcctgggtgacagagtgagactcttgtctcaaataaatacataatttatgtattccacttcctgcccaaaccttctcccccatcctcaggtttaaatccaactacttcttaaatttctccatccacactgctcacatgcaccctaaatctaactcctgactccaagccctgattaccaccaccaccactgccactgccaattcatacacctgattctctgtctcaacacttattcctttcctttatagcccattttataatctgttattttgctctttatctgcttatttctttttctcaccccatgaacacagtgactctacatattttattgcaatatcacctagcctagtacatctacgtgcacagcaaacttttgttgaataaatgaatgaatgattaaatgattctttacattttttccagctatccaggatgtgcaggtcttatccttctctagactatagattggtgcctgtgctaagcacttatcccaaggcctgggaaaacagggtgttagtaaactcttgtttgacttagctggatgaatagactcaccttccagcctcagctattttcccccaacttagcattaatattaacagtgctgtttatgaactcattccctatttgggaggggaagggagagcactaggcttggtgcctatttaggcaagtctgctgccctgcacttcccaatgcttacacctacatgatagcaggtgtcagagactagtggcaggatgaatgcaggtgtctcccagcccatgccttttctctgaaaatgaaccctctactttcttcccatagctgagggagcaggcctcagtggctatgtttttcctgtaaacatcctcctggacacagctgattggacacttagtgcaggatgaatgaatccattggctgctgtattagcattagtttcctgtggctgctataacaaactaccacaaatattatggtttaaaataacaaaaatgtattctttcacaattccgcatgagaaatctgaaatcagtattactgagctgaaatcaagggagctctgctccccttagagtctatctctggagaagaatctgccccttgtctcttccagtttctgatgactgtaaacattcctttgcctgtggctgcatcatttcaatctctgcctccatcttcacatcagcttctcttcttctatttgtgccaaatcttcctctgttttcttcttataaggatgtatgtgattgcataatcactgacccaccctgataatccaagataatccccattttaaaatctttaacttaatcacatctgcaaagaccatgtttccatataaggtaacatccacaagttccatggattagagtgcagttatacttgggaggaagtatgggggcattcttcagcctaccccagatgaccaggcaccaagcagattttttctcaataattcaaactatgag

SEQ ID NO: 315974 - DNA, 4001 bp, Homo sapiens
gaggtgagtaaggacttggccctcaaatactaaataaggcaccttcccattgcccccagcaggtacccaaagactggctggaccggtcgcaggcacttgggatggaggtaggtcccagtggggcagctgaagggctgagggcacatgaacaaacaagggctggggattgggggaggactgcggctagccagagcaaggcagacagactccaacccacgggtacaagatcacagagggcacaggtggcacaggccagcccctaccaccaggaacaaagaaacagtgaatggctgtttgtatcccatttacctagaggacattaaaatatctgagaatgtaagtaagaggctcacaggcttattttgattggctggccatttaaaagccagagatttacataaaaacctagatttcagcttcttgacaaatgagaaattctccacggagcccacaatgccaaacagtgaagggccctctggatagggcatgtgctctccagctcgctgcgggccgcaccgagacccccaccccttcccattatctgcctggcagttgcccggggacaaaggtgtgcacagttgtgcagtaggttatgaaggagtatctgggtgcccatacaccctaagaccaagaccaagtcttccaggaagccatcaagccagctgattccaggcaagcaggtccaagttatcagattcacctgcgcagagcaaatggctaggaagcggcttccggatctcttgaagggccatgcagtgaaggtccgtcaccaaggggaccatgccccacaagaagttgctccccgcccccacgcctcattttgatccaacatacacccaagtcccaaagtttctgcgggctaaggctgcctcctccatcactgctgaactcccagcacacagcacacagcctagcactcagagtgtactcaataaatgtagacttcatacctgcagagcctaaggcactgcttagggctgcctcagggtcaatccaaacctttcacttgccaactgccattcaatgagtccctactctgctccaagctgaaagacatcctaggcgttccctacagttccttctagtcggggtagggtctgccgctgcacagctgacataattaatcacttccttccaaaccttgagtcccgaaggaagcggccacactgcccggctcaccgctcaccggctggcatggtgtctcgtggagctgcaagttacttaacctctctgtgcgcttccccagccttagagtggggataagctggggtttctctaggcatcagaaaaaagaaagcgcgagaagcattcagaactgtgcgagatatgatcagtgttcgccgctgttatttctctcattttatcctcagattcgtcctggggtgtcacccccgtcaccccgaaaggatctgcggctgcccctccccagcgcttgccttgctggccagaggggccaagggaactggtggcctccctcgggtcagcctcgcccaccgcgccggaggaaggagatccaggagtggggttcttgtcctccgccccccaaacctcgtcacgactgcagccggcccggcgggggccccgccgtccgcctcagtctggacctctgtaaaatgggggtaacagcgccgacctggggggcccgccccggggatgaacggccgcccagagcgactcgggacctcacgttaccagcaggctggcacgactagcaggttacggctcgccaggcggccggggctgcgactgacctggcgccctcgcccagctccccatgcgtgttgtaattcactgtcatgaccttcacggagtccttgaacaccacgttcccctggctcagatattgcagggtgcggcggatggggaagcggcccttcatgggcatggcggcaacggtggcggggccgaccccacgggccgcgagccgagcagcgacgagaaaggactagctagcacccgcgcggatctcacgcggcttctccccagagccaggttccacttcccgcgcagacgcacaggagacgcttcccggcgggcagcgcacgccgcggagcactctgggacttgtaggcggccttcgacccggcgcggcgagaaccggtgtgtgcagcttcgctttaggacgccttccccttggaaggtttaggttgtcgcgtcctgtaaattagtcatttccccatccacccacgggaaaatatttttacataggctaaaagtcagacattgcaataagaaataatcaggaaagctcagtttggataccaagtcagctgataacgtcctattgaacgtattgtccatttttctccccaaacatctccagttttatcatgaagagttcaaactgcactttctgacgttgacttaaacttcttagcaaaagaaaaaaagatggtttgggatcaattccttcctaaattcagccacttaactcaggacctcaattttttcgtaaacaaactatgggtgagatgtatttctagggccaggcgcggtggctcccgcctgtaaacccagcctttggggaagccgaggcggaaggatcgcttgaggtcaggaattcgagaccagcctgcccaacatggcgaaaccccgtctctactgaaaatacaaaaattagcctggtgtggtggcagcacctgtggtcccagctactcagaagactgaggtgggaggatcgctcgaacccgggaagttgcagtgagccgagatcgcgccactgcactccagcctgggcgacagagcaagactccctctcaaaaaaaaaaaagatacatttctgaagtactcttgatctgaaaggtatttctccttctcttttgaagagtgattttgccagatttagaattctaggttagtgtttttcctttccctccctcccttctggagtgcaatggtgctatcttggctcaccgcaacctccgcctcccaggttcaagtgattctcctgcctcagcctcccgagtagccggacttacaggcatgcgccactacacccagctaattttgtattgtcagtagagacggggattctccatgttggtcaggctggtatcaaactcctgacctcagatgatccgcccgtctcagcttcccaaagtgctgggattacaggcgtgagccactgcgcctggccctggtgtttttctttcaacaatttaaatagttcactccactctttttttgcttgcatggtttcaaacaagtaattaaatgcaattacatttataggtatgatggctttttcctttagcttctttcaaattttctcttggtgtttggtttacggggttagaataaggtaatgcagatctgtagatgttttgtatttgtcctgcttggagtcctctgagcctcctggatctgtgatttcatgtctgtcattaattttgtaaagttcttagccatttattagttcaggtatttattcttcactcttttctctttctagtattcaagttaaatgcattttatgtcttctggaattgcctcatagttctcgaatgttctggcggggtgatggaggttctctttgcattttagtggggaagtttctgttgacctatcttcaaattcatttaatctttggttatggacagtctactgataagcccattaaggcatttttcatttaaggttttaacttctagcacttccttttgattcttagggtgtttgtttgtttgttttgagacaaagtctctgtcacccagcctggagtgcactggtgcaatctctgctcactgcaacctctacctcctgggctcaagcaattctcccacctctgccacttagctgggactacaggtgcacaccaccatgcctggctaattttttttttttttttttttgagacgaagtctcgctctgtcacccaggctggagtgcaatggcactatcttggctcactgcaacctctgcctcccaggttcaaatgattctcctgcctcagcctcccaagtggctgagattacaggtgcccaccaccacacccagctagt

SEQ ID NO: 315975 - DNA, 4001 bp, Homo sapiens
aagtaactttttgctgcagtgagcaaggaagacttcaccaaggaggcagggagttgagttaggcctttagaaaaaagtagtgttttaggcagaagaaaattaagaaagcaaagataaaaaaaaaaagaaaaagatataaaaaagcatgtttgaaaggacaaaaatatcaatccagttaaaagagaattatgtaaaaccacagttgaataaaaggatgaaaaggtagtagcgggtcaaatctacaggacgtgttgaaacaaattccctaattaagcattacaacagaattaaacttcatttttacaaatgcattatcttcatgaaataagactgcccatccacgaatttgaatgcactaatgcttttcagctaaggaaaaaagtctagtacatacctggtacaaaaatatgtcaatgctgggctgaattcaaataactgattttttttctatgtctttataatcatagacttacgtccaaagagatgggaggaaaaaaacctgaacctacatccctattactgaaaccatgccagctactcaatcataagggagaagcagaactcacgatcttttccataggatgatgtgaaataagaaagccctgtcagaaaaattccccttgtgttgccaagactgacaaaaaataaaaataaaaaaggctccagttggacttttaaatgtagtgggttttttttatctttaattccattatttaaagtccaggttagaacttgggaaaatgttcaattagaccaccactaccatccgaaagctattaataggaacttaaaacctctgaggttcttaacagttttaggatagtggtggtctgcacaactcaaaactaccatttcccacttaaattagagagctaagtttcacccatctagtaaacaggggacctaccagattctacaaatgttaactgataatgacatcactctcaaatgctgtttcagcaggacagagtgggcccttcctcttccccctacctcaccatagtagcaccctacggccggcaccaaaggaaaagaaaaaaaaaagtatatggagaaggaagttatggcagctccatttcctcagtcctcaaaccatcaaaatatgtgaggacattaaaaaaaaaaagcactccataaaagtgggagtagagtgagaggttaccatgaaaccaggcaaactcttgatacacttacatttgtaaaacttaagctgaaaggaaactgaatctagccgaaaattatcattttacacatcaagaaactgaggcccagggcagttaggtgatttgccctgggcgactattcctctaaggtgttaagtgtctgtcaccagtcagagtagcacttaatgacttactcagttacttaaatgtttatgaccttaagtacctgtcttgcaaaaaacaccaccgccacctcttctgcacccattcagtgtcttgcttcaggatctagatagagaatgctggataaacctcaaatgaatattatttctcccttcagccacaactgtcccaaattactcttcttcctttatctacttttaaataaagtggaaaccttaacgtgcctgaatttcccaggttctgactaaacaagtggatcatcaaaacttcaaaatttaggatagaatattaagtggagcatgcatattactgctttggcagttgccctttcttttgtattaacgtttcagtccaggtttttcgaaaagcaagtaattattacacacgcacagttaacattcaaattatcacttttgagatattttccttagacaatttagcatatctcttctatcttaaaaattaaagtatcctacccaccacgagttaattttttttaacaaaaacatctaaaataaccctcgacaaagccaaagtatattaaaccacaaaatgaaaaagtggtaagtaaaagtctcaccagctaaaaagcacttcgagtaccaacagccttccccggctcgctgttaaccgtcaaaccgtcaaagcatttgtggaggaacctggggcaaagttccgcgccgggttctccagctgtgggttcatcagcttagcccaccactcccacgtaacaccagtttggggaaatgcaaacacgccacatgtgcccacatgtgcatgttttgatcatgtttaaccacttttaaccgccgtaggtacgtaatcagctcccgcggcaaaggtttaagaaaaaaaaaaaaaaagccttgtgcatgcatcttacccccacttaaaccaccaccaccagatgaaccgaggcgaattaaaccattttgaacgttaacgccgctgcacaaagcggtatgaaagggttctctgcctttctgaaacgccgggcaaaagtccctcagcaagtttcaaaactaatgaccgtacagcgctgcacaaataacaaaagcttaataccaaccaccaggccgtcaacccgctcacgttaccactgcccagaaggcttttaaaaacaagcattgaaaagggaacaataaaaagcgtctcaccgcaaacacagcacgaaagggactgtcggaagtaaggcaagagcctgttaatctcagtaaacgccttggggtctccggggtcgtagttgagcactaggcggctcgcggaaatgtagagagcagtagcattcacggggttcattgcagacacttcgacaccaatggctcccggttgaaaagaaattccggatccaacttagtaagcagccagggaacgatggcgaatttgcaacaattcggaagaaatcagagccgaaccattggccaaacaagtaaccaaaatccgtgcaagtttgtggagctgaaacaatcctcccacacatggggccttggcgcccctccgtccctgagacttccagaccaaaaatatgagagagaaaccagcgttcgagttcgtccggagcgaccacagagcgcagaacgcggcggcttgggcgctcggggcgggactcggagctcagtctagccccgcggctcggcaggcggcctgcactcgagctccatctccggacacggaggcgcctcctcaagtcgagctggcaggcgcgggagcaggccccggccccgtctgaggcgcggcacgcttctcccgggctgcagggcctcttactccatcccagtacagggcgcggaggcggcggcgacggcaaggacgacggtcgggcagcggcttcccggatctagtgcaagacgccgcggcggcgacgaaggttgatgttgcggctggcggacgccgccgccgcgctctccatatcggacgcggggcccagactgcgccctggctctccgccccgtgggttgcagcccgcagttccccgaggtggcgaggcgggcgggagtcctcaacccggaggggaaggccggggaggaagtgcgcgggccgccgccggcgggcgggagggggcggggggcaagcccggccgggccgcggcggcgcccctcgcgcctcagtcgcacactccggggtcaccagactcaagcgccgccccctcactgcccggccattttttcggcgccacacacacagacgactcctccgccgagcacgacggccgccgccgccctcagcactccccggccgcggaaggcaagcgctcacaccgccaggccccgccgccgcccagcgcacacagcaaggccccgccgcaggcccctcccccgtgcctcgccgccctcaccccgactccacgcgccactccagctcggtagggcccgggctgctgcggccttaatggatcccgcgggctgtgtggcgcctcaggcctctgctggcggcgacgacgaccgttaccccaacgggcaaagccactgtcatccccgagactcccccgccgccgtcgtcgctagcgctcgcacgcatgcgcagagcacactctcacccctcccccctttcctctcccttcgcttcccttttcccttgcttctcctctaacaaccccctccacagcctcccagagctaccggctcactccacgcatgcgcaagctgctacctagct

SEQ ID NO: 315976 - DNA, 4001 bp, Homo sapiens
accttaagtacctgtcttgcaaaaaacaccaccgccacctcttctgcacccattcagtgtcttgcttcaggatctagatagagaatgctggataaacctcaaatgaatattatttctcccttcagccacaactgtcccaaattactcttcttcctttatctacttttaaataaagtggaaaccttaacgtgcctgaatttcccaggttctgactaaacaagtggatcatcaaaacttcaaaatttaggatagaatattaagtggagcatgcatattactgctttggcagttgccctttcttttgtattaacgtttcagtccaggtttttcgaaaagcaagtaattattacacacgcacagttaacattcaaattatcacttttgagatattttccttagacaatttagcatatctcttctatcttaaaaattaaagtatcctacccaccacgagttaattttttttaacaaaaacatctaaaataaccctcgacaaagccaaagtatattaaaccacaaaatgaaaaagtggtaagtaaaagtctcaccagctaaaaagcacttcgagtaccaacagccttccccggctcgctgttaaccgtcaaaccgtcaaagcatttgtggaggaacctggggcaaagttccgcgccgggttctccagctgtgggttcatcagcttagcccaccactcccacgtaacaccagtttggggaaatgcaaacacgccacatgtgcccacatgtgcatgttttgatcatgtttaaccacttttaaccgccgtaggtacgtaatcagctcccgcggcaaaggtttaagaaaaaaaaaaaaaaagccttgtgcatgcatcttacccccacttaaaccaccaccaccagatgaaccgaggcgaattaaaccattttgaacgttaacgccgctgcacaaagcggtatgaaagggttctctgcctttctgaaacgccgggcaaaagtccctcagcaagtttcaaaactaatgaccgtacagcgctgcacaaataacaaaagcttaataccaaccaccaggccgtcaacccgctcacgttaccactgcccagaaggcttttaaaaacaagcattgaaaagggaacaataaaaagcgtctcaccgcaaacacagcacgaaagggactgtcggaagtaaggcaagagcctgttaatctcagtaaacgccttggggtctccggggtcgtagttgagcactaggcggctcgcggaaatgtagagagcagtagcattcacggggttcattgcagacacttcgacaccaatggctcccggttgaaaagaaattccggatccaacttagtaagcagccagggaacgatggcgaatttgcaacaattcggaagaaatcagagccgaaccattggccaaacaagtaaccaaaatccgtgcaagtttgtggagctgaaacaatcctcccacacatggggccttggcgcccctccgtccctgagacttccagaccaaaaatatgagagagaaaccagcgttcgagttcgtccggagcgaccacagagcgcagaacgcggcggcttgggcgctcggggcgggactcggagctcagtctagccccgcggctcggcaggcggcctgcactcgagctccatctccggacacggaggcgcctcctcaagtcgagctggcaggcgcgggagcaggccccggccccgtctgaggcgcggcacgcttctcccgggctgcagggcctcttactccatcccagtacagggcgcggaggcggcggcgacggcaaggacgacggtcgggcagcggcttcccggatctagtgcaagacgccgcggcggcgacgaaggttgatgttgcggctggcggacgccgccgccgcgctctccatatcggacgcggggcccagactgcgccctggctctccgccccgtgggttgcagcccgcagttccccgaggtggcgaggcgggcgggagtcctcaacccggaggggaaggccggggaggaagtgcgcgggccgccgccggcgggcgggagggggcggggggcaagcccggccgggccgcggcggcgcccctcgcgcctcagtcgcacactccggggtcaccagactcaagcgccgccccctcactgcccggccattttttcggcgccacacacacagacgactcctccgccgagcacgacggccgccgccgccctcagcactccccggccgcggaaggcaagcgctcacaccgccaggccccgccgccgcccagcgcacacagcaaggccccgccgcaggcccctcccccgtgcctcgccgccctcaccccgactccacgcgccactccagctcggtagggcccgggctgctgcggccttaatggatcccgcgggctgtgtggcgcctcaggcctctgctggcggcgacgacgaccgttaccccaacgggcaaagccactgtcatccccgagactcccccgccgccgtcgtcgctagcgctcgcacgcatgcgcagagcacactctcacccctcccccctttcctctcccttcgcttcccttttcccttgcttctcctctaacaaccccctccacagcctcccagagctaccggctcactccacgcatgcgcaagctgctacctagctccgccgcctttcgcccttccgcgtgcgctttgaccgcccacccagaaaaccggataaacacatcagcctgctcgcgccagtccctcaccgctgccaacccaccctgggctcactgcgcatgcctggctctccacttcgactctcagaatggagcatgctctctgcgagccgacagctctcttcgcccctcccccacgtgctctcaaattccctctcccaggcatgtgggctgtggtgaaacattcgttagctggcacatccttccccagtgtgggctgcaggcttcccgcattacactgcttctgtgcccgccaacgccggggcccgacttggtagcgccatgtggcgctctgcactggcctgaacgcggcctctcgtcctgactgaccgcggtgtgaggaaatagccgcgccaggccccaagccccgccctcgcggcctttctcctggaaccgctcatcccgaccgcggaaagggcgcagcctcggctggctggcaggctctcgccgagccgggaaggctgcagtagtcaacgtggctgcgcgcccagcaggcgtgcggacggcttttgccgggtcggggccgcgttccgcacctctctgcggtggttcgcagtcagagggctctaaggccctggcaggctgtatgtaagcgtggaggctcgaacccactgccccctcctacccgtcggacccgcgctgttcccacggcctctggcccttggactcgtgcggcctcaccttcatgggtgccgatcaggacttcaccgagctctcaccggaacagagtcctgttttaaaaacaaaacgaactccttttttttttttttgaaagacctagcttttttaaaagacctagctcttctgtgtgaacagatgtcttgaagaatgcgtgatcttgctctagaacaaacccaaatccttgcaaatgttttgttttttaaaacaagcttttgccttttgtttttgcaggagatcaagggcactgggatataaataaacaaaagcctgacttagtagatgacttccctcccatctcaaagtacaaaacctttttttgagtagcacaaatagtaacaggccataggaagcatttcttatctctgtacacaccaaagctcctcagcataatttttcatgcacagtaggtactctatacgtttgcaaagtgaaaattatgatgcgtgtaaatctattgtggcacatgttacatatgtacacaggcacgtatatggaacatgtaaatgtggtacgtgttagttacaagctgccacttgaggtgagtaggaatagttaagatatcaagggaacacatataatctcgatttataatttctattaccatttgaagacaggtttttttttcacaagacctaccat

SEQ ID NO: 315977 - DNA, 4001 bp, Homo sapiens
ttccggcaatagttgtcgtccagaccttggtcgaggaacctgggggcggtaatggggcgtgaacaagaccctgggactctggcttatctggccccgcccaattgccctacacggagccctgcccctggagtcctggaccttccctagcccggcccccaggacgccgataccgcctacgcgtacttgcccggctcgaaggggtgctggtgcgggtgctgaagatcccagcgctggcactcgcgccctgactccgtgcggtctaccgcgccgcggtattcctcgccattgcaccagacacacgcggctggagacaaagagccagtgggttcgtggatggacgtgggcttgtccctccactctcccagcttgacccggcgccgcttaccctcccggcaggatttgatgccgcagctctggaagcgcacagcagggtctgttgtgtagcaccaaggacctccggggtcgccatcagggttacggcagaagttctcttccaggccattccggagagtgggcgtgtacctgagggcccagagcatcactatagtgtgtgctgggggaaggccccaggccgggacggagggaaggtgtttgtctcacttgtgatcatttgggaacttgtggctccaagcctggcagggcaggccacccacggtcgtggccatggtgccccggtacccaaccccattgttcatgatgcaggtccgtacgtagtctgggagcaagagacagaagatcaacttgggctgaggtcccctgtctcccaccctgcccctctccacccccacttgcctttcttctggaagaggtcacagcgcccagaacgccgcagcctcgtgtggggcgagtgttgagtccatggcagcagttggcaaccatggctgctcacgttgtagtggaaggccctggagagaagaaggcacagggtaacgccacagcccaggcttccctgcccccagtcttatctaggcccagtggccactcaccggcagtccattaagggcccacagcgaccagcacactcttcagcatctgccacatcctcctgccaaggcccgggcaccaccgcatgtagcaggtgctgtagctctgtgccccggagcacttggaagtcattcaatggcgagcgctgccctgcagagtaggcatgagtgggtgcaggtcaggtgggcatacatgtcagtaatgtgtattggcatgtccacactttgttcattcaggggatcaaagctacaaggcttctgggatggaccctgtatgcactttcaagggccagtctagccccctgcacagatacttgtgaaaaaaatttcccctgggaagcaggcccagacttggtagttatcaccggtgcctctgtttagtggcccaggcaccgggctcagatctaacacatacgctctgtgagagcagtgggtgatgaagcttgccccacctcatctctcaaatgagaatgctaaggctcagagccatcacattacccagccaggggccctggctaggcattcagactccaaatctgggctctcacctgcacaaaggcatatgctaggttagaggggtagatcaggctcaggaggggtcactgcctgctgtgtgcgtgcatctgtgtggtcctgacactgcttcagtgctagagcagacgtgctaatagaggcctaagtgggcaatgtctatgtgttcctagggcttcccagctgtgctcaagagggcaaggtcactgccccatgcccactgagcctctggctccccgacttttttctcatcctagaataggagaatggggccaaccccctcctgaaggcagatggggatcagggttgggggcacttaccagggacccctaagcattgagtcagaagcagcaggagtgggagccaccccatccttctggctggaggctgcactgtgacccaccacagccccatccgggaagttgtgaaacctgtccctacgggattgggtggctctggctccacacgtcagctcagggcctgctggaccctgacctgagacctggtgacaggagccatgaggggccaggcctcaggtcccataggtcagttgcaagggcctagtacagcttagtggacaggtgttaggaaggtttggtggggacacttgaggtgccctggggttggggtgaaacccctctgcagcctagtcagcccaagggcattgtgaaagtgagagctgccagaggtctgggctccagcccctgggtgacattaaacttttctgaatttcggtttttccctgtaaattggggaaaattacttgccccagcttcaacactgcctcccctccacccttttgctgctgccttatcaggccccagctgtaggcaggtcagcccacacccggcggcagagcccagagaggctcgctcatctcagccgccagaagtgtcatcccagggaaggtgagcgaggctgtccactaggactaaataggggtggaggtaacaggtagcagggactctggcaggaacggcctttcagacgttttaaggaccgtctgagcggggcctctaagtatgggtaggagacaggcggcctagggattccggttagcatgtcgcgttctgccgcagcagggctgggagcatccccagagcaggcggaggtcggaggtggtgaggcctttcggcgaagctgaggcctggaacaacccggtgggaagccatggagggggtcccctagcggaggctgggcgcgggccagtgcgcgtgcgcggctggaggctcagcgcgcaagcgtgcgcgtgatttggccctgaacggacgccgtagccaagaggttgggcggatgttgtgagccgggtcgctgcggccgaggctccgggtgagtgaggggcggcagggctctgagcctggcgggttccggctattcccttcgcggtccgggctagtccagtgcgagggcacctgcagcgcagggatctgggtgcgaaactccgagcggaagctggtctggcaggtcctgtggagcttggggccaggcgggggcgacttgggggagccatgcgccgccctcgccgtccttgggctcccagacggagtaggttcagttctgagtccggataccccggcggggttggacgggatagccgtgacagggagtccccgggcggggacaaggtccgcctctcacctgggtcctcagcaactgactcccggagcccactccgggtgtctggaaggtctgctcatcaaatgaatgactgagtttaatcagatcttcaactactctggtagtgaaggggcaccgatcatggacgcccaccgagggcccgaggtcgggaaaatcaccttcccgaggagcaggcgtggtgcagacccacaagggtttgtggcgggagtagagggtctgtttggggtgagataagagactgaactgcagagtagggagtgctggctaaggcagtgctgcagagcgaaactctagacctgcgctgtctaatagaactttatatgatggtgggaacgttctacctttgtgctgtccaacagagtaaccattagccacatgtggtcattgaactcttgaaatgtggctaaggcaactgagaaatcgaattgttaatttttaaaactttaaatttaagtaacctcatgtggatgacggctgctgtgttggacagcaccgctacacatcagtgaggccagcaccagggactcagtgcaggttctggagcagctgcagcagcaacatgatgtgagggatagatgcactaggaggaccaatggagtttgccatgagggctgggcaagggtggtgcttggatgaggtgggaggccacatgtgtgagtgggaatggtgaaactatcaggaccatggataaaagaagggaggaacccagggctgaggaaagaggctccagccttgtggggagtaagtgggacttatggctagagatgaccagaccagtggtggtctgcacttgggggaatgtgtaggattgtcgcttctggttgtgagctggactcagtatggcttaca

SEQ ID NO: 315978 - DNA, 4001 bp, Homo sapiens
agcagctgtgagtctgtgaatctgtgagcatctccctgtgtatttgtgcgtggtggtggtggtggtggcgggggtgggggaggggaggggggagtgctatttttctgcgtgtgtccctgaggatatgggtggtggacaagtaggagggaatgcccatcattctacccagcattcaggagctatgctaacagagacacggttatgtaaccctatcctcacatagccagggaaactacctaaaaaaccagaggccatgatgggcaggtaggggaaagagcaagatgaggcagccacaagggccagcctgggagctaagcctccagtgtagcctttgtctggctggtttctcacaccaccccagcacttaggaactgggtgagagagaatgcttctttccgcctgcccccccaccgcgcccccagatcccctcagtgatggaagggaagcagcctgtgttcagccatgtgcatgcagctcacaagtaagggccccttctttcagcttaccgggttggggcaaaaactgggcgactggaagaagtcgaggcctcgccggaggcctggatggactggggattcacaacagcgctccacaccctcatcaattagtgtgtccagcaggtcaatggggaaggcacagacgacagagttggggcccacgccaggaccaccatccttgccagtcacaaagaccccaaatagtacttcctggccctcggcgatgctcagctcagtggcaagttgggcacccactggagcggagtgggccacccgcagcacagggtagggctgtccgccttctggggccccccggcgcctgcgttttggagcaaatctgcagtcgaggaccagctcccgatagtcacccaactctggctcagtggcgctaagccgtgccaggcgtgtgtgcagggcactaggatcatctgtcacgctggccggctgtacagtcaggaagtatacgaaggctcccgtgtggaagctgtgcacgtattcaatactgtaggagacaagatgcttgggcagcactgacaacgccacaaagcccggtgcgaatcccgaggcgtcagccttgagacgcctgatagacactgagcgtgggctgaagctggcagccacggctgcgtccagtgaggatgccacgtagaaataggaggcctggccttgctcaaccacagttacacgggtgcccaatgggctggccacacagtcggggcagtcatcgggccggttatggtgggctgagaagaggcaggctggcgctgccagatgcacggctgtcccttggggctctaggtcatgcaggaagcagcggccctgcaggctggagccacaactgaccagcgcaggcagcgcgggatccagcaccagcacctttgtgtctgtgtcaccgggagggccgtggggtcctgggccacaggctgcacacgtctggcagccagggtctccagcagggcccgtggccaggctctggacagacttcaggtcaggcccaagcacatgcaggcgattgcgtatggctacaaacacagcactctcatttctgtcgccctcgtaggtcaccatggcctgtaccaggcctccggcggagaagctgggcaccacgtacttcacgtcaaagtcgcgagaggccgcgtagggggtgcgcgggcactgccagtcctcgcccgccgcgggcttggcaggcaacagcagcagcaacaggaaggactgaggcagcggcgggaggagctccatcgaggcgagctgggaccctagaggatccctaccggcctgggcctggacctgggcgtgggcctggctgggggcccgactcgaggtctggactgggccaaatttaagcagcggtcccgacagccccaagatagcggacccccgccccaggttcctgtgaaacccaaatcccttcccggccctcgggtctgagcacctgacgcctgcggacgcacgacagcaacgccccagccgcctcacctgccgccccagccgccgctgtacactggcgcttagcgctcagccgacccgagggcgccgggctgggcgggcggagtcgggccgtgggggcggggccgcgaggaaggcttggcctagcccaggccctccgcccatccgactcttccggcccttggaggcctggctcctgtaccttcacctggcgtcttggcgcctttttctcagcggcctgtgggtggatgtgcatggtgtggcctggagagaggtgagccagtctgagccgtcccatcccatccccccactaccgactggttcgcagcgagaaggggggcaggacactgggctctttgcttgcggtggaactagtttgcacttagtagcaacaccctcagtggctggtgcccagaggtggcctgggggcccaccatgtggagaacagagaccaggattgtgtggaagaccagaggggagatgtggggcacttacaagagatgttatggggcgccaccctttgtgggaaaggactgtccttttttttttttgagaaggagtcttgctctgtggcccaagctggattgcagtggcgcgatctcggctcactgcaaactccgcctcccaggttcaagcgattctccagcctcaacctcctcctgtctcaacctcctgaatagctgggattacaggcgcgcaccaccacacccggctaattttgtatttttagtagagacaggattcacagtgttggccaggctggtctcaaactcctgacctcaggtgatccgcccgcctcagcctcccaaactgttgggattacaggcgtaagccaccgcgcccggccgggaccattcttccatgtgcttctcctgagctatcagcgacaagatggtgtcagaggaaggtgtgttatgccctgctctcccagggccataagggtcttaggatgggatctggccttgctgactggacctcagagtcagagaggcacgtaagtggaggcccatacctcctctgcagcctcagtatatggaagctgtataatggggtccacagtatgggccttggggactcccccttccttcctggctctacccagtgcccccctgatatggaggaatcatgggctttggctctcaggacacttccaacatgctctgtaggccttgctggatcttattctcttcaatgagaatgtagttctgggctgggcaccgtggctcatgcctgtaatcctagcactcctttgaggggccaaggcaggaggattgcttgaggttaggagttcaagaccagcctgggcaacataacaaaactcaacaaaacaaaaaaactgctaaaaatgtttttaaaataaaatatgtgaccgggcgtggtggctcacgcctgtaatcccagcactttgggaggccgaggcgggtggatcgcttgaggtcaggagttcaagaccaacatggtgaacagacagatctggccaacatggtgaaactatctccactaaaaacaaaaattagccgggcgtggtggtgggtgcctgtaatcccagctactagggaggctgaggcaggagaatagcttgaatttagggggtggaggttgcagtgagctgagattgtgccactgcactccagcctgggtgacagagcgagactccatctccaaaaaaagaaaaagaaaacgtagttccgactaggtgatttcccagagttctctcttctgtttatgaggagtgggggtgggggagcctagtcccacacttggatctcagcagctgccccttggtaactggtcccccaacactagactgaggcccctgggggacaaccttagcctgacagacccctcagttagataggcctggaccctagaagacagggaaggtccacagggtgggtctgggctgtgaactatgggccccaaggctgtagataaggaggctgggggagagaggagccctcagcccaacaggatttagcctggcttggggagctatatctcctcactcccctttcagttcatacttctgtgcctgcatccccttcctaacctgacctt

SEQ ID NO: 315979 - DNA, 4001 bp, Homo sapiens
atgacctacagccactcaaaagacccttactggccaggtgtggcggctcacgcctgtaatcccagcattttggggggctgaggtgggaggattgcttgagcttaggagtttgagaccagccagggcaatatagcgagaccatgtctctaggaaaataaagaaaaattagccaggcatggtggtgtgtacctgtggtcccaggtgcttggcaggcttaagtgggaggatcgctcaaacccaggatttcgaggctgcagtaagtcatggttgcaccactgcaatccagcctgggcagcagagcgagaccctgtctcaacacaaaaaacaaaaacaaacaaacaaaaaagccaggcgcggtggctcacgcctgtatcccagcactttgggaggctgaggtaggcggatcacctgagctcaggagttcaagaccagcctggccaacctggggaaactccatctctactaaaaactacaataattagctgggcgtggtggtggggtcctgtaatcccagctacttgggaagttgaggcagggagaattgcttgaactggggaggcggaggatgcagtaagctgagattgcgccactgcactccagcctaggcgacaaagcgagactccttctcaaaagaaaaaaaaaaaaaaagcaaattccaggatcccacccccagaaattctgacttggtaggactgggtgggactaaggaatctctgttttcacaaagtatcccataagcacaaattttaaaagtaccccagatgatcattaaacaggtggtccccagactatacttggaaaaattacttggccatttggagagtgaggaagtccaatccttactgaagtcttccctgggttacttcagagactacaagatgccaactacagaatagcaactcacggtaatctctgaggtcaaatcagagttctgtggtgcaggatggaacagaattccactggaaaacttggtgctaaagctgccaaaaccacgtgggggaatgagatggcagggtcggcaagattcccaccgcactgccagccagtgcttagggtggggatggcctgagctgacaggaagccctccaggtctggcgataagacgactgggtggaaatcccaaagggagcaaaaagaggaacggagacctgctttagataaaggaactgaaagggagtgtgggttgtcttcctgctctataggggaaggaaagggatgggcctaagtcatgctgagaccttataagggggcagcacactgggttcacctcctggctccattctgacctctgaccccgaggaatcgtctccctatttttcttagctttttcttggggctttttccctgacacaactcatcctacggcacctgaagcagggaatagaccttccttaggtcctcctctctgatctttgaacctggcccctcagcttgatctctcacctccagaccccttctcaaacaagaaggacctctttgctgggctcattctgaccccagttcctccttttatggttgtcaagaccgactcttatactccggatacagaccctggagaactcctctctctctctcctcttcctcagcggcgaggtaccactcctacctttttctgacccctggcctcagcctttcctctgtaacttcccaagttaggagccttccccagctcatcgcacctccaatctcaccttagagccgccggtcccgctgccatccttggcccggtactgagtccgggagaactcctccagcagctccccaagccccagctcctgaggcggctggttgcctgaagaggccgaggaccccgccgaggcagcggcggcggcggcccgagcgccggccatggcccagccccgcgtcccctcagtgtgcctcaagcgggcccatggcacctgcctgcacccaactccgacactagaacctccggaaccgcctcagccaccgccttctacttccacttccacttccggccccgccccgtcccgccggatgtttactccgactctggccaatcggagctctggacccgcgccccgcctacgattactggcccgcccccggcgcagagcgatccttctatccaccagggaggccactggctgataccgcgtgatccgccccaaggggtttcccccggggaagccgggctcaaccattgggctgccgggggaggggggtagcaggaaggaaccattgaaaagaaccagaggaaaagtggaatcaacaattacagggaagccgagcgtggtggctcacacctgtcatcccagcactttggggggccgaggcgggcggatcacttgaggccaagagttcgagaccaggctgccaaaatggtgaaaccgcatctctactaaaaataaaaaaattagccgggcatggtgacacccacctgtaatcccaactacttgggaggctgaggcaggagaatcgcttgaacccatgaggctgaggttgcaatgagccgaaatcgaaccactacactccagcctgggtgacagagcaatactctgtcttaagaaaaaaaaaaaattacagggcgaggaggagagaacgcttggaggcaacaaattagtactagaaaccataatggcagtggttaccaatattaaaacatttcagccggccgcggtgtctcacgcctgtaatcccagcactttggtaggccgaggcaggcggattatgaagtgaggcattcgagaccagcctgatcaacgcagtgaaaccccgtctctactaaaaatacaaaaattagccgcgcgtggtggcaggtgcctgtaatcccagctactcgggaggctgaggcaggagaattgcttgaacccgggaggcggagagtgagccgagatcgcgccactgcactccagcctgggtgacagaatgagactccgtctctaaaacaaaaacaaaaacacaacatttcataaaaccctttctccccctgctgctcacaacatccctgtgagtacagtgcattatatcatcagccctattttattgaggtagaaactgggagtcagggaggtgaagcgactgccttgaaattctgtgatgagaagcctctcattattattattattagaatatttcagacattcgcaaaagtggagacaatagtataatgaaccctcatgtacccattaactggttttgaacaataatcaacatctgcttatctatcctgtttaagcagtcccttcccatccagggaattattttaaagcaaatcccagacatcacattatttcagctgtgaatacttaagcatttatcacaacagatttgtacttcaaaaaaaaaatacataaaaaatataaggctattaacatgcctaagaaaattaacaatattccttaatgtggtctaatacccagtctgaatgaaagtaattcgtttttgttaaacttttaatagaagtatgatatgtacaccagcgccccggaaccctcctcctgaccactttcagtcactacccactcaccaacaaccacccaccaccctgcccccccaactcctcccacccccagttaatcactatcctggcttctagagttttaatacggtagattggtttttaatttaatttaattttttttttttttttttttttagaaacggtttcactcttgttgcctaagctggagtacagtggcatgatcgtggctcactgcagcctccaactactggcctcaagcaatcctcctgcctcagcctcccaagtagctgtgactacaggcatgtgccaccacacccagctactttttaaatttttttgtagataccgagtctcaccatgttgtccaggcgagtctcaaactcctgggctcaagcaatcctcccacgtctgccacccaaagtgctgggattacaggtttgagccactactcctggcctactagatattttctgacaaatctatatacgcatttgtcttaaacaccaaggaatgaaatgactggattatatggtgttaaagaaaaattacaggccgggca

SEQ ID NO: 315980 - DNA, 4001 bp, Homo sapiens
actgagggtcagagacaccccacagctaataagtggtggcatgccatctgaatccctgcttgccctacttttgcccttccccctgggttctctgggtcaagaaacatctccattcccctaaggtcccttgagcctcaatgattcctgattcccttaactctctattcatctccttgtcccctcccagccaactttcccctttctaccgcccttctattctatttttaaaaagtcaagccttttttaacagtggctcctgaaagtcatacaagcctcaccaattcttcctttgtcctgaaggcttggacctagcatctgcccccaaggttggcaggagagatctggtgagccctcccctcctgtgcagctagccttctccaaccttccagcattaagagcttgaaaccagctctcaaaaaactctaatcctgatgccattcattccagttctctgaaagggcttaatttctcttcatacatctgccttatcaaatactttcttcctttctgcaagcagcttctagatttcaactcattgaacctgaaggaaataaaaatatttcacccccaaatatagctccatgatataatgagtattttaaattaaaaactcttagaggtcaacaagcgctgtaaggactgatccaccaaagaagaactattgctcctgttcccctccctgttatgtcattatccactacaggaaagaagaccgagaaggaaaccacccctgagctgacccttcatcaagataaggactgtctccaaggatctttaaattccaaggagaattatctacaagttcatttttgttcccagatccaattattctccctaataatcatttattgcccctcaacagaattcctcttctcccttcttccataacttgttttaccaagatccaagccccctttctttctgtaacctcaagatggtgtataagcttctatacctcatcaggaagttgggtgttcatgctgaaggttcctgggtacacacattaaatacagttgtatgccttttttcctattagtccatctacttcatgccagtgatttttctgcaaaattttaggaagccaattggcctccacaaccctcacctctcaacatactgctgacctcacccacatgtggcccatagaacccttcctaactcagaacagagagtacatgtctgaagtctaatcaacgtgacaattactccctatggtttagcattctcaaattcaagtacatttgtgaaaggaggctttttgctgtggtcagctctctgattatcatgagaggggatccagaacgctatagtagagaactgggtccttgcaacctacttagtccttcttatctggcctcaggaactctcaaagagaaacctctggtttgctgagcccccagatctcactccatagaccacttcttccccccacccctacaagatggagtctcgctctgtcactccgtgtcatctcagctcactgcaacctccacttcccgagttcaagcgattctttctgcctcagcctcctgagtagctgagactacaggtgcccaccgccacacctggctaatttttttgtatttttagtagagatggagtttcaccatgttggccagggtggtttcaaactcctgacctcaagtgatccatctgcctcggcctcccatattgctgagattacaggcgtgagccaccgcgcccagcccacagaccacttttgctattgctctatcttccccatcacaggataaaatgtctgtgtctttgagctgagctggagaggaaacttcatttataaaatagaccatgtgctgggctgggagaattggtagctataggcctgctgattctacctcaaagacaacatacatgattggaagaattaaaatgtaaaaatattccttacctgtgtttacagaaaggagagcaagaagagtaagatgaatgatggctttcattttagctgttcttgcttggtaatctgaggaggaaatgatttcccttcctggctacctttcgttttaactgtctttcgggtacaaagtccagtcattaattgacgtcaaaccacagaaaggcaattatagctagcatttggccaaataccatagatctcttccgagcttttgagatagaagaggtggagctggccttacgaatcatttttctgactcaaagcccaaaataagtcaggacattccaaatatccttgtgaggttggtggcacatgagtttggttaatctcttgatatctcaaatgtctccaagccgccatcttttaggaggtcaccattccattaaacattcaataacaaactgtgctctactcacccacatatgagtgcaggaaaccactttcctccagctgtagttctgagaatccctgaagaggacttacatgtttcccaaaattattagttgcttaacttttgtcactgtatgctggggactaccattccgggcctctctgatggtcatgtctagcaactttgtaatcacatctccaagcttctgtgactctacctggatacagcccccaataaagttcccaagcacaatggacatcacatcatggcatttaacctaactttactgaagtcttgtgggtgactggtgtgttggggagttggcaataaagtacagaaaagagaaaacttagaacagctgatttgatctctctgctcctggccactcattgggcaggccccacttctcagttccctttctcaccctctctctagttcctcagcccctcacctctcaccatgtgtcaggaaccagctttactgcttggatttgggtcttcttaatctaattttccctccttaaagtccagggccccaactctactgtgtctagccccagccagaggaatataaactaatgataccttgtgagttgtggctagagttttgagtttaagtttttttttttttttttttttttttttgagacagagtctcactctgtcgcccaggctgaagtgcagtggcacgatctcagctcactgcaacctctgcctccagggctcaagtgatcctcctgcctcagtcacccaagtagctgggattacaggcatacaccacaatgcttggctgatttttgtattttcagaagagatggggttttgtcatgttgtccaggctggtctcaaactcttagactcaagcaatccccaaccacagcctcccaaagtgctgtgattacaagcgtgtgccaccatacctggcctttgggtttaaattttaaccctgaccttgatgaaaacaaaacatttttgtatgatcgcccagcagataagctgcttattgtcctagagtctccattcaagaataagacaggggtttgttcttacatggctgagaggtccatttaaacactttttccaaagcaaagacacttctaaggcccattatgttatgctattattctcagcttgaataactcctggcatcaggatttaaacaaaggcttgtttttcttttctttttaaactagctttattgagctataatttatgtcaataaactgtatctatttacagtgtacagttcaacgaattttgattgatgtatatacatgtgtagctaccgttgcaaccaagataccgagcattcccaacacaccctttgggactttcctcttgtccctttttagtgctacatcccctatactccaccccaaccccaggtaaccattgatctgctttctgtctctataaattagtctgcattttctagcattttatgtaaatggaatcatacagatgtagttttttgttttgttttgttttttgagccagtttctttcacttataaccattttgagactcatccttgctgtgtgaattcatagtttgtttcttcttatatctgaacactattccactgtatcaatgtaccatggcgtgtttggtaattcatctgtcgatggacatttgagttgtttctagttttgactattacaaacaaaaagattataaataaggccaggtgtgg

SEQ ID NO: 315981 - DNA, 4001 bp, Homo sapiens
cgagtcccgggcacccactctcatccctggtccagtgcggcccagctgcacacacaaatctcacttttgcaggaactgttcgtctgccttcataatacagtttcttctccccacttcaagcctgagatcatttctttgagccttcttggtccagcccacacagctggaagcccagagtggtgcccttggagcccgacttcccctggcacattttctggcttatccaggagccccggggtgtcctttctgctgtgaaacctcctcatgctccccaagcccacagcctctcgggtccaagggggtcttctcgaatacagcaaatcccagcccagcccctcagtagctctggaacactgcggctctcctggtacaatcttcaaatctggtggagaggaaagcgtgtggacttgggaccctgagttggagaatctgctctctgccctgtgaccctggccaagtctctcagctccaagcctgcatttccgcacctgtaaggtggagctaacgggacacgtgcagcgcagaccaggccacggtgagcacaggcaggaggccacggggtgcagtgctcaggcctgtgaggagtcagattctggctccgaggagttgttactggatgcccagaagcacagtggcctcacccttaaagcagtggaggtggggggtggtaaaaacagggccgatcttgcagggccgttgtgaggattaaaaatacaatgtatgataatgatgcatcaaagtaggttcctcagtcctatcaaatgtgccactctggtgggggacgctgatgatgggggaggctgtgagtggtggggatgggaactccagactctccactgcagcttttttttttttgaaacatagtttcacttttgttgcccaggccagagcgcaagggtgcgatctcagctcactgcaaactccacctcccaggttcaagcaattctcctgcctcagcctcccgagtagctgggattacaggcacctgctaccacccccggctaattttgtatttttagtagagacggggtttctccatgttggtcaggctggtctcgaactcctgacctcaggtgatccacccacctcagcctcccaaaatgctgggattacaggtgtgagccaccacgcccggcctctccactcgaggtttagagggagcatagaactaaaaaaaaaataaatccttttctattttttaatgtatgtgatgagtttggcacaactcctattagcgacaggtcagggttcattcccgtctttcacaaaagccctgcctgtcagcatccacccttcccaagcagtttgtggcagttggacttttcacacgaaatctgtattttgaaggaaatccatgctaggtaataaactgggaggagtcagaatcttgttaagccacattcttcagctttctgcacaatgatcaccagctggcacctccctgcacccccgctccgtgccccacttactgtcccacgttcataaagacaaactctcagccatcccttacgatggcagcgtcatggttgattagcgtgtactgcagcgccaggcacgcttacactcacacacatcgtcatggttgattagtgtgtactgcagcgccatgcacgcttacactcacactgtcatttgcacactctttatcaacaataatagcacttcacaagtagcactgtggttcattataatcaacccgagagagcctgcccttgcccatgaagggtggctcatactgaaattcactcccagagccctactaggggagaggcccaccaggcccttctaggcctccttacctgcagagctcccagagaccccaacctcccagcagaagaagaaaaggggcagagccagaccccagagacagcccatcctagccggccaccgctgctccacagaactgctggctgtctctcgcgggtaccttttcctgcttcctcaaaccagggaggaggggcagcctcctgcccaggtgtgtgaccaggtgatcacaaatgtgcaggctgagggctggcaggttgaggctgtcagcaagctgacccccctgccttccttgcccggtaaacactccactgaaatttgatttgaagatatggaatcactagcttctttttttttttttgagatggagtcttgctctgtcacccaggctggagtgtacagtaatgagatctcagctcaatgaaacctcttcctcccgggatccaacaattctcctgcctcagcctctggagtagctgggattataggcgcgcaccaccacgtcgggctaatttttgtatttttagtagagatggggtttcaccatgttggccaggctagtctcaaactcctgacctcaggtgatctacctacctcagcctcccaaagtgctgggagtacaggcatgagccactgcacccagccaagtgcttttattttcttaagccaattaattagagctcttttatatattttcagtagcaaaacactgtgtacacaacaacacataaatacacagatgtattaggtatgctgaaagaagttcatcttatagattcataaagagcttttttcttacaccttcaaattcttttttactttttttttttttttttttgagacagagtctcactctgttgcccaggctggagtgcaatggcttgatctcgactcactgcaaactctgcctcctggcttcaagtgattctcctgcctcagcttcctgagtagctgggattataggcacctgccaccacatctggctaattttttttgtatttttagtagagacggggtttcaacatgttggccaagatggttttgaactcctgacctcaagagatctttgcggctcagcctcccaaatgctaggattacagacgtgagccaccgtgcccagccacaccttcgaattcttgataacctgttttactactctaagcggttgtcagctaaatagccttgaatttgcattttaaggaaactgaggtgaaaatcgaatagcaaaatttacatcataacgtatggagagaaaaagtctggtgtgctggagggaaattaaaacagatttaattgccaattaaacataaaattatagaaattataaaggccttttaaatatatacacacacacaaagatcctatagcttttacttcagaaatttagccatgaaagctgggcgcggtgactcacgcctgtaatcccagcaccttgggaggccgaggcgggcagatcacctgaggtcaggagttggagaccagcctgacgaacatggagaaaccccatctctactaaaaatacaaaaaattagccaggcatggtggtgcatgcctgtaatcccagctactcgggaggctgaggcaagagaatcacttgaaccagggaagaggagactgtggtgacccaagatcacgccattgcactccagcctgggcaacaagagtgaaactctgcctcaaaaaaaaaaaaagaaaaaaaaaaaagagaaagaaaagaaaaaaagaaatttagccatgaaataaatacaaattcaccagtttacaaacagaaaaactatctgatccaaacagtgttttttatcttaatagaaaaataacagcaaatttaaagcaggcagagaagaaactagagaaaaaagaggactcaggaactctacagtttgcaggtcaacctcagggctcctttttttttaatgtaaatgtgcagaaagaccatattacttccactttacataaactctggcaagtagaggcgccatgaaccctatggagtactcggctgggaggagcaaacgccctttctctttggagctgagaaaactcaatctctcatttacctatgacaacaacagttcagttcctcatgcaaatacatagacaacccaaactgagattcattttgggagaaaaagcaatagagaagaccctttaggatgcatctctgaactagaattaggatccttaaatcacagcttcctagaagagaaaaaaaaaaaaacaaaaaaacagccaagacc

SEQ ID NO: 315982 - DNA, 4001 bp, Homo sapiens
ccagcctcgctctgggagtcatgattcccgtggagactccttcaaccacatctgcagggcagggccgtgtggcggctccttccggcctccacgtcctcacggtgggatgagcactggagcggggttgtgtggccagggtggggtgggggtgctggagggtggggaggtgtagggaggtggtggcagtttcctttgccctcagcctagtcctgaaacatcccgaggtggaagggtccgcttcaccagcatggcttctcttgcagcctttaaacggcactcgccttctgactcactcccaggaagctcctcaaatatgcgcccaagaaatattttccctcggcgactgttcttagcctgctgagaggcagggcaggagctgagactctaaccccagcttgaactctggaccccagactctcccccaaagactcagacacccagaaacacagaataaaacttggtcctgaagccagagggacagcctggaaagtgtggggaagaggacgggggcccccgagggaacatctcccacaggcctggcatccctcccctcccagctctgtacacggaggagcccaaggccaatgccggggctacgagccccaggcaaggccgtgacccaaatggaggcttttaaacccgagctcagaggtaagaagcccacggccagcacctcccggccctctgcgccctggccgcctcctccgcaccaccctcccggccggcctgcccctctcctccttgtcgcttcccttgcttgctgctgtctcccgatcttctcctctctccattcccagggtcctcagtttgtctgcgtctcacctgtctcgtcctctcaccctgcagctttacatgagttttcttccgtctccatcacccagctttcctggcatcccctctacccccagctctgtacacaagggtgtacatctttctccttgactctgttcctcttgctctggctctgcctgtctttctctctgcgagtaagcctgggctctcaccatggatccttccagacatcgccgggctgctctctggccctctgttctcttttctctctctttcgagcattctccctctgtctttcccctcagatcttgtcccgtatctgccagttcatgcctcctcttccccacttttctcctcttcttattttttattttattttatatttatttatttatttatttatttatttatttatttatttattttgagacagagtctcgctctctctcccaggctggagtgcagtggcgcgatcttggctcactgcaacctccacctcccaggttcaagtgattctcctgcctcagactcctgagtagctggaattacaggtggggcccaccacgaccggctaatttttgtatatttagtagagacggggtttcaccatgtcggccaggctggtctcgaactcctgacctcaggtgatctcctgccttggcctccgaaagtgctgggattacaggcatgagccaccgcgcacggcctccactcttctttctctctccctcttctcttcctcttctttccctctctgggtctctctccaccttccccccatgttgtcccattcatctctttctcctttccctctccctctttttctctcccttctcttcctcttcgctgtctccctttcccctattctctctctctctctctctgtctccccggacctctttctctgacagctcccacctcccccaagtgctccccgcagccagcctcatctgctgtctccatcacttacctgggaccacatgcggaaggaggcagagacacaggcagctcagggacacccaggggaccctcctccagcgtgcccccttcatggctgcggcaaaagtccccctggctccctggggaagctccacggcccagcagctgcagtgtgaggagcagacgtgagcccgtcccctcaggcggctggcccgaaccaagtgcgtttctccgaaggggccagggaacctgggaagaggacaaaagagggcggggccccacgctaatcacccttttctctcctcagccccaccccactaccccaccaggaaagaaaacaccgatacacccgttgctctgcttctcatcagcctgagctgagtggcgggagggatgggaggagacatgggggaatgggaacaggtcacactggaaatgggtgggccaccctcctagccgggttcctgggtcctctcctccctccccaggggctgcccctgtcccaccagagctttgggctgctgggaagaatggggaagaaagggccccagagggagcgaccttggggctgtatgaatgggggaaagagagtgagacttaagcagaccccaaggaattgggaagcggggaaccatgtgggtgaggggcaggaacagaaatgcactgtatgccgtcttttggaaaggggtggtgtgcttggaatatctgctcagtgcaggcgcgtggcagaccccagacgcgtggcagaccccagacgcgtggcagaccccagacgcgtggcagaacctcagtgcagatgcgtggcagaccccagacgcacggcagatcccagacacatggcagaccccagacccatggcagactccagacgcgtggcagaccccagacgcgtggcagactccagacgcatggcagaacctcagtgcagactcgtggcagaacctcagtgcagacgcatggcagaccccagatgcgtggcagaccctcaccagatggtggacttcttctttccagggcagggagctggagccagggtgcagggagccagggacagtctgggagactggcctgagggagctggcatgggcagtgggttgaaggcagaacctcggtaggaggaagcgactgtaacctgtgaggaggtggagctgctcctggagacctgggggctctgctcaccccagttccacctcttggaactcacaggcacaagcgaggagggaaagggaccccaagtagggttgtaaagacgaagagggcagttggtgtagctctctgcaaaggaaaacggggatacctccgctcccctctttgccacagtgtgaatctctgcttctgattcctcaagacttgattcccgaatgtggggtgtctgtggggtgactcgtcccagagcagggaccttcgatgctcagacactgtggggcccaggacaaggactcagggtttctgcattcccaagcagagccagccttgtccagcaaggagtaggcaaccgacgctgtggcgctgtctccgagggtcacggaggccctgtgaccacttgcttctagaagctgaaagtctgttcatggccccaggccaaagcctgggccacgccataataatgcggataccgtggggaagtggcgtggtcccccaacagtccctccagctctgggtggacgagctgaccctgttctttcctggaggtaagaaaatcataaaggtaaagagtcatgtggagcatcctgtgggcgcctggacggggcagcaggagggacctactgcagggaattcgcagacaccaaggcccagcttggccttcgtgatcattttgcacttttttttttttttgagatggagtcttgctctgtcgcccaggctggagtgcagtggcaccatctcagctcactgcaagctccgcctcccgggttcacgccattcccctgcctcagcctccctagtagctgggactacaggcacctgccaccacgcccggctaattttttttgtatttttagtagggacgaggtttcaccatgttggccaggttggtctcgaacccctgaactcagatgatccgcccgccttggcctcccaaagtgctgggattacaggcgtgagccactgcacccggcccgtggtcatttttctgtcagctcttgctcgtgggtccccccattacctttccacaggttttgtttggtgacgctttcaggacaacagttttccatctctagaggagaaaggagcatccaggtgagaccaaactaagcgctggacatctt

SEQ ID NO: 315983 - DNA, 4001 bp, Homo sapiens
ccagagacagcaggggagaggaagcgttctggcataaaaaagagttcctgggaaaggctcctgtttccgagcattcgggcagcaaggggagtggcgcacacttctcagccgaagacactcttggtgggtccggctttgggcttctcaaagacagtctcggtacctgtgcgggtgcggctgaacaccgacggggcggccgagccagcttgctctgtgggaggaggtaaagtcaggggccagcctagcttcctgggagggaagatcccttacgatgggagcacctttcttgaacccaggaatactggattctcagaaaaggatccttgaccacctccccccaccactgacacacacctgcacccccatccccagccccagatggcatgaggacactcaccacactctcgcatgacctggtaggtcttggacttgatttcctggttcttggtcaggtttcctcgggcccccttcaggtcctcgtccttcacaggggggcgcttcttcttgataggggcttcctgagcaccagccttggagatccaagagcctcatcttactacctgaagcctcggtagaaaggcacacctacctctgtgccttggccaagacccctcttctctgctcattaaacccaagcctattcaaggctctactcctcttccagagaaagccttcccaactatactccacctgctgcaggtctcccagctgtcttggtctgacttgcccatgtgcctttcccctatagcctgggagctcttgggagcagtggctgctgcagcctcacactggcgtgtctggctacctggtcaagctcaggactgggcacagtggggaacagcgaaggggactagctctgaggttgggcaatactagggaatttggttagttccaaaacctgttcactgggtggcaagcggttcctcaaggattgcccccttccagaaaagcgccactatttactttgtgtctttggggctggaaatggggtagaagggccagatgcccacagaattacagtccaaaatggccacccacccacagagcaggcagcaaggacagtcctctctcttggcaggctggtctgtccctccagggtgggggacacccaggctcggtgtttaccctacccctcaaccccaggcgcctgtgagtctgagacctgcctgtgcttgggtgcaggtgcaggtatttcctcgctcagcctgggccaggctcctcagagcaacacactatacccctgtacagcgatgcatccagctgtgtccctccagcctcatgtgcacacacatacagcttcatgcatataccatacacagagacagacagacctatgtgtgtggccacacacagagtgcatggctgccgggcccatagctacaaatgcacaaagctctacacactgagctatatcggcagcacacacacagatgcgcacacacacacacacacacacaggcacatgcaaagatctatctaggccccccccacccccaacatttctctccactcctcctaacaaaccgtggaataccaccaaagccacatagaagaggggttcttcagggggtcctccctgagcccccatctcccaagggctgcagagcctccagttcatgcttggggctcagatcaagacacagctgccagagccgaaagtgtccaggactccacctccactccctctggcatcaacacagcccttgctgggtcctcctacctgggacatggtgggtattgtgtaagcgctgggtctctgaaggcgcctctctggcaggcagcagctgctggaaaagatctgagtggagcccagccttctgaaacttatatagcctgcttgcttgtcccgcagagtcactgcccctcctctgacaggctccctgatgattcaggtccgcagggtcgctggcttcagagtttattctcggagatgagaggggctcccagtactgctgcctgggggctgcagccctgatgaaagcagatggctgcagagaccctttgccctctgggacagctgcttgattcgccggggggaggtgctggcactgacggacatgctttgtgtttacggatttgggtcctggaatgtgtgaccatctgaattgttcctctgcaagggttcatcccagtgtgtggggtgggtgtggggtgtccctgagggaatggagggccctagctgggttggactgctccaagcttgtttttcttcctcttccatcccttcccctggattccagtggacagattttccatccctgcatggtggcagagcaggagcttcccgtgtctgctgcgtctgattatggcaagctcactgggcccttgcagcaaactcagagaggggctaccacaggttcacaggtggagaaagtgaggtaaagggagcctggggagttgctcatgtttttgctgatgtccttgtcctctatcctattccaactgcaagttcagagaggggggagtaaggggtctggaaaggaccagggaggaaaccatgctcgatggtgacagcactgatgagacagaggtgtgaaacaggctcaggctcaggcctgagcctactcacctccgagtaggtgaggccaccgcaggggggctggcctgcaggacagtttcagttgctcaaagagggtgggggagagtgaagcccactccagatactgagctgcagagacaagaacaggcccaagggctccccggaaggtcacttagctctcctttgctagaagctcctaacacacccctccttgcaaggggaagatcccccagggcacaggccaggagcctacgcctggggtgggtatggggaataggtgtgcataggtcgcagccctcccagtaacacacatatctaagtccttttcagtttatgatggagattatttttatcctcgaaggctccaggcagatggaactcaaccaggcactgacatttggttatcccaaatgccactccattgctgtcatactttgaaccccaccccaatccccctcctgacaccctggctccaggaggccaatgagaggactgccaggcttgatctgagacaagtgctgacatgaggaatgcccaggatgtggcacatgggccaagaggcagctgagggcaggccaggccttgtgggggccttccactagttccaggggtgcccctgcagatggcacctgatgctgcggctctgcccagggacctccttccagccccgcagcctcagggacaaggatgtgggctactcactgcttatactctacctccccaacacgatgtcctcctcagagacggacttgctttaattctcactagcgaagaagtggagatggacatggcaagagcatgtttggcttttcactgggcagttgctggctcccactcctgccatgaggcttcgtaaggttccttctcactctggtccctggggagaaccttctaattcacaggggaatcttttttgaccctgccaagctgtttcaactccagagaacccacaaccacaaccacaaatgtgatggtttctttttaaaaaaaactgtaataagatgccaaactttattgtaaaccattttacaatgtaagtacatcatcttctctttcatttcaaaaaaacgtttccatgaatcctaccaccaccgattaagcacccccactggatggctgctgaagtgggccatggttttccttgcataggtctgacttctaacaaacttcaggaaaagaaaaatcaaatttaaaacaacccaaccaaccaaccaccaaccaacccaggagctcaaggtgcttgtggcaagtcagaccataagtcccttaccaaaagccaagcccctcagagctgctaatgtttcacgaagtaaaacagagagctctgcactcttagctgcaagcgtgtgaaacttctaaaagccagccccacattctacaaggcagctgctctggccagtgggaagctccttgcactgcctatcttagcctggctgcgaaaaggccagtgaactgcaagggc

SEQ ID NO: 315984 - DNA, 4001 bp, Homo sapiens
gtctgttccagttgccggatcatctcctgcacaaactggatgtcgctggggcaatagcagatgaaggcatcgaaacgctcaggcatatgccctgggtgcagagcacaagggtggtggtcagagctccatgggaaggcttgggagggatccagccaagagtcccctgcctaggcaaccctgggccctgcacccttcccaagatgatactcctcagagaaagtgccctttccaggagaggaaagatgagtacctcaggggctaagctctggattaaccacgagacagacattatttcatgagcatctcacagcaatccagaggtaggactattatctccatttcttaggtgaggaaactgaggctcagaaagattaagtgacttgcccaaggtctcacagcccatctgcttcaaacacccatgctcttaacaccacaatgtcctattccacctgtcccatgggaacagtattggacccttacccagggggtcatcaagtgtggtgatgcccgccagctctgctgtccgtgggacactgctgtctacagcggccacctgtaaaggcttctcagcctcctcctgctgctgcttcaagatatacttttggcaatcctcctctgtggggaagagacagagtaaagcagcctccctgggagtgcctacctctttacccacagtcaggatccagccgctgtcccacctcctctggctgggttgttctagagggcttccccagttcactggtgccacgcgaagctcaacggctctgagaagttgagctcccactggctctaactgacccaaagggatgtcagtggtgttctggctttctggaaggccatcaaagtcaggtttgtatctctgtcccttcctagggatcctaagaatggtaccaaggtaggtctgcttcttctgggatccagggcagatgtgagcaaggggctgggcatgccagaaaggctcaggagacccactggttatggtgcagtgattccaactcagcaaggtgtgcctgtctgtgggcggctgtatccaacgcctatgcatgtatattatgtaagtgccagtgagtagaaagaagggctgcatttccccaggacttgaggtttctaagacagtccactgtcaatcgccccacctgtcctgttgctctacttgaaacagcccagatgcccccacagaagcctgattctgactcctggccctacctgaaagcctctgcctaagctgcttccttcccatctccgcctatccggacctttctccagtccttcttaataaccgcgaccggttattaagaaggaacgggacccgcatggttctccctctgcaggcttcttcgggcccccgaggcaggaaatggggtctctccatgggagacaggatgctgaggccgcggaaagtcagcctcctcaccccccaggtacgaggccaggaaggggacgtcctcaccaatgctgggtcccagctccagcagcacgtcgtcgcggcccagcttggtaagcagctcgagcagtcggcctacagaggcgccagggcgtccctgccaggcgtccagcagcctgccagtggggtccgcttgtgtctccagttgccggatctccaagtactcaaagtccatctcctccgccagcgcggtccagtcggccgccacctgtgtccgcacgttcaagaacagagacaggcggcgccgcactcgcatgttgagagcagccaggggaagggaggatgtggaggagaccggggccgcagaccccgcgccgggacctcctgcagccatggcgggcggtcctggagcctcagcgcggtcgggtcgcattgtctgccagcgcttcctctttctcctgcggcacccgccccgccccgccggctttcgctttccgagaagcgccgccctgccctacaatctggagccccgagcaaaagtgcggaggcgggggtgcccacctctacccttgaggtctcgaggcgggtgatgtggggggcgtaagaagtaggaatctgccttttgagatctggagaggtccacggcaccgccctcgagggtctggtgatggtgctagtaggttggcggcggagtgaggacgaccctccttcgggggttgtaggaaacgggccttgctttttgggatctggtggagccacagttcttccacggaggaatctgaggggttcatacggtcctgccctcgaggatggcgaggaggggacaagtgggaaggcaccagctctgccctccactgtctctggggaacacgcaatcctgccagtaggggtatgggaagacccctgctgtgctccccgaggtgggagtgggaaacggacagctgccttctggagcctgaggcatgccgtggccctgccctcgaaatggttggggacgtcatgacactaggttggggagcacaaggcaccctgtcctttggtgtctgtggaaagcccagcactactctccagggtctcaggtgaagacatggccctgctattgggagtcaagggggcacgtggccttgccctttaggtttagggacacagtcctgacctggggagccctggttcattcatttactcattcgacaagtacttattgatcatctactaagtgtcaagggtgtcgcaggctccccggatacatggtacctctctgccttggtggagaccccagcctagcacgggaaatgggcactaataaaatcattccaattgggtgtaaaactggtaaaagtgtgaaatgttcattctccagttagagagcttgtcacaccccgcatgtctgtaaaatctgttctcccggccagcccggaagcccaaattccctgtcttctcgaaagaatgggaaagcccaaccacgtcggagcaggactcgggcgtctcggaagtatttaggtcccccagctcgggtactgggaccggagggatagcagagcctcctaggaagtgggtagaggaattagagcctcggcttccatctccagcccccaagcagtaagcggtcctggctgcccagccttccgtttggctgcgggcaggagacagggatttgggggtcaggtctcgggtttggctacaaaaggtggaaagacttccggtctgcatttctgggcggggattcgtaaagatacaccttctggttggctgcggtaggccaaggtaggcggggcattgagtggaaagctcggctgggcggtgcctgtgggccctcctatagagggcttggtaggcggtggcggggaggggcgggttcccaggccgactctccttgtggttggctgaggctggaggtggacgggacttttggagggtcgctcgcgtctgttcgcagagctgtgggcggagttgaggccttggaggctgagatgtggttctgcgcgtgtgcggacggctgtctgttaactccgcggtcagttcccggactggtggctggtctgcagggttgacctgcgcaatgcagaggctgcaggtagtgctgggccacctgaggggtccggccgattccggctggatgccgcaggccgcgccttgcctgagcggtgccccgcaggcctcggccgcggacgtggtggtggtgcacgggcggcgcacggccatctgccgggcgggccgcggcggcttcaaggtgaggcccgagggtctgggcgccgagtgtgggaagacgccggcgcgggctggggtccggttcgtatgtttggttatcctggacgccggaggcagctccgcacccagctgtggtcgctttgtctccctggggtgggcatgggggagtgggggtcactgcggctgctctttctgctgcaggacaccacccccgacgagcttctctcggcagtcatgaccgcggttctcaaggacgtgaatctgaggccggaacagctgggggacatctgtgtcggtgagcgaaccactcaggccctgcgctgggccttccccgttcttccgttcgtccagagctctcctcacctccccgccccgaattttcactgggggaacctccatggccttgacc

SEQ ID NO: 315985 - DNA, 4001 bp, Homo sapiens
attaacctttctctggtgacccagacagacactggcattccacagcccttctccatagtccaggagaggcaaatcttgctcctcccatgcacttttcaggtctgcctaaaaacatccttcaccacctctcattgtaaaggactctcagctatagacagttacatgttttatgagacaatttatgttattctaatagagtttaattatttttttaaaaaaatcatctcctatcttacccctaagaagttatttgcaatgcatttccataactcctattttgtgttgaccatgtctctgaatttctcagtatctacactagtcagatcaattttaggtttgaaaaatatgtcaccatagaaaaaatcttatggcttatcaaggagcttagaggttaagagtgggctctgaagtcaggctgcctgagtgtgaatcataactctgttcttgtctaactaggtgatgctgagcaattctttattctctctgggctatagttttctcatctataatatgccttcatcttaatctgttttgtgctgctatagcaaaaccccagactgaataatttataaaaacagaaatttatttcttacagttttggaaactgggaagttcaaggttgaggagtctgtatctggtgagggacttcttgcataattatcccttggtaggggactgagaaaaaggtggatggggaactcaactttttgtaagaacccacttccttataacagtattaatccgttaatgagggtgaagccctcatgacctaatcgcctcttaatactgtaacaatggcaattaaatttcaacatgagttttgaaggggatgcatattcaaaccataccagtctacctcataaggttttcattttaaatacaataatatctgtaaaatattcaaaaaagcacccagaacaggttatttaataaatagaaaaaaataattattgcaaaattactgtgattatattgggggcatatataagtagaatttgattcagtttcttaataataaagaatggccatatcattggaagactaataggcagcataaggtatgatggatttctttgaatcttaaacttcttgcaatagtcttcttggtaaaacagttgagattacagacacactaaaatctggatgatggttgggtttttctgcactctgccatgggttttaaatagtttgataaggaattttgtctttaaaagccatgacctaatttaggtgtatgaacatgtatctcaattcaatccaaaagcagtaaactcccactgagtgtgcagaaagatgatctaagttcttgtgtttacacagaactctatgtgctgggtactattattgtcttctatttgtagataaggaattgaggcttggaaaagagagacgactacacaaggtcacagtgctaattaatactcagcagaaccagtactccaactcatacagtctgacactatagaccatgctcttaactattctgactttttgccttggggttggtcccagagaaaactactctcagtaaataattagaattcaggcaactctggtatcagcaaaaatagagaaggtgacacgtcatactccatcccactaagtacagagaggaaattcagtggaaaatttcagcaccatgacccttggtgtctgagaaaagggaagtgagaagttgtgtgttggggactggacacaagagcacacagaatgaaatcacatgaagtgttttaccatctggatttttaaaaagcagaccggctacatttatgtcatataatgatcactcagaaattacatcatagcctatttttatactatcatgtagtaattggtgtgctgctgattaagaccatcaagaataaaattctaggctgctactgtcaggctattcagcattctgttagacaaattaaaacatatgttgggagtccactcaccatgatctttttggtaagatgaggtaaatacaattaaaatgatcatatgaagtagaaatgacctaaattgaggatccgatgagagaatgatagccaggaaggcaacattatgttgacagcatgggaaatctgtgaataaagaggtggaaacatacaagatatatttagtcattgtgcttgggacagggaaataatttcaaaattcagactgagagcacattgtggaaggctttggctatctcgctaaggagtttagattttattctatatttcaaaacattcttttaaggcaaaacacattttttcaaacaatctccaacataggtctcttgactgagacattttcttccaacaaggtggggaaacagggaaaagatttagccccctacctaaaacaacttaagaaaaaagcacagaacatatgatacaatgggtttaaataattgattaataaacacaaaggacactgatccctgaaagaggggagcaaacaaggtgagctccatgactgcctcagcttgaagagtttccaagacataacacagggagttttcagaccatgaccagcaacctctttgagttaaggagatgaagctagcagtctgtagtggctgagatggctagagtttatagagcagagtactggataggagagagctgctcagagagagctctggggaactgcagaggatccttatcaagtcatcagtagtgtagtgatctgtgcatgtgtatgaggaaaggaccacccaaataaattagaagaaaagtccttggagccctttagaaatagtttttgttcctgcaagccagagtggaaaacttcatacttcatggggaatcaggaagtgtattcacaagggtttcatgtcaatagtggagattagccgtaaactaaacactgctcttgtcctttctagcaaaacttaaaaatccaaatggaaagaatcagtttctaagtaacttaactgcaactcaaaacaaagctcaaagatatctataggaatacaaatatatctaccacctaacaagctagaattcacaatgtctggcatctaattaaaaattaccaggcagaaaaggctatacactgtttgacaattgtatgacattcttgaaaaggcaaaacatggagacagtgaaaatatcagtgatttccagggagttgtgaagagggagagataaataggtggagcataggggattttttagggcagtgaaacttttctgagtgacactatagtggtgaatatatttgtccagacccataggatgtacaataccaagagtgaaccctaatgtgaattatggactttgagtaataataatgtgtcaacgtaggttcatcaattataagatgtgtactctggtggggatgttgataatgggtgaggctatgcatgtgtagggacaggggatatatggaaaatctctgtattttcctctcaattttgctgtgaacctaaaactgctctaaaaatacttaaaaattaccacacattcaaagaagcagaaaaatacagcttaaatgagaagaaaagtccaatcaaaatggacctagaaatgatatagatgatggaatgagtagataaaaacattacaatagttattataactgtatttaatatattcaagaaaccataggaaatattgaatacaataagtagagcatggaatagctgttctggttcaagaagtgttgacttcaagatgagcgctatcatggggttcagtgaagcacaatttgagaattattgctgtaagttattggaaactattgaaggcttttcagcaaaatttggcttaaaactagtggtattttacaaagactgaatgggtagcaggatgcaggacagaactcatgaatgagggagaatgagaccaaagatttcaggcaggtggtaaccataatacaacagagaaatgagaaacctaaaaccagtgggaatacaaagaaagatattattatttttaaaattaatgtgtatgataacatgacagatcccagagaagccggtgggaccccagggagagttctctttcctttgagaagggcagggt

SEQ ID NO: 315986 - DNA, 4001 bp, Homo sapiens
tgtgcatgtttgtgtgtgagcatgtgtctacatacgtctgccctcacagagccccctaagccctaaagaccaggcagtcactcaccagccccactatacctatttctcacacaccctgtccgtaggtccctgggaagctcccacaccccaggacagcacagggccagggcagtgctgctgagtgtttgctgaagtcacattggggccaccttgattgacgtcaatcaagaggcctcccgggatccagtgtccccctcctcaccggataccaggtctatttttatcactgcagtcactcgccccaaggtcaaggtcacacaagggaaaggaggttgggggaggggcatgactggcgtctctctcatggctgctgccacggagccccaccaatctccacagtgcatgccggcacagagggacaccctgttcagggccaccctaccatgactgtccctcctggcttctggcttgacccagtgttgggaagaacaggttgtcattcctggctccctgagagctctctccaccaggaagcctactgagattagggtctctgggctcctggcaaaggctccctgccctttacctgcaacctggggatgggggaagagggcgcatgaggggtctcattgtccccacctctcagaaggaagtctgtgccaacctaaggcctggcgagaaaggacaatgccactatgggccgtggctgtggtcacagcctcaccatgaggcctgcagaatgcaagcctgggacctgggtggccaactccaggtgcatatactctgaatggttcccagcagccctgcaagaggggacttgctgttctgtttcacagctgaggaaaccacgcctcagagcagcgaagaacttggcaactaaaatggagcagagttgggatttgaacccttgcctcaaaggacatggtaggtgtctctgggaagggctcatgaacaggaggcaagacttcaccgatggaatgtaggtcctgctgggcatgcagggatggcgagggttccacagggctcctgaggaggcagccagggcagcagtggtcccagccaagaacagggagcaggcaggacacagggtacgtgctgctatgcagataccacaggtgggagtcatggctccctccaagtttagactctgagaaagactttgcagttggggaagggctcctggggccactggtcatagctccatgaccagcttcctgcacagctttcagaatgtccccagccagctgatgcttcaagttccctacctaaaagctgaggcctggaagtgctctaccagctctgggctcggtgatttgaacgagacccagcctggacaggggccctgcttcttcttactccctatctcatccacgctgggagcgtgtatggacttgggacccctcagctgaacaaggaaaatccctgcctggctccagctgactccaggattccccaaggatgagaagtccaggaagaagggcaagggagagtccatttccaaaaccactaaaaagacagtccagactcaaaccccagtctagactccaccttagttctcagcagcaccagaggagtcctgcagaacgtctgaccaccatccctcctgctgcagcccttctgatgcctgaagcagtcagggcttgtctgacctctgcacagaagcttccagcgtcagctcagtgctcacctccagagcctgacctgcctcttgctaggtccactctgggatccactcacttgccctgctcctattgccaccacccagcttccatacccaccttgatcttggaagcatcaaactcgacctccttagggcgctcaggctcagggggaggtgcgggagctggagctgccttgggggctgccttggcatcatccttcttgggctctggctttttgggggccattgggggctgtaagtacagagagggatgtggagagaagaatgcagaaagcagggtaggtgagccgcctcacccaggcctttatcctgcccggatacctcatgaccccagccccacccctgcagtgcacaatagggacagggccataaaaggatatggctaggcttaggggctattttggggcctggggagggcattgttcaggctcaggaatgggtagtggaggagggatctccattcctcccaatcacctgttgggaagggggagggagagagggggacaaaggccactgcttaacacacacatacacacatacacacacactcatctgcacacccgcacatacccacacagggccctgctgcctctctgcaggtccgtaagttgaagaggtgaagaagggtggaccaagtacatgctacgtgttgtgttggggccagaaggactgggatgatctaagggcacctctgaacttaagctctccaaagtcccctgtgtctgtgtctgtgtctatgaccgtgtccatgtgggggaaggcggaagtcagcatgtgtctgtgtgtgttgtctgtgtctgtgtcggggtgtctatgtgtctgtgggtctctctgtgtctgtgtttgtgtggaggggggtctgtgtacacctgtgtgtattgtctgggtgcctccgtggtggggggctctgtgcgtgcctatgtgtgctccgtatctgtgtctatgtaagggatggcccgggtgtctgcatttgtctctgtgggtctgggtctttatgtgtgcgtggtgtgtctatgtgtctatgtgagtgtgtctgcgggtgttgcttctgtgtgtttatgtctgggtgtttacatgtgtctgtatgtgagtgtctggtcatggcaggcagctgtagccctggctatgggtccaagggtctccaggaacccccacaaagggcaagagaaaggatgctgctccctctagggcagtcgccccaggccagttcagcagcctccctcttcagcccctgctggcccagggaccagtttctcagctttcacccctagattcctacttcccctctctacaggccccagggatgcacatttccctacacaccccaggcctggctccccactgcaccctctgcccagagtgccctcgccccctctgcctgacatattcaaggcttggctctactggccctcttccagaaagctctctccaatgctattccactgccacatgttgccctctgccgacccttttggcaggggctctgagagggtctgcctctctgaggaaccccaagctgccaagcagggtctgccccagtgcagtgatgctcattccctgttcctaccactcagtgcccacccccagtgcccatcctgcagtgcccggcccccagggtccatcccaagcccagccttcagcagatgacagtgacagagtacagcctgacgggactgccacttggggaggtgggagggctgaggtggcacaaggctcttcccgcatggggacgccaacagtggggacatcttgtaaacacattgggctctgttccttgcccagcatctgtgcctggggggtgggaaggaggtgctcctggttacttttaagtgcctggagcctttgatagaaacttcaaagccagggatttccctggtgtggcaaggggctaagcctgaggctgagaggtgctgtggggcccagggcctctacctggcacgccctgctgtcttcctactgggcccagtccctctcatcctgtcactccgcctcacagggagggacagcagtccagggctggggccagcccgctcctgactggaacacgttctgcctctcatctggagggcagaacacccacatctggaaatctgacaacatccgggactggcgggggggcaagtttttcacttttcttccaaatgtttggcaacagtattgagaaagaaaggggtggggggatggtcagtggagacgagccagaaataccacaagaggagaagacagccagagggccacacagaggggccccggggaggccccaccacccaggcctgccgaccctcaggacaacgggctctggaagtcacacgggagcccc

SEQ ID NO: 315987 - DNA, 4001 bp, Homo sapiens
tactcaggaggctgaggtggaggattccttgagcctggtaggtcaaggttgcagtgagctgagatcacgccactgtactccagcctgggcaacagagccagaccctgtctcaaaataaaaaataaaaataaaaataagacaaggaaacatctacaatgctgcagctaccctcctcctcagctagccagttattacacaaaagaaactgaacatgggagataaaccagcataaatgcttccccactgtggggtggttctccaagctcatgcttagctgcaaatgaggtccagcatcctttgtatcatcagtgaacaatgagacagacctgcacatcttggcaaaaaaagctcttgtgcatgtccccagagtacccgctacccaatccagcatccagagtccaaccactccggacccaggaccaactgctcaggttcctcccagacccaaggctcctggcccactgagagtgggagaaaaaggggtaacctcactctgggcaggaaggaaaattccatgctgccctagagcactgtggtgccagcagcatcatcctccacagtcccacagtgtgcaggcggggaagagactaagagaatcacggaagagagaaggaggtcaagaatttaagagaaaagaaaacagttctattagaaccctaaatgccttgtaggaacctagtaaagtcaccagatgcacctacacttctcccagagacttgcattgttgattcctgattctttgaagtgtgggcggggttccccaaatggtcctcctaagcccaccatctggaaataatttattgataagtgcattttgacaaaaagtattccattcaggtggagaagaacacagcctctcttggaagggggatgcagctccagggcaggctctcaaaggctgtggggtgggcgggtcattgcatatactctggtctttgcacttggggagaggagggatggtaaaaaccaacggcctgaggtctggcatcatgcccactgcccaggtgtttccctacacccacccagctccctgaatcacaacagctaattttactccctctagactctagtagagctgggtcttctccttctggctacgaaatagaaagtgccccgcaccccaacacacacaccccaatctaaaaaaaatatatatccttgaaaccatttccccatcagcccatcttcacatctgcaatgccactcctagaaattcagtcctttgggtcttgaagggttttagttccataagttccagggaggggtctacctcaaccattgacaactcacatctcctgagaagtttatccaaaactttccaactgcaatcatcggcgaacaaggtccctcaacaatgggaccccagttaacgcgaaggaggcagagcgaggtaaggagcttaaatgaggagtatggagtaggaacaagtctgcaaagcccgcgccccagcttcgcctgggatggccaggtctggcactcgcgggccgccttccccgccctaccttcccggaatcacatttgggctggaaggaccttcacgtggcacccccttcccagaggccgtcaccgagtcctctagcgagggtctgggagctgggagaagggtccgcttctcctccgcccctcaaatcaaaggcacccccttcggatgattcctagaaaggcaatcgcatcagtgtccccaagcacttcatctccccaaaagaaaactcgtgcagcctggcgtcactggggtcgtctccttacgcccctgactcctcgccgcaccccggggcccctctccattaggggagtcgggaggcacagacggtgggggtcccagcccccacccagaactcccaccctcggagccttgacttccagggcccgcgcctggacaaaagcatggggcgggctcactcacccgcgcggcgaaggcggcccgggagccggggcaccggcgctcggcggggcgccccggccgcaggcgcacagcgcgggctccgagctcgctcagcgccctgctgccgaccgggcggcgcggggagcccgcgaggcgcgtccgggactgggcagggcggggcggggcggggcggggcgggggtgagcgaaccggcgagagagagagcaagtgggagagcggagagcggacgcgcgctgaggagagcgagtgagagcgcggcgctacggggtcaggactcaaaccacccgctccagcccccatgcactgatttgcatgacatttgcatagcgctcggggagtggacctgctgcccttcccgccacgcccacccgccttctgcctcggagtccggagcggagaatccgcagccaaacctagcgccagacccgggcccccctcgcacttatcctgcaccgccccagttaactcctcgcaggcggcggtcagcgggctggtactgtcttggtgcgtgtcttagtcctacactgggagacctaggccttaggtcggggtctgatgctagcttcgtgagcgtgcatgagacactggctgcctctgggcctcagttttctaatctgtaaaatgaagatgtcagcggaaccatggggctaaagttttagtgctggaaggttgtctatgtagtttttttcagacatcctccagtggtgcaactcagccccatggttcctctgacatcctccctttgtgtgtgttaagaatctctcattggtttggaagatacctacaaagttctttaaattaaaaaaggggaaaggggaggggggggaggggagggggaggaggtgtttctggttttggcttgctttatatttagtttgcacccaatatgaaatattttatagcttctgatctcttcacttggaccttcttttgttttttttaaaaaaactgtttactgcaggttaaggagtgtttttaaaaattttttaattgtaaaataaaacataaatacagaaaaccacaaaaaacaaatatatagatatatagactagtgaattattataaagggaacatccttgtaatcaccacctggatcaagaaatagaactctgccagccaccccaggagcctctccatgtgccctacctcaatgacaaccccctttctccctcctcccaaaagtaaccactaacctgactttcatgtagtcacttctgctgcttttgtttttcttggtatcttccaagggtgcaccttacccctccccccactctttttttttttaatttgatttgccttttcagtcttttccttacaattatttgttaaataacttaagcccttgatctgtgaggttttccagagtctgggggttgcacattcatgaggcaattcagcatgtttctctgtcctctgtattgacagcaagttggcagctgatccagggtcttcctcagactgaagtttgatgtcttttgtaagattatagatggttgtgtgttcttttcttcaagaggtacatgatcatgatgtctggtgtttgctcttttttgaggttaacagccgtcgatgctcaattcctagattcattaattaattgaagtttgcaaaatcatggtattctaataattttgttttcatttattagttcataagtggataaggagatgcttcctctcatctactatttgattaccctgagataggaaaggcacgatgaatacctgcttttttttaaaaaaattacccagttttcaagttaaggaattgattctctgtcattcttagatttctttaatatcattataaattcatgaatttaaatatatttgataggtttccatctacgatattagagctcaaattgtcccatctttggccagtaggagcttcttcaatatggctcctggctccttttgataagattctagtagtctttttttttttctctctctctctctctcactagtgtgcaaagagcttcaaagaccctagaagtctttgatagcttccttgctatctgatatgacaagatgttccaggcacatctgtacatttgctgcctcaaacctggaatcagccatttctccaagaagct

SEQ ID NO: 315988 - DNA, 4001 bp, Homo sapiens
ctaaatcgcgaatggtcttagagaaatagggttttacatgaggcttttcctcagcaacagcctcaaggaaagcttgggacacatcttctagaagacagagaagaagaccaggtcatttcttcactcgttgttctcgcctcgcctctagcttaaagaaactaacttttaaaaaagttgctatgatttagcaaagaaggcagctttgagaactgaatcataagcacgcctttctcctggggacaggttggcctgctgccaaatggtttttggcagaagaaggaactgtgcccaagctgaggaaggatcagactcccccttccccttatgctgacatgttgaaagaggaaatcatctttaaaaaggatttctggctgcatttcatgctgctttaggattcagctgagggtatctgagcagggcaggacctcatcagccttcctagtcttggtatccctctgccttccttctgcagcaggtgttccacctgctttttacaagggaggagtcaggtcctagccgcatctttagcttccagtggctctttctccatgctcacactgccttcatgctgtgtgactgtggaccaggatgtgggattggttcagggaaaagctgtaacttggagggacacctgtatctcctcccttcccttcaggctatgtctgggtcatctgaggaggggcagaagtggctcaggagggaccaggcctgtgtgctgcagtctctatccctggctgtgaggaagctccagagcaggcagttgctggcctcaccaataaccctacctttgctcaccaagggaatctaaactcagattctcacctgtggatacaaaaagcaccaggcagggagggacagagggtgtctctggccaaatgagataagggtctggccctgcatgcacctgaagcaggaaaaggctggggttttcactgaggagatggacgggacagcatctaagatggtgagcaagtaactgaccctattagtctccaggaggagacctgccagtcccagtctgcccagttcaaatgacacgattcagcatcatgaacaatgccaaagaatgtggaccatatgagttaatttttatttaaaacaaaaccacaaagatggtagaaaatagaatattttataaatcttacacaactacatgtaattttaatgttatttttgcctattaatatagaatatcacttttgccataagaacaaaagaagattttaatacaatctttgttaattttaacacaaaatatatgaaaaagcatagctgaggtcatctagttctattagacaaataacaactttccctccgaaaatggttaagcttaaagttaaacgattaagaataattattagacttagtaattgtcagggcaacccaaaattacttctgaatttatccttgcagggaatattaaaataaaaaaaaaaagaacaaaaccaaccaaaacctcaaaatgcccctttgttccccagccctttctttctcaccagctggctggagaaactcctccttaccttcagattctagtttttctgcattgagcgggctggttggtgaccctgttgaggatttcctgccactgagccctgagatcattgccatagaggacagtcttccaatggctctcacagcattgcccgttttctggaaaatagacacgagggttggactcaggcgttgtccctggttccagctgggtagtgcgaggggctgcagggagtagagcccagccccagagaagcagctgttccctggaacaaggacctcctgagagccgaggttctgccagaggagcgaacccaaccttgctctgctcagcactgtcagtgtgtcagaagatgttcagagaatggaatggggcctggaactgatgtgtgcgttaatgtgactaaacaaggtcaacatgagacaaaaacccttttcatacagtgcttcaactcccataaaagggatggtttatataaagcaactgcaggctgagacagctccaaagacttattgctgactgggcctagcggggctatttctcgtaaaacaatgccagtgatgtgattataattggccaagagaatagttactacagatcccacaagtcctgatgcaaaaataatcataataataataacacagcatcctgttgaccttgggcaagtcacttaaccactctgagcttcagtctccttctctaggagggggctggacaagatgatctccaaggtcccatttagctctgtttataattcagagacttaaaagattttgagaaacactctggctggcccctgcacaagtctatgatgcagtgaagctctggagaggagctcttccttggtgtgcattcaggcaccaaaaagaagcattgaagaaataaaaggcaacggcactttgcttctcagtgactagacttgggagaggaaagaatttctgctgaaaaggatcagaacttgagatgtaatttatttacattgcgaaaattctaccaagcataggatccctaataatgtacaattgtgtcttattgtttcttatctttcagtaagtttttcaccttttttctaaggttaacaggaatgactaagataagaaaactaaggcacaaccaagtctttccacccctgcacccaaagcatcttttttaggcatcgaaaagctgtgcatctagacaacagatgtcaccacagactggctacttgtcctccctgagagagggaggaaacagcctcttcataggcaaatggcttgtactcgttgcatctcaaactctgccggcaaagccattttcctcctcagttcacttcacatgctcaagtacttcagtaaagcctcacaatttaggactagttggaaagccagtaagcttcagtaaaaagactgatcattttgaaagtgaataacttctgggtgctaaggaaacatacagaaaattgtgtgcgtgtgtgtatggttaaagaggagacctactgcagtgagcgggatgaccttactgtcatgcctcctgccatccttgctgcagactgctctcatgcactttggacagacatttcaccttgctctgtcccctggccatcccttctcacacacatcacactgtatggtgtgggtatgtttctggcctctgccaccacagtgaggctgggtcgctgaacagaatccacgcagccccaggtggaggtgatgaggaggggaagatggtgagagatgaaaactgaacaacttaactgtgcgcagaaccaccgtgtggccctgcggagaatgcctctgcaggctcaggccacgtggcaacctttcatgctcttctgggagatgttactggttcaacctgtttgttgtgctagacaaagtgtagagagagagagacccagctcttcccatgggaggttaccctgccctcaggaacaggtaagaggtggtaccagccatggcagccctccctacgtagtcaatgtcagaccagcctgcttcctaatcaacccgattctcagactcggcccttctctgctctccattccctttatccaacacagattggtttgtcctgggctaggagcctctaaacccagagggttcattcccaacaagggacaggttagttctctaaccctaattgctgggagaccttgtgcaagtcagttcccctctctgggcctcagtagcctgggagcagaagattctaatcttcctgcagttccagacctctacagaacgactctggtttatatccataaatgtgtagcaaggaacacccgccttgagcccatgggctccccaattccagacatcaggattgggactgatgaggactgtcttcacctgtgtggtgtggcgagacgatgtcttttttcttccagattttatttcataacaaaatgactaaaatgaagctatcagaatgaggaaacaaaagagttatagtatttcagaggaagtagtaaatatattaacaaataaatatgtctcacatagggagaacttttctaaaagatggagatatc

SEQ ID NO: 315989 - DNA, 4001 bp, Homo sapiens
ttttttgtttgcagcctggccagcatggtgaaaccctgtctctaccaaaaaatacaaaaattagccaggtgtggtagtgcacacctgtagtcccagttactagggaggctgaggtgggagaatcgcttgaacccgggaggcagaggttgcagtgagccgagattgccccactgcactccagcctgggtgacggtgagcccgtctcaaaaataaaataaaataaattcattgtgtttaatgttcaagtttacataagtgaaatcacaggctttgtttcagtaaataaacgtgtcagaaatcttactgtttattatctgtgcttatgaaaaatattgcctgctcatcctaaatcagtgatactgatttctttataaaaacaaacattgtgtgcataaataggtgaagaatttgagttcagagaatgaatggaaaaaatacaaatctacttttgctgtgaagactactgactagcttttataactgaaaataaaatgtgtactttacctgtcaagatttaaagttcctgtgtatataaactccaacagtttctgaaatccatcagccttcacctgactctgatcaagaaagacattgttctcagaagtgcttctgtagatcgcaccaaaatactcactaaaggaggccagcacattcctatgagctttaaactggaattccccaatcactatggtacagtcacagagaaaacctgcttcccgctgtttgttcagtctctctaaaaggtgctcacagtggtgcgaatactgcattttgatatcagaatggaattttacccttgatctaaaagacaaaaagaaacagtaaatcagtaaccgtaagttctcatcaacgttcagtgagggaagggacagaggacataacttaaacaattttagcccccttgaaaatccttatcaaacatacatggttaagaatgaagggatgagtgcctttctatctttggttaccttgatcaactaacacaatcctttggacacatcaataagtgacggtgaatggcaacacttctaccacctgcaaaaagcacagcaaaacctgacgctttcacatctgttgaaccctcagattttcaagctcagtagacatacttatgttacaaaaaaattttttaaaccactaagacatgatctcttgggacagataggggcagaacagtacgagtttttaaaaactgctctcaagtcaccaaaacctgttagtttccccagtgcagtttctccaaaacgagaggtggctgcccagaaagccgggaatgcgcccggccatggcttgctgtcaaaggttctatcactcgcgctaaggaggccacaccttctcccttcccactctctacgcgaggcggcatccgagagtgacaaccaaagccagtccctcctcggcttctgccgccctgccctctgcccagctcccactcccgcgaatttccacagcagaggttgtggcccaggccaccccggggctgcctagcccaagccttccacctgcgccccgacccgtgctggaactccaaggagcctgccctctgatggcccaggctctagagagaccgggatggcgggctgggggtgaagtaggaactcaccgatagcaacccaaggggggaacacagtttcttcactctgtctccgccatcttgggaggacgtcaccgagccacgctccgcccctcccttccttccacggtggcgtcacgtccggctctgtcttcccgtggcagtgcgggaggttctggggccatgggggtccggcgccggccagggcggtacaggatgtaccacagagacccactccccagcatgccaggggtcccccgaagcagcaggcgtcatggatacgagagctgagggctcgctagctcgcagcgctccgcctgtcttcctcatcgcgagcattctggtgccggcagtcagcgtctggcgctctgccggggctctgcgccgaggcccggcagcacagcaccgcgggcctctctcctgaagccagctgcgcactgcgtgcgggggcttgtagttgcttgtcttctcccatcatcctccccttcctcggggccccaccggtggaaactgctgcatgtgtactcggatctctgccataggggattttttagctgagacttggcacccctttcccgcttacgtacctgaaaactcttggcaccccctggtttttttgtgccccagccaactgtagctcagcttccaagatgcccttacctggtgacagaagtctgggatgcacgaaagcggagcagctgggcacagtgggcatgcgcaacattagaggaaggtgggctttataccggaaaaggttttcctgcgtctggaccagaagatttttaatacgattatttacagccacttcagacgaaaaaccaagtgatataatacaaaaatgctcaggaggcgacaggactaaccacttttacactttgatctttccttctaggctgtacattattttttcagtgttagctggtgagtcaaattcattttttaaaacccgggacacatgttccacgtggcaaggcttccataaaaacatttggtgaacgaataaagtaacaaaaacttacagttcagactctcaaattgctatcatgtcttttgaaggaccggcatacattaagctaaggcttccctcagaaaaaaaaacaaaacaaacaacaaaagaaaacaaagcgtgatctcacgctttcttccaagcgaaggaaaaaaaaaaaaaaaaaaaaagggattttttagtgtgtttccgcccggtttcgaaccggggacctttcgcgtgttaggcgaacgtgataaccactacactacggaaaccccactttggagagggttttgtaaagtccttgatatgtaagtgtcaattcgcaattctcaagtgattattatcaaattgagaggaatgaatataatgtatttaaagaaaaaaacagaaaaggaaaaatagcctatgcccaattgaacagagctgaaaccatttcaaaagcttgaatctgcacgcactttcttccaaagtgcccgggtaccgcagtagaaaccaggcactcccgagttgcccttcctttgggtggccttttttttttttgtctccctggaaaggcgttttattacacatcctttccgcaggttgagctgctcagagtccggggcgaagcagggggctttcgttattcagccgcgaaaaagccatcctttcagcttctggtggaaggacgtgtaaaattacttttgaatttcctctttttgcttccgaagaccaagcagaagttctaaattgactgcttgttttcaaattctctacagatgtatgcagaatcagacaccaagatgcgtttattgacatgcaatgtactttcaaatttttccaaacttgaatttcatatgacctgataaacttcacttttcctgcaaaaagacaggcacgtccttcagcctaaaaatcaagagtagcgaatgaggcttgcagattacaccagaaggatagaaatcgaaatatatatatttatatttattatatataaatataaatttttatatatttattatatataaacataaatttttatatatttattatatataaacataaatttttatatatttattatatataaacaaatttttatatatttattatatataaacataaatttttatatatttattatatataaacataaatttttatatttattatatataaacaaatttttatatttattatatataaacataattttttatatatttattatatataaacataattttttatatatttatgatatataaatataattttttatatatttatgatatataaatataattttttatatatttatgatatataaatataattttttatatatttatgatatataaatataattttttatatatttatgatatataaatataaatttttatatatttatgatatataaatataaatttttatatatttatgatatataaatat

SEQ ID NO: 315990 - DNA, 4001 bp, Homo sapiens
tgaactcgaggaattagctccccagtctccaggaaagatatgtaccaaaagagactgaacaaaacacctggctgttcttcacattggttctttgcatgaagtctcaaagaaaagtgctctaccgtgtattcaaatgaagatttttttgttttgcatagttaattgagagaaagggaaaccattaaattgcaggccagccaaaattcacactgctcttttcctttaatcaacttataaagaactcacttgaagatttcattataccaaaatttaaaaataattccaaaatagcatgaaagtttacttttctctccctcccctccccccactggatacttcttacacaagaatgtttcctcgtcaaaaggattaatgagcaccctgattctagatttttaaataagtatatttccatgataagttacaatataaaagggagggaaagattttgcttaatgtatacatgcacatctctacagagatctggaaaagaattaattaatatatatcaaaaggttaacaggggttatcagtgggcagcagtatttcaggtgtttcttttttgttttttctattttttctccgagaaatgtggaattaaagggggaggagagggtaaagaagaaaaataaagaaattaacgttcagtgggaagtgaataaggatcaagtaaaaccttatttagcctcaaggtagttattaccatctcattttgacagatggggaaactgaggcccagagagattgcatcatgctcaaggagacatagcgactgacaggaaagatctaattccaaagcctataatcttcctgtgtcagaagattatgaacagtctattcatgttcactttcataagagagacagaaataagacaggggtaatttaatcagtttctctttgcttttattccctccaccttttcccctacaatctgtaaatgtattgatattaatctaattatatggttcgttatacaggggagacacacagtgcctacattatcagattcctcagaacccacttcttgttaatgcagtgacatcagtaagcatcttagagaatcattctagcatctctgaccttacttcagtattagtactggtaggttaatagagataacaggagtcagaatgagggagacagaagaccagaggaattcaaggaccaaaaagcaatgggaaactggaagtaacttagaattttttgtttgcagcctggccagcatggtgaaaccctgtctctaccaaaaaatacaaaaattagccaggtgtggtagtgcacacctgtagtcccagttactagggaggctgaggtgggagaatcgcttgaacccgggaggcagaggttgcagtgagccgagattgccccactgcactccagcctgggtgacggtgagcccgtctcaaaaataaaataaaataaattcattgtgtttaatgttcaagtttacataagtgaaatcacaggctttgtttcagtaaataaacgtgtcagaaatcttactgtttattatctgtgcttatgaaaaatattgcctgctcatcctaaatcagtgatactgatttctttataaaaacaaacattgtgtgcataaataggtgaagaatttgagttcagagaatgaatggaaaaaatacaaatctacttttgctgtgaagactactgactagcttttataactgaaaataaaatgtgtactttacctgtcaagatttaaagttcctgtgtatataaactccaacagtttctgaaatccatcagccttcacctgactctgatcaagaaagacattgttctcagaagtgcttctgtagatcgcaccaaaatactcactaaaggaggccagcacattcctatgagctttaaactggaattccccaatcactatggtacagtcacagagaaaacctgcttcccgctgtttgttcagtctctctaaaaggtgctcacagtggtgcgaatactgcattttgatatcagaatggaattttacccttgatctaaaagacaaaaagaaacagtaaatcagtaaccgtaagttctcatcaacgttcagtgagggaagggacagaggacataacttaaacaattttagcccccttgaaaatccttatcaaacatacatggttaagaatgaagggatgagtgcctttctatctttggttaccttgatcaactaacacaatcctttggacacatcaataagtgacggtgaatggcaacacttctaccacctgcaaaaagcacagcaaaacctgacgctttcacatctgttgaaccctcagattttcaagctcagtagacatacttatgttacaaaaaaattttttaaaccactaagacatgatctcttgggacagataggggcagaacagtacgagtttttaaaaactgctctcaagtcaccaaaacctgttagtttccccagtgcagtttctccaaaacgagaggtggctgcccagaaagccgggaatgcgcccggccatggcttgctgtcaaaggttctatcactcgcgctaaggaggccacaccttctcccttcccactctctacgcgaggcggcatccgagagtgacaaccaaagccagtccctcctcggcttctgccgccctgccctctgcccagctcccactcccgcgaatttccacagcagaggttgtggcccaggccaccccggggctgcctagcccaagccttccacctgcgccccgacccgtgctggaactccaaggagcctgccctctgatggcccaggctctagagagaccgggatggcgggctgggggtgaagtaggaactcaccgatagcaacccaaggggggaacacagtttcttcactctgtctccgccatcttgggaggacgtcaccgagccacgctccgcccctcccttccttccacggtggcgtcacgtccggctctgtcttcccgtggcagtgcgggaggttctggggccatgggggtccggcgccggccagggcggtacaggatgtaccacagagacccactccccagcatgccaggggtcccccgaagcagcaggcgtcatggatacgagagctgagggctcgctagctcgcagcgctccgcctgtcttcctcatcgcgagcattctggtgccggcagtcagcgtctggcgctctgccggggctctgcgccgaggcccggcagcacagcaccgcgggcctctctcctgaagccagctgcgcactgcgtgcgggggcttgtagttgcttgtcttctcccatcatcctccccttcctcggggccccaccggtggaaactgctgcatgtgtactcggatctctgccataggggattttttagctgagacttggcacccctttcccgcttacgtacctgaaaactcttggcaccccctggtttttttgtgccccagccaactgtagctcagcttccaagatgcccttacctggtgacagaagtctgggatgcacgaaagcggagcagctgggcacagtgggcatgcgcaacattagaggaaggtgggctttataccggaaaaggttttcctgcgtctggaccagaagatttttaatacgattatttacagccacttcagacgaaaaaccaagtgatataatacaaaaatgctcaggaggcgacaggactaaccacttttacactttgatctttccttctaggctgtacattattttttcagtgttagctggtgagtcaaattcattttttaaaacccgggacacatgttccacgtggcaaggcttccataaaaacatttggtgaacgaataaagtaacaaaaacttacagttcagactctcaaattgctatcatgtcttttgaaggaccggcatacattaagctaaggcttccctcagaaaaaaaaacaaaacaaacaacaaaagaaaacaaagcgtgatctcacgctttcttccaagcgaaggaaaaaaaaaaaaaaaaaaaaagggattttttagtgtgtttccgcccggtttcgaaccggggacctttcgcgtg

SEQ ID NO: 315991 - DNA, 4001 bp, Homo sapiens
tcaaggcattttctaggagcggataggagccaacgttagcgaaccaagcccacagcgtactcgcttctcttaggaagtccctaggcccaaaccagtgtgtgcatttaagagttttgggatacgtacttatccttggggacggtgcttatttggcaaaagaaaagaggagcaggacggatataagaacaaattcccctaccctgccaagacgtcagtaaattaaggaacaagaaggggagcaagtgctccaaaaagccgcaggtcttggggttcccaccactgaatctttccgctccacgcgtccatcaggaagatcctccgccgttacctccaaatctatgtagagccccctgggattggctccctacctcttcaagtctggcggctgtggcggaaagggagtatgaggaggaacccgggatgaagctgaagtgaccgccccgccaacagctctcccctccccaggcagcccgcgggcgagggccagacgcaatccacctgtgttctaactctgagcaccagctgtgaccttgagagagtccctgattacccccgttttacagaattaagagtttgagtcaggtccgtcgcgctgggctgcttgcggggcgcttaacggatggtttgaggcgtcccgccggtgcgcccgcagcacagtaggtacgcggtgaaccgcagcccaagcactacgtggccatccgggatcggaaaacgcgagggaaacgcagaggcgagctcccaccccagcagcgagagaaagaggcgattctggctccgcgatgatccctgagcaagttcaagtacccgcgcccctcgcccctccgcagaggctgactggccgcgcctagggttcctggctccggacgcgcacagggtgcgggggagcgtgagagacacctccacaccttcacacacccacccccgaagttgcggcaacgttgaggggagagtggcgcaaagctgccagaggggagaagagggaggcggacggtactcacggggggtggccagcctgaagcaagtccgcgaccggggtcatcgatggcggccgggctcaggccaccgcgcctcagtacgcccagggcacctgccgcaacgcgccgcgtggattagaggctgccggcggcgaagaaggggcgcgggtcggtctgcgcgctaaagctgggctgcagcaccgcgggggctcggctgccagaaccgcagccgcagcgggaacccgggaaccgacaggaggcgggagcgcagcggcgtcggcagcagcggctgcgagggaggcgcccgcgccgcaggcagccagggccagcctggccgcagccaccgccgacacctgctggcccggccgagagccaatcagaggcgcccggagcgggggagcctgcggaggcggggcgggggcgcgtgcagggcgcccggcgggaggggcggcccgcgatcgcgcctgcgccggggcagggggtgcccgccgggccggttcctccagagcacctcgggcgcgcgggcggcacgcgccgggaggggcggggcgcaccgggaggaggcggggcagggctgcgcgcgcccggggcggggacccgcgcccctcccggggctcttccctgcggcgcagtgcagtattggggccgcggttcgggagcccccatgtgcgactccaggtccttccccgattctaagtcaggcttttcctgtctcctgcctctgagtcctgggggcccggaccctcagtgaccgtagagtaatgggtcaccagaatccggggcctgcctgaatctaagacatggtgtggcgctcctccacagacagctcttccccacttcacagtccctgggtaattaaagtctccgtagtgacccctatctggattgctttaattctcccataaatttactactacgctaacgacgctcattcattcaacacacatcaaaggggttaccgatcagggagctgtccaggctaatgcgcccccaagtctcccaaacacagctgcggaaccgccgggttagtgagcccgcgctgtcagaaagactcccaaagactgctgcaagtgaggaacgctttcgggctcgtgccaggagttcccggtcctggaagaatgactgggagttgaaaggttccactccaggccgggacttcattgtgcgtttgcatccattaagccagggatcttcctgagacccactgcctcagccccaacaactcggctgtgaaaacactttgtcaattttagctgcagggtggaagtcgctccatgaaaataaagcatttatggagttacactggcgatttctgaatccctggaaatcctctcaagccggtgggttgaggctgttctctccgtgtaaatgtgcgcagtagaaataaatggcttgtttgctgatcagtccacagcagaaaacaaaacaaaacaagacaaaaccttaaagaaaggaactcggaaggtaaaggagttaatttctttaaagattcgattccctcctttaaagggattttaatgtctacaaactggtaaagtggaaggaagttagtttgtttctcttttgtttacattaaatttaaattttatttagctgtgcttgattagcattcatgtggcacaaaattctaaaactacaaatggaacacagttaacaagactccctcccacccttgtctctcaattcctcttcctgggggcaaccagtgtgtacctccctcaaggaaattgacatatacacaaacatatttgtctaatgctcttatttttatttttgttgtacaaactatgcacattgttttacattttgatcttttcccttaacaagatattatcgtggagtcattccatatcattaccaaaaactttttcttgttattttacagctgtatgatattccattgaataagatatgccaaaatttatgtaagggcccccaattatgggcatttaaatggtctccaatctatcactgttaataacaattatgcatgaataactttgttcctatgtaactgtgtacgtgtgggggtacatatgaagaataaatctgtacaactggatcatggggtcaacggtgatgtgcatttgtaatttggataatgtcaaatgcccttcatagagatataaactcatgatctcacacaaggtatgtgagtgcatatttcacacacccacccctctgatggttctgagcctgttagctctcatatccattcctagtccttccgactctgcttcatggggggcttcatttcccagactcccctatcaattggccgatgggactcagcagtaggagaataggagggagaaagggagaagccagggtgtttcccattcttccctttcagcttgagtggtgggaacagaagggtgtctagggcagcagctactcctcctgggtggtcccaagtccagtaggacaggctcagtatgggctcagctccctgggttctggcaacatctccccctcttgtccctttggcctggaggtaacaggatgtcctactgttgctaatctccagtggtctcactgtttcctgggagtctttcagcctctcacatcctccgggtaaccaactctatgttttaacttccccccatttcaaatattccaagtggtttctgtttttctagttgtacctgactgatacttttctgatacactgacatatccctttacacagtacattatccaacttgcagatctttgccaattatataaaatggtctcgatagcttgacttgctattatcttattaaaagtgaggtagaacattttgcatatgtttatgagacacttgtatttccttttaaactctatgttcatatcctttgcccattttttggtttatttttgtcagaccaatagattcttgattgtgaaaccaagtcctgccagtgaaacatttcataaaaacatttgtttgaaactaggttttcaacatgattttacctcagggagcagagtccaataaaaaacagtactgtgagcctgttgattgctatggaggggagaaaaaat

SEQ ID NO: 315992 - DNA, 4001 bp, Homo sapiens
cccactctccagaaacagtcccacagacacagcttctggcccacagagacagctcgcagatggaggtagtggtgggtaattaggagagacgcagctgcccatggccaggcaaaggaacgtgagcaggaagatggaaagcagtatcttcaaagtcttgggaaactaaatttctctaaaaagattttgaaatctgcaaatagggtcccagatattgctgtaaaattttttaaattacctccatttccaccgtagacccagatgccttgaaccatcttccttcgactttttaataaaaccccagtgcattttcacatttatcatatcctatgaactccaagttccttgggaagattgaaaggcggcggggattatttcattttataaatgaaaaagttcaggttcaaagatgctggtcagtcatcacaaaactaagtattgatctcatggctgagtttcagagttggggtgggggaggctgagttgaagggacaaggtgataatggcaagagaggctaggtgacgctctccccagcccagagctctgagaagcgcccacaacaccacaggcggccccactggagccacctcaaaggacctggagtaaaagaatcacacccgacatcatttgcataccccaagactggccagcccccagtctcagtcttcctcccctgagtaagtgtcaagaaaatcaacaaatcgagatcatggtcggggagatggagagcatggaaatgaagccagactcaaggcattttctaggagcggataggagccaacgttagcgaaccaagcccacagcgtactcgcttctcttaggaagtccctaggcccaaaccagtgtgtgcatttaagagttttgggatacgtacttatccttggggacggtgcttatttggcaaaagaaaagaggagcaggacggatataagaacaaattcccctaccctgccaagacgtcagtaaattaaggaacaagaaggggagcaagtgctccaaaaagccgcaggtcttggggttcccaccactgaatctttccgctccacgcgtccatcaggaagatcctccgccgttacctccaaatctatgtagagccccctgggattggctccctacctcttcaagtctggcggctgtggcggaaagggagtatgaggaggaacccgggatgaagctgaagtgaccgccccgccaacagctctcccctccccaggcagcccgcgggcgagggccagacgcaatccacctgtgttctaactctgagcaccagctgtgaccttgagagagtccctgattacccccgttttacagaattaagagtttgagtcaggtccgtcgcgctgggctgcttgcggggcgcttaacggatggtttgaggcgtcccgccggtgcgcccgcagcacagtaggtacgcggtgaaccgcagcccaagcactacgtggccatccgggatcggaaaacgcgagggaaacgcagaggcgagctcccaccccagcagcgagagaaagaggcgattctggctccgcgatgatccctgagcaagttcaagtacccgcgcccctcgcccctccgcagaggctgactggccgcgcctagggttcctggctccggacgcgcacagggtgcgggggagcgtgagagacacctccacaccttcacacacccacccccgaagttgcggcaacgttgaggggagagtggcgcaaagctgccagaggggagaagagggaggcggacggtactcacggggggtggccagcctgaagcaagtccgcgaccggggtcatcgatggcggccgggctcaggccaccgcgcctcagtacgcccagggcacctgccgcaacgcgccgcgtggattagaggctgccggcggcgaagaaggggcgcgggtcggtctgcgcgctaaagctgggctgcagcaccgcgggggctcggctgccagaaccgcagccgcagcgggaacccgggaaccgacaggaggcgggagcgcagcggcgtcggcagcagcggctgcgagggaggcgcccgcgccgcaggcagccagggccagcctggccgcagccaccgccgacacctgctggcccggccgagagccaatcagaggcgcccggagcgggggagcctgcggaggcggggcgggggcgcgtgcagggcgcccggcgggaggggcggcccgcgatcgcgcctgcgccggggcagggggtgcccgccgggccggttcctccagagcacctcgggcgcgcgggcggcacgcgccgggaggggcggggcgcaccgggaggaggcggggcagggctgcgcgcgcccggggcggggacccgcgcccctcccggggctcttccctgcggcgcagtgcagtattggggccgcggttcgggagcccccatgtgcgactccaggtccttccccgattctaagtcaggcttttcctgtctcctgcctctgagtcctgggggcccggaccctcagtgaccgtagagtaatgggtcaccagaatccggggcctgcctgaatctaagacatggtgtggcgctcctccacagacagctcttccccacttcacagtccctgggtaattaaagtctccgtagtgacccctatctggattgctttaattctcccataaatttactactacgctaacgacgctcattcattcaacacacatcaaaggggttaccgatcagggagctgtccaggctaatgcgcccccaagtctcccaaacacagctgcggaaccgccgggttagtgagcccgcgctgtcagaaagactcccaaagactgctgcaagtgaggaacgctttcgggctcgtgccaggagttcccggtcctggaagaatgactgggagttgaaaggttccactccaggccgggacttcattgtgcgtttgcatccattaagccagggatcttcctgagacccactgcctcagccccaacaactcggctgtgaaaacactttgtcaattttagctgcagggtggaagtcgctccatgaaaataaagcatttatggagttacactggcgatttctgaatccctggaaatcctctcaagccggtgggttgaggctgttctctccgtgtaaatgtgcgcagtagaaataaatggcttgtttgctgatcagtccacagcagaaaacaaaacaaaacaagacaaaaccttaaagaaaggaactcggaaggtaaaggagttaatttctttaaagattcgattccctcctttaaagggattttaatgtctacaaactggtaaagtggaaggaagttagtttgtttctcttttgtttacattaaatttaaattttatttagctgtgcttgattagcattcatgtggcacaaaattctaaaactacaaatggaacacagttaacaagactccctcccacccttgtctctcaattcctcttcctgggggcaaccagtgtgtacctccctcaaggaaattgacatatacacaaacatatttgtctaatgctcttatttttatttttgttgtacaaactatgcacattgttttacattttgatcttttcccttaacaagatattatcgtggagtcattccatatcattaccaaaaactttttcttgttattttacagctgtatgatattccattgaataagatatgccaaaatttatgtaagggcccccaattatgggcatttaaatggtctccaatctatcactgttaataacaattatgcatgaataactttgttcctatgtaactgtgtacgtgtgggggtacatatgaagaataaatctgtacaactggatcatggggtcaacggtgatgtgcatttgtaatttggataatgtcaaatgcccttcatagagatataaactcatgatctcacacaaggtatgtgagtgcatatttcacacacccacccctctgatggttctgagcctgttagctctcatatccattcctagtccttccgactctgcttcatggggggcttcatttcccagactcccctatcaattggccg

SEQ ID NO: 315993 - DNA, 4001 bp, Homo sapiens
taaagaaaaagacctactgacagttctcccaataaaacagtccagccagatcatcctaggctgaagccaaccagtcaataagccctactgaggcccactaaccctcagatcagctttcagtgcatcactattaaaggtaaactgccagtcctgggtcatgggattcttgagcaaagttgctatcgttaaagataaataccaaaacaaacacaataaagaaagttgaaggagaaaaaaaacttcaaaaatgattaataagaatatattgcaggtatgaagcaatagcattacatagtaaagggaatatagaaacaaaaataactctcagaaataaagaaattattgtgtaaattaaacacttgataggattgatgatgaaattgaggatattttccagaaaacaggacaaagagaggaaaaaagaagaaaaaagaaaactagagaattaatctgagaggtctaatatctttacttcagaagaaacaaagaaaatggaagaaagaaaataatcaaagatgtaattcaagaaagtttctcaagcctggaaaagctatccaaaatgaaatggttctctaagagctcaagtacagtggcagaaataaagacccaaaggaaagacattggtgaagttttataacactgagaccaaaggaaagagcctagaaactttcaaagaggggaaaaagccacatagaaaggatcaaatatcagaatgactcaacagcaacaccagaaagctgctttttatgattataataataaaacacagaaaactgatgtaacaaagactatattgcagatatactgggagaatggaggaaagggggatatgtatgtgttgagtgttggaggtgttgaaaacaaaaccttttcatagaagaaaataaagatataagctgtaaaaacaaaaagggtaagcatattatttagaaatttggaagtaaatactgaaagaaagctaaaagttgaaagtggtgtgtaaggagcacagatggggtggagtggggtgaggggcttttttttcttttcaataagtcaagagaattatttgatgttttaaagtctatacattcatgacttggattaaaataaaattaaataaataagaaaaagatccaaggacttcgtttttagcttcaggaccctaagaaatctcttaatgtccctcctgggtgatggatatagtatcatgctgtgtcatctttgtcaaatccatgcttacacaatgaaatttcctagaacattcaggtctcatcagttgctgctcaaaaaacatgtatgttgggttagcccagagtaagtcaatgttcttaaactcacatgtgactttcccactccctgctggaataaactaagaagtttagtcccagcctcagagatagcacatctgcagcaaaggcagccacagctacaaccctcaccacatcaggtttctgttttatcaataaaagaataaaattctacctgtttttgtaaagcagtcaataaggagaggagaaatactttttccacccatattgttgaaatagagccaatggtttaaaatgctcttcctttatgatttatttcttaatgtttgcacagatatgcatatgcaaaatgctaaaaaatgtacaaaataggacaaaattgacatagttctgttgcaaaacatcaatgaaaacaatcaggcaatgtataataaaggattatagtacataatcaataatagcaaattgtgaaataaaggacaagtcaatgttgcttaattattaaaattaccgtaactggtggttttctttctgccaagctcttctactcaaatttagctcacgtgtcttgagaaataattaaacgccaggacacagggcacagagctccaaaatcttcactccatgtcctcatggccagaaaagcccagacagaggataagccaggtagtcttcttaagaaaagacacagggctctgggtagagagcaataccagagtgaaggaacagcacagtgctactgctcgtttctattaccagtttcagaagggaggtgacggagagctgtgaaatctcagacaaccaatgccgagaaaaatccatcaacacatgtgcaacagggagagagaggcaccaaagctcatttaaagctgcccggtttaatacaactttgtaggggaaatgttacatgaatttttacttttttttcccactttcttggtttgtaaattcaagatatggaagagccaaagacatggttttatcatgtgctttcttgtcagtcacagactatgaggtttgctttagctaaatgttcttaatacaaacatgcttcaaatagcagcaagagactgtacagagggaagggaataattggaagagaaatctcaggggatcttttttgggcagggcaaatcagtacactccctgtggtataagaaaagcacgagagtgtgtgtatatatatgtttggccccattcatgttgactccagtgcatgtgtaaacatatactgtgatggagagtatgtgaccactccctagccctgtggccacaggcaaattattttgcttctatgaacctcagtatctttatttgtacaaatggctatcatcctcaccttcaccctggtttcataaatttgtggaaaggacctaaagacatcatgctcatactccaccaaattacaatgctttgcatattatagtgctcaaatattagtgccctctcatctgcaaagtactattattaataagcatagcatttttctcagaccacataaattatgaagaaactatcttagactaagaagaaacacatttttttgtaaatccagacactttcttgaaatgtgcctcctgcaacacccatcctcttctgatgtgggtccccctcccttctacataggcagggcaaaatcgggtggtcaccagaaagttctacaggaaaagctggttaattgtccagtgcacttccaaatgccagttctcagctgggccaacctgttttctatccaaaaccagatacttttcagataaaattacattctggtgctgaatgaaacaaacaagagatcttgacttgaaattcctaatcaaatgtacacacacacacacacacacgcacacacatgcacacccacacaccctcttaatatatgcctggagatagctgtttgttttgcatttttggaaatgactgtaaaatgtcaataataatcccagatatttctttaggtcattttatctctgatctgtaagaagacacacacacacacacacacacacacacacacacacacaatgagagagacagagagagatacacacatccagaagagaaggggacagaatatttgatcagaaaaattgagaaagagaaggggacagaatatttgatcaggaagaatatgcatatgcctttattgtgaagaggttggtagcactagcttccctctgtgagtatgcatggatgattcagaatattcatgaagacccagggcactttgcttacagtgcaacactgtttatgtagaacttagatagaaaaggatctgcagataaacagagtgttaggagggaagaaaaaaatcagtctttttttgcccactgccaactacccacagctgctaccaaagggtccctcttttccagacaaatgcacacatgcaaaattctgctcacacttttatggaatgtattgcattacaaatgggttcataccacatatgcaggctatacataaaaactttgaaaaggggcatgcctcattttctggcaaaaatcaatggccttacttcttaaaaaatggaaagaaatgtatatttagcaaataaaatgcaaacttaatgcacttctacttaaatatacatatcaaaaaggctgctgttgttgtttgacttgaaaaataagttgaaatcatggagtggtctctgatggggcccaatacaggtcatccaacccgctaatccattctgacttttcattttgatagtgaaagtgctaataactctgatttaaaagggagtgcagt

SEQ ID NO: 315994 - DNA, 4001 bp, Homo sapiens
caacatagtcagacccccgtctctacaaaatatacaaaaaattagcaaggcgtggtggtgcgcgcctgaggtcccaccgactcggaaggctgaggcgggaggattgcttgagctggggaggcaaaggttgcagtgggccgagatagcgccactgcactccagcctgggcaacagagccagaccctgcctcattaaaaaaaaaaaaatgaaaagaacaaaacaaaaggagtgcagtatagcagaaaaacaacattctccaaatatgttggattgtatctgaaatagccaaacttccaagatcatgattcaagtggagcaaatacttcctatacccgtcaattatatttccctaactggaactctttacaacttgatgtgaaacaatgcaggtactgtgaatagttcatggttcttaaactttaaagattattagtacaaaacatacaattcaacattagaataaatatccagtatttaaaggaaaattaaagtaaggaaacatgttacagacctaagaccaaattaaactttcttggaatctcttcaggaacctcaaataccgatacacagaggtaatatttaggtccttgtttggggcagtatgagattacgttgaaagtgacttttatttcatcctcaaaagtgctattgaatagttggaatgacttcgttaacttaaaacatagttacgacttcttaatcgacttacaacaacaaactatggcatcgcagagagctttttaacgtttatgagcttcatctctttgagggtaaagacaagctccaaaacggcttgagacaatgcttcggaaaaatgttacgtaattaatacattaaaactatacaacttaatggtaaggagacatttcataaaaacttaaccagtcgatccaaaataattcctaattttacgtaagaggcaaacggtgaaagaccgaacattaactttgccaatcacctgaaaggagcagcgtggtagaactacccaggaccgcctcagcactcaggggcaatagtgaactactgaagcaacagctccacctactgatccaccctatacttccttaaatatgttggcaccccaagtctacagtgatcgcgctctctccccctcctccactcgctgtgacccaacccaaatctagttgagtcactagctcttaatactcatccccgtgctctttattccaatttcttcttcctccagaaggttctgcacagctcccaagcgtgaattaaactgaaaggtgtcaaacaccgcagttccagagttgagtctggaggtggaagacaaccaaaccactccacctggagctgcgggccggcgtggctcagcggtccgctcccgggaaggaggccccgggcgcttcacaatagcctttccatgttgccccactcggtcgcttctccccactcaacaacccacactcgtctccgaaccgaaaccctgaagccccccgggtcttgcctccgctggcccttcagcccgccaacagcccgagcctcgcctccgccccctccgggagccgagggaactgagaagcagagaaatctccctccgcccgtcttcgccctgaatctctcctcgcctttgcggctctccccctctacatgggcccggacccttctaccccaccggccgggccctgcccggctgcccttcctcaccctttcatcttccccgcctgctgaggccgtcgttaccaccgatatcaacgccgtcgtagtcgccgcccttaggtctccgcacccttagctcgggccactcaaccccgcaagccggcctcctagcctgggcagggagctgtgcgagcaacgaaggccgcgagagtcgagtgagggcttgagtctggtgggggcgggagtgtctcccgccgccgcgcttgtgccgccgcttctccacacgtgcactcgggtctctcggctccctcccgccgctgccgccagccagacccgctgccgcgctgtgacctttcaccccgcccctcgcgcgccggcgcgccgccgcctcacgcgcagccgcactgctcgcctccgcgcaccctgccccctccactccggaacctccatctttctcctggactgggccttctggggtcatgctcctccctcccacccgcttacgacactgcttgtggggctggctcggtaggccctggcggtaaaatccagatttttccacccctccctctcttgtcccatatccgcaagatagtttttctcagccccgttcttcccagtttgtggtctccagagtgaccttcaaacgctgttgcctcctagtagggttttataaagttagttcttctaaatgtaaagaaatctgtggaaagctcaagtttaagttaggtgttttaaaacaaacgtagttaacaatcggccagatagattggctaccctccagcacgcctcaagttttaagatcacgtgattggcccaaacctcagagcctggaattttaccggcggactccagagggacggaacgccaccgccatttcctgtccctcgattgtggcgtgaacgtcacttccttagcaatgcgctttaactcttgctgtccacattttccacattgtactttataacatactctttgtgaaaatttatcttttatttctttaatccaagaaaattaatattcaagggatccgtaaaaattcaggccccccgagatgtagagcgctgggatggaggaggcagggcggagctcgacgtcatgtgactggttgggcccgcccccccccccccccccaacctgtgcagctgaggacttcccctccgtggtgacagcctctgggtcctcggtcggtacagtctctgcacctcgcgccccagcaggtgagcggcgaccggtaactggcgagtggtggggatagagggggtggaaggaggcagaggaaggagagaagggagagtgtgaacggcgacttttctgcctgaggcttcctccccgctgtcaccctgcaccggcaaggagctcatttctccttaacccccgctcccccaagtgtggtcgttcccgctacttggggattcagatgtccacctttcccagggttggaagtgagtgcggccattatggttccctactcagagcctttggggcttcgggtagcagattgtttcagccatttcacagggtctgcagtagacattaggtcccattccttaaagcccattctttggcaaaggtcctcactgtccttaccctcagctcagggctgaggagcggggaggtagcaaaaaccctggaggcagaggcgtctccggtgagacaggcttgggagggactgtcactgatacggccctcactgcagagtcactgtgaagcttccctccgaatgtgctttctcagtgattctaaggattttatctgacatacctgcagggaaggttccgtagatgttcacgtgcttcggatgggactagaaaagtaaaagaagggcttttactttttcttctctgcagagaggacagttgaaggaatactgtcttcaaaacaggaggtgttagtaatgcgacagtctcgattgaatgaggaggcgttgaaagatggtattgtggtgttgtggtgtgcaggaggcccaggctggtttagggaagagtgagtagggttccctgaaaccgaaataagaaactgattgggttggaaatagttaaaccaaattgatttggccatatgcttaaaggtagaatcaagtcgagatgttgctgtctgcacatgttttctgccgtcaatccttccctttttgtcattttcccctaaaatactactgaattggcactcccaatctattccttgatcggctttgtggtaaatttaggttaagtagcatttgtatccctctttagctttccccatttgtaaaactcccggtgccctcttcagattttgatgaatagtattttgtgaaaatacagaaattgttgtccaattgaaaatacaggtgttgtccaacccaagtactcccattccgtccataatgtattattaccaat

SEQ ID NO: 315995 - DNA, 4001 bp, Homo sapiens
cgaaaccaacaactgaactaccatcggttctttttaaccctcacttgattaataggtgctcttaagaatcttgatgcaaatataactggtagggaagcacttcaatactccaagaagatagatctgaaatatttacagacctaccaaggatacatttaaacatgaataagatcagaagagaataaatattttattgaaaagttttcagagtatacaaacaaaaactccctagtatataactgatttcacaagttttacccaactacaaaaggcttaaagattaggcacactgttcttgaacttaaagcacaccattcaaattatttactatatcacttgtgttgaattttgtgcatggttttctgattaataattctgaaaataattgtagttttatacatatatatggataggggaaagggaaggctatccttacacagtgaaacatatgtattaccagaaacataatatacataaaaagcaccagagaaaaagaaagaaacaacaacaaaatgtatacacaatctgggattcaattaaaaaaatattacccatgatcctaacacaaagagggataatgagtgaaatggaaagaggcctggttactccttagtttattttgatcgctgaatacagacaggtgatgcacccacacagcctagaataggctatttaggtggttgccaaacagtaataaacatttaatgtaaaatcattatcatatgcacaattggaacaaactagaggcttcccatatactttccaatgaaaaatattagagacaaataaggaatatgttataatcttgtacataataccatttgtccataagacacatagaaataaatgattctcattatgctaaatgagccttttaccttactgtttttcttcaatagaatttattacatgacttttgaaattaatcttttaaattaaaaatgctttatagtagcattttacacagtatttcaagaaagatttttaggaaatatacagagataaaaaaagatacggggattcttaagcaggctatgtagagaaaagattaaagaaatgaaagaaaaatataatttaactataaaataggtgatatatttttaggatcatgcagatctatgtgatctcatggtattctagaagtctataacaaatattgattaggcccaatatctactttctttttcttctttaagaaataacttttgttacccaaaaatgtgaaatgtgagcgaccttaaatttgtttcggtgaacaagcctctaaccagagatgcctagtcaagccaatgtcaacaaagccagtcctttcaaaggacaaaggtatctgattaagcaacacctgtgaaataaatcacagcctcctaactgataggctcgcccatgttcccctgttttctaccttttaaaaagtggttatattaattacagggaaactgagctggtaaactccagagatggcaaaacttaattaccaataaacactccacaggtagagacaaaaatcaaggttctgttaatgttggaaaaggtccaacatgaaaatgcactggaagttggttataccatttctccaacattatactggggattaaggataaagctttccataccctccacgggtcccccaaatttgtgattctgtgttgcctgagtctttgtaaacaactgagaaaacatgcttcctctgaatcaacaatctccacctcttttctcgctcgcagaaaacaccttaaaaacagggccagggcacctgaacatgcatgcagggatgcgtgtgtgcatacacagaaacacacagactttgtaatcaacactgcttaagtttctgattgtgaaaagtgaaaagttcataggctgttggtacttaccttgcaaagacgtgttaggtaaacttgcttcattctctcccattttattatttctttttaaagagggccaagcagtttcaagttgtgtcacttaccctgcaagctttgtgaccttctgactttctactgtagtattgtaacagtatactacctgctttcttctgtgaataattaccattctgcttcctgagttacctgggcttgcaggacctgttttactatgaagtgagatcatatcttttgatccactgtatggctattaaagtgtacttcacaaaacattgctttgtttcagttttgatataaacttttaattctctactttcactttagtccagaaacatatttatattttcccctaaaagagcattgatattaccagtacaccaagcttcacagagtttggtttctttgtttttgagtgtttctaatctacttttcctacagaaatcaaatttaaagtgtattacacgacatttattttttaaaccatagggaaataaggaacagctcagagtcagttttgtgcagcagtgtgaagacaagttttggattatctctaatacttgctgtgtgactgtaagcaaagaatataacttctttgagactcagtttcctaaactataaaatagaataatatctagtatgtatgaagtatgtatgattagtacgaagattgaaaacactaatgtatggctgtgctaaacactgtgaataatggacaataaacaaaaaacaatttctaattttcctcttccttttccttcttcttccttctctccctcttgttcttctgatgagtggaatgaatgctgaactgcagcattgatgtcccagatcatgtactgacatcagttatgcaacttattaactgagagacctgaaaaaaactgttcaacctaatcctgagttgcctcaaggtcctcatttgtaaaaggagagtcatgatatttgcattgccttttgaatagaagcatggtgaatattaacttagattaactgttgtgactcaacaaaaataattcccagcaaacaagagcaacaaattggagacgtatctttaaatattcatttgtatgtgagaaagcaaagatatcacagaattaaggcaatttatttaagctttgtcccccataaggcacctagaataaaaaacaatctccactttcttccctctagaaatccttaactttggctgtagttagactagtaaataaatgaatataaatatatattcatattcatatatattaatattttacaaattatatattatatatttaatattgtaataattacatattattatattcaaatatataatatataaaaacatttttattagtctgcagctaatatatatatataggctgtagttacacacatatatatgtatatgaagctcaagctcctttctttataatccattgctttttaatttgaaaaaatctatatattatgtgtgctagcttactaatgtaaaaattgactatataagttgtgtaaagtacagaaatgtcaaacaacagtttttctcaaaagtattagaaataaaggcaaacatgacattaaaaatttctgattgcaattgggagttgtctctttcatttattacctctctaggtctcagtttcttctatgagggagctggaccattgaaaacccattctctctttataatgccaggagcctctgatttaaaatctgggttgtggtttgctccagaatagaataaccctttgcctatagcaattgcatactgtaatatatatatatacacaccatgctacatactttaccaacagtaacttgaaattgaatgtttgccaataaaacactgtaatcatcacattcttacttcactttaaaaggaccaacacacatatcaatcctcactcattatgacaaacttggaaatatatttacagacctgccccaggcactgaaattagtcaataacagttataaagcacccattatctatgagctgaattatagcatgtggtaaattacgatgaaagtggaatagagaagtcctattcttaaacgataacaaaaaatccatacaaatataaacaccagaaaggtcttaagttcgtaagttcacagaaagtaacataaatactgatt

SEQ ID NO: 315996 - DNA, 4001 bp, Homo sapiens
cagagtcagctcagctgggctggtactcaggatcagctccatccggtgtgtagggtctagtgtaggggtcagcttggctgggccagggctcagagtcagctcttgcctatgcacaggatccaggttcagctgagtcaggctgggagccaaggtcacctgctgctaggttgcaggtggctcagtgccaggctggaggttaagaccccagtctccaggcagtagcatctcttcagaccacagtggctctcctcctgtagataacagccatgctgggctgtgccaggagggagggtggggttggagcagggaagggctgacagagtgcaggggggaccatgcatactggaactggggagtggtgggctgcactttgtcccacactcacctgatagcacaggtgacctggaagagacccatcccctatagagcagggcagatagatccaggtgtctaccccacattggagggaggctgggagtgatggatgagctgcttaaggctggggcagaacctaggagtcctggccccagcctgctctggctacaaatttgtcctcctcaggacctcccctcacagggggtctgtaaccaccaggtctataaaacagccgacccaatctacttgctggccttctgtcttccagtagtcctcctagtccaccactagggcatgggatagaagatgcaaagcagacactataccccctgctcaaacctacccaaggttccctccataggaaaaactgcccgggagtcttcctgtccctttcttctccctatgttccgagtctcctccagctcccagccttttcaactacctgggctatgcccactgccttagtggatcctggggccccactcatgcacccatcaggctgagctttggcctgtcttgactgccttccccacctggagcccatggcccccttcccaactctgcccatctcaggacactttggatatagacccaactgtctcctcagatggggccccagcagcaccagcactgggcctggcccacagtcacacagcagtattgcctctgcaggcttggttccccactggcttgagtttcgcaggcaccctagataaggaccacagcttccttcctatatccacagggtgtccaacggtcaccaggttgggggcccagacctcctgtgcccaaaccctactgttttcccatcttaaccaaggtcctgccgtccggcaggtctatgctgggggttttctagtcgtgggcgggcagctgagccccctccttctactcacctgctccagagggggcctcctggctccccttacctctcctgagcttgaggccaattaaacactggtcagtaacaggcacccccctcccctcacctcccacaccattcacagggctgtaagcccctcacctgcatcagccacctctgcagcagccgcaccctttggtctagagggaggaagccccaggatccgcccctagggctgagcccggggcttccccgcggccttaaccccttcagtgccgaccccacccactgtgggcggggctccggggtcctcagagagtggcttctccgtctctcccgggcctcggtttccccctccctcctagtgggtcacaggctgtggagcttttgggaatgaggacttcgagagctcgactctgtgggcaggtgtggctcggcatggtctggaaacgaacgactgacgcggggagggcgtgcagggtggcatggccacttggggaccgcacgcgcggggtggacctacaggcagcaaatgggaagggtgcggtactgacatgttgatgctggcctctgggatgttccgcgtcctagctccgcacagctgggtatctcactcagtcgccacctcggactcctcggtccgacaacgttggcccccagcggtgcggcggatgttctgcagccgtcgcgtcctgcggcacgccacggcgttctaaggcctcccagcacccgcgcgtcgccgcttagaacccgcccctggtttgcgcgtcacaacacccgccaggcgccgactcagtctctaccctggctccgcccctgctgagccccaccccatctccatttgagtccgcctcctccccacccggccccatacaggcccctcctccttctccttgcgtcacagcttaggtcccgcctcgatttggcttcttccaggccctgccccagcccagcacgtcacttcagccaggcgcaggccccgcctccagctggctctgcctccgccagccccgccccaggctctgacaagtctagcttcggttcccgccggcctcctgccccaggacagcttggaaacggtccgatcaggtggggcttcctcttgaaatttgggccccaccctgggaagcagccgcccttagactgacgtcagatctggtgagagtgacaagcctttcctgtgccctttggataccggggcctggacattttaggcgctcagtaaacagctaagtaaatcatgactgctttatttgctggactggtgcctctcagcagattcaggggtcgtgcagggctggttaccacaaactcagtaggagtgcaagggctgtacccccggagctagacagcctgggtttgaatctcaacttctcccttttcttgctgtgcaaccttgggcaacgtgcttactctcaatgtgagtgactcagtttcctcatagcctcattgtgaggaatgaataagtccacataaaacgcttagcacggggattggcaaagagtaggcactcagtgaatgtcagcctttgtgattgctgcagttcaaagactggctcagtgtctctggaggaattgtctatgaccttgccaagtagatgcatatggacatggaatgaatggtgtctgctgtggttctaactccttatgccactattccagtctgtaagtatgcatgtgtgtgcagggaatatgcctgtgacagtggctgagtgtactctttactgtgaccatgacttgtatgactgtgcatgtatttgaggaagccctggccagacccagagtgcattaggttctcaatatgtgcaactcagtgtgtggccaatcaccacatgctcttccgctcacaccacggtgcctgccagccagggtagcatcgacatttgaactccacagccatctgtgcctgatcttcaagtgagagggcaccccgcaggctcaggggcccaccaccaggcgtgagctggatggagaaactggcagggttaaggaggaggagggctttggggtggctggtgcggcggacacagcggccatggccggagcacagggcttgactgcagagaagggccccactggtcacgttcaggatgaagggccccagtgtagtgtccatatactccttgatggcctgacatgattcctaggtgggaagggaggatagcgtcagggacaccatggccatgtatggacccacccagggcactgaggcactcacctgctggtcagccaggactttgcaggtagaaagggtaagtcagggtctaccccgtcagcttaatggccccacccctcccccacccccaccctcatgccaggcctaagctcaccttggttcttgtattttcccagctcacccagagcaccactccagctgccccctgggccgcactctcccccaggctgtgctccagctcatcctgggaaggagacagcacagctctgtggggcctccttcccaccatgtggcagactgctggaacaccattagatgggacaaataattcataaccttcacctggggctgctctggccatgggaccagaggcaaactgcttcctcctctagcctatgaattccatgcagacagggactacatcattccaataaatgttgaattgcctgtgcctggcacagaacttggcaccaagtgcacactcaatggatgtgcccatgcgccaggcgcggtggctcatacctgtaatcccagcactttgggaggctgaggtgggaggatcacctgaagtcaggagttcgagaccagc

SEQ ID NO: 315997 - DNA, 4001 bp, Homo sapiens
cacccagctggtagcccaggtgggtatagaagtgcacctggtcatgggtggtgagatgcagcttgcggaagccccgggcccgagcaaagacctccaggccctccatgaggcggcggccaaagccacggcccctcagggcccgggccaccaccactgtctccactaagaggctctggggctggttcagcacccgtgacaggcgggcatggcccaccacaacgggtgctgcttcaagtgtggggtgggggcttagcagcatcaggcagagggggaaggcatctgaggactggcccagggagtgcaggcgggaggtgcggctgcggggccactgatcattgatgaggtcagcacaagcatccaggagctcgggtcggcggtgcacaggctccagggtcaactcagccaggctaggagctggggtctcctctggctggtgttcaggatccagggtaagctcagttggaccaggattgaaggtcatctctggttggcatgtggaatccaggggcagctttggctggcacgcaggatccagagtcagctcagctgggctggtactcaggatcagctccatccggtgtgtagggtctagtgtaggggtcagcttggctgggccagggctcagagtcagctcttgcctatgcacaggatccaggttcagctgagtcaggctgggagccaaggtcacctgctgctaggttgcaggtggctcagtgccaggctggaggttaagaccccagtctccaggcagtagcatctcttcagaccacagtggctctcctcctgtagataacagccatgctgggctgtgccaggagggagggtggggttggagcagggaagggctgacagagtgcaggggggaccatgcatactggaactggggagtggtgggctgcactttgtcccacactcacctgatagcacaggtgacctggaagagacccatcccctatagagcagggcagatagatccaggtgtctaccccacattggagggaggctgggagtgatggatgagctgcttaaggctggggcagaacctaggagtcctggccccagcctgctctggctacaaatttgtcctcctcaggacctcccctcacagggggtctgtaaccaccaggtctataaaacagccgacccaatctacttgctggccttctgtcttccagtagtcctcctagtccaccactagggcatgggatagaagatgcaaagcagacactataccccctgctcaaacctacccaaggttccctccataggaaaaactgcccgggagtcttcctgtccctttcttctccctatgttccgagtctcctccagctcccagccttttcaactacctgggctatgcccactgccttagtggatcctggggccccactcatgcacccatcaggctgagctttggcctgtcttgactgccttccccacctggagcccatggcccccttcccaactctgcccatctcaggacactttggatatagacccaactgtctcctcagatggggccccagcagcaccagcactgggcctggcccacagtcacacagcagtattgcctctgcaggcttggttccccactggcttgagtttcgcaggcaccctagataaggaccacagcttccttcctatatccacagggtgtccaacggtcaccaggttgggggcccagacctcctgtgcccaaaccctactgttttcccatcttaaccaaggtcctgccgtccggcaggtctatgctgggggttttctagtcgtgggcgggcagctgagccccctccttctactcacctgctccagagggggcctcctggctccccttacctctcctgagcttgaggccaattaaacactggtcagtaacaggcacccccctcccctcacctcccacaccattcacagggctgtaagcccctcacctgcatcagccacctctgcagcagccgcaccctttggtctagagggaggaagccccaggatccgcccctagggctgagcccggggcttccccgcggccttaaccccttcagtgccgaccccacccactgtgggcggggctccggggtcctcagagagtggcttctccgtctctcccgggcctcggtttccccctccctcctagtgggtcacaggctgtggagcttttgggaatgaggacttcgagagctcgactctgtgggcaggtgtggctcggcatggtctggaaacgaacgactgacgcggggagggcgtgcagggtggcatggccacttggggaccgcacgcgcggggtggacctacaggcagcaaatgggaagggtgcggtactgacatgttgatgctggcctctgggatgttccgcgtcctagctccgcacagctgggtatctcactcagtcgccacctcggactcctcggtccgacaacgttggcccccagcggtgcggcggatgttctgcagccgtcgcgtcctgcggcacgccacggcgttctaaggcctcccagcacccgcgcgtcgccgcttagaacccgcccctggtttgcgcgtcacaacacccgccaggcgccgactcagtctctaccctggctccgcccctgctgagccccaccccatctccatttgagtccgcctcctccccacccggccccatacaggcccctcctccttctccttgcgtcacagcttaggtcccgcctcgatttggcttcttccaggccctgccccagcccagcacgtcacttcagccaggcgcaggccccgcctccagctggctctgcctccgccagccccgccccaggctctgacaagtctagcttcggttcccgccggcctcctgccccaggacagcttggaaacggtccgatcaggtggggcttcctcttgaaatttgggccccaccctgggaagcagccgcccttagactgacgtcagatctggtgagagtgacaagcctttcctgtgccctttggataccggggcctggacattttaggcgctcagtaaacagctaagtaaatcatgactgctttatttgctggactggtgcctctcagcagattcaggggtcgtgcagggctggttaccacaaactcagtaggagtgcaagggctgtacccccggagctagacagcctgggtttgaatctcaacttctcccttttcttgctgtgcaaccttgggcaacgtgcttactctcaatgtgagtgactcagtttcctcatagcctcattgtgaggaatgaataagtccacataaaacgcttagcacggggattggcaaagagtaggcactcagtgaatgtcagcctttgtgattgctgcagttcaaagactggctcagtgtctctggaggaattgtctatgaccttgccaagtagatgcatatggacatggaatgaatggtgtctgctgtggttctaactccttatgccactattccagtctgtaagtatgcatgtgtgtgcagggaatatgcctgtgacagtggctgagtgtactctttactgtgaccatgacttgtatgactgtgcatgtatttgaggaagccctggccagacccagagtgcattaggttctcaatatgtgcaactcagtgtgtggccaatcaccacatgctcttccgctcacaccacggtgcctgccagccagggtagcatcgacatttgaactccacagccatctgtgcctgatcttcaagtgagagggcaccccgcaggctcaggggcccaccaccaggcgtgagctggatggagaaactggcagggttaaggaggaggagggctttggggtggctggtgcggcggacacagcggccatggccggagcacagggcttgactgcagagaagggccccactggtcacgttcaggatgaagggccccagtgtagtgtccatatactccttgatggcctgacatgattcctaggtgggaagggaggatagcgtcagggacaccatggccatgtatggacccacccagggcactgaggcactcacctgctggtcagccag

SEQ ID NO: 315998 - DNA, 4001 bp, Homo sapiens
cctgcccatagctatggggcagtccgaggaaggaggactagggtaggcttctcttcaaaccctctgctccttcacaaccactggggatgcaggcagagaagctggggcgaggggacccaatggggccaggaaaacaggagccttctctggtctggaccagctataatggctacctctccacagagtccaggaagcccctgaggtcagggctgtgtcagttttttatttttattttatttttttgagacggagtctcactctgtcaccaggctggagtgcagtggcgcgatctcggctcactgcaacctctgcctccctggttcaagcgattctcctgcctcagcctcccgagtagctgggattacaggcacaccccaccacgcccggctaatttttgtattttagtagagatggggtttcaccatgttggccaggatggtctcgatctcctgaccttgtgatctgcccgcctcggcctcccaaagtgctgggattacaggtgtgagccaccgtgcccggccagggctgtgtcagttttacaggcaggaagcagaggctcagaagtcgagttcgatctgagttataccaaagagggactctactccatgcctggcctcctgctggggcctggacctctcacaacctgagcggactgaagaggctgtggtccttctggcctggactccaggtccgtggaagacagtgggccagcctccttatggagggccagcgtgtctgagcatgaattccccccactgacaaactgttcagggcacacaatggtccattgtgcccagggcacacctgagccaggagcatgatgccaggcaggtgcagggagggaggtgctgggtgaaggggaggggagtgttaccctgggatccctccctgctgtgggtacagaaggaaaatgggggactatgtgtgtgagacggtgtgagtgataccaggttctcagctgatgggacacccacgtctgagtcactcccctcaccttctgactccacctgaagtattttctgagatgggtggggagctcaggaggaacgggcctccctccaaccttttcagacatccctcagggcctcaaggacccaccctcaccctgggcatccagaggaaaaccttttcttctgctcctagagaggtcctgggtctacccctcagaatgggggtggggtggggtgggtcatttcaagtcagggaagagcttatcacagcctgttcgctggggtgtggggggatgcaactcaagaaggacctgaagtgggagcattccccttccacacacctccctaccttggcccacacccccagacccgttggccacgaccacccaatcaggccgcgcccaagggagaggcagctcatagacaaattgagtccccctccccctagcctcctggccagtctccaggtctctccaggtctcagtttccccatttgtaaaaaggccaagtgtccggccgcctcggcccaggccactctcctctagcaagaaagactcaggctgcacggtcctgctcgcgggggtgggttgctatgaagtgcacgaccgcgagctctgtccccaaggcataagtgccagaggcacccggcgggctgggggcacacacgtgtgtgcggagccggagcatgccctgcgcgcgcgcgcccgcgcgcgcggctacgcggccccagcggcgcggggcgccaggtgcagcaggcgcggggcgcgcgaagctgggggcaccgcgggtgcgggtgcgggcgcggggcggggcgggctcacctgcgcgtagtagagcagccacaactcgtacagccgctccgaggcggccatggcccggcccggctccggccctgctgcgcgccacctgtcgccgcctcctccgcgccgcccgccggttgccctcggccaggcccatgggcggagggcgtcactccggggcggagcggcgcggtactactggggaagtctgcggctgtggcctccgcggcgcagagccacccaagtctgctcgctcctcctcctcactgccggccgccgcccagcttcctgcacttcgctgcagtcaccgccgccccgcctctcctgggaccatgtaaagggcggagagcctggcaggaggaggggcctatgggccgggcggcccgggagggtgccccgctgccctgccccaccagtgccattggaagggccagcctgagcctccgggacgagggtcggggtgaggaattccagacttccccagggtctgaatccgcccaggacgctgctcgcctgactgcatttgccgccattcagggaaggggcggcgggccgcgtggaggtggcgagggtccttcaacaataatctccaccaccaccatgacgaccccttgtagcgcttatcaaatgccaggtgctactctgtcgctttatgggaagaccgaaacgcaacttttgagctctagctgtttgtggagtgtgatggcgggaagttagagagtagcaggactagcctgaaataccttcggggccgcggtgccctcccagatcccagagaggcttagaccgttgccacgggtccccctccctcctccaggaagccttcccaaacgctccagtggaggggctccccccattccccaactccagggcccagaacttgcttcacatatgttgtttctttaacctcaacaggtgggtgcctcatggctctgttttttgtttgtttttgagacagagtctcactctgtcgcccaggctggagtgcagtgactcgatctcggctcactgcaatctccgcctcctgggttcaagtgattctcctgcctcagcctcctgagtagctgggactacaggcgcgtgtcaccaggcccagctaattttttgtatttttagtagagacggggttccaccgtgttagccaggatggtctggatttcctgacttcatgatccacccgcctcgacctcccaaagtgctgggattataggcatgagccaccgcacccggccggctctgttttacagatggagaaactgaggcccaagttgaccaaatgaggaccacttgggcagcaggggcagggacccaggcttgactgactcttttttgggtccctgccaccatcaccccgtgcccccttccccatccccttacctcacagtctggacacggggaaaggggcacggggtgatggtggcagggacccaacccctggtgttgggcagggatcaggctctttgttggggctggggagaagttttctgggcccagaggggtgctactcgttccaggagttgaccagtctggagactcctagaccttggttggccaagacaacagagaccctgtcctgttttgttctcccagcttcttggttcacctctggccttttgtcctgcttcatccatcatagctctgagctgaggtttcctgagcacctccaaactgcatgccaggccttggcagagcaacccatccactacagggaagaaggcttagacagacccaggttagtgaggacaagagggttagtgaagggagggctagatctgcagtctgtggcccatgggcctctgaagggagttggaaggggaagagtggatgtccacctgtagccagcttgggaagggaagactcagggagggaacagcctaagaggctagttgtcccctggcagtggaggtggagagggggcggcatggtctcctattcccaagtgagagggggtgtggctttggggacccccacatactgaaagaatatcttgacttcagcctaagtggtctcgcggttatcaggacactctagttcatgcaggaaagaagactctggcagcttctgctgggtagccatgaatcttgtggcgacttgcagtcgaggccaccccaagtctttctaagctggggattgggggcagtacttgaggcccactggacccaggttggggtttgctcttccccgggaaaggtaacttgaccctgaggactttgctgctccaggaggggatgggaatgagaggggatcatct

SEQ ID NO: 315999 - DNA, 4001 bp, Homo sapiens
aagtatattaatatggattccattcacagaatgctagaaattccacatgacagtatggcattagcatctaaaaaaagctacaggtttagactgaggagatgaataatagacaaagtcagaaggttccagttttcatctcacaggatgctttaagttcaaaatggtcaggatgtggaactgtctaaagtagtaactaaaagtggtagaagtgcaaatcatgcctggcacttaggcatcccagcactttgggaagccccaggcaggtggatcgcttgagtcccagagttcgagactggcctgagcaacacagggagaccctgtctctacaaaaaattagctggatgtggtggcgcgagcctgtggtcccagcttctcaggaggctgaggtgggtaggatcacttaggctcaggaggttgaggctgcgtgagccgtgattgcgccactgcacttcagcctaggcaataaagcgagactctgtctcaaaaaataaaatacattaactgaataaattttttttttttgagaaggaatatcgctctgttgcccaggctggagtgcagtggcgcgatctcacagcaacctccacctccccggttcaagcgattctcctgcctcagcctcccgaatagctgggattacaagcgcctgccaccacgcccgcctaatttttgtatttttagtaagacggggtttcaccatcttggccaggctagtcttgaactcctaacctcgtgatccacccgcctcagcctcccaaagtgctgggattacaggcgtgagccaccgttcccagccttgactaaataaatctaagagcttccctaatttagcgtcaaacaaaatttccctttccctactctagtaacacatttcacacattctccacacttaccctctgctatatgcgccccttcctttcccagtcacaaggggatttttcccttttctgaatcctcactacaggggattatgagctcgcagagcgcagaaactgtcttccctctccctctagggtttagcacaaggatttggcgacagcactcgataaacgtttactaaataattgggttaatgagtcccgccccgccaacccccaaccgtattccatccctacctccgctgatactgaaaagtctactttgaatatctgctgcctcccctttttccacaaaatatactgtgatatagtccggactaaaaatttccctcttctgaaatccagcaattctccgatctttacatccgaacaccctcaaagtgccgagcttggcgggtccacctccccactccgaagcttccccgagggcggagtgaggactccacttgtgtctcccacgcaccgcgtacagcttccgtaacaccatcctcccagagaaggggcccgaatcgccgaagggcactgcttcgccgatttaaaaaacaaagcaaaaagccccgcatctgcatcaggaaggcgcctctgcctactctgggagagagaagggcacccctcccccttgctacgtagtcgtctgcggaggcacaaccgtggaaacgggagccgccaccaccaccaccgctcaaacctctcggcactggctggggtacagggagcggctgcgagcgaatgggataagcgagcctccagttccccgtcttccagagcaagtggcttcagtgatatccaagcgcccttccagcacccattccctgcctcgccagcaggcaccggggccccacttggcgtttgcggatttcagctgaatgggaggcgacacaatgagacaagagcaaaccgtttctcagcgttcttgcccagggccttcccgtctcgcggcccggcctccctcacccggaagtgctggtcccggtactggctcagctccacgtaggagtcgctgcgcagcgccttcaggaggccacccgacatagtgcagagaagcggaccacaatgcggcgactcccggcacgaggctgcgtccgcgatggcggaagcggaaacgcgcggaggcgagcatctcattggacccaatccgagggcggcgtgtcgtcatcaagctgcgcgggggcatagacgtccgggtcgggcgccgcggggcggaagacgagggcggcgaggtcgggttccgggcgcttggagaagatggtgctgcggcggctgctggccgccctgctgcacagcccgcagctggtggaacgtctgtcagagtcgcggcctatccgacgtgcggcgcagctcacggccttcgcactgctgcaggcccagctgcggggccaggacgcggcccgccgcctgcaggacctcgcggctgggcccgtgggctccctgtgccgccgcgctgagcgatttagagacgccttcacccaggagctacgccgcggcctccgaggccgctcggggccaccaccaggtagccagaggggccctggcgcaaacatttaatcctgggctgtgcggggccgaggccgcttgcttttccttccgggctctacagtggcatcaatgtggaggggtcattccgggcactgcgcgcggcttcgaatcccgactgggattgttggcctgcagacatcccacgcataagagcctaggccagaccgcccgctccgttgaagtcttgtgattggacaagacacagtgtggagacagccctaagcctaacagagatgaaggtaggctgggtccagacacggcacctacggagagccacggaccgaagccagagagcctttcctctgcaagtgggactgaaactcttgacagatgctgctcaatctgactggtatagcaggacagttaattccagggacgatatggatgaaaagacaaccctacagctgccaaattcctttgattaaatgtgtgagctggttgataggcatgagtgtgatacttctcaggcaagatgtgttaagaataccggggactgtaggcctatggtaataataaacacgtattttatgaaatgagtcttctgtgctgggacttgctcattgcactctatgtgttatctcactccttacaacgacattcacatgaggaagcagattactttttggatttttttgtagagatggggtggtctcgaactcttgggcgcaagtgatcctcccgcctcagcctcccaaagtgctgggattataggcaagagccactgcgatggaaacagaggctgctgcttaagttgcccaaagtcttgcagagtgggatgtgagcagaggcatttgactccagggcctaagtccttaacacagctctgcagcatttaccctgatactcaaccccttccttccccaaccccccaccatcaggcattaagactactgcctaggggcagggcctggtggcagttgtgtcttatcccagccactgcagaggcaggaggatcgcatgagcctgagatgagaccagcctgggtagcatagcgagaacctttctcaaaaaaaaaaaaaaaaaaaaaaaagactactgcctgccatggaacaagttacctggactcctatcctgtggggaaaagagagatcagattgttactgtgtctgtgtagaaagaagtagacataggagactccattttgttctgtactgagaaaaattcttctgccttgagatgctgttaatctgtaaccccacccccaaccccctgctctctgaaacatgtgctgtgtccactcagggttaaatggattaagggcggtgcaagatgtgctttgttaaacagatgcttgaaggcagcatgctcgttaagagtcatcaccactccctaatctcaagtaccgagggacacaaacactgcggaagcccacagggacctctgcctaggaaagccaggtattgtccaaggtttctccccatgtgatagtctgaaatatggcctcgtgggaagggaaagacctgaccgtccctcacagcgtgacacccgtaaagggtctgtgctgagaaggattagtgaaagaagaaggaacgcctctttgccgttgaaacaagaggaaggcatctgtctcctgcccgtccctgggca

SEQ ID NO: 316000 - DNA, 4001 bp, Homo sapiens
acttatgatggagaagacttctttggtgacctgaaaactaagaataatctctgcagccaacacagcagtttgatctttttcctgttttcctctgtttaagttattgtagtagaccattaacccacccaggtaaacatcactgttcctcaatctttgaagggtattactttcaaattacataatttcatgggggaggagagggaatgcaaggcttcctacaacaagactgactttcttgacaccagtgctaaagaaggggatgatcattttcaccatgtcaacattataggaagcaagaggaaaagaaggggggcaggggtctatagcttcatagacctttcctaagagacaaaaggggctttggaggtgagaatgtggctgaattcaggaaaagcaaatccacgctaggaatgtgctgcaatatcctagtaaggggacttttcataggataaagccccacagattatgtaatcctacacataatgagtggacagggaacaggaacataaaccctctgggaaaatcatgacttttttaaaatcagctttctcaggttgaaatgattttttttctctttctctagttgtcatttctgaaagaaagagtttataaaaatattctgagattaaagcccaaggttgtggggagggaggaggcttggttttggagaaggttagagtttagatagagcaggctgctcagaaatactgtccaatcagagggctcagccttggctgcagactgtagtttagattttagattctctgacactaaaaataatgcctcttaccatggaataaaccagagacagttatattttcctgtgtatggaaggaatgaacacacgcccatgatacagtggagagaaatgttaccctcccaggttaaggcaggtaacctcgctcaggaaaaggttatctgacagccaaggacataaaataaatgctgcagggcaagcagaaaacatgcatcatgcaaaccagggctgccgcctcctcacctcctttcagccagcccagcctcccagtcctctttcttgggctgagctgagatctgcctcgggtgaaacgagagatccctatggttcctcaagtgcttggatggagagccctgcctgctgtctccgggaacggagcgctccacagcctggggacattgcgagactgcccttgcctgcttctgcttctaaggtggctgcattcccaggaaccagagcctgcttttcccgagctctcctaaaaatatttatcctctgccggtccctatgggagaacgacagtgtgaagaagggtggtttataaactgcttaaggatttgccttttgacgttgcaaaccaaggaagaggaagatatttaggacagacgaaggtttaaacagttgtcaaattctattcaagcacttcttccccgtcacaaacgcagacggggaaatgcagatctagcccgctgctagcaaggaggcgaatgcgataccctgaaaattcccgactggaccacctcaaaaagcgacagcctcaatgcattaggaaaaacctgcgttttcgtggaacccggcggaggaattttgtatccccttcaaatattgcgtaagaggaggaagagagaagcagcgctgggctgcacctcaccacttgctgtgcaccccggaaagtggcgtccagcagcatcagcttccaggggtcggacacggagccaggcagcgggatgtagacgtaataggcggccagcgccaccagggcggtgagcaggacacaggacgacctcatcttgccctggctcggctcgccagcgggctggcaaagaggaaagggcgataccacccggagacctccggcaactttctgcccgcggcagctgctcattcacgcgtttcttataagcccaggagccaatcagaggctgcgtcgggaggaagttggagcgcggacatgccccctctacggtgtccttgcaaagtgtggcagtcactacaggtttgaggaaggctctgtcgctgctctggccgtaggcacagcggactctggaggacactggtttgtactgcatgcgtgtgaggatggctttcctcctggaaggtctcaaacggaaaatagtttcagtgtgacgagtctctggacaaagcaagtgggtcattctgactcagagtactgagaaaggatataaaaattctgttttctggagccagacttggagtggtttgtaagttctagctgatatatggcaaaagaagatattaaattcttctggctcaagcaatgaaaggccagtagtacatctagcacccaagtcttggtttctaaatcctatgctccaataagaggaaccacggctttttgacacaacctctggagaaaaggctgataccagggctggggctgtaaagtacaagatgaacctgttgtgccagagatgcggaagtgctcaaaaaatgataggaactggtcaaaggtccacagctgccagcttgaagggtctcccagtggctgaagctgggataattttaccatcaatataaatcatcataatggataacccattgattaaaataaaactcaacaatctatattaatataaataaatgaggaaagaagaaaggcttttcttaaaatagaatgccagctagtatccatagaaaatcataaatgaatgctaaaactagagggtaaaaatttgacacagaattttggtccttcatcagaagatctctccacaaattactacaaagggaaaaaataataactttttattggagaaacgtgtggatatcacctgaaaaattctttcagtgagtcaatggtagcagaaatacacttaaacccagatttcttgttaatgattgggggtgaggaggggtgggtgagtactgaatgggagagagaaaacttcactagcaaaatttcaaccagaaatccagaaggaaaacagttagaagacctgtttcaagaaagtggtaggatgacaactccaaacttattgatgaaggtcttaaaacacctagtatatataattatgcatcttaagatggtaattttaatttaatcaaattaatagaagtgaaataaccataaatttggttctgataatgagatttttaggaaacagttggcttcttcttcaacattgaaggaaaactgataagaagggcacactttcatggtatttcaagcaagttctctctctcttttttttttgttttgtttgtttttggtgtttgttttttgttttttttgagacggagtcttgctcttttcgcccaggctagagtgcaatggcacgatctcagctcactgcaacctccacctcctgggttcaagcaattctcttgcctcagcctcctcagtaggtgggattacaggtgcccaccaccacacctggctgatttttgtatttttagtagagatggggtttcaccatgctggccaggctggtctcaaactcctgaccttgtgatctgcccacctcagtctcccaaagtgctgggattacaggcatgatccacggcacctggcctctctctctctctctctctctctctctctctctctctctctctctctctgtcttttaagttactggttaaactcataactctaaacagataggaatgtttatgtttatgtttgtgtgtgagtatatgtgtagaaaattagaagctattctttttttttttgagatagagcatcgctcttgtcacccaggctggagtgcaatggtgcaatcttggctcactgcaacctctgcctcccgggttcaagccattctgcctcagcctcccgagtagctgggatttcagatgcctgccactaagcccagctaattttgtatttttagtagagacagggtttcaccgtgttggccaggctggtcttgaactcctgacttcaggtgatccacctgcctcagcctccaaaagtgctgggattacaggtgtgaactaccacgcccagccagaagctaatctttatgggtgattaggaataatcctggagatataaaccaag

SEQ ID NO: 316001 - DNA, 4001 bp, Homo sapiens
tttatttaaaacattgtacaatttttgttttcaaagatactctggctgccacacaaaaagcacataatactctgtttcttctactttataagcccattcaggtaggaagtagatgaatagcctgtctctactctgacaaactgcctggcaaaataaataaaaatttggggttgctgcagggattgagcaaagaaacattttggttacaaatttcaaatcctgactcccagtctgcaaatgcattaactatcaacttcctaagactcagcaaaaagaataattttaccactgtattgatgatatatattgaatcactgtatcaatgatacaatggattctttttttttttttttttttgagatggagtctcgctctgttgcccaggctggcatgcagtggcacaatcttggctcactgcagcctctacctctggtttcaagtgattctcctgcctcagcttcccaagtagctgggattacaggcacccgccaccacgcccagctaatgtttgcatttttagtagagacagtgtttcaccatgttgaccaggctggtctcaaactcctgacctcaagtgatccacccacttcggcctcccaaagtgctgagattacaggcttgagctgccacgcctagccacaatggattctttttatgtcatttctggttgctttatggtcaacatcacttatgactaaatctagatatgaaatccactgtattattaataacaatcatcatatacctctccaccagaatgtaagatttgctagagttagtattagtttttcaccctatgatttctgcctggcttggagtaggctctcaataagaatgtgttgataaacaaatgaatgagcaaataagtaagttcttcaaaggtaaaacttacccaaaaaatgaaaaatgcaaagatctgaaattttagtaactccccaaaaagtaaacagaagagacatattccagagggagtcactaaagctaacaaatgagtcttcacattacaattacaacattctttttcaacaaagtgcttattccttttctcttttgcccttttctctggaatctcttgtcaggttactctttgtttccttaggcttgttgtgcataagagacttctataataattcctctgttcatttttctagaaacaccaagcaaatgttcaaggagatcaaattaagttcactataagatcataaggaggccactagcagaatcagcagaattaggctcttataaattattattagttttacttcatgacccaaactcaataacagtcaagaattcactattttcctcttggttgtatagctgttctcataactcatatcaaaatatcaaatctcacattaatcaaaacatcaatttctagcaatactacattaattaaataaaaatattctctttactagtgtttttattaaagattatctttacactgttccgctaaaaaaaaagtaagcaaaaagtagttaaaaaaaaaaaagttaattccaaagttgaggatgaagaaatttgttcacctaatcctttttatctaatgtttttaatgtttacaatttatttaattcacttcaaatgtctgtgctaagttgaaaattactgaattagaactgcatcaaactcaaaccatttatatcctttctctacttgttaaacattcatgctaaaacattttaaaattattttacttaccaagtcgaaactacaatttttggatatatcaccaatcatttggtttatattacatacacataatgtagtagcttacataaacccaccaaataagagttttcctttaaatttacaaaagcagaaaatctaattcacaacttcaagaaaacagtggatttaataaacagattaacttactgaaaaaatctttaaagacgtttaaccaatccattttgagtaaaaattctgtgttctgtcagtttgttaacacagctcaggataattctcagtgagcttcctcgtctgttctgcaacactgaaacttcccacacccaatccatgtgacctggcccacacccaggcaatagaaaatttttctgaggcttctctttccaaaacttttttttcctctaaattataacacagcctgtataacaagtaaataatcatggccaaaaatatgaccttattattcagacttattttggaagatgctttaaagcatatatattttttatagttaaaatatattcatgaattaatccttttgttttccccttttccttctcaactttcaaacaatgtctccaccagcacaaccattgcgaaacaaatccattaattacaccggatatttaagttaccaaaaagggatacagaaattatgagaaaagggaaaagtttatctaatgtaaaagctggacttatatctctttacaggttaactacagatcactaactcaaaacaatgtttccaagcaccctggaataaaggtagcaataactgtaatacagtaataaagttaacagagatttcctaagacttaaatagagataaaatcttgataaaactgtctcaataacatcagaatactgtagtacggaatgcatcctggagtattaacaaataaaaattatatttaaatgggattttagatttacatacagtaatacctaatactggactacttcccccctttgctctatgataatagttttttcactatattttgttaattactgtcacattcactctaatcccaagataccagtgtcctcttaaaatggaacaaaaaagtctaactgggtatgtcttagtaccctgtgcacgtatcactatgaggcatactttcttgacagaaattaccttaatttctcccaatatctctaatcatcatgctttaaataaattccagtatttacaaaaccagtattgctgattctaaccctggtctcttctgctactgaaggaaaatctctttctgatttgtcttccattgaaaaactaaaaataatggtcttaatcacaaaacccaaaagtatttaaaaagttacctcagcagttaaacatcacattatatctacttaattacctttagaacactggaaatatttttatctcagaaactgataatccactactttatatcttactccaaattgtactatattttagtttttgcagttttacaatggttaaaaacattaaatatttgtattttattgataattagaagaacattctagaataacaataatgttgaataagaataaaaactaagctgggtatggtagtaagcatctgtagtcccagctactcaggaagctgaggtgggagggttgcttgagcccaggagttcaagtttggcctggacaacagagcaagactccatctctacaaaaccataaaaaataaataaataaaaactaatgtaaagtagtgagtcaacagtatttcatatttgtcagtcatgctatattgctcccaaactgtctgcacaaggagaaattgtacttttcttctacacctagacaaagaacaattacgcaaatagcatgtttgcctgaacaccaaaaatgaaattctgtccctcccaattccttcctgtcagctaaggagagtttaattttttttttttttttttttttttaaagaagaggccattccttgcccatgcatatttccttcctatcagcttagccaagtccagtgtgaagtgggctccactgtctcaggccctaatggagggccagtaaaaataaaaaacaaaaactttggagaaataaagggaaaaagagaaacaaaatagaaaagagctctgtaggtgctaatgtacagtaatgatccacagttctcttatcaaatagaaaaacaaaatggagggttttaagtgaagttcaaaacataaggtcattagatgttaaaattcattatgtgccatgtacataagttgccttggtgccaaagaggcaattctgcctataagtctaaactccaacagtgattcatggttcaaaaagcccctgctagaaggtga

SEQ ID NO: 316002 - DNA, 4001 bp, Homo sapiens
cattacacgtaggtttcaaattttatttagatggacctgaaagcactgcagaaacctggacaaaggataatgcctagaaaaataaatacacattttatttatttttttgagacggagtctcgctctgtcgcccaggctggagtgcagtggcgcgatctcggctcactgcaagctccgcctcccgggttcacgccattctcctgcctcagcctcccgagtagctgggactataggcgcccgccaccacgcccggctacttttttgtatttttagtagagacggggtttcaccgtgtctgctagggtggtttcaatctcctgacctcgtgatccgcccgcctcagcctcccaaagtgctgggattacaggtttgagctaccccgcctggactccctcagtatcgaacaaaacattacacgtaggtttcaaattttatttagatggacctgaaagcactgtcaaaacctggacaaaagataatgcctagaaaaataagtacacattttaaaatttaatacatgagccaacagctgagtagatgtgaacactctgcaaactatgtttatggatattacagccaatttccacagatcacaattttcccaaagaagtctcagagtttgtggtcaagatgaaaagaaagcaccatttatcaaccagtgcatattactatcaagttgtgaatgggatgcctatttaagaatatcacagactccaccccccacaagaaaattaagtgttttaaaaagaaaagaacgaatattattgacaattaccaaacaaaactttcttcttaggttatttctccgtttactgtgtgacctcgccgaaggctgagagtctaggcacactggtttccaggtgctgaagaaatcgttatagttggtttgtcatacgtctatcaaagtaaaattttaaaaatgagtaccttttggcaacacccgttttgggaggacattgagctgctttgctccctacccaaagaggagttaggaaattctctttaacctaattctttcctaatttctagggcttcttacctaatctaacgtgcataattattttcaggtgactccgggtccatcagtttgacaccgagagcgttcctacggttacgtcctcacccctgaacaaaacccagcttcctgagcttctaacggcgaatttaacttgtatgttaatacagaagaaaggttacaaaacctatcgaaatggttttttgttttaccaaacatattacaactcaagtcaaaagttcacagccccagcaactcgcgtacgaatctgaagcaggtccagaccattaaagtcacagccccagactagaaaacggccggtgggtggggggaggggagagggcgcgtcccgaagatgtccacccgcagcaccgcgcaggctgacgcctcccctcctctcgggctggaggtgagagcgcccttcctcctaccacgtccctaccttcccggcctcggattacgccacagctggcaaaaggactttttcatgagaaaacagacaagtcaaccagcgcgccgcacactcgacctcccaggctcgcacgggcggccgcccgggctctcagcccgacacagcgctccaggggctgacaaggaggccgcggggtcacgctccctggggcaacggcccgagggtctcgcggaatcccggtgcagaagtctggaccctccgagcagcctccgcgccccctccggctcggctccgagcctgcagacggcgcccccggggctaactcagcgcgagaagaggaagcgacgcagcgagtaacaggctgtatggacggacagcggactgaaggggggtgtgtgtgtgtctgcctgccaacaaggccgtctcaccttcccgctgccgagccgggcagctccagctcacctgaggagggctccaggacgccactgcggccgccgtgatggccgtaacggcacgaggcctgcgctccgccgccgccgcgtagctcttgggagagaggcggggcacgcgcggtgggcaggcggatccgcgcgggcaggaaacccactctggacccaatctgataggttcagtcgcccccttccccggtccctgacgcgacaacggtctctgccgcactgggattgggcgggccctcatgtcaatcaagcgccgtgcctgatgtggagggagcggaggctgcgcggcggagagtagagagctagagggtgagaagcgctgggccggaccagaactgtcttagcttttccctctgcggctgctctggttggttactttgagcctgcctcctcagcgccgcaggagagacttaacagcaaaaatgactgtgtcctgagttcagcccccactgctctgggagcttccccctggtttctgcacctgaagaatgtcatcccagccgaaggttcttaggagcggggagcgacaaagaaaaacaaagaaaagcagacctgaaaattgggacctgggagaaatgtaagacatgtgcttaatttgaggcacagaccaaaagaagctgagtctgagggccctctaaaagtgtcctcgtgcttgggcagcttacattcttggcggcagtagtgttatgaagaggaccttcggagccaggtctgtccattcttagggctccagccactggctgaggcatcagtaagttggttcttcccctcgccggtgctgcaggcccccttccccgcccccgcgccgtaacctgcctcttttttttttttttttgaaacgagtttcgctctgtcgccagggtggagtgcagtggcacgatctcggctcactgcaacctccgcctccgggttcaagctattctcctgcctcagcctcccgagtagctgggattacaggcatgtaccaccacgcccagctaatgtttttgtatttttagcagtgacggggtttcaccaggatggtctcgatctcttgacctcgtgattcgccagcctcggcctcccaaagtgctgggattacaggcgtgagccaccacgcccagccgcctcatctcttcttaaccatctttgtggcacagtttaggatcgctcctcagggaagcttgctcagttaggtaccttccttggagcacaggtgttttctccatccgagctattgaaatggtttgcctgtatgtctacctagattgtaaactccgttgaatcagtaaccatgtctgttcagtttctccctagggccttgcagtagggtagatggtcagtaaatactgtttaaggcattaatactttttattttaatcctggccctggatatcagcctcaaaagtttgcagttttctgcatttaacttcaaaattatttacgtgattggtaatgcatgcatgtggttggcctgtgctgtaatttagatgtttgttcccctaaacctcctgttgaaatttgatccccaatgttggaggtggggactaatgggcagtgttgggtcatggaggtggttccttcaggaatagattaatgtcctccctggggagagggtaaatgagttctctttatttccaccagagctggttaaaaagaacgtcgcacttcctttcttcttttgcgtcctctctggccatgtaatctctgcacacaccagctctcctttgccttctggcatgagtagaagcagtcttaggctaccatcagatgcagatgctcagtcttgaacttttccagacatcagaaccataagccgaaaaaccttttctatttctaaattatccagctttgggtattcctttctagcaacactaaagggactaagacagcctgccatatgtaggatcacaaggtcaagcacaaatttacctatttatgctgtactatcctcaggttgactgggacaagtagaccatgaaactgggcaacagctactctatgtctacattctgttattagcatccaaagtgaataatggcggtgaattttgagtttattctaagggtttaaataactgcatattttatcatgactggtatggactgaattgcatcccccccaaaaattcatactg

SEQ ID NO: 316003 - DNA, 4001 bp, Homo sapiens
tgccagagtgcagggagaggagacagggggatagaaagacatgaagacacacacacacacacacacacacacacacacacacacacagagagagagagaaagaaaggaatggggaaagagaggagctcagagaggaacggagaggcagacagagggaaacaacgcagaaagaaacagagccaaagccagagtgtggggggagccggaggaagaaacaaaaacacacacatgtggagtcggaacgacacaggcagagaggcacagagtcgcagcaatccagacagaaagagacacgcagaaagaaacagacagtgacagagaagatggtagcctctctgccctccccaaacaccttgccccactggtcctggctggcggcaggggactcacaggcccttgacctatgcccagtaggggaagagacaggacttttcctcagaggccttcaatgagaccccattcccaaaaaggttgggtctgacacacagcagccatggtgtccacggcccccactcccacccctggcactcctagatgggatcacgccaagggtctatgaggaagcccctaggcccccagggcccatccttcctggtaagaccagatgacacttccaaatttatcccgttatttctgtcctgaactgggctgggacaggatgtttcctaaaggataaggactaggacggggcgggggtgtctggcacaggcccggcagctctgggcccttcttccccctgtggtcagaatagaccagctggagatacgcaccccaacccccgcagcagggctactcttagggaaacaggaactgggactgcagcttccactggaaggaaatggggccacgatcagaccaggagaagctataagaactcacttcatcacaatgtgagcagtccccactccaggctgggaacaagtagggatggaacccattttcaaagcaagaaagtttgagaagtcagggttggggagtggagcagacagtgtcagcaggggcatgggtccttggttcaaataaggttggtagagacttaagaagagcttagagggtggctgaacacaggctagtgaaagacactgaagtaccaaagcttgggtgttacataggggatggaggtgtctatggctctagggtccaagttggggggttgaggacctggagaatggctagggaaacaggtggtgtccaaggtggtccaggtctcagtggtggctccaacggggggcaaggcgcggggttgggggaagaaggaagggagggagggagggagggagggagggagggagggaggttggttgtggggtcctaggaatccagagaaggggcatattaaggatctggggtctcagggatttgaataattggccaggattcggtggggctcagggtcgccattcagatggcggactcgatactgaagggtctggggtcctgaggagtctcagtcccagagttaggcttttggtcgatcgggagttggtctgtcaagggcctggtcttttgtgggtgatgctgacacttggggtctcagtccccgtgggtccgggggtctcagggtcaggttctcaaactccctgtctgatagaggtcctggcctcgggtcccggagagggtggggtccctgggtcggttccgcggggctgtgaaggggtcctgccccaggggcgcggaggccgggcgggaaggggcgcactcacctgcaggcggcgcaggtaggctggcggcacgtagcccgtctcaccactgcgcgcccgcgcggccagccaccagtgcgcgctgcttcgctctagcaccaggaaggtctcgcccgcggcgaacgccagcgcgttgggctccgccgagcggaacgcgtacagcgcgcggtacatgaggccgggcagggcaggtgcagggaaggtggcaagggctgcggcgccacaacgccaggccgggagcgccgagccgcgccgcggttgtcccgccccgtgacacactacgcaggcgcgcgcgcgcccgcccgccgaagccccgccccgggctgtatcgttccacgcatcggagagcagcgcccccgcgcggccccaagaggtgcggcggggctggggtcgacagctcgctgtctcctctggtccctcccggctccaggcccctcatccccggacaccgcaccctcactcctcaccccggcctcagtttcacccgtccagccctctgctccctttccccgcttaagtccgagcgctgcgtcccgtcctacctcccggtgaaagcgcgctccgctcgtagcgggtgcgcccctaccgccctggggcagtgggtcccatctactaattgcaaggacggcgacctcgaaaggatgatcttgctgatccgacacttggaagcccccgcggggcccggctctcggtgtgtctaggcctcaccacctgtcttcaccgagtgccggtggtggccagtggggagcaagtgtggggagaagggggccacaaaagcagaaaccaggcggggctattccctgtctaaagccctcccatctttgctccccacccctactcctcctctctcttcagctatggctggttttctctatattgggcctttgcatattctgttccctctacctgggacaattttcccttccctctcctatagtatttgtccgtcaagctcccacccccatcaatcgctatcatcttgctgtgttttattgtctttataggacttaagatttgcgatgcccctttctgagagcatagaggagggctgaaagagggagtggggtaccacggtggccttaagagcctatttgatccacccagctttccagtcagcccagatctccagatatatgaaatccgtgtaataagagtgcctggaagacccagggaagaggccctcagggtcctggagagactgtggctgagaatggtccagctacgctccacaggaagcccgagcccaggaagcaggaggcgtgtacaggccagtgtgtgcaagttttctatttttatctgtatttattttttgagacagggtcttgctctgtcgtccaggctggagtgcagtgggatgatcaagctcattgcagccttgatcttccaggctcaagcctactgtctctgggactacaggcatgcaccaccacactcagctttttttttttttttttttttttttttttttagtagagacaaggtcttgctatgttgctctggctagtctcaaattcccggactcaagcagtcctcccagtgttgggattatgggtgtctgtctgacccagttgcctatttttaggcctaaagtacataggcctagtgtgaggttcaggtgaggggtagaactgctagaaactgacatccagaccctgccttctctgcaccaggtctggctcttcagttcaagacctctcttggcccttcctcctcccagaagccctcctggggcagggcagaatctcggggtctgtgctgtctgggactgcctgaagaataagactggtgaaattgcaatggggactagggctgggcaggagtggtgacaggtggtgtggccaagaggaccaccctacctgcccaaacacgcctttttatggtaccctccatcacctgggcccctttacaacacagtccatggctgccaatggaccagacccgaggctagagaccctagtattgcttccaggacatctatcacaatagccagccaattagctgctgccagtggcataggagggattaaaagctggacccaaggtttggatcacctgctatctaattggcttaagctgcatacggcccatgagaagacctgtgtcaagcgtcatgtggtttttggatagaggtgctgagacacttagccagcacagacgccagaaggtatgtaacttggggatcctttctgggtaaccttcaggatgctgggttggagactgtacaccatgccaagaggttgtgctgactttaggatccatggagtgggggtggcagccaggagaatactgagccagggaggtg

SEQ ID NO: 316004 - DNA, 4001 bp, Homo sapiens
ctctaattccagctactcaggaggctgaggcacgagaatcgcttgaatccaggaggtggaggttgtagtgggccaagatcacgccactgcactgcagcccgggcgacagcgagactccatctcaaaaaaagaaaaacaatcagcgattttgtgagaaaagccgttgaggtcctctcaaatctgcatgtgagcaagtaggtctacaacaggcaaacatactgcttcccgacttctgaaaagtcaaggaatcctaagtaatctagatgaaaaagtgactccttggtttcttcacattcccctccaagagcccagtgagccatcagctcctggccagcaacacacctgatacaaaatgggagaagtgtataaattattatgttgataagcaagataagtgccaaagggtagataagagtgaaagcattgggaagcctggcagagtgcagtcagcaggtcagttcctggcggttcattgagcagcttggcccaaagatgtaagtgaagtccctcctggtggagggatgagagcagctccagttactcggccttcatgacacaggaagttgaaggtggcacaggcattgggctgcaaagaaaaggccagcatcagcctgtctagcgccaggcctgtgctccccgcagcatgccccagtcccgggactcaccgtgtcctgcacttccacagcaatgccccgctgcctcatggcttgaagcacctgggactgcagcctctcggtccggtctccagtccccaccaccacgatctctagggaagggtgggtgtggctagtctacagttctgttgagaggctgcagtgggggtcgccttctggggcccagaacacctctgttctccctccccttccccagtacctatccggggctccagcaaccagaagagggaaaagctgtcttcggtgatgtcctggtgggatcccacctgtgcagggaggaggcacatttaatacgacaaatccacgcagcctctccccatctccatccactgcaggaggagacagaggaaagccaagtttgcagggaccaagcagggtgagggcctgtgactctgggcctcagtttccacactgcgggccaggactcacgttccactgcaccaccgagtgcgggagcagagcgcaggggccgagcacgcggtttccgtttatcatgaagccgcggctgttgtagctgtcgatgtacattgcctgagcggcctcgcgttgcagcagagagatgcgcgtccgctgatacagctcgtcatccgccggcgagagccgatgccctcgccgcggggccctgcggagggaaagggtcaggggcgcggggccgggccgggcagcccgagaggccggaaggtgctgggctggcagtcgccggccctagggggctggatggtcgagggcgcggggtccaagctcaccagggaagctcaacgggcggacagcgcagcgagggtcgcgctcggtacaagctacgtagcgcgagagcggtggccatggctgaccaacgcgcggcgaagtcgtcaccggcgccgttagtccccgggttgggagggccctgcggagcctgacccagcgtggctgcagcgccccctgcgtcccggagggcaccgcacagctcgaccggcccagcaggcgagtgtcctcagtcttaggaggccgagttccccgacctccggcgcagctccagtgtcagcacctgccgccctccccgccccgggcccttgcccatagtcccgggggagtggaacacctggcagcgtggccaccctcagggcgttgcctgggccgcagccgcggcctggcccccgggctctcagctattaagccgcgctcccggggcggggcgaccgcccacctggtcgcgtcccgaacacctggccaggcggtgggtgccagacttctagcccctaattccagcctttggggcttcgggcaccgtgggcggggcagccggctcaagtttctccggctagacgcggaagcacgccccgccctaaccgtcacccgcgcgaccgttggcctctccgcagcgcgcggagaggggcgtggccgagcgtggattggcttctcgggttctctagggggcgtggccaggtggtttctccttaaaatggctccaagtctgcaggcagccagagcaagcggaagggcaagctgtgatagtgtttgggtggctgttcggctggcccagaccaggccgaaccggaccagacttgaagtagaagcgcgtggagcatcaccttgtcctcgttcactctgctcgcgtcctgggagtcccccgtcccccgtcttgatccaagtcaagggcctactggcgcgagagtcgctggcccccgcgcggggtttgggcatctcggcacgccggctctgtcgtggcctcaggggaacattgtcgctttcgctacccgcggggccgggcgagcgggaagctcggcacagtgggagcctggtggtgggtctcctggggccggtcgcaatgggtttccgggggtcccgcggctgctctgtggaccccttcggcccctggtgctccgggcgctggcagcgtcaccggacaaaggccaccgagcgcgggggtgtccccgaggtggacgcgcgggtttacttcctctccggccccacgggcgcgcttccctcctgacggattccgaagcccgccccaccaccgtcaccgcaccagtggcccaggcttcgtgggaccaacagggctaatcctgccccacggatctaatccggatcgggacccggtcccaggggaggcccccacctccccttctattgttctgtggcccaggtgagcgtcttgttccctctagactccgtttcacaacctactcccgggtcttcctcctgggactggggatgggcgggttctgatgtggccccagggcgagtgacctgggggcaggagctcccccgccccccgccaacggctggacagcgggcaacggaatcccaaaagcagctgttgtctccagagcattccagctgcgcttggatttcgtcccctgctctcctgcctgagcagcgccctggcccagatggggtgcccctgacccccagacatactttactgagctgcttgggtctcagttcctctcagttgcgccctcaggctggaggtgatgggtgtagacgtgggagagccgaggctggtggccatctctggaaccctggggaggattggcgagggagggtggacccaggacctctgggtagggctgcaatggtagtgactcccccagggctgcctcagcccgcatctcgctaaagatagccctcttacttcctggggaaaaaccaccccaaccgtcttcgtggatgagagtatctgaagtcctcagtttgactgagggttcccaaccctgctaagcagttgtctccaggtcatgcaccttcagaatggaaagcgctttggaatgacacgatcactcccgttgagtgggcacccgagaagccatcgggaatgtcgtgtccgcccagtgctctttcggcgcctcccagcagggcctcagccctggcccagaaaggggccttgccaagcttttcctgcccctgggtttccctgctctccggatttcccaactctctctactgagttagcttctctattaaaaggaatgggggtggggtggggggtgagtaagttacagtgaaatgaagacatttgggaacctttgtgggagaaagaaaaagacctttcctattggtagaggagcaagatactccaactgaggcctattttctattatggtcgcattatttggttggcccgtaaatggctgttgcctaaaacaggaagctttaaggatcgttgttaaagcacaccaggttaaaggagtcacattaaaagctggtcattctgagccgggcgcggtggctcacgcctgtaatcccagcactttgggaggccgaggcaggcggatcacctgaggtcgggagttcgaggcttgacaaacatggagaaaccccgtctctattaaaaatacaaaagtagcc

SEQ ID NO: 316005 - DNA, 4001 bp, Homo sapiens
agttcctggcggttcattgagcagcttggcccaaagatgtaagtgaagtccctcctggtggagggatgagagcagctccagttactcggccttcatgacacaggaagttgaaggtggcacaggcattgggctgcaaagaaaaggccagcatcagcctgtctagcgccaggcctgtgctccccgcagcatgccccagtcccgggactcaccgtgtcctgcacttccacagcaatgccccgctgcctcatggcttgaagcacctgggactgcagcctctcggtccggtctccagtccccaccaccacgatctctagggaagggtgggtgtggctagtctacagttctgttgagaggctgcagtgggggtcgccttctggggcccagaacacctctgttctccctccccttccccagtacctatccggggctccagcaaccagaagagggaaaagctgtcttcggtgatgtcctggtgggatcccacctgtgcagggaggaggcacatttaatacgacaaatccacgcagcctctccccatctccatccactgcaggaggagacagaggaaagccaagtttgcagggaccaagcagggtgagggcctgtgactctgggcctcagtttccacactgcgggccaggactcacgttccactgcaccaccgagtgcgggagcagagcgcaggggccgagcacgcggtttccgtttatcatgaagccgcggctgttgtagctgtcgatgtacattgcctgagcggcctcgcgttgcagcagagagatgcgcgtccgctgatacagctcgtcatccgccggcgagagccgatgccctcgccgcggggccctgcggagggaaagggtcaggggcgcggggccgggccgggcagcccgagaggccggaaggtgctgggctggcagtcgccggccctagggggctggatggtcgagggcgcggggtccaagctcaccagggaagctcaacgggcggacagcgcagcgagggtcgcgctcggtacaagctacgtagcgcgagagcggtggccatggctgaccaacgcgcggcgaagtcgtcaccggcgccgttagtccccgggttgggagggccctgcggagcctgacccagcgtggctgcagcgccccctgcgtcccggagggcaccgcacagctcgaccggcccagcaggcgagtgtcctcagtcttaggaggccgagttccccgacctccggcgcagctccagtgtcagcacctgccgccctccccgccccgggcccttgcccatagtcccgggggagtggaacacctggcagcgtggccaccctcagggcgttgcctgggccgcagccgcggcctggcccccgggctctcagctattaagccgcgctcccggggcggggcgaccgcccacctggtcgcgtcccgaacacctggccaggcggtgggtgccagacttctagcccctaattccagcctttggggcttcgggcaccgtgggcggggcagccggctcaagtttctccggctagacgcggaagcacgccccgccctaaccgtcacccgcgcgaccgttggcctctccgcagcgcgcggagaggggcgtggccgagcgtggattggcttctcgggttctctagggggcgtggccaggtggtttctccttaaaatggctccaagtctgcaggcagccagagcaagcggaagggcaagctgtgatagtgtttgggtggctgttcggctggcccagaccaggccgaaccggaccagacttgaagtagaagcgcgtggagcatcaccttgtcctcgttcactctgctcgcgtcctgggagtcccccgtcccccgtcttgatccaagtcaagggcctactggcgcgagagtcgctggcccccgcgcggggtttgggcatctcggcacgccggctctgtcgtggcctcaggggaacattgtcgctttcgctacccgcggggccgggcgagcgggaagctcggcacagtgggagcctggtggtgggtctcctggggccggtcgcaatgggtttccgggggtcccgcggctgctctgtggaccccttcggcccctggtgctccgggcgctggcagcgtcaccggacaaaggccaccgagcgcgggggtgtccccgaggtggacgcgcgggtttacttcctctccggccccacgggcgcgcttccctcctgacggattccgaagcccgccccaccaccgtcaccgcaccagtggcccaggcttcgtgggaccaacagggctaatcctgccccacggatctaatccggatcgggacccggtcccaggggaggcccccacctccccttctattgttctgtggcccaggtgagcgtcttgttccctctagactccgtttcacaacctactcccgggtcttcctcctgggactggggatgggcgggttctgatgtggccccagggcgagtgacctgggggcaggagctcccccgccccccgccaacggctggacagcgggcaacggaatcccaaaagcagctgttgtctccagagcattccagctgcgcttggatttcgtcccctgctctcctgcctgagcagcgccctggcccagatggggtgcccctgacccccagacatactttactgagctgcttgggtctcagttcctctcagttgcgccctcaggctggaggtgatgggtgtagacgtgggagagccgaggctggtggccatctctggaaccctggggaggattggcgagggagggtggacccaggacctctgggtagggctgcaatggtagtgactcccccagggctgcctcagcccgcatctcgctaaagatagccctcttacttcctggggaaaaaccaccccaaccgtcttcgtggatgagagtatctgaagtcctcagtttgactgagggttcccaaccctgctaagcagttgtctccaggtcatgcaccttcagaatggaaagcgctttggaatgacacgatcactcccgttgagtgggcacccgagaagccatcgggaatgtcgtgtccgcccagtgctctttcggcgcctcccagcagggcctcagccctggcccagaaaggggccttgccaagcttttcctgcccctgggtttccctgctctccggatttcccaactctctctactgagttagcttctctattaaaaggaatgggggtggggtggggggtgagtaagttacagtgaaatgaagacatttgggaacctttgtgggagaaagaaaaagacctttcctattggtagaggagcaagatactccaactgaggcctattttctattatggtcgcattatttggttggcccgtaaatggctgttgcctaaaacaggaagctttaaggatcgttgttaaagcacaccaggttaaaggagtcacattaaaagctggtcattctgagccgggcgcggtggctcacgcctgtaatcccagcactttgggaggccgaggcaggcggatcacctgaggtcgggagttcgaggcttgacaaacatggagaaaccccgtctctattaaaaatacaaaagtagccgggcgtggtggcgcgtgcctgtaatcccagctacttgggagactgaggcaggataatcacttgaacccgggagggggaggttgcggtgagccaagatcacaccactgtactccagcctgggcaacaggagcgaaactccgtctcaaaaaaaaaaaaaaaaagtctggtaattctggaagccatcatgatggttgtgatttctcaggtatcaagagaagaaaaccgccaactgtatcagagtgcttatttattgggcataaagaccacccgggctgggtgcagtggctgatgcctgtaatcccagcactttcggaggccgaggcgggcaggtcacgaggtcaggagttcgagaccagcctggccaacatggcgaaaccccgtctctactaaaaatacaaaaattagccgggcgtggtggcgggcgcccgtaatcccagctactcgggaggctgagga

SEQ ID NO: 316006 - DNA, 4001 bp, Homo sapiens
catgaagccgcggctgttgtagctgtcgatgtacattgcctgagcggcctcgcgttgcagcagagagatgcgcgtccgctgatacagctcgtcatccgccggcgagagccgatgccctcgccgcggggccctgcggagggaaagggtcaggggcgcggggccgggccgggcagcccgagaggccggaaggtgctgggctggcagtcgccggccctagggggctggatggtcgagggcgcggggtccaagctcaccagggaagctcaacgggcggacagcgcagcgagggtcgcgctcggtacaagctacgtagcgcgagagcggtggccatggctgaccaacgcgcggcgaagtcgtcaccggcgccgttagtccccgggttgggagggccctgcggagcctgacccagcgtggctgcagcgccccctgcgtcccggagggcaccgcacagctcgaccggcccagcaggcgagtgtcctcagtcttaggaggccgagttccccgacctccggcgcagctccagtgtcagcacctgccgccctccccgccccgggcccttgcccatagtcccgggggagtggaacacctggcagcgtggccaccctcagggcgttgcctgggccgcagccgcggcctggcccccgggctctcagctattaagccgcgctcccggggcggggcgaccgcccacctggtcgcgtcccgaacacctggccaggcggtgggtgccagacttctagcccctaattccagcctttggggcttcgggcaccgtgggcggggcagccggctcaagtttctccggctagacgcggaagcacgccccgccctaaccgtcacccgcgcgaccgttggcctctccgcagcgcgcggagaggggcgtggccgagcgtggattggcttctcgggttctctagggggcgtggccaggtggtttctccttaaaatggctccaagtctgcaggcagccagagcaagcggaagggcaagctgtgatagtgtttgggtggctgttcggctggcccagaccaggccgaaccggaccagacttgaagtagaagcgcgtggagcatcaccttgtcctcgttcactctgctcgcgtcctgggagtcccccgtcccccgtcttgatccaagtcaagggcctactggcgcgagagtcgctggcccccgcgcggggtttgggcatctcggcacgccggctctgtcgtggcctcaggggaacattgtcgctttcgctacccgcggggccgggcgagcgggaagctcggcacagtgggagcctggtggtgggtctcctggggccggtcgcaatgggtttccgggggtcccgcggctgctctgtggaccccttcggcccctggtgctccgggcgctggcagcgtcaccggacaaaggccaccgagcgcgggggtgtccccgaggtggacgcgcgggtttacttcctctccggccccacgggcgcgcttccctcctgacggattccgaagcccgccccaccaccgtcaccgcaccagtggcccaggcttcgtgggaccaacagggctaatcctgccccacggatctaatccggatcgggacccggtcccaggggaggcccccacctccccttctattgttctgtggcccaggtgagcgtcttgttccctctagactccgtttcacaacctactcccgggtcttcctcctgggactggggatgggcgggttctgatgtggccccagggcgagtgacctgggggcaggagctcccccgccccccgccaacggctggacagcgggcaacggaatcccaaaagcagctgttgtctccagagcattccagctgcgcttggatttcgtcccctgctctcctgcctgagcagcgccctggcccagatggggtgcccctgacccccagacatactttactgagctgcttgggtctcagttcctctcagttgcgccctcaggctggaggtgatgggtgtagacgtgggagagccgaggctggtggccatctctggaaccctggggaggattggcgagggagggtggacccaggacctctgggtagggctgcaatggtagtgactcccccagggctgcctcagcccgcatctcgctaaagatagccctcttacttcctggggaaaaaccaccccaaccgtcttcgtggatgagagtatctgaagtcctcagtttgactgagggttcccaaccctgctaagcagttgtctccaggtcatgcaccttcagaatggaaagcgctttggaatgacacgatcactcccgttgagtgggcacccgagaagccatcgggaatgtcgtgtccgcccagtgctctttcggcgcctcccagcagggcctcagccctggcccagaaaggggccttgccaagcttttcctgcccctgggtttccctgctctccggatttcccaactctctctactgagttagcttctctattaaaaggaatgggggtggggtggggggtgagtaagttacagtgaaatgaagacatttgggaacctttgtgggagaaagaaaaagacctttcctattggtagaggagcaagatactccaactgaggcctattttctattatggtcgcattatttggttggcccgtaaatggctgttgcctaaaacaggaagctttaaggatcgttgttaaagcacaccaggttaaaggagtcacattaaaagctggtcattctgagccgggcgcggtggctcacgcctgtaatcccagcactttgggaggccgaggcaggcggatcacctgaggtcgggagttcgaggcttgacaaacatggagaaaccccgtctctattaaaaatacaaaagtagccgggcgtggtggcgcgtgcctgtaatcccagctacttgggagactgaggcaggataatcacttgaacccgggagggggaggttgcggtgagccaagatcacaccactgtactccagcctgggcaacaggagcgaaactccgtctcaaaaaaaaaaaaaaaaagtctggtaattctggaagccatcatgatggttgtgatttctcaggtatcaagagaagaaaaccgccaactgtatcagagtgcttatttattgggcataaagaccacccgggctgggtgcagtggctgatgcctgtaatcccagcactttcggaggccgaggcgggcaggtcacgaggtcaggagttcgagaccagcctggccaacatggcgaaaccccgtctctactaaaaatacaaaaattagccgggcgtggtggcgggcgcccgtaatcccagctactcgggaggctgaggaggagaatcctgtgaatccgggaggtggaggctgcagtgagccgagatcgtgccactgcactccagcctgggagacaagagcaagactccgtctcaaacaaacaaaaaaacacccatatctcaaacgagaaaatgcttgcaaataacctgaaaccgcggaacactattctttttaaaacgagatattttaagtaggtcgtgaaagtggccttaatgttatactgccttattccagtgacgaatattcatcatgtgtaaaatgggagaaatgaaatgttattaaaacaaacatgtgagacttcgatgagaagagacggtacccggtctaagcgcccaccgggtcgcgaggatccttttcctggttaaggcctgggtcacagcgaaagaaccctaggcccagggagggccccgagatttcagatccggggcccggctgtgcaggtggaccacgcggaaggggcgctgggggcggtaggtcgaaagcagccgacagggctaccactggcgcacctgtccacttacggggaccaccgccgcatccccgccccagctagtcggtcctttccggaagttccacctccctaaatttttttccggttccgcttactccttccggtcaccatggcgaccaggcgccttggggtcggggagacgctgggggccctcaacgcggccctggggccaggcggtccggtgtggatcaaggagacg

SEQ ID NO: 316007 - DNA, 4001 bp, Homo sapiens
aggagttcaagaccagcctgggcaaaatgatgaaactccatctctataaaaaatacaaaaacttaaccggacatggtagcgcacatctgtggtcccagctacttggaaggcggaggtgggaggacagcttgagcccgggaggcagaggttgcagtgagccgagatcataccactgcactccagcctgggtgacagagtaagatcctgtctcaagggaaaaaaaaaaaaaaattaggcaagagaatttacatgtattgattaataaatgatagtgtcacacactcatttaatcaacagaaccaaagagactggtagtattacctctatttacacatgagaaaattgaaactaccctgaggcatacagctagaagacagaagatcttggtttcaatttcaggtctgactgaggccttattcttttttaatgcatcacactaacacatcaaacccaatcatgtgagtttgtaataaatgtgtctctctgcaccctcttcccaagttaacaaggttctggctggagacagtataaccaactagttaaaagcagatgctgtgggttacacaaaccagggttagaattttgctctatcacctactaaagaggtatctctgtatgacctacttgtccttcccatgttgtcttctcatctgtaaaatggggacagtagtagagcttaatcatccaaatagttgtgatatgtaaatagtactcaaaaagagttttagcacagtgcctggcacattgtaactttcattcaatcctcataacttccaaaaattccaaaacaccaatgcaacgtgtgggaaaagtccagtcctgttctgttaacatcatatttaacctacttagttcctgtatagaaaactacctaatgaaagcacacctgttaattaccagtttactgggcatatattatgtgctgcgaatgttacacagactgtcttatttaacctcataatgcacatcatttatatacgaaaccaggaaactataattcagaggagttgaagttgcccaaggtaacagagttagccaatgagtagtgctttgggttctgactccaaagcctagaacttcagcaagcttcagggtctttaaaagatgcaggttgaaggaatcactgtattcccatcaggagagagcagtatccctatgagctgtgaactgaaaggtaaacaccagctctttaaaattatatatatatataaaatatatatgcatatatatagaatataatatatatgcatatatataaaatatatatgcatatatatagaatataatatatatgcatatatatagaatatatatataatataatatatatatgcatatatatagaaacattttctgaacacgccttacgaacgaggcactgtgctaggacagtcacatactctatctcatttaatcctaacagcctgataaaagagtaagcactatattacgcccattttgcagacagaaaatcgaggataagcagagtgaataacgttcttaaggtcacgcaggcaggaagtgatcaagccaggattcaaacccagccaggtctgagtccagagccggtcctctcgagggccaagctctggcaaaggtaaaagggtagtgagttggctaggcctggaagaggacctgcgtctgagatactgatcgggagcggtggccgaccctttgcgtggtctctctcggtctctcccaggactcgggccctattcccgcctgggaggccccacactcacgatgagccctcggcggttgggatcgttgtactgaagcaggtactctcgtttcagctgggctcttatggccaaccgctcggcttgcgcccgccgggtttccggagatatgttgtattcggctgggtcgagggtctcaggcagagtgcgcaggctcgacggcttatactttgggaacgacatcttggcgaaccagggcacaattgcgcctgcgcgattctgaggccctttgtctatgctgaccttcagcttcaggaagtgcgcctgcgcgttagcagaggttggggatgtcgttaacaaggagctccgcctctttctcctaccttcccgaacacggcgcgttcgctcggtgatatgcgcatgcgcgaagtgctcttctcgcagtgcgccctgccccaccgccgctccccacctactcatctgtcaccgcgctgcttcttcctagcagccttgtctctactgacataaccagggcttattatgtaaagttgagctgtgtgggactggctgtggagtcagaagtccgggttttcattgtgggtctaaccgtgctgtgtcaccttggataagtcacttaaagtctctgagtttccttttccttatcctggagataatgactcctgtccacctagcaaagttgttgtgaggattaaataagctaacaaatagatcacaaagtgctttgcaaaacagaattccctacccaagaagaagagaataagcttttctgtactttaccatgctagattcatacaacattaagtgtaagcttatttttcacaggtacgaaataatgattaataggaaaaatgatgttataagagaaatgttgcctgactgactatagaaggtcaggaagaaaatgagatactgaataaagctcatgagaaaacatcttagttaaaatactaaaacctcttgcctaaaatccttagcactcttcagatgcaaagaattaaaaacatccttacaggtatgaaaatactcataggggcatgtatcttattgtaaaagacgatctggggcgaaaactgaagtaatcagaaacaaaaccttctctgtccctactgtccttccttctccccagttaccaaggagaaaaacaacttcaagtttcacagcagggtctttgggttccccttctcctcaggggaaaaaatgtaaacaatatttccataactcgggcaaagaaggatggatcaaaagagagccccagcttggctgaaacgtctgggggcgcgtaggtatgttgggaaatggttgctagaaaagggacctagaaagtgttggcatttgaaatgatgagaagcagcactgctgtcaaatttattcaacattttaatactgttttaaaatatttattaagcacccaccgcgtgaagcacacagcacactagtcagtgttaagtcaatcttctaggctcagtgggggaaatccagacaaaatggaagatggggtgtttgcctttcgggagctgacaatcaggcagtacagaaagaataggcagaaatggtaatatttcaaagtagtctaatgtccagatgaatatagagcaaaatggactcatgaggattcaggctgagagaatgtagaaaaaatgaacacaagacgagttactcagactcgattttaaaggagaaaaaaaaaggaaattctgacttgttcaaaggtgttttgaaatactaagaaaataatacaatatgaaaagcaagagcagtttataaaattctaaagactacataaagtttccaaaacctgtatagattagacactgatctaggaaggagagcatgtaaaaagaataaaaggataaaggaatgagtccagcgagtacgaactgatgcagggcaggcgagccccaaagtggggcttaggcaaccagggaacttggctttgcccaggaaagaattcaagggcaacccggaggtagaagaaaacaattttattgaagaggcagtgttacagctttggtggtgtcacaaccgtgactgctcctgtagagcagggccacctcataggcagaaagcaccagctcaggccagctttgagtcacatttatacccacatttggcagtttggccgggcgcggtggctcacgcctgtaatcccagcactttgggaggccgaggcgggcggatcacgaggtcaggcgatcaagaccatcctggcttacacggtgaaaccccgtcgctactaaaaatacaaaaaaaaattagctgggcgtggtggcgggcgcctgtagtcctagctactcgggaggc

SEQ ID NO: 316008 - DNA, 4001 bp, Homo sapiens
gatattttgaggctggagacaactttctgactttaagtgtttcacttcctctttacctgcttctattgcacagggcaaatagcttacagtatatatctaatgaagaggattaaataaattaatactttaaacccttaaaatgatgcttgaggtcaggtggggtggctcacgcctgtgatctcagcactctgggaggccaaggcaggtggatcacgaggtcaggagttcgagaccagcctagccaacatgatgaaaccccatctctactaaaaacacataaaattagccgggcatggaggcgtgcaactgtaatcccagctactcaagaggctgaggcaggagaatcgcctgaacgcaggaggcagaggttgcagtgacccaagatcacgccattgcactccagcctgggcaacagagcaagactccgtcttgaaaaaaataaaaataaaaaaggatgcttgacacgtaacaggtgctcagtaaatgttggctattatttagtgacacattatttaataattgagtcagtttcctcatctgtaaaatgaaaataacattgtaatttctttgcagagtctctgagataataaagtacactgaatatcaagcatttgatctttgctatgattattcacaccgccatgatgcaactcactgtctccaaggaggtccaaatagccctattaagactgtattggtcaggtgcagtggcttacgcctataatcccagcactttgggaggctgaggtgggcggatcatttgaggtgaggagttcgagaccagcctggccaacatggtgaaaccccatctctactaaatatacaaaaattagccaggcgtggtggtgtgcacctgtagcctcagctactggggaggctgaggcgggagaatcgcttgaacccggggggtggagattgcagtgagccaagatggtgccactgcactccagcctgggtgacagagtgagactgtctcaaaagaaaaaaaaaaaaagactgtattatgactttcctgagacctaggcacttttgccttcaagggccccttcgtctaagttattaaaaataatattttatgactgcattggtataaaacgaacataatacaggctggattcgttatcatattcataaacattatggtttttttaaaaaagaaatttaaattaaaagactttcgtagacccctaaaactatcatgggttcaggcaggagaatcgcttgaacccaggaggcggaggttgcagtgagccaagatcgcgccactgcactccagcctgggcaacagagtgagactctgtctcaaaaaacaaacaaacaaaacaaaacaaaacaaaaacctctcttcctccccagttcatctgcatctcattattgggcggcacggtacttactgtgcctaaagaataagttggccctgagcctctttacctgtctacatattacctgtcttcatattccttagcataggtgggcttctcggcaagatgactttgcatctgtgggactagaacctagcctttgggcaggtggaacgcaacaataagcttgtgccctagagatacagatctcagctctatacctttctagactcagcttcatccgcaaattagcattaattgggatggtgaataacaacgttttagaaatgctaataatgtaaacacgatctatctggctacttcaggaaaacccctcatatagctcgtgctccgtctctcctgtcaagccccaagcccacaacttgtcccggctccctccggatcccaccaaggtcaccctggaagcgtcctcccttttctcgccccgcacccgcttcacgcccgttctccctaggccagcacccaccagcagccttcggaaagccacgagtgaggaagcccccaaatccgaggcgagtgccaaggggccggccagacagagctgccaccgcagtaaccgaaacccgccgcaacaaactcatggccgccatggctactacgggcaggaggaagaagggaggcgggtcacggaagctgagagagccaatttaccaatgaggacaaaggcaggatgtggccatcttaagtgagggcaagttttctattctcctcaccgccggcttgagacgccggaagtgacgctatcgttggcggaaacgcgttttgccagttatgcgaaaacatggctgcggccggtttggcccttctttgtaggagagtttcatccgccctgaaatcttcccgatcgttaataactcctcaggtccctgcctgcacagggtaagtgatgtataaagtaggtttgcccacctctccaactttggatcttgtttggttgccgagatgccgagatgccgagaacaactcaagaatggaacggccgcctggatggcagagccggagcccactttggtgaggagtgagtgaccttggagaagtcgctcacctccgacatttctattccttcctcattttgttgctgcctgctgtggacaagacagtatatggggtttgtagatgtccagcatttgttgaagtaaatacatctataagtacagaagcatcctcttgggctgggtgaggtgcgaaaaactttaccgaagatgtttttgttgtgatactcaagtctgtgtcaagtttggatggattaaaaaagaagagatatttgtatttacaggatgtgttacaatgaaagtaactggtaacttagtaacttcttttatttatttatttttcttggtcctggatccagtgaagtatccatttattacattggttgccatgactctttagtctctatccggaacaatttcttttttttttttttcttaatgttgttgacattttgatgagattagctttttaagaatcttattcatttggatttgtctgattgtttcctcattataagatttaggctaaatatttttggtagggatacaacacttgtgataaacttcattatttagtttcaaatcatctcaggtcgttaactattttttaaaaacaggatttttgaattactgcataataatttatcatccagatgcacagtaatttttaaaccattcttagctgcgtatttacataattaaaaacttgacatcctatatagtgctttaataaacatcttaatttataaattcccatctataataattttttcagttgaaacttctagatgcagaattactgaattaaaggaggaagtatttgaggctcctgatacatgttgcaaaattgtgaggtttttttgtttttgttttttgagacagggactgactctgtcgcccaggctggagtgcaatggtgtgatctcagctcactgaaacctctgcctcccaggctcaaagcgtcctcccacctcagcctcccgagtagttgggactataaggcacgtgctactatgcctggctaatttttgtatttttgttaaagatgaggttttgccatcttgcccaggctggtcttgagctcctgggctcaaagtgatcctcccacctcggccttccaaatttctgggataacaggtgtgagccaccgtgcccagcccacatgttgcaaaattgactgctctttttacctgcgcttgcacccattagcaatgtaagaaggacccaaaaatgttaccttaaaatataattgtgtaactatgttacctctgaaattataaggtagcagcttctataatgcagtattaacaatactttctaaagcattttcaaaatttattgtggccaagcatggtggctcatccctgtaattccagcactttgggaggccaaggtgggaggatcacttgagcccaggagttcgagaccagcctggacaacatagtgagacccagtctctaaataagaaaaaaaaattaattcttgtgcagaaaccctgagtagctttttaaaatgttatcgatgacaaaatgattatgtttattatgataatgtttattgcttataaaatccagatattataaaacttttacttgtttatgtgtgttcaattgcaggttttttctta

SEQ ID NO: 316009 - DNA, 4001 bp, Homo sapiens
ggcttgaactataaactgtgaattgaagtagtttccaattactaagggtcttgaaattaaagtaaaacctgtaccttttataacattttttcaatatttaccttttataagcaaaagcttcattggccatttctgacttttctggaagaaataaagataccatggcaaacagtaacttctcattttagagattcagtcagttaacaagtatttgttgaacacctgttacgatgtcttgcactgggctaaatgctggatatatataacaatagtgactgagacaaagatggtctctgccgtcacagaggcagtccagagaaagaaacagtaatcaagcaacatacagaaaatgattggggagtgagagcaggagtgtgggggtgcaaaaaggaaagtccattccaggcagtgtgagcaacaggtgagataattacacacaggagagaatgtgacatattctgggaacaatcaagatggaactgctgatagaaggcctaactaaagattggattagggtaatggggaatcattgcaggactttaagtagggaagggaaatgcccttatgtgcgttttaaaaagatcagtttagccgggcacggtggctcacgcctgtaattccagcactttgggaggctgaggcgggtggatcacctgagatcaggagttcgagaccagcctgaccaacatggtgaaaccccttctctactaaaaatacaaaaattagccaggcgtagtggctcgcgcctgtaatcccagctctctggaggctgaggcatgagaattggttgaacccggaaggcggaggctgcagtgagctgagatcgctccactgcactccagcctggcagcacagcaagactccttctaaaaaaggagtcttttttagaaggactccatatatatatatatacacatatatatatatcagttcaacaatggtggggaaaaaagtggattggatagatagggccagactagaatcggagaagccagatgggtgttgaatttaaccaaccgatggtggaaattgagacagtaaaaatagagatggtaatgtgggaattgattcaacacctattaagaagggatagtcttgataattgatagagatgcagaggaagcagcagtaagtgtcatggatgtcgtctagagtgtagtttttgaaagctgaatggatagtgatgcccaaaatagggaatccaagagcagcagcagacatggggaagatggcgttcagggttgcacatgtgtggcgttaacttggcagctggattttggggtctgacagttagtagagcaggctaggttccagttggagactttctaatcatcgtcagatagatggtgcctgaggcgaggaagtggaagggctcaccgaagtagggcagaaaagcagaggggcaaagtcaaagcagcatcctgtaaggagaaggcagaaaagcgacgctcatagagatgaagaatgaacctccagaggcgtcggagcagattggaagagacacattcaggctccatttaaccagaataattccgttatcaaaatggaagcgccaagaagcatcgttgatggcgctttcccaccatccatccgtccaacacaaacccacctgctttgaaaagactgcctcacgcagtgactcacttacccaccacagccgcattctctacctctgcctcttgtctagtgaagctggctcccgaggcttcggggccgctccacagggacctgaggacgtctccccggagaccctgactcaagctgctcgccggcacagccgagcaccggctcccgcctactcaccgcgcgggagggacggtccctccttcaggccaatctccttatcattgtccctgctgctgtcacctgctgctgcagaccgggggtcccgtccagtctcagcccgtcccgtcctccccccagcctattcccggtcccctcaacctcagggacaccgcggccagctgcaccgttggttttccaatcaaatcctcctccaggccaccaaccagcgctggccaggccaatgccgacaattcttcctccgccacctggggcgcctcagccaatcgggagcagccatgctgcgcagtgcagaacgccatagcgacggatgacgcctgccggggaatcgccgtagcaaccagagacgcgctagatccaccaccaagcttgcaagcagaagaggcagcaagtgatgctgaaggctgtgctgcagccacttcaccggaacctagagctacctgtgaacaggtctcctacacgttgaagatttttctggatttagggtgtctaacctttgatgggaaagggcagcttcatcttggagtgtttactttcaagaattgctatgggctaaaaatcaattctctttaaaagcaaagatttaatctgataaggaatcaatgcagcatgctaaatacctttcatatggcatgaaaacgtcttcagttactcaagccacaggcaatgagaataaggtgccacagcaccgtatttttcacaaaaagagtgacctgggattcaagaaacctgtatagtataactatcgccagttcgttttgtggctttgggcaagtcacttcaccttttgtgaaagtctggagcttctttaaaatttctgaactgcattagataacgctttaaaaatatacctgacattctgtaactttaaataaatgaaaaatgccaatctattaagtgcttaattttgtgccgggcacgatttcaaattctttccttatttcacttagttataaaatggaggcacaagaagtttcctaagtagtccagtatggcagagctagtgatggagtcagggtaaaacctacttcgagtctggtcttaaccacgatgatgctccttcgacgatttcttcgagtactgggccctgttcaacctcatcttggtatcactaaacgctcgtgtgtgtgtctggtggttacatcttcccaaactggattttaaatgaatacagtgaaccctaacgtttttctggtgtggatagtaagtaggcccattggattaacaatacttaagcttgggtaattgaaagcattttttaaaatgaagacggtcctattttggaaatgcagaaaggcgagatgaaagccaaactctggtgagtatagcagaactaattaaacttcagagatctaaaacaatcaggattaatgttaccaataaaacaaaacaaggtgacggggcaggaagaccgatgctgagtagaaaaagtattctgtacatacattctaaatgttaagcagtcggcctggcttggtggctcacacctgtaatcctagcactttgggaggccgaggcaggaggaccacttgaggttaggagttcgagaccagcctggccatcatggccaaaccctgtttctactaaaaacagaaaaatcagccgggcatggtggcacatgctagtccctactactcaggaggctgaggcacaagaattacttgaacccaggaagcagaggtgcagtgagccaagatcatgccactgcactccagcctgagagacacagcaagactctatctcaaaaaataaacattaagcagtgagacatgactgcactgaacttctcatcttcaccagaataccaattgtgcttcccatctttccactactcagtaaaattaaagtcttaaactaatgttttggccatcccagaatattcctgaacttccctgaaagctgcagcgattaagaggcaagaatgacactgcctctaaaagacacatacactatcatctcaaatgttaagggtccctctgtaaaatgacacaaaataaaatcccacaagagatcttgcaccaagcttatagcttatatagcaaggctcaaaactatgaaaacatatttttctaaggcctttttttaaatgaaatgcataacgtaaattatacagttcaaaagtaaaacagcataatgtcctaactacagcataaaggtaacaaatctgcatgtaagtagatattcaggatcacctcaac

SEQ ID NO: 316010 - DNA, 4001 bp, Homo sapiens
cgggcgcagtggctcacgcctgtagtaccagcactttgggaggccaaggcgggcggatcacgaggtcaggagatcgagaccatcctggctaacacggtgaaaccccgtctaatacaaaaaaattagccgggcattgtagcgggcgcctgcagtcccagctactcgggaggctgaggcaggagaatagcgtgaacccaggaggcggagcttgcagtgagatctcgccactgcactccagcctgggcgacagagtaagactccatctcaacaaaaacaaaaacaaaaacaaaaacaaaaaaaagaaaggcaggactgtttcatatgagtaggtacaaagtaaaatcacttttatttcatcagaatgttaaatgttttgttagttatcaagaaaagtgtgcttttgttttaaatctatatagaaataacattttaaattgaaaactgcctacaccttgaagttaggttttcatattcaacaattccaaagctatgagacaaaaacctagtttttaaggatggtcaatgggctttacgtggtggtgtccgtcaaccacaaaaactactagggcaattaaccacaaaaatcctcaaaacagaacataagtaaatgcccatttacaacattttccttcttaaaatgtatgaatcagttaagttgtacctaataccagtgagattagttaccagctttttcttttcccttccaaagacacgttagtaaaatctgctggaaaaacaactacagagcaggcctctaaatataccttttgtttttacttccccttcactgtcataaaagtgatgccgtctggccatactaagctgttcaaataaatatatggacttacagactttccagctgaaaagggtccttcaggtcactcagtaattctccttattttaaagatgagattaaggttccttttagagaaggacagaattagggacggacagaatgagaagttcacttctagcggctcttattttaaaggacagtctaaacccagcagtgcttaagtagtctggtccaggctgcagaagactctgggactaggttccctcccgcccaccctcacagactcagccctgccacccccatcccagtccacttttaggtcatccattccattagtctcctctgcgcaaccataaacctacccaagaatgtgtcgcattgtctagattctagaactatctgttcacttgacaacacgctccccctcgaggtttgagtgaacttgggcactgcgaacacatcttctttatttctgcatccccaatccctggcatacctcctggcatatactaggtgtttaacaaaccttgttaaggcaagtaagtgtccagcagatcaactgccgcccaaaggagagaaaaaaggttagttaagaaagctagatgggaacttggagaaagttactaccttgtgcaaactacccgttctcggtgaaacagatctggctgggggcaaaagacaacggaaggagtatttatcacaagttgaaaaccagtagttatcttcccaggtaataagaggaaggcaatttgtcaccagtttctgctacagcacaaatctacctttaaagtaaatcttaaccttaaggtaaaacgaacaattccttgcttcttcacctttttaaacatttacattttggcaaagcaggttaacgtttattgaggggcactgagactggagtacatccggaggtaagatgtccaggaaagcgaggagatcgcagccatggcgtcctagagattcggaacccagcccgggcagcttgaaaccattaccttccccctcgcaggggagcctggctagccccaaggaggacagttcgctttacctttccctgtcgtggtcggagcggcgcccggggctgcccaagtcttgcgggtaatcgggcaggcctcaaactaggggcaaccacacccaccgagcgccagacaccgcgggccacggctgtttggaaccgtggccagggagacggcgcggggcatactgggaagtcggggcgaggcggcaccaaggcggaagtgttcgccgacccaagtaggcggagaaagcagaggaggaccggcgggccaagctttcctagcctgacagcagccatttcggaacgtacgtcccagccctctttagctacttagcgcctctgggcccgagaacacctgctccttggctcagtctggcgccaccggcatcacggaactgtacttcccagagacgtcacaccgggagacttccgattcccgctcttgagattggactctcacgtgcaggagccagtcctcgctgggctctagcgggcttctgatggaggagctactcctctgggaggacagagtaggtgggctctgctgcaggtccgggcggcgggttgtgagggccgaggtggcacggtgtatgaaggcctgtgtttgaagacttaggtcagaccttttgcccgcctttcccctatgcagctctatgcaactgtctgtgcaaggtcctgtaatttgcgtaggacgccttgacacagtctctgcttatggacgctttacaaaactatcttgcaaagaaataagtactatacaggataaggttctgagatactgacagggctggaactagggtgagataagtgtaaaatgtaaatggatgccaataaaattcagtaatcaaggtaagttttaatgcaatctctaaaaatcaaaattatagcaaaaaaaatccatgactgacaaaatgtcacgattttaagtaatagtaacagtaccgtgctgtgccatattgaagcccgaggtgtcaaaagaaaaaccatcaattctgatcctgcgagttaagttagccaggtgaggaagcgtagctgggccagatatgcaaaataagatgatgaaaagagctcgtggttaggggtgtaactggatagaggggttcctagaggcatgaagcagttttccttataccaaaaactatgccaattaagaagggcccacaaatccaaagcctgaaagaagttccgtgactgattgtcaatacaaaagaaaaacttgatccttatcataggtcctacacaccttactttactgaagcccaaatgctttgtgattatgagatgaatatgatatcttttttttagcttaggactttttactttgaccccacaaaacaaatactctgtgctgtaagatgttgactattaccacttaagaatcaaagttcacagaacttctatactggtgtgtcagtaatggacttcaactgatttttctttagaattagcagcagcctctgtcaccatccaaagattacaacccatgaaaccattgaatttgtgccttgtatcagaaagcaaaggagaatgaaaaagcacagctaacattgcttgaggatctaggtaagaatttatgatgttgatatctatgttctatctaaagagcacttcataacatttgctattgatttaatggtgctggaagcaatgacttggtgccccataactagcatcaattgaaaatgttttctgttgttttaaacaggcgattaattctttagactgtcatcatgggtatccgaggactaatgagttttgtggaagatcatagtaatgagttcttcactgatttgaagttgcgggacacaaaaattgtcattgatggttatgctcttttccaccgtctttgcttcagttcaaacttggatctccggtatggaggggactatgattcttttgcagatgttgtacaaaaattctttgaatcactgtttgcttgtaatatatgcccatatgttgtattagatggaggatgtgacatttcagataaaaagcttacaactttaaaggatagagctagagagaagatccagatggcccattccctttctgttggtgggagtgggtacgtatgtcccttactcatccgggaagtattcatacaggttttgatcaagctgcgggtgtgttttgtccagtgcttttcagaagcagatcgggacattatgacacttgctaaccattgga

SEQ ID NO: 316011 - DNA, 4001 bp, Homo sapiens
tggctcacacctgtaatcccagcactttgggagggtgaggcgggtggatcacctgaggtcaggagttcaagaccagcctggtcaacatggtgaaacctgtctctactaaaaatacaaaaattagcccggcgtggtggtgtgtacccatagtcccagcaactcgggaggctgacacaggagaattgcttgaacctgggaggcagtagttgcagcagtgagccaacatcgcaccactgcactccagcctgggaggcagagcaagactctgtctcaaaaaaaataaaaaataaaaaaagaaattccttaatatctaagctctcccaaaaaggtgaataaaatatagcttgactatacatttgcagacagaatagtctgtggattacgttagatactcaaagggatccatggccccataagtttaatagtcactgatcttcagcatacaaaattattcacacttaaaagaaatcaatagcctctaatacctaatacattgccctcaatcatttcaaagaccatacaattcatttcttcaacacatagataaatgtgttttgtgaagtgtaaactaaagctcaaataactagctattgctagttccctatcatcagccccaaaatccaatgattcccccaatgcctactgaataaatttcttatgcatgagcttgtgttccacgcaaagcaactagcaccagagacaaggaagaacaggcaattgggccctatatttagggggaacatctcttctcagcttgcctggagcagtcctactgtcctggtgtaactattaataatgcctttcagtttcaaaattgtcccagtttgtacattatattgtcaccctattaataaaccacattgaataattggttcattatcctgagagtaatgggataaagtgttttaaacagaggagtgacaacatcagatttaaatttgagaaagatcactgaggctgcagtgaaagtgatggattggagaaaagcaagtcaagtggcggcgaccagttgggaaaccgtggccatagctttgctagagacaacagggtgtcctggattggggtggtagcagtagagatgagaggaggcctattgtcttagtgatagatgaatataatcagtgttggggtgcgtggggaggcttaaaaatgactccaggtgtccggcttgggcaactggtgggttggtgtcactattcactgaaacggaagacatgagagaaggtttggcgggaagaaaatgagtcgagttttaagtgaatccagcagtctacagtagagacgtttggggcccttcattcaaggaataatgcttgctaggcgctgtattaagtcctgggaatgcatgataccggctctcatgagagtatcggggttgggagaaaggtgtgtagatcacgcatgccaattagtacaacaaagaagtagataggcagagactgaaaatttttacataaaacttagaattgtaattaaagaaaatgaaaattaaaaggaaaaaaatttaacacaacaaagaagtagaagtagttctgggcgcatattacagggaggccaggcctcgtcttggtctgggaccatttccctgaggaaacgccatccgagatgagcctcttgcgaccacccccgacctaatctaccggtcggcgccctcggcgcacttctgcccgcccccgccccttgccgggccccacccctgcagacctgcttgccgtcccgccggtgcttcacaagcgtcacctctccatagctccccttgcccacgacccgcaggtagcagtaggcggccaggggcatgttcccagcgctggcccagagtcgggatgcggcggcagcggcgggtagggcagcgggcggcaacaagaagctcggttcatgcccgagagggggcagtgggggcggctgttgaggcagccgggcccgggcgggattgctggggcccggcccgcgacgacgccgctgccatagcgatccgggccgggagcagttctgcgcatgctcctgcgtccccaaaggacggccatagagcggacgccacgagcggccagagaggttccgcagccccgggaggacccgccatagagcagaggctccaggaggccagagcgactccgccaggctccgcgcactttctgtgcgtccgttccaccgtccggatccccgccacaacagagtcagggaaagcttcctctttttgtgcacttgtttgtcctaaggccgttacaagtattgttcgttcattctgcaaatatttgttgaccgcctatgtgccaggccaacaaagtccctgccctcctggagctcatgttctaatgactgggtgacagactctctaccagtaacatttgctgtatccgctttatcacatgccgtctctgcatccagcaatccatcctattttttgatacattcaaagtaaattatcagtacctttcatccctaaaaactcgcctgctaattgagaactacaaagactcctcagcatttaacgactaccctaaccactgcactaagagacttgactaaactctaacatggcatcatgctaagttaacagcctaagggcggatctctaggtgggcctaggcccctttaaaatgcctgcccaagaaagctcaggggtgccaaaagaattcaccatttgttccagccaaagcctccctttcccagagcgcttcctttttttccttttttttttttttttttttttttgagacagggtctcgccctgccacccagcttggagtgcagtggtgcaatggtgctcactgctgcctagacttcctgggctcaagccatcctcccaactacaggcacacacgtccatgcctggctaatcctattttattttttttcagagacagggtgtcactatgttccccagaccggtcttgaactcctcggctcaagcaattcacccacgttggcctcccaaaatgccgttattacaggtgtgcgccatcgtgcctggcctctttcctttttatggccaaataatattccattatatgtatacaccacaatttgtttatccattcatgcagtcatggacacggatagcttccatcttttggctattgtgaataattcggctatgaacatgggtgtacgaatatctgtttgagtccctgctttctttttaattcatttgggtatacactcagaagtgaaattgctggatcatatgctaattctagtttaatgtattgagaaaccaccacaccattttttacagcaagctgaaccattttacattcccattagcaatccacaggggttcaaatttctcctcatccttgatatatatcttgataggagatttgggtgtatgaatttgtcaaaattatctaatggtacatttagtatttgcacattttactcaaagcaatttcatcttcactagaaaaccaaacaaaaagaaccataaataaagattgaactctagttaatgatattattaaagataaacaaagccaggcattaaaatgatgaaaatagattttattcagtaactactgacagtaggggaagcagctgaactccattccatttgcgcaggggtgattgggcattccaaaggaagaataagggagtaggcaggggagcatgcaggggctcacttagagtctgggaagtgaaaaattaaaaggagtgcttagcgtaaatgtgattaggccaactgtgtctgctagctggcaattagggaagttaggattctattctcccacatagactgggagacatgagccctacctttatgatgattacattccaaaggaatggatttcaggtccttgagaaagacattcctaggttgtaggaaatacataggtatatatctcagagggacagaggaaggatttgtaattgtagctttttaaagttagtgctctagaggccacacactatgactcacacctaatcccagcactttgagaggccaaggtgggaggatcacttgagaccagcctacgaaacacagtgagacccccttctctaca

SEQ ID NO: 316012 - DNA, 4001 bp, Homo sapiens
gaattcccctcttagatgtattcatatgtcctcttgctatggaaaatagcagaaattcaacaaattggtttaaaaaaatactactaaaccacacacacacacacacacacaaaaaatcttagttctcatgaaatcacagtaaaatgcctataaataaaattcatagtaattttgtagcaacttcaaaaaaatgtctaatttaagagaaaaatcttagaaaaatcccactgccctttttgacatcagccagaagctaggtaacacctggatgctacttgtttagaaatatcagcccttctcaccctcgagagttcagcatcaggccaagaaagccaaaaggtgaagttcagccagggccctcgagatcttcctgttaacctgggagaaaaaaatcaagaggcctccagatcagtgtcagctatgagccaaaagaaaatggtgttttcaggagcaattcattattggtctcagaacaattagaaaatctttcccctcagtaatgctttccatggctctgtagcttctgaaagggtttgttttgctctctgagagctttcttgtcttgtctgttacaggacaagaaagagaagggtttgcctcctcttcctcagtgaggaaaagtctgtatctgaacagctggattatgctgacctcggtcatcacctccacactggagaggatgctgccaaatgtttccgtcatctgcactgtgcactgatgtcatgtgctaactcctctcagactgactctgccaccgcagtgctccacgcctgtaccctgcccaactgtgtctttggcctcagcaggatgatgttagaaagacggtggagaggggtggtggaccatacaccgtattctgaggccaaataaataaacaggcagggttatctgcctgtttagatgatctgtgtggctgatgccctgctccatcagggattatgcggggtggtgaatgagactaggataaacttttctctccttttattgtctaaacaacctactgtctaacagaagcaaaaaaatattccacccagccagatatttctttagatgtcagatttaaatagaggaaatatatattaccaaatgcttaaaatttacgtaactgtcatcctctttgggacagcaccttcagccactgcagcgaattcactaatcccaatgaagagaatctctaatccattctatttagaaatgtgcttttattcaaacaaaaccccttaacatatacagattatcatgaatctgggggtccagccaaatcatcaaatttcaggttttcctcattcataaaatggccattcatacattttaattttacagctgtaagaatgaatgagggcatgctataaagtatttcaatttactctgatatattttcccatatagtttcatgcctacggttggtgggaaagtactcctctaaacccacacatcaaatctcctgggagacttctgcctcgggatatcatagttctaggtcactgacagaagatagtgttacattagatttatgatacttcatcacccattctatcgatctcctccattagtatctcagtccttcctgggcctttaaagcaaacagacatgattcttgctattactaaactacaaaaacatcccagattttctttctccaaaaaactatcccccaatattttgccccaaagcaagtatggctactcaaacataggagagtgactccaaagttaagaatctgactatgggaataggaaagaaaaagaaaaaaaaaatcttaccatttaagatattttaataaaatatcagataataaaaatatacctttgtgtttgaagagtcaagtcacacaaatacgtaagagcaaatcaattgtttccagctgtaatcagcgataataacccaagtacgtgacagcatgagaaagacgatcagtttccttttgaggttacatgataagcagcagctaagcagcctttttctctaagaactcgccgtctgacctcgtggcaagaggaggccagcccctctcactggcgccctttatagcgttcgctttcagttctccactctagtgaggacgggggcgggggaagctaagagcctgttttctaaaatgcagaatacggtcatcctctctttcgaaccgggttgcgtgggcactgaggagggccagaggaggcagggagggggcagcgaggcctagatttgtggattttttttctgcacactggaaattcccagaccaaaaaggtaccgacccgagtcccggacattcccctcgagggccggctccaagacctggactggagccgcagggaggaatcagaggcaacatctacaaacaaaactttttccttaaagacgtccttttaaaatgtcctagtgaatctcctgatgggcattagagttgccttctcattagattcacctcatcttatttcgctttttctgtgtggcccctaaacgtgagggtgcagtgggcgggtggagggagttaccttttaccatatagcttttacaatacggcaatcaaaaagtagtatcgcaatcatgtgccttcactgactaattaaaggacaagaaatctgtgacataaataaagcaatggtcctgtaacatgaagatcactttattttcaaggagtaaggggaatggtaatggggtagatttaacagcaaatgaaccactgcacaaaactgaaaggatttctcctatgacatttagtttcacttcttttccatttaggacactagctgctgtaatctcggtactacttttttttaagttatcttccccaagcagtgttacaatccagctggaatgggcattagatatacacatcattagactcttaaaaagaggcccgatggcctctcatttaaccagaatattaaaaaagaaaatatatgtacacacatataaatatatttaagttcacacttttttattttttatttatttatttatttattgagacagagtttcactctcgttgcccaggctagagtgcaatggcatgatctcggctcactgcaacctccacctcccgggttcaagcgattctcccacctcagcctcctgagtagctgggatgacaggcatgtgccaccacacctggctatttttgtatttttagtagagatggggtttcatcatattggtcaggctggtcttgaactcttgacctcaggtgatccgcccacctcggcctcccaaagtgctgggattacaggcatgagccactatgcccggcccacatttttttaaaaagttaaaatgtaaaagcacttttaagagacaagttagacagaaggtggtggagtacattttctgctctcctagcttctgtgtcctttaaactcctgccctcaaccatcctcttatcgtccaccacctccattcccctaggattcccaggtccccttagcactcaggggctgtggtctcaccttcaaatgaaaaacaacaacttcaaaattttatttattgcacactgaggtgtcaagaatcctaagtacactaatactacattgtagacataaaccaggtagaataatgcttaacacaagaaaataaatacacttgaagtggaatttctggcattagtgactagctgatgttaaaaagctgaatttacccagaatccacagagataatgctgagcagttttttagaaagttggggaggcttatttctgttgtttcccttgggtgtttatttccctgtacctctctcagtcatcactatttccttgaacagggtccagaaacagactcatttctggcatgtaacacatgaatatataaaggcgtaccatatttattcttgtcaagtaccctgatttaccaatctgcaaactaagttttcagattgataaatgtgaaactggattcagttattaaactggatcaagtttcaatctgaaacttaataactgaatccaggaagtgtcagttaaatggtcttaattaaaatgatagttgttcagaatggcaaaatgaatcatactggaacac

SEQ ID NO: 316013 - DNA, 4001 bp, Homo sapiens
caattaacaacgtcttagatttatgtcttattatttccttcaattcaactgtgccaaaaaagctgcttaaattcactgagcttaaacacatttctacatatgcacacaggatttcccctcattgactgtttttggaattacttacacaggtcttctaagtaaaaaggaaatatgcttgtttcacttttaaactttgaaatacactttagcatttggtatacaagtacagtactccacttctgatcactattatgtcacaacctcttagtatgtgtgttgaacacaaattcacaaagtcaggaaatgaataattcagccgctccatcaagtgtacaaaaataagatggggcaagaaacaacgcataatttgaacatctgtatctatcataaatacatgagataaacagttcaatgatagggtaagtgaaacattagttggctttatttttaagtttagggatttcaagagataccagaattgccagaatctaacacagcatttttctggaatgacagcagttcataatccaacgtcacagaaagaaaaaaatgcagtttcagaaatcccctgtggctgtgtggtaaaccaagggaccagcagaacagtttcagccagatgaaggccaagtgggtaagaaaaggtcctaaacacatattctttctggatctgctacgcagtggtttaaatcgcttttcgcatgattttaaatgacttaaaatgaaaatgagatatcactttttaaaataaatgacaaccaaaacaggagtggctaagagtgggaaacaccggaaagagacgttctttaaaatcatgctaattactctcaacgttcaattatcgaggcgtttttctagcctacccacaggggcatcctgttttcccccaaattatgcaactcggttcactaagaaaggaaaccaattcgcagcccatgaaagataacattacgtctttctctgctagatatggcttatccattttttttaaggcacacacaacaaaaacaagaccgcaaaaattccgggcagacttccgaaactcgccaaactaaaggcataacttgagttggttttcagcccggcttcaccttgataacagcagtttccttttctttgacggtcaagtctttttactgaaaaattccataaaaactgagaaataagtcatgacctttaacgctattcccaaacccttatcctctgctacagctttccactaaaatattcacaagaagaaaattacacctacatcagaccccaaatctcatcatagtttattaattatgactcaacaaagctgcttcttagagagcgagcgatctcctggtcactcgcccggcagtcagagctcggccgagcggtttctgaagcccccccgaggcccgcgggagggagccggttccgcgggccggcgaagggcgtgtaggtcaggcaggcgcccggcccgggcaaggcggggagtggtaattgatggctaaggtgcgtacgtcctagctctaaggagggcgcaggggccaccctccatctggggagtcccgctcccaacctcctaggcgtgcgcgccccgagtacgcagcggtgcggggccggcgggtacctggctggcgctcggcgcgggcgccgcctctcgaccgggactccacggcgccgcaggaggacaccgacgaggcagaggagaagtcggaggagtcggagccgggcgagccgggcgccgaggggcccaagaccgagcagctggcgtcgcaggcgcccggggcggcggcgggcggcgacgcgccgtagaagtagctcaggttgagcgggctggtcatgaggccgcagccgcccgccgcgtcccgcagcccctctccgccgcggctgtcgtccagcagcttgtccacaatcatgctcccaggctgggcgctcgaggaccccgacacctgcgccaccggctcgctgcgcgcggctgcctcccgggctggctcagggagctgtcggcgggcggacggcgcgggccagtacgggcgcggcgcgggactgccagggtatttaacgggccgcagcgctcgccgacctccccggcgcccggcccggccattggcggtgcccgggccgcctcccagcccctcctccggatgcgtccgatttccagtaaaatgtacaggatgaggcaatgcgccctccgccctccgccctcgccccgcccgcccggctccgcccagaccgaccggttgtttgcctgcccttcaccgggaaaccccgacagcgcgcggcttccagcctcccgcttcccgcctcccgcctcccgcctcccgcctccgggaccccgtccctcgcccgggccatccctgccctctaggcccccgccgggcctgggcgcccggggagagggcgcgcggcgcagggctgggcctgcagagggaggcgggagtcagtggagggaaccggttggcctggttcttggggactggcaagtcctggaaggagcgcgccccgcacccctctgcctgccccggcgcggcgagctgttagcccagttaaggcatctctggaaggttcttaagggcctgtctcctccggcgccccagcgtagcctcccttctcaaacatagcgtttgtcgacggttttaggcaacatcccgaactgaaagagatgttggagcatttttatgttctcaaattatctgctgggacgcaaataatgttttaggtgcagccatgaataaaaagtaatgccacacttctgtatccttcaatactagaacaaagccatcttagcaaaataatacacaaacatgtaggtgctgtagtatatgtagatataacttttaaaattctgcatagctttacactatctgataaactaacacagtaattttggcctttcctatcttgaatacttttttccaatggatttatacaactatttgttcaagtccaactagcaaaaaatgcgggaatgataaggttaagtacacacatgctatgtttaaataaaccgattatgattaaataacacgagggatacaaagttcagtgagccacctaaaaggagaaacaacaggtctggtagaggaaaaaggaggtcaggaggaaaatctttgcaggggtggtggcatttaagataggtcctaaaggatgggtgggattggggcccacagcatttacagaaagaacaagagcaaagaattaaggagagggttcatattagagtgtatagtccccttttacgattgtcaagaggagaagatggcattaaatataaaagataacttggtgcctttgggtggagcacctccagcagctgagacactggaattttatttaataaacattgagaaaacatgaattttaggtaggcaaaattaatctgcaagcagttgagagaagatgaggagcccagaggccattaggatccactgcagtagcccaggagagaaatgactgggcactggggcagatacagtgggaaaggagaaagtaaattgacagaaagcagagctgggcagcattgctagggcagaacccacaggtctcgctcttttggagggggggagaaatgaaagggtccccagtcaggccatggcttggagccacgaccaggtgaacagggccaccagctccagatcacaagggatcacagagcagaatgtttgggttttaggacgaagggggggacacgatgagtttggattgttactcagtattagtaggtggcataagaccctggtgggggtaggtccaaagtaaatacagccataccccacaaaatgatgtttaagtcaataatgaactccatgtacaatggtggtcctgtaagactgtaataccatatttttactgtttcttttctatgtttccatatgtttagatagacaaatacctctgtgttacagttgcctacagtattcagtacagtaacatgctgtgcaggtttatagaccaggagcaatagactataccacagagcctaggtgactagcaggctagactatctaggtttgtgcaagtgcattccataa

SEQ ID NO: 316014 - DNA, 4001 bp, Homo sapiens
ctatccttggaaaagcaacgcacaaagactttcttaaactcttaatttctcagcattattccagtgtgtccactatcctttgcgctcattgtcacacccctcatctttcagaatcttgaagctgtgaggcggaggttgcagtgagtcaagatcgcgccactgcactccagcctcatcaacaagagcaaactccgtctcaaaaacgaaaatcagcaacgagccattagtaaacattcataatgaagattatgatgctaaatgtcattatttgcatgcaaaggtttccccctcatactaaacctcagcattttgggtttcactagatttaaagcagaagtgaggcttcattacaaggccacctctcttttctgactagtggggttttaaatagcctggtggctttccaggtggtaagtctcagctaatgggctctggagaacccagcctatcagttcatttatggagtcccttggcatccttgtactgtgaagagctgtaaggcctcaaagagtaaaaaaggtgagttgagaaggtgtcacagagcacgaaggtggtccccacacaggtcacaattatgtagctgtgaacaggccacatgttgcatctttcatagcatctgccacaaaataagggctcaatatattttcccttcaatttactttaaaaatcattaccattgcctaaatgaaatattactgacatggattttaaaaactgcacatgtaactaatgtctaaaattgggtcacgtgaaacctataaccttgaaactgagaatttccttttagacttcatgacaatataccaaacacttaatgcaccaggggctgaggggaacagagaacctaattaatcacggtgacctgataaatgaggtaacacccctaaagcaagtggctctcctttaacctcagttccatttccctacccccccacaccatgtcccttcagatcatttgatctgaagagttgaggtgggtacttattcaaaatgaataatcaaacttgcctcccaattcccaaaatctgcaaggtcccttagacctctagaagtgcaattttgctgacaggagaatgaaggaaattactctcatccaaggcgattacctccacgaattcttaaagggttatgttacatagtagaatccaggtattaatataaaaactgtaacttcaaaatactataatgtttcaatcaacaaaagtgggcagaaaaaaaattaaaaattttaaaacccaccacttcagaagcattatgctttagtactcggatagtctcaacatgggaagaaaacatcactttgtcagtgagtaacttctgataagtatgtggaaatgtaagccactccgctcgaaaaatgcacgcagggggaatgacacgcgcggtgcggttaccgttgtgtcccgatatctgaggccgttaaacgacgagaagagcggcagtgtctgaagcacgccttcctacctctcctccgcccggccccgcttccgggactccagttcacccgcagcaccctgactgcaggtgccaagtcacaactgcaaagaaacttccttttctcgagcgggggtgggacttggccgggtcccgaggcccctggccggcgggctcggacgttaggagcagaaccagctccaggtcccggtctgtccgggcgtcgctgccctctgaagctcaggccggacgccccagtccctggccgaacaaggtgccgcggcccacccaccccggtacccgccgtccgaccccgttgccctgcacctgaggatgttgtcagcataggtgagcagcagcttggaggcctccaaaaaggtctccggggtgttctggcagagctcagccacggccggggacgccgagcctgaggagctgcccaatgccgccgccgccatgcttgagcgccagcgggcgccgccgccgcccctcgctctccgcgtcccacactgagcaggcgcctcagcgcgcagcagctaccgcagccaccggcaggggcggggtcctcggccggcaggggcggggtcctcggccggcaggggcggggtcctcggccggcaggggcggggtcctcggccggcaggggcggggtcttcggccggcaggggcggggtcgggggcctggggcggggtcggggaccggggccaggagcgggggagctcggctgggagctacggctgccccttcgcggggggcaaggggctgttcggaagaaggtggggggcctcggccggcaggggcgaggtgcttcgacccagagttggggcctggtcgtacaggttgggaaggggttccgcagggagaggcggggcctgggctccggggctgaggggtgtgggcctggaggagggggatgtcgagtcctttaggacggaggagctcggctggaggggaggccggctttggtctagaggtatcgggcgaatggtgctggcacgtgcctctcagaaacccggatccctttgcgctccggggccagcctaattgatccagctattaaggtggagaaaccgcatgtacctccctcctttccccacaaataaaaccaccttagagccttctcttcgcagattgtcaggacgttctacatagatgtggatgaaagactacagaaggaaggagcaacaaacgtcaaaaacaaaaccatggctataaactctgctgggtttgttatatggattcttttcagaatttggctaatgactgaaaatctaagttccagctcaactagtatatgattcctctgtaaggaagtgtatttttaaaccataggttgcgacataataatgggttgtggattcggtttaccgcgtggtgaccagcgtaaaacacatgcataataattacgcaatattatagaatgtcgggggcgggaagggaataaaaatttgcatcccacacagtaagggtaagtaatattttgtgacttgttttttaggtagatcatgtgatcaaggtcttttattcctcttagaagatgcatcccttactactttaatccagtctcttccccaccatgttcttgaaagtgtactttaccagtggcttccttctttgcagaaattccttttcaacctcacgaagtatttttcttgactttatttcttaagataagtgatttgcctgaataacctcttttaaatttcttgatgtttcatctgtttacttttaagaattgaaattttcttccagaatctccgaacaagaccctaagctatgacatccagttcaatgactattcgtctcccaaatatacgtacgcttttaataaatatgtaaatctttggaccaccttccaagtatggtgtgttcaacagatagtagtatgttactaccgtctgtaactaaaattttcaggggcttaacacaagagtaatttctttctggctcatataacactttaataatgcaggtgtcataatgtcagtggacccagtctccttccataccttagaacaggggtcaagaaacattttctgtaaagggccacatagtgttttaggctttgtgagccataaggtctgtctcaactatttaactctgcctctgcagctgttgctccacagacaatacttgaaaataaatgggcatggttatgttctagtgaaattttatttacaaatccaggcagcctgcttggacaaaaaaaaaaaaaaaaaaaaaaaagtcacacctacttttaaccacatgagcccagaaatgacacacagcattttctctaccatatcattactaagaatgaggcctcatcaagataaaagggggtatttcagtaaggccagatttacaaaaaataaaaaaaaaatttaaaaacacataaaaagataaaaggggagagtctgggaaatgtagtctcgtccaactacacaatggattgggggcttgggtctggagatatagctatcacaaactttattcctcttaatttgggtttctttttccattgatacatttatttatcctttactaattatatgagaatagtatatattatacagtacttgta

SEQ ID NO: 316015 - DNA, 4001 bp, Homo sapiens
ccactatagcacctgtttcaacagtttgcacttacttgtttctatgggtgtctccctttactagaccataaacttcttgaaagcaagagccatacctctactcatttttgcattcaaacttcaagcattgataggaagaaaatgagtggttgttgaaaatagcaaaagcacagagatgagaaaagttagggtcaatcaagacatgtatagtgagaaaatcagtttgctgggtggcaagctcatttaatagagaatgggagccataattggaaagatagttttgaatcagattacaaagaatttaaggcaaacctaggaagtcttaataggagggtaggataagcagagcccatttgaagattttggtgcaagaagacacgatggaattgtagcaggaaatatggtaccaaatatgtaaagccattaaatatcataaaatttcccacccttttccagatcaaagaaaaggtgataagaggtagatacaaaaatgatggtctttttatttttctgaaagattttgtcacctcttagccaagacgattttgtgatattacaaaagaaatagcacattaaaactgtatgtttcttatgagttcagcttcagagaaaatattgtaggtattttcacactattattttaaagacagcaatgaaaagagatcaagtttaggtacttactcatcaagtgttactttataaccacatgtgtttgttttaattcttcaagaaactctactttgtcactgaatgaggatcaactagaggtgactggttaggcctgggacgaaggtcaaactgagctttgctgaattattttaaacaaaatagatttccaaactcatttaaatccaggaccaacctggaaagctaagcttgactcacattcttctgtaggggtaggaaagaatgcagagcactctacttggaaacaatggcttcaagaggcattgcccagaaaaaaccataaatatgactagaaggtccagatgaagattctatgctcaaccatttttctaaagaagagcaaggacaaaactcacgcctgggatagcatgtgaaaaacagatgttcgatgaataccatcttgtcgacttcttgcttttttacattttcatgttatattttccctttatcggtttgcagtcagctctaagcaaacagttaatgaatttttcacacttagaaacaaatgtctccattgtgacaatggagacaatttttgagcactgtctcaaatctggtgataatttttttttaagtgaaaggaagtttattaggaaagtaaaggaacaaagaatgactactccataggcagaacagcctggtgacaacttttaaaaagtaaaaactttattacaaaaacatttgtttattgtagaaaagctttattaaataaagctaagcaaaaataaggagggaaagatcacaatcagtatacatcttgcagacctttaaagaattatttttgaaaaaacggatatatactgttttgtaactatgtctcctaacaaatagtcgcaacatctcattaataaatattcacctgcagaattattttaaacggctgcatggcatttggatgtaccacaagatacacaacaaatttcctgatgttggccattttggttaattccactttactcacaattactaataacgttgcgagctatagcaataactttgaaactgcagagaatttccttaattctttcttacaattccagtagaatacgatggtgtcccttctccgacaaaagggaatatttgggcattatcactgccaaagaaaaatgcctttttgatgggtgaaaatgctacctcatcgcgttattggcaggtcctcgattatcggcgagtcactgaggttccgagaggggcgtctctgctcacgcaaacagctacccagccgcctcccacggtctgacctcagccaaggtgacgcggcttaaagtcaaccggcggaaagagagtcgaacgggacgcgtgcgtgggaaagcgcatgagcgtacgtgcgagcgcgcatgagcgtacgtgcgtgtgcgcgtgcgctcgagagcgtcatcgcccccgactgtggagaagtgtccggggtagccccgttacaggtatcgctggctaccctcctccttcgcccctcctttcctcctttacattcaaatcaagtcggggttgaatttcgagaggggagtccgaggacctggggcctgatttctttttctctcgccatgcttcttcgggctgtgtacatgtgtggtggtgcctgagaggcgatacagggaatggctacactcttttactcccgcccctggccttcgtagtacccttgaagtgatccactagtcgtaacccctccttccaccaatgattcaattggagaagtttagaggagtggaaagacttgtccccttcccccatcgcaagcttggtcacagagtgtattgccaacccatgtatccagacgctcagtctagggctcttggccctgggtagcgttttgaaaaggctggttatccttaagtactgaagattgataaagcccacttacttacttaaaagaatatgccctgaaatgtgttttctgtgccactgacaccagaaatgctatttagaagaagttatcagtaatcctgacaaaggatgcttcctgcagctcaaatcaggctggaggtgcctttatatttttcattgaattactgttttggtgactcgaatgaatcatcaattcatttatttgtcttcaaatgtctgacggcacttaaggtctaaaaaagaaggtaagtttaaacagatagtttgatgttaaggtataaattgaaagtatgtaacattttccctgtgttcattagcagctcatatcaagcacccaaaggaacaccttggatgtttttccttaggcccttaagctatttaaaagaatacctcctaggtgtgttgtggtcttttacaggaatgtgtttctgatcatctgaatcttaatcatgtccaactgcctgcaaaatttcctgaaaattacaagcactcgtcttctatgttcaagattatgccaacagttaagaagtaaaaggaagtttttcggaactgtgccaatatccagattgcataggcgagttgtcattacaggcattggcttagtgactcctcttggtgttggaactcacctggtttgggatcgtcttatcggaggagagagtggaattgtttcactggttggtgaagagtataagagtatcccttgcagtgttgctgcttatgtgccaagaggtagtgatgaaggtcagttcaatgaacaaaactttgtgtccaaatcagatatcaagtccatgtcttctcccaccatcatggccattggggctgcagaattagccatgaaggattctggctggcatcctcagtcagaagctgatcaagtggctactggtgttgcaattggcatgggaatgattcctcttgaagttgtttctgaaactgctttgaattttcagacaaaaggttacaataaagttagcccattttttgtccctaagattctggtcaatatggcagcaggccaggtcagcattcgatataaactcaagggcccaaatcatgcagtatccacagcctgtaccacaggagctcatgctgtgggagactcatttagatttatagcccatggtgatgctgatgtgatggtggctggaggtacagattcttgtattagccctttatctcttgctgggttttccagagcccgggctctgagcacaaactcagatcccaagttggcatgtcgaccatttcatccaaagagagatggttttgtaatgggagaaggtgcagctgtgctggtgctggaagaatatgaacatgctgttcaaagaagagcccggatctatgcagaagttttgggctatggactctcaggtgatgctggtcacataactgcccctgatcctgaaggagaaggtgccttaaggtaaagatgggttatttccttcgaaatatttcttcaaataaga

SEQ ID NO: 316016 - DNA, 4001 bp, Homo sapiens
aaaaaaaaaaaaagagatgtagaaaacgtaggctgggtgcagtggcttacatctgtctgtaatgccagcactttgggaggctggggcgggtggatcatttaagttcaggagttcgagaccagcctgaccaacatagtgaaacccaatctctactaaaaatacaaaaatattagctgagcgtggtggcgcatgcctgtaatcccagctactcgggaggctgaggcaggagaattgcttgaacccaggaggtggaggttgcagtgagccaagatcaagccactgtactccagcctgggtgacaaaacgaggctacctctcagaaaaaaaaaaaaaaaaaaagaaatgtagataatgtaaaagtagcatatacaaataattaccaaagggtgagagaacctggtgtgccactggaacagccagtgattcagcttgactactgcagtggatcttgtcattggatactcatcagaattacccaagaaaatgtgttaccaaataaattgtcctggcttcaccttagtctactaagtcaggatttccaaggttgggctctttaattaagtttcccatttgatggtaaggaacagcttgggggagaaccacacaccacagcacaaagctcctgagacaagagagacagggctgggcacggtggctcatgccgtgggtggatcacctgacgtcacaagttcgagaccagcctgtcccacatggtgaaaccccgtttctactaaaaatacaaaaatttagccgggcgtgatggtgggtgcctgtaatcccagctacttgggaggctgaggcaggataattgcctgaacccaggaggcggaggttgcagtgagccgagatcgcgccactgcactccagcctgggcaacaagagtgaacctccatctcaaaaaaaaaaagagacagaaacaggtggggcacagacacagagggctctcaatgccacgccattggaggtgggttttgccctctttgttgagtcatacagtgtccagtcactctatcaactgatgtggaagtgcaactggagattggcaactcgagtcattgggggtatggtgatgaggtaagtgacctctgggagggactataagaatggggaggggtggccgggtgcggtggctcaagcctgtaatcccagcactttgggaggacgaggtaggcggatcacctgaggtcgggagttccagaccagcctgaccaatatggagaaaccctgtctctactaaaaatacaaaattagctgggcatggtggtgcatgcctgtaatcccagctacttgggaggctgaggcaggagaagcgcttgaacccgggaggcagaggttgcggtgagccgagatcgtgccattgcactccagcctgggcaacaagagtgaactccgtctcaaaaaaaaaaaaaaaaaaatggggaggcaggttttggggtaaatcattgcttagcgatccccaactgtggccagggacaaaatgacccctaacttctattttggttcactatttggtatttccagcaaaacctagcccactctcgccacctgcatgccagcgctgtcctggatgtgggcaagagacatagcagagaacaagacaggaagctcaattctaggaaaaatgtgttaactgaaggactaaataaatgaatgattaactaatttgcaagggcaaggaagacggcagaggctttcccataaaagattaaatgcctgggaaacgaccgagattccaggtcggccccgcccgggagcctcggtcgcgcccaccaggcttgctcacctcgaagggagcgacgctggggaaggtgacatcgatgaccagcacgccaggccggccttgggaggtccgcacgtcgcccacctggagggctacggagcctttcacatggcaaggcaccaaaacgcgggacatggtgacagcagccgcaactaagtgcaaccgccgctctaggcccccgaccaccagcccttcccggcatcctcagccgagcctcaagaactacaaatcccgggaggccccgcgtacggccagcccagccaatcaccgaagctcaggatcggccgggagtcggaagtgcctgcggaagtttttttctttttcgtttttaacacggaatctcgctctgtcgccccagctagagtgcagtggcgttatctcgactcactgcaacctccgtctccgggattcaagcgattctcctgcctcagcctccctagtagctgggattacaggtgcccgccaccatgccctgctaatttttttttttttaatttttggtagagacgaggtttcaccatattgtccaggctggtctcgaacccctgacctcaagtgatccgcccgcctcggcctccgaaagtgtcggaattacaggcgtgggtcaccgcgcccctcccactgaagttcttcttcagccaatcactgctcgaggcttagagcctacccgcgagccgcgcccagcaactgcccagcctttctgtatgcaagccattcggctccctttgggtttctttcactgcttagggcggtagtctgttaaaggcatataaatacataaacacaaatcagcagtgattagcctagattaacctcaaaaatacgtattagccgttggaaaaaaaaaggatttgaacacgcgctttgcaaaagtagataaacagccaataaacccatgaaaagatacttaatatttatagaggaaatacaaattagaacctccacacagtcattagacaggctaaaattaaagactgacaaagatgtggagtgcttggaaccctcatccattgctgatttccaaccactttggggttttctgtttgttttagagacagggtctcagttacccaggctagagtgcaatgctgcgatcacggttcactgcagcctcgacttcgcgggctccagtgatctcacctcagcctccagagtagctgggactacacgcacacgccactgcgtcctgctagatttgtctattttatttcttatttttattttattttatttttttgagacggagtctcgctcagtcgcgcccaggttggagtgcagtggcgcaatctcggctcactgcaacctctgcctcctaggttcaagcgattctcctgcctcagcctccctagtagctgggattacaggcgcccgccaccacgcccagctaatttttttttctttttttccttttttttttttttttttttgagacggagtctctgtcacccaggctggagtgcagtggcgcaacttggctcactgcaacctccgcctcccggattcaagcaattcttctgcctcagcctcccgagtagctgagattacaggcatgcgccaccaacgcctggctaatttttttgtttttagtagagacggagtttcaccatattggtcaggctggtctcgaactcctgaccttgcaatctatccgccttggcctcccaaagtgccaggattacagacgtgagccaccgtgcccggctaattttttgtatttttagtagaaacggggtttcatcatgttggtcatgctggtcttgaactcaggtaatctgcccgccttggcttcccaaagtggtgggattacaggcatgaggcaccgcgcccggcctttttatttttttaatctttaagacagagttttgctctttttgcccaggctggagtgcagtgcaatcgcagctcactgcaacctccgcctcctgagtccccgggttcaagggattctcctgcctcatcctcctaagtacctggggctacaggtgcatgccgccacaccctgctaattttttgtattttaagtcgagatggtgtttcatcctgttgcccaggctggtctcgaactcctgagctcaggcagtctgcccacctcggccttccaaagtgctaggattacaggcctgagccaccgtgcctggcctagttttgtttatttttccctgtgttgcccaagctggtctcaaactcctgggtcccaataatcctcctgcctcccacacct

SEQ ID NO: 316017 - DNA, 4001 bp, Homo sapiens
tctaggtaactcaaaacccaaccggagctgcaggcaaggccatttcttccaagggaggcagagcagggccagttctagcctgagcatcttctctgttgtacttctttccaggtgccctgactacctcctggaagcaagtcattttccaaccctttcaactggttcatggctgtgatttctgctgctgagccaggaatcaaggcacaagcagctgatgtggggagggagtggtagcaactaagctctatcaggaggcaatatggcctagaggttaaggaaggcctgggttaaaaacctggttctgccatttcctggctgcagcttatgtgtcacttatataagtaacttggagcctaagttctctctgagccttagttcctccatcttagaatcaaggaccaagtaaggcaatgcatgtaaaatgctttgtacatgggcctgacccatggcaagtgttcaaaaggtaggtgtgttaataatgtccaactcggcacacccggagacagaggatggtagggtccaaactagatcaccacctcccccgacatacatgcagaggaggggcgcagtccagaatagggtgagctttttgaagatggccctctggctgaatgtgcccatagctgatggccagtcagccatcagcttagagacctcacccgcctcctgcacctagtttccccctcctctctgcagcatggagctgaagcctcctccagccctgaggagcagccatttctccaggctggcctgttgcttcaagatccacccctctcctcttcccatcctgcctgattccttccccttgccttcaggaaaggagaaaagagccagaagaatggccctcagagcggaaggttaggatgagggccagggaggggaggtgcaggcaggcccaaggcccccacccactccctaccctgcgggaacaaaggggaggaggcagggaggtgctctatgcctagtccagggccggtttttgccaggcagcccaccaggctcacaggcctggcatccaaccccgtcaaagtcgggaactacccgctatttgtcctctgtctcccccatagcttagaagtgtgtgtgggcagcttgttgccccatctcgctcccacagcccaaagtcacgaagattcctaaggcttatagggcctgcgctttagcactgagaccacccccatttctccatagatgggctccacccctcctccggtcttgtctccgcccgacccccaaggcatctgctccccaggtctctcctgcacttctcagagaaaatctcaaccaccacctcaggctccccagatcagggtcctgacgccttctctttcttcaaggcctgcgaagcctgacccttttccctgattccatccatcagagaccctctccccatcgccttcctcctggacccctgtaacggtcttccaggccggggcccctccagtcctagaggatctagaggggttccgcctcatctagacacccccctccccaagccccctttatccccagatgccgcccccaacccgagcctccctttctgatcgcgtacccttttccaaaccgcctccccgggccccgagcaacccttctcccggacctgcggggcccagatccctttcctagatcccccgtcccagccccctcctcgcaatcgcagacccttctacccgctcctcggggctgcagatcccggacccctccccaagcccccgagtcggactcccggttccagccaccacccccgcttcgggtgcccgcgcccccaacacaccgtataagtgtccacaagctccgagcccacgacgcgcgcttccttggccggctcggcttcccgctcgggcccgaaggtgcgcgcggtcgccatgttcgggtctccgccgccaccgccgcccggcgcagactagcagcagcagggggcggggtcaacgtcccaccgccccccggcccccgccgcccgtcgcccccgccgcgcgctgcgccgccatcttggccccgccttcttcctgcgccctcgccccgcccccgcgcgtgactgacaggggccactcagggcgcgcgtgcgaggtgctcgcttgcgtaatctacctgcgtggcgccgccggcggtaccctgcacagcctgctagaaactgagaccccgggtggtgacagctctgggcatcgcccctgggtcctcgggaagaggggacagaaggtcccgagtctcccaggccacacgaagcaagtcactgctcttcctggcctcagtttactcctcctgataaaggaggccataatagtgcctcacctggctgttgggctctttctctttagggcaaggcaggttggaggggaaaataggacctgtgcttaccgccggagcagggcgagagtgattctgggccagttctgaacctctctgagattcggagatctcttgtcagtggggcttctggacaactgagtgggttgattgatgcgcggcccagcacgcagtagtgctcgaggcagggagcgtgtttatcaagagggataaacttgatacgaactctgtacgaaggaaggtgtaggtggatggaggggtgtgtgctgccactgagcacaagaaccccacggggtggcctgccaaagttcaaaacgagggagacaggttgatctggacccaggaactacagtgctgaatcctaaaccggggaaagatgagacctagaagagggaggtggtaacctaattggagggtgaggagggaaagagcctgccacagatggggcatctataggggtgctgttgaataactgagagcagctgacttaagcccgaagtgggtacttctccctgggcagatgggaggtctgggacaggctcctctggcagaagggctcctggccaccctgtcctaaggtgggtcagtcacttcctccttcaccagttccacagcatcttactatgagcttggcattcgaggcttctcttggcagggccctgcactcctagcctctccttgcacattgcacccccattccagagaggtttagttaaaggcgggggttaccaagtcagtcagatcttgggcaagtcaccactcctccagagcctcagtttccttatctggaaagtggaggtcatggcaacccgccaacctggttggatgggagcctgagctgttgtgttgcaccttgcctggggcccacgactttgtagctcctgtcctgcactgggcttatgttttcattcattccagaaaccttttcagagagtccctttggggagtgtgggggacaggagggaaagaaacctggtccttgtagccgttcgtctgctccctgccctgggcagaggacgtggggactcaggccagcctgagatcactgggaccagaggaggggctggaggatactacacgcaggggtgggctgggctgggctgggctgggccaggaatgcagcggggcagggctatttaagtcaagggccggctggcaaccccagcaagctgtcctgtgagccgccagcatggatgacatctacaaggctgcggtgagggacagggctgggtagggctggggtgggcaggcccactgggggctcactcagctgagagtgcggggttagtagccccagggaagtggtggggaccaaggagaaggcctacgtgccttcaacccaggccctcacagggacagtgattctggtgtttgaggatgcagaaggggtagggggttccgggtctgaagggtggtggaggaggttgcagctttcagcatcgtgtctcactctctgtttccaagtgtctgtggtctgtggcactgtcgctcagccacatgtctctgcatttgtctctggacgtttttgcctttctcttttcatctcttcctcctgagctgtctgagtccccattactgtctccctgtccccaacccccatttctgcccctcacattctgcttctcacatgctcaaaatctgccaccccactccagccccttggcgggccgaagatgctttggagggtggagggtgtg

SEQ ID NO: 316018 - DNA, 4001 bp, Homo sapiens
aaaccgccttagggctggaagggggacaggcgggcagcaatactgctctttaagacattgagatgtttatgtgtatgcatatctaaagcacagcacttaattctttaccttgttcatgatgcagagacctttgttcacgtgtttatctgctgaccttctctccactattatcctatgaccctgccacatccccctctccgagaaacacccaagaatgatcataaatactaagggaactcagaggccgacgggatcctccgtatgccgaacgctggtcccctgggcccccctacttctttctctatactttgtttgtgtctttttcttttccaagtctctcgttccacctaacgagaaacacccacaggtgtggaggggcaacccaccccttcaattagtaatggcctgcccgaacttcccatcccacctctgctccagagtctgaaaatcctaccattagagagctatctcttttgggtgtttcctgtaacaacgcaaatgtctccagaaaaggcaacaatgacaaaccctggcctctgatgaaggcctgtttggctcagggttaactaaaaggaaaactcagatgtcccattccttgatctatcctaaatatagtgagaagcactaaatttaaccctgaaggcagcctgctaaatagttatagaatctgaagggaaactaaaacaggaaataaaagctgggattattctggggcaaacagatattttgagctgttatcagaacagcagataaatccactaaacgtctcccctccatttcccagcgttaagccattctccctcctcagcttcccaagtagtttgggactaaaggggcgtgccaccacaccgggctaattttgtattttttagtacagacaaggtgtcgccatgttgcccaggctggtctccaactcttgactcgtgaactcaagcgatcctcgtgcctcagcttcccaaactgttgggattacaggcgtgagccacgtgccgggccatgtctgtgcttccgagggtgggaaagataaagctcaccatggctacgctgatggcttcctctcctacacatctcacccacaagggcggggtcctcaactaagcttaggactgcctatcattctgcaaatgacccactctacagacatgctgcagcagggaaaccccgccactgggcagttcctcatgctgaggaggagacgcccgtcactccatctcatctgtaaagtgaagacttttaaggctgccctaatattcatcataatctaacaacgaagaccttaccaaggggcggaaaaaaagaataaaatactgtgagcgaaggaaacaacaaaggaataacatttaaagcaatgtgccaggtccttcacacattaacatcattgtgtgaggtatcattaacatcattttacaaataaagaaacaggggacttgcagggggaaagctgcacaaagtcactgaacaaagtaagtgacacagcaagaatccaagtcaaaatctggagctggaaagtgagtggggagacgaagaaccgcctgggcacctttgtgcagggcggggctggaggaggtcacgcaacttgaaaacacccaagggagttggatcctaccaccgcggcccacaccgtggagaaatacacgtccatcagcctctgtcaagcaggacgcggcgggtgccggcgcggccgggtggcctggtgctttctgggcctcgcccgccaccccggaagcctggaatcccgggagtgcgcccggccgcccggccacgcgatcccggacccacgcggacgcccgcctcagggaaggccgcgcacggcggggacgcggggcggaggggctgagccggccgagccaccgccggcgccgctccaaagcctcccccgcggcccgaactcgagctgcagcgcgcggccgcgccacttacaggtcatgactctgcagacaagcaccacctgcggcgcggactgagcgctggagatccggcggaccgcggcgtcgctacggtggggcggggaccgcgtcagaggccccgccccacccctcctcctggccccggccgggaggagagaagggtctgcgttcattccagtgcgcctgtaacaccaggacggaccaacgagaaatggttaattgcaacacagtccggaaaaagcatgcctcgaaaggcaaagggcaaaagggaacggcctaagtcgaggtggtgtgctggtgaatgtcttaacaaccagacttttcagggaggaaagccctgatttgtagcgtttgctgattctccgcaaaaggactgaacttctagctggttgaatcacctctgtggccaggttaacaccgtatgctgatgggcttgagctatttgaacaagtctctgtgacggggacggaatgaccctggttggtttaggcacgcgagacgtctgtaaaatctgactacaaggctgctaggccaacgggaaagatgctgagggttcaacgccatgccctcaacaagtcagtcctcgaatacattgtcatctctttgctaatatccttttttgtttgtttgttttagacagggtctcactctgtcatccagtcaggagtgcagtgcagcagtctcagcccattgcagcctcaacctcccggctcaagcgatcctccgtcctcagcctcccaagtagctgggactacaggcacacaccaccacacctagctatttcttttccttttttctttttctttctttctttcttttttttttttttttaagttttttacttttaatagaggtggggccttgctattttgcccaggctggtctcaaactcctgagctcaagaccctactgccttagcctcccaaagtgctggaattataggcgtgagctgctgcgcccagcctatagactatgatttttgcatttttatttattagattgctttttaattttcgtgttttgtgtttttgtgccttgtcagacttgtggaacaaaaatccaaaacttaaccaccttttggaatgccccagaatagtttatactgaaacagatcttggtttgtaaaagaacactataaaaacattttgggggcaactagggagatttaaatatgaacgagatatttgatgcttttctgaattattttgtgtgctatagtgttgtgcttgtgacaattctttactcttagaaaatgaggaagtattagggatgaaccatcagaatgtttgacttgaaaatcgtcagcaaaaagaaaacacataagataaagcaaatatggcaaaatgttaattattaaatctaggaggaggacacagctgttcatggtactagattaaaactttgtagaagtttaaaattttaagctttcataaaaaaaaattggggggaaatacatagcagttatggtctttctgcagcttaagagactatctggacttggctttgtagcaggaagatctttaaaaaccttttcatttctgctatgcttattaacctatgaggtttcagggtcaacctgtggtcacttacaacctgttaaaaaaattcatctagatttccaaatttattggactaacattgtaactaatagtggtcctaaacctggctggaaatgttatttgaagtgcttgttcaaaatgcaaattatttcatttttttagaagtggattcttacagtgttgcccaggctggtctcaaactcctaggctcaagtgatcctcccactttggcttcaaaaagtgctggccttataggcatgagccatggcatccaggtggagatgcccagtaggcaaccggaccaaagcctcaagctcagaagatgtctgggctggaaattgacttgggagtcaccagcagttttaactaagaggaagctctgaatttggatgagaacacacaagcggagtatgaaaggcacacgcaaaagaagaagggcctgtggagcctgggaaggagccattagaggagaaggaccaggccgggcgccactgcctggtggaggaacagctgtgtcctcctcctagatttaata

SEQ ID NO: 316019 - DNA, 4001 bp, Homo sapiens
cccccaaacctgtgaatatgtttactttacatactcatacaagaattttgcgggggtgattaaattaagaacttccatacgaagatattatcctgaattatctaggtgggcccagtgtaatcacaagtgtctttataagagacacacaggagtgctggagaggacagaaggtgtaattggaagatgctcctttgctggctgtgaagatgaaggaagcagtcaggagccaaggaattcaggcaggcttcataaggtggaaaagccaaggaaataaatgtactctcccctagtacctccagaaggaacacagccctactgactttggttttagcttggtgatatttacagatttacagacctagtctgatgtacaaactaaaagacggtaaatttgtattattaaccaacaaagttgctgaaatttgttacaggagcaatggaagactaacacaatttcctaagcagtctctctgcttccattttttctctccttttagcctcaaaaggagcaatccgagttatctttttaaaatgtacgccatatgaagtcatccttctgttcaaaatctgccaatgaaatccaaagtccatgtgagaaccttcacctctccgacgtcatttcccactttcccctactgtgaatttcagccacactgcttccctgctgttcctctattaatcttgcatgctccagtcatggctcttctccctctgcctgaatcagacccctactcttactcccagactcctatccttgaagtcctttcttaaatgttaccttctctcaaagacttaacctggacactccattccaaattgcaaccctcagccgctaacactccctcatcacttccctccccttatcttttttccttagcatttaccaccaaacccaaaacacagcttacttctgcttactgcccatttccaagaaggccaaaaattctgcgttgtttcctgctgcatccccagcaactatgcctggcacatattagacacttaataaatatttgttgaatcaatcaatgaaccagatagagactcttaaaaacgtaaagctgtgatttaaaaagaaagaaagaaaaatatgatgtgggaaaaaagataatcaaaaccgctacgattaagagataatgattctcttaagcctttgccacatctgaacgcataatctggaaggaaattaaagccacatgacttaaattaaagccaagtgaaaatattctggagaaacaaagtaagccagtaacctatttctcaatttaaaaaaaaacccgcaacgcaaaatgccagcattttctcggcatttcttctctaaaacattcacacctgccaaacaggtcttggcaaataaacattctgctcttctgaaaaactgtggttctcatgttagcaaatttgggacgaaatccgtatgcagaaaaagcgccgggccgcccgcaatccacccactccatgacccttttttaggacaaaatccctgggcgctggggcctgctggaggagcttcacgcagtctggagctgaagggacacagcgagcgccccgacccgcgacgccccgactccgcgaaggcctccctgggaggctggggaagcgtcgggggatctctcagcgcagctctggggcccagatttctgcgcccgtcgtgcggtggccagagagggacagcgcagcgcggagacgcggagacgcagagactccgcagggggagagcccgcggtgcgtgaaacaaacctgttctctcctcagacctcaaagacagcggctccaccgcggtacgcggccaccggctttggagcctggaccccaacttgcctcctctcgcggagagacagtcgccgacgctcgcttagccgccgagacctcgccgccaactctctcacctctcgagacgcccaggccgctcaggctcgaatcttgcggagcagggggcgggacaatagcggccgcggcgccccactcggcagaactccgccaccaggcgcgatgccggaactacatgtcccatgacgctctgggaggccgcagctttccaccggaaagagggtggctgaggtgggggaggagcccaaaaggcattgtgggagtacagctctttcctttccgtctggcggcagccatcaggtaggctgcgttgaggatctttgctcttccatccgcctttgatcgtcttcctcttcagccatccaggtccggggaccctgcgtcctcggagataggtctccctcctgtgcggccagagtttggtcaggatgcgggacagcaaaggggtggagaggcggcccccggggcgggttgagcgaagatgtgatggcggcgcgaattcgagctgggcccggatcctggaggaggcgtggggctgacgaatggggcgcccgggacaaggcagcctaaagtgaggctgctggttgggtggggtagatgcattttcctcgagagttaatcctcggtggccgcagcagtaccttgtcctgtgatgtcagcggcatctcctttcaggtcctccttggggacgccgcctgccgcagccacccgcccccttggtgctcagttctggttctgttaattcgccccaccaaaacgtgccgagcaccgctctgtgctggggttgcggaagtgactgaacgcggctccgtgggcgcagtggtgggggttgggctagctgtccccggcagttggtgcagagccattttcattcccggcggtttccttgtttttgttggggaactaagatggacggatacagtcgtcttattgtacttaaagcggatgatatttaatacacagtttgatttcacaggtaagccaagatgggtgcatacaagtacatccaggagctatggagaaagaagcagtctgatgtcatgcgctttcttctgagggtccgctgctggcagtaccgccagctctctgctctccacagggctccccgccccacccggcctgataaagcgcgccgactgggctacaaggccaagcaaggtacgtgatcgactgcgtggatgcttggataaaattatattcgagaaaagttggaaaccagctgttaggaagacactgctgcctcagtgtctttcttcgcatagggctttggcagaaaaaagctagcaacactggtcagttactgtatgcactgttgtctaaagtggcaagtgtgtcaaaggttacaaatctgaatgagttcagactaaagcaaaataaacagtgtgcctccctgtgtgagtagcctaaggtgcattgaaaaagactgggatgtgttttatttttttctattagatagcattaacttactgttgaagtatttttggtggagtattagtgacaagccattgagtcttaagccttacggcttcctataaaatcactaatttcgtgtgtgtttgtgtgtaggttacgttatatataggattcgtgttcgccgtggtggccgaaaacgcccagttcctaagggtgcaacttacggcaagcctgtccatcatggtgttaaccagctaaagtttgctcgaagccttcagtccgttgcagaggtaaatggttttgagtagcagttatattgaatactgcctggggatggtgggagagagagattaagcaacttttctgattgtacttaggtgagctgtctcgtatataaaacagggtttgtgatttttactaatcttggtgaagagtaattgcttgaaagacttgtctttgttacaaatgcgtgtgtatatactggaagtacttgtggaacctaagctttaaagcggcaagaatatgcagaagagaccaaatgtggcctgcacagcctaaaatatatactaaatatttttaaagctaaacgttgctgagctctcagttgtatggaaaaagataaggtccccaaaccctaaattttgttacccagatattaacatattcctgccctagtcaggaatggagtattaagagggaatgatgtgtttcagtctatgtgtgttgttttagcaagtctacattatctcattacacttgtg

SEQ ID NO: 316020 - DNA, 4001 bp, Homo sapiens
cacttatttaaaaaaaaaaaaaaaaaagatcaatcaaggctaaaaacattaaaaagagagagaaggcaaccaaatttccaggattatctcatccctttgctcgaaaccctttaatatcttcctacctcactgagtcagtcctacaggccatttcttactattctctttcctcttctactccagccacactgggcaccctgctgtccctcaaacatgcaagtacagtcctccattgtttaataaccaggacggattctgagaaatgtgtaattaggcaatttcgtcattgtgtgaacatcatggaatgtatttaaacacacctagatggtacggcctactacacacctaagctatatagtctatttgctcctaggctacaaacctgtacaggatgttactccactgaataccgtaggcaactttaacacaatgaagtatttgtatatctaaacacagctaaacattaaaaagttaccaaaaaaaggtattatatataagaccattgttaaagatagaaatgtcatttggcgcctgactgtatactactcctcacctcagggctgtgctgtttccctctaccacgaatgctcttcttaaatacggctcacttcatctccttctgatacctgcttaaatctcatcttctcaaaatggccttgtctgaccaacttattaaaatagtatcccaactacaagtcactgttatttttttcctagttgtccgtcttccccccaatagaatataaactataaaaggaagaggcctttgttttatgcgctgctctatctccagaccctagaacagtagcaggctctcataagaatatgcagaacaagatgttgcacaaagacaacacatatatatatgtctccaattaaaacttttgtcacggataacaaaaaaagctaagaaaacagtttgaaaccctgcacgctctgctacttagaatgaaataactatgctttagaaggaaatgtttcatttaaaaaaaatacactaacaaatgtctggattccctaaagacaaacattaatgctaagtgcatgcatgctgcaattctgctggtacaaaatgctctggtttatcacaaaagatcttcactaagccattttcccaggaaccacgaaattctagctaaagattcttaaggaaaaatagaggcaaaattaacatattagtgatatatcgtgattaggaaacacacaatatttcctactagttgaaacttcatagcaccaagcaagataaccggaaatcggatcgggagtgtctgcctcacggagacactgggagagaaaaagtcctcaaagaactgcacctccttttcttggcgccaggctggctacgaggactcagtccggagatgcagcggggtgtgtggggtttggcaggaagaggcccggactgcgagttaggggtgtgcccaggccaccttcctctcccactgattttctctcaagagaaaacggaaagttgcctgcgcctcctacccgctcccaaaaaggccgggggagggttgctgagggtagacccctccccttcgccaaggcaggcctcggccccagcagcgctccccagtttccagctcacccggctcccggttgatctcgatgtcgaagtggcactgcggccggtcctgcgcccccatcgcgaccgaggtggcggcaagagctgggagagagggggagaaaagcggtcagggcaggggcgagggcgggggcgagggcaggggcgagggcggggctgagacgaagtccgcgccacggtgcctcacgccggcccgtcgcgacagcgcaggaggccaagacgaggccccctcccgccccgggcctcgcggctcccacgcagcgcgcacgcatgcgggcgagctcttcacctggctggcctccagcctgagcgggtccccgtgagcagaagagaaagcactgccactgcagccaaaccccaacgccgctaacggaacgccgtctcctcccccaggccgggcctcccaatgccacgctaaaccccgcgagagtcgggacaaataccgcgagagtacagtctagatgggggtggtcaaccgaaggtggcggcagcgggggcgtacgcacgggggcgtacgcacgggggcgtgtctggggagctctcgaggagcctccagccagcgctcctatacctgcgcgttccctgtttgcccccccctttgaagtcagtcgcccaatctgaaagccgtggatgcgcctgcgccctccatctcgtcaggtgtggctgtgagcgccgcgcattttccgataccgcgagacttctctgtttccgagcgctgtgaaggaactgagtgaattgaggctttgagttttcgttagccaagacgttgtgttgctctgtgttctttttggccgggagtggttatgtccgtgtcctactgttaggtcttttaggctgaagaatgcgttccttcccgctttggcaccagcgtcactggcaccgtttttgtcctgtgcttactgaccattctgcatcttttgtgaagtttcagttccagtcttctgcccgtttttaaatctggtccttcgtgtttaacagttctggatacaaatgttttgttagatatatgtatgctctgaatgaaaatcttttgttacataaatgattgcgaagtctttttcccaatctgggcctgtcgtttcattgttttgacgtttttggcaaagaagtttttaattctgattaagtcaattggtcagttttatattttaatggtttgtgcttttcctgtgctaggaaatctctgcctacctcaagttcttgaagatattctgtgttctcatatatgttttacatagtctttaacgtgtaagtctatgatatgatctaatatcattaatttttgcttatgttgtcaagtaagtgtcaacattttcctattgggatatacagtcgttccattaccgtttgttgaaaagactcttttttttttttttgagacggagtctcgctctgtcgcccaggctggagtgcagtggcgggatctcggctcactgcaagctccgcctcccgggttcacgccattctcctgcctcagcctcccaagtagctgggactacaggcgcccgccactacgcccggctaattttttgtatttttagtagagacggggtttcaccgttttagccgggatggtctcgatctcctgacctcgtgatccgcccgcctcggcctcccaaagtgctgggattacaggcgtgagccaccgcgcccggcctgaaaagactcttatacattgaattaccttcgccttgtgaccatatatgtgtgggtctgtttctggatttttgttccaatgatctgtgtctgagtaccacactattttataagttttttttttaaactataaaatacacattacatgggcgggcgtggtggctcatgcctgtaatcccagcactttgggaggccgaggcaggcggatcacgaggtcaggagatcgagaccatcctggctaacacggtgaaaccctttctctactaaaaatacaaaaaattagccgggcgtggtggcggtcgcccgtagtcccagctactcgggaggctgaggcagaagaatggcgtgaacctgggaggcagagcttgcagtgagccgagatcggtccactgcattccagcctgggtgacagagcgagactccgtctcaaacaaaaaaaatctatctatagatctatagatctacagatatctagatatctatagatctatagatatatatacacattatgtgaaagttgccattttaaccatttttaagtgtacagttcgctggcattaactgtatttcacacggttgtacaaccctcagtacctcccatccgtccacagaacattttccatcttgcaaaactgaaactctgtattattaaacagtaactccccatttccctcttttcccaagttcctggcagccacccttctactttctctctgtaaatttgtctactctagtatttgtctactcatatgtgagt

SEQ ID NO: 316021 - DNA, 4001 bp, Homo sapiens
gtgaatggactaaagagtgaattcagaaggggggccaggaggacagtgttttaatctacataaggaggtttaagaatgaattgtgaaaagcattgagtggcattagggttgtggactttggcatgtaataatctataaggagccactggccaatgttaataagatcatacctatatttcagaaataataataataatattaagtctagaagactggactttggtgatttcatttacagataattaaaacataactgaaaaatcatatcttcctattgacaatccagtaagatggaaaccgactgcaaacttcacttcaaaaactaagcctttaaaatgtggcaaaggtatatgttacacagctgcagtttctaatactactgttacttttaactgtgttttgcttacaaaaactacaaattagtatttgttaggtaatttgtgaaataactcctttgtgtaaaaataataaagaattatcaagataaaccattactatgttaaaaactgtttcaatacatgaaaacccagagagatacgtcactcaaagctatatctgtattaatattgtctcacaaaaagttgtcaatagcattaaaatgtatgtgaaaaattttataaaaaactcagatctcagatttataactgtattttatagttctagctacttaattatcctataaagaaaaccagaaacagctagtttaatgtaatttgaagggatatgtagatcttggcactggataaccatgtgaaaatagtaaaagcagaataaaatataagaatttcagagttggaagagactttggagagtgatccaagaaagtcatccaggaatgcatagggtcatcaggccttccaacaccctgcaaatgaaaccaatggagttctcagcctaccttctttaagtgtatatttcaccttcaacttcaaagccattcaaacatttacatttgaaaatatgttattactaaatgtaagtggaaaatttcacaaaataaaactatactgagggaataaagaaaagattgacagcaagtactttgggggtggaagaagggagacaatgggaaggacgggaactaaagaagcttttcttactccacactactggaactctagtagaatctgctgaaagattgactccctcaatttctgcttatgttaagaggattgggaagactaactgcagaatagcaggcttacagaaaacagttacttcttttaatcaaaccatgtaatcagaaggcctgagtaatgattaacttccactttctctgtgaatcactcaatcactctgcagtgcaagtagacttagattcattctctgccaaaggcacagtaaatttaatgtttttgcatttaacatttaatattttaaatatatgaatggcccttgcttctgagctcatttcaaaaaccttgtgttctgctaggttacaatggctgatagaaatgctgagacattttataggttttacactcaaacataggtacacataccctttctcagtgacattttaatatctatgatcctattaataattgagcacaattaatggtgagaaatgcattaagaccctgtaattttcatgtacagcatgacaactcaattgacttaagcaaaaatagtctaccggagtttgagtataaaaagagggaaaatgagtatattaactacctgtaaaaatgcagagtaacagatactgggttaactatacgaattcacgtttcccaagtgttatatgtatcactatggccctggaaatgcaaaaagaaatagtacctttgtggaggccaactgttcatgatttagaattatcacaaatgaatcaaatattggacatgtaatatccctcatctctataacacactaacaacctcctctggaagaaattattcccaatgcaaaatctcaacctaaataattttaaattcaggtggtttttcatttctactcacaaggcattgtgttgaggcgggcaggagtcggtggagaacggtttaaatgtttggaataccttctcttcccaggagagtttattgcccaataatgcataatatattagttgctcaacgcgggggatctagggagtgacatcttgactggaaacacacagatctgaaaaccacctctcaggaaacgttgtggggaagaagagcaactttcttatccctgtcaaactaaccggcggaaccaaccccagaactagccggagggcctggggagagcagaaggctgaaagcagctcctctgcgctccgccgagggttcaggcaagggttttcttctggaggcggcattgttcctccatctgctcagcctccgtatttcgccaggaaaccctccccgctttctcgtaatctgttccttatttcttttgtacctctcagccgatttccatgctcttggtctctgtggtcccagggcacagctctagggtgaagagctgcagtgactggggcgccgctctaaggctttggaggcgactgcactccgcccgggctctggcagcgtgagcgccgcacagtcgctcgctcccttctctccggtctctccggctcggacgggctctcccggcctctcatcacccactccgactcgcctttcctgccgtgtctccccacgccagctccgcgcgctcggcgctggccgcccgggcgcgctctccgcgccgccgcctgatcctcggcttacagccgcggcgctcccccgcccgcccacaggccgggactccgaattgaagggtcaaccctccgcggggaggcggggaggagcggcgaggagagctggggcaagtggggagccgcgggtggggggactgacgggggaacgggagagtgaggccaagaagaaagaagatgcatctgctccgaagacgccaatgaagaaaggacagagggggcaggagtggagtgggggagagaacgcccaccaggagggtgggcaaaacgggcaatttacaaactgccggggctggagatgccgcgcggaggaggaaagaggttagcggcacagaagaagaaatgaggggaagttcccacatctccccaaaaggtcacgtttgaaaaccgtgtcccttgaacgggagttaaacaagcgactggccatggtgtaaaaggtggatttaaaaggaaatttagtgtcatgtacttatttagacacggcttcgtctcgctcaactctggcaaattaccctccaagtaaaatgtattggttttatgcagaaacggaaggcgaatctcctccactgtggactcctcctgagattggtttgtttgctggttatctttctttttaaatgaaaaaaagcgtttgggagcttccatgaaccccaacgcttaaaaaaaaccacccagtttattaaagttcattattttttattgcttttattttcatcagaggatagggtgagggactggcatcttcagatgtttaaaacacttatttaggtagcattattttttataaaggacacgatttcctaaaaccgccagaaaggctattggaaaactcagctactagcctgggaaagagagacgcatttaaactcaaatagacgattatacctccagcaccccccacccccaccccaatgggattggaaaagggttgagtttacagaagagagagagcagagaagggtgggtggaaggtggggaaggcgaaggagaggcagggaataggaagttctcggcaatccccgggattaaggtaaacgccggagctcggcggacgcaggaagctcccttacctttctctctaagccccgtttgcacctgatctgcaaccataaatacttcgtggtgcttagtgtgcagccaaacgatggccaaatgttaaacaattcttcacgctccctcccccttttaaaaaacaggctcaaaagaatgttaatagtgttcttgttatccatcggctccaaaacattccgtttcgtggggaggagagacgaaaaccaggcccttgggcacgcgtatatgtatttatatattatgcggt

SEQ ID NO: 316022 - DNA, 4001 bp, Homo sapiens
aataatcttccatgtccaatggtagccactagccacatgtggcaacatggctagtacaaacgagcaaccaagtatttaattttattccatttaaattaatttaggaaacttccaacttaaactgcttggggtttatgttgacagagtggagccagcggtaccacctggaaagaaagcagttcctgacagagctaaccaggctcttccagaagtgctggttgtccggagggaagtataatggtcaaacaacccattccaagaaagggttctgtgaagggctttgagcccttagacaagtgtctgttaaaagctactgatagaacaaggaagatcagcactatgctgagctccaaagacattttcagatggcttattcaaacccactgagctaactgatggacaagggaagagtaaagcatcacagggaagggggccaaatttcctgctttcactaaccactgaattcctatttttcctttggtttttacttttggccacaaagctagtttctccatagttactgttttcctgtgagattagggtcattctagacagaaggactacaatgtttacagggtagttgtggtaagaagccaatttattttagatttagctaattggtctgtgctgaacgattccaggattatcgtttaaaagtctctgtagtaatctctttgaagagcactgtatcattaaacctatttaacagcaaaaaaaaaaaagttaatttgaacttaaatgcaagaaattaaaaattgataactaagatttaagatgttcaaaatttaaaaattactacattataatctccaataaaaatcaggaagtcatccgagctactcgggaggctgaggcagggaattgcttgaacccgggaggtggaggttgcagtgagccgagatcacactactgcactccagcctgggcaacagagcgagattccgtctcaaaaaaaaaaagtaagtaaaaagtaaatttaaatagccacacgtagctaatggctacatattggacagtgccgatctaaaaggatgtatggtaaatattttaaccctcttagagcttatatttactagaacaagctttataaccagaaactaattcgattttctacagaaataagacttctattttttcccatttatgacaatatacgctctttcccacccaccctcaagcgttctccatagtgagtttcccgggctcactgaagattttcacatttaagggggaaggaagaagtgtcgcactcacatgtgtccagggctgcggtcggtggattctgccatatactccatcgttctgtatgccttaagttcttttaaaaaaaaaaaaaaaaaaaaaaaaaaaaaagagaatgttgggatttaaatcactttacctagtctcctctttttacgtcttcctccagtctctctgaataattaatatattcacagaacttcgaaaaagcaggaaagaaggaaacccaactccactgggtaagttcgttaaaaagaactttaagatgaggaccatgggatttcctgagcttcccagctgcaagaccctcgggccacccagctctgccgctgacctccatctcacctgggctccaaccctggacgaccaagggcgaggtcagctcgggattgtggacgcccgggccctcccgctctccaccagcccagggaccgcaccggaccaccgcgcctcagacccacgccacaggagtctccggacggcgtcccggcgcccgagggccacccacgccgacccccaaccccggggcgcgaccgcacacgggttccgggcacgcggcgctcacgcagactgagcacggccccgaggccggggagcccgccccatccgctactcaggggcccgcggccgacagcccaggtctcggactccggaacctacttcgcgcctccagaccagccctggatttgctgaaaacccgcaacaaaatagaccccggctgtcccgtcagctgccaacctggctgtctccgccacagagaagatctcgcgagcgaaatgctcgaaatcccgcggcccgagtgacgtattaaaagggacggggtggggacgaggaaaggggcggcaccgacgggcggaagggtgatgggagcggcctggtggctgggaaagctcgcggagagaagtcccaggggctcatttgccgtcagtgactgcttttcagttatcgtctcgattttcccaggccagggtttactccaaaccaacctcgcccgtatattagtctcttttcagctatcccgactgtgagcttgcttcttgattaaatgattattttatataaaagttatctgtaaacggtaccttatgcaaagaaactccatccagggcagtgccttttgtctgtttggttcaccgtcatatacaggcctgatgcctgccacatgctaactgctcaaatgattatttgttgaaagaatgaaatgtaaagcataattatctgtgaagaagtctatgcgatttttagacaaattattaattatgtgcttccggatagtgcatttaatatcttcttatgactgatttatccctcaaacttggagcagcacagaccgtgtctaatctgtctcatgacagcctttcaaatatttgaagagtacaaccatttttttttctaaatcctctcatcccaaatttcaaggaataagcaaaggcgttttgtagagggtgatcagagacagcctctcatcatttcttgcccagaatacttaagtagcctctcgtctgttgtctctacttgtagacttcaattcatccttctgaaatgcagttctgattttgtcacactcccctgcttttaatccttcagtggcctctgattaccttcagcattatttccagtttctttgtgtggaaagaagacctttcaggatctgatctccacatatcctgtcctactcccaagcacacgtactcgcaagccatgaagaccaactggcaggtcctcacagaaaatagtcttcctttgcttctacccgggactcggcactaaagattaagcctgaattagtttcctagtgctgctctaacaaattatcactgatttagttggcttagaaaacacaaatttgttctcttccagttctggaagctacaggtctaaatagatggtgagggctgactctggaggctccaggagaaaatccattccctggccctttccaacttctacacgctgcccacattccttggcttgtggtcccacatcattttgcagtcagagtctccttttctcacccccacccccccgcacccctcttacaaggacacttgtgatttcactgggcccaaccaaataatccagaataatctctccatctcaagaaatttaatcacatctgtaaagttcgtttgccatgttaggtaatatattcacagatttcagggaataggacatctttgcagagccattatcctgtccaccatacatcctctcttttctgactccttcggtccctaagggccagaggagttacatgctccttctgtatatatggttctatgataacacctttatacgaggtatatgcctctataatagtgctttgaattggatcataaattttctactctgcatgcccagcagtttcaaaaccctggagagcaattcgggtcttgttcttcttggtgcacctagcacagcagctgacacaaaacagaccctcaatatatattggtaaattaattatccatttaatacccaccacaactctgaagagacagtgtttttctccccgttttttctattcacactgcctatgccctcaaccaaacaccactaggaacacagctgtagttaagcagcttctgtctatttattactcttcgaagtgagcccagacactcaccatggataccctttgggtatctcagtaagagggtgtttagaacaaacctatcataggattggggctttgggcgggtgttttcggggaggccctaagaaaatagaggtttttctatagattggatgctgtcaga

SEQ ID NO: 316023 - DNA, 4001 bp, Homo sapiens
tgaggtcttttccaattgtgaaatccgagttatacgtgagaaatttatcacctctgcaggagtaaagactttgtctcaaaatcttatctcaatattatctctcatttggccatgtgtagtggctcacacctgtaatatcagtacttgaggccaggagtttgacctgggcaacaaagcaagaccctgactctactacatatgtgtgtatgtgtgtgtgtgtatatatatataatatatatgtgtgtatatatataaaatcatttgtcgacaaatacagagaaggcttccattaacataggcagggacagagtctagacaacattctcatttatcttatcctaaaaactgtcaatcatgttaaaggtggtattagaatctggcccaagcaaagaaactgccatggtcgctcctattcatgtcctttctacagctttcaacctgattttccactcaaaccataaagccacacccaatctaaccagtacaagatcagctaacccactctccctaatgccacaggtggtaacacgtcattttcagcaactgtctacagagacatccatgacacctcccctccctcactcttcatatccacacgatcaccaacttctggcaattttccctacctaatatatctcaaaacccataccattctcccatcctcaactgctaccaccataactctaagacatcatcattcccctctggacatcttgacagcctcctctttggtctcccagtttctgtcctgccaacctctacaatctccacacagcagccaaagtgaaccacacatgaaaatctaatcatatggttcccctccttaaccctttaaagggcaccctgttcttagaataaaaaccaaaatccttatcacggcctcccaggctctgcatgatcttgtggttccccacgtacctctctagcctcatctggaaccccacactccttaagtttctctagctccaacctcatgggcctttcagttttgaaagaatttctggcttgacagcctttgtgtgagtagttttcgcagtcctgaatgtgctttctctggttgcctcctgcccaccttagtgatcttagctcacttcccgttacactttctcacagctccttgcaagttcccttcagttccgtcttcaccaccagaaggtgtaagcagtacctagcacacagctggctcttaacagtatctgaatgaaccaacgaatgcacctcatccagccattccaaggccaggctgctaggggttctcgtggcaagaacacgcggcctgtagggaggacatggttcctttactaacgcagctaagttgtggctgtcttgactcttggtttacaacaaactgacaagtcgagaatcctgttagacttaaaggtgactccatgagaattaaaaattttaggcagggcgcggtgtctcacgcctgtaatcccagcactttgaaagaccgaggcgggcggatcacgaagtcaggagatcaagaccatcctggccaacatggtgaaagcccgtctctactaaaaatacaaaaaaattagccaggcataacggcgcgcgcctacagtcacagctactagggaggctgaggcaggagcattacttgaactctggaggcggaggctgcagtgagccgagatcgcgccactgcactccagcctggcgacagaaccagactccgtctccaaaacaaaaaaaaagtaaagctgtcggtacactgccaccccagcactcgagggggccaccactcgcttcctggagggcggcggcccagccctggtccacccacgcgcggccgggacctgcgcccctacccccgtggccacgccctccagccccccgggctcacggcctcaactctcgacccagccccctacttctctaggcctgcaaccgcgcagccctcacccctcgtacccggggcctaagcccaccccagattctgggtcattcggagccccagtgcagcagaagtccggctgcgggttcaccttgtcctccggcacagggcccggccaccaggcgccacgctggatagcctgcggccctcgcagggtccttcaggcgctccctgggcagccctgctcggggtcctagtccggttgcgccgcggcgtgaggtgaggtgtgagttgccctggagggtggcgggttttccaggcgcatgcatttgccgcggacgggacgagaggatgaagccgttctgggcgccggaactcgcttgtgggaaccgcccctcggaagccggcctgggcgccctcggaagccggcctgggcgccctcggcgggagggagtgctgggccgggtgctggcgcagcgctacgcagggtggcggaacccagaggaccggacgggctcgttcagggtggcggcccggcgggggcgatgcccgccagcagagacaccgatggaaaccttgcccagttattttctttgcccagggtagttcctggaacatggttgatgcccagtatttgtcaaaagtacgcggagggcaaagaacttaagcgctcgatagcgaaggcacaggcccttcaaagtcttttgagctctgagcgatacattagcatgaaggatcgtagctaatatgggggttgatgaaggaggatccttggctggagcccaggtgtgcatagggcatgaggaaagcaagtcataacggcctttcacgtgtcattaggaatctgggcagcagggtgtggtttgggttactctggagtctattgacgcagcccagggtgaggagatgagaactgggggtattcctggtgtgtactgtgatgtatggagaggatggggacagggagaatggatcgggggtcagctgtggcaggtgaccagaaacttggtgacaggttgaataaagatggttaaaaaaaaaaaaagtgttttggtttcttgggtttttttttttttttttgagggaaatcactgagaatgagaagaatgaaaataaacgataactgtcatcaatgtaaagacttacttgcacatttaactgacttcggtgtctgcctacacaggtgttgccctcttggaaggtttatccccaactcatggcttctgtccctgcagcaataagaagccacttcccaatagtttcctgatacccagtcacctttgggaacttacgaggaaagtttttccagtctctccgcagacccttgcatctcttctctttttgtttagacccttgaccaccaccccctattctaatcttaactcctctgctactcagttccaatcctaacccaagccctagtccctaaatttataatcctttaatcctagacctggtctctagatcctgagcccttgatgcttatcttctaacctcctaatcccaacctcaaatccctaaacctcaacccatgaattctgacctgattctcaaaccccaggcccccaaccctgactccaaaaatgacaacccattacttctccctacacggaatcactgacggagttgtagcaactgaatctgcagtaggccaaaggacccagtgagttagccagcaaactactctaaataaaagatatggtggataacagcaagcctaaacaaatcttcctcaaagatgagcaacacaagtcccagtcattatgacaatacctctgtatctcaacaaaggggcttaaatcagcaagtcatcccagcccctgaaggaagagaacagtccttgtaagttgcaaagctctcagaggacatgggtggctcagtaaagcccctgttctaggacacagcaaaagaagcaacacaataaccaccatggcccagcagatgagggccacagccagcatcgccacccctgagtctgccttcccagtatgatcatcaggacttcagaagtcccagcaaaccagttaaacagaagacaagaaccttatgtgaaaccaaattccagacaactgatacagatggcattccagaatctgcagcattccagcatgcaacaaactgcaataagtgacacagatctctccccgacagacacctt

SEQ ID NO: 316024 - DNA, 4001 bp, Homo sapiens
tctagggcatcaacacatgaaatgaccataatatggggcaataacattagagacaccacagacaacatcagaccagccaggaagtgtctaaaggagtctcatcacagctctgcaggcgttacaggacaggtatcatccctcctgtctacgtaaaggatacggaggccagagagttgaggaaatgagtcacacagcaatgaatggtaggaccagttgatcagaatttacttcaaccagaacattcacgtatgaagtggcttctgactctagaatcctagaatatcaaggctggaagaaggcccttagggataattcacacaacatcctcattccatagatgggcaagctatagcctggagaggttatgtgatgtagtcaaagacacagttggctatagaggacacaagaactacatcaggtcttctgacttccagtctaaaaatcccaccccaccccaccccacacccctcccacccccagcatggggtacccttagaatgatgctgctttcccctttcctcttttttaaaccactaggcttttgaaatccacatgcaaactgctggtcctgctgaggacaataagagagaaaccagatgtctcaaaaccactaatgctctattatctaggaggcgctgtagccttggtatgcatcttactggggccagctgatgatgaggcattttaagttcgttttaaaatgttcccatgttgcagatcatccagctgatctccttatgaccaagcactctctcctaattccagggtctatgcctgcatgtttttaccatcacttcagaatcaaccactatctattgtccaggaccaagaagaagagcagctgctggcttctgaattcacttgtcccacatgcaaatgaagtaagacactctatataacatatgtccagcacataatatatctcaaaacatatttgttaataagtgaaatttgatgagaacagtggtgggaaaactgggtctccacagagcacacagttacagactcatgcccaaagtcaaaagaacctatactgtattctctgtgcaagctgcagttgtatttcaacaagaacaaaataacggtcacatcgagttatgttgattcgtattttcttagtttatagttttatttaatgcatgtttaggttttatggttgtataagcactataaatgtaaacagcttctactcagttttgtttgcattaattttgtttgcgtaaaatttgtcatcactggggttccaagataagttttgtccctttaagacggaagggtacatcactcaagtttgagaacactgtcacgtactgctggcaaacagaatgtcacttttatactgcaaccccgctctaatcaccctcctcttccccgagcccaacccagagctggaagctagcgccccttgaggcttacctgcagggcaatttccttcttcctgctgcccatggctctgcaaagaagacgaagccctgttaccgcggccgtgggccgttcccccgcagcctcgcgacaaaccgctgcgtggatcagcaagcccagagcctccttcagacaagcccccctcctacggcccccggcccctttttaaggtgcttctaactggcggcaaatcagcacactgatacaaagtgaacaccccgcgaggaagcggagcctgcagtccacgggctcgtggctcgccgggcggttttctggggatctgcgaagccccctccccaccccggagccggccagggggcgcgcgcagaggccggagtcagtgcgccgggcgcggtgcagcctgtcgggcacagggtcgccagtcgaggaattctgacaaaaaaacgacatgggaccctgttatccctgctgttcttatggattactgggaaagtgagccactgcgaacgacaggtacaagatcttcgacgcgcccggagtcaccaaccgagtctgccgcgacctagccgcggtcgtcatggcaacctggcccccccgccaggcctgccaggaaagccggcggacacgtaagccacgcccactctgggcccaacgcagtctctccgcggaggctctgaacccagccagggagaggcaggagggagtcccgccccttgccctccatatcggaccataggaacccactcattggctgcagtgtttgtcagcgtctggaggcttcgaacccaccaagcaaagacccagtgcatctgtgcgttgcacagtcgcatctgtgaatccctgcatccctcctgccctgcctgccaagactgatgtgcagcttttctaccatcacataccggtataatgtgtgcaaggtggggggtgtctccaggttttgagggatctgcaagcgttctctttaaggcaaagaatatgaaattacaaattcaaaattagatatgaaagtcaagtgagacacatacaaaacagttacagacattgtagatattaatccaactgtatcaataaccactttaaatgtgaataatctgattacaccaattaaaaaagagattgtcagaatggatttcaaaaacaaacaaagcccaatcgtgtgttatccacaagaaaatacattaaaagcaaaaggatagagaaagctataccaggctgacactaattaaaaaaatagctgaagtaggtatgttaatttcaagaaaagcagacttcagaacaaggaaatttatcaggtataaacagggacattacataaagttaaagggatcagttatttgggaagacataacaatacttaatatgtatgtacttaaaaacagagcaccgaaatatgtgaggcaaaagaagataaaactgcaaggaaaaataggtaaactcagtattataatagaatgctttcataccatttttaaaaagtaattaatacatccagcagaagcaaatgagcaaggatatagttgaactgaaaaatatcaaattgatctaattgacatttatgcaatatttagttcaacaacagcggaatatagattctttctcaagctcacatgggacattcactgagatagaccacaatctaggccataaaacatagcttaacaaatttaaaaggatagaacaaagtatgttctctgactgcaatagaattaaactaggaatcaatcacagctgatgaaagagatctcacagatttaaataaatgaagaaatattccgtgttcatggataggaagaattaatattgttaagatatcaattcttcctaagtgaagcatacaccaaatgatttccatccagggagtgctgataccctgtttggccatgaggtacccagcaaccctctgtgaagtacagggcgatgggtatactggagaccgaacatcttcctacctgtcatcctgccttctcccacttcagctccgaatccacctactcttttcttgcattcagtcccatggcaatattcagttccatgataatattacgcagagccacaggcagtccttaagacaccacattgcaaactgagttgactagatgcaaatcatgttcattgccacaaggtggtggttgctgaagctcttgaatggtgtggaatctcccttagaatttagtttccaaaataaaattcaaatcagatgctaaattcctcttgccagcacatggaaagatagtgacatttattctttctgaaagggttaaatttcttaccatgtggtctctattacaaaatgtactcacatctttgccaggctaaacctcagaaacaaatttaggtaaaccacatgtcccagtttgcctgggacacccccacttttcacctgttgtcccatgcaattattaatagcaacccctctcactttcaaaagtgtacagtttgggtagggtgcagtagctcacgcctgtaatcccagcactctgggaggccgaggcaggtggatcacttgagggcaggagcctggccaacatggtgaaaccctgtctctactaaaaaaaagtatcaaataactgggcctggtggtgcatgcctataatcccagctacttgggaggctgaggc

SEQ ID NO: 316025 - DNA, 4001 bp, Homo sapiens
agtggtctgagaggggaaaagagaggctgcacaatggctgctctctctcctcttccctccaacaccctctgttaacatcatacctgttcttttttaccactccccacaaatggtgccagactcctgcctcatctgggttcccctactctctgggcctctcagttggttttcatggagcactttctttgtctacaacaatgttgtgaacagagccaaataagaaattgggatcatttgagccaataaaatacagtgagcagctgacagatgtttcctgaaacctaaaatgctctcccaaatccatggggtctcaaggtctgacacgtccttagcaaggtcccagcatagttgctgcttctgggaagtcttctgtccagttttaagaggtgacaccaaaagctgagaaccaccaatgaaattcaagaagtaactgatgctcagtggagctgtgtgaaccataccttcaggggctcctgggtggctttctgagaaaaacagagaagctttcccctgcaaggccagtgggtaagaaccctttctctgggttgtgccagggtggaactgtcactttatttcacctggcccaccggacatgggctccaggagggcagggcccctgtctgatttctctctgaatcctcagagccagggtaaagtgggcgccagttaaatgtttcaagaatgaacaactaaaccagtcatcattttagagaacaggctgtttgagagattctactcagaaccacttatttgatagaggaagaaacaggactcaaggagaggggaagtgactttgctgagaggcaggcacactgtgtttagtccagaacaacatcaagccttggatgtttagtgcagagtaacatccagcacccatcacgcagtgctaagtcatttacattcaccatttccattctcaatgggtagaacaatcccattttacagaggagaacgttaaggttaaggaacttgctttccccccagctctctgcaggccagccccaccaaccctcctttcctcaagccacattctctcccaacaaaatgagtttgctctgttgttccccgcccgggaattctctaaagttttagttccagcagcctttgtagctgggggccctgataaaatctctccagcaccctagaatttcaatcttcatagctctgaccacagttttaacgttcacacttgtttgcatagatatccatttgctgtcggtctccccccactggactgtgagctgcacgggggagggcaccacattttttggcctgctactgtaaccccagcacttagcccagcagcggacactgagtggaacacgttaagtatttgttagacactgtgcttatatttttaacctttgagtgcacgagtgctaaaggtgggatccgaacccacgtctccgggactctggtcatagccaaaggggagctgggggttaggttgacacgctgcagcgagaaccgccggcgcgcagaggcagcgcggagctgtccccccggttcgcgccaccccggatggctccgcactccgccgccacctgtcgccccagcggggactcccaggactcagttaggggccaggagtcacgtgggcccgggcattcagccgcgatccaggtcctagtgggctgacgaggggcccacgctgcgcttacctgctatttgcagggctcagcaacggcgctcggcgagtctcgggggactgcgggggactaggggacctgctgggcctagcaggggctgtcggtcagcgcgcggcccggcgcccgaggtccgagagggaaacgacgtttggtctcgggactcaaggctgcctccggcccgggcagcctcaggtctagatcccctagtacctgagctggaggcggggccaaggcgaacttgaccttgcgctcccttagcggccccgggcagatggagtctgagggaaacagatctgcgccccgccccttcgctggggcgggccctaaggagacccggccctggccccgcccagggtcctaagccccgccctctcccctgcccccgcccccgcccgctggctcccaaccgccaaggctcttttgtgttgcgtgcgtgtttgcttttttattctcctgttttgtattctgtttgttttgtatttttatttaattttcttttaaaaaaatacatgaaagtaacgcccacttacttattagaaaataaaattatctagatttgcttataatgaaagcaacaggccacttctccctcccatcacagctctttttaacaattcctccgttaatttcttctagtggtcacccgcttgtcgcaaaaaaaaaataaataaataaaataaaaaaataaaaaaagaaacttacatagcgatttcttgatttatccattgactttctgccatgttatatgaggatctactctcttactgcgcggcccctgtttccttctgacaaatttacacctctattctcaagccctgccctggtaaacgccagacctcaaagcagggaaggatttctggggcctgaagcatacacagttgtgtggggagaaggaagggagggctgcttaagaaagagaagacagaattagggcttgccagtgaacatttatttggaatgagaaaataaatcttaacagaatcctggggtcttagagattggggtccctatcccctaaaaccttcttaggaaatttaggtcccaaatttgcttccctaacgcagtctggcttcctctgcccacccagaactctccataagcccccagggctcatgggagccttgcagagagaggccttgaaggacaagattcactagattctgccaatacagtttcctaatggagtgaattggagtgtgcgaaaaagagagacatcaaggatgatgtcaaggttttttgattgctgtacacttaatttccagcgtttcctagacacaggaacacaacctcatcttagtatggagagtgttttataagcctgtccacatcaccagagcctcacggtgcacccatgaagttggctggacgggtgcactgtccacagttttaggaggcccataaatttgtcccttgtgtattagcaccgggggcatgcaacttgcacccaataagtacccaggtaaatggtacttccccactcagtctgaagacacagtgtccgtgccctctcggatcccttttctcttacctgtggtgtaaaatgtggctccagaaggtgatcttggacaagtctctttacttcccaagcctcactttcctttcgtataatgggaggtaacaacccctaccgcactgagttttggggaggattaagtggcttaacatctttggatattctttaattgataagtcagcttatttcccagcagggtgggaggctcatgagaaagcttagggatttctgagaatcttgtgtagcatgtagtaccacaggttgattagaggccttcgattaaaatcgtgggctgaagagtcattctgggtcagggccctaggccagggagggagaagctgcacacagagagcagagaagaggctgggcaatgacttcctcatgcaagggaagctttctctgcctgaggtagtgaagactaaagcttggtctaggaggaagcctggtttcctaggcaagaaaaaaggaatgaattaatggcattcacagcaactggatgagattggagagtgttattctaagtgaagtaactcgggaatggaaaaccaaacatggtatattctcataagtgggagctatgctatgaggatgcaaagacataagaatgacacagtggactttggggactcagaggggaagaatgggaagggagtgagagataaaagactacaaattgggttcagtgtatactgctcgggtgatgggtataccaaaatcttacaaatctcctctaaggaacttactcatgtaaccaaataccaccagttccctaataacctatggaaataaaaatatttttttaaaaaagtagcgtccccttgtgctggaaggtaagaacc

SEQ ID NO: 316026 - DNA, 4001 bp, Homo sapiens
caacgtgcggtgtctgttgggcagtggcttggatacattgaatcagatatttgaaatgcactagtccattttatacatgcaagtgcattaaggttgcccagtaggaaaactgataagacaacagataaactgctacacggacttcttcccagacaacgacaataattacacaacagctaatgagggagtttaaaaacaaaaacaacaacaacaacaacaacaaaacctgactagaagaatgtctagtcttgaagacaggaggctttttttcttttagaaaaatcagtctgaggtatttatttcaccccgactgtaacgactccgggaactcttaggctgcctataagtctctcccacagtaaagagtacacaaacgacacaacaacgaccagaggggccccaaactgagggcaaaaagttttagagattcgttcacagaaaagcaacctcttgctttatactatttttttttttttgatacggagtctcgctctgtcacccaagctggagtgcaatggtgcaatctcggctcactgcaacctccgcctcccgggttcaagcaattctcttgcctcagcctcctgagtagctgggattacaggcgcgtgccaccatgcccggctaatttttgtatttttagtagagacggggtttcaccatgttggccaggctgatctcgaactcctgacctcaggtgatccgtccgcctaggcctcgaaaagtgttgggattacaggcgtgagccaccacgcccggctgctttacatactattttattgaattataatggacctgctacatggagggcatgcaataattgcttttagcgtaaattaatcaaatggactagggaaatttgactacatctagagaaggttttcaaccatggtgagatcaggaggcttccagaaattttcatgtcaagaccattaaaatgcaagagcgatgaaactttacaaagaaaccgacacttgagccccactttggagacccacttaaaatttttatggtggggaggggggtgaaactcctaggaagagtttgctgagttgcttcaacagatgtcaccagccttctgagggggtgggcgcgggggcggcagtggagctggagattggcatttgcctcctcaggacactttccggctaatttcttctaggtgcctcaatgaataaaccagaaatagaaaagcggggaccaggcgcggtggctcactcctgtaatcccagaactttaggaggccgaggcgggaggatcattgagcccaggagttccaggttgcagtgagccgcgatcgtgccaccgcagcgagaccctgtctccaaaaaaagagacagaaaaaggggagggttaaggaatcatttcagactcgaagagaatatggcctctcaaattaaaatgggcagtttccgccgaactttcaaagccgcttggtttggagagggagcaggacggccgtgcttcccaagggtctcccggcgtcgcggcccagcccggcgttacctgcagttcggcccgcagccgcttgttctccgtgtccagcttggcctcgcggcggcccatggacaacaactcctggttcttgctgacgcgaaagatctcgtactccttcctgagccgctcgtactcggccgccgcgtactccagctctggcaccgacgagccagtggacttgaagctggcccccagcagcccgcccgcgcccaccccgcggggcagcgacccgggcccggcccctgctgccgcccccgcgcctcggcggaacgagttgcgcagcaggcgggccttgggcttcacctccaccgggatctcgcaggcctcgccgccgcccgccccgtacgtgtcctcgatcacttccccgcccgcggggctcacgagcgacgaggcggtccccatggcgtccgttgccgctactacctagtgagtaccagcaggactgggcagcggaacggaacgggacggggtggggcagaggaacggaacgggacggggcggggcagaggaacggaacgggacggggcgggccagcgggatggagcggggccggagagcaggactgggcggagcagcgggacggggcggagcagcggaacggggcgaggcgggggagcgggatggggcggggaaacaggaggggcggggcagcagaactgggcggggcgggggtgcaggacggggcgggggagcaggacggggcggggcagcggaacggggcggggcggggccggagagccggacgaggcgaggcagcggaacggggcggggagggagagcggaagggggtggggcaactggaggggcggggcagcggaacgggacggggcagcggaactggggggatgggcgagggggacggggcggggcagcagggctaggcgggacaacaagaggggccgggcaagtggggcggggcatgtgggcggggcagggcaaacgggggtgggtcgagaaagcacacagggccaggcgggctagcaagaagggcggggctagcaggaaggatggggggagtggcgactgtgcaggaccagcagtggaccggacgctggtggaggggtgctccgaacgctggtggagtggtgctccgacatagggcttctctccgttgtctccgcccggctcgaggctccctggcgggcgtgcctcacagggagcacaggcctgggtcccagctgctctacaaacgctgcagctatttctttcgctgccgccgtgcctgaccggaaactcctttctggaagcagttgggaaatctgaaaaatttatggagtgcctgctatgtgcttcccgcgatatctctctctcagtatgcatgtagatagaatgaccagcaaggaataatgccagcaaagaaagagcttttagattttacagtctgaaaccaccagggacaatccttagacaaggttaagttttttaactcattgcggcatgggacattggagaccgcacaccagtctctccttcattccctccatcaaagtggctagtcatctcttctcttaccctttagattttcttcaggaagtagtcatactaggcctttgcattcttcaaaatccagagtgtatatactaatttcttcaggtggtctcctgagataaagggaaatatttccaccatcacagtaccttaagaactttctaccttttcaaatccgttctgatttctaacttcaaatttttgaattctccatgtggatcaggggtttaaggatcatccactaggtttctgactaaaccctttgaacatttttgcatcttagtacctcctttggaatgggcctcagctgaacacttccataactatgcttgagtaagaagataaaatagccatcacccattctctccaacaaataaccaaactcactatgctaacttcctacagcttggggagtacattcagattctacagtctggaactgagtgctctgaagcatgcatctctcctttccccacgtcatttctatccagtgacatgcctctaatccacatttctccaccctacttgcgtactgatcttagattactattggtcaatgccaaagtgaccaaatttcttaatcctaaaaaatgacattatttcttcctggctaacacggtgaaaccccgtctctactaaaaatacaaaaaaattagccaggcgtggtggcaggcgcctgtagtcccagctactcgggaggctgaggcagcagaatggcgtgaacctgggaggcgaagcttgcagccgagatggcgccactgcactccagcctgggcgacagagcgagactacgtctttaaaaaaaaaaaaaagacattatttctaacctcataacctgtttttcttcatgctgaatttaacccacgtacttcagtctgcattttgaaagaataacttttaatacagaaatatagtgagaataaaatatttggcaggtggcttataacttactaaagatggccacatttttttttaatagtcctcccatagaaaagacagctaagacagctacacaattt

SEQ ID NO: 316027 - DNA, 4001 bp, Homo sapiens
ggtcctcaattaccatccaggcctcccagcatcccttggggcaagcaggtgcctctgggtagggctaatctttctctttttatggagtgagaaacggaggcccacaaaggggaaggaattgcccaaggggcagagctggagagctctgctttccccctacccccagtcccagctccatcatgcattggaccctggacatgggcacctcagcccatggctatttcctgcccaccaatgtgttcatgagtcttgcccttctccctgactagctgggttcactttcccatctctcctctacccctctgctgtccttgcagaggctggccataccaatgggcagagtgcaccggcctgaggcatttagctcctccagcaagatggtcatgatgggcaccaacttctgcttgctctcctccatggacacgaagctgctctctagctagacagagcatggaaagcatggtgggcacatcccaggacccctggctggttggctgccctgagtcctgagctggtttgcagggtcccaggtttgggggactttggagacatgggaacaccttccccaactctgcctgtcggtaaacccaagcccatctcattgcagacctctagtgtggtcagatagccagccagctttttaacaatgggctcgagggcgcaggtcttggcctgggcatcacacacgaagcccaggttgaagaggagagcattgcggctgtacttcttgtgttcgatgcacacaggacagccgatcagcttcttttccatagctgtgctggataattggaacacagtcaggcccccaagcctgtcccttcctcctcctgggacaacccctgccacccaccgctcaccccgagctagggtctcacacagtgataagcttgttctgcagctctggcttggtgatgatgtacacttggactgtgtcaaacagctctcgggagatgaagtcttcagggacctggggaggggagtggcaatgggcccctcagtggacatctgtactgggtgtagtacaaatggtgacctcctcatgccccccaagcccaagtcctcttctccagcgttcccctctctcccatccactcaggcctattacttctttctgtttccaaacatacgctatgatctcacctccttcctggcttctgcatatgctgttccctctacctggaacactttctcctgccttacctaaacttcctatgcatcatttactcttcactcagttcagggatactcatgggtcacccaactcaccttctgtgggacctggaaccccccaaccggatccctacagcccgatatcctacaaacactgccaatgtgacgtatgtcttccctgccacattgggagccgggggcctgggtctgactatcctctagcctcacagttgtctgcgaatgaagcagcatgcctgcgtgcagcacgggaaactactgccttcaggcagccagttgagctctcgagaacgtccctcttcccgcccagtcccgcgagcccgggtggcacctgataggtgatcttgggtcccagcgtggggtggaactcgctgaagaatatgcattcgatgcggcagccgctgcccatggcaataaccgggcccaggcccgtagctcctcgttcctcgcgcagaggcgtccccacctcctgtgaacacttgtcagagacagcctcgaggcctgtgtcgctggggcacgcaagcttgccaatccctctgcccaatggcgcctgcgcagcgcgactcagaggcgtggctggggcgggggacggctcgtcccaggaagtcctgggtgggtagacgtcgcacccggaagtaaagcggctccgtgacggagcggcggtgcgcgcggcagggcccggagtatcccgctttctttggaggaaaccaccgcatcagatctgcgctgcggcagaggcaggcaagtccctagcgtggaggggcagcatgctggcagcacttggggaggcggtgcgctaagggattcacgctgtaactgggaccgcagcagggaactacaatttccatagtgctccgcgccctcccagctggctctactgccggcgacggcgtggtacacgctgggatttgtagtcttacatggctttgcgcctcctacctggaaggcgggccagcgattggtaccagttcagacatgggtacacgttgacaggccgccggccgtcgactggcatgttgtgaccattcctggtgctggtcttggtactgttctttcctaccataacttattggaagagggtggcattcctgccttgcagccttttctccagtgaggagtgaacagtgggcacctgagatcctggcccacgctactatgctttcaggctacaaccactagcacggctgacgatggccctttctgcggagaccgagtcacacatctaccgagctctgcgtactgcttctggcgctgccgcccaccttgtggccctgggctttaccatctttgtggctgtgcttgccaggcctggctccagtaagtagaattcatagctgacttctgggaagggaagggccactgttcctggggaggaagggcagtgggacttccgggaacaggcctggctggttgagggaattctgtgctggagcgatgagtgaggtggagcaggtaggtatggccagggcacacagaattcctggtttgtctttccttctctgggtgctccatttggctgcctctcaggaggtgtaagggaaggagggaggactgccagaggagtggcaaagcatggcctctgatccaggaagaggccaggaagagaggataggtgtggggtcagcttgttgcagagcaagaaggggctcacagtttggcagcacctccttgggtgatgggctgctggtattcctcaacccttaaggattggtatggctggtttcttcttgcctcagccccatgaggcctcctcttctcattccaggcctgttctcctggcacccggtgcttatgtctttggctgtaagtagtgggcctgggcagttcttaggggtgggagcatgggcatggttggtggccctggcagcctctgaatctttgtccacatttaatatctgtttggaagagttgcatgctccaactactcctgcccatggtatatatttcagacttgaggctgggcacggtggctcatgcctgtaatcccagcacttagaggccgaggcgggcacatcacctgaggtcaggagatcgagaccatcttggccaacatggtgaaaccccgtctctactaaaaatacaaaaaattagccgggcatggtggcacgcgcctgtagtcccagctactcgggaggctgaggcaggagaatcgcatgaacccaggagacggaggttgcagtgagccaagattgcgccactgcactctaacctctaacctaggcgacagagcgaggctctgtcccaaaaaaaaaaaaaaacccaaaaacaaaaaaaccccccaaaaaaccaaaaattagctgggtgtggtggcaggtgcctgtaatcccagttactcaggagcctgaggcaggagaattgcttgaacccggaaggcggagattgcagtgagccgagatcaggccactgcactccagcctgggtgacagagagagactatctccaaaaaaaaaaaaaaaaaaaaaaagagacttgaatcagagtaatgaagacccaggacccaggtcaaatgggtaagatttgtctaagcacaatgaggcttcacccacctctaggcagaaagctgagacattgcatttggatgtacctctgtccctttttactttaatttctggtgatgcacctaactttccctgaaacagtgcacccatgtggccagctcttgccaagaaattgtatccagccccacgttagggaaacaaagcttgtgaatcatttataactgccacatctcaaaccctgtgtttgcttggtaacatacgacagatgacatttcagactggcacctaggaggaagtgtggagattattcagggc

SEQ ID NO: 316028 - DNA, 4001 bp, Homo sapiens
tttgagatgggagtctcgctcttgtcgcccaggctggagtgcagtagcgcgatgtcggctcactgcaatcttcacctcccaggttcaagctattctgctgctcagcctcataagtagctgggattacaggagcccaccaccacgcccggctaatttttgtccttttagtagagacggggtttcaccatgttggccaggctggtctcgaactccttacctcaggggatccgcccggctcagcctcccaaagtgctgggattacaggcgtgagccactgtgcccggccagtttaaggcaattcttattagacctcctgcttactgatagatagcagaaactgtaaacatggtgggtaacagcttgtaacagctttgaacttaaggccaaatgaacgagagaaattttaagaatggtcattgtaaattcctacacttcaagtcatgcaattatctgcacaatgaatgaaatctaacttcataatagttcacgtgaaaggtcctagttgactgcaaggttactgtgagtcagcaaagcaacatgccaaaaatactaagcctgccagggaattcatttgcaacaggattcaagacaaagagggcaacttggaacttgataatcatccaaccacttccacaagagcctgttcacttctgggtgctccatcccaaacggcaacaaggatgatgagtgatcagaaaaaacaatgctgggcaaggacaaagagatgagaactgtaaatggaagaactgaagggggaaggggatggtcaacattcatccggaggaatttttataatgtgccttgctccacgaggcaagatttagatcagcgaagtattggaagagggctcaaaccagagaaaaacttcctaattgagccagcccttatgaggttactaaagctattagaattcatgctaaagggtgggttagaagaggttcaccctgatcacctctgaattctaacatgtagaagtttaattctatgataaactcataaaattttaaaaataccctcaaaggctaagtaggccgattaggtaatcaaaacacaattagatccagatttttgtgagacaacaggttaaaaaaaataagtaaattctaaaaatacgtaaataaaattagaaagtgactttatttttacttttggtgaaaagttcacaatacatttgttatcgaggcaagattcttagaggcgcattgcaactcaaaaaataaaacaaaagctggctgtttccataacctcactcacttcagatctacctcatcatttggggcagacaaaaggagggaagggcaccctgttgttccgttgcaatgtaacaaaatgtgacaagaaaaatatttataaagccaaattctcttgatcagattcaggaaaagtcagcgacccacaggttaatttttttttaatttaaatgaagaatgtccagtcttacatatggtgttggagtcacctatgatcacctgagtcatcctgaccatacgtgagctgcacgctcagctgcgggtgtgacccgtttactggaaaactccagcccgaagggatctggaagcagtttttaagactgtgtgtgtatgagacaggtcgcgtcctagagcaaacggttttttttgtaaacagacggcatcctaacaggggcggtgctacccagtctgcggggagtcgctcgggatcgaagcacctcagagctccttcgagcgtatcccttcgggaaagccccacgccttccccgaggcgcctcctccggcctgcagcacgccctcgtcctgcacttcctcctcggaatctgcaaggtatgcagctaccagcctccccaggcgccggttcgtttggtttgcgcggggtccgcgccttggggtcacctcgcgaaaagagcgtgcggcgtccggtgcactgcggtgtcagcgcccgcttcggggacgccccgccgcgggggctcagcgggcgcgcacgcgcggcctcctccgcagtgtgcaaccccgcgggggaggagggaatcgcggcgacgtcactgccccgaggcttccaaaggggcggagcctcccgggaggctgcggcgctcccagccagcgcgcgcgcgcgcgcccccgcccccacgtgtccctgcggccccggggaatgtgggtcagggagccgagcggcctcacgtgtccccgcccgccgccgccgcctcagcgcccattatgtaatgccgcgtcacgcgcccgcccagccaaccggcgcccgcgcgccgccgaacgtaaacacagcgcgcacgtggctcgcgcggccgggccatgtgaggggggggccgggccgggcgccggcaggccgcgctgcggctttgcagggagacaagagggcgggcgccgggcggcccggggggcgatgggaaccgagccagaggcggacacgcggcgcgcagcagcccaccccgccccaccggccatggggacaccccctgccgccgccccccaaagtgccccgcgggctctgagcgctccctccggccatcccccacccgccgcagtccggttcttacctgcattcacctccatggtgccctcgcggaggcggccggggccgcccgcttcccgcagagggggcagcgccgccgccgccgcctcagcgccgcgccgccccgggctggaagcagcggtggtcgcggggccccctcatgggcagagcgggcggggctcccgggccccaggccgtgcagcgcacagcaggctgcagcgagagagggtggcggcggccggcgagcggcgctcctcgctgggtccctgacaacaaaagcggcggcgcggcggcttcctgcagccagcgcaccgcggcggcgagggcggctgacggggagggcagccgcgaccatgtgacccgcgcacacaccccctccctccgcccgccctcggccggccgctgcggcgacctccgccccgccgctcccctccctcccgcccgcttcccggctccccggctacccttttctcctgcgcttcccccttctccccttccttctccttgccgagcccctcctcttccttcgtttttcccctccgtgccgtaaacctcttctccgtttccctccgccgcatattcctcccctcctcctcctctttcctctcctcccggctgcctttcccgcctctggccgggagtcctctccacgccctgccccccaacctggtggctcttaggtcaaagcggtggcttggcgccgagcaagggtgattctcaggaccccggctgggccggctggttcgggcttgctcaacccttgcgccccccacccccaccccccgctcccacccgaccgacctccaaacgctggtctctgagggcacagacccttccctttccctctgcaccctctaggtgattttatccaatctcatagcttaagtagacctatgttcttgtgattcccagatttatatttcaagccaagacctctcttctaatctccagattcctacatccagcagcccgtttgattatgccgcttttttgcatctcagattttagacgggtgtacgcgtgtgtccgaactcagctaatgtgcagtcaagatctgggcgtttcaccttgaatgtaaattttagatcaaaagaaaaaagctagacataaattgtatgcgtgctgaggtgaattctgaggaaagtgcattgatgcccgcaatttaaacgcattactgaagtaagatgggctgatagaggcatgaatagatgatatggtaagatgttaaacttaggcgatggggatatgggtgttgcttgtaaaactctttccagtttgctctgaaattcttcactatagaaggtggggaaaatgtcacgtggaagacatatttacatgtgcaacaccctatttccccaccccccaggtttcttcaccatatcaatatttactgttttggtaaatctgcaagttcctgaagccagcaaaattatgtttctctcctaacactctcacagccttttattctccattcaatccattagcaagtctgagctatt

SEQ ID NO: 316029 - DNA, 4001 bp, Homo sapiens
aaacttcctaattgagccagcccttatgaggttactaaagctattagaattcatgctaaagggtgggttagaagaggttcaccctgatcacctctgaattctaacatgtagaagtttaattctatgataaactcataaaattttaaaaataccctcaaaggctaagtaggccgattaggtaatcaaaacacaattagatccagatttttgtgagacaacaggttaaaaaaaataagtaaattctaaaaatacgtaaataaaattagaaagtgactttatttttacttttggtgaaaagttcacaatacatttgttatcgaggcaagattcttagaggcgcattgcaactcaaaaaataaaacaaaagctggctgtttccataacctcactcacttcagatctacctcatcatttggggcagacaaaaggagggaagggcaccctgttgttccgttgcaatgtaacaaaatgtgacaagaaaaatatttataaagccaaattctcttgatcagattcaggaaaagtcagcgacccacaggttaatttttttttaatttaaatgaagaatgtccagtcttacatatggtgttggagtcacctatgatcacctgagtcatcctgaccatacgtgagctgcacgctcagctgcgggtgtgacccgtttactggaaaactccagcccgaagggatctggaagcagtttttaagactgtgtgtgtatgagacaggtcgcgtcctagagcaaacggttttttttgtaaacagacggcatcctaacaggggcggtgctacccagtctgcggggagtcgctcgggatcgaagcacctcagagctccttcgagcgtatcccttcgggaaagccccacgccttccccgaggcgcctcctccggcctgcagcacgccctcgtcctgcacttcctcctcggaatctgcaaggtatgcagctaccagcctccccaggcgccggttcgtttggtttgcgcggggtccgcgccttggggtcacctcgcgaaaagagcgtgcggcgtccggtgcactgcggtgtcagcgcccgcttcggggacgccccgccgcgggggctcagcgggcgcgcacgcgcggcctcctccgcagtgtgcaaccccgcgggggaggagggaatcgcggcgacgtcactgccccgaggcttccaaaggggcggagcctcccgggaggctgcggcgctcccagccagcgcgcgcgcgcgcgcccccgcccccacgtgtccctgcggccccggggaatgtgggtcagggagccgagcggcctcacgtgtccccgcccgccgccgccgcctcagcgcccattatgtaatgccgcgtcacgcgcccgcccagccaaccggcgcccgcgcgccgccgaacgtaaacacagcgcgcacgtggctcgcgcggccgggccatgtgaggggggggccgggccgggcgccggcaggccgcgctgcggctttgcagggagacaagagggcgggcgccgggcggcccggggggcgatgggaaccgagccagaggcggacacgcggcgcgcagcagcccaccccgccccaccggccatggggacaccccctgccgccgccccccaaagtgccccgcgggctctgagcgctccctccggccatcccccacccgccgcagtccggttcttacctgcattcacctccatggtgccctcgcggaggcggccggggccgcccgcttcccgcagagggggcagcgccgccgccgccgcctcagcgccgcgccgccccgggctggaagcagcggtggtcgcggggccccctcatgggcagagcgggcggggctcccgggccccaggccgtgcagcgcacagcaggctgcagcgagagagggtggcggcggccggcgagcggcgctcctcgctgggtccctgacaacaaaagcggcggcgcggcggcttcctgcagccagcgcaccgcggcggcgagggcggctgacggggagggcagccgcgaccatgtgacccgcgcacacaccccctccctccgcccgccctcggccggccgctgcggcgacctccgccccgccgctcccctccctcccgcccgcttcccggctccccggctacccttttctcctgcgcttcccccttctccccttccttctccttgccgagcccctcctcttccttcgtttttcccctccgtgccgtaaacctcttctccgtttccctccgccgcatattcctcccctcctcctcctctttcctctcctcccggctgcctttcccgcctctggccgggagtcctctccacgccctgccccccaacctggtggctcttaggtcaaagcggtggcttggcgccgagcaagggtgattctcaggaccccggctgggccggctggttcgggcttgctcaacccttgcgccccccacccccaccccccgctcccacccgaccgacctccaaacgctggtctctgagggcacagacccttccctttccctctgcaccctctaggtgattttatccaatctcatagcttaagtagacctatgttcttgtgattcccagatttatatttcaagccaagacctctcttctaatctccagattcctacatccagcagcccgtttgattatgccgcttttttgcatctcagattttagacgggtgtacgcgtgtgtccgaactcagctaatgtgcagtcaagatctgggcgtttcaccttgaatgtaaattttagatcaaaagaaaaaagctagacataaattgtatgcgtgctgaggtgaattctgaggaaagtgcattgatgcccgcaatttaaacgcattactgaagtaagatgggctgatagaggcatgaatagatgatatggtaagatgttaaacttaggcgatggggatatgggtgttgcttgtaaaactctttccagtttgctctgaaattcttcactatagaaggtggggaaaatgtcacgtggaagacatatttacatgtgcaacaccctatttccccaccccccaggtttcttcaccatatcaatatttactgttttggtaaatctgcaagttcctgaagccagcaaaattatgtttctctcctaacactctcacagccttttattctccattcaatccattagcaagtctgagctattctaccttcaaaatatgttcaatccctgtttctcaccgttggtattgctagagcaaaccattatctcttgcctcagctactgctctggttccctaactaggagagtgcttcttgggtcctcctacagtcacttctccccagcagtcaaagtattatttttaaaatgtaaataagatctgattactctgctgaaaaccctccaatggcttcgtgttacactttgaaaaaattcaacgacttaacctgacctgcttcgccctgcacagatgtgggtcctgcttctctttccaaggctgtcttgatacccaaacccttctaaacacagttccctaatcacggtagccctctattcttccctacttctggaatttatcaccctcatgtgatgctgatggaagagttccccaggccacgctttgtagcttgcttgctttttcatgtatcaactaccatctacttctacacaggtaaaatgaggttaatatgaacagtctagaaggcagaaaagaaatcataaaagaggataccactctaaaaaggctgtgtactgtatgattccaactatacgacattctagaaaaggcaaaactgggctgggcgcgggggctgacgcctgtaatcccagcactttgggaggccaaggcgggtggatcacctgaggtcaggagttcaagaccagcctgaccaacatggagaaaccccatctctactaaaaatacaaaattagccggggtggtggcgcatgcctgtaatcccagctactcgggaggctgaggcaggagaatcgcttgaacccggaaggcggaagttgcggtgagccgagatcgcgccattgcactccagcctgggcaaaaagagcaaa

SEQ ID NO: 316030 - DNA, 4001 bp, Homo sapiens
gattgttttcatgcttttttttttccaccctagaaatgaggagacagcagcaaggccaacatgattcacgacccactatgatgctgacctcaaacagaaggtatatttgtgttcacacacatcttttggctggagctgaagggcggtcagcccccagcaaaagagaaagaaagaaaaaccatacctgcttggtggtaagttctttgctccgacttctcccctggggtccactttgaacaatccggtgcaaaggatcgatcaaggagtagctttaccaaggagccgctgccttgttcaggacaggagtattagcttattctcttgcttttctcactgtgaacacttggcttgcaggctgaggccgagattcccactgaagtaaaggcagtgcttcctcttcccgtcctagtcataggttatgatttccccggatatgagacaatcttgtctctcacctatatttcagtccaagtcagatgtaggcactaagcggctccattgcccctcctaagtcccaagtccagcacttgaactagcaaatgaagagattaccgtatttgttctcattatgttctccctacttttttctttcaggtctcttcactacaaaaacacaggaaaaggggaagagagtggcaaatatccgctttgtctaagtaattctgagtgcatttcatcagtctgagggtctctgtcctttaccactaggggcaacattaatttgaacctagatctccttatacttcctcctttgttgaaaccacctccctggatagtgttacttgatgtgaaagtgagcaaagtattgatttatgacggtgccaatcaccagcatggttatgtaagaggggggcaggcacacagggagagggaaagggtgtgagatgagggggctgagcacagttctcgagaatgtgaccccaccactttgatctcagaacagaaggctgaccaggagtggggaggatggaccagctgagggctctttcctctcccgggtcctgccagaggggagctgaagagtcctcactcttcagcctcaaccttcttattccctagcagcaggtgctcccaagtgaacagaatcaacaaaagccgaatgtggtggataccaggatgtgtttcttctacttgctttgtttataaagatgctttatggcaggtgaggggagtggaagtaactgctcctacctaaaaggcaaacaagtacaagcctctggcaacagtaaagcaggggcatgggccccaacaagagagggagagggagaccacgattgagcaaacaggtagaaaagagaacctgggattgccaaaaaatgaccacagttgtcttcaggtgaacatttggacttccttacatttatttattgacttaagttgttattattttgaagtacatgctttaatccagccctggtgagaaaagccagaatatctaagtatgatttgtttgttttgtttttaattggtttcttctctatccaatttgcacttcccaagggatgagaaagacttgaggctgggatttcctaggggttgacatttctcaagtggatgcttgccttgctgttttcaaccaagcgcagaatgtaaggtgcttacacagctcactgctggggacttactgccagcagtggggactgggacccacagccatagagctctgtcctttttccagtcacatttctgattatccacatgggattctgctagggctaggaggtattggattacaaatcccactggacagaaagttgacttgggccttaggcagggaggacctagagtaagtgaaatattgaatgtcatgaggatattggaaagaaaaagagtaagtgaaatactggatttcagtaccagtggaagtagcctgaacagtgtgctctggggtaggaggacagcatggggctatatctggggcctgcaggtcccctgagaaacacagatcagaaggccatggctaaagccaaagagggtgggaaagctggaaagggttaagaactcaccccaggaaacttatttccaagatcaaaagtaggcctttctgcactgacaggtatctccaagtccagggaaaaaaggcatgactccagctcaggtaggccaccttgccagaagtccttaggttatgggtaacatacgtagctttcatcatctctcaaatcccttctggctcacaagggcctgaccttctctctcttaaaaatatagtgaattatttacagcagaaacaggaaactaagaacagattatgaaaccactgaggtaaaggaaatattctcaggtttctgcagggatctttgggtctcttttcctttgggtctgtggtgtgaagtcccagctagaagacaggagaaggctgtaggagtgccaggcctctctagtctagcactgcactgttaatatcagacatggctctatagtgaaatgagttaagaatacagccagaaaatacactctcgttcttaaggacagcttactaatgccctcagttgagggccagagtcactctcaagcccagctgggaagtcagagaaatttgaggccttgacctccattctatactttgcctattgcagcaaccagaaatgtagagctcctaagaaactcatcagagaaaagcagatctgatcagcctgaagagtttcttttttttttttgagacagtgttttgctgtgtcacccaggctggagtgcagtggcatggtcatggctcactgcagcctcaacctcctgggctaaagcaatcctcccacctcagcatcccaaatacctgagactacaggtgtgtgccaccatgcttggctaatttttttttttgtttttcttttgtagagacgaggtctcattatgttgcccaagctggtctcaaactctggggctcaagcaatctgtctgccttggcctcccaaattgctgaaattacaggcataagccattgtacctggccagtttcctcagtgtgaattcatttaatgttttacccctctccagagaatattaatatttaaaaagaggaacagagagaacaaaataaaagagtgatgcactgatgatataaattcaggtggaatctgaggaaaataggtgtttatcagccagtcacatggtctttctcaaaaatctcttagcctccctctggggtgtgctcaggggcacttagggcaggagcatggaggtgacactctgatccccatgaggcagtcttggaggaaacttctcccttttcatccttaagtggaggtagtagaagttacccaaaaaggctaggaataggaatcttctctttgaaagcggtttcattttatcacaagtagaagcagtgacacaaagtttaacttcccagaaatcgcagattccagcaactggaggaccactaaatttgagcaccagctgttccagatcctataattactctgaggctccataaattacacttgtggtcagaattccaatgtctctcttagaattttggaacactttgttttcacctcatttgtaaattacactgcagaatatggtatctgtgacttcctgccttagttgcttataagccccctgagaggagaagcccttatatcacctggtaccaattgcatttggtggctgctcagttcagtgtagtaattcttttaaatatggtttttactaatatgctttaatagagttctgcctttattgaagagaagaaaaaggaccaccttgagaggaccttccctgcagctagctcatgctactactaaatgaaactcatacttacttttgatttattattaaatgagttagctcttaaatgtgtgaaacctcttttcatttttaggctttaaacttgtaatgatggcaagtgtcatgatgaggataaattaccctttgacagcaaagagataattgggtatttggtatatatggaattatctaaaacttatttggaattatacatatattttcataaatcactataatgtttgagagggataaagggattgaggggaaaaggtgca

SEQ ID NO: 316031 - DNA, 4001 bp, Homo sapiens
tgtattgcaataagtgccaggtgaataaagactaactttttaaataaaagtattacaggaaggtgcaccaaagtagcttcataattttggaagttgagaaatcttttaaaaatcagcctcaaagagtaaaatccagaaagagggaaactaacagattcaactacatcaaaataacaacaacaataatagtaaaaatttctgttggctaaaaagtatgatttaaacaaagcttagagagaatattacacacatatcaaataatttgcattgagaataaataaaaaactcctacaaagaagaaaaaaaatccgacataaaataagctaaggatatgaataggtaatttaagaagagaaatacaatggccaagaggggtcctataaaaagaatgctcaacttcattaataatcagggaaattaaaatattgaaataatgggttgtcatttgcactaattcaatggaaaaaataataaaatactgaataaacagcaagcattgtttggagtgtggaggaacagtaactatccttctctgctggtgggagtacagtcggttcgggtactgtggagggctgtttggcagccaaaaattgaaccacatatatcctgtgatgtggcaattcaacgtcttagtagttcctctagtgcaatacgtgcacatgtctagaagcagacaaacacagtgaggttcattggtaagactgaaaaattggaaaagcttaaatatctatcgaaaagaaaacggctaaataaaagaagtgtacactgtgaaatatgacgtagcagttaaaataaatgaagtagagctctatacagatatggaaagtctccaagtcttgctattgagtggaaaaacagaattagaacaacatggcaacagataggtttaatagtccatctatgcatagatgaacacacacacagacacaatggtctggcagtaaatatatcacactaagtacttttggggaaactggagattaggattgacagaatggccaaaggtgaatttaggtttatctatactgctttctcattttcaaggagcatgaaatcatgtattactttataatttaaaaagttattacctaaaaaacctagtctagtcagttttgtggttgtcttgggtttattccataataattttggaacaagttgacagcttttagatcaggagttggcaaactttttctgttaaaggccagatagttaatattttaggctttgtgggccatactgtctctttcgcaattggtcaattttgctgactcaatgaatcagctatagcaggcactattcctctcccacatggcctctaatgatatggccagagttgaaaggatgttgtagggcaaaaacagccatatacaatacataacgaatgggcatggctgtgttccaataaagcttcatttataaaaacagctggtgggccagagttagcctgtgagccatagtttgtcaaccccaggtttagacttttatgacataactaaaatatttttaaagcgtatttgtgtaccacaaaatactttttcccattaaccaactgattaaataagcctctgaggcctcccttagcatcctttcaactctgaccatatcattagaggccatgtgggagaggaatagtgcctgctatagctgattcattgagtcaagactcagtggcctcagaggtgtctgttgacctgtcctagatatggagtggccttaaagcagtgcctctggccatagcttcagccgagctgggctgtaaagtggagagaagaaggacctggtggcactgaccacatgcaggcaagactcggttctgtgggacaaggtgccctttcaatagtagaggtagaaaactcactggtttgaagccaactcagccgcagcactgtgcaggggtatggcaggtgctctgagggacccctccttgaagtggtgagtcctggtgactgtcatgctgctgtccttggcctcagggggctgccagcactaacccagcaggccaaaaggaatcaggactgagttgatcccagttcccatagtccccagctcccacagtccttggaggtggtatttcctgggtccagggactccagccctgtaacagggagctggttgtatgtgtgacttgtggtaactcatgcagtagttaaggcttctcctgtggtgatttttctaggaggctagtgcaggaccagagagcatcagtaatggggctcaacattaagtgattgttttcatgcttttttttttccaccctagaaatgaggagacagcagcaaggccaacatgattcacgacccactatgatgctgacctcaaacagaaggtatatttgtgttcacacacatcttttggctggagctgaagggcggtcagcccccagcaaaagagaaagaaagaaaaaccatacctgcttggtggtaagttctttgctccgacttctcccctggggtccactttgaacaatccggtgcaaaggatcgatcaaggagtagctttaccaaggagccgctgccttgttcaggacaggagtattagcttattctcttgcttttctcactgtgaacacttggcttgcaggctgaggccgagattcccactgaagtaaaggcagtgcttcctcttcccgtcctagtcataggttatgatttccccggatatgagacaatcttgtctctcacctatatttcagtccaagtcagatgtaggcactaagcggctccattgcccctcctaagtcccaagtccagcacttgaactagcaaatgaagagattaccgtatttgttctcattatgttctccctacttttttctttcaggtctcttcactacaaaaacacaggaaaaggggaagagagtggcaaatatccgctttgtctaagtaattctgagtgcatttcatcagtctgagggtctctgtcctttaccactaggggcaacattaatttgaacctagatctccttatacttcctcctttgttgaaaccacctccctggatagtgttacttgatgtgaaagtgagcaaagtattgatttatgacggtgccaatcaccagcatggttatgtaagaggggggcaggcacacagggagagggaaagggtgtgagatgagggggctgagcacagttctcgagaatgtgaccccaccactttgatctcagaacagaaggctgaccaggagtggggaggatggaccagctgagggctctttcctctcccgggtcctgccagaggggagctgaagagtcctcactcttcagcctcaaccttcttattccctagcagcaggtgctcccaagtgaacagaatcaacaaaagccgaatgtggtggataccaggatgtgtttcttctacttgctttgtttataaagatgctttatggcaggtgaggggagtggaagtaactgctcctacctaaaaggcaaacaagtacaagcctctggcaacagtaaagcaggggcatgggccccaacaagagagggagagggagaccacgattgagcaaacaggtagaaaagagaacctgggattgccaaaaaatgaccacagttgtcttcaggtgaacatttggacttccttacatttatttattgacttaagttgttattattttgaagtacatgctttaatccagccctggtgagaaaagccagaatatctaagtatgatttgtttgttttgtttttaattggtttcttctctatccaatttgcacttcccaagggatgagaaagacttgaggctgggatttcctaggggttgacatttctcaagtggatgcttgccttgctgttttcaaccaagcgcagaatgtaaggtgcttacacagctcactgctggggacttactgccagcagtggggactgggacccacagccatagagctctgtcctttttccagtcacatttctgattatccacatgggattctgctagggctaggaggtattggattacaaatcccactggacagaaagttgacttgggccttaggcagg

SEQ ID NO: 316032 - DNA, 4001 bp, Homo sapiens
caagtcatgtattcatcagtaattcatatgaaggctgtattttcctcgactttcttattacattgaagatttgttcctcactaccgttgctatatttcacagcctttggcttggaaacaaagtgggataatggacaattactagttccaaccaactctccagccacaagcagccagttctcgatcacatcaaatgctcttcctccagggccgttacacgggatgtcctgtctggaatgccattcctcccttgggttcctctgttcaaacatcacttactcagagaggccaccctgaccattccatctaaattaacgcctcaggtcttcttcagcaggtcatttggcttcttttctttcacagaacttatgactctctggaattatttgtctattcaccccccagcccccaactctagtgagggcaggggtcttgtacagctggttctccagatgtgtccccagtgcctaaaaaactaagtcaacatgtattcagcgaacgaatgagaagagaatcactcccgaattgtgctctctcaaaccccaaatacccttaacgcttgcctctcctggtggctgtaatcccatttttaacaataacaccattttcaagtgactctgaagctcgcaaagtagcgttgcctccattttctgagtagagccccacaaacaatgctcagaagggaggtccggcctggcaagaatgcgcatgccccccatttacagtcgataaaattgagcctcattaggggattcgccaaggccgctgcgaaataacgagcaggagccctgaaaagtgtcctggttccgaaaacctcttcccacgagagcgcatcgtggactcgaaatgcttcatcacctttattactattgttcctcagtactcattcgagacgcgttccaggcggagggaagcagcccacctgctgacccaagaccaggcgccggcctctccacccggccgcgcccctcgcgccccgcccccggccccgcccccgccgacccggccccactcttcgccccggcctctactcccgccccgccagggctcccgcgccccataaggaccaccctcttccgcctcagccaatcagcaaagcttaggggggcggtgccacaggccccggccctcctatctgggcgccaattagccagcccatccgtcgctcacgaggtcgcgcctcgcacccgccttcctccttttcttttaccctccccttcagaaaaaacggcggttgggctgcgacggccgccaaaggcggactagaagcggaggggtgaaaatcccggcagagaaggaagaagggactgcaggcgggaggaggaggaggataaggaggaagggagcccgcccagccggagccatctccgtcgagaacaaaatggcggcgctggcggagggccaactataaggcggggccgcggccattccccctccacccccacccttgcgccggccgggccggtcagggggaacccgctcgcttcgcccggccgcgggcggggaggggaggggagcggcccggcccactatgcaaagcgccgggcgccgccgccgccaccccgtggcaaaggtaaaagggtcgggttcagccgccgccgcggcgcctccatgtccgcgcgccaggcccgccccctccgccgccggcccgagcccgcccgaccctctttcaattttacctcaggatttggcgccaaagcggcctcgaagcgggtcccgtgtctgcggcgggcggcccccggcgcggagggcagggcgcggggagcccgggctcccggtgtcggcggatggcgggagcccgggggccgcgggctcgcggggcagcgggcgagagacgagacgccgaggtgggagcggggtggcggggacgggcccgggggcgccgccggggtcgcggagaagggggggtttgttattgtttttgtcagtgaaaggtcagagttcgtgaccccggtgccgccgccgccgccgcccgcgcgctggtaggaggagggcgaatgttcttcttcctcttcccagcgccagcctcgccgccgcggcggggggcgggcgagaacgcgattggctgaggcgcgcgcgcgcaccggaacgccgcagccggcgctcggtccatccggcccgtgggctgtggggccccgggcggcggcggctacgtagctgccgccggccttggccgcggccgggcgggcggatatgtggcttaaatggcgcaggcgtcggggcctagaggctgaagggctggtcgtcctaaaaactcgtggacgtcgcgcacggttacccggacgcaggcccgcccctctggggaaccgcgagctcctcgcagctgggtggggaccgtcctcgcagtggcggcctccaccctgccttctcgcttagccaaggcttctggaaggctcgcaaagtgtctgttgttggaagaagccgggccctgactggcgcgacggattctcccagccgctcagcagagcgtctgtaggtcggaagtgggggttgtattgggtgggtattgagctcttcggcccttcctcggtactgatagtttttaatttaggttttaaaggtctaaagatgcgcccgttctggccatctcaggtgaaatgttgaaacgccccagaacctataatttttggtttcttagtaaacatacgatccagatcttgtgtaattccatgcccctcctcctcgaaatttggaagtagtacatggtaatagggatgtgtaaagcagcttttagcagcattgcttaaatttatttgaagaaattggcctgtcttgctcttaaactcttgggctgtaggttttccttacatatttctctgttttatgtcgtggttttgacttgcctgggaaggtgcaggcgcttatttatcctaaatgccctgaagtgtttaggctacaggctgtagatcttatactgattttttttcttcagttttcttgcttattaagaataaatattgactccagaatggatgggttaactttttttcccacacagtatccatttgggtttttatcaggatgactccaacatttagtatttttttttccataatcttataatatttctatttggtaaaaaatgttttaaacacagctatttccccttcctcctttttctgacgttgcaaaattgggaaaagagctaggttcgttttgtcatggtaaagcacagctcttgaaattggaagaggccttaagggaatgtggtcaaatttttttcttgcagaaagattttccgattttaggggtgaagtgggtgagaactagaaaggtcaagtgatgtacctgagaggcaaaagcaattgcgtttttgcatttttgaaatttgctgtttgatattggaatacattcttaaataaatgtggatcattttaatgcacatttctcactttatttttttgctaatgacttattgctgtttattttagaatatgctttttgtctaatgatgttagataaaaagcaaatttggagcagttttcttattcgagttcaaaatggttcataaagcagcgaagacaactcaaaacatcagtaacacatttggcccaggaactgctaacaaacatacagtgcagtggtggcttaagaagttttgcaaggaagagagccttgaagatgaggaacgtgatatgggccatgggaagttgacaacgaccaattgagagcaatcattgaactacatgaaaaattacagaagaactcagcgttgactattctacggtcattagggtcgttcagcattcgaagcaaattggaaaggtgaaaaagcttgataagtgggtgcctcatgagctgagcggaaatcaaaactatcgttttgaagtgtagtcttcttttatgctacgcaacaacaaaccatttctcaatcggattgtgacatgtaatgaaaagtgaattttatacaacaaccagctcagtggttggaccaagaggcagctccaaagcagttcccaaagccaaacttgcaccaaaaaaaaggtcatggtcactgttcgg

SEQ ID NO: 316033 - DNA, 4001 bp, Homo sapiens
acactgtgcagtgtggacgcacaccgcagccagaatgcaggttgtcatcagtactagcatctctcttccaaaagagtcaagactggagacagacaggtcaatgtactcttaatgcacaccccagaacaaagatactaggcgtctgctctctgttttggagtctaccaggtatgtctcatcatcaaagagcaggaactcttggatgatgaatttaaaaactataagagaatgtgttttcatgaagttcccatgagggcactcattacatgaaagctgggggcggtgactcacgcccacactcccagcactttgggaggccaaggcaggaggattgcttgagcccaggagtttgagaccagcctgggcaacacagcaagatcctgtgtctacaaaaaaattttaaaaattagctggcatggtggtgtgcacctgttgtcctagctcctcaggtgactgaagcaggagcattatttgagcccaagagtttgaggctgcagtgatctgtgatcgtgccacagaactccagtctgggcaacagagcaagagcctgtctctaaaaataaataaataaatatatatatttttaaaaagtgccttctttgtgaagctgagtttgttttgttttgttttgttttgttttgtttttttaacctaaaggcaggagttaaggttttttcctgggcccatgattctataatctcctttagggactctcgggcacacacacacaaacctaagaggtgtgtgaggagaataaatacgtattgtaaatgtaaagcccagcaaaccctcagcatccacagaacagtctgtgtgtcacagccggcaggtgaggagcacacaggaaagcatggagggccacagacgctgaatgtttctagcacccagactcctaacgggctgtgcccatcatgaagaagcctccggtggggtcccctcagcccctagggaagcacagcagccccgaccagccctgtccggagaggctccattcctaggacccccgatccggcctcctccagtcgcagccaccaactggcacgtgtccaccttctctcagaggcagcacaaagccacaccagtggctccttacttctttccgtctagctcctgggtacgtggggaagtacgctgaccccttcagaagccggcccacatgcaggggccacgagggctacggaagagcgtccgagtcttcgtcgccctcctgttagtctccctctgataagccatggatctaagtctaggctaagatccaagtcacagagccccagtgaatctcccaaggacaaacgttctgtgggagaaggggctttgcacattttcacagctgtatccccagggccttggacaggcctggcacgtggacggcatctgtgataggtgttgctgttaaccagtcttagtgtcttcatctatgagatagtggttctcaatccacgttgtgggacaggaaaggagagcccagtgctcagcatgctgagtgtgcacagagcggtctcatcatatccagtcgcccagcccagggagggagcatctctgttcccattttgcagatgagaaaactgaggctcagaaaccttaactgtctgctcacatgctccctgcagagccaggactcaaacccacgtctgaatctgaagccctcgtggtttccactacgtcgcaccacctttctcagctctaagtgctcctggagggaggtatttccacctccacccagagctgcagcccccacgcccagcacaaaagcggcggcgcttggacgcagcaagccacagcttcctcgtgagccctgagctgcgggccgcggacgctgacctcctaccacccaacctcgctcgagctcgcccacctggagaagggccccggctgtgccccggggacgcccccacgcgggaaatactcacggctcccgcaggcgcaggcggctgcgcggggcgcatcgtctccgggggctccggcctcctcgagagcagccgaacgcggggctgggctacctccttgctgtggggcatcagattattttagcaccagcggaaggaacggacggaaactgaagtcacatggagagcgggctgctcggcgactcagcacaggctcactcagacccggcctcttagagggaagcgcggcgcgggcgcgggggtggggcgggccgggggagcggggcccgaacacctgccggcctagcggccgagcagcggggatgtttagacgatcttccagcaatgcgaccgaggctcccccggctttcttgcgttggtgccttggcagggctgggggcggccagctaggggccccttgcctatgaggtctgctgacccagaaactttgctacgagcttccagccaaggaccaagctgaggccgactttgggaacggcagcaccgtggtaaagaggcacagcctgtcgtctggcagggtcagccgctcagccagtctgtcttcttatccactcagccggtccttgtggatcatctcctttacggaccctgtgttagaaagaaggggaattgctttgtcgaggactgtcagagagtgccaagagcttcttgatcttagactgcgcggatgggtttttttgtacctgatgtgtacaaagttccctgccagctcttgccaagaattcaaaggagtaagaataattgatcatatagccatcattgaagcagcgccagacactgtgctaagagcttcatatgcattaccccagcgctcctgttctcgaggaactactgtcgtctagagaaggtgaaatatttacagtgcctgctgcgtgtggagtgacgtggaccaccatagtcgggggctcagacaaggggcctccagttctgatctctctcactccccttcaaatctgaaacgttgaactgtcctgcaggattgggtcacctctcttatagcctgtgatttgggattgtgtgtagcattgtccatcctaagagaacaggagccaagtccttttcactccaaacatctggcacattgtctctgctttctacaatattcactcatggccgggcacagaggctcaggcttgtaatcctagcattttggcagaccaaggcaggtggaccgcctgagtgcaagaccagcctgggcaacatactgagactccatatgtacaaaaaatttaaaacttagccagacctggtggcacgcacctgtagtcccagctatttgggaggctgaggtgggaggatcacctgagcacagggaggttgaggctgcagtgagccaagatcacgccattgcacttcagcctgtgtgatagagtgtgactccgtctttaaaaaaataaaaataattttaaaaataaaatattatctcataatggtaataacaatcacaccaatgaaaaagctaaataaagatcaaattgttgcaaacccaggtgcttgattcaggcctctttctctcttgtatgcacattctctacttcatgtcttttgtgtctaccaatcagttggtaactccccaattttaatttctagctccaacattctcttccacgagagaagatccagacttgcatttttaactgtctactggtcaatcaactgctacatgtcccagagtcaccataacatgatgtatcccaaactcaactctctctctttttttttgagacagtcttgctctgtcacccaggctggagcagtggcgcaatctcagctcactgcaacctctgcctcccaggttcaagtgattctcctgcctcaacctcccaagtagctggaattacaggcgcccaccaccacgcccagctaatttttgtgtttttagtagagatgggatttcaccatgttggccagggtggtctcaaactcctgacctcaggtgatccgcccacctcagtctcagagtcctgggattacaggcatgagccactgtgcctggccccaaactcaactcttatcctttgtcccagcagtttctctcctgtatggctgtcacactttacggtatgtttcagcccaggcagtccagccctcaca

SEQ ID NO: 316034 - DNA, 4001 bp, Homo sapiens
acgtgttcaaaatatacccagccatcgacataggaaagaaatatgattaccaaataaagtgtacctttggctgagataaagcagtgctggctttaaagatttgttgtattatcttctaaatttcagaaatcagtcaaatattccaaattttatgtttttttcttttacagtataattaattttgtcaaactagtgggcattcctatttcaaggatcaaagtaattgctcaaagcaaaggcgtaacaatttgtgcttaccatcccgacaaagttttatttcccctttccaacatgctatgattcattctatttcttcttagttgttcctttctatagcttcagtaggaaaaggcaaccagatttagattcctttgccttttaacctcacagcatccctcccacaaaaaggaggactacatattgtactttgttccatcataaagcatcgagatgaattatactaaccttactgtattccaggcatctccgagttctttggaatactgtttttcaaaatgatccaacacaactttgcaaatctgttttgcaagcttcccctctgattttgctttcagctatgacgataagaaaaagttgctgacacacagtgatattacaaatttactgaacgtcaacattagcaaggtctttttttaagacaagaacactttttttggataattactagttcttgaaatggaagcaataccttacatgtaccaaaactgtacattatctaattatgaaaaagcaaggtttttccaaataattattttccaaatgtgaagcaaaggttaaaacagaatctactggggctgaagaaactgtcaaaaggaacaaaattaattttaaaaagtcactgtaggggctaggcaggtggctcacacctgtaatcccagcactgtgggaggcagaggcgggaggatcacatgaggtctggagttcaagaccaggttggccaacacgggaaacccgtctctactaaaaatacaaaaattagccgagagtagtggtgggcgcctgtaaccccacctactcagggggctgaggtgggagaatcgcttgaactcaggaggtggaggttgcagtgagccgagatcgcgccactgtactccagctggctcatgctttgcagggacgaggcgagaggatcatttcccagttcaagaccagactggaaaacatatcaaggacgtgtctctacaaaaagtaaaaaaaaaaaaaaaattagccaggcgtagtggcctgctcctgtagtcctagctactagggaggctgaggctggaggatcgcttgaacccaggagttcaaggttacagtgagctatgatggagcagctgcattccagattgggtgacagagcaagaacttgtatctaaacaaaactaaaaagtcaccggggatgctgacatcaagaaaaattggtgaaaggtatttgagaactctgtactatctttgcaacgttattttaaagtgaaaagttaatttagggagaaaagtcactccaatttcatcgtgaacttccttgcaattgtttcatttattcatccaagaaacgtgtattcaatgcctactatgtaacagacactgttctaagctcccgggataccgctgtgacacagaaaacaaatctcagccctccaagagctggagggagtgggtactagaagtctgcgagctggacggaagggactcagcattacagcactcagcattatttcagggcttgacagtaaagccaaagaaacgctgatctcgcgaggggacgaacaaaggtgatgttcccccatcccagcaccctccctcgccacctcggccgcgtccagaagcgtctcattcagatagaggtacccagccgggccccaggtctcacctgggtcagcattgtcccgctgagagctttcaaacaacaggtgtacgcgaatcagtatcaaaaagcctccagggaactgaaaaaaacagtctgacttccgggattcgcgggcatccactttcattctcacgtttcctcttcaatttctcgcgagatactgatttgctcgcgctatagaattcttgtcgaagaggcttagctcccgcgggagatttcgtgcgcagttacttccggtagctggtaaaggctgatacttcccaggacgcggaggtaacgggccagggccaaagcgactttcgctacttggattggtcggcgtagctttgggcggccggaccttagaaagtcacacatctgcgcgcctgtgcggcccctgcttctgcggatgctgaggtgggaggatcgcttgggcagaagtttgaggttgcagtgacccgtgatcgcgccactgcactgcagcgtgggcgacagagcgaggctttgtctcaaaaataaataaaaagtcgcatattgtgctgaacagtgtgtatatgcatggggctcaataaaggaatgagttttggggttatgttgtatgatgactgatttaaaatattctcaaagcgaagctagttactgacttaatctaccaaatctagtgacccctgttaacctagacattcagtacccaaggataaaagggtggaatataatgaaaaagaaattaagtcatgcttttccccagacctggcccatggggataatctctccttttaatggagagtgttaaactgaagtaggcatgtaaagcggttacaacagtgattaggaaacagtaaatgcccaaatgttagctgctattattttcactattgtgatcattgtgatttttgtcgcgttgataccaaatgcgtgaagaccaaaaggaccctccactctagcctccccaattcacctttacaagggagcaatgtttaatggttctccaaggaagatgtttattacacctattttgacacgaatagaagtttatttgctcttttggtgtcatgcttcagtaactatcatttgtagcagcaatcagcaattagaaaaaaccggtttgatatggtccctgatagttaataatcatcattttgagttgttccttgatgctcatatcaatatacgtacatgctataggtacaagtcttatattcatgtaaaaacatgtctttccttctaatctgatttgaagcttaatatatttatttatttaaacaagtttccaagtcacctaaaaaatgcatcttattagaatttagatttggtacaaaagactatgataatcaggaatgaaatgatgccatctcttggatgccgtctgtttaatgtttgtggaaaagtcggtctaacctttcagcctctgtattttttataattttataaatttatattttataaatattttataaatttatactttataaatatattttatataatttatttttctatgttcattccagaatgttgcaattaattaatacagtggtattgtatttgcaatgtaggcacgtaaaaaaatttgaagaagggaatttcgcggcattcttggcctggcttcctggcgtagccagcaagttcggaggtgttaaccgctgctgtcatgtttcttttgctaaactgcatcgtcgctgtgtcccaaaacatgggcatcggcaagaacggggacctgcccaggccgccgctcaggaatgaattcaggtatttccagagaatgaccacaacttcttcagtagagggtaaacagaatctggtgattatgggtaggaagacctggttctccattcctgagaagaatcgacctttaaaggatagaattaatttagttctcagcagagaactcaaggaacctccacaaggagctcattttcttgccagaagtttggatgatgccttaaaacttactgaacgaccagaattagcaaataaagtagacatgatttggatagttggtggcagttctgtttataaggaagccatgaatcacctaggccatcttaaactatttgtgacaaggatcatgcaggactttgaaagtgacacgtttttttcagaaattgacttggagaaatataaacttctgcctgaatacccaggtgttctc

SEQ ID NO: 316035 - DNA, 4001 bp, Homo sapiens
gtcccagggccaactgctccctagcagccgtgacacttgtggatgccttagaggcttgtcttgttcaatcctcactcccatcctgtgaggcagtcccacttattcccccatcgtccggaggaagaaactggggctcagggaggtgaagtcacttgctccaaaccacccagtaacaggcaccggggttgagatcaccattcaagtcaccccacctgcattaatcactctgcctctcagcctagcctcccaatgtcaccacactgaggccaggtgggtgggggctgggggactgagggacctgttgcactgctctcagcccgtgggcattagcccaaagcggacctcggcgcccagaggtgtgaagctggctcctgctggtgctcaccatgggatcttggtgggaatgactttgctccttgtatgacaagaggagcttagagggctgtgaggctccaaagatgcaggcaggcccaggaggacaatgtccagtagatccccgtagtcctccctgaaacctccaaggcaggcttctcaggatactctgagggtcttctccgggcccagagcaaagacttcttaaataacgctgggccgcccctccacagacacaaactcaacctgggacctcgagggtggacagatgcccaaggcttcaaaatgaccattcctcaggggcctttaccatcctgcctttactggtcaagaagtgattctccgccaccccacaaagccggagtgaaaacccctgtctagccagttagaatcttccagacagggctactttgttttatcagacaacaaaagccacgtcacccctgggggttcctccggaagctctcctgccctgcttggcctggttccagtcatcacccaaccctgggacagagaggccccaggactgcgtttcatgcttgagagagggtgagacttgctgggggaccacccaactggtcagtgatagggtcacgacccaaaccatatctgtctgctgcagaagcagggccccactagacccacggagacaagcaggcagatgtccagcactctcagctctggggcctcactagtgcgccccagccggccccctccaagaaggggcctcagcctcctcacgccatttctcagagggagagagcagggacagggaggttaagtgccctttgcagccctagtctgggctccagggggcgggggtgacttggcttctcccagccttcgctgcccgggctgagagggggccggacctccagggcgacatcgaggtgtgtctgggaagtccaaccggtgtcccctttggtccggccgtccctaggagcccgttccgcccggcgccgctcgctggctttgtccacagcactctcccgccccaactaagggttggccgagaacaaggggttgggggcgtttccaccgcggcttcacggcaggcgggaccccgaaggaagtcggcgggggcccagcactccggcagccgctcgaggagccccgagctcctgcagaccgagccggggaacaaacctcccgcccgcccccgggcgtcggggcgccccagaggcccccgggatgaacggccggagcttctcgcgaaaagccgcccggcccttgcgctccggggccctggcgagccccactgggtgtttccccggaggagcggcaccctggggctcggtccgtccatcagtccacgcggaagacaccccggcgcacgtcccgccccggctcacccaccgtgcaccagtctccgcatgtcctggtagcgagcccataggtgcgcgctgaggtcggcgccgctggtgggtgcctgggcgggcgcggagcgcgggacgccggggcagtgggcgccgggacccggggggccgcacccagggcaggagggcgaggacgaggcggctcgcggcccgccgtggcctccgcacagcagccagcgccgagcggccgcccgcagccccgcacccgccatgcccaccgcgcgccgcccgccgcccgcgctgccctcggccagcccgccgcccgccgcccgccgccctccgactgcgcgcccgccacggtggcctcgtgctcctcacggcggccggccaatgggtgcggcgcgcggagcccggcctgccaatgggcgcgcccctcggcccggggggcgggaggccccggacccggcggggcggggcggggcggggagggctccccagccccctcccccagccagtctccggcgcggtccgggaggactctgcgccccccttcggccgtcacgccggcgatggcggcgcctttccctggccccagccctggaagtcagcgggcctaagagcggccgtccctgagaggctccggacggccgaggcgccgagaggagacagccggagcgcgacgggtaccccccgggcccccgggtcctctgccgccctctccgctcccgggtccgcccgccctaccctgcgcctctggatgcttctgaccccagatcctccgctcctccccctagtcctggtgctctcctttcccggggtcctggtccccggtctctgggctcggactgactgcccactgaccagagcccgggccagtccactcactggtctaacaaataaagagcccttcccgcgcttcccggtgccaggcccacgctgggggaggccgaggggcctgcagggcagccgacgtccgctaaccaggtgactgggccgtgcgctgcagggttgtgggccacggtcactgcgcccgcttggttcggacctcggcaactggccgcactgacccgtcaactcccggtttcccggcgcacgcccctcgtgagatgctgtggtcttttctagcaacgtcgacaggctttccaacaaaattcctctttcctgcgcagaaccgctctccactcgcatttcttctgctcagatccgtattccgagcccgcacgcataccaggctgtgctcagggtccggaggaggccgacccagtagccgtgggccctgtcggaggggagccagctgggcgcgcgttgttttctgaggtggccgcgctgtctttcagggtgtgtgtacattcgaaactccactgaaccttgattgaagacctacagtgtggcagtccatggcctggggactggtaaggattgaggccgtaggatgggctcgagtgtggcggtgtccccagggccccagtgagcaagtgggtgtgctgggaacctggccacaagtgaacctcctccaggcgaggggatgccctgcagcatccagccgtcaaaacctcctgtagaaacgggagcgagcatcaagcctgtgtgtgtgcatgcttgggcggagtctacccggaggagaaagaggcttccgggctggccctccaaagccggttgtacaggcggcagctcaggctgctcactgcgggccctatgaccctttctggggccctgcttgctctctccagtctgcttttgtatattttgtgtccatatcaccaaatcgtctcattggttctaagctttcatttaccttccttagattgtctaatagttgtctcctttctcaaagctgttcctgcagtttttactttagtcctaggtaatggggtgacagcccctttcagttatcttcagcaagcacagcagcatgagaagacgcaattacaagtgaagtctcttaagtcagagccctgcttctacctggcatagtctcttaaactgtcagttaagagactacatataaacaatacacgttcagactcggcgcggtggctcacgcctgtaatcacagcactttgggaggccaaggcaggaggatctcttgagcccaggagtttgagactagcctggccaatatagtgggacccccatctctacaaaaaattaaaaaattagccgggcgtggtggtgcacgcctgtagtggtgggaggatggcttgagccggggaggagggggttgcagtgagccgagattgcgccactgcacttcagcctggatgacagagcgaggtcctgtctcaagaaacaaacaaaaaccatgtttgggaa

SEQ ID NO: 316036 - DNA, 4001 bp, Homo sapiens
ggccgtccctaggagcccgttccgcccggcgccgctcgctggctttgtccacagcactctcccgccccaactaagggttggccgagaacaaggggttgggggcgtttccaccgcggcttcacggcaggcgggaccccgaaggaagtcggcgggggcccagcactccggcagccgctcgaggagccccgagctcctgcagaccgagccggggaacaaacctcccgcccgcccccgggcgtcggggcgccccagaggcccccgggatgaacggccggagcttctcgcgaaaagccgcccggcccttgcgctccggggccctggcgagccccactgggtgtttccccggaggagcggcaccctggggctcggtccgtccatcagtccacgcggaagacaccccggcgcacgtcccgccccggctcacccaccgtgcaccagtctccgcatgtcctggtagcgagcccataggtgcgcgctgaggtcggcgccgctggtgggtgcctgggcgggcgcggagcgcgggacgccggggcagtgggcgccgggacccggggggccgcacccagggcaggagggcgaggacgaggcggctcgcggcccgccgtggcctccgcacagcagccagcgccgagcggccgcccgcagccccgcacccgccatgcccaccgcgcgccgcccgccgcccgcgctgccctcggccagcccgccgcccgccgcccgccgccctccgactgcgcgcccgccacggtggcctcgtgctcctcacggcggccggccaatgggtgcggcgcgcggagcccggcctgccaatgggcgcgcccctcggcccggggggcgggaggccccggacccggcggggcggggcggggcggggagggctccccagccccctcccccagccagtctccggcgcggtccgggaggactctgcgccccccttcggccgtcacgccggcgatggcggcgcctttccctggccccagccctggaagtcagcgggcctaagagcggccgtccctgagaggctccggacggccgaggcgccgagaggagacagccggagcgcgacgggtaccccccgggcccccgggtcctctgccgccctctccgctcccgggtccgcccgccctaccctgcgcctctggatgcttctgaccccagatcctccgctcctccccctagtcctggtgctctcctttcccggggtcctggtccccggtctctgggctcggactgactgcccactgaccagagcccgggccagtccactcactggtctaacaaataaagagcccttcccgcgcttcccggtgccaggcccacgctgggggaggccgaggggcctgcagggcagccgacgtccgctaaccaggtgactgggccgtgcgctgcagggttgtgggccacggtcactgcgcccgcttggttcggacctcggcaactggccgcactgacccgtcaactcccggtttcccggcgcacgcccctcgtgagatgctgtggtcttttctagcaacgtcgacaggctttccaacaaaattcctctttcctgcgcagaaccgctctccactcgcatttcttctgctcagatccgtattccgagcccgcacgcataccaggctgtgctcagggtccggaggaggccgacccagtagccgtgggccctgtcggaggggagccagctgggcgcgcgttgttttctgaggtggccgcgctgtctttcagggtgtgtgtacattcgaaactccactgaaccttgattgaagacctacagtgtggcagtccatggcctggggactggtaaggattgaggccgtaggatgggctcgagtgtggcggtgtccccagggccccagtgagcaagtgggtgtgctgggaacctggccacaagtgaacctcctccaggcgaggggatgccctgcagcatccagccgtcaaaacctcctgtagaaacgggagcgagcatcaagcctgtgtgtgtgcatgcttgggcggagtctacccggaggagaaagaggcttccgggctggccctccaaagccggttgtacaggcggcagctcaggctgctcactgcgggccctatgaccctttctggggccctgcttgctctctccagtctgcttttgtatattttgtgtccatatcaccaaatcgtctcattggttctaagctttcatttaccttccttagattgtctaatagttgtctcctttctcaaagctgttcctgcagtttttactttagtcctaggtaatggggtgacagcccctttcagttatcttcagcaagcacagcagcatgagaagacgcaattacaagtgaagtctcttaagtcagagccctgcttctacctggcatagtctcttaaactgtcagttaagagactacatataaacaatacacgttcagactcggcgcggtggctcacgcctgtaatcacagcactttgggaggccaaggcaggaggatctcttgagcccaggagtttgagactagcctggccaatatagtgggacccccatctctacaaaaaattaaaaaattagccgggcgtggtggtgcacgcctgtagtggtgggaggatggcttgagccggggaggagggggttgcagtgagccgagattgcgccactgcacttcagcctggatgacagagcgaggtcctgtctcaagaaacaaacaaaaaccatgtttgggaatacatgtgaagagcgagggctctgccaatcattatcatcataatgaatattctaactaatattaatcagttactatgctccagggttgtgttcagtgcatcattcctattaccgcactaaattatcacagcgtcagaacaaggcctccgttttacggcttagggaattgaggcacagatgggctaagggagcacctgtagagcagggatgtggtttggtaacagagtgcatgctctttatactgctcttctgcgattattgtgaataaagcgcctacaagtgcctgtggaactgtaagtgccccatacaagatagcttttattaattttagggttctcacggggcgcttacttagatttttgctgtgataattgataaagttcagctttcaacactccatatcaaattctgttactttagaagtctaggcaccaatcacgtctccgaaataaacgcaaggcattgcataattgcattttggaatgtggtgctgtacatagtccatcagagagggtcatcacttctatctgggtattaggaataaaaatggcggtggcagagtagggggcgcggctgccaactgcgagctcagacctgcactggggaggcagggggcggggccgggccggcgccacgtgggctgtccttcccttttgggccgtcccacctccagagctgaggcgcctgcgccagctccttcgaggccctgctcggcttcagggagcacgcgcgccctgccgtgctctgattggcggagctgcacgcccccgctgcagtctgattggcggatccgcctcgctttagaaggtcggcgcccagttccggcactcgtgcgcctaccagacagtggcggaggacggcgctcgctagtctcccaggtcgcggtacacggcgagaacgggcggggcggtctcggctgcgtccgggcgatccagtgcttagttccgtcatatccctctccacgacctcggtcgagcatgttcaccagggcccaggtgagacggattctgcagcgggtgcccgggaagcagcgatttggcatctaccggttcctgcccttcttttttgtcctgggaggaacgatggagtggatcatgattaaagtgcgcgtgggccaggagaccttctgtaagtgagggggtagcagtctctgtttcctttcaggaaggcacgaggcggtagggatccgtttttctggggagtattctcagattgcagaccgcgcattccactcagagcgctgggcgagtgcagttccattcgcttggcagtcagggcggcctggctctcctgtaggccg

SEQ ID NO: 316037 - DNA, 4001 bp, Homo sapiens
gacatgaccaggggaaggtgtcaggctgtgtgttgttacagattgtatatttgcatgcctgggggttaccaggctgtacgcatataaacagggaggaggcaggctctgagaacctgccagggtgcctgggataagctgtgactttttgcccctgatgccataagttggagggtcctctgctcaaaacatatggtacacacttctccttcttttcatctggtatcatgtatcatctctcagatccaataagaaaacattcccacgtccttccctccctccctagtaccaaggtcctcatctcagttttcatgggtccatggagggctgcctctagtgatgagctggaatcttaaggcctgaaatagagccagactgcagcagtcccaagtcctggagagcttcaagtaactgctcccgcgcagagccaataaaggaattctccaggaaggtaggcaggcctcctacaccatcccgcagggtatacaggggcactcgcaccaggcccagcacctgtaaaaggaaggagacaggagacactagggccccaggtggctcattcccttaactccatcctttctccagcagatcaggcctcaccccttaatactccagcagaaccaggcccaaggctcacacctcactaaagcctagtggcccaaccttctgcaggaaaatgacccaaaacatattatctagctctatcaattaatctttcccacatctgcttctaaacctctagtggctactgcctcaaagatgtattcataccctttcaccagtggttgtcaaaatgtggtcctcagattatttgcatcagcattatttgggaacttttgaaaactacaaattctcaggtttcctctccccccgccccaccaccaatgcaggaatgctgagagaaatcgctattttaataagacgccccgatgattctgctacctgccaaattttgagaaccaccttcatacataatctatctactagccctgcctgaaatatcagggccacatctcctacacaagaaaagcaaaccccaagaataaaacctaggttgccacacctagataatgtgataatctatcacactgtcaatagggaacagcagagagacatggatgagtgtgttctagaaaggatctctcctggtaaagggtgggaaagacctttacagaaagcccaggttggcagtactaattcagagtatagatgatcacgatcccaactccaccaagaaagctggggagagggcaaggtcagaggggcaaagacttttctccagggatgctttcttgggggagagaaagctttgggagaagaggaaattgggaaagggacagagtcccaggctggtcccacctccagcccgtggtccttggcgcgtgttgcgccggcctccacagccaacagctcctcgagcgtcagacgcttggcatagaagtgggccacaacgcgtggccctgacccgacgtgggagctgcggtagtcagtgcgctccacgcggaaagcggcagccgcttcgcccagctcctcgcgcagctcgcggttcagcccgtcctctaggcttctgtcctgcgtgtccacgaatccgccggggaagcccaggcgtccatcgaagcgcatctgcatctgcgggagggggaagcggggattggcaggggcgccccagaggagaccaccagagagggtgcggggctcaggcagaaagtggccgggcgcgcccccttctcaccagtatggcgtagcgcagcgggatgcggccgaagagcatcccagggtccggcgcgtagaggagagcgtggcacgcatgacgccagcccgaccccagcgccagggcctcgcctagctccagcctgcgggctccggccatggccggacactgctcctctgctgtcccgaaggcccaatgggcagaggggcgggtctcacctcggaccaatccgagcctgggcggtgctgcaaggcccaatccctgcagggataaggggaggaacctaggcgcctgggggcggggcgccgcgaccggtgcgggaggcagctaatcagggcggggcttgcagaccgggttgaagtccagggcccaggaaccctagggtaaccgaaagcagcctctgggttgggcctgcggtggggcggggctagaggtgtggccgcgccctaaacctggcgcaaggccggtacctaaaggctcctgggagccaaaagagcaagtcagggaactagctttggttgggttcggtggtacacaaagcacaaggcctgggttggggttaggaggaaatgagacttgcggcgggtcggggctgaagatgtggcagcgccctgaacctggagaaaggctggtacgtaaacgcctgcgtcgcaatctggagtcagctggagtgtcccggcaggtgaggaagagctggggcgctcagttgagtgctgggagccaaagaagtaataactacctttggttgggtgtggtggtacacaaagcacaaggcctgggtgggggttaggaggaaatgaggcagggttggcctcagacaccaaggcctatcctagggaaatggagatggacaggcgccatggtctgacaactatcttgagtggtgaaattgaggggacttggtgactgagtgaatggggaagagggagcgctgggctagtggtggttccgagtttcctggatgtggtgtcattttctgagagggggagagtaggagaagggtgagcagtgataagtgtagttctaaggaattggggtggccataggcagtgggcagctgatcgtgggggtctgacgcacagggagtggcacatagagaagtcacagggcagtgagattttcaggggaagggtgggggtggaaggagctgtgagtgaaatcctgtggcacaggactgggagtgaggaggggtgagagatagaagaagcctcctaggctttctagtctttccctcaaaccccctcagacctctgagctatgaaggagggtgggttaccctaccacaagggcagaggcctactcagggcctgatgctgagatgcaggatccctcactccaggccaggccttccccaccctgcagagcgcccctacaccaggtgtcgatattgattatgcaatagaaagcaggaggcagctccttgaggggggctgggcataaactcacagcctgtaagtgacggcatatggtgggaaagagtccggacccacccagaaacaggtttgtgaccttaacaagtcacttaactctctcagatcccagcagctcatctgttaagtggagatgataccaacctattagggatgttgagatatgttaggcacttagaacagtgccaggcagaaagtaaatgtagccattcttggagttgagggttggggcacagtgctatgtcttacgttgaggagccagggctgggcacatacctataatcccagcactgtgagaggcgaggtgagaggatcattcaaggtcatgaatttgagaccagtctgggcaacatagcgagaccccgtctctacaaaaaataataataataaataaagacccaagtgttggaactgagctgcactcatcacgctccagtgtttgaaggagggatgagctgtatgacatcatctttcctagcttagtcttctgcgttgtggggcagggatattatctaataacatgaagcaactgcattaaagtgatgagtctgtaggtgtgatacaattgtcactggcctgctagagttccagggggtttggaaatagccctgctttaacattagagtcacctcgcaaaaagcttctaaaaatttttaaaagctgccactttttcctaccacagaccagttgaatcagaatgtatggggtcctacagggacatatgcggtttttaaaatatgttttaggtaactaataaccagggtggagaaccggggccttcccccttccactagcattccaaaggcgacttggtttttctcctagataggctacctttaatgatttaggatcaaacatgccct

SEQ ID NO: 316038 - DNA, 4001 bp, Homo sapiens
tggaggagtgtgggaaggattcacccttgcttcagaagctccttgcaatcagggaccagggtagtgtgacaaatgccacttcaaggttaaactggacatgaccaggggaaggtgtcaggctgtgtgttgttacagattgtatatttgcatgcctgggggttaccaggctgtacgcatataaacagggaggaggcaggctctgagaacctgccagggtgcctgggataagctgtgactttttgcccctgatgccataagttggagggtcctctgctcaaaacatatggtacacacttctccttcttttcatctggtatcatgtatcatctctcagatccaataagaaaacattcccacgtccttccctccctccctagtaccaaggtcctcatctcagttttcatgggtccatggagggctgcctctagtgatgagctggaatcttaaggcctgaaatagagccagactgcagcagtcccaagtcctggagagcttcaagtaactgctcccgcgcagagccaataaaggaattctccaggaaggtaggcaggcctcctacaccatcccgcagggtatacaggggcactcgcaccaggcccagcacctgtaaaaggaaggagacaggagacactagggccccaggtggctcattcccttaactccatcctttctccagcagatcaggcctcaccccttaatactccagcagaaccaggcccaaggctcacacctcactaaagcctagtggcccaaccttctgcaggaaaatgacccaaaacatattatctagctctatcaattaatctttcccacatctgcttctaaacctctagtggctactgcctcaaagatgtattcataccctttcaccagtggttgtcaaaatgtggtcctcagattatttgcatcagcattatttgggaacttttgaaaactacaaattctcaggtttcctctccccccgccccaccaccaatgcaggaatgctgagagaaatcgctattttaataagacgccccgatgattctgctacctgccaaattttgagaaccaccttcatacataatctatctactagccctgcctgaaatatcagggccacatctcctacacaagaaaagcaaaccccaagaataaaacctaggttgccacacctagataatgtgataatctatcacactgtcaatagggaacagcagagagacatggatgagtgtgttctagaaaggatctctcctggtaaagggtgggaaagacctttacagaaagcccaggttggcagtactaattcagagtatagatgatcacgatcccaactccaccaagaaagctggggagagggcaaggtcagaggggcaaagacttttctccagggatgctttcttgggggagagaaagctttgggagaagaggaaattgggaaagggacagagtcccaggctggtcccacctccagcccgtggtccttggcgcgtgttgcgccggcctccacagccaacagctcctcgagcgtcagacgcttggcatagaagtgggccacaacgcgtggccctgacccgacgtgggagctgcggtagtcagtgcgctccacgcggaaagcggcagccgcttcgcccagctcctcgcgcagctcgcggttcagcccgtcctctaggcttctgtcctgcgtgtccacgaatccgccggggaagcccaggcgtccatcgaagcgcatctgcatctgcgggagggggaagcggggattggcaggggcgccccagaggagaccaccagagagggtgcggggctcaggcagaaagtggccgggcgcgcccccttctcaccagtatggcgtagcgcagcgggatgcggccgaagagcatcccagggtccggcgcgtagaggagagcgtggcacgcatgacgccagcccgaccccagcgccagggcctcgcctagctccagcctgcgggctccggccatggccggacactgctcctctgctgtcccgaaggcccaatgggcagaggggcgggtctcacctcggaccaatccgagcctgggcggtgctgcaaggcccaatccctgcagggataaggggaggaacctaggcgcctgggggcggggcgccgcgaccggtgcgggaggcagctaatcagggcggggcttgcagaccgggttgaagtccagggcccaggaaccctagggtaaccgaaagcagcctctgggttgggcctgcggtggggcggggctagaggtgtggccgcgccctaaacctggcgcaaggccggtacctaaaggctcctgggagccaaaagagcaagtcagggaactagctttggttgggttcggtggtacacaaagcacaaggcctgggttggggttaggaggaaatgagacttgcggcgggtcggggctgaagatgtggcagcgccctgaacctggagaaaggctggtacgtaaacgcctgcgtcgcaatctggagtcagctggagtgtcccggcaggtgaggaagagctggggcgctcagttgagtgctgggagccaaagaagtaataactacctttggttgggtgtggtggtacacaaagcacaaggcctgggtgggggttaggaggaaatgaggcagggttggcctcagacaccaaggcctatcctagggaaatggagatggacaggcgccatggtctgacaactatcttgagtggtgaaattgaggggacttggtgactgagtgaatggggaagagggagcgctgggctagtggtggttccgagtttcctggatgtggtgtcattttctgagagggggagagtaggagaagggtgagcagtgataagtgtagttctaaggaattggggtggccataggcagtgggcagctgatcgtgggggtctgacgcacagggagtggcacatagagaagtcacagggcagtgagattttcaggggaagggtgggggtggaaggagctgtgagtgaaatcctgtggcacaggactgggagtgaggaggggtgagagatagaagaagcctcctaggctttctagtctttccctcaaaccccctcagacctctgagctatgaaggagggtgggttaccctaccacaagggcagaggcctactcagggcctgatgctgagatgcaggatccctcactccaggccaggccttccccaccctgcagagcgcccctacaccaggtgtcgatattgattatgcaatagaaagcaggaggcagctccttgaggggggctgggcataaactcacagcctgtaagtgacggcatatggtgggaaagagtccggacccacccagaaacaggtttgtgaccttaacaagtcacttaactctctcagatcccagcagctcatctgttaagtggagatgataccaacctattagggatgttgagatatgttaggcacttagaacagtgccaggcagaaagtaaatgtagccattcttggagttgagggttggggcacagtgctatgtcttacgttgaggagccagggctgggcacatacctataatcccagcactgtgagaggcgaggtgagaggatcattcaaggtcatgaatttgagaccagtctgggcaacatagcgagaccccgtctctacaaaaaataataataataaataaagacccaagtgttggaactgagctgcactcatcacgctccagtgtttgaaggagggatgagctgtatgacatcatctttcctagcttagtcttctgcgttgtggggcagggatattatctaataacatgaagcaactgcattaaagtgatgagtctgtaggtgtgatacaattgtcactggcctgctagagttccagggggtttggaaatagccctgctttaacattagagtcacctcgcaaaaagcttctaaaaatttttaaaagctgccactttttcctaccacagaccagttgaatcagaatgtatggggtcctacagggacatatgcggtttttaaaatatgttttaggtaactaataaccagggtggaga

SEQ ID NO: 316039 - DNA, 4001 bp, Homo sapiens
cagtggctcacgcctgtaatcccagcactttgggaggcagaggcggcgggatcacttgaggtcaggagttcgagaccagcctgaccaacatagtgaaaccccatctttactaaaaatacaaaaattggccagacaagccaggcatggtggctcacgcctgtaatctcagcattttgggaagctgaggcaggtggatcgcttgaggagttctccttggtcttgaggagttcaagaccagcctggccaacacagtgaatccagagtttgagaccagcctggccaacatagtgaaaccccgtctctactaaaatgcaaaaaactagctgggtgttgtggcgggcgcctgtaatcccagctactcgggaggctgaggcaggagaatcgcttgaaccggggaggcggaagttgcagtggacagagatcgcgccattgcactccagcctgggcaacaagggctggagtgcactctaaaaacaaacaaacaaacaaacaaaattagccaggtggcctgcacctgtaatcccagctacgaggcgggagaatcgcttgaacccgggaggtggaggttgcagtgagccgaaatcgcaccactgcacgtcagcatggacgacaaagcaaaactccgtctcaaaaaaaaaaaaaaaaaaaaaaaaagaaagaaagaaatagggcaaatagtgcaagcaacagagaaagctggctggtctgagcttcgggcatcacacttacatacacgcacagactaatactcaaacaggcttgacacacacatgtccaggcttacacacatggctgtcacgtggtcacaccccgttctgcctcaaccttgacccagtcttgaaacagaaataaagggagcaactactgagcatcctgggggtgggaagggcggaagcccatcttttcacccctaggacggctgggctgggaagctaagggcgctcagtcgtgcccacgcagccttgccaggggcaggagctccatttcccctggtctgcaaaatggaagggctggactgcaccgccctgtcagtgtcggtctctggtttcatgggtccctgtggttccacagggtcacactccgcatccgaccccttggagaactcccaacccgagagggagggtgatggaaatgccctgagcatcaggacccgcgccgaggcagcctgaggggaagcgccggcctgcctcgtctcacttcgcctctgtaaagcggcccctgggcttccctccaaaactcctttcctccagggtctccgttcctccccgcgacgctaggcgctgcgcttcgtttcacagactcacttcccacgccagggcgagggcggtcacagacaaacccgagctggggtcccagactcaagggaagtgcggcccagctgccccggcgccccctcccgggtcaggccggctcgggcccggccggcttgggccctgcggtcccagacgccgctccccaggccacccctcctcccgcacaacccagaacacgcgggtcacggccgccaggctgcgcccgctctgctcgcgcctcagcggcgcggaggcccggacggcgccatgacatgagcagtggtggcgacccacgcgcacccgccgctccgagtgctgcagcctagcgcccagcgagagcgcgccgcgcacctgccggctctgccggcctcccggcgcccgcccagcctctcagcgcgaaggcccagcccggcccacggcgcccgcccggcccggccgcgcgcctcaccagcggtagcagccctccgaggcctccagcgtgaagttaacgcgcgtggcccgcgtgaagggcagcagcactttggggatgttgagcttggccgcagcggcggaggggcccgccgccaacagcaccgacagcgtcagcagcagcagcccccggccccgcgccgccatcctcgccgcgcgtcacctcccgcgaccctgcgcccggccgcccgcgccgccccgttgccctccgctcccgcccgcgcgcgcgccaggccagcaggtgatgagcgcgggggcggggcgagggccgtcggcggccgccgcttcctgggcctgagcgcgggaactctgggggccgagctcgcggcgaccccacccccagcccggccctcgcgcagggacgcggggctgggggatgggcgcgcgcccgggcccccggagctgagggagaaggcttggggcgcgcccgcggggacccctggaccctagaagtcccaagggggagcccccggggcgccccgcagcacgcatcccgccctggtatttgcccctggcggtggagccaagccgccggctttggaccttgcgctctggcccggacccacggtcagcaaggaagggacacatgccccaggacatttgggatgcagaaaaccggcgcctgccttgtcccagcccatgcttcccagaagagggaccccgggctcgcaaagggaagccacctgctgaagcgctgaaggcccggggcccgctccccctcgaccccctcacaccctttccagagaggccttaagattcccatttctccaggaaaaaaccggttgaatggcccccagatcactcagccagagagccccaagctcttgtcctccgcactgcaccccctgcggaagccattagaggttacctataggtcatttagggcgccaacgctgccagagcacaaccccctccacggcccccacacccacaaaagaaagtttagcaccgcggaatccacctgcacaccaatggaaggccttagattccgcgctgtgctctgtggcttttagctgtctgtcgtgaattgcatgaaggcatgcgtcagcaggcacctgactgcttggtgccgctaaaatatgaatctagccttgcagagaaggcccagcctagcgggaggtcaggaaagggtggggtgagggtgcactggccggctgtctgaggagtgcaggaagtggatgctgactgtaaccaggaagacacacaacgatgccactgggtgaccaggaaggagaggataaatgtcagtaaggctaggaaggctttttggaggcggcggcccctgggttgggcatagacaccgcactgggcttcagcgaggcccgcataggctgagcctgcccctcagggatcatggggcttttggatggtgatgcggggtgtttggggtcaccctcgaagcctgagggccctagaccagggaatgtgtgtgttgggggaaatctctggagataaccagaactaagggggtgagggtcggccctgtgtggaaccaggtgctctgggaggggaattccaacgggctccctttgaagaaacaaaaaacagacttgcgcggaaaaggcagcctcagagggtatttgtgaggaagtctgtgggtgtcttctgggttgcacaagattgatttgttttccaacaggtaatccagacagatggttgaaacttaggctcaaaagggttccaagtgaaagtgattcctctccctccccatcacccaatacccttccctacaggcaatgagtgtttcccacttgagtatacatccagagaaattttatgcataaacaagcatatatatatataaaacatggcacacatgcacacacatacacatacatgcacacacatatgtatatatgaaatatggcacatatacatacatatacatatgtcttgcgaggcaggtaaatctcactcttggacatatatcctagagaaatgaaaagtgatgttcccacaatcacctgtacataaaacattcatagcagctttatcaaataggcccaaactggaaacagcacagaggtccttcatgggtgatgattaaatactgtggcacatctatgccatggaatattattcagcaaaaaaagaaatgaactgctaatacatccatcttggatgaagctccagggaattatacggactggaaaacaaacactacaaaagcacaaaaggttacatactgtaaacttgcttttatacaagattattgagttggcaaaattatagaagtataga

SEQ ID NO: 316040 - DNA, 4001 bp, Homo sapiens
acaagagaattacaaagcagtcacttacatcatttggaattacaattgtcagtaacacaaatgaaattcctgagttcaatattaaacaaagaaaatcagacagcaaccctatcctctggggagctaatgttctcaggcaaccattccacaaagataatatattataggacaactgcatagaaactgtccagtttctgaggcagtccctatcctaactactctgacctgttggccaaataaatgtaactgtactagtcacagcaagtgtctggaactttagttcagaatatatagttcagaacaatagtaagagacaaaagcacagatttacatggaaaatatctacacttaaatgcatatatttcaaactttgcaaagagtagctgtatttcataggatgctgagtaagaccttgaaacagggcaggatctacagaatgaagaactggagacccatccaggaccctaacaatgatgggttaaccaaatagggtcaatccttgaaaaaagatgaagcaggggcagtagtctgcaggacttgtttccacagattccatttctccttcgtgtcccgcagcctcacatgcacaaagtgctgactcatctggaccttcccttgcccttcttccaaagcagggccccatgtattcatggaggttacatagcaagtggagaagtaataaaatcagttatataagtcacactgtactaagtgctattttttaaatattgaacacattgataggttgtggtcctcaaccctgcatgaacattaataatcatcgtggaagctttttaaaatacaaacaactgggccccactcaaacaattaaatcagaatctgtaggaataggcccaagaagtagctttttttaaaaaggtccctagatgattacaacatacagccaagtgggagaaccactagtatagagtggccagggactgttattcgtttcagttggtaaaaggatggcctttccaaaatgatgtttgaattgtaacttaaattgtcaggtcaggacaacccaattcccaggcaatggggaaggctaaccccacttcagtgatttatcccttcgtttcctttctcagtaacaaataacagcactctattggccccaaagagattgtgaggataacagacatggaaaaaaaaatactaaacaaattcaaagaaaagcagaacccaaacactacggagaaatagtatactgctgcctccaaacaattatcagggtctgggagtcctgccagtttcaaatatatcctgatgttccaaatgataattaaccacagtgaggagcggggaggcccaccaaagcagtgtgattctttatctttaggaaatgtggcaacaatccccctttaatgtaaataatgaaaagcaaagaaaatttacaattttgcacaaatgctgcataaatcctgcctcggaacccctcttattaccaccctagtggcctttgatcaggcagaaatgggcaacaggccagggtctccatatcacaccttgtaaagttacactcgtttctccccatacgacctgaatctgatgtccccaaacggcagctcagtaaggccagaacagtccaccgtgtgacagcagcgccagccaagaggcagctggtgcccagagcagcgatgagccgagagatatgagatgggcagggaggcgtcgccaagtgctccgcaccgggttagtgaaggtgcctggaggacagaagtctttcgctgcggcgtggaggtccgaactgtaccgagctgtggcgttgccgcaagtggaggaaactgaggatggagatgctcgctcccggccccgccccgccccgccccgccggtactagcctgggctccggcttcttagctgcgacgctttggcaacccagggctccaattctgcctatgccttcgacccgggcctcccctccctggcacctatgcccacagccacgactccaggggctgcacctatcagcacggggctggggactcgggagcagatgcgcgcggagggaggggcttcgcagtctaggagcgcgctggcagagccgggcaatgggtcgctccgcccgcagcggcccctcccgacgtccgcacacagaccacatccagcactcacctccgggacccgcccgcccttcgctctccgggggccagggatcctgacgccccggtcggtcgccgcagcgccaggccgctagccccccgcttcctcacccggcgacgtctcctcacctccgacccccggctacgattggtggagcttcggcgggggcgggccgagggcgttgactgacagcagcacgcgccgggcggaacccacaggcctggaagcgaagttggcaccctggcgctctacgccgccaagctcctgctcgcgacgcgacactgcagctgtcgccccgcggatcgaggtctggcccctctcacgacccaactcctcgtgaacttcggacgtctgagtttcctgggagcatccacctacctcaaggcttttcgcttgtcagcgaaagtgcccacaaccgcagttgactctagtagggcagtctttcctgtggagtgatggaatttattgtgccctgaaccagagaaatgcgatttgccaagtataagcacggatatagcggatccttgaatcttttccttgctttgacattagtcaacaacttctactcgccagtaaaacagcccgttccttttactctcactgtacatgatgtcggtctcttggcaaagcatactttcctcaccctccaccatccccaattctgggttatcctattttggacatttttctaactggtaaaacgtcggtagcagttttgtgaaattcaggaactgagaggagtcctgagaagacacttgttcaagaaaccagaaggaattgtgggctgcaccgtgtttctctgtgcttggagcacagtggggttaacacaggccccaaaagcaggcctgcccccggactattaccccaaggtttaagaaaaataattaatgtacatgacaactaagtatttttccatttcttgaccataatggactctgcatgctcattcagatgttttcatggcaggcctgcttcgtgggcaaccagatccgtgaatgggataaaaggaagttctgccacagggtggaagatctcttctgtagtaatgatcttcttttttttttttttaatatactttaagttctagggtacatgtgcacaacgtgcaggtttgttacatatgtatacatgtgccatgttggtatgctgcacccattaactcgtcatttacattaagtatatctcctaatgctatccctcccccctccccctaccccacaacatgcccaggtgtgtgatgttccccttcctgtgtccaagtgttcatttatgcagccaacaaacacatgaaaaaatgctcatcagcactggccatcagagaaatgcaaatcaaaaccacaatgagataccatctcacaccagttagaatggcgatcattaaaaagtcaggaaacaacaggtggtggagaggatgtggagaagtaggaacacgtttacactgttggtgggactgtaaactagttcaaccattgtagtaatgatctgatactccttcttcctcgaggaaatacagcactctgggaccttttgaggacataaaagggtagcttccttctgctatcgaagaagagcctcatatactagacttctgctctgattatgctttatctcccagtaggatcccccgcctcatgtacagcttggctgtcttacaagtggtaaaatacttaggacaagatgacttctaggtcatggttttggacctcattgaccccattctcccccaagcactcataaccctgaggcatttgagtgatcttacctatatttacctatattttacagtcataaccacaaataagagcagccactgcactccagcctgggtgacagagtgaggccctgtctcaaaaaataaaaaaatgtttatatgatgatatgaaaccaaaggaact

SEQ ID NO: 316041 - DNA, 4001 bp, Homo sapiens
acagcaagtgtctggaactttagttcagaatatatagttcagaacaatagtaagagacaaaagcacagatttacatggaaaatatctacacttaaatgcatatatttcaaactttgcaaagagtagctgtatttcataggatgctgagtaagaccttgaaacagggcaggatctacagaatgaagaactggagacccatccaggaccctaacaatgatgggttaaccaaatagggtcaatccttgaaaaaagatgaagcaggggcagtagtctgcaggacttgtttccacagattccatttctccttcgtgtcccgcagcctcacatgcacaaagtgctgactcatctggaccttcccttgcccttcttccaaagcagggccccatgtattcatggaggttacatagcaagtggagaagtaataaaatcagttatataagtcacactgtactaagtgctattttttaaatattgaacacattgataggttgtggtcctcaaccctgcatgaacattaataatcatcgtggaagctttttaaaatacaaacaactgggccccactcaaacaattaaatcagaatctgtaggaataggcccaagaagtagctttttttaaaaaggtccctagatgattacaacatacagccaagtgggagaaccactagtatagagtggccagggactgttattcgtttcagttggtaaaaggatggcctttccaaaatgatgtttgaattgtaacttaaattgtcaggtcaggacaacccaattcccaggcaatggggaaggctaaccccacttcagtgatttatcccttcgtttcctttctcagtaacaaataacagcactctattggccccaaagagattgtgaggataacagacatggaaaaaaaaatactaaacaaattcaaagaaaagcagaacccaaacactacggagaaatagtatactgctgcctccaaacaattatcagggtctgggagtcctgccagtttcaaatatatcctgatgttccaaatgataattaaccacagtgaggagcggggaggcccaccaaagcagtgtgattctttatctttaggaaatgtggcaacaatccccctttaatgtaaataatgaaaagcaaagaaaatttacaattttgcacaaatgctgcataaatcctgcctcggaacccctcttattaccaccctagtggcctttgatcaggcagaaatgggcaacaggccagggtctccatatcacaccttgtaaagttacactcgtttctccccatacgacctgaatctgatgtccccaaacggcagctcagtaaggccagaacagtccaccgtgtgacagcagcgccagccaagaggcagctggtgcccagagcagcgatgagccgagagatatgagatgggcagggaggcgtcgccaagtgctccgcaccgggttagtgaaggtgcctggaggacagaagtctttcgctgcggcgtggaggtccgaactgtaccgagctgtggcgttgccgcaagtggaggaaactgaggatggagatgctcgctcccggccccgccccgccccgccccgccggtactagcctgggctccggcttcttagctgcgacgctttggcaacccagggctccaattctgcctatgccttcgacccgggcctcccctccctggcacctatgcccacagccacgactccaggggctgcacctatcagcacggggctggggactcgggagcagatgcgcgcggagggaggggcttcgcagtctaggagcgcgctggcagagccgggcaatgggtcgctccgcccgcagcggcccctcccgacgtccgcacacagaccacatccagcactcacctccgggacccgcccgcccttcgctctccgggggccagggatcctgacgccccggtcggtcgccgcagcgccaggccgctagccccccgcttcctcacccggcgacgtctcctcacctccgacccccggctacgattggtggagcttcggcgggggcgggccgagggcgttgactgacagcagcacgcgccgggcggaacccacaggcctggaagcgaagttggcaccctggcgctctacgccgccaagctcctgctcgcgacgcgacactgcagctgtcgccccgcggatcgaggtctggcccctctcacgacccaactcctcgtgaacttcggacgtctgagtttcctgggagcatccacctacctcaaggcttttcgcttgtcagcgaaagtgcccacaaccgcagttgactctagtagggcagtctttcctgtggagtgatggaatttattgtgccctgaaccagagaaatgcgatttgccaagtataagcacggatatagcggatccttgaatcttttccttgctttgacattagtcaacaacttctactcgccagtaaaacagcccgttccttttactctcactgtacatgatgtcggtctcttggcaaagcatactttcctcaccctccaccatccccaattctgggttatcctattttggacatttttctaactggtaaaacgtcggtagcagttttgtgaaattcaggaactgagaggagtcctgagaagacacttgttcaagaaaccagaaggaattgtgggctgcaccgtgtttctctgtgcttggagcacagtggggttaacacaggccccaaaagcaggcctgcccccggactattaccccaaggtttaagaaaaataattaatgtacatgacaactaagtatttttccatttcttgaccataatggactctgcatgctcattcagatgttttcatggcaggcctgcttcgtgggcaaccagatccgtgaatgggataaaaggaagttctgccacagggtggaagatctcttctgtagtaatgatcttcttttttttttttttaatatactttaagttctagggtacatgtgcacaacgtgcaggtttgttacatatgtatacatgtgccatgttggtatgctgcacccattaactcgtcatttacattaagtatatctcctaatgctatccctcccccctccccctaccccacaacatgcccaggtgtgtgatgttccccttcctgtgtccaagtgttcatttatgcagccaacaaacacatgaaaaaatgctcatcagcactggccatcagagaaatgcaaatcaaaaccacaatgagataccatctcacaccagttagaatggcgatcattaaaaagtcaggaaacaacaggtggtggagaggatgtggagaagtaggaacacgtttacactgttggtgggactgtaaactagttcaaccattgtagtaatgatctgatactccttcttcctcgaggaaatacagcactctgggaccttttgaggacataaaagggtagcttccttctgctatcgaagaagagcctcatatactagacttctgctctgattatgctttatctcccagtaggatcccccgcctcatgtacagcttggctgtcttacaagtggtaaaatacttaggacaagatgacttctaggtcatggttttggacctcattgaccccattctcccccaagcactcataaccctgaggcatttgagtgatcttacctatatttacctatattttacagtcataaccacaaataagagcagccactgcactccagcctgggtgacagagtgaggccctgtctcaaaaaataaaaaaatgtttatatgatgatatgaaaccaaaggaactggtcatttctgccccatctgaaaatgtagtttacacactagtgtttattaatgctaaacttgattctctaagcaaaacaaagcatagatcttaagagtagacaaataaaagcaaataaacctgtccctgatggcagaagcttgaggcacaagcacattaagtatttttatatttcttgaccacagtggactctgtgttcattcagatgttttcacggaggcctacatgcatactcctgagcccaagtcagttcctca

SEQ ID NO: 316042 - DNA, 4001 bp, Homo sapiens
agggcctgcaggctggggaagccatggtaggtgacatcatcaagctggatgagccgaggtccaaaagcctggcacagccgctccaccatgccagtgatgcgggcgatgttgttgttggaggaacagataaaagagaaaaggcattcgatggggtcttgtcgcagcagtcgcacacctggagaccagaaatgcagggggtaggagaggtacctgctgttgggtgtggcctcttcccacccacaggtcagatcctaggtaccaaaactccaggaggatcccaggagaatgagagtcagcaccgttagagaaagcaacaccagacctctcattcctcatagcatcttgtgagggctgagttaccatcccattccacagataaagaggccacaatgtaagctccatgaggactggcatttgggtctgttttgttcactggtgtatccccggtcacacagcagatgctttgtatatatttacagaatgaatgaaatcacttgccctaggtcacacaaccaggaatgggctcaaaatccttgtcacttcactatggtgattagcaggataataataatggtaataatacttactatgtgcctggcattattctaagcactttacatgtattagttccttaaatcctcataaaagcctatgaagtagatataatccccattttacaggtggcaaaactgagtcatagagaagtgacttatgtccaagaaccctaaccccagcccaggtcctgtactcaccttggaatttctgagccacctcttggaagtgggagtccacggaaccccagtggtgatacagttgagccagggtaacatctagctggaagtacttgcgcacggcctccagctcgtctggtgtgggcctgctagcctggctcttgtctcctcggtacacagtgcagtggagctgctcctcagtctgagtcagtgtccatacttgatccgctagtacaccactccagtgtgcaggactttgctccctccacctgagcccaaggcacatgacaaccctggcactcaatttcctttcttgcaccctttggggtccctcctatcctacaatagctccatgtacgaaactaatacaagtaacagtgctatcttccagtctgagcaacatggcgaaacctcacctctacaaaaaatacaaaaatttaaccgggcatggcgcacacctgtagtcccagctactcgggaggctgcgcccggggggtcgaggctggaatgggcctctctgcattcctacctgggcaacagagcgagaccctgtctcaaaaaaagaaaaacaagtgctattatcttctgcatcggttataccgctggatccttacaattatcactgtacagacatattaaaggtaacaggttggctacccgtgcttgtttcctcttttgtaccccgggtttcttccatcatcccccaaattcctttgtaccccatgccaggcagtgttgaggcggcaggagccagtccgaggggacaggcttctcaggctcagtcactcaccggaaagattgtccagaaggcagaaccaggtccaggcgcagctcagagcgagggcacgggatggaggcccacagggcaggagtggaggctagagtacgatgccccatgcgcctgggcagaagcgcgcgggcaggcatttccacagcaggcaccgccccgtagtagccccgcctacccagaaccaggcctcgtcgacgcccaaagaccccgcccagacaaggaccacgacccttaaggcctcgcccacacggtgctgtttaacaaccttccctgtttcacttaattcctccacctcctgcatgcctcgccctttgcgggtcatcaaagccccgcttcgtgccccaattctccggctttcctgaggtgtaggtcccgccccctccttgcgacttatcttctcccgcccccagagcctgtgggcgcgcacagctgtgttcttctgggttctccaggggcagaccacagcaccaccggaagtagggctcaaccaccgctcatttcacctagaggtagccaatccgaggaggaggtaggaggcgccaatgagaaatcagggtgggcgggccgttctgaggcgctcgcgcggttggccggcactgggctctctgccagctgctcgcctttccccctccgggattgtctgcactcggggcgctaacgagttccatctgggcgccccgcggttcctcagggctgtccgtcttcagagccacgtccttccccagcccgttctccgagagccgttctcccccgagcctttgcagtcttaggcgttcgccctccttgggccgcctcccacgaaccctgtcttcaccaagaaccggagcgaacacagctccggccccagagccctcgggaagtgtctccagagtattattctcttctgcgcccgcccgctaagcttgtcccattcaaggcctttaggcgtcctctgagacctcaggacatcagaggcctctcctcggattgtcgtcccgccggccgccacagctgctgcctgccgtcttgggcatttcttccatactccatctgctcatgctttcctcggaatgggacgtttgccgggggtttgtctggggctgggcccagaagcccatcaggttgagtccaagtcccagtgtgtggccctgaggcagcctgccttctagtcgcctggagtaggaggatggattatttaatttcttcccttctggaggatggcatgaaaaagcagggagctaggagacatgacctttatctgggccattctcaccttttagcatagggatttggggttgctgtatcttaactatcaggctgcaagttttttttctttgagacggagtctcactctgtcgcctaggctggagtgtgatggcgcgatctcggctcactgcaagctccgcctcccgggttcaagcgattctcctgcctcagcctcccgagtagctgggactacaggtgcgcgccaccacgcccagctaatttttgtatttttagtagagatggggtttcaccatgttggctagcatggtctcgatctcttgacctcgtgatccagccgcctcggcctcttaaagtgttgggattacaggcgtgagccaccgcaccccgcccagactgcaaattcttgaagagcaacatctgcagcggattgacccttgtgtcccagccagagacctagcggagtgtaccgtcagcatggaatcaacatcagaccagtgccatcattgtctcagtgccagtcctcagtggctgcaaggcctgggccgccccttcttcctgtgactgttcctatctgtaggcatgccatcccacaggcgcctagcacttggaaggcattccttcaataaatgtcggtggagtctggaaagaaggtgctgaggttgggggtgagcaaagagcaaccgtctccatcccagctctgtctccggttaagcagtggggaaggtctcagctgtattgatgctgaaacacttgggccatgccactggcaaaggacttgaggcctctaagggccaagtaggaatcgatagttgactcttcccctggcagttcagcatactggttgaagagccaggtttgcaaacagacctgggttccaattctagctctgcaccttcctagttgtaggaacttaggcaagataattttttgaaacttcagcatctttgtggagataaccagtctattattaaactaccctatagttattgcaaggattacgcaaagctgaatgtctaaaggtgctcaacacagggcctgccactcactccatgcatgggcaacaggggctctctttgctgtgtcttatgaaatgtagcatgcacagcagtcagcaaccacttgggcccaattatgtatcatccctggggcacagaacctccctttgtatcccctttgccctggcagggggcaagaacaaagaattctaaattgacagtttattttctaagaatcaatatattttcttcctttgaaataaatacaaaccagtttga

SEQ ID NO: 316043 - DNA, 4001 bp, Homo sapiens
acatctctacttctttaggtagctaaactgtgccatcaccaggagacatttttaagccatgactcaatggcatccatggtaactttagaaataatttagcccaatgacagccaattaaataaataccacttataaatcagtttgttttaaaactccgtctttgtagttcttcttatacatcttaattgctccaacagagaatgctatcttctgcagtcttttctctttttatttaaagaaaatcagatatgtttcctcactaaatattgagaagtagaaatgcaagggttgtaaataacttactttaataccaagggctgtgaacttactcaaagactaaaattccatgagattaaaaatacctatgcaataattctaactgactaacactgttaactattgttatctcatctagttctgtattttggactccagttaacctatataaaacaaattgggccgggcgcggtggctcacggttgtaatcccagcactttgggaagtcgaggagggtggatcacatgaggtcaggagttcgagaccagcctggccaaaatggtgaaaccccctctctactaaaaatacaaaaattagctaggcgtgctggcgcgtgcctgtaattccagctactccggaggcggagacaggagaattgcttgaacctgggaggcggaggttgcagtgagccgagatagcgctactgcactccagcctggacgacagagcaagactccgtctcaaaacaaaacaaaaacaaactaacgaatgcattccattccttataaacacgataaattatctataccacttaaaaaggtctggaaaaaattcaaaacaactgcttagaagttaattcaggaaaaccacgtttttccaattttgcttgatgcatcttacttcctatcaaatgcctgcaacaatgagctaagcttgaaggtatctaatgatactagaacaaaatttcctataaaatccaatttaatctcattacaatgcatatagtaacgcacagaaatgaaaagatttctatgattttctatttagaattaaaccaccccagggcaacaatgattgagattagaaaggtggtgccacgttcacgaccttgcatcaaaaagtaagtctccctcccgaaacacagaaaaaagctgctattgaaagggcatctcgaatcaccgtctctgacaccgtgtgcgtcattgctctagttctgacttctatcagcgggctagggaaagagacggacgcccctttccccgatagaagagcccaggtacctgaagatgcaatgtacacatggcgtggaaatggaagaaaaagaagacaccgagagttaggagaaatgtggagagaggtgactcatggacagagccaaacctggcagggagaggacagaaaaaaggcaaaagaggcaaccagagacagacagaacactgaagacacaagggtgtaaagggcagagacaaaaggacaatagagacgggccaagattgagaggcgtccagaattttcgggttgggtagggccagagaaaagggccagtattgaagccggctccgaacgtaagcccagccagggctcctgtcattctgggtcctcaagaacatctgggaattctccaactgccgtcggcctggcctgagagtcacctgcacatttttggagatagagataagacagccccactctcaagaggccccagaattaacggggccagattagagcctgcacttaccaggccacagcggcccgacgtagtcgccacatcccgccggcggggaggtcacgcaggcgccgagacggccacgcgggagcccccgtgtgagccccagcccggctcccggtccaggaatgacccaggaagtggccctcagcagcaagggcacagagccgcggccgaggccctcccaatggcgcatggacttccgcaagagcctgacaggcacccgtactcagtccgtcacggaaacaaccacttcaccctttctaggcgggcagcacgaacggtccgcggaggaccagcgcatgcgcacagtgcgtcgggaacggactggagcaatccatcgcctctcacggggccccgccctcttgcttccgatttggaattcggaattagccttgcaggttagagatttggccaggggagggagcgagagttgggcgggaacgggaagggctaaaggcgtggaatgagaattgatgaatgctcaccgggagccatgaatttattaagagttggatattgagggagcacgaaggaaactagagagtgcaaggtgaaatacagtaatagcgtactacaaactaatgcttgcacatttgcctaccttctttcttgggcatctttgtttgaaagcactttcacatcgttagggcaatcatgggaggtgagaagcaggacgaagagtcatggataggctaagtcccttagaatctctgaggatcagatgggaaagggacttaaatcagttaggccagtaacgggtttggaataagcttgtgtggtttataaaaggcgtcaaaatgatttgttcaactgtttcttccggattttaagcccaccagtttgttgaaatggtcctcgtcaaggcctccaccagctccctattgtttgtggccagtgagcctgccacagcattcagttcagatgcctagtgctgagcactccttcaactactttttcttttggctctctggccatcacattctcctttttccctggaactgctgctcccaggcttctttgatggctcccctcccaaatttctcaatgttggacaggcccagatctcagccatcttgagctcctctcctccatcactttaaatactcctttccccttccaacacaaaccttttatgttttgtaaggaaaccagggcccgtaaaagggatgtggcctgtgaacggttatgaagccaatttttagggactaaaataaaagggtcctgtgcatcctctttacttcagggacctttcacctcctccccactacccgccccccacccatgccacacacatacacaaatacacagagcataaagacaattccttttcccttaattgtcagaatcataagtctggacccatgcactcacaataccaccaagagtagacctagccattgatagtaaacttcccaaatgcaggactcttagaattttctttatttattgtggtgactgtttcaatggcaggtccagagagcaatttgctgtaccaacctgtgcaaactgtagatcttcctgggattgtagggttgtacaaaaagtgtctttgtaatcgttacttccttgttattttagaaaataaaataagagaaaccaagagactttaacaacaacaacaaaaaagaaaaattagggataaaagactttaaccataaaaaaaggagaaactaaccaccatcaccatttatatatggttatcatatgttttatgaagcccttgttttgcagttctacttctaggcatttatcctgtggaatcattcccatgtatgcaaagatgtatgcatgatgatgtttatttctgcactgtatgaaatgggaaaagattggaatcagtataaatgtccatgtataggaactagacacataaattacatccgtactagccatgaaaacctatgctttaggtctgtatgtcctgataaggaatgatctcccatagatacatagtgttgccatgaaaaaagggcaaactgttgtataataaactgcaaccattggaccaaattcagcccacagacctgttttgtttggtttagacagtgttggcctatgcagtgttttaaaaataacactacatttgggctgggcatggcggcttatgcctgtaatcccagcactttgggaggccgaggaaggcagatcacgaggtcaggagtttgagaccagcctggccaatatggtgaaaccctgtctctactaaaaataaaaaaattagccagctactcggaggctgaggcagaaaaattgcttgaacccaggaggcagaggt

SEQ ID NO: 316044 - DNA, 4001 bp, Homo sapiens
cgcctggtggcatatgcctgtaattctagctactcagtaggctgaggcgggagaatagcttgaacctgagaggcagaggttgcagtgagtcgagactgcaccactgcactccagcctggacaacagagactctgtctcaaacaaaaaaaaaaaaaaaaaaaaaaaggaagtaaattggtggctgacaccaagagaacctgatctcacctttaaaagaatctaccagctcaattttacaccaatatccatacatatttgacctgtttcttatccttgtcttctgcctcttggagtatagcaatgcaatctctatgcaaatttttttatcatgcttataattgcaaacaaaatattcctgtaaatagagtatagaagatctgtactgtttgagaaggctatatcctgagatattttctaacctgcatattattgaatgcaattgtattatataatgccttatattaaagctagtatatcgactttagatatggaaagttttaaattttgatggtccattgttcaagacaagcttttaaaaatttttgtcattaagatataccagaaattaaaaattaaaaaatacaccattttttaaactcttaatttttattactatttctcacttttatttctagaacactttttctgcaagactctgagtttttatcattttattcttgtatggtagggtatcacagagcctagtgcagtaaactaggtttgtgaactaaatggctcttatataacagtttcaattattgtcggttattcaatggaatttagatgtagggtccctggaaaataataaattttcaagattaaatgttcagaaaacaaggaagtaaaatgtttttaaagaaatcaaccatggttgatgtaaagacacttcaactggacccaaatccaagtaaacattgtacaaagctgggtttcttcacgtagtgctcagtgaccaccctgaccactagccctctgatgaaatggcagagccatggctaaccacaagacttgttgacttatttatgcaaagggtgaaaaaataaatgatttgacatttccctttggaactgtttacttccttataactcttctcaatgcatgcatgacttttttatttctcaagctgtaaataaatgggtttagcaggggaattataatcgtgtaaaacagagaatacactttgtcttggtcttcagctaagccagatgcaggacgcacatacatgaagatcagagttccgtagtacaatgagacagaaagcagatgggcgccgcatgtggagaaggctttgcttctgcccttttcagacttttttttcagaatatcaaagagcacacgagtataagagattatgatagtcattaaagtgggtatttgtataaaagcaccaaaaataaatatcattagtgcgttaatagatggaccattgcatgaaattttgaacagttgtaaaatttcacagtagaaataatgtattatgttaaacctgcagaaagttagtcgcaatagtaaactcacatgaaccagaggatgcaggaaaccaattacatatgaaatacttagcaactgagcgctgagtttgttggacatcatcactggataaagcaagggattacatatggctacatagcggtcataggccatcatcaccaggaggaagcattctgtagttgcactggaagcaaaaaagtaaaactgggtgatgcactcagctagggatatcattgcagtcttgtctaagaaattgaccagcatcctaggggttatagaggttgaagtacaagcatctgaaaaggctaaaccaccaaggaataagtacatgggcatatgaagatgggggtcgttccaaattagaactatcagtccaaggttgcccaccatggtgatgagatagaccaccaaaaacacaacaaagaagaggacgtgcagccatggtcgatctgtaagtcctgtgagaacaaactctgtcacaagagtcttatttccctctgatatatccatactcgtcactgtaataagaaaacatgttacaaagacaatcactaaagataacacaaagcggtagcattttattatatttatacctttgagtttcccatttaattaacagtttttaaagtctaacttacatccattagtaaaatctgtttacaaagtgtgtgtttaggtatttgacactaaaattggaaaatactgaaatgaatgcatatatttgaggtgtaggggaggcaaaattttgcctctactctcttagttggcctgagaatcagatggacataagccagattcagaagagaaaagcatacaaatgtataaaagttttacataacataaaagtcctcataagtaaatgaagacctgaacatgtggcaaaacctaaaggctttcatactaggttgaacaaagaaaagcaattgtggaaaagcagctaaattatgcagggaggtaaaaggaagattagaattattttaacaagcgttgtttgtatagaattctcttggatagaattcattaaaaaatgaaaataatgtttcatttcttctggtacagggagggcatcttttacatgggagtttttaaccacttgttttgaggaagaagaggtgaaattagaatgcccttcttccatctgctgtttctttatgtacctttagctcaaaataatccatctgccaaagtggcatattttggtgtggcatattctaccaccctccagaggcaataaaaccatgtggaagaccattgcaatggaaaaagatgcaaatccaaaaccattgcatgagaaagagaattaggctaatcattgaatataggcatagctacctaatttttatggcatgacaaaagaattcataaaaaatgggaaaggacaaaacatgttggaaaaatatctgtaacataatttgcattaatacttataaaaatatatacacaacacatatattctcttttttttttttttttttttttgagacggagtctcgctctgtcacccaggctggagtgcaggggcgccatctcggctcactgcaagctccgcctcccgggttcacgccattctcctgcctcagcctcccgagtagctgggactacaggcgcccgccactacgcccggctaactttttgtatttttagtagagacggggtttcaccgtggtctcgatctcctgacctcatgatccgtccgcctcggcctcccaaagtgctaggattacaggcgtgagccaccgcgcccggcccacaacacatatactctcttacaacttggcaggaacaagtagacaacctaatgaaaaaaatgagtgaaaaatatgaacagatatgtttaccatgattaataaatatgtaaaaaaaaaccgataaatatatgaaacaatgttcaacctccttaataattaaggatattttttaaattgtcgcatcgttttcatttgtcaaataaacaaaaaagtaaaatgagaaataatatctactgatgatagaaaggtgaaaaagagttgcaatctaaaataactgacataaattttaactgcctttcaaagctgacatctatcaaaattagtaatttatatatctttgatctaacaatctcacttctggatatatattctagaaatattgtcacccagatacaaacgtgaaacacaaggatacctaataaagcattgttcatgaagacaaagccaggaaacaaaaagaatactcatcaattatagaatgactgaataaattatggtacagtctgactgtggaatagtcttcagatataaagaaaatggatttgagctgtacctgttaaaaatcggagcattttctcaatgcattattaagtaaaaaaatcaaaatagaaagaaatgtaaattacatagttccatttatatttttaattttttgcgtataaatataaatatgatatgaacatagataaagattaatttttttctataacttataaactatctttgaaagaatttccagcgtagagcttcccaaatgttttg

SEQ ID NO: 316045 - DNA, 4001 bp, Homo sapiens
aagatgattaacatacttgaagtacaagaagtgttaagaaggttaacaatcaatgactttccgaggcaaaaaatctccaaaatcttacctcatttttttgtttttgcttcctcttgctgggcaccatgatgtcgtatcatgttaacattatttgaacttacatgacaggcatttaaaacttcttgttgataacaacacattccaacaaccttgcaatattattgatttttacacatcttggtagcttcatcataaaaacattaagaccactttctttcttttatgatacttatttcttctctatgtctactccaaatgcagttattctatttaatcttttaatttcctgaattagggaaggcttccaggttgtctaaaatcatataatcatagctgggaagggccttagaagccatcctagaaagtgagaggcagcttgcctcttcttactcatacgagcacatagagttaagagcatgctcttacactatggcagtgccttcactgttcattccttctatttttatttttctcattgcatttccatttctgtctgacctgcgagttgacttccttcaagaaacagaattcaccctttcctaatataatgaaatggaagaccttgatggttagcagaatcattgggacttacctctgttcactcaaaaacaaatctgcctcagttatggtatatgatggatatcgcaggtaattcagtagtattagtatcaaaaccatcatactcaagtccttatatgataaactaggctattttagcaattaatgcatttataaatgcacattgaataacatatacaactgttaaatagttttatttgatttctacagtcattattctattatgaacagtatgaaaatttcttgaatgcttttgaataacatatagacatattgcgattagtttattaggtactaaaacattagctcactaaagtgctagaacagttgtacttgcaaaaatgtttgaacactggaaacaacataggtacctctaacttgcataattttgtgactatttttgtaattagagaaaggatattagtatgaaaccttaacatgtttttttaacatttttgtgaatgaaactgtgacttgcttatttctcagactgtagatgataggatttaacaaaggaatgatgacagtgtagaatagaggctccaccatatcttgatcatctgcttgcggagatgcagggcccacataaatgaagagaaggggtccatagtataaagagacagagaagagatgggctccacaggtggaaaaggctttccttacacctttatcagatttcttttttaagattgcgaagagaacaaatgtataagatacaagaatagtcacaatgctgaatacctgaattgaacctgagaaaataaaaaccattagaaaattaatagaagaatcagtacaagaaatcttagacaatgggatagtgtcacagtaaatgtgatgtactatgttggagttacagaaggttagtctgaataaaaatccttcatggattaaagcatgaagaataccacctacatatgacaagattaatagccggatgcacagtccattggtcataatggctggataaagtaaaggtttgcatatggctacatagcgatcatatgccatcgttgccaagagaaaacattccgtggttacactgattgcaaacgaaaaaaactgtatcttgcattcagagagagatatcatcttactcttagctaagaagttattcagcatctttggggtcactgtggatgatatccaagcatccacaaaagctaaattcccaaggagtaagtacattgggatatgaaggtgagggtctttccagatgacagcaatcagaccaagattccccatgatggtgatgagatatattaccaagaatgccaggaacaggggtattttccactgtggttgatataaaaatcctgtgagaacaaactctgtcagcaatgttgcattttcctcttccatgtcctcacagcatgccctctaaaataaaatgcaacaaatgaaagggaacatttgcaatggcattatcagttgaaattggggaagaggtgctgaaggaaaacctaaaatgatcagaaccctctcaattttttgatcagtcctatagctgatgaatctctatttgttgcaataaagacatgaaaaaatgatatattttggtttgaaactgtgcagtaattagcagatttaggtaaaacaagaggcattctctgtatgcacaacatttatatggacactattgagtgcagtagaaaaattgtttgactggcatatgatacaatgtcaacaggaaagatttttgtacggtctgaattaaaaataaataaaataaatgccatgtgaagtatcttaaactttattcttcatacaataagcatgtgccaaaaattttaagatgggaaattacatcctaattttttttaatttagtttttgatagtgtagaaaatatgctgcaagaagaagaaactgtactcagggatattaattagaaacttgttagtaaggcccaggcaatcccaaatcacattacacataaaaattatctgagtgagtttttatgaaaaatatgttatgaggttttaatgtagaagttatttaaggaattaggtctggggatctgcattttgaaaataccctccgggggattcaaatgcatgttaaatgtatggtcttggtgtgatatgacattgaaagagacagtaagacaaagaaatagattctaaagaattcagaatgtagagtctctagtattctgtgacatattttgtaggcagtaagtggtcagtgaaggagagaggagtcccttggtgactgggaagatggatattaaacattgagaactcaggtgtgctgacaagtttttggagtgagcatcatctggacaactagatgtgttccaatcagtaatatgagcctattagagctcaatagaaatgattgcttggattcattgtggtagtcaaaggcagtcaaaggcatagttaaagatgatgcatccttggagtgtaaaacagaaccaaaaggaatggcaagaaaatcaacttgagcaagttatattaaggaggtaacaaggtggacatatgtcctgtaaatggccaaggtgtgatctccttttttgccatcgaaatcatagtggctgtcagaggtaacatactgccaaaagaactagaaactcattttcccatttttcttacatctaaagtgaagggacatgatctaggatggccaattaaatacactgatcctacatttggaatatggagagagggacaaaagatattggtttcaaggcagccaaagccaaaataccaggactttacttaatgcaacctttattcacatcaacaaaatttacagtgtgagctctcaaattattgtcaaacatgagtgtaaggatacaggagttaatatgtaagtgactcaccttaaaagttttaattggagaatgtggttgattcagaggaatgggtatttatatcagaataattccaagaaataattctaagaatcattattatctgaatctttaaaccaagttttagttgtttaatgccctaatttatataaactcatcataataagattaacaaaatagcaaaatattaaaggaaaaattcagtcttataactctttatccatattagagtcataaaactaaaatataaaaatagtccagtcagagtcatccagtttctgactttctattatgacaacttgttacccaatctaaaattttaatgaattaaatggcattatcaacatttctataaattataataaaaattagagaagttatttcttccttacccatatattgaaggaaattgtggatatcctttaaacacgttgtgctttctaaacaaaaatacatacagtagcacagcaatgtcaataatacaggtagccattcatggcatattcattctttttgaaggtttctttttccaagcatagaaaaat

SEQ ID NO: 316046 - DNA, 4001 bp, Homo sapiens
tacttcaagaatatgaagtgagaagaagactaataaggactttttgaagtagaaaatatccgaactcttcctcattttcatgtttttctctccaatcactgggcactatgatgtcatatcatcttaagataatttgaactttgatgatatgcatttaaagcccctgattgtcaataacgcattccaataaccttgtaacatcactggtttttaaaatcttagtagtttcatctttttttctgggaagattaagaccattttcttcccactatgccatttatcttttcttttctatccccactttaaactaagttctattttttcatttaattttctgatttagggaagcttttcagattctctgaaaacacaatcacagctggaaagtgccttagaagccatcttaggaagttagaggctgcatggttcttactcatacaagcacagagagttaacagcatcctcttgccctcttgcacattggcagtgccttcactgttaaacacttctcattttgtcctaattgcatttccatttctgcttctttatttgatatatgagttgacttcctacaagaagtgaaattcactcttttacaattaagtggaatgaaagacctcttgaaagctagcaaaattcttgggatctacctgtcttcctctaaacacacatcaacattcactatgaagataaatgtgatagacgtctcgggtcatacagttgtgttagtatcaaaaacatcatacttaagtgcttatcagataaactagactattttgcatttaatgcatttataagacacagtgattaacataccatactgtacaatatttttatttgcttctgctatcattattctattatgaagacttgattaaaatttctcaaatccttttgaataacataggaatattttaattagttaaataggtgcttatatcataggtcattaaagcgctaggacagttataattgcaaaatcttttaatgctggcaaaaacataggtacctctaatttgcacaattttgtgacattttagtaaatagaaaagagatattagtaatgatctaaacatcatttcttttgaacatttttgtgaatgaagctattacttgcttgtttctcaggctgtagatcatgggatttaataaaggaactatgacagtgtaaaatagagactccatcatatcttggtcatcagcctgtggggatgcagagcccatatacatgaaggcgaggggcccatagtataaagatacagataagagatgagctccacaggtggagaaggcttttctcatacctttgacagacttctttttcaagattgtatagaggacaaatatgtaagatataagaacagtccctatggtaaaaacttgaattgaacctgcaaaaataaaaaccattagaaagttaatagaggaatcagtataagaaatctttaacaatgggataatgtcacagtaaaagtgttgtattatgttggagttacagaaggttagtctgaataaaaatccttcatggattaaagcatgaagaagaccacctacatatgacaagattaatagccggatgcacagtccattggtcataatggctggataaagtaagggtttgcatatggctacatagcgatcatatgccattgttgccaagagaaaacattccgtggttacactgattgcaaacgaaaacaactgtatcttgcattcagagagagatatcatcttactcttagctaagaagttgatcagcatcttcagagtcactgaggatgataacaaagcatccacaaaagctaaattcccaaggagtaagtacattgggatatgaagatgagggtctttccagatgacagcaatcagaccaagattccccatgatggtgatgagatatattaccaagaatgccaggaacaggggtattttccactgtggttgatataaaaatcctgtgagaacaaactctgtcagcaatgttgcattttcctcttccatgtcctcactgcatgtcctctaaaataaaatgcaacaaatgaaagggaacatctgcaatgacattatgagttgaaattgggaaagaggtgttgatataaagtgtgcaattatcagagactcaattttttgatcattattataaataagaaatcctataaggggttaaagaaatgaaaaaaatgtcatattttagtttgaaaatttggtagtaatatgcatactctggatttactaaatttatgggcacagtcttgaatgtggtagaacaatcctgtgtctggtacatgaatggaggtcctggggaataggtttttgaaatgtctggataagtgaatatccagatgaaataaatgccacgtgaagaatcttaaactttatatttcgtaatataagaatgcaccaaatactttcagatgggaaatgccatcataacattttttaaaatttttgatagtgtagaaaatatgctgcgggatggggaaattggactaaggagtactaattagaaacttgttactaaggttccagcaatcccaaaccagatcacacataaaaattatctgggagggtgttttatgaaaaatatagattgtgagattttaatgtagaaattgattatttcagaaatgagttctagaaatctgtatttaaaaataccctcaagatgattcaaatgaatgctagatgtctagtccatgtgtgatattacattggaagagatggtaagacaaagaaatagattccaaggaatccagaatgtagattctctagtattctgtgacatatttggtggggaagaagtggtaataaaggagataagagtcacttggtgactgggtaattggtcattaactattgaagatgggaactcagatgtgctggcaagttcttggagtgagcatcatgtggtcaactaggtgagatccaatcagcaatatgagcctgttagagcttaatagaaataattacttggaattattgtgatagtcaaaggcacagttaaaaatgatccattggagagtaacaaagaaacaaaaagagtgacaagaaagtcaactggagcaagttatattgaagaagtaacaaagtggacatatgtctggtaaatagccaagatgtgatcttttttgccatccaagacttggcagctgttggaggttatctactgctttagaagccaaaagaactagaaactcattttcccattcttcttacttgtagagtgaagggacatgatctaggatggcaaatgaaacacactgatcctacatttggaatatggagacacagaaaggttttggtttcaaaggtagccaaggcagaattaccaggaccctacttaaaggtacctttatttacatcaataacatttacagtgtgagctgtcaaattattgtcaaatgtgggtgtaaggatacaggagtttatctgtaggtgactcatcttaaaagttttaatcagagagtgtagttaattaaaaggaatgggtacttatatcagaataattccaagaaattctaagaatcattatgatctgaacctttaaaccaagttttaattgtttaatgatctagatcatatgaagttattataacaagattaacaagataatacaatatcattaaaggaacaattcagtcttataactatttaccctatccatagtatagtcataaaactgaaatctaaagacagtacagtaatagttacccaactttcttctggctattttgacagcttgtatacctgatcaaaaatttcaatcaattaaatagcatttcaacatttctataaagcataatgaaaattacaaaaattatttcttccttacccatatttttgaaagaaattgtggatatcctttaaacgtgttacactttctaaaacagaaaaaaaacacagtaacactgtgatgttaatagcacttgtatcaattcactgcatgttctttctttttggatgcttcatttctgaatcttagaaaaccattggttataaaa

SEQ ID NO: 316047 - DNA, 4001 bp, Homo sapiens
atatgaagtgtcagaaggttaacaatcaatgactttctgaggcagaaaatatccaaactcttacatccttttcatgtttttgcttcgtcttactgggcgccatgatgtcatatcatattaacattattggaacttctatgacaggcatttaaagcctctgattgatacaacacattccaacaaccttgcaatattactgatttttacaaaccttggcagcttcatttcttcctcaaaatattaagacaactttctttctattatgatacttatttcttctctatgcctactttaaatgtagttattctatttaatcttttaatttcatgaattagggatgtttttcaaattgtgtaaagtcatataaactcagctgggaagagccttagaagccatcctagaaagttagaggtggcttgactcttcctactcatacaagcatacacagttaagagcatgctcttacactatggcagttccttcactgttaactccttctatttttatttttcccattgcatttccatttccatttattttgttacttgacctgtgagtagacttcctgtgagaaatagaattcaccctttcctaagatagtgaaatggaagacctttgatagttagcagaattattgggatttacctctgctggctcaaaaacaaatttgcctccactatgggttaaatgtgaggggcatctcaggtaattcagtggtattagtatcaaaaccatcatactcaagtccttatatgataaactaggctattttagcaattaatgcatttataaacacacagtgaataacacataaaactgttaaatacttttatttactttctgcaatcattattctattatgatatgaacacaatgaaaatttcttgattgcttttgaataacatataaatattttaattagtttattaggtactaaaatgttaggtcattaaagtgctaggacagttatacttgcaaaaatgtttgaacactggaaacaacataggtacctctaacttgcgtaattttgtgactattttagtaaatagaaaaaggatattagtatgaaaccttaacatttctttttaacatttttatgaatgaaactatgacttgcttatttctcagactgtagatgataggatttaacaaaggaatgatgacagtgtagaatagaggctccaccatattttgaccatctgcttgcggagatgcagggcccacatacattaagagaagggggccatagtataaacagacagagaagagatgggctccacaggtggaaaaggctttccttacacccttatcagatttcttttctaagactgtgaagagaacaaatgtgtaagatataagaatagtcacaatgctgaatacctgaattgaacctgagaaaataaaaaccattagaaaattaatagaagaatcagtacaagaaatcttagacaatgggatagtgtcacagtaaatgtgatgtactatgttggagttacagaaggttagtctgaataaaaatccttcatggattaaagcatgaagaataccagctatatatgacaagattaatagccggatgcacagtccattggtcataatggctggataaagtaaaggtttgcatatggctacatagcgatcatatgccattgttgccaagagaaaacattctgtggttacgccaattgcaatggaaaaaaattgtatcttgcattcagagagagatatcatcttactcttagctaagaagttattcagcatctttggggtcactgtggatgatatccaagcatccacaaaagctaaattcccaaggagtaagtacattgggatatgaaggtgagggtctttccagatgacagcaatcagaccaagattccccatgatggtgatgagatatattaccaagaatgccaagaacaggggtattttccactgtggttgatataaaaatcctgtgagaacaaactctgtcagcaatgttgcattttcctcttccatgtcctcactgcatgtcctctaaaataaaatgcaacaaatgaaagggaagatttgcaatgacattatgagttgaaattggggaagagatgttgaaataaaccctaaaatgatcagaaccctctcaattttttgatcagtcctacaactgatgaattgtgtatttgatgcattaaagaaatgaaaatgatatattttggtttgaaactgtgcagtaattaactgatttaggtaaaagtagaggcattctctgtatacactacatttatatggacactattgagtgcagtagaaaaattgtgtgtctggcccatcatacaatgtcaacagaaaagattttgaagggtctgaattaaaaataaatgaaatgagtgccatatgaagaatcttaagctttattctttatacgttaagcatgtaccaaaaattttaagatgggaaattatattctaatatatttttaaatttagtttttgatagtgtagaaaatatgctgcaagaagaggaaactggactcagggatattaattagaaacttcttagtaaggtccaggcaatcccaaatcacattacacataaaaattatctgacagagtgttcatgaaaaatataggttgtgagctttcaatgtagaaattatttcaggaatgaggtctagggatctgcattttgaaaataccctccaggtgattcaaatgcatgttaaatgtatagtccttgtgagatataacattggaagagatggtaaaacaaataaatagattctaaggaattcagaatgtagagtctctagtattctgtgacatattttgtaggaagtaagtggtcagtaaaggagagaggagtcccttggtgactggcaagatggacattaaacattgagaactcaggtgtgctgacaagtttttggagtgagcatcatctggacaactaggtattttccgatcataatatgagcctattaaatctcagtaggaatgattacttggattcattgtggtagtcaaaggcatagttaaaaatgatctatccattggagagtaatgaagaaacaaaaaagatggcaagaaaataaactcgagcaggttatattaaagagctaacaaagtggacatatgtcctgtaaatggccaagatgttatcttattttttgccatccaagtcttggtggctatcagaggttacctactgctctagaagccaaaagaactagaaactcattttcccattcttcttgcctctagagtgaggaaacaatgatctaggatggccagtgaaacacactgatcctacatttggaatatggagagagagagagagagagaagtacagggacaaaagattttggttttgaaggtaatcaaggtggacataccaggactctacttaatgcaacctttattcatatcaatacacttacagtgtgagctgtcaaattattgacaaacatgggtttaaggagttcatatgtaagtgactgaccttaaaaggtttaattagagaatgtggttagttaaaaagcatgggtatttatatcaaaataatcagcaataattccaagataagaatcattatgatgtgaatgtgtaaaccaagttttagctgttcaatgccctagttcatacaaagtcattataatatgatcaacaaaatagtaaaatattaaaagaataattcagtcttacaactatttaccgtatctatgttatagtcgtaaaactgaaataaaaaataatccagtcagagttatccaaattccatcttgctatttcgacagcttgtatacccgatctaaaattttaatgaattaaatagcattttcaacatttctataaggcataatgaaaatttagaagttatttcttccttacctatattttgaaggaaattgtggatatcctttaaatgtgttacgccttctaaaaccgaaatacatacagtagcacagcaatgtcaataacacaggtagccattcattacgtactcatgctttttgaaggttt

SEQ ID NO: 316048 - DNA, 4001 bp, Homo sapiens
tagtgtgaggaaagctaaaatgtaaggacttttgagtcacaaaacatccatactcttgcttattttcacacctttcgcagccacccactggacacgatgagatcatatcattttagcattatttgatctttggcaatatgcatttaaggccactttttatccataacaaatgctaataattatggaaatattactgatttccttttcttattgttttcatttttttaatgctagaaaaattgataccatttactttctattctggcatttttcttctctacatccatgctaacttaatttttaaattatctattagctttctgaattcgttagcaatatgaatcttttcatgttttccagtgtcatacaaatacaactgtaaaaggcctctgaaggcatcgtcaataaagagaggcaagttgccttttcttattactcatagaaaggaatagagataaaagtaccctcttagagtttggccttgcattgacggttttaactcacttctcattttatgattgcatttcccattctatttattgcttcaagtgatatatgagttaaattcttataagaagtgaagtttgccaattccataatctagagtaaaagaccttttgagggacagctgattcctgagatctttatcggctcaaccaaacacaaatctgccaccacaatccagttaaatgtgatgtttccacactatacaattctgtcagctgtattatatttcctactcaaatacttttgagaggaactacagtgctttaacacttaaggcatttataaagccacatgaagagtatttaacctataaatgttttcatttgttttctgctttaattatctaatataacatgaacaccaggttaaaattccttggatgcttttgaataacatatataaatattttaaggagtttattaggtataaaaccctaagtcattaaaatgctaaaacaattatatttacaataactttgaacacttagcaaaacaccttatctaactgcaaaattctttttactgaaaatgagagatatcactatgaaatctaaacatttctttttaccatttttgtgaatgaatctattacttgtttatttctcagactgtagataatgggatttagcaaaggaattatgattgtataaaagacagagtctatcatatcttggtcatctgcttgtggagatgcagggcgcaaatacatgaagataagtgggccataatataaagagacagataagagatgggctccacaggtggaaaaggctttccttacgcctctaacagacttcttttttaggattgtgaaaagagcaaatgtgtaagaattaagaactgtcacaatggtgaatacctgaattgagccagacaaaataaaaaccattagaaaattaatagaagggtcagtacaggaaatcataaacagtggtataatatcacagtaaaaatgatgtattatgttagaattgcagaaggttaatctgaatataaggacttcatgaattaaggcatggaggaagccacctaaaaatgagaaggctaacagccgtatgcatagtgaattgttcataatcactggatatagtaaaggtttgcatatggctacatagcgatcatatgccattgttgccaagagaaaacattctgtagttccaccaaatgcaaaggaaaaaaattgaatcatgcattcagacagagatatcatcctgtttttggccaagaaattaaccaacattttgggagttactgtggaagatatccaagcatcaacaaaggctaaactcccaagaaaaaagtacatggggatgtgaagttgtgggtcattccagataagagcaatcagaccaaggttccacacaatagtgatgagatagatcaccaagaacaccaagaacaggggcattttccactctggctgatatgtaagtcctgtgagaacaaactctgtcagcaatgttgtattatcctgttccatgtcctcattcgacatccctgaaatgaaatgcagtaaatgtaaaagagcattcactaagacttatacagcaaatactgggggagggaagttgatagaaaaacatactcttattacaatacccttttaattttctttcatattcctgtaatagatggaaactgttttgggaaatataagaaatcaaaataaatgcaattattttaattctaaaaatgtgatcaaataatctacttttaaaatgcagatgatagaaatgcatgtaatgtgtgttaacttaagaaaatcactatttgtaaatttagaaaaggagagaagacttatttcttataaggggttacagcctgcaaggtggccatcaagtgtgctgggaagcatgcctctggccaagaccagaaacaggcacatcaaaggaggagggcttgaggtaggagctttaggctaaataagttggctaaatatacatattcaacaggttacgggaggatctatgagtattcatgaaggtagccttggcacatgcatattgaacatgtatgtaacatacaacccatgttcacattggagtggagacttaacatttaaatttgttacagttaggccctatacatcaaaaggtcttctcaggacatgaaggcccataaatgcactgtctctgtaaaccagccagaaccagtccgtggtcagttttcctcttatctggagaaagttactgacatcagtctcttgtccaatcaaagctgtagttatgtctggtagcaggggttcagttactgagcatctggtgcagctgcaaattgttttaatcctgcttgtcttgaggccagtgcctgtttagctactagagaaaaagaaaaaccttgtggcagttagaacacagtttattctttaagtgtagaggtgcctgacttaaaccttgcctggtgtggccttaggttctgtttataatttggaatcttattgtcacaaagaatatgttctgtcagtcttataatctctatcttaacattaataccggtcagttgtcatgtctaaattgcaaaagagaggaagtataacaaggcacatctgacttcccaccctgtcatggctgagaactaagtttttacagtttttctggagaacttttggccaagagggggttcgttctgttgatggggggctttgaattttaagtttgcaagtgcctagtccatgtgtattataatcttgcaaataatgaggatgaagaaatagattctaaagcattcagaaagtagtgtcactaggacttagtcacatatttgatagaaaagtagtattcagtgaaggaaaaaggagtcactttgtgagtaggtagattgtcattcaaaatagagactgagaactcaggggcattgacaagtttgcagtgtgagcatgccttgaatatgtaggtgagatgtttggtattagtaatacaattctactagagtgatagaaataacttgggagtcactggagtagttgaaggcatagtaatggatgtcttacctattggagagtacattaagaaaagaaaagcatagcaccaaaaatacttgatagtataatgacctaatttcctttgggtatatacccagtaatgggattgttgggtcaaatggtagctttgtttcaaattgttgagaaatctccaggctgctttccacagtggctgaactaaagtatttccaccaacagtgtataagcctttccttttctccacagcctcatcagcatgttttgttttttaataatagccattatgactggtgtgaaatggtatctcattgtgattttgatttgcattcctctgatgattaatgatgagcatttcttttttatgtgtgttgactgcctgtatgtcttctttggagaaggatctgttcatgtcctttgcttatttgttaatagggttacatttttttgcttgctgatttgtttaagttccttatagattctgatattagacctttattggatgcatagtttgcaaatattttctgtcattctgtagg

SEQ ID NO: 316049 - DNA, 4001 bp, Homo sapiens
tttttttttttttaagtggagtaatattgtctagtttggatgatagctaaaagctgtttcagaatagatgatgaaagacaaaaaccaaatgaatgcagaaagttggaagagaaagagaatcttttgcagttaagttgccagaattcaagttattatgagtttttaaaatgagtcttaatattaaaactaaactaatcaaaaatataatttggtcttttcaattaaaatcacaaagtttgaacaacgtgttggtctgctcttactagacactggttaagttttctcttggccctttaagtacttggcctgtgaaacaaaaagattttatgttttatcaagatgatgttctgtgatccatattatctttagccagtatctgattacttaagaaaactgagttttctcaatattaaaacagataacttttttgttttttttcacaataacataatttttttctatttgcctttgaaatctttgtcattttggtattctttcaatttgtgactatatttaaccaattattgcaggtcaagacaaatggtatgttcttactgtgacatcacagcctggggagttagcctggagaggctatgatgtctaattaaagattaaagtctaatatgagattatttattaaaggtcctaacatggccaaattaaaaagagatggtcagtcgctatttttactgcacttatactcaagtccttattagatgacctagactattttagcatttaatgcatttataaagccacattgaataacatacgactttgtaaaatatttttattttctttctgctaatattattcaattatgatatgaacatgattaaaatttcttaagtgctattgaataacattagggatatatttattagtttaataggtactaaaaccttaggccattaaagtgctaggactttgcatcatctttgaatgctggcaagacatagacacctctaacttgcacaatcttgggacaattttagtaaatagagaagagagattgtatgagatctaaacattgcttttgaacatttttgtgaatgaagctattacttgcttgtttctcaggctgtagatcatgggatttaataaaggaactatgacagtgtaaaatagagactccatcatatcttggtcatctgcttgcggagatgcagagcccagatatttgaaggtgagggggccatagtataaagatacagataagagatgagccccacaggtggagacagcttttcgtatccctttgatagacttcttttctaagattgtaaagaggataattgtataagatataagaatagttccaatggtaaaaacttgaacagaacctgcgaaaataaaaaccattagaaagttaatagaggaatcagtacaggaaatctttaacaatgggataatgtcacagtaaaagtgttgtattatgttggaattacagaaggttaatctgaatgaaaaagcttcatggattaaagcatgaagaaggccacctataaatgacaagactaatagctgaatgcatagttcattggtcataatgactggataaagtaaagctttgcaaatggctacatagcgatcatatgccattgttgccaagagaaaacattctgtggttacagtggttacaagggaaaaaaattgtaccatgcattcagagagagatatcatcttactcttagctaagaagttgatcagcatcttcggagtcactgtggatgataacgaagcatccacaaaggctaaactcccaaggaataagtacattgggatatgaaggtgagggtctttccagatgagaacaattagaccaagattccccatgatggtgatgagatatattaccaagaatgccaggaagagcggtattttacagtcaggttgatgtaaaaatcctgtgagaacaaactctgtcagcaatgttgcattttcctcttccatctcctcactgcatgtcctctgaaaaatgaagcaaaggtaaaggaacatttgcaatggaattgtgagttgaaattggggaagaggtgttgaaataaactatgtaattatcgagccctcttaattttttttgatcagtgctataattgatgaaccctatatttgaggatttaaatacatggaaataataatgaatttggtttgaaaattgtgtaggagttaacagactgagagttaaaaagacgcattatctgaatgtactaaatttttgtggactctactgaatgtaatgaaaaaaatctgtctgggacatggatgtagggtgaaggaaaaaagatatttgaaagacgcaggttaaaataaatggaatgaatgcaatgtgaagaatctcaaattttattcttcacacaataaacatgcaccaaatattttaggatacaaaatggcatcatgatatatttttaaaatttagttcttggtagtgtaaaagtatgctgcagaaaggaaacagtgattcaggagtcctaattagaaacttgatactaaggtcaaagggatcccaaattagattacacatgagaatcatctgggagagtattttttaatgaaaaatacagattgtgaggttttattgtagaaattgatgatttcaggaatgaggtctaggaatctgtattttggaaataccctcaagtgattgaaatgcatgtgaagtctctagtcccagtttgaaatgacactggaagacgtggtaggacaaatgaatagattcaaaggaattcgaaatgtagagtctctagtattctgtgacatattcagtttgaagtatgtggtcagtgaaggagagagaagtcacttggtgactagataggtggacattaaacatttaggatgagaactcaaattgctggcaagtttttggagtgagcatcacatctgaacaactaggtgagattcaatcagtaatatgggtctattagagcttaatagaagtaattacctggaatcattgtagtatttgaaggcatcattagaaatgatgtacaaagtggatataatcttttataagatggtcaagatctaatcctcttttttgccacccaagtcttgggggctttctgaggttacctattgctattgctctagaagccaaaaggattagaaagtcattttcccattcttcttgcctgtagagagaagaaacagtgacctaggacggcaatgaaacacattgatcctacctttggaatatggatagaagaagaaaagtggatcaaaagtggattttagttgtaaattcagccatgacagaaataccatgaatccactgaatgcatccttcatctatatcaataacacatacagtgtgagctgtcaaattatggccagaagtgtgtatatgaatacaaaagttaatttttaagtgactagccttaagagttttagtccgagaatgtgcataattaaaaacaatgagtatttttatcagaataatctgaaaaaaattcttagaatcattatgataaaaccagtctcatttgtttaatgtcctacagcatcacaaattgtcatataacatcataataaggttaacaaaaaataaaatatcattaaagaaacaatgttgtcttataactatttatcctatccatatcatagtcatgaagctaaaatatagagataagccagtaatagctatcgaatttcaacctggctattttgacagcttgtgtacccaatctaaaattatggtaagttaagtagcattttcaacatttctacaaagtataatgaaaattatagatattttttctttctcacccatatttggaaagaaatttaggagatcctttaaaaccattaggctttctaagacagaaaaaatataattgcacaggaatgaagataacacaggtagcaattcattgcgtatccattctttatggtggcttctttccccaagctcaggaaactgctgtttatataaatttggattaaacagaagagtcattcagttgtacaactctgtagttttgccagaagatgatgga

SEQ ID NO: 316050 - DNA, 4001 bp, Homo sapiens
tttgtaactgatatggcccaacacccagaacaatgcctacctatagcaggatttcaataaatatatgttgagtgaataattggaaagtaatttttaaaatgatatcacattaagatcattactctacccacaataccaacttcaggttttgcaatagtgaaaagaaaaaaaaattagataaactctacctacagtttaacaacactatgttttacatttctatatataatatacccagggtagtggtctctattgttgaaacctttcctcacctctcaagtaggagcacagagacattgcacctaactcactaacaaagaagctcttcaaatcctacatgaggtttgaactgcttttctggaagtttgtgttatggtatatttatgcaggtagatatgggagtagataaaactctcttaatgtagcttgacttgaaaattgacattctgtgtttaatatttaactcagtaataatttaaatttggaaatctgatattcactattatttgacaccttcgttttcctaatacttcctttctaactacagtaatgtccccataatgctattaaaattgatttctcaaaattcgcttgtcacaattttgttgctcatggatgtaagtgattttactggttgaccatcatatgatcttaaactctttcagtttaaccataatgctcatgctctaagctattaaaataacttatctggttatcaatgcttaatggaatggtcctttgaacttgtaacttccagttttgctgtgttcttttggatgcttatcatccctgatgccaacacagaccaagagcttgacaacatactacattgttacttgaatgagttcaaaattagaatttcatttttgttattttgaattaagatttaccacagtttactcttttttgtatattctacccttacctcttgccacttaatttgaatgtattcttatatattaaaattttacttataatttatgcatttcccctgtgtaatttcacatggaagtttttgctgcatttaaatcattaagctatagtagatgtcacttgtttccatctttcttgagattatttcttcatcagaatttttcttaagacacttattacttccctatttctcaggctataaatgaaaggatttagtaagggaactactattgtaaataaaattgcagctggtatatctttatccccttcttcaagcaaatttggtctaacgtacatgaagaaaagagatccatagaataatgaaactgacaaaaagtgggatgcacaggtagaaaaagctttggcccttccctctttggatttcattttgaaaatagtaagaagaatatagagataagatattaagacactacctatggtaaagacttgaactgaacctgagaagatgaatagaaccagttcattgatataaggatcaacacaagagagtctatacaagggaagaatatcacagtaaaagtggttgatgtgattcgatccacagaaaactaacctaaatacaagccctacatgaatcatggaatgcaggtttccagctatgaaggcccctgtggtcatctgaatgcagagtttcttggacatcatgatgtggtactgcagtgggttgcatatggccacatagcggtcataggccattgctgccagaagaaagcagtctgcagtttccacagtgcaaagaaaataaaactgtactgcacattcatagagggaaatccttttgttctcagaaaagaagttctctaacattttgggggtaatagcacaggcacagcaagaatccacaagagccagatttcccagaaagatgtacattggtgtgtgaagccgacggtgtgtaaatatcagtgccaccaaactaatattccccaccacggtgatcagatagatggcaaagaacaccacaaacagcagagtcttcagctcagggtgatctgtaaatcctgtgaggataaactcatttttcatggtatgattttcttcagccattcctgacttgtctgaaaaaaaattgtggagaaagaaggcactaatttataatatgccacagttatttaggtctctttggcttaaaggaaggagagcatcttccacaatgtttcctcatgttgcctggactttggtgcatgccccattcatggggagaatgaatttccataaaggaattacctctttggctagtgatgaaacatattttcagtaccttttaaaatcatttttaaaccattttaatagtacctaatagtagtttttcagtctctctgtccttccaccctccactgtcaagtaggccccactgtctgtcgttccattctttctgtacatgtgtactcagtgtttagctctcactcataagtgagaacatgcaatacctggttttctgttccttcattagtttgcttaggataatggcctccagctctgtccatgttgctacaaaggacatgatctcattctttcttatggctgcatagtattccatgctgtgtatgtaccacattttctttatccagtcaattgttgatgggcatttaggttgattccatgtctctgctattgtgaatatttccagcacattttgaggaagaaatacatcagattatcttcacaaagatgggttttgaggtcttgacagaaagatccagagaacaacacttctctatatgggttaagtaaagctgattcataatttaaatgtcagcaattagtatcaacattccccaaaatttcaatgaatatatatgtactgattaacaatgttgtttaaaagagtatttttatatgccaatgttaatagcagcattattcataatagtcaaaaggtggaagcaaaccaaatgtccaaggatgatgaataaataaatggtggtatatacatataatggaacattattcaaccctaaaaagggaagaaattctgacatgttacaacatggatcaaccttggagacataatgctaattgaagtaagccagtcaaaaaaggacaaagattctgttattccatttacaggtacctagagtagtcaaatttataaagacagaatatagagtggtggttgttagtgggaggtgggcacagggagctatttcttaatggttacagagtttcagtttgggaagataaagttctggatgagtagtggtgatggctgtattaatacaacattgcaaatgtatttaattctattgaactacactcttaaatatggctaagatgataaattttatgtattttctatcacaataaaaaatttaaatgcctattttcagttgtatattcttagtaattaactatctccaatactgctggagtgtacacttaaacataacatgctttggaagcaggctatttttaaggtatttttacccctctggggtggggaggaaaaggaatgtggacggaagtggggaggagacagagagattaggggaaatgagaaaaaatgcctatactagaaaccatccaggttatttataatacaatttatgcatacaattaagaattattcatgtgtgcatgaaatttaaatgctatcaaaaattcaagaaaaaggttaaaaactggaagcattccctttgaaaactggcacaagatagggatgccctctctcaccgctcctattcaacatagtgttggaagttctggccagggcaatcaggcaggagaaggaaataaagggtattcaattaggaaaagaggaagtcaaattgtccctgtttgcagacgacatgattgtttatctagaaaaccccatcgtctcagcccaaaatctccttaagctgataagcaacttcagcaaagtctcaggatacaaaatcaatgtaaaaaaatcacaagcattcttatacaccaacaacagacaaacagagagccaaatcatgagtgaactcccattcacaattgcttcaaagagaataaaatacctaggaatccaacttacaagggatgtgaaggacctcttcaaggagaactacaaaccactgctc

SEQ ID NO: 316051 - DNA, 4001 bp, Homo sapiens
ttaatatgtctcagcatctagaacagtgcttgcacatagcagaatctcaataaatatatgtagagtgaataattggaaagtatctctttaatgatgtcacataagattattaggttctatccatattaaacgactttaagttttgcaatggtgaaggaataaaagaaaatatttgagataagccctgtccacagtcccacaatcacacttttttacatgtctgtatataatatacccaaaggttgtgtctccattgtttaaccccttcctcacctctcaggaatgggcacagagaagtttagcctaactcactgacaatgaaggctcttcagatctacatgaagtttgaaatgtttgtctagaactttatgatatggtatctttatgcatgtaggttttggagtaaataaaacttaatgtaacctatcttgaaatttgacattctgattttaattatttaaatgtttaaatcatttaacaacaacttctatttggaaatataatattcacttttattggcacaatcacttcctgactacctcattctaactacaataatgtcccccacatgctattacattttcttcctcaaaattcacttgccatttttgttgctcatggatataagtgagttcgttggttgactgttcacatgatcttaaacacttaactgtaatgcacatgttgtaagctatagagtgggctggttatcaaagcccgctttgtaaatggtatggctttttatatttgtaactggtagttttgctgttgttttgggtgttgatcatcattgatactaacacagtctataggcatggtggctttctacattgctgcttgagtgaattcaatgtctgcatgtgcttttaaattctgagtaaatatttagcacagttcactcctttccatgaattttccctgtcacatatttctgcttaatttgattgtattttgatatgttttaatattttgtatacaattagtacacttcctctgtgtaattttatttagaagttttttgagcattaaaccattaagctaggatagatgtcatttgttcacacttccttgagattttattttcagcagaatttttcttaagacacttattacttccttgtttctcagactataaatgaaaggatttagtaagggaactactattgtaaataaaatagcagctggtatatcattacctccttcttcaagcaaatttggtctaatgtataggaaaaaaatagatccatagaataatgaaactgatgaaaagtgggatgcacaagtagaaaaggctttggcccttccctccttggatttcattctgaaaatagtaagaagaatatagagataagatattaagacactacctatggtaaagacttgaactgaacctgagaagatgaatagaaccagttcattgatgaaagggtcaacacaggagagtctatacaagggaagagtatcacagtaaaagtggttgatgtgattcaatccacagaaaactaacctaaatacaagccctacatgaatcatggaatgcagatttccagctatgaaggcgcctgtggtcatctgaatgcagagtttcttggacatcatgatgtggtactgcagtgggttgcagatggccacatagcggtcataggccactgctgccagaagaaagcagtctgcagtttccacagtgcaaagaaaataaaactgtactgcacattcatagagggaaatccttttgccctcagaaaagaagttctctaacattttgggggtaatagcacaggcacagcaagaatccacaagagccagatttcccagaaagatgtacattggtgtgtgaagccgacagtgtgtaaatatcagtgccaccaaactaatattccccaccacggtgatcagatagatggcaaagaacaccacaaacagcagagtcttcagctcagggtgatctgtaaatcctgtgaggataaactcatttttcatggtatgattttcttcaaccattcctgacctctctgaaaaaaattgtagaggaataaggcactaattaataatatgccacaattattgacgtctctttggcttaaaagaaggagagcatcttccacaatgtctcctcatcttgcctggaatttggtgcatgcccaattcactgcgagaatgagtctcctgaggctactacttttgtggctattggttgaacatgtttctatcatattttgaaaaaatatctgattgggtgcacaaggatgacttttgaggtcttgagagaaatattgagagcacagaacttctccatatagtataggtaaagctgattcgtaatttaagtgtcagtaattggtaccagtgttcccgatttcaatgtttgtatatgtagtggttaacaatgtgtttaaaagactatttttgtatgctaatgttaacagcagcattaccttcaataaccaaaacgtaaaaacaacccaaatgttcatggacaggtgaatggataaataaattgtggtggaatattactcagtcttaaaaaggattgaaattctcatacatgttacaacatggattaaccttgaggacataaggctgattgaaataagccagacacaaaaggacaaatattgtatgattccaattacatgagaaagctagagtagtcgaacttacagagacagaaagttgaatggtagttgccaggggaaggggtctactgggagctattgtttaatgggtacagtgtttctgtttaggaagatgaaaatgttctagagataaatgatggtgatcattccacaacaatattaatgcacttaatgctactgaactgtacacttaaatatgactaaaatgataaaagttatgttgtgtataatttaccccaataaaaatatttttaaaatactattttcatctgcctatttcagcaaattactatctccaatactagtggaatatacacttaaaaataagatgctctgggggaaaagggaatatttataagatatttatattcctgggagttggggagtaaaagtgttatggatggaagctgggagaaaaaacaaaacactgcatttaaaaagtctggtgagcacagtggcttatgcctgtaatcccagcacttcaggaggctgaggagggagcatcacttgaatccaggagttccagaccagcctgggcaacataatgaggccctgtctcttaaaaaaaaaaataaagtatataaaattaccagggcattgtgacatgctcctgtagtgccagctactggggaggctgaggtgagaggattcattgagcctgagagatgggggctgcagtgagccataatagcatcactgcactccagcctgggtgacacagcgagaccctgtctcaaaaaaaccaaaccaaaaccaaaaagcctcctatgttactagtgatactatgagtaaaactacttatgtgcataaagaaattaatgttattaaaagcaattggagaaatcctgagttaaaaatatattcggttgtctaactacgtatcaaaaaattatgaataaaatgtcaaactgggagattatctgcagtaaatttgataaagtttctgtacctttgctataagatctcatacaaatgagtaggaataattactagaaaataggtaaagcccaggaatagaaaaatctcaaagaaaaaaacatttttaagtaaattaaaaatgtttgattttattactaatcagagaaacaccattcagaaacacctatgaagctatatttattttgtatatgaaaataagattaaaaaactgataatattgagcgttatctagaatatagtaaaatggcaacctaattgcattcctggtaaatgtataaattggtgtaatcattagaaaataatttggtaatagattaaagaaactcttaaggttcataccttttgatcagtaaaaataaatgcatcaaaaagaaataactaaaacttcagaaaatatgtacatataatgatgttcattataatctc

SEQ ID NO: 316052 - DNA, 4001 bp, Homo sapiens
aatcaccttttctgtctcactggctccatataagtcacaaactcttccctgaatagatgtctgggattcagtgttactaagagttgagagtgaatgacacagaaacacactttttatttatttctatatattttttgaggcagagtctcactctgacaccaaagctagagtgcagtggcctgatctcagctcactgcaacatccacctccagggttcaagcgatcctcctgcttcagtctcctaggtagtcgagattataaggatgcaccatgcctggctaattttaaaaatatttttagtagagatggggtttcactatgttggccaggctagtttcaaactcctgacctcaggtgatctacctgccttggcctctggaagtgctaggattacaggcataagcccagattactgtgccaagcccagaaatacatttttaaaattatggcattatagaaagggaaaagcaatcaatacaggtactctgtttcatagaacttgagaatgtaaaatgactaatgactaacactaaatatgaaaatattattgattagagaatacatattctgcatgaataatttttcaagcaatctcttgaaagaactcaaaaaaagttagaatcaaattcagacagacaatttacttctcacagatgattctggttaaaaagggactaatgtttgagaacttggaatgtgcctgagttcgtaaaattatgctttaagattccagaaatttgccaacaatagtaaatgcacactaccgttatatgtactgacatttattcctagtatttgttggatttgctgaaaattgtaactaattacactctgacacaatctgagacttcatgaataatttagttcacttttgatgaacactagtagcttagattttgaagtatattttacaggaatttctcctttctgaacattttgaactcctatatcattatttttaaataatttaatattttatattcaaagtggccttgtaaactgcctcactatcccttgatttaaaataaagtattatcaagttgccagaggggatgacatttgtttcagaatgtgacaaaattttctcttcttcataatttttttcataatatttattacttccttatttcttaggctataaataaaaggatttaataaaggaataactaaagtataaaatatagcaacaggtatatctttatccccttcattaactgcacctggtcgagcatacatgaagagaagggaatcacagaatattgacacagagagaaagtgagatgcacaagtagataaagctttgcctcttccctccttggatttcattgtaaatattgtgaaaaggatgtagaaataagaaactaagactatagtaaagatttgaattgatcctgccaagataaataacaccaattcattgatataagggttaatacaagaaagtctatataatggaagaacatcacagaaaaaatgattgatttgatgagacccacagaaagttaacctcaacagaaactctacttcaatcatgggatgcaggttgccagctaggtaggctcctgcagtcatctgaatgcagagtgtcttggacatcatggtgtggtactgcagtgggttgcatatggccacatagcagtcataggccattgccgccagaagaaagcagtctgtagtttcagcaagacagagaaaataaaattgtgccatacattcatacagggtaatccttttgtcctcagaaaagaagttctctaacatcttgggagtaatagcagaggaacagcaggaatccatcagaactaggttgcctaaaaatatgtacattggtgtgtgaagacgttgctctatataaatcaatgccaccaaaccaatgttccccaccatggtgatcagatagatggcaaagaacaccacaaacagaacagtcttcagctttggatgatatgtaaatcctgtgaggatgaactcagctatcaaggagtgattctccttattcatctccaccttgtctgttgagagatgaatgaggggttataatattgtaattgattgtaattgagagcatattattgttccttcaatttttttcctttttacaacaagtagaggaatttctttgtcatatttcccctgctgtttctaaatacatcctcacatacttctaggggacatttgttctcctaaagtgtcagtgtctgtgacctcaagctctgacccttaggattcacaaggatattttgataattccagggaagatgtttaaagtggaaatggttcatctttataaatttatgcaaggatagcataaaaaactaggggacccctatctggttcattgttctcaaataatttcactgtcagttttgtattgaagatcctccttaaaacaaatttataatatatatatatatgtcatataatatagaatatatatattatatggggctatatatatatatatacacacacacacacgcacacacatctctctccaagaaaataatttctatatattcttccagtagattgaatgttttaaaaaagcatataacagatatgttaaatttatatcttaggaactgtatgaaattcaccaagaactgaggaggaaaatatttatctttaaagaaaattatcttggagatttaaagaaataaacatccgtagattatcacttgtctcatccctttccccagtgtcacacccatttcataaacattgactctatccattctattattcctgttgattttctcttacatgcctaaatccttcctccttttgataaggaatactttttatataatgctacttaaagttttaactaattgccccagtccacacagatttccattttccgaacggtagatgctctcttatatactccacacaattcagaatttcttgcctatatatacattgctttttaaaaatgtcagtctattcaattttcttatattgtaagcattttgaggttagttgtgatttatacttctgtgaaaagagctgtaaaatactatgggggaaaaggcagtattaatttcagtattagctccaccctgatgacctggaatgagtaaagttgctttatgaattctactaatgatccttaatgattctttggtttctgcagactattagctttaaaggaaagtctacaaagaaatatataaaatcattacataaaattttaggtgtctttcttttatctaaattgactcttttctaccatttttctgtttcttcagaaaattatataagattttctgaagtatactatagcagattaaaagctactaagtaaaagcaagctcacctttatactatagccttctaacacttaggaaaaaggagaaaatcctttatatcttaataggatttttgaagtcaaattttgttttgctttaaaaggctatttcctttccctgcatagtgattcattaggacatactgactgataattcaaatcatataagttctatggtcaaaatagacatgtttttatattcaaaatattaaaacaaaaacatgggctgactattttattaattcgttttaaaataataaatgtaagccatgtagtcagttaagttagcaataactttctatgtacatgcctaaattatttaacagaatttctttgtaactttacttatgtgttttgaaattctgttacaatcagaaagtcagacaaattgcagtattgtgtctcatcctagttcttcatagcattcaattttgaaaagtgctagaaagattagaaaaaagctgaaatttaagaacaataaaagatactaaataattcagaggtactaaataattcagagctttatggttgctaaaattagaagtaaaaataagttagcacgcttctcttacctagattttactgagaagagctttgtaacagctttatgatgtggttttcataaaattaaagaatataaaccttggcctctaaaacatttgggattaaaagaatgaaaatctaggagact

SEQ ID NO: 316053 - DNA, 4001 bp, Homo sapiens
agtatattaaattaaaatatttataaatatcagaaacaaatactaagactatcaacccacagaagaattatttgccacaaatagttgtgatgtcttttctctgtaaacaatgatataaataagaaataaaacagacaaaacaaaaatgacaattcataaaagtaaaaatggtcaataaacacataaaatattggtacagcttaccattactcaaaaataaaacaatgtcattattaatatgttttaaaatgtttaatgagtgttaatatgtaaactgtagttatatataatacatagccaataacatggttgatgccttcaagaatgaaaaggaacttaattatgcttctggctaaagtagaccttaatctactctgtccaatttgttataagtcacaattaattattctgcaaaatagaatattttgtaggtgagcctctttgcatgtgtgtatgtgtgtgtctgtgtctgtatatgtctgtgtatgtgtgtgtgtgttccttttcattttttttcattcttgcaatcttatctaaataaaacttcattaccttaaatataaattactgcaattagtttgcttctagtcttttccactctaaagtaatccacatgtgtctctcaggtcagttttctgaaagaaaactatcatttcacttttctgccaggaaattttaaatgtttcaaacacgctacataggattggatataatgtcttccattaactaggaaacattaatcaaagaagactcttctacacatttaaacatttaactttcatgctatgttgattaattgaggtttaggataatactctctgacaattccatgagagtcatgaaaggtagtaataacagttaccagtgagtttccccgattcattctggttgtgggatttggataaagatttgtgaaacaattttgaaattccattgatatattttttaaacaaacatagcctaatgatttataagcttacattttgtgtaaaatcacatattaatttttctatgttccctctttatgaaagcattttaataaattaaaaataaatttgctatagagcaagtttgtttaagaatgttataattcctcataatttttttaagaacatttatgacctccttatttctcagactataaataaaagggtttagtaatgggattactattgcataaaatattgccactggtgtatctttatctccttcttcagatggtccaatatacatgagaagacaaatgtaaaatattgagacagagagaaagtgggatgcacaggtagaaaatgctttacctcttccctccttggatttcattttgaaaacagtcaaaaggatgcagagataagagatcaagacagtagcaatggtaaagatttgaattggtattgaaaagatatatatcattagttcattaatagaaggatctgtacaggagagtctatacagtggaagaatatcacagaaaaagtggtgaattttattagacctgcagaaagttaaccttaataaaagccctacatgaatcatggaatgcaggtttccagctttgaaggcccctgtggtcatccgaatgcagagcgtcttggacatcatggtgtggtactgcagtgggtggcatatggccacatagcggtcataggccattgtcgccagaagaaagcagtctgtggtttcagcaagacagagaaaataaaattgtgccatacattcatacagggaaataattctatcctcagaaaagaaattctctaacatcttgggggtaacagcacaggaacagcaggaatccatcagagccaggttgcccagaaagatgtacattggtgtgagaagacgacgctctacataaattaatgccaccagaccaagattccccaccatggtgaccagatagatggcagagaacaccacaaacagaagcgtcttcagctctggataatttgtaaatcctatgaggatgaattcagctgctaaggagtgattttccctagccattcctggcttctcttctgagacataaattgtaaagaaatgtaagattccaaagcagaatgtttctaattctcaccctctaatttccctgtatacaaaagggaagaaagtcttcttcaaattatcctgtgccatctcctaaacactagcacactcactgtgggtcaaatcaagtgagaaaaaatgtatcatggattgtgtacccagggcttgtctgaaaatatctgtgtgaattcctagggcaggaaagctttatctgcatgaattatcctatgccgatgtaaaatctgtggtcagtacatataattttccatttccaaaattaagacattttcttatggtatcttttcctccaggaaaaagtaaacaagttttaaatcgtatcctattggatcaatgtgacgcttaaaatgaattactcttaaggcattttaaatgtctacattttaaaaactgcacagaaacacagtgatttgaagaatgcttttgctagcttagtaaccctttccagataaggtcaccaattgcatattttatgagatatctactcatccttttagagaggataagaatatgaaacatctatgagtgttcttaatcattgtattggatatcatttttatgttcatttcaacatattctagatactattccaatcttggtatgacaaatttcccaaggagttattactcttaattgctcacttatcctaatactttctgtctctagttttaagagttttacatgcatgtccaacattgtaagatttggtggcaaaatctccactcataatgtgaatattcttcatggtaaatatctattttgtattcactcaaacatctctcatagaaagtaatgtcttcattttcagtgagttctatggaggttctccatttatttacttgagttttaaatttatttaaatttacaaactcattatctactctttactggctatatatttatttgagtttaatgatcaactaaatttattatatagttcttatagtttggcaactgtacattaaaatatttcaggtacagaaacaatttgagttttaaagaataataaaattaactttcttttcttttagaagtttctaaaagtctttagccttagcatactccaaacagacaattttggagaagagcctacgatagttaattcaaagcacattttttttttttttgagacagagtttcaagcacttctcctgcctcagcctcccgagtagctgggattacaggcatgagccaccatgcctggctaattttgtatttttagtagagacggggtttcaccatgttggtcaggctggtctcgaactcctgacctcaggcgatccgcccgcctcggcctcccaaaatgctgggattacaggcatgagtcacctcgcccggccagtgaattactttgaaaacattttggttaggttttctctgtttcttacttttgtttttctattgactcacataatatgatgaggttttctggagttttatcactagaggcttgtaatcaaatgaatacaataaaatgtcctttatattttaggtctatacctcttttaaaaaatctttcagaattatatttttaaaaaaactttgtaaaagtataaaatgctgctctttatcattattttagtaacatctaatggaaaatcaactgaaaatatttatcaggtggactgtggaaaaatggattttattatcaataattattttatatagatcatatttcagaatataatgagtaaaatctcattttctcttcaccaatgtaaaatataatttttgaacttaatcaaaaattaatttgcctatagatcgcagaattactgtacaaggacatcatcagccttatctgtgtatttgctgataaaattatggtacttttgaacaaagaataggtcagacttatccacttactatgtctccttatggctttctataatggcttcactttagagacaaagagaattattaagtggctaaaatttaaa

SEQ ID NO: 316054 - DNA, 4001 bp, Homo sapiens
ccataactaggcttctcaactgcaagggggaagtgagcaggaaacttcaaatgggacctgaagaggaaataatgataataatgtaaattgctactaatattaaaagggggagggtattttttctttctttttattattttattttattttattttatttatttattttttttgagtcggagtctcgcactgtcgccccggctagattgcaatggcgcgatctcggctcactgcaacctctgcctccggggttcaagcgattctcctgcctcagcctccggagtagctggaattacaggcgcgccgccacgcccggctaattttttttgtttttagtagagacgggttttcaccatgttggcgaggctggtctcgaactcctgacttcgtgatctgcccgcctcggcctcccaaagtactgggattacagaggtgagccaccgcgcccggcctctttctgtttttaaacaaaacttccattacaaacatcggaggctgcaaggcacaaactggggcaggagtatgcacagtcgcccaggatgacaagtggcaggttttttgttgatggtggtggtgttctgaaacaccaaactttaaaatgaactgttacttagagaattactgtaatcggagcggacgtgctaacgctttttcaccccggcacaaagcacgccccttctgcctccctttcccagtcattcttcaggcgtgcgggaaaccgcggacaagcagagcacggggaccagcacgatcctcctgccaccactccagtctctgcaggtgccagcatagaagaaaaccagggctctcgcctccctccccgccactgcggtgcggtcccggggtggagccacggcgcgccccatcctgagaaccccacctggaggggagcagggacgcaggaagggcaccgttgggaggcatcactgggttcgctgaaggcacaatcgcgcgcgcacacacatacacagacacacatacacacacgcacgcacacacacacacacacacacagcggcgcgcggtggcgcgggcggctggcgcgttacctgttctgccagccctggaggaggttggtgtatttgctgagcacgccctcgagcgccggctccctcctgcggccgcctcccccggacgggctagcggccacagagcccgggctgctgcggcttcccccgccgccgagcccggccgccgccgaccggctggagaccccccggcccgccagagagcaggagggcgaggagcccgccgaggtagcacggctgctgctgcggctgctgctgttgctacccccgccgccgtctgtgccctggactgccctctccatggtccgtgggcgcccgggacgcgggtgcccgccgcggtggcggccccggcacggcggctgctgctgctgctacagctccggacgcccgggccgcgcgtgcctgctccaaatccccgggaaatgcctgactcatacaggaggaagaggaggaggaggcgaaggagagctgggaaggaagccaacggggctggatgcagctgcggccgcccctcctcccgccgcggccagggcccggcccctccctccgcactagtttcccgggcaagttcggagcgggtggccggctaggcgagccctcttcgggttcctccttctcttccttcgtgtccctgcggcctctcaggccctcgggacactctaggaggccgatctgcagggtgggcacgccctaaatccacgccaagtcacccacgcattccttctgccaccctctcttggatccgaaggggcgaaagggaatctctgcacgtcactccccaccccttatccacctcgggacctggagggaggggcagccccacccacccggtccacccggatatggacccgcccggcctgacaggctcacacgcacactccctctctcggtcttccgcacacgatgctgcgccagacgctcctacacagtaacctggaaattatcaccggcggagcaaagtcacagctcagggaggccctccgcgttgtctggcggaggaggggagtggcaggtgatcctcacaggtaagctcgccgggcattttcatgcagcaggattatgataaatgcttaacagacacacggctgggctggggtgaggcgcgcgaactctcaggtttgtgcgagtgcttccttaaattgagtgtcctaggtcactcactggcctaaccctaatcccctgccctgaatggcacgcataaacctggcaagtcaaaacctatccattgctaccacactgcacgtgcacctaggagcagaggctctgaaaccgggaaaactgctccagaggcaagggaaattaacagatatttacaaacattgaaggattctctgtgttggctgtaacttctgcgcccctcttcctacctaaagatactctttctatcccactaatattttttgtgaatatagatatccattgtaatctgaagtatcaaaaattacctagaaaaaagctttgaggaactcagactctctctctcacacacacacagacaaaacaaaaggtgatagatgataggtgatctccgtccaaaggatctacaaacccatcaagcagataaatacttcaagagttaaaaaaaattactaaatggaaaagtcagctctcaaagggacagttccccgagcccaacccctttctagcttcacatccttccaggaagatttcatgggtggtttagctctagagatgcacggagaagcttctggagttgaagagaagtggttgtgcccctgagtaaattacaattccaggtgcctacatagtgttaaaaaaaaaaaaatctgaaaagagcttgcctggaccaaatttgaagccattcagagctgaattctaacctatgaccttgatcaaattacctcttttagccttagttttctcactgcaaaatgggacaaatgataccggctgtaataaactatgcaagaatgttcatttgttcaaaatatttactgccgcttcctatggaaagagtatccttcctccacatggaccttaggcttggccatggaattgctttgagcaatggaatgtgaacagaagtaatgaatgccccttccaaacataagctttaagagcagtcatatggttccaccatctttctcttttccttatcccaggagagcagcatgtcccggataaggactctccttaagcttgtgtcctggagtgagaaggtgtggaatacagcagatcctaagccagttagtgttggccatgtaacatgcacaaaatgtttgtttgaagccattgagattttagcattattttttaccacagcatagctttgcctaagctaacttactgatcatatatgagtgttcattgagtcctgcattgacatacagactgaaggtgggaaggtaggtgcatactggactataaatgtcagcattatgtaccaaaacaacatgccttttattggagactgccaccttaagctcctgctaaaagaggagaagtgtcattttatttcatattacctaacctatgccaccattactccaccttatgcagccaacctaagactgaatgagctagcacaacaaattctcaccttggactaaaaaattagacccttgagatagaccagttcaagtggggaaggaactaagctaaaaggaatagtcaaggccaggatggggcaggagcaagccagccgtatgggatcaaaaatgtccaagaggtgagtggagcagatgtgctgaaagtagaggctatatcatgaaagagtgatgaagcacatgctgttcctcctgctggtgacactgttccctgctctcttcacccggtttgtgtttctcacccatggagttatggattacaagtcacttcttccagaaagctttccttgacctaccgtagtatagcaaatagggaaaaggtacctgcagaattatgtttggagaggaaaaagtctttatgtttgaaaaacaatttggaaaatacataataagttggcaaaaagtat

SEQ ID NO: 316055 - DNA, 4001 bp, Homo sapiens
tgaacccaggaggtggaggtggtagtgagccgagatcgcgccaccacactccagcctgggtgacagagccagactctgcctcaaaaaaaaaaaaaaaattataatcttctatacttcacttctatatgttaatatagtcatgcatatttcatacatatgaatattattcatgataaatgtatatccctcacaaaatcttggctttaatcccttccaagtttcacaaaaatttcacaagcacaaataagcacaaaggctaaaaaggactacagttaggcacataggagtcaatcaaaacttaagaattcatccctttagttccaatacgatgggatgtgctggtttgtttcattcattcttaaggttctggatagttctttctccctacacttcatatatgaaaaaacaaaaacaaaacttgttgcctctccaggactctcctcctgttccttaagttgttcattcatattagtgaaaattaacaaatatagactttctcatcaacacagagagcattgaagtggcctgagcaacgcaaactgaacatctccaggctcaggtttagtttatcagaggcattaggatctctacctttgtccttgcattccaattacttatgtacattcccctttccaagtcacaaataccttcagggcaagaatcttttctgattctggagaagctctggacaagtaagttttgagcaccagtatttgctaccctctcgagaaagctgagttaaacagttcctgccctcgcagtctatcagagaaagctggcttgtaaataaattgcaacataggcaaaagcagaagtgagtacagaattaaatctgaggaagcattaactctctgactgtagaggaagttcagggatacatttctgtgttcctcaaaaggccttccataaatacctgttgaatgaacaaatgaatggattaaatcttttaggcgaggtcccagatccaaacgagatgtatcagtagcttctggaagccagtgaaaaaacttttatctttcaacaattgcgggatgcagcctccagggcatattcacccctacctccacctcgggaaataattttggagaaaggagcatacctgtactgccagccttttgcactgccaccgcggctgctgctgctgctactgattccacctccacagctgctgttcttgttcggggtcaccgctgtggcctggccctccagctttccttcgctctccgagactttcattgtggacactggttcacccccctgcatcttaacgccaaagtccacttgcccttcttgagcgggagagaacaattctgtagttctgtaggtgactttttttttttaagatttgatctgaatatgataccggttgctaaatcacacggcggctggggcgggactgtcaaatggtccagaaaaggaagatacacattcccacagaagttaaacttttgagagggcaggggaagcaacgaggacagatatccttcacatgtatctctctcctttccggcaaaagcaaggaggaaaaagcatccggcgagaagacttaagtgacatactcaaaagagaaggagtgtggggaggtcgcagattctgtagccaagacggctgggaaaaggacggagcgccacggacaggggacccgcggcctaacctcggggctgacccgccgcgctccctcgtctcctccgcaggtcctcaggcagtgcgtccagtcaagcccgctcggcagttcccgccgcagcccccgagatacagccagggccggcgcgcgcagccggggaggagggtcggggaatgaggccgccgggggcgggacgccggctcccggggccgcctctcccagggccagaggcgagccactcgggacaacttcctcttatgcccctggcccgggccctcgactgggttcccaggagccggtgagtctctcgcgctatctccagacccaagcgcgaatgccagggccgcggccgccgccccacccacagccccacagccccacagccccacagcgggtcagccaccccccgccccctgctcccttcccgccttcccttccggagtagcgtgagctcacttccctcacagccgaagcgtctggcgccatcttgggtcagggcggcgggtccctgaaggaggcggaggctctgggagctggtagctgggcgactggctgatgggcgagggagggcgagggagggcgccgcaacggaacgaggaacccggacagtgaaggaggaagaaacaaaggagccagcagcactagagagttcccttctggtgtgtgagtgcccgccttccttttttttttttttttttttgagacggagtctcgctctgtcgcccaggctggagtgcagtggcgcgatctcggctcactgcaagctccgcctcccggattcacgccattctcctgcctcagcctcccaagtagctgggactacaggcacccgccactacgcccggctagttttttgtatttttagtagagacggggtttcaccgttttagccgggatggtctcgatctcctgacctcgtgatccgcccgcctcggcctcccaaagtgctgggattacaggcgtgagccaccgcgcccggccgagtgcccgccttcctaaccacgtcctagccttccatttgaggggccgttccaggcattttaggaagaaagcttacaaaaataagaaagtacaagaacgaagcaaacatctgtacgttttagttacttggggtggggggggggcaagcatgacattggagtaaagccaatcattattataaattaaaaagaagctgtcatggaaattagagatctcagaacagagctaggtactcttccagaccccagacaaatctttcaccttgtttaggccttggttttggatttgtaaaacaagagtgcatgggtagatttctaaagtctctcctaattgctaattttagtttataataacatgacttgaggctgggcacagtggctcacgcctgtaatcccagcactttgggaggccgaggtgggcggatcacttgaggtcaggagttcgagaccagcctggccaacatggtgaaacccattctcaactaaaaatacaaaaattaaccgggcatggtggtgcgtgcccgtaatcccagctacttaagaggctgagacagaagaatcacttgagcctgggaggcggacgttgcagtgagcctgaggaaggagagagaccctctcatattgttttatactcagtacctgttttaagaaaaaaagaaacagcaaggaagtaaaaccaaagacaggcagcccagcgccaggccggaaaccaggcctgggcctgcctggcctaaactcagtagttaaaaatcaactcataacttagaaaccgatgttattcatggattccagacattgtgcagcagaacattgtgaaactccctgccctgttctgtttctctctgaccaccggtacatgcagcccctgtcatgtaccgcttgtttgctcaaatcaatcatgaccctttcatgtgaaatctttagtgtcgtgagcccttaaaagggacagaaattgtgcacttggggagctcagattttgaggcagtagcttgctgatgctcccagctggataaagcccttccttctacaactcggtgtctgagaggttttgtctgcggctcatcctactaaaagctgagattgcgccactgcactccagcctggacaacaagagcaagactcagtctcaacgaaagaaagaaaaaaacaaaaaccggccgggcatggtggctcactcctgtaatcccagcacttggggaggctgaggtgggcagatcacgaggttaggagatcgagaccatcctggctaacacggtgaaaccccatctctactaaaaatacaaaaaattagccgggtgtggtggcgggcgcctgtggtcccagttactcgggaggctgaggcaggagaatggcatgaacctgggaggcggagcttgcagtgagccgagattatgcca

SEQ ID NO: 316056 - DNA, 4001 bp, Homo sapiens
cagttcttgcaggacaatctctcttctggctgctatttttgattcccatcagtggtggttttttgttgctgttttttttttttttttttttttttttgagatggagtctcactctgttaacaggctggtgcgatcttggctcactgcaacctctgcctcccaggttcaagtgattctcctgcctcagcctcccaagcagcagggactacaggcgcccaccactacccccagctaatttttggatttttagtagagagagggtttcaccatgttggccagactcttctccaactcttgacctctggtcatccaagtggtgactttaaatgaagtcctctttactgcttagtgtactcccttaatcaccttacaatttgctttgatacctccaatctctctcttctctatttcacccataatactgttataaagttagttatccccaataccacttttgtcatataaaaagaaaattacaaatctttcacagttctttattacttatagcacaaatcccacaatatggtttcaaactattcctcagatcttagcttctgtcacttccttatataagcctgataacatagaaactggagatgggaaggatgcaaatgaccagaaagaaaccctacaggagataaaccttcaaagggtaaagaattttttatctttccaagcatcctccaaaaatatgcttttattcttccaactaacacacactacacaatcgtttttttaagaaacatccttaatcttaaaaaaaaaaacttttagaaaacttgtcctttaatataatgcttttcagactctcactttatgctatttaagaaacacaaagaacatgtttctaataagatcaaataaactaatttttctccttgtgatgccctcacatttctttttctttgtactttagtcatagcaccaagaaaatatttgtactgtaattaaaagtttgaacaaaactactcaaattttggcatgcaaacaacttcaaattttacataaaagcccttcattctgacataactgattcaattaaatatagctataataatggattttctcttaaagctttttttgttcaaggaattcaagtctttgttcttaagtttctttccacgtttagataactggcttgctccgactcctctgtgaggagaagatcgtgattactgctcttttcatttcaggttcacaaccttgaatggcatgttggcaataaaaagaagacaataaaaaactaccgattttcttgattttgtgttatttctctattttattttgtgtacattttcttattggtagctgcacctccttcttactctagtagaaatgaaatgtttacaaaagagtcaaaaaataggccgggcgtggtggctcacgcctgtaatcccagcactttggaaggttgaggcgggcggatctcgaggtcaggagttcaagaccagcctggccaatatggtgaaaccctgtctctactaaaaatacaaaaattagctgggcgtggtggcacatgcctataatcccagctacttgggaggctgaggcaggagaatcgcttgaacctgggaggtggaagttgcagtgagctgagattgcaccactgcactccagcctgggcgacagagtgagactctgtctcaaaaaaaaaaaaaaaaaaaaagaaagaaaagaaaaggaaacgtttacaaaagaatatatatgtaatatataaatatatacattatatttataaaatatatattctatataaaatatatgatatgatatataaatatataaattatatttacgtatatgaaatatattttaatatatattcttttatatacaaacatgtcatttataaagcatgtcaaacatgtatatttatttctgtaagctagtttccattacctctgttgttgttacatctactgagaggacttttcctgagctccacagtgtcagtgtcacagccaggatgaaatgtgcacttgccaatctccagtccagcatctaagggttacatatgtcatagttagcattgattcgtttggaatgtaaagacaaaaaacagaagttcctaaaaggactgttagaggcaaatggtaagccaaattattcggcttcagtatatttgagtgcatctctacaaaacgtaaataatacttaatagaagctgtccatctcccagaacgaattctgtcaaggtttcttttccatggagaccctggattagggttgtacagctataataataatttaattcaaactgacccacaatatgagaaatgcaggtaatgtaactatttttttactgtcagacctagagattacaacattatatatgtaactgaggagaaatttgtaacagtggtaaggcattagagcgtaagtcctgattggtctgtggtgaaccagggagactgtagtgtctaaaaatatttaaattcaaaatttcaaaacacccaccatccattaggagaatttctttatgtccttgtgtcatgtcaggatttcataagcaagattcaaaattgtttttaaaaaactatgtttttatatcaaaattaaaaaattacatattaaatacaataaaaaaagacaaattacttaatggaagatatattgaatatatacatgatatgtacaatatatacataaaagaaagatcagcatttggaaaatgtaaatgaaccctttaaatataactttaaagatagacacaaattaaataaaaatgggccaaagttatgaacacacatttcatagaaaagaggagaactgaagggacaaaaccttccacaatacatacactttctttaattcaaataaaaatagaagtaaaatgccattttacacacattagattggcaaaaagttggtccaccttgcaatgttagaatggttttaggaaaaaaaattctggtggagttgaaaatgaatctaatcatttggagaaaattggatgctttacaaaaaagttgaaaatgcttatctcttacctaggacacatttatttcacttctaggtatgtgtatactactgagaaactgtcaatgtttatatgcaacatgtatctgaaagttcatagcctcatggtatatagtagccaaaaattggaatcaacctagtgccccattcaagagaaaatagatttattaattgagattttttcagactactgatttaaagtaaatgacttaaatacatatttactgttaaaacaaataacttaaatgtatgtttgtctgtatgcatggatttcaaaaaaacagttttgtggagaaacggaaagtatagaacaatacatgacattataccatttactgaaattgtaaatgcccaaagcaatatcatatattttggaatatatacatataaaatataaaccaatagaacttgattcatgattatgattacctctgcagagatgaagaagtgagtaaacttatagaaaaaacataagggaatcagtttttaatctatatgtattttaaagcaaatatgtaaaaatcttacacatgttaattctgggtagtgagcacaaagatgtgtttgacgttttagattaaaaagccactatccagccaactgaagctcatctatggcctacatcaggctgacctgctgctagtttgactactggaagttacaaaactgtaggtaaaatggggcattgctctactcagggaagatcgtggagtatgagctagaacaaagtaggcatgaacacaagctttgccacttagtacatggcaatgggaaagccttccaacttcatcctttatgaatgacaagtctcaagaaactctattttcttaaaaaaaagtcatttggaaaacctgctgggggtaaagagcaaatgggtgctagaatggaatctgtaagattggatttgagtcatgtttttgctttagtatcagtgtaaccttgaataagtatcattttaccctacttaagcttcatttctactttttgtgaaatgagaagtaattcccatctcaaaaaagctt

SEQ ID NO: 316057 - DNA, 4001 bp, Homo sapiens
tcccttttattcacttactcattcattcattaactatttctgaggcatcctatacaccaagcaccctgcaaggtgttaggaatgcagccatcaacattccagcagtccctactctcatgaagctgagagtctatgaaagataaacatttaacaaatagccacacaaatacgtagaaattgtcacattgtagtaaatgatataaagaaaaatacgaaggtcttattgaggacttaactgatgagatcagaggcttccttgagaaaatggtattaagctaagacccaaagaatagattaagatttcccaaagcagagtagcttccctaagtaggaccaagatagtctcagcattctaagctctcaagcactatgctctgtggcagaaccagtcagactaagacatatgagctccccaggcagggtaataacttggcacaccttggaattatttgtcatatatatttagaggagagaatgaaccctgagaacagcacagctaaatccaccactgggtaaaacaaaagccctgatgttacagaactcacagccttagcaaatagtttagcaaccagctgtgtctacttgaccatgcccttgggattttcaccgccaagcagcttaccagccagataggatactaagacttctggtaaatataattttctcagtctcattaaattttcagtaatgttttagcaatcctgacatcttggtacccaagctacggcccatctcctttactccttaatgcagctctgcataaatactaaccgcatttcccaaaaggtccctacaaagggatgaaatgaatgaaaagcttggtgaagatgtataattgcttagtttataacattaaattcctcaggcaatggtgaattttaagttgacattctgatcttaactttaccttgaattctcttctagatgacatgtaaaagctgaaatgtattagaataaagccaagactatattcattatgtatatattatagacatctgaaatcttgaaatacataaccatggtgttcaatggagaaaatcattgggcaatgacacagtattgcctcagaaattcaatgagaagcaaatggaatcctaagctttattctccacctcagagccattccatttctaatcctaactacaaatagcactcagaaaatccatcagtcagcacacattcttgcaaggcaacagaagtttcatttaccctttttaaatcagccactaatttaaaaaattgtactggtaataaacctgtgcatcttgaagaaccagagcaccatgctggagttggtaattcctgactttgctctcaccagcactgtccagtagaattgtctacaatgatggaaatgctatctgtgctgcccaatacagtggctgttgagcacttgaactgtggctaatgtgactgatgaactgaattttttaccttattcaattttaattttaatatttattaattaccacattgggcaacacagcacccatttacatttgtaacaatgtgacacctagacctgttactatttgcataacaacgtagaaactcctggggcaatttcacccgacaacctacctctcaactctaccaatgtacaagtgagaaacatgacttcttatattttctaatacctggctgtccagtctctccaggttctcctttctgcccgggtacaggtgaacaacaatcacaacaattcaaaaagaaatcagctgggtcaagagtgaagttttcaaagggagagagagtggcagtgccaaagacagaatccaaggccgagggtttggtaattggttctgccatttcagccatttctgtgaagagggtttcttcttcttctggaggtgggccactggatggctttagaccctttggcatctctctttcctcagatttcttcgtaaatttggtatgtggtgtggtctttgctattgtgttcataccagcaatagccaaaataattaaaatagcacaaagccaagaaaacatccacatatttgaagctggaagaaagatataataggaaaatatatacatattatgtgaggtccaaatgaaaagactaagtcatataaacatatactcatataaaagaaatatatatgtatatgaatcataagaatgaatgatatgcataatatagaatgatatattttcaatatattttacatgtaaatgtgtacttgaatcactacagaatattttatgtacttatttattataaagaacactttacttccattcatctttctggttattttcttagtattatatattgttcccaactattcaaactatctggccaaatagcaaacatgatctacaataaatacaacatgactcaatagctcatataccctgtggaagataaatgtgtataatttcctcactgatttcactcagatttatagaaatcaaatacatttgtattagagggagatgaaaaatattgaactgagtagtttattccagcaaactcaattatttcaagaaaaaatatggtgaaatagtccttaaatctactaaggataatggtcctgttgtgagagcaattttttaaaatctattttaataagtgaagagagagacaattaaaaataataaatttgaatatatgctacattcttagattcttcacatggcatttaactctccacctctttgctttgtaatttggggagtttttctagaaattcatgtttattcttgtattattttaatggggcaaaatgtggttattctaaaaagagctttggcaatgtccaaagtgatatgatgtaaggtttctaatgaggtgaaattttgatagttcagagtattccattccaaatcaactcccagtagtctaaggggtgctaacagatagccagggttataaatccacatttcctgataggagaaggcagccataattaagataaatagtaagagagtaaatagaatggaaataaagagattaaaaaggtctactgtttatacagtccctactctgagtagatgccgtacattaatcaatccaatcaggtctcacaacagctctccattcccccttgagaactggaacatgacgatgatgctctctctcaccactcctattcaacatagtactgaaagtgctagccagagcaatcagacaagagaaagaaataaatggcattcaaataggaaaagaagaagtcaaactctctctctttgcagaaaatattattctatacctagaaaaccctaaagactgccaaaattctcctgggactgataaataatttcagcaaagtttcaggaaagaaggtcaatgtacaaaaacgagtagaatttctgtacaccaataacattcaagctgggagtcaaatcaagattgtaattccatttacaatggccacgaaaaaaaatacctaagagtacatctaaggaaggaagtaagagatctggagaactacaagaagaactacaaaacactgctgaaagaagtcagacatgacacaaataaatgaaaaaacattccatgctcatggattagaagaatcaatattgttaaagtggtcatactgcccaaagcaattgatagatgcaacactattcctttcaatctatcaatgtcacttttcatatgactagaaaaaactactctaaaattcatgtgggtccagaaaaagagccctaatagccaaagcaatcctaagcaaaaagaacaaagccaaaggcatcacattacctgatttcaaactatactgtaaggctacgataaccaaaacagcaaggtactggtacaaaaacagacacatagaccagtggaacaggatagagtatctagaaataaagccacacaactatgaccatctgatctttgataaagtcaacaaaaataagcgatgcagaaaggactccctattcagtaaattgtcctgtgatagctggctagccatatgaagaagaatgaaactggacccctacctttcactctatgcaaaaattaactcaagatggattacagattt

SEQ ID NO: 316058 - DNA, 4001 bp, Homo sapiens
ttgctgatacattaggcagggtgtgagaggacactgacagagaaaagccaagaatgcctcaataagcataaatgcactgaaattaagtaagttcaaagaacaatcatgacatctgtcaatttagaatcttaggtgtcactgaggaagaaaaagggctcctcttgctccaacaggcaaagacaccttagtggtaaacaagtagtatacacagagtatttgaccggaaatcagcggaactgggctcaggtgtgactccttcctgctttctaatcttcagcaagtctcctcttgccattttaacattacccacgccacctcactggattactgagaggaataaataaaatgtctaccaaagtacctggcaagcaacagtgttactaaaatcaatcctaatacattgaccccttctcttccttgtcaaacaacctagagaggtggaggtttggtattgccaataaacaactccttctggcctgatatacaacagcactcatcaaatatagtttgcattatacaattatgacctacttcttttttttttttttttttttttttgagacagcgtctagctctgtcgcccaggctggagtgcagtggcgtgatctcagctcactgcaatctctgccttccaggttcaagagattctcctgcctcagcctcctgagtggctgggattacaggcacaccaccacacctggctaatttgtgtattttttagtaaagacggggcttcatcatgttggtcaggctggtctcgtattcctgacctcgtgatccgcccttttaggaataaatgtaaagtttagtagtcattgtaatgttttcttcaaaagtgcacagggatatattatgtatatgtgttacgtaaatgtaaactaaatgttatatatcattgctgaaccaagtaaagctcataatttccgtgcaaaagtggaacattacatctaaaaaggatcttatatcatctctactccaatcctttcttagaagaggaaataaggcccaaagaatgtaaatatccagttgccagaggtaatcaacaactcaagattccgatcccagatcttctctcgaaagtgctttttcactacaatgcatttcttctctactaagatattaaaatgcctagtaattaagtaagacccaatgtaatcggttttaccaaaacaggcactagcactgctttcaagacaaaaatgccttttatctgcatttcgcttcaaggcatacataggcctcacactgataaacctgcctactgacaccatttctttcacaacgaaaaaactggtactcacataagtaatttgttcctgggctttggagacagacaagctcttcattatttcccaggtgtatgattttagtcaagatgcccaactctctgtacctcagtttaaagattaataaaatggaataacatgtaaactcctagagttgacaattccacttagtgcaatagctggcacataacttcccaataataaaaggtgatgttattactattactaaaaatcatcgtcgttaataatgttataagcctggcaaacagaagactagaactcaatccctgccttccagggcttggtcctttcagcaacacaatttagggtattttaaggcgtctggggtgaggaagaagcggaatgtacctgcagccaggaattaacaagctgaccgtcgccctgggctcaaggtcactcggtgaagcgaaattctacgggaactgttcgtccgtcaccaggaagggaggtcgaggaggctaagctgctctcgcctccccaccccgcctttcccgagggccgggaggctgctacctagcacctgctgcagccttcagcgggctatttaaggcgttaaagcagacgataagaagcagggaaactttccccgctggcacctagcttgcagacccggccacgtttagttgcaggcgcctggaatactccgcggtcccagacgtgacgtagcagcgcgggcgagccccacattctattggtcgctgccgcccaataggaggagcggtgcgcgaccccgctgagcaagctttcagtcttcccagtgtctccgcccctagttcagccatctccatggtgaccgctaccggttatccatttggccgcgcagggcggagttgcgtcattgcctatgcgccggaagggctagtccttgcccggcgcgacctgatgatgccgagcccaggccggttccggcgaagttaaaccctcggagctggcctcggactgctggggcgttaccccttcggccacccccgctgaccatggcagtgtttcatgacgaggtggaaatcgaggacttccaatatgacgaggactcggagacgtatttctatccctgcccatgtggagataacttctccatcaccaaggtaacttcagggtcccgcccggcggttcacccaagcaagcgcagtttggttccgcccgttccttccatcattgggtagcctttgctgcgctgtgtcacccacgccctctttcccgttgctgaatcttcctcctcccgcgtccccccaccccaactaatgccctgagctctctcggtaggcacgcagttctggccttagattaggtcagggagagggtggcggagagcctctgtctctctgcccgatccctgccttagggtcccaacctgggatatttctgtcgaggaggggactcgttttttgtttcccagggcttttggggcgaccgaagctcgcctgaccttcctaggtgtttcccctaagtgacgcttctaggggaaaatgatgtcggcatttctcgctgaaggccctggggttctcacccaccttggggggaaggcaagccaccaagagacttgcatctaggggtgggataggtttgggggaggagatggcgaagagaagctatcctgaccacatggtatttgatttcgttgtaggaagatttggagaatggggaagacgtggcaacgtgtcctagctgctctctcattataaaagtgatttatgacaaagtaagggatataattttaaaacgggggaagggtattgtaagtcagtggcaaggacttagatcagcttgtcagtgatgagtgcaggagaatgtttcattgtgctaggtaaagtgcggtatttttttaggcaggttttaaacaccattgataaacagccgaatagtaaattaaaacgtttaaagttcagattacgtaatttattttagctttagagataaatctagctttagtgaaaattattatttattaaatagaaagtatatagattattttagtggacaattttttatatttctcttctatttaatatgtaattaaaattgtttagagctgctagacttactttgaagggaacaattgtatggtatttcgtgctggcttatacacagaattctgcattatcttgtttgagatataattcctaggtgcagctttacaatttcattttagtctttagttgccctattatctttcacccaaggatgttgacaatagaaaaaaaaaatgttattactgcccactcctacccaaagttttgttcagtacttggaatggaatcttaggtaaggaccttaacactctcaaggatgaagtccaaaatgaatatagggaaagtggggatgaggcacagagcctcatgagagaagcgggctataatttagactataatttagaaatataatgattcattcttgtattaaaatgtgctctgcaacagaaagcaaacggtaaggaagatcaggagtgctggtctgggaggaagttgcagttttccatagggtgatcatggcaggccttactgagaaaggccttaataggtaaagatttgaaggaggtgagggagtgagccatgtacatatgagggtatgaggtaagagagtcgagcaaaggatcgttcagtgaaggggacctaagacaggaacatgcctgattttatcaaggaacaaaaaggaggccagtgtgaccagagcagagcaggatgagagtagcgtaag

SEQ ID NO: 316059 - DNA, 4001 bp, Homo sapiens
aacttccctaatttgggattcccaataaagtgtcttatttgaagaaatatttcgaaggaaataacccatctttaccttaaggcaccttctccttcaggatcaggggcagttatgtgaccagcatcacctgagagtccatagcccaaaacttctgcatagatccgggctcttctttgaacagcatgttcatattcttccagcaccagcacagctgcaccttctcccattacaaaaccatctctctttggatgaaatggtcgacatgccaacttgggatctgagtttgtgctcagagcccgggctctggaaaacccagcaagagataaagggctaatacaagaatctgtacctccagccaccatcacatcagcatcaccatgggctataaatctaaatgagtctcccacagcatgagctcctgtggtacaggctgtggatactgcatgatttgggcccttgagtttatatcgaatgctgacctggcctgctgccatattgaccagaatcttagggacaaaaaatgggctaactttattgtaaccttttgtctgaaaattcaaagcagtttcagaaacaacttcaagaggaatcattcccatgccaattgcaacaccagtagccacttgatcagcttctgactgaggatgccagccagaatccttcatggctaattctgcagccccaatggccatgatggtgggagaagacatggacttgatatctgatttggacacaaagttttgttcattgaactgaccttcatcactacctcttggcacataagcagcaacactgcaagggatactcttatactcttcaccaaccagtgaaacaattccactctctcctccgataagacgatcccaaaccaggtgagttccaacaccaagaggagtcactaagccaatgcctgtaatgacaactcgcctatgcaatctggatattggcacagttccgaaaaacttccttttacttcttaactgttggcataatcttgaacatagaagacgagtgcttgtaattttcaggaaattttgcaggcagttggacatgattaagattcagatgatcagaaacacattcctgtaaaagaccacaacacacctaggaggtattcttttaaatagcttaagggcctaaggaaaaacatccaaggtgttcctttgggtgcttgatatgagctgctaatgaacacagggaaaatgttacatactttcaatttataccttaacatcaaactatctgtttaaacttaccttcttttttagaccttaagtgccgtcagacatttgaagacaaataaatgaattgatgattcattcgagtcaccaaaacagtaattcaatgaaaaatataaaggcacctccagcctgatttgagctgcaggaagcatcctttgtcaggattactgataacttcttctaaatagcatttctggtgtcagtggcacagaaaacacatttcagggcatattcttttaagtaagtaagtgggctttatcaatcttcagtacttaaggataaccagccttttcaaaacgctacccagggccaagagccctagactgagcgtctggatacatgggttggcaatacactctgtgaccaagcttgcgatgggggaaggggacaagtctttccactcctctaaacttctccaattgaatcattggtggaaggaggggttacgactagtggatcacttcaagggtactacgaaggccaggggcgggagtaaaagagtgtagccattccctgtatcgcctctcaggcaccaccacacatgtacacagcccgaagaagcatggcgagagaaaaagaaatcaggccccaggtcctcggactcccctctcgaaattcaaccccgacttgatttgaatgtaaaggaggaaaggaggggcgaaggaggagggtagccagcgatacctgtaacggggctaccccggacacttctccacagtcgggggcgatgacgctctcgagcgcacgcgcacacgcacgtacgctcatgcgcgctcgcacgtacgctcatgcgctttcccacgcacgcgtcccgttcgactctctttccgccggttgactttaagccgcgtcaccttggctgaggtcagaccgtgggaggcggctgggtagctgtttgcgtgagcagagacgcccctctcggaacctcagtgactcgccgataatcgaggacctgccaataacgcgatgaggtagcattttcacccatcaaaaaggcatttttctttggcagtgataatgcccaaatattcccttttgtcggagaagggacaccatcgtattctactggaattgtaagaaagaattaaggaaattctctgcagtttcaaagttattgctatagctcgcaacgttattagtaattgtgagtaaagtggaattaaccaaaatggccaacatcaggaaatttgttgtgtatcttgtggtacatccaaatgccatgcagccgtttaaaataattctgcaggtgaatatttattaatgagatgttgcgactatttgttaggagacatagttacaaaacagtatatatccgttttttcaaaaataattctttaaaggtctgcaagatgtatactgattgtgatctttccctccttatttttgcttagctttatttaataaagcttttctacaataaacaaatgtttttgtaataaagtttttactttttaaaagttgtcaccaggctgttctgcctatggagtagtcattctttgttcctttactttcctaataaacttcctttcacttaaaaaaaaattatcaccagatttgagacagtgctcaaaaattgtctccattgtcacaatggagacatttgtttctaagtgtgaaaaattcattaactgtttgcttagagctgactgcaaaccgataaagggaaaatataacatgaaaatgtaaaaaagcaagaagtcgacaagatggtattcatcgaacatctgtttttcacatgctatcccaggcgtgagttttgtccttgctcttctttagaaaaatggttgagcatagaatcttcatctggaccttctagtcatatttatggttttttctgggcaatgcctcttgaagccattgtttccaagtagagtgctctgcattctttcctacccctacagaagaatgtgagtcaagcttagctttccaggttggtcctggatttaaatgagtttggaaatctattttgtttaaaataattcagcaaagctcagtttgaccttcgtcccaggcctaaccagtcacctctagttgatcctcattcagtgacaaagtagagtttcttgaagaattaaaacaaacacatgtggttataaagtaacacttgatgagtaagtacctaaacttgatctcttttcattgctgtctttaaaataatagtgtgaaaatacctacaatattttctctgaagctgaactcataagaaacatacagttttaatgtgctatttcttttgtaatatcacaaaatcgtcttggctaagaggtgacaaaatctttcagaaaaataaaaagaccatcatttttgtatctacctcttatcaccttttctttgatctggaaaagggtgggaaattttatgatatttaatggctttacatatttggtaccatatttcctgctacaattccatcgtgtcttcttgcaccaaaatcttcaaatgggctctgcttatcctaccctcctattaagacttcctaggtttgccttaaattctttgtaatctgattcaaaactatctttccaattatggctcccattctctattaaatgagcttgccacccagcaaactgattttctcactatacatgtcttgattgaccctaacttttctcatctctgtgcttttgctattttcaacaaccactcattttcttcctatcaatgcttgaagtttgaatgcaaaaatgagtagaggtatggctcttgctttcaagaagtttatggtctagtaaagggagacacccatagaaacaagta

SEQ ID NO: 316060 - DNA, 4001 bp, Homo sapiens
acccacagtgaaataaacactgacacccccaaggcagctaggaagtcttcagttggtctttgttataaaactaattttagggcaggatgctggcaaagcagataattcgccttcctccaatacacaggtgtctgctcatgtccgttggattgagcctgtatagctaaacattttgatttccaaggtcactgggttattgttgtccaacaaatactcccctcatccccagtccccagcctcctcccaatccctaggcttctgtgagaattacaatctatgtgcaagttttggtctctgccaactggtattcctggacccccttcaaatcttttcacacaccagcccaatttatcggatcacgtcaaggcactatttgagggcctccagtgatacttaaaattccaaaatctgtaccaaagctgagaagatccctaagatctggctcctcccttccctctctatccttgccagccttccttcaggtcctaaaacaaatcaagctcttcccttactcaaggccactgcatctctatatccctctgtaaggaaaaatcttcccgaggctcttaatcctcacttctcatgcttcagggctcaactgaaatgttatcgcctcagaaaaagaattttccttgaaatcaccctaagtagatctccaggttattctctatcagaacatcttgtttatctccttcatggcacttgccaaagcctcttcaaatttttttttttttttttttttttttgagtcagagtcagggtttgtcgcccaggctggagtgcagtggcgcgatctcagctcactgcaagctccgcctcccgggttcaaggattcttctgcctcagcctcccgagtagctgggattacaggcgcgcaccaccacacccaactaatttttgtatttttagtagagacggggtttcaccatattggccaggctggtctcgaacccccgacctcgtgatccgcccgcctcggcctcccaaagtggtgggattacaggcgtgagccaccacgcccagcccttcttacttctttttgtcttcttatttaatgtctacctccccgactggaaagtcagttggaaggagtcgtaagttgggtctcggttgctcagcgcggttcctgcagcttcacctggaggatccccagttcgccccagcacggatggaggaaaaacttaaagctccctatctatcccacaatcccagaaatcgatggctgtgcccacttcaagatcccatttctcacacagcctcggaaaggcctgtcccacacctgcactttctttctctacaagacacatgggccgctcctgtccacacatttgagaatcctgtacacaaatctctcctgagccccctcaagcctcaccccaccccacgccacctcacaggcgcgcgcctcaaaacccccttcccgtctcacacgcgctcctcgacacaagcgtcctacaagcccccagccccacaagcgccccacgaattcctatgagggctgcgctccccgagctcccgcggctccccacgttcccgtgtcccccgcctcccagcgccgcgcctcccccctccgcagcgcctgctctcaccgatcacctcctgcagctcgtaatcgtccctgttgatggaccagggcagggcgctcgagtcctcggacatgacggcggcagcggctcgcggtcctccctcaaactcgctgacctcgctcgtctcctcgccgcgcgtctccccacccccaacagccgccgccgccgccgccgcgcccccaccaatcgtctcggaacagccacgggtcggacggcgccggggcgcggggtcaccgcgcggcagagcagcgggggctcagagctccggcggacctcgcctcctgctcctccgagtccggcactgcccggcccagcccacgtcctgtcctcggcctccgcagcagcagcgacagaagctttgcctgggcccagcccctctgtcccgccctccaccccagccccacgcacgggccaaactttcccctcttcctccacctgccgacacgcagcgcgctgacgtcactgcgctggtcacgccccacctcgggcccgcctccggccgccatctccagtgtggctggatgtaaagtgagcaagctagaaacccgagaaggtaggagttcgcggtgaaagggaagaagtgcttaggtagaggttcatcgaaggcatcgaaaagccgtaggagagcctcaagtagcacagaggcagtagccacactaagcatggcgaccaaagggcagcaaagtagaaggggcagagccacttctagcgcctggggcacgctgctgtctccgtcgtcgcattcattggtttgtttgagaaggaatcagaaaagcaatgggtgtgggtagacgtcagtcataaattggtcccgcctccaggctcttagcgcgcttctccgtgttagggctgcagcccttcaagagctccgttaccgcgctcgtcttaccacttcctctggagtgacgtcacggcgtaaccgtcacaccctcgagacgtgcgaaaggctctacagggtgtggagaaaccctgagggagcggctgggtggggtagcctttgggtgtggaccactgccaactaggataaaaggccttgggccactggtcggagtgaaactggaagtttgcctggtgacatttttttcaaggcggacgttctctctaacgcttgtcgcggcgctgtctctcgcgggtccaccctgcactgggcgggttctgtccattcgcagctttagatctgaagctcaaataagcacctgccttgagggactcgggaggttgtctttcttccccccggacagggcttggggtattaaacaagtgagatcgacccacggatttgggggttgtctcacgggcgttggcttttgtcgcccccactgaacagttttctcagtttgactacgtacggccgttagagaaattagcgagctgaagactgaacacgcttggtaaattggattttaaaaaataatgagcatccaacagggatagggctaggtgcgaaactgttctaggttggacacctttcagtccaacggcagtctttaaggaagagaccttaggccgggtgcggtggctcacgcctgtaatcccaacactttgggaggcggaggcgggcggaccacctgaggtcaggagttcgagaccatcctgaccaacatggtgaaactccctctctactaaaatacagaaaaatcgctgggcgtggtggctggcgcctgtaatcccagctactagggaggctgaagcaggaggcgaaggttgcagtgacccgagagcatgccactgcactccagtctgggcaacagacggagacaccgtctcagaaaaaggaagagaccttcacctaggcccagctgagacggagcagggaccccttttagggcctgcaggccctcaaccatggaaataaaggaaaatcttgagttacttcaagagaaattcccggcacttagctagccttgaaaagttaatgaaccccttgataagcaagagggcagtaataactttaaacattagccaaagaaactaaaataactggatgtttggttccctataaaaactaaagataacatcaacacatgtccctgagttgttttttagaaacccagacccccaccaaatggatctgctggcacatagacctcagagaatggggagctaaggactgaactctgactggtggtttgttttttctctaagtttcttcttcctgaagaaggtcatgcccacaagctgtagctaacattcttttctactgatccgaaatttttagacaaagcttcacctcttttatcaatcgcaaatcagaaaatctttgaatccacctatgacctgtgggctcctgcttggagatgtcccccctttttaggtcaaaccaatgtataacctctgtgtattgatttatgactttacctgtaacttcttcttttccgaaattacccctatctttaagaatgcttggctgggcgc

SEQ ID NO: 316061 - DNA, 4001 bp, Homo sapiens
gaagacggcccagcagtcgaagacgccgtcagccacctcgcgcagagagaagatgtgcacctgcggcgcgctggccaccaggcagccgagccacgtggcgagcactgccaggcggtcggtgcggcggcgcagcgagcgcagcggctggcagatggccaggcagcggtccagggacatgagcagcagcaggtaggtggaggcgaacatgcccaccacctgcaagtacttgaccaggcggcacagcaggtcgggcccgtagaagcggaaggtgatgtcccacagcaactgcggcagcacctgaaacactgccaccaccaggtcggcgatgcttaggtgcttcatgaagaagaagaggcgcgagtgcttctggcgtgtggtgcgcagcgccagcagcacacacgcgttcccgctcagcgccaggagcaggatgagacacagcaccgccacctccacgcgcgccagggcctcgttgcgccgcgggggtccggcggtgcggttgccctcggcccccggcggcgcggcgctggcgttggctgcctcggcgctccagttggctgcgagcgcgccctccatgaccctggcggcagcggtgcgccccggccttcgagccctttacggcttggcgcggctgggccggatccggcgtgtcggagggtgtaggggcgcccggggctccactcctggagactccacggacggatctgctgggtccaccctgaaacaaaccgggagggccgtgaggagaccgccgcgtttctcttccgacgcgggtagggcgtgcttgtcccattcccaggaacccaactcatctgaaacaacagggcacaaccgccggcctcgggttgctcagccgccaccccagaaatccccgttggaggtacctcctctgagccactgcaaatgagcgggaatcctctaccggccacaagcccagagcccccagcgtgccagttcctcgggatgttcagcggcttccactgggggagaagggagggtcaaaatcagcaacgttcctccgggagtgggaatctaaaaccaaatcacctccccgagggaatctccaaactacctactcgccccaggctccgaccctcagcatatccacctgccgcgggacccccaaaccagcccctctcctagtaaacattaattcaagtacttcctccggaaatccccaaatagccacttgcctgggaaaccccagctctggtccttccccgtctaacccccttttctaagacggtcggccgtcactccctgaacttccacagcacctgcttcggtggaaacccggttctgcagtccctgctgggggaacccctgcctcaaagcccaagatgcccaagcgctgttcccagaccctggcatagacacctcccgcggggctcctccccagcccggcagcctcgaaagttctggaacccctgacttgcgctttggacccagataatcaaggactctgagtctcaatcccgagaagtcactttacaatctctcggaacaccccgagctcctccaggaacaaggagtgcgaggcaccccaccacctccactcgggtcccgatggctccaccggccctagccatcccgtccacccctgcttagcacccagctacctgcaccgagtccgcaggcgaacctaaagttgactccccccggggaagttgcacggcgactgacggccccagtgacgcgtgcgctcccggcccgagttgggatggcctgccggctgcacctaatgtgatgctaagctgaggtctctcactggagcctcggttggaatcccctcgccgcagcctggctggtcgctggatgggtacaggaggcgagcgaggagcgcctcccaggctgcgcgcgcggacagcgtctggatgcggcgctgtgcgctggggctgaggctgcactatcgcacgggtccgctagggggcgggcgaggccagccgcgcagacccctccggagcggagctggttcgcccagcgttggtcccagagccttaacaaatgggtttattttgcagtggtttaaaactgcgagagggagggaactcgtcaataacccgcccgtttcttcctttcttggtttagaagctcttgactccgagacacataggaggcttgaataataatgttcttccccgggtagatagtgatgaagttacaaaagcatttaaactgattatttcccaaaaatgatgttaattttcaggcttttctctccccccacacctccagcttgatgtagcggctttagcagtgaactcaaataagtctttgctttggaatacttttgttcctattcccgttaatgaggaattagaaatggcctctattctaagcagtgctgggagaggcgttattttttcggtagttttagaggaaattctgaagcacaacactgtcttcatttaaagtgattctgcttgtctgcgcccaagagccgtttctgcctccttgtcgcgcttcggaattaaaattctaaatgatgccaaaggaagataaaatgttaaagacagcttctcagcctccctgccccttctctattctaaaatcattttttgaagtaatttacagtggccaagaattaagtcagaaaaaaaggccaggattcaaaaataaacagggctctttaaaatgcattaaatgtgtatttcctcctgacatttcacttctccgtctttttattatgtggagagacttgagttagccaaggactgggtttccttaatccacaattacagccccatgccgagatatcccaggggccaaccttacagcacctggatcccagggttctagctgagtaatcattccagaatggggctgggaatcttgacagcattgccaaggggtggcaggcagtattaatcaatattagtcaatagtacctatcggcctcgaaaattacagattaaagttacagacgactcaggtgagaatgaagtgaccttgggcaagccccttctctttgggcctcagtctcctcatatgtaaaatgagagcactggtcaagatagctaatgtctgaggtcctgtccctctggttttctgaaactgtataatctgtgcaatctgagggttcaatcctagcaggtaaaacacccctgcctcactccacggctggatgaaggcagatttttccctatgagcccctgaccggtgaatgtgagaaggaaaacactggcctgtagaaccaagcctgcccttctttctcctggaagacagctgctttctagggagcaagtttactgagccacttcaccaaggacagactcttctaccctttgtagggaagcctgcctacctgtgtggtcctcgcgtagcccgtgagacagcctaattctggattcacctaacagggctatttagtctcatgcaaaaggtaaattctctaacttagttttaatctaaacaacaacaataacaacaacagtaatagtgtgatccccatttcctgtcttttgttttatttctcattgtgtgcagaaaccaggcaggaaatagagaggtccccttgaaaactcctaacaatgaataagacatgctccttcacctttgagcttcggccagggagaaaaacacatattagattggtgcaaaagtaattgtggtttttgctattaaaaataatggcaaaaactgcaattacttttgcatcaacctaatatttgcagtgtgacaacaataaatgatgttacagaagtgaggactgctgggggctgaggtaatacttgggagatcgttttacaaagaggtagctggatttcagagctccagaatgagttctccaggaagcaaagaaaaaaggcatacttctcagagagtggtgcaggggaatcactttggcgttttggaggaaggactaaagatgaattgcttggtgcctagcacattgccagcacttaatacatacagttggccctctatatccctgtatctgtgagttcagtggattcaaacaatcatggattgaaaatattcaggaaaaaaaatcctcaaagttc

SEQ ID NO: 316062 - DNA, 4001 bp, Homo sapiens
ctaccatattacaacagagaggtgtttggagattcttgtgccttcacaggcttgtatctccattctgcttgaactcaggtaaaatattgagggtcatgtcttcactcttggattgcaaatttgcctcacttcttctagaagctttccttgtggctcgggagagtctccttctgaaagtatctcccgccaagaaatagagaatggggtccacacaactgttgagacttgctagacctcttgtcacctgatacgtggcataaaccctgtcattgaaagcacacattgctggggtctgaaaatcaagccgggccctcaagttcatcgttttcatcacatggaaagggatgtaagacacagcaaaaacagtcagtacaatgattaccaggtaaatcgattttctcctcagaggagagttgtccagatctttgtaaatcaaagctctcacaattaatccgtaacagcccagaatcagcaccaaggggacacagaacatggccacggtcgtgcacatgctgtagatgaaataacttcgcaggtactcgtctgaggtggtgtcgtaacaggtgatggttttgtttttgcggaccccggtacctgagtagaagaggatgggggagatcgccaccaccacaatgagccacaccagcacgctgatacagatcgcattcttctttttgagccggcccagggacttgagggggtacaccacaccgctgtaccggtgggcactgatgcatgtcagaaacaagatgctgccatagaggttcacatgaaagatgaacctctgcagtttacacatggcatccccgaagatccagtctgttttattgaagtagtagaagatcagggctggcagagtcagcacgtacaagaagtcggccagagccaaattgaacatgtacacggagatgccgctccagggcttcatgtggaagacgaacatccagatggccacgctgttgcccaggaagccgatgatgaataccaagatgtagacagccggcaggtagtaaaactggaagcccgtcttggtcaaggcgcatttgaacgacgaggagacggcggcagtggaggcgaccgtgctgttcccccaggacgaacccggaccggccaggaaggcagcgtccgtcccgttggggacagccggccacagcacctcggtcattctctcctcctcgacttaggcggcggctccgaggggtaggaggcggcgagagggcagcggcggccaggggcgcagcaagcatcggaaaagccagcgagcggaagggagcaggcgaactggatccccgcgggagggggcgcgcaggggctcgcccacgccagctctggccccgcgttcgccgcgggccatgaaatccgccccgggccgccaccgaactgggctatcgggcaagccagcaacttctccgtccgctggcaacgccgagcttacacaacagggcgcgcagggaaccgccgcggataactttccgactgcgctttcccgaggggccgcgggtccgcgctgcagagcgcgccagaggcgcagcgaggtcaagggaaactcgctctgcagggctctagcttggggaggctgctccccagcctccttggctcaaagatcaacttaattgggggcatcttcctcctccctaccttagaaacgtgcagctcagtttcggggcgtctaaccgcttcctccgcccaccctgagctcagctcctggcagccatcggagcgcgcgtggccgcagactcgtgcgcttctgcagcgcgtcccgttcggcgtccgcgtagttcaggaaccccttccccaggcccagctctgtccggagtgccggggttaggcgggagagcggagctccctagagggtgggcggagtttgggcaccggggcgagtccgcactccgcggggaggcgaggggcgtgcctccgccgagctcgcccagcagccagcccgcgtcctccagggcgcagtgggaagcaggaggcgtcttctggggagcaggtctccgccgaggccgagtgtgttcagcctctgccggcacgctgctaccggagtcggcggcgagggagaggggtgcgctccaaggtggctgctggcaggcgattggcccgcgagcgctccttccctcttccgccagctatctcggcaaagtgaagttgctgacacacaggaaacccttccgaccgcttagagccttctgcctacaaccccagagccgaccagtccgtagcaggagcctctagggccctcgagaaccacgccaggtgttttcaagctccaagcagccaggagtccctagctgggaacgcctgtcattgcagagcgtctagctttgccgggaccggatttctggcacatgcaggaacctgctattccaagagggcgcgagcctccaaaggaatgagggttgggagaggagtggagaactctgtttcgcccttcttacctttttttttcttttttttaaattctagtactgttttttcttaattacccaaatgctaataaacccacgtcattaataacatcaacgtgagaatttccaaaatagtcttgtgaagatattactagtccatattgcacattgcttcagctcaaatttgtcgtcatagatacttaacacctatcagacaagacaagctccccaaatcctcctgttcagtacatttaaagatcagaagctacaatgaaaaaaaaaaattcgaaatttatccctttgaaagtaatttgaatgccaaatgcaatacatttatattgatagacgtaaaagacggttataattccaaagtgactaaggtatggttttggtagggggtggcggggggaggggggtatttccaattctatttctttaagttaaagtgattagttacaattacctctagtatcttaaaaatacagacttgggacttccttaattactacatttactgacaaactcgttttcttgccttgaatgtaaattttaagcaatgcacttcaaaaatgtatttgagcaagtttaattggaaactaaatgaaatattagctgttcaggaacatatataaatggacccgcacaagaatggaatctagcacttcttgacaagttactagttaatgtatttttacatgacacattaacaaaagcttttctcttagaggaaaaaaaatccaaaaagaaaatatctgtaaaatatataacatcaagatttctttctggtcccagatgctacatgatagtgttcccttaaaaaataaaggaaaaccacgagctcctggctttgataccacaaaggaaaatatcccccacaagatccagatggttctttagaggaacacatataggaaggagcatatcttagcacatggtatgaatacactgggttttgaattgtagtcaattgaacagcataaaaattaataataaaacaagagtaaataattcaagtaaacagtgtgaatgaggttgtcttgaaaagtcttactttttgtgtttccttccaatctcctgattatatgagtctatgattctgagccttaacatgaaacatttgtgtattgtttgattagtatggtcctaggtgggatgattgtctattaagagagaaaaggaagcaaagaaaaccattaagggttccaggggtactcaataggtcttaagtcctcactcctttgcattttttatttgcaacctaggcaatatctgacttcactcagaagtttgttgcaaatgcattaactcataatgtgagtgttttgaaatgtacacttagtccagataccattaagtacttgcagaaaactgacaccttactaggaattgggggatagttgttttaagtgcaccacagactttttaaaaaatgatgttaaaaaataaattttgggctgggcgctgtggctcacgcctgtaatcccaacactttaggaggccgaggtgggcagatcacgaggtcaggagatggagaccatcctggctaacacggtgaaaccccctctgtactaaaaatacaaaaaattagccgggtgt

SEQ ID NO: 316063 - DNA, 4001 bp, Homo sapiens
cacttctcctaagtgcaaagtctgcattacaaggtgaggccttccactctttgctctctgtaattacttccctgtttctaaagccttctgtttcccttgctgctttccttcctgtctggtcagacatctagacagtgctaggtattttaagcatagatttgccttctctacctctaccccagtgaatctctccttctcttcagtttgtgctaagaataaatctgagaagactgttataagtgttagcttctactatacttacttaaaaccatttaaaaagtcttttaactcaaagttttgtccaactttccatcaaattgattataaagacaaatcccacagagaagttttatagaaatttaaaatgtctcacatattgtgcattccttgagttttcttttcccatcaggcaggcccaagtgcaggcccctctggaggatggcctgcctgatacttttgcagttgtttctaaccttgtcccaacacgtgaactggtaggtgtgcgggccaagcctcctgcccaccactgctgtgatagtggatgtttccatatggtattatgatagcaggcttagattcaatagtaattgtacagcaaacacaaagatgcagataattggattacatgactttgacattattcaggtttaattcaactataattgcatcataaaactggacatcataaaagatttggaacaaaagaaagctaagtttattggtgcccacattcagatactcacgtcccttcttcattttagttaatgtttgaatgactgaactgtgctgaaagaactaaaaatagtgataaacatgtaggtaaaagagaaaagataaggtaatctataaactagagcatcccttgtttttttaaataaaaaacaatcaaaatttgataacataaagcaatggggtgttctttctgttttacagaatgcaaatatcttactgtattttgtctgctaggtaggaggaatgtttgacacggtgcagaggagcacccagtggactacagactgggccctgctactccttcagatcattacttcaggaactgttgacatgcacactaacaagtatgtttttatcacttcacattgattttgctacatgtatgcatggtataagctttgatatactgatggcgatttctgccacatcttatttacttggatgctattaaaaattctgtgccttgaataaaaatactcagttaaataagtgtatttcagtttcactttaagatgaaaataattattttctttcttagtgaattattcacaacagttcttgacatgctgggtgttttaatcaatggaacgttagcctctgacctatcaaatgcatcccctgggggatctgaagagaacaagcgtgcatacatgaatttagtaaagaaactgaaagtaagtttgagatcagcctgtattatgagctcaagttgtttatggatttattatctagtgcattttaatttattactcattaaatgttattaattgtattcaacttaatttaatgtgattatttgctatttgtttcacctaaccttattagtacccagaagttacatgcacataaccttgattattttttattgaaaacaattacattataaaacatgtttaattttttaaagaactttagaaatccactgttaaatatataaccagaatactaacattagatagatttaggataactctatgcttggactggcacgtgtaattgaaaaaatagccatctgcattgaaatttataaatcgattcatttgaccgaccactaacagactcctttaaaaaaaaattgtaagaaaacagtgcaaaaaagaaaccaaataaatctgatgcattaccaatcaaataaatcaatggttaccttgtaatctgaccctggacatgagaaagtgttctgttctgcagctcctgtcttctgattgtgatcactaccctggatttttgtcatttcagcactatgatgtttgttgtgtaacaacagtgcctttgtatgtgttctattttctacttaaatagaagaaatgaaacactcattgctctatttggaactgccttgtagaacatgttcagggttaaagaacatgcgctaagctataaaaagggaaatgtttcataggggaacttccttctggttaacttttgccttcattgtaatttctgtcccacttctcactctctctctctctcttttttctttagaaagagctaggagacaagcgatcagaaagtattgacaaagttcgacagttactacctttgccgaaacagacatgtgatgtcatcacttgtgaacctatgggttccttgattgacacaaaaggaaacaaaattgctggatttgactctatagataaaaaacaggcaagagtgaatgttttttcttatatataaatttatttacaaaagatgaaatacttttttttgtcttaccataggatatataaaatatattaattttgctgttgatgtttttaaggcatatgcttgtcttctaagtgtacttagtcattggcattatcatataaagaggtcatatctttgaagatctacgttttatatgtttaaaggacttaaaatgtttccctgaatttaagtaaatttttggaaacctaccaagagaaaactaagtaaaagcttagtgtaaaaaaaaaattgcataaataagttctgattatacttcagatttagaagcagaatatatttatcaatgaaaaatttcttgtaagctgagcatggtggcacatgtctttagttccagctacttgggaggctgaggcaggaggattgcttgaagccaggagtttaaggctgcaatgtgctaggctcatgcctgtgaatagccactacaccctagcctgggcaacaaagtgagaccctgtctctggggggggaaaaaaaaaaaaaaaccttcctgtagtaagctatttcaaataaaaattattttaattgttaggatattctctattcctatcaagcagtatttaatggacatttgttttatataagatattaaagatggttctctaaaatatgagaaaattggtcagttactcttttaatgaacagtaagcaaccaccgacattccacaatcaccaagatgaaagacagagttcctaccctcaagggggaagtagacagacaattacagtgtaatgagatttgtgtgacatggtacagagagagtattaggggatagaatagagggtccccaggaaaattgacacgagtcattttgaaggattaagagttagctgggaggtagggaaaattgtggtacaaataaagggagagtttatatgaagacatgaaagaatcagatttaccagggaatttagagtagcctgagaatctaataccagtttgtgtaaagaaaaaaagctaaagtcatggtcaagtttgagtttgcagtgtcagcggacttcctggtagtaagacatctggaatccatttggatgtgtggtttttacaccaaggaaaaagttctcatctcaagacaaatattaggaaacagtcaatttacaggtggcaattgaaccttggttttattttgttttactttgtttatttatattttttgagatggaatctcgctctgtcgcccaggctggagtgcagtagtgcgatctttgctcactgcaacctctgtctctcgggttcaaacgattctcctgtctcagcctcctgagtacctgggattacagacatgcaccaccaggcccagctaatttttttttgtttttgtctttgtttttttttttttttcaagacagagtcttgctctgtcacccaggctggagtgcagtggcgtgatctcggctcactgcaacctccacctcccgggttcaagcaattctctgcctcagcctcctgagtagctgagattacaggtgcctgccatcatgcctggctaatttttgtatttttagtggagacggagtttcaccatcttggccaggctggtcttgaactcctgacctcgtga

SEQ ID NO: 316064 - DNA, 4001 bp, Homo sapiens
ttacctagagaacaaaagagaggatggttattttcagcctaaggtagttattattgctgttatctctgtgtgtaacttttttggacacagcctcctctaaaagttgaggtttctcatcttcattgtagtagttagtatgaacacagaaaactgaatcccaaaatatttcattgcagcaaatattgcatctctgctgaagagaaatgatctgaagtacaatatgtgaagttatagatgcttagtatttttttatttgttgaatgtttgcctcttaaagcacattttgtcttagagctcactcatatttatatgcaaaagctggaagagaaataatggggctgtgctttactcttctctagcttcccctccatgccttttagctttttggtttctattcacagtcacttttccccccaacgtccttatttctgagcttcttttactgtagtaccgtcaaaacagttgagagagaaatgatggataattgcctgttagaatcctaaagtaataaaaagggggaagaaattgatggaaaattactcttgggaaacttattaaataaaatactgaatcagtaaaaaaaaaaaaagctgaccttttttctttatatttggaagatattcctgcctctatattgctcactcattcaaagattggcctcacggagattcattattctgcttcaaatattttaacccatgtgtatcttatttccaactttcctcagtgttttgaagttgctgcatacattttcttgaatatcattcagtataaattttaaaacagtaaaaaaaaaaataagagtcagaaatggcctgtgtatatatggtcatgagttggcattcctcaaaacagggcatactttccagatttatggagtgtgtaatggtagctaaaataaaatataggttattaccacaataggcagctataatgaaaacttaacaagtgacttgaatatgctatatggcatctacatcttgggaatttgaaatgacgtttgtaatctttttatttcaccagagataagtgaaattgattctatataaaatattcttaataatcagagatatattgaaagtacaaataacaaattttaaaaaataactttcgtgtaaaagatatttagataaatgaatgtagcacttaaattccccaaaatgtccatggaattcctttctgtccttaattatggaaggaaaacgattaagaatcatgttgtcacagtatggcttcaattttcagcatctcctcacctatttagcgctttaaaataatgctaaacaaaacctaatgttttccaatacaagatcactgattttaacctttcctgctactgctgtgtggtcttagttcatccctgaccgttttggaaattcgacttagtgaatatacattttgtgtagtctgtaagatatttaacaagtattcttgacattgagaatttcagctccctttatctgtatttaaatctcattttatacttgaggcaaagtaactaagaccatttatattttatttctatgctttgtataatttttcttaataaagaggctaattaacaattgtctctgacatcactaattagacttctattttaattataatttttattccaaatacatgcttgcattgatagttattaaggtttacaattttaagagaaacttggaaaaaatgtacacacatatcagagtgtaaatacatatatttgtcaagtacttgtagaaataacattacctgataactgttgattctggagggtttgaatgtatccagtaagtagtagttattgcaacctgcagagtggcatctggtattttccttttaatgtcttagtttagttgccaaacctctttgtgatagaggatttcctgagttttcgtcagtaaagtcttgagtgctctagagagaaatagaaggagagaaaaagagggcttcacaatcagagattgtcttcaaacactggactcaaagctatgcagacactgaatttctatctgtcctcttttaggacttctgcttttatttcccaggaaatgtgggatgaggatggctgagaagtcatcttttaaaaagcaatttaaaatcttgcggctttttactgaaacctgctatagagttgatgatttataacttcgagttatggttattttctatgcaaatgataaatccaagttgagatcaagccttcgaagtctgcttcctggagaagattttaagcttgctttcttgggtggttaatttatctgaaatatattgtgtacaacactgggtgatgtattttcttctaacaagtaattatgttaactcaaaatgcgtgctggctagggatgttaagtctctggccctttgtttttcccttggttaataatgtcattattttaaacctgtgtttgattaactcctttgtaggtgaaacagcttccttctattataaattagcagattccaaaattacattagagaagtgattgtatccattgccaggcttattatatactgtgtcgttcatgcttttcttgaatagaatttaaatataaacaatttttttttgtttctttacctaactttgagtttttgggaaaatataacattaaattaaggcatccttgtatcacaattatttacagttgtttaactttgaaaccagaagggcaaaaaatatgttaggggtgagattgaagggcaaagtgttttgctgctttaactttttttttttaattttattattattatacgttaagttttagggtacatgtgcacaatgtgcaggttagttacatatgtatacatgtgccatgctggtgtgctacacccattaactcgtcatttagcattaggtatatctcctaaagctatccctcccccatccccccaccccacaacagtccccagagtgtagtgtttcccttcctgtgtccatgtgttctcattgttcagttcccacctatgagtgagaatatgtggtgtttggttttttgttcttgcgatagtttactgagaatgatgatttctaatttcatccatgtccctacaaaggacatgaactcatcattttttatggctgcatagtattccatggtgtatatgtgccacattttcttaatccagtctatcattgttggacttttgggttggttccaagtctttgctattatgaatagtgccgcaataaacatacgtgtgcatgtgtctttatagcagcatgacttataatcctttgggtatatacccagtaatgggatggctgggttaaatggtatttctagttctagatcactgaggaatcaccacactgacttccacaatggttgaactagtttatagtcccaccaacagtgtaaaagtgttcctatttctccacatcctctccaacacctgtgctgctttaactttatgtaaatattgctttgcagaaacacacctccctggtgtctcaaactgcagtgtccttctgttatcagtgggaatcatttgtgttggtgcctttgctgtgaacacgttttggttttttcttctgcgttttgagtatttgtctatgtctttacatgttaaatatcttcattggttttcacagtgcagagcagcagctctgcatcacttgggaacttgctagaaatgcacatttttgggcaccaatctagctgagtgaataaaaaactctggggtgccccaccctgcatctgtattttagtgagccttccattgatgcttggtacactcaaatgtgaggaccactgatttaaatggaataagaattttgttgccatttagaacttgaagctattaatatcagtcacttcagacacataataatccccaaatgttggtcatcttaaagggattagtttgatattaaactcttggaaagggttgtattgttatttttaaatatgactattgtaaacaaatcttagccttccttatttgttggagtctcaaaattttaaaaagagcttttatgctgtatgtacttcaaataataattgtcaatattt

SEQ ID NO: 316065 - DNA, 4001 bp, Homo sapiens
ggacttcaagagttgggcgttttttttttctttcagcacatatctacatttaaggggcacaaaagcagtagtgttatgtgaattgtggaaaagaatgtgagaaggtgtttggaggggaggtttgtagggatatacgtttctccttagtcttttccaaaatgttaaagtgaaatgctcttgaaattaaaaaaaaaaaaaaagaaagaaagaaataatgacctctagtggccatttgtatcctgttgcattctcttagtaatggttcattcagcttatgaatagatctatgtggatttaaattttatataatcttttctgtacacgaggataataaaatgtaagagagcatttgttccaatctttttttcttggttaaatttgatttccacattatctacggaagtctcatcaataaatagaagttaaccctatgtacagttgtcagcctaaggttatgttgtctgtctgactgctatgattttcttggcttgatgctgtggtctttctcccttgcatacatggtagcttttctgtgaattttttacataagaatatgtatattaagggatccatacaaatgttagttgctgccaaaaagagagttgtttctttagcaataaacagttgattttgcagtctacagtcagtcttattgttggtttgactgtgagtatatggaactctggcaaaatgaaatggagcaaaacacacaaagaagacagccacgacaacaaatactttgccttccagctttttgttgttttttctgtccttacttttggactttctataagaatcatatactttttttgcaataaccacataaaacacaagcattaggataaaaacagtccagaaaataaactggcatatgttatttaccatttgatgccatttcagccccagaggcccctttaaggaagcacactttttcacagacgatggtgttgcttccttgttgctcaagatcgtatttggcagggagatgaagaacaaaaagaaccagatgaagattgagaccgtttttgcaaaaacaggtttttttagaaaaatatttctcaaaggtctgatgatcttgaggaatctgtcaaaggctatgagccctaacagcacgatgcccacatacatggtctcataaaatatcaccgaagaaaaacgacacacaaaagctctgagctgccagggtgccaggtgtgagtcagagaggattttgaaaggaagcatgagtgtcattatcaagtcggccaccaaagtgtttttgaggtagatgatgaaggtggaggagctggggatgtgaacaaacacccacagagccaaagtattcagcaggatgccggtcaagaaaaccactgtgtagagggctgggaataccagctgtactatccgagtgtctctggggcaccgctcagatctgttgaagccttgcatcactgtggtgttcattgcttccagtgtcacctgttaccaataaacatatatacaaacaaaagaaaacaaaaagcccttcatgattttcaaatgctattttttaaaaacagactttatgtttatagcatattaacatcctgcatttatccaacactttcaatagatgtgttgaaaaggaaaatactgttttctggctagaatttttaaagcatataatacatttttggtacttttaacagtaccattactttcacatccttgtgaaatccaaataacaggttctgcctcattcacaggtgctactgttagccataaaacaaaacactgtttaagagataataatacattattattactaatacatcagattgctgtaaattatgtaatttcttatgctcataaactatggtttgtagaatattaactttaaagcaccttttttcccttaagcatattcttttatataagcaagcacactcataataacaaaaattgaaattcacctttgggaggatactcagttctctctgtcttcttatggcggcagtcattagttcagcctacaaatgagcatgtgaagcaaatgttctgctttcttatagtggatttccttccttatttttacttatgtaatgtgacccattagaacctcttcatatttagacctttgggacatttgctaatactctattttagttcaaactttcatactgttaatctgtgacttgaataaagaagcttatttgcaattatctttaaatttcttcataactttcttgaagtttatcttcttgatctgcatgttcagtgaactttttgagtgcctcttgtatatagtggaaagtagaaagatgaagaaaatagtcccaaattacaatcaagtaggagaataagactacctaaaatcagacagaataatcttctgtatccttgtaaactggattttccagtaatttgtgttcaggaagacggtatgtttatttttgtaggtatttgacttagtcttctggtttggggatctctgagagttaacatgatgttttctgagaggtgaagactattagatccagatttttggagttagaatcccagttccaccaattaattgggattagattatagataaatgattcaacagctctgtgtctcaatttcctcatctgtgtaatgggtttgaaaatagtatctaacacactgtgttattaagaatgaattggttgcctggaatagtgcttgacatataggaggcactaaaaaatgttagccacttttagtggcttttagtcccattgccatgggaatgaattgcaaatccagatagagatattatactctttcacttagtagagggccatttttagaaatcttttttgtatttggtgtatttcgagtgcagaggacttcaggaatttcatcaatcaacattgggccaatatctgtgcattttttttgctttaattctcttcaagtttgaaagatgtaatggtgcttttgcatagagaaagttgttgtccatggcagaaatctacttgccaggtaggcataggaaaagcggaaattaggagatcttacggaggatgtggagttcatggtgagtttcatttcatgtttcttgccacaagtgttaccatggagttagacgagactagtgttagttgatcacaaagttttgggtgacttggctttgaattctgagaagaaaaacttaatatccccctggacattttaaaatatgaggcaatacagtgtctaatagttttgattagactacccaataacggcacagtttgaaaaatttctctttgactgaaataaattaatccttgggagtatagattcaagatttcattaatagaacatacatgtatgtcttaaacataaatgtatatctttttgtttgcttcagcagaggaaaaaaaatcctttatttcttaagtagagaaatttaacctacaaaattaattgtaaattttcctatagccccaaatccataatctaaaggaagatctggaatagtttttctttaagcaagataaattctgtgcaggataatttcataatctgaaaactggaaatcacttcttggtcaaatttcaaaacactgaagtgtgggaaactttccaaagaggaactgacttacagtgcctgtttctagagttatggaaatagagtctcttaaatgtggtagatgtcaaagtgtttgactatagtaaatatccaatagatcattcatttctatgtgtttgtgcttcttatgtattagctgatttttccttagtttacagcagcactattgcctgctggggaggccttttgcccttgaagacacagctgagaagctgctcagcagaatgtttaggcgccagagtgcctgggctcaattcctttttccaattctttcttttcttatgaccttaggcaagctgcttatgcccactatgaaatggttgccttatctttacaataaaaataaataatagtatttgctttacagtgttgttaaaagaataaaatgagtgaacattcaccagtgcttagaataatgtctgtcatgtggtaggtatcatgtaggt

SEQ ID NO: 316066 - DNA, 4001 bp, Homo sapiens
ctcagggatctagaactggaaataccatttgacccagccatcccattactgggtatatacccaaaggattataaatcatgctgctataaagacacatgcacacgtatgtttattgtggcattattcacaatagcaaagacttggaaccaagccaaatgtccaacaatgatagactggattaagaaaatgtggcacatgtacaccatggaatactatgcagccataaaaatgatgagttcatgtcctttgtagggacatggatgaaattggaaatcatcattctcagtaaactatcgcaagaacaaaaaaccaaacactgcatattctcactcataggtgggaattgaacaatgagatcacatggacacaggaaggggaatatcacactccggggactgttgtggggtcggggaggggggagggatagcattgggagatgtacctaatgctagatgacgagttagtgggtgcagtgcaccagcatggcacatgtatacatatgtaactaacctgcacaatgtgcacatgtaccctaaaacttaatgtataataaaaaaaaaaagcaaaaaaaaaatgaattaggacttaagaagttgcattttctccatttagagagtcatttgttgacaagagtcacagtttttaaaaaagctctgccttcccttagttgcagtgttcttataatgtattcagaagacagggctccttttaaaaagattttcttttgtttactttctttcttcttcttcttctttttttttttttttttttttttgcctgagaaataatctggagtagattctaagcatgtatattaagtttctaaattatctattagtctagatttttggaaattactacataatttatagaaaaactacacaataatattccttgtccttgccatccacaagttaaaacaaaaaatgctatgaatgtttgttatttaaatgtttaacgctcagaggaagcaatcagaagaaccaaggaaaggaaaattaaaacctaagacactaataaaaaataaaacagcaactatgagacctatttaattcctatttctttcctttgaaaataaattgtgactcaccattaaatccataccagtgacccatgcatttaatattttagagaagacatcacagctgccttgcatgaagtatttcacctttggtttcattatttgtagagttttagcattttgtgcttttaaaccaaactgtctggtttttgttttctttcttcagtatattcgttctttattggactgtctttgccctgagattatatatatcataacccagctgtactggtccactttatcataccaaatactaattttgtcactacccacatacccatccgactgtctggataataagtatttttaaaataggaatttcctaatgcctaatgtacaagccccatgaaaggaaatcatgccttatcaaattaaaaaaggatacttacaaggaaaatttaactagacttggtttattacttgaatttggaaaagtcttgcatagcctataactctgtgactccatccattaaaaaaaaatttaggatgtcagcaccacacaaagccattttacattgtaatcacaaatattatttaactgtactctgcattagatggaattttcttacttaccaatttttccagtcttttaggttctctgtaggcaagataggatcagcaactgagtgtagcatttgatgttgagggaaatagattttgctctctgctggactgctcgtgttgaccagtgggaaacactgcattagctttcaaatcaaaacatttaaagtgctctctgaaatattgacatctcgccaaatgcttgaatgtcaggtactacagatgtccagtattctttggagcccagctctaatatatgcttgcataagttggacctgatttggatttgcttagggttacagattagcacggcttgaccaaatagtaaatagtatgaaaccagctgtgaaaagggagactgagcaagtgagagctccagccagcaggaagatagatctttcccatgcttgtttatgaccttttcctgtgaagctgttgtaataatagcttctgtatttattgggaagtatttttaagttgtaattcacatggtttcaaactaattccttgaaattagttggaaaaccaaaaaatatttgagagtaaaacatctgcacgtttccttctttcagtaccaggggaggaggcaggaaagctgtttaagtaggtgttaacttgggggtcttgattggtgcagggcaagataactgtcaaatgagaagagatattgaaaggaccccaagactatgctatctcctctgggacttgggggatttgctcctctagacttatcctggtctagggatggacttgatgcatgccagtacctcttctactccatctgttatcctgacacatttccagccttgaatgggggcttttgggtctccaatcattcttcgtattactccttgacttaaatctggtttcacaacattctgtttctgtcctgggttgttacttgatcccaatgcctggatatttccttctttaacaagttcttcctggggatttctgaaattatgctctggattaatacagtcataatacatctttcagaaggaaaggcctgagtctcctatactccgtctacttgaattcatccagtttagggcctatagcatcaacttttcccattttaccagtttctttccttctgtcctagagaggcatgctcacgatcaatcatgcctgttatcattatcaaataaaataaagcgaaaaccctcaaagctctcccttaaatgtgaatcctctttattagcaatcatccagtcggtacctttatctccttatccaaacttgttggaaatggtctgcgtttgctgtctccactttcccattcactctgtaatctagtccactctgccttctgtcctcagcacttatctagaactgccaaagacctcctcattgcacattcctcaatccaattgacattttgaaagattttttttgtctttgaggtagcttttttgggattgtggtgaaatacacataacatttgccaccttaactatttttaagtgttcagtgacgttaattacattcacattgttgtgtaaccatcatcaccatgcatctctagaactgttttcatcttgcaaaactaaaattctgtacccattaaataataattctccatttatccttgcccctagtccctggtaactactgttcttctctacgaagttgaatactctagctatctcatagaagtggaatcatacagtatttgtccttttttgactggcttaattcacttagcataatgtctttaaggttcatgcattttgtagcatgtgacaattcatttctttttaagactgaataatattccgctctatgtatataccacattttgtttattcatctgtccatagtccttgggtagcatccaccttttggctattgtgaacaatgctgctatgaaagtgggtatacaaatatctgcttaagaccctactttcagttcttttggttatgtgcccagaagcaaaattgctggatcatgtggtaatcctatgttaattttctaaaggaattgctgttttccatagaggctgaatgaaccatcttacgttcccaccaacagtgcacaaaggtgtcactttccccacatccttgctaacacttgttttccatttgtgtgttgtgtttgttctttctttctagtagtagccatcttaatgggtatgaggcattaaggcagcttttgatgatgattctctctgtggtactttggcatactgcccttgtacctttctgacactgttccctccatgattaagggcttgccctcaaatgttgatgttttatggattccatcctgagccccatgcttttgcctttctctgcccttgccctgccctgttagcacttgtgacatctctgccagcatctctcaccaccttgcacc

SEQ ID NO: 316067 - DNA, 4001 bp, Homo sapiens
gatggcagaatatgcttgtgttggtgtcagcctacctcctggactggtctgtttttggtattctagagactgctcacactgggaggttgaaacagctcacttgtgaccgacctaacttctaaggatatcctggggccaaatggaataaacctgtgacttctgagttcatagagccttaggcttagggaagcctcaacatctaaattcactcagaagcactttatagagtgaacgttcttctagggagccgtgttcttcttctgttcagcactttagaagcatcataggtggccttgctcaggatagtcacaccctctgtacctgcttcaactgtgaagtgggcaccgtaatacttcaggaaattatacttcttcctctgcacccggcccacttcccctgtgtcttcatgctttgagtaccttggaatctccccactgttcttttggttttatttttgtttgtttttgtttttgagacagggtctcactctctcgcccagactggagtgcagtggcccgatctcagctcaccacaacctctggctcccagactcaagcgattctcctgcctcagcctcctgagtacctgggattacaggcatgcaccactaccacccagctaatttttgtatttttagtggagataggggttttaccacgttggccaggctggtcttgaactcctgaccagcctctcctgaggccactcaccttggcctcacaaagtgctgggattacaggtgtgagccaccatgcctggcctccttgttttttttttttccagacatgacaatatagagttcattcatatataccaatgtgttaattgtgtgcacacaattgtatgcatgtttgtatatatagtattcataaattttaccgaaatataaaattcattgcatgtttacaaatcataaaatatgccattttggtattttccgagtgcattgttttctttttaacttaatggctaggtttttttttagtgctaaaactgattatcaagtttgtatgttttagaaagatgaatatacaaactatttatttttttactagtgtgatctttgattcattttctccgtaggattgattgtccttggttaacaaagtatatgtagacaagatggattgcatgggcttggttgaataagctgacattgtgggtctgtgctaattctcctgaatgtaatttaatttataatgtttaaagaattgtaagtaatttagctgattagtcatagactataaataagtagcatatgaactcaaatatttgctatgcctaggacagatatttctgtgatttacaatttaaaggcattttattttagtaggtgttaatggggttaacttatcctaataatgacaaagataaaaacttttacctatataagtgtatgtacaagtaaatgcaactatatatctgtacacatatgcaattgcaaacaaagacatactgacctaagtattatgctaatcgattttgtagttttgagaagcaattttaatacacatttacgagcttttgaaatgtttgtcctggatgaataccttttaaacattttccttgatatctcttcatcacagatatattttgacagccacgattggaaatcctaaatcataaatgataatatttcagtattggatccccatattagcatggggaaatatattaatataccaattatagttgtcaaacaaaaagtaacctactgagaaaaatgtgagtggcaatggttcagtgttcctcagctttgttgctgcccagctcagaaatcttttctgttcccatgcaccattcacatacatgcaagtcatttcatggaaaagctgttttcttacctgcgtctaggccttcatctgtgagagtcatgcttcactcattttgaaatacctctcattgtaggctccaaggtaacactgttacagagttcttgctcatcttcaactacggatgaaaatcaggaacttgacagaaaccacaagatagtgggtccctctgctgctgttgtcagatagaatttattgaagactgggacgtggaaacaaagaggaaggaagagacgttttaatctctgtgggtgttaggctgacttctgagctagttcctttcctccagtaatgcaaaaacagtcctgctttcttatttctcctcctacttttccccacatccctacatcatctgatgcacagccaggcaaaaacctgttttcttttctaacctttgccattgtcaaattcaacatgtggtatgaggtggagaactgatgtgtaagatatggttctttctgaagcaccctcagaaaattgtcagcagcttcacagtataacgtgcagagatgggtagttggagctacctggaaatgcggaattaacagaataaagaagtattttgacaccaatgtcgacatattctagataagaggtgttgcattgtcatttttcccacattaattttcccatatttgaacattactgataaatagatcacaagtaggacttcagataaactcctcgtgtgttaacattttggtgtttgtgctgtgttactattttgaaagtcttcatatttttagttcctttcaggctctgtaatataattggtgatgtcctgcagtgctccactgtctttcccattgactattagtgccattagatttggaagttttcagaagatggctacaaagtcctcttcaaagtgtataactcagaaccagaaagaaagaagacaaggggctgaaaagcttactttataaggttcctgcattttaagtgtatttacttaggctgttccattgccaaattatgggtaacaactagtaaagttcagcttgccttaaaaacatagctatacatttagttataataattataactggcttatgacatgcccgttactattctagttgctttatatgtacttgctacgtaggaggcagtgttctggacattggagatggagtagtgactgacacatacccaaacagttatttccctcatgaagagtattttcttactttctgtctcacagacttgctagtcactgttgatccttggcaaagacctgtgagacacagagcttgtttagagaagttcgccatttctccctgccagagggactcttcttcagacccccagcgggccccaatagtcctcactgatgctttgattgaggggctaagaatactgatgtgcatagagaggcttgttagcttcagctgcagtgagatctggtaggtaaataaacttaaggacaagtggatgtgaggaggagccgctagagcctggttattaccagggcacattgcagagtcctccagatgtaaacattttgctgattaaattgatgatttggcaggaaccgtatctctaaggtgcgactctcaagacttccctgatttattgcaggagatgctgtttactctgacagtctcaaaaacacccattaattgttccgggtcccttttgtgcttcttgacttccccgtggggtgtttcacatagatgttattgagtatgactggggagaacatgataatttgttgcttcttgacttccccgtggggtgtttcacatagatgttattgagtatgactggggagaacatgataatttctttgactggagctgcttgcttgcctcttaatgccaggagttgcaaagtccaaggccaaaaggatagccctacaggtggtcccctcgtggcaggtggtacaaatgggttggactctgtgtaagacacttgggagtagagggagtatggagaaatggaaagctaaagggcccacccagggggacagttgtgtctggaagcttgccagagtcatgggcctcatcttgggatgggccagtgtcttcagaacattaaacgctgatttgcatgtactgttctaaacactctgtgtgttttagcttgattactcacaatggctccatgagtaaagtaggtctgtctactacttcttccccacctttttcttaatagacaaggaaactgagg

SEQ ID NO: 316068 - DNA, 4001 bp, Homo sapiens
tggccccagctcctaacccattccatcccccggcaggcaggaatggccctgggtttgcaaatatgtttgtcacggaggccaggtacccagggctgggctacacaaacaccctggacaatgtccatgggactaggggtccccacccagttgacactggtggtctttgaaggactctggggtcttcacagctcgcactgtggctttactgcataggccttagaggcaggctatgtgggttctaatcctagcttcaccactgaagtaaccgtgtcagcctggccaagccacagcagctctctgtccctaactttccccctcactggcctgagtaggatctacacccacttcacagaggggttgcaggaattaaatgaaataatcatatgaaggcaagcacataactagagctcagaaacgatgagctatgttgtggctccaactggagtcaccctagaaagctttgcccatgatggctgaacaaagacttcaccttaagaagaatctcagagtgctggcagcaaaagctgagcctctgactggtactccagtggaggaggctgggggggtaccagtttatctacatttggacggcctgcttctcatcagaccacaaggcccacttcggcagtgggattttccccagaggtcctgaggtcggcagaaagctggttatcagtctcccaccttcctcccagttctagaaggtgacagaattaatggtggcacggaagacaggtgcaatgaaacgtttagacaccagcctcaggctcaccctgccagccctgtgatggaagaatggactgcagggagttgggataagagggagtgttaccctatttcgaggacggggaaggtccttcactttggtaatcctctggaagggctgctctgaagcagccattttcaaaatagaggtcacgtggtcacaacgagcctcaaggtggccaccaaaccgcagcccctggcccttcccaggagtatctggcggacttaccgaagagcagcggcttgaggctgagggttcggatgaagtgatccctgtcggtgaccagctggaccttacgctcgtgccccacctaaggaaaaggcgcacagcgggcagctggggcgccagaccgcgctgcccaagaagggccaagtcgccccggcccggagagcgacagcaggcgagtgagtgggagcgcgcgggaccgacgcagagcagcgccgggggcagcgtggggacccgggctgagcgccggtcctctcgggctcagccgtgcagggcctggagcgcggcggggcagggaggtcctcaccttgatgccctccagccgggtgaggggacctaaggtgggctcgggcccggggccctgggcacggtgttggggcccgggatcgctgctttcgtcgccgttgctgtagtgcacgaagagcagcagcgccagcacgttacccaggtacaggtgcacgaacaccatcagcaccaggaagtaggcgcgcgagcagatgccgcggggcttgcacagcggacgcaccggtgcgtcctcgccgtcgcccagcccggccgccgcctgagcctggcagtggtctggcggcgcccactgcggcctcgaggcctcctcggccgccgcggtctcaggccgctggcctgtcaccgccgctgccgccatggcacccaggtcgcgcgcgcgcccaggggaggggccgcgggggtgcccgcgctgcgcagtcgcccggacaacggccgccaggcccgcgagcgccgcggtcactaggagacggtgcctgggggtgctgagcccgcccggagccgcctgcgtccgcgccgggctcggccttcctgcgccttgagccccagcccacgctggggcttctcttcccaagctgggttgccgtcgggcagagctgtacactctccaagtcagaagccaaggtcccaagcgtagacgcggacaagagcggcaccattaaggcatacactagtgggagcttctcggtgcctgcgtgaagacgccctcttgcctccgggaaaagtatcgtctgcatcttcttgctccaggagcgggggtggggagcgcagcgcggaggaggcagcgctgagatgactcaacagtgcggcatttgggggcgccgcggaggctgggactgcgtaagcggcgatagggtaggacccacagcctcctcgcaggcattcttggagctcggttccgcggtcggtccggatctcccgggaagtctcgccggagtcaggcaggccttaggaagaagctgcctgatgtgcaaggtttcataggccgtcagagggggcatcctggaggagccctggcatcaggaaagtgagccccccatggcagcccgcaggaatgaaccagtgctcaggtatatggaacactccttgcatcaaagctggcacgtgtgaagaggcgggaagggactcttccataactgagacaccattacctcagagaaaaattaaacagattatcaccaaaaacgggggtggggggaggacatacctaccagtggtcaagtgccaaggcatccctgctcttctagagctggttatcctcaggaagagattactacacgccctcagggcagaagctgacccccctccccgaggtggacttgcaggcaagagcaacacttttaaggcaggtcacactggtggtttctccctaccctggttaagacccccactacctctactcccatctcctctcccttccccatagcaaagcatagtctgcattttctagtcccctcaagtcaaggcaggccaggggctccaagggcaggcccacctctttcttctaagattttttgtgtgtgtgtgacggagtctcactctgtcgcccaggctggagtgcagtggcgcgatcttggctcactgcaacctctgccttccgggttcaagcaattctcctgcctcagcctaccaagtagctggcatgcgccaccatggcgggccaatttttttttttgtatttttatttattattatttagttttaattttttaattataattttttttttttttttgatacagagtctcgctctgtcgccaggctggagtacagtggtgtgatctcagctcaccgaaagctccgcctcccgggttcaagcaattctcctgtctcagcctcccaagtagctgggactacaggtgcccgccacaatgcccggctaatttttatatttttagtagagacagggtttcaccatgttggccaggctggtctcaaactcgtgacctcaggtgttccacccaccttggcctcccaaagtgctggaattacagacataaggcaccacacccagaccaaatctcctaaattcttaaatataataaaccaaccaacagaaccataattttaccaaggatctcatggctttctcataccttttctggaatgaagttgagactatttccctctagccttttttttttttccccgagacagagtcttgctctgtcacccaggctggagtgcagtggcttcatctcggctcactgcaacctctgcctcccgggttcaagcaattctcctgcctcagcctcccaagtagctgggattacaggcacgtgccaccacgcccagctaatttttatatttttaataaagatggggtttcaccatgttggccaagctggtctcaaactcctgacctcgtgatccgcccgccttggcctcccaaagtgctgggattacaggcatgagccaccgcgaccggcccctctagccttttaaaaactagaatttgatcaccataaaatctgtactttgcttaacctattttcctgaactccattcttacacctattacctgaactaggcctaccactaagcacaggtactgatagctcattgccagacaacagaaagcaagcaggttgcagggctgctccacctgctgtcagctgtgggaatttcacaaccacatcagaaaccagaatttctcagtcttttaaaagcctggccctttgatgccatgacaatacatactaccaaatcc

SEQ ID NO: 316069 - DNA, 4001 bp, Homo sapiens
agaaactggcagagaagccaacatctacagaccaagtttcaaactccaacaaaactccaacctttctacaccttaatccctcaggccaataaaacatccattaagttaaggacaactgatactactatttaagaaatgatgacagtattgaagctgagtattggagccacttttttcagagccttgctggagggaaaggtaacaatgggctacttagtgaaaacacaaaatacactgaatttaggtcaacctgttaccaaatcggaaagttggtttaagacctacatctattacaggttcactttccgtaataagtgtcaatcaatgtgcttggctaataagtagctcgaaagatttaatagccgaggatgacacagtgaaaaagttgcctgaaatccatactcctaacagaacatgaaaaaggctcttcatatatacacgagcatgagtgggctttacagaagccacagaccttctggcaaagttgacaagttttaacctgctttaaaaattactattcactgccttcatcccaatgtaactttactgagtgttattctattggacaaccctacaaaaacaaaatccccagagcaaattcttgtacatttcaatatcctgcctacttataagagcggaagagtcgaacacagcaggggaaaaaacgtgacgtgcacaaccttgatccaaaacacagctcttcgtagtttaattttaggcctaaccattttgtctttttataaaggttaaaaaagaaaacaaagaaaggacacatcgcctgtaacgcagaagtgagataatgatatcaaccggagttcgttatttatcaagggacaacaaatcacgctcacactgcccagggagagtactactaaaattaagatacaaggatgggtacaacctcacacccactgacgatgacacgcttctgttcttggatgacttatctttaaagaattagttaaaaggttgagtggcaacgttttgtgtttgtgcgtgcgtgtgtttccaagagagccaaacatggtgaaaaaccaatcttaacttcacctaagttatctaaagaagcaaatttcacccctaggctgaagctcaaacaggagcgaggagaagctccgaaagatcagttcgtaagcggtggccctcaagcgcccgggacgctctacgtttttaccaatgtggaatgtggaaaagaggttacaggctggagctgagaaaacagtcaagctactcgcgacaatattcctgagcagtgaaacgggtgaacagagagcgagcaagcaggggctgagaatcagtgagaggaaaaatcaaggaacaaaaccggagagtctggtccagcattaagaaaacggagcaaaggaagagggtgaaacgcgaggggagggaagaccgagagtcggcagagaccgtggtgccgcgaggttcagagcagggctgggtccaggaagagtcagacctccgcagcccagcgagcttcccatttctggctaaagccagcgaagaaaacggccctggggagcagacaatgagccaccgccccaggagctgcggctcccagcacgcaggtggcggctccccggccccgcgcggggcaggtcggccgtcccgggccgctcccgcccgccaggccacggagaaggaaggaggaggaagagacccggcctgcgtcccgcgccggccggcctgtgtgcacttaccccgggcaaggcaaggtccccgccccagcgaggcgcctcggtcagagctcccggcgggctgcggagccgccccgggctagcgcgcggtgcggggaggggaggggagggaaggggaagcggggcgggaagagacgccgcgctggagcagccgctgctaccgctaggcccagcggcggcggagtcctgcgcacgccagggaggggaggggagggagccttcggcaatggcgacggcccgggccggaggggaagcggaacaaccgccgccgctgcgcgtggccacaaccctgggggaggaagacggcggggagcggggcggggcggggccagaacccagaacccctcccgccccgaagccggagctccccggggcggagacgagcgccacctcccatgggcaggcccgcgcgggggccgctgggagtagtagttcggtgatagacgttgcttttattccttgggtagtctttgtattgagaggagcagccagtccctcatttaattcagcattgtctccaagcaggtctctgccgacggaagacgctgacagacgattgctgttatacacatctgctccgcgacatttgtttctgggaattcatccgttatccattttgcttttttgcttacaaattcttaactaaaattttgctgctaaattaagtatcacctccttgcaaattaagacttccctattttatccacggaggagttcatcaatgtttcacttattctacaaatatttgagtgtctgatatggactagacactgttaagcatcagaaatacaagggtggttcaggtgcggtggctcacgcctgtaatcccagcactttgggaggctgaggcaggcggatcacctgaggtcgggagttcgagaccagcctggccaacacgatgaaaccccgtttctactaaaaatacaaaaattagctgggcatggtggcacgcatctgtagtcccagctactcgggagactaaggcaggagaatcgcttgaacccaggaggaggaggctgcagtgagccaagatcgggccactgcacttcagcgtgacagagtcgtcatgcctcaaaaacaaaacaaaaaacacaaaagaaatgcaagggtgaacacgattcaccaagcctttgtggagcttatatgaggacgcagtaattaaagtagtcacacctggtataagaaaaaacttggcgaggttactttggatagggtggtcggagaaggcctcgttaaggaggtgacacttaaggcaagaacagaaagagacagcaataagaagcacccagagaaaagcaatacaggcaggagaagaaagaaaagggcttgctacggtcagttaagaaggcctgtgtagctggggcctagaacaagaaggcggtactattaagaaaacactacagcagacaagattcaggtcatgaaagatcctgaatgccatggtaaaaagtctatattacaaaaaaccattaaaaggcttttttaagcaggaaagcgatgttacctggcttacactttaagatcactagactgcaatgtggataatggagtatagagatgcaagaatagaagggaaataaagtaggaaggcagtggaaagaaagaggaattgtgcttctctatcaatgtagagcaaaaaactcaattgatgcagtgggtacaggagagaaaggaatcaaggagcaacatggcacagtaagagataacctgaaaaatgctctgattattaaacacacagaaacactggataaataagacatcctttcaaaggcataacttgcaagaatgaaaatagaatgtttctgacagtcttccaaatttcacactcaacctgaagaaggggcaggacaccagagtggtaagcagggcagtgaagccatggttgtgttgagggcacctacttatctcagaaatctctagagttttaataggtgcacaggaaactaaagacaaggacttgggcctatacaagaagtcaggactgtgatcctgcataggactggaaattcaaggcgctataccctccaagaacagactggggggaaaaaaaaccctatgctagcccagggagacacacaggacatttgtttactttggcctgcagtgggcttgcagggcagaagaaaattttccctttagaattaataaccctttagaattttccctcactaaggttttaaagttcaaatttgtcaagaaagtggtcccaggctggagttctggggggcctggaagaaacaaatacaaatcctgactgcacaggtgtaccctcaacctcggtctcaaaggatttcacagataaac

SEQ ID NO: 316070 - DNA, 4001 bp, Homo sapiens
gttttgtggaatacattaaagtaaacaaaaatctggggtctatacaaaccactcgagctcctcaccaatagtttaaccagagtccctaaggtagaattcacagttgtatcatgacacacgccttcagaaaacactgtttaagaaagtaattgagaactctcaagcagcttcccctgatgtccagttcaagtgtatgcaatgcagaaggctgtgaaattcaaaactatgtgacaaagaaaattcagtgcgtaccacaggctttgataaattatgaaaaatcaatgtatatattactatttaaataacatctgaaaaacattttgaaataattaacttgtgttcacattccatgcattttctagcaggttaagccctgggtttgcgtctttgtgcctgtttcctacaaagctccattcttttgacaaatccaagcattcctcagactgaaacagaagttcccaaggattctatttaccctctttactgtgtacctgacctcacaggggctactccttattaccaatggcacagatgattggaaaagcaaactctttggggctttatttgggattttactcactgcctttgagaaatccctggatgtcaaagacatcacctgaattttttccaggggcaagaacaagtgactatctccctcccgcttgaccacccctgccaacctccctacttcaaagcctccagtgggttgggatccctttgtagcagtgaactttttccctatggttttgcagcaccttccttgagcaaagaagaaaacacaatgaaatttgaaaacaaaccaacaatagcaacaacagaaactccaaacagatgggcgaaccagtagtctcctccaaggcggaggctcactttttactgcagaattcggagctgtttaggaacttcctgattaccagccccaggcagaccaccagcagcagcatgtagcccacagtacccgagaaagtgggtgcggcaggcggcgcctggaggaactggcgcaggccctcttctacgtagtacacctggtcgtagatgctgaggaaggtgaagatgtggaagagctggtggctgtggccgataatgtcgaaaagacccggctggatgcgctcggggatcttgctcacgttgaagaaggcggccaccaccagccagaagtagcggcggtagaagtgcacgaagagtgtggggttctccccacgcaggtcgaagagccagctctcgagcataatggggcaggccatgctgagcggcatgacgaagacgaaggtgcgcagcgcgaacgggtaggtacaccagtcggtacggctcttgcagcaggccacagtgcaagccaccgccagcacgaaggccacaggcagcaccagggcgcggtaggcggcgataaggcgcgtgcagtccacgtgccagcccaggcgctgctgcaagtatggagtcatgactctggcatccagcaagctgaggcctggcaacaggtagtagtagtaggccaccgtgctgccgaagccgtagtagctgatggacgcgtagtccaggtagaagaaggcggcgcgcagacgcagcgacaggcagctgaacacgtgcgccgtgcagctcatggcgaaggtcagcagcactcccgacgcgtagcaccacaacggtagcagccacgggtggtggaagggcacgtcgccgccgctcaggaagaacagacggcagaacttgctcaggaacagcagcagcgggatgaagtgcgtccagaagttgagcgtctcgttggtaggcttcagcaccgaggctaggcactcctgggccgtgcacggcagacgccggtagcccgacaggatgaagcactccacgaagtcgtcgggcacctcgtcccagcgcagcagcggcttggcagacgctggggggtcccgggaggcggcagagtgggagttccgggcggcccccgaagctgccggggccggggccggagggccttttgtgcccgcgccccggggctgcaggcgccgcggcatggtgcccggggctcggctagggcgcgcgcaggcgacctctggcgccggctcccgggcgctgggcagcccccgccggccgccgtcggagcctttgtgcccacgccgggggcgtcgctgcaggtttaggagaagacccgtgcctccgagcagccgctcctaaaaattaaataaatcaataagagaatcaattaataggcagcgctgcgaccgccaggagcgcggagcgcgcgaggctcagcggcttcctcgccaagcccctgctaccggcgcgcggccgcccgcgctgcggcagcggcggcggcgcggctgactgcggcggcagcgcggcagcggtgactgggcatcgcgcggtgcgggtgcctccgccgccgccgcccccggagcgggaggtggggatgtgcgagccgaggcgcggagggagggacgggcgcaccgaggaagggcgggggcctcccaggctagggtttcgcggccgcttcgggggatagagttgtcccctgtctcgagttccgtaccatccccctcctcgggccgccgcagcccgggccgccccgttaatgattgatgcgggggccgcaggctggtcggcgacgcggcggcgcgcgcgccgagtactagagtcggccctggggttcgaaacccgacagccacgcgggcgttctggaggacactggggagccgcgttcgcggggggcggggagctgcggctgcggggggaggggagggcgccggagccgggcagggcggagagatgcgccagcggtaatctccggaggtcgccggggaggggggcactccggaagtcggggggctttaagcccgcgtccggatcggggccgtgtcattgtcagctacctggggatgcgcctctcgctccctcactgtctttgcgtgtgtgttagtgtgtgtgtgtgtgtgtgtgtgtgtgtgtcggcctgtctacgcactacacgaaggcttagttggtcttctttcgtctagtgggcgcactcaggtgcgtcaccattctgccgtttccctcgcccttgtcctgtccgaaagaaccgtccgcaagctgccctgtggtcgcgctcaccagctcttcgagccgcagctaacccatcttcttgtttttgtgtctttaactaggacttctatttggaactgagtccgacagctcaggactggctgctcaaactccacaatttaatgaaaaatctcagatgatgactcagaaaacctctaatgatctgaggaatatattaagggattccagagtcaaaggctgatcatggagggcattgatgagggaagacttcaggtaggaggtgcattctagcaggaactgaagagaatgaagtccagttggtagaaacggagggggtggcttggataaatcttatatgtaattaatcagaagtacctggcaggtggctggagaccagaagaaaggaacactggaagaatgaaaacggttgtgatgcactgcagtgtgaaaatatgcccttgagccttaaagaaaggggcttaaggccgggcgcggtggctcacgcctgtactcccagcacacagatcacgaggtcaagagatttgagaccatcctggccaacacggtgaaaccccgtctctactaaaaatacaaaaaattatgtgggagtggtggcgcacgcctgtagtcccagctactcgggaggctgaggcaggagaatcgctggaacccaggaggcggaggaggttacagtgagccgagatcgcgccactgtactccagcctggcgacagagcgagactccgtctcaaaaaaaaaaaaaaaaagaaaaagaaaagaaaggctactttcatcgctactgcacatcctctaagtaggttaaggaagatttacttagtagagcctcaagatggatttaagttatggataagaattatttataactaggatatcattcagtattataagtgtctgcagttacttaaggatgctagaaacagtctagaagtttcagtcttctctctgaagtatact

SEQ ID NO: 316071 - DNA, 4001 bp, Homo sapiens
ccataagaagtcaacatatagctaataaaggttatatataaggtaaactgatactattaactttaagaacttattaccagaggcaaatgctctatttcaggcctacattctcatgtatattttttatgcaaccacgaaaatgtcattttcaaactttctatacaaatggcaagcttttcagacattaaatactaatcttcaacatttcatgtgtttctggttcactgtttcaaatggtctttatactcaatttttactagaggctcattagttttcttttgcttccccttcctaaaaccaatacggtgatgtgtacataaatcttaaatgtttaacacacttcctgttgcttcctaatacacgtacagtatttatttattttacatggagtctcactctgttgctcaagatgaagtgcaatggcacgatctcggctcactgcaacctccgcctcccaggttcaagccattctcctgcctcaggctcccgagtagctgggattacaggcgcccgccaccatgccccgctaatttcttgtatttttagtagagacggggttttgcaatgttggccaggctggtcttgaactcctaacttcaggtgatccacctgcctcagcctcccaaagtgctaggattacaggcgtgtgagccaccacgcccggccagtattaatcttttctttcccccttaaaccatgcaatctcaaatgggattaccacctccatctgtcctcattttccacctccccaggagtttaagattagtgcctgacagatctatgttagtgtatgaagatacaatgtatgtaaagttttcacaagtccctgataaaattcacctggaatgcttgtcggacatataggttcttccactccacccacccctctcctgattgtgatttgggaggactggggtgaggcctgggacataaaatccatacaaactcttcaggtgatccttgagattaggcaatggctccgccacattagagcctcgattatttaccactgactatcccacgtgttgataaacaatgtttcttatcagcaatcaggtggattcgaggcacccatctaaccaagtcagaaattggaaggaatgaagttttgaacaaaagaggaggaaaattttcaaagccaaatgcacatcagattcttaaacaggtgaggaatttctctcttctctctcaaattagaaatgaattactgtgatgcaaaaatcagcaatactgatcaaccatacgcttcacacttctactcggaaggttcggcagttttctttccaaatcaaccggaaacgaaatcttccactgtctcaattcaacaataaagcctctcctacgactttgccagacacaaagtgataccttccatcagacttcgtcctcccttagatcacaagctaaagaaggcgactggttgtaatggaacacaacctttataattagatggaaaaagaataaaaaccgccattctgccagctgtactaacttcttcacttcagaaactggctcaacagtttccactcgcgattatgaagtgtggcacgcaatgaaccctcagcttagttccccttccagtcacgtccttcccaatgggaaaggagaaagcgcaggctcgcggggggctgggctgggcaaggggagcgagaagcgaggactggacggaggcgagagaggagagagaaggggcaggtaaggtgaagggggtgagctggggccagcacaagaggcccagacggcctccgcccccgaggatacacggccagagctcagggaccaagaggcgagaagaccagagcgcggcggctattacctgcgtccgaggagctgcggcggggttaggaccgcagtgagctcctcgcagctgcggccgcccaccgacgcaccccacgcctggccgcagccccagcctctctgcgcccagcctcgccacgccatcttcccaacctctgccccaccatggcccgaccttaccaaccccagctgcgcaactacttccggggcgaaggcaacaccatagagcacgaggagcagtctagagcgcccccgcgcggctgagcggcagccgaaccagccacggtgcccggacgactggctggcgcccttctgtcccaccgcttcccctcccactgctcagctggctccgggagcgacctgcgagagtggcccggcctcccggcatttgcagatgaggaggatggggccagagcgaagagggacaactgtcattttttcgagtaacggcacataccaggcgctttgcctaagatcgcatttaatcgtcacagcactgctagaggtagatgtcatcactgtttcactttgcctctggtcagaggggataggacttgcccggagttgcagggctggtccctagaggaaccaacgtggcaagccaagttttcttaaattactacttttttctgcatctcaccacttcgtgttattctgtatgcctttaacaaagtccaagcctatcgggcggggtggctcacccctttaatcccagcactttgggaggccgaggccggcggatcacctgaggtcaggagttcgataccagcccggccaacatggtgaaaccccgtctctactaaaaatacaaaaattagccgggcatggtggcaggggcctgtaatcccagctactcagttggctgaggcaggagtattgcttgaacctgggaggcggaggttgcagtgagccgagattggaccactgcactccagcctaggtgacagagcgagatccgtctcaaaaaaattacaaatacaaatacaaaaattagctgggcgtggtggcgcaaacctgtaatcccagctactcgagaggctgaggtgggagaatcacttgaactcgggaggttgcagtgagccgatatcgtgccagcctgggcaacagagtgagaccctttctcataaataaataagtaaataaacacaaaatccaagcctgaaatgaaaagcgggctttcactttttcataatccatccctcaactacctgtcagttagcttgattccctgccattccattccccccgaccctagctgcagccatacagtcattggccattactcaaaggcaccatccgcgttcccactgctgagcattcatgctaccgttctcaccacttgaaacatctaaccgacttgtccttcaggtcagcctcaagtgtcacctcttccaggaggcctttcccagacctccactccaatttagattcccttcctttgtactcacataccgctttatgcttatctctgcaatagcacttcattcattccataagctcttattaagcacctacagtgtgtcaggtgatatgttaaacctggggatacaattgagaagacactatatctgacctcacaaagattctattgtattgggggagaaggctctgtaggagtctagagaggggggatatagcccaattgaaggaaggggcatgggaggctcagggagaaggcttcccagagaaactgatagaggtcaccaagagaagaggattgaagtgttcctcagaaagaatagcatttgtgatgtctcccagcgcacgacttgtttgaaaaactaaaataaattcacgccttttccacacaacccagagaggggcccatacggcattgttctagattctctgtgggcggcaagccatccaggtgccgaggcaagagaccaagggcacgagctgttccagtataataaaatatataaaacaacaagagttatactagatctagatcatagacgtgattatatatgaatatcattaatcatcagtttgtagcaattattctttattccaatattataataatcctcgctctataatcataacctaggaaaaaccgggccatacagaggcaggagctgaggggacatagtgaggagtgaccaaaagacaagagtgcgagccttctattatgcccagacagggccaccagagggctccttggtctaggggtaatgccagcgtctgggaagatgcccgtt

SEQ ID NO: 316072 - DNA, 4001 bp, Homo sapiens
ctgcctcagcctcccaaagtgctgggattaacaggcgtgagccaccacgcccggccggttttgagttttaataagttttgggtcatctgtgctggggggtaagacaagaggggccactggagcagcctgggggtggaggaagaggagtagtgggctggggccggtcaaggatggaagcccagcaggaagactgaaatcttttctgcttggagggctagaattgagttattttatcatcacaaaattatactttgtgctatttgtattttcatgctgtttaaatttgtataattatttctttttgttcatttggggttaacattaactacggaaattctgaaacttgaacacattagggtcacctgggctgccggttaaatacacgcttcccacccaccccacattcactgaacctgaatctctaaaacagagctgggaaggtgcctggttaacctgctctccaggtgattcagatgcaggtcagacctacttctaaggataatggaatctaaaggagaaagaagcatccttaagggccagatcgatggtgatgctgacctctgaagtcaaagtggggaaaaccctcaaggaaaagtgacacccaaaagagaaatgactaatatcacacagttgcccttctgagcactccttggtaaaattaatcctaggaaaacatggtattttgttttcataagggccatgagccaagcatatctcctgtccccctccttccttccttctgtgcgccattctttttctgtttcatttttcctttttggatccctgcttgggcactctaattgcatggcctcagcctcagcctccttgcctctcctctggcccgaatgcttctccaaatctagcgacatgaaagcggaattaggggttgactagatcccgataggtcatcatccataagatgccagtggaaaaggtgcccattctgggagctgcaggtcactggcttcccattgcagaccagggaggcccttgagccagcagatcacctctgggctcttggcccaccaagtagtggtgggtctgtaaggagggaactttgccgactttccctccaaagctcaaatctcccaacccacaatcacttcagaatatcatccttgctcccaatctgagggccactagagactcggagaagaggccccggcaggccctcgacaatgggcacctgtggtcgatcgacagcccctccaatgtggccgctgtgacggctctacgttgacattcaggcagtgtgattttaggtagcgcctctgcccctctcccaagtgaccccgggacccctgggaatctccaagaaccacaaggaatctctgtgacttgccacgtttcttaatcagtttccttccccacacaagaataataacaacaggaaaagacagaaaaggatgataagaggatagactcacttccacaacaacaacaacaaacaataacaccaccacaacagggaaagacagaaaacgatcgagggataaagagttacttgcgcggttccgccgccacctccgggccgcgccattaagcgcctggaagcgcagggcgccggggaaccgcagcgccccgggtgcgctcggaatccattctgccgcccccgcccccgcccccgccccggccacctccgctacagcagccgccgaagtcgggcgggtcaccctcccgtgcgtgccctgccgccatttccctggagggagggcagaggtgccccctcctcaccccacccctcgcgcccctcaccgtcctccgggtagaagaacaccaggaagcgggatgggctcctgggatcctggcggacctcacactcgccgcctcccgacctcttcgggctctggaagtacatctgcaacttggtgttcaagttcttcggggggtcggggccccaggagccctcgaccagcagcgggaaggagccgggcacagccatcctcagctccgctctccgccggactgcaggggccgcgccaactccgggccgctaactttgactctttcgctttcgtttcctggaaaactcccaggccttggtttccttttgccttcagcctaacacagcggacccaggaatggcagagtcatcccccgcccacctccccaccttcgcattcggcccacagccaaggccaaagtaaccctttggggctggccagcggcgccccgggaaggcggcctcagttcacctgtgctccacgggctcccacaccccctcctaactccgggccccctacctgccgctcgccccaaccgcagatcaagtcggcagctttggggcaccagaccttgcccaaacgcaaagatcatttaatttttgccgcaagccgaccctttacaaaagaataaaatgactcacaaactgtggcccctttagaatgtttgctgcctatttggggactttttcagcaatcattgtgattatcagaattttacgttgctttccctgttttgctttctgttccttgatctgttaatactacatgtctagaaatgtgggggaaacaattacactcacagttttttttgtggaatatttactaggcgccatgcactcactcactgaaccctcgctgagctcacggagctatggtgaacacagtgggcaataggtgctctgggaaagaatatacttgtgttcctggaacagatgaggagtggctcctagtccagctgtggcggctcagggagggtttatagggcggtgacatgtaacctgataaccccaggatatcaggggatagccttggagggttaggaagtggggttccacggtgtgattcacatgtacaggatcactccggctgctgcgtggtggctagagtggaggcagagagatcagccaagtggctaccatagtgtcctaagtgagagacaagggtggctgagactggggtgctggcagagaagaactgagaaaacgaggattctcaattaatagtgaaagcaggacttgctgaagaatgtgagccttgagagaaggagaagctcaaggatgactccatggtcagccatggatggcccgtgcaagtggctggataatagtggcatctgcaagaggggaggccgagtgatgggagagaagctggggctgtgtgtttccttgaccccaaataaagcagtgttgcaagtcgaggggggcggggggattatcattccagtgctaccgatacctcaggtcagagaagtgtctgctggactgctgaggagcggcaagcatagtctcctggtgaggagggaggagagggagatggcagctactgaagactgaaagggagggaaggaagtggaagcagagagcgtaacacgctctttgcagaaatgtgaccgtgaaggggaagaaggagccaggcagtaggttgtggggttacaggatcgggctgaatttcagaatgaagagaaccagagatgggccaaatggtttacctggcttttatttcggctctgtaataatcctaaacagtacacagatattttctcctgcctccagcttgctacctgcagatggcgctcatcatctgatccaaaactgctctggacccccgcatgcggaagacgggaggacaagcgccctcagccagacttggtgactgtttctccccagggcctttacatctcatcccaaaccacaactaaaatcagcactcctcctctcccactctcccctgagtttggggttccagaactcagcaaaaagtttccctttttcctcacataattattgtataagaaataaagtcagaggcatttctggattactttcgaggatttatttaattatcgacaatgtgtcttaccaccgaggtctgcttatcatgcctgggtggactgggaaggagctatcagaggatcaggatggcaggtcttgaaagccaaggaaagaaagttctagaaggggcaaattgttgaacggcattagctcctgcagtactttgttttctgcaagttatttttgccttgttcacttgaagaatgcgtatcctctcacaattctc

SEQ ID NO: 316073 - DNA, 4001 bp, Homo sapiens
gtgatacctaaggctccaaagactctctgctgaatgatttcatgtacatgacgttctggaactacagggaccaaaagatgaccctagtggttgccaggagctcatcttgagtgaagaggttgaagacaaagaaactggtagaaaactcttttatatcttcattatactggtaaacatttgtcaaaactcacagaagtatacactaaaaagtatgaattttctaaatatagaaaagctgtctgtaaattacaccttaatttttaaaatgaaagaaaacatcaaagcatacatacacgtaaatagacaacatagcgaatgagtaaacctcatatataatattgagaaaaaagaaaaattgaaatgttttatgtgaagataactataaaccttctttaaagacacaaaaatagacttaaacaatgaaaaggcatcctttgtttcgcttccttttctatgtgcttcaaaacattccttcataatggagatttcattggttgtgtcgaggatcagtacacagatatttcaatttgtacactattcttaacatacacacacaaaaaagtttaaaaagtcatgtattgtaattgtttttaaaagttattctagtgactttccagcttaaaatttggaggcaaattttccttaagaggatatgaagtaccagtatctacaattgttgaaaagctgttacatatgtcccaccaattcacaatttaatatcatatacattacatactcaaattttcaatctttcacagcacagtaggttagaccatgtcaacaccacctaaagatatcagctctctgtaatttattaatttaatgcaatcccaataaaaattccaaagagcttttcttttttttttttaaactgatcatacatcagaaaagttcataaggaaaaataaacaacaagaatagctaggaaaatagtgacaaggaagcactctctaggaagactagccctgacattaaaacatacagcaaagcctctctaaagcagatgaataaacgggtcaatggatgaaaatagaaggtccagaaatacccgaaccacatatgaaagtctagtacatgataaagctggtatctcaagttactgggacagtgacgacctttataataaatggtgttgggacacttgatacccatttgaaaaaaaataattagattcactcctcaaaccacacacaataacacactccaaatgtattatagatctaaatgtaaaaaatacatcagttcaagtactagaagcaagcatgagtgaactcttctataacttgggtgtagggaagagtatgactaaaagtcatatattaaaatatgactaaaagtctagacgtcataaaataaaagactggtaagtcttgccacacaaaatttaaaatatttgcatggcaaagagaaacaaaagccccccataagcaaactcaaaaaacaaaaaataaattgggaggacatattcataacacatatcacgaataaaggactcatatcctttcaaactttataaagaacttttaaattttaagggaaaaaaaaaaaaaaccaccagaaatgctaaggaaaaagaagcagcacgcatccccctcttccggaacagggaagtcagtgtagtcggcgccccctagaagagagggttgtgcgtggcgtggggtctctgcgcccgctcgggctgctgggtcttgcgggccccaggctcagccctgctgtccccttcccgcacccgtcccccgcgctcctcaccatactccgggaggaagagcgccgggaggccttccgcgccccacggttcccggccggcagcacgctccccgcctcccgatctcgtccggctctggaagtaacacctgcaactccgtgcataagttctctgggggtcggagcccctggactcagagcagcggcaggaagggggcctggcgcagccatcctcagctcgctgggactgcagttgcgccccacccaacaggcttgtgcctcgaacttcttttctctgaaaaccgcttccgtcaaagattgaggcctcgagtttgcgaacagctgcctcaggattgtgtcgccctttgggacagacgttactgccagacaaatcctgggtcaaaatcctgaggtctgcaattttattagttatgtagcctcagtcaatagcatctgtacagtgggcacagccataactatttcatgttattataatgaagattaaatgagataaagtctgtagaatgcctggcacattaaaacacaggaatcagtattcctttccttttctgttgggcatcccactcctttccccccaattctccctacacacccatatttagaaaaatacactgggttctctcctgtgctccctaagccagggctggagtcaggttcccctctggcccaacagggcattatttaattcaatcaacgcgtattgaaggcctttgatatgcctggcactgtgttaagattataaagatgaattagacacagatcccctctctttggagtgaggggtgaagtaggaggtggagaaataaaacatagattaatactgttacctggtgtatcacgaaaagtcctggcagtatacagatggtatactcaaaattaataattgaagataatttaataaagaaattatttacacaggtgtgggcaaagggttaaggaaaccattgagagatggtgaagtagcctcctccccttaccatctaggctgaaggggcaagggagggggcatctcctgaacttggtaagagctataccaagtgccagcaggtagaacccatgactgctttcggaagacagccaggggagtataagcatcccaagtactctctccgtgtgccttccaatctcgtgctggtacctcccactgcagaacccaatgagtaatcagagaatggagctgatgtggtacttagaggtcagccctcagtaccacctccaaggcagagagcagggtaaaaggttttggtatcgtatttgcattgagatacatataaagtattaggataacagaaatcagtggttcgttgtaatttagagacaagattggagaaaagtttctatagtagtggcatttcagtaagaccttgcatgatgagtaggggactttctaagaggaaaatcaggtgaagaatgagaatgaggtgtgtctctctctccctctctctcttcagagttccctttttcatcatctgtcatgcagagagcagcgatgggggtggattacacagaacaaagatcacatgaatgaaagcatagactgtgctttggaaaatcttgtagtctggtgtgactgaaccctagggacttggtggtgaggaaggagcacaaagtatgcaaagtggcatgagcaatcgctaacggccatgctgctgagtttaaactctattttctaggccagtggatctctaaatgtaattcccagaccagcaacatcaggttcattgtgaagcagtaaccagggtgataacccctagcaccgcgttacattacatcttactttgcctcacttctctttttgtttgtccttgggcttggacctccaaaattattaatatcttaatctttgcatcaagctctatgttttagatctgatcaataaaaatgacccaatcgataaaaaaggaaatagcacctaacttctgtatggaaatcaaaccaaaaacagtactaaacatttttttttttttttgagacagagtctcgctctgttgcccaggctggagtgcagtggcctgatcccagcctactgcaacctctgcctcctgggttcaagcaattctcatgcctcagcctccggaatagctgggattacagatgtgtaccaccatgcctggataatttttgtaaacactaaactattacggtaagtgtaaggaagtccaataaagatcttatttttctcctaatgattactttgatgctattttcagggaagcatcaaatatgtattattcttttattttattttttctttggagagaagggtgcccctgatc

SEQ ID NO: 316074 - DNA, 4001 bp, Homo sapiens
gcccgaatgtgttactataatgggagtcaaacatgtcacggaaaataaagaaaaacggttgcgtttcatttctcggtcagtgtaatgcagagaagagaagagctaccgaaggtgagttctaaatgccaagtaggttacataaacaggaaagtaaaaatagaggaacttagaggtactaaactatacttgtggaaattcaacagttgagagctgacactaagtacaatgcgtcagttaaactccacctttatatcagttaacaccccatctaatcctctcctgggaaataggtgtttgacaggcaaagaaactgacactcagagaggttaagtgacttgtccacagctacacattgctaagtggcatagctgggattcaacccacgtcttcctgagttcagagaccacatattttctacaacactctctgtccactcagggcaaatattagccacaatttcccttccagaaattagtcatactaataattacaatatattgcttaaataaagtacctgatttccgattaaatgtccttgctgttgagtttacaataacatctacctgttcagtggctatatctccagtagcaacctgaaaagtaattgcaccgattttcatttcatatgctgtgaaacaaggcttagagacagtcccgaccacacctgaaaagaaagaaaataggtaaagaatgggctggctcagcttctggaggaacagcactcatcttggggccctattctcttcccagctcagccctctttcttttcccccaacataaaccgaaatattgccacatctcctggcctcttaaacagcttggttttctttttaaaggaaattagaaaataacgctttgtgacagtaagcatatctacattttctgagttacataggataaggcagaaatatccgatagtgtcagtctgtttactggcaagagctgctggggtgtcaagagagaggagtgagaaaaaaaagggagtgtgaaaagggcactgtcctttcttgcagacaacactgctaggagggtcttttattaccacaggtgtagcaatataaaggctgctccaaaatcccagcactttgggaggctgaggtgggaggatcacttgaggttaggagttcgagaccagcttggtcaacatggtgaaaccgtgtgtttactaaaaatacagaaaaattagctgggtgtggtggtgcacacctgtcatcccagctactcgggagactgaagcaggaggattgcttgaacccaggaggcggggtttgtagtgagccaagatcacgccactgcactccatcctgggtgacagagcaagactccatctcaaaaaaaaaaaaaaaaaaaagactgctcagaggaagttacctttaacctgttggcatattactctccactccacactctgaggcttacaacttagctgtgccacttcagctcatcccttaaaccctttagatctacctttcaacgtttatacagtggcaacagaaccacctgccacggggccattgtacacgttaaataatatactatatatgaaagcaatcagtaaagtatagtgtgccaggcacggtttagttattattttattaccatttcttagaaactctggtttcattaccattaatttggttcatgttaatatgcgattgcttctttgtgtgcccagacaatgggacatgctctaacacctcccccatcacagatttgttcttcatgtgaattagctttgcctacttctactggacttcaactaccactgaagagttgctcagcaaaaggaaatatttccttagcagaacgactttaccagaccttgggtatctcctgccatgggaatcctggccttgttgggatttattcttgaccagttagtgaattcatctaaaaatgcctggaaatagaaacagttactgactacaacaatattgtgtaaaaatattaatccaattctttggagcattgatcatcagatatcaaagagttgataacaatagttctcaaaatatttcctcttccctcagagacttcttaaaggattgcggttcaacctaggaattttctccacaaatagcagtgctgatttgctttactttgtgagtaaactaacactgtccaggcaagtatgtcagcaggggtgctgactgtggctctgcaggaagtcacatgccttttttgtgaccactatcgttatccctcctcttttgaagccccataattctaatctcctacatccaataggctgagggaagtgtagagtatttgtaggtgagcagggggcagggcaacaacgttccttggcatctttggctgttaggtacattctggggttgattaacaacaaatacatacagtatgcttcatctcttaggtccagccaaagcctcctgaatgaaaacacgaaaatccacgttagaaaacctcagacattgaagttttgtttagaaatggaaaaaacaaaaaggcattttggtcgtgtgagtgataaaattgagcaatgggcgacagagtagagttataaagtttcacttgggttgtcttcatccattttctttcttttcaggtatctttgggactgtttctactttttctttttctctttctttctttcttttcttttcttttcttttttttttttttttgcagacagagtctcattctgttgcccaggctggagtgcagtggcatgatcttgactcactgcagcctcaaccccctggactcaactgatcctcccacctcagcctcccaagtagctgggactacagatgtacaccaccacgcccggctaattttttgtattttttgtagagatgaggttttgccatgtggcacaggctggttttgaactcctggactcaagcaatccccctgcctcagcctcccaaagtgctgggattataggcgtgagccactgcaccagtccatgtttctaattcttggttaacaatgaaatttggggcagttactttccagattgctactgaagatgtcaccccaataaagggcagatgttattgtgaactcaacaaggacacagatatcacgaacagtttgctaataataatttcccccagtttatctttgagcaaaaaaatatgtctctggatattttatatttaccgggggaaaaaaactaagaacctttgggggtaaatgttgttttttaaaatattattattatttcctatggataaatttgcttacaaactacatcatgcaatactttggagtgtttctggggaactctgggaaacatctctggaaagaccacacttccatccagaatgggtaagtataactaagaacttaaaaaacaaaattatctttgatccagtttaagtggtgatgttagtaagttgtagcaattgcttgtcagtccttaaagttgggtaatgactactaccagttttgggggttttctatgtgctagatatcatgcaaaacacttcaaatacacccgttttaatagttagaacaattccgaaaggtgttattaccacactcatcttacacttgataaaactgagattcaggctgggcacagtggctcacgcctgtaatcccagcactttgggaggctgaggtgggtggatcacctgaggtcaggaccagcctggccaacatggagaaaccccatctctactaataatacaaaaattagccgagcgtggtagcacatgcctgtaatcccagctactagggaggctaagatgggaggattgcttgagcccaggaggcggaggctgcattgagctgagatcacgccgctgcagtgagccgagatcacaccactgcactccagcctgggtaacagaacgagactctgtctcaaaaaaaaaaaaaaaaaaaaaaaaagctgagattcagagaggtatgtcacccaacttttaaatggcaaaactgagattaaacctaagtataccattcttctaatgtcagtgggaactacttagttagtgtgccttgactgcttctccactgctgaatatggt

SEQ ID NO: 316075 - DNA, 4001 bp, Homo sapiens
gggacagttgggaggtgcccccccaagtcagtagctgtggccttttgaggaccctggggagtatgtgcagagcaggcagggcactcaccacacggccccagcggttccagcaggtgaagaagcggttgctgtcttggagcagctggatgatgtagaacttgttgttgttgttctcgatgttggtctggttcagggtgcagttgtagtcctcatacacctgggccagaggggaggtggggggcaggctggctggggtcagatggggtgcctggccgtacaccgagagggctctgatggggacaggagtctgacggcagtgggagtcagagggaccctgtcttggaagcttgggggggtcactgctcttccctaggggatgcggtgtgagaggacatggctaaaccctgacatggaggtatggggggtgctgggggggacacagctgggccctggatgggggaatctgagagggacatggctctgccctgaggggacatgggcaagcgcccaggagactgatgtagtcacagcctttccctaagtgcggtgggaggaggcctgcatggggtctgaagggcagatgtgacccgcctggacctgacgggacacagccctgatgtctggggtcaggagaacatggccttgctctggcgcttacctgggggccttgggctccaaaaccagaacagagtcctaagggggtggcctgggtgtgtttgtgcttatcagtgggcaggctctgggcctgactggggactgcagctcacctgggtcccggggttgctgctgagtggacatgttggatccacgcggattatgcgcttctctgcgggtatggccttgagggcctcagcggtggagcggaaggggtcctcctcccttcctgcctgccggcccttcttcttctcagggccctcagtctgtacccagggcttcggctttggagccatggctgtcctggggcacagagaggcccttaggcctccatggtctcctcatccccaacgacccactctcagtccccacccctgccctgggccagcacagcaccaacttgccccaccccgggttggcccttcggtggcctcccactgcatcctgtgtccactctgacggcattcccagccccagaccacacccagctctttgtcactcagaaacacccctttccccagtcccaagtgcaaggttaggactctgtccagtctgcccactctggtcaacagggtctgcctggctccctaccctctgcagctcacctgtgtgtcctgaggggtagggaaagtgaaaggaggctctctctcttccacttcggggctcctccccctgtgtcagctagttcagccctggcatggttgccgggccgagtcaccgagctatgggggagggtgggcagaggatcctgggggcaggattcttggggccagattatcctcccggagcttagaacccagagctgtagaagcccttcccaatggactcaagagttctgaggagccagaactccggatcagtggccttgaactgatagagggcaaaggccagtcccaccaggccttgccctgccctgccgtgggcaggaccataggacactcacccaagaaaagcagggacatgggagaggtcctggctgccacccggcctggttgtgtgcgcctcccagggcagtcccaggtctagcaactctccatgagcctcaggcgtgaattagggagagaattcccaacaatcgccagaggccggggatgagcttgtgtgggggattagacatcggctatttggccaccagtggggtgaagcagaggctggggcaggccgagtcaggcgaccagtcccacggacgggtggacactcgatctggcatatccaaggccggggcagtcgcgtccgtagcgctgctcatgtggccggggcctgcagcacgcatctgccggtcgcgcggtgaccttgggcccggatacagacgcagcctccctctccccggggctgcttggatccccgttgggtctagcgccgggctgcccatggaggggaggagtcacgttccagaacgcgaaagggcgccgcgtctctggcgccccccagcggccaaggggcgcaaacacagagaaggctcttgctccgacttcgaagtgggccagcagcagagcgcaagcgccacagcatcaggccggaagcgccgtggagatgcgggcttcctactcgagcctggtgcgggagcctaggaacttcaggaggcggggctacaagcgtgcatcctatgggtgcctgggggcgtggcagagcctgcagaaggacccaatggagcagtaggaggcggggcccggcgggcggtggaagcctatcaatacgcggggtcttgccaggcggctggggagctgggagggttcagctgccacgtgagttctgcggccgctgctacacgcctggtgggcagcatgtcggcaacagcggctgctcgtaagcggggaaagccggcctctggggccggggctggcgcgggggccggcaagcggcggcgaaaggtgagcatggcgcttctgagggccgcggtcagccctgctactgggacaaccgtcatcccatccaggggacctgggtcccggcccttccccagcccttcgccctggacccctgctggagtcagcttcgtccctctctccgcgggccaaatcctagaaagccgttcgcttaacccgggaaccaccgccttccccattcctggggttctgagggaaccgaggggggggggcccttggtcaatgccagggtggtctggacccctgaccaaagaaaagaccgtataattcccaggccgactctgcgggggacaggggcaaatccaagggtggcggcaagatgaatgaggagatctccagcgactctgagagcgagaggtgagctattcttttccacatagtgggagggaaaactgagtcccatggtgcacggaagactgagtgagtccgaacagaactgagcctagaatccaagactctgtcccttggctctgagatcgtggctgtttcctttagtttctggtcctgcaaagtcttgtttctgcgaggtctctgggtgggaaggaccctgggccccaatccgaggccattgagacctccttaggttttggcagggactggactgattgagaaattgcaggaaaacagaacaaagctgtcaagtatttcttgcatccttcttcccttgccagttttcctgcaatttcacaattactgggctccccgtctcttaacatgccaggcactgcctttgctgttggaagtgcagagataggcaggcgggtgaagagagtgtgttgtagtgaggtgtgtattttatagttgtgtgttctgggaacagaggagggacatttaaatagggtcttgagagatgaagaggagtctctcacggagaggtagggaaggcattcagtgatcagaggaaagtctgaggtgtaagtgtgccagaatgggcagtagaaaagatgaaagggggctgggcctggtaactcatgcctctaatcccagcactttgggaggccaaggcgggaggattgcttgatgtcaggagtttgagaccagcctgggcaacatagcgagatcttgtctgtacaaaaaaaaaaagttagctgggtatggtggtgtgcacctgtagtcccaactactcaggaggctaaggtttggggatcccttcccagggagttgaagctgcagtgaactatgatcatgcactgctctccagtctgggtgacagcaagatcctgtctctaaaaaaaaaccacacacaaaaacaggaggactggtcataagtgcatgtagattgtagagggctttggatgcctccctcatttctgcaggtgatgggtgtggttgcttgcaggttttcaaagggtcaggcatggtgtcaggcctgaccctgtgggttggaggctcttggaccagagaatcctagtgccttccctatgagttgactttagaactcgcttctaaaattgagtatgt

SEQ ID NO: 316076 - DNA, 4001 bp, Homo sapiens
gcctccctagtagctgggactacaggcgcccaccaccacgcctggctaattttttttttttttgtattttttttagtagagacggggtttcaccatgttagccaggatggtctcgatctcctgacctcatgatccgcctgccttggcctcccaaagtgctgggattacaggcgtgagccaccgcgcccagccatcaatatactcttttcaaagatttaaatgtacctagtttgacattttattgtttgaataggtattacatttacatggttcaaatttagaaaatgtaaaaggtttcctcctgtctccgctgctaaattccctgtccagagtcaatcagcgcttctcctgtattcttccagtggcattttttacacgaaaggtagtagcttatacacacacttctgcatcttatttttcccacataatgtatcctagagatcttttcatgttagcacatagagagctttttcatttttcctactgcccattgtattccattgtatagatatactattattattaaactgctagtccccctatttatgggcattaaagagttccctatcttttgctattgtaaacaaggctgtaaagaacatctttgtacacaggtcacttcacacaggggctaatatatcaatgggacaaattcctagaaatggaactccagaaccaaaaagtatatgcagttgtaattctgacagtattgccaaattgttcacagtaaagacgggcccatttccagtcttaccagccatgtgcaaaaaccttatctcaggcctctctgccgccactcatccctgcttgtaaatgtgtcctccacacggttgtcagcaccatatttctaaaatgcaaatctggcaagtcattttcttgctttccctgcttaaagcccttcaggtcatcttcactgctcttcaaggcttttcaccatctaaatatgtcctgtccagggtggactatcagcctcacatagctactgaggctacatgtggccagtctgaatcgagatgtgatgtaagtataagaaaaacactgggttgcaaagacgtggtatgataaaaagaatgtaaaaatctcattacatgctgaaatgattaagttttggatatgtcaagctaaataacatcattacagttaatttcatctgtttctttatcctttaaaaatttcctaaaaatcattaaaattaatttcatctgtttctttatcctttaaaaaatatggctgcaaaaattttagaatgaacctactggctcccattgtatttctgctggacagtgcccatctaggtaggctctccctccttcatcccctcacccatctcctctcctcccaggccccaggcccactctgtgcttcagaccacagtggtccctaagcctcaggtgcttttccccccaatcctgtcctccccatctcgccgccacactcaatttattaagattctgcttgaaacttccccttggaggccttggagaagttttgctccttggttcacaggtccgcctcccctcaccagcccttgacatcagggccttgctctgctctttgggcagcaagaaacaattcagtgctgttggttaaatcaagcaatggaggagaaaagcccgcagaagcccgtctaaagggtagagttggagggagggaaggggtaacaggtcacaattaccagatgaacacattcaaattttcaaaaatgggtaagtttaacatggattcagaatgtgaattactttttaggatcaaataatagtggtaacagcagtaagagttacaaagaataagaaacacaggagaaacttactttctttgcatagtctactcacaagggaggcctggccctgggacccgggtccgcgcccgtcccccttctccccgcccacctcgagcctgcaggagaggggaccccgagggcccagaggcaccggacctactcacccggcaggccgctctcctcggtgcagacagcacagggaggagggggaagcggctctgccgggaacagggagggacctccagggaagcgaaactgaaactttgcgcccagtccgcagggcgggccgcgcctttaccgcccagctgcctcccggagcccccgcgccctcccgacgcgcagagccatggcctcccacctgcgcccgccgtccccgctcctcgtgcgggtgtacaagtccggcccccgagtacgaaggaagctggagagctacttccagagctctaagtcctcgggcggcggggagtgcacggtcagcacccaggaacacgaagccccgggcaccttccgggtggagttcagtgaaagggcaggtgagcttcgggcggccaggctgcgaaagccctctgggggcccggcccccgggtttccaggcggacccagttccagctgacctaggggagagggcgggagaaagtatgtcactgtgcggtggcggacagggacggggccctactgccaagagactcactgagacagtgaacactcggtggaggatggggcctcacatgtgcctggtgcgggtctggctgacggcgccttagtgtggatgctttccatatcctcattctaacttaatttctcagctgtcatcttccttcccccagatgcctgccagctgctgtccttgtcattcagggattccacttttatgttttaaataatggttccattgttccatccatgaacaaaaggatgttccattttgtgtttttgaggattacaaaagtgatatatgctcactatagaaataaaagagtaaaaaagaaaacaacctgaagataaacaatgtgaccatttggtgtatttccttcctgcctttttttatgaatgccagcaaacacatgtatatttacaaaattcggagtctgcacttttgattcctgctgttgtcacttacctgtataatgagtattgaaatgggagactgggccgggtgcggtggctcacgcctgtaatcctagcactttggaggccgaggttggtggatcacctgaggccaggagttcgagaccagcctggccaacatggggaaattccgtctctactaataatacaaaaattacccgggcatggtggtgcgcacctgtaatccaagctactctggaggctgaggcaggagaatcgctggaactcgggaggcagagaggttgcagtgagacgaggtcctaccattgcactccagcctgggtgacagagtgagactccgtctaaaaaaaaaaaaaaaaaaaaaaagaaggaaggaagggagggagggagggaaagaaggaagaaggaaaggggagactggagacagttttagaaacatgatgtttaatcggtggacaatgttccattgtcattaagctttcacttctatagtaaaacttaatccgcacactttagagctcttaatagctccccgactttctccatcgccaacccaccattccaggatgcagggagcagccttactgggaggtgctggggcagagtacagacacaggaatgagaggattacttgaaatctctcccatttttatgtgtgtatatgtgtgtgtttaatgtctccactgaagctaaggagagagtgttgaaaaaaggagagcaccaaatacttgttgacgaaaaacctgtgcccattttcctggtacccactgaaaattcaataaagaagaacacgagacctcaaatttcttcactgacacaatcacaagcagaaacaccgtctggtgatatgcatcaacatgaaggacatattcctaatgctgtggattcctgtctccaaaaggtgagtattgaaagaaggagctggctgtgcctgcgcctcctctccagtcaccagcctcatgtattattgatccaacacccatgtgctgggcacgtacatgggagccaggcactgttttaggcactggacacagagatgaatataacagacaaggcccctgctctcaggcagcttatactgggggccaggtcatgcacagaaagacagtaggcaagtaaacaaaataaataa

SEQ ID NO: 316077 - DNA, 4001 bp, Homo sapiens
cgaaaggtagtagcttatacacacacttctgcatcttatttttcccacataatgtatcctagagatcttttcatgttagcacatagagagctttttcatttttcctactgcccattgtattccattgtatagatatactattattattaaactgctagtccccctatttatgggcattaaagagttccctatcttttgctattgtaaacaaggctgtaaagaacatctttgtacacaggtcacttcacacaggggctaatatatcaatgggacaaattcctagaaatggaactccagaaccaaaaagtatatgcagttgtaattctgacagtattgccaaattgttcacagtaaagacgggcccatttccagtcttaccagccatgtgcaaaaaccttatctcaggcctctctgccgccactcatccctgcttgtaaatgtgtcctccacacggttgtcagcaccatatttctaaaatgcaaatctggcaagtcattttcttgctttccctgcttaaagcccttcaggtcatcttcactgctcttcaaggcttttcaccatctaaatatgtcctgtccagggtggactatcagcctcacatagctactgaggctacatgtggccagtctgaatcgagatgtgatgtaagtataagaaaaacactgggttgcaaagacgtggtatgataaaaagaatgtaaaaatctcattacatgctgaaatgattaagttttggatatgtcaagctaaataacatcattacagttaatttcatctgtttctttatcctttaaaaatttcctaaaaatcattaaaattaatttcatctgtttctttatcctttaaaaaatatggctgcaaaaattttagaatgaacctactggctcccattgtatttctgctggacagtgcccatctaggtaggctctccctccttcatcccctcacccatctcctctcctcccaggccccaggcccactctgtgcttcagaccacagtggtccctaagcctcaggtgcttttccccccaatcctgtcctccccatctcgccgccacactcaatttattaagattctgcttgaaacttccccttggaggccttggagaagttttgctccttggttcacaggtccgcctcccctcaccagcccttgacatcagggccttgctctgctctttgggcagcaagaaacaattcagtgctgttggttaaatcaagcaatggaggagaaaagcccgcagaagcccgtctaaagggtagagttggagggagggaaggggtaacaggtcacaattaccagatgaacacattcaaattttcaaaaatgggtaagtttaacatggattcagaatgtgaattactttttaggatcaaataatagtggtaacagcagtaagagttacaaagaataagaaacacaggagaaacttactttctttgcatagtctactcacaagggaggcctggccctgggacccgggtccgcgcccgtcccccttctccccgcccacctcgagcctgcaggagaggggaccccgagggcccagaggcaccggacctactcacccggcaggccgctctcctcggtgcagacagcacagggaggagggggaagcggctctgccgggaacagggagggacctccagggaagcgaaactgaaactttgcgcccagtccgcagggcgggccgcgcctttaccgcccagctgcctcccggagcccccgcgccctcccgacgcgcagagccatggcctcccacctgcgcccgccgtccccgctcctcgtgcgggtgtacaagtccggcccccgagtacgaaggaagctggagagctacttccagagctctaagtcctcgggcggcggggagtgcacggtcagcacccaggaacacgaagccccgggcaccttccgggtggagttcagtgaaagggcaggtgagcttcgggcggccaggctgcgaaagccctctgggggcccggcccccgggtttccaggcggacccagttccagctgacctaggggagagggcgggagaaagtatgtcactgtgcggtggcggacagggacggggccctactgccaagagactcactgagacagtgaacactcggtggaggatggggcctcacatgtgcctggtgcgggtctggctgacggcgccttagtgtggatgctttccatatcctcattctaacttaatttctcagctgtcatcttccttcccccagatgcctgccagctgctgtccttgtcattcagggattccacttttatgttttaaataatggttccattgttccatccatgaacaaaaggatgttccattttgtgtttttgaggattacaaaagtgatatatgctcactatagaaataaaagagtaaaaaagaaaacaacctgaagataaacaatgtgaccatttggtgtatttccttcctgcctttttttatgaatgccagcaaacacatgtatatttacaaaattcggagtctgcacttttgattcctgctgttgtcacttacctgtataatgagtattgaaatgggagactgggccgggtgcggtggctcacgcctgtaatcctagcactttggaggccgaggttggtggatcacctgaggccaggagttcgagaccagcctggccaacatggggaaattccgtctctactaataatacaaaaattacccgggcatggtggtgcgcacctgtaatccaagctactctggaggctgaggcaggagaatcgctggaactcgggaggcagagaggttgcagtgagacgaggtcctaccattgcactccagcctgggtgacagagtgagactccgtctaaaaaaaaaaaaaaaaaaaaaaagaaggaaggaagggagggagggagggaaagaaggaagaaggaaaggggagactggagacagttttagaaacatgatgtttaatcggtggacaatgttccattgtcattaagctttcacttctatagtaaaacttaatccgcacactttagagctcttaatagctccccgactttctccatcgccaacccaccattccaggatgcagggagcagccttactgggaggtgctggggcagagtacagacacaggaatgagaggattacttgaaatctctcccatttttatgtgtgtatatgtgtgtgtttaatgtctccactgaagctaaggagagagtgttgaaaaaaggagagcaccaaatacttgttgacgaaaaacctgtgcccattttcctggtacccactgaaaattcaataaagaagaacacgagacctcaaatttcttcactgacacaatcacaagcagaaacaccgtctggtgatatgcatcaacatgaaggacatattcctaatgctgtggattcctgtctccaaaaggtgagtattgaaagaaggagctggctgtgcctgcgcctcctctccagtcaccagcctcatgtattattgatccaacacccatgtgctgggcacgtacatgggagccaggcactgttttaggcactggacacagagatgaatataacagacaaggcccctgctctcaggcagcttatactgggggccaggtcatgcacagaaagacagtaggcaagtaaacaaaataaataaaaccattttatttatttggagagaaacagcgccagggcaagcaaggggaagatgggggtggtgttacttctttttttccccccaagacagagtctcactttatcgcccaggctggagtacagtggcacaatcatggctcactgcagagttgacctcctgggctcaagggatcctctcacctcagtctcctgagtagctaggactataggcgccactacacccagccaattttttttttttttgtagaaacagagtctcactatgttgcccaggctgttctcaaattcctgggctcaagcgatctgcccgccttggcctcccaaagtgctgggattacagtcatgaattactgcacctggcctggtgctacttctaa

SEQ ID NO: 316078 - DNA, 4001 bp, Homo sapiens
aattttttttttttttgtattttttttagtagagacggggtttcaccatgttagccaggatggtctcgatctcctgacctcatgatccgcctgccttggcctcccaaagtgctgggattacaggcgtgagccaccgcgcccagccatcaatatactcttttcaaagatttaaatgtacctagtttgacattttattgtttgaataggtattacatttacatggttcaaatttagaaaatgtaaaaggtttcctcctgtctccgctgctaaattccctgtccagagtcaatcagcgcttctcctgtattcttccagtggcattttttacacgaaaggtagtagcttatacacacacttctgcatcttatttttcccacataatgtatcctagagatcttttcatgttagcacatagagagctttttcatttttcctactgcccattgtattccattgtatagatatactattattattaaactgctagtccccctatttatgggcattaaagagttccctatcttttgctattgtaaacaaggctgtaaagaacatctttgtacacaggtcacttcacacaggggctaatatatcaatgggacaaattcctagaaatggaactccagaaccaaaaagtatatgcagttgtaattctgacagtattgccaaattgttcacagtaaagacgggcccatttccagtcttaccagccatgtgcaaaaaccttatctcaggcctctctgccgccactcatccctgcttgtaaatgtgtcctccacacggttgtcagcaccatatttctaaaatgcaaatctggcaagtcattttcttgctttccctgcttaaagcccttcaggtcatcttcactgctcttcaaggcttttcaccatctaaatatgtcctgtccagggtggactatcagcctcacatagctactgaggctacatgtggccagtctgaatcgagatgtgatgtaagtataagaaaaacactgggttgcaaagacgtggtatgataaaaagaatgtaaaaatctcattacatgctgaaatgattaagttttggatatgtcaagctaaataacatcattacagttaatttcatctgtttctttatcctttaaaaatttcctaaaaatcattaaaattaatttcatctgtttctttatcctttaaaaaatatggctgcaaaaattttagaatgaacctactggctcccattgtatttctgctggacagtgcccatctaggtaggctctccctccttcatcccctcacccatctcctctcctcccaggccccaggcccactctgtgcttcagaccacagtggtccctaagcctcaggtgcttttccccccaatcctgtcctccccatctcgccgccacactcaatttattaagattctgcttgaaacttccccttggaggccttggagaagttttgctccttggttcacaggtccgcctcccctcaccagcccttgacatcagggccttgctctgctctttgggcagcaagaaacaattcagtgctgttggttaaatcaagcaatggaggagaaaagcccgcagaagcccgtctaaagggtagagttggagggagggaaggggtaacaggtcacaattaccagatgaacacattcaaattttcaaaaatgggtaagtttaacatggattcagaatgtgaattactttttaggatcaaataatagtggtaacagcagtaagagttacaaagaataagaaacacaggagaaacttactttctttgcatagtctactcacaagggaggcctggccctgggacccgggtccgcgcccgtcccccttctccccgcccacctcgagcctgcaggagaggggaccccgagggcccagaggcaccggacctactcacccggcaggccgctctcctcggtgcagacagcacagggaggagggggaagcggctctgccgggaacagggagggacctccagggaagcgaaactgaaactttgcgcccagtccgcagggcgggccgcgcctttaccgcccagctgcctcccggagcccccgcgccctcccgacgcgcagagccatggcctcccacctgcgcccgccgtccccgctcctcgtgcgggtgtacaagtccggcccccgagtacgaaggaagctggagagctacttccagagctctaagtcctcgggcggcggggagtgcacggtcagcacccaggaacacgaagccccgggcaccttccgggtggagttcagtgaaagggcaggtgagcttcgggcggccaggctgcgaaagccctctgggggcccggcccccgggtttccaggcggacccagttccagctgacctaggggagagggcgggagaaagtatgtcactgtgcggtggcggacagggacggggccctactgccaagagactcactgagacagtgaacactcggtggaggatggggcctcacatgtgcctggtgcgggtctggctgacggcgccttagtgtggatgctttccatatcctcattctaacttaatttctcagctgtcatcttccttcccccagatgcctgccagctgctgtccttgtcattcagggattccacttttatgttttaaataatggttccattgttccatccatgaacaaaaggatgttccattttgtgtttttgaggattacaaaagtgatatatgctcactatagaaataaaagagtaaaaaagaaaacaacctgaagataaacaatgtgaccatttggtgtatttccttcctgcctttttttatgaatgccagcaaacacatgtatatttacaaaattcggagtctgcacttttgattcctgctgttgtcacttacctgtataatgagtattgaaatgggagactgggccgggtgcggtggctcacgcctgtaatcctagcactttggaggccgaggttggtggatcacctgaggccaggagttcgagaccagcctggccaacatggggaaattccgtctctactaataatacaaaaattacccgggcatggtggtgcgcacctgtaatccaagctactctggaggctgaggcaggagaatcgctggaactcgggaggcagagaggttgcagtgagacgaggtcctaccattgcactccagcctgggtgacagagtgagactccgtctaaaaaaaaaaaaaaaaaaaaaaagaaggaaggaagggagggagggagggaaagaaggaagaaggaaaggggagactggagacagttttagaaacatgatgtttaatcggtggacaatgttccattgtcattaagctttcacttctatagtaaaacttaatccgcacactttagagctcttaatagctccccgactttctccatcgccaacccaccattccaggatgcagggagcagccttactgggaggtgctggggcagagtacagacacaggaatgagaggattacttgaaatctctcccatttttatgtgtgtatatgtgtgtgtttaatgtctccactgaagctaaggagagagtgttgaaaaaaggagagcaccaaatacttgttgacgaaaaacctgtgcccattttcctggtacccactgaaaattcaataaagaagaacacgagacctcaaatttcttcactgacacaatcacaagcagaaacaccgtctggtgatatgcatcaacatgaaggacatattcctaatgctgtggattcctgtctccaaaaggtgagtattgaaagaaggagctggctgtgcctgcgcctcctctccagtcaccagcctcatgtattattgatccaacacccatgtgctgggcacgtacatgggagccaggcactgttttaggcactggacacagagatgaatataacagacaaggcccctgctctcaggcagcttatactgggggccaggtcatgcacagaaagacagtaggcaagtaaacaaaataaataaaaccattttatttatttggagagaaacagcgccagggcaagcaaggg

SEQ ID NO: 316079 - DNA, 4001 bp, Homo sapiens
caaaaaaaaaagtttatttgtatagtttaaaagtcctcagccaggcacaggggctcatatctgtagtcccagcacttggagaggctgaggcaggatgaccgcttgaggcagagagttcaagaccagactggataacatagattgatcttttctctacaaaaattaaaattagctgggtgtggtgctgcacatcagtaatcccagctacttgggatgctgaggtgagaggactgcttgagcctaggagcacaaggcttcagtgagccatgatcactttactgaactccagcctgggcaacaaagtcagaccttgtctcaaaaaaaaaaaaaaaaaaaaaaaaaaaatgcctgtaagcatcccttcagcaattttgtctttccatgaagaggaaagacagattccagagttcaatgccaagttttaaaatggccttgattacagttacaagttcaaaagtctaacaatcaataatttatagtggacagttaagaatacttaataatgtgcaactgggagaatatcgacttactatagacaaacagtgtatttcgaccgtttatgaactttagccctctcctatatttctagtaatatttagcaatacaatacatgtttaaaacaaaatcttggaaaacaggactcaaaggaaaaaaaacacctataaacctacttccaagaaaaaaaccactcttaacgttgtcattcggtttttggtatttatgccttagttacctattattttttaccaaaatgttaacaaaccacatatattattctacagcctgtgttttagtgaaggttcttccaagtcaacattcttcctcatgatgtttgatgacttgatagtaatctatcatatagatacaccacaatttacttatcttgggaattttggtaggatattaacatttgaggtattttgtacattcccaaagccaaagaaagcggtcaaggcccttccattcatccacacataaactctttattgttttaatttgaaacacctcttcaaaacatattttccaatcttccattttggagctcaaaatcaaatatgggcgacctgtaagtaataaagcaaaaattatgctactcttttatgtgcatgagtccaatttgcactttttggggaaaagcacatagccaaatggagaaaaaaataatacctaaaattatttgtcaagaatcctgtgttggaaagtaagttaattaaaacaattcaccccaacatacgcttctataattattgtaagaatttctatatccactataccgtgtacttatttttcagggctttttctatatttttgcaactctttcttcccctttaaattaaaacttattataataacaaaactgtgcttccccaaaccaagaaatatacacagttcccaaaatcccggattctttgtggtgttgagaagctgaaatatctggcctctactataaatacaagtcccattgattaaaatacccggaaaaaatacggaaagaaaatcactaagagtttgtgtcgaaccgtcaagaaaccacaacaaaaaaaagaggccctgagcaacggaggaaatgaaggactttcccgacctgtcactggtattggggactgagggaaacgttgacagctttgaagctgccccgcgacgagcgggaaagaggagcgcggggagtttccgacccgtagtgcgcctttgtccctgccggcaggtgcgacaaggctactgggcccatccggaggccagccgccgcgccccgcccaaccccgcgcgcccggcccgacccgcgcgtccccacggccggggcggggcttccgccgcggctcccgcccgcccgggcccacacaaaggcccggcagctgaccaagggggagcggccccacccgccctgggcccggccttacccagccgctccgccgcctgcagccccggccgcggtcaccgaccgccgcgccccgccccgtggccgccacggctgctgctattgctcctccggccgcggccgctgccgtcgcttcggcacccgccgccctcacctcccttacccctcccggtgccgccgcaaaaccagtcccgcggccgccaagcgatccctgctccgcgcgacactgcgtgcccgcgcacgcagagaggcggtgacgcactttacggcggcagcgtaagtgcgtgacgctcgtcagtggcttcagttcacacgtggcgccagcggaggcaggttgatgtgtttgtgcttccttctacagccaatatgaaaaggcctagtaagtggggtcgggaggcgggcgtggagggacccacgtctggaagttgctgcagccaccacgacgctcttctacggctacggctttgtctctgctggtatgggggtgggagcctacgcgtaggccttggccctatttcctggtagaaccgagagttggaagtccctacggcgatcatgttaaccgcgcgggctcattctgcggaacgaagccgggcagagggtggggaagactaggctagattttcgtaaggaagcagcgtctgagccaggtttgaggcccaatattttctttccgtggccacgtgcagactggcccaggtgagagctgagaatcgcctcccagactcagtgttcctctcctgccttatgattcgtgctgtttgacacgaagtggttgtcgttttgtgtctcatacgctgttgtgtatgatcccattctaatattgtgagggtaagtgcagggaattttgactccattctggatctactgaatttaattctctgggatttgaaagtagcacgtatgtttgcattaggcatttcgcattagacttaacgttaggtttggtagccaataacacaagaaaaggatataactccatagtgcgttaacccagaactaatcatttgggttaacagatttgtgatgtgtttctttgtagagttaaagaaagcaagtaaacgcatgacctgccataagcggtataaaatccaaaaaaaggtaagtgtagtgcttgagagagctgtaccaaacacattgctaaactgattttgccctgttcctttgcgggaaagtctgggttaatgtgatttggttttgggaaatggcattggatagactgaccatgggcacaagctcttaggcatcaggagtgcagctgtgagaaagtgcagtgatttggtgataagtctctaaatttgttcagcatgttaatctctgcatagagagccttctagttacaatttcttgctgttttatacttacatatgcattactttgtaagattccaattaaagctccattttcctaggacattttataggcataactaaattgcagccagattggtttctcacttgaattctgcttaagtataaagatatttttgtaagcagacaaaatctctttattttaataggttcgagaacatcatcgaaaattaagaaaggaggctaaaaagcggggtcacaagaagcctaggaaagacccaggagttccaaacagtgctccctttaaggaggctcttcttagggaagctgagctaaggaaacagagggtaagttatgttagccagaattttcattgagtggtgtagtgtgttatgtgtgatatttttcagagtaaggtaacaacactagtcactggttcacctatttcccttatggctctgacagcttgaagaactaaaacagcagcagaaacttgacaggcagaaggaactagaaaagaaaagaaaacttgaaactaatcctgatattaagccatcaaatgtggaacctatggaaaaggtatgattaggtctctttatgaatgagagatcaggggttttgattttggtttttttgcttgggcctgagtgcagtggcacaatcacaactcactgcaacctggaccacccaggctcaagcagtcttaccacctcagtctccaagtagctgggactacagaagcacaccatcacgcctggctaattttttttagcagacacgggctttcactatattgccaaggctggtctcaagtg

SEQ ID NO: 316080 - DNA, 4001 bp, Homo sapiens
tgatcactcaggcctctgtgcccctcaaagatgttgctgcaactcaaagaagtccccgctgggcatttctgagcctgtctttccactatacacagagctccagaaagaggaaatttgagacaagaccagggtcagtgtgcagggagaagagttaaggttcatggggcctggggacatttggaaccaaagatggggctgagggtcccggaggagtaatgagagtagagtgagaagacccagacatgagggccagccacatgggcagaggtaggacctgcctggacaggattcctggttcctttctcagcatccccagccctactcctgccgttttaccaggactaggagctccctaggtatgctgctggggtgggggatttgggctgtgctttaggttttcagagggtgggagcagagtgggtctcctcatggaagagggggactggaagaagggctggggggtggggtacgtttcacagagtcgagttgggctcagcctgtcacagctggaaaggtcttaccaatcacaagaggggctcgcggcccagagaggaagggaaatgtttgtaaggctacatgggagacaactggcagagctggagaacccaggggtctacctgtgcagctcagagctctttcctcaagatgtcagcgccactgggcaatggtgatggaggctggaggggcagcagtgatgggagtagggagggtggacagcctgtctggggacacagggtggggcaagccagcctcctcgtggcctgggcctgccagggtgtgtgggctgcctgctcccagccccccaccctgagcatgcaagaagaacaatccccttgtgtttgggcagcctgagcctgcatgctgatgaaggctagggggtgggggctgggatgggggtgccctggaggttgagggggctccaggacctgggaagaccaggggattttttcagatggggaaagaatagggtcccaggtactggtcctgaggcaatgagggtgacccagggaacagggagggcaggagctcagctcctagggagttcatggattgtaagagcctttgtggcggaaggcaagcccctggggacacatgtcctgctggttcagcacgaacatgagcatcctgggcttggtggggagaaaggaatgcaactggccctgggtgcatcatcaccttggagaccactcccctgggtgctggggccgggtggggcactgggtgccacaggtctcaagatggcgggccagggataggggagagaggaggcgggcacctccctctcctggccaggcaggcatgagggccaggctgaagtgagtagcagagcctcccacccccaccccccaggaccccagccaagaagctaggtcagagctgaagggctgaagagctatggggcaagagggaccactctgagcccccagctgtcatctccatacacccctggcctggaggtctgtatctggctcccccaacgactgcggaggatgggaaggagtgtgtgcccagccaggagctacaggggagtggcaagtgagggcagagatggagcagaaccagaacccagggcaggagtcagagagaggagcaggcgcaaaggacagaaacagcgagtgggatgggggcctcaaatctgggatctaaggtccaggaagcccctccctggtgccaagggcgcctctggcagaccagcgcctcccacctgtgcaggcctcagcggtgtgggacagagaacgtgttcctcgcagtctcacaaacctgcgaccccaaccgagggatctgggcgcgggctccctgcccccgggcgaacccccaaacttcgcggcccgccgtgccccgcccggcccgcgccctacctcgctggggctgtcctgcggcggcggcggcggcggcacggcggctgggccgctcagtcccacattgtccccgggagaggcggccgctcacaactgcgagtgacatcagctgcgaacaatgaggggtttgacaggcgcggagcccggccggcccggagcccggctccgcgccccccccccaccccccggcccgcccggcccggcccctccccgccccctccccggatccgattacagagcggcgggcccgccccagccgccccagtgccgcagccgcccgccccgccccgcgcgccgcggtgcgccccgagcggcggccgcttcctggagggctcgggcgacccttcccctgccactcccagagccccacgggttgggggtaggggcgtccggcctgaagcccggtccccagccacggccttccccgcaccgcccgcgctgcgcccggctccaagcccctccgctcccgccaggccagtccttccggcccgggccgcccgcccggcgcctctgccgagccccctgcacccccatccccgccttggccccgccagccccggctccgcctcgctcccggcccgcgtccctccgagctccggctgggaccctgcgccccgcctagctcccggctctgctcgctgcgcgccatcctccgctcgggcttgcgcccaccaagacccgctctcctcggccacccacagctgcatggcccggccctcgtccgcgcaggacaggctggaggaggggcctgagagccgtgtggccctgtgcacccgatcctgtgataaccccaaatctacccccggaattccttttggggatagggtcgcaaggaacgggctccgttgagtcttttactggggaagggatactagtgggggtgatgaactgttctcaagtccgctgggcaccccccgccctcggggaagcaactattccttcccccccactcctccataatcggctcagcctggtcccactgacctccacctccccccacagctgagtctcttggcacctgggtatgtgtgggtggggaggggaatccaatctcccttcctctccatctggcctggtggacaaagggcagggggaccatctggtcccgccggggtgggggaggggcccacagtgttggtcccaggggtgggggaggggcggcgctctttagaagcaggagccggtggggtctaattgcatcactttatttcaccgacctccactctggctcccaccccacaagcctcagagcaggaaacaagcttggctgagatgcctcaggcctggtaacctgaggtgtagagcacccagaaggaagggtaaaagcagggggcaaagcggtggccctccctttctgggggtcacttctgggctggggccagctgaaacctgtgtccaagtagctttcagggctggccacaccctaagccttgcaaaagggcctcctgcaagggctggcccatggggtccccaccttcccagccagtgaggttagcatggttaggagtccacatgtgtgcaagtgcttgtgtggaggctcatgtatgcatgtgtgtatatgcaaagctgcacatgacaatgtgcatgccagtccagagttagatgtacctatgcagttgccctcaagcgaagggtcatatttggaaacaaggatggctctaaacatgtaagcgtgcatgtgggcatgtatgtatctggggcctaaggaggtggggaagtgggtgttggggtaagggctggccttcagggcatttgcagaaggaggagtgggtgggagggaaaggctgggcagagcaggggaaggagtgaaagccaggcaggaaagtggaagaacaggagaagctcatgtaatggattaccctccacaggattatgttccttgattcctgagagttttttctcttgattttaccccctcagtctatcactgcaagagaaagaggtagaaaagacaaacagaccacaaaagacaagaacccagacatatagacagacgcacctgttgcatgtgcatgagccagagcctgggagagaagagagagcgtgcaagagagagctcagagcaggcaggcagcccaccccctgcagcagtgctgggcttcactggagcccctgcaggaagtccagcagccctgtatgcca

SEQ ID NO: 316081 - DNA, 4001 bp, Homo sapiens
gtgaagccctccgcaggcttccaagtcagatgtgatcactcaggcctctgtgcccctcaaagatgttgctgcaactcaaagaagtccccgctgggcatttctgagcctgtctttccactatacacagagctccagaaagaggaaatttgagacaagaccagggtcagtgtgcagggagaagagttaaggttcatggggcctggggacatttggaaccaaagatggggctgagggtcccggaggagtaatgagagtagagtgagaagacccagacatgagggccagccacatgggcagaggtaggacctgcctggacaggattcctggttcctttctcagcatccccagccctactcctgccgttttaccaggactaggagctccctaggtatgctgctggggtgggggatttgggctgtgctttaggttttcagagggtgggagcagagtgggtctcctcatggaagagggggactggaagaagggctggggggtggggtacgtttcacagagtcgagttgggctcagcctgtcacagctggaaaggtcttaccaatcacaagaggggctcgcggcccagagaggaagggaaatgtttgtaaggctacatgggagacaactggcagagctggagaacccaggggtctacctgtgcagctcagagctctttcctcaagatgtcagcgccactgggcaatggtgatggaggctggaggggcagcagtgatgggagtagggagggtggacagcctgtctggggacacagggtggggcaagccagcctcctcgtggcctgggcctgccagggtgtgtgggctgcctgctcccagccccccaccctgagcatgcaagaagaacaatccccttgtgtttgggcagcctgagcctgcatgctgatgaaggctagggggtgggggctgggatgggggtgccctggaggttgagggggctccaggacctgggaagaccaggggattttttcagatggggaaagaatagggtcccaggtactggtcctgaggcaatgagggtgacccagggaacagggagggcaggagctcagctcctagggagttcatggattgtaagagcctttgtggcggaaggcaagcccctggggacacatgtcctgctggttcagcacgaacatgagcatcctgggcttggtggggagaaaggaatgcaactggccctgggtgcatcatcaccttggagaccactcccctgggtgctggggccgggtggggcactgggtgccacaggtctcaagatggcgggccagggataggggagagaggaggcgggcacctccctctcctggccaggcaggcatgagggccaggctgaagtgagtagcagagcctcccacccccaccccccaggaccccagccaagaagctaggtcagagctgaagggctgaagagctatggggcaagagggaccactctgagcccccagctgtcatctccatacacccctggcctggaggtctgtatctggctcccccaacgactgcggaggatgggaaggagtgtgtgcccagccaggagctacaggggagtggcaagtgagggcagagatggagcagaaccagaacccagggcaggagtcagagagaggagcaggcgcaaaggacagaaacagcgagtgggatgggggcctcaaatctgggatctaaggtccaggaagcccctccctggtgccaagggcgcctctggcagaccagcgcctcccacctgtgcaggcctcagcggtgtgggacagagaacgtgttcctcgcagtctcacaaacctgcgaccccaaccgagggatctgggcgcgggctccctgcccccgggcgaacccccaaacttcgcggcccgccgtgccccgcccggcccgcgccctacctcgctggggctgtcctgcggcggcggcggcggcggcacggcggctgggccgctcagtcccacattgtccccgggagaggcggccgctcacaactgcgagtgacatcagctgcgaacaatgaggggtttgacaggcgcggagcccggccggcccggagcccggctccgcgccccccccccaccccccggcccgcccggcccggcccctccccgccccctccccggatccgattacagagcggcgggcccgccccagccgccccagtgccgcagccgcccgccccgccccgcgcgccgcggtgcgccccgagcggcggccgcttcctggagggctcgggcgacccttcccctgccactcccagagccccacgggttgggggtaggggcgtccggcctgaagcccggtccccagccacggccttccccgcaccgcccgcgctgcgcccggctccaagcccctccgctcccgccaggccagtccttccggcccgggccgcccgcccggcgcctctgccgagccccctgcacccccatccccgccttggccccgccagccccggctccgcctcgctcccggcccgcgtccctccgagctccggctgggaccctgcgccccgcctagctcccggctctgctcgctgcgcgccatcctccgctcgggcttgcgcccaccaagacccgctctcctcggccacccacagctgcatggcccggccctcgtccgcgcaggacaggctggaggaggggcctgagagccgtgtggccctgtgcacccgatcctgtgataaccccaaatctacccccggaattccttttggggatagggtcgcaaggaacgggctccgttgagtcttttactggggaagggatactagtgggggtgatgaactgttctcaagtccgctgggcaccccccgccctcggggaagcaactattccttcccccccactcctccataatcggctcagcctggtcccactgacctccacctccccccacagctgagtctcttggcacctgggtatgtgtgggtggggaggggaatccaatctcccttcctctccatctggcctggtggacaaagggcagggggaccatctggtcccgccggggtgggggaggggcccacagtgttggtcccaggggtgggggaggggcggcgctctttagaagcaggagccggtggggtctaattgcatcactttatttcaccgacctccactctggctcccaccccacaagcctcagagcaggaaacaagcttggctgagatgcctcaggcctggtaacctgaggtgtagagcacccagaaggaagggtaaaagcagggggcaaagcggtggccctccctttctgggggtcacttctgggctggggccagctgaaacctgtgtccaagtagctttcagggctggccacaccctaagccttgcaaaagggcctcctgcaagggctggcccatggggtccccaccttcccagccagtgaggttagcatggttaggagtccacatgtgtgcaagtgcttgtgtggaggctcatgtatgcatgtgtgtatatgcaaagctgcacatgacaatgtgcatgccagtccagagttagatgtacctatgcagttgccctcaagcgaagggtcatatttggaaacaaggatggctctaaacatgtaagcgtgcatgtgggcatgtatgtatctggggcctaaggaggtggggaagtgggtgttggggtaagggctggccttcagggcatttgcagaaggaggagtgggtgggagggaaaggctgggcagagcaggggaaggagtgaaagccaggcaggaaagtggaagaacaggagaagctcatgtaatggattaccctccacaggattatgttccttgattcctgagagttttttctcttgattttaccccctcagtctatcactgcaagagaaagaggtagaaaagacaaacagaccacaaaagacaagaacccagacatatagacagacgcacctgttgcatgtgcatgagccagagcctgggagagaagagagagcgtgcaagagagagctcagagcaggcaggcagcccaccccctgcagcagtgctgggcttcactggagc

SEQ ID NO: 316082 - DNA, 4001 bp, Homo sapiens
gcccttctgtgggaggtacaaaacagataatcactcttaacttagaggtcacagcctccttccctgggctgaagcctcagctggagggggatgtacagagcagagctaggcacctaccttcccgatgatgctgcccacttcctgcggacaagacaagagccgtcagatgggtgccagtgcccaggcccagcccctccccactgggatacccagtgaaacccagcccagcccagccttgcctcgcctggccctccacctcccgctcaccttcccgtgcatcagcatccgcagcgtgagggtgatgctgagctctggctcctcctccagtcccccgtccgagccgctcattctgtcaggcgaggctggggccacagcgacctgcgagtgtgtccgcgctgcaacctggccggctctggcaggggcagccaaagaggggttcgagaggagcccagtccaccctgcccctgcccttacatggggaccccagagctgggctagtcaaactcccagaggaaagagactgcatggaccttgagcgccacacatcactctgaccagggtgcttatgtgtgtctcacgagctgtgtaagcctggggagcccattcaaccctctgagcctcagcttctccatctgtagaaggggatacaaattcccatctccaaagagtgatgagaattaaaacaataagcacatacatggtaggtacctagcctttcccttaccctgagacactaaaagaaataattaactaggaagcctatgggagtcaggaggagagcctcctccctgacctcttggaagaggtaacctctgtggatggggccctgaaggtggagttcaggctgaaagcttactccatatgagaggcactttcgtccagcagccagatggtggatggagcacagaagagcagctggggaggaagctggagcagccatgggaagccttgaaggcagggaggcctcgggtgtggtcaggtcttgccactgcctggtaaaggcttgaggcaggggttgaggggggaattgaggcacactcccacctaccaaaagtcactagggcagaagctcactacagacacctctgggcagggttcattcagcactgggctgcagtgggtggggcacagcgtgtcaggggactggcagttctgcacgttggtttccaatctctcttctatgtgctggaaatggccttgggaacaggaggtaagaagtgtccaggctggccacattcccagcctggaacactttctactgtaccagaaacaagtcacttgggctctgagtctcaatttcctcacttataaaatggagggaatacctctccctgggactgcgtgatgggtaagaaaaggatttggtgggctgcgggaatgtcaaggccattaactgatggaggaaggtggagcctgagattagctgctgggattagctcagtggccagccctccccacccgaccctttttcatgccccgacttaatcctcaaccttaatcctgcttggaaatccctctccttaggcgtctgtctcctgccaaggctcagccttgatggggagctcactgggggaccagaaccctatggggaaaacagggagtgggaccaactggtgctaagtctgggccaagaccaagccctaacactgcaaattcctcatgcccaggagggtgtggggatgaaggatgagtgtgctgagcttggaacactccagaagtctctgggcgccttcctcctcagccccctgccccatcccaacatgacaggaaagggcatggagttctgtccaacgccctcttctgaactccccttgctagacagagcttgagcacggaaggtgaaaggggctcccagcctggctccttctcagaagtcccagcaagccaccgtatggcataaggtctttgtttcctcacctatccaacggaggtgacaccctgctcccctgggtgcagctgctcctccttccatttgagttctgccacagggactccagaggctggagatgagcagtggatgcagggactgtgctctccgagcatcctggccagcctcatgctggctgcccttgctagacattcccccagctgcctgcacttcccccatcaaagcacttgtgatgacgtgcttggtttctgcttctctggacagccaagcccaggagccccttggagcaggagccaaggctgctgccttctccttatgtccccagggctcagttcagagccaggccagagaaggtgctcagaacatactgagctcagctggaactcagctaacatactggttagctgagcagatgaattcactacacaggagaacctgatgcctggagaggatcagtaacctgcccaaggtcacagagaggtgggacacagtgggactagcattgctagtgtgaggctatccaaagccccatctgcctcccctttcaggctgctcctgtctggatctgttagtcctcttcctggagggcgggctccttcgaaagtggggattgggcttcagtcgtctctgagacctttgcctagctagaagacagggatcctatttggaaaggactgacaacttgtccagagcctcggtcttaagttccaaaattttctggggttcaaggacccccttgggatggtaaccagtgggagacctgacattgtccccaaaccatctccacatgacctcttgtggctccaggaaaaatggggcaggagggctggaacatggccagaactagagcttctgccatgaaaagatgcctgggtctccagcagagacccaccgccccaagtccagtgggtaactttggccaggtcttcacctgacctaaacccacctgtattgtgtttaggggctgggggtagggagagagttgctggtctatctgcgcccttcctggtctgagagactctcaaggtctttcccatctttaggcaagaacaaggggttctgacccatgtcttccaaattattctcctagggcccaaggaacgagcagccccatgaggcatcactggctccccctgccctcagtggggctctagggagtcatttgctgctccagccgggtgggccctgggtctttgccgggccacccacgtggcagccacacaacatgccacagtgacctccagctcacctccgcgggtgcccagccccctctggtcagcagggctccctggcagggcataccaagctcacaccaggcctctgacctcgggcattccctcctgactcccaggccccctccccagccccagtgcccactcctcctgtccctggctttctgccactcaggctggaggaggcgggggggtgacagctgtgtaagcgatggtggctgcccccttcctgcccctcccccccagctgtctctctcccatgacagctgcccaatcaaagggctgggggcttagccagctcaccccacatgcagggatcaagtgtccaccctgcctttgttctggagcaagaacaatccgggggaggggagggctcctggggccaggcgattcaagtagactggcccgccccttgggggattccctccgctctgctggccagaatgtctggaccagctagggcctgtggacccacctgggcttcactctccatctcacatccccccacatcctctcagcacccccagctccccacctagcagcccccttctcctattcccactcccaaagcagccatgctagccacacccagtgatgctggggaatggctcggagcatccagggaggcagggtgtggtgggggtggaccctgggccacagcacgtctgcatcgagggctcctaactctcctgcccaatcccttctctggagatgctcactctcctaactagccaggccttcataagaactgccccagcatcttggacacatgtgcccagcctcttggcctcccagcctcccgggatagccaatcatctacagttgggagaggaggaggggagtgggaagcctcaggtgagcatcctggggtccacaagttc

SEQ ID NO: 316083 - DNA, 4001 bp, Homo sapiens
gcagtgagctgctgcactctagcctgggcaacagagtgaactctgtctcaaaaaaaataaataaacttacaccctttgacccactaattcctcttctgggaaaatctacggaaatggtcaaaaattgttttaaaaggggtgcagggccgggtgcagtggctcacacccataatcccaacactttgggacgccaaggtgggtgaatcacttgaggtcaggcgtacaagaccggcctggccaacatggtgaaaccctgtctctgctaaaaatacaaaaaaaaagttgccaggcatggtcgtgggcacctgtaatcccagctacttgggaggctgaggcaggagaatagcttgaacctgggaggcagaggttgcaatgagccaagatcgcaccatggcactccagcctgggcaacaagagcaaaactccgtatcaaaacataaaaataaaaaggggtgcaggagggggttcatattaaatcagcctcctaagttaactttggcaaaagaaaaacagcttctggaggcttcatctaaacctagtaggatctacctgggaaagggctaggcgatgttccagggaagaattgagcaataggccccaacagaaagagtgtacaggagcactgacaggcctttccagaggatgatctaacatctccctcagccctaacagagtaggttagaagtagccccaggggagagaaagcactcctagcaccacaaaccatcactaaatttacatttcactctcaagtgtcaaaaggaactgttacctttggacccttgtcaaatgcgaatttatgacatctgaatcaatattagacaaatatagagctgttcaaatctcctcactttaagaccccatccctcccccagtgcctccctcatggttgtgagttgtgcctgaatactcttcatctgtaagagtttcacttctgcaccttcccgttggttaattcgttcagcacaacggtccagactcacccaccagtcacggacacactgggcaagcctggtttcaagtcagggatcacctctccaaaatgggccgcccagcttatctctgaaggccagctggattctcgcctcaaaacccaggcggtgggtggcagtgtttcaactgctcagtccagccaaacatcgagagtagcctgcgcactcccagaaaggccacctgcttccgacacgtgcctttgctacccatcaaggcgaggcatgctaaggccctaaagagctcgaccaggcattctgcgggcagaagttccacaagttcctgcacgcgcacatcccccatttcatgttagtggagtatgcccaagttcagttttcctgcttccacaaaggagaaagaacctaccatcactctttcatggggcacgagaataagcacatggtttttactgagcgcctatcattttgctatctatggtctaacgatacacttgtgaaggaagaattattattaaaatgacccacagagatttaataagttgcccaaaagcttatgttaagtgttgagctggctagagacgagccagatccgtctaaatcccaagggttaaacagtatgaaaaagcacacaggtgcttctgctggttatacccgcctccacgagaaacgctacaggttttcaaggtgaacacccttgctccggcccctccaggcaccgtgcggattggcagggaggcctcggacgccgcaagccgggcacgcagtgataggtcgcggacgccaggggcgggactcacttaggcccctcaggactcactcgcttgtgctgcgcgtcaatacggcgttggccccctcccagcagcgcggtccggcgcttgttttcgatgcgttcgttaacagaggtggcctggctgcaaaggctgcggaccgcggcgcggagaccgctcgccagaacgctgagccttgccccgaccgccgccacccgtaatgccgccgccatttttgctgtgccggcgcgtcccctaccggcgcacctgagtacgcatgtgctaaagcgtgggtacggcgcttgcgcagcatcggctggctgtagggagccgcgggggctggactacagaacctgcttgggagtaaggcgtgagagttcgagacccggtgctgcccgaggagggtcgcgcagagaaaaagtacagggcctgcctggctgcacaaaaaagggacatagtccttgctcttctctgaccacctagacccttaactttgtcgtcccacttcctacagaaaatgattataagatttaaccaacatttattaagcattgtgccaggtgttgctttttgcacttaccatgcactagcttactatctggatttcacagatgaggtaaatcaagcacagagagatgagtgatttgatcaagaggcaagactgaggccgaggtaggtgagcccaggagcccaagaccagcctgagcaatatagtaagaccccacctctacaaaaaaattaaaaattagctgggcatggcggcttgcacctgtgaccccagctactcgggaggctaaggcggcaggatggcttggcccaggaagtcgaggctgcagtgagccgtgattgcatcactgcactccagcctgggcaaaaccctgtctcaaaaaaaaaaaaaaaaaaaagccaagactgacaatgtggttggccaggattcaaactcagagacctatcattaatatgtgccagataatgagcacaggacccttaacctctaatcagtagttctcaaagtatggatcccattaaagaaaaaactattcatgacacttaattattcatgtttaagaatggtaaggcaaactttattcaggcccaatctgacagaggtagggatagagttttgccataagtcagagcgattgggctgaatatagcaaagtggtaatttatagctaaggggcagtgtgtggaagtcagtggatggaaaattactaagaggaaacattggcggggaatctggctaaattgacctaacaggattcctgcccaaggcaggtcagggtaactgaacatcacctgggggatggtggcggtatgggtcaaaaccagatatggagagtaatcagatatcaagaatggaggattctggctaaactgacttggcaagtttcttgctaaaatggaattccacaaggaatgacatgggagcccacactcaggcctagtcaaagagagagctcagaagagcctgaccaatgtttgatcaaggagggaatcttgtcaatccagcaacttcagtatcacctgggagtgagttggaaatgcaagctcgaattctcagaacttactccagacctttaaatcagaaactctggggctggggccagccatctgttttagcagatgacctttaggtgattctgatctgcttgctaaagtttaagaaccactgctctaggaatttggaattgtactgttgagagcttgaccatctgtttctcccactaacaggcaggtcttcaagacaaagaacatggtttatatttctcatttttagccacagaaaactgctaaagttgatcatgagcccttcccagatccagctcatagccagggccttcataaagtacaaattctgacctatgaccttaatgttaatgcaattcaactcagaaaacatttttgagcacctaccatgtgccaagaactaaacatcagtactgattgcatttcctggagtagtaacagttcatctagatagagagggcagcttagaggccaaagcctcttggctaggcaaagcccacctgtatctgtataactccgtaatgggtactcttgaccttgcatttgggtccttgctttaaagactttaccaacctagagaggcagatggacaacctagagaggcagattgccttgggagcacaagagagaatttgagtaaggctgagtgtgttgaggagagtttctccaagaaagcatccatatgccagggaacagaagcagtgtgagcaaaggcctggcatgttcagattcacatacacagacacacacacat

SEQ ID NO: 316084 - DNA, 4001 bp, Homo sapiens
actgctcgacaggaattaaaattcagaatattctctagttaagcccctaagacaaacttgacagtgttttcaaaaaagtgactatctgccacaaaattaccaattttgcaatatccatggtatgacatattttaactatgattcctatgcacaatttcattaaaaatatctgacattcaaaaatggcttaaacttaacagcactactttcttgtaacggcaaggagacaaattatgtagaagttaagggatatttacttactctaagttaccaagaaaaagaccataataatttttctgataccaattagcaaagtaattctctactacttctccccacatgctaaaatggaaacatcaatattcatactatagaactaataaccctcaactgaaagaatggcaggtaaattatacagtggatttataatgacactcaaggtacattttgacagcacattaaacacgtctgctaccctcggtcaagacagttaacgagatggccttaaaatcaacacatgattctttaggcttttcctcaaactacgtctaaaattttttgcttttcctcaaactacttttaaacttttatgtaattttatcccacaatttccaatacaatttttttgggaaaaaaaattccctagtgagaaagtagtagatggtttaaatttaaattgttctttcataaggtattttactagttataaaaaaaaaaaaagacagggggtggggagggaagagagagatggagttccagcttaactaacagaattgtacgtgttttttaaaaaggaaatcctgggtccaaagtaattaacattacacttaatcttttcaataatttttgttcccaaggcaattaacatgaaacattatgttagtaggtctactagtggccttcatatgctattaatcgtttctattttctcatattaaataatttcgggaatgataactaaggtggtcagaatagagaataatgtttaaaatgttctaaaaacattttaaacagctcgcacgtgttaagtcacttgtcttgttatgtgcaaagagggagctggagagattacgtttcttttccttcacgcacaagacccgaatttagggagtggaatggacagaataaggatagctgtaacctgagtttaacgtcgtaacaaaatacaggaagagtcacgctagactatttagtcgcctaagtatctggcaagcggtcagctggcaacagcctaagggagatacttcaaagaaaagcaaccaaaccttagccctagaccccgcagcttaaaccagagggcaggcaaaggcattcctcttcccctccatcacctcggcccatcctgtcacagggtcaatattaaacttggaagtaaaggaaagagagcaggccggagttgtccacctcctcagtgaaaagggagcagcaagcgtaattaactcctgcgtgtaactgagaggccggcaccgtcagaaactcagcctgcggccagttcccgcggcaactactcggtggctcgcactgtgtgtatgttatgtctcatgagcgtctccggtgtgtgtgttttgtgtgatgtgcgtctccggtgtggcggtagcggctcctgcaccgccgctcctggtcccaccccgagttcggtctccctttctggcgcccatctcccttctcctcggaatcagggcctccgctggggccaggaggtgacgaacagtggccggctctccccaggcaaggaggcgatgtaggcccggagcccagagggccgcatcgggcgtgcccgaggcaggtctgggcccaacacctggccgggtgaggtccagatccgcccattctcgccccaccccactccccccaccctgggagctcaaagaaaggcccggagcatcccacgctgcccacgacgctggggttgtgttcacctccggcggctccagctcgctgcgacttttcaggcttctcgtctcccgccttcccgtccgccattttccccgccgcggcctcccctgcagccacgccaaggacgtcacgaccccgcccaacaaccatcgagtttttggggccagccggcgtggtggcagcctagagcggtcccgaggaatgaaaagaggccgccttcggaagcggaagtggatgtgatgtcatcgagtagccgcctcggaaggaagagctgggaaggttgggcggtctaagagtgctggctaggcactttattagagggcagtcaggtcttcatggtctagcgacaggtccggagaagtgaggggaaatggagcatctccctggaaacgctgggatcttagaaggtttctgcatacccagatgtggttgcagctgaggctgagagtgtcttccgttccggccttgctggataacgcatgcctgccaactctatgtaaacaaaaagcctgcattctttttccctaaaggggaaatcagtgtttatctagcgccccctagcttcagacgcctttcatacactcgtttaatcacggcgattgtccaaatatagaattctcctctcaattacctgtaagagttgaggtcagagagagtaatttgtctaagtcacgtagccaactgtaaagttactttttgtatagtctgcttctaccaagttgagaaactactatgtcaagttaagactgcagtaatttctgccttaataagaaacctttagtggattcctacagtctgcattctgaagtccgtgagttacattaggccctagcctaccttttcggcttcatcttccccctttctcagtatttatccagccctcctagccaaatggggtctattacttgcttagggaactggagtttctgggtttgtcttaccatatatagttagagaaagtcttaggagtcagaacttggatttgaatctgttttgccctttcctgcttgagtaaccttgagacttgcttactgcctacagagctaccttttcttctctataaaagagcaataataatagtacctcctcaaagagtggtaatagggatcaaatgagatcatctttgtataccattatttggtcacttcatacttccctcagtttgtgtgtgtgtgtgtgtgtgtgtgtgttttaagtgttgtctctctgaatggctcaaaagttccttgacaacagagaccagtttttaaaaactgtgtactgtgcgtttcatatatgaatataaaaagtgttcaatatttgcggatggattacttctcgggcttcaagtccagggagtggagaaagaatgaagaaattatcaaagtgtgtttcccatgacagaagcagggcagtgtggtggtgattttgtgatctaggttgaagtccctgatccatcatttatcatatatgtaaaagtaaccagcaaactatcttacaggtacttaattcatgtttgtttcattttccttgtgatcttttcaaggtaatcattgagactctcgtttctatcattttaaaaatggagatatacacgaagatttttatttgagattatgtatttacagatgcttgtaattttttatggggggtggaatggagtctctcattctgtcacccaggctggagtgcaatggcatggtcttggctcactgcaacctccgcctcctgggttcaagcgattctcctgcctcagcctctcgagtagctgggacaacaggcgcgtgccaccacacccggctaatgtttgtatttttagtagagacggggtttcactatgttggccaggctggtctcgaactcctgactttgtgatccgcccaccttagcctccctaagtgctgggattacaggcgtgagccaccgtgcccggccgatgcttgtaatttttaagtgaagaagataaagctcagagaagtcacatacctatttaggagcggatccagttcccatataccacactgcagaagttaaggatgcatgtgcaggactaggtatgaaaggaaaaaaacgaaacaaaaaaaggatgaagatagtaatccattcacctttcagttctgtgagtt

SEQ ID NO: 316085 - DNA, 4001 bp, Homo sapiens
caggaacattaagtgggctttttttattttttttctttttcctttcctaatgagcatagagtagtcaaagcactatctttgatcttccatttcccactgggaatttatgaaggcacgagcaacaaaaaacttatgaaggtcattacaacaggcctttgactgaaaacagctttaattatgaatctataaaactcaactgagtcacactgggctttcagaaacacatctgctctgagaatttattccttcaagcattatcttgtgccctttgtaatcactaatgcaggacacgactagatctattatattaataaaaatcttcccaatagttggggtaaatccaacatttcactatttcaggcatttgcctcttactcaaatcctaacaccagaggaaaaaggcagcagcctcacactgttgccaacacccacttccaggagaatacctttttaaaaaatgcttactgtgattttccaagtacatttgctatttggagggtacactccaggaaaaccttcactgccaataaatccagactctccagtaagaatgccaccacatgtgaaaacaggtctgggaacataaaagaagaaaagataatgtaatttgaaacatggtctaacaatctgatgttaccttcagaaaggtgtagcctattaatataaataaaagttaatgttgattaatcaatgcttgcaccatataagggatctgaaaatttgctagctcctagaatatttaaattatagcctgacaaagcattcagtccagcgccatctgtctccatcataataacacaagattatatatatgtataatcaagtcctcggcattgtggcaaagtcttgtaggaaaatggtaaatacatcaatttaactgggggagtgggagagaaggtaagagccaggctgaatgagaagcatggttttaaagaaagacaggcaagcaattggttaatataaaaaaagtttgtcgttcccatatttggagagatgcccagttctcctccccctttctgaaaatcactcgccattggcagagcttcccatcgaaagggaggctgatgttgatggaggctgaagaggtgatgccaaagttggccaccgggcaggtcccacagcccagctcctggggccttccagaggttggcgaagagttaactttccggagcggctccctaggcgccgcgccgctagggttgttccctagtttacgtctctgggcaaagcctctcggggaaggaaaaaaaacagcggtaaaccaaaatccacatatttgggccccagtgcttccctctggccccatagacacgaggagaggggagacacaagtcagattaagccccgccacgtggtggccaagccagctgcagggccatccggcaggccgggctggggacccaggagggagccccgcgagcaaggatgggtcccgaagtcccgggcttagcctacccgagggtggcggacgcctgcaccgcgcgggagcgcagggtcgagcgctgggtcacccaggcgcgccgaagcgggttgagtaaagcagcaggcgaggctgcaggggtggaggaagggaaaggagagaaagggagcccgggcaggggtcgcgttacctctctggggactgctgccgcgagagctgggtggcggcagccagcagcaggcagagtggcgcccaggcgttcgcgcccctcatggcagcgtagacgctcggggtttgcaccccacggcgcgcgcgccggcacacacgcccctccgcacccaccgcgctcacaccgccgctcacactggcagcagcgctggctcacaccggcgctcggctgcccgcgcgctccctctcacgcgcgcaccgccgcggggcggcccaggtagccgggggatacgcggccggcagggcggaggcacttttaaaggcgattatggtgccgtctgactcgacgcttagtttcccctgaggagctgctctggcagccacaggccactgctgaatatcccgtttgttctccggcggcaggaggggcggctccgaggccagagccgccccctctcgtggggcgggcgaacgtctcctcccggcaccccgggaccgacgggtcctctctcgtccagccctcagggaccccggggagaagaggaaccccttgcggagtggcaccccagcggcccgggccccgacgcccagagacgattctcagggagggcttctggttttgctttggggaatgtttttcccagttgcttttaaataaaaagtaatagcgcttgctggctgctggaaagcctgggggtccttctttgtctccttcaaaacccagatccaaggaaagaaagggaaaagggattttattgtattttaacttctgtgcttattctcctctctctctctctagatacttttcttttttttactggtatgacaatgacaaggaagacagtctctgtgccgggatttaaacacgggttttcaggcgagcgatttctgtgtgaactgtcattaaatgtcagataatgaagacggaaccaaatcagcaaatctcaccatcccatgtcatgttctgaaaatggtgtttctctgcttgcatctctctgttcttagacctttccaacagcatctttctgtggtattaacgggttaaaatttacggagaattcgtttttcttagacgaacaattctagccttgtggaatcaatactctcttttacttaattacagaaatataattttaaacatttattttgttaagagcttcccaataaccagggattaataaaagaatgacaggaacagactagattcatagagatttttaataatcaccagctatgggagatacagcttaactttgatgcctcacgttgttccttctaaattgttttcacctttctaagcaagaaaattaagtattaaagtagttcttatcgagactttatttctaataatgagctgttaagaatctaaacacgggtgggcgcgatggcccacgcctgtaatcccagcacttttggaggccgaggcgggcggatcacgaggtcaggagttcgaaaccagtctggccaagatggtgaaaccccgcctcgactaaaaatacaaaaaattagccaggtgttgcggtgtgcgtctgtaatcccgggtactcgggaagctgaggcagaagtatcgcgtgaacccgggaggcggaggttgcagtgagccgagatcacgccattgcactccagccccgggcgacagagtgagactccatctcaaaaaagaaaaaaaaaaaaaaaagaacctaaacactcctggcaaggaagtaagtaaaactggctacaggaaatattctgacttttcatagtgagtgcaccctgaagcctatactaggaaccagaatatacggacaggacttagattatcttaccatttttttaaaaagtgaaggcaaaaacatcataaagtacaactttcaaaacttctctacaggcaccacaccctttatgacattaaaaaaaagggtgacagaatttggcaaactgctttatatcctgaaacactctcaacccaataaaaatgtctttaaaacagggaagaggagaataaatggttgttgattttgcacgcatttcaagaatatgctatctaatagcataagtgtttttagataattgtttatttgaaagtcatagttttaaattataaagggaaatattgctcaattcactttctggtaatgatttgcagtcctcgtaaaccagaaaatacttcattcaggactaagctaagttttcaaaatttaaaataaataacaaagtattaaatgtgcctaaataggaaactatttgaactaaaatacacagccatttcttaatttatagattgatgactgtgttcatatgctcactaaagagttaggattttaacaccaatcattctgttgttgacactcataagacattgattttaccatgtgattttagaatttactaaaacccatattattggctcttaaaaacacatatttgactt

SEQ ID NO: 316086 - DNA, 4001 bp, Homo sapiens
atcaccattattgacactgcgagtgtcatcattttgtccccctttctttctcatcatggtcatagtttactgctattactgcactaaatcccattctcaatgtctttttactagcaattctctgtacttgccaaatcactaaatatcaagataaataggctctggaggtcatatctgccttcctacttccattttattgttggcagattattttctgcccctatcttgagtttccttcccaacccttgttcctacgctcaaagcttcccgttcctcatgagcagtttctcataccacaaacccctaaatcctcactgcctctataaatatcacaaataccactgtccctttttttttttttttttttgagacagagtctccctctgtcacccgggctggagtgcagtctcacaatctcaactcactgcaaccaccgcctcctgggttcaagcaatcctcccacctcagcctccccagtagctgggattccaggcatgcgccaccacacccgcccagtgtccctatttcaatataatttctggttctcccaactgagatgccgagtttcagctctcacagctagtcacctcaattacattcaggaagcctcctccagttaggccaggctaatacagcctgttcccaattgcatctttgtacttccaaagagttccctattcatagaatcattacattttagaaccaaaagaaaactcagaaatcatccggtccaatgtttttcaaacttttaaagtacattttgcttcttacactttgagatgtacaaaatctattttacatcataatctcatacacacataactcaaacaaatcacatgaaacaatacttacccttactatgtaaacacactgaaagtttctattctattccactttttaaaagaaaagtacaggttcaggccaggcgcggtggctcacactgtaatcccagcattttgggaggcctaggcgggtggatcacctgaggtcagcagttcaagaccagcctggccaacatggagaatccccatctctactaaaaatacaaaaattagccgggcgtggtggcgcatgcctgtaatcccagctactagggaggctgagacaagagaatcgcttgaaccagggaggcggaggttgcggtgagctgagatcgcgccactgcgctccagcctgggcaacaagagcgaaactgtctcaaaaaaagaaaaagaaaaaaagtacaggttccatccactaaattggtttcacagctcaatactaggaagaaacccatagtgtgggaggcattaaactagtccaaacttcccattcactgatgaagaaactgtaactcagtggtgaagtttgtccgtaaaaattaaactcaggcctgttaagttccagaccagtgttctttccactaaagaccttctctgcccagtcacggccaatcacaccccgtgcccaaacacaaccctacagcgccatcgcccatcacggatgccatcctcttctccaagtcagcccctcgaagtcactgctctgggtcggagtcccctcgcggccgctgctcgtgttcccttaggtccggatcccccacagtcactaccaatcgatcagagtctccttggagtccttgccccttgatcatagtcccttgcagtcactgcctcatacttcctcggtccaagtgccgtcgcagccccggcctcgcgctctccgaggtcaccgtgtttcgcattcactgctcctgggtcacagtcccctcgctgtcactggccctcggtcacagtagcctcccagcccctggctcccactgccctcgctgtcacttaccactcttcctcagtcacagtcacctcgcggtcccagccccacagtttgtcctctcaaacagagacgcaaagataggcacacacctgcaactcacgctcccccgagcccggtccggtcggatttctggccggcgccgcgtcactgactagggaagttgaggaggttgcggggagacgcccggggaaggcagctgatggaagagccagccggaagttccgcctacttcccctacctctgtcaatccgaccacgacttctccttgaaaaccacgactcctgacacagtagttccgcctcctcagaggcccccgggatgaagtgacccagcagaaataccagagaccggagacggaatggcccagggtcagcctccacccggaaccggaggatgcagcgaagacgtctccttgaagtgggatacggatgtgaaccggcccaagtgctcgccggtccgtcaagacgcgctgcccggctgctcccgtgtccaactcgggctgtgtccgcccaggcgggcctgtgcgcggaggtcctaccgctgcacctccgcgcctaccgcagcccgcacccccgcacccgggcagccaacgtgcaggaggcccgggcgccttcagcggagacgccccgaccgcggctgcctcgccgcagcgttagcttttacctacgtggggaagtaaggggaatttgcgaccgccagcccagtccgctgaaaacctgtggctgacccaccctcttcctttttctgacccacgttggctccaaaaaaaaaaatccctagggatccactgggagccagttgagcaggagtggattaagacacgtgtcgcagggtgtatggtggaaagaaacgttttcctttgctagaatgaaccttgggaaggatcccttttgattccgtagatgtaagaggctacacaatattatggaagaaggatgtaaaaaaaatgtattattattttttagttaccaactggactgaagtaaaagaccttttaaacttatttacttattcttttatttttttaaaagacggagcctcgctctgtcgcccgggctggagtgcagtggcgcgatctcagctcactgcagcctccgcctccagggttcaagggattctcgtgcctcatcccgagtagctgggattacaggcatgcgccaccacgcccggctaatttttgtatttttagtagagtcggggtttcaccatgatggtcaggctggtctcgaactcgtgacctcaagtgatctgcccgcctcagcctcccgaagtgttgggatcacaggccaccgcgcccagtcaactttttgttgctattgttgttgctttgctttttttattttattttgctttttttgtctacatcaagggtatccaatcttttggcttccctggggcacattggtagaagaggaattgtcttgggccacacataaagtacactaacagtaacaatagctgatgacttaaaaaaaaaaatcgcaaaaaaaaaaaaaacctcatgtgttttagaagtttacaaatgtgtgttgggccgcatgcaaagctgttctgggccgcggcttggacaagcttggtctacatgcttaacttgaaagtggctgagaagaaagaggatgggtataactgcatctgctgaggagtttccagggggaaaaaggatttaaacctgaatttcaaatatgtctttgaacatggcggttagactaaggtaccccaaataaggacagttagctggagaagacaccgcggcctctaaggggaacatcactacaaaaatagagttgagatagtaaccaacatcagaatctcagtcttaagggaggatgaatttcataagaccctgacactgtggacaaagaaaatggatgggtgtttaggctaataagctatgtaagacataggatggcaagagctgagcaaaaacactgtgtgagaaagatgaaggcaacaattcaaaatgtaggaaaaagcagccaggcatggtgtttcatgcctgtactcccagcatattgggaggctaaagcaggaggatcacttgaggccaggagttcaacactagcctgggcaacatagcaaggcctcatctctataaaaaataaaattactgttgggagggcaacatgggcggatcacaaggtcaggagttcgagaccagcctggccaacatggtgaaaccctgcctctac

SEQ ID NO: 316087 - DNA, 4001 bp, Homo sapiens
aaacagattaatattcttgctttaccatcactgactcatgttcagtttacggtctacttacatcactgcacctttcttaatccagcacaaagtcagttatcaccacataattttccatttgtttaactgggtcttccttgtctgtgtactacattacttatggtacattattcctgattttacttcattctatagtatcatactttttctattttaaaaatcgtattaatttccagaccatcttaatttcaaccatcagggaagataatacctctgttccgaaaaaatgtttttccattaaaaagtgaagcacattgttgataatatagtaactgcagagtacattcaaaattcagcatagtctgatgatcaacttatatataaaacagtaagctatgatttattacatgttaagagtaagccatgatttattacatgctaacctgtatggatataaagttatcacaaataaattctgccatcaatgaacatactctaacaattctattaaaaacttatccaataataatagtcatgagctataactggtcataatcattatagaggataagacttgcataaaggcactactttctgcaagatatgaactatacgtgtactgttttttcattcttcaatgtaaagtaagaatgaattgaaagtcacagttgatgctaagaaaaataaaaatatgcaagagcccaattttattatttgcagacacacacacaaatacagcccagagtcaagaaaatgggggaaaagtaaagtctcaaaaaagacgatgttacctccaagaaatgcaaaataccttcttttctagtaatgggcacactaaactctcctaacgctacattatttgaaaaaagtgtagttttgtgaaagaattccaatcccactattatcagttttacaaaatgagagtaaaaacagtcctaaggtagaaaaagaaaagaatattcttctaaggatgggatatattgtttaactgttgttctcccatcctattacctacccgtaaaaatgaactgtgagagtagagtctatcatttaatacacccctaaaaaaaggggaaaaatctgtaaaagttgaaactggccatttttattttttccaaaaggatctttcctttattgaggaatttcactccggttcaagaaacaactttttatctcacaatggcttcttagatatactatataaaatacatttactttgtaacttcctccacccttttcaaaaagcacaaccaacgtccctactctaaagctggactcgaaccgaactagattcagaaagtctgtccctacgtgtgtgaccttgggcacgtcatataatccctcggtttcctcatcagcatcccaaaatgaaagcgctctgaaagcagtaaaggagtaaaaacataccttaggtatgacacctaagagggtcaagtctttctgtttaaggcaaaattatctccttagagggccacatcattaaactggaactgaatccgtagaccccaacatttgtctcttccttcttccagtgctcctcttccctcaaagggcataacccgagtcacccccaagagccgactcccaagcaccctttccttcctcctcccttttctcttacttacaaagcagggggaaaacagcagcctcacctctcggtccgaagccacaccttcaaaggaccccaccccaggcacatccgccctgtcccctctcccggggcaccaggggccaacctcgcccttcccctcccgcccccacctagaggagacttcctggaggcgttcgggcccaagccggcaggcggcatttacaaacccgctttacgccactcgcgtagggtaacctcgcttacgcccgtagggccccgctctcagccccgtccgctccgcctgccagaaccaagcccaagtgcctcagccatggcccctgcgtgaccctagacctcttctgctcggtgcagagctacggggactgggacagaacagctacaccttaccagcaactgaggcactgacttcacttcccaccttgcagccctcttcaactcccggatcaattcactccggcgacgccggaaggacccaagaggaaccaggcgttgtccggaatcctgcccagccggagtcgtgcagaggcttatggggactcgtagtcccgctcgccggcgttgtccgcaattcctgcaatcggaagactacacttcccggcaggccatgcgggggatcctgaggcgatgggtggtgacacttctagccaatagtaggagaattccctgcctttgcgggaggaggtgagatgaagagagatggtgcacggaaaggagaggaagggcggggcaagccctcacctgcgccaatcagggtgcggagtaggccccgcaggcgcctcacccattgagggggcgggctgacagagcagaggaaggaagggggtgaggggcctgtggtggggatcctggggctgtcgggctgagtatgccgtgtgggtggagaggaagcctcggggaaatcgcccaggtgaagggagggcttggtgtggggacttgcactgggcagaggggcagcttccctgagagcagctaagccccaggcacaccgggcatccggacacacaggtcggggaaggataggctgagccggggctcccagcagagacgcctgggtggggcaggaggccgctccaggtgtgagccacagaggaggggagagggacccccacgggagtggaagtggcagagcagctgcagaagtgcagggagcggaaaggtaccagggcagctgctttccgctgcctccggtccgggcagctgcagaaacagcagggggaggagcaacagctgccaaattcgccaactagaggagggagaggcggagcttgggtccctgtagaagccagaggcgcagtctggactgtagtttcccgggagagacgaaagcaggaacgagagcggagcggagcacagtccgccgagcacaagctccagcatcccgtcaggggttgcaggtgtgtgggaggtaagcgtgggtccttcttcggggcgtctgcactgccctggagaaaacgtcttccaataggaattacatcaagacacagctaaaagagtccgcgttgggttaggaaaccggtgcaaaacctctcgggtgaaagatttacatttttcgactttaagggcaaaaaagcaaaaggaagcttgactctgggtataaagggcgtggttagtgtttttggtttgagttgcaccagtaaaactgttctgggagatctgaagattgagaaaaatcctgctaattgaggacgaggtggatgttatctggtggatgttataggtgcgtagcctataaaaagcaaaaattttgctattgatatagaataacttctgaactatttcactaggaaaataactttgcattcttcttcagtgtctaccctttacgttggtttatcagattgtcctgctaccgacctgttatccagggtggttattttgcagtttcctagaattgcaagaaatccgtattaaagaagcaagtgcaggcaggaatagtcaggataggatgggctctgacttaatctatcaaaagtataacttttgccagcaataatgtaaaaatgaattttaatgaatggatagttagctttcttcccagtggctctggaatattggaacaaagacctggattcagcctacaatggaaacatatggtgtacctcactgctgctcgttagtttctcatttgtgtccgataatatgtgtacattttaaaaacgagtacatggaaagctgtgtgggaatcttttctctgggtagagagtatgtgctgaaggactacccttaatatgtgttatgatagtgggttcagtttaaaacacatgtagtgtcataaaataatagtttattctcggtattaaactatatgtgcattcaaagcaacgttaattgtaatacctatggatggaaataagttgtaatgctgggtaaagatgaaagtctcacctac

SEQ ID NO: 316088 - DNA, 4001 bp, Homo sapiens
ttacatcactgcacctttcttaatccagcacaaagtcagttatcaccacataattttccatttgtttaactgggtcttccttgtctgtgtactacattacttatggtacattattcctgattttacttcattctatagtatcatactttttctattttaaaaatcgtattaatttccagaccatcttaatttcaaccatcagggaagataatacctctgttccgaaaaaatgtttttccattaaaaagtgaagcacattgttgataatatagtaactgcagagtacattcaaaattcagcatagtctgatgatcaacttatatataaaacagtaagctatgatttattacatgttaagagtaagccatgatttattacatgctaacctgtatggatataaagttatcacaaataaattctgccatcaatgaacatactctaacaattctattaaaaacttatccaataataatagtcatgagctataactggtcataatcattatagaggataagacttgcataaaggcactactttctgcaagatatgaactatacgtgtactgttttttcattcttcaatgtaaagtaagaatgaattgaaagtcacagttgatgctaagaaaaataaaaatatgcaagagcccaattttattatttgcagacacacacacaaatacagcccagagtcaagaaaatgggggaaaagtaaagtctcaaaaaagacgatgttacctccaagaaatgcaaaataccttcttttctagtaatgggcacactaaactctcctaacgctacattatttgaaaaaagtgtagttttgtgaaagaattccaatcccactattatcagttttacaaaatgagagtaaaaacagtcctaaggtagaaaaagaaaagaatattcttctaaggatgggatatattgtttaactgttgttctcccatcctattacctacccgtaaaaatgaactgtgagagtagagtctatcatttaatacacccctaaaaaaaggggaaaaatctgtaaaagttgaaactggccatttttattttttccaaaaggatctttcctttattgaggaatttcactccggttcaagaaacaactttttatctcacaatggcttcttagatatactatataaaatacatttactttgtaacttcctccacccttttcaaaaagcacaaccaacgtccctactctaaagctggactcgaaccgaactagattcagaaagtctgtccctacgtgtgtgaccttgggcacgtcatataatccctcggtttcctcatcagcatcccaaaatgaaagcgctctgaaagcagtaaaggagtaaaaacataccttaggtatgacacctaagagggtcaagtctttctgtttaaggcaaaattatctccttagagggccacatcattaaactggaactgaatccgtagaccccaacatttgtctcttccttcttccagtgctcctcttccctcaaagggcataacccgagtcacccccaagagccgactcccaagcaccctttccttcctcctcccttttctcttacttacaaagcagggggaaaacagcagcctcacctctcggtccgaagccacaccttcaaaggaccccaccccaggcacatccgccctgtcccctctcccggggcaccaggggccaacctcgcccttcccctcccgcccccacctagaggagacttcctggaggcgttcgggcccaagccggcaggcggcatttacaaacccgctttacgccactcgcgtagggtaacctcgcttacgcccgtagggccccgctctcagccccgtccgctccgcctgccagaaccaagcccaagtgcctcagccatggcccctgcgtgaccctagacctcttctgctcggtgcagagctacggggactgggacagaacagctacaccttaccagcaactgaggcactgacttcacttcccaccttgcagccctcttcaactcccggatcaattcactccggcgacgccggaaggacccaagaggaaccaggcgttgtccggaatcctgcccagccggagtcgtgcagaggcttatggggactcgtagtcccgctcgccggcgttgtccgcaattcctgcaatcggaagactacacttcccggcaggccatgcgggggatcctgaggcgatgggtggtgacacttctagccaatagtaggagaattccctgcctttgcgggaggaggtgagatgaagagagatggtgcacggaaaggagaggaagggcggggcaagccctcacctgcgccaatcagggtgcggagtaggccccgcaggcgcctcacccattgagggggcgggctgacagagcagaggaaggaagggggtgaggggcctgtggtggggatcctggggctgtcgggctgagtatgccgtgtgggtggagaggaagcctcggggaaatcgcccaggtgaagggagggcttggtgtggggacttgcactgggcagaggggcagcttccctgagagcagctaagccccaggcacaccgggcatccggacacacaggtcggggaaggataggctgagccggggctcccagcagagacgcctgggtggggcaggaggccgctccaggtgtgagccacagaggaggggagagggacccccacgggagtggaagtggcagagcagctgcagaagtgcagggagcggaaaggtaccagggcagctgctttccgctgcctccggtccgggcagctgcagaaacagcagggggaggagcaacagctgccaaattcgccaactagaggagggagaggcggagcttgggtccctgtagaagccagaggcgcagtctggactgtagtttcccgggagagacgaaagcaggaacgagagcggagcggagcacagtccgccgagcacaagctccagcatcccgtcaggggttgcaggtgtgtgggaggtaagcgtgggtccttcttcggggcgtctgcactgccctggagaaaacgtcttccaataggaattacatcaagacacagctaaaagagtccgcgttgggttaggaaaccggtgcaaaacctctcgggtgaaagatttacatttttcgactttaagggcaaaaaagcaaaaggaagcttgactctgggtataaagggcgtggttagtgtttttggtttgagttgcaccagtaaaactgttctgggagatctgaagattgagaaaaatcctgctaattgaggacgaggtggatgttatctggtggatgttataggtgcgtagcctataaaaagcaaaaattttgctattgatatagaataacttctgaactatttcactaggaaaataactttgcattcttcttcagtgtctaccctttacgttggtttatcagattgtcctgctaccgacctgttatccagggtggttattttgcagtttcctagaattgcaagaaatccgtattaaagaagcaagtgcaggcaggaatagtcaggataggatgggctctgacttaatctatcaaaagtataacttttgccagcaataatgtaaaaatgaattttaatgaatggatagttagctttcttcccagtggctctggaatattggaacaaagacctggattcagcctacaatggaaacatatggtgtacctcactgctgctcgttagtttctcatttgtgtccgataatatgtgtacattttaaaaacgagtacatggaaagctgtgtgggaatcttttctctgggtagagagtatgtgctgaaggactacccttaatatgtgttatgatagtgggttcagtttaaaacacatgtagtgtcataaaataatagtttattctcggtattaaactatatgtgcattcaaagcaacgttaattgtaatacctatggatggaaataagttgtaatgctgggtaaagatgaaagtctcacctacctttgtgtaattatgacaaaattacagccttttatttttagagaagtagtaagaagc

SEQ ID NO: 316089 - DNA, 4001 bp, Homo sapiens
catgttcagtttacggtctacttacatcactgcacctttcttaatccagcacaaagtcagttatcaccacataattttccatttgtttaactgggtcttccttgtctgtgtactacattacttatggtacattattcctgattttacttcattctatagtatcatactttttctattttaaaaatcgtattaatttccagaccatcttaatttcaaccatcagggaagataatacctctgttccgaaaaaatgtttttccattaaaaagtgaagcacattgttgataatatagtaactgcagagtacattcaaaattcagcatagtctgatgatcaacttatatataaaacagtaagctatgatttattacatgttaagagtaagccatgatttattacatgctaacctgtatggatataaagttatcacaaataaattctgccatcaatgaacatactctaacaattctattaaaaacttatccaataataatagtcatgagctataactggtcataatcattatagaggataagacttgcataaaggcactactttctgcaagatatgaactatacgtgtactgttttttcattcttcaatgtaaagtaagaatgaattgaaagtcacagttgatgctaagaaaaataaaaatatgcaagagcccaattttattatttgcagacacacacacaaatacagcccagagtcaagaaaatgggggaaaagtaaagtctcaaaaaagacgatgttacctccaagaaatgcaaaataccttcttttctagtaatgggcacactaaactctcctaacgctacattatttgaaaaaagtgtagttttgtgaaagaattccaatcccactattatcagttttacaaaatgagagtaaaaacagtcctaaggtagaaaaagaaaagaatattcttctaaggatgggatatattgtttaactgttgttctcccatcctattacctacccgtaaaaatgaactgtgagagtagagtctatcatttaatacacccctaaaaaaaggggaaaaatctgtaaaagttgaaactggccatttttattttttccaaaaggatctttcctttattgaggaatttcactccggttcaagaaacaactttttatctcacaatggcttcttagatatactatataaaatacatttactttgtaacttcctccacccttttcaaaaagcacaaccaacgtccctactctaaagctggactcgaaccgaactagattcagaaagtctgtccctacgtgtgtgaccttgggcacgtcatataatccctcggtttcctcatcagcatcccaaaatgaaagcgctctgaaagcagtaaaggagtaaaaacataccttaggtatgacacctaagagggtcaagtctttctgtttaaggcaaaattatctccttagagggccacatcattaaactggaactgaatccgtagaccccaacatttgtctcttccttcttccagtgctcctcttccctcaaagggcataacccgagtcacccccaagagccgactcccaagcaccctttccttcctcctcccttttctcttacttacaaagcagggggaaaacagcagcctcacctctcggtccgaagccacaccttcaaaggaccccaccccaggcacatccgccctgtcccctctcccggggcaccaggggccaacctcgcccttcccctcccgcccccacctagaggagacttcctggaggcgttcgggcccaagccggcaggcggcatttacaaacccgctttacgccactcgcgtagggtaacctcgcttacgcccgtagggccccgctctcagccccgtccgctccgcctgccagaaccaagcccaagtgcctcagccatggcccctgcgtgaccctagacctcttctgctcggtgcagagctacggggactgggacagaacagctacaccttaccagcaactgaggcactgacttcacttcccaccttgcagccctcttcaactcccggatcaattcactccggcgacgccggaaggacccaagaggaaccaggcgttgtccggaatcctgcccagccggagtcgtgcagaggcttatggggactcgtagtcccgctcgccggcgttgtccgcaattcctgcaatcggaagactacacttcccggcaggccatgcgggggatcctgaggcgatgggtggtgacacttctagccaatagtaggagaattccctgcctttgcgggaggaggtgagatgaagagagatggtgcacggaaaggagaggaagggcggggcaagccctcacctgcgccaatcagggtgcggagtaggccccgcaggcgcctcacccattgagggggcgggctgacagagcagaggaaggaagggggtgaggggcctgtggtggggatcctggggctgtcgggctgagtatgccgtgtgggtggagaggaagcctcggggaaatcgcccaggtgaagggagggcttggtgtggggacttgcactgggcagaggggcagcttccctgagagcagctaagccccaggcacaccgggcatccggacacacaggtcggggaaggataggctgagccggggctcccagcagagacgcctgggtggggcaggaggccgctccaggtgtgagccacagaggaggggagagggacccccacgggagtggaagtggcagagcagctgcagaagtgcagggagcggaaaggtaccagggcagctgctttccgctgcctccggtccgggcagctgcagaaacagcagggggaggagcaacagctgccaaattcgccaactagaggagggagaggcggagcttgggtccctgtagaagccagaggcgcagtctggactgtagtttcccgggagagacgaaagcaggaacgagagcggagcggagcacagtccgccgagcacaagctccagcatcccgtcaggggttgcaggtgtgtgggaggtaagcgtgggtccttcttcggggcgtctgcactgccctggagaaaacgtcttccaataggaattacatcaagacacagctaaaagagtccgcgttgggttaggaaaccggtgcaaaacctctcgggtgaaagatttacatttttcgactttaagggcaaaaaagcaaaaggaagcttgactctgggtataaagggcgtggttagtgtttttggtttgagttgcaccagtaaaactgttctgggagatctgaagattgagaaaaatcctgctaattgaggacgaggtggatgttatctggtggatgttataggtgcgtagcctataaaaagcaaaaattttgctattgatatagaataacttctgaactatttcactaggaaaataactttgcattcttcttcagtgtctaccctttacgttggtttatcagattgtcctgctaccgacctgttatccagggtggttattttgcagtttcctagaattgcaagaaatccgtattaaagaagcaagtgcaggcaggaatagtcaggataggatgggctctgacttaatctatcaaaagtataacttttgccagcaataatgtaaaaatgaattttaatgaatggatagttagctttcttcccagtggctctggaatattggaacaaagacctggattcagcctacaatggaaacatatggtgtacctcactgctgctcgttagtttctcatttgtgtccgataatatgtgtacattttaaaaacgagtacatggaaagctgtgtgggaatcttttctctgggtagagagtatgtgctgaaggactacccttaatatgtgttatgatagtgggttcagtttaaaacacatgtagtgtcataaaataatagtttattctcggtattaaactatatgtgcattcaaagcaacgttaattgtaatacctatggatggaaataagttgtaatgctgggtaaagatgaaagtctcacctacctttgtgtaattatgacaaaattacagccttttatt

SEQ ID NO: 316090 - DNA, 4001 bp, Homo sapiens
agctctaaaatttgacaccaaggggtcttaattcctctgagcaatctattcagtaccccttccttcggagaaccaacccttccccagtccggactcatcttgctttgatccatggggtaaggagaaattaaaccggctggatgactcagataagggcaattaacttagcccatttcccaccatcataaatgggtgcaaacaaacccaggagcctcccatggacttccaccagagctaaggagaaaagcactcccttctgtaagatactgagtgttgcggacgattgttattacactacagccatccctctcaatacatgaacaaagctttcgagggaagcatcacggaggcaagacgatctccagtgatacctaaagctaaggaaggaatatccctagacttttcagttagcagaataagtcttacttttttttttttttttttttttttttgagatggagtctcactctgtcgcccaggctggagtgcagtggcgcgatctcggctcactgcaagctccgtctcccaggttcacaccattctcctgcctcagcctcccgagtagctgggactacaggcacccgccaccacgcccggctaatttgttgtatttttagtagagatggggtttcaccgtgctagccaggatggtgtcgatctcctgacctcgtgatccgcccgcctcggcctcccaaagtgctgggattacaggcgtgagccaccgcgcccggcagaataagtcttttcttagctcaagctagtttagcctgggtttctgctacttggattggaatacaattgtgattctcctgtgaaacaagtagaatatactatacggagaaaacgagattaacaaggtatgcaaaagaaatgtttaactataaaatcgtaaaaaatgttcttataactattaagtatcatgaaaggaaccctcattaaatcagcatgagctaaataagcgtttgctaaaataacaaatttactctactgtgtatatatctgtttgtgaacaaactgcttttaaacaacctaccttgaacggttcaactatgtaactagagttttatttcaaatagttgtagctcctaactttcagaattctccatctatcatttgattattttgaactgaggaagacggtccatttcatgtggacaatgtgatgagctgatcagacatttggtccagtgtcccaattcccccacttcccccactgccttcaagcaactactattatgaaatcaaaatgtggcccaagaaagacagtgatggaaaaatggggcgaaaggggaagcttcagttagagacccaaaaaagtgaagactagttctaagtaaatgtggcaaaagagatcagtacagggcagactgctgctcccaggtatctgatccacggagccctcgccgaccaagggctagagcagacgtgcaggcaggacaagcgggcagtcacagcgggcctgcagggcgggtcctgctcaccagcaaagaatgcagaccacacctacgcgcctggtcaggccgggacggggcggctccgcccaggttacaggattgaaggaaggggggagacgggaagaggagcggcgagcgacggctggcagacaacctacccactcccagccccgcgcccacctcaggagcgtctcgagcgcgccctcgtgcttgtccagcggacgaccgactgcggcgcggcgcagcttgctgagctcctccgccgcgcggcagtactgggcctgctcttccccgccgcttgggtaagtctgctggatgaacttcaccagcggcttggccaggtccacctctgaggtctttttcagctgcaccgagatgaatgtcgccatgatcagcgcctccgccgccgttcgggccaaacagaccgcggacagcttacgagggccgaggagagagaggtactgggctggcggactggcggactgactggctgacagacttgcgctccgcctgcgttccgggtccggcaacttccgggagctccagcgcaggcgcactggatgcggggtccttaagctgtccgcggtcacgtgaaggtgtcgcggcggctacgcccacctggacccagtttaccctgtactgtgctgcaaaatattactttctccccatctggaattcttcccttcctccttcctgccgcagtggtgtactgagcactttcacgtaagagtattcctccactcgaacaaccccccggagaagtactggtgtcactgccacctgcgagagtttgcggctacctccccaagaggcagtcccagggttattgtgacctatgatgtttattcaactactgttgacgggctgctgtgcacagggaacctagtaggcaagacccctgccatcgtgcagcttactgtcaggttgacacagaccttaaggtaaacggaaaaagtatcaggaaaaaaacagggtgcttgggacttaggagatgttaagatcgcttggaggaccctaatttaaataagataaagtaggttttctccgagtaggttaactgaaaatgaacctgtgtctctggttgctgttttgtagaaagaacaaaattttaaataaattaaaaacgacacctgtaatttgagaagatgcttgatatcagaagaggagaagagtggagaggggtggagtggcaaaggagagcctccaaaccaaaagcctgcggcagaggccctaggaggcaagcacttaaccatgtttcaggactagaaacgaaacatgtgacaagacctttaaaaacaaatagaatgggatggaataaagttggatgagtaagcaggcatcaaatcattcagaaacttgttgtccaagttgaagaatttgtttagtattgtataataaatgcagaggaagctatatacacttataatttacattttttaaaggccacgttgtagctcaatcggatagtttgtcttttgatgggatgtagtatacagtatcatcatggtatattccaggcaaaaatatttaacttgaatctgtcaagcctttgcatctaacacagtttataaaaaatacaacagatagatgaacaaactaaatgatgccagaggaagtaactagacagatccagaaggtgaaacattctgcaggataactggcccatctcttcaacaatttgtcatgataaaagcaactgctttatgaaaagaaatttaagggacataacagtttgaattggatcctggtttgaacagactgtctataaaatgcattttcaggaccattaaagaaatatgaatgtagatggactgagtattggataaaatagaactgtattgccatggaaaagatcattaactgaaaagagcaagtcacgaaatagtatgttacagcatctcattttggtttaaaaatgcacatatatgtatttatgtacaactaaaaaaatagtgggcttataccctaaggtgttagtattggtaatctttggaagtggaaatgtgtatttttttctttgtgtttgcctatctttttcattgtaacttttgcagcacatagactactttcattatagtaaaagtttattttaccacaatttttttttttttagaaagagtctcactctgtcacccaggctggagtgcagtggcacaatctcagcccactgcaacctccacctcccaggttcaagctattctcctgcctcagccttctgagtagctgggactacaggtgcacaccacatgcctggctaatttttgtatttttaatagagactggatttcgcgatgttggcccggctggtctcgaactcctggcctcaagtgatccacccgctttagcctcccaaagtgctgggattacaggcgtgagccactgcacccggcctattttaccacaatttataaaaatttttgtttattttaattaagctattctatgttaaaataagtagccacccttggctgatgcataaagaaaaaattagaggaaggaaagaatggaggcaaggaggcaaatcatgagaccatttcagaaatcaag

SEQ ID NO: 316091 - DNA, 4001 bp, Homo sapiens
aaatgatcttataaggtgcatgaaacaccttaggtacttaaaaaatggtagctgctcttcttattatgaacaaaatcaattacttaaaaactttaacacaagaatgacatctataaaatgggaataggggacttactgtgaagattcaatgagcctatgatttaaaaaaaactagtttatatttatggagcacttcaaaacacaccacgctcttaaattttaagtactttaaaatgtgccagaacagtgcttggcaagtagtaaaaaacattagctactattgttcttgcatttagcgtgtgtccctctcgctagattgtaagcactgtaaaagtccctgctagtcttgttcaaggcaacctgcagtatggcaggcacaccagaggtgttcaaaaaatatctgctgaatgaatgaagagtaaactttgtgctgaagatacaagggcaaacacacctttcaacaatatctggatactttcatcgcacttttaacccccacctcattcctcgccttcctggcccctaaaagtgggacagtatgtgaagagacgggcggaactactttacctgaagaacagaagatctctggagcaccttctcctgcgctgatgggtacaaaactagtttctccagcagttctttgtgaagtgggtcggactcgagggcttcgtagaatgaaatgtcatgctggctaagaaggctgaacttagactttcggtagaaagtggccaggccttcgtgctgcttgattcgaaacaccccctcgagcccgaaggcctctagggcgggtaccaagctgtcagaaaacactgcgcggtcaacctcctgcaaacagatgacatcggcgttgtagccggtgagttccttctggataaggttctggcggtagtcgagctccagggcgtagggggcacagtatgggtacagaaccgttcgcgagaactcagtctgcgcgtacgtgtctgccaggatgttgtaagagacagtgcggatgagagcgtcctcagtcaccttcttcgtgtagagatgccggtggtcaaaagtgcaggtgccaggcccagcctctaccacacacacactttccaactcccggctgtgcccaaagcgctgcccatcgcctggggtgcagtgaagcttgagccttagcccgatgtcggcattggacggggtgtagacacgctcctccacatcagtctcagtccaagaagaagaaggtgaggagggagacaatgacgaggggacaccgacctcgggctccgccgctccgggcttggcttccttataccagcggaaaagggagctggcgggatccccaaattcgaggctgagtttggggcacacagggaacccggccatgatgtagcgcggcaactgcagttcggtgaaggcgggcgggttgcgctccaccttgtacttaacatcgccgatctgcagcaccgcgccgtcttgccaggcatccacgttgagcacgtcctcagccactgcctcttcccggtagtacagcttcaccacgggctcgcagaacacagccggctcaggccccggccctgaacaggccgcaccgccgctagcattcggccggctcttcctgctcttcttggcggcggccgccttagcgtgaccctttagggcattggtagcgatgcggctgaggactcgacccagcggctcgctctggtcgcgctgcatgttcttgtggctaccatcagccaaagcgaatgacaggctcagcttgggttccgaaggtacgcagcgcactacagcgcgctccatcgctcccgccgctgtctggctccccgcttcagcccggctcagcttctccaccgccgtccggatcacccgaagcgcggcgcgggcgcctgggagcctccacatgaacctggtggcctagcggtcgacaagacccgcggccgatcagcggcctactgtcaggtggagctgaggagccgaggccgccggctttgactcattcagatctcgcgacttccggctagcgaagagagggaatgaagtgcttccgactcgcactttcgcctagcgcgtgggcacgcatgtctgtaatactctgaagattaatttttacctacacgataggtcagaattatagggaagtgaagaaaatataaaggtgtcagaggaaaatactagattccacggttttgtcgaaagtgcatgctggtgacgggagggcatgccctccaagccggaagtggatagggtggtgtcacgtgttccgcttcgttggaggaggtggacacctgtcttggaatcttggctgaccagctctcctccctgcgcccgggactggactgcgctaggacgtggaggcctccacccggattgcgagctttactcgcagtgtggaaggtgttgcccatttcatctccacagctttgccgaccctgatcgctcgtttcggtggcctggtgggttcaccccaggctgagccagcgcctacgcacctctgagcagagcctttgtggtagttaacaacgaacgatatacaataactccgtttagtgagcgcagactatgcgagaaacgctacacacactatcttatttaagcctcatagttcttatgaggtaggtctctttatccatcgctttacagatgcagagtcccgagatattacctgctcagggtcacacaactattaattggcagaaagaaatagtactgacaaactgcggaaggctgtttgttattttttattagagacaggttgtcactttgacgcccaagctggagtgcagtggcctgatcatagctcactgccccctcgaactccagggctcgtgcgatcctcccgcctaaccctctcaagtacaaacaggcaagagccacccagtgtttatttttagttagtaaataggaagactctatttagttactacatttaacaaataaaattacaggatctcagttaaattcaatttcagataaggaataataatggggcatatattaagaaatagttgtttatctgtttattttatttttttattttttaggtagggccttgctctttcacccaagctggagtgcagctgtgcgatcttggcttactgcaacttcggcttccagagttcaagcgattctcgtgcctcagcctcccaagtagctgggactacaggcacacaccaccacgcccagctaatttttgtattttagtagagaagggcttcaccatgtttcctgggctggtcgcgaactcctggcctcaagcaagccccccgccttaccctcccaaaattctgggataacaagtgaaaaccacctcccctggcctaaggaatcgtgcactttattgctatttcttttaaaggtcttaaagacgccgggcccagtggctcacgtctgtaatcccagcactttgggaggctgaggcgggtggatcgcctaaggtcaggagttcgagaccagcctggccaacatagtgaaaccccgtctctactaaaaatacaaaaaattagctgggcatggtggcgcacacctgtaatcccagctactagggaggctgaggcaggagaatcgcttgaacctgggagatggaggtcatagtgagttgagatcatgccattgcactccagcctgggcaacaagagtgaaactccgtctcaaaacaaaacaaaaaaaggtcttgaagaacgaatgaattgctttacctgtagaccagaaagaggtccagtgtgatgagtaaggtgagaccaggggagagtagcagataagaaagatatgcatccaccaaattgtgtagtgcattctaagccatagtatgaagttctggatttcttctaagagggccattagagttgttttgcttgcaattatggaaaagctttaattttcattttcttgaaaggggaaaagctaaaaacatttggttttaattgcaagaaaaaaggtgtttgatactgtaattgtcattggcctccatgtaattatttttttatttttttatttttgagatggagcctcactctgtcacccaggctgga

SEQ ID NO: 316092 - DNA, 4001 bp, Homo sapiens
ataactttcatatattttagttaccttgtatgccccatcatactgggcaacttcttctccaagcagaaataccttctcatctctttccagctcctcatccataccctgatttatagcatcacgaactgtcacctgtcacaggtatgcaaaaacagtcaatacagaattgtttgggattcaactaagattttcttcctttatatttacctaggctgcccacagcatacaatataaaaacactagaacaagcttctctctaaaaactcaaagaattctaaaagtaacatttctattacacatagttggtctttgcatgtgttaatgtactgagtgctcactaggtgccaagtactgccaaatactttgcatccagaatgtaggagttgctcttttaatataatgaatggtaaaatctagttaaaaaaaggaaggagaggagaattaacatacaatccatcaattccacttctatgtatatgccccaaataattgaaagcagggattcaagcatatacttgcacatcaatgttcacagcagcattactcacaatagacaaaacaaggccaggcacggtggctcacacctgtaattccagcactctgggaggccaaggcaggtggatcacttgaggtcaggagttcgagaccaccctggccaacatggtgaaacccattctctactaaaaatacaaaaattggccgggtgtggtggcgggtgcctgtaatcccagctactcgggaggctgaggcagaattgcttgaacccaggaggcagagattgcagtgagctgagatagtgccactgcactctagcctgggcagcaagagcaaaactccgtctcaaaaaaaaaaaagaaaatgtcgggctgagcgaggtggctcatgcctgtaatcctagcactttgggaggccaaggcaggcagatcacttgaggccaggagttcaagaccagcctgggcaatatggtgagaccctgtctgtactaaaaatacaaaaattagcccggtgtggtggcaccggcatctaatcacagctactcaggagtgtgaggcgcgagaatcccttgagcccaggaggtggaggttgcagtgagctgagatcgcgccactgcactccaacctgggtgacagagggagactatctcaaaaaaatatacatatatatattattcagccttaggaaagaatcaaactctgacgcatgctacaacatggatgaaccttgaggacattacgctgagataagccagacacaaaaggacaaatgatgccacttataagaagttctagaataggcaacctcataaagacagaaaagtacaacaggggttaccaggggtttggggaagggaaatgaggagttaccgagtaatggacagtttctgcttgggatgattaaaaagttctggaaatggatggtggttaatggttgtacaacatggtgaatgtacttaatgccactgaattatacacttctaaaaagtacattttaagttaggtctattttgctgcaatttaaagaaaaaaacatggagtgagggaggaaacgcctagtcttagttttcccccattgcccagccagctgtgaggtggtgactcgccggtgtgctaattgccaggcggcgacagaggcagcaggagctccacggaggatgctggctccgcaaacccaaggcccacggcgccggaaggccacagcgcaggcgcgactccggcctccttcccgagagaaggggggaccctccccgccctcgtccgacgagcacccgcgcctgttacctgcagcgcagccggcgcggtccagtgaaagcgcctcttcagcagcccggagacctggcagggagagaggaagatgacggcgggacgcagggtgggcaggggtcgcgtgggaatacaggccgcgcgctgctgcctacctcccgaaggggtctccgcaccaagccagacaccgccgccatcttggtcgtgtcctctatccgctgccaaacgacaacagaggggccggcagacgtgagcaggccccgcctccaccggcgcgggccaatggcaaggcgcgccggctgcgtgacccgcccacccgcccaccgggtgaggggccgcggggccgggctgaggtggcgtgtgggtggccgtgcccctctgcctggagccgcctcaaatcaactttattgacagtaggcggtgaccgacaggcggggtgcacgctgggcacacgtgcctggtcggtgttacttgaagcgtggggactagaagtcagaccctgaggagcatgatctctggaagctggagagaccttaagagttaggccaacctgttgtgggtgctggaatcctttgggcaccaagaagtgcttgcacacgctctactgatggggaacttaacacttcatgagtgagtctagtcttccctggacagtgctgtctgttgattccttataatgcacatcatagctttcattgattgcattaagcacctactgtgagccaagcattgagatatgtgctgtatagctcattctcacagtaccccacttgggtaattagtgttattattatctccattttgaagacggttaaactgaagcagaaattgattaaatgagccgatattttaatttaggactgtcttgactctaaagcatggtctttttcccactgcttcctaaagcagaagtggattcctgcttgggggaaggttacaacaactttagagaagggcggccctatggatgtagcaggacaagccgcagacgaaactcctcagacaccgagttaaagaaggaaggggtttattcggccaggggcatgggcaagactcttgtctcaagagccgagctccctgaatgggcaattcctgtcccttttaagggctcacagctctaaggaggtgtgcgtgagagggtcatgattgattgagcaagcagggggtatgtgactaggggctgcaagcaccggtaattagactggaacaggatagggattttcacagtgcttttctatacaatgtctgtaatctatagttaacataaccgattaggtcggggtcgatctttaccaggcccagggtgtggcaccaggctgtctgtttgtggatttcatttctgccttttagtttttactttttctttctttggaggcagaaattgggcataagacaatatgaggggtggtctcctcccttatggggaggtgccaaacacttggccatagggacaacctctggaagctcattagtcttaatttggcccttgggggtcagatgggacaattgagcacccagtctccacccatccccaagacattccaaacattcccttctatggatcacagctgcaggctgccaaattaggaatttgcaacttccagtaggttgctgactgggaatgggagggggtggaggcaaaggcagaacaggcggatgctgggaagtctgtggcagcaacagaggcagactaggaggcaacttccagatggagaggagggggacagttttgagatctatttgggctagaatcaataggaatgctgtaagtgctagggaagagcagaggaaaattttggatttttgtcattgctggatggatagatggggtaagggaggagcctggggcagtgtaagtgccaggagctggggaagtaagagtgtatttttgtttattttttgagatggagtttcactctgtcacccaggctgaagtgcagtgggcctcactgcaacctctgcctcccaggttcaagctattcccctgcttcagcctcccgagtagctgggattacaggcacctgccaccatgcccggctaattttttttatttttagtagagatgagttttcactatgttgaccaggctgatgttgaactcttgacctcaagtgatccacccgcctcagcctcccaaagtgctgggattacaggcatgagccactgcagccagcctttattctttagatgactgggacatacccaggttgcctggagcctagggcctagtcagggctaaag

SEQ ID NO: 316093 - DNA, 4001 bp, Homo sapiens
gctcttccgcacctcctggtgaaggggacctgcagccctccactgcctagctaactaccacacatctttcagactctgttcaaccctaccacctcaggaaagccatggctgacctccctttaaatcaacgtatggctccggttcagtgaaggatactagtacttaaggtcacagcacttgcagttctgtcattatttgctcacaggactgactcctttgcccaatccagggcaacaccagacggcaggtacaatgtgtgttttgctctccgcccaaaatctaacccagtggagggcaaaatatcaatccaaacaatgtgattgacaaataaatgtctgccgaatgaaatttcagattctcaagccgtttgttttcacaaaagggaggggaaagggaggaaagcaggacctcctactcagcccaagtgcaaagaccgatggggggcgtttcaggagatagctccctcctcctggcccagagacccgcccagaccaactggctccagggaactgatggcaaaccagcattcaacaaacccagacgcaattaagtgacactgccccactccagcctggttctccccaagagggagaacacagaccgaagagaacagggggcttctttccccacccacttccaaccagagagtaccaggccactcctcactggtgatccaaaaggccagggtattgggagatggaagtgtttcaagcaactcaacccacacttttctcctcccatttgcccagtgtccttgccacacccaaatggaaaagaacgggaaaatctgggttggggggagggtgccaggaacaggaagttccctggaacttcaggggaaaaggaccaggatggtcctaaaataagggagcgcataagttatggaaaagatggggaaggaggccacaatatctcatcacacacccacagcgaaacgaaggccaaaccccagacctgggccggcaggcacacccattccgacctctctcagggatgcctggagtcccccccaccaagtgtagcaaactactcttggagtccactccttttccacttttgtaagattttgcagtttacacagcttcctccactgagacctcatccgactctcagaaccaccctatgggggtagctttgcctttctatatcatgcatgaggaaactagctcagatacattaaatgaaccgccgcgtcacacagctagaaagtggctgaggctcgagcccgcctcagttgggtgtaggagcagctcctccgccggggcgggctacgtcgaccccacccagcccaccgagcctggcctgtgggcggaggcccaggtggtggcccgcagtttcccagacgcctggggccgaagccaagaacaaggtggccctaaaccaaggtttccggcagtgcaggtagtaagcacccccatcccaccccgcactcacacaggtgcagggctcggagtctggagcggagctcaccccgcagcccgccggcgtcctgcccgaccggctgtgccccgacctgcatccccgcaaagttgtggccgtggcgtaagcaccctgccagggatctcccggcgccccacagctgcctcctgcccctgcgtccgggagcgcttggcggcgagggcaccgggacgcccgctgtctcccgcgtagcacccagtgcccgcctgcctggcatgcacgccctcatcccggtgccccggggcagctccccgcacgttccgcagagggctggagcagagagcgcagaagggcacgcgggacacacgtgctggcccggcccggatccctgccccacagtctcacccagattgccagcagcagccacgccggcccggcccgcgccatcccagcagcgctgcccaccgctggctcctttctccactccggcgcccgctcccgcccgcccgcctgctagctccaccgcggccaaccaccacggccacttcccagccgctccccgcctccgagttcccggtgccacgtctgccaaagcatgcgcagcagctggggagaggcggccgggaagaagtgctcgctgggagttgtagtctgcagcctggctcagctgggggctgcgggtgcggactgggctccgaggccacgtggcagcgagtgaagtgcgaaaaggcaaggtcagggagtaagggaaggcaattaatgagcgggggcttactctgtgcctggagcttcagaaacagtatctcacgcagctcacagaaattaggttttattttctccactttgaggattaggaggcagcgcagggaatttaagtacgttgatccagatcacacagccggtaaatggcagagtccagggctgcctgtgaaggacaggaaaagccctcatccctgcctcccagactccctcctgcttattctatttaacttcagtaaaacattattgagctgttggaaaacaatctggtggttcctcaaaaagttaaacatagattactatatgaccagcaattccacccttaggctaatacccaaaagaattgaaaacaggtattcagacaaatgcacgtacaccagtgttcacagcaacactatttacaataaccaaaaggtagaaacaactctaacgtctgtcaaaggatgaatgggtaaacaaagtgtgatacatccatctaatggaatgttatttagccattaaaaggaataaagtggcccagcagggcagctcatgactgtaatcccaacactttggaaagctgaggcagcagaatcgtgtaagactaggagtttgaaaccagcctgggcaacatagcaagacctcatctctgctaaaaataaaaataaaataaaataaaatagctggtgtggtggcaagggactgtagttccaactacttgggaggctaaggcgggaggattgcttgaacctgggatatggagactgcagtgagccaagatcatgccactgcaccccagcctaggccacagggtgagaccctgtctcaaaaaaaaaaaaaaaaaaaaaggtgggggggagagaataaaatgctaatacattctacaatgaatgaatctcagaaatgtatgctaatgaaagaagccagacacaaaaagtcacatatgatgtgattacatcttatgaaatatttagaataggtaaatccacagagacagaaagcatagtagtgggggtggggaggaaggaatggggaatgactgcttaatgagtatagggactcctttgggagtgataaaacattttggaactagatggagatgatggttccacaacattgtgaaggtactaaatgccactaaactgtacactttaaaatggttaattgatgttatgtgaattttacctgagtaaaaattttcaaaagaaaaaaactctttattgaacccattccctgtgctaaagcaggggtccccaaacgctgggcctctggacagtctgtggcctgttaggaaccaggaggcaagctgtgggccagcgagcattaccacctgagctctgcctcctgtcagatcagtggtggcattagattctcataggagtgtgaactctattgtgaactgcacattcaagaaatctaggttgtgggtgccttatgagaatctaatgcctgatgatccgagatagaacagtttcatcccaaaaccatcccctgtccccccaccatctgtggaaaacttgtcttccacaaaaccggtccctggtgacaaaaaggttgggccctgctgtgctaaagcattcttgcatgcagtcagttcatacattcaagaatgtttattgaacacttactatgtcctgaggctcaagatatccagtagtgagatgaacaagagaacagcacagtcagaggttggtaagttatagctgaaaggtccttgccttctgtcaggagagtcaaagctcaaaacttagaagttatccattactcgcttcctattcacaacaggcccatccaacccctcaccacatcctgtcaattttacctccagaatatatctctcctgccacctcccaagtctaagtgac

SEQ ID NO: 316094 - DNA, 4001 bp, Homo sapiens
aaagatgggcacgcaaaggttcaacatgcagctttgcacccaaaagctgtgacccaggcatgaaactgccccttaatgagcctcagttttttcatctactaagtgggaagggtcacaccaacctcacttgattaaaaaggaaatgactgggaagaatgcagcacccagcctggagcaaagtaaaccctcgctcaaggggaccgctcaggtggagatgttaaaaataattctaggtaacacttgttgagcatttatttactctctgccaggcacagtacgaggcccttctactaaactctctccctgaagcctgacaaaaacctttcgcactgagggaaactgagggatctgggaattaagccagaagctcacccagctggtcagcaaaaagcccagatttgaaaacagttttaactccagaggactcacacttaattattactttatacttgttgggggcagagtgctcctttaattctttctgaaatccctggatgaatacctcaggggtgcctggctgtgtttttactctgtataccacgtctctagggaccatagtttccaactttagagaggttaagcagcttgctcaaggtcagccagctagttggctgcaaagcccacgcttgcatccagcttttaccccagaggcctctcttctgatatccttcttaacttaatctacactggctgtgggttccctttatttttttttctggaatcctagaggatgcacggatacaattcacccaatgtgtccatctctcctctcctaagtgtcagtctataggtttctgacctctagagggtaagcaacttgcccgagatcccctagctggtctgagcagcaaagcctttgaacgcagttttgactctggagctgcattcttcattcttatcctacacttgcttgtgaattctttttcgtccttccagaatccctgaagctgtacagctatactttaccggttacgtctagactataaaggaccacagtgttccacctcaggcaggttcagcgacctgcaagtagtgatacagctggtaagcagtggaagaagagggaggaagcaaggatgttcccgggaagctcggggcatccctgtacccaaagggatggggcggggccctgggtccccagggatcctggctggaggtcggggcgggcagcaggcgcctaccttgccgccgggcggcgcggccacgcagcggctgagcgagtcgaggcgcgcgctgtattcggtgaatttcttctggtagcgcagcgcggtcatctgcagctcaagctgcgccgcggccagctgggccaccagcgacttctcgcgcttcccagcgcgcagcgcctccttcttgagcgccttgtgcagcgcgcccaggcgggcctggagcgcgccgttgtgcgcccgcagcgctcgcgcgcagcagtggccgcccgcgcgctgctcgccgtgcgtcaagggtagcccgcagccctcctggcagcggcccactggccgcgcgtcgcaggcgtcgcgcatgtgcgcctccacgtcgcgccgcagcagcacctggccgcaacccgcgtggcgacagcgcgcgggcgcgaagtcgcagcgctcgaggtgctccggcagctgctgcagcttgaccacccggccgcagccgcgcgtcgcgtacgcgcacttgatgtccagcttgaggataaggcgcttgagcggcaggacgtggttgagctctttggccgacaggcgaccgcggcagcgcgccgggcagctgccctcctgcaccacccagggcagcacgcagccggcgcagaagacgtggccgcacggcgtggtcagcgggtcctccaggaccttgtggcacagcgcgcacttcaggtccgggtccacgtcgccgtcgaagcggtccagctcgaagcccatggtggcggccaggccccggggtcgccgccgggcggccgggcgccccctccctccccacgaggcggcccagacaggccggctacgccgcccgcgcgctcgctggctctccccggactgagcctaattgatccagacttcctcggaaaatgcccgaggaacaggactcctccggccgtatttgcgcgagcgcgagcgcacatacatcgtgccttggatgcctcccgccagccccccgaaaaagggaggaggctggaaggcagaagcgcgtgggaggacactgaggctcgccagaagggacgggccagcccaggacgccagcctgaatcttctcgggaaactcctttctgttctcttacagtctacgctataggagacaaaacgccagccgagaaaagctcgctgagtttggagctgaggctactgctttctcccaagggttctcttcgagccccttcccgaacggatcaaaacttttttactcccttctccctcccccttcctctagtggctgattgcagaggactaaaaatatcttggggcccgctatctcagcacttacggtctttatttatttatttcattccagggaaagttacagagcctgcgggaagctccggctgcaacttcagttctgaccagaggttctgtgaaccttcaggatttagcaggtttccaggaccggtgggtgaatctacccggggaagttttggtggacaagagctgctcgccagctgtcggagtgggagaggccagcgtgctggctccatccacttcacctaacacctctgaagtgtctgccctgcagtgtggcaagcgtggtgctgagcgcttctaaatccgtcgctttaaagatcattagtacaatgttgtgagagggttagctccatttgaaaattattttcccgtgattacaaaagaagcgatgctgactgcagaagttagaactgggagaagactcatcacccccatgatcatgtcaacaactgccctccttcagttttggtttgttttgtgtgtacactctgtcatctttccattgaggaaactcaggctagaagaaggataaaaacaaaacagaaaacaaaacaaaacaaaagtgccctgtagggtcctgtaggtcagtgtttctcacattttaatgtggttgcggttctgatacagtgggtctggggcgggttctgagaatctccatactgaaagcacttccaagtgatgccaatgctgctagtccatgctggtccttggattcccacttgattggaaaaccctggcgatccatagatctggacattcattccctgcagtacagcaaacctggctgggtaggattcagcaacagtcctgagcaatggaggaatatttttggaattccaaactgggtgtaaagttcatagcatcatccattgattttattttattttatttttacctcccaaggctatagacattcctaagaaacacgcagtcagcttttggtgagagtggaatcaagctatggaattctcatttggaatctgcttccagtttctgaacagtgaagcgggagagttctgaacagtaaagcaggagctctgtattcagcgagactctggggcctggaaagtgggattacagcatccattttgtctaattgctttccttctttcttttatgtggctgctaaagccccatgaccttcactatttaactgcttcatcagagtgaaagaattgccttgatgttcataaggattacttgtttcacactgacctttaaaaagttgtcactcactagatttttcagtgcatggttgaggtcactggacagtgttctttaatcagttttggtggcatttgttgcctatttgaggtggagactttcttttaattgctttaatcaattaatgcattgctttgataggattctgcatggggtggaatattattggcctttgttcagataagcttgtgccagggaatcctccatcagtatattcattaaactgctcatgggctctcagataatgggtaggaaacaaattctttcaccaaaggtgtgtgggcttgtcagtttcacagaatgagctagtgtcaacagggtgataatcttcaaaccaaa

SEQ ID NO: 316095 - DNA, 4001 bp, Homo sapiens
aaagtttttgttaatttccccttagtggtcaattgtcaattttgtgtaaatgaacaattttttgagggttgactctattaaaatcttcctgttttacccttgtgaagaaactgtttaaaaaacagataatatataaaattgtaagtatcattcttgggtgaagatgaagcataaaactatagtaataattctttgttaattttttcagcagtcattatttgaattcttctatgttacttaacttttcaattggtgtagcttttataagaaacatgcagatcacattgatcatatataatatttaaaaatatacttcattcactactttttgtctatcaaatgtgatataatcacattaataattttcaaaacaggatgatgttagtcatacgggaaatcttttggaattctggcactgtatattgagaattcttataaaaattgagactatgatgaaatattgtgttttatttaaaaatggattatagtccaaaagaatttccctaagttatggaaattaaatctgggtagtactaagtcataaatataacaacatatttatctatttccaattgctctaaaagacacagaagcaaaatcctcagtattcataaatgttatacaccaggataaaggcatcacacataatgattgtatttgaccatctttggaatggaaaggaagcccaaacatcaaacctgatgactaaaccatttaggtgcgataaagagtccagttcatactttagaaagctgagttagtattttatttttctcccaaagcatatatctgcctttataagaaccaaccaaccgtatgaatgagaactggagtcaaggttaaagtaatcttgcccaagagagtagagtgtgtttgcatcggaaagaagcagcggctcagctcagatgaatattaataacaaccggaggcagcacctcccctgaaaaacattagagctccttggacatgtgtttgaaattcatcctcccaagtcatcctgtgactattggagtagatggcaatgtcccataatgtgaagggggaaaatacactataaatcgttttttaaatataacactttaaaaaatgaaacgaaagtgacagagtgttctaagtcaagcaaccttttcagatggtaaaggaaaagctttgtctttcctattattgtttgcccttcagttgacatacatgctgagatgcatcaataggattacaacggaaacacggtcatctctagggtttcctctgtttcgattccttgatcctgtttaaagaaacaggctcagggaatgcacagaaaacaaacttccccaatcgaagttctgaggtcttccctccccttctcccaccttcggaaaccggtctagttttcccggcagcaccggacagaaatgtcacggtcatgttgcatcacttcacttgttgagctgtgcgaaggcagcacttgaccacagaaacttggtgaaccgccttgctcttaaattagcccccaagaattctctccagccctatagaaatgtcttacctgcatgtgtccctggtacattctgcttcggtttcttcagggctccctgaggccaccggatgcttttcccccgtgcttacttgcccaccaaaagaggggaaaaggtgggtgcacagcgggttctcagagggtgctcctgagccccctggagctccgggtactcggccggccggcggccactcggcagcgctgcgggctgccgggaactgttctccgctcggggtgctgaaagcggacgcgggagagcgcgcagagaaggcgaggagccgggtcggccaggctctcctgcaggcgcgggtcctgctcgcggggcgtctctagaactcactccttcttcgccgaactctttctcgcttcctgccaggttgcctcatgtctctctctctctgagctgcgaaccccctcctcccagccctgacgtgagcgcctacaccagccgccgccgcagctgccgagcggggcgcgcgccgttctcccagccgcgtgcctgccgagaggccgcgggaccgggcacgcgcgcgcgttcccaggggcctgggagcggcccgagggcggccccgggcggtgcgcgctccccgagcgcgtcctcggggctgcgcgcgcgcggcggcaaggcgaggtgccggcaggcggtggtcgcgctggtgtacaacgcccgcagcagcgcggcgttcaggtgcggcgtcggcgggcagggcgattctagcggagaggatggccggccggaagaaaggcgggaagacatgcatcgtctctccgggggccatccaccgcggctgagcctgttatcctacagacattataggctgagtgcaggggttgccgaagagtttacttcggttctgattcagctctcgaaagttacgtccgtatcacccgttaaataaagactccccgctcccctcatccccagttcatcgccgagcattctatttaaaacggcaaaccctagtccctgaggatctggcatgttttatttttttccctagcacgtaacatcacctaacatcctttatattttccatatttattttatgtactgtctgtctctccctctgtacaatgttatttccatgagatcagggacttttttttaggggggtggagtgttgcacttggttttgcacgtgtgtgcacagtaaggtatttagtacttcctgacacatggcaggcacacaataaatatttgctgaatgaatagacctttactactatacacttacacacacatacacacatatatgaagagtgcatttaaatatgtctcaagttgagactgggtagtttgatgtgtctacacaataaatgttcatatatacacacacaccacggggtggtgtatactgtgattacctaattttgttggtaaaaacatctccaattctacaggcccctcatattatgtacagcatgatatccccaaaatattgcatatagcataatatgctttttataaagtttaaaaaatccctagaaatgtcaatgtgtattcatatattcatatacaacaatataaaaaggaaagcagtggaacaatgaatatagtgttcagagtgttggtgaccctgggtgaagggaggcagggaaatagatggggaagcatttcacttgaagtttagatgttaatgtcttatcttctatgccgggtagtgattcataggacacctaatatcctattaaaaattactgtgtaactaaataaaatagaaccatgtatggactaatgaggagaatgtgaaatgaacaaaaggatgtgaaatgaaccaattcaatgcatctgaggtcctaaaacaaccaaccaaacaaacacaaaaggactaagacctgtaagcaggagacatggattcctattagattccactagtagttacccttggacaatttccttttactactttggacatcagttttttcatgtctaaactctgtataaaaaacttattttttttaccctgaaaatagagatatgttcataagcactgtaaactgtaaaatgtcatccagttcttattttattgttctttataggacaaagcacaggacttggagtcagcaacaagaggtgctagttccatctcactacctcaatgctctcttgggcaagtgtaccaactctctatttcctcaattttgaaataagacaaatatctacctagtgtgctgcacagagctgctgaggactgaatgtatgcaaaggaagttgtaaattaccaaccatgatatatgaatatgcaaacagacttttttttcccagttcagaaaagatgaggactgattttctgagacctcaagtactgcagattttaaaatggtactaattatcatataatactatcatgttatataaaaactgggaaaagtatagtgctttgatttaaaagtactagaaatctgtgaagtaacaatagggtcaaagttttccaatccattatatgcttgttattatctaacggcaggttcaaggagccaacaacca

SEQ ID NO: 316096 - DNA, 4001 bp, Homo sapiens
tttacaaaattaggtattcgaaaagttggaggacagactattttaagagtttatgtaaatgcacttttttttttttggcattttgtcatcatttattttgtcccaatgaccactctccatctatttcctccattgcaaaatctataaattctaaagttagaaaaggacatagataatgataatcattttacacttgtgctacagcagaaagataatatgtctgagcctttttttctcccaacgcaacggttgatgagaatactagaaatgtcatgttgtgtcttcataccagcaacaaatgaaaaataaaaaccactacatagttagctgtagttcaaggttatttatttattttaaagattcttgctttagttattaactacatcaacttgaattaagggaattaaaaatacttatgtttgcatctactgtgtcatattagggtcctcatctcattcagggaagagatatatccttcagtgaacatgatataaatcttcacactgtgagcacaattcttattttttccccataacattcaaaaaccagatttacacatttttttcccgcaaaaacatatctccaatttttgtgggttttttttttactgtaataaagagatttctgcatcttccaagtattaggatgcataaataaaacacaaattctcatttatatattaatgaacttagccactcagaacagaacagatggccacagcatttctccctattattattcttgtcctcatttgaggttccatttcaagattgatggaaaacaaaaagaacaaggttggtttcagtcaagctgacttccttcctatcattttgcttttgtattctttttgttcactggttgccataagattttgtctagagtgtctctaatgtaaaacacttagaagtgcctttccaaatattgatctgtatacgtaccaagtagctcatttgcatgacccggtttctggacaaaagggcattaagtagagatggaatgtgggtccttccatccatttcactgtcagacatcccagaattctttatgccactggcagtggcttccttgccagaacttgctgaccagagaaccacagatcttgcccaggaacagcattaataatgtacaacaataattgaagtattcctgaatcattgtcttgactttgtaaacattgtgaaatttttggctagcacaaaaaactcactgaaatgaaaatttctttttctaactaatttttatccatgcacttctatgctctttgactgttgttcccatttaatgttttaaaaaatctacctattttaaattatataatttttgtatttacttctctgcatatggactcttcagcctcctcatcataaaagctcttgatttcccctttttaatctcctattctaaactttcttgacaatcactgctaacagatagaatgtcagcactcacagaacatcattcgaaactgcaacttctacaaataccaaagtccgcctctccaatctcaactccttatctaatttagtagtaaattttcctgggaagaggctagttcagggaaggaaattatgtcccccaaccaatctaaatagaagctggcattttccaagagtgggaggaggcatttagagctctggttttgtacttaaacctctagtctccaaacagcacacaacagtacacaaagctggagccttacagttttactctagaattaagcaatattttctagttcaccccataaccccggggggattaatccttttctaagccataatggtattcactcacttactgcttatttctagtgcgagcataatcctctttcaagcactcagcttcccactttgcttagctcagccagcccaggcagggatcttcagctctcctccctcctcccagccgggaatccctgtcttctatctatgcacttttgtcaagcacaaaaagcaagtccacagcttctgcgtggtctttcacagtagccaaaggactgaactagaaggaaaaagaaagctaatctctccaccttccaagtgtgagggggcagggcttctgtgggaggagaagccacagggcaatcacttcctgtgctcctcccaccttcagtggcaagacactggagctgaggatttccactgaggcagtaaggttaggcccctgtctccctggccttagcatgctgcccatttatggacgactttgtgcactgttcccctaggtgcagccgaggagggagcattagtgcagtggagctaaaatggtgaggtcctaaggcgggaaaggggaggaaagagcgaaaggacatagtctttctttgctgacagtgcttcacccccataagaagctttcagctcaggataacgtgtccaacttctgaaaccccaaacacagtatctcctatctttccacaccattctgaatcctttctgacctgcaagagacgtatctttgttagttctttgttaatgctgataacttttttgatactattgcattagatgggtaactttcttaagaacattgagcctaactggtaatcttgcctctctacagacttccaccatctctccttaaccctacctcctgtttcctacccctttgtcctctcctccacaaaagtaaaacagaaaggtgagtttattttaattaaataaacttgcattaaacttggaaaatctatagaaaaatataggccaggtatggtagcttaagcctgtaatcccagcactttgggaggcctaggcaggaggatcacttgaggccaggagtccaagactagcctgggcaacatagcaaaacctcatctctataaaaaattagctggacgtagtggcgtgcacctgtagacctagctactcaggaggctgaggtgggaggatcgcttgagtgcaagagtttgaggctgcagtaagccatgaatgcactattgcactccagcctgggtgacagagtgagaccctgtctctaaaataaagaaaaattaaaaaaagaaaaacaatataatggccacagatatgggatgtatcatataggaacattttgcaagtaagtaacacaacaatgaaatctgatgggctagagatctgaaaaatgaagtaactcctgttcattgcaggatatgaatttcttaaaagtaagggttttaattgaaaaatactagttgtgtatgaattgaattaaaaggactcttcatactcattaggaatggaatatataaagaacattttgaaagggaaaaggaacacttgatttggctaattgtacaaattagccctaactgcaatttttgcctaactacagatgtcaaaataaatataaaggtttgcatgtaaataattcaaatttttaaaaatcaatgctgctatgaatgatacatagtagacatgaatttattaaagcacatgtcacatatacaatataaaatatagctacaagaagaaaagaccttcttactgttttcttcatggttgtcaggattcagttcctatcctctttttcacctatcttcagccttttctctaccactttccttcccacagctgcaaaattgctcagattttccctgtcctaaaaggtgatttcctcatatctgcttttccttgaagactttgatctaatctctcttttgagtgtcaatgaggagaagggttgaaaaagaagaaaatgtgctgaaaagatacttgctgagtttgtggtgtctttggaaagttcatcccagtggaaagatccagtcacccatttggatgtaggtgtctgtatctaagaagagagataagggcagtgcatatagatcactagggttaattgaaattgcaggagtggataagctcaccaaagaagaaaacacagagaaggaagagatgaggactacggccagagtcctagagaacagttgcatttaagtaatgggcaaaaggaaagaactcagtaaatgatgaggaagaggagtggtcacgatgcaggtggcgaattagtggaatacagtcaaaggaaacaga

SEQ ID NO: 316097 - DNA, 4001 bp, Homo sapiens
taatcccaacactttgggaggccaaggggggcagatcattagagataacgaattcaagacgagcctggccaacatggtgaaactccatcctactaaaaatacaaaattagccggccatggtggcgcatacctgtaatcccagcaacttggaaggctgaggcaggagaattgcttgaacccaggaggtagaggttgcagtgagctgagataggaccactgcactacaacctgggcaacaagagtgaaactccgtctcaaaaaaaaaaaaaaaaaaaaagtccaggtcctcactcctttcccctatgtagtaatagcagccacccccctaagtcaggaccacacagccctaataacacagactggctcagcctccccgcctccagaagagtctcaaaggaggggtggccatagccctcaggactgagtgtgcattatagacagcacagccccaccaggacctacatcacaatcaaagccatgagttaccacgacttggtctggtcagaaacatggccttcccctgccaggactcacagtgtggccagaaatacacacacccttcccccaggactcatatcatgatcaaagccatggctccaggctgctgcagcaggatgagcacaaagaactctccccttgcttatcatacataagcagaggcaggatcacagggagacccaggcatgtcactcaatctcctgatctccatttcactgtctgttaaactagatgttctctgaggtgctggacaagctgcaaattcattacaatgtttcagttactcctaaaacaaatctttcttttcctggtaataaaaaagttgcaggccaggacccacgcctgtaatctcaacacttcggaaggccgaggccagaggatccacttgaagccatgagttggagaccagcccagacaacatagcaagaccctgtctctacaaaaaaaaagaaaaaagaaaaaaaaaagctgggtgtggtggcgcacctataatcccagctaatcgggaggttgaggtgggaggattgcttgagcccagaaggtcgtggctgcagtgaactatgatcgcgccactgcacttgctccagcttgggccactgagcgagactcatctcttaaaaaaaaaaaaaactgccagctcatttaaggacaggcagaaactcaaggaagcggtttaaacacctgggaccctaggagaggtgagccccttaacaattccatgaatttcagcattctcctagctgtttcactctccagttttactgtacacccatgaccccaggtggatacttacatgtcccgggacacagacacaggcccacacggcatacttttctgtctctatcctgagcacatctctgctgaagttcctgcccaagctcagctttaaggccaagaggcacccttcctcctgttggaaaactagcccacctttgaaagttctgggctcagagaggccaagtaattcacctagggccacacagctcagttccagtccaacaacccggcccacactccttggccaggagagagggaagggcctggggtgcccacagggtcctccccagactgggggcgatggggattggagagggaagcgagggggccagagccctccccgaggtgatggtggccagacctagccaccgccaagccgatatgcccccacacacctgtccccgccccctgctctgccacacctgtctctggcccaccactgtcacgaccgcctcacctgtccccagcagcctccccagtcacggcaacctcacctgtccccggttccccatctgtctcccgccccttctccatgcgagacccccgcccaggccgccctacccacccatcccggtgcacctcccacctcctcccagaggaccccgcctcaccaccgcgctggcaagcgtgcagagcgggccgcccattgctgtatggcatccagatcttcttcagggggttctgtgtcaattcccgtggggacgccatcccggggccgggatgagtcggactgcgccgcttccaacccagcagccgggccacctcgggccacccgaggtcccgccccttgggccccgcccctcctcaagccgcgacagcccatgtctatcttcccgcaggtcccgccccagagtgagtaggctccgccccagctgaaaggggcccggcctccgaccacgcatgcccaactcacctacccgcccgttttggaacaagtgggcccagttcttcaggccaggatcgagaatgcgcatgctcaactccggattgtactggtcccgccccagttcaaggcccggattgtgcaggcccgccccggatgcgcaaactcagctctcccaacctgcccgcgctgatttgcataggccccacctacgggctccgccctggcgctgcatccctgagcagcggcacgcgtgaattctgctacctccttgctagggagcccagggcccccaggagggaggggttttcatgcagtgggacgaggcctacgtgacccgcacggccaggttggtcagagccgacaggggccagtaggcctgcagtcccagccgtcaactccgctgcgccctcctgcccctcctcggggtcccccttgactgctccgagccccgggactcttccgccgtccataggagcatgctcaaccacgctggaaaagctcttttacctcatggatagagactcaaaacacatttcaatattgttcctctttctttgctttggctgctgggagcaaatgcgtgggactttttttttttgagacggagtttcgctcctgttgcccaggctggagtgcaatggcgctatcttggctcactgcaacctccgcctcccgggttcaagggatgctcctgcctcgggttcccaagtagctgggattacaggcgcccaccaccacgccctgctaatttttgtatttttagtagaggcgggatttcaccacgttggccgggctggtctcgaactcctgacctcaggtgatacgccctcctcagccttccaaagtgctgggattacaggcgtgagccaccgcgcccggccgtgcgtggcacttagtaaccaagtactttgggtactcactaagccctgggagtatcttaatcgtctttccagaatttcattttttacaatttttttttgatttttagtattttggtttttttaactaaagttttacatattttttgaaaataatatgttaataacattttctcttcaggaaaatgggatgtgcacattgtctatcttacagtattacagtataaattaagtatgtcaatctctaagaaattcattttaaaatacgttatggttgccttttactatatttgtatctccctcttgtctttgaaaatgcactggggacaaggaacaagggagagatccagaagttcctaaacccctggctcactttcttgtttggcccccaccggactcctgcagtttcccgcctcctcgggatccccagccccgcctctccaagctttgtacactctctgccccagcccccaccaacacggcttcaacctgagccacactgccctctagcgatgtcatccacaacacccctggcaggtgccctgcatcctcaggttctctctgcccagtgtgtacccagccaggagccaggtgttgagggcatgggactggcaacaagactggcctcgtgggctataggtgtagcaccccctcccatgccctccctgccacagccctgccttggatcagtccaagtccacccagctctttaaagcttggcaaggacccttaagatgactgacacagatgtcttgcccacttcataggaactgaagattccaaaggtccacatgctggaagcccatctggaccctcccccaaaccagctctagctgcttgccctgggaacaccctgccccaggcagagtcaacaacttcctccttcctcatcctccttttgcagtatctacccgcttattcctccaccccagtcccagcagatctgagcacatccatgggcg

SEQ ID NO: 316098 - DNA, 4001 bp, Homo sapiens
attcagtcccattacagtaaatcatgtttcatcaaatttaaagttgcttcaaagtctcccaaaataaagcctgttctttgatgtgttcacttctctgcttagagtaactagaaatatacgtgatgagatggacttcaacccctggacatcagtgcttttccaaattcatatttccctcctatttttctagccacgactcccgtttctttccaacttcccttcccctcccatctcagtaatcagttttctttctgggcaaacgcaaagtggattctgtctacagcactgcggtaggcaatagtaaaacagaaaaaatggagggagattgggaaagaaactgaggtagccaccagaaccggaaaggagaaaacgtgcattctaacattccatgaataagaaggaaggcgtcgcccccatcagaactgcagagtcatagcaggccccagccatttccaagcacactcccgcaatcttcctagtcagacagcgggaactcacacacaaagacaagaggactgcaggaaaaaagttgatgaccagatgccaattccctacaagaattgtagtccactgcgggtatacgagaccttaaagtactactatcaaggactgagttctaaagttagactttaaaccatgttaagtggtaaaagaataattagcacccttaataggggacctgaattttggtgcttaatggaaagggagcgtggtgctaagaaataaagagaatggtctcgtatttagtacaattatcataattttagaaacagccttgggcagaaacaggcaaaacaataagctggaggttttgtggcaaatattctccaaacatattgcaaccaactcaaaaccatcaagtctcaagaaaatcaggcaatgtgaagcataaaactgcattagttcctttactgccaccactaaagagggagggacttagagaagtgaagtgtgctcctggtcttcgcagataattgaaagcccccgaaaagcaccccttttttgagctatgttgcataactggggataaccgtatatcgatgaatctccatatgagaagagaaatcaatggcagttcgccatcttggagaatttaaaaaaaaaaaaaaaacaacctatagagctagagctgaagtcgagattcacgaatccacctacgcggtcggcgtacatctctcgcaagccccagaggcctggacatcggtaaacctacgcaaagtcgcttcgagaatcccgggggccgggccggggccgccgcctcccacagccggaggcgcgggaggcgcgctgtccgcggagcaagagccggccagagagcctagggacctccacccggggcccgcgcgccccagcccggatccccgacccccgcttccaccccagaacgtgcatagcaaacctcagggcttcaagagaacctaggggaaccgcactaggaggaaaaaaggaacccctccccttgccctggccggtgcgtgccccctcccccaacccgggcacctggaccgacgctgggaacgccgggggcgcccggccagggccagcaaggagtccggccgccgcccccagcctgtcagcgcagccccgggtgagggggcgtccccgggcctcggcctccccgcccgcccggcagccgcatcctcggcgcccgctgcctagcacacctgcgggctcggccctcagtgttccagccccgcgctgcggtgcccccgcggccggccaccccgctccggtgcagggaccagggtaccggccgccactggtcctcaccgtaatgctctgaaagacgcccccggccgtggctgcccagacgtatttggcgtcgcagtagccgacaatggcggcctcctggcagcagccatcgcacatcaggttatccacgtagctctgccaaccggccatcttcgagcccttcgcactgcagcgcggacggcgaggagcagcaggcgcagcggcggcggcggcggtagcgggcggcggcggcgcggggggaggcggggcgggggcggggaggaggcggctctgcgcaggcaccgaccgcccccctccccgaggagctgcggcgggaggacgcgggttcagcgatgagggacgaacctcagagcgcgctcggccgcccggccgcccgcagccgcggggctgacaaaccagcggcgggaggctgcgaagcggctgtgcctgtggcggctgctccttaccgcagcgccctccgttttccgcggacacggctgggcgtgcgcgcgcgcgtgcgtgcgatccttccgcggcgcccgggcacggagggtcccgggaagggcggggggagactgaggcgggggcgcggagggataccgccccgggacaatcacggccgccacgtgcgggaggcgccggccgggagcggtggcgggccgagcttcggacctcgggccggcggagagggtggaccccgcgtcgctctcggcaccccaggaacagcggcggcacggacgccttggagccccgcggccgggccgcgatgtgcttttctcctgtgttcgctgcccgggatgcggaatcttgagcctcggtgtcgggttacagagttgtcctggtgacgggatgcggagcgtttcctcctttttgttgtgggggcggctggtggcaggggcagctggtggcagggttgcccacgctaatctccgagtctctaagggcaccgtctttcctggatccctcttgcgcctcgtccataaaggcagacccgcgggcgcgcgccggcaacctgaaatcagagcaggcgtccgtggcgctcaggaaccttgctgagcttcgccgatctttcattgttgcttcatttgggtaccaagggcctctcattctgtggattctttgcctggaggagcccccttaatgttgctaatcacgtgtggttaaattgctcgtaaattccgaacaaaacaaatagcgacctgtgttacactgtttcttggtaactgggaaagttactggtggcttgaagtatacgcagaaaatacaaagattaaaaactagggaagagttcactgaatgaacaccgtaacatttctgctctgcagggtaaaataatttcgggacccaggtctgggaaagatttgtattaacaaggtaaacggtgggtagagtgcctgagaagctattcgtatcgtctttggtagcctctgggcactaggactagacatggaattaggggtcccccaacaatgacttcaattttaggttaatagaaaccatctgccacttaagggaaagaaagcaccaaaatgtagataagttgatgttcacccttaaagttatcgtgtgaggtcatgatttgtaggaggattaaggaatgtatctctggaaagggcaagaacgttgcttttaaaagtctaattggttctgaagttttatattttttctgctgattgctttaaaatgttcagctactagagagaaaaaaagtacagtaaaagaaacccccaagtcagagacctatcagactgagaatatgtattttctcatgttctaaagatacagaatacctgtgtggtgtaaaatgtgaaccaaaaattgtttcatttttgtaagtgtgcctcccacctgatttaattacacttaattgttcttgtttatgactctgccttttatggtgatgttgatcattttagtccttcgatcatagcactgtatcatcttaaaagttaataatagattacttgtaacacaggctcactatgtgagaattcatcaagctgtatgtacatttattgtgctcttcattgtatgtataattcaataaattgaaacagtaaacgaaaaggtaattatagaaaaaatacagtgataacttgaagtatgttgaatttttattaatttactctgaaggttttaagatataatttctagacgttactatcttattgttatagcacagagttggaaataactacattcttttcctattcttttattgttggctttaaacagtgaaagaatttgaccaacaatattttctaattcaa

SEQ ID NO: 316099 - DNA, 4001 bp, Homo sapiens
actaaatacagaatctgtatttgaataaattcaaacactttaagtcaattctaaggacctccatattgttagaaaccagaagagcagtagtttttgtcgggccagaaatgtacctcgaaggtgaaaagcacacaagagattatactggttttatctcccttttcttatcggtcttttcttctgagaaactaaatcccacccaccccacattagcagcactgataaaaatgtaagaacactttctattccatgaaaaaacaaatgaatctggcactaattggtacacatacactattaccatagcgttgcttttttaagtacaaattttctttgttctatattacgtatgtaaacagtatttatattctctgaggaaccaaatgtaaaaaaaaaccgaacaaaaaaaaaaaaaaaggaaaagtgggggccttgagtggcggttcacacctgtcatcctaccactcagggggaggactgcttgagcttaggcgttcaaagccagcctgggcaacatagggaaaccctgtctctacaaatgaaaaataaaaaattagccaggcctggtggcacaggactgtggtcccagcaacttgagaggctaaggtggggaaatcgcttgagcccaagagggccaggctgcagtgagctatgatcgtgccactgcactccagcctgggagataagagtgagagacgctgtcacaaagaaagaaaaagaaaataagaggaaaagtgaaaggaaaaccgtcaggaagaaagctgactcctcacttactttttggattagtaaataattcatacatttttatgcttctgttttttttttttttttccaaactgccttccaatcaaatcacagcatcatatggtaactgttcaacattatacagtattagtggtaggtaaggtaaactttttaccgaactgctgcctgtcatactactaccgtatcgtgtaccagtgacatgcaaaaggccagcttaagttctggttttttaaaagtgttaatctgctcaactatgccctccaatccaaacagtatggtaaacagttctaactcctaaccaaaaatggtcacagagaatccaaattctcggcataagtctaaacatcggttgagcggaactggccaaaccatcgcactgcatttcgaggcctggcacaaaagaacaactttggtaactccaccgtctaggcatactaatacctgcaaaatacagccagcagttctggtgcacaagaggcctacccaggaaacagtaagttctggagtcgttaactaaacataccgtcacaccgacacacaagaatgtggcccgcgtgtgaggcagcaacgctgcacccagagaatcgagggaaagacctttctttcagggtgttttcagcctcaccagacctgcaagcagcccccgccgctctcaggcccacgccgggatgcctccggcacgagggaagcgggcagccccgcgtgtcggattctcccgctgaggaggagtggggtggcgccggggcgggaaggagaagaaggcgaaggaggcctggcagtgcccgccctgccctacccagcctccgcgggcccctgcgcaggcagccgtaacaaggctgcccgcggggcccacttgcaggaatgacagcgcctgaggagcccacccgggctcgttccccggaaaaccccagctcccggagtcccaagggtgaccctgcgcgcagggccgcgcagatccgggacctgatggcggaaggggcgctcctgcctggagggtaactggaccctagagttcgtcttcgccccgcgacacgggcctagccggctcctccacgataggacgggtctcgagtctctctttccccacactgcccgcaaaagagccctgagctttcccctgggggaacgtgtcgctgccccaactcgccccccctagttacgacatcagtcaccatctagtcactcactccgcttccgccatcttctctcctccatcactaacatgggctgcgcatgcgccccccggcggcgggcggagaggcggggtcggctcagcccccggagccagaggtcacgtggcgtcctcagcttccaatcgcccccgcccaccataggaattgctctttctggaaagtgaccagatttcccccactaagataaccagtgtctcctctccaaacccctctctttctctcctccaggatcttcctcttggggagatatctgtaataaagatataaaaagttatcttagattgttaaatttaaaatttaaagaatatgggcgcggtggctcacctgtaatcccagcactctgggaggttgaggaggatctcttgaagcgaggagttcaggaccagccttgacaataaagtgagaccctgactctaccaaaaaaaagcccaacaataataataataataataataattttgaagaatatctaaaatataccaaagcctatgcaaactgcagagtggtttcaaagaaaatacccacgaggattagaggctgaggtctcagggagaaaggaaattcagggctggctgcagggcttgttgcctgggagctttggggcttgagggtcccaaccagcagtacctctctccagctgaaagatagtgttcagatgccagtgaatgagtggttaaggaatcatcctgactaccctaggcatatcattcatgtcttcagtatgaatttgctgagcgcttagtaggaattgcaaacttgaacaccacaaggaacaagcaggaacagccaccagtttgctagtgtagtctgctaaatgccaacaactcaggtgtgtgagacaaacatataaagataagtaaaataacacatttaaatataaatatgaaataataaagatgagtccttgtcttccaagaagtagcggagcgggttttatagacatttgcatacaatataatgtgttctgaagaccgggacgatggctcaccctcataataccagcactttgggaagtgaagttgggaggattgcttgagcccgggagtttgagaccaccctgggcaacatggggaaatcccatctctacaaaaaatacaaaaattatccggatgtcgtggcgcgcacctgtcatcccagctactcaggaggctgaggaaaaagtgttctgaaacagatctattaagtgctttggaaagtttaaagttcaaggtgtataataaatctttacctccctttacaggaaaaaaaaagcatacgaaccataaacaatgtctctttttgcattttgtgaggtgatggagtcacaataatttcaagaactgagaatgaagtattgatataaatccatccggaagtgtaatatggtctgatgaaaagtatacttagtcttagaaatcctatatgccaggatgtgcctaaggaagggaaaagaacacttcccatctatgtgagcttaaattgtccctttgcccacttttcccatctgataacatcttttttttttaccttgtctacctaatagcagtactatctactactacttctagaattcattgagaaagtctccttttaaaagtccctgtagaccaggcacagaggctcactcctgttataccagcaatttggggggccgaggaaggcggataacctgaggtcaggagttcaagaccagcctggccaacatggtgaaaccctgtctctactaaaaatacaagaattagccgggtgtagtggcacctgcctataatcccagctactccagaggctgaggcaggagaatcgcctgaacctgggagatggaggttgcagggagacagtgccacttcattacagcctgggaaagagactgagactccatctcaaaagaaaataaaaagtccttgtagatgctttaaaatattactgctttttctttcattctgacttgctcatatatcattgttattaaactttttttttttaaattgagacggagtattactctgtcgcccgggttggagtgcaatgatgagatctcggctcaccacaacctccgcctcccgg

SEQ ID NO: 316100 - DNA, 4001 bp, Homo sapiens
gtcttgaactcctgggttcaagagatcctcctgcctcggcctcccagagtgctgggattacaggcgtgagccactgcacccagcctaaaaatagattttaaaacaaaaaagctattaagaaaaataaaaaaacaaggctgtggatatgaggatgaatgtaacagagaacagtcagtacaccaaaagccataggatattcaaagcaaaggaggcctcatactcacaagacagaaataatgcacgctgatattgtctttctgaagaaattcccctaatttttcgggatccccaggttctcgaaggcatagccagcaaactggaagagaggacacccagaatttggctcaaattgaccattaagaatggaagagaagggtgagaatgtaaccattcctctaagtcaggaaggagtagaatactaggaaaagggtcattttggcaaggaggaaggttgggatgaggtcttatgtggtatcaattagtctgtcacataattctggttacaatgaaaaagttggccacaactgctcacttcatttttttttggttttgttttgttctaaagtgactttaataacttgtttcttgaacttcagacatggtaatttaaaatggcagttcctgagtcctcaagatcttagagaatctaggaaggaagtagggctgggagagagagaagaagcaagtatactgccccacacaggtggccttctttgctgagggctggaggcagtgggcgaacacaagctccagtctttcttaccaggccctgaagacggtttcctctgggttaccctcctagtcttggcagattttctatacaagagaaataagaagcacaaggtgttctttggggatcttgttgataacctttttaacatttctcttaaaatgccattcatgggtctgatgaaggaccaacatatctaaagcctaagacatcagcttcttttcatatttcacatatatatgtttttgagacagagtcttgctctgttgcccaggctggagggcagtggtgcgatctcagcttactgcaacctctgcctcctgggttcaagcaattctcctgcctcagcctcccgaggagctgggattacaggcgcctgtcaccacgcccagctaatttctatatttttagtagagacggggtttcaccatgttggccaggctggtcttgaactcctgacctcaggtgatccacccgcctcggcctcccaaagtgctgacattacaggcatgagccactgcacctggccatatttcatattttttttaagtgcaaaacatactcactgagttatttgagggcaggaaccggattgtaagcatctttctctccccagtgcctgtactgcctatgttgactgaatgaatgcaagagcaaaccctcttttacttttttactgcttcttctgccaactactctgaatctcaggtggtaccacctttacaaagcatactgaaatgaaccaaaattgataaaagtatttcctgttgcgaggcactattcttggcactttacatgtattggctcaattaatctacagtagctcaatgaatctacagaacactctaaaaagtacatgccattattatgtacattttccagatgaggaaactgaggcataaagaaatgtagtgccttctgtcacagttattggcaagtggcagagctaggatatgaatttgggtagtaaggttccagagtcagcactttgctactagggacagcactggtaagacaggtatgacagctcccagctccgtgtgtgcttccacactgtccaacctcaacccccaagactacgacaaagggggcaaaaagtgcagcctataccacaggccattggacaatttctcccaaattccctatgtcaactacttctacctcaatctctggcattccttcttttcttttacagtcttcattcggtgctgtctctctctcctctcttgaattcttctatactattgtgaggacaatacaggctcttccagctataaatataaatggggtttggtaagcaatttaattctgtatttggttatcaagttccccagggtcaaggcaatggtgcacttcacctcccaacccatgtgatggaataaaagggactgttctaggtacttgacatgtgttaactcacaaacacgccatgcagtaggtaccattattatccccattttcaagatgggggactgaggcacagagaggtttaagtatcctgcccaaggtaagagttagtaagtgatatagatgggatctgaactcaagtagcctggctccagaggccaacactaactctcatgttatactgctatcacacagtagcaaaagaacttagaaccattacttgacctagctaaatggttgtttctttgtgcctacaaaaaaatacgtgaagtagcactcaggaaaaaaaggctccttttgcacctaagtatgggtgccttaattctacccagtgaaagctagataaggtagctttttcctaagcaaaggagcctgtgagatttgggctgcctaaaagcaagaactccctctagtgagagacaagaggtaacactgacaaacaccccctaggctctatcactttttttttttttcagacagggtctctcattgttgcccaggctggagtgcagtgggtgagtgcatgaaagtgccactttcctaggctcagatgatcttcctgactcagcctcccaagtagctgggaccacaggtgccatgccaccgcaccagctaattttttgtagagacagggttttgccatgttgcccagactggtcttcaactcctgggctccagtgatcctcccgcctcagcctcccaaagtgctgggattacaggcgtgagccaccaggcctgacctctcctatcaattcttttcacctaggctcaggtggccactgagatatggtctgtacccaacctttgtctccatctgagccgagtacaatagccaaaagtgcagaaggtaccttgtctcctatttccaatgtcagccaactccggctgttacctgttttcattagtaaacaaactgtaaaacaaatgtacagtttcactggttaacggggagatccctgaaagtgaacgggaacgaaagaaaatccaccgctgtgaagcaaggactgtctagtcaggggagaggagaaggacagcatttcttagaaggagggctgggtgaatcaggtcactccagagacactccagtatccatggcctccgatcacggctggagatcgggaatatcttcagggactttaaactattctgcatgaataaggacgactgaggaaattactgttcaagaaaccaaagccaccctgccctccccttctttgtgcttgttctgtctcctcctctaacccaggagttgcagaagcaatgacatctgatggcttcttccttaaggaaaacactggacaggctggaagaggagagagaagggcatgtcctgaccttgctattcccacaggggtccacgtgagcggactgcggagcagttcccagttactggggctaccccgaccatccagcaatagacataaaaccttgaaacttcagttctttgcatcgctgggccaagacgttccttgagtaggattctgtgcacacactgctagttacaagacgtcacgatcttcaaaacatctgaggggtggctttgcaaatgaggcttccacaagctgccaggcagtggcttcctaacccggcggacgcccctcgaaacgattatcaagttgtttcactggacaggtgctgggtaaaagcttgttgagaaaataaaaaataaataaacgtgttcgacccgccgccgcaagaatgatttatctgtaaaatacgtgtcggtgtggtcacaaccgttccccggaggttaacagccggagaaggggcttaaggagcatcccgcggatgccagaccaggctcatgtcgcgcctgccgggcggccagtgcagggccgggccgaggtcgcctccgccgctcctc

SEQ ID NO: 316101 - DNA, 4001 bp, Homo sapiens
agtgatatagatgggatctgaactcaagtagcctggctccagaggccaacactaactctcatgttatactgctatcacacagtagcaaaagaacttagaaccattacttgacctagctaaatggttgtttctttgtgcctacaaaaaaatacgtgaagtagcactcaggaaaaaaaggctccttttgcacctaagtatgggtgccttaattctacccagtgaaagctagataaggtagctttttcctaagcaaaggagcctgtgagatttgggctgcctaaaagcaagaactccctctagtgagagacaagaggtaacactgacaaacaccccctaggctctatcactttttttttttttcagacagggtctctcattgttgcccaggctggagtgcagtgggtgagtgcatgaaagtgccactttcctaggctcagatgatcttcctgactcagcctcccaagtagctgggaccacaggtgccatgccaccgcaccagctaattttttgtagagacagggttttgccatgttgcccagactggtcttcaactcctgggctccagtgatcctcccgcctcagcctcccaaagtgctgggattacaggcgtgagccaccaggcctgacctctcctatcaattcttttcacctaggctcaggtggccactgagatatggtctgtacccaacctttgtctccatctgagccgagtacaatagccaaaagtgcagaaggtaccttgtctcctatttccaatgtcagccaactccggctgttacctgttttcattagtaaacaaactgtaaaacaaatgtacagtttcactggttaacggggagatccctgaaagtgaacgggaacgaaagaaaatccaccgctgtgaagcaaggactgtctagtcaggggagaggagaaggacagcatttcttagaaggagggctgggtgaatcaggtcactccagagacactccagtatccatggcctccgatcacggctggagatcgggaatatcttcagggactttaaactattctgcatgaataaggacgactgaggaaattactgttcaagaaaccaaagccaccctgccctccccttctttgtgcttgttctgtctcctcctctaacccaggagttgcagaagcaatgacatctgatggcttcttccttaaggaaaacactggacaggctggaagaggagagagaagggcatgtcctgaccttgctattcccacaggggtccacgtgagcggactgcggagcagttcccagttactggggctaccccgaccatccagcaatagacataaaaccttgaaacttcagttctttgcatcgctgggccaagacgttccttgagtaggattctgtgcacacactgctagttacaagacgtcacgatcttcaaaacatctgaggggtggctttgcaaatgaggcttccacaagctgccaggcagtggcttcctaacccggcggacgcccctcgaaacgattatcaagttgtttcactggacaggtgctgggtaaaagcttgttgagaaaataaaaaataaataaacgtgttcgacccgccgccgcaagaatgatttatctgtaaaatacgtgtcggtgtggtcacaaccgttccccggaggttaacagccggagaaggggcttaaggagcatcccgcggatgccagaccaggctcatgtcgcgcctgccgggcggccagtgcagggccgggccgaggtcgcctccgccgctcctcctcgcggtagctcaccggccgccgctcccggccagagccaccctcccagctgtctgagggcgccgctgtactggagctttagtcgttgacacaggccgtggtagctacctccgggcggccgccctgcgcggtgactgcgccggcgaagactgcgagcgcgcaaacgggggtgggtcacgcggactatgaccttcgggaatcgcggcgacgcctaccgttagtagaaaccgaccgctaacggccgcgcgctaacggccgcgcgccccgcccatcccctcctctcgcgcctcagcgcccaacacccgcccccgccccttccgttcgccgccccgccccgtccctcctctcccaccatccgcgcccagccccgcccatccccgccttttcccctagcctgccccgcccctcctctcgccccacctgcgcccagcacttcccggccccgccttttcccctcgcccgctccgcccctcccctcgcagcacccgggcctagtactgcccgtcccgcccctcctctcgagcctcagcgctcagcatcgcccggaccccctcttcccttcgcccgcctcgtcccgaccctccccttcgcccccgtcccgccccgcccctccccttcgcccccgtcccgtcccgccccgcccctccccttcgcccccgtccctccccttcgcccccgtccctccgcgcgtgcgcgttcgccttcgagcgcatgcccgcatctgctgtccgacaggcggaagacgagcccagaggcggagcagggccgtcgcgccttggtgacgtctgccgccggcgcgggcgggtgacgcgactgggcccgttgtctgtgtgtgggactgaggggccccgggggcggtgggggctcccggtgggggcagcggtggggagggagggcctggacatggcgctgaggggccgccccgcgggaagatgaataagggctggctggagctggagagcgacccaggtgaggaggggaccgggagggccaggggctggggaggccggatgggcccgggacgcgcctgcctgaccatcaccccctcctcttgtcgccccacccaggcctcttcaccctgctcgtggaagatttcggtaagagccttttctccctgccggaccggggctgtggcggcccacccctgcgccctcactcatcaggggctgtccttccctactgctttcctttcctcatcgcaggtgtcaagggggtgcaagtggaggagatctacgaccttcagagcaaatgtcaggggtgagtggctgtacaccagggctgccccttacacccagagtgctggggaaggtcccagagaacagggccccttagggaagacagtgccaggaaccctacgttgtaaaatctcacagaaagcagcagccttgctctctgagtgcccgctcctgatcaaactgatactttcttttctcccaaactttccttagcgcttccctttttgtagcagccccctccccacccctaagcatcctttggttcagctgctttcctggccttgcagcgggaagaccccggtcacacaatgtcttttgtgcagttgtgtaatgtattaattttagtgtgcccatgtgtccttggctttaatcctgacacaaagtcatcctgtattgattggttggggtgacaaggcccctcctgggtgcccacacttagagtcttttcccagtggtcctgcagaatagatgtgtaagagagtagcaacagtagcaaccgtgactgaaccaagaagtctactttaatttcctggaacaaaagagactggtgtgggtgttcatttgctttcctgactgcattggggcccacaagtgagaaggagtgcctcagttcctcatcagagtttttgttcttgtcttactttgtgttcctaccctgtcccatccttggccctcagttccagcttttcttctcttacccagaactatagacttcataaggagactgggtggactcctggagcatcacagtcagaggcttatgctttgctctgcctgtggcaggcctttggtgtgtgagggcacaaggccacttcagacacagtgttgggaagaagccaggggagaggggggatcacagcaaggacacctgagtgatgacgcagtgcaaaggattaatgggagaaagaagggaatgctgattgtcttctcccctttggctgatctggctctgccccttacttcccccagccctgtatatggatttatcttcctgttcaaatggatcgaagagcgc

SEQ ID NO: 316102 - DNA, 4001 bp, Homo sapiens
cctaaggcagccttcagtaatgtggggaaatatggccaatgcataaatttttaaaaaaaattttttgtagagacagaggctcactttgttgctcaggctggtcttgaactcctggcttcaagcaatcctctgcctcaccttccaaagtgctaggattacaggcatgggttgccatgcccgacctagccaatgcatttgatcaccccaagatccttttccctcgtcaaaaccacctccatcacttgcattatctatgaacatcctctggataccagccagattcacacttaacattttgcagtgcttaatatcttcacagaaacgtatcagttttccataattctccacaacattcttgagaggtagccacagacttacccaaagtcacacaagggtttatgtctacaatggcctccactcttgcatctagttaactgcctcagacactaaatattcagccacaaaccctgcctgaggggagtcacttcagttccacaactgattgacaaaaataatgtcaaacattaccttgtcctacatgacccaactccttccctaaagggagttcagaaaaataggacttcagcattactaggcttctaactaatgactataggagccaggaaccactgcacaggcccgaaagttgtatgtggtgaccatatgacaacatttctgcaattagaggagttatattcagacttaaggaagagtgaatcatattagataaaaattacatatttctagagtgtgtagacttgaaggggaaaatttccatgttttccttggtgattactttataactttattcttcctcaagaatcactcaataacttgtttcatagttatcatctccttcttccccatagacctccagtgatgagggaagctccctccaaagccacaagctttgtacatagagtggcattggtatcatcaggtttgcatattagttttgctcatgtttgtttatcattgagctggggaaggggggtcttgggatatttactattctcggaaggagaaaaacttacttctggtgagaagagaatctggactatagcttcagaggagcatttcttctgtgttgcccatgcctttgctacagagggactcaggccagcaaaggctttggtggtcctcctgattcagggtaagaaacggcctagtctcagtaaatgattgacctggctgccgatgtgataagcttaggtaaataggcttgattctgctccagtaatttcaggacttttaactctctaggttccaaagcagaaaaatatacgtgacttcctgggagagcctatcatacgaggttgacagccctgtgaatggacagtatatttctcggaatatattattctataccatatactacagtatatgtacactgtcctctctggtatgtcttgaaaattgaaaaaaattatgcaacgaaaattctggaacaaaaccatgcttgtggagttaccaccaatgaaatcattttaataaatcgcacatataatttgttataatgaaaaatttttaaaaaaccttccaagtttctgaaatacgtacaggagcaacaacaattttcagaagagatagaagacagaaggaaaatacagcctgctttccagaacaggctgatagaaaaatgactgaattcagacacacacccgggtctaccatatctccagcagaccctcctcagaaacactctggtgacgaggctgtatatgctgctcattttgttattacaagagaagggccagtgaccagagagatcacctaccttgtctgctgcttttcaatcccgactcttccctcagcttctttcctgactcagcagggatggcccatggctgttccagcgattgctgaagagagtgggatgttgggaagacacattaacacaggtttctccttttccccaagcatgaaggtgaggttcctttccatttcctttcctgctctctctggcctctgcagactgtggtcacaggcagcaacttgcttgcagccaggtatattgacagatgtgaaggagggagtctgccctggcctcagccgcctggtctagccaatcattacacaccaggacagactgctagtcctgcttaaatccaaccagagctgcatggaaaaatcagatggcaggactgtggggggcagaaagcacagtctgatagccattggctatccagaaaagtgattcccttgtaactgcatctgggaagtggacaagaggccccgagaatagtttatagaggaaacgaaatttttattcctttagatttcagcaatctcagagggaaatctggaagtcactttatcaaatgtcctatttaatagtggagtttcttctattaaattcttgtatggtgagaagcatctggtagttttttaaataaatatggctaccattcattgagagagtattatatgttatgcatttcatgcatattaccacaaatcctgatggtaatgttgagattttatttctattttatgcacaagggaacaaaggctcaaaggggtaatggtcatgcaactagtaggtactgaagccaagatttgaatccagatctgttctaatacctgcaccagcattaataagcctttccgcacgttctgtggtaggttgaattatagccccccaaaaatgtccacatcctaatcttcagaacctatgagtatgttatcttacatggtaaaagggactttgcagatgtggtcaagttaaggatcttcagatgggagattatcctggcttatcaaggtgggcccagtgtaatcacaggggtccttatgaaaggtcagaataagagaaagagatgtgatggcctataatcccagcacttcgggaggccaagggggcgcagatcacaaggtcaggagatggagaccatcctggctaacacagtgaaaccctgtctctactaaaaatacaaaaattagctgggcgtagtggcgggcacctgtatagtcccagctactcgggaggctgaggcaggagaatggcatgaacccaagaggcagagcttgcagtgagcagagatcgcaccactgcactccagcctgggcaacagagcgagactccgtctcaaaaaaaaaaaaaaaaaaaaaaaaaaaagagaaagagatgtgatgacagaagcagggtaagtgattgatatgctgctggctttgaaggtagaggaaggggccacaaaccaaggaatgcaggccgcttctagaagctgaaaaggcaaggaagtggattctactctagggcctctagaaggagcatggccccactgaccattttaaacttctgactctagacctgcaaggtaatacatttgcactgttgtaatctaccaagtttgtggtaattttttataggaactatagaaaatgaatacacatttcctcagaaatactctttatgatggtgagatcactgtttcacttagtttcctattctataaaggaatactctttatcaagctaagctcgaccttcttaaaatggccattcattggtcctagctcttccccgcacataaggcacttggggaggcagctggaaatggtggcaaacagtactgggaagggaatctggattctagtcctacctctgccttagccagtcagttctctctggctttcagttttctctcctgtaacattaatgccttgtacaaatgttctttgatcccttctatatctaaagccataatattctaaactcaagtcatgtaacaatttaaaaatacttgaagatatctctgtcaccttgctccaaatgtttcctgttccaactaccccagttttccgtgtgacatgacttctggacccttccatctccaaattgctcttctctatgaaggctccaatttagccatttccctctgaaatgtggtgcccaagtcttcacatagtgcccctgccatttcttgtctgctagtgtacctggttctcctggctcctctgaccacactcttttgctgggtctcatctaactattccttagga

SEQ ID NO: 316103 - DNA, 4001 bp, Homo sapiens
gttaaaatagtgggcaactctaacggtttatttatcccaaatccgacagttctgttgctaacctaccaggaaccaagaattcaagtgttcacagggcaaaagtttaaccttctgaaactgtggacctcatttagatctctcccagccgaattcaaacgttagaatcccagagacatatctcgaacgcccaaattaaaccaaactaggaagcttaaaattacacgtccaatacttgaaaacctacatctgtaacttacacgttcatattacgaagggaaatgtggctgacaaatatttacactaaaaagactccacatttttatgcctcgtctagttacactcccagctgtgcctggctatgactagttgtgcattctagagctctttagagctacttcagagttgcaggataaagatttctagggaagagggcagggccaggcgcccggaggatttccagccacgggtagtttaccgagagaaaaagctgcgggcgtcgctccctcttttacataagaaaggtaagtgaggaaccgcgaagcagtttgacttctcaagctctttcaaacaggaaaccccaaccctgggagggacagcctgtcagccttttaatttcctggtggtggcgggagttagccaggtcctcggcgctttaataagtgatgactgctagggctaagttattaagcgaaccagcaaacgattcagctgcgcctccgccgcgcagggagctggagaaacagagggttaaaatactccccaagccttccagctgctatctctaggggtgccgagacggccacactgtaaactttcagtggggggtcaaaggccaaatcgaaatcagccgcttttggcggttaaagctcgtaggttcactcttgaaagaaagtggaactagaagcgcagctagccaaatatttgcggggagggagtcttctctgaatcccgcgccctacaccatccagcagcggaccttctctttctcagggagctatcccaaggatccccatccctctctccatgtgcattccagagttgctggaaaaagttgcccccagttcccccacattctgcctgttttctacaatcactctggaagcatcttccctaccagacactccctccccgggatcccctcaaccggagatctacccagccccccgagagtcatgcacaacggggttcgccacccccacccacccagctgcgcagcctgggcactgccgaccccagcccgggcttttgtccctacagcctgtaaagaagcaaagaaactctgtgtccccggagcccactcaccgtctcatctttcctccaaaccgccgctctacgctggcgccgccgccctagcgcctagcctttgcccccgcccaccctgtctccctccgtgagcccgccggcccctcctgactcgcggtgagcagtcagcgcgcccctcctcggcccgggcagccactgcctcctctccgcccccaaccctccgcagcgcaaccggcggcaaccaactcggccgcgggggaggcagcgtccccgggacgcactcctggcacacggagtcggcaccaccccctcctcccgggcgaccaccgccgcctcctcacctggccattggtgcagcccgttcccggcggcgagagaaggcaggcgcgctccttgcgccacgccacaccgtcgggcccccgtcgggtccccctcgggccgcaatggtgggctccgcgcggctgggtccggcactcttgaccccctttgtaaccaccgcggcgggcacccagggagttcgagcaacgaagttggtgacctgccccgctcccaggcagtttgctgttggggctttcacggctgctggaagggcatggctgtttgccccatcactgggcgccagcttctcaaagctacgttcgcagcaacgcagtagggactttcgtggcaggctttttttaagagctgaaagaagggcgggagggtttacgtcctagggtgatgatttcctcaccagacagcgaagtatctattgggaaactccaggtgaccgcacctccttccgacagttcgccccggggcaagtttaccagctgcgtcagaaagcaggtttgcaaaatccttggagaacggcctgagctaaggactggggtcaggagggttttaaactcattctgattttcttgcaatcatatctcttgaaagtttttatattttccccaatatttttctgagttgctatatccaatgaaaacaatgctgatgtagaggtccaccagccaatgctttattggaagtcaacgaatgagaccgagggtggcccataatcaatctcggcacgcgggaatgtgaacctcttccaaggtctgggcgagtccctagagttacgcagatgaaggacattggccctcgagaatctcacaccagcaaagaagagcacaacgaagcgcaaactacttatgatcattgtggctttgggcaagttgttgtagctcccagcaacaatttcttcacctggagtgcagcaataaatgatactggtgctgcagggcagctaataagcttctgaataatatatgcaaagtacttggcaccatgagcagaactcagtataccgtcactgaagaaatagcttatttaatgattacacttttcatatgtgcaagtaaaagtttgacttttagggagagcctcacctacggaatgtcttttttaaatttcttttttaattatactttaagttctgggatacatgtgcagaacgtgcaggtttgttacacaggtatacatgtgccatggtggtttgcagcacccatcaacccttcatctaggttttaagctccgcatgcattagttatttgtcctaatgctctccctccccttgtcccccaccccccaacaggcctcagggtgtgatgttcccctccctgggtccatatgttctcattgttcaactcccacttatgatgagaacatgcagtgtttggttttctgttcctgtgttagtttgctgagaatgatggtttccagcatcatccacgtccctgcaaaggacatgaattcattcttttttatggctgcatggtattccatggtgtatatgtgccacattttcttcatccagtctatcattgatgggcacttgggttggttccaagtctttgttattgtgaacagtgctgcaataaacatacgtttgtatgtgtctttatagtagaatgatttataattctttgggtatatacccagtaatgggattgctgggtcaaatggtatttctagttctagatccctgaggaatcgccacactgtcttccacaatggttgaactaacttatactcccaccaacagtgtaaaagcgttcccatttctccacattctctgcagcgtctgttatttcctgactttttaatgattgccattctaactggcgtgagatggtatctcgttgtggttttgatttgcatttctgtaatgactagtgatgatgagctttttttcatatgtttgttaggaatgccgggttttttagaggaattcttttccctgtcctgagtttttgccctgcagaagcatacatacactgatcaatccaacagttaaacagttaagtgctccagcaatgttcttttctcacccacgtcatctctttcctcctcttttttggatcatccccataaacatacaatcattttatttccattaccttggaatttttttttcttttcttttcttttttttttttttgagacagggcctcactttgtcacccaggttggagtgcaatggcacagtcatagctcactgcagccttaacctcctgggctcaagtgatcctcccacttcagcctcctgaatagctgggaccacaggtgcagaccaccatgcccagctaatattgaattttttgcagagatggggtttcaccacattgcccagactgttcttgaactcctgggctcaagcgatctgtctgcctccgccaccctaagtgttgggatgacaggtgtgagccact

SEQ ID NO: 316104 - DNA, 4001 bp, Homo sapiens
gtcacagttattgaacggaggagtaagcaagctctcagtccaatttcccaagtatcttttcctccccttttcaaacagggatccaggcgacactcgtggcagacgatctcaacaccaaaagaacagcagctgccagctgcataaaacagattgaggcctgcaaattgactgaaatgatgactactcttaaccagacatctcatttttccacttctgacaggctgagatctgcaaacctctgggtctcaagagatgaaggctacattagccaactaagacgacaaactcaactcttccttgtcattaaataatttgccagttataaatggtttggtaactttacagaatttaagtacatgtaatgtttaaatttccccattaaatgtaagaggcaaagaaaatccttttaaataactaagcagaggatatgaaaggggagccaagaatagacagaactgttacttttcaaagaaccttcgctctttattcaaacaaatatttacacaattgaaggcaacggcaagagagatatagccattctgttaaaatagtgggcaactctaacggtttatttatcccaaatccgacagttctgttgctaacctaccaggaaccaagaattcaagtgttcacagggcaaaagtttaaccttctgaaactgtggacctcatttagatctctcccagccgaattcaaacgttagaatcccagagacatatctcgaacgcccaaattaaaccaaactaggaagcttaaaattacacgtccaatacttgaaaacctacatctgtaacttacacgttcatattacgaagggaaatgtggctgacaaatatttacactaaaaagactccacatttttatgcctcgtctagttacactcccagctgtgcctggctatgactagttgtgcattctagagctctttagagctacttcagagttgcaggataaagatttctagggaagagggcagggccaggcgcccggaggatttccagccacgggtagtttaccgagagaaaaagctgcgggcgtcgctccctcttttacataagaaaggtaagtgaggaaccgcgaagcagtttgacttctcaagctctttcaaacaggaaaccccaaccctgggagggacagcctgtcagccttttaatttcctggtggtggcgggagttagccaggtcctcggcgctttaataagtgatgactgctagggctaagttattaagcgaaccagcaaacgattcagctgcgcctccgccgcgcagggagctggagaaacagagggttaaaatactccccaagccttccagctgctatctctaggggtgccgagacggccacactgtaaactttcagtggggggtcaaaggccaaatcgaaatcagccgcttttggcggttaaagctcgtaggttcactcttgaaagaaagtggaactagaagcgcagctagccaaatatttgcggggagggagtcttctctgaatcccgcgccctacaccatccagcagcggaccttctctttctcagggagctatcccaaggatccccatccctctctccatgtgcattccagagttgctggaaaaagttgcccccagttcccccacattctgcctgttttctacaatcactctggaagcatcttccctaccagacactccctccccgggatcccctcaaccggagatctacccagccccccgagagtcatgcacaacggggttcgccacccccacccacccagctgcgcagcctgggcactgccgaccccagcccgggcttttgtccctacagcctgtaaagaagcaaagaaactctgtgtccccggagcccactcaccgtctcatctttcctccaaaccgccgctctacgctggcgccgccgccctagcgcctagcctttgcccccgcccaccctgtctccctccgtgagcccgccggcccctcctgactcgcggtgagcagtcagcgcgcccctcctcggcccgggcagccactgcctcctctccgcccccaaccctccgcagcgcaaccggcggcaaccaactcggccgcgggggaggcagcgtccccgggacgcactcctggcacacggagtcggcaccaccccctcctcccgggcgaccaccgccgcctcctcacctggccattggtgcagcccgttcccggcggcgagagaaggcaggcgcgctccttgcgccacgccacaccgtcgggcccccgtcgggtccccctcgggccgcaatggtgggctccgcgcggctgggtccggcactcttgaccccctttgtaaccaccgcggcgggcacccagggagttcgagcaacgaagttggtgacctgccccgctcccaggcagtttgctgttggggctttcacggctgctggaagggcatggctgtttgccccatcactgggcgccagcttctcaaagctacgttcgcagcaacgcagtagggactttcgtggcaggctttttttaagagctgaaagaagggcgggagggtttacgtcctagggtgatgatttcctcaccagacagcgaagtatctattgggaaactccaggtgaccgcacctccttccgacagttcgccccggggcaagtttaccagctgcgtcagaaagcaggtttgcaaaatccttggagaacggcctgagctaaggactggggtcaggagggttttaaactcattctgattttcttgcaatcatatctcttgaaagtttttatattttccccaatatttttctgagttgctatatccaatgaaaacaatgctgatgtagaggtccaccagccaatgctttattggaagtcaacgaatgagaccgagggtggcccataatcaatctcggcacgcgggaatgtgaacctcttccaaggtctgggcgagtccctagagttacgcagatgaaggacattggccctcgagaatctcacaccagcaaagaagagcacaacgaagcgcaaactacttatgatcattgtggctttgggcaagttgttgtagctcccagcaacaatttcttcacctggagtgcagcaataaatgatactggtgctgcagggcagctaataagcttctgaataatatatgcaaagtacttggcaccatgagcagaactcagtataccgtcactgaagaaatagcttatttaatgattacacttttcatatgtgcaagtaaaagtttgacttttagggagagcctcacctacggaatgtcttttttaaatttcttttttaattatactttaagttctgggatacatgtgcagaacgtgcaggtttgttacacaggtatacatgtgccatggtggtttgcagcacccatcaacccttcatctaggttttaagctccgcatgcattagttatttgtcctaatgctctccctccccttgtcccccaccccccaacaggcctcagggtgtgatgttcccctccctgggtccatatgttctcattgttcaactcccacttatgatgagaacatgcagtgtttggttttctgttcctgtgttagtttgctgagaatgatggtttccagcatcatccacgtccctgcaaaggacatgaattcattcttttttatggctgcatggtattccatggtgtatatgtgccacattttcttcatccagtctatcattgatgggcacttgggttggttccaagtctttgttattgtgaacagtgctgcaataaacatacgtttgtatgtgtctttatagtagaatgatttataattctttgggtatatacccagtaatgggattgctgggtcaaatggtatttctagttctagatccctgaggaatcgccacactgtcttccacaatggttgaactaacttatactcccaccaacagtgtaaaagcgttcccatttctccacattctctgcagcgtctgttatttcctgactttttaatgattgccattctaactggcgtgagatggtatctcgttgtggttttgatttgcatttctgtaatg

SEQ ID NO: 316105 - DNA, 4001 bp, Homo sapiens
ctcccacatcggcctcccaagtagctaggattataggcccacgccaccacacctggctacttttaaatttttttgcagagacagggtcttgctatgttttccaggctggtcttgaactcttggcctcaagcaatccttccacctcagcctcccaatgtgttagaatttcaggtgtgagccactgtgcccagcacaaatccagatctttcttcatcctgtttaattttaatgggggtagggtgggaagtgaggactgctatccaactataaattaaattagaagaaaaattatgaacaggcttaaattctactggtatgtacaccagacagcagttgatcattgggaccggagaaaggctaatttacaaatagtacagcaaatactagaatgtcatgattttaaaggcaaaagtaccatttttaaaacgaatttgttgaatgtgaatttaccttcaacatttttcctcttaactattactttggtagtggtgaactggctctggaaattgacttctttttcctttttttttttttttttgagacagagtctccctctgtcacccaggctggagtgcaatggcgcgatctcggctcactgcaacctccgcctccctagttcaagcgattctcctgccttagccccctgagtagctgggactacaggggcacgccatcacgccccgctaattttgaccccttttcaattataaaatgctaacgttggaagcctctacagattaccaaatccaactgtttaaaaattcttctggccgagcatggtagttcacacctgtaatcctggcactttgggaggctgaggagggtggaccacctgaggtcaggagttcaagaccagcttgaccaatacggcgaaaccccgtctctactaaaaatacaaaaaattagctgggcatggtggcgggcacctgtaataatcccagctacttgggaggctgaagcagaagaattgcttgaacttgggaaaggcggaggttgcagtgagccgagatcgcgccattgcactccagcctggcaacagagtgagactccatctcaaaaaaaaaatcttcttggcctcataatcctttgtttagataaacttgaaaacccaatatgtaaacacacaagcagaactgcactgattgacagatactaaacggatctaaatgataccaaggatgacagaaacatcctcattttacagatggagaaacttgtagggtttgtgctttcctcccatcaaaccttaccctttattgtaattattcccgcacttgcccgtctcagtagtacaagcagtttgccaactactacttgcacgaacaactagcagtttgccacggagtcctacattcagtttggggattctcaggcctcacagggcgctaaggccttgcctggccccttggtgatcagaagcttcgtgcagctcaagagcatcccaagacgcttgacggctgactttccttctcagaactttagtaacagggcggccagtccagcctgggaaccgcagggcccgagcccgactctcccggagacccgggatccgccgcagagcaaagcgcacgggagggaaggagggcacacggctctagtgtctgacctcctccggctcgccctactgatctaggtcccgcgccgggtccccacatccccgcaacccgccgagaggcccgggagccgggaccgctcccacgctctggccccccaagccccgccccccttaccggcgtcagagcgcgcggcggtgaaggccgcggcgggcccgcgcgtgagcccggtcgccgccccgaggagcagccaggcggccgcccgaaccgccgccacccgagccgccaggacgccggaagccggacgcccgagaggggcgcgcggggccaggtgcggacgcaggaaggggcctggccgcccgcagctcctaccgcgcgctgccccagatttatcggctgggaccgagtgctgggtgcgcgcgcctagcgcccgcggttcccagctgcctgcagccccggcccccaagggttcccgcgcggcgtggggcggtcgtccccgcccagctgttccttgctccgcccacccgggggcgggcgaggagctgcgcacgcgcggggacgcgcgcccggcctgtcgctgtggaaaccgctaggccagcgctcgccgggacctggaatccctgtacgccgaggtgggagccggtggaccggtcccccagccggcccccacctccgcttcccggtgtttgagggttcgggcctcccgccggggagttcacccctcgggctcgtcagtagggctgtggctgtcgcctcttcctgcagcgccaggctccgcccggtctcacagtcggcttaggggctttgcgtgcactgcggttgggtggaaaaacccactcctggttgtttagacgttggcctgcagacgatgtcatttctgtattcctctaagggtaagaaagccagccttgcactagtggagacgtgagtagggagagaatcgtctactctttggggacattcgtacccttaggtgctgtggggcttcctaacaagattgtgggcagttactgatctctggggagaggagtattcgtgtccaggaagaataattggataaacgtgccgtccttcttcctaaacagagtggaatctgtaagcaggccaagagagcatccaggcggcttggagtggaatagagggctctagagcgggtgtctcaaagaggaaacagagtgtatgtcaaaacatactatccaaaactgaaaatagccgggcaggtggctcacgcctatagccccagcactttgggcgaatcacctgaggtcaggagttcgagaccagcctggccaagatggcgaaaccccgtctctactgaaaatacaaagattagctgggcatggtggtaggcacctgtaattccagctactcgggaggctgaggcacgagaatcgcttgaacccaggaggcggaggttgcagcgaggggagatcacgccactgcactgcagcctaggcgacagagggagactctgtttcaaaagaaaaaaaaaaactgaaaatggtagtataagcatgtttcttaagaaatggagagagaaattttggaagatatgccttttaaaattcagtctggctccctatgaagaggagtagggccaaggacgatagtttgttgttataagcctcatagaattattttatattccaaatacaaacattactttagcaaaaattaaagttaaattttaaaaagagtctagtaaaaaaaaaactacattatttgagtaccaactgcatacatctttgacgagtacagccattgcttcagtgtgtggagtttatatgtgccccgtaggttgtagtttactaacatcaaattttagttaggtgaattgggaatagtattcgttaaaaaaaaaaaaaaagcaagaaaagagaaggaaaagaaggagaaatggtgtgagctcattgcatcagattagaggtagagcacagtaattttttaaagtagttttttttttttttttttttttttttaagaataggcgtatcatgctttggagaggctgttgtgcagtggcaccatctcaactcactgcagccccaaactcctgggttcaggcgattctcccaccttggcctttggtgtggctgggactacaggtgcatgctgccatgcctggccaatttttaaattttttgtagagacatgcatggtctcgctgtgttgcccaggctggtctcaaactcctggcctcaaggtatctcctctccttggcctcccaaagtgttgggattacaggcctgagccaccacacctgcctccatctttttgagatggagtcttgctcttgtcacccatgctggagtgcagtggtaccatctcagctcactgcaacctccgcctcccaggttcaagtgattctcctgccttggcctctcgagtagctgggattacaggcacctgccactatgtccagctaatttttgtatttttagtacagac

SEQ ID NO: 316106 - DNA, 4001 bp, Homo sapiens
atctccagtagcctcctgggggtcggtcgtcgggagggctcgtgagcggaaggctttaggatgaagcgacagggcccagagtcgtggagattggactggggggcaggggagcaggcattgacaaccacgccgacaggggcatcccgcgcgcctgtgtgggagaatgtgtagggcaagcagcagggagagaccatctcagagacaggggaacagccaagcagaaaccactgtgctgggcgcggggggaggccgggaaagacagcacatctgcggggcgggaggaggggagggaagggagtagaaacactgctcccgccagccgcgggtgatggggacacgtgtccagctcgctgagtccgagggcctgggcccgctttgggtgccctgtttctccggcgcccaggtgtgtgcgcagaaccgtgtctgctccagggacagccgtgaacgagcgccgtccggagtggcagggccatcaggtgtggctcattccaagaaaggtccgtaccttcacatgtaaacttcctggcaaagctgctgggttgccgcttatgggagaaggcggcgggcccaaggttcggcccctttgtctgaatctggcatttggagcaggctttaagacttcgggaaaagccgggcccctgtgcaaccaccaaaggctgcttctcccgccctcaggactaagatcttgttccagtcctccagtcctcggggtctactccaggggtacaaggtgagagtggctctccagagtccatttgccttttggtgccgcactgcatcctcactttgaccctgagcgctgcagtaagccctgcagggtgctccaccttgaagcacgggaagatctgatgctggccgccttcttccttcggttgcctgaaagggcccgtgtttatccttcgcttcacagagaacgcaacacacaacattaaacacacatagagagtgaaagagaacaaggcatcttcatcaaggagggcgcaccatttaaccacccgcgaccttgcagtgcgcctctgcaaagtggggactccgctctgtagcaggagatgggggtgttgacgattttgaaagtagttctcagttttccgaggcaaaggtgtctggggctgacgaatgacttttgagaagaaggaatgatgagaaatgtcctcattacagaactttcccggccacactgtgagtcccacgcaaagaccccatgaccaccaaccggagcgctgggtgctccctggcagggtcacctttgctttttgcgcgcccccatgccacccctggggcaggaggccatcctcttatcctgggagtgcaggcctggcccgaagtgcagcccccgaggccgggagccgagattcttctcggcttcgtgctcagagctttgcagcgtggcatggtttcctcctcttgccctgttgctgtttcataccagggggaactgagacccagtcgggttatgggcctccctgagaacactggcctctagcagaagcagattcaaccccaggcctcaacctgcgcccagacccgtgccctggagtggagtttacccactgccgcccttcctgggcaaatgtcaccgctgcctccgtccccctaggtccggggcgggtcagtgcttcgagccagcggaccccggcctagggacaggtgcctgcgagaatgcggggggcggcccccagctcccctgccctcctccctagaggctgggcctgctggtctcccggctgcgcgcaaggtgggaacgcggccgacttggtccgctcgccctccccgcacccgctcctctggagccgctggggctgcgcaccgactcacccgcgcggcctccgggctgcgccttcagcgctggcggcgtcctgcccggcgagggccagggtcccaggaggccccggaggcggcgggaccgcagggcggaggggaggccgtgggagcggccgggcgcgcctcagcagcgcggagactggggccgccgccgccggcgcagggcgggccgggagggaggaggagcgcgcgggcggggccgccgtgtacgtccccgcgctcccgcccggcctggccccgcggtcccggagcgagctggggccgcgctggggagggtcctgggggcgccgccgtccctcgggccgggcaacgccgggcggggaccggtctcgccccgccgcgctcgggctccctccccggcggcccctcctcggcgaacagcctttcggcgcggggggctgttaaaccagacaccccaggccacactcctctcgttcgaaatgaccatttcggggttctccgtggcggggagctccgccgccgccgtcccccttccacgcgcgggaggtcggcgagggcagggcggggacccggagtgcggcccccggtcctgcttcgtggcccgaaacgcctcgcaatggagtcactcatgacaggggactcagcgcacggggcggctgctgagccccgcagcgatcggcgggcgtgaggggttccccggcgtggttgcccgggagcctgtcagccccagcagccctgacaggaaagggaagtcgagaggaggctgagcgaacggccgccacccccgcgggacgctgacccgggcggaccccgaggggcctctccccgcgccagagcgcggcgtgcgcggggaagcgcgacccaccggggtcggcgacggcgcgcggggcgggcgcggcggttccctctcctccgcccgtgcccgtgggatcggcgggcttgtcgggctgggagagcctcgtggaacccgggcatccgggcagcagcggcctccgagccactgtggaggcgcccggggtcggcacggcgaggccgacggggacctgacacggtcacgcggcgccggggagcaggttcgagtggccgggcgtggccgtgctgcccctccgcgttccgcaggcggcgacgggcgagcggccctagcgggctgcagggaggacgccgcgtggacggagagccggcgcccgggggccagatcccctcccgggacggggcgccaggtccccgcgagctgcggcgcgacgcgcgggcacccgtgtcccacccggtggcctcgccgctgcgggctgcgctgagagcggggtggcgcgacgcggtccctcaccgcagggggaagacggcaccaccgcgtcccggccgctggagcttcccgcccgcgccgccggcccgacgctgccccctggcgggagagcgctgcaggggccccggcgaggccgcaggacccgacctccccgccggcctcgcactcccgcgccgccgccgagggtcggcagccggatcgccctccgtgccccatagcacccctcacactaaaaacgacgactttattaagatgtgaggtattctatacatacgataaataccaggaaatttaagtacagtacatggaagtatacagttccatgaattttttcctttattttttagatacagggtctctgtcgcccaggctggagtgcggtggcacgatctcggctcaccgcagccttgaacttctaggctccagcgatcctcctgcctcagcctcccgagcagctgggaccacaggccccgccaccatgcccggctcagttccatgacttctgacacgcgaaaccaccaggctagtctccccccgagttcaagaagtcctctcctcccaaaagtaccctcctgcccctctgcagctaacccctcacctcccctccgccctggttccagacaactgctcctctgatttctgtcactgccctttgcctctctcgcaattgcatgcaaggagaaccattcaccgtgtggtcttttgtgcctggctttcttcgcttggcaccatgcagctgagcgtcgcccgtgtggcgtgtgtgtgttgtattttcctctaccttggtcttgagacctccctggagagccactgtaaaggccaactctgccctgacagggctcctgggatttgggcgtgggtgtttgccgtgggcctttcatggggcacctctgtatcctggctgacctgtgaccgggtg

SEQ ID NO: 316107 - DNA, 4001 bp, Homo sapiens
accaatttagttaaatttttttaaccttaaataaaaacactcttctatatttacaggtgtttcatttttaattatttaaaactgacaggaatgtctttaaaactttatacgcacaatcatgcaatattaatattcctttactttcttgttatttcccccatgatgctattattacgatatgctatcatttttaaataaactattttgtgattttaataggaaagtactctagtttgaaaaagcacaagaaacttttgaaaaaagctatgaagttttattttgtcccaaaatgtgagatgaaaaaacttaagcaaaataccaacacacacacacacacacacacacacacacacgtaaacacacacagtcctcttcagataattttggctgatgacactgcagaacagttaatctgataattaaaaatttccagaacatgtgatgtttagatggagatctatgctgtcaatcggacctcagtgcttcagttaaaaggaaaaaaaaaaaacaccaaaaacttaaaacctgaatacaaagacacgttaaattgttaagactgtagttgctttgaaagcaaagtgttttgatttatccaaactaacttagcaacacggtattttgagtattttccagaagttttcttaaaacacgcaatccagcacataaacaaattttgtacggtgcaatgtaagcaaatactcagaaaaattcaatttctaagcaggataacatatgaccaatattgccctcagtggttcaaaagtcgcagtagaaataatcccctgagataacctggaatttacctacccaagtattctaaggggttctccccggccacacaaactatgattcaaaacatcgttccgaaaacccaggtcctgcatgtgcacaaaggcgcagtgctggaatgaggaagcttcaccaagatgaaatcacaactctaattcattaaagaatatgcagactgttttctagaaagaccctcttgttgcgctccctttaccctaccctttatttaaccatgtaaacagtctcaattattgacataaaaaaatagctttcgattcccaagtctggtaacacggttggccaccatcactattcctttagcatcctaaaataaacccctcgagccgaggtcaaaaacacgccggctgaacgtctggtgtttacatagcccaatcccgggccctaccctacctttccgagccacttaagagccatggaacaggcatcacataatacacttagtaaagagacaagtcacatgagtcagtgtctcaggtctatgaatgaaagatctaagcgtttgtctcagctaaaaggaaaaaacaacctcgaaaggaagggtgggaggggagctggcgggggtgaggggagcggtgttccttccatacccctgccgggcgatttaaacccagtaagaggcaaacgcagggccgccaggctggcggggccggagtcctcgggcgtgacagcccctcaagaaaagctcgcggtttcgcgcccgcgtcccttgagccgcagtcctcgcggcagcccctccacccgcgggctgggtgggcgtgcagggcgcgggagacagagccaccgcggccggggcggcggccctgggcgcacttcctcaacctccagccgccccgtccccaaaactgggagtagaagcaaaggaagagcgaggcggcagccagagagaaaggagagggagcggcgagccctcgcctctgcagctaggagaggccagaggcaggcgagggagagggtgcggcgatcgcaggcgaactccgccgcgggccgacgctgggagacgaccagcccgtagcctccgcccaacacggcgggcgcgcccgggagtctccggcacccacccggtccccattcccaccgcacccgctaccggccagtccgcgctctactcacgctcggggctcttccaggctccgcggctctaaccgcatcgggtcccagccccgcgggcggcggcggcggcgccgagggagaggagagcgggcggcacggcccccgcctcccggcccctctcccccgccgctccggagctgcccggccgggcccgagccctgcctcgccggcggccccagccccagtcccagcggccgcggcagcagcagcccgacacctcagcggccgcagcggcggcaccggaactgccgctttctacttctcgctccctctcctcgctagcccccgccacacgcccccgcccccgactcctttctccgtcgcccctgtttttttttccttttgtttccagaataaactttattggtctctttttccgctcacatcgtgtaaacaaacaacgaactcttccccaccccctcggccccccccctcctccggcagaagagggtaagagctgaggaggggcagagcctacaatcccccggaagcagatgcgcaaagaagcggaagcgaaattgaggcgaggaggagcagggagtgggcaaatagggtaacaatatgtgctactgcgcctgcgtcttgcttttccgcccgaagtttatgtacagttggggctgctcttctgacgtttgtttaatgatccgtcttctgcagtagtgagggtgttgtgtcatcctaggacagcgtacgtgtagtatatttgtttctacgagcagcaggcgagctggggtagagatatagaaaggaatattgggagcaagtgggttatttcacttttacacccatagaggaaacgagattagttcgggggtgagaggaggtgcggtggctaaccgccgctgtcagtggctaaccagcgtggttatggattctataatagaaagaatgctttttacaaagcgttgctgtgcgttcttctgccgacatggtttaagttgtataccatcccgaaggcggaatgcactgtcacagccctctgcagtcctttgactcacttcgtggagaccttttgctatgccctcatttttttttttaaatcgaattctgattcgaagcagcttgtaggattcaattctaactattcagaagacgtgggggatttttcgcgtaatgccaacagagacttcagaaatgtcatataggctatagatttgattcaaggtagtgtcttggtgctgcgtaccttagaagtctgtttgcttgagagtaaatcaatctgttgacttttgagattactactgataagggttcggtactgtgcgtttttctccccctactggtcttttgttgtaatattggaaaagcgtaggagcagtgattagaagtctgagatacaagtactccagcatcggttcctccttgaatttttaagtaatagagggcttgggaagtgacccatcctagagatgttacagtcctacttgtcctctagagcaaaactctgaccaataacagtcttctcgaacaccgcacgtccgtccataccccaatggtaaatgagatggatctgttcctctttgtggtcgtagtttcacttgactgtatttctttcttttctgtgttttctttctttcgtcctttttctccctttagctcggattttcatctcacattccaggggtttgtgtttctaaatgtttttctcgaaccaatgttcttcaacagttttagaacactgttactccagagtacagatttttttaaaaaaggaacactgaattgctagtcaaagtaaattttaaggcaatatatcccaaattgtgtttcaagcacagagttatatgagatattaataggtagaccttggtggggaaaaatatactagggatatttttccttataaaatttattatttatttattattattatttttttgagccagagtctcactctgtagcccaggctggagttcagcggtgcagtctcggctcactgcagcctctgcctcccgggttcaagcgattcttctgcctcagcctcccgagtagctgggattacaggcaccagccaacatgccagctaatttttgtatttcttagtagagacggggtttcaccatgttggtcaggctggtctc

SEQ ID NO: 316108 - DNA, 4001 bp, Homo sapiens
tttaatttgctaatactttaaatgtacaggtagattatcttaagtatttataaagtataatatcaatcttcaaaggtagtttgtactcaagcggattgaggaaattaaataaactttcagcttattttctgaacatttttttttctccagagacagggtctctctctgttgcccaggctggagcacagtggcatgaccataggtcactgcagtctgaaattcctgggctaaagtagtcctcctacctcagtctccagagtagctaggactataggcacatgccaccacacccagctaacttttaaatttttgtacagacaagggtctctctatgttgtccaggctatcttgaactcctagcctcaagttatcctcctggttcagactcccaagctgatgggatcacaggcttgagccatggtgcctggctcctaaattctgagaatttgttcaaagatttccttataaaaatcaacactaccaggtgcagtggctctcacttgtaatcccagtaccagggatgctgaggcaggacagttgcttgaggcaagtaatttgaggctcaataattgtgccactgcactccagcctggatgacagagaaatactccattttttaaaataaaaaacaccatgccaaacctaaagataaaatatatgacagctcagctctcttagcatgtaaattaccatagccctatatttagcccccattagataatctctttatccccaagacatgcagtgtgtatattaaagaaatatatttagaaatgaagtccttactatagattctataaaataactacattaggaagcgccactaacagacatattcaacaaaaatcaattgttctttgagtatcaattctaatacagcagtgactatacctttaatatttgaaacaacattttatgtattcagttacatatgaatatatttatagccctttaagggcgtgagatattaaaaaatagaacaattatgatttcttcattttataaataagaaaagtgaactccagagatgccttttctctctctcttttttttgagacggagttttgcttttgttgcccaggctggagtgcaatggcacgatcttggctcactgcaacctccgcctcccgggttcaagcaattctcctgctcagcctcccgagtagctgggattacaggcatgtgccaccatgtccagctaattttgtatttttagtagagacagggcttctccatgtttgtcaggctggtctcgaactcccgacctcaggtgatccacccacctcgggctcccaaagtgctgggattacaggcgtgaaccactgcgcccggcctggaggtaccttttcttacttagtcagtgataaaaccaaaactaacagagttaagaaggctccctgatccatggtcttcccactcaacaaagctgtcactgtatgggaagttttgaaagagacagatagagcttaaactatacatagaggaactgatcattcaatcatttcatgcatagaggtcctttaaataattagcttaccttatcgaagggagggtaataataaggttgttttttattctctggaaatttaacatgcaaagctgttgcattttcagtatatggatttgtttgaacagttcccattggattcaacatttcttcgagttcatctaaaacatgcaaataattttggttcttaaaaaatgtctttaaaactaggctttaaaaaagctgtaatggatctcctcccatgaaaatcaccttagaagtatgtcaactacagaagtgtgacagacaattctatcagtaatcctctaattttctgttaatgcttggaacaaaatttcagtgtgagtttgcatacatgttttaaaaatgagaaagttaacaaaactgaatgactactttacctcttaattcaaatttagttctcaatcttgaaaagactttaattggaactgctctctctccatcaaaattaggtggcccatagaaactataatctcatcactacatatggacttcttaatcacatgtaatctggttttcatggttgtcacaataaccaaattggtattttaagtcatcaatgacattcttcttatcaaatctaacgataatgctctttattatcctgcaactgctgacagaaaataccttctctggtagcctctggaatactccattaagtggcgctccttttacctcaccaactgcttctttcttcaaggtactccttccttttccttttccaccacgctaaatatggtcaattcacagaactgtgtgtgtgattttagaatttcagtgtagttagaaaactctggagttcgcatcatataatttttttatttcacagataagaaactcatgatgagaaaatagagttaggtgtacaatctaagatcctctctctccaaagtaatttttcttttcttatactgactgtagtacagttgttctttctgtatctcctaaggaaaaaaaatatcagctctactctaattaggtctaatgtccataaagtatgcacactcagaattatttcctaaagctggaaaatctttacaagttttcgttccttaattcttcgttcatctttttaaatattttctcacctcacggactcaattttttctttttctttttttttttttttttttgagacagggtttctgtcacccaggttggggtgcagtggcatgatcttggctcactgcaacctccacctcccaggctcaagtgatcctcccaccttagcctcctgagtagctgggaccacaggcgcatgccaccatgcccagctaattttttaatttttggtagagacagggtttcaccatgttacccaggctggtcttgaactcctgagctcaagagatccacccaactcagcctccaaaagtgctggaattacaggtgtgagcaatcacacccagcccaaactcaattttcacctggatggaggcaactctttttttttttttttaatcttcctgtttttttagagacggggtcttgccacattgcccaggctggatacaaactcctagccccaaacgatcctcctgcctcaagcacctgagtaactgggactacaggcacacacacaccactgcacctggctcaattctaataatttatacaactctagagctgatttctcagcaatttacagtttcatacttctgctctctagtactattttacttttgtcctatcaaatgcaacctaactgaaatcaaatttagtattttagtacttattagccccatacatagaggtaatcctttagccttgttcaaaagtgatcagaaaaaaaggcactctttttctgtgtgtatagggagacagagtctcactatgttgtccaggctggtctcaatctcctggactcaagtgatcctcctgcctcagtctcccaaagcattgggattatacatgtgaaccaccatatgtggcaaaaaaaaaaggcattcatatatactacacatggagagcaaaaattgatacacgctattgaggaacaatttgtaatgataagaattataaatttatctattctttgaatcaataaacccacctctaaggaatttatctcagatatacactgtacataagcatggttattcattatagcagcactgtttgaactatcagaacacaattctgcttaaaaaaaaaaatctaacagtccaggcatggggggaaaaacagttctctacatagatacgtagagaagatatggtgatatgtagatatgtagatatggtgaataaagcaagaagcagaacattacacagaatgtgtcattttgtgtaagtatagggggaaaaacaggaatcgacatttgtatttcctagtccacataaaaaaattatggaaagttaggaaaaaaaataataaacgtgattgtataccttgtaatgatgacctagggactctggatggtagattatttgtagtttctttgcttcttgtttgcccctactgggttaaatgt

SEQ ID NO: 316109 - DNA, 4001 bp, Homo sapiens
tgacactgccctccagtctggcgacagagcgagactccgtctcaaaaaaacaaaacaaaaaacaaaaaaaaacccacaatgagataccacttcacatccattaggatggatactattaaacacacacacacacacacacacacacacacacacacacacacagaaaatatggcaaacaagatcgtatctcttagacaaacaaaaaaaggaaagaaataatgtaagaaaagaggaaggaagaaaggaaggaagaagggagggagggagagaggggaggggaagggaggagagggagaggaaggaggggaggtaggaaaagagggagggagggaggaagagagggagggaggaagagagggagggaggaagagagggagggagggagcgaggagaaaatagcatgtgttggccagtatgtagacaaactggaacccttgtacactgctggtcccaacattatatggtgcagccactgtggaaaacagtgtggcagttcctcaaaagttaaaacatggaattaccactgtgaaccaacaatcacacttctaggtatatacccaaaagaactgaaagcaggaattcaaacagacatttatacaccaatgctcagagtagcataatattcacaatagccaaaagctggaagcaacccaaatgttcatcaacagataaatatacaaaatgtggcatatacatacaatggaatattattcagccataaaagggaatgaaactaggatatatgctacaacatggatgaactttaaaaacactatgctatgcaagccaactacaaaaggatagctatttattgtatgtttccacttatataaagtaccaagaataggcaaactggtagagatggaaaacagaatagaaataaaaaggaattgagggaaaggggcagttatgggtatgaagtttctgtttgggatgatggttaagtgctggaaatggatactggtgatggttgcacagcactgtgaatgcacacctaaaaatgtctaaatagtaaattccaggttatgtatatttcacaattaaaaagagataaatggttaatctaatgtgaagtatagccataggaatccatacttgtcactggtgactataaaaataggtgcaccatgcatgagcgtatgagatgcttaagtcaattctgtattttctttttactttaaggatcatgccattttagaattccagtttctctaatgaagaagcttggaaaggagttaagaggcttgtccaaagccaagagttttcagaggtatatcataaatatgttttcttaaaaataccgtaactcctgatattcacattgggttcagctttttgaaaaacattagaaagaaagtttagaaaaacaagttcatgtatatgctggtttttacaaatcaacggtgctcatcaatttactttaaaaactaatgcaacagaaaaggcaagcctgctgagggaaaaatatctggtgaacagcagaaaagtctttcttcccccaagagtcaaggaaagggggaagagaagaaaaaggagagaagagaaaatgaaccaaaaatcacatttttaaaagtgtgacaagctcaaagacagtaatttcaaagacgaactcaaaagaaaatcttcttgacagttttaataacccaaacaaacatttcaaactagctaacataaactaatttttcttaattaccatcacttcattactatcattatcacatataatttacattaacattttctattatagaatgatatttcccccaagtgacacagtatgctaaacacatagaaattatacctattaacatacctgcttaatataagaaatggtagcttcccgaggtacctccaactggatataaatcccagtgggcaaaaggaaatccacaggtatggagccatcagatgctatctgtgaatccaccgcccagatgtcaaggatgtctgccatagcaggaggcattatgaaactgaagcacattcataaccacggggccctagaaatcagtaattaaaacatagcaaaacaaccatcagccaaattttataccaagatatgataaagaccactaatctacaattagtccttagatttcaatatagccaataatgtaacaggaggccaattaaataatgtgatattttaaaaaccaagagtaagtcagcagaaataaattatttaaatacacttttatcacttcacaaattatatatatgtacattatccaatccataccaccaactaaaggaaaaaaattattcttatatacatataaataaaaatatatacacatacatatgtacacacacacacaccacattgattcaaattcaacatagatatttgacatctgaataaactgcatgcttaaggattacagggtcctaagaaatttagttaaccagcacttgacaggtgatttttctccaaactttatttagaaaatattagcttcttaggctgagtttttctctgcaaattccaatgaaaatgacaatcaagagggccctctctcaacaagaacaatttgcaatcaagagggccctttctctacaaggacaattttttttttttttgagatggagtctctctctgttgcctaggctggaatgcagtagtgacatctcagctcactgcaagctccgcctcccagttttacgccattctcctgcctcagcctcccgagtagctgagactacaggcgcctgccaccatgcctggctaaattttttgtatttttagtagagacggggtttcaaccgtgttagccaggatggtctcgatctcctgacctcgtgatccgcccgccttggcctcccaaagtgctgggattacaggcgtgacccaccgtgcccagccaacaaggacaattttctatcaacctcacggcccatcccctaagcattaaaaacaccaaatcgctcaatacagatggcaaggccccttgtgctatttctctggcctatttttcttgctctcccatcactctacagcccgagactggtatcacagtgccttctgccttcctgctgctagacctatgttcacatgaggaataaactcctcatatcaaaacaaacgcactatcccaacaaatgcaccctttaatagtgccatttaagtcttacctattccttaagggcttccttcaagaagatacaacaataataattggaagaacatgagcgctaaagttaaatgaaccaaggttcatttaacaattatgccattaatgaaagtgtcatatcaaaagagacaggaggccgggcacagtggcccatgcctgtaataccattacttggggaggcttagatgggtggattgcttgagtccaggagtttgagaccagcctgggcaacaaacaagaccctgtctctacaaaacatacaaaaaattggccaggcgtagtggtgcatacctgtagtcccagctacttgggagactgaggcatgaggattgcttgagtccaagaatctaaggctgcattgagctaaaatagtaccactgcactccagcctggacaacaaagtgagaccctgtcttaaaaaaataaaaattaaaaaacaatttttagaacttcttttgctaataaatggaaaaagaataataaattagaaaatcacaattctgcaagtgctaatgaactaacagatctaggcaatgatcattaatagatgctaaagacataaataataataaggtgaaaggagaagaaactttacaatcgtccgtgtctgtcttgttgacactacaggaatcccctgatcttagcattactaaaagtgggactatcagacattatgtgtctcctcatgaaatgcaatagtcagtacttaccattcacacaaaacaaaactgaacttgaatctaatcaaggctttagatctgatctatgtgctagtttacaggaaacagagaaaaaagttaaatacttcaaggaagcaatcagccaagtagagaatgtggcatcttcaataaaacaaattatatggtttct

SEQ ID NO: 316110 - DNA, 4001 bp, Homo sapiens
gttattcaagaatggacgggtactgatgcgatcatagagattgtctcgcacatactgcctaaagagcatagctgctttctcagatgctttttctgatgctttctggaaaggtagacaattctgtgcagaattaagcctgattttcagttcctccagctcttgtttatagctggttaaaggcaatgtgggatcctgaattgcaaaaaccttcacaacgaccaggccttctcggtgcttggctcgagcaactttaaaaaaccgagtactccccaggcttttatcatattcaaagtcatgaatatctgaaaaataactctctacagaaaggatctgggagggagcaatgccagcaagctgatttcccataatggcaagcacctctgtggtctttagtaaggttaggatataatacctgtttaaaataaaaacaaatgaagaaaaaagacaagaaacaaagaagctgtgaaacaccattattccattatttggtctcttccaaaaagacagatgcagcatacttctcttccactaacagcactgtacctagccttctggggcagcctctaaatttcacacacatttatctaaaaagaccatgttattttctccaagaagaccttgttattttacctaaaaataccctgctattgcgcatcgccatttccaggagctgaactatatttagataggcctcttcaactttaagccaaaaatgttagtttgtgttattttctcatatttaaatttaaaatattaatgagcctttactatgtgttccgtgctgtgcttggggctatgagaattacaaagttaccatatgacatagttcttgtccaagaatctgtagtttcttggaaataagaaagagacacattaaaagcttaaaactggccgggcgcggtggctcacgcctgtaatcccagcacttcgggaggccgaggcgggaggatcacgaggtcaggagctcaagacggggctggccaacatggttaaaatcccgtctctactaaaaatacaaaaattagccgggcgtggtagtgggtgcctgtaatcccagctactcgtgaggctgacgcagaattgcttgaacccaggacgcagaggttgcagtgagtggagatcccgccaccgcactccagcctgggtgacagagcgagactccgtccgtctcaaaaaataaaaaaaaaaaaagaaaaactgaaaactgaaaaggtcaaactaagatctaaaaattcagttaactcctggacacttcctgcctaattccagtgtgccctctcacccagctaaaagaaggtgcaaacttcgctggtctgcaacaagaaaccttgccacagatgttaaagaaaagcagaccaaagtatacactagctaaacgtaccccagggttctgctaactcaggttttgcaggaaataaatgccacacatatacacacacgaccttgagcacacataaacatttaccctaggcctcgggaaagtgtcaaaatcgttcagaggctcacaacgaggtcatagtagactacttcggggacgggacgggaaaacgcgtcagcagcggggaagttgtttctacgaagggtctttcttcatagacaggagatgggctgttggtggaggggcgcagaaaagtcccgatcttcaggaaccccggtggtcctgggaggagaactgggaaagctctcggggtctcagcagagagaagaagccacgctaaagagtctccacaagtaccccgggatttgacccctccagccccctaacctgccctgggggacatgcgttcccgggcctcgtcttcctctagcgcggatcgctacacccgtccgagccctcctcgagggcctcaccaccgggcggggggagatggaacccgggagagaagtgcagaccgccagtcccaagaaaacactacacttcagctgctgcagccccagcaaacgccgaactcccgggaaagcaaccggtctgacctcacttcctgtcgccgagcggaagtgacgaaaaagagtgagccttgaggaattgccagggtaggaaaccggttgctaggaaactagggaaggcgtggtcttactttgggcgagtctacagggagaaaatgatgctctgacaaagatctattccccttcctgctcttctacctttcattcacgaacgctgaggtttctgacatcccctagaatctgctcagacacgccttcactcccaggacagcagaacagagttaagagaactcaagaatatttaggaaaactaatatatcccaagctggatttttagagttctggtgagatataacttacataccataaagttcacctgcttaaaatgtacaaagcagtagtttttaatacatctatcgagttgtgcaatcatccctataatctgattttaatttttttttttttttttttttttttttttttttttttttttttttttgaggctgagtctcgttctgtcgcccaggctggagtgcagtggagcgatctcggcttactgcaacctccacctcccgggttcaagcgattctcctgcctcagcctcccgagtagctgagactacaggcgcccgccaccacgcccggctaatttttttgtatttttagtagaggcggggtttcaccgtgttagccaggttggtctcgatctcctgacctcgtgatccgcctgcctcagcctcccaaagtgttgggattacaggcgtgagccgccgcgcccggcctttttttttttcttttggagacagtctggctctgtcacccaggctggaatgcagtggtgccatctcggcttactgcaaactccacctcccgggttcaagcgattctcatgcctctgcctccagagtagctgggaccacaggcacgtgccaccacgcccagctaggtttttgttttttttttttttgagacggagtctcgctcttgtcgcccaggctggagtgcagtggcgcgatctcggctcactgcaagctccgcctcccgggttcacgccattcttctgcctcagcctcccgagtagctaggactataggcgcccgccaccgcgccgggctaattttttgtattttttttttagtagagacggggtttcgccgtggtctcgatctcctgacctcgtgatccacccggcctctcaaagtgctgggattacaggcgtgagccaccgcgcccggccgctagtttttgtattgtttgtagagatggggtttcaccatgttggccaggatggtctggatctcctgacctcaagtgatccgccgcctcgacctcccaaagtgctgggattacaggtatgagccaccgcgcccagcctgcctgattttaaacattttcattaccccaaaaggaaaccctgaaaccattcggagtcactccctgttctcccccatttctcctcccccttccagccctaggcaatcattaatctactttctgtttgtatacacttgccttttctggacattttatatataatatgtggtctttgtgactgactttcactttgggtaatgtttttgaggattatccctattgtagcttgtattagtacttcatttatttgttgttgcaaataattttgtttacccttttgttagttaatagacatttgagttgttttacttttacgttattatgaataatgttcctatgttcatagcattagtctataagtctttgtgttgccatatgttttcatttctgttggatagatactgaggaacgaaattgtgggctcatatggtagctctatgtttaacatttgagaaactgccaaactgttttccaaagtgcaggcaccattttacattcccattagcaatatatgagggctctaatttctccacattcttgctgacactgttattatcttctttttttattatcctggtggctgttaagtggtatctcattgttgctttaatttgtatttccctaataaccaattccgttaagcatctttcttattgtgcttgttttctattcatatatctt

SEQ ID NO: 316111 - DNA, 4001 bp, Homo sapiens
taaggtgggaaaggaagagaagcggatgggaaatagagaatgcctcactgggtaagtgtgaaaagaaagacaccagagacaaacaaaggcaagaagaccaggcaaggaaatacccaggccctgctaacatgttattataagcccacttcctgcccagagcatctagaatgattcccacatatgtggctggaacctgatcagcttctgcgctgaccctaaccctgctatctggttcagaatttctgagcttctcttatctgtgtgacagaggccccaggcttaccgacagatgagcttccaaaaagagtttgatgccaatttgctatagtcctcccactcctcaaccttcaaatcaggacaactagcaaatgccttccagcccctaaggaggcctggggctcctgagcagggacaaagtgggcctgccaagcccacttctcagaacgggacccacagctctcctaggtgatacctcccaccttctctccaaggtggctcatgacagccctgttccctccacttccatcagcctagacaacaatttgctaataataaaatcacaaaggaataagcaactgcaaaagtcaggccctgtgcacagatgatcccattcagtccttacagcattcctatctggtaaggatcatctctagctacaggtaaagaaagccacttcctcaaggtcacatagctacaaagaaacagagccaggattccagtctgggttagcccgacccagacagagcctattccccatcagctcagcccattgcctcctctaagcatcaatgtctgcaatattcactggacatctgctctatacagagcacagcactaactatgctaaaagagacagaagcctcaaatcctcaccttttagggacaactaattgaggtaggagaaagcacatacagagctcaacagcacctctgaaaaaccacccatgagtgcaaggagagcatgcagtcacccagtggaactttgtagcagggaggggtgctgagcagaaaaagaatgagtacaagggagataggaatacagaagcccccttgaaagatgcaaagaacagaaatcaatccaaaggtgatgtgagcaaccccaggcagaagcaatgacatattctagagccagggaatgagaattaaatgtccagcggagaagacagaaaagcagcctgctattgtgagtagagggaggggatttttctaagggtgacctcaccatagtgagaaggagtcttctgagaacttctgagaacccaaagtagagcaggttaattttctgttaggcaagagggatcagtgggtcagttctttactgggggaaaggtaaatgcaaattggcatctgagggaagttttcccaggggcatctgaggttagcagggactagttcccatcacccagccaggatgacaaaccacttgagttaggttgctggattagaaaggacatctaacaatctcagtgacaaaatcattattagtttggaaaacctaaattttaaaattaaatatatcttggaatggtggatatttatggggtgaaaaatgaatatcttagaattaaccaaattttattttcttacagttggtcctggcttgtgcaaggtgagaaagggtttttttatgtgggctttagaaaaatgagtcggataaccagggaaagttcaggttttgtgacctgtttaccatcattccgattatgataaaaggggtttttttcccctactgttttaaattcacctcagaagaggcaaaaggcttttaggggatcttccaaaagttagtactgcataagtagttggagaaatatgatcactgactgaaataagttcctcccaaggcctgagccctggcttacctgaacttccaacgctgagccacaaaatgaggccccccacccagaagcagctctcccagggacctgggggcatcgctgagctggaaatctcagagctggtatggagtaattccctaaagccaaagagatcatataacccagcctctcagaaaacacccacgtggatttcactaatcattaactagcctcatgacctgaaaaggaaaaataaattcttctttatttatttaaatgccagagttttcggtttcttcttctcaatgaaaataaatacactttcttttttgttaaccagagtgcattgaaacacactgtccctctttgagccaaacatgatcaggaaactatttcctgcacctctcccacttcccgtgataggatgttagtaataaccaaggcagaagtcctgcatctctgggtggccagaaacccctcattgtgttggaattatctgtggacatgtgtgtctccctagaagattctgagtgacttgagagcaaaggctttctcttttcatttttgaatacccagtgcctagcacaagactgagataatactatatattaagtgtccatttaaagggaagaagggaagaaaaagtttcctctggagagtactatcattttgtagaatcttggggctaggagtcaagtccaactttggagatgttcaacttcctgaattcacaaagaaactgcatattagaaaaagaaaatgacctgtagagatcccgttggtggaagtggcagagccgggcctggaaccaagatggttccagcaccatatggcctctccaccccaaagagtggcagaaaccacaaagagctatttctaggcaagtcaatggggcagaggcagagggcagggcacttgccccccactccctaaatcataacacattgctgtgaggtagacagcccactggcagggccaggatcatcttttccaaacaataactctctgaggtgagtattatcacagagaagttaagtaatttgtacaacaaattacttatttgtattataattgtatacaaattacttaactgtgacaattacacagttagtaagcacagataagtacaaattacttctctgtgatagaagtaatttgtattaaatacaaacatttgtgttttacacagctggtagggcacagagaatttaagtcatttgcctgaggtcatgcagagctgggatttaaagcgggatgagccagccccagaatccatgctctgagcaacgatactctacagcaacaactcctgaagaggctctgggaccatgtcatcatggctgaacgcaggatacaattattttggaggggctagcccttacatccccttgtgcacatgatctcactgctcaagtgctgctgcaaccaggaaggggtgtggcaataagtagtgcacagcagaggtcactactgaaagctgtcttgatattagagaccaagccaagtgtatgagttcaggtcctcggagaagaagatgccaaggtaagacaagatatgcaagagatttatcgagctaacacctgtaaagaataagaggtactagagaagccaggaagcgcctttagatggtggtgaacatctgatacctgtgaaagagaatgggcaggaaagagaggattacataggaagagtctcaggctgcagcacagtttctagaatattctgaccaggccaatggggactcctcaggccaaagtcttttgtgacagcagatgtgttttgtagaaatgagcctgcattagcagccacatcttgcttagtcattagctgaggtcagcctcagcacaaagacagaggtagattcagaagacagcagctggagccatcagtcaatcattttccctacagcaggagaactgagggctgttttcctagccacccacaccgtggccagagatagttaatccagggtgcccttgtgcatggcatgaatacagctgacattgagagagcactttcactttctttcacatccaacatctagcacagagctctccaagcggggtcagagtggtcccttccagaaccccctgcctcacaaccatccaattgacttgggacagattgctggatccaccccagacacacagaatgagaatctttggaactgggcccaggactctg

SEQ ID NO: 316112 - DNA, 4001 bp, Homo sapiens
aggcctgagagtttcacagaggaattctattgatccctagcttacacatgctgttccaggaatagaaaatgggagacaggattccagttcattctatgagaatatccgaagtaccaaaagtgcaaaggacaggggagaaggaaaaactaaaggctactttcatttataaacataaacagaaatctaagataaaatatcagcaaatctaaatccatccaggataacaagaccacaaagtacatcatggcccagcaaggtttgctgggccaattctttgcaaagaattaaaggctgttttaacattaaaaaaagtattaatataattcacgtatgaacaaactaaagaagaaaaaccatatgctcatctcaacggatgagcagaaaaaaagaacacttgacaaaattcaaccctctttaacataagaaaggatatctcctaaaagcctacagtaaggattagatttactgggaaatattagaagtattccatttagaacagggaacagataagaaatgtctgctatcactgcttctattaaatattgtgctagaggacctagtcctaaccactgaaacaagacaatgcaatgggataaaagttataaagtttgaaaagggagagaagaaaattgccagtatttgaagctgataaatagggaagcatattcagatactgcctctacctagccaccactccaaccaaagaacagtgacacatgagtatctggccaggctgaccagagatttataaacaatagaaatgaggggtgcagaatgaaatactggcttgtctgagtctgaaaatagcctatagttttctattcttgagtctttgacactgaagaagtgttagagaagggtgagtaaggcctggtaacacccatgtttccataatggaaagtgactctcaggcatatatgacagagctcccttcacccgcctgggctgctcatggttcccatgggtggcctctgtgatctgcaaatgctggaaatgtgctactctgcactcccacctgcacctgtctcaggtgtgttctgtagatcggtatcccccatgggcttttgtttcgtagaagtgttattttgctaaaacagttttgattctgtggcctggaccaagaagggaagggtgttctggcagtgacagagttggcacaaaaccacatcagacactttgttatcaaatgtggagatgacagaggagccatcggtgcatgtgtcgggaagcaggcaccctcctccaggctcctcgggaagacactgcaggaggggaggagggcggaggccccctcccaatagctgacttgagggtggctctgccacgcatgcagggtgcagcaccaccttcaggcccaggctggccttacagaggctggtgtcacaggctgcttctgccaccagctcagcactatgggccactgaacttcctgccacccccttgagccctgggctccccacagacagagctgtgctatcagatgacctgtggattgaggcatcagcagccaggagtgtctctgaaatgggccaccctctggaacccttctttggctgaattgtttcaggatgagtgtcatttaatcaatctgcctaacgtcaggaagtagagatgaggactgcagcccgctcaatttctttcttctcagttaccaaggcttttggcttattgaatgtgtcctgtgtgcctgggcctgggtgaggctctggggattcaaggatgaagaagacgccagccataactgccctttgggagctcaaagtctagcggagaaagggaaaataagcaggccccacagcaaatagggatgtaagatctgtgaccaggaaacataggtactgagagaacacaaagaaagaccacctaccccagatggaggaagacttgtgcatccacctggaggagaggacgcctgagccagcctggaagctcaagggccaggttgatcaaggagctcaacaatctaaagctccacagtccaaggaaaaactaggtgtgactggggttgtcatgaaagattgtgtgggtacacagccaggaaagtgagtggaggctgaacttccaagaggcccatgtgggtcagctactgcccttgtgtgacagcaggcacctggatacctcctgaacctcctccctcccgatcatttgagctcttcctttcctttaccttgagctctctgcatccggcatcttctttctgtccacctacttcatctaggctgtctgaagtcaattacatcctttttccttttccctttggcatatttctatccctcccagccacacacacacacacacgcacacacacttctatctctgcctatccatcaactcacttaatttctgagacagcactactaaaagtaagaataaggaacattaacttaataaatattgttgctgttgacagtgaaacactcagttaaggtgggaaaggaagagaagcggatgggaaatagagaatgcctcactgggtaagtgtgaaaagaaagacaccagagacaaacaaaggcaagaagaccaggcaaggaaatacccaggccctgctaacatgttattataagcccacttcctgcccagagcatctagaatgattcccacatatgtggctggaacctgatcagcttctgcgctgaccctaaccctgctatctggttcagaatttctgagcttctcttatctgtgtgacagaggccccaggcttaccgacagatgagcttccaaaaagagtttgatgccaatttgctatagtcctcccactcctcaaccttcaaatcaggacaactagcaaatgccttccagcccctaaggaggcctggggctcctgagcagggacaaagtgggcctgccaagcccacttctcagaacgggacccacagctctcctaggtgatacctcccaccttctctccaaggtggctcatgacagccctgttccctccacttccatcagcctagacaacaatttgctaataataaaatcacaaaggaataagcaactgcaaaagtcaggccctgtgcacagatgatcccattcagtccttacagcattcctatctggtaaggatcatctctagctacaggtaaagaaagccacttcctcaaggtcacatagctacaaagaaacagagccaggattccagtctgggttagcccgacccagacagagcctattccccatcagctcagcccattgcctcctctaagcatcaatgtctgcaatattcactggacatctgctctatacagagcacagcactaactatgctaaaagagacagaagcctcaaatcctcaccttttagggacaactaattgaggtaggagaaagcacatacagagctcaacagcacctctgaaaaaccacccatgagtgcaaggagagcatgcagtcacccagtggaactttgtagcagggaggggtgctgagcagaaaaagaatgagtacaagggagataggaatacagaagcccccttgaaagatgcaaagaacagaaatcaatccaaaggtgatgtgagcaaccccaggcagaagcaatgacatattctagagccagggaatgagaattaaatgtccagcggagaagacagaaaagcagcctgctattgtgagtagagggaggggatttttctaagggtgacctcaccatagtgagaaggagtcttctgagaacttctgagaacccaaagtagagcaggttaattttctgttaggcaagagggatcagtgggtcagttctttactgggggaaaggtaaatgcaaattggcatctgagggaagttttcccaggggcatctgaggttagcagggactagttcccatcacccagccaggatgacaaaccacttgagttaggttgctggattagaaaggacatctaacaatctcagtgacaaaatcattattagtttggaaaacctaaattttaaaattaaatatatcttggaatggtggatatttatggggtgaaaaatgaatatcttagaattaaccaaatttta

SEQ ID NO: 316113 - DNA, 4001 bp, Homo sapiens
cttctggacttcctgccccaccacccttgctcccttagcacccagaaagtctgtggcacccctcacccagccctactcaacccagtcataatattagtttggtgcaaaagtaatcacggtttttgctattgaaagtaatagcaaaaactttcaatagcaaaaactgtgattacttttgcatcaatctaagagcttctcctcctgtgggagggtcgtggcgaggagactttgagctgaccctgggttgaccttgcagcctgcccaggctagctgtgcacagtgaggtggccatgtggtggggcatacagggtgttgcaggtgccagtgggaagctgagggaggtgccaggagtcctgttcctataccaagggtgatgcataataaagacacactgggcctgggacccacagcgatacacagctacacagatatggccacacaaatacacagtcacacactagaccaccactcacacaacctcaaagagacaatgagccacacacaatgacacactgccccccaaaattacacactgtcacagggagttgcacagtgtcacacttagtcatgcatagccacacaacatatagtgccagagcatcatgatgatgatgatagaggctcccataataatagttaatatttaaataagatactgttcttagcacatgcacttaattctctcaataaccctctgaggaaggcactgtcattattcctgttttacacaagaggaaactgaggctcaaggaagttgcatggtggagtcaggactcagaagcaggtagcttacccacagggtcagcggtatgaaactttacgcagccactgtgaagggacatactgccacagagtaagaacatcagaaaatccatataacacacacaccataatggaatgacagaaccactcagtcaccctaggtcacccactgtcacattggttatacagtcacactcagttgaacagtatcacaacagatcacacgctgtcacactgggttacaagcagccacctcagtgccacaatgtcacacactttgtttcacaacattacacaccatcaccatcattacacactgtacagtggccccaccacagaccccaggcatgacagaactactcagtcggcactgggtcccatactagatcaccactgtcacacccatcacatacaggcacacttttgcacaggatcatattgaagcacaaactcttgcagatcacctcattggttacacagaccaggccacatacacggtgcctcagaaatttgtaaacaggaaggcgtcgggtgacaagggatggggagcgttggaagggctgagttaaataatgagaaggggtaactaatcaccctagtactcaccccgacgtgctaccactgcaaacactgccccacagtgggccacacactcacagaagtactaaacatgtccaattaaaggctccaaggcaaatggccccgcgttaagggacaagtggtcggcgtcctgctccagctgccttcccattcccccgcagatctcggagtgctctgcgccccttacccagcctccgtccattgagcgccgccaccttaaggctccgctcctgcaggtagagctccctggagcggctccggctccggatccccaggcactgcatggccctccacagtgcccctgcctgcgcggagccgggtccggggcagtgccgcctccagtgttttatgctcacaacaccctctgctctggtccggggggcggaactgtcgcccttggaggggagcaggggcggagtccaggaatgggagggaggagctagagttcgagaggaggggcgcacttcggaggggcgggacgagagggaaatctgggctgagggggtagtcagacgctaggaggcggagctagtccacgagcggcgggacctatgccccctgaaggtgaggcgagagcgaaaccgaggcaaagtaaatgagtggggggagtcagaatacaggaggcgggacgagaagaaaatctgggctaaggagggcagagtcagaccccaaaaggctgggccatccaagaggggtgggactaacgacccctggagatggggcgagagtggtgtcgaggcgtgggtggggatgggggtggatccagaacccaggaggcggggccgaggaggtgccgggccccgcggaggcggagtgggacaaatccataacccaggaagcaaatctgtgtcgaagcctgggggcggggccagagccaaggcagcggggcgaaggaggggccaggctcagaggcggagctcaggccgggagcctctgctccagaggcgacgtggaggcagagccatacccaggaagcagcccgggggcggggccagggcccaggaggcgagcctgggaggatcccgcactggaagggcggtgtccaggcagggaggggcggtccctcggctttggaggcggtgcgggggcggagccagggtccgggaggcagtgtgggcggggtctgaccaaggagccggagcggcgaattctaacgccacctttgaggctggcgcagaaccgaagggctgagtctggggagaaaagctgaggggagtcccagtgggaggtggatggcagtctagcggggacctgagtggggcgagatcaggcgggaccggggatggagcctgggccagacaccgagccccccccaagtattttacttcaattgctcaactaattcattgcgactcagcttgctgttgcctcatttgtgaacctcaggtgggcctgtttgcttctctcggtttgaccaccaaagtgataatccccaaggtgacggatgcaaacgaaattcttgaaaaaattctgatcttaaaataagcccattaacccagggtggctttcataaatacatgagaacgactgtaactttgcacaaaactttgctgccaatatgctcgggaacagtgggtcctttcatgtacatcacaacttccctttcattcacccagtaattatttattgagcccctactgtgtgccaatgtcaggacaccacccagaggcctgactcttactctcagcctctgaatagttcccccagttcgcttcactgcagctccagtcaccagcattgacagtgagtcactggcaaagccagttattggcacagacaagcacagcagtaataacaagaaactgaagcgcagagtaacttgcctaaggtcatatcagagagaataaatcatgagcaaggtgagtagatggacaaggtagatgagctgaaatatgaacacggaaaagctattctttggagaggggaagcagagtgcaaagggagcctgtgttatggagaaactgcgcaggggttcttaaccagaccaaagacccctcaagaacctgtagatagaataacatctcaaaataattggcttcctttgaattcttatgtattttattttctgtatttaaaaacatgatcctggccgggcgcagtggctcacacctgtaatcccagcactttgggaggccaaggtaggaggatcacttaaggtcaggagttcgagaccagcctggccaacatggagacaccccgtctctgctaaaaatacaaaaattagccgggcgtggcggccggcacctgtaatcccagctacttgggaggctgaggcaagacaatcccttgaacccgggaggtggaggtttcggtaagccgagatggcgcaaactgcactccagcctgggtgacagtgagattctgtctcataaataaataaacaaataaataaataaaaacataatcctgagaaggggtctacaggcttcacctgactgccaaagtggtctgtggcacaaaaagttaagattggtgtggatcagtgtgtgcctgtgtagcatgggcctggaagcccaggggcagactgctttggaacacaggtgagtgaggagctggccaccccaacttgctaagagctctggaatcatcatctcttggaggactggtttttggggcaacctagaatttctatgcccatt

SEQ ID NO: 316114 - DNA, 4001 bp, Homo sapiens
gagtgtggtcctgcagcacatccagtgctggggcacccacactgtgaaacggatgcagactctccaatgcaagtgtagacaacctggaacagcacagggcacagtgatcaccccctcccaccaacaattctccttgacaggttcttatttccccatctggtttgcagtgtggacagaaggcagttgaggtaattttgggtgatgagctagaagtggcagggccttcagggaaaacagcttggggtcacagtgttcatgtcaacccttcaggaaaggctggactgagttaggcatttgggaggctggtctcaaatggggtgggccagggcagccaagcctatgccacaggactgggaggtcctgactgagcctccatgtgtcttcctccatggaaaagatatcaaggctgcctcaggagagaaactggacaaaggcacagacactgaggatgaagcctgttccaacaggagccaaggaatgacgctgtgtcagagagaaagcagagatgtccactgtgtcctctcagctgcccagcctcccttcttgctagtctggcaggcgcacgaaagacacctctggcctgaagaaagaagagggagcactggaaggggcagggactccatgactcatctagacaaggtggctttaaggagcctaggctattggtgtaaaagcaacagctctgggcacagagcaaggtctctctgggccaggaggaccaggtctgtgccaactgcagaacacgagatagactggaggctggctgatgggaacatctctaagtccctctaaattccagggggactctagtggaaggctagaggactctgcccttctctttcccatctattatgtccatgaacagtttagatggatgggtggtggccactaaagcctccaaccccaagggtactaaaaaagagagggatatacagtaaagcagtgattggtatgaaaggagcagggtttgctgagatggcaagtgacctgggagggcaggagggcaagcccccaccaagagtgagtgagtgcctgtcctggagcaaagaggcgcccaaagttaccctccccaacctcccgcctcccagaaggcctccagatctgccttcgggagcccaggctcccctcgctgctggagggacagcgaaagggcaaagagctggctcatattggaggaaacaaagctccgctggacaaaggatggagcaggcagctccggctgagacctggccctgtcccccgaggagggtcgcagatgaggggatcgtgctgcttctttcagcctgagcatcgctgactattctgcgctgggcagttaaggctgcacggcccgaccacggttaaccttgcacacctcctctccccacccgcttagcccctgctccgccacacccgcgcggcctgacgcggtccaggcacgcccaggctttggggagcctctggggcggcccggatggggcaaggagaattttggtcgttcttggatgctgtttccttccttcgccgcccctccgtgcgagcgggatcgtggagcccagactttcatgaccaggacaagggggtccgcgaggcggagggaagtctttagacccgtaccgcccgcccacccaccccccgggctagatctcggacaagcctggaaacgcccagggtcgtgcccggcagtcccacccagggagccgcgggctgagattttcccagtccggagaaggggcagagaggcgggcccggggtggtgtggaggcggccgaaggagctgggggctccctgtccagggcccggaacagctttccaggggtccacccctgcagggtctcccgctcgcgcgggccaggcactcaccgtgcagggtcaggaagtcccggcccgagtccatgcccgacgggcggcgcggcgggaggggcaccgcgggactcacttgagtagcgacagcaccggcggcctggggtccgagcggagtgcggtgcagggacctgaatggaccgcggtgggaggaggccgggggtggtcccgggacaccgccccgcccccgctgccctgcgcccccgccccctgagcccgccaaccctcgtctctccccgcccccttctggggacgcgagagggagggcagagctgggggcccggaggactggccaaccctggcccgggccagcgggcgcgccccgaccagaaatagccagattcctccagcttcctccgccgccgccacccacgggccgcgggccctgtcattaccgcgggcggccgggccccacgccctgttgtgggcgcctcgctggggtcggggtgatgctggaaagaatccggcgtcatcccggggaagggatcgtgtaaggtccgacgcccagccgggctgctgcgctagggagacgcggcgtccaggcttccagccgcagctcccagcgttcgcattcccttctgcgaaatgggtgcacggacacgattagaaggtcttcagagagcaatacctggaccttgtcgggaggagggtccccttccctctcgctgggaggtttctaaccccaagagtgcctttggtggagtgttgggggtgtgggagggggaagcaagcaggtgcacggatttcacttttgagccactcatatcccaaaaccccagcgatccatgcagccgagggggaggatccccagggtcccttcttcaggtggcctcccaaggggctgtctgggcaaggtccctatgcagacccaccccctaactcttgggacccagaaaaccccctttataggttgcccagagacccctcccaccacagaccctgggagggtccctagatcctgttgcccaccacccctttggagagtcccttgggaaaactgggctcttggtgtcagagagcccccagagggcctcccaggaagccacccaggcctcctgggctgataaggccaatgtgagagtcaggcaaagctagttggaccagctctgcggggagggggctgggctcaccccaatccctcctcttctgggccctaggtggccttgaataagggatgtgaaacagctgaaggacagtcttctggttctgggggttaaaagtggatcaggacttctgggctttggagagccccctgctctgcatgccccctctccacagacggggcttcaccccttacctggcactcagctccaatcctgtcctgcagtgcgaacacccctgccctgggcaggcctgtcagttccttccttggtttcccttctgcccagggccacactccatgtttgctgagggatgagcaaattcatactggcaggcatcactctggacctccatacaggggatgagtggggaagaagggtccccttctctgccctctggaggcctcctcaggccttggagcctaccacttgcacctctgatactcctggagcctgcaagcccctgtactcagcaaatcaggcctcctcaagcccccctcctcttcctaggcagcgtcacagtgaaactctgacaccaggagtggacatggcttcatctcagtcatcattcctatgtattcacatcatctcccaactctgagccccaggccccaagccaggacattacctgggagcctctcctttccctttgtctatgtaccatggtggggatgcagccaggctcttcctttgcatgctccaaacccacctcacagaatccctcctctggcccctggcacagacataggagctgcagcctcctccctagcccagggttcttgggcaggatgggcactgctgactcagagctggcacatgcaaccaggttctgccagacatgagggctgggccccgccctgctcatagagaaacccggcggctgctcagagccgtgggtgagccctcactccagtcctctcctctcttcccctggctatcggcccctcctggctctcacaggctgggaggtgctctgctggttcctgctaggggtaagcctgtgtggtatgagtgaacttgtgtggaggggctggagctcagaggaggcaaagaggcttt

SEQ ID NO: 316115 - DNA, 4001 bp, Homo sapiens
tggtcttcctgcctccgaataaacattcctcaactttgtactccagtcaattgaagccactccactaatgttactgtttaacaatgcaactcagatttcatgatatttcagaatctatcaatttcacacactcagatatagagttgatctgcataattcaagatgttccttttaaaattgatctggaaatcagaagaaagattttttgaaaaatagtcttgctaccaactgaaatgattttaataccaagatggctagtcagtaatgaaaatttttcattcagcagaataaaatcactaagataaataatagaaaatctattaaataaaatatgaaatatttgctcaatgaaaaatctctggtaagacatctgtatgtgaaaacatctaccttgaaacaagacaccttacattcatcaactttgaaagcttatatgagtaggaaaattatatcaaatttccactatgtttaagaattaaagctctattttaaatttaaagatcatcttatgtggtaaaggtaatagaagtcactttcatcattacttccataatgtgtaaagcaagacgaccctgatagtatgctgtgcagttcaatttactcctacattctgcatacataagagtttccaaacatattataagacaaaactctaaatggaaatccttctgacaaactgcatgttaagtaagccaaatccttccctatttctgtatgaaagcttcttcccaggcttagaaaactcaggtatactcaagaaaatctcaaccatggtacaatttatgttttgaataaaaagcaaacatcaatgctggtactgggaacatggcacattaaagctgaaaccataaactagcaacaatctccagacaggctttcagatcagcattgatgggataaagttacatttgagtagacgcatatgaataacctgaaatgacagacaaatttcagtttgaaggtaactttagaagacatttcttgacatgtcatttattctgtctgaccaggaaggaataattcttataattcaagaacaatctccatagattttcaatttctaatctcctaactcatactttaagatgtttttctcatgctcctggagctgacaggctgtaagaacatgatacatggatcctgcctccattttatctgtgctaaatacttctgccattctattttatagagctaattatttttactatccctgactagttttaattgatacaaattgggaatcattctctccagattattgtagaaagttaaaatatagctttattcatcattattcaaactgaacaagacttgacaatgtttcagttaaaacctactgttcataaatgtcagacaaatgaaatttttaggcatgtctgtatcctgacttataacctaagaatacaaattattttctcactgaccattttaatataatgatatactttcagtttgccagcatgcaaattctactcttataaaagtctacatttatacgaaaaaaacacttctgcctaaacaaaaatactttgttacctcatttcatactgaaatataataaatatgttctgaagaattcaaataaatatttaacttaactaaacatgaaataaaataaatgtttaccatcttttactaggactattacacttaccttaaaattagtagtatgagtcttacctttttctggacttaagtttttatacacttcaaggtctgccattaaatttaatactattacacattattggcaagagcagtacaatttctctctaaaggcaaagccttttcctgatacacatttccaaaaagggtggggggaaaaaaggcaaagaaatccttagcagcccccagaacttggctcatgctgccctttatggcatgatgagatcttcacaattcaggctttatagtgtggagaaaataaatccatgagatatgattatagaactttgtcccaaagtgaaaagcacagccagataagcacgctggaagcatctgctcggggctgccgctattgtgggaatgcaggcgctgtggctactttgggtatgagacatgcatgcttcgtgcagcgcgttaaagccctcaaggcattatgcacatttaatgtctgggaagtgtaggtctttatccatcaaagaaaccctcctcaccttcagaggtcattgagaaacactgattaccgtgggagtgacgcagactgaatacagaaaatgaacatgcacacacagagacacagaagcacacacacagacacacactctcagaagcaaacatcactccatcggaggcaaacacaatccattaagaaataagctacgactgccctataggctacttttgtgcaagtcaggttaagtgcatattcaaagcgttgagggttttccttgtttttttgtcctgattttattcacacacaaacatagcaatgatcacagaaaagactggaatgtttccaacttagaaggaatgaggttacagtttgaaaacacttactcggtggaggctatttctcatgtttaaaaaaaaaatcacatgcctgtggacgtggacaaggtagacagcatgaatgggtctaaaaaagtcagtttttagtgaatgaaaccacacattattatagtgcaattttccctaaagtctatgtaaacattatttgcaactttattcaacttctttgaagagataggtagacagacagacacataagcagatacagtagcaatttacagtagtcttgcattgaggcattgtaactaagcctctcatcctgagtattaactctctcattccagcattccctttctaatatcgaccctattgccattttcttctcccagcttcagctgtccctcacccacctgtggcccttaggactcccagcatctcccattctgcatataccagtgtcaggccctttaggcaattcccaccagggccacccagcctagattgctaactcatcccttgattccaaggtgccaagctctatcccagatccaattcacctgtgtcccaatttgcacatcccctgccccaaattgcaaactacactatttactttcaaatactctagggaaacttggatttcaaaggtatatgtgggcacacacaattaaatacatgatgaaaatatccttcttgcaagattcaatctaccatacatacatacatcactatacaaaatagccattaagagtttaggagcctatctgcctaggttcaaagactgactctgccaccaactagctgtgagactttgggcaatttacttaaattctctgctcctccatttccttatttgtacagtgggcatagtaatagtttctacttcaaaatgttattgcagtaattaatttaatacacataaagtgcttagaatcacaattatatattattattgttttactattattaatcttgaaattctttacatcaacccaggaaaggagtggacttcattgcttaatctgaattaattagtggtccgaacacaagatggcaccccaaaatgtgacatatctgagaaatacccattcctgctaaataatccaagtatttaatactcccagataattttatacaaaaagacaatggtgttttcttaacacaaaattggtaacaccaagtaacgaatatctcgttcctttgtctgcccagaaccaaacatgcccaaaaagcaagaggcatcttgggtttatctcttgctcggtcctgaaaagaggtgaagaccaaagcactcccagctcccaagaagttttggaaaggcttccttccaaagatccccctccccactccaatctggggtcaagaaagaggaaggggacaaactttttatgtgctcactttacccactgggagtcttgctcataataagtttttcatccctctcacctcttgctcctgaagccccaggctcctccctgaaaaggctgacatgcaggattggatatggagcccaaccacacaagcacatggcaggtttattctgagtggctctg

SEQ ID NO: 316116 - DNA, 4001 bp, Homo sapiens
cagcatgctcatttcacagaaaagagaactgagttcctgaaagattacgtaacttgtccaagaccgtacactgctagtcaacaacagagcaaatactgttatatagaacttaagcctcagaatgttaattttttttttaattaaaacggagatggcagcctgaaagaagaaaaaacagtgaggtgttggaattaggcagatcaggatttgaattttaggtcaccattttacaatctccacaagctttagttaccccattcataaaatgggttgaataatagctatagcaaagtccttgaaaggattccgtatgacaatgttaatggtcatcaagcccttagcataagtatctgcaatatagtaataaactaattggtaatacgactataaaaatacatagaaaaaattttaaatgattatagcctttgagatctctgaataaaggcattctaaaataatgaaaataataatgagtttaaggcacttaaatctaaattctttaaaaactggcacaaaataaagcttgaaaaaataaacctagttcttctaactcccgtgatttttctattatcatatttactattttttaatacgaataaatttgcaacagaacaatacataaatcaaacactgcatgagagataaagcaatgaacaggacccttggctgaggctagagaaaagcaacgcagaacctcagtgccacagggtcaagtcgccattcccacgcctcctctgctaagggcacttcaccactggaatgtcaagagaaccaacctggaaaggtggaggcagaaattttcatgctgacattgctaatacctaattagttacatcaacttgggcagttatttcatctctgtttctctttcttcatctgtaaaatgaaatcactctctactttacaagggcttttagtgaggttgtataatgaacgttgaaaaaacactataaacaccaaagtgcttaataaagtaaggttaaatttgttatcttaaacttagtttaaagcaataataaacattaagtctgtcatcaaattggggaagacttcagaacaatcttagaaaggtgaaagcagcttagattataggattctgttaaagagcactccactccccctgaaatctctctgttccctctacaattccacaggcctctgatagagattactccaaaaattctggcaccacataagtctttggcttttaaatcagtttcaccctggggtatcttgacagcaggattgacagagcttatccctgactgtataccacaaaacaaacagataccagcagggtaaaggcaatttgtcttagtttgccatgaaaatgactaatattgattactctctgattcacagctgcagtcctccaccctgatagtaacggtttagtgctgcaaactcttctgttctgttgttatatgggacataatatatagataagtctgaaagccctaaaggacagcaataaaagtgggtggacttctcttcaataagtgtctaaagcaggtggccacaagcaccctctaacatctcaatttggaaggccatgctatgctggtaataagcattgactggtgatccacaaatattaactgaacaattatatggccctcacccaaaataattacaaacatcagaaagggatattactggagttgacagtgtggtagaagaggaaaggcactggtaccaactaccctacgaaatagaaagagataacactattatagtcgttgaggtggggcccattccttacaagtggagatagtaagtgcaatgggacttcttgggtaattattcataaacaagttaactcaagctcttggttccatccaacaattataccatatttgcatctagagtgctagaataaaagtcctgtcagaaacaaaataaaagatccaactacataaatacaagagacagcttaccatgaaacacactgttgtccaccagaaaatgcctgcggtactgcacacagttccttttttccaagttccagtaactcattgtcagaagatttctggcacagcatcaaaaccaaattgccctgtcaagggaaacagaatgagacaaaaatgaagaaaacggcagccacacgctcacactggtagcataatgccatcggttgcccagcattacggggcaacatatacggcatacaacttctccacacatggagctggaatcccccaggccctaagaaatttctcacaagtcttcccagggtctagaatgacatttagcatatcaaaacagtaactttttcaaaccacctttcagggctcaatgttacccatctccaggggaaataaacctaccatcagagagcaggtttcaggaccagtatatgtgctcccagcctcactcctagtagtccaagatccaaactagtcaacactggtaacatttcaggaaatttcagttgcaggtggggaggcaactaacaggaacgaagctatcattcccaattcctgaattttgtgtcagtacagcatccatgtggccatgaatgagccaagcacattaataaaatgtgcctccctctttttggttcattgctggtgtccatttaggactgctagggcctggatctgcccaggctgaactcattgatgtaactagagctgggcacaggcctcagcaaggtaaactagcagtgcctgctcctacataagacttgctccatcacagacacagagaaacacaatgctagctagagcaacaacttgaaaagcagagatctgagtcgatgaattaaattcctccaaaagctgacgtgcataaccctgaacaaggcctcctttgttcacaggatttggctaaagcaacttttcagaattccaacctcctttctgttcacagaataaagccaggcaaaaccaagcaaggctggcatgaagcaaaacccacaggtggaaaacaatttgtcatctctcctactaaaaccacctagaattttgtaaacgtatcccaggataaaatcagtcacttagtgaaaaaaatatatattatcagagtgttgtctattcattaatggaacaattggtgaaggctcctgaagcttttgtcagagcttctccttggctccctatggcccaaccttaacccacaacaccagggattttacctaattcctgcctatcctgccttttctctggctccgtgctggactggccacttcctcttgcctcatacccacctggctaatctgactgcttatcctactccctaaggctgagggagtcttactactgtatggaactgactacaaaatacaatagaatatagctaattatgaaaacaacccaacctctgccctctccccagccaatactatatactacaaagttctcttctttagaaagtatttttagttatacaaataatgcagttatatatgttcattatttttaataatgtgcatttgtttatagttagcaaaatatattcacatacatgatgctcatttgtcccttattaatcttctgaggtgagtactcttctctccttctacaacattaaagaagatgacaaggtgttagagattaactgattcacccaatgctgctaggaaaaaatagtaatgagacttgaagtcatatcttcatattccaaagtcaagccataatagcaactaggactttatgaagtgaggtcgtttaaaaaatacaatctgggctgcgcgcagtggctcacgcctgtaatcccagcactttgggaggccaaggcggatggatcacgaggtccagagatcgagcccagcctggccaacatagtgaaatcccatctctactaaaaatacaaaaattagctgggtatggtggcacgcacctgtagtcccagctattcgggaggctaaggcaggagaatcacttgaacccaggaggcagaggttgcagtgaggtgagacagcgccactgcactccagcctggtgacagaacaagactctatctcaaaaaaaaaaaaaaaaaaaaaaaaaaatctgctggcc

SEQ ID NO: 316117 - DNA, 4001 bp, Homo sapiens
caaaaacaagtattcaaaacaattaaaagaaaggggttaaaattaggtaggctggtatcttctttggaattttcacctcaaattttattaacaccacaatgcaaaatcaccacaaatattttatgacaaataaaaacagaaatgtcacctaactctgtcaataggattgattatcatgcacagttgaaagcaacttccatggaaacataagctacagagtaaaagaaaacgtaagtcactaaaagctatgtatgcagcaaaaagacactttactttccttagtttatctctacgtgtgtgctgcaggtagttaatacacttcatctccaaacccttcaaattgtgtccttgcccagacataaactgcgcaaacagatgacaaagggaaatgcagtttcacaattgcctcttacatagagtagcaagatggtatatttcactagattactgcataagttgataacaccatcagacattttcacagtacttggaagatttctgtaggtccaataaaatttcagataccaccactgccaactctctttactgtggcacgttctgccctcccaccagttatcagccacaggaagggtgggtgcagcctgtcaatttgctttgctgctccctgtcctgataactccttgattttcagaaagcaatgttttcatttgctccaaacttgagcgagccgaatgagctggtcttgcctaaggctctgctcttcttagctcatcaactatttttttttgcacttcatgtcatgaaaaatatttttacattgcgaaccaaaatgtaacattagaatgaaactaacacaaactcgggagttcctaatattacttcttgagtttaaaatgctcaaaacaatcgctggctttcttccgctaacactgtgcaagcaaaaccaagcaaactgcccaaaagaacttccacagtactcgaggcctgcctactgcagcaaggaaaaagattaaatcgtgtggaactgtaatctctgagcttttgagcctaagaaagcggaaatctgcatttatgttcagaaatctactctatttttctttgtgactgagtgaccggatattaggagattttgcaccctcgaagtgtaaacatttgtaagagccaactaactgtatacggatcagaagaaccctattaaataatctctgttcaccctctgttcgccgcctgggatttttaagaaaatgttctcacatttcacataatccctatctgtgtttaagatacaatagaaatcttacagggagtctgttaaccagactaggctacacataagagtatgccctaccccggcaggtacaaggccctaatgccagaccaatcctggaagaggtgacagccccaagttcaactgaggatgtctgagcacagctccccctgcacattagggatcacctctccattctttccacatgccatttgcatccaatccccgctcaaccaccccaagcacccatgctccagtggttcctgttagcagtgggcttcctccttccaccaccactcccccagggagaaaatagaatccaaggacggctgagggtgggcgatgagcgcccttctcccacctaccttgatgatgctgctccggcggggcaggccgcccggcttgctctcccgggggagggtacagacgaccgcgctgggggtcggggcgagcgcaacgccgcggggtcccctggtagggctagcccgggcttcgtccccggacacgccgaggctgcagtctccgttggaaaccccgccgctgtcatagcgcgcccgcccgtggccgaggcgacctcccccgccaccgccttcccccactccggctttcagggcgcccttggcgccgagggccgggcccggggaggtgggcagggccccgccggcggcgcccccccggccgcactccgccatgggcgccccgcgacccgcctgcacaaagccgcgtcctcgcgtccccgcgtccccgccgccgcctcgggccgccgcgcgcggcccctcctcctctcctcccgccgccgcctcggccgcttcttccgcttttttttttttttaatttagatgtgatgtttgtttcgagctctcgccttgcgcacggttaaagtcgcggcggcagaattatcggaagattcctgcaggggaaagaagagagagacgagtcagctccggcgccggcggagccccggctctcggcacctggggaaggaaaacacgccccaacacacgcgcctctgcgggcgccaaaaataacccgcgcgggccgggcgcccaccccggggcaacccgcgcccacctcaggggccccaggcacccaccccgaggtaacggggcgcccacgtcaggggctcggggcgcgcttccccggggctcagagcaactggggtcggagcacccgccacgcaggaaaaggcgcccacctccggcgaagggcgaggggaagtggcggccgccccgacactctctggacacgcggaggcggctcccgaggatctcccggccccgggcgggcggggggcgacgcgtgggtctctccggaccctaactccccagaggctgccgcgtgccgagctctgtcacgtcccctcagagccccgttaaggcccgcggcgccgagaggaagcccacggcgggcaggggcggccgggtatgacaatcgccgtgcggccccggggcagctcccggagggggcagcccagacccaccccacccgccggctgctgtctcctcccgagctcggcgctgccccctacaggccgcgtggtccctcctcggtcgccccctgacccaccatgagccgcctagctccctgtcgagattgccgccgtcgcggctgctgtcaccgaggccgggtcatcgggccgcggggacctcaaagccgagtggacgggagccccaagtcattgcctatccttcgcctccccagagctgctgcaactgtcagtcacccacccggaaccccgaggggcaactaccaagtaggcctcggggcccggaacaagggtcccggggctcaggatctcggccgctgcgcctcactcctgccccagccccgcgcacggaactcgtttccttcccacccagttcgggacactcctctctgacttccccagtaggtcagactcatttcatacactgggaccaattcctttcccttgggctcctgattgattcaactagttggaaggatgctgaggcaggggtgaaggctggggtggctggcaggctatgaggggcagaggacatcagcagagcctatttcgtgccctctgagtctccacacacagatttatcattgagaccttcccgattcccctaccagggatgccggctggccctgccggcctgcggggcccagcctaagtcaggctcatcttttgggacaggatctcacttgcagcgctacagccagtccctcttctggttctcacgcacccacttaaggcggagtgactggcctaaaagtccaagctgatcgtgtggcttccgttcgtaaatatctcccctggatctccctccctggagccagacaagactcaaaactccgaagggtgagaccccagaccttccaccgccaccccacgccccaggcctgggcccacccacctctccatcccaggctccgtgggctccagcttcctaccctctctggcaccccagcccttccccaactcgtgtgctttcatttccaggaatgcagtccccgcagggcgcaaaggagaaactaatagtccagaggcggggtgaacttaaagacctggctttcattagcgtggtgttgtaacagactgccaaggagcctctgaggaaatggatttacgtacatatacatactcgcccttgcccctgaagcaacatcaaatactttcatgttattcttgggggcgttttaattcttccgatcctctgaattcgtgtttttgtacatctctttccaacctgggcctacacactaacagaaatagttttttacatcgaaggacaatgcttagtgtttt

SEQ ID NO: 316118 - DNA, 4001 bp, Homo sapiens
aattcaaagcgataatactcagtgaggctgaagctagtgccctaattggtaatggacaattggcgtattagcctttctggaggcaatttgactacattattgaaatatttcaagatctttcctttgactcagcaagtctacttccaggatttgtccaaaagaaataatgaggatggtttcataaagatgcaagaataatatgttaaatgcattgcacataatctttttgttaaaagtgaacaaccagagggctgagggtctctgcctccatgcccacgtctcaaaattgctaactcctgttgattccactgtctgaagagctcttctgtgtctacttcttcctagttgcactgccatttcctagttcaggccaccatcacctttcacttggattactgcaacagcttcctacatagcatcccatccctttccggtttactctccacctggcaggcaggatgagatttttaaacacaaatcaaataacctcccactcctgataaaggtcttcactggcctcccatagccttatgtccaacctccttgacacttatggagagctacggtgattccaatgcctgattaccttgccagtctcctctccagactgccaacagatacacttctgaagctcaaacgggccatgatgatctctgggcatgctggtgttccctctcctagaacacagttcctcacactattctaccctttcctaacctatgttcctcacattctccagggctcagcttagcaggaacttccttagggtcaatctctcctgcttctccagcacttgagtgaaatgtagctcttaggcacccactgtccacagcatcctgcacttacccaaaaccacagcactggccacattatgtggatttaactgtgggtcatcagtttacaggtgtctcgggtcacttctatcattgcatgaccttttcagagaacacaaaagcctttgcatgcccaatatctagggctcctttccttattcatacaccaagacttttttgttcgtttgtttttgagacagtctcactctgtcgttcaggctggagtgcagtggtgcaatctgggctcactgcaacctccgcctcctgggttcaagcgattctcctgcctccgcctcctgagtagctgggattacaggcacccaccatcatgcccggctaatttctgtatttttagtagagacaggtttcaccatgttggccaagctggtctcgaactcctgacctcaggtgatctgcccccctcagcctccaagagagctgggattacagacatgagccaccacacctaaatattcctcaagaaactggctaaataaattacacatctatacaatggatgtgtactttacacatccatctacacaatggatgtatactacacaaccataagaaaaaaaataaaacatttacttggaaaacatcaggaaatagtgtaaggttaaaaaaaaaagaaataaaaatgctgaacaatattctagtatgctgctacagtgtatgaaaaagcaggcatatgaatatatgtgctgattcatgagtcaaatatctctctggaaggacactgggaagggaaactgagtgggtgaagtcaaaatggggagaaaggactttccctgtataatcttttactgtttggctttgttagtatatttcatatttcaatgatagcttactttggatttttgtttaactaagtagtcgtaagcgttttagacaaaactctttagaggagaaacacaaaggctaatcttccaccactcccaaaatgaaacaaaacaaacaccttacaatttccagtgctcttgaacaaggctgtggagaggtggcagcggtgtcttccctgcccggtgatggagcacgtcacaggggagcactgctgccttctctctcgggtctgctttgctcctcttttgcagtccttcactcaaatttcctgagcagcaaccactgtaaaatactccggctgtccaataatacttaggtacgtttcattttcttagaggcaatgtgaaactatgacagtttcttctcacaaagtggtgctggaatcaaccttaaaggaaaagcaaaactacgaatttctacagccaagagtactaactacaaattctgcttttgtgtcccataatattagaaaataaatgaatggatgaactaaagaaaagaagaagaaggaaaaaagaaagaaaatcttctccaacagacttctccttttcctttgacttggaacagccatcatggcaagacagagtgaggctgtttcttcttaatcagtactgggctacagagtccatctacaactaataagttgtaattcatgccttagatctgttttccctgcagctaaaagatacgttcaagggagtaatatgctctggatctcctgtattttctagcactgatcagctaccgtgcattatctaccagcatatggctgtagagagaaggacctctccaaaaagagaactgcaatggagagagagaaaattcagcagaaatcccaaacaaaatatggtaattatgaaacatcttacttcttgtcttattaccaagatgaaaataaatacctccaaacaaaactgctaaatttaactaccaagatttttaaaagtacaccctgaattcaatattatctaagacatggaagaggactaatggtactccaaaatgcttaagtgagaagaaaaaaattcaatctaattgtcttaggaaaacatcagatgaaataatatgcatgttattcccaaacaaaggatgttactaacctgaaataaagatagatattgaaaagttagtccttgagacaatgcgtatgctaacagctgatactacctaaaccacatagcagaatggttttcaaatccaggcctaagaaatacatataaattcagattcaactaaaaattaagagctatcctaattctggcagccataacgaattaccatagactggtagcttaaaacaacataaatttgtttctcacagttctgaaggctggaagtgtgagatcagggtgccagtgtggtcgggttctggtgagggccctctccaggctgcagatggccaccttttccttatatcttcacatggcagaaagacagtgagctagctctctggcctcttcttataagggcactaatcccattcatgagggctcctccttcatgacctaattatctcaaatcatcacactggggattgtatctcaatgtatgaattttgcagggatacaaacatgcaatcataagtttattctatgtcagaacttagtgtcttacctatacaagatgctttcatatccaacatctcatcaagttcttaaaataaccttgtcagggaggtgttattctcattgcaagggagaaaactgaaccttaaaaaaagagacttgcctggggtcattcacgtaataaatggcagcaaccgaactggaacctggaccctcagactctaagaccaatgcatgttctctataaataatatttgtgaggttttcttttctatcccttaaaggcaacagttgttagttaaacttcatttagacagaacattgacaatgcaaccaggttattctgtctgctgataaagaaagtctctatttaaattgtttttataggaacagaacatttacgtgctttttttctaagggagaggagagaatgaaatgggaagagaaaaagactaaaatgagatcaaatacaaataagcatttaattgttcctcttctatttcatacatctttttctaattcaagtcacttaaatatagtcaatagcttttgtgcttacatatgtgccagacacggatctaagtacaatctgggttcctactctcaaagatctcagaatgtagcagaagagccagaccttcaaataaaattttaccacaaagtttcatgagcattagagttaaaaaaaaaaataaatggcaatccagaggaagaagtgaatgcatcttcctgggaaggaggttcagagaggaatggcttg

SEQ ID NO: 316119 - DNA, 4001 bp, Homo sapiens
aaaagacctgttctgaagcatgcccatctggcatttcccaaggaactgtagtcaatggctgataaaacatacatgatcataactataaagaaatttcgcagccctctccttgctcaaaagcaaccggggcctatgaggacaatgaacctggaagacacccaaaagaggaggtgagtaaagaaaagcctgcatttgaagccaccactgctcttcctcatgcacagaaagcaaagatcgggagttgcatgaggtcagattttcagccaccaaaaacaaacaaacaaaaaaaccaaccaaacctcaaaaaaaacccagacgggtctagggaatacttgggagtttgtctggtagtctgtgggtgaacttcaattgttatgtctccgagtgaaataaaggattggcagtagtccatcccctgcttctaggagtgctttccagtatcagcatttgtaggacttgctcagcacaccaggccaaactcactgtccaaatatccttccctagaaaacatacaataaccaccttctgagtggaaggaagaggacacatttaacaaatgatgtcaaggcataaaacctccggcagagagacagtggctggagcagaagtgcttttcaaggctgcagttctaaatcagtcaggcagacacctgtatacatacatacatacagagacaaagcttcaaacaccaccacctcatcacacctaatgactgcctgtgatgagagtctgcattctctattctggctttctaacaacaaaaatgtgtctttatactcagttctgattctgaacctattctctaatgcttatccattttttgtttttccaatacacaaggtcagataaatgagaaataaaatatttttcagttttaattttgatccagatctaaattgtttgtgacttttaattcattgcctttgatttccccttcaagtgatttaagacaatgcacccctcacatacacataacaacagtaagaaggataatattcttagaatggggctagcaaatataagcaaacaaacaaaaaaaccacaaacaaaaacaatgatgcttctgttttcatgagtccttttaccaatgatgcagtgtactgcaatctctttaaagcagctgcttcagtgttaagtttttggtttggaaataaaaaggggtcactgacaattaatttctcagcacaatagaaaagcaacccaaccccttaacaacactaaaatggcagaattaaacacagtgggaacaagtaggaatagacgaatacctgggattgccagattggaaagggggaggttgtggaggtgaggggggagcgaggccatccagtcggcattgcagacctccgatgatgtctttgtcccgctggggttgggggagcagatggtccccatcctgagtttcctcctggccttcctaactgctagcatccctgttgttaacaaactggccagtctcagcccagtgccactcactcagtgatcatcacttcttgggctctgtggacgtttcagggcgacgcttgccacgccagtctttccaaaatgcctttctggctgggggacggggcaaacagatggatccttacccactagcactcacagtccccactctctccggcccagcctccgctccactcccttaatctgctcagtcccagctccgttaaacttcttatgttcccctctggagatgggggaaggtaggcccctagagataaatcttacataaactgaaagtccgaggagcagccacacccggagccactcacaagacaggtgcccacccagtgtacagacatgcctgcgggtccatacacaggtgcgcgcccgggcgcgccggctctagcctgatttatgtttctatatatgtcactgggctggtacacaagctgggcctgcctgctactcactcccccgcttctctgcacagacgccccctgccctgtggcttcctgaaagacacacagaagtgcagccggcggcaccaggactcccagcagcccctccccgcactgccgggcagatttgccgggctaggcggcccgtgattggccgctggcggagcgcgctccgattggccagcgctctccgggctgcccctctgtcccgctcccacgccttccctgctccccagtctcctccctccgttactcttgccttccagtgtgtgtgtagacagacgccgcggcagcgactgcatttgtggaaacttgcaggcttcggccagtcggtcctcagataggtcctctttcctccagcccctcacacagtcagcactcagatgttcaccgcgaccgcaaatgtttccttccttctttcagacacgcgcgcacacacacccatacacacacggaaagggttacaatttccgtaaaccacagaagcagcagaaatatgataggtaagaggcccagaaaggtgctgtatctcatatttggatgacaacatctaggatggtttgtgtttcaggcattacataattaagcttcacctacacatcactacgcagcagttctgtgcagttattcccattttacagaggaggcaataatgaaacatatttgtattgtcctgttgtttggaactttctttcaaattccttgtcgcatttgctcttcacagtacccccaccaggcagggagggttgctgacataattccctttagtagatgaaatgaaagtctggaagcattcagggagctgaatgtggtggcactattggaaatcccattttggaaagagtctcgctggtatggaggctcgtaggcatacaaacccatttccctgctttctgcagtgttccctactccttcaaatggtacttctccgtgacggaaaactacgaggtctctgctgatctgaggactttgcacatgaaaatcacagggacaccgtggcaaacagacaaatcaagaaaagcaccctggacttgatggtagggacccggagggcttgacggtagggtcctggagggctccaggtcaggcaggtcctcagtaactcaggaggaccttatgggaaaagaaggcggttgcctgagctaagacaagactgaaggctcatatatagatctgtaggtcagctaacatttaatcaccaagtggtcccaccttatctcctgagccccaaaccacctttccatacacataactcctgctgcatagtggccccttttgacatcttatcaatctttccttttccgggctattaacattcatttaaacctgctttgctgcataatagtcccagtttttctgttttgtttgtttggtttggtctggaggattatcacttgtatgttaagaaagtgtgtaatatttttcatatatctcctaatgcttaaagggtacttcagtataaacgtggtattctttgtttttaagtacaccacaggatactggtaatatgtcacctacctgtttgcatcaacaatgtttttgggctttttcctcccacccactctcctagaaaaatcactctgtgaagtaatatcttaagatttatttttgaagtgacagctttcagggcttcccttcagcctaaaatttccaaacataaaactttatggaagcggtataaggcaaacacaatgtattctttagtctctactgtgaaatgttaattttagtgccttttttccccttatttttcagctgttaatgaaaggaatgagtgatatttagaaagcatcaaatttggccgggcgcagtggctcacgtctgtaatcccagcactttgggaggccgagaagggtggctcatgaggtcaagagatcaagaccatcctggcaaacatggtgaaacccagtcactactaaaaatacaaaaattagctgggtgtggtggcgcatgcctgtagccccagctactcagggggctgaggcaggagaatcgcttgaacccgggggggtggaggttgcagtgagctgagatccgccactgcactccagcttggtgacagagtgagactccatctcaaaaaaaaaaaagcaaaaaagc

SEQ ID NO: 316120 - DNA, 4001 bp, Homo sapiens
cactgcactccagcctgggcgacagagcgagactccgtctcaaaaaataataataataataataatgacagtcctacttttcctttgtaacaaaaataaaagttacctataagagttaaaggtaaataaaatttgtaattttaattaagaaacactaagtaaacatacaacttccaagaagccgggttccccactacctggttataagtaagtctacaaacctaaatgagcattgtacagcgcttactatagttcataattattctgtcatcagggacaaacattgtaaagacactttttcctcaaagccttagcattcaatttttttttttttttttttttttttttgagacagattcttgccctgtcgcccaggctggcgtgcaatggctccatctcggctcactgcaacctccgcctcccgggttcaagcgattctcctgcctcagcctcccgagtggctgggattacaggcgtgtgccaccacgcctggctaatttttgtatttttagtagaggcggggtttcaccatgttggccaggctggtctcaaactcctgacctcaggtgatctgcccgcctcagcctcccaaagtgctgggattacaggcgtgagtcaccgcgcccaggcagcactccaactttttatatggattgttaactgtactggttcttgagaagccagactgagcgcttatacaattagtccaaagatccccaaacaacatttaaaggctgtctacaaattcaagctaaaagactgtgtacaaattcatttgtgtgtcacaaaacatttaatactgaaagagattcttattcaaataggcagtgtgtaaatgtggggtctgttaacagttcaaattgcagattcctttccttctttaagttttcattgcaccaccacgaactaaaccatttaacatacctcagaggtctctgggtacctagtctctcagaggcctttggaggcccacgaaggcttatcttaactaaaattggcagggctggctgataaagttaacggaactccccattttggaggcagacttagtaatggtcaaacgaagaaactgttgtggtctgttcttaaaaagctactagtatttagtgcttcacagaggaagtaaagaaagcaataatccgagatgaggaggagcaaatacaggcgtggcggtagttcaggactgagtctacaagggcggttctcaagggcgtcacaaaatcctatggaaggcttggaggacggcactcctggatctgagccctacgtcccaaacaccttcaatcgtattgtgaggaagaagaccttttacacactccctgctgctggcccccggccccctcgccccacctccgagtggtcacatcacacggcgggagccgcggtcagcagctgtgatcacacccccaggaccgtgctctgcgggctgggctcgaagccttgggacgcggcacttcctggttggtacgggatgccggtcccatcgcccccaccagcccagtcatgccaccgcgcacccgaaccaagggcgcccggatgacctggggacaccacacacactgcacccgaagccctgtggcggcgaggcggtgcatcctgcagaggacgcctgggcttcagcctgagcctgcgcggctctgcgctccaggcagccgcccgcgcggcaaaagtgcgtgccagagttgtcagctttcaccctgcaggaattccacccgaaggcgtgcgagggaggcccttggggatcgctagggagtccgccgccgactcactcgctgaaatcccgtccaagttgggcggggagcggccagctgcccaggttgggcggaggagggacggagggcgagggcagtggaaacccggctcccacgggcgcccggtgatccgggtctcggcgcggctcctacctgcagggcgaaggggccgctagcacctgcgcgttggcggcggactctcagggctcgggtgcctctggcacagctggagctcagcgggagggagggagagagggcgggccggagggggctctgcgctgcgcggccggcaggaactctccgcccggattcgccccggattcgcaggggtggagcgaggcggtgccaggtcccggggcgtcgcggtgccggctggaggccccagcggggcaggtctcgcgactgggcctctgatcgcccgcgttccttgttctcttttcccaaagtttcataactcgaccgcatcaccctagggaatgctcgctattaggaccattatcaggtcctctcgagccgccaaggaccagccacctttcccggagctttgcctatgatatctattcttcgactactgcggatagtagccacaactggtccaacttataagtaaggaatcagcaaatcaaacggctaaataacttgcctgaggtgacataattaagagactggagctttgctggagtctttataagccttcttgcacctccttagggaagtgttatcgccaatttacaggtaaggaaatgaaggctcagaaccagcccgaggtcacacagcttagatggagggggacgggaatttgtgtcccgatgtctctaaaactggttataattcagaaatcttagcataaaataataaattgggagcaaaacagggaaaagacccattccacctatggaaccgttcaaacacggcaattttgctgttttcagtccacttagaataaagtcttaagaaaaagagaaccagttgtcatgtggcttgaatagcagccctttgggaatgtaattttgaatataggccagttccaacctcattacacgatattgcatcccgccaaagccaggggaagcaatggcctccccatgcaccaaactgctaataacgtcagccactttaaagcatttagtggatattacacaactgcgactgaccaagttacataatgtcttactgcacacatggcattgcatgaaatgaaaaatataatataccagtccaaattaggggaggggggccaaattatagtctggaactcagttttcctgtaacctacagttgctcagccctccttagaccacatttttgtctcttgagcacatcttttcctaatgatagaagagtcacacagccctcactctttccttgttgacataaatgattgatgtcttttgaatcctatgatactgacagatttttacaattaaacacatgactctctgagcagagtattgcctaagaggagtttagtaagtttcagacaagcatgttactggaaggcagaataccctctctcctcccctctttctcaagctttattagtcacagatggtctgataagtcttgtgcacacacgtaactgcattcttacaagcttgtctttagaaattataatgcttttggttgagaagcagcagtctataaaattgcatcccaaattcttaagtgtcactatgaaaacatttggcacttgcctccaacaataggtctttctactaaatctaattagaaataaaattatcaaggccaagcgcagtggctcacacctgtaatcccaacactttgggaggccgaagcgcgttgattacctgaggtcaggagctcaagaccagtctgggccacatggcgaaaccccggctctactaaaaatacaaaaattagccggaggtggaggcaggttcctgtaatcgaagctattcgggaggctgaggcaggaggattatttgaacctgggaggaggaggttgctgtgagttgagattgcaccactgcattccagcctggtgacacagcaagactctgtctcaaaaaaaaaaaagaaagaaagaaagaaagaaaattatctaagtgcccttacaataactgaatttctgcctccctgggatagaggaataaaataggaaatgccatatgttgtttagagatgaactgaagcttatggactcccaaacatgaattttagaagtagtatgattttgtatgtaattattttattttcctgagagattttgtgatttttctttccaactct

SEQ ID NO: 316121 - DNA, 4001 bp, Homo sapiens
tcccagttaaagtctccttgggtgtttcaacaaagaaagacatttttctggggaaggctttttgttctgtttttcctttttaaatttctctacttccaaatttgctgaaagtatttactttctactttccagatattatgttagaagaaatatttttaaattatgcaaaagtttagttcaaatttagaggaatcacacgggttcagaaatccatttttaaatggtcacatatacctaacagaaagaaaagcatcctgtaactgatagaaatccatctgaatgctgaagtttctcaagctaacaaagcaagcactgttttgtagaaagataggcagttcagcctgctgacgctttctgaaacacttaaagatgaagacaaaactatcgctacatggattagctggactgcaaaccaaatgtcactttctgaatgtaactctgaaatagaaatttctgtccttaggcttaagaaaagttcaagtagaaaagcactctattataaacttgggggaaaaaatggtgccaagatgacttaacaaaaaacaaaacaaaacaaaaaggacattagaaggtcatttaaatgcaagatctaatttcagagagttgagcacaaagagcacaaatgtggaaaactccaaggatttttcatgtgccacaaaaggcagcaaagcatgtttagacagacgtggtgaaactctctttaatctggctaaatataaaacgttttgttttacacagcttctgaaaacgagagacagcaccgggctcaagaaaagggtaggtaaggggagcagctgtgtgtccacagcttccccttcagatcccaaaggaagaaagctgccgcctggaggtactgggtagccaggcagccttactgaaaacaactaaggttttcgagcgagcgttgtttttggcaagagggaggtgttaccggctgcttcctggggtgctggaaggaatgtgtcaccatcaattagaaagtacactaagccccgtgtttaggtcacagaaggagtactgcctcgtccatcaaggataaatccatgccaactctcggaaaggaggggaaaggagagctgcaggaaaggtgttggtgcccatgacctgcaagtccaaaaggaaactccaacttgttctgcagggaaattcgggcacgctgagttcaccgagaactccaaggagtcaacgagggcgggtgcccctacacttccccagggaccagcgccgcccgaccgcaattctggggaagaccccggcggtcctggagaggagggacaggcccccactactcacctggccagccccgcggaagggctggtggatgaatgaactgcccccccgccggccgagcctcgcgggacagcggcggaccgcggggtgctcacctgtggggatgctcgagggcttctccgagtccgcacccagacagggattccaggggtggaggacgagcgccaggagcagcagctgaggcttcaccgtgcatccccccatattcggccctcgagggccgcgcgggctcaggcgcccacggccccgcagcgccgcgcttctcgcgagaacgcagagacccgggtccgccctgagccgccgattgcgggcgggagccggcgggcaaggcgcgcggccggcagccggagcggcgcgtaacgcagctgagtgaggtcgtcggtggaggcacggagcagcaggcgcccggggcgctgcggaggccttataggctccccgaggggaggcgacggggcgggccgcgccctggctattggccgccggctgacccgccgccgctgcgcgcccggtgcggtcgcctcagctcgccctcctgggccccacgtctggactgtttgctcagcgcggacgctatttaaggagctgcctgcggctacgtgtggaggctcacgcagcgcttctggctggaacggggaagcctgcacttagctttgggagtgggtttgggagagggaggaggagccgccgggagtctggcgggagggcggtgttcccgtctgggttcctctctgctgtcccagccccggtagcttccacagcagcctcgaagggtgagaatttgctcttctatggacttggatactccacccagtctgaagtgactgcaaatctgcggcaatcttggctgactgggacctcgccagactcttaagccatggaaatggatcgcccctcattaattcaggggcaggttcatcaccctgtaaaaggaaggccgtgattttattttactccgtaaaccgaaagttttattgtccagtgaacatttcttgctccgccgcttgtgccaagagagccttagactctttccagtaatgaggcttgtaaatcctgcggaatcggagcccaacgtgtgtaatgccggggctgtgcttacaagatcgtgctccagtccgcatggaaaattactcccaaagacgtggtcggagaggtcgagatctctgagccttggcccccactgcttccacttttgactgatgtctaagaaaattcccttttttctgttctcacattttaactagccaagggtttaacttgttggaatgagtgggagcaaaagcacaattaagaaaaaagcttgacagttttgcctcatacatttaatgacataagctattttataggagaaagagaaccaaactgctaccattctggaatctcctgcctaaattttcgtgaaattagaaaaaaacagaatcgagacaacacccgttataactctgggcctttgaaattaagacagaaaattatggaaaaatgtgttccattatgatcacgttttgtctaaaattaacatatcaagataacatgaacttaatgctttcatcttgatagcattaaaaacaggtggaaaaccctgcaaagaaatcttgcctgggatgtgacattttagaaagaatcatttcctgtgcccagaactaagccagttattactctgttttgaaggtttggtctcagttttttaaaagaagaggaaaactggagaaagttctgagaagagtaacaaataattaaagaagtggaaactatgacctgtgagaagaatgaaataaggtttatttagtctgaaggggaaaaaaaaagctaaaagatggattccttaataacagcctttcatgtgtggcaagtacagcttcataaaactaggcacaaagcaaacagcatcagtcctctgagtccaaggactctgctaggaatggctggtgttttggccagatctgtctccagaaagccaaacctgcaattgccaaactccttgaacttgacttcttgcttccttggttctccagtatctttaagaacttggagagctacaacctggcttcctgccctcccaaacccccgttcccctcatgaatgcttaccggcttctctgcatcacaggtgtgtgtgtgtgtttaaactccaaaagtccactaataatttcaggttattttgacattcttccttctctgttaagagtcacaacatctgtgctgtgagactcgtataaagcaagtgttgggattttcaaatacctagacatttctaacagtctgaaagagccccaattctcaaaccaaatccttcctgctttcttacatttccagccatctgctgaacatttctacttggatgttccattggcaaaaactcgatatgtcttttttttttttttttgagacagtctcgctcttttgcctaggctagagtgcggtggtgcgatatcccctcactgcaagctccctccgcctcccgggttcacaccattctcctgcctcagcctcctgagtagctgggactacaggcgctcgccaccaggcccggctaattttttttttttttttttgtatttttagtcgaaacggggtttcaccgtgttagccaggatggtctcgatctcctgacctcgtgatccgcccgcctcggcctcccaaagtgttgggattacaggcgtgagccaccaagcccggcctgatatgtcttttaactcatcaaatccagatcccact

SEQ ID NO: 316122 - DNA, 4001 bp, Homo sapiens
gaacacacatgaaatctctttacaaaactatacatactgcacttccttcccccactccctcccacaaacaggggctaagaatatactttgtgcttagtgctgggtgggatgtttaagtcataggctttaacctccaagagcttacacaacctgccaacttcctggtcgggaagttgggaggtgctaaaatactcaggatactatatacaatggggatactaacagcacaaacaacagtagtaagtgctatagggttcagaagagggagagctacttcatgctaaggcaatcaaggaaggcttccaaaaagaggtcacacctgagctacaccttgcagcatgagcaggacttcaatacggaaagagggaggcaaacaggcattttgggcaaagggcccaggtgactgagggaaggaaggagggcgttttcaggaccagcaaattgttaggtggggcttcagtgaaagggcactttttgaaaggaatttatgaggtactaggaagcttagtaagagaaacaactaattttctgcttaagccagacttcatggtataagtagaagagaaaaaggaagtttaataatggaggtaaagaagagtatctgcagggagtggtaaaaagaccccagaaaatgagaaaacctggatcccaggcctagctttgccaatgaggggcttgggtggccacagcaagtcatctaacctcgctggtctcagttttctcatttgtaaactgaagcagctgaactggctgacctcaaaggtctctacagccaaaactagaccagctgtatattatttctgccattaaaacatttatcatgggaggaatgaaggggggcaggatacctgtattccctttccatataggtttctcttcctgaacttaaaatttcctcttcctaaacttactacctctctctctatatatatatatgcctccacattacacattaacactttactatagaatttcattacataattcaacttaaaggaaagctgattacaaaggtggtggggggtgtaaaagtacttgcttcaagttcagtgtgtgccccctgtcctgaaattttgcttctggctcacaggttcttcaagaaatttatgcagcacagctgaagcctcatacaagtgtatccaacaccgtggctggagggaaagatatcacggtataagccataaaatgtgacatagtaagtaagtaaaggaggaaaagtgagaattctgttactcatctaaacgaccgcttccttttaatagtaccaaatgaagaccgaaatacagtaataattgaaaagttagggagaaatcttaaatttttttaagtctccacttgaaaatgcagctgaaacacggaaagttttttggcagtgaaattcgctgaaaactgacatttttatgccgcatccagaggtccctatgctccaggaaaggtaccaaaaacagcacggatgggatttcactacagccctattgatcctatgcaccaaaaggccaaaggcaaataaaccagtcccagaattaaaacaaaacaggctggttcagaaagcctcaccggcagccacccaaagttgaaagaagaaaacttaatgaaataccttatttcattgcatagaatcacaattcagttaacaggcttattgtttaagcagtgtaaatacgcgatttaacacctgcgggcactgcctgccgggactgggcagaagcgtgcccagaggacggcgggcgccacactgcacagccaggagacgagacgcgagcgaggggacccggagatactgcccccgagccgccgcgcgcccccaaaggagtaacgcttcgctttccatctgtctgtccagccttccttttgggccctatccccacccccgcgtacctgccgccaccgctgtcctgccttcgagagggcagctcccactggagatccaagtacctgcaggtccactctgcggctacctctccgcgcccgcgtagccgctgcgctcgcgccactgcgcatgctcggccggcacccgggcccgcaaactctgaatccacttgccgcgttttgcctgcggctcccaggggagggaaagggaagcccagaacctgggtttaggctaagggtgaaagaggagttgcaggcgctgggagcgtggatggggagaggtggacgggcgctgcggcaacgttatctctaccgcccacagttacccaagtctaaagatgaccacctacaccctgggaatgagtttagcacagcagttctcaaacttgagcgtggatcagaatcacctggagagctttttaaatcacagatcccaaacccggaaactgagtttccgattcagttaggtctggagcgtagcgcgacagttcccatttctaacatgttctcagcgaaaactggtgctactagtctgggtaccacactttgggacctgctggtcaaaaggaaaggtatacgttattaaaggaagacttgtttctctcccctactctttttttttccgtttgtttcacggattgcttccttttcctttaacagccacacctgattaaaataaatatataactaaagcccacactcaaacaaaagtgggatattttctctcgcatgtgagtcaggtaaatggaatgctgcctcaagagttctcacatactttgcctgaagcataatccgtagttgtggtctgtccaactcagtccagagaacagaacaaggttttgctgcccctttaactcaaagtcccacgtgccccttctgcgcctaacacaatatccaatacagaataggcacccaaccaaccctgagatggtaacaatagaaaaaataaaggggggaagttgaaattattttaagaactcaaacaaattggacgagcaatgaactatgaaagtaggtgggccatggagagggaagataaggaatttttcccacctgccacctagagaatcaggtgaatttagtattcttatctgatttttcccacctgccacctagagaatctggtaaatttagtatccttatctgatacttatttatctagatatgcaaggggagttaagtaagttctcacaaaataaagcaaaatatttccttaaaaggtaaacatacatctaacatatgacccagccatttcattcctagatgttatccaagagaaattaaaacatatgcttacacaaaaacttgaacaggaatgctcatagcagctgtttttcacaaaagccccaaaccagaaggaacccaactgtccaacaacatgtaaatgaaaaaacaaattgtggtatatttatacaatgcaatactactcaacaataaaaaagaagaaatactctcacacaggactcaatatggataactctcaaaatcggtatgctgagttgaagaagctagagacaaaacatattgtataatcccacttatatgaagtacaaactaacctataatgacaaaacccagattagtaattgcctggagccaggagtggagggaaggataaactgcaaatgagcagaaaaaatatttttggagggggacgatggaaattttctctgttttgatggtagtgacaagttcacaggtgtatacaactgtcatcgctaagttgtacactttaaacatgaaaaatgtgtgtaaattattcaccaataagtttgataagagaacactttttcatgaaatactcttatgatctgtttttttttcgtggtaatattgaccagggcaggttcatgaggaaacgtagattctaaatatggtataacctgatttgggaaaggtaaaataaaaagtcatcctctgtaaatgaagctaaaaataatgcatataaaatgtctgtaacaaccctctgtaaaagcagccaaccctaagatatgatttgtaaatataccattgataaaaccgtttcccaaaattgtttccaagtgtaaaataataactagagtatatcattagaaatgcacaaccagggcccagtgcagtagctcacgcctgtaatcccagcacgttggcag

SEQ ID NO: 316123 - DNA, 4001 bp, Homo sapiens
ctctctcacggcaagcatcataactagttttaaagaaaggaatgatgactacttaacactaaaatgtgaataaccagtaaaccaagcctgtaaagtgttaattcttccaactatatttacattactatttaatcaatatgtatacatcagtaaaacaaatgaatcacatctgtttctcaaaatcatactaaatgaaaaaagcaaactgctgaagtatacatacaatatactatttattataaattataaaaacacaaaatactatatatgttgcttatgatcccatacctatgtagtaaaacttaaacatacatgagaataacacaacaaattcagaatagtggtggtctatgtagagggaggcaaggagcagggcttgcagggtagggctgaatctgttacatcttttttttttttttttggagacaaagtctcactttgttgcccaggctggagtgcagtggcatgatctcagctcaccgcagcctctgcctcccaggtttaagcaattttcctacctcagcctcccgagtagctgggactacaggcacccatcaccacatctggctaattttttttgtatttttagcagagacagggtttcaccatgttggccaggctggtctctaactcctgacctcaagtgatctgcctgcctcagcctctcaaagtgctcagattacaggcatgagccaatgtcctcagcctgttacatattttttaaagatacagttgaagcagttatggcaaaatgctaatgtctgctcaatctaggaagtgagtacatggacataggttatattgattctgtattttagtcttttgctttaaataattcatattataaaaaattattcttaaagagaaaaaaggatgcttcttaatccaaagccacaagccactaataaaggaaaatcaagccataaaaataataaaaaataaagatgaccaagaatatgtttttgaacaggggaaattttaccaaggctttaggaaacttaactacttcaatcttgagaaattaaaataattaatattattgtgggagaataatttattgaaatgttaaattgtgtttattctttttcctcctcaattaaagcaataacacactgggcgtggtggctcacgcctgaaatcccagcactttgggagggcgaggtgggcggatcatgaggtcaggagtttgagaccagcctggccaacacagtgaaaccccgtctctactaaaaatacaaaaattagccaggtgtggtggcacacgcctatagtcccagctacttgggaggttgaggcaggagaattgcttgaacccaggaggtggggaggttgcagcaagcagagatcgcgccactgtacaccagctcgggtgacaatgtgagactccgtctcaaacaaacaaaacaaaacaaaacagcaataacactataacactttcttatctgagggactctggcagcacagaaggcaaaaccaggctagaatctgtggttccctcagtctttgggaagaagcatgaacctcctagagggcttacttaggttggatgtcctggcaatcggatcagggggaagaggccacctctgagaaaccactagatgaggaaggcagtgagagggaaagattgcccccacagggaggaagggaaatctctaggtgccagcaagtaagactgctgcttgctgccctaggagtggcaggtgcaacagaacctcaccggagagaatctgccgactaagccaaggggtgtttcccaggtagccactgaagaccgatgatggagaatagaagagcttcctctcagccttttgctctacattagacccaggacaacagaggctgaggagcagattccaggtgcctgagaaagacttggcagtattcgggcaggatgaagcatgacaataaaaataaagttgcttcaaagaatatcaagaaatgtgatctttcttttatctgacttttatggaaaaagacttgatagtgttcctatggagaattgactgagatcagaggttctagaatatttcagtatctctggtgagtagaagttctactggtaccccatgtcctcttcttctttgcaaattattgtctctctcaccacagcccttcccttttcctatgttacttcccattttcagccctccattacaagtttacagatcacaaggtcactgaaataaatcactatgtgaaaaaaaacagctatgaaatagttgaagaattttccttctagtttaaaggaaaacctggaaaatattttcatctatatgtctagcaatctccttattcaacaacatttcacaacagggagctgtatcattcattttggaaaaagtaagtattcatattccatatcaacctgtccattttttatcagattttctttaactggaatgtctactgactgttgaatataagtatgaattgggatatcatttattttgttaaatattagtctcctactctacataacagccttgactgtcctttggacaaagggtaaaatatatgaaaatggtgcaatataattcaaagatttcctgagcatccttcagcactaaaataactgagctcaactttttcattcattcacaagggacagctatgatagaaaacttttcttaaaaattggtcgagtgcagtggctcatgcctgtaatcccagcattttgggaggccaaggcaggcagatcacttgaggtcaggagttcgagaccagcctggccaacatggtgaaatcctgtctctactaaaaatgcaaaaattagccaggcctgatggcatgcacctataatcccagctacttggggggttgaggcacaagtattgcttgaaccagggaggtggaggttgcagtgaactgagattgcaccactgcactccagcctgggtgacggagtgagactctatctcaaaaacaaacaaaaaaaagtaattaatttgattgccaacagcctggatttgccaaatcctgggctattttaaaaagacaattttattttcaaacacataaaataatttcccacatgcttagacaatcctagagacctcgagaacttcaattatgcaccattatgaagtgttaagccaggaacagcgcaccgggggtaaagtgacactggttccaaactgactaactcttttgtgatcttttttttttttttttttttgagacggaattttgttcttgttgcccaggctggagtgcaatggcatgatctcagctcactgcaacctccacctcccaggttcaagcgattttcctgcctcagcctccctggtagctgggattgcaggcgcccgccaccacgcccagctaattttttgtatttttagtagagacggagtttcactatgttggccaggctggtctcgaactcctgacctcagccgatccacccacctcagcctcccaaagtgctgggattacaggcatgagccacggtgcccggcttgtgatctcttaaagggaggcctgacaatctcctacaaaaacaaaaaataacaatacactgttattttaacattgggacttttttctgcttcagtcttcccaagtatttaccatttcattataccccacattgccaaattaatgcggtctctgttctccactctcaacttgacagcttggaaggccgattcccccatatccttaacgccttcccattggcataagacttcatcacctctgtcttttcctttgctcagtgtcttcatttcttatgtattattccgttcatgtacattaatttattcttggttatgtgttgtgttgtaatggtcttattttgctattttattttcatcccaccttcctatcattgtttgctccttgcaggtaaaggatattttatatttttatattcccactggccttgtgttgtatatgtggggaaaggttagtaaaattcattaaaggtaatatttctctaatatttctcttcacagagcataaggagtactagataacaaagggccaaataaaacaacagt

SEQ ID NO: 316124 - DNA, 4001 bp, Homo sapiens
tgtaataccgagaactgagttggaaacatttggaaggaaagagaaagagggaaccctagaaacctcaattctaatagaagaacatagtcagaaatggtagctaaacttttataattcttaaagcaattgaggcccagacccagggagtgccttaaaatcagcacttagaagaaaaaataggcagtcaggcactcagtgacatattcgggagtttaagaggtttgtttctgcagtttatccctaaccccaaagtactgctctattctctttgagctcgtatttccagagttccaagcaatagtgccttttacagcactgactgttaagtcatcacagaggcagacttttttttaatggctagacaaggccaaaccattagtaacatttgtagctatgcaaagaaacctaataagggtaatcaaatatcatgctttgggtggtaaactgatctaaactgggatcataaaagaatgttatcctcctcctccacaagaatacaattgagcaattggttgattcattgtaaaaggactggcacaaaggcatagcctttgttggactccaggtataatagaggaaaggcaattccagttcctaagaaagctatgtgttttgttttaactatgtaaaattttcccagggcactcactttccatggttaattggtcataatgtgttcacttctctaacaagagtattctatggtgcgtacaagtaagttgactgcttcacaaagctgagcaagtcttaattctctacttaggtttaagagctcaggtcactgcaaaaagaaaacatacttaactttttaaaagctggcctcttttaagaaaactcaagactctttaattctttggcactggggtctatgtaaactgccagcagtatcagtatccaagtttcctcaacatgcatcattcaagatcttctcagctttacacagggtgggaactgctcattttctgctttactaagaaaagaacttaaggtaaggctgctacagcttctagggctgcatagggtaaagatatagagttttttggccagcctcagaaaccattaaaaatgctcactaaagagcaacttgctcacttgtacactatttataagaaaattatctttctgaaagctttcaggcccttcccaaattcaatgaaacagtgaaaagcttttaagcaaagctgctatccccaagtacattttggtacttggaaatgctgaagaacaaatataatgataaagaatttatttccatttagatattttcttcagactccagatgcttaaacagaatcttacacattcctagtactggagatattctgtattactatgtcttatctgtgaaatttctctagaaaaaaagcagagttttgcttatccacaattaaactatagactggaagagctgtttccatcagactgaaagcatcaagtttccaagcaataatacacacacattctagatggcacagaaagagtgcattcagtcacttcagcattttcctaataatttatatccatttctgaaaggaaaatcaaagcccaatcaagaattatgagtctaatatttttatccaaccctgaataaaccaaaacagtcctttcttctctaaccagtggtgcttacagaagaaagttttcaaacagaaaaatgaagagataattaagaattatattatcttcacaccaaggttcctatttacattgattatgcaaagccatctagagtcccaaagcaagaatgcatttaaaaaagaaatactatgagggtgtttatctcaatttaacaattatatgaaaaagcagcctggaatccgaggctgtcttactgctattgacagagataaatttttgtatacctgcttctgctggtcttatcacttgagatttggaagtccagaaaaacaattcagaagacttaaaattcagtcttcctaagctgtgtctatcctctgccaaagttagtgtttgaccaaagaaaagaagcaattccacactgaagtgttctgcctattactacagatattaatcttgatggaacttactctcagtagaaaggccaatctgcaacatgggtgtggttcagaaccataaaaaaatcaagaggcaaaaatgtggatgtcatcatcattctatttgattatagctggggagcttaaaatacattgtggtattcaccttaccccttagattttacccaagcaggttttcttcctatggaatgggactaccctatgagcttccatattcttttcataaatgttcctttgccactttaattttaaaatggcaatgttgagctgggcacagtggtatgtgcttataatctcagctacttggaaggctgaggcaggaggaccacctgagcccaggagtacaaggctgtagcgtgctatgataactcctgtgaatagccactgcactccagtctgggcaatacagcaagaccctatctcttaaaaaagaaaagaaaacggcaatattgttttcatcatgtaaaaaatcatgaagaattaattcccagaaataattaggaaattgtaaaaccaaaaacaaacaaacaaaccctaacatcttactgaatttcaattagagtcactggactaatttcaagcaaatatccaaaattatctttgaatagtaactgaaaacatgttatagtattatacagcgttaaaaccagaagatgccccacgggttatagtccaatactaccatttaagtgaggcaagaacagtttcacttataaaatgtataatgcattttcactgtctggttaattatctgaagggaaagtctaaaacatcttttatgatggctccataaaggtaaagaatagatgttataaaactgcttcataaagtgaaagaaaaagttaaggacttttataagccagttttttttttaagtacatacagtactgtatgatcccatttatggaaattctagaaaataaaaactaacctatagtgacagcagaacaaaggttgcttggaacagggtgaaaggagggatggaaagcaaaatacatgaggaggctttggaggaaaaaagtgttctacgtcttgattgtggtggtgattttgtggatgtatatacctgtcaaaacactgccggctgtccactttaaatgggtacagtctagcatatctaaattatacctcaatgaatgttaaaaatacacactcacatttaaatattttaaaggacatctgtattgaagaaggcttattcttgctctttatggccacaagctggtagaattaggaccactggcagaagaaataccaggagacaaattctgcacgaatgtaaggaaatattctgtccacgtggtccagagacaacccggactgcaacagtgaggttctacacctggaacactggacctgtgtgtccaaaagctcagagtcaattttggaggcacacaggctgttgtctttgggaattcctacatagaaagttggatgcggtggcattaatgttttttgcattgaaaattccattatttcaaggagaccacttacggatggctgtagtcctgctgctgttgcatggagttctgctaacctcttgactaaaacatatatttgctctgatttcccccaggacttcacttcacaggaaaaaccaattatctgccctatgtgtccttttaaaaaatggatcctgtgtggttattttctgattgttgaaaagcaatatgcagcattaaaagtatttggaaaataataaaatctaaattgctctcaagcacaccattcagaaataaccaaggccaaaatgttataaattttcaatctttcttctatgcacatgtgtatgaatatacaattttccaaacaaaattgatatttgctatatatagttttacttaatattatttaaagttttcagtttttgaaagtatgcctttcatgcttcataatagtccatgtatgactataccatgatttatttaagcattcatattgctaactaaggtggtttcctatgtt

SEQ ID NO: 316125 - DNA, 4001 bp, Homo sapiens
agagcatgcaaggcactataccaggcactagagcacaatacctagacactaggggagacagacaattaagaattaaatatattattaaaaatactctaagtgctataaataaaattaatgttgctataagaaagggttatggggcactaacttagatggtggtagggggtttaagaaaagtcagactaggagatgaaggaagtctcaaatcaactagtctatggaggtatggtgggtggggtgttggagggcatcatagatagagggaactccataggtagaattcctgagctggaggaacgtccctcattcaagtaaaggaagacgagtgaggttacagagcaaaagagggagacattcttagagatgaagatggagaagtacataagggtctgctcacacacatctgatgtctctccacctgtatgtactctaagctcctttacagatctaaaggcagtttgatctataaaccagctattttacatgccacttttctatccaattgcataaatccactctttccctttatatgtctttttcatttccccgcattttctcattgttcaaagccctactattgttgtaaacagggtggcattaagacaaaggtttgctcttagaaaaagttcaagaagggagcccccaaactgtctgacacgtttaagtgtcacttgtagtaaccatgtatctcaatgtgataagccagaaaaaacaacgactgcctgttcctggaactgggaagtggccatgccaagacttccaggaataacagtgcatgaatgaaaccacctgggaaccagagaatcagcttggagaagcaggaactttgtcaaatatttaaaataataagagctaactttcactgagtactttctgtagcgccaggcactgctctaagaattttacattaatactctgtagctcatttaatagttacacaatttcagagatgaggcaatggaaagaacatatataagaagaaagtggctgacagtccacagacgtgaagcagtagaggccgaatttaaagtcggggagcctgactggagctaatggtcttaggaaccgtgctagataccgccactatctttcctaagctggtattgtagagggcctagcatagatgtgggctccggcggacttcattgaatacttactgataaatgacagcttgcaggctgtattaaccattccttctaatagccccactacgctggcacatgctcctgagcccagactctacccaggattcagggccgctctctacctgtaaagcagtgtagctaaggggaagctgagccccgcaaggcgttttcaggcagggcaccccttgtcattcgaatggttctggggtgagcccgggtgccgctgggccgcctggggccccttgccgtgtacctgctccacttccagggtccctttcagaggcctcttgcatttctggccccaaccttcaccccacatcctccacccccagagcagcaaacacaacctgcgggccctcgcgccggttccccacaagttgccctccacacctgaccccggccctggccccagcgcaggctccgcgcagttcccgcgcccaagtccccaggaggcggcagagaaagccgcccgcgcacctctggctgccgctgtttccgctcccgagcgagacaaggtccagagagccggggccaggcgatggcttcctcttctgcgcctctagactgccgggcacagctgctgcgcaaccttctcagaagtcagccggaaaagggtctgggagtaacctttgcgccaacacccgcggctcctggtttcgtttcctgaatcttacgtacacaacacggtttccttttcccggttcccgcgctggcgctcggggacccacgagactactggagggtgaaggagctggaggagggactgcgcccaccccctggtgtgaggcccctcccctacccccgacttgctttcttgctcattggagagactccagagacgtttgtccggtggttaaggagaggaactgggactccgacactaactggaactggaaagtcatcagctggggagtggcctcccccgggaactttctttactctggctttgacctccatccctcggaagcccgtggcttttcaaggcgagggagtagaggcagcttaagactacaaatgaggaggggccaaaattgtttttctttatggtgccttttctttcttgctgtcttgctctttctttccttctattaaattatgtgatattactttttaatttttaagcagttatttgaatgttttcgagctcactttatttttttataaatattgttcctttttaaactaaaatagtttttattctgtgtatttaagttatttgtatgacatatccatcaactcctataattacacatttccccccttggggcaagagcagctataatctacttatttagcataaatcctgaataccactatcattaactatagccctcatgttgtacattaggtcttcccatttgttcatcctacgtgtttgtaactttgtatacttttacctaaatttccccatttctcctgaccccactccaacctggatgaccctggataaaccagtggtccccaacctttttggcaccagggaccagtttcacggaagaggatttttccatggaccagggccgggtggcagacggtttcaggatgattcaagcacattacgtgtattgcgcactttacttctattattattacattgtaatatataataaaataattatacaactcaccataatgtggaatcagtgggagccctgaccttgttttcctgcaattagaaggtcccatctgggaacggtgggagacagtgacaccagaagtgtgttgcttatgtccagtctactccgtaatcttgttttggttgctgtcactgcagaaaatcctgcttcacaaagatagcatgttggaaatggaagcagactcttcagtgcttttgtggcaatctcaggatatcccaccttgagtttaatccagaacatgggatttgaagctgtctcaaacatacttttaaggccaccatcatttgtgatctcaagcaattgatcctcttctagtacggacaaaatcgattcacctgacttactcacaaatgggtcatggatacattcattcccagttcagggttcttttgtggttgggtagtaatgctcgaactcttttgaaagctaagataggtgatcatgcatcagctgagagaaagaagctgctggctcagtcttcttcaaaatctctgctaatgtttgaaacatgtcaaaaatctcaatgttcattcgttgcccccataattccagtttggctttcaatgcaaccaatttatctgcttccttgaacacagttgtccttctctcctgaagcgacaagttgagttcatagatcgagttgaatacatcacacaagtaagcaagttttgcaaccctttctgtgtcactgaaatgtgccgccaatggtgactgattttctaaaataaatctctggagcagctctcataattcaaaaatttcagccagtgatctacttttagaaagccatctcatttctgtgtataagagaagacatgcatgcccagtgtccatctcctcacagagctgcacaaacagatgtgagttaagaaaatgtactttaatgtggttgattatttttgtcacatcctgcaaaacattgttaagttcaggtaacatttttcagctagccagcatttttctgtggatgacacagtgcatagactcacattctggtctctttgaccagagtagtgaaaccagaaagccatccagtcatggcagccactccttccatgcatatacctacacaaaataaccaattcagttttcttgatatgtaatcattcaaagacaaatagttcttcagctgtggttttgattggcaacaaaaattcacataatatatccttgtgcacatcttcctgaaaaatatatcacacacaaaaaagcattg

SEQ ID NO: 316126 - DNA, 4001 bp, Homo sapiens
aacaaaaatgagtcttaaagtcagttattctcatttgattgctttatcactgctcaaaaacttttcccaacaacccagacctcccttgaatattaatctagttgaataatatatttacatgatatgtaaattttatgcacttaaaagatttggttaccatctaattactaccatttgattaatattcaaggaatcttaaccaaaggcatagagcatgaaaggcactgtacaggcactaaaaaatggaggagtcaggcagttaataaaattaaatatattccagcacattatattaattaaatttattataaatatattatggataacacatatataacaatacaaatgtatttgtacatatacaaatacattaagcactatgaatacaaataatggtacaataaaaaggatatggagtcattgatttagttggagtagtggtggcattgtcaggaaagtcagagcggagagttgaaaaaagtctagaatcagccaggccatagggatgtatgaggggcgtggtagggcattatagacagagggaagctcactagtagaagtcctaagctgcaggaaactgggcttattcgggaaatgaaaatttatgaaattacagagccaaagatggacagacccttagagatgaggatggaaaggtgcacaagggccagttcacaaatgtttaaagtcgctctacctgcactttaagacctcaaaggccagagcttggtttgtcttatccaagacaagccacttaatctgtgtttgttaattcaacaatgagtgtacagtattattttgctcttttcagtcagtaagaatagttcccttacagatctgaaggctgcttcatgtacagtgagacccaggtattttacacttgtctatccaactgcagcaatccactcattttcctttgtatgtgtttttcatttccttgtgcttgttcattgctcaaaacccttctattgtaaacatcagggtggcaataagagaaaggtttgctcttaggaaaagttcaagaaagaaaggagcccccaaaccgcctgacacttctaagtgtcactggtactaaccatgtatctcagtgtcataagcgggaagaaacaacgactgcctgttcctgcaactggcaagtggccatgccaagacttccagaaataacagtgaatgaatgaaaccacatgggaaccagagagtcagcttggagaggcagggactttgtcaaatatttaaaataataaacgctaactttcactgagtactttctgtagtgccaggcactgctctaagaactttacattaacacacattaattactgctcaaaaacctttcctaacaacccagacctccctcacaaataggagttttcctttcttctttataaatgagaaaactaagcccataaagataaaatgtttacttaatgctgtacagctcagtaactagctgaattgaaattattcatgattcatgtccgttgcatttatgttcctatttcgttgaaaaacaaacaaaaaatctcacattctcccaatgtgccaaatttcagtgtaatactctgtagctcatttaatacttacacaatttcagaaatgaggcaatggaaagaacatatatgaagaaagtggctgacagtccacagatgtgaagcagtagaggccgaatttaaagtcggggagcctgactggagctaatggtcttaggaaccgcgctacataccgccactatctttcctaagctggtattgtagagggcctagcatagacgtgggctcctggcggacttcattgaatacttactgataaatgacagcttgcaggctgtattaaccgtcccttctaatagccccactatgctggcacatgctcctgagcccagactctgcccaggattcagggccgctctctacctgtaaagcagtgtagctaaggggaagctgagccccgcaaggcgttttcaggcaggacaccccttgtcattcgaacggttctggtgtgagccagggtacagctgggccgcctggggccccttgccgagtttccgttccacttcaggtgtcgcttcccgcggcccattgggcccttgccccgccctctgacgcaaacacaattatggggcggagcatcgtccccactagccaggcacaccccagtcccatagggaggcgactgagaaagccgcccccttacccgtggctgcagctgctcccgcacagccctgagcgagccgaggtcctagcgtggcttcctcccgtctgccccgtgactgccaggcacacctgttgcacagccctcccggaagtcggcggaaaaggggcctggaccagcctcagagtctacacctgcagcagcccctagtttaggtttctggaccccaagggtacaacaaggcttccctcccctggtccctgcgcgggctcagaggatccggctttgctgctggagcgcggccgagctgggggcgcgactgcacccacccccccacgccgtgtgcgacgcgcagctgccgcccagcccgtcccgtctccctctccccatccccgtccccttttttgctctttggagagactccggaaacgtttctccggtggttaagggcacagatgaactgggacgtcgacaccagctggaactggaaaatcatcaggcggggagtggcctaccccgggaacttccttaactctgctcttgacctccatcccttagaagcctgtagcttttcaaggtgagggagcttagactacaaaagaggagcggtcgagattattttatctctagcccttgcccttctcccttttctttccaacaaaaggcatttttaagttaagagtgaaaatgatgaggcgtgtagaatgtttaatttttcaggacgcgcctttgatttttcagggtgtgcctgcaactggcacaccctcatgcaataaataaatacatattgcactgacgtttctactgattttttaaaaatttatttacacgcctgaaaccctagcattttgggaggccgaggcaggcggatcacctgagaccaggagttcaagaccagcctggacaacatggtgaaaccccgtctctactaaaaatacaaaaatgagccaggtgtggtggtgtgcccctgtaatcccatctactggggaggctgaggcaggagaaaaatcgcttgaacccggaaggcagaggttgcagtgagtcgagatccagccactacactccagcctgggagagagagcaagactcgtctcaaacaaacaaacaaaaacacatgatcttccaaacaataacaccatatatggagaaaaatgaaacctcaccctctccattcccggtgctgttctcccgattaccctgctaaccaaggttgacacaaacatttgaagacacactaagagaggtggggggagggaagaaaaaagggaatggaagggaggaaggtggagaaagaaattgagaaaataagatagaaaaaggaagaaggaaaatcgagctacctgagtttgaattctttcttttttacttcctgtgcctgtgacttgtgaaaattacttgacaatctctttgcctgttttctaatcggtaaaatgagagtagtaatggtatctaccacagaggatttttatgatgattaaggaagttaaaatatataaagaatttagaatgatgtttgccatagagtaagcgctcagtaaatgttatatacatacaaataagtatatacacagctacacagtgtttttgtttttttgttttttttttacataaagaggattattttatacagctcttctctgatgtgtttttcacctaacagtgcatcttggaaatctctatccctctaatacagaactgtgtcattgatctaataatctaggtactgtttccaagttttatcaattataaattgtgctgtagtcatcatctttgcacatatctttctgtatacaataaaaaaaacattttattcttttaccaataagtcatgggatttctaatttttccac

SEQ ID NO: 316127 - DNA, 4001 bp, Homo sapiens
ctgttggtttgcaaatcttctgtgaatctggggattggaggatggaaatagaacaagttgaaattccacagctcactgttctatgatagtttcacattttttaagatgacctttagattgaggtcattggttaatgttcggagttctaaaattttggttttgaccatttttacctgggttctgactgctttctttgaggcacagatttttggagcccttattctgaattgttttgtgcatatgaaattgtacatagagactattatttgaaattaaaacaaataagaactatgtcacatctatgtataatggtaagtacataaatatttcatatacatgaatggcaatgtacttaatttaaaaatcccagatatgtatgtatttattaatttttatgttttattaagtatattactgtttttcatgttgtctacatgtgtgcatatacagtgcatatgtgtatatatgttttaatacttgctaataagtataactatattgatttttaaacatacatgtcaccagacaaaatatttaattatgccagacaaactggtggtcttccagttgttttgtcaaagaatctcaatgttacattgttgtattattcttaagtctatttaatttgataaagtaatatattgctgtcagtgaacctaaaatacaaacagtttttaaacactcatggtttaaatactttctaaatcacagatcttcaaagaatagtaataatcacacaattatattagttggaaagttctcctgaagtcttagaaggaatatgattttgcattatgcttcacccaaatatataggtttcttaattttgaaagaaaattcagactttccatcatgaggtctcatacttatgaaacactcttatctctagaagtgtttcctagtgggttcactgtagaaacttgcagatcatttgtaggtcaactctgatcccagttttatggatcaaaatatgagcctcagagatgttgtgttatccattagatttatacatggaagagctataaagtgaatccaggtatcctaaagaagaggaatggcaggaatagttgacataaataatggattgggaaagaggagtatcaattagagtaggagagaagaggttcattcagggtcagacatatttcatatacatggtgattttcaagttagatgtaagatgaagttggaggctttgttacactccaactatggcattcgtttttcttctctctagagaagaacataaatgtcttcttcctatttttggacactttgtactgagtggaagctcagagatttgtcccaaacctggaatcctaggcaatgtctctaaaaatacatcacaatattcttttatattatatgggcaacaatgaagcatcagcaaagtaataaattctgaatactacagtttcccagtccaatggactgaatatatctttctgaaattaatatgttaaagtcctaactcccagaggttttaggaagtagggcttttggaagatgattaggccacaagggaggagttctcagaattgggagcaatgcccttatagaaatagaccccagaaagacccctccccgcttctgccctgtgaggttacagtgagaagttggtcatctgtgaggaagtgaaccctcatcagacaccaaatctgtttaattctgggcttcccagcctctggaagtacagaaaccagtttctgttattataagtcacccagtctatggtatttgttacagcagttcacactgtttaagatacctagtatgagtttaaggtccccattaggtagttcgtgaataggaacatatgcataaacaaaagggagtatgtagtagttatagagatcaacatttgaagcacgttagtctctggaaactacatgtcattggctacctgggaggtgaatttgaaaaggcttcattctccattcggcccacaatccagagtctctcagaattattgctaggaagaatctaagatgggcagatacaagcaaccacaacaatagacattccatttagaactttgaagctgactagttctatgaataattgtacgcataccaggatataaagcttgtaattctcccatggtgttggaatggcagcaaaggctcaaagcagtggtcatgcctcctgcaagcagtgtgccacctcaaagcagtattcacacctcaaagtagtatgtcacacctcctatattccaataattgatcaagtggggccagttccacatgaagtttctgatacctaaggctttaccactacatgttaaacaataaaatggaacaatcaaataattacatgatggtgcataaaatggtttcagagcattgtacgttgtcctctgttgtactagtttcattactttgcactttgtgcaagagcacactgttattgggagatcttctcagtcatataaaaagagagaaagcctaagtggaatgtaaattagaacattatgttttgtagtaggatttgagtaagaggaaaagtatctctttggtatctcagaacagaaaggaaaagtattcacaatgtatgagagatgaaacaacctggatacacatttcaattacaggatctagaagcagaatgttaaggatactatggtaagtgactctcttgtgtgggcccatttgccaagcttagctatggacaacacaacagccttgggtgtctgtaatcctctctgaacaaagtgaagggatttggactcttgtgaaggtacatgggcatgaagttacttcttccactgactatgatgtcaatgaatcccagggtggtggtgggggcggggttgcatttcctgtgaataagggcacaggtttagcacctcacagcagcatctggtcaagacagataagaacctactggcattaatcagtggaaacaatacaggataaaggctgccactttatgaaagatgagcttggcctgtccaaaataaattgtgtaacttccccatggagaagacaagagaggctaaatgggtcacaagcaaatagtctcataagccctcagccagattagcatgttgaaaacctcccctttatctgggccagtaaggagcaacttagcctcccagaactgggccctcttggatccactaacctagatcatagtgagaggtgacagcgttctggcagccctcgctcactcttggcgcctcctcagcctcggtgcccactctggccacacttgaggagcccttcagcccactgctgcactgtgggagcccctttctgggctggccgaggccggagccggctccctgtgcttgcagggaggtgtggagggagaggcacgggcaggagccagggctgcaagcagcgcttgcaggccagcccaagttctgggtgggcgtcggctcggcaggcccgcactcggagcagctggccggccctgccggccccgggcagtgacgggcttagcacccaggccagcagctgtggagggtgcactgggtcccccagcagtgctggcccaccagggctgtgctcgatttctctctgggccttagctgcctccccgtggggcagggctcaggacctgcatcccgccatgcctgagcctccccgctctgccgtgggctcctgcgcagtgcacccgagcacagccccctactccacggagcccagtcccatcaactgctcaaggactggggagtgcaagcgcaaggcgccagactggcaggcagctccacctgcggcccttgcaggatccactgggtgaagccagctgggctcctgagtctagtggggacttggacaacctttatatctagctaagggattgtaaatacaccaatcagcactctgtatctagctcaaggtttgtaaatgcaccaatcggcactctgtgtctagctcagggtttgtaaatacaccaatcagcactctgtatctagctaatccagtggggacgtggagaacttttgtgtctagctcagggattgtaaacgcaccaatcagcaccctgtcaaaatggac

SEQ ID NO: 316128 - DNA, 4001 bp, Homo sapiens
ggtctaggtttttgtattatgcttagaaatgcttttcccacatgcaatgtgcacaaatatctattcaggctttctttttccctttttaggctgcatatgtttagatttaaactagtaagccatctagactacatttgtctattaacagtgaggaaaagttccagttttattattaggtttcccaaacaaattcctgcttgtccaagtacattcaattaaatgttatttcttcttcccacccagtgatttaaaatgtatgcttatcaaatgccagctttccttttattcttccatgtctcttcagtttcatttacacatctggtagtaggtctactgcactgtcttttaatcaccacagttttgtaacaccttttattatatgaagaagtctccactatatatatgtgtgtatgtataatattaaatgttaaaatcatatataatatataaaataagacataattatatattttgtattttattatttgtaatatattatacataacgttaatatgtttgttcttccacatgagctaaacagtacagttaaaaacagtaacaaaaatattcagttaggattctacttatacgttgttttagagaaatgatatctttacctagaagaatgttatgtattttattggattctcatacatacctttttatatcttcttaaaaataatttctcaattgtgtgttatttcatgccaaactgaattttactttattttactgtattatctagtttatgtataaacatcaactgacttctataaattaagtatgatgcaattggaaactttgataaattcacttatgcttcccatcaaatttcagtgtttcctatggacattaaggtatacactcacatcatgcataaagtgataatatgttcccctacctgttgtcactcgcccatagaattcacaaccatgtcacagagtgtaatgattagcattcttgtctttttcaaatttaatggaaatgctgctagtatttcacagctatccatgagagcagatagacagatggaggttgtgttctattactattacaggagaatgcaatttaaattaggcaatctattcccctttaagcagtatcaagtttggtgcattatatcttcacaagtacttattttggtggctccattctaaatgcagtataaaattaaaaactaaattgtagatcctaagagaagataaggccacaaaataaaatcctaagtctttaaatatgaacgtttttaaaaacaaatcaagcacagccccaaatcgccccagtttgccagaattggaaataagagagagggattctctcctgtcaccgcctccactcgctgagcaattaaaaagttactataaatagcgtttttacctgcgagtggcctggcctgagtccgtgagagccgcgccgtagaaacgccagagacccatgagaaacccaatcaagcgagacctgtcacgcagagcgaaacgaaagggccgcccccgtgaagtgcagccaggacccccatccctgggcaggaaactgctcgctcccaaaccctctgcgtctgcagtgcagacgcgcgcccgacaccacggaacttctgcaaccacctgaggatgcgacgcgagcgcagtgtccgggaactgctagcgcaggacgccgcgcaacctccgcgcctgcccgcaggcaccgcggcctcgggcctcccctgacgacgccctcggccccgcagcccgggcgcccgcgccaccctgtcctgctctgcgcccgcctgtccagccccactcaccgcctgccccgcagaatgctgggcaccggggacgccagacgccgggtctagttgtactggcagaggaaagggaaaggaaaggaggcagggaagggagacggagaggatttttcaagttataaacaaagtaagcgcgcggaagggagggctaggcgcgggttctgggggcgggtccggcacgcctggaccctccttccccgcgcgcggcttccccgtctcggaccccgccccgcgctgggagagccgccagcccgggggagcgtcttcctggaagaggtggggcaccctgaagtccgctgaaacctaaaagccgagggggaggaagaaatgaagaaaataagttgtcactactctaataagaggtgaaagaaaagataaaagccagcccacggtcacttccaatcagaggggcaggttgcagggcctgggaaagggagctttgttcatagattactgcgcctagagagaaaatgaagaaacccctctttctcaagagccttttttatttttttatttttatttttgatacggagtctcactctgtcgcccaggctggagtgcagtggcgcgatctcggctcactgcaagctccgcctcccaggttcaggccattctcctgcctcagcctccctagcagctgggactacaggcgcccgccaccacgcccggctaattttttgtattttttactagagacggggtttcaccgtgttagccaggatggtttcgatctcctgacctcgtgatccgcccgcctcggcctccaaaagtgctgggattacaggcgtgagccactgcacccggcctcaagagcctttttgatttgcatttgcgcccacccccaggtccttggcttggtgatttagccttggcaatgccgtgctggctggaaacacttgggcatagggcccagaaattctgttttcttttccacagaattgggggaggccaatttgatcttggagggaaggcgggagagacgccaataaaggggaaagggagcaggttgcccatgttttctgacattgggagaaaaatgccatttgcttattactgttaggcacaaatatttctttcagaccaatgggattcagttctgtggtggtgcttggagagaagcacaatacactgacaggaagtgggagaactgaaggtcctctgaccttataaagaatcagaactggacagaagtaagcttgattaagctctgaggagtacttggcagaaccccattgtgggagaaggttggaaaggggaagggatgtgggagtggagttctagaattttatatttttctttgtatgtgtgttatttgttaatattcatgtgagaatagattaaaaaattcatactgttcttctcagtaataattgcacagaacatttctcagatgcagacatagtgttttactgaaagcataaaacaaagaaactggtggtgaaactaaattataatagcatatgttactgttgggagcaagccccccaaaatctggccataaactggccccaagactggccataaacaaaatctctgcagcactgtaacatgttcataatggccctaatgcccaagctggaaggttgtgggtttacgggagtgagggtgaggaacacctggcccgctcagggcgaaaaccgcttaaaggcattgttaagccacaaacaatgagcatgagcggtctgtgtcttaagggcgtgttcctgctgcagttaatccggcccatcccttcgtttcccttaagggatacttttagttaatttaacatctatagaaacaatgctaatgactggtttgctgttaatacgtgggtaaatctctgttcgggggtgtcagctctgaaggctatgacacccctgatttcccacttgacacctctatatttctgtgtgtgtgtctttaattcctctagcgccgctgggttagggtctccccgactgagctggtctcggcatgttacctttgtttaaaatttatgaaagaggccaagtaattgagcttatgaatgtaaacatccacagtggccacgtgaagataccaaaaatttcaagagcaaaacatgtcttgtgaaacatattgctttgagggattaaaataaaatcaagtatgtcatataccccaaatcacaactttcgaggggaagaagaagaactcaatttcctgtttttctgaaatttcctgatctgatgactttccaacctggacatttcgagggatgaca

SEQ ID NO: 316129 - DNA, 4001 bp, Homo sapiens
cctcactgcattttcaacaacacctaaagttatcagactttcaaaatttgtaaaattaatgcaaaaattgatgtcttacttcatatatgttttggataattagtgtggctaacagtattcactctgcttattatttgcatttcttttgctttgagttgactctttttatccttaactgggtcattgattttgaaggtcattaataagatttctaggtatattagcaaaattatctttttttttctattaacaatgtccgcagtttgtatcttttttgggggatgcaaatgttaataaaaatcatgtccctaaatgggtctaggtttttgtattatgcttagaaatgcttttcccacatgcaatgtgcacaaatatctattcaggctttctttttccctttttaggctgcatatgtttagatttaaactagtaagccatctagactacatttgtctattaacagtgaggaaaagttccagttttattattaggtttcccaaacaaattcctgcttgtccaagtacattcaattaaatgttatttcttcttcccacccagtgatttaaaatgtatgcttatcaaatgccagctttccttttattcttccatgtctcttcagtttcatttacacatctggtagtaggtctactgcactgtcttttaatcaccacagttttgtaacaccttttattatatgaagaagtctccactatatatatgtgtgtatgtataatattaaatgttaaaatcatatataatatataaaataagacataattatatattttgtattttattatttgtaatatattatacataacgttaatatgtttgttcttccacatgagctaaacagtacagttaaaaacagtaacaaaaatattcagttaggattctacttatacgttgttttagagaaatgatatctttacctagaagaatgttatgtattttattggattctcatacatacctttttatatcttcttaaaaataatttctcaattgtgtgttatttcatgccaaactgaattttactttattttactgtattatctagtttatgtataaacatcaactgacttctataaattaagtatgatgcaattggaaactttgataaattcacttatgcttcccatcaaatttcagtgtttcctatggacattaaggtatacactcacatcatgcataaagtgataatatgttcccctacctgttgtcactcgcccatagaattcacaaccatgtcacagagtgtaatgattagcattcttgtctttttcaaatttaatggaaatgctgctagtatttcacagctatccatgagagcagatagacagatggaggttgtgttctattactattacaggagaatgcaatttaaattaggcaatctattcccctttaagcagtatcaagtttggtgcattatatcttcacaagtacttattttggtggctccattctaaatgcagtataaaattaaaaactaaattgtagatcctaagagaagataaggccacaaaataaaatcctaagtctttaaatatgaacgtttttaaaaacaaatcaagcacagccccaaatcgccccagtttgccagaattggaaataagagagagggattctctcctgtcaccgcctccactcgctgagcaattaaaaagttactataaatagcgtttttacctgcgagtggcctggcctgagtccgtgagagccgcgccgtagaaacgccagagacccatgagaaacccaatcaagcgagacctgtcacgcagagcgaaacgaaagggccgcccccgtgaagtgcagccaggacccccatccctgggcaggaaactgctcgctcccaaaccctctgcgtctgcagtgcagacgcgcgcccgacaccacggaacttctgcaaccacctgaggatgcgacgcgagcgcagtgtccgggaactgctagcgcaggacgccgcgcaacctccgcgcctgcccgcaggcaccgcggcctcgggcctcccctgacgacgccctcggccccgcagcccgggcgcccgcgccaccctgtcctgctctgcgcccgcctgtccagccccactcaccgcctgccccgcagaatgctgggcaccggggacgccagacgccgggtctagttgtactggcagaggaaagggaaaggaaaggaggcagggaagggagacggagaggatttttcaagttataaacaaagtaagcgcgcggaagggagggctaggcgcgggttctgggggcgggtccggcacgcctggaccctccttccccgcgcgcggcttccccgtctcggaccccgccccgcgctgggagagccgccagcccgggggagcgtcttcctggaagaggtggggcaccctgaagtccgctgaaacctaaaagccgagggggaggaagaaatgaagaaaataagttgtcactactctaataagaggtgaaagaaaagataaaagccagcccacggtcacttccaatcagaggggcaggttgcagggcctgggaaagggagctttgttcatagattactgcgcctagagagaaaatgaagaaacccctctttctcaagagccttttttatttttttatttttatttttgatacggagtctcactctgtcgcccaggctggagtgcagtggcgcgatctcggctcactgcaagctccgcctcccaggttcaggccattctcctgcctcagcctccctagcagctgggactacaggcgcccgccaccacgcccggctaattttttgtattttttactagagacggggtttcaccgtgttagccaggatggtttcgatctcctgacctcgtgatccgcccgcctcggcctccaaaagtgctgggattacaggcgtgagccactgcacccggcctcaagagcctttttgatttgcatttgcgcccacccccaggtccttggcttggtgatttagccttggcaatgccgtgctggctggaaacacttgggcatagggcccagaaattctgttttcttttccacagaattgggggaggccaatttgatcttggagggaaggcgggagagacgccaataaaggggaaagggagcaggttgcccatgttttctgacattgggagaaaaatgccatttgcttattactgttaggcacaaatatttctttcagaccaatgggattcagttctgtggtggtgcttggagagaagcacaatacactgacaggaagtgggagaactgaaggtcctctgaccttataaagaatcagaactggacagaagtaagcttgattaagctctgaggagtacttggcagaaccccattgtgggagaaggttggaaaggggaagggatgtgggagtggagttctagaattttatatttttctttgtatgtgtgttatttgttaatattcatgtgagaatagattaaaaaattcatactgttcttctcagtaataattgcacagaacatttctcagatgcagacatagtgttttactgaaagcataaaacaaagaaactggtggtgaaactaaattataatagcatatgttactgttgggagcaagccccccaaaatctggccataaactggccccaagactggccataaacaaaatctctgcagcactgtaacatgttcataatggccctaatgcccaagctggaaggttgtgggtttacgggagtgagggtgaggaacacctggcccgctcagggcgaaaaccgcttaaaggcattgttaagccacaaacaatgagcatgagcggtctgtgtcttaagggcgtgttcctgctgcagttaatccggcccatcccttcgtttcccttaagggatacttttagttaatttaacatctatagaaacaatgctaatgactggtttgctgttaatacgtgggtaaatctctgttcgggggtgtcagctctgaaggctatgacacccctgatttcccacttgacacctctatatttctgtgtgtgtgtctttaattc

SEQ ID NO: 316130 - DNA, 4001 bp, Homo sapiens
ttctgacaatgaaatgaaagcacattataattttatttcttacacagtttcacaagtgtttttagtgagattgcaacttactttaaaaacaactacatctcttgtctttttagaccttctttaaagtaagataacgtaatgatatttttgcagttttaggaatttgagaaaaaactcatcagtcctactccccaaaagtctgctaagtgatctgtgcgcttaaagcagatattttctgtttgttttctatctttaatttaccataaggaaatttcaagatatttttgctttataattcagaaatacttatttctagcccatcacatttaagaatcaataataacgcatgtcagattctttataataaatggctatatcacataatttgaataacaaatgggaaaataaaacttagagagtgtaactggattgtctgtaactcaaaggctgaatgcttgatgggatggatatcccattcccctttatgtccttaattcacattgcctgcttgtatgaagacatctcatgtatcccataagtatatatacctactatgtacccacataaatttttaatattttaattaaaaaaattattaaattgcactttaacactttctaacttatgtgtgaaaagttttcttcaaatccttttaaacttaaaatatcaccctgtccttgtgtttaacattgaagattcccattctaaactttgctatgcagcttttcttattaattcactatgtttgtattcatgataactaaaacatcgtttacatctgaacttttacagtctgtcagataaagtgtttttacatgtaactcaacatgctcctgggagttaagattttaaaatcacaatgttcaaaagtgacaaatgacagcttttaaagtaccaatctaactggttgtaacacatccacaattgtatatttttagtcttaatataagaaaaagttattagttggttatatttactcttacctttagaggccatgaagatgtctgagtcacttcttcaaaggttgccaggttggaaaacaaaggcttttcttgttgcagcaaggagagaaaacgcagcatgcacaaaacttcagaacgtgtttgtctgcctcttgtcagcttacatataacagaggaagggagtcccttgctgtttctagacttctggactttatcagtttggacaacagagtgagatgaaactgtcacaaaagtaaacgctgttcagaaaccatcatataactttggtggctgaaggaacaatttaaaaataataaaaaccagaaaggaaagcacacagcactcattttaagtgtcttttttttttttaccaagttgtttttgtatttcttagaatatacacatttgcattcagtcttatatcagaaatatcctgtatttctcaatttctagaagtctcctttccagattctgtgataaaacatcctattgtataaatttttgatagttctaaatacaattctttacatgttgaaaatgtttgaacattattattgttatttttctattggatttatctccatctcttcaactcaaaataaataagaagaggatatattccctactattatataaataaatctttattttcatttttaattgaatttgattaatcagaggcattggaatatacaaaccttcaatagccttgcaaagctaatcaaaatttacagatgatatttaactgcattgaattctaaggaaagaaaacaagtgctgtaaccttgactggacagctcctatttctaaatgcagctacccaggtgaccatggagattttgctcaccaagtcaattgccctacatggtatgattcacaaaggttgaacatgcaggatatattgcattatcagcaacactgtctttttctgaaaatagttaagaggcttcaggaggtataccttgtgatgaaaaattataaagtcaacctcacagtttgcagactgccaaaagtttgagttttccttatttgacaaagaggagtggttttgttgttgtagttttcttagtgtttggagttgaaaaaagctaccattatttaagttgtcgttttgcagaaaagatgtgtgaatatgattaatatttttaaattaaactgtatgtttcctaagttttttctaatgtttgtcgtgagcatttagaaaaactttaatacaaaaaattaagttattaacactatcaaagaagattaaaaaaattttttttattatactctaagttctacggtacatgtgcacaacgtgcaggtttgttacatatgtatacatctgccatgttggtgtgctgcacccattaactcatcatttacattaggtacatctcctaatgctatccctcccctctccccccaccccacaacaggccccggtgtgtgatgttccccttcctgtgtccatgtgttctcactgttcaattcccacctgtgagtgagaacatgcgatgtttggttttcggtccttgcgatagtttgctgagaatgatggtttccagcttcatccatatccctacaaaggacatgtactcatcattttttatggctgcatagtattccatggtgcatatgtgccacattttcttaatccagtctatcattgttggacatttgggttggttccaagtctttgtattgtgagtagtgcgcaataaacatacgtgtgcatgtgtctttgctcagcaaaaggaactaccatcagagtgaacaggcaacctacaggatgggagaaaatttttgcaatctactcatctgacaaagggctaatgtccagaatctacaaagaactcaaacaaatttacaagaaaaaaacaagcaaccccatcaaaaagtgggtgaaggatatgaacagacacttctcaaaagaagacatttacgcagccaacagacacatgaaaaaatgctcatcatcactggtcatcagagaaatgcaaattgaaaccacaatgagatatcatctcacaccagttagaatggtgatcattaaaaagtcaggaaacaacaggtgctggagaggatgtggagaaataagaacacttttacactgttggtgggactgtaaactagttcaaccattgtggaagacagtgtggcaattcctcagggatctagaactagaaataccatttgacccagccatcccattactgggtatatacctaaaggaatataaatcatgctgctatcaaacaagatgttttgaaatgtggtcagaattcaccagttaattttgactgccctacacagcacaaattttggaataaaaataaaaatcttagtgaattaaacatatttgtgaactctccaaagacaaccatatatgacttgggcatatgatgacatgggcatatgactgactgatgggatcttttaatatttaatctgcagtggaggcttttcagatcatcgaacctggtaatgctactggtgaggtatactcaatgcatttttcttcccttatgcactctccctgtcttgccaaagacaataccaatgttttttttctttttaaaggctaagtgtttgccaacctgagatctcccttttgttcattcctttctttttctcagcttttctcaaggagaggctcacaaaactctgtttaataggactctcacatgtttcaagtgtcctaacactgtgtgttcacgcagccaggagatgctgctccacaagctggcctctctcctgttgctattgctgctgccattcaacttcaccttcatagtactcagtgctcttctcctaacacctgctgccttcctagaagaacgatggtcataccatcctcttggctctgtgccatgaagcccttgaccttttcaagaagcatcagtttgactttgccaccagcctgcagtttttatggcccactcacttgattccaacccaaggtgggcatgtctaacacagtactgaagacttgagatcacatcgagggcattgctgtaagaaacaggaaacttgaacacgaatatcagaaaccat

SEQ ID NO: 316131 - DNA, 4001 bp, Homo sapiens
gcgacccccagcagcaagcccagaaggcctggcctcgggggtcccaggtctgggccgagtcccagccccttcactttccaccctaagcaaggcccgtgccctctgagcctgcccaggagtgtgaacaagacactccctgaaaggcagcgagatagaggccccaccccagctgtgccttctgatgggtgctgggggctgtggctccctgcagtcagggtcactttctctgcaagttgttaactgtggcctgcaccaggacaccatcagctcccattgctgggcaaaagcagaggcccagcgggcaggtgccaccagggtcatgtgggggacacaagcgctccatggaaatggtgtctgggctcacctgataggctctggcaccagcctctcacttgctgtgtgacccagggcaagttaccccacctctctgatcctataacctcatttgtaggatggggacaagatggagcaggcaagcaccaggtgtaggaccaggcatgtggctggcactctgtccagtgtcccacaggggctgtggactatgccagcagggcctcgtcaccccatcttctgaggcacaagacagcatcatggctgggagcagcctttggggctagcaccctgggtccaaacccactctctgggggatggaaaagggcagccccacctagctgagccatggggatggccaagccaaaagccaggccaggcacacagcaggcaccactgggcgtgcatctgacaccgatgccgtcgtccctggaggggatggggccgcgggaggaggggcgcccctgcccaactcaccgagttgatgcagcccagctccttgttgagcagccacggcagggagagcttgccctcaccacggtagcaggactggatgcgctccttaatcttctccttgatggccctgagcgtgaacaggcacagtgctgactcctttggtggcttcacgcggttcttctggccctgggcgaacacagtgaacagcacgtcctcgtcctcagccaggcccagctggtgggccagggcacggccgggccggctcaggtaggcatcctgcaccaggcggtactccacacccgcctgctcgcagccaatggggaactcaacgtacgagtagaatttggggtcgtccacacagagccgcacgatcttggacgtgaagaagtgctcgccggcggcatcaggcgaggtcagctgtgtgtctagctgcagcgtgaggtagtagacaaactgctcgctgcggaagctgtacacatagtagatgtcaaaggccgggaacttggacagcgtgtccgaagggatcttgagctgtgatgacacaaactcatcctggtacacgaagccgaacatgtcggcatcctcctcgttggccatgagccgacggctggacagtgtggggaagtactcggacttgccatcgatgggtgtgcccacgaagagcttggcctggccctggcccggtggcccggcaatgagcacgcccgccatgctgcctgcctcctgcacgctggacaggtagtgctccttacggtggtgtggctcacccagtttgaagagatcgtccagacgcaggaactggcagatgccctgggaggcgctgccacaggccagcaggcggttagcggcatagtccagcagcagcagcttgttgacgttgtcagtactgcccaggccgtgggggcaggactgcacgctgggcggcgggtagcacttctcgttgtcctccacagggcccgtgacgtgggcccgcagcagtgtcaggttccccgacagcttatagatgcggttcactgcgcccacatacacctcgcctgtctgctcatgcaccactaggtgggtgaggccccagtcgctggccgagaaggtgcggaaggggggctgtgaacccccgcctgccctgggcaagcctgcctcagcccacatgcccggcagcagcagcagcaacagcagcagcagcaggagcacctgcaggctccgcggtggcagcggcatggcaggctggggccttgggcctcggtgctctggtcctgctggggtgagcatcatggtgccaggagcttcagccctggggaaggggcagaagagggcatgtgaatgcaggcatggcccatcccatgatattatgatctcccagtgtgagcccttccagtgctgggcgtgcccactgcacctccaggaggcagaacctgacccaccaggaggagccaggggcaaactgggcacctccctggcctgaggccctataagctgtggggtgcaccaggtatccccaggacacctggcaagaggtcactccgttggcacctgtgccctgccatcactggcggaggccaggaacaggaaggcaggtgacaagggcctgaggtgtggaatgggaccccagctgacaccaacatctgacaccaacctggagagcagccttcacccagagcctccctatgcactggggagcaggaccctccccacagctctgtactcccagggtgggcaccagctccctgcctgaggctggtggggacatactccaccaccgtcccctacagaagcttgacatagatgggctttagtgctcactcccacctccacagccctgcctctcccccgaacacgccctgacagcccacagcagaggcaccacggaggacatggaggcccaggccacacaggcagcagttctcactgtggataggtggcagcctgggctgctctcggtgggaccccaagccccatgctggataaaccttgagacctgcagtccagaagccaggcaatgtgtcccacccacatccccaccccagccgacgggtgccccgccacacggccccttcccaggctccctggcccaccagccctgactctcagcactctatccaagccaccagtcctgctcccagcctcacacccaactccaaggaaagaggaattcctccacagggaaggctggcaggtgctccctgcactccacccctccacagtgaccccttcccagcctcagcaccccatacccacccagacctgtgtggccccctcctgccttgctccacatcgggccctcacttcctggtcacactcactaccaaggtccattgactccaccccaaactccacaaaatgcccacccctccttcctggattgccagggtactcggctccctccacccacaaccacctacagccaggtccctatgcagaggctaaggccactcttctgacctgcacacgaggtcagcgctgcccagatcctggcgggagtccccatatcctgtcctggcctccactgcctctggaaaagtctcaccacaccctgcctagcaactggcagccaagcactgggctaaatctagaccctgttactctgtaggcagatgactctgatggggacactcccttttcctagcctcagtttccccatttgcaaaaggggcatgaaagctcttttctcatggatgaaagaggaaagggcacacctgcccacaaggcatagtcagcagtgccacccccttggttgtcagtagggcctgctgccctggatgtgcctgatgtgctggggcctctcacccactcctggctggagccggctacagcaaggctgagtcctgagtcttgagttcaagcctcagccagccagtttgcacagaccatcccagacaccccttgtatggtctggccccattttacagatggggaagctgaggcctgaagatggatgccttctccaagtctaccagggagctgggcacagtcccatcagcctctgtgcctggtgcccacatgcagtgtggggctgcctgcccctcccccaggcctctgtgcccctgtctccactccccgccctgctcagtcaccctgttctcatctgcagcacaggactcgtgaagggtctctattacttattgctcccattctcccggccagaatggctgccctgtgagagcagggcctggctctgggtggttgccactgcatccccaagccaagccagggacccagga

SEQ ID NO: 316132 - DNA, 4001 bp, Homo sapiens
tggcttctgattcagaggccccagcaacttacacagacttcagcacagaccagatgctccctgtatggtgaacgaacccccatttcacacccaagaaaacccaacaagtaggggagatagggggcccacaatccctccaagccacttggtctctcaaagggaacacattggccccacttttattaatgaccaggccagggcagactgaaaaggctgatctagaaccagacctcacatccccaacttacacagccaggatctcctgcccattcccaatatctgaggccctgctcagactcacagccaaagcctaactctgcctgtgcccagtgctcccccacacatgccctggagtctcttctggggccaccctactctgaaccttttcagggggcgcaagactgcccaacttctgtctgtagagcaagcacctcccggacccccgtggagctgtcctcgacaacaaaaggggctcacaaaccccgccattccgcacctgcagaggggccataggacagcccacatttgccttgcctgccagttagtgggaaaccggccttcccgtttcaccctcctgctcagctcccagggttcactacagaggtgagttattcattgacagtgcagtggtgcccgctgcccgccctgttttctgtgtgttgaggaggggtggggagatccaccatttaccaggcacctgcgatgacccaaggcgctcatcgatcacccacttaatatgtctgtgtgtggagaggagggtcccccccacccgcccgggggtcaggaggctcgaggtccgcctttgtcagtcccaccgggagcagccagaaagggctgttactactgaggggaagccccgacctccccactcggctcgtccttgaccctccccaacccccagaccccgaggcgaggaccccatcactggccctgggagggcggggaaggggccggccggtccccggcggcgacggcgaggagggggcgcggaggagcagctccacctcctcagtctcccaatcgcgttccaggcggagtcgccagagtttcccttcgcgcggagaagtgtggtcccaactctcaaaaccaaagccgcccaccactcacccaggccgcccctgcccggcgggatcggggccccggcccgttccacctcgggagccccgttcctcgccgccctggccccgagccccgcactcaccacccggccgggccccgcgggatgtgcgcgccgaggcgggcgtcggccgctccgggctcgggctccgcgcgcagcggcctctccccgggtctggcggagccgcagctgttacccggagaccgaggggcggaaaactgcgcccgctgcccgcccctcccgcgcggcgctgccaccgccgggaacaaaggagacaaagccgcgtcggccgggctcgtctccgctccttccccctcgcctgccgggctgccctccccccgcccgccgcccgggccaggccggaagcagcccggagagccgggcgcgcggccccgaaccgcccgggaccccgcattccagccccgcgggctccgcatcggccgagggctggggacccgacccctcccgcacgggggagggcgggggcgggctgcaccgcggcggtcgccatggcaacgcgggtcgcccggaggggtgaggagtgaaccccgggagccagagccgccccgccccgtcggcctcacctgctcgcctccttggaaccggaactgggaactttcctggttgccaggagccgaggcggggggtcgcgctccgcacccgcaggtgctggtggaacagcgtcccggcctcttcccgcccgtccagagccgggtagcacccgagtccctcaccagcccgacccgttcttctgccagcgcccggcctcgccccgcgcccggagctccctttcccttccttacccggctccggtggtcatcctccccaactttctttacctgaactccaaggcgccttgtttctcccctgcgcacctggccctgcccaccgcccctgctcaccgcccctgctcccactactccccaacagccaatccctccttccggcccccacctctggctgtttgagaagagcatgggctttggacctgggcttgcgccatcaactaaaccatgtaacctgacaccaaccccccccagcctatttgctcaccagtaagtgggggtgatcccacctctagcggggctgtgaaggcagggaacctgggctgcagaggcgcacaagcaagggctcacttccttcctttcttcccagcccaggacccagacctggacccaccccaagctgagaagcgttgggcaagtctgggctccctcactggcaaacacctgggccttctgcgggaggaaacgctggcagaaaggttctctcctggggaccatttgtaccctgtgcagggcccttcacaccctggcatgcccacggctaactcaggaccagaacctggcccatcctattaggacttttggaggactttggctcaaagccattggcacagcttcctgggaggcaaaaacgtcacaggcatcatctgaaagcctccaaggcctccacaggctaggggagcctcaatcaggaggttcaggtcatccacactggctactgccctagagctagagacaccctcttcccacctcccaccagctatcaagggtctcctgtcaggtcaccccttttcctccactcccacttccagcacctgagtccaggtgcttagcaccttgtctgcaccagcatagcaatccctccctggatccctcacccttagcctctgacctcagactgccaacctggcaccccgggcctgtgacatcattctgcacaactcccccacacccatcaccaccccagccaggacagtctgccccagtccctcacccactttggctttcctgcctatgtagcttgtagcagccccctccacatgcacagaatccctccctccccaaatccattcatccaagcacacacttcaggacctatctcaccccagaggaaactgggacttccaaaccccacaacccctttcatctgtacacagatacgctacctcctgccctacaaggaatgtgaacactctaagcacaggggtctttccatcccatgccattctggggagccattactcgccaaggatagattgactgagggaccaggtgctgagaacctggggtggggggcatttgggccatgctcactgcccaagactgaacacaggctccaagaagaaagtatgccttatgggaaacactcctgactccacaggctctgagagctctgcacaggcaccagtgaacgagtccccacctgcggcccccctgcatatagctaccctgcgctctcaaaggggagtgggttctctggaatgtgcctgacttccaatactccaacaccaggactgaataccagcccaaagctcctgtttactcagggcacacaaggccacccatggccatttagtcaaggtcaagggtcactgttcccctctgaaaagagatcatacatatgccccactgcacctcccacctgtgggagacccccccctccctatcactgcctctccatgcacactcccggtgtcctgagctctgcctatgcctgtggaagatatccccgggctgtgtgggggtgtgcacccagcccccgtggcacaccactgctgcccaaagcaatctctgtaccagggatccagactggccaccaatccctatacttatgtccccagcaacatttatcaaccattctcccaatctcccttccctgctctcctctgatcactcctccagtactagaaccaggaagttctcccccacatggtagagaaagtgatccaggagatgggaagcaaccatggtcacgaaatgagtaggcagcaggctaggttccactcactggaactcccaggccatctgacaccggacagtcaggtaactggaggaaatccaaaatgaaaatctaggcctcaggagtgcatccataacag

SEQ ID NO: 316133 - DNA, 4001 bp, Homo sapiens
tgagcagctcccagcccctccaatctagcctcccaactcccaacttctcaggactttccttgagcagaattgagtacacccctcccccaagagcctctggggcaccccagagcgggagggataaaggcctacccctccagtccacacctctcccacccgatccatgccagtgctcccccacacatgcccttcgttcctgccagcctgaactgcaggctgcttggctcctccaaccgctgcacaggctcttgccgctgcctggaatgcccactccctcgctatcccattaactcctacaccaaccatcctctccctggggagcctcccctgtcctcccaggctcctgaggaggccgctgcatgcggtggacagaatggacacacctagccaccaccctgacaggcacggccgctctgcctcaggctttccgagcctcagatttcctagttgtacaatgggaggcaggattgctctgaccagtaaacatgaaacagtgtgtgcctggcattagtgatgccaaccagggtcacctttctccctgttccaccctcctactctggacttgaagctccttgaaggcagggagtatggcttctgattcagaggccccagcaacttacacagacttcagcacagaccagatgctccctgtatggtgaacgaacccccatttcacacccaagaaaacccaacaagtaggggagatagggggcccacaatccctccaagccacttggtctctcaaagggaacacattggccccacttttattaatgaccaggccagggcagactgaaaaggctgatctagaaccagacctcacatccccaacttacacagccaggatctcctgcccattcccaatatctgaggccctgctcagactcacagccaaagcctaactctgcctgtgcccagtgctcccccacacatgccctggagtctcttctggggccaccctactctgaaccttttcagggggcgcaagactgcccaacttctgtctgtagagcaagcacctcccggacccccgtggagctgtcctcgacaacaaaaggggctcacaaaccccgccattccgcacctgcagaggggccataggacagcccacatttgccttgcctgccagttagtgggaaaccggccttcccgtttcaccctcctgctcagctcccagggttcactacagaggtgagttattcattgacagtgcagtggtgcccgctgcccgccctgttttctgtgtgttgaggaggggtggggagatccaccatttaccaggcacctgcgatgacccaaggcgctcatcgatcacccacttaatatgtctgtgtgtggagaggagggtcccccccacccgcccgggggtcaggaggctcgaggtccgcctttgtcagtcccaccgggagcagccagaaagggctgttactactgaggggaagccccgacctccccactcggctcgtccttgaccctccccaacccccagaccccgaggcgaggaccccatcactggccctgggagggcggggaaggggccggccggtccccggcggcgacggcgaggagggggcgcggaggagcagctccacctcctcagtctcccaatcgcgttccaggcggagtcgccagagtttcccttcgcgcggagaagtgtggtcccaactctcaaaaccaaagccgcccaccactcacccaggccgcccctgcccggcgggatcggggccccggcccgttccacctcgggagccccgttcctcgccgccctggccccgagccccgcactcaccacccggccgggccccgcgggatgtgcgcgccgaggcgggcgtcggccgctccgggctcgggctccgcgcgcagcggcctctccccgggtctggcggagccgcagctgttacccggagaccgaggggcggaaaactgcgcccgctgcccgcccctcccgcgcggcgctgccaccgccgggaacaaaggagacaaagccgcgtcggccgggctcgtctccgctccttccccctcgcctgccgggctgccctccccccgcccgccgcccgggccaggccggaagcagcccggagagccgggcgcgcggccccgaaccgcccgggaccccgcattccagccccgcgggctccgcatcggccgagggctggggacccgacccctcccgcacgggggagggcgggggcgggctgcaccgcggcggtcgccatggcaacgcgggtcgcccggaggggtgaggagtgaaccccgggagccagagccgccccgccccgtcggcctcacctgctcgcctccttggaaccggaactgggaactttcctggttgccaggagccgaggcggggggtcgcgctccgcacccgcaggtgctggtggaacagcgtcccggcctcttcccgcccgtccagagccgggtagcacccgagtccctcaccagcccgacccgttcttctgccagcgcccggcctcgccccgcgcccggagctccctttcccttccttacccggctccggtggtcatcctccccaactttctttacctgaactccaaggcgccttgtttctcccctgcgcacctggccctgcccaccgcccctgctcaccgcccctgctcccactactccccaacagccaatccctccttccggcccccacctctggctgtttgagaagagcatgggctttggacctgggcttgcgccatcaactaaaccatgtaacctgacaccaaccccccccagcctatttgctcaccagtaagtgggggtgatcccacctctagcggggctgtgaaggcagggaacctgggctgcagaggcgcacaagcaagggctcacttccttcctttcttcccagcccaggacccagacctggacccaccccaagctgagaagcgttgggcaagtctgggctccctcactggcaaacacctgggccttctgcgggaggaaacgctggcagaaaggttctctcctggggaccatttgtaccctgtgcagggcccttcacaccctggcatgcccacggctaactcaggaccagaacctggcccatcctattaggacttttggaggactttggctcaaagccattggcacagcttcctgggaggcaaaaacgtcacaggcatcatctgaaagcctccaaggcctccacaggctaggggagcctcaatcaggaggttcaggtcatccacactggctactgccctagagctagagacaccctcttcccacctcccaccagctatcaagggtctcctgtcaggtcaccccttttcctccactcccacttccagcacctgagtccaggtgcttagcaccttgtctgcaccagcatagcaatccctccctggatccctcacccttagcctctgacctcagactgccaacctggcaccccgggcctgtgacatcattctgcacaactcccccacacccatcaccaccccagccaggacagtctgccccagtccctcacccactttggctttcctgcctatgtagcttgtagcagccccctccacatgcacagaatccctccctccccaaatccattcatccaagcacacacttcaggacctatctcaccccagaggaaactgggacttccaaaccccacaacccctttcatctgtacacagatacgctacctcctgccctacaaggaatgtgaacactctaagcacaggggtctttccatcccatgccattctggggagccattactcgccaaggatagattgactgagggaccaggtgctgagaacctggggtggggggcatttgggccatgctcactgcccaagactgaacacaggctccaagaagaaagtatgccttatgggaaacactcctgactccacaggctctgagagctctgcacaggcaccagtgaacgagtccccacctgcggcccccctgcatatagctaccctgcgctctcaaaggggagtgggttctctggaatgtgcctgacttccaatactccaacacca

SEQ ID NO: 316134 - DNA, 4001 bp, Homo sapiens
acctagccctgtcccgttgtaccagtgtctgtgcagtacacctgtctgccctgtgcgtcttcaggccccagcttgctggcacacaagtccatgcagacatctgcagggccctggtgcacacctgtgtgcctccttgcacacctgccacacccatgcacccatcaccaacgtgcaatggtaactctgacaggctcacgcagtggccccagaacacaactttggtcaggcatgcagtcacttactgcgccctcagcatgcacctgtgaccctcacgtgcatacctgggctttatgcgcacctgggtacctgtggcaacttggacccctcccagtacgcctaggtatgcgcgcccatgagccggcactcacttgagtccctgcacatgcccacctgggccatacaggcgccagtagtacccctcgggggacacctgtattctcgcgtgcacacctgggttccacgtacatctggatctctgcgcgctcccacctgtgacccactcagctcacgacccgctcggttcccgcccgcccccgcccccgcccccgccgccgccgccgccgccgccgccgccaccgcccgggtgtacctggatgttgagcttgcgctcacaggccggtcccgtgccctgcaccacgctgtcgagcaccgccaccacgtcgggcgccggttccacgaagcaggcggtgcgcgcagctcggatggcggctcgcacgtcggcgaagcggaaggcgcagagtgcggccggagcagcgcgggccgcgggggacccctggggccgctcgaagacagcaaagagccgctcccgggctgggaagaccgacaccaggcggctgtagaggtcgccgcggcccgcgccgcccgcgcactgcaagcccaactggatgtaggactcggtgagcttcttggcgtcgccgccggcgccgtggggcaggcagatgcgcgccagcaggctccgcgcctggctctccttgtcgcccgcgcgcgcctcgctgttgagcgccaggtacgcgtaggactgtgcacccggcggcgggtcggacgggtgcaggaaggcgctcacgaagcccagcttgtgctgctccttggcgccctgcttgatcttgaggatgttgtcgtcggaggggttgaggtcgaaggtgaagagcttggccaggtcgccgcgcgtgtccagggagcggatggcgatctcgggcgtgttctcgaagcggtggtcctccaggctgcggttgcgcgggaagaaggagctgccgtaaccggtgtacgtggcgcccacgagcaggcggctgccccccgcgcccgcggcgggaggcagaactagccccacggtggacgcgttcgggtggttggccgccacgttcagcatgctggggaacaccgtgacgggctcggcgggcggcgcggcgggcgggaagcgcacggccacggccgagatgttgccccggcgccgcagctggcagaagccctggtagatggacccgcacacgactaccaggccctggccggggtccagctgcaggatcttgttgtagttgtccgtgaggcgccgcgggtgctcgcacgaggcctgcggcagctgcggagcgtgacacagcgggctgtcgggcaccgggcccacggccgcctcggcctccaggctcaggttggcgcccgacagctgatagaggcggttgacggccgccaggtacacggtccccgccgcgccgtccagggcgaagttgttggtgggcgtgggcgaggggaaccgacgctggatctccagggcgccggcccgcgccgcccccaggagcagcagcaacagcagcggcaccgggcaccgcggcggcgtctggaacggcggggggctggcggcggcggcccgggcgctaaggggtgcgccgcccgcggcgcgaggagccatccgggcgtgcgcgggctgcgcggcgcggcgagtgcatggggcgaggcgcggccgggagccgggagcccggaggcggcgggaggcggggggcgggcccgggccgcgatgcgcttcctgcccgcgccagccgcccccgaccccggcgcccgggcccgggtcagcctcgccgcgcagcccgggggcggggcgggggcggctccgctgcggacacgccctcactccccgccccggccccgcccgcccccgggacccccgcctgcccctggccgccctgggccacgccccgccgtccgcgggtcccgccgcccgcgccctccaggacccgcccgcggccccagggtccctccccgtagccgccgccgccgtcgctcgctctcctcgctctttcctcccacttggccgcttggcctgcctcgctcgcgcctgttttctcttttccgccctctcccccaccccgtctctccctctctctgcgtctctcggtctctgcgtctctccgtctctgtccccaccccaaactccgcgcgtgtggcgcttctccgggttctgcctctgcttctccttctccctccgactccgcttcgctctccagtccctggcagccccgcccccggccctttctagtctccttctctctcctgctccgtttttccgtccctgacgctcgctccctctctccgtggctccctctgcctccccctcggaccctccgtccctctctcggtccctctgagctcccctttccttctccctctgccttcccgaaccctgtgtctcccctccacactcagcctccctccaccacctttctcaggcactgtccaggccttcgctcccccggtgccggccagtcgggccccccagaccccataatctgtcccccaaaccccagacccataaaagggatttacaagtggcagggccagagggaccagtgctcagggtcagatatataaatgaggaaaacatggagagaggaaatagttccagccagtggcccacaaccgatagccagagcaaggccttggtcctggagcccacagttgcctcctgtggagacccagccgcacccccacccctggcacccccgccaggcactttccctgacatcctcccaggcttagtggaagattagtcccacaaaagccggcactgggcagggttcttgatctcaaaagcagcgttaggggcaggcagcctggttccaaggtcacagccctgtgaggaccatgcgccgtggctgttttgcgggggtgctcacacagggctagcccgtgccagacactgtgccaagcacttgccatgtacgggctctctttttcctcacagattcccccgaggcgagcgctattggtaacccatcttccagatatggaaaccaaggctgaggggaagggactggcccaagatgcacagctcatgaggagcagagctacagtgtttgaaagcaaaagcccttcagctccgacctctcagaacggggcctcccatcagacccccagcttccacagggtgcccggtgggcctcactctgagagtagcgggacctcattttcctctttcccacccaaccaggaaggaagggcaggggtgtctgtgcaccatggggccggcaggaaaggctgggcctgcagccgccccccacttccctcaacaccctcgccttcctgccatcctgcccgccttgttccagacccctcagccctggtctggccactgctttgatggccgggagtgttgagctgcaggaaattggaggccccctcccaggcccatccacccaccaagagccactcaggggactgcccgtgggactgtgtccctgtcttcctctctggatggagaaggcgcacatcgtgccacccgtgggggccaactgcagagcccagcaggggtgcatggggcctgcctccatgcccctcctcctcactcacatcctcagtgcccccaccccagtccatccgctggtctctctgtcttatctctctctctcctgcccccacccatctctgttcctatctgtcttgctcctcccgttcactctctttgtctctccttctctcagtgtcttgcccccttccctttccactcttcatctgtc

SEQ ID NO: 316135 - DNA, 4001 bp, Homo sapiens
cacaaaaacttgtacacaaatgttcagagcagcattttccttaatagccaacaagtgattgaacccaaatgatccatcaacacatgactgaataaaccaaatgtagcatattcatacaacagaatattattcagccataaaaccgactgaagtgctgatgcttgctgcaacatggatgaaccttgaaaacatgctaagtgaaagaagtcaaacaccaaaggccacattttgtctgattccattcatatgaaaagttcagaatagtcaaatctatagagacagaaagtattaatatattagtttgccaagggttgggagaaaatggggaaagagaagaaatggtatgactgttattgagtatggagtttctttttgggatgatgaaaatattctggaattagtgattacagttgcacaacactgtgaatgtactaaaaactactgaaatgtacactttaaaaggtgaattctgtggtgtatgaataacttaataaagttaaaacaccagagagaatactccggagactctctccatccaatagcagcttgtgtcttaacacttgaagggttataattcagccatccaaacatctccccctactctaagtatcagaaacctcaaagaagcattttgggtgctccaggaagcccaaaggctcctcctgggaaaggatgtccttggggcacagcaaagccactgccaccctacagagcagtaaccagaacaaaggccctatggccttgtgcccagctccacccctaacgcacctgtcagagtctcctttcaacaacagagggaggagcagctgggggagggtccccaacagagccttctgctctcacctaagcttcttgaaagaacatgcgtaagagagtgtccgcccctaggctcagtgggcagaggcaagttcaggtccacccctgaccagtaggtcccatggtatctctcaacaccgcctcccctctgtagttccctgcatgtgggcctcatctccctcaacagtggtttatacatgaggggacaggaagggaggtagagtaccagattaggagtcaaaaggtctgtatcctagcctggaatctccgtccatgtcctcaagtgcctcagggcatcacaggctaccacccagcctccctgactctccaatcagccagagggccttgcccgttcaaaggaatctctcgaaatgaggacttctggaggaatgtgaactcagagagggcggctccgccccgctcacactgcaggcccgggcatcccagcgtcctgctgtacctacctgctggagcagggtgtaccctcaacaagaccccacgcagccacccactgctaaggacgtggagaatggctagagaggcccgataccggccccaggtcacacatgagtcgggacttggtcgtgtgtccctcgctaggatgcaaactatggaggcagaggcctgtttgttcgctccagaaacccagcgcagggcctggcacgcaggaggcgctcagaaagtgcccgacccagcgccccctgcgcagacagtaaactggacctgaagaggaccaccctggaacctggcgccccgcccgcccctcgcagccatcgctctggccattaggcgcccagtgtcccagcggggagactgaggcctggggagttgctctcggctgggcttaccgcgcagggcgcagccatggcggggctggcggcgccgaaggcagctgcggtggccgttgcggcccgttcagtttccgcgcccccaacggccaccaatagcaacgcgggccgcgtcggcacgccccgcccaccgcaattaaaggagaagcgcctcagctttttgcccgacgactggaagcagagctgtatgaccggcggccggcgccacggtctccgtgcccagttccccaagcccagacaacccacagacagcgcagccaaaagcctctgtccgccgccactcgttccgcctgagaaattaaaagacccaggatgaagggttcaccccaccagcccgtcgtccggctactctaacggcgagcgcagcctcctgggaaatgcagttccaagccgcccacgcccctatgtctggaggaaggtggagctacacttcccaacatgagattgcaccattgcattccagcctgggcaacaagagggcgggccgggttttaccacccgaagcgacggccttaaggatcccggaagcggaggacacgtgggttgctgtaaccagattgcgttaaagcacccgcgcgcgccggcgcagccagattttccccgcaggaacctattgagagctgagtattcgcccctcgggaactctcagtggttcgccgtccgaacgttcttaagacaagtgtcgatttaaaataacatgagttactcggaatcacaatcatggagtggagagatcaaggttcgattctcagttctcgccctgattggctgtgtgatctcaggaaaaacgcctctgctctgtgccccggtttccccatttgtaacacgagggagtgtggtgcagcccggccctgtcaggatccttaaggcctcagaagctgttagaaacccagtctttaaaagaaggagaggccgggctcagtggctcacgcctgtaatctcagcactttgccactttgggaggccgaggtgggtggatcacctgaggtcaggagtatgagaccagcctggccaacatggtgaaaccccatgtctactaaaaatacaaaaattagccgggcgtggtggcacgcgcctgtaaacccagctactcgggaggctgagggaggagaattgttcgaactccggaggcagagattgcagtgagcctagatgttgccgctgcactccagcctgggcaacagagggagactccgtctcaaaaaatatatatatatataaaataaaatttgaaggccaccagcaaccatctgaatagactccctgcttggccagggcactcaaatttaacctgaaagagtggttcaggccatgatgggaagtgggggttggacatgcctcattataccctccagcattaacatcaacaaaaaccttaagtctgataagaaacatttacgatctattttctctgaaacctgctacctggaggcttcatctgcatggtaaaaccttggtctccataaccccttatcttaaccgagatatccctttctactgataataattatttcaaccaattgccaatcagaatatgtttaaatctaccaatgacctggaagtttcccacttcgagttgtcttgtccttccagatcaaaccaatgtaaatcttacatgtattgattgatgtattttgtctccctaaaatgtataaaaccatgctgtgcccaggccacttgggcacatgttgtcaggacctcctgaggctgtgtcatgggtgtgtccttaaccttagcaaaataaattttctaagttgactgagacctgtctcaggtatttcgggttgacagtttggcaaccacgaaaggattctgagtggaggtgcccctgacctttgacagatctcctatcggtgcttggtaccagcttgagctatctttatggctcaaatctacaggacaatttgctaaggcctgggagcccccctccacaaaattcctgatcttcccaaatttggttaacatctaaagtttattttactgtacaactcctttttctggagttttacttgtttccaacaaggaaggcaggttttcctgcttccctgacgatggaaggcaggtaactcctttctggagtttgagctcgcttccaacagagaaggaaagtttgagttttccctacttctgggatggtagagagcagtctttagcctaagacctgttcttaggtaagtagccgaattggggattttcttggctgaagttaaggttaacaaccagctggtcttaattttccttaccattagagtgctcagtaatcatataaattgtacgatcaagcccggcatggtggctcacgcctgtaatcccagcactttgggaagccaaggcggg

SEQ ID NO: 316136 - DNA, 4001 bp, Homo sapiens
tacctccactctgtaagcacctgagaaacaatgctgacaggtccctgaagggcttccacacaaaggtgtgtaagaaagagacacactgctagacacacgcacatgccctccaagcagggggtaagaagtgcgtcatgaagagcatgcacgggagagaggagccgggaggcaggctgcctgcagtcctcacagctggtcacataagcacatgggcagttacagctgggcctgggtccatgaggacgttgctggccagttctggtttatgactgtcacacaaagaaatagcagaccaatcaattgatgtttatttattgaatgtcgcctttttccaaagaggatttacggcgtgaaagaatacaggtgggtttgtgtgagtgtctgagccaacactgatggacatgtttttctgtgcacaccacctagggcctttcttcatccctagactgactgtggagaaaatgtaccctccctgaactgagccttcccatgacatgcacaggaatgtgcgagggaccactttcccctcccagccatttaccctgggattctgccactctgagtcccaggttcatggcccacctcaggcaaagactgttcctcccttcccatagagacccttcactagtttctctttcactcacacacatctggacacaaagtgcctgtgtcttcatgggccagctgcgtgggaaatgtcctgtgcacactcctacatgcacatacacactcctacatgcacatacacacatcatactaggacgctattttgacgtgtgcatcagaagtgaagttacagctggctgatgagtgtgcacaggcacacatgcacacttcctcatccgggtattcctccagcagcaccagtcacaccttaacatacaccgtaacacactccctctgctctgccagtgtgtgcaggagctgctcagctatgaccttatttgacccacctttgcagacagcccttctccccgccatttccatagtggccgcctgcctcatgggctgtcacaccccatgcccacctccctacacaccccctccactaaatccccgtctgcgctggaagccatcaggaggcccgtctctttctctctcaggcagacacatccctttcacacctgtgccacacccccagcccgccacgcacccacacagcccgccgcccggcgtggctgctgaatggaaaccacacatctgagtctcacacctccctcgtgtgtgagctgcgtgggagcctcccgccgtgtgctgtcacgggccttccgtggctgtacgcccgtttttgtcagctcctaatagagtcgcccagaacaggagagaatacccattcaccgtgacacactcacactccctcccggcaacgccacgcgtaaacagccacccgcgcctcagcgtacccgccccacactccgcaggcggcccctgggaccttcacaatgcggcctcctccccgcgtggctgtcacacacgcctcttcccccgagtgcgcaggcacacaatgcactcgcacacacacaagcacacgcacacacatgcacacccacacgtgcgcgcccccccggcccgcgaggcagcagcctgcgcacctgcccctgagagccgcggcgtgggggccacggtgctgtgtcccagcttcaccgccgcgcctttgtcgggggtcgcccggcacgccaggcgcccgccgcggcccccacgcacccactcctcgtgcgcgtgtgtcggggcggcgccgcggcccggccgggacacgcgcgctcccggcggcgccgcactctggcccctttgttggcggcccggggagctgtccagcaccgcgcccacgccgccgcccgccctcccgcgctcgggcccggagcgcactcacccccaaccagcagaagcagcagcggcgaaagcagcggcggcagccgggcggcccgcagcagccggcccatggtgtagccgtcgccgcctgcagccgcagcggcgcggcgcccgggcccgcgtcaggggccgcgcgggcggcggcggcggcgcgcgcccgccccattggtccgcatggccgtcactcacgcccggccccgcccggccgcgtgccgcgggcgcgcccccgcggagacgaagcggacgcgcgggcggccgtccctccgcccgtcccccccgccaggccggccaatcagcaccgccgaggctcgggggcttggcccggccgcccgcagacctgggcctcgcacctcgcgcccggatgccgctctctccccgcgcggtcacccgttccctgggaagcagagtgggcagctgtggcagatgggactgatgggacgaggacgacgcgtggaaatgactgtgagggtggacagaggcctggggtaaggaaagacttctcagggtacttagattgggtgagccctgaaggagaacctgagagcaaagaactggactttagagctaggcagtctggctcaggatcagattggttccgagaccttgagtaaatctcttctcacctctgggccccacttgccccatttgctaactggggggttttagattatgagagaggtgctgacttctctaacatgtgctcccttttggcaactgaagatccttaatatgccaagcactgtagtggtaaataaaacaggcacatccctcgtcctcatagtttaggctcgtagagaaaacagactgaaaaacaaaatggacacacatatggtcctatgattgcaattggtagtcggtctgttaaggagtataaggggctaggagacagcacagaggggaaccttatgcttgccttcctgaagaaacagcatttaaggtaagctggctggcatctggaaggatgagtgggtattaggtaggagattgggtttgggagagaacttacaaggcagagggaaaagctcactgatagagttcctgagttagaaagaagctcagcctcttttagggagagaaaaaccccgactacccttttagaagtactgcagcttaaatatacagcaaccacaattttgtggaatgttactttatatataccatattaggaaaacacttctttaaaataacaaatcgttatttgaatatgctttttcaaagtatatccccacccccctatgcaggggtatagcatcagacattggagataatctcacgggactcttccagactaaatattaatacttaggagaaataggagttggggtggaggagcatagggaagaaatgggttccagacaaaagaaagaacatgagcaaaatgtagcaccttttatttggtgggtgttaggggtactagaaaagtggctgtcagctgggcttggaaaagagaaatccagggtgtgtctagacccagcttccctcttctttcctcctctgaggatgaaaggagcatccctttggttttttgttgtgttttgttttgtttttctgttacaagaaacaaagatcttagaagcaaacaagaaatggaaggaaacgtcctcaattccattaagggtatctcccagaaacctttattatcatacttaatggtgaaaccatacttaatgatgaaacattagaaacattctcttttaagtgaatggaacaaaataatcctcactaccaccacaatgattgaatattctataagagacactgcaacaaggcctgatagaagaaatgggatgaaagtattgggggaaaactcattatttgcaggtttatctagaaaatgcaagatcatcagttggcaaaataattgaaaaccaatgagttcagcaagattgctgaataaaagataacgtacagaaatcaatagcttttctgtgtatcctcaataaccacttagaaaatgtagtaggagaaaagatcgcaatcacagcaacaattattaaaaactggaataaaccaaaccagatatgtaagctccaaatgaagaaaactctaaagctgccaggggtggtggcatgtgcctggaatcccagctacttgggggagactgaggtaggaggatggatcacttgaggcta

SEQ ID NO: 316137 - DNA, 4001 bp, Homo sapiens
cactgactctcttgttctggtctgtctggtccacactctcccccacaagcccttactctggtagcgtgacagcagtaaccaaaattacactattttgtattccttttaaagtgagtgcatagtaagttttcaataagtatcataagcatccaaggaattttttgaggagtcaaaaataacataaaaaggagcttaaaagaccctgttatttagctgatgaagaatctgagacccagaggagttgaagtggctcggcacaggggtaaccagtgggagtaccggcaccaacacccaagtctgttttcagagttatctttctaccatacctcatcccggccctgatgtgcattctctctcttttttgagacggagtctcactctgtcacccaggctggggtgcagtggcatgatctggattcaatgcaacctctgcttcccgggttcaagcgattctcctgcctcagcctcccgagtagctgggattacaggcacgtgccatcatgcccagctaatttttgtatttttagtagagacagggtttcaccatgttggccaggctggtctcgaaattctgacctcaggtgatccacctgccttggcctctcaaagtgctgggattacaggcatgaaccaccatgcccagcctgatgtgcattttctaaagataaccatcaggaaatttaggactagattcagcgatagatgggtttatttcctcaacaatatttatcgagcacgcactgacagctagcaccagggagacaacagcaaataagacacagaccctgacctcaggaagcttgcagcccagtgggaaaaacagatgcacatgcactgaatcccgcagtgagtcagtggttaggttgacaccacctgagcctttcccatgcgagagcatttttattccccagaaatagaaaaacatccttgcctttctgaccactgcaaccaaaatctctcaaggatgttagaatacttcctgtgacagcaactaaactctcaaagacacatcaaagaaaagaactcacccatggtagcagctgcagttttgacttgaacatggttcgtaattctccaaagacctgttaatttggtcaataaatactttccattttgaacctttaaaaagtgaagtaaatgagagttaaaaaaattttcctgaatgttatttgctgacaccacaccaacagaagaaacagaagaccaaaactttcagaaatccccttcccatcccactgatggaaacgaaacgctagggaggaatttttgtgtgtgcaactcccacgctcacgtcaagtctgttcctctatccggctgtcaggtgtccaagaaactggaaaattcccaagcttaatgctcaaccctcagaatgctatggatagtgacgcggactctcactttctactaatcaaattgaactccacaaagaggatcagttaaaagctacagacattaaacccctcttctcttctggcaacgcatatacacacacgctcgcgcgcacgacatttgcccccatccccgacccctcagtgtttcaggcaggtccagagtagccaagcacgggccacgcctcctgcgggtgaacggggaattccctctcctccctgtcattctgaattccggggaatgggttactctccagggtccagagcaggagcagagaccccggcacctcactctccgccgcaaggcgccccggtgccttctgcccagctccgagctacagcggccacggcatcttcccgggagccggccgcgcgggggagcgcctcgggactccggccagaccccgagcccaaggggcaggctcggcactgcccggagcccacctgactccttctggcggccctgcgctgagggcaggaggaacaacagcagccagagccgaagcggcgagctagcccaccactccatcgccggcagacctactgcagattccccgctgcggcgctggcggaagcgcggccccgcacaaagatggcccgggagccgcagcacgtgggcggcgggtcgccccgcacaaagatggccaccgtggccccaccacccttcctccagtccccagccttgaggcggagtttccctgagaaggctgcgccgggaaggtggggaggataaacgaatggaccagttgcctatcctccctccctggcacccctgggaaaataggtctgcagccagaaaactgaaggtcagagagggtatgtttcacggttagtggcacaaccaagacttggcatagagcctaggccaaacagttcttctcttgacgtcaaattgcctcttatcaaatagcataaatttgttgagcatgtgtgtgtgtgtgtgtgtgtgtgtgtgtgtgtgtgtacagcacggttagaccccaaaggttgcaattagcatagcagggatccctttgtaataggaatttataacagttggggtgacttagacgtaggaaaaaagatcaatggtgttaaataaagtttatgggaggtcgttgttttggacagaactctggcactaggcctcaagagagcagacaaaaccagaatggaggcaacttgtcctaggtgctgcgtaattaaactcagctttaaaaggggtcagttttccaacaaataggagaaggggcccatatacctgagctggcatgataaagaagtcccctctgatgtaactctttgaggaaagtaacttcaaaatgaccaatctgctttttgttccttatttctgctttcttcagcccttttctgcctataagcccaaccccttctgctcagctcattagaacacttttctgttttatagatgagatgctgcctgattcatgaatcactaataaaagccaattcgatttttttttttttttgagacagaggacagtctaactctgttgcccagcctggagtgcagtggcacaatcttggctcactatgacgtctgcctcccgggttcaagcaattcttctgtctcagtctcccgagtagctgggattacaggagtgtgtcaccatgcccgggtaatttttgtatttttagtaaagacagggtttcaccgtgttggccaggttggtctcaaactcctgacctcaggtgatctgcccacctcggcctcccaaagtgctgggattacaggcgtgagccaccatgcctggccaagaactttaaactaaatttgatgaaattttgtttcttgacagtgggcaacatgatactggacaatataggtatatagtatagtacaggtatatatctttatacaggtatatataggtcagtgtagatatatttagtaatcatagaactacaaatatttatctattttcttttttttttttttttttgagatggagtttcgctcttgttgcccaggctggagtgcaatggttcaatatcggctcaccacaacctccgcctcctgggttcaagcaattctcctgcctcagcctcctgagtaggtggattacaggcttgcgccaccacacccggctaattttgtatttttagtagagatggggtttctccatatttgtcaggctggtctcgaactcccgacctccggtgatccaccagcctcgacctcccaaagtgctgggattgcaggcgtgagccactgcgcccagcaatatttatctattttctaaaatgtacatggttatatccctaagccttgtggaaatatggaaatacagggaagtacaagatcaaatctgtgctcccaggagtttagaactagtagggaagacaaatatgcttccttagagatagtttacaatttaaggcaatagttaagtgccactggtttcagtggaggaaaagatcaatatgaagtggaaatctggagaaaggggtaggaggggtatattttgtactgaagaaaaggaaacgttacagttaaggaatattgtgctggagtcactaaaaatatgggagccataatttgcagaaggtggggatcaaatttagcttgacagtagtggaggctttaggatgcacgttaaggaatggtggaag

SEQ ID NO: 316138 - DNA, 4001 bp, Homo sapiens
aaattttatataaagtatattacttgttgtttgtatatacaaccctgtacaaacaggtcaatctatagctgggcacggtgactcacacctataatcccagcactttgggaggctaaggtaggcagatcacttgtcagaagctcaagaccagtctggccaacacagtgaaatcccatctctactaaaaatacaaaaaagtagctgggcctggtggcgcacacctgtaattccagctacttgggaggctgaggcaggagaatcacttgaacctgggaggtggaagttgcagtaagcccacatagcgccactgcactccagcctggagacaaactctatctcaagaaaaaaaaaaggtaaattaacaaacatgtaatgataatgctcataccctgaaaagcaaccaggatcaaacaggggaagggcagatttacatctcccattgcacactcactgggatatatgtttgttgagaataatggcaggcagaattgcccactctttaaattgtcatttttcttgcttccctccaccccagtcaaacaataaaacttttgtaatttaaatataaataaaactccacttttcacacatattgtacgattttctctagttataaagcactgcctcattcaccttttaaacgaaccacaactacctcaatagagtattctttacattcatatcttaaaaatagtaattagtttacataaatttggatacctgaataaactaaattctttccttccaggacttgtccaagcaaaaggcactctgcctgccattcaaacatcttttttacaccaaaactgtggtatttttccagaactgctttaggaagtccccagtttgccaatagtagcttgtctctttcgtagtcaggaactgtaggcttgcattctccttttaggaaaaagaaaaaattaaaatttaatttacttctaatatatgagttttacagttagcccttcaccgtgtgttggaattcctatgtgttgaaatgaagctctttaaagcacatcctgacttcaagaatcttatgagaaattgaccatgtatagaaaagtaataaattgttatttactgcatataataaaaattccttaaaagcctcaaacgaacaaaaaagcgtgcaatacacagtagataaagagtgttggaattacgggtgtagttgggggaggagggcaatatgcaagcattacaaagctaagttaggtgagtttctatttatagtaagttttagttccatgacgactgcacaactaacgattttaaaaaactgggtcgacatccacgggacacccaaccaatctcattacgaatcccttccagccttcccctggacgccgaacagcctgtgccgtactccaggcccaacaatcctgtcttaagggtctgtaaggagtactgggtactaccaggaacgagccgcccaacagatgatgggatgaagctaactaggaagttgtttctctaaaggtcgaaagatccagaagccacgtgaacattaataccaggcgatcactgaaaacacgcgtatgtctgaacagaaagtgacctgccacaccaggccccagtcacagagaaggggagtagaagcccaatggggtatgcaacgaagcaagtcccgtggggtgaggacacctcccgacccatggcccggcggagctgcccccgttgcccgcggcctcccgggttcctggagcacctgcagctgcggccttcaggcagcgaccaaggccgggcggcgggctcagcacggacccggagaggaactgggggctggcactgctgtcaccgccgcttcccgagaacgaatctgagcctgattctgaacgccgccgtttcccactccgacgcagaagattcatggcaaactcttctcggccgatcagggcaagccacagtcccagcgtcctccctctcgggagaaccctggcctggcaacagctgcggacatcttcccgccagtcttcaaactcaaacctcccggcccgccccggaaccatagagttctccgtggcttaagtaacccgaaagccatagactcgtggggaaggagcggctctcgctggcgtctaagacttccggcctccaacctcctggttggttaatatgagagatagattaaagaggaagaatacagaatctacagttataaccatactgacctaaaagccttccttctccttttgtccatttctggtttgaataggaaggccatgctaacttcataaaatgggctgcccataataggtagatcagggaagtagctcttcttaacgtattggtattctgtaaaaaattatttcagattgagaagcattatgcaagatagcctagggtttctaatagagcataatttcctcctttctcctagtatatgatggtagggcagggctatttctgaacacaatttccattttagccagcatgcattgtgaggaatatgtaatgaggaattggggattgctggctgacagacccctgagacactatatgaacgccgcgaggaaggggctctgaatataccccagggatcgttatgagccaagagcttagtaatgcatctgtgttgtcccttttgtaaaggtagaagcgaacgagttctgaacgtaaaacggtgaccattcattacctagttgcataattcatttcaccaagcaaaactagtaggccctaagcctgacctgaagaggctgtgcagttctagagcactaaaaatctcaaaaggtccagtccaattaaaaaaaaaaaaaacactcgaatacaatctggaaaatagcattcgaaccatcaattccttccgtgaaaacatttttttgatttaaatgacaatattctaaagttccacgagatggcgacattactccgtgaatgaaacatttttctcttggccttttacgcaatcaacaactatttactgagtatctactgtaagctagccactgggtaaatggcagtgaaatggcataaaatggttcctgctctcaaagagaaagagtctagagaataaggcagacattaaacaagtcagttaatgaagtgtgccatatgcttgggcagaaatgaagagtactattaaagaaataaaagagatctcgccggccgtggtggctcacgcctgtaatcccagcactttgggaggccgagatgagtgcatcacctgaggtcaggagctctagaccagcctggccaacatggtgaaaccccgtctctacaaaaatacaaaaaattagccgggtatgatggcgggtgcctgtaatcccagctactctggaggctgaggcgggagaattgcttgaacctgggaggcggtggttgtagtgagccgagatcgcaccactgcactccaacctgtgcgacaaagaaagactccgtctcaaaaaaagaaaaaaaaaaaaaagagagagagacccctagattgcagccaagaaagaactttctcagatgcagtgtaacttaagggttaacagtgcaactctggagtcagtcagtctaggtttgaaacttagtagctgtgagatcttgggcaacttgcttaacccattttttgtttgtttgtttgttttgagacggagtgtcccactctgtcgcccaggctggagtgcagtggcttgatctctgctgactgcaacctctgcctcccaggttcaagcgtttctcctgcctcagcctcccaagtagctgggattacaggcctgcaccaccacacctggctaatttttgtatttttagtacagacagggtttcaccatgttggtcaagctggtctcgaactcctgacctcaaatgacccgtccacctccgcctcccaaagtgctgggattacagcgtaacccttttgtgcctccatgtcctcatctgtatgatagagataataattgtaacaacctatttggttattttgaggactgagtaagtcaatatgtgtaaagtacttagaatagtgccggcacataataaatactattcagagaaaatatttagatgttctaata

SEQ ID NO: 316139 - DNA, 4001 bp, Homo sapiens
cacaatgcagtcgagacactggggagaagcaggaaaagagtgacagaggtattgccaaggcagatcctacagtgtgggattgtatgcaacaggatactcaatctaacccagtctacatccagtggtctctcatctgctctcatagaaattcaggctcaatcagaaccagatatgcaagaaggaaaaggggagaaaaactgtggcaagcgaacgtaatccccagaaaacaaccaaagatactccagcagcaaagcctgcctggatgactgagaacctgactctgggcaagttattcaatcatccaaaggttttctctttctatgctaggcactgtgctgaggggagtgaccaagatgtataagaactggtatccgtcttgaaaaacatcttagtctccaggcaaagaaagagacatcaaagagaaaattattgatagatgacaaaataaagaggtgtaggccggtgcagtggctcatgcctgtaatcccgacattttgggaggccgaggcaggtggatcatttgagatcaggagtttgagaccagcctggccaacacggtgaaaccctgtctctactaaaaatacaaaattagccaggcgtggtggcgcatgcctgtaatcccagctacttgggaggttgaggcagagaatcgcttgaacccgggagacggaggttgtggtgagctaaaatcgtgccactacactccagcctgggcaacagagaaaggctgcgtctcaaaaaaaaaaaggtatataccaagcagctaactctaactcaaagaagacttcacaaagcgctaaagattctgagggcaatacaagaatataggctctgaagtcagattactcgctgtgaagccttgggtggtttactcaacctctcagagaaaaatgggaaaggcaccacccacctcatgaggactgtcatttttttgagacggagtctcgctctgccgcccaggctggcgtgcagtggcgcgatcttggctcactgcaacctccgcctcccaggttcaggcaattctcctgccttagcctcccaagtagctgggattacaggcgcccgccaccacgccaggctaatttttgtatttttggtagagacggggtttcaccatgttggccaggctggtctcacaagacagtgtctagcacagagcaggtagcgattataaatatgcctaggagtttgccagcaccatgacaaaaggccacccaggcaccgggcacggcatgcgtgaagccagagagagctcgggagtctccgttttctcatccataaaatgtttactgagggaggtccctacaccaggacctgctggtaggggcaggccacaagagctgggtggacacggggcccaggggcatgtccgcgaggttagcctcttcctccaaaccgcccctacataccttacttacctcggtcaaacttcttgccctccgggtcaatatccttcacatcgaaaatatcctcaaacaggatgcccgccatcgcgagggggccacgagagcagcagaaggggtgagagcgcgaccacagttgggagtacgtgcaccccctagcgtggacaagaccggagagaaccaaaagcacctcctgaaagcgcggcggccagacgagagtggcgcatgcgcacaaacaagcggtaacgcgaccacttccgccacagcctcccgctcggggctacttaacttccgtcccgaaagattgcttccgagaggcttcggcattgagggcgggtctcatgtccaggtggctctgcccagggcggggaagcaataggctgtagagcgggttctcgcgctccgctggggccctactgcgccctcttcagaggccgggttccgaagactggaatgcgtgggggcctaacccaggcagggaccttgatccttggcccagagaagccgggccctagccctaccccgccggtccgcgtgcccgccgagggcacagtccgcgccgagggcaggtggagcagaaccccgccccagaggtgcccagcccctccagccggcaccgaggaccccggggccggcctgggccggctcggccctgctggacgtaacccgagccggatccgtccagtttgggaatttgccatgacgtcgctatggagaagaggaaagcctgcattgtcccctcctctcgtactgcaccctcccaccactgccctccctcttccccccaggccctgctctcttcccctacaccgccccttcagccgggctcccgccacccccctcccccgggcattacccctccagcttagtgctgcgcgttccccctccactgccttctcctggacacggatcccctccgtgccccttcagcctggcactgccctgtcccttggataccagctcttccctcacactggcccttcctcctgagtgctggcttctatcacaaggcccccccttcccgggcactgctcccgccccctgagccccgcctctgcctcccaaatgccccttactcctggtgctggctctcccgcacacttgtgcgtttcctgggcgctgccctcgctcctctcacactatctctacgctgcccatccaccctgcgcgcgctccgccctctgttctatccttccccagcccctgatagagaacccagaacaccagcaggcagttcccccaaagcggagggatggaagcagcgacttgggttcctccttgggcccagccagggagaagcgacccacgcccgcgtcccaggagtagacttcccggcacctggagctcccttccctccggcctaccccttccggtgccctccccaacctccacccccgcacaccccgcaggcccggttgctccaagtgcacctacccacgggagccccgagaaaaggaaggatgaggaagacggccccaaccctctccgaatccttccagctttgcttttcacccctgacggggcagaggggccttcccaggcctgtctgggccgctcgtctcttcggaggggcagaggggaggcggctcctaacgggctgacccggaggagtccgatgtagacagctccgcagcccccagccccaacccctacggagctcaggcgtctgcagcccctcctgcctgggcacggggaaccgcgaacccgggccggcccctccacgtgccagtagacccgcccctcccgggcgcccctctccgacccgggcatccgcagggagccggcgcgggcttgcgccttcccagcgccccttgccgcctctcgggaggccccgcgcggaccccagcctggctgggccgtcccctccggatgggccggcgggcggagcagcgcagagggcaccgccctcggcccgcccgccggggaggggacgcgagcgggaggctgcgccagcggcgcccgccgggggcccgccgcactctgctctcggcctcccgggctgcggggacgggacggctgccggcgcggactttgcgggccgggagccgagtccaggacagagccggaaccgccgagggaggcgagagggcagtgcgcggagatggcggccgcggcggcggaggaagggatggagccacgggcgctgcagtacgagcagaccctggtaagtgaagctgagctgagccccaggagtgcgctccgggacccctgctccaggttaccctgggaagcgcgaggaccaggggcctaccctaatcctgtcctagcattttgagctggggaaactgaggcttggaagtctgaggctgcagggccgaagggatggaaaactgcatgctggtttctggctgaggctgagggcctgcagaggacaaggacaccaggtacttgtctcaggtgtccttcccctcaccccacaacatgcacgttttctttgcacctccccttcaccacctgggcccaagtctcagcaccccactgccccttccgcggcaccattcacaccattgaactttctctacgccactatctccaccacccaagacattctctgtgtccctgccatgtgcatggcaccatgctaagcatagaatcgag

SEQ ID NO: 316140 - DNA, 4001 bp, Homo sapiens
tctcatccataaaatgtttactgagggaggtccctacaccaggacctgctggtaggggcaggccacaagagctgggtggacacggggcccaggggcatgtccgcgaggttagcctcttcctccaaaccgcccctacataccttacttacctcggtcaaacttcttgccctccgggtcaatatccttcacatcgaaaatatcctcaaacaggatgcccgccatcgcgagggggccacgagagcagcagaaggggtgagagcgcgaccacagttgggagtacgtgcaccccctagcgtggacaagaccggagagaaccaaaagcacctcctgaaagcgcggcggccagacgagagtggcgcatgcgcacaaacaagcggtaacgcgaccacttccgccacagcctcccgctcggggctacttaacttccgtcccgaaagattgcttccgagaggcttcggcattgagggcgggtctcatgtccaggtggctctgcccagggcggggaagcaataggctgtagagcgggttctcgcgctccgctggggccctactgcgccctcttcagaggccgggttccgaagactggaatgcgtgggggcctaacccaggcagggaccttgatccttggcccagagaagccgggccctagccctaccccgccggtccgcgtgcccgccgagggcacagtccgcgccgagggcaggtggagcagaaccccgccccagaggtgcccagcccctccagccggcaccgaggaccccggggccggcctgggccggctcggccctgctggacgtaacccgagccggatccgtccagtttgggaatttgccatgacgtcgctatggagaagaggaaagcctgcattgtcccctcctctcgtactgcaccctcccaccactgccctccctcttccccccaggccctgctctcttcccctacaccgccccttcagccgggctcccgccacccccctcccccgggcattacccctccagcttagtgctgcgcgttccccctccactgccttctcctggacacggatcccctccgtgccccttcagcctggcactgccctgtcccttggataccagctcttccctcacactggcccttcctcctgagtgctggcttctatcacaaggcccccccttcccgggcactgctcccgccccctgagccccgcctctgcctcccaaatgccccttactcctggtgctggctctcccgcacacttgtgcgtttcctgggcgctgccctcgctcctctcacactatctctacgctgcccatccaccctgcgcgcgctccgccctctgttctatccttccccagcccctgatagagaacccagaacaccagcaggcagttcccccaaagcggagggatggaagcagcgacttgggttcctccttgggcccagccagggagaagcgacccacgcccgcgtcccaggagtagacttcccggcacctggagctcccttccctccggcctaccccttccggtgccctccccaacctccacccccgcacaccccgcaggcccggttgctccaagtgcacctacccacgggagccccgagaaaaggaaggatgaggaagacggccccaaccctctccgaatccttccagctttgcttttcacccctgacggggcagaggggccttcccaggcctgtctgggccgctcgtctcttcggaggggcagaggggaggcggctcctaacgggctgacccggaggagtccgatgtagacagctccgcagcccccagccccaacccctacggagctcaggcgtctgcagcccctcctgcctgggcacggggaaccgcgaacccgggccggcccctccacgtgccagtagacccgcccctcccgggcgcccctctccgacccgggcatccgcagggagccggcgcgggcttgcgccttcccagcgccccttgccgcctctcgggaggccccgcgcggaccccagcctggctgggccgtcccctccggatgggccggcgggcggagcagcgcagagggcaccgccctcggcccgcccgccggggaggggacgcgagcgggaggctgcgccagcggcgcccgccgggggcccgccgcactctgctctcggcctcccgggctgcggggacgggacggctgccggcgcggactttgcgggccgggagccgagtccaggacagagccggaaccgccgagggaggcgagagggcagtgcgcggagatggcggccgcggcggcggaggaagggatggagccacgggcgctgcagtacgagcagaccctggtaagtgaagctgagctgagccccaggagtgcgctccgggacccctgctccaggttaccctgggaagcgcgaggaccaggggcctaccctaatcctgtcctagcattttgagctggggaaactgaggcttggaagtctgaggctgcagggccgaagggatggaaaactgcatgctggtttctggctgaggctgagggcctgcagaggacaaggacaccaggtacttgtctcaggtgtccttcccctcaccccacaacatgcacgttttctttgcacctccccttcaccacctgggcccaagtctcagcaccccactgccccttccgcggcaccattcacaccattgaactttctctacgccactatctccaccacccaagacattctctgtgtccctgccatgtgcatggcaccatgctaagcatagaatcgagtgtgtagaaagatggtcagccccagaccctacctctggaggctccacacccagcgttggctccaggagcccctcagttgactctggaaaaaggtggcttgccactctgggggacaggagctttagggagggtgggtgaagcaggaatgggtgtgggaattgggacctttgtctatgctgatgcggggtatccagcccccacccaccccagggtgtgtcccctgacctcattagaagcaggggtcctgggctctgagctgacttatcgcccccattgttacttggtgtttgagaagccacgtgaccctcctcatgtcactggggtggaagacccaagccctagggaaaggaaggggcccgtggttcctttttaccagcttgggctggaatttgcccaggaaggtggcagggagggaacgtcttggagaggagaggctataagtctgggaggtgcccagttaggagaaagtagctggatgaatcaggatgtcagggagaggtgggagtagagcaagggtagaggggccaacccttgggatggggtaggagacacttgccaatctgcccagaccaggataggagcatggtcaaggaagccaggcacctggcctctgaaatggtgcctcttaacaccagccacctctccatctccgtcccttccagctgtctctggaatgagctctcagggtcgagctctgtcccgggcactctgtgctccagcctgctcccgccccccttcaccatcctatccctttgtctttctctcccactctcacctccctcctcctacaccgtgcttgcctcttaatactctccattctcttcctcctccgtacttcttcctctctcatccccttctttctcttctccatcccttcgccttccctctcttttctcttctactttctcctctctagttccctctcttctctttgctttccctttcctatctctcaccctctctctgtctctatctttccctccctccctcccccccatcccagccccaacaggagccctttgtgtcccgaagctctgcgggtggcagccagaatctactcctccccgccccccaacacacgcccagcttggcaggtctagccatggttcaggcgactctcccgtcccatcaccccagcatccacagtcacagcccagccatcctcagcctccgctgtcccccaacccaccgctgggctcagtgcagctccagaatggggctgaggccaccaagccctctccacccaccctaagtgagaggctttccact

SEQ ID NO: 316141 - DNA, 4001 bp, Homo sapiens
aatttcacatttaagaaggtatgcttagaggcattaagtgaattgcccagtgatacacagcaattaagtagaggggttaggattcaaaaccaagacggactccaaagcccgtgatgacatttgcaggttccacctttcacattcattatttcatccaatttaagaaaccctgggaatcacgtgattggtaggtcctggggggaaagtatcccactgacaaccaagctgagattggcaaggacccttggaatgggggatttggtaatctaattttctagttagtgcaatatttactagaaggctttgtttattgctaaatattttctaaagcaaggctcagagcaagaacttgccaactagcatgcttacatggccacggtgggcccagccaccagcaccatgccctcctttctgctgaagatctccactctccttctcgttctcgcaggggcccaaggctcaggaaggaacgtgctgaccacccctggggatgaggggacctatgctctttcctagctctgcagggactgagattcctcaaaattaatattgaaaggatgagctggaagatctgcaagattcatgagagccagagagggcagctagtaccattaaagatgaacctggactccaagcacctctaacactttctgtcgttagtcaccacgactgctgatatttgccacacacttactgttagacatactgggctgaggacttgcctggcactatttcatccccactgcaaccccgtgataaaggcactgtactttcatctccacttcacagagaaagaaacagaggctaagagaggataagtgacttgcttaaacgcacaccgctagtagccgagaaccaagatttgaaggcggggcacatattgtagtaaacatttggtgaatgaaacctcctctgtctatgctcttagctactaagtcctatcaagctcgccccataaccctgaagtcatccttttccacgcggagccttgcttctcccaagagtacgctctaagtgttggctggcaataaagtaggcagacactggtcgccctgcacctggtgcaagactctggcctgacggtcacatactttagcagagagttcccatcagtgagctggagacgggttcctaaacacacacatggagtcaggagttcactgggttccttcttcagaggctactctggcactgccaagcaggccgtggcaagctcttaccaccggacacacatggtaggtgccctactggcccccaaagcgcccaggaatcagctgcaggcctgccggggttctgccttcaaaggcagttggggaggcccaggcccgctccgcgcacctcgcgtggctccccaccacccccgccaaatgtgcaccacccatcacctcccaaagcaaaagggcctgaggacccgacgccagtgcctgccacgagctgagggctcgaactggcaagccccagggcgttgcccaggtccccggcccccggcccccgacccccaatccccggcccccgaccctgagggtccacccccgccccgcccacctcccgcgcctccctcagctcgcttcacacgtcacccctcagttctgcaaactctcctggatcccgaaggcgtcctagaacctccccctcaccccggggcccagcaccgcgtcgtcccctccagggggccgagggttcgacacctccacttcaagtcccaggcgggtgtcggagtccgctccagccccaagcgcgcgcgcgtcttacctgaagcctggactccgcgggacgaagccacctccgccgacgcgtccaggaggccccacggcggcgccgctttcccaccccgccgccgcccccagcgccagcttctggcccaggaggcccagaaggcccaggcagccagcacaggtttggccgcgccgccgggttcgcagcgaccgccacctccaggctcgcaggtgtccgccgtgcgcctgcccggcgggcgagcccggcgcggagcctgtgcgcctgcgcagagccgcgagttcggttgccctggccccggccacaaccttggctcgcggaatcctgggaggtgtagttttgcgtacgaggacagcccgcgccgccaccagcctgcggaatgttgggagtgataatttgcgccgagaggctgagttttacttagtgttaggattacacagttatggcagttctgataataaatttaaatgcaagtttaaccaacaaccaaatgtcattgtaaagtcaaggtaattaatacgtttacatgcttttaaaaattgtaatgctacagagaacttacaaaagcaccagtcctctgcggcaccattccattaaccagctgtcaccttatcccaccgtccagtcctggctgtccagtcctcaagggcagctacttatggctgtggcatctggcattcccgcggattctccgaatatacatatgcccctatttcttgagttatgaattttagatcttttgacttcttttttagatctcttgactttttttgaacttaagtcatctagagatgcacctaccaccaccaactccacctccatagagttataagatttctacctatcaaattgggaaagccctgactttaatttatgattattttaaattagcccaaatgttaaggtattaagttggtaaatttttgcagggcaatttgtcaatacagccaaaaacctttaaaaacatgtagtcaaaagcctctaaccaagaaattctaataattgtggatgactgcaaaggctgaatagtgttgtttagatgataataaactgaaaggctgaagtggtgatattactttcagagagagtagaattgacagcaaggaaaattaccaagaataaaaaagggataattatataatgataaaaggttcaattcaccaagaagacataattctaaatgtggatacacctaacgacatagccttaacataaataaatcaaatgatagaaccataattagaaatagacaactctgcaactgtaattggaaacttcagcatccctctctcaacaactgatagaacactagacagaaagtcagcaaggatatagaaaagatcaacactaataccatcctaatctaattgatatttacataatacttcacccaccaacagaatacacattcttttcaagcaaccttggtatatatattaagataaactgtatcctggatcataagtttttaaatatacagaagacattaatatatattttaccaaagtagttatacagatggcaaataaggacagatgttcatcactagccataaaggaaatgcaaattaagactatgctgagatatcaccatacacctatttaaaacagcttaaaaaggcagggcgcggtggctcatgcctgtaatgccagcactttgggaggccatggctggcgaatcacgaggtcaggagttcaagaccagcctggccaacatggtgaaacctcgtctctactaaaaatacaaaaattagctggatgtgttggtgcgcgtctgtaaacccggctactcaggaggctgaggcaggggagaatcacttgaacccaggaggcggaggttgcagtgaaccgagatcgcgccactgcactccagtctgggctacagagcaagactccatctcaaaaacaaacaaacaacaacaacaactacaaaacagcttaaaaaataaaatagcaaatgctggtgagtatgcacagaactggatctctcatatattactcacagatgggtatatcatggtagtttcttttaaaaaactaaacatatgcttcccatatgactcatcaatcacactcctgagcatctattccagagaaatggaaacttatgttaacacacaaacttgtacacaattgttcctactttctttatttgtaattgtcaaaaactgtcaacaaacaaaatgcccctcgataggtgaatggttaaataaactgtgattacatctatataaagaatatcattcaacaatagaaaggcacaattga

SEQ ID NO: 316142 - DNA, 4001 bp, Homo sapiens
atgagcaagttccctaaattgtctttaagcatggaactataggtgcaaacattttcacaatagttatatgtatttgtatttacatctatatctgtttacaaataatcgcattggtttacactttcagttcaccaataaatgaaatgaaatgtaccctcacaaaatgtctcccctcctagctcactctatccaggacctctgagttcaaacaaaatcaaaacatatatacatgatacttcaggttctataaatgaatacacaaacacgtattattactattagtggtagttgtagtaccattagcatcattgtcaaacttttttctccattgtgtggttggcagtattatctggatttgctttttttttttttttttcttggaattggagccttctaattgccatcttaccttttctatcacattctcctggtctcaagaaagctggtggagtgggggttgtggggctcaagagccactagggcagtataaaaaaatccacaattgcctactaagtgtgtagcacagagccccgtgatgttttctcagaagaaatcaatgcccaacattcacatccaggttgactgggcatacactgatcctgactaagaccatttctgcccatatctgactgtcagccttctccaaaagaggcggtgcttccacaaaagccttgatgagataggtgtatcacttctcttctcccattgttgggccctcagatttacagtactgtacttgacttcttagtcttcaagaacctcaatagaacaactggaaatggaaaggtgggcaaggggtattcactctccctacctggctacatacagctaccccaaacacaagtggggctgtttgcttgatgccttggcagggaacaggggttatgagaaccaccccgctatcccgacctcccatttctggcattgttccctgaatacagttggtgcttagcaaatgttgaatttgagtaaggaacagattaaccttattgaaatgttagtttttcaaagcttacagagatattgctgcagcttaggcatgacacactgatatgtgtgtggtgatggtagaggggttatttaaggcccaggctcaagacacacgcactgcacaccttccagcagcaagtgcacatacaatcattcttgccaaccaagatgcctcatgaactggtttcttcttggaaaatgccaagaaagaggaagcaaccccactcttagaaaaatctattttggtttgtttgacttgtcacatccttccctcaatggaaggggacacgaaatggaaagggacatgaaatggaaagggacacactaggaaatgagaagtgtgggctggggaaagaaattctgggcaatggatagagtagcttaccggccagagagcagcagggacaggcggttgatgggtgtctcaccctccacagcataggtctgttcagtggccagagttaagacctgctcctcgcagcagtgaacaatctccttgtatgtctgtaggggcacctgcaagggcaggcacagcgtcttgtagaggaggtcaaactcctcagggagggtgtcctcacgcaggcggtataccaggtgtgccagctggagcaggcagaccacagccagcaggaagctccaaagaacaatgtccaggccacaggcactgaaccagccccacagcacgcagcacaggtaacctgcactcaggaagccaaaaagatagaagcatccatacaccccactgccccccatgaagcccaggagtaagaggcagttggctaggtggtagacagccccttccacatcctgcttccacctaatgcacgctgaaccctgcaagagaagctggcccactctgctgctgttggcgctcatctttggggcctctcaaagcctcactgggctctaatactgtcctcacataggaaattcagaaaatgaatgaatccatccgctcaggggtcttctcacctccggcttctcactaccgactccacctttcctagaaggaatgcttccggtggctttgggaaggaatgatggaacatagtacacttcatggagaatttaaaaacctctttctctctctctctctctctccccctctccccccctctctcctccccaccacccccgctgtctcagcaaggctctggctctccctgcagagctctggcaagcttccttggttccatgtttcttgggagtcttcaaatttggttcttagcagaaaaacctaaatagtcccaagggaaagtagcactacaggactgaaaagtccagcagcgtgggatgatgcggccacatcctgctctctgtttttcccaagcagaatgaggagagccagcatgggaggcacatttgtgttccatttggaatgtgttctctcttggcaccggaagaaagggtgaccccagatggataccatgtttggaattggaatccaagaggtactggcagtgagaaaaaacaggccaggcacaggcagcctggcagagcacttaacatacctcccagaggacaagataagacctcagggtcagagagacagacaaggagagagaaaggaaaagtgagcacagaattcacctgaacacctcaggcaggaaactgtcccgagctccctttggggagagccagacagtgcttctgagtgaggacacatcagagtaggaaagtatgggactattatcagaaaaaatcctaacagtgaaagctggaaaaccccctgaaggcctttattaagtcacactgcaaatatcattatgtatttatttgacatccatttaacaaaagtagctatgtaaagtggctttttgaattctaagctggctttcccctgcatatatctggatctggtaatagtaaacaaataataatacattgcccagatcatcatcccacccactccggtgcttccaaattataattcccacctattaaacacccatgaagtgccaaacctagattaggcattttatacacttataagttagttgtgacaacaatccttcaaaataaatattattctccttctagatctggaagaaactgaggctcagagaggtaacaagctcccacagatggtctaagtggcagagccaggatttgaacccaagtctgtcaaacttaatactctgtcccaaggggtttgccagtaagtggaagtacagtactagatccatgactcccaactccacacttctatgaagtctgacaattttcaaggaacttctggttgaacctaggaatctactttgggctgccaagagataaagctggagtatgcaaacattaggctaagaaatgttagttgggcacagtggcttacgcctataatcgcagcactttgggaggctgaggcgggtggatcacctgagtgaggctggagttcgagaccagcctggccaacatggtggaaaccctgtctctactaaaagtataaaaattagctgggcgtggtggcgggcacctgtagtctcagctactggggaggctgaggcacaagaatctcttgaacctgggagtcagaggctgtggtgagccaaaattgtgccactgcattctagcctgggtgacagagcaagattctgtcaaaaaaaaaaaaaaaaggaaggagaagaaagaaggaaagaaggaaggaaggaaggaaggaaggaaggaaagaaagaaagaaagaaagaaagaaagaaagaaagaaagaaagaaagaaagaaagaaagaaagaaagaaagaaaaagaaatgtgactctctggattccaaatgactccttgattcttcctccctgctgctgggttagcacttactcccattactcctatcgcccctgaagtacaggcggggtgctcagtaacctcccagaactaatcaaggactcaattcataaggacttttactatactgctataacttgatgaaaatttatgagaaattcaaaattgtcaaatatggtgagaaggagatgttttcactcaacaaatatttattgagtgccttttatgagctaagc

SEQ ID NO: 316143 - DNA, 4001 bp, Homo sapiens
aaaagaactaaagtcattttgcaatataatgattacatataatgcattactgtgcattccaaaattaagcaaattatcattaaacatatttaatactcaagtgttcccattaaagtcagtgtttctataatagttccttagacaattagatgtatatgattcaaatttcattaaaaaattataaatcaatgctattatcatttaaaacatttgtaggtcacttttattaattataattcttttttaattttaaggcttaaataatttttgcttttcagattttaggaagttaaatacaggataggctaatttactaaataaattgttacttattttaaagtaaataaatggcattttgagtataaaattagattttactagattattacctcgattctgaattgtattttcatgctggccaaattatcttcaaacacagaaatagtgtattattctcattattctcaatctataggatgacctactatttaaaatatgtgattagctatgtggtaattgcttagatttatttatagcatatatttttgataaaaactattgtgtcttccaaaaattatgttggaggatacttcctgtattaccctttaaattaaattacagaaatctttggcggattcctgaaatttaatttaaaaggtaatattgaaaaatctctacattaaatgattttaccaaagtctaaatatctgacctctagattctttaaaatccaccagaagattggtgccaaacttacgcatgtatttagaaaatgcttaataataacaaaagatagagcttaaatccttcaaatcagaataatgtatcaactcaaactttgatttctaaatgtatataatttcattcctaaatatgagaaaaattgcatttaaaacaagtggaaagtgaatattatattgctattcaatggaagaaatttacccaattcaagtctttctccatttgtaaatcaactctaaaacactttgttactgcataaagaatgaacacactggcaaaacatatgtatttggctgattgtgttgagcctgtgaattcttaggtttaatttttgttctaaaaagttatgtgagataaatgttaaaacttagaagtgaagtaagtctcttcagaatgcaattttgagaaaatttaccttagttaatgggctttaaatgtcatgttatttcttgctataatttctgtatcttatgctaaaatatgttaattaaaactctattttattctatgaaatccattgttgttgatattcagattgttctgttgtgtttaatataaggtttatagctgtttttagatagtaaatgtaatttaacaaccgaataaacctttaagataaagaagtagcaccttttaaatattgttattttataatattcatttcatttgctccttattctataaatatttccattaaaaaggtttttagatttaaaatgtccaagttcattcttttcttatgtagaaaacagattttcttccttacaacaaagccaacagtgattttaaattactacacttactaatatttctttaaaatttatttggcatgttggctttttagatatgcttaatgcttacttcacttaagacaaattaaattggaggggtaaaatgaaagatgcaaagagattattaactatcaagattcaaagcattcattctgaaatatttaggcccggtcatatgtaaactgtcataggagtcagtacctgtagacatcacattggtggcatggttggagactggtagacactcggcagcactgtgatgcattatcagaggcagagttgcagaggcgtcagaattcagaggtataaaggtatcagccgaagtaaaagcttggcaactcattcccacaagagagtagaaaaataaggagaaccgctgctccccaaatcagagttttattatattactgtctcaaagggccgattcaattctcactacctgcatatatacatcaggaaggctctgaggcaccaggagggtgcgcgctagtatttatactgcaaggaaatccctttatacatgttaatagtcttttcccaggagtattgctttatcaatctgaaccgtcttccttttttaccccaaacataatccatggcagagaaggaagctgattctggggtatagatggaggggaagggagaaatctgaaaccttatttgacaacttcagtagttcagaccttttagagaggaatcaacaattttgaaaacacgtccctcaaaaaaataatgccacaatcaattgaaaaatagtaggtatctttttgctactaacacaattgcaaatgtataaatatgagatttttttaaacaacttctcattaaatctgcgataaaacatgaaacaaaagaagtgcatagtattatacataattttaagaaacaatatttaagattatgagagaagcatataatactaaacatgagaaaatatgttgtcaattaatgattcatactcaaaaatgcacagcttttaaaaacgatgacaaccaatataagttttactatattataagtgaaaaatggaaaaaaattggataaaatgtagtaatgataggttggtgcaaaagtgattgcattaatggcaagaaccgcaaccactactgcaccaaagttaaatacaactaagatatgggtaattgttatctttacctcgatttcaattcactcaagaacccaatatttagtaagctgttactagatgctgacagtattctaggtatttatacagttacgtcatgcaaatctcacaacatctatgtgagttatgtaccttgccattctcactaagctagactctgtgccacaaagcctgagataaccatggtagttgctaactagatgcaaacttctcacacaaaatatattgactttatatgagaatgaaaaaaataatatgctacagccaactatttcaaagataaataacagcatcaaaactttacaatgatcatgatttatgagtatgtaatgagtaaataaaatactatttatgtattgtatattaaggtaatatagcaaatagaagtaagcgaacaggaatagatattattgatgtgagtagacactaattttgtactacggaatgttttaagataatttggaattggttgctttgtatcaaatttcatgttaatattgataagacattttcaaaaacttgaacactttgtcagtaagcagctgatattttgaaggaaaatatgtaaaagcttgcctaaatcattagatatggaatgaaaatatttattctaaaaatgacatattttttcattctgaattctatatctttgaagctttattagtcttttctaatgagagaaagtttcaagtaatcaaaagcattattatacccttgcagaattctgatcattttcagacttcacatatacaaaaaggtgattttcagtatgtctatttggagtttctgttaagaaaattaaataaaagtgtgtttattgggtatcatgtatgttaaaaattaagctaaatgatatttatagaaaatgtaatttgaaaatgtcccttaataattttactattgttatataaagtcattggaatatgttggtaaagtatgtgaaaaatatactttatgaagtatactgaagatactttatgaagtaccataaaacctgcctagcaaacaatataaaattttcccagttatttaccatgatatctaaaaagttttaaattgcaatcgtagaatttcttccataatcatttttaaaaattaaacacctgttctgttaaaatgaggtaaagccaggaaataaatgtttccattacagtcttctacgatacaatatatctataggattatctggaatgtacccctttaagatagattcttagaagtagaattactaagcttaagtcttacaaacttttaacatcttgaaaacattactaacttgcattttcaaataattaattatattatgattttgatgtaaaatatca

SEQ ID NO: 316144 - DNA, 4001 bp, Homo sapiens
tcagtagagactgggtttcaccatgttggccaggctggtcttgaactcctgacctcaagtgatctgcccacctcagcctcccaaagtgccgatttacaggtgtgagccactgtgcccagcctgttatttaattttatcacaatttttgctggagtattttaatgccaatcttcaaatcatatcaactcacccataaatacttcagtctcaacagtctaatccaatcacttcttcaatacctacaataggccaggcgcagtggctcatgctgtaattccagcactttgggaggccgaggcaggcggatcacctgaggtcgggagttcgagactagcctgaccgacatagagaaaccccatctgtactaaaaaaatacaaaattagccgggcatggtggtgcgtgactgtaatcccagctactggggaggctgaggcaggagaattgcttgaacccaggggcggaggttgcggtgagccaagatcatgccattgcactccagcctgggcaacaagagcgaaactccatctcagaataaatgaataaataaataaatatataaaaataaaaaatacctacaataggccagctaccgtgcaaggtgctgagatgcacagatggatgaggatgcaccctgcccttgaagctatgagggaaaaagtttgcagtgctgtccatatgctcatccaggtcattaataacagaatgaaacaggtcaggtggagccaaggacaaagtcccattattgtgcccaaccgggaacctagcccttcatctggctaggaatggtgtgatgagacctaagaaaatgacctaggaaaactcacagctgagacatattagcaaggggtccaaggcaatatccaagagaatgatcagttagccggcagaaggagcaagaggacccagcaaaagaaatggacaggtaagcagagaagtaggggaagaaactgggtctgtcaaggcctttgagagcttttggccaaaatatataaaaatattttaattgctattttttggtaatattcatgtaaaggatgtagttttatgagccttgatggactattgggacaatatataaagcaccgcaacagtgtgttttgatctgaagtcaattacttgtatcagaacttcatttttccatacgccggggacagccataatacagctctatcacacgtgggccattcttagaatgtattgcatcattcatatgttcattcattcataataacaaattaaataggccgggcacagtggctcatgcctataatctcagcactttgggaggctgaggcgggcctatcacttgaggtcaggaattcgagaccagcctggccaacatagtgaaaccctgtctctactaaaaatacaaaaattagccgggcatggtggcagccgcctgcagtcccagctactcgggaggctgaggtgcgagaatcacttgaacccgggaagcggagtttgcagtgagccgagatcgcgccattgcactccagcctgggcaacagaacgagactctgtctcaaaataaataaataaataaaataagttaattaattaattaattaactataaagacatcagaataagagcatagagaggaatggaattcctcttttgtataaggcagagggatatatcactcttcaatgtacacagtttaacaggaagccaaggtttcatctgataattaagaaagtggaagaaaaaaatactgtagatataattactcattggctatacgtattatccaaaaaagatttaagaaagtttaccttaaagcattattggtgctcatgttcctttggaattacctttctttgccctccctttatccccttcccctggcctctatttctccaacttgagtagtgatggtgatggtggaggtagaggtgaatgtgatggctgtggcagaagtagtggtgatggtgatgatagcgatggtgggcattcccctcacttgatggtagagctccctgtgtggaatgttcactacatcacctggaacctcagtcagaactcactttatgattcagaaggactgtgaagcaataacatcacaagttgtatgaagtaaactttggaatttctgaaagaaggagcatttgttaaatatactgtcttactcttcctttctccgccatcatggtgtgtgcttgactctgcttctcgccatgtcttctcacaaaaccttcaggattaagcgtttcctggccaagaaacaaaagcaaaattgtcccattccccagtggatttggatgaaaactggtaataaaatcagtagaacttcaaaaggagacattggagaagaaccaagctgagtctataaggaattccacatgagatggcgcacatatttatgttgtgtgaaggtcacgaccaccttaccatatcaagctgaaaatgttaccactatctggacaattggacatgtttcactgggactatattttttctttctgtgtgtgctatgaaggcactggttggctgggttcagtaataaatatgtgaggtctttcgtttttctctctctgcatatatatatatatatacacacacacacacatatatgtatatatatagacagtatatatacatagacagtatatatatagtgtatatatatagacagtatatatatatacacatatatacatatatatgtgtatatatatacagtatatatatatatatatatatatatatatatactatcttactgctggatgcaggggctcatgtctgtaatcccagcactttgggaggccaagacaggaggattgcttgaggcctggagttcaagaccagcctgggcagcgcatatcgagaccccatcgcttcaacaaaaaaaaaaaaagaagaaaggaaagaaaaattagctgagcattgtggcacacacctgtagtcctagctactcaggagacggaggcaggagagttacatgagcccaggagtttgaggcagtcagctgcagtcaactatgattgtgccattccactccagcctgggtgacagagcgagaccctgtctttaaaataaataaataaactgtcttatgcctatgtagtagaaatgaaaatgtaaaaggagtgactgtcaattatttttataacttgtggcactttcaaatagccattttaggagactatccttactgtacagatgggatgtcttcccacccagtgttacagcacctcaggccatctctcgaggacacctcctctatctgctctgtagagcctgcccaccccatcttgctgtctcaattaactgcctgagagttgtagatcttgactggactgccttcactctttcccctgccttcactcctgactaatatctttagttcccaaatgtttaatccacagctgcatgccactcccttaccccaaggctgagttagaacaagagtcctagagcaggttgcctgaatgctgaagaagtttggacaagcccaactgtcaactaggtgtctccctgaagaggtatcaaagtcaacatgttcaaaatggaactcactaaccttccctccagaatcttctttgatcatcaacttagtttaactggaacgtctcagagaatcccttttcctgtgtggttccaggttaaatttggccaagaagggaatcttaatatttaaaacttaggggtttatattggaatgctatcatcatccaatgagttcacccacagatgctgaagtgcctagcaggtttctgcttgtcctttgttccccactactctgcctccagcttttcctccagctccaggtcttgctgaccaatagcagccccaggcctattagctggcacccgtctttgggcccacagaagcaaacatttcctctagccttccccatcagcttctccttcatggtccagcttgggcatctggatgtccctggcttctcagactgactggctggggacttccctgatgccccatctcctcttcccagatgtttagttgaccagcttctcccacaaactaattttaa

SEQ ID NO: 316145 - DNA, 4001 bp, Homo sapiens
gaacagaatgttttgatatattactccaaatgctaactggtagcatctatgagtgtcttctgtcaaactcccctaggagtgaaaggtatttctttaagagaaaagccacagtgaatgtccatgccagtccctataccagaaaggttttctaaatcatctagcaccatcagttggttctgttctcagtcagcaatcgatcacttagcaatagacagaaagactgccataaaatacctgaaacctgtcgaagatttgcccaggtccttttaaagagttaagttattcattgttctcttaataaatccagttaacaatttgtctcacgaatgacagaaacagttggggttaaaataatgtacttcaaaatcagaggttttccaggaataggtattatacaactcagtttatcattgtctggttttatatccaaatgataatttacacaaataaactttacattttgtccctaatcttgcaaggaaaagaagaaaaattttagtttcttcatggcagacgactatttttgacttgatttcttttataacaatgacactatttttacaaccgttagcctatgacccaagtgaattggattcttcttataaaacaagagcactgcaaaaaaaaatgatataaggataatacaataattttgcaaatttcggacctatcaccaacacattccaacaaaatgcaatgagagtgagccaactcacctaaggaaagggaattaagcagaatgcagaaatgcaggcttctggtcaccagcagaggttaaggccccttccttacctaccactgaccttatataaaagccgcagctcggttactccccgtttctgactccttaccttaggctcctccctaaacaccgaggcgtaaagtaccacgactacacacccaccttccaccaagggacctgagatttctgttaacctctgctgcctctacccccctcagttaggctcccaggaggagtggtcagcgcctggcacttgcaggagcccacaaagcagcgacttcgcctttccagccccccggggtgcggctgggggtcctggctgcgcgctccatccgcggaggcacggaggcacccagtccccgtccccagcccctccgccgggcgtagggccagcacaacgcgtcagggcacagggcctggccagctacaagcgcgcccctcgctgaacggtcccccggtccccaagcggcggtcgcccctgggctctggacagcgaacgggacctcctcctcagcaggggtgccgcgcggcctcaggacggacgcacgcggatcttcgcttccccgggtccagacaccctgctccaaagttcccccggagcggctcccgacgcttgcgcacctccgccggggacgcggaggtccccgtgtccccggctccgcgcccacccggcgctctcccgaggggggctgtcctggaagccgggacgcaccggctcgcgtccactcgagtcggcaccggccgcggctctctgtgcccgcgccctccgcccctagtgcgcgctccggtagacgcgaccctcagcccgggtgccctcagcccaagaccccttcacccggtcacccgtgagccgcccgcccgcgacccgtcagtccgggtcctgccggaccatgaccctgcctcagccccggacccctcagccgagacccccttctccccagctctcatccgtctgggaccccgtcagttcccgtttcctcggccctagcccccagaccctcggccccagccctccgcgccccctccctgagcactccccgcccagccagcagccggttcccgagcgccgcgggcacccgtactctgacctgcggccacggcggcgtggcgcccctctccggtgtcctcgaggccgacccaagcgccccaggcggcggctgcggctcgggctcgggctccgagtgcgctgggccccgcctgcccgcggcggagccgggtcgggccgagccgggcccggcgcgggggcgggcgcgggcgccggctgggggtgggggtgggggtgggggtgggggcgggggcgggggcgggggcgggggcggcggcgcgcgactgggagggagcggcccgggctcggccgccgcccgcgcacagtagggcccacggcgggagccaccggctttcccgcgtccactctctgccccgcggcaggctacctggtgtcgtttgctcctcgccaccaccgctgggaggcggcccagagagggtcccatttccgaggagggatccgaagtttagggggatgcccccggccagggccggtctggggagaccgaggtgtggggctccctctcggccagagtggcttgcccttcacacggcgatcggccaggccgtcttcccaagatgttctttccagtgacattttaaaagaaaatttaattaaagcatatttcgggtcccttggttttctcttctgatcggtggtgctgcacactttcagagttccttgcgtttgtaagttacatggttattcacaagtcactgacttttaatcattaaaaacatttcttaaactcattaacagaatttcttaaatttcttagcagtgtttctgacaccgagggactcagacaacatgggtggggacggagtggggacgtgaggcacgagaaacagtttctcatgtgttgggtagacagtgaccttttcttttcctgccacgctgtccatcgtgacctgtccaaagtgggttggcaggtgcgcgttcagaaagccgctggtctcctggacttgaggcccctctttccctttttccagtcttatttctggagcatactgttctgggcctgatcctctttggggaggcagcgatgcctgaggccccccacttcaggaagcttatggactgtatgctggggtgctctgcatttcttcctagcttcattgtggttattgcccctctggtacagaaggtcctcgtttgtggttgaagcaaagttttgcgaggatgggtatcacaagggaaaatattcagcgcttaaatcaacataatcatgtccttcctccacagcccctaagataagaagctgagagccacggatcttacagggactgaccactgaaagaccatttattggcctgtgatttaggtagtcaggttgacccggatccacagtctccactcaggcggaagtgctccgtgcgtcctacttcttgttaattccagagttccaatctgctttttttttttctttcttcctttcttttctttctttcttccatgagacagggtgttgctgtgtcgcccaggctggagtgctgtggcgcaatcacggctcacttcagcctcgacttcccgggctcaaggaatcctcccaccccaggctcccaagtagctgggactacaggtgcacaccaccatgcctggctaatttttttttttaattttaattgtttagtagagactgtgtcttgacatgttgcctagactagtctgaaactcctgggctcaagtgatcctcctgcctcagctttccaaagtgctgggattataggcaccagccactgcgcctagcctgctttttaaaatcacagctttattgaggaataattaatataatctaaaatgtaaataccatagaagtaaaatgtacaattcaggccgggtatggcagctcacgcctgtaatcccagcactttgggaggccgaggcaggtggatcacttgaggccgggagttcaagaccagcctggccaacatggtgaaactccatctctactaagaaatacaaaaattagctgggcgtggtggcacgtgcctgtaatctcagctactcggggggctgaggcagtagaatcgcttgaccctgggaggcagaggttacaagccgagattgcgccactgcacttcagccccagagcaagactccatctcaaaaataaataaataaaatgtacagttcaatgagttttagtttattgacagagttgtgccatcatcaccaaatctacccttagaacattttcatcactccaaaaag

SEQ ID NO: 316146 - DNA, 4001 bp, Homo sapiens
cctcaactccacagtgttcaactctgctggcctcggctaatgatgatcatatagctaatttatttttaagtctgtctgttttggaagaggtggagtaattatttaaaggtcatttacaaaatgcaataggagtaacaatcataggtcttgggcctttaggagctcacatttttaacagagaaacagtgcttatgaagaagtagtagccagagaccctataagacaagggttaaattattggtacaaaatataatgttttaattgctaataatttcattctgcactatgttaattaggaagaaaagtactggatcattcttttagaggaaattgagactcaaaaaaattaaactcagagtaaattcaaagcataaaattagagattagcacagaatgaaaactaacttgaatcacataaccatcccttaccacaaacagtacttgcctctcagttaacctatttgttgatatttgttgcactgcattctagacatgttctttcaaaatagacaaaactatcaaattttgactcaagaactatttcacagtatagccaggacattctgccctgaggcaggctaaattaataactgaagaaagatagcaacaatttttatggcttgcagaaaaacagaataacaacaatttatggaataaaacaaaactcctagttaagaggcttagatgatagaaatacatgttgaatcaaattactgtaataaaataaaacagtacttcaggaaacattttcttactcatttttaaaaagctttatattttaaaaacggtgactaatatgttcaaacttcaggcttccaggaaaattaaaaggttaaaatgtaaagccatccatttcagcaattaagtgacttaattttaatgctttagcacttatattataaaacatgaatcacactagctaacaatctatttttacacagaatctgagaagagaaaaataaaatgaatagaaatatagacatcaatacgagacaatacaaaacagaaaaggctgtgctaagaaactccagtagaaggagctatagaaatggagaacttatattttgcaatggccaagaaagaaatattgaaaaggaggtatctgattctgacacatctgaagagaagttaataggtagtcacttgcaataggcatttactgttttagggacctcattttctttatgcataaaatgtgatgcttggaacagatatttttcaaggttccgacaatctattctgcaatgcattaggcactatgctaggaagtatcctaagaaatctaataaagagcaccacttggtcctacactctgggaatttacaattctttgggagagctgaagtgcacacacaatacctagatttcaaaatagaacagaaaagagctgagagtacttcaagaggaataaaagtgctgcaagagggataaaaacagttatgagagatctctaacatatgagatgaaaagaggaaaaagtgacccttcaagtctaaaaagcccttatgtattcttgggaaatctatgcaaactcaggaaataaaaatgaacaggattgtttttggatataactatacctttaatgcttaaaattcaggaaatgggagccatgcacagagataaaatagattaggttaggtttccttttttaaggttctgaacatgtttttaaatgaacgcgatagcaacgagctaagcattaaaatactggagtgtacacatgatagtattaaaacaaacacaacctggaagacaaactacaagagcaattttacccttacataaatgcccccacgtccccaatagccgtatctggaaggaactttaccttgtgatatgtttgcagacagtgtatcagtgaaggaatcgctttctgggtcaataggagaatctcccagagtttcacccataacagcatggaataggggtttgctgtaattcacactgatattttgtctctatctagcaaaagatcaatccgttaaaagaaaaagacttgaagtaacagaatttgtgaatacacccatgagtcaagacatcagtttccaaatatttgggagagatgggaataaacacagaaaggactgggcttgaattggctggcactgtcctattaggagccagctgtgacaaaaagttgtgtcataatgttcactgctttggcaagacttggtacattacagggaaaatattgccacactgtctcgccggtgacccacatgttcagtgtcttgtgaggggcgtgaactgtactgtatttagaattatcagagcagagactgttcaatatccacttgcattttttattgttgtaaaattcacaattgcttcttaaatggaaaacttaaatctcttgcttatgaaataccagaaagcttatttgggcaaagttttctttcggtgtctattcctggttgaatctctaatcacattatttgaagaaaaatttggaattcaaatatgtatccatagtttaaacgttggtatcagcatgctactgaaatgttatattcctaaggtacttactctactgatttgtgaagcccaaaatgatactgactgctatctaaattctgtaaaattaaatagctgagagaatgaagaagggtttgatatggtttcaattttatacatcgggtttgctttcttaaaaacttcagcttatccatcaatagcaactgcagcaatgttacaccagctgatgtttgaacatcaattgatgtttaaacgataagtgctatgtcataatgaaaaaatggagttctctatgagaagaataacacaccaccagaaaaaaatagacttacgctgttaggttggcgaggaattgtggtcagttttgtaatcaggaaaaagctggcttcttgctcaaggcctttgccctttttggcaaggagaaatactagctgtgccaaattaccgatgtgggagcaggtcttgtcacatgagtggcctattagaattgcagtgactttgcggactttcaaagacgcccccacacagggcagtatattagaaggcaataattctctgaattatacttatcgtgatattctgagtaaaataaatatatatctggttaatctccattgagtaactattcattcttcaaggggactagtaaaagtgtccctgtcaatcatggtgcaagagcctgatggggaaatgctggctgggtctgaacatcacggaataaagtgggggagttgagcaactgtgccattaagccccaaaacatctttattaaggcaatccaagttaaagcaaaacttgggtttgctaatttgtccaaatgactacagtgattacagttgtgtaaaattagttttctctatattcagttgaattctcaataaaggagcttctcctttcctccccatgcttggaaatttacttatactacaaagtaatccagacacgatggcacaatacttaaggatatgactgaattgaactcaagtcctataccagtctctgttactctttggcaacacacagatgcagtccttccacctgtcctcatgtcctcaaagggtctcacttctggactcttcatctactgttacttctattctcttttttctcagacactattcaacttctgagtctagtgggtagtgaggccttctaagcctctaatagttcccatactgtgctttagcttctgaaacataagattacatattttaacaatttattattccatagcatcagaatctgataacacctactcctatagcacccaccacattctgacattccgtcttcccccagactatgttttacttgaaagcgaaaacctgtcttactcattacatttcatgcatttgtttgttcaacaaatattcattgccaatataatatgtggcaagcctaaagctaggtgctaggtagacaatgatgaacaagacggatgtgtcaaaaaacagtcaattagcaaaaactacaattttaataaacacagggcctgccacatagcagctcagtaaatgttgcttaca

SEQ ID NO: 316147 - DNA, 4001 bp, Homo sapiens
agtgaaagtgtgggccagaatgtgtgaaacattcagaaaatgtcattttaacatattttcctacttcatgaaagcctcttgttattaataacgattttataacctgaaaactaaatgaaatgtattattaatacttgtatatgttccacggttgtgccttttacacagctttcatgcacataattatcttgataattaaggttagtggctaacatccttattgtcagaaaattacagaagaaaaaagtatttgtttatatttatataacactgattaaaaacaattcactacgaccattagtaatccacttctaattcatattcctcatgtcacaccttttctcttgtacacattttaaatgtcataggaatttagaaatattgcaatttaaagcataatctagaatttttttaaaagtagttctgaaacatacaaaaaaatgaacatttaggaaactagtccttcaaagaaaatattatattttatcattaaaaatatcaatcgcaaaaatattttcaaagcacttaagttcaataaagaatatgaggccggtggacattttagttttaattttaaaaagaaattatattctttttaatgtaaagaaatgagaaaacgacatccaaaaagtcttcagcctgggattctacaaaactttatacctcactgatgccatggttttacagcagttattgtttaagaactagaaacaaacttgtaaatatgaaaaaagtttttgattttaaaaaaaaccatcattagtgtttctcttttccttcaagtgagttttaaaagactgagatggccaccagttgattcaaagatctcttaagacataattattagcaagttaactatcaaatatcatataatttaaatcagggagaaaaattatgtgaagtacacaagaagacaaaaatggacagttttgtaatacacttcactttttggctgagacattacctttaaagtttcgtatattaaagtgaatattcaaatacactttatttggaatcaaataaagtgtatttgattccaaagtgaatctgattgaaaatatactacacaaaacttactttaaaacttgaacagaatgttttgatatattactccaaatgctaactggtagcatctatgagtgtcttctgtcaaactcccctaggagtgaaaggtatttctttaagagaaaagccacagtgaatgtccatgccagtccctataccagaaaggttttctaaatcatctagcaccatcagttggttctgttctcagtcagcaatcgatcacttagcaatagacagaaagactgccataaaatacctgaaacctgtcgaagatttgcccaggtccttttaaagagttaagttattcattgttctcttaataaatccagttaacaatttgtctcacgaatgacagaaacagttggggttaaaataatgtacttcaaaatcagaggttttccaggaataggtattatacaactcagtttatcattgtctggttttatatccaaatgataatttacacaaataaactttacattttgtccctaatcttgcaaggaaaagaagaaaaattttagtttcttcatggcagacgactatttttgacttgatttcttttataacaatgacactatttttacaaccgttagcctatgacccaagtgaattggattcttcttataaaacaagagcactgcaaaaaaaaatgatataaggataatacaataattttgcaaatttcggacctatcaccaacacattccaacaaaatgcaatgagagtgagccaactcacctaaggaaagggaattaagcagaatgcagaaatgcaggcttctggtcaccagcagaggttaaggccccttccttacctaccactgaccttatataaaagccgcagctcggttactccccgtttctgactccttaccttaggctcctccctaaacaccgaggcgtaaagtaccacgactacacacccaccttccaccaagggacctgagatttctgttaacctctgctgcctctacccccctcagttaggctcccaggaggagtggtcagcgcctggcacttgcaggagcccacaaagcagcgacttcgcctttccagccccccggggtgcggctgggggtcctggctgcgcgctccatccgcggaggcacggaggcacccagtccccgtccccagcccctccgccgggcgtagggccagcacaacgcgtcagggcacagggcctggccagctacaagcgcgcccctcgctgaacggtcccccggtccccaagcggcggtcgcccctgggctctggacagcgaacgggacctcctcctcagcaggggtgccgcgcggcctcaggacggacgcacgcggatcttcgcttccccgggtccagacaccctgctccaaagttcccccggagcggctcccgacgcttgcgcacctccgccggggacgcggaggtccccgtgtccccggctccgcgcccacccggcgctctcccgaggggggctgtcctggaagccgggacgcaccggctcgcgtccactcgagtcggcaccggccgcggctctctgtgcccgcgccctccgcccctagtgcgcgctccggtagacgcgaccctcagcccgggtgccctcagcccaagaccccttcacccggtcacccgtgagccgcccgcccgcgacccgtcagtccgggtcctgccggaccatgaccctgcctcagccccggacccctcagccgagacccccttctccccagctctcatccgtctgggaccccgtcagttcccgtttcctcggccctagcccccagaccctcggccccagccctccgcgccccctccctgagcactccccgcccagccagcagccggttcccgagcgccgcgggcacccgtactctgacctgcggccacggcggcgtggcgcccctctccggtgtcctcgaggccgacccaagcgccccaggcggcggctgcggctcgggctcgggctccgagtgcgctgggccccgcctgcccgcggcggagccgggtcgggccgagccgggcccggcgcgggggcgggcgcgggcgccggctgggggtgggggtgggggtgggggtgggggcgggggcgggggcgggggcgggggcggcggcgcgcgactgggagggagcggcccgggctcggccgccgcccgcgcacagtagggcccacggcgggagccaccggctttcccgcgtccactctctgccccgcggcaggctacctggtgtcgtttgctcctcgccaccaccgctgggaggcggcccagagagggtcccatttccgaggagggatccgaagtttagggggatgcccccggccagggccggtctggggagaccgaggtgtggggctccctctcggccagagtggcttgcccttcacacggcgatcggccaggccgtcttcccaagatgttctttccagtgacattttaaaagaaaatttaattaaagcatatttcgggtcccttggttttctcttctgatcggtggtgctgcacactttcagagttccttgcgtttgtaagttacatggttattcacaagtcactgacttttaatcattaaaaacatttcttaaactcattaacagaatttcttaaatttcttagcagtgtttctgacaccgagggactcagacaacatgggtggggacggagtggggacgtgaggcacgagaaacagtttctcatgtgttgggtagacagtgaccttttcttttcctgccacgctgtccatcgtgacctgtccaaagtgggttggcaggtgcgcgttcagaaagccgctggtctcctggacttgaggcccctctttccctttttccagtcttatttctggagcatactgttctgggcctgatcctctttggggaggcagcgatgcctgaggccccccacttcaggaagcttatggactgtatgctggggtgctctgcatttcttcctagcttcattgtggtta

SEQ ID NO: 316148 - DNA, 4001 bp, Homo sapiens
tcacttactctgtgaccaaggggaggggaccccgacactacccaagaggttacaaatttacaaccagtgagaaacctgcattctgaaaaaacaatataaaaaaagctagagtggatggaaaatggcaaaaactgatttcagttctaccaaatgagtttttctactaagtttgtcattcttggcaaagttggttctacaaggtaggtaggcacagtagcatgaaaagattagcagagtgatgggtaaggaatgcggataagatatccagttgaaagctttctcaatgtttacccaaaacaaaggccaaagaacaagcaaatgcttgaaaaagaatggcagtccctgcagttccctacagcctacccagagatcagagggcagagaagaaagttgggggaaaacttgtatgggagttcgggggaggggtgtaatcaaaaacaggaaggggttaagaataagaaaagtatgctgccaaaagggaaaacaaagagtatgcagcaatgaacccgttacaaaccgccaatttgagagatggggtgattggcccagtgttctttggagcatggcgctagagccacatttgcctctcactttgcctgggccaatgcgcaaggaccagagccaagctttgcctaacctccaggaaacctgggcctcagcgcacaacccgggtgccacagaaatgtgggagagggaactgaactggcctctagctatctcctgcttccagatgaaccacaaacaaaggaatctagaagcaggacgacgtctgcacccctaagcccgccagggcgcaagggtgaggtcaaagcaccgcctcctttgcgggcatagccacctctgcaaaggccagggacatctaggtcccgctctgagatcctagtgaaaacaagcggccagcgaggcgctcctgtcaattggcccgattgcacttgtaaagttgatagagttggaaagaagcgcagagctgcccctcggattcctccctagagtgaaggcgatgggaaggagtcacagcttccttcaccctcaatgagctcgctctgcagatatagcctgtttgcctaatgaagcataagatattgtcttccttctctgtgcctagttcagctcaaaccctagaacaagggcactggggtctgggaccaaagttcactggagataccattaattctccttgctaaactagcacagtgttttctgggttccggccttgggaacctcacattaagtagcaacaaatatgctgtggatgactctcctttccctaaagtggaccctcagcaccaagaagtctggatccagcagtgcttttggcaacttgagccgcatttgtccagccaggcaccgtggtgtcatcaccacgcccctcgcacccagatcctctcccgctgcgcacacgctgtcctgttgtttatacacacacacacacacacacacacacacacacacacacgagacatacacggacacaaatacaaagccccggggtagctcctacctctcccccgtgcccgtcgaagatcccgaagatggacgggtgcgtcttgttggccagatccgtgagaacttcgaagcggtcctccatgtggtctctccggccctggatggagtacaccgccacgttgtggttcttgaactcccaggtcttggaaaactcggcctcgagcacatcaagccccccgagtcgatcgttctgcatgatctcggctaccttgcccttcaccatcttcacggcgtcccggctggacttcacgatggtcttcacctcgtcggtgtggaagaagtaactccatagagccaagctgatgcacagcaggaaaagcgtctcgggtctcagcaagaagtagcgcatgatgcgacccagcagagacagcaaagtcattgtatcctctatcatttattatcgctagagcctcaaccaccaccagcgacgcgcgccccgaaggctcgccgggtccgggagcactgcggggacagcccgccgggagggaggcggagcagtgcccgagggtgggggagaggatcgcggagcccagccagaggcagccgagcaagcggctccgagcaggcagcgcgagcagaggcagcttcccttttgtctccccgcctcggcggcccggaggcccgtccctgccgcccgcgccgcctcccttccctgagcccctttgtgagaccgcggcggcggcggtagcagcagccgccgcagcagcagccgctggtgccccggttgggcaagaagaatcaagttaaagttgcgctgggcgggtctgccgcggtgagcgggagagttcaggggcgccggcgcccgcgcggtccctccgggggtgccccctcgagactccggagagcgatcagcaggtgaggcgcagggctccagagcccggcggacgagggacgcaggtcccctcggtcgccgccgaaggggagcgcggagatggcggaaggttccaattccttcacacaccccgggggccccagagaataaaagttttgcgggagcctgggcagagacaggggtacgcagagcccggcgacgcggcacggtcggtactgagccgcaggcggccggctgggctctgcctgcctctcccaggcacctcccggctcggatcggctcggctcagctcggcttcactcgcgcgctccctcctcgcgtcccggctcgcgcgcgctccgccccccgcgcgctcgccccgccccgtcccgccccttgagtcgggactcgacaccccgaggtgttcccacccagctgtcagaggctgagcaagttccgcggccgccggtgcgggctcgcagccccatgcggtccaggacagccaagggggagaaaagagggaggtccgctgcctagctcttgcgaatcgttgttccttccccctgtgccggctcctaagacaagctaatactgaccccggtagtcttagcgttggttttccaggaactattgctgctcactgggaagccgagagccatacgtgagcgttccccccttcggcggctgcactatagtgcggtccccgcttcgccagccataaggcaagcgagaagggacgcacttctcccggcttgcaaagcggtagggagacgatcgggccgctggccgctgtctcggcgttcagcaatagaggccttcccggatctcccgagaggcggggagcgagcctgggtccagcagccttctccctcccgagaacagcagaaaggggggactcgacagaatgacctctgtttccccaaggaagtgcactctgacgataacctcgggagggacgagaagggccgctctttcggagagcggccgccgcccctggagtaggggactcagtggccacgaaggccttccctgctcgcgacctttccacgggaaggcacgaagcttccgatgggggccccggggcgctcctgacttttctacggcgcgagggctctgactctgcggttcaggtttgaaagtcctttggaagctcgcaagtggtggtctcccaccacctcctcggtcatcgcaggaagaaggcgcagtgagggcgggagtctggatgagcggagagtagccaccgcggagaagagtgcgggcttgcaggagccgacgaagataactcgaaatgtgggcaggcaggtgttggtgggtcttgaaagtgggaaagcacgagaaaagaacaatgttcgcgtccgcttagaatacggaaacaagtgagctttaaaggaaaatactcattctcattacccctgtccaggaagaagagtgctgatctgctgcttccagtccgctgggctggagagcagaaagaggctacttgatcccagccaagccagtgtctgtcccccagcaagcacttctgccttggtgtgatccccattccttttctaaaaatacaaaataataagaagtcctggaaggaaatacactaaaatgttcccagtggttaatcatgcgtacagtagtagattatatgcagctttcattttctgctttagacttttgtctattttccacaact

SEQ ID NO: 316149 - DNA, 4001 bp, Homo sapiens
ctccgcaccaagatggccctggattgaggagagaagggagaggtctaggaggaggcctccaccctcacccatggccaccctcctaccagtccctcctccaaccaccaggatccagctctgtccatgatgatcccttaaagccctccatgactacctaagacctgcaagggtgaaggcttagccctttagcggggcctttgaggtccctgccctccccggcagccactgtccacactcgacacataacaagtacacacacaattcagccagtcaatccttcctactatccctccacttccagccacctttgcttgtccccattgctgcttatgccctccccatcccacccttgcccaccctccaaggggtgactcacctgctatccccagcattggccatgtacagctttccctgcagggacacagccaccagggctgtgcagccgcccatctggcctgaggcctccagctcccgcccgatcacctcatcctggggaaaaccgaggccaccttagctgctgcctgttctgccaccatactactttgtctctcaatccccaccctaccctacagttcacttctaccagcaggcctgacagtcccagcccaaagtccagccatacctccaagatccctgcagtcaggagatctagacaagggaagtgctactcaaaataggaagagaaaccagcccctgcaccaaggaccaatagggtattcaattagatgatgcaggtaaaagcagttagcacacagtaggtgctggataaatgagaggggttatgctgatagtgatggctgttagtaacaatccaaccaacccaatctcatcctcccaatccaaggatctggtgtgatgaccatgggtatacagagatgccatttcctgagatccccggggcaaaatctccacttcttccccagccaaaagccacacactcacacattcctgaaaggcactctccaatgccccgatcaccaagtcttctgccctgatgcccttttcctccacaaactgagggtcactggggcagatgcagcggccattgaggtgcatggggggctgagtggccaccaagccttccaccacggcctccagctgccggcgcaagcaggagtgcagggtgttggcagccaagatggctgctgcaggaccgccgtgcccatcgaacagtgcccagtaatggcctgtcaggaactgcacaggaagggctcagtgtcagcctctgcctgacttccccacttgtcccctgacgcaacctaactaggacctggggcagcagggtaagaacctcagcctgcaggtcgtggccccagcctgtcggagggattccagccaagaactcagactgcactcacctcctctgggcacagggtcagccactcttcttcagccccaaactcacatctccggatgcacagcttcccacaggcggcttgatcctcattgaattcagatttctctgcattgataatcctgaggccgggaaatggtaagcgaccctccagggacacacctatgtccccatgggcacagggacccaagccagcacagggagaagacccctccctctggggcaacagctccccagtgctgtccctaacacacacttagacaaccacgatgtaagcttcctaacttcactggcctcatggctaaggtaaaagtcagggcccagctcctctggagcctacctggtgacccagggctagacggtaagggtaggttgccattcctgcccctgtcctgtcgcagcccaaagccctgtcccatacagcgcaggtcatacccagggtgagatggtgggggtagagggcgaggggaaatctccaaagccccgaatgctggaactctaccgagtctctgggcctcatcttggaagcccctgggctgcaggtccttcccgacctcctgtcttctctgagggggaggtcggaatcccaaggaaaacgctgggtcgggatgaccgggaagttgtcaggattcggaggtgagggcaagaaggggctgtccacaggtgggtggggactgtcactcagctcctcccgctttctaggcgggcgcaggacccgaagcgggttcaggcccgggcctgagctgggggtcggggaggggcactcactcggcgtagcctgcattccagggtagcgtgcgtcctcgtgcggggctgcgcacgggccgggagtctgggcggcgcgaggcgtcggccgccccggggctggagctggagccgcgaaggaagcggggccgtcggtagggcacggggctggcatgcggcccaggcggccgcggcgcggggagcggctccccaggcaggaagcggcgccggaaccagccggcggacatggcgcggcggcagggggctgcccgcggagcgcggggcgctagggctgggccgcccgcgggaggaagaagcgggccgcgggcggagccgagggaggggtgcgccggcgggaggcggggccgggggcgcgcagacgggaggcgtcgccccccagccccgacctccgcccgggagtgcgtgcgcggctggttcgctgactccaggggtcaacgctcgcgaccgcctgaagaagcccacgccggcatcagccccatttgacaagcaggaaaaccgaggcctagagaggcgaagtcgcctgcccagcgtcccacagtagccagggaggactgttcacccacgcttgcggggcactggtggttgagaggaaaagtcccccacactccgcggggccagcgtcgcgcagatcctcggacctcctcctgctgggtggggacctgacgcaaggggaagatggggacaaaatgagctgggaggtgtcagacccccacattgagtaaatgccaccgagcacaggttccttcaggcggcctccaatcctctccaccccggcctgccaccctccaccccagacgggcttagtgggcaccttggctttccccgtcctgagaggctgctgccaccctcgaggacagtcttccaaatggctgtccctgcattcaagatgtcttcgcggaatagacagcaggatccttactggactgtgagtgagtgacggacaagagaaatctgtgtgagtgtaaaggggaatccgtggtcccccaaaggctccagctggtccgagttcagacctgggacggagggaagtgaaagacgaggaaccatcttgcggtctctcaaccactggctagctgtcaccaggcggtcagccgcagtgtccccttcacatctgcgagttaacaaagcactttgtcacccatttgtcactcaagtccaactccctgtgcaaaagtgttactttggccggaggcagtggctcacgcctgtaatcccagtgctttgggaggccgaggcgggcggatcacttgaggtcaggagttcgagaccagcctggccaacatggtgaaaccccgtctgtactaaaaattagccaagcgtggtggtgtgcgcctgtaatcccagttactcagaaggctggggcacaagaatcggttgaacccaggaggcagaagttgcagtgagccgagatggagccactgcactccagccagggcaacagagcgagactcagtctcaaaaaaaagagtgttacatcatatggacgattctgaggcccatggaggggaagtcttggacacccagggctgtactatttccattatgacaatgcagctgactcaatcctcgcccccagggcacttctcttcccctttcctcctccaggaagccagggcttgccaattaaaagcggctaaggctccacagcccagtgcctgcatatgagctgtatgaggagtccaccttcacctccactccctagcccaggtagacgctcagtaagccctacttcctcccagcagctagtcctgccccagtgggagttcctcgggcccaagaaggaaggttcttagggcagggacctgtgcccaacacccactccctccgatgactcagtcccagaccagcctgggggctgattgactgaacccacagtgtctgc

SEQ ID NO: 316150 - DNA, 4001 bp, Homo sapiens
tgctatccccagcattggccatgtacagctttccctgcagggacacagccaccagggctgtgcagccgcccatctggcctgaggcctccagctcccgcccgatcacctcatcctggggaaaaccgaggccaccttagctgctgcctgttctgccaccatactactttgtctctcaatccccaccctaccctacagttcacttctaccagcaggcctgacagtcccagcccaaagtccagccatacctccaagatccctgcagtcaggagatctagacaagggaagtgctactcaaaataggaagagaaaccagcccctgcaccaaggaccaatagggtattcaattagatgatgcaggtaaaagcagttagcacacagtaggtgctggataaatgagaggggttatgctgatagtgatggctgttagtaacaatccaaccaacccaatctcatcctcccaatccaaggatctggtgtgatgaccatgggtatacagagatgccatttcctgagatccccggggcaaaatctccacttcttccccagccaaaagccacacactcacacattcctgaaaggcactctccaatgccccgatcaccaagtcttctgccctgatgcccttttcctccacaaactgagggtcactggggcagatgcagcggccattgaggtgcatggggggctgagtggccaccaagccttccaccacggcctccagctgccggcgcaagcaggagtgcagggtgttggcagccaagatggctgctgcaggaccgccgtgcccatcgaacagtgcccagtaatggcctgtcaggaactgcacaggaagggctcagtgtcagcctctgcctgacttccccacttgtcccctgacgcaacctaactaggacctggggcagcagggtaagaacctcagcctgcaggtcgtggccccagcctgtcggagggattccagccaagaactcagactgcactcacctcctctgggcacagggtcagccactcttcttcagccccaaactcacatctccggatgcacagcttcccacaggcggcttgatcctcattgaattcagatttctctgcattgataatcctgaggccgggaaatggtaagcgaccctccagggacacacctatgtccccatgggcacagggacccaagccagcacagggagaagacccctccctctggggcaacagctccccagtgctgtccctaacacacacttagacaaccacgatgtaagcttcctaacttcactggcctcatggctaaggtaaaagtcagggcccagctcctctggagcctacctggtgacccagggctagacggtaagggtaggttgccattcctgcccctgtcctgtcgcagcccaaagccctgtcccatacagcgcaggtcatacccagggtgagatggtgggggtagagggcgaggggaaatctccaaagccccgaatgctggaactctaccgagtctctgggcctcatcttggaagcccctgggctgcaggtccttcccgacctcctgtcttctctgagggggaggtcggaatcccaaggaaaacgctgggtcgggatgaccgggaagttgtcaggattcggaggtgagggcaagaaggggctgtccacaggtgggtggggactgtcactcagctcctcccgctttctaggcgggcgcaggacccgaagcgggttcaggcccgggcctgagctgggggtcggggaggggcactcactcggcgtagcctgcattccagggtagcgtgcgtcctcgtgcggggctgcgcacgggccgggagtctgggcggcgcgaggcgtcggccgccccggggctggagctggagccgcgaaggaagcggggccgtcggtagggcacggggctggcatgcggcccaggcggccgcggcgcggggagcggctccccaggcaggaagcggcgccggaaccagccggcggacatggcgcggcggcagggggctgcccgcggagcgcggggcgctagggctgggccgcccgcgggaggaagaagcgggccgcgggcggagccgagggaggggtgcgccggcgggaggcggggccgggggcgcgcagacgggaggcgtcgccccccagccccgacctccgcccgggagtgcgtgcgcggctggttcgctgactccaggggtcaacgctcgcgaccgcctgaagaagcccacgccggcatcagccccatttgacaagcaggaaaaccgaggcctagagaggcgaagtcgcctgcccagcgtcccacagtagccagggaggactgttcacccacgcttgcggggcactggtggttgagaggaaaagtcccccacactccgcggggccagcgtcgcgcagatcctcggacctcctcctgctgggtggggacctgacgcaaggggaagatggggacaaaatgagctgggaggtgtcagacccccacattgagtaaatgccaccgagcacaggttccttcaggcggcctccaatcctctccaccccggcctgccaccctccaccccagacgggcttagtgggcaccttggctttccccgtcctgagaggctgctgccaccctcgaggacagtcttccaaatggctgtccctgcattcaagatgtcttcgcggaatagacagcaggatccttactggactgtgagtgagtgacggacaagagaaatctgtgtgagtgtaaaggggaatccgtggtcccccaaaggctccagctggtccgagttcagacctgggacggagggaagtgaaagacgaggaaccatcttgcggtctctcaaccactggctagctgtcaccaggcggtcagccgcagtgtccccttcacatctgcgagttaacaaagcactttgtcacccatttgtcactcaagtccaactccctgtgcaaaagtgttactttggccggaggcagtggctcacgcctgtaatcccagtgctttgggaggccgaggcgggcggatcacttgaggtcaggagttcgagaccagcctggccaacatggtgaaaccccgtctgtactaaaaattagccaagcgtggtggtgtgcgcctgtaatcccagttactcagaaggctggggcacaagaatcggttgaacccaggaggcagaagttgcagtgagccgagatggagccactgcactccagccagggcaacagagcgagactcagtctcaaaaaaaagagtgttacatcatatggacgattctgaggcccatggaggggaagtcttggacacccagggctgtactatttccattatgacaatgcagctgactcaatcctcgcccccagggcacttctcttcccctttcctcctccaggaagccagggcttgccaattaaaagcggctaaggctccacagcccagtgcctgcatatgagctgtatgaggagtccaccttcacctccactccctagcccaggtagacgctcagtaagccctacttcctcccagcagctagtcctgccccagtgggagttcctcgggcccaagaaggaaggttcttagggcagggacctgtgcccaacacccactccctccgatgactcagtcccagaccagcctgggggctgattgactgaacccacagtgtctgctggggccacactgggcacaggaacgcagtgctaatggagacaagccaggcctctgcccaccaagccccctgcagtgatggtagcagttctggtggatgctgcttcatccagctggcaagaggataggggcgatgtcagagaaagtttcccaaaggacctctgagctgtgaattgtcactgtgacagaacagaaaggtaccagggtggggcaggcccaattcagtctatggggccacttcctcaccctcaccagttgatgcctcagaggattttaaagtctaaaattggacaaaacaaagtgcatacactctattccccaacccacccctgggtgggggaaagccttgtcctgaagtattttcacagaagctctgggc

SEQ ID NO: 316151 - DNA, 4001 bp, Homo sapiens
ttgagccttctgtagttacgttacttatcttttaattccttttcttttctttcctttttttttttttttttttttttaagagatgaggtctcattatgttgcccaggctggtctcaaactcctgggatcaagcaatcctcccaccttggcctctccaagtgctgagattacaggcgtgagccaccacgcctggatgttatttatcttttaactaacttggttctcctgcttcagttatgttctggtgaaattctgtcttcttaattccatgacctacacatcacactcccccagcactccatttaacgtggcttagcccaaagaagttggaaaattgtgtgtgagagaatgtaagattcaagcatccatgagcgtgggagttgctagacaaaaactaaggtcctttccagccccaaaaggccacgattctaacctatgaacctactcaatatttccttcaaggtaacacaaatccctaaaatttaccaccaccaagcagtagttccttttatggtcctaaataagatcctttatccaggaatgccctaggttcctatattctgagatttcacaaacatcctcattttagcttctgactaccaatttcaatggtaacttttcttaagccttattttcagaaagtagagtccttctatttttagtatcttgcaacgcccaagcccccgtgcacttctaacccactacagatactgtactgcaacattttctccgtgcataaacgcctacctttctttttttaaaggctagtatattgttccattatacaaacgtaccgtaattaatatttcaccagctcttactaatggacttccggtcgtttccaattatattataaatattacatacaatgctcaggtcaacaactttttacatgtgtatctttagcgtatgcaagagcaactaaattaccactgggtcatttcaagttgctcctctttgaactgttttgagcttagatctatctctgaacaggaacaaaaactagaaagcacccaaaactctggttgcagatgcagaaatacagtgtggcacaatgctaatgggggaaatggtctcttctttgacggatcgcctattagcttgagactagatcttaaagggttcccaaagcaagaaaatacactgtaattatcgaagaattttagatacctcagagatgaggttaagaaatagtaaaagcttaacagtcgaagatctgaagcttcaatttcattctttgatgttcccgattacagaaagttcaaagatgatgtttaaaaatattatatatgcccaaatgcttaaaaaaaaaaaaggaagcatgataaacgtcatcgcccagccttcttaaagatcgctcccacccgcggctagccgggcaggagaagagactcgagcggcacccgagccgcatccacgccgcccgcccgcccctggggtctgggtaggtaacgggcccggcgggaaggaggggctcccaggccgtccctcccagcgctcacctcagctcctcgtcgacattcccgcggggctgttcggccgacgccaccatagaggaagtcgtagaggtcttgttcttcaagatccccttgatgggccggtgcgaggccgtcgaggccgccattgccgggcgctccggctgtcggctcagggtcgctgcttggcgtggggtccgcgaagagaagggtcggcacagcagagactcgcaggcagccgcagatcccgctcagggctaaagcggccgcaactgctgcctcggaaacggctaccgcagcggttgtcacgacacaacgaccccgacgccagagccaacgccgaacgggtggcggctactcgcgcacccttagccactggcacttgacccgcggctcgcggagagacgccggcctagagctccagcgcaggagcgacgcgacgccgaagccaagcggacccgccctctcgcgatatctagggaggaggcggggagagggcggggcgagaacaaagccgacctcctcgccccgccccctccgtcccgcccgggctgctcgccccgcccccgcgcggcgctgggaggcgggagctgtctctgagaacctgcgggagagcgcccgggcttgctgcttcccggacccgcgcgtctctcgagcaccctcgtcccaccaccttgtgaggccgtagtgttatttttattttttagatcagcagactgagactcgaggtgacgtcactccgcagagaggttagctgacttgaagaaaacgggtatctcctctttccatttcgcccgtgtaaacagccgaactgcctattataaaagcatggactgccagcattggagtggtccttagaggcctattatgaaatcatagaatgtctgcattggaatcgcctcacctccttttaccgctggagaagccgacggacagacgggcagcgacccccgccgtcgcacaacccgtctaggcagagagcgcaggagacgggagggcggcagggacacatctcccagccaaggacctcctgggcccgcagaggccgcgacaggttccccccacagagggaaccaactctgccgcaggttgatgtggacttcaagcctgcagaacggagagcccatttccattgcttaaagccacctcgtgtgtggtatttgttatggtccctgtacactcccttccctccctctcccaagtccagtccgcagctcgctcatcaccaggctcttttccatgactctttcttgatcaggcctttttatcgtcctcaccacaggttagagcacagcagactgagccacccagaactggcccctccggtggaccagcccctgcggattcacagaccactggtcctggaagggaccttgtcaagcaggcccataaggtggctattcagcctgtttctccaacaaccccaggggctagaagcccgccacacccccgtgtaactcattttgtttttggacagctctgactctgggagttcttagattgagctgacacctcgctcccagcaatgtctgtccactgctgtggggggtgagaggaagcgttttcccctatctagcccctatagcagcagtttcactcccatggctcatctctggaccacagtctcatcttctttaacacaggctctgtgccttttgaggatgaccctgttctgtgtccttaggactctgcccctcagggatgactgtagggttctgaaaacgattgtttttatcgtctggccccgagcccctagctcctagatgagttcctggcacagaacagggcctcagtatgggaatggatgtggatggagataatggaggggaagtgagctggaaggggagaagggaaacagggttgctggtcacagagtggaatgtgttccccagggatttgcctcagccaggggcctgcacagtcactgttggcactgtccccacctttgttcccagtcaaatatccactggtgccgtctctccctcccaggccaggactgctcagtggatctaacattacaccctgacagccctgtccagcccatggagcagagagagagggttctcagcgaggggaagcaggatggccacctcccttcccttcctgagttctttccaccccagtgttcaacacctgtgttgcgtctcctgccctgtcagcaggagtctaggtcagtgatggcaatcctgttttcaagggaatacacaaacttccctgtatgttccaaattattgggcagatttgctttgttcctgcttgggctgggaagcatcactgagttcagcatccctgaactcaactgtgactgggcccttgattaagcaacagcttgctttcagaccctctaatgaaagggactacgatcgtatgacataaagtgttttattagttaattaactaacaaacattggaacaggaggtgatgaagagttctctgaagaaccttggaaacatatttccctcatcaagagttaaacttttgtctcctgtactggttcttccactcccaaacccacaacaaatgaa

SEQ ID NO: 316152 - DNA, 4001 bp, Homo sapiens
tgaaaggtaacaggggccagatcagtggggactatgtttgtcaggagcaaggaggagtctctgaagagtttaaaagcaaagttatgatttgaacaggtgcccccaagtaccctatactccaaaattattcatttccttttttcctttctcgctgaaacaaaacttccattctctcagagtagctggtttcagctgaacattaaggccaaattaattcagcccaagataaagtcagataggcccttcactctccagaatgttaagctacattttaaaatatgcaaatacttatgagtacaaataaatctttaactgctcaatgttcaggttgtcagtgcataaagctatttttgaactcaacagccagattggccccagtaacactttcccaaagctttgttttttaaaaacctttttgatctgtttccccgttctcctagaaatctcctagatttctgagctcctagattgtataaaagatctaagtttttttccacaagtatctcatgccattaagttcttctgccagaggtgataaaagggccatttggatgcaataaatgtaaataaattgtgtgtgtaaattagcagtggcttagaaaatttttaaaaggctttcatggactactgaaagaaactgagataatttttaacataccaccaagaaaaaaaaacaacagttttactacaacacaagccggctgcctactgaactggacgcccatgctctgacctagtatggcaattcttagggtctaggcgctgggttctgtttacaagaaactaaggcctgagactaaggaagaacaaagaaaaatgcctggcaccaaaggtgtgggggatgttttgtacataaatgaagatttgaggaggaatacttcctcagatgttggaaggaattactctttttttgcttacgtgttaagaatttaatgttttcaggccatttcctaattagaaaataccttataatttacaaacaataatttgtcttcccctacatttgctgaccaccaagactggataaaatttccttaagctttaccagagtgggaggactgggaataacgggagcacaacagagttcggatgcaacatcaactccaagcccggccagctggtttccatcgagaggtcccccaggagaacgcccctccgcggcggcggcggccaggtcggcgcgggagagacccaccgaggcgctccagcgcggccgcggtgcaggaccaggggccgcccggcctccgtttacctttgtttcaggtaccccggctcctggcgggccgggaatcccgtccgcggcccggagctggtgacacatccttctttggccaagtcgggccgaggttgggcagggggcggggaaggaaaagaaagcctcagcgcctaacgacgtgactctcagttcttccaaaacgctggcatttgtttctctgccaggctttcctgttaacaagttcccgagggctgtgcgggcgaactggcccaggagccctgaaaagtgggagggcccaggccgcccccgcctaccctcctccgcgggcgcccctggggcaggcaatttccacacctccctggtgccgtgtcccgggaccggccggccgcgccgaggcaacgcaccgcaccgcaccgcaccgactggaattccgacttccacagcccaatcagctccgtgtggcccctctggccaggccggtccccgcccccaggtcccggccccgcccgccccggcctccgcgcgccgccccgagcctcgccaccccctcgggccgggacgagggagctgaaggctccaggccgtgcggccagtgttcctttgcctacctcgttgcccgcggctcctcctccggcggctcagctcgcgggcagcgcttgcctccaagcctccccgcggcgcggactctcgggctacgaatgcggcgcgtgaagagcggaggcccgagcgcgccccgcccagccacccgcaggcccctacctccttctcctcctcctcctcctcctcctcggccccaccctcggcggccggcccgcccggagccccgcccacgcgccaggccccgcccactctccggccccgcccccagcctacgccccgcccctctggccaaggcaggaagggggcctccaggggcgccgcgagagccgctgtggcctcggcgagggcagtctcctgtatggcggcgccgcggggatgcgattcgtggtggtcgctgctgtttgacagattcgagtctcttgctcggatttattactgttattgtcatcgtcaatattgtcatcgttgttattgttatcgtcattagttgtgttgccctcttcaaggggccttcaaggaggccccttgagggcagcgcgctgctggccagacattccctggcgctcctgtcttcccacagtcctgcacctgcgccacatttcactcagcccaagaagttgtgtgaattttaaaagaagtgatacttatttttaactgttattgttaactgttactgttaaataaaacacaaatatagacagccatataaaaccaatgtacagcttaatggattattccgatacacacacccttataaccactcgccagatttattaataacaccgtgtaatatggtctgctctgaaacagaacctcattaatagctggaaggacatagcctggaagggcctcccaaaattgccctccttctaactgccacagtactcaaatgtgacaggtccataatcatgccctctccaagaatatatttgtaaaatggaaatttctccagaattaggaacctccaattgagtatcttcgtaaaaatcttgataaaatgataaatctataaatatataagcatataaataacaataaataagtcaatcagttgggttgaataccatgagtaaggagcatgggggtgggggatgggaggtatgtaaagacttaaaaggattaggtgggctgtgaggacaggtcctgggcacctgggttgttctcactgtctccccagcacctagcatagcaccaagcatatactaggtgccatatgtgtgtgtgtatatatgtgcattgtacatatatgcacatatatgtgtgtgtgtgtgtatagcacaaggaaagaaaaaattatgtaagataaccccaaacaagctttacatactgaaatttcacccaaggtcaatcctcccagtagctaaagtgtgctctgtgagatgccttgatgccctagagagaaagagaccattttactttcaactttctactgcttttccatttcaaaagccctttcacatgcatatggtatcttatttgagactgagagcaactctgtgaaaaatgcagggcaggataggactctgcaaaggtcacagtgcaatgcatatcagtaagaaggaaaagtacacaatgtaccataaaacaatgttaaaactgctgaccctggcaacctggattcttggtttgtctcaacagttttattgccaatgtttttacattagggctcctttggcccttttgccatgcatttatacacattataacttgaatgtataaaggacacaatacgtgactggaaatttgattcaatacaatagagttagtctctctgtcatgaggaccatggtgaattggggctagagagttgccaattcaccacaatgtattgagtactcagactgtactaggtggtaggaatacaaatgatataaaataaagaagatacaggggctgggcgtggtggctcacgcttgaaatcccagcactttgggaggccaaggagggtggatcacctgaggccaggagtttgagaccagcctggtaaacatggtgaaaacccatctctactaaaaatacaaaaattagccaggcgtggtggcacgcgtctgtaatcccagctactcagaaggctgaggcgggagaatcacttgaacccgggaggtggaggttgcagtgagccgagatctctccattgcactccagcctgggtgatcagagtgaaactctgtcaatctttgttctc

SEQ ID NO: 316153 - DNA, 4001 bp, Homo sapiens
tttctgtggtgtcacatctagggcagttatgcccatagaattaagaccactggtgccagcagggatgaaacctgagagtctcatgaatacatactagtgggaaaggtttacagcaaggtcttcaatgttaactctatgcttttgctttgacagaaataagtgatattcagaacactggctgccaaagattttatttgaatgggaaaatatctgattataaaatattctgttctgcttttcttagtgtacttaacacagagcaattcactgataggcaactattaatccactggtcaattccatatttaataaaactgatgttaatatttaaaaggaaaataacattaaaataatgcatttattttgagcttttggatactcaatttactttctattgagttctacaggagatatataatttaaaccttaaagtagctgaataaaactggtagtttacaaacattatggaagaaaacctagtaacataaattctgccagatttactagcaagtttagcatctgctcactttggatacagtggtttcagtccagtctaggagcagcattagaatagaattagctgggtaaaatacttcaattctccatttgtctttccctataaacacagtatcatttagatattcattcagaatagtatccttgtgctattatgtcactgtagcatttccaatatttgatcatttttgacctacaaaaaagcaatttcatatttacccaaataatttgagattattctgggtcagaataaccataaaactatggtttcttgctggattttggatggccagcatttgtacagtccttgatttatattgtagtcaatgttaggcacttgtttggtgaaacactgccataggttttaagcaagaaagtagggactctgcaaagtactcatcataggcagaaatgactcaattgcacagcttgcttagggaagacatttttaatgatctagaagtaaccaccagtctttgttatctacatacattacgacacacacatacacaattgtctatatagacaaatacgtcttgctttaaaaaaagattaccaggattaacatactttttaaacaaacatttgttacagatgtgtatgcacgctaatatataatctattgattcaaagtgcaaacaaggcttttaatacagaaattctagtttctcaaggatatttctatgaaaaattctggtaattttctacctaaattgtaaaatgttcattaagttgtatttgttgtctctaaaactggattccctctctacaagagaaaaatgtgagtactgtactccaggtccagaaggtctatttttaaacctgttggaatccctctgcaaatagctttctgcaaatagctgaatagaggacacacattaattccttgatctaatatcaagatacaagggagctgtaaaattacttgtgagttagttcactggatggttttattagtaataaaaatattttcaaaacaaaacaaaacaaaacaaaacaaaacacccaaatttcaaacctgtgtctgctgaaatgacttcagccgcttcttaaaccgtgaagggagaacaaaatcacagccccttgccaggaaagctagctctccccttaaatccgggtcccttcgtagagatgtttccttgatcatcatctttgaaaagtaaatgtttacttcgcaactgtccagcacacttctgaagataatcagatttagcaagttgtcaatcttgtcaggtaggaaggtattttttcttcttatctcccaaagaaatgaaattcaagcattgtgctctcccagcctccacagaccacaatctatgcttgtcctgacatgcagctggttcccaaatacagtctgtggctcccaatacctgctcataattttcaagttataaacacagcctgcagtgggcctgttgctccttgttggtagctttatgtcaaattgacctgcacatgttgagaatatggagccttctgggaaagggagcacccactactctgtgtaccaaagttagaaacattacagctggacctaaaaatagtaccttctcagataatgctaacttcttaaactcagggtatgtgaggtgtcaatccacataaagcagtttcttctcaaactagaagaaaaagagtatgtagaacattttcggctttttctctttaatattttataaaaaaaagaacaggctactgaacttcgaatttgaaactattaagaatagttttttattttttatttgaagggaagtaaatacccaaatctttccagatctctctagtcaaaacaagaggaaaaacagaaactttcattctcaaatgggaatttacaaaaagatctgttgatctcagatgtaaaattttttaaagcaaaagactatcatagttatcaaacattttcttgaactgatgatgaacatatttgaaaatttgttcttggaagtattaagaaagtagaacaactgaatgccatagaaaagttttagatacatataagcaagtgaaatttggctaaaaaaaggacaaaagatgatcaaacagcaatgacatactacatactgaatttgtaagttttcttcctttgagaagctttaatcagttaagatttttaaaatacctattatttcatcatatattaaatatctgcctcatatagttatttgtaagtgaatcataaagtaaagtcatcctttggtaactgtggggattggttccaggaccctccacggaccaaaatccacagctgctcaagtctcttacataaaatgtgtaatatttgcatacaacctactcacattctcccatatactttaaagcatttctagattacttgtaatacttaatacaatataagtattatgtaaatagctgttatactctattgtttaggaaataatgacaagaaaaaaaagtctgtacatattcaatacatatgcaaccatacttttttccccaaatattttccaactagatgtagaacacattgatacagagggctgttttctcacattttatatttagatttcaatatttattttcaatcaaccacatcattcaatatttttctatgtctagaaaatatacaccaaacattattaaaacaaaaaaatagcttacaaccctcttttactgaacctttgtctaatttagtgggaattaaattctttggttttccactgtttcctacaaatttaagtctgctttttcccactgatttcttttcaagacattctgacaactctttctaatgtatacattaggcttatatgtctaaagctgtgttttaaagaatttcttttaagtggcagagtcttctgttcacatcaaattttatctgaaagcttttgatacgtactatgattgaaagaggattacaactgaaaaccactggtcttatgcttcatcctgagtcgttccttattttctcaattttctctctcactgggcttccatgttaattctttgaggtgggtagctttcccatattttttccttacactcccgactagaatactctttttctccctcattatttatctcctaaataaaatgtcaaaaaggtttgtaggaatgcaactaggcctttagacttacaatttaatgcttattctattaaaccacaccttaaatttcctctccttcccaacaccaacctgtggctgtaggtgagtaggttcattcctttcctgagaatgctccctttcctcaaattatacattctaatcatctttcaagatccatctcaaaatttagctatttcatgaaggcttcctgtttatttaagtccccttactgtaattcttaactttatatatacagcacttagtgaaatactatgtaacgtctctcaaaggaactccacttaacatattatcttatttagccaaagctctccatttctcctctgaaacagagcaactaatgcccatcacacacagatttgtggctaatagtttctcttacactctcatatttcttacctt

SEQ ID NO: 316154 - DNA, 4001 bp, Homo sapiens
tactgggcagataacccacttattaacattgaaaccatagaaacctacccctttcctgctgccccagcccccacccaaagactacaaaaagaagtcatcaaagatgcactgttgtctacaaataaacttagccagattgtgtctaccacacaaactgcaaaacaatgacctggaatgttccttctgaacacagccctaactttatagcgtaagtttcagattcagaacatttggaaacgagctgaataaaatgctgagcatatgtaacaagtcagctatcttagaaagtctacaagtcaaaactgtagcatctggaatttgtcagataataacagagtcctccagacgataaatagaagtgacactttaaacacctacatatgcaaatatgaccaaaaaaaggctggacacacgacaatatgagaaaataccaccaagactctgaaacagaatcaaagccacaaaattctaggaataagcctatttgttatggccaaaaagggtcataatggaataggcattcttcctttctctggctcgttaagactaatacattctctaagcgtgccaaagcctagctataaagaaaattttaacatacacaggtttttaaaatccgttacagaccatgtataaagtaagtaagcgtatacgttctttaaatgtaaatatataaattatttaaatgaccaggacttctacaatttagaatgaattatttaattatcccaaaatatacttttttccctttcctgagcaattcttaataatgcactggtctataacgacaaatgcatgttttcaactcacattgtttctccagtcttggctacatgacaaagaaactgatccaggacaggacaaacttcctttttccccctcttctcaaaatctagatgaaggaagaaaaaaaaacgttatcagttttctcaaaagcgctctaaaaacaaactttcctcctagtcctttaccttattaaaaatcaattaaatacaaaattaaaaaaataaggcctctcaaccaaattaccacctcaatcctccaagttctacttccaacatgtcaccctctttacagataacaagaatcctcctaaagggggcactcaacttcacaaaccatttttaacgcagtgcttctcgaagtgtggtccgggggaacaccagcattatattaagctgggaatccagtgaaaataaaaatccccaggccccgactcccaccaattgttcatctaagtccataaatctgcctttctaagaagcaccaactaccccaagttgccgtccccaaatgattctgaatgtcaaagaataattctcaaaacgctgaaatctctctactcgaagtttgtaagccactgttctcaagcctgttgcgtggaaggcgtgcaatcaagaacagtgaaggcaaccacctcgaaattagggcgcggaaagatgacttcaaaagccctgaaaaaggcatactgagacaacttaaaagttgcgatgctaccccctacccccgcccccaccaaccgtttactttttctcccaccccaacgcctagcgtacgggtagcctggtggagaaaagaggatatctgggagggaggggtctgcgggtccgccactcgtcccctgaacgggtgggagaaagactggggcccccgcaagagtttccccggctcccctcccccagcccagacgccggcggccgacacaaagccagagcggggcgggagagagctgcccacagggctccccgcccctggggaggtggagggggatgggagcccgggaagcactctccccacgccgcgcccggccccggtcctcggaaccatccgccctgaaaggagagaagagcgagccggagaaggtgagggggaatggagagggggcagctacccccacctttcagcgcctcctggagcctctcgacgtccatggcttcccggagtccctcacagcctccgcctccctccgcgggtctcttggggaccggaacgcctccccccacccccccgacgccctccccctccctcgcacacactccggcacgcaggcgaccgggggggggaaacgaagggagccgggggaagcgtgcgagagagcaagaccgacagagcgagcacctccccaagccgctaccaccaaccctccaacatggcgcccggtacgtcaccgcgcgcacgctccctgccgccgtcctcgctcccgccgcgcgctccggcccggaacccgagagcgcgtgcgcggccgaggtgtgacgctggggcccagtggcgtctgcgtcccggcggcttccagagcctcagccccagccccagccccaggcccaggctccgcggagctgaagactggacggtcaggcgagagggttgcaggcggactcctaggctttgaatccctgccatttcctctctgtgtgaacttaagctacttacttcgcctgtctgagcctcattttccccatctgtacagtaagggcactggtactgatgccctatgcagttgctgtgagaattcagtgtatacacttcacgttcagaatgcgcctaaaaaacgtagagcgaggccgggcagggggctcaggccggtgatcccaacactttgggagggaggccgaggcgagaggatcgcttgagcccaggagttcgagaccagtctgggtaacaaaatgaccccgctccctcgcccttctctatataaaaataaatacaggccgggcgcggtgactcaagcctgtaatcccagcactttgggaggctggggcgggcggagcacctgaagtcaggagttgaagaccaacctggccaacatggcgaaaccccgtctctactaaaaatacaaaatgtagtcgggcgtggtcgctcgtgcctgtaatcccagttactcgggaggctgaggcacgagaatcgcttgaatccaggaggcggaggttgcagtgagccgatatcgcgccactgcctccagcctaggcgacaaagcgagactgtttcaaaaaaataataataaaattaacaatacatacatacactaagcattgctaataatcctaacaagaatacctccctgcttaacccaacgttcgttcgtcactggcccacctgtggcaagaagtaatgtatacagcaaagtcattaagagctcaaggtttggaatcaatattcaaatcccaactcaactacttactccttgtgtggccctgaagtagttacctaaactcaggcagcttcagggttcttatttataaaatgagggttgtaaaacggccacgaggattgagtgaaatggcaaatgtgaaacatttggcacagtgcgtgaaacctggaacactcaacgtggctgggtttttattaccactgttagcattattacatgacataatctcccaggaggtaggagagggcggaaacctcagaagtcctctgcagccctgacattttacaaatgggaaagctgtgtcacagacagcaagtctggggagacagaactagaacccagaacccaaatcatctggctcccagccagtgcgtggacatttttatactcatctgtgagcttttaaaagaaaaggtactgcccgggcacggtggctcacacctgtattcccaacacttcgggagtctgaggcaggcggatcacctgaggtcaggagtttgataccagccaggccaacatggcaaaaccctgtctctgctaaaaatacaaaaaaaaaaaaattagctgggcttggtggcgggcacctgtaatcgcagctactcgggaggctgaggcaggagaatcccttgaaccctggaggctgaggttgcagtgagccgagatactccagccactgtactccagcctgggcacgacagaatgggactccgtctcaaaaaaaaaaaaaaaaaaaaaaaaaagagagagagagaaagaaaagaaaaggtactgcgttgttccacctcctcttcccaaaacccagcatagcacaaagtcatggaaggaaggaggggagagaaggaccaagggaggg

SEQ ID NO: 316155 - DNA, 4001 bp, Homo sapiens
acacaagtgaggagtataaaaatcacaaactaaggccaggcgcggtagctcacgcctgtaatcccagcactttgggaggctgaggcaggtgaatcacttgaggtcaggagttcaagacaagcctggccaacatggtgaaatcccatctctactaaaaatacaaaaattagccaggctggtggcatgcgcctgtaattctagctactcaggaggctgaggcaggagaatcgcttgaacctaggaggcagaggttgcagtgagcttagatcactccactgcactccagcctgggcaacagagcaagactttgtctcaaaaaaaaaaaaaaatcataagctggaacatgaaaaaaatgtgagttaccacatctcacagctgcttctgaatcttgccaagtcatctgctccttggtcactcgttttgccctctgttcatactcacaggccaataagttgtaagaagcatcaacgcattaagaaatgtgtgtgaggaaaacttaaaaataagacagctttgttaacttaatttttacccctgtaatttggaagacaaccatgcctgtcccactttggcagtcagataacgctaggtgtagctcttagtattgtgaagcaggggtgtttgagagctattggcctggaaactcttcttgagcactttatgatgcagagaatcagccatgcagcacttttggtgctggaaaccttcccatctaaataggccaacacaaaatcacacactttctgtacatctctgtcccctgaaagtacccaccactgccatcatatgccattaatggcaaccaggtgagatgcctcctctctcagcacatatagatgttaagtacctgcaggccaggaatgaaatctaaaccatgacacctctcccttgtccatctcccaccttttttccttatttccatgcattgaataaacccctattcaatgaggacttatttaataagatgacaatgtaatttaataatatgattaggccaggtgcagtggctcacgcccgtaatgccagcatgttgggaggccaaagcgggcagatgacttgaggccaggagttcgagaccagcctggccaacatggtggaactgtctctactaaaatttaaaaattagccggtgtggtggtgcacacctgtaatcccagctacttgggaggctgaggcaggagaatggctggtagcgggaggcagaggttgcagtgagccgagattgtgccactgaactccagcctgggtgacagagtgagactctgtctcaaaataataataataataataataataataataataaatagcatttattgagtgcctgcaacgtgctaggcactgtatgcgatattttcagatttgtcttcagttctcacagagataggggaaaagtcaggctttggtggggttaagtgacttgcccaagatcataaggccacggaggggagggactggcagtggtatgctcttatgaggtcacacaacattgcacaggctcactgggcaaagtagcctttcttcccatctcaccaagcgctctacaaaggagaaagagctccaggagtcctgctggcctcaagatagtctcatgtttctacggcacggttctcaaagtttggtccacttgggccggcaccctgggccggagaagctgaattttccaccaccccatctctgcccccaccccgcgccggtactttcagacactcatgagcgagattcacagtggactgggggtcattctgtacaaaggtggtcttaggtttcccatcagaaagaatatcgagattacccatgcaaaatccagagaggcacaggggcagtttactaacctcaaggaaatgtaccgccgtgttcgggcccaacctcaggcaatgagaggaaactgaaggagaaacccacagcacgcacgcaggaggctgccctgcgttggccagcagccggcgcctccgagagatcagggaagaaaagctgttcagcctgagcacgcggggcggggaccgggtccctcagccttcccctccgcgactgccagggaaggcacgccccacccagtcagctgccaggtttgcgagcaccacctcccaggaagcagccactcccgctaccgccccttcccaggtcgcgtttagattgtcagctcccggacgtcctggctccactgtcagaaccctgggacacgacctcccccaccccgcctcgtttttttccccagccgactggggatgggggtggagagactttggccaacagctgcctccgcctggagcaggatttaaggtcctgtccagccttgtcccttctttgaaaacccccagattcacacagaaaaaccaataagcgctccacagccccgcatgctgcacgcatctgcgggccgcgcccaaggccaaagcccgccagtttgcccgtgtgccacgcagcagccggcttcttcgcgcttaccgcgcggcccacagatgcggagaagagggcaagccagggcagaggatggcacgacaacgggaccaaacagtgacccctgcaggtgactggacgataacttggcctaggaccggccccccgccactgcaagctgcgttccctctgtgctcacaccctgcagcagtcaaagcactcccactcacacacgggctgcacacgcatagttgcagtacaccgaactcacacacactacacgtaaacacgtagtcgtatgcacaagctcacacaatcacatgtgcccgcgcgcgcgcgcgcgcgcgcgcgcacacacacacacacacacacacacacactttgtactgcatacaataaaaaactaggctttctgttgtagactgaataatgccctccccctctatccctaatcccaagatatccaggtactatgcctggaacctgtgaagagttaccttatattctagggaaggaaaaaagaaaaagactttgcagatgtgattaaagatttggggataggagattttccggcgttagcagtaggacccaatgcaatcacaagcatccttagaaagaaaggcagagggcccttccatgcttccgcatataagaggagaaggcaatgtgagcaggaagcagagactgaagtgatgtggccacaagccaagggatgccagcagccaccagaagctggaagaggctaggaggtaacagcgctgtggggaggagtatggcacttcaatatcttgatttcagcccagtaaaactcgtttgagtcttctggcctgcaggactgtgggagaatgttttaagccaccaagtagtaatttctttcagcagccataggaaactaatagtttcctattcacactttccacccacagctcagcatgctgcagtctttgagatcgaaattaggatcatgccatttaacttgagccaagttactgaacctttagcagtttcagtttcttcatctttattaacctagaaagaatgcctaccaaatgggcagattattgtgaggacgcactcgtgcatgccttcatgcttttatttccaattaataaatcacctcccaccatgtgccagacacagctccagaggctgggttaaatgagacacccttttgtaagtacagaacatagcaaaagctcttagaaccacacctgtctggcacacagtaagtgctccacagatgttgcaataatcatcatcagagtcttgacactgagcctcacttcagtgggaggtcaaactagcacttcatggagagagaacacaaaaaagaacaggaatgaaaaaaaactgaaagaggcttcttaccctcagaacacaatagtgttttgttcatccttcttaagccccagttgccttcttcctttccctccagcggtgctacacgtgcttccattcaagactggaaacatccaggggacagggtctgaacttcactccctatgcctctctctgcctaatgaggctcactcttattccttaccgtaaccctggcctgtatccacacagtactaaatcttttccaagtaggctttctcttc

SEQ ID NO: 316156 - DNA, 4001 bp, Homo sapiens
agcttccataaatgcatctttcttcctctatttctattttattccctcacatttcatgggtaaatctttataaacacaccatttcaaacaatgctattttactctttctggctgccccgtgaatctttatagactgagatgcccgatggagccagtatgttttaattttcacatgaaaaacagaattcccaaggggaaggagcatttgatggaaaggcaaaacctttataagcactcaaggcattaaaatccaaatttccaaaatatggtaattatgtcaaagttgtgacttactctggagcccttggggaccctcatcctgacccatctgtgaaagccatcagcaggcagtaagccttctgaggagcaggattacagcagccaatttggcctctagcaaagaggcaaggctgcttcatttagtttaagtctcactgagatggtttaaaacactctttgggaagagatgtgcaggcaaagcaaatcacagccttaccagctgcagattcagtacacggcagtctatgtctacatattcatggcacactggagccctcccctgactgtgctcatacatgcattgatatgggaagcagaactctctcactggggaaataatctatgtgcctaagttagacaagagccacatttggaccagcggatggcatcacatctggtatggatcgctaacctcagtgtgatttggcccagcctggattatttatgattcataaaagtcccactggaccccagcatagtccaagaccacataacaaaaaaccatgggattaaaaatctgtatttcattgcaagacccccatggcaaattagtaatgctatgattggttttcgagaagccaagagtgaggagaactaactatgatcactccctcaagaaacccagcatagagggcaaaccgaatcatgtgttcagccaggctatgcagtcatattctgaagctctgtcaccatttctaatctgaaagcagtgtctaaaattaaacctaaataatttgaaagccatttctttacctggaagtctcagctgagtccttgttcctcagatcccctaatggtttctgacatcatgtgttgaaatgactactgtacatgaacgctatcaggtatttggtctgttagcccctttccccatattattatggttttttaaagaaagctacacttttagagaaacgctgcttcttcttaagcatcaagatttaagcgtttcttcaggactccctagagctgtgacataacactttgtaatcgagctttctaatcagcatagaaaaggcaaaaggggtcgcagggccaccaaaaatgctacctggccaagaaaacgaagacccaatatcctcccccagtgcaaaggccctagatctggctttctcatcctccttagaaaatatactgctgtttaatttgtgaattagagcaaatttcttacccacctccagggaggatgaaatgcccagtctcggaggaagcttctgccagacccttggagcttgtcaattgtcccagttcactttctccctggatctgacttctaagaacgcaagcaggacctcaggcagccaaagcatcttctcctcaaacccccttttcagtctgaacccttcctgaagctggcaacagactcaagccgagctgctccacattccctcagggaaaacagcactgctggatccagactctgctggggaattcaccaagcaagagaaaaaaagtatgacttctactcttcctctagatcagcctgagtgctcagatcgccttccggaggacccccagtttcctcttaactccccttcttcatgacaatctgaaggaagaagtcatagactccagcccagcgtcaccagctgatcctgagccagacccggggtgactagtcagctgctcacagagctcaagccactgaaccaggaaatgtgctgcttggtcaaaaaataataataactctcggtggcgctgctggtggtgcctgagaagtcgctgttgcagtgcttgcatcctccgcatgctaatgaagctgtgatgtcagcaagtcagtcacggcatctggacgtcccatcctgctgcccagtgctgagatttatttacatgtaaattagccttgccttccaaatcaataatccccaagccagggagaggggaaggaagcctttgctggatgcaaaggcccagctacgtaacctccaaatgagcatgaaaaaaatcacatataagaagagaggctttaaagacacatgcctattttttttcttcttaaaagctgtgctcttaggtgccaaggttcagatctgggcacaattatcaacctgagcgcctgtttcagattatatgctgcaccaacctaggagtggaatcagagcactctttttttaattaaatgctgtgtcaagccttcaaaaatgcctctcctttttttttttctttctcttctctcttcaactttcattttcgggtgttgcttgttttttggcctgagactatgtcacctttgagtttttgtgcacctcgaaataaagcacaagtgactcctttcctcacgtgcttgggtggtgagtcagtcagctgccctttaaccccttaccccaattccaactgcatgcagaagaagacaaagcataaaccttcccagggcatctgaagaccctgagaccctcagagagcattgcttccatctcctcattttacagattagaaaatggagacaactggagaaaggacttttctaaagtcacaccaggatttcagcaaggatgggtcagaatccacatttcctagacctcagatagagcttttgttgaatacctttggggtctccgagctccatttttatacaccactaggcggcctaaccaagcaatctggaagaaaggaatctatacatttggagagccctgtgttcaaatcctgcctttccttcctgctagcagtgtgatcttaggcaagtaacttaacttgtgggatcttcaataacctcatctgtaccattcactcattcaataaatatttactaagcacgtactctatgccatgcacagctctaaaggctaggtataaacacagtctctgctttcaagggccttatgggctactgcaattaaagaaagtaaaatattgaatagaactatggtgaagattaacacaatatcacatactcaatagctatttctgatattttgaatgaagttagaaaaattcaccgaggcatactatctactaggctgatcactgttcctagcatctgagtatttccatggtcatctttaattgtttaaaatcatatattccttcaatgctgcctgtgcagtatcccgggccaggagagaggcaagagccaggcaatattctggactctgtgcctgtgataaggaagcactgtgagtgaaagtaaagggtgagggaaaggttggggaggctgggagggaggaatattccatcatgcacagaagtgtcccaaaggacaaagcagctagcacggctccttgcccacactcccccgcctggggaacccactctgatgagctctgcccttccagctgcagttcctgaagcttcaaatgaatttctttgttggatgtggggaagttaaattatgtcttttgttgtatgtaattgtattaataatgcttaataacttctttcagaatgcttctctctagttcccagaagacctttcatggtgaaaatcatgagacctggaataacttctcagtaagagaaataaaatacaagcaaatgaataacactcagccttcagtttccatcacacagaactcagagcgtgtagggaggcagatggtctccccagacctcaatatccttcaaaaagtcaattagcaagtctaacagtttggggcccccagtagccaagtggaagcagtgacattctaacccagtgtggccacgaacaagtcacttcaactttccatgcctcagtttcttaaaaatgggtacactactctctcatctactcatgatcagca

SEQ ID NO: 316157 - DNA, 4001 bp, Homo sapiens
tgggaggcccaggtgggaggataccttgagcttgtgaggttggggttgcagtgagccctgattgtgccactacaccccagcctgggtgacagagcgagatcctgactttaaaaaaaaaaaaaggtgtgatgatcttggatcaccaaatctgtgaggggagggacagtctccaacttgtttcctgctcggtccttattgcgtactcttggagtttattgcaaactcttggagaaggtttactattactaaatgataaatcctgacacagcaagtagagccaatgaagctgctctcctgatctcagtctctgctgggatcctttcctttaaagctacaacccacccactaaacaagaatatagttactgggtttttcctttttctttttttttttttttgagacggagttcgctctgtcgcccaggctggagtgcagtggcatgatcttggctcactgcaacctccgcctcccaggttcaagcgattctccctgcctcagcctcccaagtagctgggactacagacgcccgccaccacgcccggctaatttttgtatttttagtagagacggggtttcgccatgttggccaggctggtctcgaactcctgacctcaggtgatccacccgcctcggcctcccaaagtgctgggactacaggcgtgacccaccacgcccggccaggtttttcgttttcaaaaatgaggtagggtgtctattttgcccaggctggtctcgaactcttggattcaagcgatatttcctcctcagcctccagagtagctggtatagactataggggcccactgccccggccggcaagataattatttactctcaccaaatttgattcaatcgttttggccaagtttttaaaaataggaatattcccagggaccatgtttgaagaaatacaaactcaagtaagcagaggtgaaatgacctgagagatttgctttaatacacttcggcaaagaaagaaaaaaggtatggatgaaactttgtgacaaacgcaactgttaaatgtaggtgatggcatatagggattcatctcacctttcctcttttgtctatgcttaaaagttttcacagtaacttttcaaaaaaaattattatttccaaacaaacttactgtcctatcaattaaacacaagtcactggatgagaacgctgttgtcttcgaagccaaaactggtgaagggtcttaagcaaaggcgagggatcctctagcagggccgacagcgcgcacgtttccttcaaggctggatctgacaaatcactcggtgcgctctagggctcgcaggatcgcggagctcaatttggaagtggcgcacgcgggctcacgccggtgtctcagggaaacgctagaaacgcggctacagagctcccaatcccagcctgcggtcggcttggctgcggcgcgacacctggctccctgccacccctctagacctctggagacctcctgcaccactccccagggccccgcccacagcctaccttccaagtcctcgtcctcctccgactcgctgtcccctttggcgtcggcgacacggtccgggccgggttctggcggggggtggcccaggctctggcgtggggtggcggcgggcaggactgaggctggggcgcgggcctcgcgcaggcgggtgaagtactccactgcgaattcgacgaggtcaggcggctgctgtcgcagcacctccaccgtgtagccctgcagcagctccgtgagccccggcgggatctggatgtggctcatgccggcggcggccgaagggatagacgggttgggccgccggcggccactgtctccgcgctcactcacgccggcctttcgctccgcgcccgcgaggtctcttcgcgcacggccccggctcacgtcgcgccgctctttggccggctctgcgtttccgggccgcgcaaccctacgctaccacggccgacctggcaccgccgccgctgtcactgggcagccgccgccgccgcggggaccgacgggcaggcgagctggacgggcggggcaggcgtcctggttgtgacgcacgccaccgcgggcgtgcgcgtccccgcttagcaccggccctcagtgcgcttgcgccactagatgacccgccccctcgggctgtcggggggtcgagacagtggagtgttcctgatgccagctcacggagggaatccagggaattaggtaatgaacggtctacccatgaaggggaccgattagtgcctctcgcctggtcctgaagacctttaaattattctttcagctgatgccaagagcctctttttggccagcacttactaagcaccagagacacagcgagaagcagaagcatacgagcacatcagtgtgattctgctgtgatgaagggcaagagagggctcactttccggcgtgacattcaagctagccccgaggcctgagcaggacccgcccaggggaagatctggaggaaagccatctgaacatacaacaagagcaaaggcctggtggagtcaagaccaccttggctgccaggtggaatggtggaataactcaggagtctgtcaggtctctgagatgtcaaacgggtaaggccttgtaggaagtaggcgtttgaatgagatcataatttgagagccacagacagaaaaataaatttgaaagagttcactcagccaaatgtgtacagtgagaaagggaaataaggccaaaagcagcaaagacctctgtgcctgttcctcctggagcactttcaccagggtccccagatctaggtctgcccattcctctccccacattctacactgggccctaggtcaacactgcttgatgaagttgagcagaccacaggcattgttatcctttgcccctgggaagatggtataggtgaactgtagaggccagactatttcccaaattgccctcctcctcctaccaaactggaagggtattgaaaaaggtggagaccttcctgggatgtccagtctacagcctacgtgctaaccaaaggcccactgggcatagagcagagtccccctctccttacaggcctagccaggaagagagtagctgtaggtttgggaacctgagggcatttgggatgcttaaacaccgcctggtaattactcagtattaattaaaatcctccctatcacctcccatacaggcttggcacacacccaggagctcaatgctgctgggagctgagcagctgggagcaaggagccctcatccccactgatgaagaggccagcccaggttctaggctaagcaggcctgtgattataaacagcagtgtctccctggacaagtttcttgaccctgagaagaatgttagaccatcaactttgtgaggggacaggcagtctccaacttttttcctgctcagtccttattgcatactcttggagaaggtctactgacttgttctcagatgccccacggctcagccaaccacccatccagcagagcattcaaaaggcatctggaaggaatgagggcgaccgttctgccaggcccctatttttttttgagaggagtctcactctgtcgcccaggctggagtgcaatggcatgacctctgctcactgcaagctctgcctcccaggttcaagcgattctcctgtctcagcctcccaagtagctggtactacaggcgtgcaccaccacacccagcaaattttttctatttttagtagagatggggtttctccatgttggccaggatggtctcaatctcttgacctcgtgatccacccgcctcagcctcccaaagtgctgggattacaggcgtgagccaccgcacctggctttttttttttcttttagatggagtcttccttttgtcgcccaaggtggagtgcaatggcacgatctcagctcactgcaacctccacctcccaggttcaagcaattctcctgcatcagcctcctgtgtagctgggattataggcacctgccaccatgcccagttaatttttgtattttcagtagagacggggttttgccatgttggcca

SEQ ID NO: 316158 - DNA, 4001 bp, Homo sapiens
taccgtggccacacactcccaggcttaccccagcactgtcccatcgcatagccctcacaccacccatcagccaggtacagctgcccagacaccaccacacctctctgtcacacacacacgcacacacacaaccacacatatcacacatgcaccatacagcctccctctgctggcctgctcaccaagccccagctcactccacagcaggaacgaggaaaccccagggatcagtcccctcccttagtgaccaggtgggcctggtcacagaaactcagtggcagagggagagccacacgtgagtacacacacatacacacacttatacagatacactcacacatgagactggtgggtaggcacccaacaccaggggcttccacaattaacagatctaacgtactcatggccagttggtcaccatgatatacccagtgtgcaacaccgaaacctccagacacacagggacacacacactagcaggcaaggacacacacacacacacacacacacacgagtctggtgacaacaaacacaccaagaatggtacacacagttgcaaaagacacacacagagcctcaggacacaaacagacatacacacatacacacaagcaagtcacacatgcgaaaaaggacacacatgcacaggcaagtcccacagtgacagacagcacagaagctgacacagacacacaacatacccacacacccagataccagtgacttagcacaaggagacagcttccacgcatacagggtaggcgtcagagaaggggaccccccgcccactcacagcagatccttctgaccaggtttaaggcggggctcggtggggctctcccctgccccaagagagagggaactggggaagtgggagcagttccgatggtgctctccttctgccgctccaccaccagccaggaggacccccccccccgacctcctcccctcatctggtggagcccccacaacgggagtggcatctgggttgggggcgagtacagaccgtatcgggcaggggccaccctgggaggggtctcagaggggcggaggggtggggtgggaagggggatggtggagactggagccacgcccagcccagagacggatgaagggaccgagaaagactcttgagaccgaaagaagagacagcgaggaggaggcgccgcgcgggtcgggcctccagggacccaggggcgggaggcgaggcccggcgggcggcctggcctgggccccgcggtagagcggagaggcggctggactggcagggggcggcgagcgtgggccgggggcgcggctccgggaggacgggatcgagggggcggcgggcgggggtaggggtgtgggtgggggtggggcgatggagcacgcggagggcaagggacggacggatcgggtggcgagggacagaaggatcgggtctcggagaggcgcgcagggggagaacacagagtgggtggcgacagacggacggacacagggcccgggagagagtcgggagggacggacgggcccctcggaggagcgggagacacacgggcgggtggaggggccgggagcgggcagacagaaggacctcagcccccactgtctagcggagggacacacagacggacagggggacggagtcaccggcaggtctcggcgcggcgggactttcgctgaccgcggctcagtttctcagtttcggaaacgggaactggggcgggaagggggaaggaagggcgccgcgccctcggggtagccccgatcccgcgcccggacccggccctcacttacctcccgttgcaggggcaggcgccaagggtcgcggcggcagcggcgggggcgccgctccccggcgcgcgcggacggggttcggcgcggcgctgactgggatgggccaagcggccagtgaggtgtggcccgggcctccgcgcggcgggcgggcgccgggggtcgctcgggagatgtgggctacagccgcctcgggctccggcgccgcggcacacggaagtgcgagggggcggggccgagcgacctcacccaggtgccgccggccccgcccccgccaggccccgcccccgccaggcctcgccctgccaggcctcgccccgccagctgcaatcggggacagcgtccctccgcctctgcctgcgcgggacaccgagtctcccggtccctctgccctgcctggccctcttcgcatcctcccgccattagcgcgcagccagccctcagaaggggcccattttacagaggaggacgctgaggcccggtggggaggctccctccgcccgctggggcctgggaggggccggcgggggttcccccgctccccacacccacgcccgggactccccactggccagctggcccgcctctcctggccccactcctgctcttcctgttggctggagctcggacgcggccgggcgcggtgcccgccgccaagcccgctgtcccggctctgccccaaagactgagctggttagactccagggtcggaggttctcgctggtcgggcgctgcactgctcctcaggcggttctgggaactgcccctactcggactggcagttgcccctaccccgattggcagtcttctgctttcctgcccccacctttgagacctctctattgctcctggcaggcgcctgagcctcctttccagacatggaacttggttgtcagccataactccttcattcattcattcactcattcatctattcaccgagtgtcccctaggctcaaagtctagggaccagttggggttctagggagtccattcccctgtccccagagctcagaaagccaagacattagccttatactcatccaaagaaatgtcacttcccaggagacaaaaaagagggttccaggtcctggggaaccacctagaagggatagagaaagtctagacagctcttcccagctgagacacaagggatggaagtgggggacaatccctgaggtggcctgagctgagaaaggggcttgtgacagagacaggccattggactttggtcttctcacagagcaatgagaaggtggtgaaagctattacaaccaggcaggatgacaggctcaagggggctcctgcgggatagatggggcagagggacagcagggcagaggagaggctggatgggggacagaagggctgccacgttgttcaggtgggaggaccctggttgagattgcggaagatggatggggagaaaaggccagaccaggtgggttcaaggactatcctttgggaaagactttctcttcacacccaggccttgagcatgctgttctctgggcctgaatgccatttcccaccccacccccaaacctctacctgccctggttgtgtccattcaaatgtccctcctccctgatgcccagttgtaatgcacggcacttccctgagtgaaggaccatattcattagcatgttctgtgtcctgatcccatcccaccccacccatcatgccccatggcttccctggggttggactggaggaaagggtaaacaaggtgagcctcaagtgacctttgcccacttgggatcgggtttccttctggctcctccttcaggtccacagtaagccaacccagtctctccctcaacataaacaataggcccaccctgtgccagggactgcagccagagggaggactgacccttgaggagctccaggtccagccaccagacctttgttcccactccgtgtggttcaccatggaagaaggaaatgaataatcatggctatcgctgataggggctacccagcaccaggctgtgtgctgggtgctggatgtgggcagtctgaacagttctcaagaggtgagggctgctgttagtgccagttttggtgatgagcaaactgaggctcagagaaaggagaagcgacttgccccagagtacacagctagtcagtggcagacgcagattcagaccgaggtctgtctggctccaaagcccatagtttacatcagggatctcaatttcagcaccactgacctttgggac

SEQ ID NO: 316159 - DNA, 4001 bp, Homo sapiens
ttgcaaagttcatggctgaccatcctcaagtcaaaacagctcttgtgacaactacaaactttaaaaaatatccacacgtttcttggtactgatttaaaataaaaacctccttaatcagttttacctgcttaaacacaaagttatcatactgtccaatataactccaataaactactcctgcatacagtcaagctaataataaacagaggccagaggcttcatggcagcaaatttaaaagtccttacatcaaggacaaaaaaccaaacaccgcatgttctcactcacagatgggaattgaacaatgagaacacatggacacaggaaggggaacatcacaccctggggactgttgtggggtggggggaggggggagggataccattaggagatatacctaatgtaaatgacgagttaatgggtgcagcacaccagtatggcacatgtatacacatgtaactaacctgcacattgtgcacatgtaccctaaaacttaaagtataataataaaaaaaaaagtccttacatcaaatcaatacaacatttaggggctcagattttctttgaaatcaaaacaagagaggtagtttgagagtttgctatcttcactgatcctctcaggaatgtaaaagtatgcattaaaatttcaacctagcactgcttgagttttttaaagcaatttacttctacctggacaagcagtaaggcaagccaaagtagctgggttttctgtgacttctcagtctccaacctttatggtcacactaacatttcacgtttctaatgctcctaaacataattatctcaaaaaaaaattcaaaccacaactgaatttaaaggaaggggggcactttgcgtcactgatagaaaatgatttaacacaatgaacttagaactgggttttttcttgtaaccatagtaagggagtgaagatcagagaatttaaaactgtaactaggctagtctcctcaccttgcagtatctcaccctatcgggtagtcgttgaaacaacactgagaaagaaaggctcacaaaattttgatttacacacatgcaacttaatcttgacgacacgtaagtacccactgcacgtccctgaaaacgcatcgacttgattcttaaatacaacccctatgtctaatatactggcagtgcagatacactacgtgaacacaacggggatggaggtatatctcagagaaccagaggcgttaggcctgctggtaatcaaaacggacagctaactgaagaagtcccgttttctatccccacagcaaactgagttaactaaggcatcacttggaatcctcaactcgcaaccccaaatacacccagacttaaggatgcaaggcccctacaaagctctcaggaggcgagtctctcgtccacaccaggtgcacctactctaaccctagcttccttctcggaccctactctggcccctcggctccccgcaccgccatacctgggggcgcccccagtactgcatccccttgcttcgcccccacccctatcacttcgtcactcaccctgagtcaccggagccgcccgcccgcccagcccaatccgcccacaacacctccagcccctcaccctcccctcctccaggccgagtggagccggcctgtcccctcccgcccaccgccctgtcccaggacactcacccgcggtagtaggctttcacccggacctggtgggaatggtccccgctgccgccgcctgcgaccgtgtgggacatggtgctgctgtccctctgggtcggcatctcctcactcccccgcctcaacgctggaggccgggggtgcgggggggcgcttcgggcgccgtgggggactccgccgcctgcgcttgccggagaaccgcggccgtccgcccacctacctgcccacctcgcccgcagcgccgacccaagggtcgcctcgccggagcagccggaaccgcgcggctcctcccactgcccgtaggcgccgccgcctctacagccgcccgggcccaagacacctcctgcgtcggtccctcccacttcgctcgctccaaaggcccacattccggggtagggcgggcgcaaccatccagccagctcaaggagcctcaataccgggctgaaccatccttacgggggcagagaaaggggacagagggaatgggagacgctgatcatggcatcaaacacgccgagaggggtgctttcacgcgagctgtgaaagagacaatgaccagctctagatcactaaagtctcttccctgcagggacaatggtagggacaaattctacgacacctcaccctagcctcgcaacttggtcacgtctgcggtcggccgacttggcacccgggatagatttgcgtgcaggtttctgggatttggagtcctcataggattctgggacttgaggttccttgcgcgtagggtgccgcgccttcccgctggtgaagtctgtctctccagcgtgctccctggagctgtcggggtggaaaacctggatccagcttgggcatctgaaggtcctggaaatgactgggcttcctcacgttctagactttattaactgatgaagtctcccttcttctaattgcataaatcgtctgaattatacatgtcttttgggggaacaagaatttggttacctgctcagcataacctcttttatggaaataatttaataacatatgtaacaaatataataaaggaagaaactcaaccagaaaatatgatgaaaaaccgatttttcttctttgggggcccccatatctaggcccttgtagactgcccttgcatggaacaagagcccaatgaatacttacccaatcaagtcagtcaatccaagagcatttcattctgtaaaaactggcttaccaaagattagaaagaatcgtccttggccgggcgcggtggctcaagcctgtaatcccagcactttgggaggccgaggcgggcggatcacaaggtcaggagatcgagaccatcctggctaacacggtgaaaccccgtctctactaaaaacacaaaaaattagccgggcgtggtggcgggcgcctgtagtcccagctactcgggaggctaaggcaggagaatggcgtgaaccagggaggcggaggttgcagtgagccaagactgtgccactgcactccagcctgggcgacagagcaagactctgtctcaaaaaaaaaaaaaaaaaaaaaaaaaaagaatcgctcttgtaacctagtctttgactttcctaggatcttggctctgacacataatttacactgcaactacaggtagcatgaatccagcccctgcagcagtcctggtgctgaaagagttggaataatcaaagaaatagctttctttacgatgataaaataggcttgggggactgagtcatcagttatgtgtgacacttcagcgtggtacgacatcctccaactgctacagacttggattatatactcttactaaaaattccccttgagtcaggcaaagtgctacatgcctgtagtcccagcctttgagaggctgaggctggaggatcacttgagcccaggagttcaaggccagcctgagcaacatggtgagaccccatctcttaaacaaacaaaaaaatcccattgaaaaacttggtatcaggtttttcagtaattggagacctgcatcagcaagtttaatacggagcgattaattatggaatatattataaaatatacgggcacctgtaatcccagctactccggaggctgaggcacgagaatcgcttaaacccaggaggcagaggttgctgtgagcctctgagactgcaccactgcactccagcgagactccgtccctgggcaacacaatgcacagtgagatcccgtctcatttttttaaaaaaagataattcacatgccatacaacttactcatttaaagtgtaaaatttgatagttttaagtatcttcacaaagttttgcaaccatcacctctacctaaatccagagtattttcagcaccctgaaagtaactgcatatccattagcagt

SEQ ID NO: 316160 - DNA, 4001 bp, Homo sapiens
aaaatcttttaaaattcaatcacctggatgtttaacatgctatacacaatgtatcttgataagttactgagtttttcatttgaatccagatggttcctgtcatggagacataactacattttattgccctgttgctttagagacatttttaaaattctctttttgtaacactgagttaaaataacaacaacaaaaacagcacacataactatataataagcccagtctaagcctctctaacagatagacagccaatgtgataaaattttattttgtaacaaaagcttcagttcttggaaaatttacaaagagttgcataggtttatatatttttaattagacagctgtttcctaatgcccttcatccttaacccattgcaaatctattcagatagtgttgtcctgtgaatggaacaaaaagatacttatattgcaaagggatcttgggctcagaggattaggagaaactttaaatgagccagcaggagaagagggagaaaaaaatccaatcatgtttcaattctcatgtattagaaagacctgcaaaaagtttttctcaaccacatggactggcaaagctatgcaagtaattttttgaaaaaatctcttttctaataaatatcacagagcttacagttaaatatctgttggatatatacaaatgctgtcatagcaaaaggactttcaaaattctataaacctaataactaatatagagaaaatagagcttgattttttcaagacaaagatacttcctttaaagtcaaatgatattatctatgtatcaacatttcaaacatagacgttttatttaaatcccattatgtgcacttaaatatttgaagtaatttaatgaaggtgtgaaataattcctcacttaaaaaacagtaaagaagttgaacaaccaggaaatgatagcagttttgccttgttaatgtaaactagactatttagtattgtactgcaaacccaattttttcagatccacacaaaattgttgagagtgggagagaactgaactagttcctacttacagaaaagatgaaaacatcgtctctaagtttaaacatctacacagcaacctactccatcattatgctggagcactggaggtgctttgccaggaattagaaatttaaaacttttatggggatacctcaagaccctgagcgcgggggaaagccccggaacccagaaggaagctcccacaattgcttttcaaagcgctcacatggccctggaccaagcgatttcaaagggtttctgcggaggacgcatcggggagcaaactctttgactgtaggattaagactctgggcacttggggaattcgtcttggtcctttgcatttcaggaaggggccgtcaaattttaaggttcgaggttggagagcctccaaaagtacttgagaagactcagagagaaacttctttcagcctaacagaagaaaaatgcgaggagtgaggccgtgggtgatgagggagaagtaagcgggagaaggtggtaataaaggtggtgggcgacatccttgtcactgtttcttccaggacgcgcccagtgtccccagccgtctgctgcttttggatctgggtattttcccaagtgcaccaaggggcgacaggggcaggtgtccccgcccagggcgaccctccctttgcctctagcctgcccttcagggtccccgtcccaagccccctgggcacatcccaggcgcgcatcaggggcagacaggtgcgcccgggccgcttaccccggtgatcacggcggcgtccccagcgcggggcgtgagcagcagcggcggcagcagcaagaggagcaggagtggggcgcagcacaggctcctcatggcgccctcgggactgggcggccgccggaggcagttgggggcgcggggcccgggtgcgctgggtggagcgcggagcggcgggcggacgggcgcggcggctcccgcgagcctccgggccgttataaaggctagccccgccgtgactcacgccggcgcccgcccggcagcacacgcggggggcacggcgcgggcacacaccccacgccccacgcgcacacgcgcgcccgcctcggcccggccggctcccagacgagcacgtgctatgcgcggccccccgcgcccccgcctcgggcgccacgcaggcagcgctcccggcggggcgccccgctctgcgccgttccctccgccgtcgcccagccaccgcctttcgcacgcgccggaaccgcttttgtggtctccgagacactcatttgctgtcctggtttccaaagctccacgtgctcagcgccgaaaacttgcaaatcatttgctgtacagatgtttaggggtcgcctactacgtgcggggcgctgtggacacatagggggcggggggtgggtgagggggacacagcagcccctgaatccattcgtttgttcagcaggtctatactgggcgcccgctgcgtgccaggtactgccaccggctctctcctcacggtggaataacttaacagagaagacagacatcaatcaaataccctggaaacgtggaaggcaggggaaagaacaaagggagagcaaaatcgccccaatcccacatcacccgcgacgtgaaaggatttgtccttccagctgcgggactcctatttgtttatttcaagtcagaggccttccctttatgcccacatctgttcccgaccctctcctctgattttcctcacatgtatttcctcccctcttcagccccgcgccagctccaggcacagccgttcagggtgatgccaaagggaaatgagaacgcctggtttcgagtgccagcctgaggccccttaagccctaggtacgcagctctctcttctttcttaaactttccagcccaggaaaatcacccttcggttttacagatgcgatagggcgttattgtgattccttcattcacgtaaacatgaattgagtgtctagtgggttccaggcacaccaggaaagaataagtgacagatttgccctccatctctcatcctagcctggctccaaaaactgcagcctgtttccctcaacaaaaatgacgtcaagaatacctagatgtgaccacaccgaacttgcttgcccgttttgggaaacccaactttcttcctgaatagtcagaacctctggctttcctggtctcttaagaaccgcaaactattgaaaagcagatgcgtctttcagcctctttaataaatgcagtaaggagagttgggacagagttactttcagactgtggggctcccccgtgccaaagcattcagacgaaatgtgggggatagcggggggaaggcaggcaattatctgaatgttaaacagctgaatatttggaaaccccaatctttggctgatttttaaaaacctttttcacacgtgttctcatgtttaaaaaacgccttgaacagaaaacacaaaaggagtcaaacccttttttcaacttaaaaaaatgttaaaattggactcacagtggagtaagtagaaacagtagcaagtgacagacttgtggaaagtttccttttccagtctccatgccaacgctagctcgggaatgctgccgggtaaatgtaaaaaccagtcaacatggattttaacattcctatgactttcttttaatggtctatttcatattcgctactattgaatgccagcttgggtattccctgcttcttcaagcatagaaaatatgatatgtctacacaggaaaaatcagatttcaaaagtggctggcttcttacacagctgtttggaaaacagtcctcataaggctgttttgaaacaagtttaaaaaaaagaaataagtttggaaacacttaaaaatagggttgtttagtttcatgttcttttggaaattttaattgctttaatgctttaggagagaaatgaaggctcttgatatgtcatctttgtatctgaggccaagtttgaaaaatgaagtctgacttcaattgttataaagggaaaaatgaaaaaaaaaaagagtttggattagt

SEQ ID NO: 316161 - DNA, 4001 bp, Homo sapiens
gtcaaaatgtaacaatctctacaaagagaaaaagcctagcaaatttctatgatgacaaggagttaagtgtggcaagctactttgcctttctcctctccaaaacactagctatgaagcaaatatttaattgtcctaatgaactatttaggtaataagcgcatgtagttacaaattggctgaatgataggggtttgaatgctgaagttttgcaattgtagctgtttaatgtaagatcaaaaaataatgttttagtcccaagttagatttttaaagtactgcattcatcctgatgactaactaatagaaactagtggaatgttagcaaattgatatataattttctagaaatttccatcttcaaaaagtttactttggagctctagactcctaaaagttatttgtaattcagagttctcactcctgttccaatccctgaaaataaaacatagaacaagaagtcatttttggccaggtgcggtggctcacgcctgtaatcccagcactttgggaggccaaggcggatggatcaccggaggtcaggagctcgagaccagcctggccaacatggtgaaaccccgtctctagtaaaaatacaaaaaaaaaaaaaaaatagccgggtgtcgaagcaggcacctgtaatcccagctgctcgggaggctgaggcatgagtatcacttgaagccggggggcggaggttgcattgagcggagatccagccactgcagtccagcctgggcagcagagcgagactcaccctcaaacaaacaaacaaaaaggcgtttttattcaataaacacacttacaactttagaaaacaaattaactgaccactaaaatgtactaattgccttggtattccttatatatttttcagagaaaactcaatatcctgtcttgaatccgggcataaggacataaagaacctgaaacacaaagataaagaattcatgccaccacctcagatcagtggcatgcagtgttaaaaaatcctcagtacaaacgatctgagaaatagaatacagtatttaacagtccttttgatttcagggttagaaagtgacatatatctactgctatacaaaccctcagtcatcctaaaacatttcgttaatgtgagacaagcaaaccaagctcaaagtccagaaattgcaaaagggaggcaggtttcaggagacgggtgcaggttgggggcaggcgcttggacaaagggaagacacagtgtgttaccttttcttccctactcataagctagaatctgctcatcctagttctctgactgggaacttcagctttgaagggaaatgggcaggtgttctcatccctccattgatacttagtgtcatctaggttcttagatctgtcctgtaggcaatacattctcgcaactgtgcaaatagtgatcctgccccaccattgcactgcctgctctatccacggctgtttccatccgctgggtgtctgtcggtacttactggaaactttctaggaggctgcagctctagagaagaaaatcctaccaaccagggcacgcagttcagtcgacaatgctggggaagggagaagagacgctattgattactcacagtttgcctctgagacgggaagcactaggaggagacacgccagcagcgccccgcagcgcccacccaggaccctcatttcgaagcgcgcggaggcgccggcagggacggtggcgcgtcgcggcggggaccggagcgctaggcgccgcggagctgcgagcctgtgcgcctcggtctgagccgtgctgcgcggcggcgccagcgacccagcgagcctcggcggaacagccgggggcggaggagaccgcccgctcccagcgcccagcccgagaggggaagtgataacaaggacatttccaggaagcttttcggagctgggggatgggctctagtgttggaggcctagtaaacactgctgagacatccttcttcaccagctccctagttgctgcttttcctccacagtgtgacgtttccaaaggggaaggggtggggaacgcagttctctgactggtcaagacaacttccagggttcaagaggacaggatccctaggttcagaagcagaaacagtgagacactgagttgtccctgaagatattaaccaaaacctggaagtcaatgaggactttaggaagaactatggtgatagtaaaagcaaatggggtcattttgatcatccacatgttttttcggtcttgtatgccatacaggcataaaaataatgtaaagaacatgaagaaaagaagggaatattagaataatctaccttaaaaaaaatcttgctccgataaagacttcagttgaaagtgaatatctatctatacatctacctatttattaatttaaaaaaattttttttttttttgagacagagtctcactctgtcgcccaggctggagaacagtggcgcaatttcggctcactgcaacctccacctcccgggttcaagtgattctcctgtctcagcctcctgagtaggtgggattacaggcgcctgacaccatgcctggctagtttttttgtatttttagtagagacagggtttcaccatgttggccaggctggttctgaactcctgatcgtgagtgatctgcctgcctcggtctcccaaagtgctgggattacaggtgtgagccaccacacctagccttatttatttatttatttatttatccgagacagggtctcactaggttgcccagactggagtgcagtggtgcaatcatagctcactgcagcctcgaacttctgagctcaagcaatcctcctgcctcagtctcctgagtacctaggactacagtcacacaccactatgccaggctaattttttaatttgttttttttttttttttttttttttggtagagatggtatcgctgtgttgcccagactggtctggaactcctgacctcaagtgatcctcttgccttggcctcccaaagctttgggattacaggtgtgagccacttctcctggcctgaatatctttttaataccacaaatttgcatcacattgccagtaataattgtcaacactgaaaatttatgtgtcctacactgtaacgtcaaactttgtaaaaccatctggaatctattaatatacaatttgacaatacatctttcaataaaattctgggtttttaattaatctcagaagttaactttgtgaaagtgatatctggctttagctcaatatgaattgacacttggtaatctcatttagccaaagtttggttttgatacagaccttaatatacaattaaaacctgtccaaaatttaactcttaatctagtctcattcataatcttaatcccatcatttttccagtgttacacttctccatatcatcttctaccaacatagtgtctacttatccacttcttcatctgtcttcaccagtaaaatgtaagattcatgagagcaggaatttttaaaggttttgttcacaactatattactagtgcttaaaacagtgactggtacataaacgtttcattctatttaagtcaacagtgtgtgcctgggaatatttatgccaaaatatcaacaattatcctgaaatgacagtgttaactagaatcatagcagcatgactcttttcatcattcagaataaaccagattacacactaaaaagccagaaaattacagtgttttagataagaagtgtttatttcttgctcattggaagtctactacaagtctgcatgactttccaagtaactatcttccatgtgtgaactcagcaattcatgctgctttgattttacaatccctcaaagtcaacatagtcttctacaattaccattgcaagagaagagagaacattgagaattgtgccccagctcttaaatacttttaccaagaagtgacataccacttacatttcattagacaaagcaaggcacgaggtatgcctgacttgaagagggtgggaataactgttatttcatgtgcctgtaaggaaagagaactagac

SEQ ID NO: 316162 - DNA, 4001 bp, Homo sapiens
ttagaccaaatgtccatgcggtgaaggtgagtgagtacccctgagaggaaatcaagatgaagcccacactgccctgaaattcaggaatacccattggttaaagtacatagaatatgtcattgtacaagatgctgctggaatgaaagtgtcacaacttcctactttccctcattaaatattgctttcactaatttttaaattgttttttcgttttcttttttttttttttgagatggagtctcactctgttgcccaggctggagtgcaatggcacgatctcggctcattgcaacctctgcctctcaggttcaagcactcctcctgcctcatccctgctagtagctgggattacaggcacacgccaccatgcccggctaattttcgtatttttagtagagacggagtttcgccatgttggccaggctagtctcgaactcctgactgcaggtgatccacacgcctcggcctcccaaagtgctgggattacaggcgtgagccatcgcgcccggcccttaaattcttatttgcagaaacacttccaaaaggtccagtgcattcattacatttgaatgttgtttgtttactatctaatctaatatgcatttatcttgattgtccaggtccaggaaaaggagttaaggagagcaagtggaaaataaaatcagtggtcagaagcacctcagaggatgttgggagaaatcgtataggtaaattcctaactgcaaaaagaaggaaagacaatgatctggattggagagaacggataggtgtatggaagtgataaaaaaaaaggggggaattttaaagaaaactgaagggagctttaagcaagagtaggggtgaaactgaggatacagttggctgaaggtgacaaaggcagaagtaacagctcctgcagcaaaggcaagggatctgaaaatccatgactggttatgtgtggtctactcttcttggtaaaggtgcttaccagaatctgcttttcttttttcatgtccttgcctgccacttaccaaggaattctgccaaaaaaccaaccagccagccagccaaccaaccaacccacccaaacaacagtaatccaactgcccgctgtcgatgaatgaagatgctgcatttccgggctgtggcaagtcctcacagtgagtcttggaggatccacaagaacccgcagccggtggcaagggattgtgggaagcagttcattcctggaacagtcgtctgcgggccttgcacggagggcgtttcgggagcggcgggtgcgcgtggggacctggactccccacgcgcggagagggaggtagaggttggagaggtgagctggggacaggctccagaaggcggaattccgggtcgaagaaggggcctggagagtgtccctctgaactggggttgggggccagagcacagggttctgggatggggccctcccggtaggggctgaacatacttctggcggaggagtagagcccagcggctgagccggctgcggagtccatctggagctccggaaactcggggtccgcgtcctcctcgtaggcctcttcctgggcggcgatctctgggacagatgcgcagaagacttcctgctcaacgacgacgtcctccctgagagcgcccaggaaaacgtccacttccagcccagcagacgagtcgtcctgcgctcctgagcgttcgtcgacagagctcaggaggacctctgggatcaggatgagggtgtgtccatcgagagacactcgcaggatcgacgttggcgggagctccagcaccaggtcgacgtcgtccaggggcacacgcagggcacagcccgcggccaggaccactatggaggtgagcgcgcccacggccggggtacccgccgggtcttccaggctgggcgccacgcggggttcggggcccgcgggctcctccaatcggaggcgcttggcagggccgggtcctcctggctgctgtccccaccagggcgcagggaaggcgctggggctgcggggccggctgcccatagcctcgacggcgctcttgggcctagcagaggacgtagggagcgcgggcagcgaagtcctttttgaggtaacaggtgtcggtgctaggcgaggcgggttggggcggaaggggcgaaggaccgcgcggcgcggggagagtcctgggagctccaggggcgcctcccggagaccgcagtccgtgctgctgagagagcctcgcgcgatggaatcttgggccttcctggcgcagacccggatgcacgtccgatgactaataacgtgggacgtcaggtgacctcggcgcaccaggatgtgtcaatataggccccgcctcccgacagtgctctgcggtaggcgtggcctagagatgattggatcaattagaacaagagcgaggtgcggaggtggggaggtggggaggtggaggggtgtctttgtgtctgtaggggaaggttccttggatgtgctcgtgggacccaatggcggtaattgcttttatcttggttaagaaaagaaaagccaaaacacaatttcaaaaactgcttgcttacttttataagtagcttacgtctcaatgtctcttctaagattttccaggaatatatgaaaaagagctttaactcatactcactgctctttccccacccttcctacgtggttctaaaaagttctttcatttctgatagaaagtagaaatgaaaattttgctttgataagtaaactttaatttttgtgggtacatagtaggtatatatatttatgggttatatgagatactttgatacaggcctgcaatacgtagtaatcacatcatggtaaatggggtatccatcctctcaagcatttatcctttgtgttacaaacaatccaattatactcttttagttattttaaattgtacaattaaattattattgactatagtcacccggttctgctatcggatactagattttaattcattttttctatttttttgtacctattaaccatttctatttgcccccaccctcactacccttcccagcttctggtaaccatccttctactctctccatatgttcaattgttttaatttttagctgccataaataagtgagaacacgagaagtttgtttttttgtgcctgacttattccacttaacataatgacctccagttccatccatgttgttgctaatgacaggatctcattcttttttatggctgaatagtactccattgtgtatatgtaccacattttctttatccattcatctgttgatggatagtttggttgcttccaaatcttggctattgtgaataaaactccaataaacatgggagcacagatatgtcttcaatattctgcttttctttcttttgattatgtacgtggcagtgagattgctggatcatatggtagctctatttttagatttttgcagaacctccaaactgttctccgtagtggtttttacgagtttacattcccaccaacagtgtacgagggttccctttactccaaatccttgccagcatttgttatttcctgtcttttggataaaagccattttaactggggtaagatatctcactgtagttttgatttgcatttgtctgatgatcagtgatgttgagcaccttttcacatagctgcttgctatttgtatgtcttcttttgagaaatatttattcagttattttgcccatttttatattggattattagattttttttcctttagagttgtttgagcttcttatgtattctggctatgaatcccttgtcagatgagtagtttgcagataatttctttcattctcttctgtttgttgatgtttcctttgctgtgtagaagctttttaacttgatgtgatcccatttgtccacttttgctttagttacctgtgcttgtggattattactcaagaaatctttacccagatcaaagtcctggagagtttccccaatgttttgttatagtagttttatattttgagggtttttttttttttttgacagagttttgcccttgttgc

SEQ ID NO: 316163 - DNA, 4001 bp, Homo sapiens
gtggaatgtaagaataaaaatgtaggaaataattggtaaggcatagtggtagatctgaatagttattgatgtttttaaataaaataaaaccagcttgttgacatcagctttaccagtaatcttttatctcctatataaaaatatgaggcaactacagtaataaactaacattttaaaagttagaagtttggtttacatgagaaaaaactcagggtagattttaaaaggtataaaataatgtggaatagcaggaatgcaaacactttccattgggtgaaatcaccagattaacaaattaaaaaaaaatacataacacaatgcatgctgaaaacatctgataaaattcaacacaaattttcatttagaattagaagactagaagaaaacttcagcaggataaggggttcctaggaagaagcaacatacagtcttgtatagtaagcatactatttggcagtttccttggagagcagttggaaaaaccccaagaaaagccatggctaagtcttccaaaattcatgggaaaaaaatgcaaggtaactaacaacgtaagagatctggtgatttcttggtttggggagaaacgggagtggcagtatgatgctggagaaagactggaatttgagagaaacaactgatgcaaaacgagggagaatgaagggatctgaatatgaccttgtaaagaagcccagaaatctggacacattttctggtatccttgcgcagattttctatttaaagatgaggtctagaatataccttttcttgctgacgtcttcatctcctactatcggtagtgtgcagcgaaaaagcaattgtccgaacacgcggtgcccaatttccaggttgttggatactcaatgtgagagattcccgcaatcctagagggcctccagcagagcggccaggattgttgtgtgtacgtgggggtgggggtctatgcctggaacaggcgtctccgggccttgcacggagggcgttccgggagcggcgagcgcgcgtggggacctggactccccacgcacggagagggaggtagaggttggagaggtgagctggggacaggctccagaaggcggaattccaggtcaaagatggggcgtggagaacgtctctctgaactggggttgggggccagagcacagggttctgggatggggccctcccggtaggggatgaacatacttctagaggaggggtagagcccagcggctgagccggttggggagtccatccggagctccgggaactcggggtccgcgtcctcctcgtaggcctcttcctgggcggcgatctctgggacagatgcgcagaattccagctcgacgacgacgtcctccctgacagcgcccaggaaaacgtccacttccagcccggcagacgagtcgtgctgcgctcctgagcgttcgtcgacggagctcaggaggacctctgggatcaggatgagggtgtgtccaccgagagacactcgcaggatcgacgttggtgcgggctccagcaccaggtcgacgtcgtccaggggcacacgcagggcacagcccgcggccaggaccactatggaggtgagcgcgtccacggccgggtcccccgccgggtcttccaggctgggtgccgcgcggggttcggggcccgcgggctcctccaatcggaggcgcttggcagggccgggtcctcctggctgctgtccccaccagggagcagggaaggcgctggggctgcggggccggctgaccatcgcctcgacggcgctgtggacggcgctcctgggcctagcagcggacgtggggagcgcggcggtgaagtcctctttgaagtaacagatgtcggtggtaggggaggctggttgggacgagcggggcgcaggaccgcgcgacgcggggcgagtcctcggagctcccggggcgcctcctgggggaccgtagtctgggctgctggtggtgcctcgccggccaccgggctcagcttagctcgttggacccttgggccttcctgatgcagacccggatgcgcactgcaaagccaattatgttgtaaatgacggcagcggaaccgaagtcgcaaaatgtcacgcaatgctccgccccctggaggacccgctctagaggcggaggtatccgtgctgtccagtatccgtggctataattggtcggacacgctggggaaatactcttacaggcctctagggggcagaatgatcagtataacttattcagaaaaaatgataacaactgtaatagaatttcaaagatggctcgcctttagaactcatgttttcttgtgatttcagggattctagagaaaagaccactcagatctctccgacccatccaaatgctacatacaattcctttaatgctactaaattatttcattttaggagtattcagaaaatacagatttctacttgggaaaattgattttaaaattctgagtgaagctgggagtggtggctcacgcttgtaatcccagcactttgggaggctgaggaaggctgatcgcttgagcccaggagttcaagaccactctgggcaacatggtgagactcggtccctatgaaaaatttaaaaattcaaaaattagcctggcgtggtggtgcgtacctgtggtcccagctatttgggaggctgagatggcaagatcgatggagcccgggaggtcaaagctggagtgaaccgtggtggtgccactgcactccagcctgggcaacagagtgagaccctgtctaaaaaaaaaaaaaaaaaaagtgaaacatttgtgaatagtttcatcctgaaagttaaaaagttataaaattattaatcatattaaaatttaaaacaatattaataaaattatttttttttctttttttttttttttttgagacagagtctcgctctgtcgcccaggctggagtgcagtggcgcgatctcggctcactgcaagctccacctcctgagttcacgccattctcctgcctcagcctcccgaatagctgggactacaggcgcccaccaccgcgcccggctaattttttttgtatttttagtagagacggggtttcaccgtgttagccaggatggtctcgatctcctgaccgcgtgatctgcccgcctcagcctcccaaagtgctgggattacaggcgtgagctaccgcgcctggccgtataaaattaatttttaaattgaacacttatatttccatgattcttgaattttttttttttttttgacagagtctgactctgtctcccaggctggagtgcagtggtgcaatctcagctcactgcagtcttggcctcccaggctctggtgatcctcccacctcagcctccggagtagctgggactacaggcctgtgccaccatactggctatttttttttgtatttttagtagaggcagggttttgccatgttgcctaggctggtcttgaactcttgggctcaagcgatcctccctcatcggcctctcaaagtgctgggattacaggtgtgagtcactgcatctgacctgagcttttttttttgagacggagtctcactctgtcgcctaggtttgagttaagtggcacgatcttggctcactgcaacttccgcctcccgggttcaagccattatcctgcctcagcctcccgagtagctggcagtacaggcacttgccaccacgcctggctaatttttgtatttttagtagagacgaggtttcatcatgttggccagtgtagtgtcaaactcctgacctcaagtgatccgcctgcctcggcctcctaaagtgctgggtgctgcggttacaccgtgcccagccctgagttttttttttttttttttttgagacaaagtcttgctcttgtcccccaggctggagtgcaatggcgcgatctcagctcactgcaacctccgcctcccgggttcaagtgattttcctgcctcagcctcccaagtagctgggattacagggacttaccaccatgcccgtctaatttttgtatttttaatagagagggggtttcaccttgttggc

SEQ ID NO: 316164 - DNA, 4001 bp, Homo sapiens
tacaaaattagtcgtgtgtggtggcgcatgcctgtgatcccagctacctgggaggctgaggcgggagaattgcttgaacctgggaggcaaaggttgcagtgagctgagattgtgccattgcactccagcctaggcaacaagagtgaaactcttgtctcaaaaaacaaacaaacaaacaacacacacacacatacacacacagagtcttagaattataagcttttccaggataaaataattatattaaaaacatagaagaagaaatgaatggaaaagagctggctctaagagttaggggggaaataaagcccaataacataaacaatttgctaaaccaatcatgaaaaaaaggagggtacatgatcattattcccagttcggtctgttttgcaaacaacaaacatttgtccaggtacaactatgtgcaagatcacccaaaagggctcaggccaccatagggaaaaattccatgttgagaaggtcgtcataaactagcccagagactagggccaaaacccattaaacaaaataaatgtagtaaattaacttgggagaaaaggtgtgccatggtaacgtgctggggaaagggcggatttttagagaaatgtgctggaactgaggttcaaagcaaaaccagggggaatggagctgcctaggggtgacttccaaacaaaacaggcccgaagcagcaatctcacagtctgaaagtagactgtatttcaactagcgtatttttatgctgaggaggaggatcttttttttccagactttctaagtcagccactgatccagaattctgcaacgcagcctgtatcaaaaaagcatctatccgttatccactctccgagatccttgtaggttgcgcaacatacacacaacggctatcaggagacggtctcctggagcccagcagggtggcaagggattgtgggaggcaactcattcctggaacaggcgtcttcggaccttgcacggagggcgctctgggagctccgggcgcgcgtggggacctggactcggagagggaggtagaggttggagaggtgagctggggacaggctccagaagatggaattccaggtcgaagatggggcgtggagagcgtctctctgaactggggttgggggccagagcacagggccctcggatggggccctcccggtaggggctgaacatacttctagcggaggggtagagcccagcggctgagccggctgcggagtccatccagagctccgggaactcagagtccgcgtcctcctcgtaggcctcttcctcggcagcgatctctgggacagatgcgcagacttcctgctcgacgacgacgtcttccccgtgagcgcccaggaaaacgtccacttccaggccggcagaccagtcgccctgcgctcctgagcattcgtcgacggagctcaggaggacctcggggatcacgatgagggtgtgtccaccaagagacactcgcaggaccgacattggcgcgagctccagcaccaggtcgacgtcctccaggggcacacgcagggcacagcccgcgtccaggaccaccatggaggtgagcgcgtccacggccggggtccccgccgggtcttccgggctgggcgccgctcgggattcggggcccgcgggctcctccaatcggctgcgcttggcagggcctggtcctcctggctgctgtccccaccagggcgcaaggcaggcgctggggctgcagggccggctgcccatcacctcgacggcgctgcggacggcgctcctgggcctggcaggggacgtgggtgcggggggctcggggcggcgaagtcctctttgaggtaacaggtgtcggcaggaccgcgcgacgcggggcgagtcctcggagctctgggggcgcctcccggagatcggagtcggtgctgctgctgggggaacctcgcacgctgtgtggctcagcctcgcgcgatggaaacttgggccttcctgacgcagacccggatgcgcactgcaaagccaattatgttgtaaatgacggcagcggaaccgaagtcgcaaaatgtcacgcaatcctctgccccctggaggacccgccctagaggcggaggtacacctgctgcccaatagcggtggctgtggttggtcggtggctgtggttggtcggtcacgctggggaaatactcttacgggccgctagggggccgagcatctgtgccgctctagggcctggcttccagtatcaagttcttgtcctttgcgttgacgtcagacgcggagttgaagagcgattcaggttcaagtaacactagtggagtgccaaaccaggacaccgaatcctaaacccatattcccaggccccgtcccggaagtgccctgcgcgttactattgacggatagtggcgtgcgtttttgagttctcctatcttgtacatcgatgtaatatccttttaggggtcttggaagggagggtaaagctgagatcctgcgtgacaatggcaggtcctgcattatctgtttattatgatagttggtactatagtaattacagtcttcccttgatatccctggaggattggttcctggactcccgcatggataccaaaatctacagatgctcaagtctcatataaaatggtgtacatttgcatatcacttacatccttccgtgtattttaaagcatctctagaatacttatagtacctaatacaatgtaaatgctatacccctggttgctacacagagtttcatatatatatggtttgtttgtttctgagatggggtttcattctgttgcccaggctggagtgctttggtgcaatctctgctcactgcaaccaccacctcctgggctcaggtgatcttccacctcagcttcctgacaagctgggattacaaacacgtgccaccacactcggctaatttttgtattttttgtggagacggggttttgccatattgcccaggctggactcgaactcctgggctcaagcattccacccgccttggcctcccaaagtgctgggactacaggcgtgagtcactgtgcctgaccttatatatatgggttttttttgttttttgtttttttttttgagacggagtctcgccctgtcgcccaggctggagtgcagtggcaggatctcggctcactgcaagctccgcctcccgggttcacgccattctcctgcctcagcctcccgagtagctgggactacaggcacccgccatctcacccggctaatttttttgtatttttagtagagacggggtttcaccgtgttagccaggatggtctcgatctcctgaccttttgatccacccgcattggcctcccaaagtgatatatattttttattgtgttattttccttttttttcccgaatatttttggtcttctgttggttgaatctgcgaattcgaaacctgcggatccagagggccgactctattatgttacaatcagctgaagtatggttaactttatctaatttgacctaaactacagctctgaggtctatctgttttagcccaatttatggatgatgaaaatgtcatgcagaaaggttagccaacttgcccaagagccagtaactaccagagcggggtctggcttgtccagctccatttaaggtgatagacctacacaatgtcagcgtttttgacctgtgtcagctgaaaggcacctctacgtcacgtgtccaggcggtaaaagggaaggtgtagctcaactagtgttaataggagaaaatactcagcactgattttggaatagtaatattttcaagtgcttacaggggacaacaaagcatttcctgacatctttgctaagcatgtgatgatcccaccttggcgggaaccattattacattttatcattccaaaatattcttgggcatttaaaagcaaatctcatacatgttatttatctccctcccctttctacaaaatttattcttttttagggttgcatagcattcctttggatagtctttacatttaaatcaagtctctcttgctggacagtggt

SEQ ID NO: 316165 - DNA, 4001 bp, Homo sapiens
caagctgttcatctgtcctccaacacccactggactgtgtggctcccatgccttttgcttctgctgttctgtcagcagggaatgctctctcccttccccttcacttactgaaatcctgttctttttgagacggagtcttgctctgtcgctcaggctggagtgcagtggcgtgatctcggctcactgcaacctccacctcccaggttcaagtgattctcctgcctcagcctcccgagtagctggggttacagacatgtgccaccacacctggctaatttttatatttttaatagagatggggttttgccatgttggcaaggctagtcttgaactcctgacctcaggtaatctgcccatcttggcctcctaaagtgctgggattacaggcatgagccactgcaccctgcctgaaatgttattcctaaaggcccacttcaaaaatgagagacgtggagagggagaggaatatgcaccggcctttggcgaggggcctgagtttgaatcccagtgtcttcatttcctgggggagtcatttcacctctctgcatcatagttttcccatcagtaaaatggggataataagcatgcctaactcaaggcatgagacaaataaccaaacaggtatgggcgaggttcatacctgatgcttgacaagcgttacacattcctcttcccgccttccttccctcatcttcctgggcacttgtcactctggtctgattctataataatctcctgcctcttatttcaaacctgcagcctccagtatatacctggccccacgtggatatcccctaaaagttcctgttctcgagagcctgtcagtgggccagggaggcaggaaggggccccaccaccaggagaggtttcatggagggtgcgagagctgaagcctgggtgtgtttggcggcagaggccctgctcttttcctctctggggagcagctgtccccaaagcttcctggctgttaacccatggtggctcacagacaccttaagaagccactgaaaacccctggtgctctcccggggaaaagacccaggctcaccgaaagttgtgaacaatttcaaggggttcaaagacctttgagtcccatcctccaaactcgagtttagactctgtcttaaagccttgttagttcatttctcaaacattcacggagccccatgggctgctcctggtctaggctaggtgctgggggcccagagacagggctttgctccagggttgggagtaggggtgcgctgagacgcccctaacacaggtactggctaaaaacagtgctcctgtgtttagttctttcccagtgaggctcctgcgctgagcttagcaacacgtcactccgccctcccaatacaaggtgtgggaacagccatttcacagggggaagaaacgggggttcagagagggtgagcaactcccccaaggtcacacagctgagtggacacaatcggggttgtgaaaccctcggaggctcatcttccacaggaggtccaaaaagctttgccgagaaaacggctgaatggggcctccaaagataaacatgccatctgcctaccactgccaacccaagagatgtgggcacctgcggacaaggcgggggcttgcccagccctgggctcccactctgctggagaggctgtggggggtggcggatctctctgccgcagggactggggagaggccggcctgggggcagggcgaggccgttgcggggcagcctcggagctggtccatctcgggttacctctcctcctcctcctcctcctcctccgtctcctctctccctggctccgcgccttcccgcagtgtcctggatgggggtgggcgccgtgcaggcctggtcgcctgcgcccgcgacgggggcagcaggccacgctccccgtcggggtcccgccatcgccccctccctgggccagctcctcacctgcgcgccgcagcccccgtgttcaccttgcgcgcgtccctgcagccgatcgccgcgccgcatcctccgagatgctcagactcggctaacagagcccggcgctgccgatcgcgagcccgcccacaggagcgcagccctgcttaactctttccccttaggggtggactcttctgtcaaccctgacttcccctcgctcagggattgtcagggctcagagtggaaccgaggtcatctctgagggatgtggaaatgtcttctgcagcatccctgaaaacggggcagctagcctctgcttgcatacctcatgggacggggagctcacttcctttctatatccctacatccttttaggtaaatcctacctacagcttggtatgtatccttcagattcttctcaatgtacagttacatgtacatcttaaatagaaatgacatcatactgtatactttttttttttttttttgagacagtcttgctctgtcgcccaggctggagtgcagtggcgtgatctcggctcactgcaacctccgcctcccaggttcaagtggttctcctgcctcagcctccctagtaaccatgcctggctaatttttatatttttagtggagacagggtttcaccatgttggccagggtggtctcgaactcctgacctcaggtgatcagcccgcctcggacccccaaagtgttgggattacaggcgtcagccaccgtgcccagccactgtacacatttctgtaatttgtctttttcactttccaatatattctggcacatttttcatgtaaatatctatagatctatatcatttcttgtatccactgttgagaattccagcatatggtcagctagttattgttctttatcctgtcccctgtaattggacataggttgtttctagccttttgctcgcagggataatggagcaggggccattccttgcttaacacatcactgtgcacgtacactagtgcacctaccagataattgcctagccgaggcatggtagtaaaatctatgggtctgcatatggggctggtagacactgtcaaaatgttcttggtctttctttgaacacctcttgatatactaaacatccattattaggctcaattccttaagggaaagccacacaggaaatatatgtggttatcaaaaatgagatagggctgggtgcagtagctcacacctgtaatcccagcactttgggaggcctagagaggaggatcattttgagcccaggagttcaagaccagcatgggcaagatggtgagacttttttaaattaaaaaacaaacaaaaaaacaaaaaaactagctgggcgtggtggtacatgcctgtagtcctacctactccagaggctgaggccagagaatcatttgagcccaagaggtcaagattgcagtaagctatggccactggagtgtcactggagtgcattgaccactctgtccattgaccacaagctgtgtcactggagtgcaatgaccactgcactccagcctgggcagtagagcgagactgacaaaaaaaaaaaaaaaaaaaaaaaagaagaagaagaagaagaagaaaatttggcctgtataatggctcatgcctatattcccagcactttgggaggccaaggctggaggactgcttgaacccaggagttcgagaccagcctgggcaacatggcaaaaccccatctctaccaaaaaaaaaaaaaaaaaattagccaagtgtggtggtgcgcacctgggtcccagatactcaggagggttatgtgggaggatcacttcagtccaggagccagaggttgcagtgagccaaggtcgcaccaccgcactccagcctgggtgacagaaagagacccagtatcaaataaaaaatcaaatttcacttaaaaaagaaaaagaaaaaattcttcctagggctgagctgacatctccctcccaatggcttcctacctctagctctcacagaaaagcaatactcaggccccagttgtgtctgacgtgttgcagtttgaagaatattccatccctaatggctggtaaatggtggggcctgcattcagctgcttgactctggg

SEQ ID NO: 316166 - DNA, 4001 bp, Homo sapiens
tccctctggaaaaaggccaaggcagtgagtattattctcatttgacacagaaggcccaaagttgacatggagagaggaggacgtaagaaacaaaaccaagacaggaacaggaagaatatttcaggagagggagaggcaaggccttgccaacctgagaaatgacaaccaagtatcgtcactgtaagtatcagtagtaatagtgagagtgtgtcctgtgcatcagtaaagcatctttactgtctagagcaggatcacagactctcaggcagaaaatgccccagaagtaccaaatccagcttctccccagggataggagggcatacacccgacccataggagtcttctggttctctctacatccccaggaacagaaaataccctatccaccaaagcaggtgcttcgaatgaggagcagctctgactggcagacagctcatcaccctctgagctgttcctggggagaactttatagcatcttgctctgtccagggaacctaaaaatcccccaaaccagtcaagcacagtgcccccacgaatccacagaaggagatgttgcccatgtgtttcttcttctcctggctgagcaactccagttccaggacagaagtcttcctaaatggctgccatcaaatatttgtgttgcaacaaaagaactcaacccagtttctgatgtcacccaagccaaccaggaaccatgaccctgactgctgctaaactgcgtgcccctcaccacctgccactcaccaggcagtttgcctccctgcccctttctgtggccttcatgtctactccaggagtaagggtgcctcctctctgccccaagtttgcttcctgccttgaagtctcaccacgttctggtgttttgccccatccggtcacccagcacctggtcctaccttccacctggaaattctcctgagggatgcagataggctggatgtttgaggtaaaattcacaggatgttggagctggagaagggcaaggtcatttcgaatggttgtaactgttgagaacttagggtggacaaaagctctttggactgagaccaccacacttgtgttttcattatagacactccgatctcccatcttgacactgtaatggaaacggctgtggaagagatgcctctaagagaaggcctgggaaacatcctttgtgccttttccatacatttccaatgtttctgaaactggcctcaacctcccgggccactgtccctaccaccccatcgccatcaccaaaaacccttccttgatcactctcaaacttggtttgtctgcccgacttagacatgcctacagcaagacgaccgatgcactccggcttcactgtgagttttgtttctttgtcgccaaattgccggggcaatggaactgtgtgtgcttgagggggccggcccccagccccgcgtgccgctcctcacctggaaatgcagtggcctgccgtcagcacccacgtggcggtgaccagggtgccgccgcagatgtgcctgcctttggtcctcacgctcacctgccagggccacctcccttcctccgcgtccactcctcccacgattctcagaggggttcggccacacactggggtgaggatagtgtaggatgaagaactcactcaaagacacaggagttgactcccccgggcgccccgacgacagccaagaaggaggccatgtcccccggggctcccgagccacgcttcagattccccgggccgcggaccgcaggctcccaggtagcacctgccccagcctggcgccccaacctccgcctccgggcctcccacgcagtgagtcacctggaaaggacgtaaacagattgagtggggggcccgcttcaggtcctggagccgggctcgcttcggggttctcgccgccctcctctgagaggagaggggacgggaggcgtggcgccgccatgcccgcccagttctgcccgggccagggctgaaggagcagaagccacgccaggaggccccgggagccgccgccagaggacatgtcatggataccggctgcccctctccagacagctcgcgcccctgccaggggttggctggaaccagggcgcctgcgagggacgagggggcagggccggtgcctagggggtggaaatggccgagccgacttgttggaccccggtcctgctagattccttgtctgaatgggaaatgtcgccctcgcggtttcactcagatcctcactccagactatgtccagccagaaccctgcccagggccaagggattagggtacttctgaggaaactgcccctgatggagaactcccgctttagggtcggcacttaggaggctggtgcgatgctgcccctgaccttgtaggcatggtacctggcctggagctggtcaggatgggccttctgggaattcatggaggagccctcattctccatagcgtcctcaaatcagggcttcattcaccagacctagatatcggggtaggagggctttacagattaagcaggctagacagaggagtgggctgctcttctgtttcagtcgcagggacatcttttaaacagcccgcaggtcaatccactcttattagctctgtgtccctaatgtctaatctgtctgttctggtagctcatccttttgtctgctgcccaagagctactaccaagcctctgcctctcctggcttcatctttgttgaagttggaggaaaaacaacaacaataacaacttttgaattgctgtatgttccactttttcctgtccaaaagtggacagccatgacagtgttttccacggatgccagtgctctcctcaccaatttattgttctaagtcttggtgaagggggcattctctatggccctcttggagctcagaggagtgggcgagcaggtcacacatcatgaatccatcccaatatttgcctctctctaactctgtctctacattgaacaagtgtaaggaccagccctaccaggcctgtgggtttttctcctcgtgtgcggagacaagagatcgtagaaataaagacacaagacaaagagagagacagacagctgggcccagggtaccactaccaccaagacgcggagaccggtagtggccctgaatgcctggacacgctgctatttattgtattctaggcaagggggcagggtaaggagtatgagtcatctcaaatgattgataaggtcacgcaagtcacgtgtccacccgacaggtagccgagggagagaggaaaggcagcatacatcagcatttcttctatgcacttatcagaaagatcaaagactttaatactttcactaattttgctactgctatcttctaagaacttaaaaggaggagccaggcgtacaggcagaatatgaaagtggacaaggagcatgaccactgaagcacagcaccacagggagatgtttaagcctccggatgactgcaggcaggcctggcctcccacaagagctggtggagcagagtgttctctaactcttccagagaaagggagactccctttcccagtctgctaagtaacaggtgccttcccaggcactggcactactgctagaccaaggtctgctaagcaacgggtgccttcccaggcactggcgctaccactagaccaaggatctctcaagaagcccttatctgggcatgacagagggctcacgctcttgtcttctagtcatctctcacagtgtcccttcagctcctaattctgtatggcctggttttttctaggttataattataaaacagagattattataataatagaacaaagtaatactacaaactaatgattaataataatcatacctatatcttatttctagtataacttttcttaatttaattattttctttattatactggaacagcttgtgccttcagtctcttgcctgggcacctgggtggcttgccgcccacaaacaaggaatttctgacatatcacacttggtagtcaagtgtgggccaccactgagttcaggtttaaaacaaccaagtggcagccaggtgcggtgg

SEQ ID NO: 316167 - DNA, 4001 bp, Homo sapiens
gcaaaagtcagcatcacaggggaaggaagacaggagcagagcactactgggtgatggtaacggagggaggccgggccaaccccgccccagggaactgcctccacccaggagtggttcccagcagaagcagagctaccagaacctcccagaaactcacatagcacaagttttccccataattggtggcacagatcatgtcccccaggacaagggggacaactggggggaagaaggacttcttgtaatgccggtcacacctcttgttgtccatgataaacacctcagcctcctgcagctctggggtcagcatggagttggctgtggagcctagcagggtgagcagtgacctctcactccacccaaccctgacctctgtccagggtcctgtccccttcaccctggagactcagcccagccaccgcctgtcatacctccaagccctcccctccttcaccggcccctccccctgcagtgcaggccttgtctgaaaagcccccgccctcgaaggctctgagtccagatccccttcttgggaaacttctgcttctgaaccaaaccagccataactcaagtctcagtgcagccgcttccaatctggggcccagccccgcgctgcttccctgcagactctcagctctgctggcacggccgctctccccaccttcgttaacactcgctcctcctccagggcctcaaggcagtccctctgcccagagctcattccagatccctcccagctggatctcaagaccaccagacaagaactttgccttgttctcctcagcctgtgcccacacccacacccaatcatgacttccctccaggcagggcatgcatttctaatcccaagggctgggtgccgacactcaaagtgtgtcaagtgaaggaatgagtgaatgcccagctctgagcttctataagacacagatggtcatgcccagcccaggcactaccaggcctgaatgaggtgtccacataaacagtgacaatggtcaccacatgaggagtggtcaacacattcagagaaccaggtccagcaggaaaggccccagaaggaaaggagtgtgctctcggtggtactgcacccaccccccatcccatcctgctcatctgaaaagcgctgcttaacctggctccagccagtcacccaacactgcgtcccaaccttcaggttgaaattgggctccgggaggcagatgggctgcacgtactcactgaaggtgacaggtgtttgaaggtggacaagggcaacgtcacccatgatgaaggcccggccccagtacttggggtgcataatgatgtccctcacagggacccagagggccctgctgaagttcatgggctgcagcttggaggtgccaagcaccactgagtactctttggtgctgtgggaaacagagagccccacctggtaggtatcagactcccaagcaggaacacactcctacctccccgtggccctacccctttagcaagagtcctgcctccacccaatctgcctaatccagcctgagggcactgaagatctcagagctgactgcctcctcattcatcattcaaattgattcaaggtggcctggtctgtgtgttgtgcgtgcaggtgtggaagtgttggtgtacacatatgctctcatgcgtgatggggtagggggcgtgttctgggttttcctgttgctcagcttagggtgcagtctttgttgctaggggctcccgccctagctcagtccctggcccccaggagaccccgagcacaattctcacttatcccagatgcccttcccactccctacctccctcccacactgtttcactcaggaaatgaggaagctgggctgggcccatggtagcttgaggtctccaagccctgcacacatgggccatactcacccttggatgcagtgggccgcagtcaccacccagctggggtcaatgagggcccctccacacacgtgctcattttccatccggaggctcacctcccagggccaatggcgggtcatttccaaatcctccgaccaccagggctcaccacaaacttcaggaagaagtgtgccagggagacacaggaaccacatagaggaggatgagaaagactgagacctagatgccctacagggccaatttgcacaaagctgtaaactcggggcctcttcccatttcagagatggggagagtgagggtgagagaagggcagtggcctgcccaaaagcactgagcttgacggaaagtgacagtgacagaggtaaaaagcatcaaggcagagacatggagagagagagattctgagtcacagggagccttcagcccaggacctcaaaacaaaggcaagcagagaaggagccccaaggcaagcagagaaggagccccaaggcaagaaatgcattttcttgcatctggggaagttcctccgccacttctgaaaagctataatgcttgctgcatttcttagatgcagaaggcctgtgtcccctacactgctaagagtcaagaaaagctcctgacttctgtgtcagaagttttcacattgaacattcaaagtgccagcagggagaccccagaggcccctcattcacaggtcacacactcagttttcacacagttctatcagtcaagttatatggttgtatgaacgtatgaagaaacacagatgcacgcattctaaataaaatagtagctcatgttgtatttttaaaaaacaatgcaccatgatgattaaggattggcccaggagtgcaagggtggttccacattgaaagaattctcagtggattctccacataaaaggttctaacaatctgaagacagaaagaccatgtgctttcctccacggacacagaaaaagtcatttgaaaaatttaacacatatttataacttacaaaaaaacccctcttacttaaactagaaatagatggaaaacccttaactttacaaaagttggatataccccaaacttacaacaaacatcatacaacactaaagaacaggcagaaaagaacctatcccaccagagaccaggaataaggacactttgtggaaggagggcagaggaaataattgagagaacgcaagggggctgctgggtgctggtttagcctttttttttttttttgggacagggtctcactctgtcacccaggctgcagtgcagtgtcacagctcactgcagccttgacctcccaggctcaagcgatcctctcacctcagcctcccaagtcaccaggactacaagcagttgccaccacacctggctaatttttaaaaaaatttttatagagacagtcttgctatgttgccagggctggtctcaaactcctgggctcaagcaatcctcgcacctcagcctctctacatacttattctactttttaacctgggtggtgataacacaggtatgctcactgtgtgacaattccttcagctgggccttcataatttgtgcattttttttggaatgcatataatacttcaataaaacaatttccttttaaaaacaataatgtttttttatcccagcacaaccaactagaaaatatactgaagtaacatacattttcagcagcgaaaaaatgataaaagttcataggaattaacttacctaacaccacataagactcctgtggtaataaatttaaaactctaataaaggacacagaaaatgatcagcataaatggcaagacagtccctgctcttaaaacaacagctaaggcctggcgcgatggctcacgcctgtaatcccagcactttgggaggcgcaggcaagtggatcacaaggtcaggagtttgagaccagcctggccaacatagtgaaaccccgtctctagtaaaaatacaaaaaaattagctgggcgtggtggcgggcacctgtaatcccagctactcgggaagctgaggcaggagaattgcttgaacccaggggccggaggttgcagtgagccaagatcacgccactgaactccagcctgggcaatagtgcaagattctgtctcaaaaaaaaaaaaa

SEQ ID NO: 316168 - DNA, 4001 bp, Homo sapiens
gcagcactttgggaggccaaggtggggggatcgcttgaggtcaggagttcaagacctgcatggccaatatgatgaaaccccatctctactaaaaatacaaaaattagcctggcgtggtggcacgtgcctgtaatcccagctgctcaggaggctgaggcaggagaatcgcttgaacctgggaggtggaggttgcagtgagccgagatcgtgccacagcactccaggctgggcgacggagccagactctatctcaaaaaaaaaaaaaaaaaaaaaaaaaggcaaccaaaggccagggtcagcaggtaccccacattctagagttcccaaacaatgaggaccagacaactcctcctgggcttgttgtaagccatcacccaggactcatccttgcccgtagtttacacaaacagatggttgggggagagaagcagaagagagaatcaccacaggggcgagctgtcagccaggggataggtgatggggcacaagtcggccaggctgcctgtccccagtgaagagtaatgtcacactgcactgctctaggggccacccatgcccctggaggtgcagtccttgtgaccgtgtagggaagtgagtagagatgtgtgtccattccctccttgactctcactggccccagcagcaggggtgagaagagagcaggctgcactgaaccaggtgtgagatggagattttaaacaggcccagtctggattgctacaggtatttactaactaaacatcataaaggataagaaagggagaaagtcacaccagtaatcacagagctttggaaagcccaggagggaggatggcttgaggccaggagttcaaggccagcctgagcaacatagcgagatcttatttctacaaaagcaaaattaatcaggtgtggtggtgcacacctgtagtcccagctactcaggagactgaggcgggaggatcacttgagcccaggagttcaaggctacagtgaactaggattgcaccctccattccagcctgggtgacagagcaagaccctgtctctaaaaaaattttaatcttttttttttaaatatggaacgcttcacgaatttgcatgtcatccttttttcacccccaaagagtctattgaacacaggtattgaattctggctacagcactcgcaaaccactgaagctctgtgagtctcagtttctcactgtgaaatgggatgctggtgaagctcgcctcacagggtgttgcgacctcactcagtctcagccgcgctgatacagagtgggcactaagcctcacttcctcatcatcgcaagatggggtctcctatgactgtgcctcccaaacaagctcactcgttccatggatgttagtgttagtgttagtgttagtctgttccttttttttttttttttttttgagatggagtctcactttgtcacccaggctggtgtgcggtggtgtgatctcagctcactgcaacttccacttcccaggttcaagctgttttcgtgcctcaacctcctgagtagctgggattacagatgtgcaccaccatgcccaatttttgtatttttagtagagacagggttttgccatgttggccaggctagtctcaagtgatccgccctccttggcctcccacggtgctgggattacaggcgtgagccactgtgcccactgcgttcccccatttttaataaggctcttccctcctgtcatggtcacccttgaaattggaaccgccctgacaccgtttgggtccccagtctgctgaggatgtaccacccaccaggacatggacacaccaaggcccttcaggcatgaggacagcccgacacaggcacccggcaaacagacccctccagcctccgtcccatgcccctgaagccttaccttcaatagacggctgataatctaatctggcagaggaaagcggagatgtaaggctttgaagatcccccggcccacaggccatggcaagtgggtatctactcctcaatgctccttctaacggatgtggaggcagaggggatggggcacctctactatgccaagattctagaactcatgctttgtgtgttcatgactgtggggagtaggcatccgccccaaggttggaggcctacctggctgtggcagtcacaggactctgagaaggaggcagtgtggtcatggcaaggccctgccagggccacaaggtgatgctgctgtcaggaacctccctggagtggtactcccggtgctcggcccgtgacagtgcctcctaggcccagctctctgcagtgtaccctatgtccagccttggccttgatggtgcccccagtgtgtagttctgagcctgtgacagtacgatgtgcctggctcgtgacagtgcctggtacctggcccatgaagcaccctagtgcccagcccaggctcctttgtgaaccccctctcacgcctccctggaggtgtggaaactgaggcactgagagggagataactagttcttgtagtatgtgatgtgattgaggtggaactggaggtttcttttttccctcagggtctgtattttctttacttttctttttttttttttttccagacagggtctcattctgtcaccacgctggagtgtgatggtggtgagatcatagctcactgcagcctccacctcccaggctcaagcaatcctcctaccttagcctcccgagtagctaggaccacaggtgtgcaccatcatgcctggctaattttttttaattttttgagagacaaggtctcactgtgctgccctggtctcaagctccagggattacaggcatgagccactatgcccagcccaaggtctgtattttcaaaggaaagagctcctgggttgaggaaatctaggtatgtttaacctggcagggtggcttcctaagaggaagccacttgcagacttgggtcttcacaaatcagcagaatgaatgacatctggggacacctcgtcaccactcccccgaggtctcccttcccaaggatcccaggctcctcacactgtccatgcaggaagctcctgctccaccctgcagccagtgctgccaaggacacggagtgacgaggttgttcacacactgctggggagataaactgacatgaccactataaatgactgtttggaatcatttagcagagcagaaagtgtgcctaccccacaacccacagttctactcctggcttcatgccctagaaactgcacagatgcagcaggacaggtgcaagagactgttcactagcagtgctgctgggaagggtcccagctggaaactacccaactgccatccaaggtgcaacagctacgcggaatcttcagcggcagtgagaatggatgagctgctgctacacctagctggaaggtgacgctcataaccctattctgagtgagacaattcagatacaaaagtcagatacagtctgtgtactgtatgaaattaaaaaacaggcaaaacaaactaattttagagctatatggtagaaaatcaaggaaattattatctgtacaatcaaattccctccagggggaaagacatagaaagggaaagagggagaaagaaaagagaaacttcagagaagagaaacgctatcactcttctgcctttgcagaaaataattctttgggggaaacaaccaatcaataaaacaaaacaggataactgaataaagatcaggcatatctgttatcacaaccaatgtgaatgcatagaattctacttttaaaataaaaagatcttcatgttgggtagaaaaaaacccatccacatactacttattaaagacacaccaaaaacaaagtggcataaataaggtgaaagtaaaaagatgtggctgggcttggtggctcacacctgcaatcccagaactttgggaggctggggtgggtggatggcttgagcccaggagttcgacaccagcctagccaacatagtgagacctcgtctttagaaaaaatttaaaaaattagccaggtgtggtggcatgcacctgtggtcccagctacc

SEQ ID NO: 316169 - DNA, 4001 bp, Homo sapiens
cactgcccagatatctctctccctgttcccacagcccgggccctagagcatccccagccgaccagcccagtgtaccactggcccctctgccgtcaccaacacactctcagctccaatcagatccttcactaacttgttctcatttccacctggttccaccctcaccatgtcccctacttcagccaaggcagagctctctccctcctctgggaacccctttctgtggctcagtgagaggaaagtggatgccccaacagaaaaatgggcatagtccaaggagaaaatcccagtagccaatgaccacagaagctgctccgcccttagtctgcagggaaatgcagactgcttcttcttctttcctcttcttctctcttcccttttcctcctcctctgatgaggtcttgctctgtcacccaggctggagtgcagtggtatgatcattgttcactgtaacctcaaactcctaggctcaaatgatcttcccacctcagcctcctgaatagctgggactacaggcacacacaaccacacccagctaatttttttattttttaattttttggagagatagagtcccactatgttgcccaggcaggtctcaaactcctgacctcaagtgatcttactgcctcagcctccaaaagcgctgggattataagcatgacccactacctccagcctgaaaatgcagatttcaatcatgatgagattctgctctgtaccatccgcctggcaaaaacgcaacatctgtgacaccgagtgtcagtgaggattatcacccagaatgcctacccacggctggtgggagtgctcactgctgcagccgctttggaaaacaatttctctagattgaagatgcacatatccaacatctcaggagtcccattcctagtgttttccaaatggattcgtggattgtaaatgtaagtgggccgtgaccagcctttttaaaggataacataggcaagaaaacatcggcatgcacagcacagggtactggaagtcctgtttgggtgactttctgtggcagttaaatgctatgtgctgagtcccagtcttatgtgggtctgttaaacatgcctgaaagccactgggcaagagaacgtcttacgtgtgcaccctggagacaccacaggaaggctcacacagcctggccctgaaagctgtgctggagatcccagaggtccctggctgggagcctgggtcagaggcatgatgggtgtcagggcctggagcagggtgagaggccacctgccccacagccagctcaggcgaggcgggaacacacagccggccccaggcccctctgactttcctgccccctacctcagcaggaggggaggcctgtgaggacaagacacccagagctctgggcctccagacaggaccaggcctgacccacaggtgtttagtgctcaatgaacacctgtagaaggaggcgctcctctatcctgctcgcccccgtcccttctgctcccctagccccagccaaggtccttaagactcctctgtcaccctccttgccccacggagtctacacccctggtactcacagcggtatgggtcgactttgccttcagaaactgggaattgggtctccatggtggtcgagggcagtgtctgggtggtcggggtctgccagagaaggcgaggccggctggaaggacaggtggccttggggacacactggacgctctggtcggcgggatcagcagtggacagcgcccccggggcttcccctgcgccccagcaacctgcggaggacgtcgagcggattagaggtggaaggcgagggccgcgtcaggcgggtggggtagggatcgggagggactcacctgcagacctcagcaacagaagcagcagcagcagggcaccggcgcgggagggggcagacgtccgggggcgctgcccgcgcgcgacggtctggcaccagcgacccatcccggggtggcagccgactgcgtctctccggaaggcgctcccagtgccgcccccacgacggcgccccctgttggccgcatgccgcggcctctggtgagctgggtggggatgctcctagtgccccgcctgcgtggcgccccccaggggccacccgccacggcgctcgtggtgtctgacccgcaagggcgcccctagtgacagccctcccttatacctcccgggctgggtacgccccggctgacttccctccttggcccctccctctcctcactccgctggtccaagcagtctcctggagtccctcaacttaatctcggccgattctcagacctcctcaccctcgcagcccattgccctggactggctcatggtgtcacccctcccgcagtgagatgaagaccaaacctcaggggctggcatccaggatctccaagtgaccctactttccctccagcccctccagtggggctttgcccaaggaactgaaattaagcagatagatgtgttttaaataatgattttgaaagactgcttcattctaagcaactacaccccacccccaccccattcagcagatgcccttgccccacagatccatctgcttaggaaagagagtgcaggcaaagggtccctccacagaggaacactggtgcttaccattgcgccactgtgggatgaggaggtcactttgcatgttacaatttggggaacacattgatggttcagtgacacaggagggtaatacatttaaaaagtcatgtggggtactcaaagctgttggaaaattctagcctaatagaagataaggtgatccagcattgtggcatgcacctgtcccagctactctcagctactcaggaaactgaggcagaaggatcacttgagcccaggagttcgagtccagcctgggcaacatagcacccccatctctacaagaaaatatttttttctaaggtacggtgaaagttaaatcaagccaggatattctaacatgtgtccaggcttgtggtcttgggatacacacttgagctggccaatccatgctccaatctctgaaaagacagtaaatcacacccttcaggtgccctaagggataggggtggctggttgctcagcacctgaggaccaccaggtctgagcagcccctcattcctcacacaggggcaaggctctgtcctcagcttggctacctccagtagccttgctcgtgctgtagagtctaatggaggtcaccaaggcagctcaggagctcagggcatagtgatctcacacattcattacccaggcaggcactctgccctatccccacatcacctacctctgccaaagagggaggaggaattggtcaggctctgcagacccatggaaggatatgaagggtagggagaagctagtgggttctgaaacatggtccatggttgtgggtctgtgatctggccatggtgagttacttgggaagaggccaggcctcgcaggaaggcctgagggaaagtgtctgtcacatacccaggggagggccatggggacctggggattactggattgctgggatgactaagaaggagctgcagtcccacatttggaagaagagggaggggaacagtctcccagggtcacacaacaagcacaagacagacatggcataaagctatcagagaaggctcagcttgagagaacagccaggactgcttgggggttaggaaggttgtgaagggctctggccgaagtcaggaagcaagatgatcacttgagtggctcaaagttcaaaagcatcttcattgaacaacagaaagtaacagtggctctcggaccctccccctcactctgccctgccatcctgggcaacctctcgtctccacttctgagggtagaacagaggggagggagaagcagcctctgggagggactgtccttgaaacaccgctcacaggagccacagggagctcaaggagcccagtagaatgtagccagtgaggaaaactgggctcaggaaggcagggccagccctactgatgaaccttatgttagcaacctcagtcctgatccactggttgaagtgg

SEQ ID NO: 316170 - DNA, 4001 bp, Homo sapiens
tgcaagtgtcctattcgtaagcttatctctttgccagcttcttccctacatacacatccttgcaggaggtgaagatgtcttctaccaactccatgtcattgagcatcaatgccaatctcagagcttcagggaagcggctaaactttcggaacacacccagggcacaacgcagtagggctgagttctcaggctcaggcacgtaattcacacaactacaaaagtaaaagtaacaaagaattcagaaagtcccaggcactcattttccccatgaattcacttacccaaaataaataataaatatctactatatacaccaggcactgtgctagatgttagaactactaagaagacacaaagtctctgtcctcaagaaactcacacacatcaaaagattaactacagcgtgatgctatgcttgagcaaatgctctgggaaaatagaggaggcgcaattgagagagaggtgctgaggagggcatgcctgccacccttccctaccatgttcactcacctggtgagataaaggcagacctttgcatatgcattttcatcaatgtccttctccagcatgtccacctgctcaatttccataagcaggtcgcaagcctcatgctctgcattgtgggccatgttataggggacgatttccttcaccagagtgagcagaggctcccgctggaccttctctgcgtcatccagctcctgccactccttagccacttctcctgccagatgcctacagatagtcccagacgattaagagagcacagcttcaggggaagcacttctctgtgggtcaaggaatccagcgtctgggaaattcaatacactgatgctccaagacagattgtactccacaagaaaattctgaattatctcagagcctcagagcccccttcggattcccaagaagaaagatcttacctgacatactcatgaccccatgatgccaattcctcctgggagcccactagccgatacttgaggcactcacgctccccactcatggtcatggccaaaacggagatgatgtcagcagcaaaacgctataaagaaaagagttctttgaagtcaaacccagcagtccagcataaagggagcatgcattgtggaatcaagatcattgtctccgaaactgaactaactacataccaatctctgtactagaaatttaacatgttatgtaagctaaacctcacaaaaaccaaggttggtgttgttgctatctccttttttttttttttttgagactcagtttcgctcttgctgcccaggctggagtgcaatggtgtgctctcggttcactgcaacctctgcctccggggttcaagtgattctcctgcctcagcttcctaagtagctgggattacaggcgcccaccaccacacccagctaatttttttttttttaatttttagtagagacggggtttcaccatgttggccaggatggtctaaaactcctgacctcaggtgatccacccctcggcctcccaaagtgctagggttacaggtgtgagccaccacacccagccactgtcttccttttaaactaacacagctgaagggtgataaatgagggataaagtggaaaaaaatggaggctctcaattttactttaattgcaattataaactattaaaaggtcttaagcagaaaagacctataaccgagaaagatcacgatagctgctacatgagagacagactgtgtaggaacaaagcacaaaagcaacaacatcagttaagaggtgctgcaataacccatgcaaaaactgaacatttccaggattagggttgtaccagcaggcagagaagtgactgaatgtggaacatattttagagataaatgaatgtatatgggatagaagaaaagagaaaaatcaaggttaaacatacgttaaaagtagaccatgctaatgaaaccccaaagtccaatacacatgacagaaacagtgtcttctgagaagctgaccttcctttcagctcttctgtagatattttgactgtgatgaactctgctcaaatagatcacggcttaggtctatcaggcttcctgtgactcacaatgagtccccccatgatctgggtaaaaaggaattcctaaactaggcctccaccaggtttgaaacagttttaccttattctccccaggggccatgttctcatagatttccttcagtttgccatagtgtggacgcagaaatttgagaggcttgggcactgaagtcatggaagttgtagaagaacgaatctgccttcgcaattcctccagcgctggtcgatacagggatgtatccttctcctgatcaagagacgacagggctcagacaaaaaggagtcacaccccttcaagtcataatacagagatatttaacttaacaactcctccaaggaaatgctgtgtcttattcattcatctgtgattcctcaactccctgcaccctgcctggcacaaaaacaaatgacccaagttaagaggtaagaactctgcttctcccacaagagaaagctgcaaaactgtacaaataccctttgtaactctcctgcctcccaacatcatcataacactgaccctaaaatacagtccaccgtacatagcagttgcctcaaaaaagaataaaacaagtgggaaagatccaaacatgcaccgaatcatgttaacatcgtgactcacccctagtcgttccacgagcatctccagttcatcttgaagctgtttatcctcttcagactggagggttgggagaagcagctcatgaagagaaggaatcccaaagacgtcctcctcccacttacccggggcaggtgaagaataagcctgcctccttaggaggggccaggtggacaaggaaaccgagtgggaatgggaagccctggtgagaaatcagcctgggttctgaatcaggctctacttgaatgccactctaggaaacggaggtgacaatgacctgcccgagtccacttcacgcggcggtggtgagggttggtggggacggcggaggtgacagcgcggaacggagaatgaggagcagagaggcaaggtgccgggagtcccgagggtcgccccaaccgccctctccctggcgcggtggggtagttgggtgtcgggcctgaggcctgcggagccgccgtgactcagccccgcagcctccttcgccgactctcggggtcgcgcctcaccagctcctgttctttgtccttgtccccggcatcccgccgctccttgccgctcggcttctcgtccgtgccgccgggggccgccgctggagactgctggggctgcaccggcgccttgtcccggcctccctcctccatctccgccgccactgccggcccgctgcgcgcgcacccgctcgcaccgccctttttcccagaccaactcgcgcgcgtcggtcgcggcgcccctcctcctccagagcccgcctgcgaccggaaacgccggggcgagccggggcgctcggcgacccacccaccccctcggcctgagagccccgccctcggaccccgccctcggaggcaggtggagactacaattcccagcctcccccgcgccatagtcgcccctggcccccgacctcttcggagtttcctgaaacccgcgggacttggccgtgtggggtttgggttcgctcactgctgtagatgggcggtctgcgagcggagttaccgagttttactccgccacaggtttttctcataacggtgtaaatagaacccacagtgacactccagttgactgcgtggcgcgacagacaaactagatttcttgacgtccaggacgcttgattgccgcctgtataaagtctgtgtaactgtgtctagccccacaccactgtggaatattaacctcatttggttttgttgttgttgttgcttttgagaaggaggctcgctctctcgcccaggctggagtgcagtggcgcgatctcggctcactgcaaactccgcctaccaggttcaagtgattctcgtgcctcaacctcccgagtagctgggattac

SEQ ID NO: 316171 - DNA, 4001 bp, Homo sapiens
tcggcctcccaaagtgctagggttacaggtgtgagccaccacacccagccactgtcttccttttaaactaacacagctgaagggtgataaatgagggataaagtggaaaaaaatggaggctctcaattttactttaattgcaattataaactattaaaaggtcttaagcagaaaagacctataaccgagaaagatcacgatagctgctacatgagagacagactgtgtaggaacaaagcacaaaagcaacaacatcagttaagaggtgctgcaataacccatgcaaaaactgaacatttccaggattagggttgtaccagcaggcagagaagtgactgaatgtggaacatattttagagataaatgaatgtatatgggatagaagaaaagagaaaaatcaaggttaaacatacgttaaaagtagaccatgctaatgaaaccccaaagtccaatacacatgacagaaacagtgtcttctgagaagctgaccttcctttcagctcttctgtagatattttgactgtgatgaactctgctcaaatagatcacggcttaggtctatcaggcttcctgtgactcacaatgagtccccccatgatctgggtaaaaaggaattcctaaactaggcctccaccaggtttgaaacagttttaccttattctccccaggggccatgttctcatagatttccttcagtttgccatagtgtggacgcagaaatttgagaggcttgggcactgaagtcatggaagttgtagaagaacgaatctgccttcgcaattcctccagcgctggtcgatacagggatgtatccttctcctgatcaagagacgacagggctcagacaaaaaggagtcacaccccttcaagtcataatacagagatatttaacttaacaactcctccaaggaaatgctgtgtcttattcattcatctgtgattcctcaactccctgcaccctgcctggcacaaaaacaaatgacccaagttaagaggtaagaactctgcttctcccacaagagaaagctgcaaaactgtacaaataccctttgtaactctcctgcctcccaacatcatcataacactgaccctaaaatacagtccaccgtacatagcagttgcctcaaaaaagaataaaacaagtgggaaagatccaaacatgcaccgaatcatgttaacatcgtgactcacccctagtcgttccacgagcatctccagttcatcttgaagctgtttatcctcttcagactggagggttgggagaagcagctcatgaagagaaggaatcccaaagacgtcctcctcccacttacccggggcaggtgaagaataagcctgcctccttaggaggggccaggtggacaaggaaaccgagtgggaatgggaagccctggtgagaaatcagcctgggttctgaatcaggctctacttgaatgccactctaggaaacggaggtgacaatgacctgcccgagtccacttcacgcggcggtggtgagggttggtggggacggcggaggtgacagcgcggaacggagaatgaggagcagagaggcaaggtgccgggagtcccgagggtcgccccaaccgccctctccctggcgcggtggggtagttgggtgtcgggcctgaggcctgcggagccgccgtgactcagccccgcagcctccttcgccgactctcggggtcgcgcctcaccagctcctgttctttgtccttgtccccggcatcccgccgctccttgccgctcggcttctcgtccgtgccgccgggggccgccgctggagactgctggggctgcaccggcgccttgtcccggcctccctcctccatctccgccgccactgccggcccgctgcgcgcgcacccgctcgcaccgccctttttcccagaccaactcgcgcgcgtcggtcgcggcgcccctcctcctccagagcccgcctgcgaccggaaacgccggggcgagccggggcgctcggcgacccacccaccccctcggcctgagagccccgccctcggaccccgccctcggaggcaggtggagactacaattcccagcctcccccgcgccatagtcgcccctggcccccgacctcttcggagtttcctgaaacccgcgggacttggccgtgtggggtttgggttcgctcactgctgtagatgggcggtctgcgagcggagttaccgagttttactccgccacaggtttttctcataacggtgtaaatagaacccacagtgacactccagttgactgcgtggcgcgacagacaaactagatttcttgacgtccaggacgcttgattgccgcctgtataaagtctgtgtaactgtgtctagccccacaccactgtggaatattaacctcatttggttttgttgttgttgttgcttttgagaaggaggctcgctctctcgcccaggctggagtgcagtggcgcgatctcggctcactgcaaactccgcctaccaggttcaagtgattctcgtgcctcaacctcccgagtagctgggattacaggcgcccgccaccacgcccagctaatttttgtattttttagtagagacgggggtttcactatgttggccaggctggtctcgaactcctgacctcaagtgatctgcccgcctcagcctcccaaagagctgtaattacaggtgtgaaccaccgcgcccggcctattaacctcatttgatattcctccccagttgaaagagagtactctgctattcccgtggctaccattttaaatactttggggagccaggtggagttgacatcgatcaataaagccctgtgctccccgccaagttctggagctaaaagcagaacaagacaaggtcttcgtcctctatcttctcgtctttccctgtgaagccttagaggcgtgtgactgacgcgcttatgtcaggactgctttcgagtgattccatgcacttcttacaatcttttgagattggtagggttaggtccattttacagagaagatcatatcaagtagtaaaatgaggatttattttttattttatttatttgttttgagatagtgtttctctcctgttgcccaggctggagtgcaatggcgcaatctcggctcaccacaaccttcgcctcccgggtgcaagtgattctcctgcctcagcctcccgagtagctggataaagaggagttttagaaaaaaatccctctacagatgactgaagaaagcatgaaaatgtatggacaccgtgaagccagagatagaataggcagaacagttatggactgttgaatttttgtgccaccacgcccggctaatttttgtatttttagtagagacggggtttctccatgttggtcaggctggtctccaactcccgacctcaggtgatccgcccgcctcggcctcccaaagttctgggattacaagcgtgagccaccgcgcccggcggaatcaaaatttaaagctcagtctttcagtcttcaaagcccttgactgttttaggcaaaccccagagtttcttcttcagctgtgtgtgtgtgtgtgtgcgtgtaaggtgagaaaaaaggaagtatctcttctccctttcacctagtgggaacactcaggagtcttctagcaatcttattttatgggttctgacacattgaagaaaaagacacctagtacaacatatcacagagtgaatgttgggtaaatgtttgtgtagatacggaagtaaaggtctgaatccattttaaatacctgttgctcttttccactcagtgcttggattctaggcatgaccttccattgccattgccaatgactcccccagcgctggtctgcagacaaaaattcaacagtccataactgttctgcctattctatctctggcttcacggtgtccatacattttcatgctttcttcagtcatctgtagagggatttttttctaaaactcctctttatccatgacttccttcttcttttttttttttttttccagacggagtctcgctctgtcgtccaggctggagtg

SEQ ID NO: 316172 - DNA, 4001 bp, Homo sapiens
gagactagcctggccaacatgttgaaatccagtctctactaataatacaaaaaaattagctgggtgtggtggcgcacgcctgtaatctcaactactcgggaggctgagggaggagaatcgattgaacccagcaggtggaggttgcagtgagccaagatcactccattgtactccagcctgggtggcaagagtgaaactccgtctcaaaaaaaaaaaaaaaattaccaaaaagtttgcataaatgcacaataaaagaactgaaaagcctatccctgggcaggtacagagtaaagaaagataacagaacttcagcatttactatactgtttcttagtttctgctaagtattactcgtgtaaagtactaaagacaccagaaccagtgcttcccaaccaagtgagaaaactgctgaaaatgatcccaattttgtaaaagcagtaaataaaattctctagatgtacacttacgtttttatcggcatggggtgaaatggggaagaatacagccctagctgctgtttggggaaatgacaaggcatttcatggagacgactttttcatctttacattgattcaccagtacaagcaagcatgattacctttatactttttctaaaacgaagttaatttttttaatgagaaacgattacctggaatagtctccaattttagcctatactaactacagagagggaaaaccatctctactcactttgtcacctatccggcagaggtactcggcctttgccatcattgcatcgcgaatttcgctctctcctagattcttctctgcatcttccagctcctcatccaaacgcttcaactcatcttcatttgccttcttcattttattgagtaggtccacgtctatctgccagtcgagggatttgcacaaggcttcatagtaaggagccatgtctaacatgcaaaaagagggatgtgtgagtggggacacttgtgccctcaagtcaaagtctgcccacgtatttcaccccccgccccgccacaagtcatccaccagtctcttccccactaacaggaaggcatgcgatggcgcttaataatcggcttggcaaaacataaacgtatgctggtgggaggtttgcgtgacggccaatcctggcaatgccaacctctactagggctggagggagggcaatcctcggtttgctcttgccggattctgttccaaaagtcttcaaacagggaaagactttttatacacacatactcacatacatatgttcaaacatacacattcactacagaagggccagaaagaaccgaacccaaatttcccttccacaggcaagctgaactctcccacaggaataccccgcgcccgggagcagtccccactgacagaaagtcacggggcctttactctgtgcctagcacaggggtaaatattaatgcctcacgattctcccccaagctgcccttacaggggaaggcggcacagagagatgcagaccccgctgaggcaagtcgaggtcccccagggtatccccaaaccaaagcaaaaccctaagggccggagaagccaggcctggtctctgagaccccgtcagaggggtctggagctccatcaaaaaaagtccccgcaggctccggaacgcggggacggcccaggcctaggccgctgactcggcgctcgtgcgggcctcactgttatcgcggacggccgccatcagctcgtcgcgcacggcagcgtctccgcggtgctcgggcaggctgagcaggaagcgcagctgcgcgatacgcaagtcggggttcttgggcagaccctcctcctccaggttctccagcggcatcgcggcgaaggggacagcggctgacaggacacaacttggttacgaccggctgcggcagcggaagcgggaggagtcggcgaatacgcccggccgcctgcggcccggcttccggtcccgtctccgccggcagcgtcctctgctggacacctccgggaacgcctcacccggcctgggcgcctgcgcccctgtgtggtcacgggggcttttccaccctcaaggccccctgcggagtcccagagtgggtgcagcccaactcaaaagcccaatttcttgaatctctttctcactccctttttagctattttactttccgtttgtaactgatgggagcttaaaattttttgaaaactgaaaatgtaataacagcattaataaaaacaatcaccatagtttgtcgagtcgttactctcattcatcttattaaaatcatcttcatgctgcgaggtagtactattagcctatttagtaggtaagacaaatgaggcacaaagaggttagggaaacagaccaaccaaggtcatgtaacagccatgtcgcaaggcctaaatgaaaacccctatctagaactctaaaatccacattctttctgcggttttaagaagaaaaaaaaactgcacccaggattctacgtcatagtacaacagcatcatcgttttgtttacacataaattaaatcattacatgcctgcattttcagcttccttttgttcacattgctacagatcttcagaggtggtaatctttacattaaattccttttttttttgaaacggagtcttgccctgtcacccaggctggagtgcagtggcacaatcttggctcactgcaacctctgcctcccagcttcaatcgattctcctgcctcagcctcccaagtagctgggattacaggcctgcaccaccatgccgggctaatttttgtatttttagtagagacggggtttcaccatgttggccaggctggtcttgaccttctgacctcaagtgattcccccgcctcagtcgtccaaagtgctgggattacaggtgtgggccaccatgcctggcctaaattccatctaatggatttaccataatttactttcactcttccctctgttagaggtgtctttaggttgaccagagtttttacttacctaatataaaaacttggatgaagactttggatgtctagatcacttcatgttttgcatctttttccttagcataaaatcccatgaaggaataacggacaaagggaagaaggattttgtgacttggggatatttaatgttaaatggttttccaaaagagctgaaccagtttacacagctgctgaaacaggtgagactgccacatctcacaggcagtaggcatcatcacataatttaaatctattatttgtttctataaaaatgaaacaagcattttgaagacaactcaaatgatagagaaaatatgaagagtaaaaaaaaaatactattaaatagctctccaccactgctaaacttttggtaaaaaactttctaaaattctttcatttagtcattcaacaaacatgattgcatggttacaaagtaccaggcactgtcttaggcctcaaggactcagcagtgaagagcacaaagccctgtctttggaacttacattccagagaagcatagcttctttaaaactcatctgggtatattaacatgatcattctatactcgcacattttaaactgtgttttattcattctaccatgtattgtggatatcttggatgacaatggattgaccatataggattccattatatttatttctgtttgtttgttatttttgagacggatctcactctgtttgagacggatctcaggctggagtacagtggggtgatcttggctcactgcaacctccatctcccgggttcaagcgattctcctgccttggcctcctgagtagctaggattacaggcacgtgccaccaagcctggctaatttttgtatttttagtagagacggggtttcaccatattggccaggctggtctcgaattcctgacctcaggagatccgcccacctcagcctcccaaaatgctgggattacaggtgtgagccaccacacccggcccattatatttctataccaactttttcttcatcagtccttaagtgctggttgatttgggttatttttgtttttttcaatcttattaatattacag

SEQ ID NO: 316173 - DNA, 4001 bp, Homo sapiens
actgctgaaaatgatcccaattttgtaaaagcagtaaataaaattctctagatgtacacttacgtttttatcggcatggggtgaaatggggaagaatacagccctagctgctgtttggggaaatgacaaggcatttcatggagacgactttttcatctttacattgattcaccagtacaagcaagcatgattacctttatactttttctaaaacgaagttaatttttttaatgagaaacgattacctggaatagtctccaattttagcctatactaactacagagagggaaaaccatctctactcactttgtcacctatccggcagaggtactcggcctttgccatcattgcatcgcgaatttcgctctctcctagattcttctctgcatcttccagctcctcatccaaacgcttcaactcatcttcatttgccttcttcattttattgagtaggtccacgtctatctgccagtcgagggatttgcacaaggcttcatagtaaggagccatgtctaacatgcaaaaagagggatgtgtgagtggggacacttgtgccctcaagtcaaagtctgcccacgtatttcaccccccgccccgccacaagtcatccaccagtctcttccccactaacaggaaggcatgcgatggcgcttaataatcggcttggcaaaacataaacgtatgctggtgggaggtttgcgtgacggccaatcctggcaatgccaacctctactagggctggagggagggcaatcctcggtttgctcttgccggattctgttccaaaagtcttcaaacagggaaagactttttatacacacatactcacatacatatgttcaaacatacacattcactacagaagggccagaaagaaccgaacccaaatttcccttccacaggcaagctgaactctcccacaggaataccccgcgcccgggagcagtccccactgacagaaagtcacggggcctttactctgtgcctagcacaggggtaaatattaatgcctcacgattctcccccaagctgcccttacaggggaaggcggcacagagagatgcagaccccgctgaggcaagtcgaggtcccccagggtatccccaaaccaaagcaaaaccctaagggccggagaagccaggcctggtctctgagaccccgtcagaggggtctggagctccatcaaaaaaagtccccgcaggctccggaacgcggggacggcccaggcctaggccgctgactcggcgctcgtgcgggcctcactgttatcgcggacggccgccatcagctcgtcgcgcacggcagcgtctccgcggtgctcgggcaggctgagcaggaagcgcagctgcgcgatacgcaagtcggggttcttgggcagaccctcctcctccaggttctccagcggcatcgcggcgaaggggacagcggctgacaggacacaacttggttacgaccggctgcggcagcggaagcgggaggagtcggcgaatacgcccggccgcctgcggcccggcttccggtcccgtctccgccggcagcgtcctctgctggacacctccgggaacgcctcacccggcctgggcgcctgcgcccctgtgtggtcacgggggcttttccaccctcaaggccccctgcggagtcccagagtgggtgcagcccaactcaaaagcccaatttcttgaatctctttctcactccctttttagctattttactttccgtttgtaactgatgggagcttaaaattttttgaaaactgaaaatgtaataacagcattaataaaaacaatcaccatagtttgtcgagtcgttactctcattcatcttattaaaatcatcttcatgctgcgaggtagtactattagcctatttagtaggtaagacaaatgaggcacaaagaggttagggaaacagaccaaccaaggtcatgtaacagccatgtcgcaaggcctaaatgaaaacccctatctagaactctaaaatccacattctttctgcggttttaagaagaaaaaaaaactgcacccaggattctacgtcatagtacaacagcatcatcgttttgtttacacataaattaaatcattacatgcctgcattttcagcttccttttgttcacattgctacagatcttcagaggtggtaatctttacattaaattccttttttttttgaaacggagtcttgccctgtcacccaggctggagtgcagtggcacaatcttggctcactgcaacctctgcctcccagcttcaatcgattctcctgcctcagcctcccaagtagctgggattacaggcctgcaccaccatgccgggctaatttttgtatttttagtagagacggggtttcaccatgttggccaggctggtcttgaccttctgacctcaagtgattcccccgcctcagtcgtccaaagtgctgggattacaggtgtgggccaccatgcctggcctaaattccatctaatggatttaccataatttactttcactcttccctctgttagaggtgtctttaggttgaccagagtttttacttacctaatataaaaacttggatgaagactttggatgtctagatcacttcatgttttgcatctttttccttagcataaaatcccatgaaggaataacggacaaagggaagaaggattttgtgacttggggatatttaatgttaaatggttttccaaaagagctgaaccagtttacacagctgctgaaacaggtgagactgccacatctcacaggcagtaggcatcatcacataatttaaatctattatttgtttctataaaaatgaaacaagcattttgaagacaactcaaatgatagagaaaatatgaagagtaaaaaaaaaatactattaaatagctctccaccactgctaaacttttggtaaaaaactttctaaaattctttcatttagtcattcaacaaacatgattgcatggttacaaagtaccaggcactgtcttaggcctcaaggactcagcagtgaagagcacaaagccctgtctttggaacttacattccagagaagcatagcttctttaaaactcatctgggtatattaacatgatcattctatactcgcacattttaaactgtgttttattcattctaccatgtattgtggatatcttggatgacaatggattgaccatataggattccattatatttatttctgtttgtttgttatttttgagacggatctcactctgtttgagacggatctcaggctggagtacagtggggtgatcttggctcactgcaacctccatctcccgggttcaagcgattctcctgccttggcctcctgagtagctaggattacaggcacgtgccaccaagcctggctaatttttgtatttttagtagagacggggtttcaccatattggccaggctggtctcgaattcctgacctcaggagatccgcccacctcagcctcccaaaatgctgggattacaggtgtgagccaccacacccggcccattatatttctataccaactttttcttcatcagtccttaagtgctggttgatttgggttatttttgtttttttcaatcttattaatattacagtgtcacttatccgtgtacatatatattttcacacttaaatagttatttctcaatctaaatctctagacgtgcaattgctgaataagagggcattaatattttatattttgatgtattctgtaagtattttatgaattattttccacaaatgatatatatatcaatttacattgccactaatattgaacagagaacctgcaggggagaaaaagtagtatcctttcttcacccattgcgaggttcatagctgaggcacctataataaaagatagaatagcagggccaggagaggtggctcacacctgtaatcccagcattttaagaggctgaggcaggcagatcacgaggtcaggaatttgagaccagcctggccagcatggtgaaacctcattagcagggcatgg

SEQ ID NO: 316174 - DNA, 4001 bp, Homo sapiens
cattgagcatttatattcttttacatataaaattttacgtaaaaaagattttatgaccgggtgcactggctcacgcctataatcccagcactttcggaggccgagacaggtggatcacctgaggtcaggagttcgagactagcctggccaacatgttgaaatccagtctctactaataatacaaaaaaattagctgggtgtggtggcgcacgcctgtaatctcaactactcgggaggctgagggaggagaatcgattgaacccagcaggtggaggttgcagtgagccaagatcactccattgtactccagcctgggtggcaagagtgaaactccgtctcaaaaaaaaaaaaaaaattaccaaaaagtttgcataaatgcacaataaaagaactgaaaagcctatccctgggcaggtacagagtaaagaaagataacagaacttcagcatttactatactgtttcttagtttctgctaagtattactcgtgtaaagtactaaagacaccagaaccagtgcttcccaaccaagtgagaaaactgctgaaaatgatcccaattttgtaaaagcagtaaataaaattctctagatgtacacttacgtttttatcggcatggggtgaaatggggaagaatacagccctagctgctgtttggggaaatgacaaggcatttcatggagacgactttttcatctttacattgattcaccagtacaagcaagcatgattacctttatactttttctaaaacgaagttaatttttttaatgagaaacgattacctggaatagtctccaattttagcctatactaactacagagagggaaaaccatctctactcactttgtcacctatccggcagaggtactcggcctttgccatcattgcatcgcgaatttcgctctctcctagattcttctctgcatcttccagctcctcatccaaacgcttcaactcatcttcatttgccttcttcattttattgagtaggtccacgtctatctgccagtcgagggatttgcacaaggcttcatagtaaggagccatgtctaacatgcaaaaagagggatgtgtgagtggggacacttgtgccctcaagtcaaagtctgcccacgtatttcaccccccgccccgccacaagtcatccaccagtctcttccccactaacaggaaggcatgcgatggcgcttaataatcggcttggcaaaacataaacgtatgctggtgggaggtttgcgtgacggccaatcctggcaatgccaacctctactagggctggagggagggcaatcctcggtttgctcttgccggattctgttccaaaagtcttcaaacagggaaagactttttatacacacatactcacatacatatgttcaaacatacacattcactacagaagggccagaaagaaccgaacccaaatttcccttccacaggcaagctgaactctcccacaggaataccccgcgcccgggagcagtccccactgacagaaagtcacggggcctttactctgtgcctagcacaggggtaaatattaatgcctcacgattctcccccaagctgcccttacaggggaaggcggcacagagagatgcagaccccgctgaggcaagtcgaggtcccccagggtatccccaaaccaaagcaaaaccctaagggccggagaagccaggcctggtctctgagaccccgtcagaggggtctggagctccatcaaaaaaagtccccgcaggctccggaacgcggggacggcccaggcctaggccgctgactcggcgctcgtgcgggcctcactgttatcgcggacggccgccatcagctcgtcgcgcacggcagcgtctccgcggtgctcgggcaggctgagcaggaagcgcagctgcgcgatacgcaagtcggggttcttgggcagaccctcctcctccaggttctccagcggcatcgcggcgaaggggacagcggctgacaggacacaacttggttacgaccggctgcggcagcggaagcgggaggagtcggcgaatacgcccggccgcctgcggcccggcttccggtcccgtctccgccggcagcgtcctctgctggacacctccgggaacgcctcacccggcctgggcgcctgcgcccctgtgtggtcacgggggcttttccaccctcaaggccccctgcggagtcccagagtgggtgcagcccaactcaaaagcccaatttcttgaatctctttctcactccctttttagctattttactttccgtttgtaactgatgggagcttaaaattttttgaaaactgaaaatgtaataacagcattaataaaaacaatcaccatagtttgtcgagtcgttactctcattcatcttattaaaatcatcttcatgctgcgaggtagtactattagcctatttagtaggtaagacaaatgaggcacaaagaggttagggaaacagaccaaccaaggtcatgtaacagccatgtcgcaaggcctaaatgaaaacccctatctagaactctaaaatccacattctttctgcggttttaagaagaaaaaaaaactgcacccaggattctacgtcatagtacaacagcatcatcgttttgtttacacataaattaaatcattacatgcctgcattttcagcttccttttgttcacattgctacagatcttcagaggtggtaatctttacattaaattccttttttttttgaaacggagtcttgccctgtcacccaggctggagtgcagtggcacaatcttggctcactgcaacctctgcctcccagcttcaatcgattctcctgcctcagcctcccaagtagctgggattacaggcctgcaccaccatgccgggctaatttttgtatttttagtagagacggggtttcaccatgttggccaggctggtcttgaccttctgacctcaagtgattcccccgcctcagtcgtccaaagtgctgggattacaggtgtgggccaccatgcctggcctaaattccatctaatggatttaccataatttactttcactcttccctctgttagaggtgtctttaggttgaccagagtttttacttacctaatataaaaacttggatgaagactttggatgtctagatcacttcatgttttgcatctttttccttagcataaaatcccatgaaggaataacggacaaagggaagaaggattttgtgacttggggatatttaatgttaaatggttttccaaaagagctgaaccagtttacacagctgctgaaacaggtgagactgccacatctcacaggcagtaggcatcatcacataatttaaatctattatttgtttctataaaaatgaaacaagcattttgaagacaactcaaatgatagagaaaatatgaagagtaaaaaaaaaatactattaaatagctctccaccactgctaaacttttggtaaaaaactttctaaaattctttcatttagtcattcaacaaacatgattgcatggttacaaagtaccaggcactgtcttaggcctcaaggactcagcagtgaagagcacaaagccctgtctttggaacttacattccagagaagcatagcttctttaaaactcatctgggtatattaacatgatcattctatactcgcacattttaaactgtgttttattcattctaccatgtattgtggatatcttggatgacaatggattgaccatataggattccattatatttatttctgtttgtttgttatttttgagacggatctcactctgtttgagacggatctcaggctggagtacagtggggtgatcttggctcactgcaacctccatctcccgggttcaagcgattctcctgccttggcctcctgagtagctaggattacaggcacgtgccaccaagcctggctaatttttgtatttttagtagagacggggtttcaccatattggccaggctggtctcgaattcctgacctcaggagatccgcccacctcagcctccc

SEQ ID NO: 316175 - DNA, 4001 bp, Homo sapiens
cagacagggtcttgctgtgtcacccaggctggagtgcagtggcacggtcatggctcacagcagccttgacctcctgggctcaagcaatcctctcacctcagcctctcatgtagctggcaccacaggcatgagctaccacacctgggtaattaaaaaattttttttttgtagagacgaggtctcactttgttgcctagactggtctccaactcttgggctcaagcagtcctcctgcctcggcctcccaaagtgctgggattacaggcatgaaccaccgcacctggcctatgcctctgtttctaagtgtctctaagttttatggttctgtgaccactgatcttccaccctgctttcccccttggtgatgagaaaagaacattaatggagggattggaaggactgagagataaaactagaggctgaggggaggagttcttttcagatctgacaccagggaaaacttgagatttggaaacatactacttgtacttgggaggatgagggtgggctgtggagagggctgcagagaggaatctgatgggtgctgggtcccttaagggcattcctcctgccataactcatgtgcctcaccccagagtcccctgctggacattccacagctgtgggtggggccacagatcatctctctcaccctcgggcctctggttaaagtgctaccatgagggtgggggtgtcacacattaactggtagcacccaagcacctggcagagtcagcttgccctttttgacaagcacgccccaggggctcagagtcagtttctggttagtgtcaggtcagtgttagtttcaatggggtttgaaaaggcctggctgggggtggggagtaggagtgagtccctgtctctaatccccaggctggggcctaggaggaggagccagggtggtcactggatctcagaactgcagtaggggccagactctggccccacccctgctggtgtggcagccccaggctgacaggcctctgctgcagccatcccaccgtgagtagggctctggccaaggtacacagaccctggggccagggtgggcatcagacaccaacaagcaaggcaagaggctcagctgtctgagcaatgcagcctggccttcctccctcagaaaaccccttggccagaccaggggttctctgggactaatggctcacatctatttctgagtccttatatttccccagtgcttcatcccaacactagccccaaagtcaggctgcatccaagcttagccctgatcccagactgagctctatctccatcatgagccccagcctcaggctgagttcttatcccagtctgatttctagcccctggctgaactctgaccccaggttgtgcctccacccagccctcaaccccagacctctctcggcttctaggcccctctggaaactttttgaggcaagagcccagtaggggaggggatggctaggccataagtgaagcgaggtgccacttttacagccatttcggctgctcataaacaccccctgacacccagctgagtcgctggaggctcccatggcagctggctgggtagcccccttcccttgcagcagaagcatggctgcctggctttcttgcctctcaggaaggtgaagggaggggcgatgggggcacctggggccagcaggctctgtcccaaccagggagcactcctaaggctcccaaggagctagaggtatgggctttctgtccctgctggcctcatggttacaagccccctgctgtcataacaccaggtccacagatgtgtctccatgcgggcatgtcttgtctgccccatagcacggcccaggtatttagacactcacccccagggaaaccacagacttgggcttcccagctgtgctcaggcccctaggctcccctggcccccactcacctgcagcccatgggccttccaagtcgggcctaaagctgcagagcagactcaagttggccacggggaggccatggatagtccctgagcagcttctgtggctcaggcctaagcaaggatagtgctgctggggacaagaaaagacctgagtcagagcttccacttgaaaagaaaattaattattttttaccaagccctacactggcccaggactttgtcccaggctcctagtcaggagtaggaggcaacagaggcagatccaagtgtgccggtgttcagatgcccagggctgggccctcccctcagcacccatgggtctgcctgccaggtaactgggcccactcaggctgccagacacgtgtgtgtgcctcaatagtcctctccttgccctgccatgcctctctcttagtctctgtgtccctgtctaaccctctggtcctttccacatctcaggaatatcaggctgccacgaggtatgaacacagcccctactagtgacttcactcaagtttaaggcacccagagaaatcagaggggggctggaggtggttcttgcctgtgtcacaggcaggaaaactgaggcccaagaaagcctgatctgccagcactgggtacccagtggctcctagacggaagagatggagggggccgtcattccactccagcccgtgtcctgacccctacagccccacagccacctcatatctgactccttgcccactggaatgtgggctcctggtgaggagtcagccaggaagccctccctatctgcctcccaggcccttccaggcccagggtctgcttaagctgtcacaggtctcaaaggcagggggctgtggacaggatgacttctctctgtgggtctgtagaacgagctgtgttcagaaccagggctggttgctcaggatgaagatgtgggcagacagggaggcagagaccctgcaagatcccagaaacctcacccccaggccctgtgacccggctggaggctgcccttctgcctgagcccagtctgagctggtttgtgtctggaagtcctaggctcagcctgatgaggtataatgattcacgtggcagctgccactcagcacattccagctgtagcccccagtgccctgcatgtgaggcagctggccccaaccacccccagccattgggcacattcctagggcccccctccctgggtcttccaggctcctggggagggtaccactcattagagtttccaaagtactttttgtttcacaagttagtcagggaggcaggctcggtgatacctggcctccaggtggaggaaacgggaccaaagagcagaatggactggccaggggacatagtgaaactatgacaaacagcacttatgggactcctgccccagctactctgaagtgcactgctccaaggggtatcctgggacacgtaggctattctgtgaccaggccagcggaggtcagtgggcagttgtgcccaaaggagggagagttcccctgtgctctgtcaagcctccctgttgccctggctcttgactgccagagcctctacctcccctgagtccacatgcactgccctaccctgcccacaggccccatcctcactggccagggaagcaggaggctggggccttttctgctttgacctgtggatccctgagccagacgccttcctgctcatggcctcagtttcctgatctgttgttaacagttgggcagtttcaggctcaaaggggatctgtaaagtgcccaggcacttgggtcttggatgcaagcagacctgggagtctgaaaacctgaaggcctttctctcctcgagccttgggcctgccagtttgcgttcctcctgtgggccccagcccagggctctggggggcaagtctggccctcagctccggggacaggaagttgtattttggtcctgggttctggggaagaggtagggggagaatggcagctcagacccagccatgtttactcgggcccggccccctccgagctcaacaggctcccattcattgggagacccataaaccctttggggctccctgaggttcagaacgcctggatgccaaggctggatgccgcccccagacctgctgggagctgtg

SEQ ID NO: 316176 - DNA, 4001 bp, Homo sapiens
tgtgcttctcctacaggggtgcactgtgaggtcagtctccttcagggaactccatcccttctccatgccacaccacacccacctccttggggaaacagcttctaccctgggtgaagccagacgtgtgcatgtgtgtgtgtgagggctggagggggcccctaaatcctaccccctgcctggatgattctgacctcagacctacattccctgtgtccgggactgcaacaaaacttgcagaaaacagaggtccccaaagcaaagtctgtgggagtacgcagcagggccaaagcccagccttctgttgggtcacactgtcatcttccagggagaaacagccatggtgctcacagaagcagaggatggtgaaaactcaaccacaaattgccagatttgggaccccaaacgaggcttcagaaatagggaggcttcaggcagctggaacccacagtccagacatcccagagacagcaggcacccaggatcctggatcagaggggactctcacccaaagttcgaactactgggggaactcaagactgcgtgccttagacctatcccgcggaccctagggtaagcccgcagcctgtcccggagtgttggcggcgggggactcaccagcgcgtacgcggagctgagcacggggcagcagagcaggagcgccaggccgggtgcgatccgggcggtccccatcgccaccgcctagggccgcgtccctcggggcagccgccgccgccggccctggtggtggtagggggtgcagagctgcgtcaggctggccgccccgcccacgccccggcctatgggaccccggcgtcccggcggcccgaggccccggggcccggcgcggggcccatgcgctgagggcgagcgagcgagcgagcgagcgagcagcgcaaaggagggagggagggagggacaggagggagggagggagagccggaggccgggcgggcggcgggcgggcgccgagcgctgcggagcggcccgtctgcctcggagcgaagaaatcacatccatatggccgggccccccgcccccggcccgccccccgcccccctcccgcgccgccttttctttctttctttctttctttctttctttttttttcttttggggaaatgggagctgtggcttcgccccacgcccagtggggggagggggcgggggaggggtcggggtcgcggtctgcggggggcgcgcaggactgttatttttagctccgcgactttcggcgtagggagtcagggccgggcagggggcgcgttctgagccgcgcggggcgtgcagttagggggtgcgatctcaactttgcagccacactgagcccttaggtgttccggccgccagcccccggccgttcggcctcctgagatcccagaccctcggcagccgcctcccgcaccccttccccatccttggccagagccccgcttgcgcctgtgcggctcgggcgcgcagcggccccgacgctctgtcggtctgcctgtctgtcagtccgtctctagctcccccggccttggcctcagttcttccagcggccccaagctccgtttcggtcactccctcgctccctccctcccccttttctctctacgaaaacatttgcaagtttccaaaaaagccaccgagccgagcggcgcggggctggcgactcccccgggttccgaggaggcgccgccgactgacaccgagacagagcagcctggctgctccggccaggcccggagtcgctcctccccgactccggccacttcccctcggcgcgggtccccagccccgacttactccgagcgcgccgccgcggcccccgccttgccatggatgtcggggcccccccgacagcctccccaagccagcgccccgtccgcggccccggggggacttcatggagctctcgggataccccccgctggccggcctggcctccagcgccccccgcccggccgccgctcggagccaccgcccgccgcgcgcatccctcgcctcggcgtctgccgctccccttctccccggccgggcgcctcttccctcccccgcgccctcccgggcctctcccgcccccaccccctccgcagccgccgacgcgggagtgtggagaggccgagaggagccttccgccccccgccccgggacattgcgctagaggccgaggcccggagtcttacggcggcgggatgtgagtgctggggagacggggcgggggcagctgtaacatcgagacccgagcagggaacccgggacgccgccgccgcttcattctcttctggaaagcacgggcttttaaattttttttcccttgatcatccggcccccgctggcgaatagagaccctgagccgagaagcgagccctctttcatcatgggcgaatcccctgaggaggctgcccggtacccccgcgcgcccccggccgcgacgctgtcagtccactgggctcccgttcgggccgggtcggggtccctggggaggccgctcggctgccagccccgagcccggcttggctgctgccgccctcccccacgtccagccccaccctcgcctcgtcccctgccctcagtcccatcccaggcctgtcgttcctctcggccctaggccagccccgacccccgcccaggtctgcagccacacatcccgctccctccctgcccagcgtctcttcgggtccgggtctccgagtctcgacccattcagctgctggccgggcctctccagcttgcccagccccaaccccggaggctcgaggctgccagacctggggctcaatccagacacccactctcaggcttcacctccctcccccgttcccacccccactcccaaaagctatcggccggctcggaccgggccgcctgggaccctcgacttaggggaaggcaaggaggagtccgcgggggttggggctgaacggggcgggatttctgtgtttggctggggagggcacgctggagctctaagaggaggggcccttcgaccccaaacctaccacctcccggtaccaagtggggaaactgaggcagagggaggggctggggatgcctggagcgcagggctttaaggatcgcggaggaagcgaatgcatgaggccctgggaaatgagtctgggctaagcaacagcctgtgcttgcccgcttaccagttgtgtgtcctggacactaccactcttcggctgtctggacctcagtttcctcatctgcaaaatggagaggttggccagctgattcaagggcaatgttaactttactgtttagtttccacgagggtgggcatcctggcccatgggctccaggggctctcaagactcagcctgtggatattgagctcctcggagcctgcaaacctgccctccaaccctcagtgcaaatctgtcaagcccaagtcctaaggcctaggatccagctgcagccacccttctgctggctcaagcccatccagcttccagactgcactcccaggtgcattccccatgtatttcttctgctgctactttcttcttctttcttctccttctccttcttcttcttcttcaagacaaagtctcactttgtcacccaggctggagtccagtggcatgatctctgctcactgcaacctccgcttcccaggctcaagtgattctcccaagtagctgggactacaggtgtgtaccaccaacctggctaatttttgcatttcttggtagagacggggtttcaccatgttgaccaggctggtcacgaacccctgacctcaagtgatccacctgcctcagcctcccaaagtgctgggattacaggtatgaaccaccagccttggccctccccatgcatttctatggctgcctcccttctctgtgcccactgccctcatttctttttctggtgttcaagggctgtgctatttgagacagtttcctccaaaaatgactctccctaacaggaactgtctgctagactcctggtcttcttcacacatccactctcctgcctttgtccttgctgcttcctctgccaggatcatactcttc

SEQ ID NO: 316177 - DNA, 4001 bp, Homo sapiens
aactaggcaatggggtgtgtgtggtctatgctatttccaaaaactatcacataaggacatcaagtaagagtttgtaaaagaagaaattatttaatggtgtaactggtacaaccattaacagccttaaaaaaaaagcttactttgctctcacaatcccaatttatcttcctggtttaagataccactccttaccctccaccccattctctatgttcattgctcaggaatagacttctttcttcttaccaatgtacctcaaaatccctctccagtccaatgccctcaccggctcttgctaagacaacaagaattttatatataaatattaatacacacagtgagattcctggatgtttttttaaaaatcaatctatgtgaccactgatgtgatataaagcttgtatctgtactagttcttcattgacctgtgagtcaagagaaatgatttctagatctggaacttctactaacaagttctatgatctcatgcaagtcacaacttctctgagcctaggttccaacacctaccatttctaatactagcaatacatatatgatcctcccacgatatattttcttcttcgtgaaaaaaaagcaaggtgctgaactgtaaaaatattaatatattggcatttgtcttattttaaaaagggatagggggatgtataaacatatttgcttgcatcagcatcttaaggatacacaaaattaactgcctcgagggaggggagctgggtagaagggaaaggtgggaggaaagattttcactgtattccctcatgtttttcatttttaaccctaacaatgtatcacctactttaaataaaaatggatgttcactatacaattctttcaactcttctgtatgtttgaaatttttcataataaaatgttaggacttcttaaaaaattacaaatgaagataacttaaaaatatataactgtctgatgctgtgatcctcctcaccaaaatgacaagataaagaattgcagagctgaaggaaccttcatcacccagaccaaccctttagttttacaaatgaaaaaacggaggctagagaaataagatgatttatccaaagtcacacagctagttagtggcagagcttgaactaaaaacccgccgggataagggatgcactgaaatgaaagagacagaagatgggtaaaaccgtttcgagggtccattctccccctttccagtaactctgccttctactccccagtttcttccccaccccaacccatcctaaaagtctaaactcatctaaagcctagctctgctcatgtcgctggccaaaaactttgaacgctttcccaatacctttcagattaaagcgcagcccagattttgaaaacagccgcccaaatgaatggtcactctgcagccacagctcctccactccccatgctggcgccgttcaacatccgaatctggccgcccaggacgggctccgcgccgcaggtagtccggccgctgcccccggccccgcacctgtggccagccccacctttcctcccgcggccctcgcgagccagcgcccggcagccgtccccgcgccccagtgcctgggaacttggctcgacccccagcgcaggagggagctcgcgggcagccaccggggccgattcagcgctcggccgccctcagcgcccaggtaccgggtcccgggcaccccccgccgggaatgcactgcctgcggcgggccgcgccgatcctatccgccccgccgctggccgcagggctccctccccggccgcgctggctccccgcctccccgagccccagcctcacccggctgtcatcaccacattgtagatgaccaggtacgccgtggccaggggccccgggcccttcttcttccgcgtgccgctggcgtccccggccccggccctgccaccgccgcccccattccccttcgctgctgcagtcgccgccactgccgccatgtcaagtgcccgaagcccgctctcctagcgcgagcggctcgggccggactacgcgaggagagggggcggaggaagggacgaggggcaggcggggccagggccgcggggcggagccgggacagggtccacggcagccgccatcttggctgagggcaaagacgctcctggcgctcccgtctttcggcttgcctcagttgccactgccatcttggatcagggtaattcccgcctcttgggcgctcccggttacaacctcggcgccatcttggattagttcaatgtagccaccctctccaggcccgctgcttctgccagctggatgttgcgtcgtccctcgctattcgccctcctataatcactgcttccatgttgaatcaaaacaattatgctttcgttctcccttcttcaattgccctatcttcacacctgaacactattgctccggtatcctgccattttggatcagggcggttgacggtggattcacttcccatcagcccttgaggctgcagggaccagccctttggtaggtgcgctttgcttcctaacccgttgccgggttggagattccacctccgaagttttctttctgacttttgattttacattcctagtacagtggagaagcccaggcggcctagaatccagtgtcgtccgtgagtgcttggctggtgttcaagtgcatcttccagcctgagaccgcgtggactcgctcatcgtgagggcgagaggaggataagcccattgggctgtcggctgagagtgaggtgcggggtaagggagtagatttatagctatagtgactaaaaataaaaggatgttggcttaggtggaaaacctctctgctttgggaagctggagcagcttgtgggcattgcttcaaccagctgatcccactttccattcattgctttgtttcaggaggttctttatttgtaaacgtcccctgcaattttttacacacccaagcagctccttaaatgtattactgtatatgtggtagtataaaatatttatgggttcattccagcaagtgtttatggagcgtccacaaagttgccctggagttcatggcactaagtgaaagagacaaagtcgtcagtctcccagggattatatagagcagcggcccccaaccttttggtcaacagggaccggtttcgtggtgggggggtggatgatggtttcaggatgattcaaaggcattacatttatcattagattctcataaggagcacacaacttagatccctccaatgcgcagttcacaataggttccccgctcctatgagaatctgatgccaccgctgatctgagggaggcggagctcaggaggtaatgctcccttgcttgctgctcacctcctgctgtgcctcctggttcctaacaggccagggattggttctatccgcagcctggggcttaaggacccctgagggaaccagacgaaaatgctcgtattagttggtgaaaagtggtatcaggaagttattacaataatccagccatggtgatagtggtgtgggccagagtggtggaaatcgaggtgatgaaaacaacaatgaattctgtgcgtattttagaagtagaattataagatttgtggatatgttagttttggagtgtgaggtcaaaggcgttttgagcaacttgtaagaaaccatttttaaggcggaagtcgggaattttgttttttatatgttgaatttgaaatccttattaaacatccaagtggagaggctggatagacaattaaatttagaccctgaggttcgggaaggaagtccaatgggctagagatataaatttgagagttgtcaacctaaaataataaaaaaggtaagaatctagtttaaaggaagtttattcaagcataaaggttgaagatggctacctgggagcatagattcaagttaccctaaatatacactctgattagcagcggttatgagtgggtttttaaaggaaaaagaggcagcttctaagttgtttactaagaatttacattaaaattacattagctattgattggctataaactattctttgta

SEQ ID NO: 316178 - DNA, 4001 bp, Homo sapiens
gaaaacaggagttttggccaggcgcggtggctcatgcctataatcccagcactttgggaggccaaggtgggtggatcacgggtcgggagatcgagactatcctggctaacacgatgaaaccccctctccactaaaaatacaaaaaattaggcaggggtggtggcgggtgcctgtagtcccagctacttgggaggctgaggcaggagaatggcgtgaacccgggaggcggagcttgcagtgagctgagattgcgccactgcactccagcctgggtgacagagtgagactccgtctcaaaaaaaaaaaaaaaaaaaaaaaaaagaaaagaaaaagaaaacaggagttctgttgtgtcttagaaaaattcatccaattgtatttgtatgaaacagcagatgaaggcctgtaatcccagcactttgggaggccgaggcaagcggatcacctgatgtcaggagttcgagaccagtctgaccaacatggcaaaaccccatctctaataaaaatacaaaattagccgggcatggtggcgcatgcctgtaattccagctacttggaaggctgaggcaggagaatcgcttaaacccgggaggctgacgttgcggtgagccgagatcgtgccattgcactccagcctgggcaacaagagcgaaactccgtctcaaaaaaaaaaaaaaaggtaggaaaaagaaacagcagatgaagaagagagcaacgtctggataaccgttaacaaaattctagaattttggatcaattaccctcatttcctggccccaagaggctagatgatggactcaaacactgtctgaactaaggcaatggtgtatggcgattagaggggagacagcttcttgggaaactacttccaaacccattttctttttcctatttgtcttcccaagcgtctcgctaagtggtgcaccatctagattggggcttactctggcatctgctgtgctaagcccacaaggccccccacctgcgacggcctcctggttgttccttttcatttctgctctagccctcagtgctaccaatacagcggatgtctcggagggcacctgtgttcaatcaccacacctgaacctctccacagaagttccttgccttagtcaacgccaaacctgcccgtctgttcttccaacacagtaagatttctctgagctctacaacactgtttatgccctccagtcggttacgaaaagcagtaaccctcctaaaaatgtcgtgggattgtattgtttggtccaaagagactcccgaatgggagaccatacagaatcgcagcaattgtaaaacaaaccctcaccgcaggggtcgggcatctccctgggccaccggggctcacgtcttaaacacacgcccctgagccatccccagtgtctgtcccaggcgggcgtggacttgacagcgcaccgagggccgggcgcagcaaaagaatccgcacggtcagggccgcccaccgctcccgcgcggggcggtcctggcatggaggaggggcggggcagaactgggtccgagcgtcagaaggaggaagtgtgctgcctcagtgggaacagcggatgactcggggcagaagtcgggaaccgggttcagatgaagatgcaggtgctagcacggggctatcggggaggagaagaatggcctgcgggcgccggggtgtgggacaggctgaggaaaaccggcgaaggcccctcctggcctcaccggaccctgcgaccgggcctgaggaggtgatgggcgcgcaggggggcgtcacgcgcttgcagacgacggagatacgcggcggataggggggaagatggaaggcaagctcaccttcttcacagctggctggaagtgaaagtcaccggcctccttcaggtccagccagatcatgggcatgcggggcacggcctccatggcggctggcacccgccggccacccggccactcccgtagctgctgcagctgctggctcagccacgagcccagccccgccccttcgtgccggaagtcactggtcacgggagggaatgaaaaatgccagcggcctgccgggagttgcagtgaacccagccacccgctcgcgtagtcttttgcgcaggcgctgtccctgttgcgcatgctcagtcttcttcgcgcggagggagtagggcggggaggagctcgccagcccgaggcgaaacggcttctgggatagtagtcttcatccactaaactgagaggcgcggagcgagcttattccccgctcccgggccaagcccagctgcgggtcccgcccgccgcgctcctccctcctaggaagagcatgagacctcacctatgaacttgccctcccacgtattgtcaagagccgtggaggactggtgctgtggtagagatgacgtggcgggcgggccgctggaaagagatgacgcgaaaacgggccttagagagggtgcggagggagcacctggcctgaaggagtcggggctgagagctgggggtttcagtcccagtgctgcgaaggctttcgagctttggaacagaatcactgaccggagactggcctactcagcccagcctgggaggccgggcagtgcccaagggagacggacgatagggagggagcgcctggatggagggtctcaagcggagtgaggaggccccgggccctgtggggaagtgggtgggggaaggtatacggccaggtgagcacccagggacgcccacagtatctggaaggagaccacggaatggagagcacctgttgcctctggagaggggacctatagagcaggaattgttaaatcatatggctgtatcacctacttttagaaataaataataggctactcgggaggctgaggctggaggttcaatcgcttgacctgggaggcggagattgcggtgagcctagatcttgccactgctctccagcctgagcgacagagcgagactccgtctcaaaataataatagtaacaatagaaataacagagaatggcctggagatagtgagtgcaaaagtgcgagctgggagatcagtgagccttttgtagtcttccaggagacaggtgattgtggcttggagcagagggaagtaaaaagtgagcaaagaaatattttgcccactttgagaaatatttgaggaatattttggagacaaaagtatcagaacttggaatggatggatgtaagggcatgaggacgtcgaatatgatttccaagcttctggcttgtgcaggtgggtggctgtggggctgtttactgataagggaaaacaagggaagagcaaaggttcaggtccgtgttaagctcgaggtcaaggcctttgactcgttctggatgaaatgtggagaccacgatgccgggtgcggtggttcacgcttgtaatcccatcactttgggaggccgaggcgggcggatcgcttaagcccgggagttcaagaccagcctagcccacatggccaaaccccgtccctacaaaaaatataaaaattagcaggacatggtggctcatgtacgcctgtagtcccagctactcaggaggctgaggcgggaggaaccttgagcccgggaggcagaggttgcagtgagccgtgattgtgccattgtactccagcctgggcgacaaaagtgaaaccatgtgttaaaaaaaaaaaaaagaaaagaaaaagaaaaattatggagaccgtgggatgtgggtgggatctgggattctaagacaggcttcacccacaaggtagagcccaggtccctttgttgtgagacctcaaaccctttcaagacttagtcaagggcctagcttcattccagttggagttagagcagaagaaaatgaaattacatgaatgttcatagcagtaccatttcacagtagccaaaagagaagcaatccatgcagtgatggatggatgcatgaataaagatgatgtgtgtacatacaatggaatattattcagccttaaaaaggaatgaaattctgttacatgctgcaacatgaatgaaccctgaagacattatgctaagtgaaat

SEQ ID NO: 316179 - DNA, 4001 bp, Homo sapiens
agggatgaaaagcaaatcaccccttcttccagcccttccccgggctagggcaggacttggcctccaccccaagggacagctacgagggagctcggggctgctgcccgggggacctgcaagagaggagagggaggcagctggcctctgccctccccaggggagagaggagggggaactgccagctgagagctggaagtggagggtcgccgagccgcacaccgttacgtgcggtgatttattcttatcaacggccagtattgttcctgtcttaacctggccagaaaggagcgagactgggtctgccagccgcgaacagcctgcaaaagggcaaagatgaaggtaggcagggcgcgcgagacaggaaaaaaatcagccccggcgcgaacagcaacccggccgccgaaaccgccccggccgccgaaaccgcccccgccccctccccgcgtccagacccaggcaatccaatcgagcagagcagcggagggaaagggccacgggccggggctaggggagacacggatctctccgaaaccgcctgcgccctgccgtctcactgcgcccaaggaggctgcctcacgccggcaccgaagtgctgcccgcgccccagcccccagagagagggaggacgcccccgacccagaacgcaggctgctccccacacatcctcagtcctccgcagccagcctccgacttccattccccgaaacctagccctcccaaagggatggagaacagcaaagcaaacccccaccttctgagttccttcaatacccgccagagcgagggggctcatcccgggccccccaaacccacagaagcatcctttccatggcctcagtctccccaaccgccccacaactcgagttctcccgatcggcgacgagtcagcaaagcaagtccccctttctcccgattccagctccccaggacccccaaaagggagcgggagcagacccccgcgtcccccagccccctccccggccagcccctgcctccaccttcctcgaccactagcctgcctccctaaacatcatccaagccagcggagcaatccttttctcctatccgggcgccgggccaccctccaccctctccagggtctcccggacgggcgccggagctccgcgcccaggcgacaactccgcatccccaacgcgcgccggccggggccgcatcccctcggcggccggcactcaccggggaagcacacgacataatggagcacggaactggtgattttcaggaacaaaatccaccaacacggttccagtaacctccgcatgtccgaaaacgcacatcgaaaagaggaaagcagggaggtaaacttgttgaataagttcttgcctccgtgcgagcctccgctaagccggggcgcttccccggctcgcccgctccacgggccccccgcgctcggcggcccgagtccccttggaatccgggaagccgccgagcgccccccggaaaatctcaaaaagtgaccgggaacgcagagccacgctggggacgatcctctcggcggagaaaggctgctttccgtttaaaaaggagagagccgatcgggcagggcgcggagtcggcggccggcggcgatgccccgggcctggggcaggcagggaccgcgggcggcggcggcgagcagccgaggatccccaacttgagtcggcagcgcagcacagcccgagagccggcgggcggcggcggggctgagcgcggcgcggcgtctccgggcttcaggcaggcagctccttccagggccccgggaaggaaggaggcatgtttgcgagaggggaaggggaggggagaggcagggggagcggagagccccccaaaatagaaacggccggaggaaacggaggaaaacacaaaggatctcagaggggcgctggggcgagggcgccttcagtccatgctcctgaaagttgtggctccggcgcaggctgggaaggaacgaagagcgcggggctggaaactggccatgcctccatacaggaagtaacatgtgagcatggatcctggcagagactttaaagccggcgagcgaaggagcgagcgaacagggggcgcgcggtggcggcgggggcgcgcagcccgggccagctggcggcgggcgcgcgctctccgcgttcttaaagcagccgcgcttggctcccgccttgcgctgggtccctcggctctgctctctccgcgcggcctctactgggacagtttggggactgggggcgattgtagcccgtgcgcggagagaggagggaggctgccttctggggccggcttgttttttgctggattcccgttgttcgagctcttaaaagacgccgcacggtgctcgggtttggcgagatcctccgcgcagctcgcggatcccggacttgaggggcccctcgccctggcgaggggaaagggggagggcggacagctgcctttttaaagcgatggggttttctgttcggcttcactgccctggcatttgcagcggtgaggctcaccgtctgcggctcctgttcgcgcctccaacacagcgcattcccccgccgggaaacaaagccgagcggcctttgcactccggctacattgagatttaattttttttttttttctttttcgggctttcattggcccagtccaaggctggggaaagtgggggaggggaggaatgtcgatcccaggattgcgaaatctagcccttccgagccccgcatcccctttcccggcgccacgatggatcggtggcggagtttccccaactcgcagcttctctggagaaggttcccgcaccccggtttggccgcggggagggcgcaggaagtgcgcctcttacaccctgcagggtgaaagcagcgccgcggggccggactgatttcctggcagctacccggggagcggctgcttctttagcaatcggggagaggcgtccgggggaaatgggaggactaggcttatctgtaatgagttttgtcccttggctctcggtaagaagatctttatcgcttagacttctaagcgccctattttacattcttaacgctggggctaaaagtgggggaggcgggctttcgagtaaatgtgtaactgagccaaggtaattagccgtttgacattttttgcctaatttttctgcctgtgtttcaaagcgatcttgacgtgggattgttttgttttgttttgagacggagtctcgctccgtcgcccaggctggagtacagtggctcgatttcggctcactacaaccttcgcctcccgggttcgggcgattctcctgcctcagcctcccgagtagctgggactacaggcgcccgccaccacgcccggctgattatttttttggtggttttttttgtttgttttttgttttattttggttttttttgtagaggcggggtttcaccgttttggcaaggctggtctcgaactcctgaccttgtgatccgcctgcctcagcctcccaaagtgctgagattacaggcgtgagccaccgcgcatggttcttgtgttttaaacgtgtccctgctgtttcatcccaacacggcagggtcctccacccacccaaacatcccaaccggatgctaggttttcaaataaagtacagatggtcggagatcctcccgttcgatgtgattaaggaagcattttcacacccacacttccaaaagaaaaacctttgaaaagttacgtatgggattacaaactaataaaagccaggaagttcctggggagggccctagctctatctttagcagaacgggggtgaacaccctcccccagggtggggaatgaggcgagtttgtttgctttggaatgtggtccttcctggttttattggaatcctgacttctttataaaggattgcgagggccatttttcttggaagtgttgtaatgagggatattcgttcctcaagttagattaccccagcatccctgactaccttcttaatgtcgagtgataaaataggaaaaactcgtcaaatacttgtgtcagcgtcctcaggtgaggtttcctcc

SEQ ID NO: 316180 - DNA, 4001 bp, Homo sapiens
tccaaatcttctatttctttcttttaaccatctttagaatgtattattttgggaacccatgtctgtttggagattcatggagtgtcacatgggactttgagaagttgcctgtggtttgaacagtctctctcctgcttggccccaattctctgaatccctggggtggagctgggatcccctacacggattggctcctacacctgactgttccacgctgaatcccaaaccgcacaccctccgacctcccctgtcgcgctaattccacaaaccccgggggctgggggacccctgaagaattccgctgacccttcgggagattagctttagcctcaagtttcttgctgagaatgggtgggcggagaggaggggccggctgaggggctggaaaacatccctaaacgttagcctgggccctgaaatagtgcgggaaaccagagctcctctaaagacagaggcaggataaaattagaagacgtggaaatccctaacggagggaagctgggcggcaagagggatcacggttataacgggccagtggactcctgcagcgcttagtcggatcgggtgtaaggggccctagacgtctatttcaagactgtgatggttacctccacaactctctttagggctccttaggactgaggaatacttttttaaagccaattttcccgccttgtatggtgtgcctgagctctgtgaccgcgcatgcagaaataggggtgtgtgtgtgtgtgtgtgtgtgtgtgtgtgtgtgcgcgcgcgcgcgcgcgcttcccatgaaagcttcccctagaaggttgcctggcttggcttgccgttacgcgcgctcccggaacaaagccgcagtgggaggtcccggccccgcttgcctccttacctgccggcagccagctccgggcagcccagccctgcaccgcgtgcaggtcggctcgcgtctgccgcagctcctctagcaccgcggccagggcgcgccccgcctcctctgggcgctgcgcctccgcgccctccatacgcgccagcctgcggcccgcgtcgcgggtcgcctgcagcagctcgtccagagcactggtcagcctggcctctgcgggagcccccggcgcgcacggcctcgccaggctttccgcgagccggcccagctcctcccgcagcctctgcagctcgccccgcaggacgtcgtccgtggcttgcagcagcatgcgctctctcatctgcgagttctccagcatgatgaagagcttgtcccattccgagtgctcctgaccgcaggcgcacggcgtggctagagtacgggatacacacacgttagcagcccgcccaggcctgccttggatgtgctttgtaaaagctgacctccctcggtggtgccaagttgcagcccgttcctggcattccccttccctttaaggacacctccgaaaaacagcatgtaaatgtctcagaaacgacagaaatcattcattcaggtatagattaagttgtaccctatgaaatcgccggttatgtagctcaaaacagtcaaatattgacgatttgatatgattcaacccattatgtacgttacagaaataactttgaaacctccatctttcttcaagtgcttctcacttttgcataacaagctataaatttttaacttgtctcactggccacaaagtatatgtgtgttatttagaccaagaggtggatatgtagtcagggttagcagagaaacagttaaagtgaacttacggtcctcagtgggatggagtccattgtctatttcgttgtccaaattcacatacatgagatcataatcatccgagttctcggccaacactgcagaccagagagcacaaaacagaatcgcaaggagatgcattgctggagagacgcaaagttctttccacagctggcgggaggagactctcaagtgagctgagtttgagcggaggagagtgagagtgagaggctggagcagagagtccttaataaatgctgaggaaagcctgaatggggatgaatgagtaatgctggtggcactgcggtaacgggagttcccctgaatttggtgggggagggggctgggtgggagagcgagggaaatgtggaagttgcacaatattaaaccgcaaaggtttacgctgcagtcagattaattggaggagggtcagaggggaaagaggagagaaactgggcttctactgttctcctgagaattagctgttgtaatttgaattgatagcaatggggatgaaggaggggtggtaggggagaaatttcagagggtactgaagcaaatcatcatttcagcattttctgtgagctgttattatttcacaaccctttatatatagaaaactttccatgtttcctttgtacactgttttacaggttgaaactgaaaatggtctgattccaagataaaccaacatattaagaatagttatggctctgaaagtcaagtccaatccgagctatcttgtctttaatacttgaggagttgcacctatacttttatagataatttttttttttgagactgaatttcgctcttgttgcccaggctggagtgcaatggtgtgatctcggctcactgcaacctccgcatcctgggttcaagcgattctcctacctcagcttcccaagtagctggaattacaggcacccgccaccacacccagttaatttttgtatttttagtagagacagggtttcaccatgttagccaggctggtctcgaactcctgacctcaggcgatccacccgccttcgcctcccaaattgctaggattacagacgtgagccacctcacccggcctatgacaaacaacacagtacaactgggtaaacctagaatggggaaaaaaagctgggggaaaaaaggaatatacttatttagttatttaggtatgtttcttttcataacttggtattatgtggacattatattattctacaaggtttcgaggcaaggatcatgttttaaaagtaaacttagagatttctgcttctaacaatatatacaggtctgtgttcacatgatattaataaaaacttaaaaggtacagatgagctcccattaaagtaaggggaaaatcccggagccaaagatagagaggaaagcaaaaacaacaatcccatgagctgatgctagggcccctctggcataggagtgaagtgagataggggttattagttctataaccaccaaatgttgatgaccatgtggaagcaaagcttaggccaaaggtggagagttagaagggagatcctcatgaaagccaggaccctcacagggttacctactgtatttcagtaggtacaatcccactctgccctagcacaaagaggtaggaagcaatcatgtctctctttgaactctacaaggtccctttgagtttgtgaaattgggcctgccctcagatatgtttagaattcaaatatatactatctgccactgtgaaaacaaaaaagaattcacaatgatatttgaacatatgaggaagcaaaccactataaatgagaatcagcagaaaccaaaaaggattagacacctctccccaagaactgcatttagttgaaatatcagccaaaaaactagaaaataaatatgtttaaaactactgaagctctaaaagaaggaattggaaatatgagaaaagaataagacattgtcaaaaagaaaaaggctaggtgattttttttaaagaaccaaataaaacttctagaattaaaaaaaaaagttaattgaaaattttaaaagctcaaggcatggattaagtggcaaattaggcaaagctgaaaagaatattaatgaactggaagacagatataaggaaataatctaaaatgtgctgcttttatgttcagtaataggattctaaaatcatttcattgttcaggaggacgaaaaagaaattaattaattttgctttgctcaaaaatatttgttataagtttaaggacaactaccaaatggacataggcatccgaatagaaggtgcagggggaatttttaaaga

SEQ ID NO: 316181 - DNA, 4001 bp, Homo sapiens
tctgcctctgtggaggtataaatattctctcagtccttaacataaacgaagtcaggatagtaaactggtaaggtcccctccaactgtcctctcactcaactgtaagcaacatccccaattctccttcatggaatagaacagcacacaaattcaatctagactctggcatcaatttaaaaaggtatagcattaagaactttgtcttggaaccaagtatctgcggagtcggcatacagaaacagcgtacaattaataacattccatttaccatactatactctgtgtaaatcagatttcattacagtgctggaaacgtggtggtaaactgtcagtggaaattctcagcccagaagagacactcaatcccatcatgcaaactttgcttccctcataaccaactaccctgactcacctaccatgtaacaggattctcctccttctaaatcacactattcaagaaatgtgcacacatctctccttttaataaatactagtaaaacttcagtttacggttttatgaaatactgaaaaccaatctttgaccaagcttaagttctgcccctctacttttcttaccaagagccctcaaataaataactactcgcagtgttctgatactcctcctcccaccaaagactggtgtccttattttcccaaatcgctgcctcccattaattaccacttaagtccatttctcttgcatgaggcagactttttttttttttttttttttagcacagtccttaataagcaggcttctagtctggcatacctgggaagaaaactcagagactaactcccaaatatgacaggaaaacagtaacataacacgagggtcaagagatgggaaacaggcgcgtgactgttttggttagaacagccggggcacacagtccatgaaatcaggtatttaacacgtaaatcttgttcctgcggtttggtaaaataagcacgggcagtgtgagagacgtcccacaagctggagggcagggacgagggtcaatctagagagctccagaagctgtcagggcagagccgggggagtgggcacaagacagaagaaaactagctgtaggggattctgcggctgggtgggctaaaatggtgccttctccagggtggaaggccatgagaagtggacccggaggcttcattccatcgggctccggtccctagggtttctgggctcacagctcaagtttcaccgggaaaaaaagcggcaaacgtgcatcccggcaccttaacctacgagggttcccagagaatgagcgaggaagtaacggtccccggagcaaacccggagttcggcgcacgaagcaccatcgccaaccctcggccatccgcacggcgacccgcgcggccgcgggggagggcagcgggccgccggctcagcattcgctggcctggcccttccagggcctcgccccgggcgcggcgaaaagtttccagccaaagtcctcggcactcgctcgcacaaccaaccgcctcgctgctccagagaacggctggcagagccggccgcggcgcccgcaccctcagtggcggctccctcagcccacgccggccgccgaggttcacctaccacagagcctggagaagagcagcagcgggaagagcagcagcagcagcggaggtggcgtcgggggctgcagcaggagcccggctccgaggagagaagcggaggaaagttgtgctttgccgcctccaggacacagcggggacggccgcagggtccgcgccatcccccaccctccccccggcccgctcgcccgcccgccccccggctcccccggccccggcgcctcaggctctgggcggaggctgtggaaggtccggcgcgcgcgtccccagctcccagctctagcgccgtcgctgccggctgacacttggccgaacgctggcggctgcctcgacaccgccgtcgccgacgccactgccgaggctgaagcgggagccgcccgccgccgccgccactcccctcccctcggcacccgcccgcgtcgaactcctgggaactcggaacgcaccaccccgccccacgcaagagggggaaaagaaaccgactctcagagcgggcgcccgactcgcccgccctccccgcgcaactccacctcccgtctgatccccgggcgcaagccctgtctcctcccaccccgccctcctacacatgctcctcccctttcaaaaaaaaatattcttttcatccactttgataacggggtttctcccacagcagagatttaaaagggacaggaaaatctggaataggttagtcggccccgcccctcgttcctgcctggtttccccccttccctgcctttccaatggtctcgcccactccacccctcgcgggtccacgggggccccggcgccgactgaggcgagggctgcgggacaatcacgctcggccttctcctctcccgggcggcgctctccctgtggcggggacctgggacgagggggtggggtggggaggggaaggcaggagggggctgcccttccgttgcccatgctaaaggttcctgtgtaggaagctggacgcagcctgctggactagtaatcttcctcctcgctggggcgcggggcactgaagggagggagagactttctcctccttcctgttccccgggacagctgtgctctccgaatccttcccttcttcccagcccacttattccccgctcgccaaggcacgtttgcacaggcatttttcctgctcttttttctgggagggcagcttggtagaatggtcggcggagctgggcgaggagaggggtcttcagaaggtttgctttcttgctcttgcttctcactggccgctgggctgtccactttccgcgccgggcgactggcaacaggaggccatggatttcccccaacgagtgcgttggtgtttttctttggttttgtttcctttgcatgttcgtatgtgtagttttattttcttgcctgttttcgtttgatggcagagaggcgacctcgggaagtattaaacatttgcccgtataagaagagcgtctgtggtccaccatgaccctcgctcatcccaggtggctctccgccctgccctctccatcctcccgcctcgcacagtaccggcagcttgaccttggagccactgccacattggttccgcggggggagtaggagggtggacaatttggactgtccagcgtagggggtgaattgaaggcagaggacaccagtcctcaggcctgacactattaattttatgtaggtcctgtcatctccacgagatagccataaatgtgttccagtaacaggaaagctgaacaaggatcagccgcccagaagttagcctgtcgcagctaaactaatgcatgcttgcggccaagaccacgctgtcctcggctttcagtcaatagggtcttcccaccttccgcccgctggattacaaggctttactaacctccaaggctacaagccattctacaccctgcccacctcttttttctttcttaacttctgcctcccttccagtctcccagcgctcggtctagtgcctttttccctccagccctttcctcttccctccctccctgtgcctgtctgcctctgtcgtcccctgtaagcttgtctcctgcagccaaggctttctatcacctattctcaagatgcacttatgaataaaccttgtcctgcatcgctccgggagatcccctgatgatgatcataattgacaaaatgtagctattgtgacattcctcagctgtgctgacaccaccgtttcccttgagaaaatttctttttctatattcgcattccctaaacctaatttcactgctaaatttagacagctcactgcgcagccactagctaattatctgtttagatagcactttaacacgttgttgagactcagttaaatgttaaacaaccaaaattttaatatcactagccaatttcattcttccaggttttccctgatggctccacatctccaagaaaagtaatttagccaacatttcaaaaaataccaa

SEQ ID NO: 316182 - DNA, 4001 bp, Homo sapiens
aaaggttgatggaaaaaactcgtcataaaggttcacaaattagggtgttataacactataagccaaaaaaggaagctgtttaaatgagtagcacacaggaatacaaaaccagtgtctacctctacaacaagaagagttgactctaaacactacacctgctctaaaacacagtccatttgcctacactgcttaagtttttaagctctgaattaaaaatcaagtccttccaatgctacattgagattttttaaaactgttttcttcttccatgtgaaaaccaatgtgttccttcaaaaagtaatcaacaattcattttcacaaccactaagaaattatcatgtaaataattcctgcatcagctatgcatattacctggcttcagtcttccacagagctttgcctaactagatctgcctctgtggaggtataaatattctctcagtccttaacataaacgaagtcaggatagtaaactggtaaggtcccctccaactgtcctctcactcaactgtaagcaacatccccaattctccttcatggaatagaacagcacacaaattcaatctagactctggcatcaatttaaaaaggtatagcattaagaactttgtcttggaaccaagtatctgcggagtcggcatacagaaacagcgtacaattaataacattccatttaccatactatactctgtgtaaatcagatttcattacagtgctggaaacgtggtggtaaactgtcagtggaaattctcagcccagaagagacactcaatcccatcatgcaaactttgcttccctcataaccaactaccctgactcacctaccatgtaacaggattctcctccttctaaatcacactattcaagaaatgtgcacacatctctccttttaataaatactagtaaaacttcagtttacggttttatgaaatactgaaaaccaatctttgaccaagcttaagttctgcccctctacttttcttaccaagagccctcaaataaataactactcgcagtgttctgatactcctcctcccaccaaagactggtgtccttattttcccaaatcgctgcctcccattaattaccacttaagtccatttctcttgcatgaggcagactttttttttttttttttttttagcacagtccttaataagcaggcttctagtctggcatacctgggaagaaaactcagagactaactcccaaatatgacaggaaaacagtaacataacacgagggtcaagagatgggaaacaggcgcgtgactgttttggttagaacagccggggcacacagtccatgaaatcaggtatttaacacgtaaatcttgttcctgcggtttggtaaaataagcacgggcagtgtgagagacgtcccacaagctggagggcagggacgagggtcaatctagagagctccagaagctgtcagggcagagccgggggagtgggcacaagacagaagaaaactagctgtaggggattctgcggctgggtgggctaaaatggtgccttctccagggtggaaggccatgagaagtggacccggaggcttcattccatcgggctccggtccctagggtttctgggctcacagctcaagtttcaccgggaaaaaaagcggcaaacgtgcatcccggcaccttaacctacgagggttcccagagaatgagcgaggaagtaacggtccccggagcaaacccggagttcggcgcacgaagcaccatcgccaaccctcggccatccgcacggcgacccgcgcggccgcgggggagggcagcgggccgccggctcagcattcgctggcctggcccttccagggcctcgccccgggcgcggcgaaaagtttccagccaaagtcctcggcactcgctcgcacaaccaaccgcctcgctgctccagagaacggctggcagagccggccgcggcgcccgcaccctcagtggcggctccctcagcccacgccggccgccgaggttcacctaccacagagcctggagaagagcagcagcgggaagagcagcagcagcagcggaggtggcgtcgggggctgcagcaggagcccggctccgaggagagaagcggaggaaagttgtgctttgccgcctccaggacacagcggggacggccgcagggtccgcgccatcccccaccctccccccggcccgctcgcccgcccgccccccggctcccccggccccggcgcctcaggctctgggcggaggctgtggaaggtccggcgcgcgcgtccccagctcccagctctagcgccgtcgctgccggctgacacttggccgaacgctggcggctgcctcgacaccgccgtcgccgacgccactgccgaggctgaagcgggagccgcccgccgccgccgccactcccctcccctcggcacccgcccgcgtcgaactcctgggaactcggaacgcaccaccccgccccacgcaagagggggaaaagaaaccgactctcagagcgggcgcccgactcgcccgccctccccgcgcaactccacctcccgtctgatccccgggcgcaagccctgtctcctcccaccccgccctcctacacatgctcctcccctttcaaaaaaaaatattcttttcatccactttgataacggggtttctcccacagcagagatttaaaagggacaggaaaatctggaataggttagtcggccccgcccctcgttcctgcctggtttccccccttccctgcctttccaatggtctcgcccactccacccctcgcgggtccacgggggccccggcgccgactgaggcgagggctgcgggacaatcacgctcggccttctcctctcccgggcggcgctctccctgtggcggggacctgggacgagggggtggggtggggaggggaaggcaggagggggctgcccttccgttgcccatgctaaaggttcctgtgtaggaagctggacgcagcctgctggactagtaatcttcctcctcgctggggcgcggggcactgaagggagggagagactttctcctccttcctgttccccgggacagctgtgctctccgaatccttcccttcttcccagcccacttattccccgctcgccaaggcacgtttgcacaggcatttttcctgctcttttttctgggagggcagcttggtagaatggtcggcggagctgggcgaggagaggggtcttcagaaggtttgctttcttgctcttgcttctcactggccgctgggctgtccactttccgcgccgggcgactggcaacaggaggccatggatttcccccaacgagtgcgttggtgtttttctttggttttgtttcctttgcatgttcgtatgtgtagttttattttcttgcctgttttcgtttgatggcagagaggcgacctcgggaagtattaaacatttgcccgtataagaagagcgtctgtggtccaccatgaccctcgctcatcccaggtggctctccgccctgccctctccatcctcccgcctcgcacagtaccggcagcttgaccttggagccactgccacattggttccgcggggggagtaggagggtggacaatttggactgtccagcgtagggggtgaattgaaggcagaggacaccagtcctcaggcctgacactattaattttatgtaggtcctgtcatctccacgagatagccataaatgtgttccagtaacaggaaagctgaacaaggatcagccgcccagaagttagcctgtcgcagctaaactaatgcatgcttgcggccaagaccacgctgtcctcggctttcagtcaatagggtcttcccaccttccgcccgctggattacaaggctttactaacctccaaggctacaagccattctacaccctgcccacctcttttttctttcttaacttctgcctcccttccagtctcccagcgctcggtctagtgcctttttccctccagccctttcctcttccctccctccctgtgcctgtctgcctctgtcgtcccctgtaa

SEQ ID NO: 316183 - DNA, 4001 bp, Homo sapiens
acctagctaaagcactgatctctaagttattttttcaatgtttacaattaccattttacataaacagaaaaagaggcatagtaaggttgaagttggattatttagtcatttgataaacacatttgaaatcctatcaaaaaccagggaatgagactcaaaagtgaggaagaagtgcccctcctcttgtagcctggtggagacaaaaagtaaagaagtaattacaggacaaactaatcaagattaaggtgtgggtaggcacatgggctggggctgtagaaatcatgaatgcttcctagggaaagtaatttgtgagtatttagaaacatctatctctttattttcaatacaaaataaacctaaaggactcgacactattccctgaaaggttataagacttacttgccaatagtcaagtcaaaaatcaaatttaatagctgaattactcttgactccctatcctaaatttcaacccttatgccatactccctttaggcacaaatgatagcaagtttaacaaattctgtcctgtatgtgccttctcacatgtctacagaataggattaaagacacacagcgtgaaataaatagccctttttaaaaagataataattttcttaactggaagtgaatgctttgaacaattcaagccctacaaagcacggctgtcagaagaggaaactgaggttcaaaaaagtctcactttaatacaacagaataaaaggtctctttgaagtcatcagaagagcttgaacgaaaagagaaacagaaggctattgtgagctttagcctccagatgatgaccccccaaacacactgcaatggtaaacaaacaagcctctgagtctgaatctgattcggtggactgacaaaacatcacaattgaaggaatctctctcctcactcattacttttccaaaaaagtcccactagctgatagctccaggtttcttgctggttcctagatttattgcttggaaattataatgcatagtgggcctttcaaaaaaaaaaaaaggtacaagcaaatgaaaacaaccacggttttaaagccccataaaagaccgtatatgtagcagaaatgaaccctgccaatgtttactatgaggacctattactcctttatgctactcgagtggattttaaactcaaatgaatgctaccactgcccactaaagagcaagttagagaagcacattcatacacctgcttaacagcgccccgactgccgcccccaccacttcccgggaccagggccaagcggctgacctggaaacggggctgcagaccccagccacttacactctgctgtcccaacaagtaggctctggagtcacacttcatttggcccggcacaccctcatccccatcacccagaccctcagctgcaaggaggaaattacacggcctcaaaaaggaaaaggctggcggcgggcagaagtggatggtcctgagcggtctcgttcctgctcccctagtccaaggtgagcccgggaatcccgcagcccccgcccccgccccccaactcggagtcgctttcctggtcgccgccgagctccttccaccccgcggcgccgggagctgcggtccccatccttggcccctccgggcctcagcgttcgcctgggccccaggggccctgacccagacccagcggcgcgccacagccttctcggccagggccgcccaccctgtggcccggtctccgtccgacgaccctgcccggcccgcgccaggcagcccgcagccccctcgcggcccggggccgccccacgccgcccgcccgcccgctgggccgcgcaccgtgtgggactgcaggctctggctcgcctcgatggctgctgtcagcggcaccgtgtcgtccagcagcaccttgccggctggcggcttctccatgaaggccatcccgggacgcccggccgccgccgcctagggacgcgaggtaggaacccgaggcgccgactcccgccgcccgcccggttccaccgccgccgctgtcaacacgcgccgccccacgcgccgccgggcccgcggggtcctagcgccgcccttcccacggccgccgccccggagtcctagcgccgacccagcgcagaacgtgtgggggccgccagcactgccgcccgctggcccgctcctccgcctcgcggctgccatgggcctgcgcttccctgctcctcgcagccgcaccgcagacccggtgcccttagctccgggcttcggaccagggaacaccaccctaagccatcactaccaggatcctcagatccagagacgcctggtcctgagccctgggatccaggaatcttcagggcgagatttccaaaccaggcctctcagaactgggcttttcggggaccgtacctcttgaaaccctcagaactggatctctctcatcccccaggcccaaggaccctaaaactcagaaaaagggcctttaggatgggacccccagtctgagccctgcaaacccagagactttctgaaacaagcccttcctattgaaacttcacagggactcttgaacgtggctcctcaggcctgaacacctaagagctggaccccataattggaggtcttgggccccagaaccctcagacccaagctctaagaactggagaccctataaaatggtccagagacccctagcctctactcttggcccccactgcgggctcaaccacatcccttagacttgggagtttttgatcccaccatatggactagaagaacttcaaaccaagagccaagccagagaaccttgggatcaacttctcagccctaaatctgcccacagtctgcctgaacccaaagccataatcctggcaccacctcatcccccccatctccatatacacctagaaatttcacccacactgccctctcctagggcagcattccaggatagtgaagagttaaatttagaattggaggaccatcatctccatggctctggcatttaccagctgtgtgatcttcaataagttacccaacctctctgagtcccaactccccaatttgcaaagtggagataatattatttgtatgaaaaggttaatacaaggaatgcagtagactgggaaggggcttggcacatagtaaaaactcaaacggtggtcaggcatgatcgctcacgcttgtaatcccagcactttgggaagccaaggtgggtggatcacctgaggtcaggaatttgagaccagcctggccaacatggcaaaaccccctctactaaaaatataaaaattagctgggcatggtggcacgtgcctgtagacccagctactctggaggctgaggcaggagaattgcttgaacccgggagggggaggttgcagtgagccaagatcataccactacactccagcctgggtgacagagtgagactctgtctcaaaaaacaaacaaaaaaacagacaaacaaaaacacctcaaaccgtggtcaggcatgatggctcacctttgtaattccagcactttgggaggctgaggagagtggatggcttgagtccaggagtttagcctgggcaatatggtgagaccccgtctctacaaaaaaattttaaaaatacctgggcatgatggctcacacctgtggtcccaactactcaggaggctgaggtgggagagttttttgagcacaggaggttgaagccgcagtgagccatgatcatgccacttcactccagcctgggtaacagagcaagaccgtctccggaaaaacaaaaaaaaaacaaaacaaagtcaatattagtttcctccttcccctacagttgacagaatggaaggttcctaactcttaaatttgcctccactaaatttctacacttcagataagggaacaaagttccttggtaatcccaccaccaccaccaaaatttgacatcacaggaaaggcccacatcatacataaagggtcccttctccagatctcaagcttattgggattggtgggcagccccgttgagtcaagtagccatgagattggtcccaggggccaagat

SEQ ID NO: 316184 - DNA, 4001 bp, Homo sapiens
caatagtgaagtaatattgagctaactattcaagctgatcaatagaaaaaagagttacagatactgcagttccacaaacactcggagtgctgtgctccaaaggccaggtggcccacgctgttcctggtgcccaaacgcagcctcccaaggcatcagtgaggatgggctggccaggagccaatccctaacagagaagttccccctacacatcctttctctgagataagcaattaatttaatccaagacttaatgaaagccaggagaagggatggggcagattcatacactggctttcaggctgtcccgtgcatcttcacctctctccagggaccacgagggttttttttttttttttttttttgacagggttttgctcttattgcccaagctggagtgcaatggcgcaatctcagctcactgcaacctctgcctcccaggtgcaagcgattctcctgtctcagcctcctgagtagctgggattacaggtatgcaccaccacgcctggctaattttgtatttttagtagagacggggtttttatgttggtcaggctagtctcgaactcccgacctctggtgatccgcccgcctcggcctcccaaagtgctgggattacaggcgtgagccaccgcgcccgaggccttttgatccatctgctataaatccccttcccacagatgtcccgattgggcaccaacacctctgaggagggtaagttactgccaagcccgaccgcagtcgcatcccgtttgaaagggtgggctccgcactgccagcttcacacccacgggccttctgcaaatatcaacaaacggctccatttgtggagcactctccgatcccccatccacccccctacacttccccattcacagctcgatctgattccccatctctcctgattttacttgttgaatgcttacaaaggatccttgcctttccacaaagacactggctagccaggcggtgataacctcactcactacagagccccctcgcaatcgctgaactcacagccgaagcgggaaaatatggctccacgtcctgcaccgtgaatcctttaccatccacaggtacaatttaaaaggcagctgcggctgcaaagcaggcaacctaccctaagcaaatccattctctctctctctgtgtgtgtgtgtgtgacaaacccagcttatttaaaagatcaggacataggcaagttcaccagcaaaagcaacgtcgtgggtctacaccacacggtcctaacctgcgcatccaggaatgttaacctgcgctcgggcggccccgtggccaggcccgggactcccggaggcgtcaggctgcaggtggctgccaagaggagccagccccgtctccgggaaaggccgcgaagttgcggccgcctccttacctggagactagccggctcaggaccgcccgggaagggggatcccgggagcttgaatctcggctggaatccagcggcgggagtgcgggggccgtgcgggagagggctggaagggcgggggcgaggtggaggcgggctccgcgggagagtgcggggctgcggggggcgagggcttggagacagagccgggggttcgcagcgggcgtgagacggcgccagctctgggagaagggggctatggggcgggcgccggggctgggacaccgggcgcacggggggagtggcaggaaagagggcgcaagtcctaggctcaggggcgagcgcggggataaaggaggaggcttagtcgcgggattcggacccgacgcttcgaagcgcccccagccttcccgcccctctcccactggcgagttagggggaccccctcagtctcccaacctcggaccctggacgcccacccgcctagaacctctgcgctgctcggccccaacggcaaccgccccggcccaggcccgcgccgcactcaccgcccatggtcccaggccggccccagctccgtcgctgcgcgcccggctcggcgctcgccgccagctcctcccggcgcgaggggaggcgagggcggcgcgcacccgccaccggggagctcgcggggcccggcagcgccccctgccgaccccgccgcgccccgtctcagttcggccggccctgcaccaggagccctggagctccgccccggaggcggtgttgcggtgcggctgggcgggggcgaccgcgcggggttgctgagaggacactgcctctgggaggcccagcacagcccggagagactggtcagtctgcagagccctcggcgtgcaaagccacgggcacggacaagccgagcgcgcagggaccacgaccacagacgcgcagggctctcgcgtgcctcacaactcctgacctgcgatcagggactgcgcggaggcgcgccaaggcccaggaacacagccctggccggcccgggccctagtgtgggtgctttggggccatgtgcctgccctggcgccgctgatgctatcgccgggtgggcgcgcgcgtctggggtgcgcctgctgccacgtagacccaaactgtcaccccccaccccccacccctttcggcctatcccacactcctcttccggctcagaacacatccggccttgtgttgctctagtcctcgctgctgctccgtctccaacggtctgcagagacccggggaggtcgtggccccgcgcagtcgcccttcccacctgctcccggcccgcggcttccttggagccgctgctgaagatcctcagagcacttgagggctgcctgtaacgccccgttagacatctgataggcgaacggttgtatttggtttgatcagtatttgtgggtcatttattgcaaatgttaggttccagctggtggagatttccaccagatttctctgtgggagatgaaacgaccaacagcgattatcagagaggtctttgctgtcagctcgaggtctacagcaaccctgtgtgtcctagcacaactagcctcaggcaaaatagatacggattcgaatttgctactatatacctttgaggtgcacctttgggaggatctcatcccttgacttctgctttctctccttgattgatggctctcaaatccacacacttggctcagatatgttagccatatttccccctaccctccggtttttttcttagaactttcctcctcaagttaccacgtctggcactaaattttacctcttccaagctcccaactccatttatccccgtggtctcgccattctctcagccacctgtcatgccttcttcatcaggtgccttaatggctcgtcagtaccggactttgctgcctgtccgcctctggtattcccccgatgcagcgctatcccgggccttttttctgccctgaatactgacagcctctcccaatccatgagcacaaaatcttttcactgtcccctttggcatcacccccaactctcccacctggcccccacagaagcccaccgcagcccgcccaacaatgtctcctctgccccttctgattgtcctctcacggattgcaggctctactgcttagctcacactgtcaccctcttctctacatgggttagtcaaggtgctttctgctgtaaaagacaacccaattcacactaacttaaatcacaaagggttgatccgctgtgtacatgaagagcctgtctgcttcaggcctggctttagtcccagggtctcagggactccccgtctcagttttgctgtcttccacatgaactacgctttcatgcgcacatgagaccctggcagatccaggctcacagcctcacagctctagttctagcagaaaatcagcttctctgccagccattgcaactagccttggacctggctttgtttgcaggattgggccacatgtccatgctgtgctctcagcctctgtgactccatggcaggtgggttcactcgtggacacactatcaccctcagcagggagcatgtaggcactcttggatcccttctctgtcacaaggggactaaaggtaactcagggcaccatctctagccatttctctgcaaaatttgcca

SEQ ID NO: 316185 - DNA, 4001 bp, Homo sapiens
gagagaaaggaagagagagagacagagagagagggagggagagagagagagagagagggagggagggagggagagagagagaaaaagaaagaaagaagaaagaaagaaagaaagaaagaaagaaagaaagaaagaaagaaagagaaagagagaaagaaagaaaaagaaaaaagagggagggagggaggggagaaagccagatatattaggaagtttactttgtacatttcaaatctgtagggaaaagatgagattgcaataaaggttctggtatccttggctggctgcctgaaaagaagaatgctggatacatacttcatacctttgttgggaaaaagtggctaaatagattacagatttaaaggcaaatattaaaatgtaaccatgaatgaatcaggagtaaagataggagaattattttattcccttggactaggaaagatctttctatgagtctcatctggaagccataaaagtagtgatagattaatgcatatacataaaattgtagtcttctgctgtggggaaaatcataagcaaagtcaaaaagaaaagaaattgcaactcatatccagatagtactaatctctcagacataaaaggagttcctggaatcaatgagaaaaagacaaaacaaaacaaaaatggaataaaaaaggaaaattgtcaagagtatgaataaatagttcattgaatggaaatattaacggtctttaaacatatgaaaagatggtaaacattcattgtctcattttttgcatttttaacatttattgagatataattcacatatcacacaactcatttaaagaatacaattaaatgtttttagcttattcacagatatgtaccatcatcaccatagttgatttcagaatattctcatcacctcgaaaagcaatcttaaatgttttagctattactccctattcccctctactcaccaactctccttcccagtcctaagcaacctgttatctacttctgactctataaatttggccattctgaactttcctatgaatggaatcatatcatatgtgatgtgaccatataatattttgtcttttatgacaggcttctttcatttagcatagtgttttcaatgttcattcatgtttaagcatgtgatcaatacttcatttttgtcgaataatatttcattagctgcatatgccacaatttgtttattcatttgtccattcacagacattaggttgtttccaccttttggctattgtatacaatgacactataaacatttgtgtttatgtttttatttctcttgatcatgtacttataaatataatattagatcatatgagaactctgtttatcatttgagaaattgccatcctgttttccaaagtggctgcacaatttcacatttccataagcagtatatgaggattctagtttctccacatctgtgccaatacttgttattatctttctattctagccagcctagtggatatgaagtggtatctcatcatagttttgatttgcatttccctgaatactaaagttgtcaggcatcttttcttttaatgtttgtgaattatttcacctttatttatctcaaaatactggtgatatagatatttcatatataacaaggttaagcaacatgtgcatgtaaaatggaggcagaaccaaggctaaagcaacatctagctcagccatcaactcactatccctgaggggttaaggtgggggcatcacacagtgttcatcagctctcccagacagatgcgtttgattcatcttttcaaagacctggatggctgccatccctgcccagtagctgcaggagtggctggtgaagatttctaccagttgcttcccattagccttgtctacctctgtctgggggacggtctgtagctcctttcccagggagattgttctgatcagagacttgaacttgctcaactcatcctggctgagctgctccagaagagcctgcaggttgaagtccagctctgcagaagatgccatcttgtcctatgtgggagctctcccaacgcctggccctatgctctggttctcacattttttcatatactaataagtatatatttttatatctttttagaagaaatatcagttcagatttttgctcattataaaattgcgttattgtctttttattgctgagttgtaagagttctttatatagtctagggacaggtccttcattagatacgcgatacgcaaatttttgctcccattctgtgagttgtcttatcagtttaatgatggtgtcctttaaggtacaaatgtttttcattttgatgaaatcaaatttatctatttttttcttattttttatgcttttgatgtcatgtctaagaatcttttgccaagtctcaggtcataaagatgtacccctatcatttactataagaatattacagctttaactcttacatttgggtatttgatatattttgagttaatttttgtatgtggcatgaaatagaggtccaactttattcttctgcatgtagaaatctacttgcctaagcatcatttgttgaaaagtctattctttccccattgtacggtcttgaaacccttgttgaaagtcagttgaccacagatgtacgggcttatttttggactctcagttctgttttattgagcaatgtgcctatccttatgccagtaccacattatcttaattaccattaagatgctaagtcatgaaatgaggaaatactaaataaattactaagtcatgaaataaggaaaggtgaattgtctttgtttgctcttatttttcaatatcatcttggctgtactgggtctatgcgatactacttgaattttctaactagtttgcccatttctacataaagtaagctgaggttctgacagggattgtattgaatctgtagatcagtttggggagtagtgccatcttaacaatgtaaattaagccttccaatctataaacacgagatgctttccacttatttagctctttaatttctctcaataatgtcttgtaattttcagagcataagttttacttctttgttaaaatttatttctaggtattttattctttttgatatgattctaaaaggaattgttttaatttcagttttggactgttcattacaagtgtgtagaagaaaaactgatttttatgtatgatcttgtatcctgaaacctggatgaactcatttaatagttctaacaggtttcgagtgaattttttaggatttcctatatacaagattatgttatctgctaatacagacactttcacttccattccaatccagttgcctttcttatcttgtctagttgctagggctagcaccactaatgtaatgttgtatggtcatgctaagagcagatagcattgagatggtcctgattttaggacaaaaatcatttttccattaaatataattttggctatgagttttcatagataacttttatcagattgaggaagctcccttctattttccagttgggagtatttttatcatgaaaggaagttgggttttgtccagtgctttttctgtgtttattgagataatcatgtaatttttgtttttattctactgatatgatgaattatattaattgattttcatatgttcaaaccaaccttgccgtcctgggataaatcccacttggtcattgtgtataattctttttataggtcactgtattcaatttgcttgtattttttggagtgcatgtttcagattgagtataaatttatatgaaccctagagaaggcagtcctgaaaaatataaacgacaagagcatttgctctttgacctggcttttccacctctagtatttgtcttacaggtgtgtctgcttgcatagcattatttgtaagaacaaaatactcacttaatgtcctcaatagattcttggaaactgcaactttgaatgaaatgatgtataacaaaaacaattttatcataggctaactcatacaagcaagagttaaattcctatggcatgc

SEQ ID NO: 316186 - DNA, 4001 bp, Homo sapiens
aaattttctgtagagaggagttctcaatatgttgctcaggctggtcttgaactcctgggctcaagtaatcctcctgcctcagcctcccaaagtgctgggatcagaagcgtgagccaccatgcccagccctcttcctgccttttatcccttagtggattccaggctctgttcatgccagagtctttgccagcttcagcttagtgaagcacgctcacctgcatgtccacttcattcttgatcattttgccatctgcccacttcagcacagcccgagcctctcctagaagcataggcacaaggagctgcagaaaggcaaaaaagagtactccccccacctctttcccaaggaaaggtcctggctgaccaccagaaccagagcctgagcccagccagaccactttaagtcactcctgttccttcccccacctccttctcactcgtgcccagaagaaaaggcatgaccagagagaacaatatagccccgttccaggccctgctcacccatcagcagccccatgttgaaatggtaacgttccaccaggagctggggccggtgcctgttaatagcagcctccacctgcagaaagccaaaccatgtggttcaggaaagccacctttagagatattctgggaacccacaccctcactctgggtcttcctgaggagggaaactgagccactcctttccatggccaggactggggaggcagacgatgcctggggaaagactcacagcctcctcaatctgctctggggtcacaatgacacccacgccacattcccgctcgaagtccacagtgtcgatggggtccaaggggtgactccgcacatactcaagggcagctgagaagaaagagcccgtgagtttgtggcatctctgctccaagaagtggacagacagggtcctaatctcatgaaactccaaggatagtctggcctcctgaaaagttaagccctggcaccaccaccctagagaacacagggaagaaagaagcacgtgtcgagagtggatcccccctcagaccctgacagttcccgtgtcagtctcaccataggccaccccttccatgcctcagtgcctgtgcagaactaggtgtctagaaagaaactggaggacttggcaaaaagggaagacaggggtcttggctgaagggaggcattggtgcgaactggcaggacaggtaggggtctcaccgcttagctggggctcagtgtggatcttcttactggctatgtagcttacaaggaaggagagacgccgggtatccctgagtcgggaggccaagccatataacaggatcccggtagctttgtcaatggtggaacccagggtctgctgagcctgaggtcagaggggtcaagagagaagccccgcgctcagtgagaggaaagggcgggacaaacggggcaggtcgggatctggaccccgccccgcgctgcgttgcagcatggtctgcaaaccaggccgggggcagaggggctcgcacctgagtagcggcctcgcgcagctgcgcgctcagagccgagttcttgagcgtctcgcgggccttctgctcgctcaggccgaggctagtgaagagcgacagggagtctagagccgccattgcagagacaccggaaactaaaagaaacttaggccccagtctgcaggtcggcattcactcgctgaccaatgagagtgaagcctccggggagagccaatggggtccttccttggcgggagggggcggggcgctccaaggtcgtctatcccctttaaacaacacagggcggacaaaccggcctttccgggggctttgcttccgcctccgtggaactgggaacttgaaggggtgttggcaggcggcagggcttttggagatatttgccacggacctggaaggaaggtgttcgtccctgaggcaggaggaagacacaggcgtggttttgctctgacttttctacttcagccctggtaactccatctcaatatagtaattgtcctcgggggcaaatgcgagtccctgtcacgcttttgacgccacagctttggagttgtcatggaaacagttgaacaaatgaagcccaggaaatccctcatccagactccatcgtagagaatgtgtggaatgaccgatccaggggccccataagtccgccggttttcaggtgcccacttggacacagctggccaggaaagggaagggacgggtctgggccaggagggacctcacataagttctatgatgatttggtttaaaatcttggccgggcgcagtggctcaggcctttaatcccagcactttgggaggccgaggcgggcggatcacttgaggccaggagttcgagatcagcctcgccaacatggtgaaaccctgtctctactaaaaatacaaaaattagccgggcgtgatggcgcacgcctgtaatcccagctactcaggaggctgaggctggagaatcgcttgaacctgggaggcggaagttgcagtgagccgagattgtgccactgcactccagcctggtcaacagagtaagactgtctcaaaaaaaaaaaaagaaaagaaaaaaaaatctcatcccacacttaccctcttgccaaagcattatcaggaaaaccacaagcaaattagaccttgaaatccctctgcaggcctttgagaggatattttattgagcttgtgagagggtgggacaaatgagatggttatagcttcatgattatagctgttgtgcttggggatctttccacagtctcactggacttccaggacctgctggctgaaacagaacagagactttgtgtgtgtgtgagaaaagggactaaggtagtaagggactgaggtagggggttgcagagaatgagcagctggtggtgggatggtggaaatccccacatttgagattggagctcttgcaggaattggtgatgctcatacttctggaccttcaaggaataggcaggatcctgactagtctttatctatattctgtgtcttttgtgcccacatcccattattaatgaccaacctccaagtctgggcctacatctggataccacctaatgatcacatgccaggtgcagaccagggccacatgctgtatcgctatccaggtccaatgctgtcctggggcttcccacatctccatggccccgtggccccagccagatgcctagccctgcagtgtactgcatgagaaaggccaggtgcaggaattaagcaggggatgcagaccagtggtgctaaggacaggtaccaagaagcagagccatagccacaccagccgtgcaccaaatttgaagctgcaagtacccagcccaccataaaggtgcccatggtgagcaaagccatgcagagtgcctgccactgccactatttcctcagtacctgatgctgccaatagattcactgtagcaccatcaccaagtcctacaggtctagtgatggctccctcaatgagatcaagatctgcactcccttccctggttacttcatggtacactgtggacgccatggctacaagtcatagaatgaggcagtagccccaccagtgtcaccaagaatgccacaagtggtagcataccagtcgatatccagctagtgccctagatgtctacgacttgcacaaagcagaaatgttaaattgtatgggcccagtctggaggttagcttgcctgcataagcccctggcactgcttccaggaaaagtcaagacaaagatgaccaagtggaaaaaccaggcagcagccagcaaggcccagtcgtggaatggacagaggtagggtccagcaacctcctgggctcaaacgatcctcccatctcagcctctgaaatatttgggactacaagtgcataccataagagccagctaatttttatatttttggtaaagacagggtctcactatgttgcccaggctggtcctgaactcctaggctcaagctatcctcccacctcgccccaaagtgctgggattacaggcataagccaccacacttggccagtttcagcaactttttt

SEQ ID NO: 316187 - DNA, 4001 bp, Homo sapiens
aaaaaaaaaaaaaaagtcaaaattttaagtgtatcctagaaaaactttacagcttttctttgaaccatttaggtccgtttaaaagctgagcctgcaaacgcttaaatctgcgggttccactgacttatatcctaagaggagaaaactgagcaagtagcgaactgtggctgaattcaaagatgccgttctcccacatcttcattttacagcacctaatagtttctggaagacagcacccagaattgacaggatttgtaatgcttcagtattaccagaaaaaaaactgtgcacagatacttccaggatatgaacaattttaactcaccagtcaccatgttgcatgtatttctgctgcttgtcctgagttcttaagacttctaatattctgaagaagatagaacaaaaaagttccttccatcctcagcctctttttattaataattttaactttgttcttaaaaacaatacagtacattagaaagaactaccccaccattatcaaatttgatggctaattttacttcctcttagcttcctattccttaagcttaattgagcaagactgtaaatcaaactagcagatgttttgtattagaaaaaagaggtgcctatttctctagaacaaacctagaacttccttgacaccaaaacacagcggcagggtcaaaaaaagagctgaaaaggactgaaatcctacaccaaaagtgacttttacagtgatacactatcagattttagtaatttctgctgggatttctgcaatttcaaaaaaggtaaagcactgattctcaggttgttccattttgtttaaggccaactttttggctgaggcaaaggtgggcctttaatataataaagtaagcccctcccacttacgcaaaagaaaagctgcgtttaaggatttaaactggcattttagagctcggagttcacatgggccacataagcgaattcccttccggagcgcacagaggtgacgtgtatgaattacgcttatggacgtattagtttctaatgaaagataagcaggtaccactcaagggccttctaatattaaccttccctgcccggcagaaagcccagtacaaggtgaggaaatccgaaggggctcactgccctctcaaaccaagagggcttggtttccgaagcagagaaacaccctacccaagcacccgcaccgtacttgggcctcaagtaacggcattcttcgaggagaacgggcaatctcgcccccctcacagaggagcggaaccgcaagccagacagcaaagctggttggtttctctccaggccgaggccacggatgcccgggaacgtcaccagaccagaaaggacccaatcctcaaccttcccagcgcaacgagccgcggccggccctctgctcagcagaagcctcctgcgcgctctcgaggcagcaccgccacccgatatcagagcgcgcgccccaaaactgggggtcgtcacgggcgcgcgctccagaaagccgcggttgcccacgggccacagctcctagagcagagatatccgggccgggaacgcgcacgtcggcggccacgcgcaccgagagccgcacagcgcgcgcgcgtaaaaacaggctcagccgcgcgcccgcaccggcgcgccatctcgcgccgcgcccacccaaatccccgggccacccctcccccatccacagggcggggtgcgctagcccaggaacgttttcggctccggagccgccccgaactctccagggcccagcggtagtggcccgcccgcccccgcccgccgttgtgtggggtgggccccccgtctcaggcctacagcttcgccgcatccccacccgcactggagccctcacccggcgacgtcactgccgccgccgccgccgcctccgctgcacccgccggccccgccgcaccgccagggaccctggttctgccgtcgtcgctccaagaccgacagggttttctcctcacagctccctgggcgccatcttacattcaaccctcacagccaataggagccgattgctcctctcgcgataatcggggcgtcggatcccgcgagatctgggactgcctaccggccaaaattaaagtgaacgcttcagcaggggaaggtggccgcgcttctggccgctagagcggatagtggatcctagggtatggagcggctcgctccgcccatggacgcctctccatgtggggcggagctagggccgtggcttggcctagtagtggagtctcggaaggctagggctccaagctagctctttggacccaccttccgtcgcccgccagagcctcctttggtcgagcacgcccacgcggggcggggcctggccaggctcggcctctcgcttaaggtggaccccacaaacttctgtcctgggcctggcgtccccagccgtgccctgcctgggaagcctctaggttgctcacctcctggaggagtcagcatctggtactcccgctgtctgctgccatctgagttcagccttccgcagttgggtccaccttaaagcgggcccccgggtagcctagtgtttgtatacagggaaaatgtggaaggcgttaaagctgcaggcacactcgggcctcagcagcagcctacactgcccccagagggcttccagcctgctgtagactctttttgcctcggagcttttgcccttgttcctcttatcctggcaaactccccgtagtctttcgtgattcccttcagaagtcacttcgttagagtaatgttttctgaggcccaggctgggtcaggaacctcttccagtcttgcacaggccccagggagaccgctcccatacagtgcttggtcacccatttcccctcccgtgaacttggaaggccaccacagcacgtatgccccatctcactttgcctggcacgtagtaggcactcaaaaattatatgccgaatgggccgggcacggtggctgaagtctgtaatcccaacactttgggagaccgaggcgggtgaatcacctgaggtcaggagtttgagaccagcctggccaacatggtgaaccccgtctctactaaaaatacaaaattagccgagtgtggtggtgcatgcctgtgatcccagctacttaagaggctgaggcaggaaaactgcttgaacctgggaggcagaggttgcagtgagctgagatcacaccattgcactgcagcttgggggacaagagtgagactccgtctcaaaaataaaaaagaattataggctgattgggcgcagtggctcacgcctgcaatcccagcactttgggaggccgaggcgggcagatcacctggggtcaggagttccagaccagtctggccaatttggcaaaaccccgtctctactgaaattacaaaaattattcaggagtggtggcgcccgcctgtaatcccagctacttgggaggctgaggcacgagaatcgcttgaacccgggaggcagaggttgcagtgagccaagattgagccactgcactccagcctgggctagagtggaactccgtatcaaaaaaaaaaaaaaaaaattatatgctgaatgatcagactgggagctaggcctctccacaccagcagaaacaaaccttttagatccctctggcacaggggtcctaaccatggacaaacaccccagggccctccattctctcagaccaggtgcggagggtatgaatcctacccaggcccctgcctttaagcaccaaaaagtgcaccggtgctttcaaagctgtcagtaccactctgttctgggaaagtccattctcacagacaaaatgtgcaaaaggcacatctccatcccccaatcataccaccaccaccagcatgtcttcagggccttcagatgctagaagtgcagagataacacacagactctaggagaatttagctgttctttattgacatggaatttggggtggcgagggtagccacaccctccaggaggatgaggtaggttcagtgcttccagctcacacctttcctgggtcttccttcagtgtgacagttcggttaa

SEQ ID NO: 316188 - DNA, 4001 bp, Homo sapiens
aacatggtgaaaccgtctctactaaaaacacaaaaatcagccaggtgtagcagcacatgcctgtaataccagctactccggaggctgagacaggagaatcacttgaacccaggaggcagaggttgcagtgagccaaaatcatgccactgcagtccagcctgggtaacaaagcaagatgccgtctcaaaaaaaagaaatgaagaacgctacaattctagaaaacagtaaatgaagatttttccaaggcattcggaaatcgttacaccatttggtagggggaaagagataacgacgacgttaaactttgttgagtatgtgtgttaaaaattcagaagtaactgttaaacgattaatgacagaatgcataatttccaaactcactggagagggaagtgggaagataaagaaaaatgaattaacctaataaaaggcaagaaaggaaaagagaccaaaaaaaagaaatagaaaacacaaaataagatggtagaattccaaatgtcagtaatcacaataaaagttaaattaatttcacatatagaaagacaataatagcaactaacatttatcgggtatttactatgtattaagcactgttctttatatattcactccattaatcctcagatcaaatgcataatatagataccattattatctgcattttatgtatgataaactgaggctgataaaatccccagctggtaagtggcagagcaaggactttaattattgaagtctagttttcagcgctgtactctaataggctgggagcttattagaagttccatctggtacacaagcacattataatcttagtttccattttgctatagtgttcttcttcttttccctttctccctcccgcctctaatccatcctcccagtctctgcaatctttctccattctcatacaaatatttaaacatacttgcatatgggagggagtgttttggtcagggtttgcttttacaaaaatggaaacatattatactataatatatgcacttctctgcaatttgcttttctctcaagaataaacattagacgtctttcctgaagaagagacataaagctaacttacccttttgaaaaaaactacttcgtggtactgcatagtttgtatgagcacaatttattcaaccgcctttcagacagaccagttacagagctggtcctaggatcgctgcaacagtccgagggcatagcttccctaacttcattttcaccaatttcaaatcaactttagtttacatttcctggcagaatgcttcacatacatttatttttaatcattacaacactccagtgattcaggtattatcgtccccattttgcatgagaaaacagggtctctgagttattaaacaagttgcctagggtcatatagccacaaagtagttgaattcaaaactcctgttctaaatctttactctgctttataagcccatttatcacccctaaatgggctgtctctggaaacacctcggctaagccaataagcctggatttatctttgctccatgggccatctccatggccccagacctccctaggcacctggctcagagattgaagacggtcccaccctcccatgggcagttcggaataaaaacttcctgaaaactctacctttcagcagaggctagtcgaaaggggcccttttatctcagaggtgtcggcgacgctcacacgatttatgagaatctgaacttacagaaaccaatccaccaggacaccctgaaaagggaagcagaggagacatggcgggagtacaatcaccgttactgcaacacaaccaggaagcgtctggacgcgacgtgactcatccatctctagcagctcccacaccagcagggcaaaggggcacttacctgccaacaaaccattcgactctttcagtcttcagacccctcaaactcctcacagttcactaccacgtgttgcaaaattctctgccccaaaatcactgcctccagtgcagagccaatcagggagtactgcgtcatcactgggcgccagaaaaaaagcaaagccgacattcaagcgagccttgatgacggcaagagcgagggacctctgccgttgctatggtaactgagccaacgcgagcggcctgcgcagagcctcgtgggagtggtggttcgacggtgtcctatgcctgctttccttgcgggcggaggaactacaattcccagcgtgacccggaggcagcccgggcagaagggcggttgctgcagctttggccgaggttcgggctcgaacttggaaaatgctcctggcgcctcagggaaggtccttctcaaagaaaaggatggggctgaatcgctggaaacggttcacaaggaagccgagtcccaaggtgatcccaatcgagagctttggagggcggggactttcccaaggcgcggcgcagtcaggaagccagtcgcggcccgtctgtgcttcctgcctcttcatcctgagctgacacgcccctgccttgaccgccccaaagccagcattaccctgagtgaaatgctctaggagctctggggtctgggcacattacggctttggtgggcagcatcgtggaagaactgtttgtaacgcttttctaaaaccggaggtgtctgctaatgcccatcggggtgaaaggagtttgcaaactccgttccccctaccttaaattttaggaaacttctcgcacatttctttctttttctctctctttttttttttttgcaaatcttggggtaattgatctttattaacgggagagagcttcacattaaataccctgcctatattcctgccccttcacttttacgtaaagtatctaaataaactcaggagtgcaaatggatattgaatacattaatacttgattcacatagtaatttctaaattcaaccaactttcaaaaaatagattctctccgtatctatcacccatttggatgcattagcacctgaagataagaaaaaaataataaccccattttaaacttgaaacatatgtgacatgtgcaaagtcacagttgcaccgtgtgctttccacagactacctttttaacagtccccaaaaagatgcttaaaatctaaatgagagtactaaaatggagaagcttctcagctttcagctacagagcagtttcaccagctgttttcacccttaagttatactttcctaaataatattctgtagatgtatgtggcctttttgagggccccaggcgattgttcttgcgatttattctaaatttaccagctaaatgcattggacatattccacatgacaaatatgttgccctagatactagagggcacagactgaagcatcagggagacttggaaactgaggctgctgctatttcaatacatcagttgcataatgtattggatccaagataggatatagatatggacttgatgatgaaaggtaaaaatttagaataatttcttaggactccaaaaggaaggatttttgctgctagtgctcattattactgcctagagaaaaaaaggtaaaaacatagggcttcttcaagttcagttgtattttaattagatcagctctttctttgttgcagtgacaaaattattaagcagtacagctgcgttagttatcagtaagatgctttgaaggtaaagtgttaggtaagtgaaagagtattatatttttcccacctccatgtgtcagtatgctagtttagatatccccttattttattattattattattattattattttaaagagtatatttgagtaagaagcaattcatgaactgggaacgccaaaccaaaagagatttagtgctccaatgacaaatcatcaggatatccccttattttaaaaacacacctgaatttttagtgaagaagataactctatttgttaagtgactattagagggaattctgcaagcttctgggagtttcagaggttgaagaaaggaaatgtcctgatagttttacttctaatttcagattaatacctgactgatctgggtggaaatttat

SEQ ID NO: 316189 - DNA, 4001 bp, Homo sapiens
actgtggacacataaagactgttgacttacttttttctccaccttggggcaggagggaggcaacacccagaaattatcccaattttatagaaacaaagacaaagagctacatatcctagccaaaggcaacaaggagcaggcctagagccacccggagaggcagagcccagcagcagcaaggctccagtgactcccatctccctggcagagatcgtcccagccctgtgccctgagggtgtcctgaagatcatgggggctcgaaaccatgaaagcaagcaaagatttctgtacagtgcggttcagaaaagttactgagtgccttcagcccaggatctcctggttgattagggagtactaacacctaggttaagaaactctgatttcattcatcacaaatatttatcaaaccactgccaggacattgtggcaaccacatcctgctgtttttattcggagccattgccaaagcttggttctctcccccaccttccggtatctgtgaagttttcagtttctatcaaactccagctgggggagggaaccggggctggccctagtcgagtaaagttccaccaccaggtccacaaagagactgcagggaggcgtggccaggccggaaattctgacaaaaagttttggccctctggtcctaaaagcaactacttcctgatcgctcctagtcctggggtggggatgcagttctctggctgagtgccccgccggtgggctgagctgggggctgccatcgcggtggatggaggtggggggtctgatctccgcactccaaggcgctccgctagtacctggaacaggggagtctaaccccctgccttccaatggctaaagttattttggagcacagtcccctcctagggtgtgagctccggagggcagggccgcctcctccacactccctcgccccccccccccccagcaacccacggccggcgctttgaggacttgaacccggcccagaccccggggcccaggcctgctccgacccgaggaaggaaaaaggggaagccaaaggaaacttcagatggacgcggggtgcgctcgccgcggccaggggctccgctgcccccgccccaccctccgagggagcgccttccaggggccctggccggcctcccaccttgacccgcttgccctggatctccagcgtcttcatggtgaagtcgacgccgatggtgcttccctggcgctccgagaaggcgccggtcttgaagcgctgcaccacgcacgtcttgcccacgcttgcgtcgcccaccagcaccagcttgaacaggaaatcgtactgctcgtccgggtcccccgggcctgggcccggccctgccatggcctagaagaagccgaagggccggcgctctggacgctgggaccggcctgagctcacgcaagccgcgggccgagctccgcccgctccagcccacgggccgcctggctacgtggagccgccgcaacacctgaacccccagcactgccgaccgcctgcctcggcctcggccccgccccaccccggctggctcccgccccggcccggctcggccccgcccggacccggtgccccgcgggttcggctcccccccggacccgccaagccgggccctccgcaaagctccggccggtcctcagctccgtgccacaccagtctggcctgtaggcccgccccagcccgcccccgcccgcccccggctccgccctcaggctggcacccactccgcccccagcccaaccctcgggcccacctcagcccgacccgggttccgcctacgtccccgcccccgactccgccctcagctccgacctcgactccgcccccaggcccacctcagcgcgccccgactccgacccgactctgccctcagcccgacctcgactccgcccacaggaccacctcagcccgccccgactccgccctcagcccgaactcgactccgtccccagctccgacctcgactctgccttcaggcccacctcagccctccccgactccgccttcagcccgacctcgactccgccctcaggcccacctcagcacaccgccccgactccgcccacaggcccacctcagcccgccccgactccgccctcaggctcacctcagctctgactccgccccacccgactccgccctcagccccgaccccagcccgaccccgccctcagcacctcggcccctcctccatcaacaccccggcgcgcccacaccgcggatccgtctggcccccaaaccgctgcccaccccgacccttcatcagctgggacccccaggtgctgtcccgcgcctcctgctcgccccccacccaggcctggtccgcctgcccgggatcccctacctgctgcctcccagaccgccggtcagggacaggcggagaccatggctggagctccgggcctgcaggcctagactaagaatgaccccctccggaatggatcacggaggaaggggacgaccacagcagtgtcacctgagtgcccactctgacaggcgggcagtgcagtctccgagagtggtgggggtcgctcttcccaggggcggaagggaagggagggagcaggctgcagaaggccagaatccaggctggctacaaaactgcggaggagcccaaaatccttgtgaggagaggacccagggccccatttgatgggaagctaggccagaaggaggagctgggagctcttgtctccaaaaggcagcctagcagtggttgaagcagctgctaaacggctggatgacccagctcagagcagctacaggcccatttgggaaactgacccagccaaaaagcaccagtctaggaagaggaacagaaaaacttgaagggatttctgaggaagggcagaccaactcctgagttggcccagtgaaccagggcgcctcagagaaaggagacccaaacatctgtaagaagcttatactagatccaacaggactgggcttcccagctccgaagatgggaaggaattgacagcaccccttacccctctagacagcttccttgtggcactccaattccaggtattcaacatatttaatgaatggctactacaggcgggcattgtcctggggccttgtaatgcacctgtggacaaagcagacaaaaatccaggagaaaaggggaaagtcttcaagctgaaggagacttcgcagagagcaagtcccccagtgccactgtgaggaccccagccaacctttcaggtcaagatagaaagggactgaatgagcagtctgcaaaggcagaccccgtggagaaggcagaagagttgtttcttctgaaagtttgaactccactcccatgggaaatacccaacagaatcagacaggaaaccccaaagtgccactgaaaagcaattgagagccccactttggtacacctgatgggagcggagagttagagaggcaggaaataacctccactccagggtagaagtagacaggagatgggatggaaggtttctgcatgctgggactagctcaggtcaaagtccagaactccagaaaacaaggcctgcccccagctcagagcagctaccacagcacaaaatggtgtggaatccaggagccaggatgaagcgtaggggtagacggtggttggatagctaactggcctttccactgctctagcctggaactggttgggctggggcaggggacatgttggtctgagtatagattttgtcagaaaacccaggcaccactcccttgcctttgcggggtgattctaaaattggactgtggtaagggttgcacaactcctcaagtttattaaaatcattaaaatgtaaacttacaacctgtgggttttatggtatgtaaattatacctcaataaagctgtctaatatctgcatttcctcttttggtggtaaattcctgagtagcacagtggcattttatttgaaatggaatcatgctaatttgaaatgcagcaattaaaaaatatttatgtttcatttaatacaccaaatttgaaaaaatgtatattgcacttttttttt

SEQ ID NO: 316190 - DNA, 4001 bp, Homo sapiens
caaagctgccttctgcaccttgctcttttccatccacggagaccaaaacacagaccccagaagacgattaaaatataataataataaaacccctcaggcaggagtttctgcttccccgtcacatctactgagaggcactgtggacacataaagactgttgacttacttttttctccaccttggggcaggagggaggcaacacccagaaattatcccaattttatagaaacaaagacaaagagctacatatcctagccaaaggcaacaaggagcaggcctagagccacccggagaggcagagcccagcagcagcaaggctccagtgactcccatctccctggcagagatcgtcccagccctgtgccctgagggtgtcctgaagatcatgggggctcgaaaccatgaaagcaagcaaagatttctgtacagtgcggttcagaaaagttactgagtgccttcagcccaggatctcctggttgattagggagtactaacacctaggttaagaaactctgatttcattcatcacaaatatttatcaaaccactgccaggacattgtggcaaccacatcctgctgtttttattcggagccattgccaaagcttggttctctcccccaccttccggtatctgtgaagttttcagtttctatcaaactccagctgggggagggaaccggggctggccctagtcgagtaaagttccaccaccaggtccacaaagagactgcagggaggcgtggccaggccggaaattctgacaaaaagttttggccctctggtcctaaaagcaactacttcctgatcgctcctagtcctggggtggggatgcagttctctggctgagtgccccgccggtgggctgagctgggggctgccatcgcggtggatggaggtggggggtctgatctccgcactccaaggcgctccgctagtacctggaacaggggagtctaaccccctgccttccaatggctaaagttattttggagcacagtcccctcctagggtgtgagctccggagggcagggccgcctcctccacactccctcgccccccccccccccagcaacccacggccggcgctttgaggacttgaacccggcccagaccccggggcccaggcctgctccgacccgaggaaggaaaaaggggaagccaaaggaaacttcagatggacgcggggtgcgctcgccgcggccaggggctccgctgcccccgccccaccctccgagggagcgccttccaggggccctggccggcctcccaccttgacccgcttgccctggatctccagcgtcttcatggtgaagtcgacgccgatggtgcttccctggcgctccgagaaggcgccggtcttgaagcgctgcaccacgcacgtcttgcccacgcttgcgtcgcccaccagcaccagcttgaacaggaaatcgtactgctcgtccgggtcccccgggcctgggcccggccctgccatggcctagaagaagccgaagggccggcgctctggacgctgggaccggcctgagctcacgcaagccgcgggccgagctccgcccgctccagcccacgggccgcctggctacgtggagccgccgcaacacctgaacccccagcactgccgaccgcctgcctcggcctcggccccgccccaccccggctggctcccgccccggcccggctcggccccgcccggacccggtgccccgcgggttcggctcccccccggacccgccaagccgggccctccgcaaagctccggccggtcctcagctccgtgccacaccagtctggcctgtaggcccgccccagcccgcccccgcccgcccccggctccgccctcaggctggcacccactccgcccccagcccaaccctcgggcccacctcagcccgacccgggttccgcctacgtccccgcccccgactccgccctcagctccgacctcgactccgcccccaggcccacctcagcgcgccccgactccgacccgactctgccctcagcccgacctcgactccgcccacaggaccacctcagcccgccccgactccgccctcagcccgaactcgactccgtccccagctccgacctcgactctgccttcaggcccacctcagccctccccgactccgccttcagcccgacctcgactccgccctcaggcccacctcagcacaccgccccgactccgcccacaggcccacctcagcccgccccgactccgccctcaggctcacctcagctctgactccgccccacccgactccgccctcagccccgaccccagcccgaccccgccctcagcacctcggcccctcctccatcaacaccccggcgcgcccacaccgcggatccgtctggcccccaaaccgctgcccaccccgacccttcatcagctgggacccccaggtgctgtcccgcgcctcctgctcgccccccacccaggcctggtccgcctgcccgggatcccctacctgctgcctcccagaccgccggtcagggacaggcggagaccatggctggagctccgggcctgcaggcctagactaagaatgaccccctccggaatggatcacggaggaaggggacgaccacagcagtgtcacctgagtgcccactctgacaggcgggcagtgcagtctccgagagtggtgggggtcgctcttcccaggggcggaagggaagggagggagcaggctgcagaaggccagaatccaggctggctacaaaactgcggaggagcccaaaatccttgtgaggagaggacccagggccccatttgatgggaagctaggccagaaggaggagctgggagctcttgtctccaaaaggcagcctagcagtggttgaagcagctgctaaacggctggatgacccagctcagagcagctacaggcccatttgggaaactgacccagccaaaaagcaccagtctaggaagaggaacagaaaaacttgaagggatttctgaggaagggcagaccaactcctgagttggcccagtgaaccagggcgcctcagagaaaggagacccaaacatctgtaagaagcttatactagatccaacaggactgggcttcccagctccgaagatgggaaggaattgacagcaccccttacccctctagacagcttccttgtggcactccaattccaggtattcaacatatttaatgaatggctactacaggcgggcattgtcctggggccttgtaatgcacctgtggacaaagcagacaaaaatccaggagaaaaggggaaagtcttcaagctgaaggagacttcgcagagagcaagtcccccagtgccactgtgaggaccccagccaacctttcaggtcaagatagaaagggactgaatgagcagtctgcaaaggcagaccccgtggagaaggcagaagagttgtttcttctgaaagtttgaactccactcccatgggaaatacccaacagaatcagacaggaaaccccaaagtgccactgaaaagcaattgagagccccactttggtacacctgatgggagcggagagttagagaggcaggaaataacctccactccagggtagaagtagacaggagatgggatggaaggtttctgcatgctgggactagctcaggtcaaagtccagaactccagaaaacaaggcctgcccccagctcagagcagctaccacagcacaaaatggtgtggaatccaggagccaggatgaagcgtaggggtagacggtggttggatagctaactggcctttccactgctctagcctggaactggttgggctggggcaggggacatgttggtctgagtatagattttgtcagaaaacccaggcaccactcccttgcctttgcggggtgattctaaaattggactgtggtaagggttgcacaactcctcaagtttattaaaatcattaaaatgtaaacttacaacctgtgggttttatggtatgtaaattatacctcaataaagctgtctaatatctgcatttcctcttttg

SEQ ID NO: 316191 - DNA, 4001 bp, Homo sapiens
ggcatcatcactgggcacactcaataacggacactccacccactccagcccttccctggctacctgctccaaaagggtggtcccgagtgactcaaagctgccttctgcaccttgctcttttccatccacggagaccaaaacacagaccccagaagacgattaaaatataataataataaaacccctcaggcaggagtttctgcttccccgtcacatctactgagaggcactgtggacacataaagactgttgacttacttttttctccaccttggggcaggagggaggcaacacccagaaattatcccaattttatagaaacaaagacaaagagctacatatcctagccaaaggcaacaaggagcaggcctagagccacccggagaggcagagcccagcagcagcaaggctccagtgactcccatctccctggcagagatcgtcccagccctgtgccctgagggtgtcctgaagatcatgggggctcgaaaccatgaaagcaagcaaagatttctgtacagtgcggttcagaaaagttactgagtgccttcagcccaggatctcctggttgattagggagtactaacacctaggttaagaaactctgatttcattcatcacaaatatttatcaaaccactgccaggacattgtggcaaccacatcctgctgtttttattcggagccattgccaaagcttggttctctcccccaccttccggtatctgtgaagttttcagtttctatcaaactccagctgggggagggaaccggggctggccctagtcgagtaaagttccaccaccaggtccacaaagagactgcagggaggcgtggccaggccggaaattctgacaaaaagttttggccctctggtcctaaaagcaactacttcctgatcgctcctagtcctggggtggggatgcagttctctggctgagtgccccgccggtgggctgagctgggggctgccatcgcggtggatggaggtggggggtctgatctccgcactccaaggcgctccgctagtacctggaacaggggagtctaaccccctgccttccaatggctaaagttattttggagcacagtcccctcctagggtgtgagctccggagggcagggccgcctcctccacactccctcgccccccccccccccagcaacccacggccggcgctttgaggacttgaacccggcccagaccccggggcccaggcctgctccgacccgaggaaggaaaaaggggaagccaaaggaaacttcagatggacgcggggtgcgctcgccgcggccaggggctccgctgcccccgccccaccctccgagggagcgccttccaggggccctggccggcctcccaccttgacccgcttgccctggatctccagcgtcttcatggtgaagtcgacgccgatggtgcttccctggcgctccgagaaggcgccggtcttgaagcgctgcaccacgcacgtcttgcccacgcttgcgtcgcccaccagcaccagcttgaacaggaaatcgtactgctcgtccgggtcccccgggcctgggcccggccctgccatggcctagaagaagccgaagggccggcgctctggacgctgggaccggcctgagctcacgcaagccgcgggccgagctccgcccgctccagcccacgggccgcctggctacgtggagccgccgcaacacctgaacccccagcactgccgaccgcctgcctcggcctcggccccgccccaccccggctggctcccgccccggcccggctcggccccgcccggacccggtgccccgcgggttcggctcccccccggacccgccaagccgggccctccgcaaagctccggccggtcctcagctccgtgccacaccagtctggcctgtaggcccgccccagcccgcccccgcccgcccccggctccgccctcaggctggcacccactccgcccccagcccaaccctcgggcccacctcagcccgacccgggttccgcctacgtccccgcccccgactccgccctcagctccgacctcgactccgcccccaggcccacctcagcgcgccccgactccgacccgactctgccctcagcccgacctcgactccgcccacaggaccacctcagcccgccccgactccgccctcagcccgaactcgactccgtccccagctccgacctcgactctgccttcaggcccacctcagccctccccgactccgccttcagcccgacctcgactccgccctcaggcccacctcagcacaccgccccgactccgcccacaggcccacctcagcccgccccgactccgccctcaggctcacctcagctctgactccgccccacccgactccgccctcagccccgaccccagcccgaccccgccctcagcacctcggcccctcctccatcaacaccccggcgcgcccacaccgcggatccgtctggcccccaaaccgctgcccaccccgacccttcatcagctgggacccccaggtgctgtcccgcgcctcctgctcgccccccacccaggcctggtccgcctgcccgggatcccctacctgctgcctcccagaccgccggtcagggacaggcggagaccatggctggagctccgggcctgcaggcctagactaagaatgaccccctccggaatggatcacggaggaaggggacgaccacagcagtgtcacctgagtgcccactctgacaggcgggcagtgcagtctccgagagtggtgggggtcgctcttcccaggggcggaagggaagggagggagcaggctgcagaaggccagaatccaggctggctacaaaactgcggaggagcccaaaatccttgtgaggagaggacccagggccccatttgatgggaagctaggccagaaggaggagctgggagctcttgtctccaaaaggcagcctagcagtggttgaagcagctgctaaacggctggatgacccagctcagagcagctacaggcccatttgggaaactgacccagccaaaaagcaccagtctaggaagaggaacagaaaaacttgaagggatttctgaggaagggcagaccaactcctgagttggcccagtgaaccagggcgcctcagagaaaggagacccaaacatctgtaagaagcttatactagatccaacaggactgggcttcccagctccgaagatgggaaggaattgacagcaccccttacccctctagacagcttccttgtggcactccaattccaggtattcaacatatttaatgaatggctactacaggcgggcattgtcctggggccttgtaatgcacctgtggacaaagcagacaaaaatccaggagaaaaggggaaagtcttcaagctgaaggagacttcgcagagagcaagtcccccagtgccactgtgaggaccccagccaacctttcaggtcaagatagaaagggactgaatgagcagtctgcaaaggcagaccccgtggagaaggcagaagagttgtttcttctgaaagtttgaactccactcccatgggaaatacccaacagaatcagacaggaaaccccaaagtgccactgaaaagcaattgagagccccactttggtacacctgatgggagcggagagttagagaggcaggaaataacctccactccagggtagaagtagacaggagatgggatggaaggtttctgcatgctgggactagctcaggtcaaagtccagaactccagaaaacaaggcctgcccccagctcagagcagctaccacagcacaaaatggtgtggaatccaggagccaggatgaagcgtaggggtagacggtggttggatagctaactggcctttccactgctctagcctggaactggttgggctggggcaggggacatgttggtctgagtatagattttgtcagaaaacccaggcaccactcccttgcctttgcggggtgattctaaaattggactgtggtaagggttgcacaactcctcaagtttattaa

SEQ ID NO: 316192 - DNA, 4001 bp, Homo sapiens
ctgaccaccgtcagcactgggccaccacagacactccagacacagaccgatagcacatgaggaggacaccactgctctttagcctgtattttcacactcccatttccctgcagctgctggcatcatcactgggcacactcaataacggacactccacccactccagcccttccctggctacctgctccaaaagggtggtcccgagtgactcaaagctgccttctgcaccttgctcttttccatccacggagaccaaaacacagaccccagaagacgattaaaatataataataataaaacccctcaggcaggagtttctgcttccccgtcacatctactgagaggcactgtggacacataaagactgttgacttacttttttctccaccttggggcaggagggaggcaacacccagaaattatcccaattttatagaaacaaagacaaagagctacatatcctagccaaaggcaacaaggagcaggcctagagccacccggagaggcagagcccagcagcagcaaggctccagtgactcccatctccctggcagagatcgtcccagccctgtgccctgagggtgtcctgaagatcatgggggctcgaaaccatgaaagcaagcaaagatttctgtacagtgcggttcagaaaagttactgagtgccttcagcccaggatctcctggttgattagggagtactaacacctaggttaagaaactctgatttcattcatcacaaatatttatcaaaccactgccaggacattgtggcaaccacatcctgctgtttttattcggagccattgccaaagcttggttctctcccccaccttccggtatctgtgaagttttcagtttctatcaaactccagctgggggagggaaccggggctggccctagtcgagtaaagttccaccaccaggtccacaaagagactgcagggaggcgtggccaggccggaaattctgacaaaaagttttggccctctggtcctaaaagcaactacttcctgatcgctcctagtcctggggtggggatgcagttctctggctgagtgccccgccggtgggctgagctgggggctgccatcgcggtggatggaggtggggggtctgatctccgcactccaaggcgctccgctagtacctggaacaggggagtctaaccccctgccttccaatggctaaagttattttggagcacagtcccctcctagggtgtgagctccggagggcagggccgcctcctccacactccctcgccccccccccccccagcaacccacggccggcgctttgaggacttgaacccggcccagaccccggggcccaggcctgctccgacccgaggaaggaaaaaggggaagccaaaggaaacttcagatggacgcggggtgcgctcgccgcggccaggggctccgctgcccccgccccaccctccgagggagcgccttccaggggccctggccggcctcccaccttgacccgcttgccctggatctccagcgtcttcatggtgaagtcgacgccgatggtgcttccctggcgctccgagaaggcgccggtcttgaagcgctgcaccacgcacgtcttgcccacgcttgcgtcgcccaccagcaccagcttgaacaggaaatcgtactgctcgtccgggtcccccgggcctgggcccggccctgccatggcctagaagaagccgaagggccggcgctctggacgctgggaccggcctgagctcacgcaagccgcgggccgagctccgcccgctccagcccacgggccgcctggctacgtggagccgccgcaacacctgaacccccagcactgccgaccgcctgcctcggcctcggccccgccccaccccggctggctcccgccccggcccggctcggccccgcccggacccggtgccccgcgggttcggctcccccccggacccgccaagccgggccctccgcaaagctccggccggtcctcagctccgtgccacaccagtctggcctgtaggcccgccccagcccgcccccgcccgcccccggctccgccctcaggctggcacccactccgcccccagcccaaccctcgggcccacctcagcccgacccgggttccgcctacgtccccgcccccgactccgccctcagctccgacctcgactccgcccccaggcccacctcagcgcgccccgactccgacccgactctgccctcagcccgacctcgactccgcccacaggaccacctcagcccgccccgactccgccctcagcccgaactcgactccgtccccagctccgacctcgactctgccttcaggcccacctcagccctccccgactccgccttcagcccgacctcgactccgccctcaggcccacctcagcacaccgccccgactccgcccacaggcccacctcagcccgccccgactccgccctcaggctcacctcagctctgactccgccccacccgactccgccctcagccccgaccccagcccgaccccgccctcagcacctcggcccctcctccatcaacaccccggcgcgcccacaccgcggatccgtctggcccccaaaccgctgcccaccccgacccttcatcagctgggacccccaggtgctgtcccgcgcctcctgctcgccccccacccaggcctggtccgcctgcccgggatcccctacctgctgcctcccagaccgccggtcagggacaggcggagaccatggctggagctccgggcctgcaggcctagactaagaatgaccccctccggaatggatcacggaggaaggggacgaccacagcagtgtcacctgagtgcccactctgacaggcgggcagtgcagtctccgagagtggtgggggtcgctcttcccaggggcggaagggaagggagggagcaggctgcagaaggccagaatccaggctggctacaaaactgcggaggagcccaaaatccttgtgaggagaggacccagggccccatttgatgggaagctaggccagaaggaggagctgggagctcttgtctccaaaaggcagcctagcagtggttgaagcagctgctaaacggctggatgacccagctcagagcagctacaggcccatttgggaaactgacccagccaaaaagcaccagtctaggaagaggaacagaaaaacttgaagggatttctgaggaagggcagaccaactcctgagttggcccagtgaaccagggcgcctcagagaaaggagacccaaacatctgtaagaagcttatactagatccaacaggactgggcttcccagctccgaagatgggaaggaattgacagcaccccttacccctctagacagcttccttgtggcactccaattccaggtattcaacatatttaatgaatggctactacaggcgggcattgtcctggggccttgtaatgcacctgtggacaaagcagacaaaaatccaggagaaaaggggaaagtcttcaagctgaaggagacttcgcagagagcaagtcccccagtgccactgtgaggaccccagccaacctttcaggtcaagatagaaagggactgaatgagcagtctgcaaaggcagaccccgtggagaaggcagaagagttgtttcttctgaaagtttgaactccactcccatgggaaatacccaacagaatcagacaggaaaccccaaagtgccactgaaaagcaattgagagccccactttggtacacctgatgggagcggagagttagagaggcaggaaataacctccactccagggtagaagtagacaggagatgggatggaaggtttctgcatgctgggactagctcaggtcaaagtccagaactccagaaaacaaggcctgcccccagctcagagcagctaccacagcacaaaatggtgtggaatccaggagccaggatgaagcgtaggggtagacggtggttggatagctaactggcctttccactgctctagcctggaactggttgggctggggcaggg

SEQ ID NO: 316193 - DNA, 4001 bp, Homo sapiens
atttccaagtttctattcccataatatctaacttgcatagctgatgtgacaattaaataaaacaatacatgtaaacaatctctaatatacatagtagggattgaaattgccaataatgtgctcctttgataagaaaatgataaaatatcaatagaacatcatatatactgaaaatgcaccaatacatcttcagatattacacacaatcaaaacattttccatttgtctttttatttaagaaaacaagaaattacttatcaaggacaatatgctccaaatttctacggcacttccaaaattttagggaaaatatcagactcccattaaaaaaaaaaatcaaacaagattctgatttcactttgacttttaaggtttaaagctacttaattgtggctactccccctaaggatctcaaacaggaaataactaaagttaatggtaaatatacacttagcataacactaaggttaaaaattacgtgcattcatttgtattcactgcttactgaaacttctgttttgcaaaacaagaattttgcataatatacatttgtaatcttttgaaaataactgttattcattctatagttaaaatccttctaagggttctttgatcaaaaaattgactgggcacttattttgtgccaggcactgttccatttactttgtttatacaaatgctgagttatcacttccattttactttaggaataaagtttatgagcagtcttgagtattcccagaggtgtacaagtgtttttttcttattatgtgaaaggcaactgattgaacgctttgattccatttaagcaagacaaaaaccaagtatgtgaactatgacgttcagaacttaacaagtttgaaagtctcagaggtaagcagcttccagggaagataacgccagagcaagttccatggtctctacccagtgaaggagttcagcggtcctgttatcttgaatttatttaacgctgtagttcactaccttccaaacagaaaacaagtctctagacagcctattttgacgagcctcccacccaccgacactactcatctttggaagttgaagataggcggagctccccacattgacacctgcagtaggcccaggttcctgcttggagagcacctgagtagctaatagccaactacagatcgcctggataagcagcactcgccaggtcccttggcctttccaacctcctcccccgaacctgccttgctttgaccgagacccccaggactgccaggacggagaccaggcggaaccgcggcctccagtacactttccacggcgccatcttgagaagggaaagggtgacacccgtcgctccctcagtcagtccccaaatcccggtctccagagcccctggaggatgagtcaccagggctggcagaacaagacgccgggttcgatagttctctggtccagggcactgctgcgcgtgagggagaaggggtggggggtctcagtaccggcagggccgcggacaggctggggaccgcggataacctggggtccaggcccccgctgcgcaggaggaggggcggttcggttacctgagaccgcagcaagccgagctgcggggccgaagcttcctggcagcaaggcccaggcgtggcccgtaggatgagagtgtatctatggcggtggtggtggcggcggcggcgtcgcctgctcttagcgccgctcccctcacactggactgtgcggggctcgtgccgtggtgccgcccctgtcgggctccgtctccgcctctcgccgctcccccttcctctttcctttctcctcctccgccgccgccgccgccgccggcgctggagttccgactaattcttcctcctcctcctccctctgcctcctcccctaaggccagccgccggctccttcacgaaccaaaacacaaacactcaagtcccaccgccggagccacttccgctgcccggtgccggccccgccgccacgtcgctgcacgcagcgaactgcgccacttcgtcacttcccatcatcgccagtccgcctgctccttccgcttcctcgccccttcccgaatccctccccgcctaggtttgttcgcggggcggggcgaggcaggatgtcacgtgaccctgcgagtggctcagatccgaactggccgcctttctccccttcccccaccccaggtacgcgcggccacgccctctccagcgccattgttatttaggctggggggtctctgggctcctggcggccggggtcgggggaaattcctttactattctttgggggaagatcaaaataacttgtgtttttttgtttgttttttgtgcccagcccttgtgggagcggcgaggttccctaaccccaatcctggcatctcggctaaggggctttattagagggaacttgtctagcacgagagaacctcctcccacaaaatggccctggggttgggtaggtcggtaaaggctgctaaatcgcatttaccccaaggaggaagaaaggaccctccctatcccaaaagccgcctttaggcgcctgacaataagaagtcgcttctgttaagagtttacgtggttttggtagggggcggggaaggccaaatcctaaaatagtgtctgccttttattcagaatttcccttcgctctttactgtactaaacgctttacaggaattatcccattgaattcttacactcgagtctttcattctgaaactaacttgttaatcgtctgttccctacattcgaattttagctccccttggtggtcctcaccgctgtaaatctatgtctagcccagtgcctggcagccaagtcttcagttctagttgtagatgttttataggtaaagaatttgagacacaagagattgagtaacttgtccgagatcacggctgtgtggtgcagaagctggattctgatctgcggcgggttggctccagaacgtgagttgttgaacacaattctggtgaaagacaacccaagatgttcgttaccctccacgggggacctactgaagatgtgctgctttagttgaatcccacaccacattcagtctctggcgaggcttcagccaccaccccctccccagcctccgccaaaaaaattgttttgataatttagtggaagaatattaaattgattttccttcagaataaaggctacttttcagtttgcagtttacaatgtatagctctgttgtaagggcgagaatattgtctttgaagtgtaccgggttaaggtatcttatgggcgtacagtcggcggcattgtgcaattaagatgatttgaactttgaacagcccgtctttcagatcaactacctagttgccagaagaacgtaatgtgtcatacgtaaatgatacctgtggcattttattctcaaggagttgttcaatatgaactattaatcatggtaatagctctgggacaatcccaggaggagtcaggaaataggatatgtgacatcagttttgtcatgtcaacagtatgcccaaaacgaaacctattccactccaaacctgcttctgcttagagactggcattaacatcctcccagtcacccagacttggaactgcagaatcagcttcacctctttcttctcctcacaaaccattgtccattctatcaacaaattatctaatccccaaatttgaagtctaatcccaacacctggtccatggtagtgtttatataaactgaaattaatgcatactgctgttctttctgtccattctttacattttagccactctactaaaaaatgttcaatgctatgtcattacttgacagtctaaagttctttaactctagtcccaacccaagtttctttcattctatttctatagaattcctctccccatactctttatttgttccctgatcacacgtatctggtctgtgttccctgaatattgcctgtgtgttgccatcttggtatctgatcactttattttctccacatggaacactatcattgcccataactgctggctccgtcttagccaggacaccagttc

SEQ ID NO: 316194 - DNA, 4001 bp, Homo sapiens
tccagacacagggtatggtcagctctatgaaactgggatctattaaaaacaggcaatcagaatccagggcaaacgctggctggctgagtggatcttcttctgaaatgcccagcctgtcccccaaacccatctccatactgggcctggacactaccttctaacgtccttctctgaaccatccatcttaggcaatgagtatcagcagacaagagccagccacgtgacctccataaccctcatgtacacacagcacagtagcactgttcctgggcccacccagtcctcccacagctgcctttcttttgggcccccttgtcagagaggcaccaacccaggtgaacaggactggtctgcagaggcagagctggggtcctgtcccgcaaggacagccttctcccagagcagagctgaccagagctcagtttgtctccctgcagccccatgcgagaggcctctggagggatgctctgaaagccactccttcctacaggtggcagaggggtccctgcccttcaatctgggcttcccgcctctagggactaacctggttttcagagatgttttcctggggagggagccgggcagcggagaagcagtctccccctcccccagctctggccgactgccagggtgacctcccctcccccaagaagggcggtgagctgggaggtgggggtgggaagaatccaccgatgctctctggaggagtgctgggaagctaggcagggcgtgtcgcctgggcctttctctgcccagagccagacttcacagcctctcggtgtgaggtgcccctgtatcattccccaaatcgcctcgagttggggtagccctcactgcaattgcccagatccctgggcagcaaggagactaacaagcgccggcgaagggcagcgggtctagaaccttctgtgcccagtcggacgtgagccaggggaggtaggctccccgttcccccatggcctgcactcgctctttcgagcagagacaggtgtcgctcttttctccccggtggctgtttgtcccacgccctggacgtgccctttcgcatggttcccagcagggtccgcagggaacacccctccagtgcagcggagtgaggcccggccagaccccagcttcgcttcgttctccaaggggggcgcccgtcgctctccccacccccgccagcacccagccacctgcgcggtcgcccgcagccggtgccgcagtgtgagctagccagcgagcccggttccttcacgccctggccagcgccgcggagccagccgccgccctccgggccccctgcagcgccgcacctgcacccacaccccgggccccccacccagagcccaccctcacctccaccccaggctccagcgcctcctccgtcctcacccttggcccctccccagcccgaccccgccccgacctccccatccctgtccctctcctctaccctggcaaggaggggcctttccgagcctgggccgggggtcccaatggggtgggcgattgggcggcgggggtcgactcggcgacaagccaagagattaagccgggtacttaccgctctgctcccccaagaacaccaacttgaattttctcagtggattcccaaaatctccccctgcggacatggtgctggcagccggggccgggagaggaggaggaggaaaaagcgaaggagcagggaggggagagtaggagggcgaggggaggcggccggcggtgcgggagccggagggggaagggctggctgcgcgcgtccctgactccccagctgcgtcccggtcccggcctgcggctgcgtgtccggcggcggaggaggaggaggagagagaggcggaggcggaggaaggctggggctgggctgctgcggtcggcactggctgcggtgcgaggggcgcgctctttacgcccgaggcgcggcgctgggagagaggcgcgggcggagcggggcgcagggacggcgcgcggggcggaggagcgctctccagagccgcgccagtcggccccctcccgcctgcctcctccgccggcgcctgcgctctgtgcgctccccagcctctgatgtcatgcggggcccgcggggctgcggggctggggggcgtgcgcccgcccacccgagcccgcacccgggcaggagagaacctcctcgccgtacccctgagagccccccgggggggaccgtgtctcgctgccccgctgcgtctgtcttccccactctacccctcttttgaatccagaaaatgacagaaattgtcaggggacatttgtttctggtcttttaaacctagatgccagtcccttcctccacctcgcgagacaccgatgcacagcgcagtcgtccgaccgacagggcggaaaggaacgaaggtgggggagagccagggtgtggcgaggcccgtcagggcggtcagacctagggaaacctggcgtacttggcgcagatggggctcgactcttgccccccgtggcttctagcccgcccttccctctcgaggcctagaccctttatttgggcggcctcttgtggagtctgtgggtgcccccgcagacctggccagcgagagaggagctgccaatatcaggcgcgcctacctcaaaccagctgctcatttggatcattttatgccaaatcctaacctgccccatgggagagaaggaacggtgacgctctgaatgccagtgccactatctccaggacagtgccctgcgtttcttgatcccggggtcgccaggctgacaatgccactccccaccctggcaattaggtgtatctggacaatgagctatctgaggacatgtgggcgacctctccttggcctctacttgcctggtccatcgaggcacacagaccaagttgtgagtgagtgagagcaaagagcagacgccaagtgctagaaacactcccaagacagcccgagcctaaggcatgctggttaattgaggttttacaaagctgtcccttactgttctgccacagcgtggtcttgttcatttatggctgttcagtgagcatttatttgagataataatctgcatgtcggtgaacacgatggtgtgtgcacgcatgtgttatagaaagagaaagaggagtgagacacaaccttcacctccagatttctcgtggacacttgttaccccctttttgacttatggggcttgcttgggcaagcctatctgtctccctggtgtgctcacctcgaatctctttcctatttcttgttagaaacctgaccacaagttccataaaagcagtagttgaagctccaccactgcatcccaaggacatagctcagagtttaagaaatagttgttgaatgtttgaatgaacatctagaactcaaatcaaaataactgtcctattctcataattacctttagtttggaaccccagggattgtaagtcatcacctagaatatctgccccgttgtggctggcaccaggctcagggtaaccctccagacacccacccacttctctggggctcctgctctcttaggagaccatatccagcttggggttgaagaaagctctgaaaggagaggagactcccaagtcacagcccttcccgtctctataagtgatccctccaaagaagggccagtgagctactggccaaggtacccagccatgcaacactcctccaacctgcaccttctcctaacatctagtgctgtctccctgtaccctctcatcctgacctgatgagatcatcggtggcaagacaaaacagctgaggtgtgccagaaaaggcaccatcttttgggtaagcctaggcaggtcctgtacctcctctgatcatctggtcccgcacatgtaaggtggtatggcagtaggggagggagggctggggcagggcccctctgggcacctctaagcctccaagtcatcccatatgcttaccaggtccagctgggctgactatggtccagcttactttgggggactctgtcataattcttccagttcaaatgacaaaaacccggctccgactaccgggctcacgtcgctg

SEQ ID NO: 316195 - DNA, 4001 bp, Homo sapiens
ccctgagtcaatgtcccacaatgcctgatacattgctgatactcaatggatactcaaaatacttaatgaatgaataaaaaggtgcctatcattactctaaactcaaacattatataaagccacagtacttattactcacttaaatattttaggctaggtagcaaagttaaaaaaaaaaaagacaaatatgaatacaacaggattgtgaacgctaagctttaacttagccggtcccttcttcagaagaagtactcctaactcaccttccagtccttaaactcaaatctgaacaaaccttcccaagtttgaagagagaaacacactaagaggagactttattcatccatggatgagaaatcatgtgcttcatcagctgcttaagtcacaagaaagagacaagagtccgttctttaggaaaccaaagatgcagtattttgaatagggaagaaccagccggctggacagccatcaactaaggttgtaagaaaggttcactaggcaggtttgccaggcctacctgcaaaatttttcaaacctcagttaagtaccctgccggtattcaagagctcctaattcggtgacactacaccacaatatgtgtgataagtcgcaaacggcatttcttatggctttaagggagaactgatgctaccagaaagactttcaaatgacatcaatagaaagaaaggaggtggtgggaggcactgaggtacagataccaggtagcaaaagataaaccagcaagcttcaggggtacgtgaaagcagtacaacctagaaatttaatacagtgctctggagtctgactgcctgggcttgcatctctgcttcgtaacttattagctgtgtgaccttggccaaatggcttagcctctctgttcaacttcccactgtgttaagtgggcacaacagtggtacttcagagggttgttcaaagaactaaacataatgatctgttaaaaggtcttgccacgctgcctagcatacaataaacgctcaaatatttgctgtcaatattctcaatattccccttatgaccccattaggtatcaagcctaaaatgaatgcagaaagaggccccaaacacggtcggaatggaaacacaactctacatccaactaccatctttcctcgattaagttgaaaaacttctctcaggatttaccgtaacatgcctaggacaaaaagctccctgtctcccagcgccagaggcgcctcaatgtacacaagtgtcgaggcgagcccagcgcacgtgacctgactcactgccttgactcagttgccgtcagggaactcccactaacagggtcaggctgttcaactgaagaaccggatgggaacgcggctcggcccccagcgcctgtgacccatgcccgccgggtgggcacggcggcgggcggcgtgggctctgacaccctcctgctcgccgcgctaaggaactccactggccagcgcgtcctgccgcggcgcagggccgcccaagtcaaggaaccctctcgggtctctgagatccaggccaacagtaaacagagcgtccgagacgggtggccggggcgggcaacccggccagaggtcacgcccgacgacctccgacctctccaagccgggtggggtcttggcctgctccgggggcctgagcgatgccgggtgtgcccgcgtggccagggctgggactggagcctgcccaggaggacagggaggacgcgaggccctggcgaccgaggggctgaggggggggatggggccaggccgccggccgggctgggcccgctgcttaccgcggccgctgcgctgggggctccgggccgggcgcgtcgcgagggctcccgccgaggaggagactaaacggaggacagaagcgagaaggtccaagttctggttccagggaactctcccgagctctccaagccgccaactccgccgctgccgccgcctcaggctttatggccaagactccaggcccgctcccacttccgccaccgccgccgccccgagcggaagtacctgtcacgagacgctcgacgccagggtgcgggggaggagccccgcctcaaccttgcgtcacgttccggctgcctcgggactgagcctggatctcgtgctacaaacatgtctgcccccaaatggttgtccccatctttgaggctcatacaaggagcaggacggcgccatgttggacccacagacagattccctcagccatccctccttactccagaataaataatgccaccgaagaggggacaaggggtaaactggccattccagttgtgtccttcttcgaaaggcatcatttatccttactttaattacttaaccaaaaattattatcaccattttacaaataaggaactgagactcagtatatcatgtcacttggtctagctcaacacagaaactggtggagcgaggttttgaaccaagatctgtctgatgccaatatgtgttatcgttctagtagactgcaaatgactacagcaattgtgtggctcggtgatagagacaggagaaataggcactttgtctggcagaggagacagcccaagaaaatggaaaatgagctaaagcctctctgaacttagtattagagaagatgtgataaagatggaccgggtagaactcttcttgtaagcacagagcagcctcccaagcaccagccccatccgaacacatcaggatccactcagaatttttgcctccatcttcaacaatgccctctcatagtcttttcttattttggttcatgcaagctccattctttcaattgttccatccaaaaaccttgcaattgttacagtaagtagtcagacctgagcagggcaggagaggggccactccccgaccagcaatgtgaggcaaccatgacgtggttgtcaggttaagctgtctctctaaaataataattggttgcagccagaccagagaaaggcagtctcccaatagataaaaacacctaaaactggtgatcagcagcttcccgataagatctcaggagttgaggggtctggggaaaaaaaaaatctcaaaagctaggcaagcagtctcaaccctgagatggtacaatgtctggggtttcccctactttttcaaccaaaattggctctttccccaaaaccctcaccacctattctcctgttttctctatgtgtattctgaaatggccttgcacactgcagaaccatccgcctctggggtaagtccactctttctctgctttcactttgcatgtgcccaggagttcaagaccagcttgggcaacataacaagactgtctcttccaaaagataaacaaaaaagaaaagagaaggcacacatctacatcagacctctgcagttgtacttctctctacctggaaagctcttcctccaggtatctgcttggccactccctcactttcctctggtcttgactttaaagtaaccttttcagtgaaatagccttccctatttaaaactgaagtccctctccctgtcaccacaatacaaacacaaaaattgacatctccctactgcttttctcctctgttttttcttttttattttctttttcttttttttttttttgagaaaagttcttgctctgttgcccatgctggagtgcagtggcataatcagggcttactgcagccttgaacttctgggctcaagtgatcctcctgtctcagcctcctgagtagctgagaccacaggcgtgcaccactatggctggctaattttttttttttttttgtaaagagaagttttcactatgttacccaggcagtcttgaactcctggtgtcaagtaatggtgtcaagtaatcctcccgactcagcctcccaaagtttttcctcttatactactcacttatttgcatattgtctgtcttccccactagaatggcagctccacaaggcagctatttttgtctgtctcattcactgcgatatccctgattcttgaaacagtgttggggtacagtaggtgctcaatgtgtacaatttgcagagtattcaggggaat

SEQ ID NO: 316196 - DNA, 4001 bp, Homo sapiens
aggctagagccaccttgtctggctaagtcatttctttatatatttgtgaaaccctcaaaattttataagggaaatggcctttatttaaaaataaactttcgggtttgaaagaaaggctgaggaagtgtaaaaagtgcattctaaactgtcagactgtgtacttttaaatcgcagttaaaaggagactgacaaaattaccttttaaaaagataaaaagacaataactaactttgcacataaaggttaacattagtgaatgtgtgacaacatcaatcactttcctggccatcacagctgtgtcttctgctttacaactaaaccataacaggggaggcgggcagtagggaagcttatcaattgcctgattacttttccacatttaatgtagctgctaattctatccctgttatatgacgcattaattccacagttataaccccagaacctaatacagtgcctgttggaaagaaaataaattgactagttgcaacagtttgtaatatgaagggattgttagatacaatagaaaatggaattataaaggacacaaaacacccacttaacgtatcatgaagaagtctgttagttctggattgtaaattctactcagtgatactcttgccaagtccctttaggccacaattactttatctgtaaaactgagtgattttattaaattaacttcggcaccacttcaagctacctgatagaaatgaagtcgacataaattgtgattatgttcattaagtttcaaaaggcaactttcttaggggaatattaaataatgctctctgtaaaatatttcataatgcaaataatcctcagggcaatgtgaaaacattcttaacctatatttgctgcccacaattttatttagtttctattaagttttcaagcctctccacctccaagcatctagcacaacgtctttgctcacaacacatgctcttaggccaactccagaggagcgcttctataaaatgcaaggtcagcatttattgaagttactaaggagagctgaattggggattatggaagaaaagataagggcagtgaggtgggagctggaaatccagacgccagctgtagttctcaaatgtcccaggtgtcaaaagaattctttttgcatccactgagattaaaaaaatatatatatatttaacactaggattaaattgggctcagcgttaaatcctagctgcttcagaataaaactcttactttaatttctctattgtacagtctaggacataataggttttcaatgaagatcaaacgagaaccaggaaattaagctcagttaagaataaaacaggaccactacccaatatgtcactgcataattataacttagcgtttaagttcgtggactccgcgttcaaaaggattctgtcatttacatctctctgcctcactactctcatctgtaaaatgggataacaggactgtctcagaattaaatgagttaatacatgcgaagcgcttgccagtgcacgtttctcagtgcacgtttctcagtgcacgtttgacttccttaatgaacaaaatctcttgaaggcacggtcctactaacttctgtacccttaacatagaaccccatacaatactcaatgcctgctttttttttttttttttttaataaaagaattgacaatacactctaggctggggtcgcctgggagaccgatgcggaaagccgcgaaggcaaaagacccgggctccgcgacccccacccgcgcgacgacgccgccgccaccgcgtcgtcacacggagcaaagtcccctgggaagtgtagtcttcaggccctgggagggacttcagccacgggccgaggagccaggaagttgagggaaggaagctaaggggagggttactgggtaactcaaaagtgtctggagccccagaggtagggtaagccgctcacctgagtctcccaacaccagtaccttcacccgatccagggacgccatcttgccactgccttccctgggttaacgcctgttcctggattgtaagccaatcagagttgggcatggagggcagagccttcaatttcattggccactcggagcgtgactgtcttgatcgaaggtttcactgaactcattggctggtctggtaaaaggtagcggggtgcttccccagctggtcgcaggaatagtgcgttttctttgtcgcgcaaggggcgtggttcatttaagccggtagttgaagcgctgggggcagctgtagtgggagtgttccaggattcgccttggtaaaccttgttccctgttccttgttcggagttccctggccgggcattgcatttcatgatttcttcttcctttcgctccctcttaactatcctcccctaatgaattaccctgttgccttggtcctcttggtcctccaaagaaccattgaccccggagcggcccgtgtgcgacctcgggtagggcgggcttggctgcgccgagtgtggccctggacccaactgggagagtccgagggagtttggggtctcggagtctcgcattggggaggagtgcatatcaccgaacgcgtctcgtggagggcagctgggtccggaggtttcgcggtagtttgccgctgtgtgtgtgaaggcgtggaaagtgccatgaaatgtggtaacacaacaccgcagttagatgtgtagaatcccaagttgttctagaactggagtggcgatttactgaagtaatctaactggtctcttcgcatccacttttcttgtttttttctccactctgcagtcagtacaatcttttaacatcctgaatttgatccacgcacctcccgcttaaaactgttttaaatttaagaagagagtgcccagtagcctgtccgattctaccttggaaacaagagtggaggaagtgaagcagggggaagctggcaagatgagccatgttggaacaaaacgtgcctaggagacatatggaaagttttatggaagtacttgtctggctatgctagatgctggaaattaattggtgaacaagatgaagtctggtcttagagatagacatggagaaagtacaagaagggggaaagagccatggaacacgtgaaaggggatgattgtatgctacttaatggggagtctgggaaggcctccatgaggaaatatcatttgagacttgaaggatgattaggagaagggggtttgggcttagctgtaggggcagaaggaacagcatgtgcaaagccttgggatgcagggaaagcacatgtggctcatggaattgagaatatgctggtgtggctggttatgaggctgacagggtagacagagggcagagggtgccttcttttcaactttgtttctctggctccgtgcctggtgcacagtagtccttaaatgttgatatgattaaaatacacgtgggtctgggctggggtagggaggtgaggctgggatctgactcatggactatggagatcaaaggaagaaacaaaggtcctaggaggtcccacgctcagaagtctccagagaccagccatactccttccctaataacgccagctgctattcggcttcagcttattgtttccatgtgggaacatgggctcactttttcctcagatatttccaattttgcaagaggagctggaagttgaaatttatgtgaactcttacaatttttaaatgttgacaactaattcagaaaatttttgaaacattctttgggtgatacaatgcgtggggggctgccagtttgagaactcttacctaagacctctagagattgagtaaggagattcagcgtgagtgggaagtgatggaggagagaaggtagtggtcaggaaggaggattttagaatgcagagattttgaacaaagtggcacagcttgatttcattcctgagctctagtttcatttgttcagctacctgctgggcatattcagaggaatatcctatggtatttcctcaaagacacttctaaaagtgatttcctcatttcttcctgctcctcgtcaggggtcacctatttc

SEQ ID NO: 316197 - DNA, 4001 bp, Homo sapiens
acttgagactccaaagtctttctgtgaatcctaagttagcaaccatggattctgagtcagacttctattcaataaaagaagtaacttcagtcagatctgcttctgggatctgatagttctttgtgcctggaagagttcaagcaaaaattaggtgagaaattggcagatgtgttataaaggagattaaaatactgaaaggggctggttttctaaccttaagattccatgattccaatgtgagcaaaaaaatacgggctcaatcaactctctggttgaacactcactgaacgctctgtggtgccaaactctacattcagtgctgtggtgagataccaaagtcagagaagacatggaacccgcctctaaagaacactgaaattgtgggaatatgtaaagtgtgcttaaatctacaaagcaggagctttacaggttacagagctcttttactttccttatccaagtcaagcttcatgacaacaaattaaaaggggaaagaagcacttaacacagtgctaataataataaaatatattcattgaatgcttactacattccagatactttcaatcaagcagcaaataatatttgagcacccacttggtgtcaggcactgcagtaagcacagtgaatacacagcagaatctgtgcccacatacatcaactaatttatttaatcaatcctatgaactgttatttttgtctctaatttatagttgaagaaattcaggctcagagaggttaagttactaaccgaaggtcatacagtcaagaggcagacaggagatttcacccaggaccactggaactcaaatctgtgctcttctccactgcatcctggtgccaagcccacaactccaaaactacagctttcctggatcatttcacaatgtcagcttctcatcatgcagatatctcaagtccccaagcactctagacgtcactgatgacagcaggaagaacaaggccttctacttactttagccttcacttaattctaaagtcaaatttatgagtcagtgggacaggtattataatccccaagtctacaaaactgagggagaagaaggctatcttagccactgtgagaaacggaaataatcacagagcaagaagaaacaccaagcaactgatctttatccagcacagcaaagtgcatctgctcttgagcaaatccagggcccaccactactgtaaatggaaactggtatgccttgccaaaacagaaagtggccacaaaaataaatgttatttaagtgaaataatcagacgcaatgcaagatcagcgctgagcctgagtcctgatctctgtttaagagacatgagcaattgttagagaagagtgaaggtgtgttagagaggagttggggcagtatgtcagaacaaacgagcactacgtttattgagaataatcagaagaaatgaaagagcctgtaaaggagactacctgcttggctacgtgattacatacatgttatctgataaagtgtccacccaaaatcatgtccggtgtcactgtttagtgcttgacacaaagtaagctttcagtaaagaacagctgtcgatgtcattgtttggaataactgtttttctccatgttattgttgggattggatcgcagaatagctggtgccataagactgccaacctcagctcaccaggcttgtccttgtcacttatcagaggagtaaactgagacccagagccacgcggtcggctagtggcagggcagagccggatacccgggcccagtgcgacgctcgcgcctcatcctttctccttaaggcgaggacatcctcctcaaagggagggacctccccccgcagacacccgggagctcccaaactccccgaagcactcaccttcatgactgccaggcccggaggccaccgagactcggccagggagtccatggtcgctcccgaggatgctgggggtcagccacccactagcctccggcgctccaacaccactcgaaattccccgcgctaccgcattacgtcagcagcccgcgacgcgccagaggcgggcgcggagcctgccggaagttgtagtagtatgtgggcggggcgccgcttaagggcttgtactgcgcatgcgccaggcttctgccgcacttaccttgaagaaagtgaatggttaaaaagcgtagagccagttgaatattaagaaaagatagccaggaatcaaaccaaatccagacctcaccagatctgtcaaggtccaggctcatgacccccctccgggtcgcccaccctaatcgcagtgactatccgtccttgctctgaacagaagtttttatatccattactttatgtctcccgtatcacaacactgggaggtagatgttatcattgtcagtttacacaagagaagcctacgcccgaaaaagtggatagagtttcgagtcagattccaaacaggacctctgggctttaaatgggagctgttgcttttattcatattaaaattttaatgcacggtttttctttttcttcggagagaagcaccattaactttggcatatagccttctagatatttcctatgcagattgacgaagattctttgcttgagcaaactttagtcaggctcctgaaccttctcctaggccaatctgtgtacttcctgtaaaaatccagttttagcaaaaaaccctgctaaatcaagttaccaagaatccccacctttgatatgtgatcactcttgatatctgatgtgttcctcatcctccaccatcccccagttgatgtctgatcaccctggcctcttcagcaagaatctactgttacctctgatgtttcctcttagtaatttttcatgcactgctccccaccctgcttcctggctataaatttccatttgcccatgttgtattcagagttgagcccagttttcaccaattgcaagacacagttccagtggtctctatacctacttgaattgtcctgattaagtcttccttattgtgctttaacaagtatcattgaacaatttttttcttaaacgagatataaatatagatactttttttcatacatgttatattaaatgcatgaggaatggaggtttacggtgtccacccccgccccccactttgtatcagccaatcatagaacggcatgcaaatgaacgcaaatgaatgccaggctgagctggaaaatgtcggatagttctggatgtggaggaagtggggtcttggagagacaaaggaaaagcatttaagaccaggtccgtggcctgagtgaaccagtaattgtttttttcacactactagttggacaaggtaattaggtttaaggtgacaaatggctgggaaggtgagagaggaagagagaggagatgagaaaaaagagaaagaatgggtaaggagaaagggagagagagaaaagacagggacaggaatgtactttttgcattcaaccatggagacagatttggaaggaggcagtacttgttagtcctggggccaaaatacatttccctatctatggagagcctccaggacaggatgcggtgccattcatctctgagtgtctgccaatagctggtgggtgaggctgaatgaatggatgaatcaccgactaagcccacattcccataaatcttttcctcccaggctgagcatttctcttcctgccatcttcagcagcaccagggtgatagatcccatcaagcccacctctaggcccaggaaggaaagttcaagaacaagcgcactttgagctcaggaaaaggcgtttgtcttgggtgtttatctaaccctgggagccattctcctcttaacaagctgctgtttgtatggactttctccttctgttagatcaataaagagattgtacttccttattcaggactaaaaacaaaatgttccatgtaaaataaaagcaggctagtgtttagtggaatcttctgtggcacatagcacacagcgagaagccagaataggatggccagataaaatacaagttgcccagtaaatctgaatttcagatgaaccgcaca

SEQ ID NO: 316198 - DNA, 4001 bp, Homo sapiens
gctggagtgcactagcacaacctctgctcaccgcaacctccgcctcctaggttcaagcaattctcctacctcagcctcccgagtagctgggattacaggcatgcgccactatgcctggctaattttgtatttttagtagagacagggtttctccatgttggtcaggctggtctcgaactcccaacctcaggtgatccgcccgccttggcctgccaaagtgctggcattacaggcgtgagccaccgcgcctggccattacttactcttatctggaattaaagaccagcagaatggagggggcatttgactacagcaagactgcaagaaattagagaccagttatttcaagtcacttctggcctctacttatttttctcttgaatattagtgggactttttttttttcctgtcttattgggaaaaaataaaactgaaagttctataactaagtctgttcatcaaaaacatgcctgaacagagtgctagattttaccaaagtagccccaattaaagaaaatgacaaatctctcctgcatctggagaattcctggcaaaaacaccaaagccaggtctctggtgccagcagaagaatgccagagaaatgtcctgatcaggggccatatagaacacaatgctgcctggtatactttagtgttctatcaatgggagagcccgctgtttccaaacaagaacatgccaaacagttacctcctggcttccccatacaaactgtcaggaaaaaaccttctactgccaggaatgaccttggactttatagtgtggactcctgcctaccggcactgaataaagacaaccttggccaggcgcggtggctcacacctgtaaccccagcactttgggaggccaagacgggcggatcacgaggtcagtagatcgagaccatcctggctaacacgatgaaaccccatctctactaaaaatacaaaaaattagccgggtgtggtggcaggcgcctgtagtcccagctactcgggaggcctgtaatcccagggaggctgaggcgggagaatggcgtgaacctgggaggtggagcttgcagtgagccgagatcgcaccactgcactccagactgggcaacagagcaagactccgtctcaaaaaaaaaaaaaagacaacctcaaaatttcctcacctgtccagagtgccaacaggtgcagacagctgccttcctcaccagacaaggaaacttgaatcctgcacagcaccacagtacccagccacattcctactattaatactactgagattagaggtcctatataataatacacattaactactactgacaaccagcactgaccaccctcaaagcttgaggccctcatctccagtcctcgatgcaatctgcaaagaaggctgtattaggcccattttacagatggaaaaacaaaaccaaaccaaagctcagagaggttaacagcttatcaagggtcaaaaattgagcaagaaaaagtgggaagactccaaaaaccaagctcttcccattgtaccagacatttcttctctcagactttttctaaagaaatagaaaactctaagccttatttccaagagtttctgaagttgatccatttaactaagaggtggccaaaaacatttatttaagcaatcaccttgcctttaaggcaacaaataaacaagtttttattttctttgatcaagtgaatagtccagatggaaaatgagagctattttgaagaattcatttattatttaaataccttgattttacatttcttcatttatttttgcccaagatatatacacagagagatagacagcaaaaggcagaatttcattttaatagatcagaatgaagagtaacaaagcaaaaaacattcagatttacattatattttatgcagtaaaaattaagaagcaaatgactttcaaacagactgagccttacctcaatcttactcctcctgttccaagggacagcactccaagtgatcagcagacactcccagcctacatacagtgaaccagacataggggataagcaacgccttcatgctcccaaaaccacagtgggaaggagtgtgatggcttcctggggaatctgaacacatatagtatttgtaaatcactgctcgttgagacatacaccaaaacaaaatgttttacctgtggtttgtctacaggagtacttaaaattaacaggtgtataaaatagtgcaaaaataatcccataccagcatgaactcacagtgatagctaaactttttccatggagatgttaagataattaactgtcaccagtcaaaattaatacattataaaaactttattcaatgtctttactgattaaaagcttgatatacctgaatcacttctttcttcatagacctataaccacctctaaaccaggaactaccactaacaaaatgttaaaaaatatcatcagcatttttgaggtgcccaaagcagtgcctggcaaaatgcaataaatgttcgtttatgaaagaatgaatggagaaagagaaagaatactactttttttttttttttttttttttgagtcagagtctcgctttgtcgctgaggctggagtgcagtggcacgatctcggctcattgtaacctctgcctcccagattcaagtgattcttgtccctctgcctccagagtagctgggactacaggcacatgccaccccaccggctaatttttgtagttttagtagagacagggtttcgccatgcaggctcaatctcctgacctcatgtgatatgcccgcctcgacctcccaaagtgttgggattacaggcgttagccaccacacccagccaagaaagaaagaataccattgaagaaaaataattatttaaagcttaaggaaaaagataatgtttacaataatgagaactatcagtacaactacaaacagaattacctaacattgcacttgaaagtttatactagactccagttaggctatatttcctaccactctaaactcagaaggtacaatgattctgatactgtttttgttcatgtagggttccctttaaacctcacctacagacaacacaccaacttttgcctgaataatacatacagagctccggcccacagctgcaggcctcagagttggagtttgcgtactgtctttcaatgatatagattgtcacagggagacagtgtacaggccaaattcattgaagatggataatacttctagtgaagacaatgtcctgtgagagtaaacaaggatgctgaaatgagagtcactaagatttaatagattcaacgaactcacttcatggcagtaagagaagatgaaatttcatggatttaaggatggaaagaccatttaacaacataaatgttagagttttcttatccttctttagtgttgcacacattaaacaatggtacacaaattagtgaaaagaagcttttaaatttagatttataagaattggactgaaaacgcctggaacttacatgtatgatgaagtctaagtttgtctatcatttcaaatagccacagtgctgaaaagaaagtatgagtcacaattcaaaaacaacggaggaaagaaaaaaatgaacagagaaaagctttggatccaaataccacaaagaaattccttacttaaaatgttgtcaatgacagtcaccactctgacttggagtaagaaaggtccacactgtcctctacgtgggaacaaactcatccagccccacataacccttccagttgcatccacctcaatgttcagccaccaatatagtcagccacaatccctagcaagcaacaggaatcctaacagatctgagtcacccactcccacgcagtaagaggtcactctccatcaggaagcccactctgcaaagtttccttgttcatctcccaggctgccaccaccatgacccacataaagctgattctccaatctcagtagcctatcaaccctcctctacactccccaaaccacaactcccaccggcctcaccctaacgacaagacagctagca

SEQ ID NO: 316199 - DNA, 4001 bp, Homo sapiens
gcacctgtctgtagtcccagctactcaggaggcaaaggcaggagaactgcttaagcccaggagttagaggctgcaaccgagctatgatcatgccactgcactctagcctgggcgacagagtgagatcctgttcctttaaaaaaaaaaaaaaaaaaaaaaaaaaaaaaaaaagtttgcattgttctgaaaaaataaaaaaaaatttaaaagtcattaactaagttaaactaaatatgttcaatcactatcagcttcaacatcaacaaagggagaaaattatcagcaagaatgaagactcggcaacccatgtacaataatccaaattcaactagttcactatctacaacaaagacagccccctcacaattctagcaacttttattttactctcatctctcaccatttccttcctgcaccccaggcaatttgctgctccccaaactcatcccaactcccacatggctctaagcctttgtaccagctgttccctgagctcctcctcacccgatgagcacttactcacaggtgtttcaaaactcgactcagaagtctcctcgagtgtagaagcttcctcaactcctccccaagcaaaactaactgttctaaatccccataacacttgataagccaattcttatcacactgcattgttttcacgccttaggagcgcagggagggcagagtctctccactcagcccacagaggaccaggcaagcagaaacgctcaatgaacgtgccttgaattcattttccacttagattaagtgaccccctagaacccgttcacatctcaaggatacactaagttccattccttcttcccaccacagaatgaataccaggggcacacccagagccctagaacgagaacaatgaatgaacacggccgcctcgcctctcacgacgtccaaacccctctctcttgggcatcgactcgctcgcagagcctcagcagctgcagagctgaagcgtcccggcggctctcgcgtcacacaaaagacagccctggctcttcattccaaagcgtcctgaggccaatcctctataagtatcccaaacctttcattaataacccagagtcctgatacccaaggctagtcctgatacccaagaagaggcccctgtgcctttgtggtagggcactggccagtttcctcctctcttacccgattcctcacgtcgtctctaaaagggtgtcacttgactgaagtaccctgagaaagggtgcaagcccgggtcccacattcggcggcccaagagaaaaggaattggcccatccaagtgacaacagatatggggcagctctgggcggattttcccactgccaaatatgaggaatgcgcatggcataagggtggcgttggcacgtttccgccaaacacaaggaaatttgagtgggatgtgggaactcggctcgccggccatgacaccggactccggggcccccgcccaacgctaccccagggtgacaacggcctggcccaagccctctgcccggcagccgcggggccgctccatcagcgccacccaggcccggtcgccctggaagccgatccctcagccccgccgcccggctcccccggcatccacgacccggtcctgccacctacctgagggagccaggccgccccaacgtcctgtcgttcggcggcagcttctcgcccgctcctcctccccgcggcgggtgagggagcgggaggcggtcacattcggcgcgtccccagcccaggggacggagccccgagcagcccccgcatcgtagcaaacgcgctccgcgcctcagggcacgcgccccaaagcccggccagctgacccttttcggggcccaaaaaaggcagcagaaagccgttcccgcctcacaatcgttttcctcttactcccgccatctaagatggcggcccaagcgcccgcgattaagactctcgggcggcccagacgagcgagccctcgactcggtgctcgtcctcccgacctgcgacgccaccggctctccgattctgcgcgagccctactggcagtcgacttctaacttggctcgggcatccatcgctctggcctgaactcaggccccgcccccggggcgtggcctagcgatctggtggccgccatttcgaagctgaagaggttaggcgacgctgacttgctttcaggagaggcactcggtaatcgagaagaaccggctttcggccagccaggagtggccagaggcctagaaggggagaggaaggcctgcctgcccagcattgcaaggcccagcgatcaccagacgtgcctcaggacacagggcacagtgtccaactttgacgcgtcctctccgggcactttaataccaaatcacggctccgccacttgacagctatgtggacagtccctgaaccttaaacggtcttttccttgtgtgtaaattccgagttcatttttcccccatcacattagcaacaagttaaaaaaactgataatatccggtttggtccaaggtatattgaaacctgttgtgtgccctcgcagcgctatcacagtggaacttggacatgttaaaagtatatatccttcctcccggcagtttcacttctagacactaattctagagaaataagtatacacatacacaaaaagctatgtgtgaagatatttaatgccatattatttgcattctggagaaacactggggatgaaatgaagattaataggaaactggttaagagaacgctgctacacatccaatctgggttgtcatccatccaagaatgaactagatagttactgaatttaaaaaacaacaaaaaaagggcccggcgctttttttgggattactcctgtaatcccagcactttggaaggccgaggcaggcggatcacctgaggtcgggagttcgagaccagcctgaccaacatggagaaaccccgtctctactaaaaatacaaaaattagccgggcgtggtggcgggcgcctgtaatcccagctactcaggaggctgagacaggagaatcgcttgaacccgggaggcagaggttgcagtgagcccagatcgcaccattacactccagcctgggcgacagagcgagactccgtctcgaaaaaataaataaatataaaaaaataaaaataccaaattagctgggcatggtggtgcatgcctgtcatcccatctactcgggaggctaaggcaggagaattgcttgtacccaggaggcggagattgcggtgagccgaaatcgcgtcattgcactccagcctgggcaacaagagcgaaactcttgtctcaaaaaaaaaaaaaaaaaagacatggctgggcgtggtggctcacgcctgtaatcccagcactttgggaggccgaggcgggcagatcacttgaggtcatgagtttgagaccagcctggccaacatggtgaaacctgtctctgctaaaaaatacaaaacaaataggccgggtgcggtggctcacacatgtaatcccagcactttgggaggccgaggcgggcagatcacgaagtcaggagatcgagaccatcctggctaacacagtaaaaccccgtctctactaaaaatacaaaagattagccgggtgtggtggcgggcccctgtagtcccagctactcaggaggctgaggcaggagaatggcatgaacccgggaggcggagcttgcagtgagctgagatcgcgccactgcactccagcctggacaacagagtgagactccgcctaaaaaaaaaaaaaaaaaaattggccaggtgtggtggtgcgcgtctgtaatcccagctactcaggaggctgaggcaggagaatcacttgaacccagtaggcagaggttgcagtgagccgagatagcgccactgcactccagcctaggtgacagagccagactctgtcgcaaaaaaaggaaaaaaaaagccattaagttaaaaaagcagaacataatgtatgatcttatttacgcaaacacaggaacacaagatacctacctaatactacagaatgccatgtgcactattactttt

SEQ ID NO: 316200 - DNA, 4001 bp, Homo sapiens
attaaaatcggttactgccaaccaaaaaacaaaaacaaaaggctaaacttaaaacacacacacaccacacacatacacacacacaccatagtacacacgaaaatgtgcagatctgtaacatttttttcacagctgataaaaaaaaaaaatactaccattctcccccagactcccctttgatacagtaggtaaacaaaatagattttttttccacaaatatcagcagacactttctggcaccccacactgtattggcatcagtgttaacagtcccagttcagatgtgcaatacttcagattggatacactgtaacaagaatccaactttgcatagacatcctcagaatcgcaatcagtcatggggttgcccttccaagctggcagaaaaggaacccgatcttaatttccagctactcctggaaaagaaggaaaaaaagtttcttcctctcctcctgctccttcatatggttctcccggacttccttccatgtatttaaaacttggaactagaaaaacggctgttgaccaaaaaaaaaaaaaaaaaaaaagaaagaaaatagaaaaaaaaaaaaaaaaaccatttccaccttctctccctccttttcatccacccttcccccccattttttttccaggctgaaacttttgcttggtgggtgtcaagctgccgatactgcgccctaacggctacttaaacggggaaatatgcatcaaccaaaatcagggagaaacgtacatgctgcaaagagccacatttccaccagagtatcggatgggcaggaccggacaccccctcgggcacagggtggaggcaggggacgccggccgcggaggccagccgggctcccaagacaccctggccaatgcaaagtggtctccaatctcaaagcaagaaataaatcacatttagagagtcggatgcgtttggcttttgtgcgcagagcgcggccggcgcgcggtggccgcctcagaggatcacgcaggccgagcagcagccctcatcgccgttgggctgcgccgcgtagttcatctgccgcacgatctcggcaaatagctcgtctaccgaggctttgtttttggccgacgtctccatgaaggggcagctccactcctcagccagggccttgccctccccgtacgagacctcgcgctcaccctccaggtccaccttgttgcccaccaggatcatgggcacgcgctcgtaccgcttcacgcggatgatctggtcccgcatgggcttgatgtcctggaagctctgctggttgacgaggctgtagaccaggatgaagccctggccgttcttgatgtacaggtcccgcatggacgcgaactgctcggtgcccgccgtatccaggatctccagcaccgacggcgacgagtccacctcaatctccttgcggtaaaagtcttcgatggtcgggtcgtacttctcgatgaaggagcccgtcacgaactgcacggtgagcgcggacttgcccacgccgcccgagcccagcaccaccactttgtactctctcatggctccgtcagcgctctcgccgcgcctgccgcggccccgtcggggctgcgcgccggggaaggctgggcttggcggctggacttctcttccccttcctcagctacgcaggaaaaacccaggagagagcaacccagagaacgcagggcggaaaccaccgaacggaggccgggcgccgggccggccggcggcggcggcagcgtatccctggggtgcgggtccgggccccgcagcagtccgcggcggcagcagcagcccgggcggcgaaccgagaggacaatgcccgcagcctgcgcgaggcgacggctggagctcctagctgcggcagcccgggagggcagggaggcggtggcggcgggctgcggaggtggctgctaattgcgcgtcgggccgggacgcgcgtggcatgagtccccgcggaacgtgcgcccaccgccgcggcccatcgcgctctctcccacagcctctactgggcgagggcttcctactcgccgcgcgcagcccggcccgcccctccccggcgagcatgcccagtgcgttccggccgcgccttgcccaagcggccgctcctggttttccgcggggccgggagggggcggggcagtgggcggggctccggatttgagtccgatttggggagtggcgcgagttaggaactggctggaagatggggtgtgtgtgcgtatatgggagcgaggaaagcgctgtaggaagcatgcaggccgctttattttacagctgtgggagtggtggacaagggcggcggctctgcgagaagcacgtgggcgcggcgggccgcctcagggatggagtaggctgtggtcttgccaactcccgttatcaaaggcccaaggacgccattcactcagccccgggcgggcgtgggtctgggggccggaaacccgaagtcctgtgggtgccgtggaatgcacgagcagccggcggagcaaacctgccccatagatttttctaaaccgttcgccacagaaacgctactctgtcttctctgaccgactctgtgcactgcagccttgcacaaagaaaacaggaggtactccaagtctgagatactgttccgactaggaaaggggtagcttctggtacctgcagctctctcggggcagggtcccgcgggtcgtacccacctccccgctcgagtgcggtcaaaacccggagaccggattacatcccaatccagaagtctcagggcgcccgcagttagttcagggcatgctcagtcgcagagcaggtttttgggcttggaagtaggaagcttttgcaccacacacccacactctagctcaaattacctctcccagactctgcactcattggtctcggggcgcgagtctgacacccctaagtgttgttcattggctgccgccaaggctttatcagtttggggcgcttcattggctaaaaagtagcctccgctcgcgattggttatttatagagattgagcggagaggcggaggcacagctgttctttctccgttgctcccccaccctctgcctcccacttccccaaccctggcgttttgaagtaaaagtgaaaaaataagaggcatttaggctgagagctcagaactaaatatagttctttgttggtgttttcgagagggtctgactcctcggtttccagtcacgactgccccttaaagggagcacaaagggctaattacaggttttggtccgcaagaaaccgcagagttgccaagtttttttgcagggagtgggagggggcgaggagccgaaatgggccacttggaattcgtttcacccggaggggtaggggagtgtccaagcttgcttcagaggaagcgtcttcgctggcgggccgggcaatcgctagacttggctgggctggcgctcccgggaggtgcaagggagatgccccgacttgttccgactccctcgctcctcgctgaggagggatgtcaagacctgtctgcaggctgagctcggcggcggcgggtgcgggatggggagggaggcggtggagctgcgtcagcgctggctccccgtcctgatgtcactgctccctggtttcaccgtccgcatcggagggtaaacctgggcatggctaacacggtttcagttcctagtgccgccgtgactcacgctgcgtttgctagttaacctccaaacccctggccaaagcagcttccgtgcacgtctgcagcgtgaagtccttgggcacagaaccgggcgggacgtgggctgcccctgatgccttgggtggggtgggtggtgcccacacccgcgcctcaccccaatttagtagagagaggagactttcaccttgactgtcagagtgcttggatgttatgaagcttatataattctccagaaaaacctctcagaggcaaactcgcctaagctggagagaaccctgtcaacatccacccaatgtgtaatgtccaccaagcgttttacatatactgccactcctcataataatgattatttacccattttaaagat

SEQ ID NO: 316201 - DNA, 4001 bp, Homo sapiens
gggcaccaaaaaagaaaaggcatttggggagcagctgaagattaaggcgccttctgaaaacgatattctttttgccctgcttatggctctacaaaatgttaagtcagacagccaggctgttggcatcaaatggttattgatttttcagctacaaacctgttgatttcccggcccaagaagcaagtctttattcttaagaaaaagtttcagagagggcaatttaaatcctgtcattgtcccctctcccctttttcttctctctttagataagccaccatgttattaggaaaactcaatttcttccagttaaactttgacctctttgaaaacaaagatttaaaatgtcattttcaggctaatgctccaatgaattgtcaaataaagtactaaaaacattttgatagatagctgagccatttatctaaatcactgtcagggcggcgaagcatcctgcaggctcccactacagccacccgaaggtgggattttctgggactcctgatcatttctcaagcctgcagccaggctactgttgaccaggtgcgtacctcggcactgtgtcagcatcagataacaaaatagtcaatattttttttttaaattgggctaccccacttatatttcctttcctttaactgatgtccacgttccgggctgaactgcaagatatggaaataatggatggctcagtccaaggggtgttcattgccagtagttttctagcaaaacagcaacttcttagaccaacaaagtgacttggaaaggtggcagcagggtcaatgctaagaaatattgcctttccttagcaaggaaaacattggaagcggcagcttgaactggtggtttatgaacttcgggagcagcagccaccttaattaaactaaattcctttcaaggaaaatgtcatattttaattactttggactgttggaatacacaaggggtggggggacctatacaactagtagctaatccaaagaacagcaaagttaaattccactctgcatacattttagtaaaaactgcaaaatgtgtcaaattgccctacttgaagaatgttttaaagtcttgtggtcaccctctactccccaccccccacatttttatgcatattttaaaaactgttttcaagagactataaggttggtaaggagaggagcatgggggcgggaggggttatttgggaagaaaacatctaacaggaaattttcagcaaagggaatcaatatgcatgccagcatatcacaccccttcagcattaaatcattaaatcctttgtcttgctaccaatgcagtttatttccaacgtctttattgcatgcaagagagacaattttttttttcttggtagaagaagggaaaaaaataaacctacattgagcagtgtgccgatgctgccattcggtttgggtcaatccactgaagcatgctttgagagctttctcctggagcatgcaggaagacggactcgcagtgtagaaatccaggatttgcccaggactcactgacagaacatccatacagtcaaacatgatctcccttgcactgaatgtctgcaaaagtgcttatcctctaggtgtggaggcaaatggcatagaaaagtccacccaactccatcaaactctgccccttttttggcacgtaggctgttggtctttttcccagccccgaatcatgaattatgacagacaagccagctaaaagcctgtaattgatccaaatgatcatttaccattttccaggcttgctcggccaatccagccggggcggggggttcccagaaagatcccaagttctccttccaagtaaatgcttgcaaaaagccttccgaatgcgttccggatcctaccccgacggtgcccagacaaaccctgctcggatcgctcgcgttctcggcatcccagtcctcaaacagctcgcatgggggaattctggtcccccctttggcaaagaatagaccctcctgcctctgaacagctcacttcctactacttctgtcacacagaatgaaagattgaattgcctaatatatgcgagtgaactttcggtgaaccctacccgggctgctaaccttcaaatgacccaactagtctgacatcaccaactcccaggattctcacagagcttaaaaactcccagcagccctgcaaaagcagacagccagagaggcaggcagcgagcgcacaagccggcgttttctttcctatttctcaccttaaaaacaatacaagaagtgcttttaaaatgagcaggggaggagccgggacgctgctcctggctcacgttgagcaccaacttctctccctttacgcctttttatttgcggcggcttagcttggaaaacggtgttccgcctgcgcccgctcgcctcccgcccaccgcctcgccccccagcccacactttaaattcctctgtgcgcctttctgtctgttaaattccttataacttatgtatttttccactccagaaaaagcacatgcaagccctaaactgtagaacagagaatggctaccccttgggaaaggcttgggttgggaaactttccattccacagtctttttctctttctccctcttgcaagcccctggctgaattgactgcactcgtttgctctgcaatccagctttcgagattcatttactttgaaaaatcctctccaggttctatgcagcatatagagtagtcaggaattggttacccctgtcccaaacacacagccacacagaaaatgagatttcagatctggacttgaaaaaacagtatagtggtcaagagcatgggttggggaatcaaactgaactagattccaattccaggtctgccacttaccagctgtgtgttctgggataagtatttaacttcttcaggcttcagtttcctcatctgtaaaatgggcatataatactacccacgtcagtgttaactgggaggacagaaataacacttgtatggtgctgggtaaatatcatggaacaaatgttagctgtgactcatcctcatactgttcaactggtgaaacaaaaccccggggagatgagacctacccaaggtcacacagctcagagctgtgactagaacccagctccctaggatgaaagtccaatgtgaaaattacttgcctgttcccacatccttgcaccccaaatagccatgttggttgcctctctcatcatacacctacacacatcccaccacataattaaacgcatattttgtaaactggtttaagtatgacagttttacattttgaaggaccagttttctctcattccagcccctgcccaatccttttattaaaatacagtaattttaagggaaaatgattttttagatctctcacactgacccaacctacaggaagaagagtctttccagccagtcctaaaacactaagaaggatagatgcagtatttacaaataaacccagccggatggagagctttaaaagggagagccaatctaccctgcagccattttgcacaacttgtttaaaggatgcaacatacatcaaataaaggaaactctggagaggaattaaaacacccttttttctccactgcctctgtagcatttacttgtaattctcccacaaaacagggcaggcaagtggttaggcagggagggagagtctccttgcccaatgcagggaagagcactgctccagtctcctttttgtggatagtgttggaatgtgcattggcatccgggccttttaaaagcctgtcagggggcaccccaccccatgctgaaacactgccctgtctagtggagttgctaagtggcacttgtggtgtaacatgaaaagtatgcatcgcacacacttaccaagtcaaagatccttttatgaaggtacattaaaacaattttcagcccagcaagctcagttcttgctattgaaaagttcagggcaataaaggggtgagatttttgctgaatctgtgtttgttatttttgcgcctctcttctctcttttatatggccatcattttgtaacagagac

SEQ ID NO: 316202 - DNA, 4001 bp, Homo sapiens
aaagaaagaaagaaagaaagaaagaaagaaagaaagaaaagataaatataaataaaaataaatcagtagccaaagaagcccaaagcccaaagttgcttttgggaacctagaggtttcaggctgccttagagtttcaatctgccaaatttgatcattcagcatgggaatcctactcatatctcaacttcttggctacatctacaaaatatgcttctgatctcaggaaagaaacctgttaaaatgtgctgtcaggccagttgagcaacggaattagacacagaggctcataggtaaaattttaatggctttatcaatcatttagacctcctcatttgttagctaaaagtaacttcattatatcatttgcatattgagtgaacatgatttgaaacagcacttgggtcagcaagatattttgagtactggtactatgtccatttctctggatagtcaatacgccgctttggctgcttcaactttcagtttgaacttcagaagcatgggaggaggtttttaggcaattccagagacatgagggtcaaatgttcaagccagaaattcgaaacacagaaggaaagactcatcagcaaatcgagtcactgtttatcaggaatgatatagtactatgattgcaatcaacatcccaaaagtgcaagtctatcatctgtttgcctatctgtcagtctgttcgtccatccaaacacccatcccctactatttttgaaggcaatgtaccggggattctacttaggtagaacaagctccctgctttcggtgagctaaggatgtagtagaaggaatgactgaaggcacgaagagcacaatatagaaagattaaggtggtatcccaatgataccatgctaatatttgggggaagtccttgaagagaagcaaaatgcaaaacaatcaccaggaagagttacaaagaactgttgctctatgagccagaaaggacttggagaacatgctgtggatgcctgttgttaaataaatatgccttttcacctccagatgctaaaccaagtaagttgttattaacaggtggaaaagctcgctggctaccacagtttgtctttaaacaggcagaactttctaaaaattgcacaatatagatgtttcaatgtggaagtcatatcagtcttggagaattctaactttgactatttttattttatagtaccttatacagaaaatttaagggaagatctgggataagaaatagctagtacagaaacaaaaggtgccaaggacactaaaaaagcttaatgtgatatgaattggtagcaaaggtctatgggaagttgagaacaattacagatatcatttgtacacaggaaacaagtaaaagattcagagaagatctcacaaccaaaatagcttttaactctagtattatcattagtgatttttatggtatcatctcctaattcactgcttccattatttatcatatggccaatttctttagatattgatcacagatattaaccacacatgctcatcactttttgtgtttgcattttatgaaacagagcaaaataccaaagcagctttgaacgggttgaattctaaaatttgccacttgtctagtttcaaatcatatctctttccacagaactaaaagtagaattcaagaccaaaagaaaccagcacccaatgaaataagaaattgccctggataccaaccattccgttttctcaggtcccttcatccaatcaacccagagaaaagagagcaaattccagcaggacttacttgccggcgacggggtgctgcatccactcggaggcggatgtccatgaaggccatggaggggaggcagggaaagtcctccgatgacaggtggaaagagtaacgggtagggtgtggctggatagtgagtcatgtgtccgttcactgctgggaccggacatgcgtggccgctggtggtcatgtttcgggcctcacagaaagaaaggtgctctggagcaggaacacatcactccaggtcttaaaccaaagtgagggaggcaaatgcactgcaggagttgaggctgagctgtgttctgggccaaagtcaagatggttcaactgatgaccttgcttcttcccagcatggtttctctgcctgtcattttgctacactgattacaggaaggatgctttcgtcgttcagcttcgcagtttaagaccagtgagacactagcaccttcaaatttcagagctgttaattctgtaagaaaaaatgaaaaaaatatatatatcacaaaaaatctctccctttttatcaagttactatacaaaacgtctctaatactaatccaggtctcctaattccttgtcttcctacagttactgcttcccaaagagtgttaattttcttttctcacattctaacatagactacaacttttactcaatttaaaaataactggccatctgatattaaatagcaaaacctccactcctgtgttatttgactatatcactctgctaaatttttctccatggcagttaaacgacttgatacattacatgtgggagtgtttgtttttgtctgtctcccccattagcatgcactcaccaggagggcagagtgtttttgttaacagttatgctttaagctcctagaagagtacctgacaagggatagaccctgagtatgtattagttgaatgaatgaaattttttttcttgcttttttagggaaactatttaatgctattctaactgatatgcttccaaattttacttcttttatatgagtaactttggattttacggtggctatttggagtgacatagccaagataataaaattatgggagaaactataacctaatgagagagatagtaaaatattatgtatcacttctttattatcaacatctttcacaactgtgcatccatccatccatttgttgacccatttgtctgtctgcctatccagtcacctattcaccaatcaaatctcactattatgtgccaggcactaatgtaagaactagagatatacacagtgccaaagaacactaatgtgatttctgccctgagctgctagttttaacaactattgattgaggtcatattgttaaagaagtctaaactgccccatgcttcatgaaggacaatccagagatgctcaacacctaggattccttgagactgggaatagaagaagcttaaattctagagtgggctggctgtaaacttcatagcctcaccttggccctgataaccaatattaagtagaagctcccaaactctgcccactgaatggcaacctctgaatgtattcatgtggcacaaaaaaagattcatgtggcacgaaacaagagtacttcaaggccagaatagagtagttgttaagagcgtgattctagagccagtgtgtccagctcaaataattctgcccctctggcaattatttgtcctttcaatgttatttttttttcctgtaaaataagaataatagaatttacttcagaatggtattgtgaggattaaatgaagtaatacaacagagaaacagtgcctggtatatagtaaacactaggtaaatagtaaacgcttggtaagagtttctattaacattaacatatttgttatcacatcaaaataatatgcttctcacaacaagcttgctggaatagacaagaggttttggggttagggcagggagactacattatagtaatcccaggaaaacaatgttaggactaaagcttacgtccttgaagtaaggaagaaaacgagggatctgggtaaggttgagaacaatcactcattaagccttcttgacttcagtttttgaagtgagtcagtttgattcttataaaccctacaatgttctaatcaaatataattttcattgactatttaccatatgtgaggcacctcactataagctctaaccctttttaaggcagatattttttattttccagatgagaagagtaggtctcagtgagtttcaatgaattcccctcaatgtcacagagtaagccctcgctaagccag

SEQ ID NO: 316203 - DNA, 4001 bp, Homo sapiens
gggtaagatccttgctactcaaagaaggctccttgggccaacatgcatcggcatcacttaagatcttattagaaaaatagtatcaggtcccagctcaggcctgtggaatctgaatctgcattttgatgaaatccccagatgactaaatgtacaattaacatttgagaagcagtaggttaaaactaatgatgacacagagtggtgcgattcacttttaagtcatgttactctttattctagattaaaaaaataataatcctccatcctgttatctaaccacccaaattccatgggaaatgggagttcacaaaatataagaacggggtgttctcctacccctaattctccaggattgtactcagaatcaaagcaagaactggctgtacttctatcacaggtaaatatgctcataaaataagatggaaatcgggaaggagaattaaaagtggttaaataatgttccagaatcttctagtctccaaattgctttttaatacacagtgtatttcccagaatataaagtttccagttgccctactgcttataatctcccagagtagatattctcctgactggattatcctgcaggcaagcttttagcaagtcaggtcaactctacccactaaacttattgttaatccatccccacatcactatcctgctaccacaccatgctaataatccaccatcgcctctcacaactgctgcaatagcttcttcattggtcacttcatgccccttcttcctacctagtgtctattcttcaaacaagcagtcaagatagttgttcaaatgttaaaatccatctgtttcactcgcctatctaaagccctccaatagtcaccaattagatcaaagtcaaactccttagtatgttctacaagacttttcatcacacggcattttagcagcatcatttccttcagtgagtcccctaatttattgagttctatataattggcatctattctgtcttctgaataggccaagctctcataccaactgaggctattgtgataactatttgtcctttctagatattctcagaccttcaaatatctggttgtttttcgtttcttagatcacaaagcaaatgctaccttcccagagatgatttctctcattaaaatgcccctctccattcctggtcactctgtctcactattttatttccataaaaccctaaccagtgttcaaattttagatgtttgtatataattttatattctacatctgccatcccctatactctaaatattgagtttcataagggaaagaaactcacctgcattgtatacatctgtgttccaggactagtagaggtcctggcacatggcagataatcaataaatatttgttgaattagcacatgaactttttccttttcctttttcttcctcattttgagcactaagagtccctctaagttgttaaatgataaaattagaaaccaaatagctcttatactcctttgcttccttaaaaaagtaattaattagccctttggaacagaatcaactataattatagtattttcataattcagaagaatcttggaatgaattcatttgagtagtacaggtcctagtagataaatctattatagtctttactggttagaaccaaggtatctgggatgaagatatcaatcttgagtacattatttctggcagataggaagcccttgctttgaataagttggcacagtggcagcaactgttttatagaagggctggtatctgagatgtcactaaagcttatcagctatcaagcagtagatgcaaaagcattcttcacacggaactaatcagcttcactgaaagcgaattaacaagaaaacactgcttgttaaaattagaaaacaatgtatcactgtctattaaaaatctaaggaaaaatacacacagaatcactcacccacaatcttttcactcagagaaattcactgtgtacgaccttccagaatttttttctatgcacataaatgttttgggtttgtctactaaggtggaattatactgacactgctgaggactttgtttaacctatgatgtcatcaatttatttccttgtcgataaatatttttcacagaaaacattccattgtgatgaacaactttgtagctaatctcaccacatctttatttccttcaaatacattactgaagtgtaattatcagttcaaaggttgttattttaaaaatattttgtttttaatgcatgttgataaactgacttctagaaaggttgtgtagatttacactccctgatatcaacgtaagtgaccccttccccagatgcctctcaaaccttttggagtggtttgatttgtgtgcttctacttccatccatgtgcttcaacaactgacagagtcatgtcatcaccactatgatcaatctcgcattgagttcttcacagaaggaaggtggggagcggtgtgttttaaggtcctactcgttcgtgtagaacagctaatctggcctgtctaggaaagttgtaaatagaattctggtagggctggaatcagctgtcagagctatgccctgaatttcaaaagtgggtagtaatttccataaatatgccacttcaaacacatgcactgaagggagtccagcatttcaccttcccaaagaaaggaaacaaaattgtgcataatttaatacccaagaaacttggggcaaagcacacaaaaaacgggaagtctactggacattaaagatcccaaagcattttacaaagattggatcttttcctatggataagagtcatttataacaaatgaatgaatccagaaggcttttcctgaacagttgccatgaacgaaaatgttctattgtaagtaatcaatagtgagagccctggccttttatttaggtggtggtgatttcaccaataattctaggaactttctcatgtgagtacaatagattctcagactgttcatgtgttcaatcatttgtttggctgagtgacataacatgccaggcattgtgttatacgctatgggcaatgatagtacataatcccttatccttgacaaatttggcctaatagagaataaaccaacaatgataatacagtgggttccaaacttggctgcacactagaaccagctggggagctttttaacgtcctaatgaccaagttgtatcccagatctattatgccagaatgtctgagaatggagctaggaattgccattttaaaaaaaattcccttttggctgactgtaagatttaaaacagaaaaacaaaacaaaaaataaaaataataaaaagtattcccaggcgaatccaaactgaagtagtttgggaaccactaatataatgtcagagtgaactataggccttatttatcccaggagaaatcaagggagccttccaagaggaagtgactgggctatgtttttaaatgataaattggttctttctactgtttttataatttgaatcctgcaaatgccataaatgaacataatttgaatgctacaaatgccacaaaaacagaaagggaaaaacgttatgtacgatccccaaaaaaaatcatctttggaaaaattttcccactggtagtaaaaaattaagtatttgactctctctctctctctctctctctctctctctctctatatatatatatatatatatattcaaatatcaccctcagaattgatggtcagtggtcttttatttcctctatgtggcctataacactgagaacaatgcaaggcaaaaaaaaaaaaaaaaaaaaaaaaatcagtggtatagtctgtcagatcaccaaagctagcctcaggcgaacatgccaagacaaattctagaattacaaccaggaaaccaggatatggcatcaatataaaagatttgtactttaatgcaatctcttgcctttttggtaaggtagcaaaaacatactttggcaaagtttatcagaggtccttttctttttttgccttcctccaccccccaagaaagtcagtgggaaataagcagggggacag

SEQ ID NO: 316204 - DNA, 4001 bp, Homo sapiens
tacctaccgtctctgtttctgcttttgcatcattaaaaagaccatgaaaaaaagattagctaccaaggcagaaaaatgtatcataggtagggctgcgttcagctgcaggtaagagaaaacctaattacagtggcttaaatagaggtgggttatacttttctcatttaataattagtgcaggcataggcagtttgctgatattgggtccaaccaggaataaaaaaaagaaggttggtacttgttttgcctctcctttttaacagaaaagcaaaagctttcccagaaatcctgtctcagcagatctgctttttatcctgttgaccaaaatggtgtcatacggctgtaagagagaatgggaaagtgagactgaatggctgtcctagcagccgatgaagattctttgccacaagatcaatcctggttcaactcccagagattttttgaaagggttggcatccaagttcctttagtgataaagaactaaaatgctgaaatactgcaataagtctataaattaaaaatgttatacatagagtttattagttctaccttcccttcatactgtgactaaactcatcactttcttgaactgaaatggagaaatccaagatcactggtcaaacttcacgtgattcctgaaactgcagtctgcttaacaacttgagtatctctttttcttatttttccatattagttatttcttgatggattcattcattcagtaaatatttattgaggatctactatgtgtcaagcattgtaataggtgctacaatacaatggggaacaagatacatacatttcttcttctacgaagtgttgttttagtggaagagacagatacaatgtatttaattataattgtgatacatgctatgtagggaaagaacaaagtaaaatgaggatattacaggaaattagcgtagtttgaggtgtgtcaggaaaagctttcccaaggctcaacgaaaccagggcctctctgcctcagcacttttgacattttgggtcagacaattctttgttatggggggctgttttgctcatagtgggaggtttagtggcatcccttgacctctacccactagataccggtggctttccccttccagttgtgacaaccaaaagtagttctaaacatagtcaaatatccctgggggcaaaattatccccagttgagaactactgatttaaataaagacttggaagatgaataggagagtcagtcacaccacagagagaagtcatcaattcctgtccatctttcaccccaacccttcctttggtaaacttttaagccctcttgctttattcaaagagctttaaaacctcttctaggaagtctttgctgaagacaaaataggtggcaaattctctctggctctcaccctgaataaaccatgagttccacaacctttttctactcagtatttcacaatgtctggaaacatatataatgctatttcactttttcacagatggaagatgtccttggtgatcttatgtatattcacctatgtttccagactttatggacagcctctgtacttctttcttttgagcactccagagacaagtattaaaggtctgcttcatgccaggcacggtcttagatgccacagtttagatatgagtaacagaagacttttggtctccaagaactcatcgtattgctttgctcaggtacaacacagaagaagctgtagaggcaaagttgagtgttcagttaattatgttctgctggctgcatgtcctttccaatgaacacagattgagaggcaaagacaacgcctatttagctcacaattcagcacctaggaggttatacagaaaatatctgcagaagatttgattgataatcctgatataaaatgattaatgagaatgattctgtactcactcagataacctcacctggaaaggcaattctactcagcttcattcctcataattatttgctgaataaattgagacttgattttcatttgcttcaagctctgtcaatggcttctccaaagcgagatcctccctaaaattccttgccaggctttgacctacttccttcttgttctccagacagagcttccccctaaaatctctcttgtttttcacctgtctagccaaatcaactgccaagaataggaatgctgaagtgaggcaaagtatttatttcctgctttgtagagccagatactttaaatggagaaaaaaagtcctcacttgcttctaagtaatgttttgttttggtcagagccacacattaattcacatgtccatgctgcttgtaaaataaaaccagaggcataagaactgataagaatacgcattcctatttcctctctctacaaaagaaagcctgatggtggtggctcatcacttgtgaacaatggactcaaaattttaaagaaaacagggcttagcatgaagggatggttatatctagtcctcacataaatgggaaattgaacttacattccatggaggcagaagcaactcactagggaagcttcctacagaaacaaaaattattaaaacaacatgatgaggtaagtatagaagtacaataaagtcacctgttttttttccattagtctttcagagtcctttgtagtcagcccagtgcagtgactgatgagcaccaaactcctcattcttcttgaaagggagaaacatgtcagcaggtctctgcattttactatcagtgatgttcatcccacgtgttctccttcgctttacatgctctgtaccaatagctagtaggctgcagtcttctttttcatatgtccatggcagggtctttaaaccaattcaggaccttctgcatggctcaaacttgggtcacctccacagtaggcctcttacttattttttagaaattgtttaaattgcaatataaaaactgcagccagagttgtgcaagttttatgcagttttgtggaaactgttgaggatgatcttttcccagaaaatgaataggtttccaagcattgcagtatatgtgattagttgagcccagtcttcagaccttctctggaggtacaatgctatggctcctgggaatgtaatacagttgactcttaacatccaaaccacggctataacacaggatccaagagagcaagatccctgtgcctttgtgggtgtatgtgttaaaaccagaatgcctttttttgggggaaatgctctcaaattaggcaaacagtgtgattaaaaaaaaaaaaaaacttcagctgaattaaatttaatggaatttaattgagaaacaaacgatttgcgattccagcagcctcctgagtcagagtagactcagagactcccgcgcagccacgtggtggaagatttatggacagaaaaaggaaagtgacgttccgaaaacagaagtgaggtacagaaagcgttgaattggttacagctcagtgtttgccctacttgaacatggttcaaacagctggctacatttgactggccaaactcagtgactggcacaagtgaggctacagagtatttacacttccagttgttatacttcacgatgtacagagaaaccttcaggccaaacttaaaatatggaaggaggcagctttaggctaaacttcatttagcaagtgaggtttgtttcggtaggacaaggcaatacaatttgatcctgggagacttctcctttaagggtgtttcaaaacaatttaatattttcagattatgtgacttccatttctgttaagctagtcttgaatttattatgaagtaaagaacatagacctttcaagtgcaagttttattgctattacagtctcaggtgaggtgataatcaaatatttattatatggaaagtagtgagcactactactcagaatggatctcaactgttctctcagagacccgattttgaaggccccctgctgtgccaagtgctaacctttgagtggtgattttgggaaggtctggtgtggtgaccctggtgaggaaaggctcagggtagtggccacttaccaaggactacacaa

SEQ ID NO: 316205 - DNA, 4001 bp, Homo sapiens
acattctctgctcactgcaacctccaggtcctggggtcctgggctcaagcaatcctcccatctcagcctcctgagtagctgggaccacaggcccacgccaccacatcggctaatttttttttaatttttaattttttttatttttggcagagatggtactttgccatgttacccagactggtctacaactcctgagctcaagcgatttgcccacctcggcctcccaaagtgctgagattacaggcgtgagccaccatgccccagcaggttgcctttttctttattattttattttattttatttattttattttgagagggagttttgctcttgttacccaggctggagtgcagtggcgcaatctcggctcaccgcaacctccgcctcccaagttcaagcgattctcctgcctcagcctcccaagtagctgggattacaggcatgcgccaccacacccagctaattttgtatttttagtagagacagggtttctccatgttggtcaggctggtctcgaactcccgacctcaggtgatccacctgtctcggcctcccaaagtgctgggattacaggcgtgagccaccgtgcctggccaggttgcctttttctaggaacaatttgatttaatcattcaataaatacagccgtgccgggtacaggaataagttttgaagaaccgaggctgagcttcttgaaggactttccaatggtgtttgcttccaggcgtttggcactgttaaatgaaaatcctgctgctacactttaaaactcgacctatttattaaatacatgcgatactcaattccagattctttgaggccgtgtgtctgcaggctttgtggaatatctggaggttgtagaaggagcaactttgcttttgggacagacttagtgtagttctgtaacttttgtaatctataggatgaagaacgcaaagtagcttcacacatacgagacaattcctacagtcaatgccttgaaatcagcaaccaaacaacgggttgcaaagttctcattcattcggttcatatagaacactgggctcggattcactcacttctaattagatcaaatcagacgccagcattagcaggtttctgcccaggcctacgtgtaaattccaaccacattaccccgaagccctagcgtggtggactgcaattaacaagagacagtcgtccgcggtatggtatggctactggcttagattttggaaatcccgcccaaaactttggctgcagccactagtagggcgcaggcacagtaagcacccccatagcaaccaactctgggtacctccggacaaaattaaatgttgccctttcagcctgttcctcaatttcccaaagcatctctttcccaggtgtgggagcagtcaagagcgctgccctgtgaaaaacctatgacctcataaatgctggaaggaacgagccagatttctgcagacgctgtgcaccgaaggggccccttccacgccctgggatacttcaggggcgccaggcccagctgggatctccccgggcgtcgtgcgcactgcaccttccctggcggaccatccgttgggccggcaggcgcgcgtacccaggtgtcacctcccagcgccgtgcgcggacaggcaggcgcgtgccccggcgcgtcgctccgcactcacccacgcgcggccctcctgcacctcggccagcactcgtagcgcgctgggcgagccggaccggaagttgaagaagtgaagcgccgcgcgcgccgcctgctgcaggagcctgcgcgggaccccagcatcctgaggctgcccagggtcgtcggggtccccggaccccgcgggcgccgccaccggggcgagcaacagcagcagcgcgagcagcggggcggtggggcgcgggcccctgggcccggaccagggagcaggcagccgttgccggcggggctgcatggacgcaggaaagttggctcggcacccgacagacacgggctcggagcgggcagtgccggcgctcgcggaaataaggccgtggtgggcccctcccctccgcccccagggcgaaggtctgtagcgagcccgggtccccatggggccactccttttccacgtttcccgcagcccctgggttctctctgcccctccccgctgcccgggcttagtgctaggatgcggcatcgcctccgcagcgcagggccgggtgcttctggcccaggccgcggcgggagagggtcggggttggggggacaatggggacgcctccccgaggaatcgcggcccgcccgtgctacctcgtaccgcgtccctagcccagctcagggacttggcgtttcccctgcggtttcgcaaccctggggttttagagggaaactgcttggattctccaagcattagggctgtgatttcccagcaggtgaaaggggacggcggagaaaggggcaggccgcagcgggcattgatggggctcctcgtggcacagccactgtggaggtgggagaagtcgccagagggctggggctggggaggaggtgaaggtggatgccggcagggagcccgggacgccggagccaggggctggggacgggcctgaacacctgccggtcctgcccagaagaggcgccgaggagggaggagtgggcagcaaggcagggtaagataaggcctgagagtcccatttgtctcagaagcaagtaggtcattgatacattgataaccactgtgcgaggcagatttaaaggccggggatggaagtcggattccagcggggtgaggcatggatggggcttcagggaatggaggcagcaagtgttggcaactcttttttttttttttttttttgagaccatgtcttgctctgtctcccaggctggagtgcagtggcacgatcttggctcactgcaacctccgcctcccaggttcaagcaattctacctcagcctcccgagtagctgggactacagccaccatgcccggctaatttttgtatttttagtaaagacggggtttcaccatgttggtcaggctggtctcaaactcctgacctcgtgagccgcccgcctgggcctcccaaagtgctgggattacaggcgtgagccacggtacccggcggcaactctttttagacaggtggcagtgaagggctaagatagccattgtttttaaaccgtaggcaagagaaaaagtcctggagaaccagggctgagagaggagaactggtactgctaggcactcccaacatccatttctccatcctgcattttgttcaggggtctacccctgcaccaaacgtggaccccagtgccattgtggggctaaaggaaatctctttttgccagtgggtggttgagagtgggcatgtgccagttctgcatggtgagcaaagcctgtgggttgatgggcgtggtgccatctctggaaagatcctgtcttactgcacttcttcctctggctgttgtctgtcccttgtctgtctttccttccttctgcagataattgtgaaacacctgtgccaggccctgggggaatgagggtgaacaatcttaaacatctctgccttcctggagcacaccttctaggcaagtggggcccggacactcagtgaggccaagggaatgtgtgctatattggatgaagttacatgccagggagaaaaattaagccagaaaaagaaatggggagttgggaggtggttaatcttaaaaggtgtggtcagggcaggcctctctcgggaggtaatatttgggtgaggacctgaaggaggcagagccaagtggacatgtatgcaaaagcactgtaggcagagggaacgcaagtgcagaggctagggcaggagcctatctggcatgtttgaagaaaagcaagaaaatccagctggagggagaagccaagggggagagtgcaggccctcgataggccccagttaggtctggctgtgctgcccagaagcatgcctctgtcttgctggctgcctgagaatgaagcccatttcaagagtggcagagcagagagaggggagggccctgggt

SEQ ID NO: 316206 - DNA, 4001 bp, Homo sapiens
gggttgctttaaaccatagaaacaaagtggttttttgtttttcttttttttaacgtgtagacccaagtttcacttacaaaactgttcttagtggtctttggcatggggcagacaaaagcacaggacaactaagtccttctggaaaccctaaccctcaattccaagacatgtgtatatgtagttccatggtaaaacctgcagttacgtaccagtgagtctccaatagacaatgcctagcatcaagtggcactaagaaagtggtaaaaatctggaaaatcatataaagggagaaactttggcccatttacagttttcccaaatgttaaattagatatatgcaaaagttgaaaacaaaattttcccctcaaatataaggttacagaaaaaagaaaaaataaataaaatttaatctgaattctgaaaaggttttatgccctagaaagtaactttaattttgggaactaagatctacctctctggtgtcactttccaggttttaagaactgtaatctcttaagagccccaggactacctcagggaataaaaagataagaaaagttaacatgtctgcttctgaggtttcataaaatcccaaatacgtgaaccacctgaaaagaggaaaagtgggagaatgtgagctcaacagtactggtattagaggagaggaaaattttacatcctgcccaggaaagaattgttagccactttaatgcaagtcaattttcttcaaagtgaaaagtacgccctcataattgagggttatttataagaaacatgaagcatgtttccaatctgagaatactgcatgaagaaaataatgctaattttcgacaaatgcaaaaataaatgttattgatctctcttacaaacagaaaacaaaaagcacttcatctaaataaaccactgtgaaaaaaaaaatggcaacctgacaccaaagggtcgtttttaaaactaaaatgttcaaatgacagaactcaaataatctgtccacagtaatgctcggacaactctgagcaaaatttcgtatttagtcaactggtaggctcgctcactaaagtagcaattacacgcatgagaaggaagggaattaagcgggctgagtgcgggctgggtgattgtgttttgagacctgctcacaggaagccactacatcctgcctttagtcccgcctgtcacgccgtccctcgattcaagtcccggccgcagcgaggtggggcaagtacaggtgtcccgccgagctcctcccggggcgctcacccgcgaacagaccgcgcggtagccactcgggccccagggcggcccgtttcctgcagctcagggcgcctttttcaacctctcccaggctcgccgagcccaggaaacgaacagccccctcccctcgggccagccccacttcccagcccgccacctcctcgggccgcgcctccgtataattactgctcggctcccaccgcggggccactccccagcgcccgcagccgcgcgaaggcctgagtctgagggcggccggaagctcctcacgcccccggaccgcgcccccggccgcgccccggactccagcgtccccgcgtccaggccgctccccacgaccgagcccctcacgccggcgcagcccgggctctcccaccccaggcccatctccagctcccactccctccggagagcagcagccccggcccacgccgccccgtcgaggcgacgccgccccccaacacacccccttccagcctcaaccgcgcccggcccaggccccctcccgggcccgcgatcccagcgcagctcggcgccgccaccgccgcgaacccgccgccccctcagcctcgcgcccagcgccgccagggcgtcccctcagcccagcccccgcttacagatcttgccccgcaggctctgcaacactcgaacctcgcgactgtcctggtccccggcctcgggctctgcagtcgcactcgccgctggcgcctcggaagaagccgccgcagcagcaggcgccgccgccgccatggtgccgcccggcccgtgccgcagccctgccgcctgcgtagccgggcgaggcggagcccagcagcggcctaggcccaggccagccgcgcgcctggccccgcccccgggcctcggcccgactcgccccgccccgccccgcccgccgcggccccgcccccgccccccccgggtctccattcaccgccttcgccacccccgagccgggctaccctgcagagaaccgtactcccggcttggggcgctggctaagggtagctcccagtcgtggctctgagcggccttaaaatccccaccaggagaacgccccggccctcccgtgatccctaaatcctcccgggaattgggctcccccaatgaatagacctgcacatctcctaacgctcgcgggaaatacaggcccttcccaatcagggaaactccctgtgggaagaaaatagaatggaatttggcaggtgggtggacctcaaaagtatcttattcaaaaggaggcaagagatgcatttgaggctcttccagtattatccaaatactccccgccagcaagccaaactcctcccacacaaatactctttactaggaccaattctctgcaaaacctggttcaagaaaaggaccagccacccccaactccagcgtgagtgcagtgcctgagaccctctcatagagaaattctgaagcatttaccatcacttttgtatttcaggaacagaaaaagcaaagaagggctcccccccgccaccgccaccactactaaaagttggctttgttaaaaagttgactgaccctaggaaatgtgtaaatctttgactaattgttagctttatttcaagggaactctttacagtgagtaaactgcatgaataataccctggtatgtgatgaggaagacaatttcctggtgttgaggttgttaactacgctgccctaagaaggaagaaactgtgacttaatcgggcagggtaattcttttccagggcaacaacaggaataagccagtcagtcaacaaatattttttgagggtcagacatagtgatggcctcagacctcagagactacacaaaggtcaagatgaagagagctccagctcattctggagggagacacagaaaaggccagaggcactgggagataagaaataggacggggaaacctgaaaactgaagacaaacgcgccgcctgtgcaaaggctggacagccccagagaatggtcagagtttaacatggacctggccagcgaagcttccagttctgcctgtgttgcaggtgacttctatttccccatgtgatctttacacttgttggataaagtgaaccacttcctcttatatgaatgttttgctgtcatttcaaacataagtccaaaacttaatttcctgtctccctttccaaatctgagttcacatcttatactgttactcaggccagaaactttgactttttcttatcccttgtcccaatgctgttttcagttgccacatccttctgactctgctgaaatctcttccttcctttccattctctgtcattgcccttgttaaaattattctcatttaaagagtatcaacgtgttacagggttttttcccccttatttttaaaggcatccctttttagaatcagacatagagcctgtttctaccccttttacatttgggcaagttactcaaccttcctaaacctgtttctgtttcttctctttctttctttctttttttttttgacagtcttgctctgttgcctaggctggagtgcagtggcacgatctcagctcactgcagcttcaacttcctgggctcaagctatcctcccatgtcagcctcctaagtagctgggactacaggtgcgcgccaccatgtccagttaatttttgtatttttggtagagatggggttttgccatgttgcccaggctggtcttgaacttctgggctcaagtgatccatccgcgtcagcctcccaaagtgctgggtgtaagccactgcgcccggttgaacctgtttc

SEQ ID NO: 316207 - DNA, 4001 bp, Homo sapiens
ctcagctcctttgcagattctgactcaacttccatatctcacgatgaagtctgggctcagtcctgatcactggcctggtctgtctacattcatctgccccagatccacggctgaaacactgacctaaaccctcagactagatcctccgtgccagtaccttcactaggatgtctaaaagacgtttcaagtgaacatggccaaaatttaattcccttttcttcagcctcactgctacacttgcccagcttcctctttgcagcaaaaatggccactaggctcccagttactggagacaaaagcccaaacttatctttgatttctcccttgtctctacctctgataaacatgcccaaatcatcctgcttcttatctccatggctactttatttctctttgagaacgctgcaatgtcccagccttgttctttttttttttttttttttttttgagacagagtctcactctgtcgccaaggctggagggcagtggcacgatctcggctcactgcaacctccgcctcctgtgttcaagcaattctcccacctcagcctcccgagtagctgggattacaggcacccgccactacgcctggctcatttttttttattttttagtagacatgaggtttcaccatgttggccaggctggtcttgaactcctgacctcaggtgatccacccgcctccgccttccgaagtgctgggattacaggcatgagccaccgcgctcggccccttgttcattctttgcattctgtcacaactttgtgctccccccagctgaatttgtgatgtcctcttgtaccggatgagagggtctccatgcacacacagacctgggacactatccatccacaagttcctaaataggccagagcagtgatgctcaacccagactccatgttacaataatttggggagtttttaaaatttactgatgcctagggtccactcccagcagttgattcaacaggtctgcggtgggatccaggctagcggggaggactgtaaaagcacccctggtgattccagctggtgtctacccaggggagagcaacctttgcttgctggcgattcccaggggtgcagaaggactgctgggtgtgtggctgcgtgcatattttagcatctgattcactgggtcagaaaagggtgtttgctaaataaagactcaacaaaactcctgcttgcagggggcccaccaaaggttctaaatttttccaggctccctcccataggtggtaatttcccttcaccctaaaggttctggagggggtcatgagtgtttgagaagaggcaagcctgggaagatggactccgaggacagtaggcacaaaccctttctcaagaagggccaaggcattttaaagataagaaacttaaaatcagcgtatttttacatataagcagccacctctgctcatctgtggcccagatacgagtggagtgcgacaagggataaaccattttcgcgcactcttcagcgatggggcgaaagtaacggacctagtcctcgggagctgtccccgccgaccccctctgccgcgacttgacccgcggcgactgcgctgccccttggctgccccttccgctctcgtaggcgcgcggggccactactcacgcgcgcactgcaggcctttgcgcacgacgccccagatgaagtcgccacagaggtcgcaccacgtgtgcgtggcgggccccgcgggctggaagcggtggccacggccagggaccagctgccgtgtggggttgcacgcggtgccccgcgcgatgcgcagcgcgttggcacgctccagccgggtgcggcccttcccagcgcgcccagcgggtgccagctcccgcagctcaatgagctcaggctcccccgacatggcccggttgggcccgtgcttcgctggctttgggcgctagcaagcgcgggccgggcggggccacagggcgggccccgacttcagcgcctcccccaggatccagactgggcggcgggaaggagctgaggagagccgcgcaatggaaacctgggtgcagggactgtggggcccgaaggcggggctgggcgcgctctcgcagagccccccccgccttgcccttccttccctccttcgtcccctcctcacaccccaccccggacggccacaacgacggcgaccgcaaagcaccacgcggagatacccgtgtttctggaggccagctttactgtgctagaggaagagggtccccacatccggccctggccctcctggtccggtttgctgaagcaacacacttggcctacccactgggtggggcaggaagtctcgagccttcacttggggtgaggaggagggagatcggtcagcagctttaccgcccgctctgctctccactgcggagactggggctccggcagaggctggaccgtgatcttgaggttcaggggtgcattctgggtggattcccttggcatgggtggtcggccctcagcaactgcagccctcatttggctctgtcaccctgggctgccaggacacaagtctttccatgcttttcccagtgcttgacttggcactccctgcaggcaggtgggtattgaggatggcaatgcatgtgggggatgtgggagtagggcttagaggtccaaggttctaggataccctcacctgcagcaataccactcattctggcatcgtgagcagcgcttagaagcctctgcactgcagtaagcacagcggggccgctctggagccactgcctctagcacatccagcctgtaggtctcagcccacctgggggaaagtcaggaaggtctgactggccctggaaggtgggggcaccccacccacatccatgcctcctgcatcccctccaccctccctgccatttccacaggccttaccttcgcgcctgcagccgcaggtcctgctctgaggggctgaacacatgctggagctggtgcttggcaattgcctgccacttgcctctgttttctcgctccagccgctcccagatttctgggatctaggagagagaagtggagagtggcaggaaggtgctggtaaagtgggacagtggtcctgagcagctaactttccagtgcctacctgttccaacaccaggtccttcttaggaggctgggtttcagttagggtcagatgggccaggaaactctgcaagtgggccaggttgggcagctggtccagcagtgtgtctgtgaggaaggcccgaagctgcaagggtgtccagtggaggccagtgtgatgcaggtgctggccagggggccaaggaaaaggaaggggctgggttgggctgagaatgcctgtgggggcccatgtcccactagctggtgtgtcacctgaggcccaaggactgaaaagagcactggggttgaggtgggtgggcaaagataaacagcagggacgcagtcggggtaggatggggagggcggtactggggctgtgggggctggtgcggagggagtctgaccttgagtagccgtcccttggcaaaacttgtgaggcagtagcgcgcctgagcctcagggcttagcagcaggttgtacagggcgatccacacttgcccgtccaacttgctcagcttttgctgctctgagggggccacagtatgccaacggctgccctcgaactgctgcagcttgcctggggagaggaaccagcacactgggtgcagacgttgaattctcttcaagtgagccagctgtgggggctgggagactgaccactgcctgggaatgggagaacctgggctgcaggacttgcccaggctatagggctgctgaccccagagcagggtgagcctcagtagtggacacatgggcctggcctgctgcagagctcaggtctaggccaaccttggctgaggcatcctggtatcctcagtgggcttggggacagggtttgtcttcgtgtgtgcaagctgcccccctctatcaaaaagataccctgaagcagtagcctggggcttaggctggtgggggaggaccctacctccttcccgccggctccag

SEQ ID NO: 316208 - DNA, 4001 bp, Homo sapiens
aaggaattttgtaaaattttatctgaagcatcactcacaactccactttctttacttaaataaggatttccgccccatttctgccaggcatactgagcttcacagtccctgtttctttttcctggtgcctaggcctggttctctgagcctggtggtcacaccaatggcatctggcacacagttctccgataatggggatacctaggaggttccgagacaccttacagtcctgggttagtaacctggatctctttttccacctctttaggcattttataatctagctttcccccttcctgtgggtaaagtgctcctgaatgcttatggtccaaaacaagacttctttcctatctattcccaaatctttctccagatccaccctagaggaagggaacagaatcttccacattccagcagctggtgacaggccagaacagggaagaggtgagggctcagctggctccatacaggagtgcagatggaggagcaggatctctctctgcctctcaagttttcctaaacatacttctcaattcctggcgaggactcttccctctccacatcctcccctagtctccccaaggagggagcaggagcattcgaacgcggaaatcgaggtgctagtccaaactgctcggtcggctttagtcatagctggataatgcccggctcaggtctaccacaagccatacagctgctttttccgtgttcaacctgtctgtgacagaaaccaagggggccccggcacccagcatctaggcggtggaatcggggtcttacgcacggttccgcgggcaggtccccggccaggacccgcggggagccacgtagccaggagggtggggctgcccaccgacccaggacgcggcaacggaccggggagggcggagctccagcgaccgcttcccctcccgcccgccggcaccccctggctcccacctggtcccggcgcggcctgcgagctagcgaggttcgcgcggtgaagtactgctcgagctccgagtccgagtcctcttggctgcagtagccactgctcgtcgtgctgctccaggtcatttcgaaagaaggcgcctccgcctcgcccatagccgtacccgcccgtcccccagtcctgcgcgtccgtagccgccaaccaccgccccggtcgcgtgcgtgcgtgtacgcgtgtcagtgtgcgcgtgcgcccgggccagagccgcgccgcaaccgttaagactgaaacgtagatcgccgggatctagctcttgtctcattggggcaggaacgccggggcggggacacgcacgcttcgcccccaggaatgacctcatcgctccggagctccactcacagaccccacctaccacagggaacgggggcgggtgccagcgtccgggcaagcgcacaagagtggcctctggccggaggcgagggcgggaaggtgcgggaagtgcgcgtgcgcggagcctgggtcagcctgggcccgggtccgcttgcagcgggtggagtacttgcggagccggcaatccaggctcccctcccagcccccgcgcagaattagcctctctgtgccgccgggaaatcggcaattagaacgctccttgcgcgcggcacccaggcagccctcgagaatgcctgcactgtggcctgcccatcctcgcccttcccatacgccctcggccccgcgctcaccacgttcgtgtcccgctccaccgcgggttcccagcccaggtcccggggcccgcaacagtccaggcagacgagcgcgcggcagcggtagtggcaggtgaacttgcaatctgcagagaggcctggcggtgaggcggaggagctccaggtcggggaaatgtcccggagattgaagggaagccccagggagagggccgctgctcgccaggctccgcaggcccgacctatctcagtgggttacctcacactgctacgcggactctaatgttggccacctgggcgtctggaaaccggccggaaggccacaggcagagaggcctgctcaacagttggatctctatcgcctagcacagaacttcccctttcctcattggcaattaaaaaaacaacaacaaaaaactgcgtcttgcttttgtcacccaggctggagtgcaatggcgcgatttcggctcaccgcaacctccgcctcctgggttcaagcgattcttctgcctcagcctcctgagtacctaggattacaggcgcccgccaccatgcccagctaatttttgtatttttagtagagacggggtttcaccatgttagccaggctggtctcaaactcctgatctcaggtgatccacccgcctcggccttccaaagtgctgggactacaggcttgagccaccgcacccggcccttcactgggaacgtatatggaatacatctgcccatttacttgaaggaaaaactaaacacctttaacctacgtctgccctgtggttgtcacctgtctctactcccctcagaccaagacactggtctctatacactctaatccttcgccttcactctcccctctacccactccagccaggcttgcctcttcctccaggaaactgcccgggacagggtcctcagcgatctgtgtactaccaaatggaatccagtgttccattctccattctcaccccctcagcatcatttgaagcttgctccctttgactcccaggggctacactctcccagttttcctcctaccccctgcagctcctgctcagctcctttgcagattctgactcaacttccatatctcacgatgaagtctgggctcagtcctgatcactggcctggtctgtctacattcatctgccccagatccacggctgaaacactgacctaaaccctcagactagatcctccgtgccagtaccttcactaggatgtctaaaagacgtttcaagtgaacatggccaaaatttaattcccttttcttcagcctcactgctacacttgcccagcttcctctttgcagcaaaaatggccactaggctcccagttactggagacaaaagcccaaacttatctttgatttctcccttgtctctacctctgataaacatgcccaaatcatcctgcttcttatctccatggctactttatttctctttgagaacgctgcaatgtcccagccttgttctttttttttttttttttttttttgagacagagtctcactctgtcgccaaggctggagggcagtggcacgatctcggctcactgcaacctccgcctcctgtgttcaagcaattctcccacctcagcctcccgagtagctgggattacaggcacccgccactacgcctggctcatttttttttattttttagtagacatgaggtttcaccatgttggccaggctggtcttgaactcctgacctcaggtgatccacccgcctccgccttccgaagtgctgggattacaggcatgagccaccgcgctcggccccttgttcattctttgcattctgtcacaactttgtgctccccccagctgaatttgtgatgtcctcttgtaccggatgagagggtctccatgcacacacagacctgggacactatccatccacaagttcctaaataggccagagcagtgatgctcaacccagactccatgttacaataatttggggagtttttaaaatttactgatgcctagggtccactcccagcagttgattcaacaggtctgcggtgggatccaggctagcggggaggactgtaaaagcacccctggtgattccagctggtgtctacccaggggagagcaacctttgcttgctggcgattcccaggggtgcagaaggactgctgggtgtgtggctgcgtgcatattttagcatctgattcactgggtcagaaaagggtgtttgctaaataaagactcaacaaaactcctgcttgcagggggcccaccaaaggttctaaatttttccaggctccctcccataggtggtaatttcccttcaccctaaaggttctggagggggtcatgagtgtttgagaagaggcaa

SEQ ID NO: 316209 - DNA, 4001 bp, Homo sapiens
caccaccatggccagataatttttttgtattttcagtacagacggggttttgctatgttggcctggcaggtctcgaactcttggcctcaagtgatctgcctgccttggcctcccaaaatgctgagattacaggcatgagtcaccaagcccagccttctttcttttttttgagacagagcctcaccctgtcacccaggttggagtgcagtggcacgatcttggctcactgcaacctttgcctcccggttgaagtgattcagtctcccaagtagctgggactacagtcacacaccaccatgcccggctaatttttgtatgtttagtagagatagggtttcaccatgttggccaggctgacctcgaattcctgattgcaaatgatccacctgccttggcctcccaaagcattggcattagaggtgtgagccaccgtacttggcttccttttctatttttgagacagagtctcactctgtcactcaggctggagtgcagtggcacgatcttggctcactgcaacctctgcctcccaggttcaagtgatccttctgcctcaccctcccaagtagctgggattacaggtgtgcacctccgtggctagccctccttttcaattggttagtgtcttgtggttttcccacctttccacagtggaaaatggctcaggactgactgacatgaagacaagcccaggggtctacactcaactcaacccttgcacccaagctctgggctaagattttggcgtgctgagcaccacccattttgtaaggaattttgtaaaattttatctgaagcatcactcacaactccactttctttacttaaataaggatttccgccccatttctgccaggcatactgagcttcacagtccctgtttctttttcctggtgcctaggcctggttctctgagcctggtggtcacaccaatggcatctggcacacagttctccgataatggggatacctaggaggttccgagacaccttacagtcctgggttagtaacctggatctctttttccacctctttaggcattttataatctagctttcccccttcctgtgggtaaagtgctcctgaatgcttatggtccaaaacaagacttctttcctatctattcccaaatctttctccagatccaccctagaggaagggaacagaatcttccacattccagcagctggtgacaggccagaacagggaagaggtgagggctcagctggctccatacaggagtgcagatggaggagcaggatctctctctgcctctcaagttttcctaaacatacttctcaattcctggcgaggactcttccctctccacatcctcccctagtctccccaaggagggagcaggagcattcgaacgcggaaatcgaggtgctagtccaaactgctcggtcggctttagtcatagctggataatgcccggctcaggtctaccacaagccatacagctgctttttccgtgttcaacctgtctgtgacagaaaccaagggggccccggcacccagcatctaggcggtggaatcggggtcttacgcacggttccgcgggcaggtccccggccaggacccgcggggagccacgtagccaggagggtggggctgcccaccgacccaggacgcggcaacggaccggggagggcggagctccagcgaccgcttcccctcccgcccgccggcaccccctggctcccacctggtcccggcgcggcctgcgagctagcgaggttcgcgcggtgaagtactgctcgagctccgagtccgagtcctcttggctgcagtagccactgctcgtcgtgctgctccaggtcatttcgaaagaaggcgcctccgcctcgcccatagccgtacccgcccgtcccccagtcctgcgcgtccgtagccgccaaccaccgccccggtcgcgtgcgtgcgtgtacgcgtgtcagtgtgcgcgtgcgcccgggccagagccgcgccgcaaccgttaagactgaaacgtagatcgccgggatctagctcttgtctcattggggcaggaacgccggggcggggacacgcacgcttcgcccccaggaatgacctcatcgctccggagctccactcacagaccccacctaccacagggaacgggggcgggtgccagcgtccgggcaagcgcacaagagtggcctctggccggaggcgagggcgggaaggtgcgggaagtgcgcgtgcgcggagcctgggtcagcctgggcccgggtccgcttgcagcgggtggagtacttgcggagccggcaatccaggctcccctcccagcccccgcgcagaattagcctctctgtgccgccgggaaatcggcaattagaacgctccttgcgcgcggcacccaggcagccctcgagaatgcctgcactgtggcctgcccatcctcgcccttcccatacgccctcggccccgcgctcaccacgttcgtgtcccgctccaccgcgggttcccagcccaggtcccggggcccgcaacagtccaggcagacgagcgcgcggcagcggtagtggcaggtgaacttgcaatctgcagagaggcctggcggtgaggcggaggagctccaggtcggggaaatgtcccggagattgaagggaagccccagggagagggccgctgctcgccaggctccgcaggcccgacctatctcagtgggttacctcacactgctacgcggactctaatgttggccacctgggcgtctggaaaccggccggaaggccacaggcagagaggcctgctcaacagttggatctctatcgcctagcacagaacttcccctttcctcattggcaattaaaaaaacaacaacaaaaaactgcgtcttgcttttgtcacccaggctggagtgcaatggcgcgatttcggctcaccgcaacctccgcctcctgggttcaagcgattcttctgcctcagcctcctgagtacctaggattacaggcgcccgccaccatgcccagctaatttttgtatttttagtagagacggggtttcaccatgttagccaggctggtctcaaactcctgatctcaggtgatccacccgcctcggccttccaaagtgctgggactacaggcttgagccaccgcacccggcccttcactgggaacgtatatggaatacatctgcccatttacttgaaggaaaaactaaacacctttaacctacgtctgccctgtggttgtcacctgtctctactcccctcagaccaagacactggtctctatacactctaatccttcgccttcactctcccctctacccactccagccaggcttgcctcttcctccaggaaactgcccgggacagggtcctcagcgatctgtgtactaccaaatggaatccagtgttccattctccattctcaccccctcagcatcatttgaagcttgctccctttgactcccaggggctacactctcccagttttcctcctaccccctgcagctcctgctcagctcctttgcagattctgactcaacttccatatctcacgatgaagtctgggctcagtcctgatcactggcctggtctgtctacattcatctgccccagatccacggctgaaacactgacctaaaccctcagactagatcctccgtgccagtaccttcactaggatgtctaaaagacgtttcaagtgaacatggccaaaatttaattcccttttcttcagcctcactgctacacttgcccagcttcctctttgcagcaaaaatggccactaggctcccagttactggagacaaaagcccaaacttatctttgatttctcccttgtctctacctctgataaacatgcccaaatcatcctgcttcttatctccatggctactttatttctctttgagaacgctgcaatgtcccagccttgttctttttttttttttttttttttttgagacagagtctcactctgtcgccaaggctggagggcagtggcacgatctcggctcactgcaacctccgcctcctgtgttca

SEQ ID NO: 316210 - DNA, 4001 bp, Homo sapiens
ctgctgcccactgcccttggtcctactccgttcctcatatggtgaatgggttgtcctcccacggtcactggaaaggcttctccgtttccgcctctcttcccagggcttgggcaaaccacggtctccatctgccccccaacgctcaccactccggctgcgcactgagcgactgtagccctcaaggctgtttcggcggtcagagcttttactggggctggtccagtccccttccaaaaaagtccggtctcggtctgagtacagaaggtgtgggggcgtcctgtcccgcaccaggtcggcgtccaggttgcggtgccgggtgtatccatctgtgagcagctcataatgcacagggagtggcgagggctggtactgctgggggtaccgagtctcctctgctttggcaaaatccacgcggagcctgcggtctggtccacccaagggaaaacccctcattttagcacaggcggcctgggctgcgtccaagctctcgtactgaatataggcaaagctatctcctttgacgtgatcaatggtccgaatgctcccaaagcggtcaaactctcgggccagagccgccagtgacgtgttaggtcccaggccacccacccagagacgagtggtggggttggccttgccatagcctatcttaatggggttgcgaccaatcactcggcccgacatggccaccttagccctatgggccatgtccaggttctggaacttgaggaaggcataggcaccgccctggccacgggcaggcctcttgatgaccacctcctcgatgatgccatatttctcgaaggcccttcgcagctccacctcagatacgctgtggtccaggttaccaatgaagaggttgcgcgtggcccgctggtcatcctcgggcatcaggtcctcctcacacacagctgggtagccataggggcgcccacggtcgtcgtacagcccgtagtagtccagggcccgctcccgggacagtcccacggcggcggcagcagcggcatccagggcgaaggctgcggcggcgtgacgggcacggggctcccgcaggggcggggcagcgacgggggacagcgagcgctgcttgtactggtagcctccgtgtagcgggaggtagccgagcgggtcggcgggcgcgggcggccctgggggaggcgtggaagcggcggcgctgctgctgctacttcgccgactgctcccgccgccgccacgcaggtacacgggctctaccttgagcgggcggtcgtagagcagcagctgccgggccagggcgtgctggcgggcctcgcgtgcgtcctgtgggtgccggaaattcacgtaggccacacggcccagctcaggcgtgtgcgacaggcggaggctgatctcgccgaagcgcttgaactggtggaagagccggtcctcgaggtgctcggcgggcagcgcggggctcaagctgctgatgagcaacgtcttgtactcaggcgcggccgcggatgagccgggacacgcgggctcggccccaggcggtggcggaggcggcggcagaggagacgcgcggggcgacatgccggaggcgcccgggtcccccgaggccttgccgccgcgtcccccgccgccagcgccggagcccgaggagcgcccgctactcgcgcggtgattcgcgtccccggtgccgcggccgtcgcgatgcccgcccccgccgcttccgctgccgcggggtttgtcgcgggcccgcgctggaaccgggtgcttggcgccgccagaggccttgtgcgccgcccgccgcccgcccgcctccgcctcccgttcgcgctcccgcggacgcttggcggacgatgacgagccgcgcccgctcgggctagagtctcgctcgctctgccgcttcatggcgctggcgcggcgggcgggcggcccgtaggtttctcacagcggcggcggcggaggcggcggccgaggaggcagcgcccccggcgccgccatcttggacaaaaggactcggcgcggcggtggcggcggggcggggcgggagcggcgccgaggggccgggcattgcgttatcaaggtgcgccgtcctgccacgtgactctgcggcgggcggagcaagacccgcgccgggcctgcctcatcgcgctgcgtcgcccagtgccaggtgaccctgtgagtgctgggtgagtgggaccggccgcgcgctctggcgccaccgcgcggcccgcatggccgatgcttgaggctacgcggagtgtagtgaaccctgagaggccggcgagacgacctaacgctttgtgctcccagccgtgctttgccgctctgggtccagctatctcctcttgcaggcactggagcccgcgctgattggagcaggagtggcagcttccatggccgttgggatctggggcattgacccagtcagtggtctctttatgtagtatcccctcagtcctaggactaggcttgagcaaaccccacatcaccctcgttggcatctcctgcctgggatccggcgttgacggcgccaaggactaatgcatgcctatccttagaccctgcccaggacccaaggcccacattctgcgcattctccacgtgcaggttcacctgcagcagtccccgaaaaggccgtgaggacaattgctgtcacgcaggtaataaccgaaagcagagacaagcctgcagttgcagttgatggagttggaatagactctttaacgccactcttgggtcccaccctcttctgtgggcagatagcaggctggaaaggtagggccgtaagagccaaggatgaagaggccatatgcacagatagtgccagcagttatcacaccttgccacgctgacccctcgctggccagtaccctcctgttcatcaccttcaggacgacctcttctccccaggtgaggtgagggaaagggtgcccaggtgctcaagcccattgaggaagctttcattctccaaggacagttgctggagccatggtagaacctgacccaatttctggcacagaatccttgcgatggggaagagcagaccaagtcatgccctcttcgcacaaagagaaagcagctcctggagtagctcaggcaggtgcagggggaaaggtcttggaagaaagcaatgggttccacagcagcaaggcctcctacaggcaaactgagcttaggagacacaagtgaagtgatctgaggcaagaccaattacttggaaagcactggttcttagtccgtcctttcaggtggtttctacaggtgtcttcattgagccacagctcacactaacaactgggtttcctaagcaccagtgccacagagagtggcttaagaagcagactccagcaaaaccctggacctcaactgttagactaatctagggtaaacaaaggcaaaaggcagcttcccactccctctttgtataagctgactcctgccagacttgcaaaaactggaacagacatcagaggcttggaatggacaaaagagcaagtaggtggccaggccaacagcatctttatagagatgtcagtgctgacgtgcactgattgaagatatccttgtggaaaaaccacactccagacaccctgtcttgcttgtactgagccacaatataaggccctccaatgtatcccagactcactcctcctagagctgtggcctccagctctcttgggcgggtaagacagatactgtatcaaggggcagggtatcaagcgcagcaccccccgcccccgccacctcctttctgctgagtgcctgctgccctctagtggtacacacccacacacatcagctggccccagcccctatgtcctgctctggtattttcagcactggtgggttgagagataaatgggaatgaataaccccccaaactctgcaactggaaagcagaaactggtaggagcctcctggggcaaaaccccattttggtattcactataattctgcaaggacagctagaaattttttttctttaataaaaaaatcccagacacactttgaagtcctagagtacaccagcaacagaa

SEQ ID NO: 316211 - DNA, 4001 bp, Homo sapiens
gaacaataacaagaaatggcattcattgattgcttaccacagccaggaactgtgctaagtgccagactgtatgatctcctggattctgcaaaggttgctgtccacacagggaaccttcagtgacccactctaccctgcccttctttgcctaaaattctttcttatccttcagcttccttccagagaatattttctccaggaagctttcctggctgtgaacaagaaaaagacatacttcctatgtgttctaagagcaccctacactttatcacagcatgttcacacagtactttaattctctcactagactgtagtttgtgacaacaggatcataaaggtgttcgttagcaatgcctggcgcaaaacactcatatattagtttgataaactattttaaacaaggagttcagtccccactgaaatgttgagatcaaagccacgtactgtagtaacttaccttttgtctgaacccattgtcccactgaagatttagcacacagctccaaaaggttcaaattttattttttctaggagacaagagagattaattgctataaatctcagagatcacttaagtcagcagctccatagcttggatactactgaggctgggatttcatcaaaccttcaaatcattgacagtgattatctaaggtggggaagtggtggggacaaactgtcaacgttaaaatcgtgctaacattttgttaacaatgagcaaaaccggaagattaagcatattttaaaatattagattccagatttaacagaatcataatacggagcaagcagaagactccttccctgctcctaccttagaattacaaagcaaaaagggcagagctacaatcagctccttggttttgtatcaaagcaactccgtgggatagttgaccgttaaaacattaatccaagtgtcttcattaatacaaggagcaacatgaaattcaaacacttctgatgaaaaatgtaaaacctcgtagaagctgggatactgagctgactgaaatctactacattaataacgtatcgcataagacaagagcaaagctagaaacgacctaattcctaggtaacaataaccaccacgtcttgagccagttcttatgactacaaaccactgagtagtgaacagcccggccccccgccccccgttggtaataagacatcacactgctggaccgcgttcgatgagcgcgaggtccgaaaaatcagttccagtagtctctggaagcctagtctagagcgaatgctcaacgatttgttgaaattaataaatgaaaaagaaccactggggggaaacaagtcccggggcatattcactggtgccgccccttgtctcccgggcggtgccggcacccacctccgtggggtctcgcggccgagatggcggcgtcacggcctgctcgaccgactccagcgtccggcctgccctccccgcacatgcccctcccgcctcccaagaggttccaaacccgcagatgggcgatcaccgaacagcttttcggagagggcgattcagttgcagttgagcgggggatggcggccagagactgccagggagctcccaaggagtgcccgagggacaggcgacggctccactgctccgttgggctgaagattaggggacgtgtatccacaaggggcaaagtcacagccagaaagaagcaggcccaaggctgagctggctggacaccctctggaaactgacagagctggcaacaaggaagggcgcggccctccaacgcctggggtaatttagcccctctacagaaccggctggagctgatcagtcgcctccggcagctgacaagggaggcttgggggccagcccaaatggcaagaacctaccgtcgttacagacagccgccgcacttaccccaaggagagaccgaagcagcagtagcggttctgcgccccagaacctccaacaaggttcggcggctacacaaaatggcgcctccgccgacggccgtctcctacccacagtacctcacgcttatcccctccccctgtcacccgcctcctgcggagaagtccaatcctcgaagcggcctggctgtgcgagggctgccgggaaatgtggtcgccagaccatcctgtcacttaggacgctctgtgttaatgtcttgcaattctcttctaaatcactacagagttgtcgatcggcttttgcagacctggattagtttttagggctcctattaggcatgttaataattctttgcttttgctactagcgccgtagagagtacagtttgctttcactggcacggtgtaaaacattgtctaattctacttcaaaaggagaccgtgcgtgaagtggtggctcactcacaagccagcattttgggaggccgaggcaggaggatcgcttgaggccaggagttcgagaccagcctgggaaacacagtgagatcctatctctacaaaaaataaaattaactgagcatggtggcgtgcacctcttgtcccagctactcaggagctgaggtgagaggttcgcttgggcccaagaggtcgaggctgcagtgagctgtgatctcgtcacagcactccagcctggggacaatgcgagaaactgtcgctaaaaaataaaaaggaggccggtgctgggcgcggtggctcactcctgtaatcccagcactttgggaggccaaggcgggcggatcacaaggtcaggagatcgagaccatcctggctaacacggtgaaatcccgtctctactaaaaatacaaaaaaattagctgggcatggtggcgggcgcctgtagtcccagctacttgggcggctgaggcaggagaatggtgtgaacccgggaggcggagcttgcagtgagccgagattgcgccactgcactccagcctgggcaacagagtgagactctgtttcaaaaaaaaaaaaaaaaaaggctggacgcagtggctcacgcctgtaatcccagcactttgggaggccgaggcaagtggatcacgaggtcaggagctcaagaccagcctgaccaatatggtgaaaccgcgtctctactaaaaatacaaaaattagccgggcatggtggcatgcacctgtagttccagctactagggaggctgaggcaggagaatcacttgaaccagggaggcagaggttgcagtgagctgagatcgtgccactgcactccagcctgggtgacagagcaagactcagtctcaaaataataataataataataataataataataataataataataataaataaataaataaaaaggaggggccaggcatgatggctcatgcctgtaatccaagcactgtgggaggccgaggcaggtggatcagctgagctcaggagttcgagaccagcctggccaacatggctaaaccccgtctctactaaaaatacaaaaattagctgggtgtggtggcgcacacctataatcccagctacttgggaggctgaggtaggagaatcgcttgaacccaagaggcggaggttgcagtgagccgagattgctctaccgcactccagcttgtgcaacacagcaagactctatctcaaaaaaaaataaaaataaaaaataaattaaaatgaggaacattagttgatcgctttactagatgctatattattgccctagatgctttgcaaacatttttgtttgtttgtttgtttgagatggagttttgctcctgttgcccaggctggagtgcaatggcacagtttcaactcactgcaaactctgcctcccaggttcaagtgattctcctgcctcagcctcccaaacagctgggattacaggcacccgccaccacacccagctaatttttgtatttttagtagagatggggtttcaccatgttgaccaggctggtttcgaactcctgacctcaggtgatccacctgcctcagcctcccaaagtgctaggattacaggcatgagccaccgcacccagccagaactgatttttcaggtcatacaaattgaaaactgtgcctataccattagttacagaaag

SEQ ID NO: 316212 - DNA, 4001 bp, Homo sapiens
actacaacctctacctccccggctcaagcgatttttccatctcagcctcctgagtagttagggctaacaggagcatgccaccacgcctggctaattttttttttttgtattttttgtagagacagggttttgcgatgttgcccaggctcacaatttgttttagaaatactataacagggccgggcacggtggctcacgcctgtaatcccagcactttgggaggccaaggcaggtggatcacctgaggtcagtagttcaagaccagcctggccaacatagcgaaactccgcctctactaaaaaaatacaaaaaattagctgggcataaggcgaaacgctgcctctactatgttggtttttgttgagttttgcgggttttttttttttttttttttttttttttttgagacagagtttcactcttgtggcccaggctggagtgcaatggagcaatctcagctcaccgcaacctccgcctcccaggttcaagcgattctcctgcctcagcctcccaagtagctgggattacaggcatgtgccaccatgcccggctaattttgtacttttagtagagacgcggtttctccatgttagtcaggctggtctcgaactccccacctcagcctcccaaagtgctgggattacaggtgtgagccaccaggctcggcctggtaatagaattctataaggaaaggtgctacaactatccagagagacctgggacctgtcctgcaggttaggtatctagttagatgctagtttctgagacaaggttcaaattcaacttttgtgtttcaccaaaatggtaacatattatttagttactttcttcactgccagtcctaccatcacgcaccagctcttgacacctctcgttagagacctcacaaattcagtaatggtgacatatttaaatcattcacgctggtggcatttctcaataggaaggtggaaactagcaagccgagggcacaatccagggttcagaaaatgaaccaggtgaccatgtctgcatgtctactgaactccttcacttaaatccggctactctgaccttcacaagcaaacctggaatatgcaaaaaatacaattacgctcacggtttatgtaccctacgaaacagggcccttccttcaaaaaaaaaaaaaaaaaaaaggcattcccaaagttgaacccattcgcctaacgtcaattctaaaataaagagaaaaacatctatttacaccgctaatggaatctaaagcgtgaatacgataaaacatccttctccttcattgcctaacgggcgcagaacccaccagaccactctcccgcttccaggttctaccgccccgacgaccgggctcggagctcttgtgccctccggtccagcggagcctcccttgtgtctgtccaagtctgaggacgaggctacgtgctaagcacaagagctcccttcctagtgatgccacagaattggatctgaaacaggaaaaccgcaagaacagcccgcttacagctccgaagagtaggagcacagagccgcaaccacgcgccggccccagcctcacagctggccgctccgcggcgggaccggtaatctactgccgcgccgggccccgccccaggcccgcgacggttccggggcgttcctgccacgggcggcgcctccctcatctcaccgttgcttggtcttcttcccgagcgaggccgcagccgccccgcgacactgaagccacagctttcaggctgcgcgggcctgcgatgtctagagcgggcctgtctgctggctattccctggcaggctctggcacgcctcccctccagtcccgggcccttacctaggcggcgaagcctccacggcccgctcctccttctcctcagcctccgccaccgacccagcgccgcggacaccggaacttcctccgcgcggggccactgctaccacaaaggcgccgcgccgctgccttcagcgctcggcccgctgggagatgaagtacagctgccggtcccgcagactcttactcccgccgtgccccgcgcgcaggggacttgccttctggggtgggtcgtaagagcacgctgtccatcgccatccaataagaaggcgcgcttacccgccctactccgcgtgacctgctgggagttgtggtttggcctctgccctgtgacacctggtcctcttgtgctttcctctcagttgattgaggcttacagttttttggtggcttgactttcctgaggtttgctccctgccagcagctcgggtacggccctggcctgcctagctcgaggcctccttattgtccgttagtgtgagagaaatggaagggagcttcttcgggagtaagtttaagccatctccagctggttggcggggcgcggtggctcacgcctgtaatcccagcactttggtaggccgcggcgagtggaccacctgaggtcaggagttctagaccagcctggccaacatggtgaaaccccatctctaccaaaaatacaaaaattacccgggcttggtggcaggtgcctgtaatcccagctactcgggaggctgaggcaggagaatcacttaaacccgggaggcagaggcagaggttgcagtgagccgacactgtgccactgcactccagcctggacaatagagcaagactccacctcagaaaaaaagaaagaaagaaaaaggccgggcgcagtggctcatgcttgtaatcctagcactttgggaggccgaggtgggtggatcacgaggtcaggagttcaagaccagcctggccaagatagtgaaaccccatcgctactaaaaatacaaaaagtagccaggcgtggtggcgcatgcctgtaatcccagctactcaggaggctgaggcagagaattgcttgaacccgggaagcacaggttgcagtgagccgagatcgcgccactgcactgttgcctggcaacagcgcaagactccgtctcaaaagaaagaaagaaagaaagaagttgggcgcagtggctcacgactgtaatcccagcactgtgggaggccgaggcgggtggatcacgaggtcaggagatcaagaccatcctggctaacacgatgaaaccctgtctctactaaaaacacaaaaaattagtggagcgtggtggcgggcacctgtagtcccagctactcaggaggctgaggcaggagaatgacgtgaacccgggaggcggagcttgcagtgagtcgagatagcgccactgcactccagcctaggcgacagagggagactgtcgcaaaaaaaaaaaaaaattacccgggcttggtggcaggcgcctgtaatcccagctactcgggaggctgaggcaggagaatcacttaaacccgggaggcagagattgcagtgagcctagactgtgtcactgcactccagcctggacaatagagcaagactccgtctcagaaaaaaggaaagaaagaaagaggccgggcgcagtgcctcacgcttgtaatcctagcactttgggaggccgaggcgggtggatcacgaggtcaggagttcaagaccagtctggccaagatggtgaaaccccgtctctactaaaaatacaaaaattacccgggcgtggtggcgcatgcctgtaatctcagctactcaggaggctgaggcagagaattgcttgaacccgggaggcggatgttgccgtgagccgagatcgcgccactgcactccagcctcacaacagagcaagactccgtctcaaaaaagaaaaagaaagaggttgggcgcagtggctcacgcttgtaatcccagcactttgggaggccgcggcgggcggatcacgaagtcaggagatcgagaccatcctggctaacacggtgaaaccctgtctctactaaaaatacaaaaaattagccgagcgtggcggcagccgcctgtagtcccagctactggggaggctgaggcaggagagtggcatgaacccgggaggcggagcttgcagtgagccgagatttgcgccactgcacaccagcctgggcgacagagcaagactcc

SEQ ID NO: 316213 - DNA, 4001 bp, Homo sapiens
atataccatagtagaaaacaaggacccgaaacaaagtgtaatttttgaaacacttggaaaaatgtagccaaatgagtaaaagggatggaatgtctgatatttttcatgcaacctttgagtttattgtttttgttttgttgaggcatgagaaatgactgtaaattttccccttttaacttgtccttgctctgccatttccttgaggaatggcaggcagcattctcaacctaacacccccaaagagttaaaacttaaggcaccgagcaggagggctagtctatttaagcatcagcagcacaaactaaatgctcacaaaggcaaatagcagtgtgagtcgaccttggaggggcagggtggattacaaagcaattgaaaaagaaaaaaacaaagcaataatcttttgtataatactgaaagtctgcttcccagtctggtttacaaataggcgttgctggacgagacaaaataaatgacagataactacagcatgaattacctaaccctaatcacatcaccgagtcctggtgacagcatagatcattcaggcacgccttgttcactctcggcatatttatttattaaggagacggtggagtctggctaatgctaatgcaatacaaaataatatcacccgtacactcgaggtggtcactccgctaacatgttttccccctaatcaagtccaatttaattgacaaatcggagcagtgatttcacacctgagagtctttcatgtcttaactgcaggataaagttcagggtaggtactgcccactgcttacttacgtgggcttgcctctgggcccctaatggtcatttgacacacacacataaagcctaaagtatttaaccaattcaagtccaattatgatcagttacatttcattccttttcaagactcaggcctcctcatggcagctacacagaaaaatagatcttctaaaagtaaagaacatctattgtaaagcagtctgtagcatgctgatcatcctcaacataaaataaaataggcaaggcaaattaaaaataaaaataaactctcagagactctggtaggagccctataccttctcacacccttctttcattctataccctgcgattaaaagtttgagttacccccaccgttgcacgtcctatccagtgggaaaaacccttttagagccacaatcaaagaacagctcaccagaaaagcccctgaaattatattcttgtgcctggtaatcactgttgtgatctgctttctaaaaaccgtgcccatctgcaaaagacgttcctgatatcaggaccatttatgctgccaaataacaacaaagaaactgaactcaagtgaaactattatctctccttaaagagaaagctacaattccgggtttgctgctttcttcttatgtcttcctctgcctcattaactccattggtatgtcactaatttcaaagaagcaggaagaagtgatgggggtgggggttaactaataattcacacgcctgtctgtttcccatcccaagtgcagaacgataccacgctgatcgccagaccgtgggtcaagccataccttggtttggagataatgaggatagtagtaagtgtactgggggtacatttgtggctgatccaggcgtttgcccatgtagctggaatctttatctccgaggcagggaactggatgacagggtatagtgccccaggccgagcttcctcttaaaccactattcctgacagtcccggtgactgatgaggcttcagagactccaccactcgctagttccaacacagcaagaatttttttaaaaaacaaaacaaaacaaaaaacacacaccaaaggaaaaaaaaaaagggcgaggagtgagatctgtagaaaaaacacccacacacagccttcccagatcttgcctggcttcccccagctgccggggtccacttgggatgaggcagtttgttctctaaccaggctgtctgtagtgatgtcaattgccagcgttcgtaaagggggaaaaaaatcaaagtccttttagcacaactccgaatccttgcagatcagcttcctgtctcttggttgtctctttccccaccttaaagaaaaagaaaaaagagagagagaaagagaaagaaagaaagaaaaagaaagaaagaaagaaaaagaaaggggaaaaagaaaaaaaaaaagaaaaaaaggaagaaaaaaaaaaaaaaaaaaccttgtacagcttagttgctgctgtctccctcccagagtgacatggtgttcggggcttgtcctgtcctttcattcacttcccctccttccagccggtgggtggaaccgagagagcctctccagggagcagcgtacgcagtccagaaggctgcagtatttcctccaagaaaaaaaaaaaaaaaggctgcttcaacccctgctgcaagcaaagttccgattccctctgctggctatctcgaatagcaagcgatttttgcagcaacgctgctgccgctggaactgaacctgaagaactcaaatgcgggcggtggattatttcttatccctcctccatctaccccacacaagagctgctttttgttcctctttttgccaagttccaaggtaagccacactgctaaacaaaacacagaagagagggaagagaggacgaaagaaggaaggaggagaaaggaaaagaaataaaggcaggggaactaaccttgctggttaaaggggaaaaaagtaagtcccggatgctttcaaaatctgttaacacgctagagccagacgcatccaagagctgattgagaaactaaccttttactacctggaaaacttggtggatgttaagtattgaagaaattttagggtctactccaggactactattaatgccacatgtcatcagattggactgatcaactgaacatatcaaaaataataacttttttaaaatacatccattttgtaaaaaaaaaaaaaaaaaaaatcaaaggaagtgaccccttaggttcgtcagatattttacagataaaatctgtttctcccattgtctctctctttatgattattttgttgcattgatgctttaatcactttactgatatcatctaaaaaaaaaagaacaaaaatcataattgcttggcagagttttttcccaccaatgataatattctgtcatgtctatcagctgctacattataatacaaattgtttcagataaaatatatttccttaaagggtcccttttcaaggcgggcgaggctaaaattagatgtgccagctgtgttttgctgcgagtgctcacgcatgcccaaagcgtgggcagaccaatactgagctcttttctactttgtcaagtcggctctgttctcctgagcccagagtctcctatttagataaaaggtccctggtacaaatccagcttcctagtcaagaagaacagagaatttgggctcagtgcacacatggtgtccatccacatacaagccgcaccacccctaaagcaactggcttccaccgaggggaactggtttctggaagctgtgtgagtgcatacgtgttccttggataaaaataaggatggcaggtaaatagttttatgttttacttttgacaagaataacaatcagaaggaaggaaggatggagggtgagagggtaagagttaggaggccctgacaacatggtgattgagaatattaaatcaaccccacctatctcttaaatgtattatttggggcctcagttgtcccatctataaaatagaaatactgccaactctcctggctgaaggcagtacactgaatcagacactaaaaatgacactgatttaaaaatcctccagtggtgtcacgtttctcaaacaataaagtcctgactctttggaataggtttcaggacacttgacgagctgtctggccctggctttctactctagtctcggactttcaactctgcccctcacatcctataccggagtcactctgagctactttcaggacaggaacatgctctcagaggcttctgtcattccctcttc

SEQ ID NO: 316214 - DNA, 4001 bp, Homo sapiens
gaggtggtgggtgaggaccccatcaataagcaaggtggctcctgggatgaacataagccacttctgaacccaagactataaagggagaacaagagtaccttgacctcccagcaaccagataatgttgatggaggcctggggctggccttccggcatctgctgtggcagtactaattgggatgtcctgggtcaggagtttcccacccttgtggaagggagctcttggccctccctcttcccccactgctgtttcctctggtctgggctggaggggccctgacttactgaataggtgtcagctgcaaagttcaaagaatgctcagtaggcattggatgacagggtggggcaggggatggccaggagccaaatcccagctctggggcaaggatgggcagatcagggggcttccagcagagatcaaggggcccccagcttcctggagtgacttcacactaagtcatactgaaagtttacacttcaaaggggttacctgtgtttcttttttctttcctcctttcttttcttttaccctccaccagcccagtcagccagagaacggcatcaacagacatgctttgaactccagaccctccctagctgtgctactctggacatgttacttcatctctttgagactgtttcttcatctgtaaaatgggcatattcatatctccctcaaaggctgtgtgaggcttaggtgaagtcatgtgcataaagcaccgggcagagtgcctgaacgcagtggagacacagcacatggcagccttcataaccatcaccttccagtgtagatagagcaggatgcttcatgagttggtgctgcccaccatgggggctgagagtgggaagagttttcagtccctcaggcccttgccccctctcggatgaactagcccagcccttggtcaggccccctgggcaggagacaccaggtggacgcgaatcctcaccatgcacttgcggtcatctatgcctgtcagatcctcctcaaactccttcccaacctggaagtccatgatgtagttcctaaaagtgctcagcgtgcggatgatcatatggtcaccgtcctgcacgatctctttgtctggcttcagcaagttggcgattttgcgcaaggccacattgacgtctgcggtgggggttgaacggggagagagagagcgccagagagttggcagggaaactcagagaaccgttcccaaggtagcggggccccaggagccctctccgcccgcgaacactgttagggttcccgctggctttgcgttgtctctgcgcacagcctgcctgtgcctcccctgccgcccccaacaaagttttctgctcttatgttaaccgtttaaaaacaaaaagtagcaaaccaagccccagatttactaatgaaattacccacctccagggccaacgagcagacatttgccaccggttaacctaacaaccccgaattctccaatctgcagcctgggggctgccctgggagcggtggccgaggacgccctttctggcgtccgggggcaccggaccgcggctcgccgggatggaggcaggcaggcagcgtctcgggagggctctagggagcggcccggagctgctcggcggggcgcccagggcgcagcgggcagcgcttaccgagggcgcgcaggtactcctcgaaattctcgttgaccaacatcttccagtacccagtgaagtcgactggcatttcggggagtgactggagccagttggccacaagcgggcgggacggctggagactgccgggacagcggctgccggtgctacgcgggtggtgggcggcccggaaatgagcgccctccggggacagggggctctgcggggcggcgacagctggattcccagcgcgcacaaagcctgcgggaggatccattgtagcggtcgctcctccccgcttagcgagggcgggcgcaggggcgggggatgtcgaagggtcaggtttgtccaggccgcgccaccttcgtttcagacgttcagttcgtttcccctacaaaggaagaggagaccggagacgggacgtttgctttgttggccgaactcttcggctgctggggatttccttcaaacgccattaacttctcacactcagcagccactcgggagttgggaaacaatctcctggggtttgtgctggcgtgattaaggaaagaggccacttacaggcctttgtctaaagcctcgcgccggtggtggctggggtcaggaaagctgggaggttcaactacgggcgagaaaattggggcactttccacgtctctcccgaaaataaaagaaaggatgccgggcacggcggctcacgcctgtaatcccagcactttgggaggccgaggcgggcggatcacctgaggtcaggaattcgacaccagcctgggcaacacggtaaaacctcgtctctactaaaaatacaaaaaattagccgggcgtggtcgcgggcgcctgtagtcccaactactcgggaggctgaggcaggagaatagcttgaacccgggaggaggaggttgtagtgagccgagatcgtgccactacactccagcctgggcgacagagtgagactctggctcaataaataaataaataaataagtaaaatagttgatgttatttgaagtgcatgtggctaaaaaagccttctgggtgattctgatgcacaatcaactttgagatccactgctgctttatgcaaatgtaagcaatatactgtttattaatgtttcctcccgtttcacctaatggcagcactgtactccacggtgttctggactttgctttattcacttaatatattctggagacttttccatagctgtacatagaaagtatccccattattttacggagtattccattgcttatccagcttgtcccctgatggacaaactatattgtttctgatctttcactattaaaagcagtactgcaatgaaaatctttgatcacatctcctttgtcacctgcgtgggtatgtcattgtggtttaactgcatttgccaccaagtagatgacataatcacatgggctgactttttgaccctctttttgactacctcttttaaatcgctttttgcacaaatcacagcctaagtgacagcagataacattttcttcccctctagcaccaccttccccagggtgcctccctggggctcacatgtgttctcacagtgcaggctgaattaggaaaaggagcctcttcctcagggtagagacagcttcctcccaggcagcaacttggatttcagcgcttctcaccctctttccctagactaggatttgtttcttaatctctgtgctactgacattctaggccacataagtctttgttacaggagcctgtcctgtgtactgtaggatatttagtggcatccctggcctctacccattagatcccagtggcacccagacacaaagatgtcgccagacattgtcaaaggcactggggtgtgggtgctgggtaaaccagccctggttgagagccagctctaggcccttgtttcccactgcttctttgtctggctctggatggttaggtcatcagttgttcacacaagcactggctctgtgtccctccctagccagcccagggctcatcttggctgggcactcagggcaacctatcccagtccttccaacctgaaggtgcaataagacacctcgcaaggatggatggggcctggcccaggttctgtaaggcatcccaccagggccagccatgctttgggctttcttgttatcctgacttaccagaatggagcattggtcaaaggcttaagcagtgaactggccattccttggtcacttccaactagtctaaactcttctccctgctctctgatgcctccagcccagctagccggatttctcatcctccccaaacttctccctttatgctgaatcacctgagatggtttatgccaaatgctcagcacagtgcctggcacacagcagaggccagtctgttctgactccctgccatgcttggaatggcc

SEQ ID NO: 316215 - DNA, 4001 bp, Homo sapiens
ctttctaattatattacttgactctggcttattcagcatattgctgaaaccttgaaacttccaaataacccttgttaaagtacttttaattgctcaaaaccacaagtacatctaatatcatctggagggacaggcaaggctggggctattatctctatttggcagatgaggaaaccgaggttccaaaaggttaaaaaactggttcacggtcacagagcaagccctggactctagtccgagctgtgttgacccttctgctttggtttccttatctgtataatcttgttcagaattctagttccaagctatgctccaatccatttacccatgtgtagtatcagaatcccatttctattggccactcctggtactaaaaatcacaggtgcaacagggttgaggatggggctctggtaggaggatttttgtctctttcttcctcctcccaactatattgaggtaaaaatcctgctaaccagaatgaaaaggaaagctattcagtgttggaaaccagtctaaagaacatgaagaggccgggtgcggtggctcacgtctgtaatcccagcactttgggaggccgaggcgggtggatcacaaggtcaggagattgagaccatcctggctaacatagtgaaatccgtctctattaaaaatacaaaaaattagccaggcgtggtggcgggtgcctgtagtcccagctactctggaggctgaggcaggagaatggcatgaacccgggaggtgggcttgcagtgagctgagatcgcgccactgcactccagcctgggcgacagagcgagactctgtccccaaaataaaaaaaaaaaaaaaaaaaaaaaagaacatgaagaaagtgcttagttccacaaatatggaacatatcacagctctcctttttcattgacatggtggacattttcaagctagaagtttatcacaccaaaaaactcatgatttccactcttggagagacctcccaccatcatatccaagttattattgggcctctaactccacccactgccgtttctctcattctgcatgtggaggaagttccagcgaagttaccccatatgtggagaactttaaagctagaagaggtgataaagaggctgctgagggatggaataaggtcaggcagccaaagccccttgctcagcacctggagcacaggagccacccagtaactgtgagctcccctctggggacccactcactctagtcccaggcagaacctgtaggctgggcagggctatgtgttttctgccagttccacagggaacccactctgtggtgaactcaggacatgcaccaattggtagcccttggcctggaacccagttcagaagtcatataagcagtgggttgtttgtgctatctgacaacagcctctctaggcttccatgagcttgattttccctaggctgagagatttgctagctatttcttttctgcttccccattacaaaactgataaaagaacaatgcagaggtcattggtggataatatcaggtccaagtggttatcagagagatggtggtcacaaggcagaagagcgactgtgttatcctctcaagtttggctttactctgttgtgtgtgtatcctcctgacatacacattcagtgtatgttttctgtgggccaggcactgtgctaaggcatcctagacataatctcatttatcattattcccagtttccagatgagaaaactgagcctcagagaattcttatgatctgcctaatattgcacagctgtacatgaggcatgaggatttgccacaggtctgttgaactccatagcagcactgtctggagggccagaccacagtactcccaacaacagctaccctccccatccccagtctcctccttacccagggccttcatgtagccctcaaagttttcattactctccatctcccaggttccattctggtcccttgtcatggtggtggccactggttcggtgagggtttgtggtggatggcaaggagcaggctgcagggagaatacactggaatgagcttcttttatagcctagtgggccaggtttgtgactctgaagataagaggttcaaagggcagaagcacaactcaaaagaacttttctttgtaaagttcagcgagactataggtaacccacgaacaaagtcctggtatggccaggcgtgggtgtcctagtgtcctgcaccataagcagggccctagagcagctcatttttggctggctgggtccccatgggccccttgtcccacacagaacatttcatccagtaatggaagaaaacaaacatccagggtctaccccacatgtactatgggtcactagtacccaggcctcaagcctggagtctatcagccatgaatccagcactcatagcaaggctggtgaaactgaaaagacagaattcacacctgtggagctctactctactctgttccaggcagcatgcatacttcatcttgtttcagcttacaagagctctgtgagttatgtttaaccatccttattttacagatgagaaaggatcatggaggttaaatcacatgtctaatcacaacttgtaagtggttgagccaggattcaaactcagatctgttgggctccaaatccttttcttcaacagtgtgctaggtcagctttgaaagaggtttggagcctgacttaagagaccaaatctctcttgcttccctgtggaagcaaggtgccctgtggacttcctagcagcagggtgagacatgagaaaagtgttttctgggaacatgattctgctaaaagcaagctgagcctggagggagtccagatggaggcagaggggtagtggaatgttgttttaagatccaaggggaaagctgaggatcacctggatcaaagtgggggcatagctggacaaggacccttggttcaggaatgttctccaaatgggctgtcccaatggaaatgggtttagtttattgctctgacactctattccaagatgtggtgtctgagaagtgactgtgaagaatggaggtgtggcctgagacagatataccatgagttcccaaagtgagacctattttgatgatgacactgcagctctcatatatgtatccttgtgctgtgaaatctaagtaaatgactctgtgtgtggtacgagggatataaaacagcacatttatctttcagtaaatacactggagttaggaagacagagtgaaaaatggcccagctgttgtcaaaaggccaatggggaaaggtaaggggtgagaaagaaataactttaccacaaatggaaaatgagtggaggaaggagtagacagataagaaaccttggagattcatcctgtgaagtccagccagaagctgctgtagactgagcattcagcctcctgggctggagaagtagatagtccctcccaggtcaaattccagggcctccaccgtccctcctgcctgcaactgaggcctcctaccccgtaggcctctcctgtaagaatgtgtaatgagaagctggcctggtaggggaaggggctgggggcaagacaggagttgctaattgcactaagccaggggcttgggttttcatgggcattgaggggggaggaatttgtcttggtgtaagacgcaaatttgaaactgagatgtctatataaagccaggcacttgaagggctactccctcattgagggtgtaaattagtcaaaatctgcagcaacagacaagaaaaaagtttatctacttggcatgggatctacataggttaaaaaaaaaagttctgttctgctctgaccttggtttggggtttgaatttatcctttctgttagctaaaatattaaaataataaatgtcctgtgcttgttaacatttttaagctgccaggaagaagtaaatgtaaaagctgtgaagaggaacacaccttcaaaaccagatcaaccagaattctgtgtgataaagccatgccaaatatgagctcataatccaaaattgtaacacacactgacaaacacatacaaac

SEQ ID NO: 316216 - DNA, 4001 bp, Homo sapiens
gacagatcttataagccattaagtgacagttaagtagcaaacctgatgttctcactgcttcaaaaataaaaggctggccaggcatggtggctcaagcctgtaatcccagcactttgggaggccaaggcaggcggatcacctgaggtcaggagttcgagaccagcctggccaatatggtgaaaccctatctctactaaaaatacaaaaatttgccgggtgtggtggtaggcgcctgtaatcccagctagtgggggtactgaggcaggagaactgcttgaacccaggaggcggaagttgcagtgagccgagatcatgccattgcactccagcctgggcaacaagagcgaaactccatctcaaaaaagtaaataaataaataaataaataaataaattgatttggggcctaaacacttcagggcttaataagttacattctctttcttactggctcatggcaaagtcacttccaatgtcacctcatcaagacacccagtcacaagagaaattgagacaaaaccattccacaaaagcagagaaatttctccccaagaacctggggatacaagccacagtatatagtgaggggagatgtgtgaccctcagctttggatggactgtagaagaccaccgaggagggactgcctggtcctcaaagctgaagggtggcagcaactcagaaaataaacaaatgagacaccaggtccctattttttccctctagttaagaaacccagtgacttcataacttttccactggaatatagcagccctaggtctggcctgttccctccccagccagtggttcatctgatgctgactctgacagctccctttcttcccatgcactcacccctaacgaccacaaataacacaaagcccaccacatccatgccacacaaccacccttcacgcctcagcccaaacccaaacctcacttcctcaaaagaaatgcctcttactcagagcatcagaatggacttctccttcacagcactcatctcaatttataaccgcaggtacatacgtgaagtgaccaagtaagactgtaaaatctgggagggcacagactctatatgttttccacttcgccgtctccccagggtttagcacagtacctggcacacacaatgaagcagcacaataaagctccatgaatgaacgaagaaatgaatgaactccaaaatcatataactaagcatacaccataaagaaatctaacacaaccaccgaattggaccccacaaccataactgaacacataagcaagcccctcgcactctaaatcacgtaaaaagtaaaaaaaataaaaataaaaaaaataaatatagctacatgttctgcagccgtacatccagcatgaatgtcaccccgccacatgccgcatcgacgacacatcccacagccgcactcaacccggcctcacgatcgcaaccacaacccacataactaacatgattatacacacatcgcatgaccacacacaacacgaacgactcaatcccgtgaagcagacatgacaacgtcacacatcgcacagacaccacacaaaacactccgaacatctccacacgaactcagaatacaaacgcttcagctttacacaaccagagaatcaaacacaaccgctcgggagacaagcacccacccactccacccacagctgcacaaccaaacccaagtgtatacgccccgcgtaaccgcacaaccacacagagcccaatcatcaaaggcacacacaagcgaaacgcacggcctgaaagccccatctcccacctctcacgtcacacccaccacaaccacacacggcccgcccgtctccgttctggaggagtcgtgtccccgccccccagactgggcctgaccctctgtatgtaccctgccgggctcctgcgggcacccaggtttgtcccccccttcaggcccgggctctgggcctccaccgtccgtcactcagccgcagccgccatctccatcggtcgctcggaactcggcaggtgcgcctgcggcggcgacgaaaccggaagacaagctggtagacgcctgtcgagcgccgagtcttcgagggcgcgaaaagggcggatacggattcgaatagtggagggcgggccggcggcttctgcgcaggcgctttccgaacgagggaggggatggtggggagcggagagaaagtggggctcggtaattttgtgcggttcttacgtcccgaattcgaactaatagcgcgtcaaagccagccaatggctctgcaccgccttgtacaggtgggaaagctgagaccagtagatctttggctcttgaccaaagtgcacaaagaataaggcagccaaggaatcaaagttcctgagagctagagacagaaaaaatattcaggggacgtggaggcgatggaaagtccaagaatagaaccacatgagagtggagacttggtatgagaaggtgtatcccggggtgtacagcatggccaagcctgtggaaaagatggcattttcaaaaggcaggacgattgatcagccaggacctaccccgtgcctacgctgtgctgggtaccacggggtatagagaggcaaaacctcatcccagtcccggagacctatttgctttgtgccctgcacacgttctggaccttagcaatagccagcctctaggagcaagagctgcagagaacgatgggacgatgggacgatcctgggcctccgtttacatccctgcagtgttactggcccccttttacagaagtaaaatggggatgataatgatagtctccgcttcacagtgttgtgaagattgaggtaattgcacggtaggtaggtaggtaggagggtgtcctgcatattggctttgcccatctcactttccctgcctccaaaaagtcttccccacctggtctctggacaggagcactgagcctccatcaccttccatttaaggacatggggctccggacttggagagcattgagtttttggaaagcaatcaccagtgaaagggcagtgaactaggggtctagagatctgggttctagccctggctgtacgttactttgtggctttgagcaggtcctttcccctttcttcgcctgagttctctcatctgtacaaaagaaattggctccagtgacttagccttttctctcaatctgatggccaatttttttttaacgttacaacatctgcaggagcgaataatgacttccctttgtttactgatggagacaaggaagaggcttcctaacctgtcagaagcaaagcaacatgccaagctccccgtctccatcactagcttctgccttaggtcccaaaagccaggactttgggagtaaaaccacccttttgaaagtctgaagccaccgaggtcccaaaacgagccacacttacaggcaggactatgttttgggtagggcaatgaacgtttattaaaccatcatgatttttgcttgtcattttatcatttacaaaaaacatatttggtcgggcgcggtggctcacgcctgtaatcccagcactttgggaggccgaggtgggcagataacttgaggtcaggagttcaagaccagcctggccaacatggtgaaactctgtctctaccaaacatataaaacattagtcgagtgtggtgtcgctcgcctgtaatcccagctactcaggaggttgaggcagaagaattgcttgaacccaggaggcagagtttgcagggagccaagattgtcccactgcactccagcctgggcaacaaagtgaaactccacctcaaaaaaaaaaaaaaaaaagaaagaaaagaaaagaaaaaaatatcatattcatcatttcatttgctcaaaaaagcaatagctatgtggcctcaacttgtaagttaattctggaaatcacagtggattgggcactgctcttgatattgtttcttttttttcttttttcttttttttttttttttttttttgaggcagagtctcactctgtcccccaggctggagtgcagtggcgtgatctcagctcactgcaa

SEQ ID NO: 316217 - DNA, 4001 bp, Homo sapiens
gatagcattgggagatatacctaatgctagatgacacgttagtgggtgcagcgcaccagcatggcacatgtatacatatgtaactaacctgcacaatgtgcacatgtaccctaaaacttagagtataataaaaaaaaaaaaaatgaaaaaaaagaaaaaaataaataaataaataaataaaaatgagggaagtgggggtttggagtgtcagtttgtttttcccattcttcccatatctttcctaacttcccatcccacttcccaaactgagatgtcaccactgggacactgacaacattttctggataggggagccccaagctggggacaataacagagatgacataagcacagagaggtacaaagtttgtctttattacccaagaatcaggaatggaacaaatgaagtgggacgtttgagttagatttcttggttgggaccctggtttcattactgtcatggtcacaaaactgagttctcagcctcctccctgtcaggtcaggtggcagcagcgggcagtggtccagtccaccacactgcactggcagtggcaggtggtttccagctgaacatcccacgaaccacagccatagccacaagcacagccagtgacagccatccctgcatgagcacatgaagcacagacatcagagctcttggaatttaagaggaggaagggctacccacaaccatctttcaaccctgtgcagtcaggggtagagctaggtttcgtggggcctcaagctcattcaattttgcgagctcatttcaagaaaagaaatacagaaatcacagaaacaaatatttgctgccatgaaagagactcatgcaagtgagagacttggaacttgggagtttcagttttcttcgatttgtgataaattcacctctctgttggcccctacccatcaaaacagaggaatagattggaaagagaaatgaagtatgtgatcattatgggacaatggaggagaggaagggctgagaaacaggggcatgaagtgaaggggtgaaaggaagaggcagaagcccaagatcccccagtagcatccttcagggaaacaagaatgggcaaggggtctctgggaaccaagagtcatgactcagccccagggtgccagggtgatacagacctgacatgggggaagacgtaggtgcagggagatggacaggggaggatacagggcatcgtagtcgccattccctctcagggagttactcaccagcagggcaggaggacggtctgccttggcttttgacactagcacacgagagcttcttgcttataggagagggactgtactctgagtaggaaagaagaaagggtacatcccatgagctatcctccccataatccccttatccccttccaaattgtcttctaccttggaggtgacactgtgtccagaatcagcctactcatcagcttttaaggttagtttcctcatttttaaagcagaagtaatagttgtccttacctcataaaatggttgtgggaattaaatgaaataatctacgtaaaacttggattatacctggttcataatgagtgttcataaattacagctaccattctcctccacctcttcctcctcatcaggaaaacctcagcttttagccaagacttcaaacacgggtagggtagtgtagaaagccctcatcaggggttgggcttggttgggatcttgggatgggatagagacaaagctagagtttaagaacaggagaaatgagcaagggtcaaccccccgcttcccctaccccagtcagttacctagactgttgagaacatccttgatcttcttatccataacggagtctaaggaacactgagtactccccgggttgatcagctggagaagggggattaggatgagaaggaggcaagaggacggccccatcctgtacagagtcagtgtcctggggctgggagaaaagatggaaagcagcttagatctctgagctcctgggtggtggtgaaggaaagaagacaacgtggttagtttccagggagtaaagatggaagaacagcgtcatcagtactggatctctttaggcagtttggagaagcaggtagggttgctgaagaacagatttattcaccaaaacattcagagaaggtctacaaggactagccaggcaagggcgttttaatacacctggtattaacctgggcacctttaacatacaagcacacacaaacatgtaaacacactcccagcacactttcaaagacctgtgccagctagggtaacaggtgactgtgataaactttggagtgttcatgagaagcaacagctgcctttgctctggatctctgccaagggagtcctcctgcctttttgttctccttctcctttcttcttggcaacccgataaggctagcacctgggccttctgtggtctgccggtattataggcttcttgtttgatccttcatcaggaagaggttactttgcagttaacaaacaaattaatccacccatcatctatcccaaacccaagtgtatgctctttcttatctctgttggctgagggagggccctacttgtcacctgttcagacaccattttattgtccctggccaatctcatttggaggaaagtcacagaaagactaattaatcctggattaaaaataaggaagttcagtatttacttaactagaagcatggtttatgattccagagttcttttgggggctcataaagtttccctttttcccccaccattctcagctaatctttcgatcttgtctcctcatggtcacaaggtagaaggtgccacatcctcagcccagaccctgagcaggaaggaaggagtggggcaaggccactttctgtaggggctttacctttttattttaagagcaagatctttctctagaagctcaagaagatttccccttacattccactgtttggttctgggtcacacaacctccctttctatcagctatggctgaaaaagagagctgggcttcacaattccttatccaagacctggggcccaggtatgtttcagaactcagaatgtttcagattatggaaggtgcaaattctgtatattatgttaaaccaccaaggaggttgggggcagcactctgcagtctaatgcataaatagcctgatgcaaaatgtatgaatattaatgtgggataaataaaagaccataaagagcctcacaccaggccatgccaagtttttctgccaaatgagttagcctcaaatttaggacagaacattttcatctttagagccttttagattttagaataatggataagggattgaggactttgaggattcacatatggccaagaggaatgaggatgccatgattcctcatctaggatggggcatgtggccaccatgaataaataaaatttaaagaagtgcagatgaagaagcagagaaaggggccatgtgttgtggctcatgcccataattccaatactttgataggctgaggcaggagggtctcttgagcacaagagttcaagaccagcctgggcaacatagtgagactctatcaaaaaaaaaaaatttactgggagtggtaccatgcatttgtggtcccggctacttaggagactgaggcaggaggatcacttgagcctcaaggttgcagtgagctgagattgtttcactgcactccagcctggatgacaaagcaagaccttgcctcaaaaataaataaaataaaataaaataaaatgagaagcagaaaaaggcagttaggtgactattccttgaggcagtcagagctggaaaggctgggctctacctctgtgaccagcctttctgcccactttcctggagatgccctctaatgaacagctattacttatacatatctctctcaggcaactttgagaaatgaggcctggagatgccagcaaaaaggcaaggatgcttcctcaattaccagacaggagttgaagagaagaaaaatgagactggagaataagaaagagcatacacttggatttgggatacatg

SEQ ID NO: 316218 - DNA, 4001 bp, Homo sapiens
gttaaaaaaaaaaaaaagtgatcagtactggttagagagataatttatgaattattttaacaaagacacaagtgttcttactatttttccacccagggaacgggtttggctttcttgttctctccgctacttcccgcactggcagctactcctcgatccttggtcagcgggggtttagtactgatggatgtacctttaagaaatgcttgcatggtacttcaccctggtcaggtgcaagacagaaaaaaaaagcttttattgaaacttttattgcgaatcagcaccataggaaagcgggggtggtggtggggaaccattatgagaaagtacagcccgaaaataaacttagccttgtgcaaagatgttacataataaaggacatcaccccatgacctaggacactctgaatgcactgtactgagggctacaagaacagaaaagtggtcaaagtccctaacgaacttagaatctatttctagtgcaggagttatagaacaaagatcatatgtcacaaaaatgtttaatgagttccaaatgcattgataaatatgatgttgctaatgaccaaaccacatgggcctccatggtttctttcacagtcatgggcctagctctagctcagaccctgaaatggactcttcggcaattaaaggtgctctgcttgcaccacaaatgagaaccttcactcctttccttgggtcagaactcaaagacctttttttgttgttgttgtttttgagacagggtctcactcttttgcctaggatggagtgcagtggcggaatcatggttcactgcagccttgacatcccaggctcctgtcatcttcccacttcagcctccccagtagctaggactacaggtgcgtgccaccacccccggctaattttttaaatttttggtagagacagggtttcaccatgttgcctaggctggtctggaactcctgggctcaagtaatcctcctgccccggcctcccaaagtgctgggattacaggtgtgagccatctcgcctggccagggacctattttcatggcagagtcaatgcttacctaccttcagagactttctgtggggaagggaaggtgggggactctgttgttaaaatagaaacagctgtttttctcataacacactcacttgaagaaatcaaaacaatgcataaaagcatgagagatttaaaaaagtaatacaaaatcccacccagaaggtaactatttctaacatgcaggtaaacattcttccaggctgttttcagggataaaaagcatcattagctcgcctgaaaagtccccggttaattctatttttttcactgctacatgccctggtgcctagaacagtgcctggtacatggtagatgctccgtaatatttggtgaatgaattaccatctatgatacccggtttccttttctgttaaaggagctaaggcctattccacaggacaactgagttaaataaaagaatgtatgcaaatacatagttccttgcttggcatatggggatatgctcaataaaataaatttttaatatctgttagcagccaaggtttttataacgttactggattagtccatccctgcctcgggctgttaaacattaatacagcccaaagccggggcctgcaagatgctgtccggaaccaccatttcaccaaagggcgcggccagggcatgaaagggccactaggctggggccccgaaggaggtggaagacctcacaaggggcatcaagggcaggagtggggaaggcgaagcgggcttgcagttcctccagcaggttaccagttagcctggcttctcgtgcaggtcaccgccgccggctcgttcctcaggtttccgcgatacaaaaaggacgagatggtctcgaagtcttagctccgtcacctaatctgagaataacgggcccaggagacttacgatcactgatgtccccacagtcgcctcagttcccgccacggaacggcgggcgaaaagcagggcgggaatacgccggtaggaatacgcgggcacgtaacgcgtcacttccggtgctggggcgcgctgcttgcggagggagtttgcccgtatacggttttatttaggcaggtgatgagccagccggactttcaggcagaactggactggaacaggcatggcctaggaggtgtccctgtcccggtgcattgctcccacttcagacgtgagcgcgaccctcccggaaggagtagaggtcgcgcgggcacggcgctggggctgcttacctggcaggctcagcaatgagggcggggcggcggcgcgcgggcctctggaaccctgccggtccaccgaaggtcccgagcccgctatcttcgtaggtgcgggcctccggaggtgcaggtccctgtcctccttgtcctgcttcgtcgcagagcagaacgcgtgtgctttaagggcagagacatctgaagatgctttgccttgccctcttgaggacacgtggcttttacttctaatagtgtctgcgtgttgtggagagagaagaccatgcagctgtggacatctattataattcctgagccccacttagaaatctggaagtgaaggcgttcaataaaagttaaaggactgataatcatgtttagccccaccaagcttcatgcacagtgggctaggctggtgcctgagcccactgcttttatctcttccaagtacttggtttagctctgaaatgctccttaatcctattgaaacctgacccttctcaaaggccaccttctctactggtctttactaattactaacccataaggttgttccgggtcttcttcaaatgactgttttgtttggcacaaactcagcatgatatccattgttaactttgtacgtttttttcatttatcttgcaacaaatgcttacagaatgtccacgcactgtgttagatgcctgcagatacagcagggaaaacgctcgagatgccctcaagtagctttacagactaggagagtgacagacaatgtgatgtgtggttatgcagaggaagtagggggctgtgagaacttacatcccaggcctaacccaatcaagggtttaaccaaagtaaggatgctttatgctactttgtaatttccacagagtctgatacaatctctggacagtataaaaaacacacaggttatctatctggtcaccggtttacattaccataacttatcaaactgtatacttaatgcttgtatattttattgtatgtaaattataccacaatacagttgataaaacaagatctatgaaaatagatggtatccatttgctacctgaaggaacagcacaaccacagagagggggatgttatgatctcatttaacagacaagttgggctgggcacggtggctcatgcctgtaatcacagcactttgggaggccgaggtgggcggatcacctgaggtcgggagttcaagaccagcctggccaacatggttaaactccatctctacaaaaatacaaaaattagccaggtatgatggcaggtgcctgtaatcccacctacttgggaggctgaggcaggagaatcgcttgaacacggtaggtggaggttgcagtgagctgagatcacgccattgcattccagcctggtgacagagcgagactccgtctcaaaaacaaacaaacaaaaaaacagacaagctgatggataagtggtctttgtccattttggctgctatgtttataagccatagattgggtggcttataaacatcataaatttatttctcacagttttagtggctgggaagtccaagatcaaggcaccataagattcagtggctggtgagggttcactccctcattgacagctgtcttactgctgtaacctcacttggtggaaagggctaactagttttctccagccatctcctttatgaaggcatttctcccattcatgagggttccactctattgaaccagtcacctcccaaaggccccacctcctgataccatcaccttgggagttataatttcaataactataatttgg

SEQ ID NO: 316219 - DNA, 4001 bp, Homo sapiens
tttaagaaatgcttgcatggtacttcaccctggtcaggtgcaagacagaaaaaaaaagcttttattgaaacttttattgcgaatcagcaccataggaaagcgggggtggtggtggggaaccattatgagaaagtacagcccgaaaataaacttagccttgtgcaaagatgttacataataaaggacatcaccccatgacctaggacactctgaatgcactgtactgagggctacaagaacagaaaagtggtcaaagtccctaacgaacttagaatctatttctagtgcaggagttatagaacaaagatcatatgtcacaaaaatgtttaatgagttccaaatgcattgataaatatgatgttgctaatgaccaaaccacatgggcctccatggtttctttcacagtcatgggcctagctctagctcagaccctgaaatggactcttcggcaattaaaggtgctctgcttgcaccacaaatgagaaccttcactcctttccttgggtcagaactcaaagacctttttttgttgttgttgtttttgagacagggtctcactcttttgcctaggatggagtgcagtggcggaatcatggttcactgcagccttgacatcccaggctcctgtcatcttcccacttcagcctccccagtagctaggactacaggtgcgtgccaccacccccggctaattttttaaatttttggtagagacagggtttcaccatgttgcctaggctggtctggaactcctgggctcaagtaatcctcctgccccggcctcccaaagtgctgggattacaggtgtgagccatctcgcctggccagggacctattttcatggcagagtcaatgcttacctaccttcagagactttctgtggggaagggaaggtgggggactctgttgttaaaatagaaacagctgtttttctcataacacactcacttgaagaaatcaaaacaatgcataaaagcatgagagatttaaaaaagtaatacaaaatcccacccagaaggtaactatttctaacatgcaggtaaacattcttccaggctgttttcagggataaaaagcatcattagctcgcctgaaaagtccccggttaattctatttttttcactgctacatgccctggtgcctagaacagtgcctggtacatggtagatgctccgtaatatttggtgaatgaattaccatctatgatacccggtttccttttctgttaaaggagctaaggcctattccacaggacaactgagttaaataaaagaatgtatgcaaatacatagttccttgcttggcatatggggatatgctcaataaaataaatttttaatatctgttagcagccaaggtttttataacgttactggattagtccatccctgcctcgggctgttaaacattaatacagcccaaagccggggcctgcaagatgctgtccggaaccaccatttcaccaaagggcgcggccagggcatgaaagggccactaggctggggccccgaaggaggtggaagacctcacaaggggcatcaagggcaggagtggggaaggcgaagcgggcttgcagttcctccagcaggttaccagttagcctggcttctcgtgcaggtcaccgccgccggctcgttcctcaggtttccgcgatacaaaaaggacgagatggtctcgaagtcttagctccgtcacctaatctgagaataacgggcccaggagacttacgatcactgatgtccccacagtcgcctcagttcccgccacggaacggcgggcgaaaagcagggcgggaatacgccggtaggaatacgcgggcacgtaacgcgtcacttccggtgctggggcgcgctgcttgcggagggagtttgcccgtatacggttttatttaggcaggtgatgagccagccggactttcaggcagaactggactggaacaggcatggcctaggaggtgtccctgtcccggtgcattgctcccacttcagacgtgagcgcgaccctcccggaaggagtagaggtcgcgcgggcacggcgctggggctgcttacctggcaggctcagcaatgagggcggggcggcggcgcgcgggcctctggaaccctgccggtccaccgaaggtcccgagcccgctatcttcgtaggtgcgggcctccggaggtgcaggtccctgtcctccttgtcctgcttcgtcgcagagcagaacgcgtgtgctttaagggcagagacatctgaagatgctttgccttgccctcttgaggacacgtggcttttacttctaatagtgtctgcgtgttgtggagagagaagaccatgcagctgtggacatctattataattcctgagccccacttagaaatctggaagtgaaggcgttcaataaaagttaaaggactgataatcatgtttagccccaccaagcttcatgcacagtgggctaggctggtgcctgagcccactgcttttatctcttccaagtacttggtttagctctgaaatgctccttaatcctattgaaacctgacccttctcaaaggccaccttctctactggtctttactaattactaacccataaggttgttccgggtcttcttcaaatgactgttttgtttggcacaaactcagcatgatatccattgttaactttgtacgtttttttcatttatcttgcaacaaatgcttacagaatgtccacgcactgtgttagatgcctgcagatacagcagggaaaacgctcgagatgccctcaagtagctttacagactaggagagtgacagacaatgtgatgtgtggttatgcagaggaagtagggggctgtgagaacttacatcccaggcctaacccaatcaagggtttaaccaaagtaaggatgctttatgctactttgtaatttccacagagtctgatacaatctctggacagtataaaaaacacacaggttatctatctggtcaccggtttacattaccataacttatcaaactgtatacttaatgcttgtatattttattgtatgtaaattataccacaatacagttgataaaacaagatctatgaaaatagatggtatccatttgctacctgaaggaacagcacaaccacagagagggggatgttatgatctcatttaacagacaagttgggctgggcacggtggctcatgcctgtaatcacagcactttgggaggccgaggtgggcggatcacctgaggtcgggagttcaagaccagcctggccaacatggttaaactccatctctacaaaaatacaaaaattagccaggtatgatggcaggtgcctgtaatcccacctacttgggaggctgaggcaggagaatcgcttgaacacggtaggtggaggttgcagtgagctgagatcacgccattgcattccagcctggtgacagagcgagactccgtctcaaaaacaaacaaacaaaaaaacagacaagctgatggataagtggtctttgtccattttggctgctatgtttataagccatagattgggtggcttataaacatcataaatttatttctcacagttttagtggctgggaagtccaagatcaaggcaccataagattcagtggctggtgagggttcactccctcattgacagctgtcttactgctgtaacctcacttggtggaaagggctaactagttttctccagccatctcctttatgaaggcatttctcccattcatgagggttccactctattgaaccagtcacctcccaaaggccccacctcctgataccatcaccttgggagttataatttcaataactataatttgggggtgtggggacaaacattcagactacaacaaaggttaatagcaagtaagtggcaaagccataatccacatcttggactgactccagactcaaagcttgtgatcagtcactgggcaggttcagggctggcatagaggtgccttaatgttaaatagaaaagagagacctgagtggtatcttgttttggcaattga

SEQ ID NO: 316220 - DNA, 4001 bp, Homo sapiens
tttgccacacactgcagtccttattagcaacacagccttcatttacttctgcaaagaactttacagcttttgttttaagacagggtctcactctgttgctcaggctggagtgcagtggcataatcacagctcactgaggcctcaacctcacagactcgagatcatcccacctcagcctcctgagtagctgggactacaggtgcatgccaccacgcccatctaatttttgtattttttgtaaagacaaggtttcaccatgttgcccaggctggtcttcaactcctgagctcaagcaatcctcctgccttggcctcccaaagtgctgggatgacaggcatgagccaccgcgtccagccaactttacagttttaacaaaaaggctctctcacatctgttaaattatttgacactaaaaacaacgaggtaaatgcacaggaagcaagactgagggttaagtgatttcctcactgtcacacggcaagtaaatgacccagcttgaccttacaggtaagccacctgactcgtagtccagtgtgttttccgttataacttgttttcgttttatgaagcctatctgagtagtaagatattatcaaaggctgaaaaaaaaccaacattgtggataaaacaataaactcagttatttatgtagtgaaacagaaaaaaaaaatccctaggtaaacttagaatggctaacatttactaagcacatatcacgtgcaaggcactcttcaacatgctttccataggttatctcatttcattcctacattgactattttaaaaatacttattaccctaataaaaatagctacatttattaagtacttgtagtgtgccaggcacttaagaggcatgatttcatctaatcttcctaatgaccctgtgaggttgcactatgattctcatttaagatgaagaaactgatacagaagtcatcggatttatcccgaaggcaggcatctagcaagtgacaaggcccaaactcaagccccattctgcttggttctttcttctgccctccatgtgcctctctaagataaggggtagggtagattcgggacttgtgtgaagtagggttgattggctcaagagtgagacagagagatactgagccacttgacttaagaggttcagctcctggggttgaaagaatcttcagataccatttggactaactggcctgtatcatacctgacagatgacaaaaattagggccaagaagggaagtgacttgtccaagatcacataaacagaagatgcagccaacatgtattaaatgcatactaagagccgggtactgtgttaagtacgtttatttgaatgatcccaatcaatccctgcttatgagctaagtacgacatattattacccccattttactagtgaggaactcaggctctgcaggtgaagtcacttgtcctgggtcacggagcaatccaagcctaactccagatttctcttcttagctatgccatatggactctcggaactcagtgggactcaaagtttgaggaaggtgtttgatgaaggaaatgaaccccttgcctgaaaaatatcagattctcgagcacgaaataccagtccctcacccccgccacctgatctaattcactcctactgccatatgggaaatagaatgctcagaaggaaagcggcttgtctgcagtcacccggcctagactctaaaggcaggctcctatctccgggccagggtcccccctcatcaatgccaccgtctccggtcgacccccccaccccctccattgcggggtccacctcgggactgggtcggccctggggcaggctctcaagggcccaagggctgccatcccgcgaatcccggctgcagtacaagctggaacctgaagggcagagagtacctgcaggaggagaccggaggaggccagccgggccgcgtggcccagcacctcctggctgcccatagcctccgcgccaggctcagacaccaggaaatgccgccgccactccgtttagtcgcgataagatggcgtcacggcgcgcctcgctgtctgattgatggccttgagagaggggggcggggcacgagaagttctggtcctttaagtgggcctgtctcgggccgtctgttatggcgcctggctctttctatttcggtaggttttgcgctgtctgtcgcttgtgcgctgtctgtccctctcttccccgtataaacgaaatagtgtggcgagtactaagagataccgttaaagaatccaaagttccttctctgaggctttcagccaccaaccaagaagcactaactttcctggcctcatctgccaaaaggggaacaaacttctcactggcccgttaagaagattctcaccattgacctttgcttacagaatcacagccacagaccctctgaattaggctggacaggaattgtcctcatttaacagagaaagaactgaggaccagaagttagatatagcactgttatgtgtatggttttgtgaaatccttccgaaagctctgagaattggcccctgtggttagagatgagtaaagccttggagatgggaagtgacttgttcgaatctacacaacttgtttcctgactaagtggataccaggctcctgatcctaaacttatcactcttgcctgtatgctagaaattgtgagggcagagtggaagaaggactggaagtgctttgtaaaaaaatgtaaagcgcccaacatacacaatcagctgctgttctgtcagtgttcttattatctaccaagcaggctgtaggaagcccagtctttccccaatctctttcagtcctcacatgatttggccccaacctatcttctactacctttcacacgatcattgcccttcccaacactatctaggccatagccattccgagtccttactggtcctcaaacaggcggtgactcactggcctttgctcctccaccctctttgtccaaagtgtcttccctgacagcaccccttgccctcctagaccacactgtcctgactttcctggccaaccacagctggtacctgctgtggactaaatgtttgtgtaccctcaaaattcatatgttgaagcctaatccccagtgtgatagtattaggaggtaaggcctttgggaagtaattaggtcctgaaagtggagccgtcataatgggattcatgtccttataaaaagagatgtcagaaaaatgatctctgtgtttactatttgaggatacagcaagaatgtagctgtctgcaaccacgaagaaggctttgtaaaatgtaaggcgcccaacatacacttaacaggaaccaaactggctagcaccttgatcttgggcttccagcctccagagctgtgagagaaatttctgtttttgacttacccagtctatggtattttgttacagcagcccaagcaaatcaagacagtacccctaaaatactctgtacccctttatagttcctaatgcaatctgcattatagcagaaagactagaatatgtgtctctatataatcagcccatgagctccaagagggcagaagtgcagcctgcctggttttgcttcctgaagtagcggtacagaacattcttagggctcctataaatgtctcctgacacatgactgctgctactgctgctggaaacagactgtggaactcaaagcctatcactcccatcttcccaggtgaaatgagctctgtcttagtgtggaggcccagaatgtgagcttttctttttcttttcttttcttttcttttcttttcttttttttttttgagacagggtctcgctctgtctcccaggctagggtgcagtggtacagtcttggttcactgccgcttccacctcctggcctcaggtaatcctcccacctcagccttccgattagctgggactacaggcgtgcagcaccagacctggctgattttttctgtgatttttgtagagatgggtttttcccacgttgctcaggctggtctccaactcctggactcaagtgatccgcccacctcagct

SEQ ID NO: 316221 - DNA, 4001 bp, Homo sapiens
ttttctgcttgtttccctacagacaaagcaattatttgaatgtaagccaaaaattcctgctcaagagggagaaaaagaactcactgacttgtattcccaatttattatctttcaattcctgtaccaaatctactagctaactgcacaacactccacttccatttgccccatgtccatacagccaaaaagcaaacaaagaaaaaccaacccagtgacttgatatacaaatgcagccagaggatgacgtgccagctctggggctttgaatcactcaggcgggccagaaaccccactgaaggcaaaagaggatgcagagctcagtctgaggttagagtgatttcactgaggttagcacacacgcaccaaagagtcccaaacagcttgcttcgtaacccctctctggggtttggtgacatctggggtcacttgaacttcgttgggattcagctgttcagagatacaaattaggaatcccggcagcagagaggccctacccacaggcccagaggtcgctcacattacacccggcttccttcctggcaaggccttaacttatcctgagatgacacacgatggcaggggttggaagatgcctagtctagttgagcgcccagctcctgaaacagctgtaccgactacaagggttccagcacatgagttgctggaaactggggtgaccactgacagagattgagccagactttttttttaaaaaagtacttcttgtttgtttgttttaagcccccgaagaaactcactgacaccacccagcgtccctagggatcacccataaccacacagggcagctgagggcaagcacagagtcacagacagacagcagggagcgtgcctggttctacaaccttggcctccacgcggttcttgctgccaaaggcagcgacaccggaggtgaagggcaccagccctggcctaggactggggtgcgcgtgcctgacaacggggcttcccgaaatacacaaccacctcctcctcgcccagacccatatccatcctggcgtcccttgagtctagagaagtgggttaagacaagggaagaaaatcccttacagaagaggagatccccgttttcagtgctggggactctcggcacccgcgtccctgtgcttctggtggttccggcgcttcctcggagcgcgcggcatgtctgctcctacacgtccagcacctctgtccccagagcaaacccacctcccagggcacacgcagaggggcagtcaggcaccgcctccaccctgccccacccaggccgcgcgcaccccggaaacctggactccgcgaccagctccctcctgttcttttccgaggaccccagcggcagtgtgtcctggacccacctgtagcctccaagctcccccacctctgcgtccttcctaggcgcttctgagcctgcagagcctacgacccccaacaggctgctccgaagtgcctctccctacatcgctccaggaatgactcccctacacccgttccccgcaaaaaaaagttggcccaagatccaggcgtcccaaggatcagcccaggtccccatccgacgcgggccagggggtgctgctctggcagctccggagccccggcaaagagcaacctgcagggaggcgccacgcgcggttcccactacccgccagagacccggtccatggggccaaacggaggggcctgtgccggtcgacaccccaagccctgtcgcgccccccccgccgcctaccgtatgggaccggcggaggagaaggcgcggtcgcgggctccctgaggcagcgtgttccgtcccgggaggaaagtttgtgccatacagaggaggcggcgcggggaggacttgggcgccggtgggtggaggcgtgggcggtggcgccgcgtggtcgtgtgtctgtccctccggcgatcggtgcgtctgtccctcgccggagcccgcggccgccgcgctctcgctcgctgcgcccagcgcccggcgcgctccggctccagccccgacgcgcccccgccgccgccgccgcgcgtccgccggctacacttcctcttcctctgaactcatgtgcaaaatatgctacgctgcatcttcagggaaagcctcgcggcccctgacagcagccgctggagcggtgggcccgcccagctctccccgcgccccctcggagttccgcccggtcacctccacgcggccgagctgcaagcgaccctggcagcctcagaacccaggggtcaggggctcatcgatcctccctcccagcccctcctaatcaaggttgtgtgctgtcaggaagagcgcctgggagacaaggatccttcaagatttgagccaggatgctgaaagggcgactgccatcaaggtgctgatggctgggggtggggttggggccgacttgagagaggaccatttctcgaccccattccacaggtgggagcatccctaaacatctcaggtgctgctgaaattctctcttgcgagttagtgcttcagggaagggtaatgccactgtctccgttgccatcccttggtctacctacttaagatgtccagaggtttgagaagatctggagaatcaccttgcgtggcaacttgaggcacccagggagaaaattatataaagagtgaagcactagtaaaccaggctgcattagtaaagtgaagatgtgaggcaaggagccattagaaaatattttcttcgtaaaactaaaccaagcagaattacagtgtaggggttaagagggggaactttaaagtcaaataatcagggttggattcctggctttagtacttactggctgtgtgactttgggtaagtgacttaactgctctgcgcctatttgtcacatggcacttcttcgtgggttattatatgtaaagtgtttagcaaccactctataacttagctattatcattattttaagggggctagaacaagaagggtgagataatttaattaattatctccattttctaattgggcaaagaagaccctgtgtgggcaaagttaagcactggagcacacagggtggagggctggtttaggggcccagcagtgtttcgatgaggtccttctggcactaataacactcctccagcaagtaaggaagcactattttgttttcagggactcttcctgttaccacagcttctcagagattttcttccttattttctctttccatagcctttctagttctgttttgctccccctccctcaccactgttttgtttttatttgtttttctcctttccctttccaccccaccttttcctggtgtcacactcaccaccactatccccagtgtcccccatttcccccctacacttgagcttgccacatgaaagaaaataagaccaggtgaccacgtaagtccaggttcagacagtagtgcgcagggacatttgctcaggggcatcaccagaggttgtgaacacccatttatgaagccaaagggaggggtcttcatgctatctatctgcccgaggccttgaattgctgcaagtcagggtccatccaaaatctttctgatcctttgctggtcactaggccacagaaagaaaataaaattgataggtgttaaccggtaggcatttaaaagaagataaaggaaaaaggagggtgggggtgggggaatgcagcataacctagttgcagtgtgcttgatttcttttaagcaaatcattttcactctataaaacttttgcacaccgttgtgttttttgtgctttttttttttaagacaccagtgcttgaggttaatatgctattctgattgcttccattttcttccactcaatattttcccgagtgctaataatcatgggcaaatgtcttaaatgacttttttccctgcttggatctgcatttttgagggttttctagaactcctgatcttcttgatattctgatgcttcctactggcacatagtaggtgttcagtaaatatgtgtggaatgagtggatgagccaatagcatgcagatctttcaaggctcttcttaacctgcattcagc

SEQ ID NO: 316222 - DNA, 4001 bp, Homo sapiens
gctctgggcccataagggacacgaatcagatcagggggtcaggattgaactgggaacccggtagggagttttgtgtgtgtgtgtgtgtgtgtgtgtgtgtgtgtgttgtgtgtgtgtgtgtgtgtgtgtgtgtttagcagaagaatgcatcctaatgtggggcagagttccttgttgggaaggaatgcagaggtggtggaaacccagaattggcagtccttcctccctctcccttctcgggaaatgaaataacccggacatgtgggggcctctcctaggagccatgaagcaatgtgcaatgttttgcccagaggaagaagaaggaaatgatggaattcagacatctgtcctgctcaccaccccatgaagttccatagggagagtggccatatagttaatcaaccaaactgggacattcctaacagtgaaagggacaatatttgtaaactgggactgaccctgcagagaacaaccacccgtaagtggcacacccaccttctggccagaactgagtgatctgtgattattgaatgcaacaaacacccaacaatggccagagattccctgagaatgggaccgaggcagcagcctggacatgggggagacagggcaaggctggcagagagacgcttgtggctggcggtaagctctccccgtcacccagctttgcaatggctgcttctagcgtctcctcctgcatctcagcagagatattcctggatcacagccaggagacctaggctcttgttgctgcctggccacatccctaaatgagtctcttcccctctccctgcctcagttttcctctctgttaagtgggatctgttatccctgcagcaccccatctgttttcctgttaaatgcaagacattattctaaagcaaaaaggaactgcttcagagcggctgcttgcggttctcaacaccaggagacttggaacgcggcagggaggctggaggggcacctgaggacaggggctgagaggggaggcagaggatgccagaggggaccgagcccattgcccagcacagggaagacccaatgactggagaatggaaaatccacttcccaccctgagcttgggcccccagagaggaggggtctggcttgcccagctctccctcagtgcccagcctgggtctgactcagcacagctgctccaagggaaacagaggcttggtgctgcaaacatggcccgagatagatgcgggcttccaactcaactctgcacccgtccctgtgtgacgccccagcagggcgcttgacttctttgagcctcagctcagttttcttgctgtgaaattagacaagcgcatattgctccaaataagatcaaggcagtgttcagtgccagccctgcacaaacagcagcccggctatcaccatgaatggtgtttgttgactgaatatatgagggctttggataacattgacaggacaggagaagggagaaggcctctcagccaccaccgccaagcccgggactctcccagacccctccatgctcccgggctcctgcacaccccacccacacccggctcataccgcccagggtggcaaagaagccctccaaattgcatcctgtgggcccgaagacgaagtatccatgcagagaggtgtagagggtgctggtgaagccacctaggaccatgaagaggtcagccacggctaggttgagcaggatgtagttgagaggcgtgcgcagcttcttgtgctggacggtgacgtagagcgtgaggaagttgatggggaagcccagcacgatcagcagaaacatgtaggcggccagcatggagaactgccatggctcagccaggtagtactgtgggtactcgaaggggctgcgtaccacacccgtcgcattggagaagggcacgtagaagttagggccttctgtgccattcatggctgtggcccttgtggctgacccgtggctgctcccacccaagaatgctgcgaaggcctgagctcagccactcagggctccagctggatgactctgggttctgacccccccagacccttataaagtgacctccccctcctaagctcctggctgaatcagcatctgggagattgggggtgttcataatcatattaatccccgctgcagaaactgagggcctaattggcttctaagaggggccaaggtgacactaggaggaagcctgaggtcagggaggagaggtactcaggatccaggaaaagggaggagaaggtcccctaacttctgcatgacttgtctgtcccaaggtcccagctcagtctggtggcctgggtttgaaatagggaccatgggcctctgtgctatgtcctctggacagctagagactttctggtttattctcccagtctctcatctcgtcacacagccccttacctgttcgttcccccacaagttacctctggagtcatccagtccccacactcctctgacaggaggagctccatgagggcaggggctgcaacctgcagcttccgtttctggtgccagacacatagcctagggcccaggagcccaatccttgttgcatggaattggaattcactctcttgttcgttcattaaacatttatttgcaggcccctgggaatacaaagatggaaagaaacagccctgcccagaggagctcaggggctgaggaggactcaaatgtgggaagaagcagattccgtccagggtggctgtgaggttgtggagacagggcctgactgcctgggggttgcagtctgggaggccatgtttgggcctttgagagaaggagcagtttgccaggtggctaggtggggaagatctgggctgggggcagttgtaatgggtcttgaacgctaggccggggaacctggctttatccagaggaaagtgagcagtggcttgggcagatcactggtgtagaaaggtgactcaaatgcccccaaagatggagtggagggagggaggatggagggggctaccagagcaggggaggggcagaacccttcaggggactccagtctgaaggggaggctggccctggaggcagcagacagggcactgttgggggaggcctaatcagccacgagggcctcaaatgccatgtaccaggtggccccacgagggccgattccagaatagcaggatgtaccgtgagaaagaaagtagtcagagccttgggggcagatgactgggggaaaatggaggccaacactggcaggtccccctctccccgtcgtccaagcaacatgatgacacctcccaggaatgaagtggggtgtctggggcggcctgtgcaagtgctgagagtgcccgacgtgcggccgctcagtgaccactgtccagccaacatgtgtattgagcacctactgtggcccagacaaggtgcttggtccttggggacacacagggtacacgaaagagcaagctcctgctcacaagaagccagtgtttttgtggggtgagggggcacagggaccacaaacaaatagaagagcgaataacagtagggacagttcagtcgcagccactcccaacacaggaggcttctctgagaagctggagcttgagctgagaacggaacaacaggaggaagcttcaggggaaggacatccaggcggaaggacccctgagagtgcaaagccctgatgcctgggaaatatcccttaatctctctctcactgtctctcttcccacccaggattcccagatctgtctgctcagaagagtgcccccttccctgcagcccacctgggctccagccccctacctggcctgggtggtgttgggtctaacagcgtttggcacacgtggcagggctaaggcagggcgggtgggatggggcctctcgtagtttaaggcgcttggcctggtgattatgcccaacgctaatgaggttaaggtgagggtttgattctgacgtggaccctcatggccagaaggagggtgtcctggatgccttgggtcaagactgacccacaactggcccctccctggccgggctgagcccccatcccacacagcttagc

SEQ ID NO: 316223 - DNA, 4001 bp, Homo sapiens
aatgaacagtttctcccaaactattcaccatcaacaaggtttaaaagaagaaacaatggaataagctagaagtcctgaattttagctgactctggaggccaactgcttgggagtaaatggagaataccttaacagagcagacagttctggtctgctcctgactagataggtaaccttgggaaatttacttaagtctctgggactcagtttgctcatctgcaaatggggttggacaaccagtcctgaaagattcctcttagatctaaaactcaagaactacacagtattcctactctcttcttccctccaacacagatttttatgagaacagagaggataaatctagcactagactttaactcaaaccaaggtgcaccttatatatttaatgtccccaagagccatcagtgctccacaaaagtagatggaaccaattaagacaagttatccagagatccttcaataagtcattctttacaattaaaaactagtttttcagtccaatgtcacttgtgccaaatgctcaaaacagtatctccgccaatctagccacatctaaggtgacaatcatccgcatggtacacattacacatctgggtgatactaagtggttgaaaaattctctccacatacaacattttaaattatggaagttttttggtttttcaatttttctccttcagaaaggcagagtgaaatatctacttacacacctgcaagaaacgtttaagactttcttcaagacagaaccaaacaagtcaacaacagaggtaaaaatttaaaatcagaactattaaaaaacacaagtggaaccaactttgaggtaaaaaggattccaattttccaccgtaaactactaaacaaggtttgtgaacaaatcaacttggatgcgaatagcgctattcaatgaagacgacccgtaactgtagatccaatcagtaactaaggtacagatatttagatcattcctaatcaatacagcgacttcgactaagcaacattgcatctattttcatgcaacatcgcttaaatcatttacagttttgtgtgttgttttttttttccaaatggaaaataccccttttccactcaaaacagaccccaaagctttcagacgagttcgggcgcgttccaggtggtatggccgtagatcatacccctaagcgttcaatacaatcttttacttacttacacagtctccaacaagtctgcattaaaagaaaacctacccaaagtgtaactggactttaatcaatatgaaacagtgattgtcgtttctcgttaaacgtaaaaagcaaaatggagttgtaaagagtttctttcccatttcaactccgacagccacgcgcgctttcagcggccggctacactgcgcggtcgcggggcccggcccaaagcccccgccctgcccggcgccgctgggagaggaagctccggggaccgagggcgggcaggcgggcagcctgggctccaccaggcccggccgggcgggggaaggggcacaggagactaccgggcgcgcttccggggactgcgcgggcggggtcgccgcttggggcgcggggcccgggctgggagtcaggtcaagggtcaggggccaggggcggctcggccacgagcagccggtggggcgcggccgcggcggtgcggcggcctgccggccggaagagtaccgggctggcgggcctggggccccgcggcgcctggagggaacccttccgctcacctcaggcaacgaatccgagtccagcctcttcgcgccggggacgccggtccgcgagtcgcaaactcggagacgaaggcgggtagctgaagaccagaccgtggactaacgagagaaccgacggaggaccgcgggcggcgggagggtagcgcgagagagcgagggcgggcggcggcgggagggcggggaacgacgtgcgcgcctccgagtgcccagcgggctcgagccggcacaggtcgcggccccgcgcacgcgcgcgcactcacagctcatccactattgctcaggagcccgtccacgccctaaaagcaaaacccttaaccaatcattgcagccgcgtggggcatcacgggaactccggggctataaaagacctggttgctattttgtactcccggagtcactcatcccttaagcaagcagggtggggttaggtgcgcgtgcgcggttttaatactcctccccgaactgccaactcttcacgcacgcgaagtaggccccaccctggctgggtttacgcgtgcgcactaacgggcctggtcccggaagaccacacgcgtgcgtggtggggactacggtgacagtaccccgggtggggcgagggccagtcatggcggagtcctggtctgggcaggccttgcaggctctgccggccacggtgctgggcgcgctgggcagcgagttcttgcgggagtgggaggcgcaggacatgcgcgtgaccctcttcaagctgctgctgctgtggttggtgttaagtctcctgggcatccagctggcgtgggggttctacgggaatacagtgaccgggttgtatcaccgtccaggtgaggcttcctacgaacctccgtgggctggccgcccccgcccccaccctctcccgactgtaccattgggttccccactatcctgcaagaggctcatcagaacttaacattggttcacggccttactaccctgaacgcatctgacctcggaagctaagccaggtacttggatgggagaacttaacgttgtgccctgactcatgccaccataccattttacgccagaatccccaccagtccacccatcacattgtatctgttcctcagaactctcacctggcaataccattagtcccttaggaccctcaccagacttcaccaaacaataccagtggtctctaacctgacctgggctgatgcctgctcagattcccaccccagccttctgcagctctggatgtgtttctgcctccaggtctgggtggtcagaatggatccacgcctgatggctccacgcatttcccttcgtggtgagtaaatctgtccataccgcaaccccatgcttggcattccaaggacactcctgtgctggtgacagagaggggagttctcaggctttaagcccaccagcttaatggcctttgcagcaagcttcaagtctgcacgtagagctcaggcttcaagttagggtgacaccaaggtctggacagtccatcatcatgctgttcagcagcctgtaggataggtggtggtattgtcataatttcagagagatgaaatgacaggtttgttggattccactctgcacaatcccctcagttgggaaggcagtaatctctgtcctgagcacattgacctcatcagggtcagcctcctcttctgcaaaacatgcgctcactaatcagggcattcattcagataatctctgggcccctatcacgtgataggggccacacgaggcccagagaacaaagacaacccgggccctgctcatggggagccagggatttattaggggagggcggcagtgcatggggcaagggtggtcagggaaggcttctcccaagaaagacacctaagccgagatcaaatgccacagggtgacaaagtgtaccaagcaaagggaatggattgagcaaggctaagagggaagaatacgggtgacatattagaataggtaagactgtgatgctggagcttgaacgtgagagcttgttggaccctgggagccattgaaagactaactcagcaaggctgtggtctgatctaatttgcctttataaatgcctacttcatggcaagtagataaaggggtccaagagttagggctagaggttagaaaggctgccactgcccaggtttctgtcttagagaagaggccaggccccatggctcatgcctgtaatcccagcactttgggaggctgagatgggcggatcacttgaggtcaggagtttgagactagcctggccaacatagggaaaccccgtctttactaaaaatagaaaaaatta

SEQ ID NO: 316224 - DNA, 4001 bp, Homo sapiens
agccatacctgctggtggctgctgggggtgcatgttcagaagaggaaaagatgcggttcaggtagtcattcagcagcttctcctgcacaatgcctgagccacaagtcagaagggagaaaagggccacatgatcagtgcagctcctggcccctgctggccccagagacttctggtcctaggccagccacaggtgcagcaaggcctgaggcctttgtcccttccttctcctcccaacaagaggagcctccttccttccctgccagctcttacctgtgaccctggatttctcagcatctgaggtcagcctatagctcttgcgggagaaagacatgccggcccccttggatgccatccttcatctctcatgggcagccagtggtcctgggggctgagccagacacagagcctgtctactcagggccagccaggggcccccacacctgacctcagtcctgccatggcaggaaggcttgggagcaggtgaggccaggggcatgcacactaacacatagggcaggggaatgcaggggctcccagcttcctacacagggagggtagccagggtctaggcccatgtaacagggaccacttcttgttctccagtgtccctgtgcccagcacagggctgggcagagagcaggtactagatatatttttgccgaaccataacaaaatgtctcagctctgtggaaatcagaccaaaatgtccaaagtgaggtgtcctaggggcagagcccctgtatccatctcagttgtaagccatactgagtccagctcacaaccagaagcgacaatcctacacattcccccaagtgcagaccaccactggtctggtcatctctagccataagtcccacttactccccacaaggctggagcctctttcctcagccctgggttcctcccttcttttatccatggtcctgatagtttcaccattcccactcacacatgtggcctcccacctcatccaagcaccacccttgcccagccctcatggcaaactccattggtcctcctagtgcatctatccctcacatcatgttgctgctgcagctgctccagaacctgcactgagtccctggtgctggcctcactgatgtgtagcggtgctgtccaacacagcagccgtcatccacatgaggttacttaaatttaaagttttaaaaattaacaattcgatttctcagttgccttagccacatttcaagagttcaatgaccacatgtggctaatggttactctgttggacagcacaaaggtagaacgttcccaccatcatataaagttctattagacagcgcaggtctagagtttcgctctgcagcactgccttagccagcactccctactctgcagttcagtctcttatctcaccccaaacagaccctctactcccgccacaaacccttgtgggtctgcaccacgcctgctcctcgggaaggtgattttcccgacctcgggccctcggtgggcgtccatgatcggtgccccttcactaccagagtagttgaagatctgattaaactcagtcattcatttgatgagcagaccttccagacacccggagtgggctccgggagtcagttgctgaggacccaggtgagaggcggaccttgtccccgcccggggactccctgtcacggctatcccgtccaaccccgccggggtatccggactcagaactgaacctactccgtctgggagcccaaggacggcgagggcggcgcatggctcccccaagtcgcccccgcctggccccaagctccacaggacctgccagaccagcttccgctcggagtttcgcacccagatccctgcgctgcaggtgccctcgcactggactagcccggaccgcgaagggaatagccggaacccgccaggctcagagccctgccgcccctcactcacccggagcctcggccgcagcgacccggctcacaacatccgcccaacctcttggctacggcgtccgttcagggccaaatcacgcgcacgcttgcgcgctgagcctccagccgcgcacgcgcactggcccgcgcccagcctccgctaggggaccccctccatggcttcccaccgggttgttccaggcctcagcttcgccgaaaggcctcaccacctccgacctccgcctgctctggggatgctcccagccctgctgcggcagaacgcgacatgctaaccggaatccctaggccgcctgtctcctacccatacttagaggccccgctcagacggtccttaaaacgtctgaaaggccgttcctgccagagtccctgctacctgttacctccacccctatttagtcctagtggacagcctcgctcaccttccctgggatgacacttctggcggctgagatgagcgagcctctctgggctctgccgccgggtgtgggctgacctgcctacagctggggcctgataaggcagcagcaaaagggtggaggggaggcagtgttgaagctggggcaagtaattttccccaatttacagggaaaaaccgaaattcagaaaagtttaatgtcacccaggggctggagcccagacctctggcagctctcactttcacaatgcccttgggctgactaggctgcagaggggtttcaccccaaccccagggcacctcaagtgtccccaccaaaccttcctaacacctgtccactaagctgtactaggcccttgcaactgacctatgggacctgaggcctggcccctcatggctcctgtcaccaggtctcaggtcagggtccagcaggccctgagctgacgtgtggagccagagccacccaatcccgtagggacaggtttcacaacttcccggatggggctgtggtgggtcacagtgcagcctccagccagaaggatggggtggctcccactcctgctgcttctgactcaatgcttaggggtccctggtaagtgcccccaaccctgatccccatctgccttcaggagggggttggccccattctcctattctaggatgagaaaaaagtcggggagccagaggctcagtgggcatggggcagtgaccttgccctcttgagcacagctgggaagccctaggaacacatagacattgcccacttaggcctctattagcacgtctgctctagcactgaagcagtgtcaggaccacacagatgcacgcacacagcaggcagtgacccctcctgagcctgatctacccctctaacctagcatatgcctttgtgcaggtgagagcccagatttggagtctgaatgcctagccagggcccctggctgggtaatgtgatggctctgagccttagcattctcatttgagagatgaggtggggcaagcttcatcacccactgctctcacagagcgtatgtgttagatctgagcccggtgcctgggccactaaacagaggcaccggtgataactaccaagtctgggcctgcttcccaggggaaatttttttcacaagtatctgtgcagggggctagactggcccttgaaagtgcatacagggtccatcccagaagccttgtagctttgatcccctgaatgaacaaagtgtggacatgccaatacacattactgacatgtatgcccacctgacctgcacccactcatgcctactctgcagggcagcgctcgccattgaatgacttccaagtgctccggggcacagagctacagcacctgctacatgcggtggtgcccgggccttggcaggaggatgtggcagatgctgaagagtgtgctggtcgctgtgggcccttaatggactgccggtgagtggccactgggcctagataagactgggggcagggaagcctgggctgtggcgttaccctgtgccttcttctctccagggccttccactacaacgtgagcagccatggttgccaactgctgccatggactcaacactcgccccacacgaggctgcggcgttctgggcgctgtgacctcttccagaagaaaggcaagtgggggtggagaggggcagggtgggagacagggg

SEQ ID NO: 316225 - DNA, 4001 bp, Homo sapiens
actttacatttccatcttcctcttgacacacacatactgttaaaaactgaaacaaaagcttcttgccataatatttacttttattccatacaatgtcctctggtattttttctttctttataaagcttatgtcaatgtactaaattgattctaaaatctattaatgaatccttatgggccctgcactacagcactgcactacacttcctgcactacagcactgcactacacttcttacctcctgtttaaagttctttttaattgctatcactgtccagttttgttacttcgagatggagctaatgtccacccattaaaaaactgtgcttaaatagcataaactcttgaaagccctaccttaaatcttgaattgatctgtttctccagaagaactctttggaggcacagccaccttacttatttatattgtatcaaaaactgcagatgttctccttggagaacaaacacatcattgttgaaaggaatgcatcagttttcactgtttctgctgcatcactgacgaacagtaatagccgggcaggtttggggcaacaagagaggacccgagcagctgcccacggtgctgaaactgatgatgaaacgacagttttggaaatttactatttactattgtcagattaggacaaaatagaggaatttaccagacactggcagagaaaactgagtggccgccaccaaagttgcatgagtgcttccgggatactgctgtttggcttcgatgtctgcccactctctctttctctctgggacaaagttatttaataagtgcaagtcaagtcaagtcaagcatacaggcagagctgctgactgaccgtagtatctggccctagcaggggttaagtcccaaacctgcaatctgagcttccagggaaagaaaaagggggtgggggtaaaagagaggaagtgactgccctccttctattcagagacaaaacagccccctcaactaaagtcaagcgatgtgcccgaggacgttgcggcaggtacttgaccaagaaaagccttccaaacatgttttccaggcaggctcttgcagcctcaagaagggaatgagagaagcaaaaccggtaactcaactttggacacacacaaactcgcggaatgagagtgcaggggagactcggtcccccgagggcaaggctattttattccttttgcaaaaagcctaattgacttctcacccagctctagaggagcagcaaagacctcagcagcagggccgactccgagctcgagggccaacaagcggggtatgttctctgggccgctcgataacgagctgcccggctgccgcgaagccggacagggtcttaccttgaagtccggcccccgcaacacaaacagtcttgccagccgcgtcgctgcgggagaagtccctaccctgatttcatgactgaatatccgcaccgacccccacagcccggagtactagcagggacgacaacacctaggcgaagcggaagtcccgccccacgcgcctcattggtccgcacccaaaggcacagaaaacccactgggcaacatggttgcctgttaaggctctttcccactctcacgcggagtctcgctacttgctctagcccggctcggagaaatgcccagtttgcgagtctcgttcttggccgcgtgatccgtcttccctggaagggaagagcagggtggggcaggcgtctgcggaactggagcgcggctgaagaagctgctcttggcagaggaaggggcaggctggcaaagtggattggctgtgggcgcctgccgctaaccatgtgcccctagaaacggagaccgtagggtctggagggcgcgggaccgagcgggcagggccggtcggtctgatctgctccggctgttgggacagagtagcccaagattcggctgccgggctgcccccgggcgggcctggccctggcgctgacgcgtctcttccctgcacactacactcacccgacctactaaagaggcgagggcgaggcctcatccgcccgccttccgtaccgtgcccagtctgagatcagagtgggtggggaccgtggccacaccttaaagtagggctcaaattgttagagatgcgagcggcccgaggtctgaacgccagtcccctgaggcctggctcggatccacgctggcatcagcactctgggcctgacacgcgccatccccggggcttagcaaaagtcaaaccatgtgattcaggccctaggtcagccttttaaaacccttgcctccttttgatgaaccaaaaatctcctcccctgccgcccttctgataagccttcctttctggttgtctcaatcttaaaccagtcgaaacttaaattaccggattgtaccatccacattgattaatcattgccaactcgccaccttacaaaagcagtgtgacttaggcaaatattacagagtcctgaaagaaatgtcaggagacatagaatcaggcactacttctgcttcaaataataaggcacccttaataaggcctttacaggcttcaactccttcaacatcatcttttaaaaatggtggcgaggaggctatcacacagagtattagtagaataccattggatgtaacttgtcactttgattgcttggagagccctgagtaggtgggacacagcaatggggaaaagactctttccttattgtgtatccttttgtgccttttgaattttgaaccttgcaaatattacctactcaaataaaattcaaatacaagaaatttaagatcaaattttaaaaaattaaataaaagctatcaaaggtactttcctcttctgtgtatcctatgagtattctatgtagtcttaacttttcattggttgcaaagacattcaatacttaaatcacaattctgcctttaagaaagtcataaataaaagtcagcattgggaatattactaagaagactaattagtataaacacatttataatatctctataagcatttttttcattaaattatcccaaattggtatattaaatcagatttcttgcataacatcaaaataaatttttttaggccgggtgcggtggctcatgcctgtaatcccagcactttgggaggccaagtcaggcggatcacttgaggtcaggagttcaagaccacactggccaacatggtgaaacctcgtctctactaaaaatacaaaattagccgggcattgtggtgcacacctgtaatcccagctacttgggaagctgaggcaggagaatcgcttgaacatgggaggcagaggttacagtgagctgagatcccaccactgcactcgggcataggcaacagagcaagattccatctccaaaaaaaaaaaaaaaaattaagtccacagagaggagctttgggttttgttgttttatttttatttattttagagacaaggtctcactctgttgcccaggctggagtgcagtggtgagatcatgtctcactgcagtccagaactcctgggctcaagtaatcctcccacctcaacctctggagtagctaggattacaggcatgtgccaccaggcctggctaatttttttattttttttagccttacagtctggctatgttgcccaggcaggtctcaaactcctggcctcaaaggatcttcttgcctcggtctcccaaagtgctaggattacaggcatgagtcaccacgctcagacaaagagctttgcttattccttaaaggcaccttgagtacagaatattttacttctggtttcaacctgctcttcagataacaataggtatagttctctcaactatgaacaaggtaatgtgtcatttgtactgcatttaggctacactctgcaaaaacatttactctcccaacctgtgctgaaaaaggtaaattggaaaaaaatatattggaaaaatgtattaatctttctaaagcagattagacagtaagattgacagatatcataattacaattttcaagaacatgaagggttaataaggcacgtgatactaatataccactaattat

SEQ ID NO: 316226 - DNA, 4001 bp, Homo sapiens
cttttaaacattttactgaatttatgttacccagaccggcctcaactcctgggttcaagagatcctcccacctccgcctcccaaagcgctgggattacagctgtgagccatcgctcccggccaaccgcacacttttagtaggtgaattgtatggtctgcgagcatttgaataaagctttttcttttaactattgtttaaaaatgtttaaaatggcatttttttacaataaaataaacgtatgtttaaaaggcaggtacacatataactgtgaccaaaaaaaattagaaaaaaaaaaaaaaaaaaaaaaaaaaagacctgtccacgagagaacggagacaccatatcctaagcccagacaggaaccaccgcccggcttattgctcacattagtggaggaaagagtcaagggttcagtttggggctcctgagtctaccgggtgcagggttgagtgataaaaaagcgactttagcctcgtcgcatgattaggagaatcaagaattaaatgaatggagatgtatagataagtaaatcagaggccgggcgcggtggctcaagcctgtaatcccagcattttggcaggccgaggcgggcggatcccttgaggtcaggagtttgagatcagcctggccaacatggtgaaatcccgtctctactaaaaaacagaaaaattccccgggcgtgatggtgcacgcgtgtaaccccagctactcgggaggctgaggcaggagaatcgcttgaaaccgggaggcggaggttgcagggagccgagatcgcgccactgcactccagcctggaggacggagcgagatcctgtctcaaaaaaaaaaaaaagaaggctccagacgggcaattctttaatttttaacacaacaaacacccatcgaacacagcgcgggcattttgacaatggacaaaatcttgcccttgactttataatccatcgacatttggggacccataaaccccctaacctctgagaactatttagacaaatactagtcgggttttttggtttgtttttactttttaaatggaaaagtgatgattcaccttttcaaagacttgcggcttttggccaacaaacacgccatggtttactcacccacttcctctgattcttggccagacgctctaagcttgcactccctgggatagtgtttttgaattatcgtccacagttccacgttgacgagagaatttcttcgggtatggtaccgagtccacgacgatacccggcggcgacagaagggacagcataaactcgccttttcgacggtcgactggaagcacggtttacacagcgtgtggttacacgggagggtgacgggctccacgaggatttccatgcagatcccgcactggcactcggacagcgaggggatggcgtctttgggtagagccatttcaatatgttagtaaagccgactaaacaacgacacctgcacgaaaaagaatcctattttcggccaaccacagagagagcaaaagcagttttgtgtttcagtattatgcccagaagcgtatcagaattcggagaacaggagcatccaacacgtcttgaagcaaaaaggcgctctcagggtcaggcaaacaggaataccccggagggcggcgtctttgtccattttcaaggcaaacgtcccgccagcaaataaatgcaggttttcgtcggaggagcctggctgctccgcggcatgaacaccgcggctgcggctcccggggcagcgaggggaacgcgccaagtcctctcctcccctcacccggaaaggatgctccgctcagctcggggcagccgggccccgggacgcggctccgggaggaagcccgggctccggctgcagcataacttccgctttaccgctgctgcgggggagacgcgcgactcccgtgttcacctttcgggcgcctggcgcagtttcccagagctccgcgcccccgtccctcctacgcagccagaaaccctattcgttgcggcagcgcagcagccaccggacaagcgctagcaacgtcacaaccgcccgccaaaatcgcacttcccacccagaaaactgcccaagggcgaacgttcccggggcgggacttccggggtctgcgcgccgcccgccctccctcccagccggagacggtcccgccctggcgtcgcagccccgcctagtgcagcctgggtggagcctgacctttccctgagatttctgcgaggcctcagacacccctggtttcttggtttctgggtagaaaaagggaaacctcaaaacaaaatcaacagccaaacaaggccgggtgcggtggctcacgcctgtaatcccagcacttcgggaggccgaggcgggcggatcacctgaggtcaggagttcaagaccagcctggccaacatggtgaaacccccgtccttactaaaaatacaaaaattagctgggcattgtgacaagctcctgcaattccagctactcaggaggctgagacaggagaatcgctaaacctgggaggcagaggctgcagtgagccgagattgtgccactgcactccagcctgggggacagagcaaaattccacctcaaaaaatacaaataaataaatagataaaagaattggggtctcactgttttatccaggctggactacaactccagggttccagggattctttcgcctcagcctctggagtagctgggtctagagcttgcaactccatagccagctccggacctgcattttttgagggaatcaatcagtgtgaaggaagagaaaagaaaatcactgtgcgtgaaagcagcctttaagttgttttgaggctgctgagagcattcaggctgggtaggggatggtttccaggttgagaacaacgaggagacatcggtcgttggtagaagtctttgggaactttcatttcaatgtgggttcagaaacctgttattgtctgtgatagctcacacctgtagtcccagcactttggaaggccaaggcgggaagatcagtggagcccaggagttcaggtccagcctgggcaacatagtgagaccctgtctctacaaaaaataaaaaaattaactcggtgtgctggctcacacttatactctcagctactctggtggctgaggtgggaggatcacttgagcccaggaggtcaaggctgcagtgaacagtgatcgtaccactgcaccccagcctgggtgacagggcaagaccctgtctcaaaaaaaagaaaaaaaaaagaaacctgggactgtcatctggttgtctacagtaacagtaccttagcttggaatttcaggcttgttttttgttcgtttgtttgtttttttgagatggctcctcattctgttgcccaggttggagtgcagtggtttgatctcagcttactgcaacctccacctcctgggttcaagcgattctcatgcctcagcctcccgagtagctgcaattacaggcgcgtgccttgtaataccacgtgcattgtaataccacgcctggcaaatttttgtattcttagtagagatggggtttcaccatgttggccatgctggtctcgaactcctgacctcaggtgatccaccggccttggccttccaaagtgctgggattacaggcgtgagccactgcacctggccttcaggcttcctaatatgtccacaacctgcttttcccatcgaatctcccattattcttttaaacatgcaactatgatttattctctgtcatccaaacgttttgctttcatgacattgctttctcggttcatcctaaatgggttgctttgtggctgtgcctacttcaaacaccaatttaatgcagttgggccaggcacggtggctcatgcctgtaatcccagcactttgggaggccaaggagggcggatcacaaggtcaggagttcgagaccagcctgaccaacatgttgaaactcagtctctactaaaaatacaaaaattagctgggcatggtggcaggtgcctgtaatcccagctagtcgggaggctgaggcagaagaattgcttgaacc

SEQ ID NO: 316227 - DNA, 4001 bp, Homo sapiens
ataaaatgtttagcgaaacttgtcttaaaaaaaaaaaaaaagagtctcctggatcagttaaaaatgcttcccaaactagaaattatgattcctaagtgggggtaggggcagctgtattgctggcaaataaactagatacttttaaagcctcatatgttttgtttgtttgttgctgagacagggtctcattctgtcacccaagctggagtatagtggcagtggcagtggcaggaacaaggctcactgtagcctcgacctcctgggctcaagggatcctcccacctcagcctccagagtagctggaggccaccatgcctggtcagctttttattttaatttttaattgtacagacagggtcctgcgatgttgcctaggctggtctcaaactcctgggctcaagtgatccatgtaaaataagtgggtcatgtctaatatcaaggtctttcaaaagagaaagataaaaatatctgaatccaattgttgtaaatcctctttgaaacaagcccttaggaataaaagacaaaagagcataaactgcgaaatctcttgattctggtatgtttacagtctcaccccccttaaggtgagcaattctctgtatgttctccaattctctcatttttcaagacaagtcacagttttcaaacgatagaaatgtccgttttctttaactaccctcaataaagaattccactgaagagggtctcatagtaattttaaatgccctatctgaaaatacaacttgcatttaaatagcacctgcttttcaaagtggtctgagttcttagaaccatataaaatataacaagattaagctgttctgaaaagtttcacttggtctaatattttaactcaaaatatcacagaaagaagacatatttgtaagagggttctccacaaaggcatgactcagagcagcacagtatcttctccaggaaatggcatccaatatggagaggggggtgtgatggaggtgaagttttacgtttctgaaaaaagggcttacaattcttcagcttccatgaaacttagatattcttgaaccacactgttcccttcaagccacgctagtgctatctgacccgtcttaaatcaatccagatttaaaagccattcgaagagcggcggtaagctaatccggaaatgcaatggctatgaacactttcctgcgtccctcgaggagaactaagggtgtcgttttgtggaagatgactctggagcatcactttggtggtgaccaagactattaaagttcactgctgaatcacggcctttaccctgaccaccttgtgttgagcttttagaggtggggctggggctggacacacaaaccgaagtgtttcctgctagttcccaacaatcacccggttttactttcttggtcacacccatcactacctgaaattaccttgtttaactccgtttattgcccgtctctctccctagaacaccaaccacccggcgcagggcgcctgttgcacaaccccgcagccccaggcggcggccgcagccctcaggagccgcagcaggagcgtggctccgcgttcctccggcgccggggcagggcgacctccacccactctcccaggcagggcactttccgaggcttctgacggacgcccgtcccttcccaaccccgaggtcggctcccggaggccgcagggcggccctggactcgcgtgcagcgcttacccatcacctggaccctgcagatggcgcacgtatcgcactccacgtcccagctccacatggccaccgcgttccacttcttgagggagaacatcttgtcgcctcccgacttggagcctgagctcccggagtgagaggccagggcgcaggtttcctctccgtcttccacgtcggccatggcggcgccgcggagccgacggcggagacgttggcttggggaaggcggaaggctagggcggctctgtggagccgcccgacgggccacagcgccgcccgcaggccgccagccaccgtggtgcctagaccccggctgcccacgattggctggcgcggcacagtgacgtcacctgacgccagcgccaggggggcgggcaggccccgccctcgccgtcctaggccaactgagagggctcgggcccttatggggcgacgccgctgaatctgcctgctgcgctgcggggtgttacgtctgagcaggcgcacagattgtgcagggatatgtgtcctgctttacggcttcattaaacctactgctctcagaaattatcttgttaatttattcgtttgtctcttccctcccaaatgtaaaactctatcagagcaggaaacatgttgctatcaccacattatcctccgtatctgcaaaatgcctggccacaggaggcacaattatttgttgagtgaataaatgatcttaaagatctagaaatctggttcagtgattctcaaaactttttggtcccaggactccttttcacttaaaaattattaggaccttaaagaacttttatttatgtaggaaatgtgtaaatatatatatatatacacacacacatattatgtatgaatatatatacacatatacaatgaatatatgtatattcatatatacatacatttcctgtatatgtatacacacatatgtagagattaatgtttgcttttgaagaaattaaaacattttaaaatgtattcattaaaaatcacagtagtaacctcattacaggttatcattagagggatgacttcacataccatgtagttgctagaaactccggtgtacactcgtagaatgagagtgaaaagagagaaatagctctaaatattgttaggcaactagtttgccctcttttgaccgctaaaagaggtcgggatcccaggagtcccggtgtgtggcgacacaacccacacttatttttcaggccccgctccctcagctgcacagtctccattccttctgctcagtacatttgagctagtttaacttcctctttttatatgtaggactaatgaggtctgaagaagtgaaatgacaaagatcacatcgttattatagtagtgcttctacggctagcccaccatcacatgtgtttccaagaaagccggtatctccattgaaaagaaaacagaagcacagccagcctaaggagatgcctgaccccaccatcacctagtggtggacagctactctgtcaagtttggattctgagcctctccccatcccctcatttcctgatacctgggcaaaagctaaccagactaatggagcctggcaggggaaacaagaatgcattaatatacagaaacataaatatggacacagggtcacatttggttagatgcaaatgcgtatttgttgagtggtgtgttaagggctgtgagggtacaggatgcagtgagggaaagcctcatgagagaggtagaggatgcagtgagggaaagcctcatgagagagtagaggatgcagtgagggaaagcctcatgagagaggtagaggatgcagtgagggaaagcctcatgagagaggtgaagtttgaactgggggaacatgggaggtcttcagggccagtggagagagcaaacctctctgagctgttggccagagcagggcacaatggtggcagcagacaggaattggaccacacctactttataagccagacacccattggagtgagcacacaaaacatgtgttctcttcttactgaacgaccacacatctgcctagagatggctgtaaatgctaggtatctaacaaagaaggaaggctggcaccagaggaggataaaacgcacccagttggtgagaagtttgaaagtcaaaaggatgaaatggtgaaaaggaaaagaatggtttcgctggaggaatggtatgtgcccttgctgaggcatgaaatctggagagaggtgtctgctgcaatgaaatttaaaatagaagccaggagggagcataggggcgggaagtgggaaggcaggtggaggagatgagtacagttttgacacactgcatgtcaggagaactttttctcctg

SEQ ID NO: 316228 - DNA, 4001 bp, Homo sapiens
tgtgtgtgtgtgtgtgtgtgtgtgtgtgtgtgtgttttaaagcctgaaatcggatccgtgattgaaaccagaatctaccaaaaggaaagaaacagaagttgagtcgtggctcagttcacccacagtaaaaaagtttcctagggagtgtatgaaaactatttacaagtgtagatacagtgtgtactcttatgtcagaagggccccgtttcagcatccttccaacacttcatatggaatttcagtattatttaattaatcctaaacatcccaaattcagttttctttcgccaatgagaatccccaggcaactcccctttccgatgcttgcaaccgcctgttttccttctaaacccagcgaggcagtggctattttatatcctaccttaagaaggagttatttcgtgaagcttcttcagaatcaaatttaattacagactttggttacataaaacaactactaataaccccttgtgctcggaagaggaggggctagagaggactaggctcaggaatcctggcaagcctgcgggccacaagctcccagggcgcacatttccctccccagggaagcagccggcggctgatactcacttcggctcatcctgggggccctagctcactgccagccgctgcctcctcccaccctagtgcttagacgtgcgtttgcccagagtaatctgggcgtgccctgaacttggcaaaaggccgagatctgcaaagagtcttgaggaggttcaggggtggaggggaggttttggggagtggggaaaaagagacaaccccaaatgcgaactaggaacattttcgcctaaaagtctagcaggaatcgagcccctccggccttaggagggaggggtaaccaaaatacacttctgggtttgatcgtgcaaagtggagagggggcgaacagggaggatcaagggtgaagaaagaagacgcggggttacctgaacagagacatattaatccaaacaggtaaaagtgagcgggctccgcaatcattgtcctcgggtggatcctgtatacagtctcatgccaagaggagggagtggaaatagggtccccaaatgtatgaagccacacaccacacacaaaggcttaatataagcaacgtgggtcaattagccaagagttttcagggcaattactcgtcgacctttccggacgcttgtcagtatctcagagacttttgcagaggaagaattccaaggtttgtcttctccggccccaggatttccgaggaggctcagacactttcaagaaccatccaaagcgaacaacaaagagccgaggcagaagcgcagtagtgccgtttcctgcctccacggtcttgcggagcctcccggcgtgcgcccccacaatgtgcggccgagcgccgctgcgagggcaggcgcggcggcggcggcaaagttggggtgtgagagctgctgagggagggccaaaaagtgcttctccgtctcccggcgagcccagtcagcagcgggccacccgcggcggcggcgatagcagccaaagtagaagcagcagctccggaggaagggctcggggtgccgggagtgtgactgggtgactccgcgcgcagagagcgagcgagggggcggtgcggcgacagcggctgcctgggcgggcccttgttcccatcacttgggggatgcggagggtactggagacagcagcaggaccgcggacactcgcacgtcttctgggcgcccccagccccgcgcggcgcccaacatcgccctcggcccctcgccctctggggcgctcgcaggcacccctaaactacgcagaagcccaaacttcctgggggcagctgcctgcacccctggctcgtggaagctgtaaagaggcagctcccggctctccccggggtggcagagaagggcagagaggatgctgctgcgggtgggagagacggccgccgcggctcaccccagctcctcccggatcagcggcgtctgaagtttctgctctcacgctgcctcctctccagctcaattgcttgtgggtttcccccacagtccccgcggctcccagttccctccctctcctccccggcccgataatacttaaaggggccgcgtggtcctttccatgcttcactctattctccaggcgctggtcaggcaagttctgctcctcaatatttccatccacaagccaggggtgcccaactgcgccctcaggtgagaatccaattgctcggaatcggaaatccaggcgaatgagaaactgtcttgtttctctcgccacccctagctcccctgcacctttctccaaatggaacctcccagccaaagacttcaaaaatcctcctggtccaacttaacctcttccttgccgcttccaggaattggaataaactctcaactccactctcacttctccccattcccatttaaaaaaaaaaaatcaattttgagcaacatggctttaggacaggaggtaaacagagaactatccagaacatatcagtagatgggcagtctcttacaaccatccttttcttttaagttgcagttgttgaaggtcttgtagaaaagatatccaaatcataaggcacagggttgggccttgggatcatttcctcatgtttcagttgaaactctctctttcaacttcatactccacacattagaaagctaacaatggggatgtaattttaagagagagagaaacaaatgcaaaaaacaatcttgacaagcccagagtttgcagttaggagaagctagtcaggcataggtttgacactcagtatacccgccctgaaatcccaacctgccagttatagctctgtgaccaggtctgttttctcttctctgtttctgttctcgagatattttattgcattaacaaaaaatacacaaagcaaaacaaacctgacacgtctgaaaggcattcattcattgagtcagtcatttttctttctttcttttaaataggacacagtggccaggcgctgtggctcacacctgtaatctcagcactttgggaggcccaagcgggcggatcatttaaggtctggagttcgagaccagcctgaccaatatggtgaaaccccgtctctactaaaaattcaaaaattagccgggcgtggtggcgttcgcctgtagccccagctgctcgggaggctaagacagaagaattgcttgagcccaggaggcggaggttgcagtgagccgagataacttgccactgcactccagcctgggcgacagagcgagactccgtcttaaataaataaataaataaataaaaagacacactatgtgaaatacctaacatgccgaatgctgaataaatggcagaattaatatctacagagttgtgtaccataacttcaaaaaaaattatttggtgtctagcagtacatgtaagaagctgctttcggtggttgcctctggaggacagaactgcgcaatggatagggcagagaaggaggatttgctcttttctacatagtgttgtgcttttccatgtcttttcaggtgagcacattcattacctaatggaagataaaaatttaaaagcaaattgtacattgattttggttgctgctggtgcaaccaacgaccttagagcgacattttgtggaaactctggttaacagcacctatctttgaaagtgaaagatagtctaatcctgagaaaactgactataaattcagtaaacagcctggagataagaattcaaagactccaaccaaaatcttttcagcagtaaaaatatgaatgggcagtcaaagctgaaaagcatacatcgatttggtcttgctaaaggatatttagtgaaaaacatagaatatatctcttttttcttggaatacaaaatacttttaagagaagcttacctagtaatagaaaacaaacactaaagtgtagtacttgagagaaagagagcaagatagagagaaaattcaaatcctcatatcatttgaatgtacgttaaataaagatgtcaaactttcacttagtaatgggggtatacttttaaatataat

SEQ ID NO: 316229 - DNA, 4001 bp, Homo sapiens
agacaaccatctcttaacaggcctctgtaacacacagcttgatgaaaatcacttacacagggcagatgacacagaggagtttacaaggtcggggcactccttggcggggcgtgaaagggtgggaggtgctgaggtcagggttaaactaccctgtgaaatgagcctcctgccctgccctttcctcccttcatctatagaaggagcctccagtgagttcctgcgtctggaaatctgccccctttagtgccgcagacaggccagggacagcatttcaaagctcctctaaatcaatccacttaaaagagcccagaaaagcctgaccattgaccataattgccctaaattgcttgttttccttcccctcttgcagcctcatcaacatttcccttctttcccccttcgtgtccttttttcttgggggcgcaggtcctctagatgcttggggtgcacactaaggatatttgagtagtgggagctccgactcgaggcaggagtgggatgtcttagcattccgtctcccccaccccacccatctgcgtgggacacagtgactcctagaagggtatcccaggattttagcggccaggtgtgagcgccctccacgcggtcctccgagacctcagggcgcgtggcaactgggcagaagccgtctctgcagcgccgctgccccgggtggagcggcagcccaggctgcagcagtggggttgccacgccgagttttccgcatcggccgcccgcagggctcgcctgcttctccccattgtgttctcagagctgtgggacccagccgcgcgcgcagccgcacccgcgccaacgctggaaccgaaggctcatggaagcggggctggcaagatggggcagggagaaggagcaagaaggggccccagaagggcacggcgtttcatcaataatgcagaggctcctggacctccctgcaatacgttttccagctaaacgccaccaactggagcgcttcctggttcgtcccactcgtgtggtttttgtgtgtgaaagatgggacgcacctttttcattcatctgtcttctctcattcttcctccttccctccctcatttcctccctcaaagtccccgctggcttagctttaagctctcgtcttcacatcagcaccatgttttcaagcaaaatcctgcaggttggaaatgcaagtgtcaaaagtccccactgcctacataccgccaagagtttaccaaaatccacctagtaacgcttattttcaaagcccccacgcgcatccattcctggagaatgctttcaaagtttggaagctccctgcagcctgcccgtgtctatgcctcagtcagctcacatcacgaacaacggtgcggtcagcggcactgagattaggctgcaaagttgcccggccccagcccactacaccgctgatgctcgccgcatccctagagcaaattccgctgtgtgcccccaagaagccaaaagcggcacgaaacctactccaacaagggttagcccagccacacacacaacaaacaaattccaaaacttctttgttaagcagccgcagcctacctggaacggacactctgcacaactggcaaggaagaaacaaacatcgcatccctgcaggaaaacttgttgaatccctcccgatcgcaaggctgcaatttccgatttagcctgaaggtttttgattctaccccaaaacaccctggcgcatcagccacaatttctggataaactgcagagtcctctcggcaaccattctgcactccaacaaccactagtgtaaaacccagcgtgtccccttttacaaatcaaaagccagctgtcacttcccttgcaaccatttccgagacttacccttccataagactgttttcagcaatctagaggctccgtagtgcagacgcagccctgcaactttgctgtgcactgagacctttccgagtttaaaccaagcgaaaggtgacagacttttaaacctaagagtggggaaatagggagagagtgaagtcgggtttcttctctgtatcagcaccctggaaaaattcaatccttcttcagtagagaattctttcaaacccgttatctgtattactattaatgcgcagagcagaaggcattgcatacaaataggtccaagtgtgcgcttctattggtggctgcggaggcccctgggtcctactgctccggtctaaactacacagcaacactaggcacgcagctttggagacgccgaggggaaaatggatttaattgattcgttacctctggtattgtaatgcctgctgcgatgtttaaccgaggggggaggaaaaaaaaaaaaaaaaacccttacatttaactcctgtcatgtgatctatcattccatagctgcttttaattgtctgtgtggagtggctttgatcatacaaaggattttaaaagaacattttcgaaggaaaattcacacagacacttttggcaggaaaaccctcttttgctctctattatgcattattctcatataaatccaggaaattttatataatcaaatacttctgcacttcacgtaggtacacacaacacccaattgtatttacaattcatagctactacaaataaaataccttacatgggtagtagatagtagaagctaaaatatgagtctaccaattataaaacacgggttatattagtcaaatgctacagaaaaaattccatcaatgacaatggcgtcagcatcatttttacttcgcaaaattagaaattcaaaaatattttccttgtaaatattgacataaagatataaatcaacataaaggtattataatgtcacagtatgtcaagcatttactattaattgctacattatctttttacagtttctctcttagcaagttcattagtaatgcaaattggcataacaaggagatttaaagtgaggccgacctgtggtgactagcaatttgaaatattgtaatagtgtgcaaaatcactttagttcatcatcggtaaagccagttattttaagaattagaatattaaatgctgaatcttaatatatattaatttgaagtcttaaacatgctgttttctttgacctttaattttgtggaggaaaagagaaatccttatttaaactaaaatgacatagactttccacaaaatcctagatacgatatttactgatattataatttaggaagtaacataattttattgtctttgatgtaaataattgtgataaattccaatttaattacaaaattattacatatatgtaatgtacaactgaatgaacattgttggaaagggccactctggataaggttaacatcaaccaacctataaattcactacctatgtgtaaactaaataaatgaaaacacaatgcaaaaatacaacagactcgagatcttattccaaatacatgtaaagcatttgaatttatgtagtgtgtgctacaatccctcttcatttccgtaactctttccctttacagccccttcccttcccccaatcagtaacccttgacaacagaagtgttaacttcaagtccaggttgcctttgctgccttccagacctaacttacagattgcatccttgtaggaaacagagttaactcttacacgactgagaggtgaaagaagagagtttctttcagggattagaaaatccagtatttttatgtgtatttgcaaagtttgcaccaaacacatatttttaaaaatatccatgatcactaattcagagtgaaaagatgtgatcattggcattgtatcagagtcaatttgctgtatatatccattgctattgtgtcactgaaatagcttttgaataacttttattcagggttacttcaatcactttacttcaggttaataatttctccatttacaatagagttaaaatgaaaataccaaagtgttgcaatattcagtataagggtataaaggacttttttttaatctgtaaaagaaaagaaaagctattatttcatatagtaagaaaagcataatgaccatgcaaagttgaa

SEQ ID NO: 316230 - DNA, 4001 bp, Homo sapiens
taaacaccttatttgctgctgagtagatagaattttaaaaatgaaaaattaaaatttcttaatttttatatatttaaaatagaccagatttcatttagagtgtttcttcaaatatgacacaattccctaaaaataaaaattagaagattcaggacctggtctagcatccccattaatttattgtctgaatcttggtcacctaaactttttgggcatcattttctttatcttgaaaatgggagaataatgccagtcatattcaccataaaagggtctgttgggggaaaaaaatcaataaaatttggtattgaggtatttcaatatgtttgaaaagtttccaaaattagatatttcaaaacaaaaatggaacaggtatggatatttgcattcttgaatttttgtgtgtgtatttcaaattgcatttaatttgagggctttttgaagtatcattttataaaaataaaactatttggtggccagtacaaaatcccattgttaactaaagtcctactgctcatagctcaaggcacttcacaaaaaataaaaaatatgggtcttaggattctcctagtcttttcctattggagttatacatttccagcatccgggggttccaggtttcttagcacaaactgtaaatcagaagcagatgcctgagaacgaaaaacttcattgggatagctacataagaaattgtaggcgagtggatcacctgaggtcatgagctcaagaccagcctgggcaacacggtgaaaccccgtctctactaaaaatacaaaaattagctgggcctggtgtctgtaatcccagctacttgggaggctgagacaggagaatcgcttaagcccgtgaggcagaggttgcagtgagcagagatcgcgccattgcactccggcctatgtgacagcgggagacactgtctcaaaaaaaaaaaaaaaaaagaaagaaagaaaagtacaattttgtttaccaaaagaaagacacaggcccatgagctattatttaggagaaaatatatatagctatatacataagattccagcatcctgaaatctcccaattctcttatctttgaagacgtacatgacaacaaggaagctgaagagtgcaaaaattttaaggcataattgtttgtttgtttgtttgtttgtttttttgagacggagtctcgctctgtcgcccaggctggagtgcagtggcgcgatctcggctcactgcaagctccgcctcccgggttcacaccattctcctgcctcagcctcccgagtagctgggactacaggcgccgccaccatgcccggataattttttttttctttttgtattttttgtagagacggggtttcaccgtgttacccaggatggtctcgatctcctgacctcgtgatccgcccgcctccgcctcccaaagtgctgggattacaggcgtgagccaccgcgcccggcctgctttcttataataacatattggtcatcttgatttcatataaacaaacttactacaacaccctggcttgatactatcttgaccagacttctctgaagaagaccaagtaaaattatgcagtgtgttgattgattctttaggtttcagcgtctatgggaacacatcaaaacttacttgaaataaataaaagtaaatgtgcacatgaggttcattatgttcacttacatgccacttccagagacgcatttcgactcactgcttcaccaagatagttcctcgcaacacaaacgtagcttccttcatcaggtttactcctgcgcccgtgcacgatgcgcaagaagaataaggatccgctgggcagaagcatcctgtgggaccggggatcgtccttgtcagtctccactcgctccccatctttgtaccactcaatggtgggcgttggccggccctccgccttgcagttcagagtcgtgggctcgcccttagagacgatgacatcggaaggatgctccacaatccgcgggggaaagtcctcctggcgaagacgcgatcctacaaaacatgacggaataaagacaagctttaacatttccttatctaaaccctcggtttcacttgggttcctgatggggaaattaaactcttcgattatccaactgaacattattttatgtttcgttttgtgtatgcatctcataagtcatctcaactcctttgcaggatagggcgataccaataaattaatatgttaactcaaaggagttaggtttaatgtgttccatgaatcatgacaagcaaaagtaaaagagaacaagagactttcttgttcttctgggatcagcatgggtactaagatgagtaagactaatttcctgtcctcagattgcttattatacactggggaagaaagccacgtcagcaagcagctagaagacacacatagatagcatttaatgtgctgccaatatgttatcagactaacacaaaaagagacctgtaaattatgtacaaatattatctgcatttaacagatgaggcaaaagcttaggaaatgatgtcagttgcccagaaatgtagatgaggcaagcagcagaggcaggattttgaactcaggtgtgtttgactgaagagctcaagtataaatccgtatgttaaaatgcaatacgctgcatagaggtatataagaaatgcactataggcagaaagaaaaaaagtaaaagttaaccctaaattaagcataataagagatcccttccccgaaaaaaattacatttagattgagccgtaaagaatgaaaaatgacaactaaaagaaaaaagcatcatgccaagagataccatcagcaaaaggacaaggaaatgacagttacgtgcatggtacatttcataatcaggaaggaagctgatacagcaagaaaaggtttaagacagtcttggagcctgagacaaggctttgtgccatgctcaggggtatgactattcttttacacggctcacagatttttaagggggcagtgacatgactgtctgtacaatcgaaagatacttgtagtctgtattatcaataagggatagcaacggagacacgaagacagttgtgatttacttaaatagttcaagagaaaaataaaaagaacctgactttgggaaatgatggtttaggtagaaaagaagaaggaaaaatataccatatcaaaatgcttgacagaatttggtatatcaccatgcacagtacaaagaaagatagatcgtaccagtgacttccctgtgaatgcaataaaagtggggccataaggggcgtaagaaatcgaaagagaggccgggcacggtggctcacacctgtaatcccagtattttgggaggccgaggtgggtggatcacctgaggtcaggagttcgagaccagcctgcccaacatggtgaaacctcatatctactaaaaatgtaaaaactttgccaggcagggtggtggacacctataatcccagctactcgggaggctgaggcaggagaatcgtttgaactcaggaagcagaggttgcagtgagccaagattgtgccactgcactccagcccgagtgacaagagtaaaactccatctcaaaaaaaaaaaaagaaaaagaaaagaaaagaaataggaagagaaggctctgttgatatttcacaatcaaatttttgcataatgtgttattttgaatatttttcatttatatggtatcaattaccattattcatgaaaatgttctaccagctgctccaagtaaataaaaaggagatgctgagaggaatcaccatatatggggacataatgattatatagataagcacttcttaaaagtttgctcttatataagattttccaaccaatcacctaatatgagcacatttctcttcaacagatagcagtaatatttacttgtcaatgttacctcagttcactctcagtattaattgaaaatacatgttttaatgtattaaagggaatttaatttagtcttaaatgaactttatttttttgaagaggaataactcttaaaagttgctatttttttaatc

SEQ ID NO: 316231 - DNA, 4001 bp, Homo sapiens
gcaaaggtactcatgtagtccatgattgaaaacagccacttgacagtaggtaaactcctctgtattgcctcatgtttatagaaagccttcctttttgagtccaatacattgggctctatgcagcagtagctgccaggaacaaagttagctactcagatgggccaaaataggcagtgtcccaaataatgaattcatccacaatgcaaatgctggaggaaagtttatgtggcaacaagctattgtgatggctcaaacagttagactaataccctttaggttctttacaagtacagaaagtaactaaaaacctaaagtactgcaatccagttagaaaaaaaaaatatctagtactcccttataccagttgtttccatcgatataaaaattaaagcctctagaaggttaacagcaaatattcttttaacttttttcttttgaatacaaaccaaaaagcatgttaatgattatttccactcttcattcaaaagaaccacaaaaaaggattttgcaatagtcgcacaagaaattgacatcctgtgaaaatatcccagtaaaccaaatcggaacaaaagacaagagaatcagaggcagaatgctgtgggcttgacagactgactcaacctagagggagacacctccagcacctgtttaaggtccccattgtgtttgcccactggggactgagctaagtgttctactcctgtggccagcccatagctgatgcttcccccttcgtggagcctcgcccagtctcacttttgacagttttctccctaggatctaaattcttcattcgatttaacgctaggagagcattcactggcacacaggtgatacacattgatctcagtctcaaattcctaacccactgaaccttccttagagtgtctattactgtatttcttcacttgaatgtctcagccaaagttcagacacaagagcaaacatcaaatagagagcaggcacaatagtattaggctcttgcaggagattgactgtaatatttctttttctaacaaaactgggagcccaatcatttattatccaactccttaattagtgaagtaaattacaacaataacaacaataggtgactaccaacacattccacttacagcagtttagaaacaaaagacttaaataaaacctctgcccccaaggagcccgtgccgggccaaaacggactaacagacataatgtcatttcatttataacccacatcaaattcaaaaagaaatggttttgggggattggggggtggggggcgcaaaaaaagatgaaagcatttttaacttaccatcaacccgaacatataaaaatccacagagcagtagttgtgtaaacatcagcagactcattttgacatattaaaaaggatccagattctttaagaaaccaatcccagagagcaaaagtacaaaaatgagtatcaaaaaaagaggtaggtccaaagtttagactttcctagatactaattaaagtcaagaagagcaaatcgcaagatcagaaggggttggtggagaggtctcgaacggggcacactgagatccatccaaattaacagagggtacttcaaaggctgctgtatttccagcactctggcttcctaaattcccacaaattcagcccagccagagggattattcgagtgtgtctaaccctctctccttaggctccactgcaatccaaagccaagttcttccttcagaagtcaagatgatgaagggggaggaaaagacctaattcctagaaagtgttccacaaacttgccagcgcgctgccgaaaaaccattggcctgcctactggttttctttcccccggtttccttctccgtagcagctccacgtccggagttattttttaatatgtctatatttttacttaacttccataataagaatgtgtcaaagcaacactttgcaggcgggcagacttggcgggcctctcctttgcagcggtgttgccctccctccacctctccggtttccaaaagagaggagaagggaaatcaggacgattcgggtggagaatccgaactcctacgtggtgagggaggcagggaaggagcgagggagggagggagggagggaggggccgggcggaggccgaggctgcagacacccccgcggtgccgcctctgaggatagtgcaccaggcggctgcgggcgcgagcagagacgggcgtgagagcccagcccgggcgcggcggagaaagggagcgctcagtccagcgccaggcgcgctgaggcccctcgcccgggtccagcccccgcagcctcgcagcagagcgtccgcttcctccggcagctgccgcgggtggaaggacttctaggagggaaggcgaggaggcgggaggggaggggaggaatgagagctgcctggagtcggcccggggaggggcgggggcgaggaggggcgcgcggagccctgaacctccggactcggccacccgcccgctggggagtggggaggggtcctggagagccgagagtccccggggggacggagatgaacaaattcggagagccccgccggctgccgagggccgaggccaccgggcgactccttccccttctccgcgcccccgggtgcccactccttcccgcctcgggaggggataggtgggctccaggctcctgctcctcgccgcgtcccgtttaatgggcaggtaattttctccgtgagtgatttcatggaagcccttcctaattattcatccctccgtctgccggagctgcacgcgctttcttgaaaaagatcagcctccaggacccagggcgcagcctcattacgcgttaaaatcacacactcactcactcttcaccttttagccagatgagaagccgagtaggaggaaggaaaggaaaggaaaggaaatagaagcaccttttggactggaaaggttgtgtgtagatgcttcctatatgattcaaaagcacaagggggagaaaaaggagggggcagaattctctaacctccagcggctcattttagccaagatctatggccccctgcggcatccccaagggaaggaggaaggggaggcagcccctcttatgttactcagttgccttttgacccctccacgatgagtttgatgcgcgatcgcgcagggcgagggagttccacagaagatgctaaggacggggaagcggggatcacagagcttgggggagggggatccccgaagtctttaccctccagggaccagcacctccagaaggaaattcggtaaacataggctctgggtgtggaaagccgaaagcccagctgagctcatggaagctcaaaaagaagccgaatttcagcccaaagacgacaaaactctgaaaattaagaccaagactaccaaaggatgccattcaggaccggggatgatgaaggaaggtcacgttagatcaaaggggtgccggtgtcggcggtgccccggtgcggccgggcccacgtgtgatcacaggctcgctggtagccgtttgatgcttgttcagatgatgagaaggcggcttataggaactcacgcaggtccccgagccgagctaaatgctggatggtgagtctttagttccccctactggaaaatattaggaaaggttctctccagaaggggccgtctgaggaagagcctttgtttggtggatacgttttggtgctgctacttaacttaggtctcccttgcatattatgggcgctgtgtgttcttttaaaaaaaggtcagcgacattcaagcaattagaagagacattaggacacctcggcatgcttgaaaattacggtaatgaaatagtcttgcgaaagaataaaacaaccactcttcttgtaaagcattaagagtaatttctgcacacttttaatctacagtatttacttgtgaagaaaaaagtgcattcggttgttaaagttgaatcacttgaattctcactataataattctgaatgtgctattgttttagcaccccgtgaaaaaaggcttaaccgttaaggagaaacccaccccaaaggt

SEQ ID NO: 316232 - DNA, 4001 bp, Homo sapiens
ctttaggtccggttatcaatatttgcctctcagctccaaattcaccttgtattgcctcctccacaaaaattgaactaggtcctttaacattttttcccttgtcagctgtcataaggatatgctttgttaggacagggcactggaaggactggaggaggaagaggtttctcttaggaatttaggtatgctcttcttgctaggctccaggaacttgtagtttctcctatgctgggatcctgtagcacacagcttttctagcatctgtttcatgcagtgtgtgatcttttgagtgcccaactgctggagtacacagtggctatcagtgctccatggctagcagtgtcccctggcacctctcttgggaagctctatagcagagtgctgtcagtgagttaccttttagtgaatggcttctctggtgtttcagagagtaaattttgcctgcctggcacctcagcaatttctctgctctccagtcagctgtggccatcccctatgcaccaagctctgggaaaggtttcttccttgggtgatctatctcaggggtagtggttgccccttatatctgtgattcctgtatattttagatctctcctgacatattagccaatccttcattactccaatcccatcattaacaattctttatattgaacttctcttgttaaattatatgctcaaaaaattactatatgatttatttctctttgttggactctgaaacacgttgactgacagctgtgtggatgagctgaagagaggatggtgaagcttcaggcagggagccaggttaggagaatatggcagcacttttgacaactcccaggagcttcactgccttgaaaagtagttgcaatagggagtgatataagagacaagtatttaggagataggatctacaggatttggtaactactgaaggaggaggaggaggaagaaaagaggaggtggaggaggaggaagaagagaaggtggagaaggaggaagaggtgaaggacagaaaagtctagagtgactatcagttttcaagcttggatgactgggtgcacagtggtggtacccttgtagaaatagaaaacactaaaggagggtcaggtcaaattatccccccatgttcccatttactttcaggagttccatgcacttttgaatcacagagttgaaatcatagactctctgagttgaagaggcaccaaagcccagctttcctgcctttgggcaataagggtcatttgttcacatcaaagaagtgggagaaaggtccattctatcttaacattcctcaattctaacattttgtaaagttattttccatttttaaatctcttgatagtgtaggtcttcttcaattatacattccagagcttatccataaccccaactctttcaattcaatgcatttcctcctaagtgaaacctacatgcctctcaatgtaaaatggaggccaacatatacctgccaagtgctgaagaatgtaggtcttaaaatagactatagccttgtttcagggatctctcacttggttttattggtatgggctaaacagggcttccgtttcataaatgaaagtctccagtaacatgaatgaaaggctccagggcagaatctcagagggtttctatgagtatcacttggaaccaagcacaggcaactgcacatccctgtttgggtttggaattggagatggtgggtttgggatgtggttactcttgtttggaatacattctcctcctcttaacaggttgattcttcctttggaggtctgcttaaccttccctgattaccctgtcagttccattgtacatacccttccagagcatcacttacctatccttagtgtgattctttgagtaacatgtgtctcccccagcaaactccacggcaggactggtcagtttttgctcaccacaccatcccagtgcctagcccagtgcctggaacttagtgttcaataggtactagtaaaaatgaatgcgtgatagcagtctatgaagtgctagctataaaatgaacacgtgataggagtctatgaagtgctaggtataaaataatgcgtgataggagtctatgaagtgctaggtataaaataatatgtgataggagtctatgaagtgccaggtataaaataatgcctgacaggagtctatgaagtgctaggtataaaataatgtgtgataggagtctatgaagtgctaggtatgcccatgacatccacatgacaattcacccagaggtatttttatatccctgtcgctgatgaaaaagcagaggtgtggctcctcggtggagggctctgattccaaactcttgagcctcccaaccactgtcctccgggtaagaaaccgtataatagtattctgggtacaaaatacgcacacaaattggccagaaagccataatcccccacagtcacattctcttgaagatccccttgccttccccttgccctgtgaacaaggagaggctcagaatccagggggcgtccggcagggctcctccctcagaccagcgcagccctcggggcgctcagagccctgccctccctccacttcccctcggggtggctacctcaggctcgctcccaaaccggctgtctggcttcaggcgacacctggcgcctggcctcaggcgagaggtgtggggagagaccgagtgcctcccacccttcttaagaaggagagcagtagaacctcggcggggagggcagcagcggccgggggtgacagcagcggcggggcacgaccgccgttagcgttagacgttagcgctccgccttcgcctggcaaaccctgcgcgggctccgctgccaggtcaccaggggtagcgccgggcgcgacgtcacagagccgccccgcctctcctgcagcggcgggttcccagggtcccgctagggcgctgctaggggacgctgaaagctgttttgggctttgctggtggtggaaggaccagacggcctggagggttaaggactgggctggggacgttaggaaacccgggctgggggcgttgggggtggggcggaatgtgtagccattgacggtgcgcttttgtaggtgagagggcagaagtggagcttgatctttcggcttgtggaaagtggacaggtgagaattcctcaggaatcatagtaacaacacttcttacaatgagtttttggtgccaggaattgttctaagtgcattacacacatgaactcatttcatccttactgtcaccccatgaggcaagtactattgttatccccatttttacagatgagggaactgagcacagagaggttaaacttgtccaagatgacagtcagcaagtgacagagtcaggatctgaatctgggttgcgtggtcccagattcctcactcttgaccttataatgctaagaaaggggcatggagtggataggaacagagcctgagatgcctggggacaacagggaaagatagaaaatatttatagggtagaatgtggtcactgtgccagggcacttttacaaacatgatgacatcaaagtttcacagtaaactctgaaggtaggtattaccttcgctttggaaataaaaaacaggctcaaggcttcgagtaattttgcctgtgatcgaacagctggcagtagggctcagggcccaactttactccaggtcttccggtttcaagactgtgtgtgtgtgtgtgtgtgtgtgtgtgtgtgtgtgtgtgtgtgtgtgtgtgttttgagacagggtcttgctctgttgcccaggctggagtgcaatggggtaatcatgactcactgcagcctcaatctcctaggtctaagcaatcctcccacctcagcctcccaagtagctgagactgcaggtgcttgccacgatgacaggctaatttttatatttttataaacggggttttgccatgttgcccaggctggtcttgaatccctgggctcaagtgatccacctgccttggtctcccaaagtattgggattacaggtttgagctaccgcacctggtctcaagactgttc

SEQ ID NO: 316233 - DNA, 4001 bp, Homo sapiens
caaatgaagaaactagggctcacctgggcacatgtagatggcaggaacttgaagctttgagataaattgctaggcagggtggatagagaccaaggattaggctcacaaaaggcaaatgtctggactaaaggactccccttctgacctaaacttgagacccgcccagggactacaccctcagcgtgaaaaggtgtggctgaaaatatctgcctacaggctggggtaagcaacaaagaaacctgtctccattgctgcttctagtcaggagagaaacagtcccccaggagttggtagccacagactagttctaagttttccatttataccaacaccagcatggctcggaaatcccaagacaagaaactaaagtggtcttagattggtgggacttcatgaccttttactttatttatgttcttttatttggaggaaaaggatgataaaataatgattaattttagactttgcaaagtattagaaaagttttaacagtaataaccactaaatctgtacagaggaaaaaaggattttttaaaatttttttagtatttattgatcattcttgggtgtttctcggagaggggggaagaaaggaatttttaaaaaacacaaaaaagcaaacaaaacatgcctcccaatgtgaaatggcagcccaacgtatacctgccaagtgctgaagaatgtaggtcttaaaatagactgtatagtcttgtttcagggatttctcacttgtttttattggtatgggctaaacagggcttccatttcataaatgaaagtctccattacatgaatgaaaggctccagggcagaatctcagagggtttctatgagcggcttggaaccaagcacagacaactgcacatccctgtttgggttcggaattggaggtggtgggtttgggatgtggttactcttgtttggaatgcattctcctcctcttaacaggttgattcttcctttggaggtctgcttaaccttccctgattaccctgtcagttccattgtacatacccttccagagcatcacttacctatccttagtgtgattctttgagtaacatgtgtctcccccagcaaactccacggcaggactggtcagtttttgctcaccacaccatcccagtgcctagcccagtgcctggaacttagtgttcaataggtactagtaaaaatgaatgcgtgatagcagtctatgaagtgctagctataaaatgaacacgtgataggagtctatgaagtgctaggtataaaataatgcgtgataggagtctatgaagtgctaggtataaaataatatgtgataggagtctatgaagtgccaggtataaaataatgcctgacaggagtctatgaagtgctaggtataaaataatgtgtgataggagtctatgaagtgctaggtatgcccattggtccacatgacaattcacccagaggtatttttatatccctgtcgctgatgaaaaagcagaggtgtggctcctcggtggagggctctgattccaaactcttgagcctcccaaccactgtcctccgggtaagaaaccgtataatagtattctgggtacaaaatacgcacacaaattggccagaaagccataatcccccacagtcacattctcttgaagatccccttgccttccccttgccctccccttgccctgtgaacaaggagaggctcagaatccagggggcgtccggcagggctcctccctcagaccagcgcagccctcggggcgctcagagccctgccctccctccacttcccctcggggtggctacctcaggctcgctcccaaaccggctgtctggcttcaggcgacacctggcgcctggcctcaggcgagaggtgtggggagagaccgagtgcctcccacccttcttaagaaggagagcagtagaacctcggcggggagggcagcagcggccgggggtgacagcagcggcggggcacgaccgccgttagcgttagacgttagcgctccgccttcgcctggcaaaccctgcgcgggctccgctgccaggtcaccaggggtagcgccgggcgcgacgtcacagagccgccccgcctctcctgcagcggcgggttcccagggtcccgctagggcgctgctaggggacgctgaaagctgttttgggctttgctggtggtggaaggaccagacggcctggagggttaaggactgggctggggacgttaggaaacccgggctgggggcgttgggggtggggcggaatgtgtagccattgacggtgcgcttttgtaggtgagagggcagaagtggagcttgatctttcggcttgtggaaagtggacaggtgagaattcctcaggaatcatagcaacaacacctcttacaatgcgtttttggtgccaggaattgttctaagtgcattacacacatgaactcatttcatccttactgtcaccccatgaggcaagtactattgttatccccatttttacagatgagggaactgagcacagagaggttaaacttgtccaagatgacagtcagcaagtgacagagtcaggatctgaatctgggttgcgtggtcccagattcctcactcttgaccttataatgctaagaaaggggcatggagtggataggaacagagcctgagatgcctggggacaacagggaaagatagaaaatatttatagggtagaatgtggtcactgtgccagggcacttttacaaacatgatgacatcaaagtttcacagtaaactctgaaggtagatattaccttcgttttagaaaacaggctcaaggcttcgagtaattttgcctgtgatcaaacagctggcagtagggcccagggcccaacttgtctccaggtcttctgatttcaagactgttgtttttgttttgttttgttttgctttgctttgttttgagacagagtctcactctgttgcccaggttggaatgcaatggggtaatcatgactcactgcagcctcaatctcctaggtctaagcaatcctcccacctcagcctcccaagtagctgagactacaggtgtgtgccaccacaccaggctaatttttatatttttataaacagggttttgccgtgttgcccaggctggtcttgaacccctgggctcaagtgatccacccccccttggtcacccaaagcactgggattacaggtgtgagccaccgcacctggcctcaagactgttctttttaagcacccaaagaggcaagaaaagccccatctttctctgctacaccccgtgtcacttcacacccatatgaaagctgctcattgcatcatgtaatccttcagtccatttatactacagtgtgtattagtctaaatcaattaattcacccagggtcttcagagctttctctggttgtgagatgaaagcctttgtctctccctaaagcaattttaagcatcagtgaacaagtgggggaactagatttttggcttatgcatgcagaaagcttttcacagcctgttgtcatccatttgtaaagaggccactctgctggcatttgtcaaaatcctgcaggtccttgcacacctggagaatcctggatggtctggggacggccactgcccacagggcaagatctggggatgaaagaaacctagtcactagctatcacctatctttctgaggcctctgtggaggggctaccaggtgttggtacaggcacctgaccaacagagtgtgccttaggttgggagggggaggctggaggcttgagggctgcaggtgcatcttccaggataacaagaatgctctggccactggagtctgttctgttgtatgcacatgagatgaaggtgtgccaatctcttcctgctttcatgctgagtaaataatactgacaggaatgaataataatgatctttgtgcagaagaacaggtttttcagacaaagcactaacagctggagatggaagatgaaataaaatagaattttagagtagcaggttaaacacaagggaggaatttcatagcactgtctgact

SEQ ID NO: 316234 - DNA, 4001 bp, Homo sapiens
gcaataaacacaagacttagtattgttgtttactttaagctaaaaatttggcagaaaccagaagaaaagaagatggcaaatctaaacaaaggcaaagccctaaactaccaggatagaaaagtgacctcaaggcatttattttatttatttatttttgagacagggtctcactctgtcatccaggctggagtgcagtggcatgatcacggctctctgcagcctcgacctcgctaaaacgatcctcccaactcagcacccccaaggcccccctacctgggattacaggcgcgtgccaccatgcccaacgaattttttttttattttttgtagagatgggggttttcgccatgttgcccatgctggtcttgaaacttgggctcaagagaccctcccaccgtggcctcccaaagtactgggattacaggcatgagctatcacgcgcaggcaagacattttaaaagtaaataatccctgtctacttctatgatgcaaatccctcttcaggatggctctgaatcttccgtattgtttactccaaaacaaacttttactagcataaacaaatctggggatgggagggaggagtgattagtggacagttacctgtgcggaaacttgaggatgaaatcagtgagctgcatgcacttgaaaggcatggcctgtctcctcacttgagtgcaaggtccatcgaccaaagcctagaacacaaacatcaagaacttcagtgcaaaatctaacagcaattaaaatggtcagatggttctgtaacattacttatccgttcagggccatcaaacccacactactattttaataaattgctcagaaaagacaaggattgtcctatctgggttatatatatgtatgtcttttgctcaacacaaacatttctccacatcattaaatgctccttcttaaactatatagtaccccatagaaaccaaccacatgtaatttacaggcaactttaggactctgatccctgctgatttatagtcagtggtcaactccttagtttgcttgtttcaaatacacagcagtaaatacaaaagtgctttctacgtgctggatctgttctaaactcactttacgtatagtaactcatttaaaactaaccaacgtttcagcctataactggctctagcttaagtggctaatactgaaattcaatactaatagctaacttcaggctgtgcttaaaacccgtaccattacctgtttcctcaatggtaaaataaagcgactacccatagcatcctcatcttacacagccatcgagacaattcattattgccatctgcagggcacatgtccactgccatgtttagtaaaaagttgtgacacttaccctgttctgatcaataacatctacaatcgcgaccaattttccggcatgaggtccaaaggagacataggccacccggccaacctccacgaagcgcctgaacacctaaaattggaggagaaaggacagtgaaacttacttagaaatactcgctacatatgtcaccttctgcagctaaagacaacatggttaaattcagcgaaaaagaatgctgcagggaacaaacgcccgagagccaggcgccaacctggatggacgaaatcagcaaacgcctcagtagcttaagcccggttcccaacgcccgccagctcccaggtccgcaaggcccacacggcaggacaaggctctcggaccacgagccgcatcagccatccagctccagcggcggaggcgcgcacgcgtggcccaaggcgcgccaggcctgccgggccctccacgcgctcgccagcggcgagtccgggaagggcgcgagtccgggaagggcccgattccgctgcacagccggcccggggaccctcaccatgcgcttcccgggaccctctgggagccgtttggcgcctcagcttcccagcggaggtggaggtcgagcggcatggtcgacggccccggagcccgcaacagtaagactcaccatgttggcggcgttaggcgagaaggaagaagacccgcccaaccctgcgcatgtgtagaagaacgcaccgcccctgcggtaacgagtcaccgacgtgagcaccgattggttggtgcgtgcgtgcgtgcgtgcgtacgcacgcgctcgcaagctcactgggaaaacatggcggagtcggctggcgttaagttgctttttggcaaagttgggcggcgagattgtttttggtgatttggattagaaagctgcaggagggtcatcgcttagtaatttagggttaagagtacagaagctatgtcttccgttggtcgcatgccatttgagttcctttttatttcctcgagttttatttgttggttattcatggctaggtctgttcgctcctcacgttctctcctaatctcagtaactttgttaacctttcattttcaagtaattcacagttacagaaatattgctaaactagtacaaataattcccacaaacccttctagattccacaaatgttaacgttttgcatgtgctatatcatttgaaaggaaattgccgacatgatgtccttctatcgctacatttttttttttttaaagacggagtctcggtctgttgcccaggttggagtgcagtggcgggggcttggctcaccgcaacctccgcctcccgggttcaagtgattctccagcctcagcctcccaagtagccgggactacaggcgcgcgccaccatggccggctaatttttttgcatttttagtagagacagggtttcactatgttggccaggctggtctcgaactcctgacctcgtgatctgcctccctcagcttcctaaagtgctgggattacaggcgtgagccgccgtgcctggcgttacattcttttatagagacagggtctccctcagtcgctcaggctggagtgcagtggcgcgatcatggttccctgcagcctctaacttctgagtgaagacgatcctctcgtctcggccttccaaagtgttgggattaccggcgtgagccaccatgcccagcctatctatacgttcttaaaatgtgtatttcctaacaacagagagattctcttatgtcatcagtacacttatcaaaatcaggaaattgatattgcaatagtactattatctaaccttcagtccttattcaaatttataagttgttgctcctatgttccttggagcaaatgggaaaaaaaattgtttttccaggctcttgatctaatggaggattacaaattgcaattatttatcaggtctctagtctttaactgatagttttagatttaactgttaaatttgtaacatgggtttgttggagttttcctcattggattcagatagtgaatttttggtagaaatgctatgtccttggtgcatcacatcagaatacattctctctctcttcactctctctctctctatatatatacgcacacacaaacacttttttttttctttctttttttgagatggactctccctctgtcacccaggctggagtgcagtggtgcgatctcggctcactgccacctctgcctcccaggttcaagcagttctctgcctcccgggttcaagcagttctctgcctcatcctcccaagtacctgggattacaggtgcctgccaccacgcccggctaatttttgtgttttaagtagagacagggtttcaccattttggccaggctagtcttgaactcctgaccttgtgattcacttgcctcagcctcccagaagtgctaggattacaaacgtgagccactgtgcttggccacacacatatacattttttcgaagagatggggtctggctgtgttgcccaggctggagtgcagtagctattcacaggtctgattgtagcctgctacagccttgaactcatgggctcaagcagttctgcttcagcctccagaatagttgggactacaggaatacaccaccacacatgggttcccaatattgtggtggtattttattctttagatttttacccaggccagtgcagagaggtgtta

SEQ ID NO: 316235 - DNA, 4001 bp, Homo sapiens
ttggcagaaaccagaagaaaagaagatggcaaatctaaacaaaggcaaagccctaaactaccaggatagaaaagtgacctcaaggcatttattttatttatttatttttgagacagggtctcactctgtcatccaggctggagtgcagtggcatgatcacggctctctgcagcctcgacctcgctaaaacgatcctcccaactcagcacccccaaggcccccctacctgggattacaggcgcgtgccaccatgcccaacgaattttttttttattttttgtagagatgggggttttcgccatgttgcccatgctggtcttgaaacttgggctcaagagaccctcccaccgtggcctcccaaagtactgggattacaggcatgagctatcacgcgcaggcaagacattttaaaagtaaataatccctgtctacttctatgatgcaaatccctcttcaggatggctctgaatcttccgtattgtttactccaaaacaaacttttactagcataaacaaatctggggatgggagggaggagtgattagtggacagttacctgtgcggaaacttgaggatgaaatcagtgagctgcatgcacttgaaaggcatggcctgtctcctcacttgagtgcaaggtccatcgaccaaagcctagaacacaaacatcaagaacttcagtgcaaaatctaacagcaattaaaatggtcagatggttctgtaacattacttatccgttcagggccatcaaacccacactactattttaataaattgctcagaaaagacaaggattgtcctatctgggttatatatatgtatgtcttttgctcaacacaaacatttctccacatcattaaatgctccttcttaaactatatagtaccccatagaaaccaaccacatgtaatttacaggcaactttaggactctgatccctgctgatttatagtcagtggtcaactccttagtttgcttgtttcaaatacacagcagtaaatacaaaagtgctttctacgtgctggatctgttctaaactcactttacgtatagtaactcatttaaaactaaccaacgtttcagcctataactggctctagcttaagtggctaatactgaaattcaatactaatagctaacttcaggctgtgcttaaaacccgtaccattacctgtttcctcaatggtaaaataaagcgactacccatagcatcctcatcttacacagccatcgagacaattcattattgccatctgcagggcacatgtccactgccatgtttagtaaaaagttgtgacacttaccctgttctgatcaataacatctacaatcgcgaccaattttccggcatgaggtccaaaggagacataggccacccggccaacctccacgaagcgcctgaacacctaaaattggaggagaaaggacagtgaaacttacttagaaatactcgctacatatgtcaccttctgcagctaaagacaacatggttaaattcagcgaaaaagaatgctgcagggaacaaacgcccgagagccaggcgccaacctggatggacgaaatcagcaaacgcctcagtagcttaagcccggttcccaacgcccgccagctcccaggtccgcaaggcccacacggcaggacaaggctctcggaccacgagccgcatcagccatccagctccagcggcggaggcgcgcacgcgtggcccaaggcgcgccaggcctgccgggccctccacgcgctcgccagcggcgagtccgggaagggcgcgagtccgggaagggcccgattccgctgcacagccggcccggggaccctcaccatgcgcttcccgggaccctctgggagccgtttggcgcctcagcttcccagcggaggtggaggtcgagcggcatggtcgacggccccggagcccgcaacagtaagactcaccatgttggcggcgttaggcgagaaggaagaagacccgcccaaccctgcgcatgtgtagaagaacgcaccgcccctgcggtaacgagtcaccgacgtgagcaccgattggttggtgcgtgcgtgcgtgcgtgcgtacgcacgcgctcgcaagctcactgggaaaacatggcggagtcggctggcgttaagttgctttttggcaaagttgggcggcgagattgtttttggtgatttggattagaaagctgcaggagggtcatcgcttagtaatttagggttaagagtacagaagctatgtcttccgttggtcgcatgccatttgagttcctttttatttcctcgagttttatttgttggttattcatggctaggtctgttcgctcctcacgttctctcctaatctcagtaactttgttaacctttcattttcaagtaattcacagttacagaaatattgctaaactagtacaaataattcccacaaacccttctagattccacaaatgttaacgttttgcatgtgctatatcatttgaaaggaaattgccgacatgatgtccttctatcgctacatttttttttttttaaagacggagtctcggtctgttgcccaggttggagtgcagtggcgggggcttggctcaccgcaacctccgcctcccgggttcaagtgattctccagcctcagcctcccaagtagccgggactacaggcgcgcgccaccatggccggctaatttttttgcatttttagtagagacagggtttcactatgttggccaggctggtctcgaactcctgacctcgtgatctgcctccctcagcttcctaaagtgctgggattacaggcgtgagccgccgtgcctggcgttacattcttttatagagacagggtctccctcagtcgctcaggctggagtgcagtggcgcgatcatggttccctgcagcctctaacttctgagtgaagacgatcctctcgtctcggccttccaaagtgttgggattaccggcgtgagccaccatgcccagcctatctatacgttcttaaaatgtgtatttcctaacaacagagagattctcttatgtcatcagtacacttatcaaaatcaggaaattgatattgcaatagtactattatctaaccttcagtccttattcaaatttataagttgttgctcctatgttccttggagcaaatgggaaaaaaaattgtttttccaggctcttgatctaatggaggattacaaattgcaattatttatcaggtctctagtctttaactgatagttttagatttaactgttaaatttgtaacatgggtttgttggagttttcctcattggattcagatagtgaatttttggtagaaatgctatgtccttggtgcatcacatcagaatacattctctctctcttcactctctctctctctatatatatacgcacacacaaacacttttttttttctttctttttttgagatggactctccctctgtcacccaggctggagtgcagtggtgcgatctcggctcactgccacctctgcctcccaggttcaagcagttctctgcctcccgggttcaagcagttctctgcctcatcctcccaagtacctgggattacaggtgcctgccaccacgcccggctaatttttgtgttttaagtagagacagggtttcaccattttggccaggctagtcttgaactcctgaccttgtgattcacttgcctcagcctcccagaagtgctaggattacaaacgtgagccactgtgcttggccacacacatatacattttttcgaagagatggggtctggctgtgttgcccaggctggagtgcagtagctattcacaggtctgattgtagcctgctacagccttgaactcatgggctcaagcagttctgcttcagcctccagaatagttgggactacaggaatacaccaccacacatgggttcccaatattgtggtggtattttattctttagatttttacccaggccagtgcagagaggtgttaccttttatcacttgattaaggtgatgatctttgccatgacagttccc

SEQ ID NO: 316236 - DNA, 4001 bp, Homo sapiens
ttgccgctttaaagcttaggttccacaagtacttccagtatatacacacgcatttgtaacaaagacaagtctttcaagcaattactcttcaccaagattagtaaaaatcacaaaccctgttttatatacgagacagctcacctaagtacaatcagaaaagttgcttaatctctctctcccaccatccccaggcagtattcaatataactgctactcaaaaccatttacctctgcaacggactgaaggcttcgagcaaactttagctggttaacaccatgatggacaggcttgccgtaagttgcacccttaggaactgggcgttttcggccaccacggcgaacacgaatcctatatataacgtaacctacacacaaacacacacgaaattagtgattttataggaagccgtaaggcttaagactcaatggcttgtcactaatactccaccaaaaatacttcaacagtaagttaatgctatctaatagaaaaaaataaaacacatcccagtctttttcaatgcaccttaggctactcacacagggaggcacactgtttattttgctttagtctgaactcattcagatttgtaacctttgacacacttgccactttagacaacagtgcatacagtaactgaccagtgttgctagcttttttctgccaaagccctatgcgaagaaagacactgaggcagcagtgtcttcctaacagctggtttccaacttttctcgaatataattttatccaagcatccacgcagtcgatcacgtaccttgcttggccttgtagcccagtcggcgcgctttatcaggccgggtggggcggggagccctgtggagagcagagagctggcggtactgccagcagcggaccctcagaagaaagcgcatgacatcagactgcttctttctccatagctcctggatgtacttgtatgcacccatcttggcttacctgtgaaatcaaactgtgtattaaatatcatccgctttaagtacaataagacgactgtatccgtccatcttagttccccaacaaaaacaaggaaaccgccgggaatgaaaatggctctgcaccaactgccggggacagctagcccaacccccaccactgcgcccacggagccgcgttcagtcacttccgcaaccccagcacagagcggtgctcggcacgttttggtggggcgaattaacagaaccagaactgagcaccaagggggcgggtggctgcggcaggcggcgtccccaaggaggacctgaaaggagatgccgctgacatcacaggacaaggtactgctgcggccaccgaggattaactctcgaggaaaatgcatctaccccacccaaccagcagcctcactttaggctgccttgtcccgggcgccccattcgtcagccccacgcctcctccaggatccgggcccagctcgaattcgcgccgccatcacatcttcgctcaacccgccccgggggccgcctctccacccctttgctgtcccgcatcctgaccaaactctggccgcacaggagggagacctatctccgaggacgcagggtccccggacctggatggctgaagaggaagacgatcaaaggcggatggaagagcaaagatcctcaacgcagcctacctgatggctgccgccagacggaaaggaaagagctgtactcccacaatgccttttgggctcctcccccacctcagccaccctctttccggtggaaagctgcggcctcccagagcgtcatgggacatgtagttccggcatcgcgcctggtggcggagttctgccgagtggggcgccgcggccgctattgtcccgccccctgctccgcaagattcgagcctgagcggcctgggcgtctcgagaggtgagagagttggcggcgaggtctcggcggctaagcgagcgtcggcgactgtctctccgcgagaggaggcaagttggggtccaggctccaaagccggtggccgcgtaccgcggtggagccgctgtctttgaggtctgaggagagaacaggtttgtttcacgcaccgcgggctctccccctgcggagtctctgcgtctccgcgtctccgcgctgcgctgtccctctctggccaccgcacgacgggcgcagaaatctgggccccagagctgcgctgagagatcccccgacgcttccccagcctcccagggaggccttcgcggagtcggggcgtcgcgggtcggggcgctcgctgtgtcccttcagctccagactgcgtgaagctcctccagcaggccccagcgcccagggattttgtcctaaaaaagggtcatggagtgggtggattgcgggcggcccggcgctttttctgcatacggatttcgtcccaaatttgctaacatgagaaccacagtttttcagaagagcagaatgtttatttgccaagacctgtttggcaggtgtgaatgttttagagaagaaatgccgagaaaatgctggcattttgcgttgcgggtttttttttaaattgagaaataggttactggcttactttgtttctccagaatattttcacttggctttaatttaagtcatgtggctttaatttccttccagattatgcgttcagatgtggcaaaggcttaagagaatcattatctcttaatcgtagcggttttgattatcttttttcccacatcatatttttctttctttctttttaaatcacagctttacgtttttaagagtctctatctggttcattgattgattcaacaaatatttattaagtgtctaatatgtgccaggcatagttgctggggatgcagcaggaaacaacgcagaatttttggccttcttggaaatgggcagtaagcagaagtaagctgtgttttgggtttggtggtaaatgctaaggaaaaaagataaggggagggaagtgatgagggagtgttagcggctgagggttgcaatttggaatggagtgtccaggttaagtctttgagagaaggtaacatttaagaaaggacttcaaggataggagtctgggagtaagagtaggggtctgattcaggcagagggagaagagccatgactggagcatgcaagattaatagaggaacagcagggaagcagtgtggctgaaattcacagtaggggaaagtgggaaatgacgtcggagaggtgaaggttctcacatggactttggatttcattggcagattttgaacagaaggatgacttcatatggcgtacattttaaaaagataactcggattgctccttttgaggctaaaaggagagaaaaaatggaagcagagagactgcttaggaaattgtgttagtcttccattgctcctgtaacaaatttcagcaactttgttggttaataatacaaatttaccgtcttttagtttgtacatcagactaggtctgtaaatctgtaaatatcaccaagctaaaaccaaagtcagtagggctgtgttccttctggaggtactaggggagagtacatttatttccttggcttttccaccttatgaagcctgcctgaattccttggctcctgactgcttccttcatcttcacagccagcaaaggagcatcttccaattacaccttctgtcctctccagcactcctgtgtgtctcttataaagacacttgtgattacactgggcccacctagataattcaggataatatcttcgtatggaagttcttaatttaatcacccccgcaaaattcttgtatgagtatgtaaagtaaacatattcacaggtttgggggattacgatatctttgagagaccaggtgagagaacatggtgcctcacccagaccacttcagtagtgatgaaaatggtaagtagtgcagccctgtatgtatttcaaaggtgaggatgactaaaaagttgaatgtgctactgtaggtacgctgcctatgggcgtagtcctgctcctaaaggagcagtaaaaataaaatttaaaaagttggatgaatcatttggaaaaacaattctagtagtgtgaa

SEQ ID NO: 316237 - DNA, 4001 bp, Homo sapiens
caaagacaaaaaagtttatcttattagaaacaagatacaccaccacttattgtcttcaaacattattgcactttaactttcttaatttgacaaagcattcaagaaacatctgcagactagttttaacagacaaataacacctgtaagcagacatgactgtcctaaattgtttattaagtatgaattttacaaactttacttatattagcggtaacggtggagctggagagtattgcgccttctccaagctgcccggcgagagccaccaatagtgtggtggaacttgtggccctttccaaggccacggctctttcggcctgcagatgtcagcccacgcatctccctgtgcttgtggactggtttggtgatccactgggtgtcaggatttcttctgatagctttatggaatggatcaatgaggataacctcaaaaaatttgtatgtggaatcttcaccaacccagtaagaattcaggactctcagagccccacagtggcgtccagctcgctcctagaataggaaaaaaggcccaaggtcaatctcccacattgcctatagcagcaagtcagaaagaattttaattctcaactctagttcaccaccagacaagagtcttttactactcaagttatttactaagcatttctccctagactatcacaagtgtaatgagataatgtagacttgctaaaacaacacacatagactgaaacacatcattccctcttaatactccattcctgactagggcaggaatatgttaatatctgggtaacaaaatttagggtttggggaccttatctttttccatacaactgagagctcagcaacgtttagctttaaaaatatttagtatatattttaggctgtgcaggccacatttggtctcttctgcatattcttgccgctttaaagcttaggttccacaagtacttccagtatatacacacgcatttgtaacaaagacaagtctttcaagcaattactcttcaccaagattagtaaaaatcacaaaccctgttttatatacgagacagctcacctaagtacaatcagaaaagttgcttaatctctctctcccaccatccccaggcagtattcaatataactgctactcaaaaccatttacctctgcaacggactgaaggcttcgagcaaactttagctggttaacaccatgatggacaggcttgccgtaagttgcacccttaggaactgggcgttttcggccaccacggcgaacacgaatcctatatataacgtaacctacacacaaacacacacgaaattagtgattttataggaagccgtaaggcttaagactcaatggcttgtcactaatactccaccaaaaatacttcaacagtaagttaatgctatctaatagaaaaaaataaaacacatcccagtctttttcaatgcaccttaggctactcacacagggaggcacactgtttattttgctttagtctgaactcattcagatttgtaacctttgacacacttgccactttagacaacagtgcatacagtaactgaccagtgttgctagcttttttctgccaaagccctatgcgaagaaagacactgaggcagcagtgtcttcctaacagctggtttccaacttttctcgaatataattttatccaagcatccacgcagtcgatcacgtaccttgcttggccttgtagcccagtcggcgcgctttatcaggccgggtggggcggggagccctgtggagagcagagagctggcggtactgccagcagcggaccctcagaagaaagcgcatgacatcagactgcttctttctccatagctcctggatgtacttgtatgcacccatcttggcttacctgtgaaatcaaactgtgtattaaatatcatccgctttaagtacaataagacgactgtatccgtccatcttagttccccaacaaaaacaaggaaaccgccgggaatgaaaatggctctgcaccaactgccggggacagctagcccaacccccaccactgcgcccacggagccgcgttcagtcacttccgcaaccccagcacagagcggtgctcggcacgttttggtggggcgaattaacagaaccagaactgagcaccaagggggcgggtggctgcggcaggcggcgtccccaaggaggacctgaaaggagatgccgctgacatcacaggacaaggtactgctgcggccaccgaggattaactctcgaggaaaatgcatctaccccacccaaccagcagcctcactttaggctgccttgtcccgggcgccccattcgtcagccccacgcctcctccaggatccgggcccagctcgaattcgcgccgccatcacatcttcgctcaacccgccccgggggccgcctctccacccctttgctgtcccgcatcctgaccaaactctggccgcacaggagggagacctatctccgaggacgcagggtccccggacctggatggctgaagaggaagacgatcaaaggcggatggaagagcaaagatcctcaacgcagcctacctgatggctgccgccagacggaaaggaaagagctgtactcccacaatgccttttgggctcctcccccacctcagccaccctctttccggtggaaagctgcggcctcccagagcgtcatgggacatgtagttccggcatcgcgcctggtggcggagttctgccgagtggggcgccgcggccgctattgtcccgccccctgctccgcaagattcgagcctgagcggcctgggcgtctcgagaggtgagagagttggcggcgaggtctcggcggctaagcgagcgtcggcgactgtctctccgcgagaggaggcaagttggggtccaggctccaaagccggtggccgcgtaccgcggtggagccgctgtctttgaggtctgaggagagaacaggtttgtttcacgcaccgcgggctctccccctgcggagtctctgcgtctccgcgtctccgcgctgcgctgtccctctctggccaccgcacgacgggcgcagaaatctgggccccagagctgcgctgagagatcccccgacgcttccccagcctcccagggaggccttcgcggagtcggggcgtcgcgggtcggggcgctcgctgtgtcccttcagctccagactgcgtgaagctcctccagcaggccccagcgcccagggattttgtcctaaaaaagggtcatggagtgggtggattgcgggcggcccggcgctttttctgcatacggatttcgtcccaaatttgctaacatgagaaccacagtttttcagaagagcagaatgtttatttgccaagacctgtttggcaggtgtgaatgttttagagaagaaatgccgagaaaatgctggcattttgcgttgcgggtttttttttaaattgagaaataggttactggcttactttgtttctccagaatattttcacttggctttaatttaagtcatgtggctttaatttccttccagattatgcgttcagatgtggcaaaggcttaagagaatcattatctcttaatcgtagcggttttgattatcttttttcccacatcatatttttctttctttctttttaaatcacagctttacgtttttaagagtctctatctggttcattgattgattcaacaaatatttattaagtgtctaatatgtgccaggcatagttgctggggatgcagcaggaaacaacgcagaatttttggccttcttggaaatgggcagtaagcagaagtaagctgtgttttgggtttggtggtaaatgctaaggaaaaaagataaggggagggaagtgatgagggagtgttagcggctgagggttgcaatttggaatggagtgtccaggttaagtctttgagagaaggtaacatttaagaaaggacttcaaggataggagtctgggagtaagagtaggggtctgattcaggcagagggagaagagccatgactggagcatgcaagattaatagaggaacagcaggga

SEQ ID NO: 316238 - DNA, 4001 bp, Homo sapiens
ccacattgcctatagcagcaagtcagaaagaattttaattctcaactctagttcaccaccagacaagagtcttttactactcaagttatttactaagcatttctccctagactatcacaagtgtaatgagataatgtagacttgctaaaacaacacacatagactgaaacacatcattccctcttaatactccattcctgactagggcaggaatatgttaatatctgggtaacaaaatttagggtttggggaccttatctttttccatacaactgagagctcagcaacgtttagctttaaaaatatttagtatatattttaggctgtgcaggccacatttggtctcttctgcatattcttgccgctttaaagcttaggttccacaagtacttccagtatatacacacgcatttgtaacaaagacaagtctttcaagcaattactcttcaccaagattagtaaaaatcacaaaccctgttttatatacgagacagctcacctaagtacaatcagaaaagttgcttaatctctctctcccaccatccccaggcagtattcaatataactgctactcaaaaccatttacctctgcaacggactgaaggcttcgagcaaactttagctggttaacaccatgatggacaggcttgccgtaagttgcacccttaggaactgggcgttttcggccaccacggcgaacacgaatcctatatataacgtaacctacacacaaacacacacgaaattagtgattttataggaagccgtaaggcttaagactcaatggcttgtcactaatactccaccaaaaatacttcaacagtaagttaatgctatctaatagaaaaaaataaaacacatcccagtctttttcaatgcaccttaggctactcacacagggaggcacactgtttattttgctttagtctgaactcattcagatttgtaacctttgacacacttgccactttagacaacagtgcatacagtaactgaccagtgttgctagcttttttctgccaaagccctatgcgaagaaagacactgaggcagcagtgtcttcctaacagctggtttccaacttttctcgaatataattttatccaagcatccacgcagtcgatcacgtaccttgcttggccttgtagcccagtcggcgcgctttatcaggccgggtggggcggggagccctgtggagagcagagagctggcggtactgccagcagcggaccctcagaagaaagcgcatgacatcagactgcttctttctccatagctcctggatgtacttgtatgcacccatcttggcttacctgtgaaatcaaactgtgtattaaatatcatccgctttaagtacaataagacgactgtatccgtccatcttagttccccaacaaaaacaaggaaaccgccgggaatgaaaatggctctgcaccaactgccggggacagctagcccaacccccaccactgcgcccacggagccgcgttcagtcacttccgcaaccccagcacagagcggtgctcggcacgttttggtggggcgaattaacagaaccagaactgagcaccaagggggcgggtggctgcggcaggcggcgtccccaaggaggacctgaaaggagatgccgctgacatcacaggacaaggtactgctgcggccaccgaggattaactctcgaggaaaatgcatctaccccacccaaccagcagcctcactttaggctgccttgtcccgggcgccccattcgtcagccccacgcctcctccaggatccgggcccagctcgaattcgcgccgccatcacatcttcgctcaacccgccccgggggccgcctctccacccctttgctgtcccgcatcctgaccaaactctggccgcacaggagggagacctatctccgaggacgcagggtccccggacctggatggctgaagaggaagacgatcaaaggcggatggaagagcaaagatcctcaacgcagcctacctgatggctgccgccagacggaaaggaaagagctgtactcccacaatgccttttgggctcctcccccacctcagccaccctctttccggtggaaagctgcggcctcccagagcgtcatgggacatgtagttccggcatcgcgcctggtggcggagttctgccgagtggggcgccgcggccgctattgtcccgccccctgctccgcaagattcgagcctgagcggcctgggcgtctcgagaggtgagagagttggcggcgaggtctcggcggctaagcgagcgtcggcgactgtctctccgcgagaggaggcaagttggggtccaggctccaaagccggtggccgcgtaccgcggtggagccgctgtctttgaggtctgaggagagaacaggtttgtttcacgcaccgcgggctctccccctgcggagtctctgcgtctccgcgtctccgcgctgcgctgtccctctctggccaccgcacgacgggcgcagaaatctgggccccagagctgcgctgagagatcccccgacgcttccccagcctcccagggaggccttcgcggagtcggggcgtcgcgggtcggggcgctcgctgtgtcccttcagctccagactgcgtgaagctcctccagcaggccccagcgcccagggattttgtcctaaaaaagggtcatggagtgggtggattgcgggcggcccggcgctttttctgcatacggatttcgtcccaaatttgctaacatgagaaccacagtttttcagaagagcagaatgtttatttgccaagacctgtttggcaggtgtgaatgttttagagaagaaatgccgagaaaatgctggcattttgcgttgcgggtttttttttaaattgagaaataggttactggcttactttgtttctccagaatattttcacttggctttaatttaagtcatgtggctttaatttccttccagattatgcgttcagatgtggcaaaggcttaagagaatcattatctcttaatcgtagcggttttgattatcttttttcccacatcatatttttctttctttctttttaaatcacagctttacgtttttaagagtctctatctggttcattgattgattcaacaaatatttattaagtgtctaatatgtgccaggcatagttgctggggatgcagcaggaaacaacgcagaatttttggccttcttggaaatgggcagtaagcagaagtaagctgtgttttgggtttggtggtaaatgctaaggaaaaaagataaggggagggaagtgatgagggagtgttagcggctgagggttgcaatttggaatggagtgtccaggttaagtctttgagagaaggtaacatttaagaaaggacttcaaggataggagtctgggagtaagagtaggggtctgattcaggcagagggagaagagccatgactggagcatgcaagattaatagaggaacagcagggaagcagtgtggctgaaattcacagtaggggaaagtgggaaatgacgtcggagaggtgaaggttctcacatggactttggatttcattggcagattttgaacagaaggatgacttcatatggcgtacattttaaaaagataactcggattgctccttttgaggctaaaaggagagaaaaaatggaagcagagagactgcttaggaaattgtgttagtcttccattgctcctgtaacaaatttcagcaactttgttggttaataatacaaatttaccgtcttttagtttgtacatcagactaggtctgtaaatctgtaaatatcaccaagctaaaaccaaagtcagtagggctgtgttccttctggaggtactaggggagagtacatttatttccttggcttttccaccttatgaagcctgcctgaattccttggctcctgactgcttccttcatcttcacagccagcaaaggagcatcttccaattacaccttctgtcctctccagcactcctgtgtgtctcttataaagacacttgtgattaca

SEQ ID NO: 316239 - DNA, 4001 bp, Homo sapiens
taattctcaactctagttcaccaccagacaagagtcttttactactcaagttatttactaagcatttctccctagactatcacaagtgtaatgagataatgtagacttgctaaaacaacacacatagactgaaacacatcattccctcttaatactccattcctgactagggcaggaatatgttaatatctgggtaacaaaatttagggtttggggaccttatctttttccatacaactgagagctcagcaacgtttagctttaaaaatatttagtatatattttaggctgtgcaggccacatttggtctcttctgcatattcttgccgctttaaagcttaggttccacaagtacttccagtatatacacacgcatttgtaacaaagacaagtctttcaagcaattactcttcaccaagattagtaaaaatcacaaaccctgttttatatacgagacagctcacctaagtacaatcagaaaagttgcttaatctctctctcccaccatccccaggcagtattcaatataactgctactcaaaaccatttacctctgcaacggactgaaggcttcgagcaaactttagctggttaacaccatgatggacaggcttgccgtaagttgcacccttaggaactgggcgttttcggccaccacggcgaacacgaatcctatatataacgtaacctacacacaaacacacacgaaattagtgattttataggaagccgtaaggcttaagactcaatggcttgtcactaatactccaccaaaaatacttcaacagtaagttaatgctatctaatagaaaaaaataaaacacatcccagtctttttcaatgcaccttaggctactcacacagggaggcacactgtttattttgctttagtctgaactcattcagatttgtaacctttgacacacttgccactttagacaacagtgcatacagtaactgaccagtgttgctagcttttttctgccaaagccctatgcgaagaaagacactgaggcagcagtgtcttcctaacagctggtttccaacttttctcgaatataattttatccaagcatccacgcagtcgatcacgtaccttgcttggccttgtagcccagtcggcgcgctttatcaggccgggtggggcggggagccctgtggagagcagagagctggcggtactgccagcagcggaccctcagaagaaagcgcatgacatcagactgcttctttctccatagctcctggatgtacttgtatgcacccatcttggcttacctgtgaaatcaaactgtgtattaaatatcatccgctttaagtacaataagacgactgtatccgtccatcttagttccccaacaaaaacaaggaaaccgccgggaatgaaaatggctctgcaccaactgccggggacagctagcccaacccccaccactgcgcccacggagccgcgttcagtcacttccgcaaccccagcacagagcggtgctcggcacgttttggtggggcgaattaacagaaccagaactgagcaccaagggggcgggtggctgcggcaggcggcgtccccaaggaggacctgaaaggagatgccgctgacatcacaggacaaggtactgctgcggccaccgaggattaactctcgaggaaaatgcatctaccccacccaaccagcagcctcactttaggctgccttgtcccgggcgccccattcgtcagccccacgcctcctccaggatccgggcccagctcgaattcgcgccgccatcacatcttcgctcaacccgccccgggggccgcctctccacccctttgctgtcccgcatcctgaccaaactctggccgcacaggagggagacctatctccgaggacgcagggtccccggacctggatggctgaagaggaagacgatcaaaggcggatggaagagcaaagatcctcaacgcagcctacctgatggctgccgccagacggaaaggaaagagctgtactcccacaatgccttttgggctcctcccccacctcagccaccctctttccggtggaaagctgcggcctcccagagcgtcatgggacatgtagttccggcatcgcgcctggtggcggagttctgccgagtggggcgccgcggccgctattgtcccgccccctgctccgcaagattcgagcctgagcggcctgggcgtctcgagaggtgagagagttggcggcgaggtctcggcggctaagcgagcgtcggcgactgtctctccgcgagaggaggcaagttggggtccaggctccaaagccggtggccgcgtaccgcggtggagccgctgtctttgaggtctgaggagagaacaggtttgtttcacgcaccgcgggctctccccctgcggagtctctgcgtctccgcgtctccgcgctgcgctgtccctctctggccaccgcacgacgggcgcagaaatctgggccccagagctgcgctgagagatcccccgacgcttccccagcctcccagggaggccttcgcggagtcggggcgtcgcgggtcggggcgctcgctgtgtcccttcagctccagactgcgtgaagctcctccagcaggccccagcgcccagggattttgtcctaaaaaagggtcatggagtgggtggattgcgggcggcccggcgctttttctgcatacggatttcgtcccaaatttgctaacatgagaaccacagtttttcagaagagcagaatgtttatttgccaagacctgtttggcaggtgtgaatgttttagagaagaaatgccgagaaaatgctggcattttgcgttgcgggtttttttttaaattgagaaataggttactggcttactttgtttctccagaatattttcacttggctttaatttaagtcatgtggctttaatttccttccagattatgcgttcagatgtggcaaaggcttaagagaatcattatctcttaatcgtagcggttttgattatcttttttcccacatcatatttttctttctttctttttaaatcacagctttacgtttttaagagtctctatctggttcattgattgattcaacaaatatttattaagtgtctaatatgtgccaggcatagttgctggggatgcagcaggaaacaacgcagaatttttggccttcttggaaatgggcagtaagcagaagtaagctgtgttttgggtttggtggtaaatgctaaggaaaaaagataaggggagggaagtgatgagggagtgttagcggctgagggttgcaatttggaatggagtgtccaggttaagtctttgagagaaggtaacatttaagaaaggacttcaaggataggagtctgggagtaagagtaggggtctgattcaggcagagggagaagagccatgactggagcatgcaagattaatagaggaacagcagggaagcagtgtggctgaaattcacagtaggggaaagtgggaaatgacgtcggagaggtgaaggttctcacatggactttggatttcattggcagattttgaacagaaggatgacttcatatggcgtacattttaaaaagataactcggattgctccttttgaggctaaaaggagagaaaaaatggaagcagagagactgcttaggaaattgtgttagtcttccattgctcctgtaacaaatttcagcaactttgttggttaataatacaaatttaccgtcttttagtttgtacatcagactaggtctgtaaatctgtaaatatcaccaagctaaaaccaaagtcagtagggctgtgttccttctggaggtactaggggagagtacatttatttccttggcttttccaccttatgaagcctgcctgaattccttggctcctgactgcttccttcatcttcacagccagcaaaggagcatcttccaattacaccttctgtcctctccagcactcctgtgtgtctcttataaagacacttgtgattacactgggcccacctagataattcaggataatatcttc

SEQ ID NO: 316240 - DNA, 4001 bp, Homo sapiens
aactctgattacaaaaataagccgagtagaatgatacttacaaaatttccagaatcaaaaattccatcttctactggatgagtaaggtccaaattaaacctccaggttgacctcttgggcttcctgtctttctgctacataaatgagaaataattatgtagctatataaaacaacttattcaatttatataaacaattttaaagtttgtaccaatgcaatctgtacaatgtactgttaggttacatatacagaaatgtaacaataaataaaaaaacaccaccactacccacgccggggttgatttgaacctctaaccaagtcctaatatgttcaagttgtcaaaaagttacggactttcattgttttctatactaccaatgatcaattttaaattatcgtgcttttctgccaccccactgcagatgggaataggttagtatactgcctagcccaagctcaggtaagtgccagagctaggattccacccacctatgtctagaaaattcaattcttacgttattataggcaagggaaggggactttggtaaaaaaaaaaaaaaagaaaagaaaagaaaaagaaaaaataaaaataaaaaaggcaaggtgccgtcccagcactttgggaggctgaggcaggaggatcacgtgaggtcaggagttcaaggccagcctggccaacatggtgaaaccccatctctagtaaaaatacaaaaattagccaggtgtggtggtgcatgcttataatcctagctattcaggaggctgagtcgggaggattgcttgaacccgggaggcggaggttgtagtgagcctgatcatgccactatactcccacctgggcaacagactctgtctcaaaaaaaaaaaaaaacctaaaaaccaacaccgtggaacttaaattttccatatccaaaccttttataccaagaccatataatatggctacataagcaaaatgttactgtggccagcaaccatgtacattcactgcaatatgaacaaacaaatctgtatttatcagactataacctccaatttagattcacccaagtggctaccaagtattacacattagtttgctttctcaggtagcatggtaacatgtgccaaaagataattacccagttggcgcagaagttaatttgggagacacaaacaacttctgtctaatggaacagataaccctatagggtttatggccatgctgggcattacccagttttgtagctagcccagcaattttatcctaactttatttgtaaattgcgcatgtatatctagcttttcagatattcttaggaacattttaacatcttactggttcccttactaatgacttaagtaaaacatctgaagcacgtttatttcacattgctggaatctagacttatacttttctaaaaattacttcaccgagaaacttcttccccaactgaaagttctcaaaaacttgtgatgtcggccatcgcgggagctgagcgcctaggagctccctctggcctggcaaaggtcgtcagaccggcccgattacccaccattcccctacccagtgctgagtggcaaaagcattatcaggcgcgagatagtaaagaaatggctcagattgcagtaccaccggcccatttacagttgtgcctccctctttcccgcgtgtccaaaaccacccatcctaaaccaattccgggcccagctccaactccactagacctcatggcagctgccagggagtctcgaaaaacagttcaggatcctcgcgtcttggttgtgtttctgacccagacttcactactcccctccctttatcttgactgagacgtctccactcgacagatgcaaaaatcgttacagcggaaatcattaaattgccacacaacactcccaccaagacatcgctcactcaccggcgccatcttgcgagtcggccgcgagagcagagaggaagctacggccgcgcggtctgcatttatatcaaagcgtgctgcgtcacgcgctgagagcgtcagattgtcgcctcccggaaaagaaagcgggaggagcgctgaggccggtaacccaggaaaccagtgcgctgccggacgagagtaggccatcggctttccgcgggcacacgcgggtggctgtggttgaactgactctcgggtttccgctcctggctgttcaagccgattaattgcagtggcctctacagttacctagtggctgctcccggatacggacgcacgcgagggatgcaggagtcatctttcactaatcaccggaatcccctttccaatcagggcaaggcagtgtctcaggttgctttgggatctccttttattgcagttataatcctccagcgaaaaagttatttgtttgtgttttgtctgtgagcctcgttttctaaatgactgttgagggaaattggtgcttcggggaccaggtcctcgggaaaaaaaaatcatgtatatatatgcttacacgcccacgcctgtaatcccagcactttgggaggccgaggccggagaatctcttgagcccaggagttcgagaccacccttggcagcgtaggcatagggagaacccgtctctacaaacaattttaaaaaaaatggcccgcgtggtggtgcgcgtctgtactcccagccactcgggaggctgaggcaggagcatcgctttaccttgagaggcggaagttgcagtgagtcgagatcgagccactgcactccagcctgggtaacagtgagactgtctcaaagggaaaaacacgtagtgcttgcttcttgttcattcgtttggtataatttatcatgggttttacagttaatcccaggtctcttgatttccatccaaaatgctcccagttaaaattcaatgaatgtttgctgtgacctatcagtatgtacaagacacacgagggtggaagtgtcttgctgacaaaaggaaaaagtagcttttgagctttgaaggattgtaaattgacatcagatccgaaaagtggcatgctgaaccgcttgggtttagcagtaatatgttttcgtggagatgaaattatcatacctaggggtaggggtaagggatggggtggactttgttgttaatttgaagaatgaccccagaaagtaagaactgttcgtggcctttatgccagcaagtagttatcgtggaaactatgctttaatagagcatatgacttgtagagtctgaagagaggccctgaattcctagaagaaatccatttcaacaagattttttagttgtctgccttaagagctacaataatcacatttctctttccaaacattaaagggagcaattggcatttcctcctcaagggctgcctaagctgaggggcagaaatgattctattttgcttgtctttagcagtcttccatgtcttgacaataaactccttaagcactattaagccatttgtacaaggaggatatggaaacatacctgtttcacaagaactagtaatcaccaaataactagttagaaactgtaatgggggaaaaatgtttgtcaattagaaaaaaaaacaagaatattagcgagaaatgtgcagatgggaagactaaaagttgtaaataattcagttcttcccaaactgtgcgtgtgcacacgtatatagtaacacaatgctagtcaataccctatagttattttttaaaaatttgacagctaattaaaaaaattttaacatttattttagattcagagggtacatgtacagttttgttacatgaatatatataatgatggtggggttggggtgcgattgatcccttcacccaggtagtgaaaatagtacccaataattagattttcaacccttccccacttctagtattcccagtgtctatttttgccatcttcatgcccatgagtatccaatgtttagttcccacttacaagtgagaagtacagtatttgattttctgttcctgcattaattcgcctaggataatggcctccagctgcagccatgttgctgcaaagtatgtgattttgttctttatgg

SEQ ID NO: 316241 - DNA, 4001 bp, Homo sapiens
gtgagctgtgatcctgccactgctctccagcctgagcaacagaggacctgtctccccaaaaaaaaaaaaaaaaaaaaaaaaaaaaaaaaaaaaaggtatagtggccttatgtacattcatagcgctgtgtagctatcaccattatccatctaaataactttttttttttttaaaggtctcctatgttgcctcaaacaatcctcccaccttggcctccggaggagctagagtacagccgctgccaccaagcccggatttgctatgacactgatatacaagttatagagtccctgctttcaactgttttagggtataacttagaagtggaactgctgggataatttttatgtttacccttttgagaaaacaccaaatgatttttcacagctgttgcatatttagcaatgcacaaaggttccaatttctccccatcctcaccaacacctgtaattcctgtttttttttttcctgaatagtcaccctaataggtgtgtcatatccacttttaagtttctccttcctctgaactttcaacatattttatgtctgatggcatttatttctcacaatacctagaaaagtccttcatccagaaggtgttcagtaagtattcccaagcctcctgaatactagtcctaccatggcactcaaactttttctcatgtataacccagctaaaaggacacttaacaaggaccagaaaaaccactgtttttctagtgaatgaactagtgtatggtggactggttcatggtccactggctatgttaggactaatcctgtaaatattgcaatcaaaaccaaattatggtaacttctcaatttcctcccactggaaaactaagcccttccaccctgccctataacgcaaaggtgcttaacgtaatttatctgactttaaaatttcaactcggtattgctactagcctaaaatatatagagacagtttataatatctttttcattttgctgacgctttacagtttaagagctctttcgcatacagtctgatttaattttacagagcagaaaaccaacgttcagagagctttgacaacttaagagatagcccccaacatcaaggcgtattccacttaccgactgtccctttttgtgcttccttctgtagaggacagtccagtttatctgccgaggattcctcttggaaaggaaagccgactcgcatttcgcattaagaaactggaaaacctagagtgacaaatgcaaaggaattactatttaactatacaaagtacaagaggctgagtaagcttggaatccttagaagatcaatatgctagttctggcttatcattttacaaaactgaggcccacaaggaccaaaaggctgtcacataactggcaggtaactgtgtcacactatgaaggtccttgcgtttagtcttttctcgagagcaggaaatctaggctcatagcaaaggacagggtggtgcgtccttctgggaagcattctgctcttgtccgtcccaggattccaaagggtacctccgtacctcagttatttcccttacaccgggacatcagttacataaacccctcctgatgtccgacctggctcacaataaataatcaacactggttcacttagaggtttctggtcctaacgaccagtccacagagcgtccacgaagacttccagaggccagtggtgatgtggggaataaacccgcctaaaccgaattaaaccagcctttcctcctcggagtacaagaaggtaggtgaagccgacgcggctttttaccttcccgtcggtcctggcgtagcgcctcccgtgtccggggtagatcttgtacccgctaaaactgcacagctcgaccctgcaacaaaaagtgaaagtccatcagggagggtgtctacagccatgccagggacgacagagaggagttctgcccgaggatgtaagcggattgggaaccacgggtcgtgcttacttcatggcgacagctccacggaaagacaaaagatggcgaaaagaaagagagaatcatgggaagagaccttataaggtcgctgcggggatgggggccggaaatctcctccccaatatccttcgatgctcctggccctccttgatgacgtaatcatcgcgaggcgaaagatctcgttttccctgacagctgacttcctctggcgcaattcatccagaggcgctggagggttctcgggcccagagggcctgccaaaaaggcagtcagacagttggtttatgagtcattctgtctctgtctctcctctcttttttttttttgagacggagtttcgctcttgttgcccaggctggagtgcagtggcgcaatctcggctcaccgtaacctccgcctcccaggttcaagcgattctcctgcctcagcctccctagtagctgggattacaggcatgtgccaccacgtccggctaattttgtatttttcgtagagacggggtttctccatgttggtcaggctggtctcgaactcctgacctcaggtggtccgccctcctcggcctcccaaagtgttgggattataggcgggagccactgcgcccggcccattctgcctctcttactgccaagtatcctagagccatcttccggctgcagggaatgtgaactgaagagaaaggtgtcctctcttctcataaagagacccaaagacgaatgccccgcaggtaaaaccagtcacattttgccttccctgttggcccatttcctcaaccaaacaaattaatagtttcaccatttataagaaagtaatgacaaccgaaccgtttctcaggctgtgcgaatcgaacagtgcgcgttggcgctttgcattaattataattaacattctttgagcgctttctctgtgccgggaattatgccaaaggctttttaaacatgagctcattcagtttccaaaattcctattaagtacctgcctaagaactacaattcggagttgctgcctagtgaagttgagggggtcggtggagccccgctgggaggccaagggctcaatctgttgagcccttctatgatgctacatatttcatcgtatgacaaggagtggccagaggcaattcttgaattctgtgggaggttgcagtatatgactaggaaacaaatgtaatgactgagttctgctttctatgtatgcaactcaccctaaaaacgttttgtaaggtagctggttgaagatatttggaatgtctaacaagttggctgactaatgtcatgaaaactgtacaattgtgttggagccagtcttttttttttttttttttccttgagacggagtttcgctctttcattcaggctggagtgaagtggcgcggtctcggctcactgcaacctccgccctctgggttcaaacgattgattctcctgcctcagcctcccgagtagctgggattacaggcgcctgccaccacgctcggctaatttttgtatttttagtagagatggggtttcaccatgttgtccaggctggtcccaaactcttgacctcaggtgatccactcgttctcccaaagtgctaggattacaggcgtgagccaccgcgccgggcctggaaccagtcttaagaatgatgttaggtggccagtcatggcggctcatgcctgtaattacggcactttgggaggccgaggtgggcggatcacctgaggttaggagttccagcccagcctggtcaaaatggtgaaaccccttctctactaaaaatacaaaaattagctgggcgtggtggcgcacgcctgtaatcccagctcctcgggaggctgcgggaggagaatcgcttgaacccgggaggcagaggttgcatttagccaagatcgcgccactacactccagcctgggcaagaagagcaaaactccatatcaaaaaaaaaaaaaaaaaggaggccgggtgcagcggctcacgtctgtaatcccggcactgtggaatgccgaggcgggcggatcacgaggtcaggagtttgagaccagcctgggtaacacgatgaaaccccgcctctac

SEQ ID NO: 316242 - DNA, 4001 bp, Homo sapiens
gtcgatcgagcttgcggctgacaccctttgggatcttgggcttaacctccttgggctttacgagggccttgatagcctcggcacgtgcactcatggccttggcattgttggcctgcatcttctttaggccctttttgttgtgcttcttggcaaagcgcatgttcctcaggaacttggggtccacctgaaaagcaggaaaggtacaggtggcagcatgtgggtccccaagtctctccctgctgcccctctccataggggtacccagcattctaaagacagcatcaagtcaacctcaaatgtggaaatacccaacctcttgaaactatttccagagaaagtgtaccaccaccccagggagccaatacgccacctgggtaatgctgtgcagacctccttcaagaacaaaattacaagctgctttgctgccctgtctgccaaggttgtggggcttcaacttcctacagcaggggttcgaccaagttttttcctgacatcccctcagggacaccccctcccctctttagaagaaggtgtcaattaaataccaagtctggtccaaaagacttatagccaaggtgggatatggggaaactgaggctcagagtttgtgattcactccacggaacagagagcaaaagtaaagggaaggaacagactggggacatgctcagctctcccctagaccctccagccttctcagctaatccttagaaccccctgacacaggaagagaagctgaccccaactccagcactgggtcagatggaggtcataaggctggtcagtgtgggaatgtgccctgcacgcactcagacaaggccactccttaccctaagtgccactgccaagcaagggagatagccaaactgccctcaggaggcaggttacaccctgaccagagggttacacttcaggctgtggagaccaaggaaagctttattatgggtctggtagggtagaaaaaggaattgcaggctttgggtgggccagttaggctgtgctcaggcagaagccaaagctagagaaaaactacatgagaggccttgactgtgcacctggaaccaagaaaagacacttccatgtgattcagtgcactcacccccttaagagattcgtatctttgtgatcggggtttcttgataccatttctgtgccattttcgggctgtgggagaaaaaaagggaattaagccaacaaagaactttcctctaataagaccacccaacatcacagctggcaagtctgggagaaccaacacttcctacagcagctacacttgagatatgggaaacccttactactaaatgcaaaacactctgtatctcaagtagatctctaaacctataaaccctaaagttattactgggtgaaatcaatcagcctcaggcccacaatggaaacgtgccccttcatctctgtcccagtttgcctgaaccagtccttgccagggtctgggatgtaggcagggcccaaaaaacttacactggttgtgtgtggtgtggttcttggacttggccatgtctgcacctggaagacaaaagtggagatcagggttaagggctcgccaggctgggccacctctgccccccccattctggtcagaatgagcctgcaggcagagaatgtgcagcctccacgagtctcggcttactctgcacgaccaaacgccagtcctggcctcccaaacccaggtaatgatgccctgaaatcaactccttacccccggaaagctgcattccccaataaagtggctttccctgccatccccctcctaggacctagaagcaccattcccaccccgcagcttttgctcccgacagacacacggtcggtcaccagtcctctccgcagcccgcgccccgccgccacccgtaagtcgcggatggcatcggatgccgcgcggccaacactcaccataagccgcggctcccgaagcgcctagaaccggaagagaaaggggctgcggtgcagcacgggaaatagggtcaacaacgccggaaagtactactggaaaagcttccccaggctccgcgaagaaaagttccgaagcccggaagaacgcaagccagacgtggaggcggtgctacgagcttgcctccgcccccttcaggctgcctcctcccttctctgtttctccaggacctgtctcttaagtcttattcaagatactgaaaaagaaaggagtccttgagggatgttgttgggcaagaagatctgtgttctttttctttttttttttttttgagacggagtttcgctcttccaccgaggctggagggcagtggcacaatctcggcccactgcaacctccgccttccggtttcaagcgattctcttgcctcagcctcccgagtagctgggattacaggcgcccaccaccacgcccggctaatttttacatttttagtagagacggggtttcaccatgttggccaggctggtctcgaactcctgacctcgcgatccgctcgcctctgtcccccaaagtgctgggattacaggcgtgagccaccgcacctggccgatctgtgttcttaaaagcacccctgtaatcccagcactttgggaggctgaggtgggcggatcacgaggtcaggagttccagaccagcctggacaacatggtgaaaccccatctctactaaaaatccaaaaaaaaaaaaaaaaaaaaaaaaaaaattcacggggcgtggtggcacgtgcctgtaatcccagctactctggaggctgaggcaggagaattgcttgaatctgggaggtggaggttgcagtgagccaagatcgcaccattgcactccagcctgggctacagggcgagactctgtctcaaaaaaaaaaaagaaaagcacgcctgactctttcgtggagaaggagcagaggggaggaaggagagagggctgcctggacctgagggaggacagtgggaatgcagaggagtggacaaagaaagagtactggacttgggacacagaagatgagggagaaaaaggaggcaaggatagcccctatgtctttggcttgacaactgggtgaatggtgggctgtttacagagatggaagattgagtggggagcaggggctttgtttgttttgttttgagggggaatgatgagccagatatttttgttggatgcattaaatgtgagatgcctgttggacatcagaattgagaaattgttgcctctaacaactctgttgccttctccacctcttccccctatagttcattttccacacggcagtggggcttggggacttgttttaagatacaaatcagatcctgtcccttaaatctgcaaggacatccccttgcattgaagatcaattctttacccacttgaccctgacaacctctgtcatttacttctctccaaacgcattgcctttctttcctgccaaccacaaatgtgtgttctgcctcaggacctttgcacttgctatcccagccacctggactgcccttctccctgctttttggatggtgtgctctttcctatagaggcctccctggactccattatctaaaatagagaaccactgcctcatctcaccagtgattctgtgtcctctcatggtttcctttcttttctattctttttttttttttcttttttttagacagtctcactctgtctcccaggctggagtgcagtggtgcgatctcagctcactgcaacctctgcctcccgggttcaagcgattctcctgcctcagcctcctgagtagctgggattacgggcgcacaccaccactcccagctaatttttaaagaattatttttagtagagacgggttttcaccatgttggccaggctggtgttgaactcctgacctcaggtggtctgcccgcctcggcctcccaaagtgctgggattacaggcgtaagccaccgtgcccggccatggtttgctttctttatagaactttcccagactctaattgcattgtttacttagttgtgtatgtgtccattatcataggagcccagagtttgggactggt

SEQ ID NO: 316243 - DNA, 4001 bp, Homo sapiens
tccttttggggagggaaaaaaaggaccaaatgaaaaggaagtatgccacacagtagttgcctttggtaacaggacttcactatttccttacttttttggtgggaaaaaccaggagctcgtggctttagccactagggatgaaggcacccccaccattgccactcccaagcaatggaggaggcaccaatgggatgcgaggggactgtgtagatactgagatggcaagcacagctgcagacactgctctcagcacctgagttttcttgtctataaaatagggatcctgctgtcacaaggcaacccaaaatacaggacacaaatgcaaagccctctgaacacatcaaaacggccaaatgtcccttttcattaaagtttcgcttcacacatcaagagacataagtaccagcactagggcacactgggggagacctgtatttctacagaaagctcttccacaagccagttcatcggtcaaagataatcctgactaggtgatgtcagaaactgttggaaactcttttcttcaccccacacccatttccatcccaggaccacataccttaattttgacatatcggtctgactggtgccggatgaacttcttggttctctttttgacgatcttgggcttcacaaggggtctgagggcggccatgatgccttttggggaagaagcggccccaggtgaggaagaatcctggaaggaggctttcctgcccagggactgaacactgtcgcagagtgtcttccaatcgccagctacggagcaagctgggaatggaatgggtgcctctgccaggcttgctttccctccctttccgaagctggcagaatactaggcactctccagatgcgatcccaggaggtcaagggtcacctcacccactcagagcccaaagaatgccaacagctgagcaaatcaaaactgaccccaagacactctcaatttgcaaggggcagcaaatcccaccccaccagtgtccgaacccccagatggtccttccggtagtactggccttgaccatctacttgaacctgagtcttttcctcacctgtaaaatgaagatgacactgcgcgctgaatgcctgcagtgcctgtcacagggtaaatgttcaataaaaccttctaattccctagggagctgctgcgctaccacaccctcaacacacacaaaaccaccatatacctctgaagatgcctcaaacctggagatcttccagtatcaactcacaccttcctcagtgtggtcttccgagccattgatttcctacagcagcaccccttctgctctcttcgcagccatcaactggcccagagtgggtactcaatgaaccacgtattcaaaacgactctgccttctggcccatgatatcctcgaaggcaaggtgggggcagttgcatcttcatattcccagagatactaccagaatttctgcctgcagctggaccagccgacctacagctcgtctttccttggcggtcccgcagcagcagccctcgggccagagactgcagcggaagaagccggccatggcatgaacgaatacacgtgggccgacattggtgagcgctgggatccacagatcccagctgaaagctgtcaagctgggccacccctggtcgtcccacggcccccaggagaccccgaagtctggcctcaactagcaccctccaccgccaaggaacaaacaagcagcccgcagctctgaatacaggcggagggcaggaggctctgggacgcaaagccctatcaactcggcggcttcgttctgttcctgtacacgctccagtaagctgacaataacaatacccacagacactaccgcgctgaaggggaggcctccgcaccactgggcgacggggccagatgaatcccgcaggaatgcggattgccacggattaacacttaccgagaaggagatggctgccacctccgtaggcagcgccgaggaagagagaagggacggtggcgcgcaagggctgatgggtcgtaacccctgggtcctagcagggaaaaaggcaagcacttccggctccggctcttttaaataaaataaagacacgtcaaaaaataatgccgcaaaaattctgagtatacatgttttaatagacaataataactaggaataggactgagaaatgtattctacctatccttgggactacgtagaaatttggaattctttctgagctaataagacctggtggagggaggaatttacttccgccagaagtcgaagccaatccgcttttgggctatttccgcccgcgtttcttctactccgaagtgcgcctcttagtggtcagaagagaacaagacagagacttcctaataatttcatcaccgaatttagacagtaaatagtaacgaaaacagctaacatgcgatggagttcactatgcctaccacaattctataacgtacccctattattgtctccattttgcatatgtggaagatgaaatttggagacttgactccaaactccacgcttctaaccactgggcgaaactgcctagtttttctttgttcattttttagaaatggggtctcactctgttgcccaggctggtcttgaactcctgggctcaaacgattctctcgcctcagcctcctgagtagctgggattacgggcacgagctactgcctagatgttttttgttttgttttgttttttggtttttggttttttttagacagggcctccctctgtcacctaggctggaatgcaaaggtgccatctcacggctcacggcagcccctgcctcccagactgcctagtttttaaagatgctcttgatttgttttgcttagcttttgtatttaagattattgtgcaaattggctgagcactatggttcacacctataattccaatactttgggagtctgaggtgggagatttgcttgagcccaggagttcaagaccggcctaggcaacatagtaagaccctgtctctacaaaaaataaaataattagctggggctggtggcgcatgcctgtagtcccagttactcgagaggctgagctgggatgatcacgtgagcccagcagttctagactgcagttagctgtgataatgccactgcactccagcctgagtgacagagcaagactctgtctcaacaacaacaaacctataaagacaaataacccaattgaaaaatgggtaaagaatccaaatagacatttctctgtggccaatgaacacatgaaatgatccacatcattagccatcagggaaatacaaactggaactgcagtgagataccatttcacactcactaggacagagaaatgggaatgtccgtacagtgctagtgcaaatatgaaatggtgcagtcactttggaaaagaatagcatttcctcaaaatgttaaacataaagttactgtaagacccagcgactgggcgcggtggctcatgcctgtaatcccagcactttgggaagctgaggtgggcagatcacctgtggtcaggagttcgagtccatcctggccaacatggtgaaaccccatctctactaaagttacaaaaaattagctgggtgtggtggcacatgcctgtagttccagctactagggaggctgaggcacgagaatcacttgaactcaggaggtggaggttgcagtaagtggagatcgcgccattgcactccagcctgggcaacaagagcgaaactttgtctcaaaataataataatacatgaattggtgtcccacaaaatgaagatactttttttctgataagaatatacacataagatttatgtcaactcagtaatcattcaggaggttttacttcctgagattttttttaatgaaaacattttctcaagttagattcctagggtgtctaagtcaatgccaagaaaagtttggaaagactttgagagaaggccagcccagcatctttcttgtaagcggaggtagatttggtttcacagaggcctactggaagtgataaaagggaagaattctttaggaatcactttagt

SEQ ID NO: 316244 - DNA, 4001 bp, Homo sapiens
aaccctccatgtgctttcacctctacacctttgtgtaagcactctctgcctgccaagtttcctcctgttctccatctaatgcaaactttccagagccctcctgcccctgaagataccccttaccacagcacagacttaagagccccttaaggtctgaggtccatgtttgaccttctcccgcttgtaagccaaaaataaaattcaaaggcccccagcaaccatctgaatgcactccctccttgaatagggcactcttggtttccacaacctcttactgtagccaagacattcctttctagtgataaccaattctcgacgagaaacagaaaatctatccaaaacctcgaagtgccgcctttctggaccaaaccaatgtatgccttatgtgtatttgattgatgtctcatgtctccctaaaatatgtaaaaccaagctgctccccgcccaccttggacacatattcttagggtctcccaagggctgtgtcacgggccatggtcaactcatatttggctcagaataaatctcttcgaatatttcagagttcaactcttttgcttgacaccttcataaagaaagcaacattttggaaacaacagccaaaggatattgtagtagtggaaagtggctattattgcagtgttcacaaagcagtcttttcctggtcttgggtctctacacttagaagaccaagtcacctccttcagcaaaggaaacaccttgaattccccaacaagcattctctaaaatcctgcaaggaacaacttctgattccctcagagaatgtacaacaccccccgccaaaatgcatcccaagagtttgtagagttcctgccagaagtgctcacacagatgcaaacttctgatcactgaaaactagaggtgggacccaactcacttgttgcacatcagcagcacttccagctccttgacgttgtggaccaggaacttccggaagccactgggcagcatgtgctttgtttttttgttgcttccataaccaatgttgggcatcaagatctggcccttgaatcttctacgaaccctgttgtcaatgcctctgggtttccgccagttacgctgaaggaaataatacacaggtgggttagcgtctgtgcagagtgcgaactcttccttttggggagggaaaaaaaggaccaaatgaaaaggaagtatgccacacagtagttgcctttggtaacaggacttcactatttccttacttttttggtgggaaaaaccaggagctcgtggctttagccactagggatgaaggcacccccaccattgccactcccaagcaatggaggaggcaccaatgggatgcgaggggactgtgtagatactgagatggcaagcacagctgcagacactgctctcagcacctgagttttcttgtctataaaatagggatcctgctgtcacaaggcaacccaaaatacaggacacaaatgcaaagccctctgaacacatcaaaacggccaaatgtcccttttcattaaagtttcgcttcacacatcaagagacataagtaccagcactagggcacactgggggagacctgtatttctacagaaagctcttccacaagccagttcatcggtcaaagataatcctgactaggtgatgtcagaaactgttggaaactcttttcttcaccccacacccatttccatcccaggaccacataccttaattttgacatatcggtctgactggtgccggatgaacttcttggttctctttttgacgatcttgggcttcacaaggggtctgagggcggccatgatgccttttggggaagaagcggccccaggtgaggaagaatcctggaaggaggctttcctgcccagggactgaacactgtcgcagagtgtcttccaatcgccagctacggagcaagctgggaatggaatgggtgcctctgccaggcttgctttccctccctttccgaagctggcagaatactaggcactctccagatgcgatcccaggaggtcaagggtcacctcacccactcagagcccaaagaatgccaacagctgagcaaatcaaaactgaccccaagacactctcaatttgcaaggggcagcaaatcccaccccaccagtgtccgaacccccagatggtccttccggtagtactggccttgaccatctacttgaacctgagtcttttcctcacctgtaaaatgaagatgacactgcgcgctgaatgcctgcagtgcctgtcacagggtaaatgttcaataaaaccttctaattccctagggagctgctgcgctaccacaccctcaacacacacaaaaccaccatatacctctgaagatgcctcaaacctggagatcttccagtatcaactcacaccttcctcagtgtggtcttccgagccattgatttcctacagcagcaccccttctgctctcttcgcagccatcaactggcccagagtgggtactcaatgaaccacgtattcaaaacgactctgccttctggcccatgatatcctcgaaggcaaggtgggggcagttgcatcttcatattcccagagatactaccagaatttctgcctgcagctggaccagccgacctacagctcgtctttccttggcggtcccgcagcagcagccctcgggccagagactgcagcggaagaagccggccatggcatgaacgaatacacgtgggccgacattggtgagcgctgggatccacagatcccagctgaaagctgtcaagctgggccacccctggtcgtcccacggcccccaggagaccccgaagtctggcctcaactagcaccctccaccgccaaggaacaaacaagcagcccgcagctctgaatacaggcggagggcaggaggctctgggacgcaaagccctatcaactcggcggcttcgttctgttcctgtacacgctccagtaagctgacaataacaatacccacagacactaccgcgctgaaggggaggcctccgcaccactgggcgacggggccagatgaatcccgcaggaatgcggattgccacggattaacacttaccgagaaggagatggctgccacctccgtaggcagcgccgaggaagagagaagggacggtggcgcgcaagggctgatgggtcgtaacccctgggtcctagcagggaaaaaggcaagcacttccggctccggctcttttaaataaaataaagacacgtcaaaaaataatgccgcaaaaattctgagtatacatgttttaatagacaataataactaggaataggactgagaaatgtattctacctatccttgggactacgtagaaatttggaattctttctgagctaataagacctggtggagggaggaatttacttccgccagaagtcgaagccaatccgcttttgggctatttccgcccgcgtttcttctactccgaagtgcgcctcttagtggtcagaagagaacaagacagagacttcctaataatttcatcaccgaatttagacagtaaatagtaacgaaaacagctaacatgcgatggagttcactatgcctaccacaattctataacgtacccctattattgtctccattttgcatatgtggaagatgaaatttggagacttgactccaaactccacgcttctaaccactgggcgaaactgcctagtttttctttgttcattttttagaaatggggtctcactctgttgcccaggctggtcttgaactcctgggctcaaacgattctctcgcctcagcctcctgagtagctgggattacgggcacgagctactgcctagatgttttttgttttgttttgttttttggtttttggttttttttagacagggcctccctctgtcacctaggctggaatgcaaaggtgccatctcacggctcacggcagcccctgcctcccagactgcctagtttttaaagatgctcttgatttgttttgcttagcttttgtatttaagattattgtgcaaattggctgagcactatggttcacacc

SEQ ID NO: 316245 - DNA, 4001 bp, Homo sapiens
aaaaaaaaaaaaaaaaaaacccataattttaaggcattaacaaaatgcattaagcacaagtgttctaaaaatccttaaattctggcaaaaggagccgagaaaaaaaattagaaaccttaaaaggatcacaatataaggaattacctcctttattgcttacaagtgcaaaaggtacctaaatccaacaccaccctcagaagtaacgtccttctaaaactccccattaagttccttaatgacgcaaaatagaagccacagcaataccaatccagcctggccaacatggggaaacccattctctagtaaaaatacaaaaattagccgggcgtggtggcacacccctgtaagcccagctactcaggaggctgaggcaggagaatcgcttgagccaggaggcagaggctgcagcgagccaagatcgcgctactgccctccaacctgggcaacagagactcttgtcacaaaaacaaaaaaacaataccaagtacttcagctaaatcttttgtttattatttcaataggataatgaggccaggcgcggtggctcaagcctgtaatctcagcactttgggaggccgaggtgggcggatcacctaaggtcaggagtttgggaccagcctggccaacatggcaataccctgtctctactaataatacaaaaactagccgggcgtggtggccggcgcctgtaatcccagctactcgggaggctgagacaggacacttgcttgaacccgggaggcggaggtttcggtgagggagaccaagtcactgcattccagcctcggcaacagagcaagactccgttatataaaaaagaaaatgaggcagatctcaaaaacccaaaacctaccagtgtcataaacttacttctttgctttatatacataagcgcatctcttgcccaaatagaattctgtttcatctcgggcgtaaacaccttcaattttaagaagagctgtgtgctccctttggttccggagaccccgcttatagccagcaaaaatggccttggaccacagcctaagacacaaaagatacacaacatgaaacataagcttcaaaaaaccaatctgacttgtaatcacccccacccaaaagttactcagagcaaacatctaagttttttcttgccaattttaagctcgcatttacgttcacgtctaacacacaaaaataaagaactatatttaaaacgcgtaccttccagacatagttccttttagaagtcccgttcccagcaggccttaaaacaaacaaaaagattagtttaaaaccaagccacacaagtttcccacctcgtcccctctcgtttaagcccctaaagcaaattccttttggatgggagtttcatgtaggagttcggggacaacaatgccagaacatccatatgaaacgcagggtccggcaagacattcaaacctcagagaacagctggtatctaagcaaacttcagaatgaagacaaaactaagggacaggagtcacaaaaatgactctcagaaaagcctgagaaaatgcatgccgttatcagtaggcaacactcaggaaaagaaatgaagccttaaagagaaacacacacgtaagacttttatgcaatggctgggggagaaaagctgaggaaagagactggtcagacaagccaaggaaggtatggactgggaggaaacggatgaaggaagcactgcctcatggacaactgcacacgaacaaaaacatcgtttcactccgttcaggcccaggaatttaactgggataacccgggcagccgttctccgggtgtcaggggaccaaacaccatcagcccaacatctcctccatcctgttctccctcttcttgaaacccgtagaaatcaatggctggcagagactccgatacgcaccggcgactcgccaaggcacaggaacaaacctactccggttatttgcccccaaatttcagcagcagacccttcactcacctccacaggagccaagatggcggtaagagaaggacgaggccccgccgcgtggccttgtgggattaaacatctttcgactccgccctcaatttaggcatcttctccaaacgccagaaaaacaatcctcggaaatcggcttcgcactgaaataagccacattcaatagcactcttacaattattttcctaagtcctttcatcttggtaggctgcaaaatgtactacttgggaacaagggaaggcaaaatggtagccagctaaatccgccaaagctgtgcgttgccatagaaacaacttagtttacttcctgcgtccccggacgccgtaggtggaaaggcgaaccctgagtggaggatgttcccgctgcctaaagaatgattgactgtaagattgatttgccaacagtggggtgcttttctctcgatacacacagcaatagacagaacggaaattctgggatcctaatctagcatggaagagaaaggccgggagcacgaaggcagcaggacctcttccttctcttttttctttttctatacttcttttctcccctctacttatttatctctttcaagaaatgagactgggcacagtggctcacgcctgtaaacccagctctttgggaagccgaggcgggaggatcgcttgaggccaggagttcgagaccagcctgggcaacatagtgagaccacctcccccaacctctacaaaagaaaaaaaaaatgaatgaaatgacttaagttcttacctccattcttctttttggatccgaggtatgaggaggactgcctgcaggaggctttatcgcccttttaggagaactcgtttagctgcctcgtgtccgcacctagtaggtcctccgtagatacttgtagaggtggattagtggacgccagagattcacatttccgaattattgcatatttatttgggttatcctatggattcattcatttatttaacacatagtttaatgaatgactaccctgtaccaaggtttgtgtaagatgacacggcagtaaacaaatctatgccctcgtggagcttatatcctacgaggcggagcaacacaatgagcaagtaaaaatagatgacacgttagaagatgataatttctgtgaagaaaattaagcagagaggccactgtaaaagaggctttccccactttgagatgggaagtatgtaaaagaggcttcccctgctttgagatgggaactatttaagggtcctgaacagaagggtgactctatctgacttctatattgacaaagtcactgtgttgaaagtgaagggaggcaagggtatcagcaggaagataattataggttcctgtagtgactatgatgagaggtgatggtgtgtaaacagaggatattgagtactggaattctgaatatatttaaattctggcaagatttgctggtggatgaggaatgagagagagtaaagtatgactccgaagttgtatgaaatagatgtatataagtcacttttaaaatcagatcctctcttaaatacaacaggatagaacttgtaccttgtagcctactaccccacccagtgttccctgtcccagaaagaaatgtgctagaaatttcactattagatattgatttgtcaaagttctatatggaagtcctcctgggaggaataacacattaagtgtgagtttcattcgtttgctcgtgtattattcgttccacaaatacttattgagcactgagacttagcacctgatacaactgtgagcatcgttgtcatgttgctgctttcatggaacagttgtctagtggggggaaactgacactaacgtaacaaattgtgaacacagctctgcgggaaagtagtggcatgagtgcccagaagcctgatctggcctgacgagtcagcgaaaggatcacttggacaagtgtcagttaaggcatttttcaaactgcaggtgatgaccattagtagagcatgataagaatactttttaaaacaaagtatgggccgggcgcagtggctcacgcctgtcatcccagcactttgggaggctgagg

SEQ ID NO: 316246 - DNA, 4001 bp, Homo sapiens
ctccagcctgggcaacagagtaagactccgtcttcaaaaaagaaaaagaaaaattggccgggtgcggtggctcacgcctgcaatcccagcactttgggaggctgatgcgggcagatcatctgaggtcaggaattcgagaccagcctggccaaccatggccaacatggtgaaaccccgtctttactaaaaatacaaaaattagccgggtgtggtggcaggcacagctaccacaatcccagctactcgggaggctgagacgggagaatcacttgaacccaggcagcagaagttgcagtgagccaggattgcgccactgcactccagcgacagaaggatactccgtctcaaaaaaaaaaaaaaaggaaaaaaagagactttaaaagctggtgtgcgttttaacatttgtagcacatcttttttcagaccagccacatttcaagtgctgaatagctacatgtgattcaatgagctttggtcagctcagctttacaacctctcaggttctttctctaagcaaactctcttaggttctgaaattgagaaggcgtggagggtgactattggattacaaagcctttatgattccaacaactctcagttaatagaagcatccgtcctgtctcttgatgtcctagtgactaaagacatgtctagagaagaaactcttttaactatatttttatatagttacatgacagcctttgagaaaattgagaattaaggccaggcccagtgcaaaatgaaaatgttgtggaggtggcggggaggggaggcgggtgctggtttaaaaattaagaatttcaagattgccatagcagagcaagaaagtaagtacagggcccttctgagccctatgtgactgcacgggtgggacccttttgaagctagtcctggtcagggtttatgtctctggatgaatccagatgtgtaaaaggcaaggaagtggcgagattccttgggctatctttgagaaacggggaccttaaaggagactgcaaaatcttacctactggaattaatggaggaaaagaaagtgtttgcgcctgtgagaacgccttggaaagaggcagtgagcagatgaggcagataggtaagacacttggttttgctgattaaaccactgatgaatcagtgccactcacatcctgggtaattctagggacactagttggacaacgctgacatctgaagaggtggcagggcggaacatggatccctttaaggctactttattgtcgatttcctccttctctaagctagaaacagggggtgcctgagtggcctccagaagccactactgtaggccaggagcagtgcctcacgcctgtaatcccagcactttgggaggccgaggcgggcggatcacctgaggtcgggagttcgagactggtgtgaccaatatggtgaaacccgtctttactaaaaatacaaaaattagccgagtgtggtggcgcgcgcctgtaaccccagctactcaggaggctaaggcgggagaatcgcttgaatccggaggcggaggttgcagtgagccgagatcacaccactgcactccagcctgggcgacggagggagaccctgtctcaaaaaacaaacaaacaaacaaacaaacaaaaacgctactactgttggagtcggcttgagctgtggcattgttgtttccagcccgtgaccctcacgccgccctgctcgttgggcggaccgggccctggcggcgggtgaggaggaacctttacttaccggcgccctggcctctgcttttttcccactctaggacgcaaatctcgatctgcaagggcctggggcgcgggcggaaaaggcgggcccagctccctcaggtctgcgtgtcaccgacccgaacccgctccgtcgtcctgacgcccccggcctagctgcagccaccttgtcgcaggggccttggtgtctctgagactccgagacgcctcgcccccacctggcgttcggaggcggttgcctcgctgggcgcagcaattcaaccgccgcgcgccggatgctaagaccgcgatttccccggatgctagggcggtgatttcccccgtgacaggccccgccccggccccgcccaggcccgggcggtcccgccccactgagctgtggctcggggagccgtgggtccgactcctgcgtgtgatgtgtcaccaagttgactttggggtcccccattcttccttagttctctattttacctcagcgcgttgtctagctgctgcctggccacggtacttagcacacagcgtgacttaatactggataaacgaggaaaggattcgtacgccctggcggggccagaggctcacagcttgggttcccgcgagcacacgagccaggaaccgccaatgcctccagggggcgctctccctcccatcgagccaccgccgggccattggagaccaggaggacctctcagctccatccctgcgtctctaacaattgtctcatttccctgcctggagtcagtattaccactcccataacacagatttttaaaatgcaactaaattttaaacgagtcactttatttaaaaacaacatgaacaaaatgggatttctgctaatgcaaatatctatacaaatttaacgattttggttctaattctagatgaaaagtcaaatctcctgttacatatgagaaaagtcaaatctcctgttacatattagaagtttacctcttgttacctttactgcaactgcaatggcagtttcaactgtttcaaccaagtaatgtagttggaaatgctgttattagaagtatatcttcccagcatttcgggaggccaaggtgggtggtttacttcaggtcaggagttcgagaccagcctggccaacatgatgaaaccctgtctctacaaaaatacaaaaactagccaggcgtggtggcgggtgcctgtaatcccagctgctcaggaggctgaggcacgagaatcggttgaaccctggaggcagaggttgcaatgagctgtactccagcctgggcaacagagtgagactgcatctcaaaaaaaaaaaaaaaaaaaaaaaaaaaaaaaaaaaaaagtggatatgacagttcgaattagatctaaaacctttcctaattacaccagttaaatcatgaaatcatgcaatagtagaacaggtgtcttacctacctgcattatcctgtaaatattgacatgttattctacataatcataaactgaccgatcacacatatctttaaatctaatcatcataactaaaaactgtatttgaataaaattagtgtatttctaaatctgtctttaacagacacaaagatgtaaatttgaaatgtcttggtaaatgaggttaacacaatataaatatttttgacgaattcatcataatttgttcattttaaggagattgattttattttcttgaagcttaaggaggactttgacattttaaatgtatctaaaatttaaattttattaaattttacatttcacatttcttttttttattgattgaaacaagcatttcacatttcatatttcttttttttattgattgaaacaagcattccatagtcatttcaaatagtgtacaaagtattttaaaatgtttttctggccggatgcagtggctcacgcctgtaatcccagcactttgggaggccgaagcgggtggatcaccaggtcaggagatcgagactatcctggccaacatgatgaaaccctgtttctactaaaaatacaaaaattagtcaaacgtggtggtacgtgcctgtagtcctagctactcagaaagctgaggcaggagaagcgcttgaacctgggaggcggaggttgcagtttttcttcaaagacctatctgatttccatatgcaggataacacattcaaactcttatttgttgttaatgtaagctttaattcatatagttgttttttttttctttgaggagtctctatcgcccatactggagtgcagtggcacaatctcactgcaacctccgcctcccaggttcaagtaattctcatg

SEQ ID NO: 316247 - DNA, 4001 bp, Homo sapiens
agccctgacttactctgcactgtaagaccgcatgtaaggggctaaataacttaacctgacagactacagcctccttgcctgctatatgaggatttataccttaaatggttgctatgagggctaaatgagaatatatttaaaatacccaccataatatctgacacacagtagagtcccagtaagaaagtatcttaccacagaaacaaacaaactaaaggacaaaaggaaacttctggaggtgacagatatgtttattacccggattgtggtaatggttacaccagtgtatacgtattttgaatatactaataataggcagttttttgtataccaattatacctcaataaagttgggagaaaaaataaaaacaagataaaataagtacattaacctagctcgcaggcatgatggcaggatagccgagctcctgctgtggtccacttatactgtaacaagctcattaaatcacaactggcttctataaagaacgggatttaacattcaagacattcaaagatggcaaggcaaatttacatgaagttttgatctatctttccacaagcctttgagtaaaactttatttcatcatggacaacgcatgaaagaaaataggagtcatttcagaaacgtaatctctataaacccatctttatagctccatattcagtcagagaacgaagtgtgcttagaagaaatgtgacactataatgactattctctcaacaaataattaggtaatcatttaatgaaattgtttaacaacaatagtaataaaaaccaaacctctgtgtatgtacattccctttactcccaaacccaacattttctttggtgatcactgaaatacctggaaacatttaagccaaacacagccatttattgccgaggtgtaagaatgagaagcagcagggggaagggagaaaattggactttccttttctgtacagcataagagaacttatattacgtgcaggagttttaaaactaactttaaaaagagttttaacatttagaaagcgttcactaggaaccttaaaatgcatcacattcatagggatttcaagtgattaccaacttaaaaatgcgaaacctgttacatttctgatggttctctatgtctagaaagaagcacctacaacggaccagatactgaattaagagaatgaaattcactttaattcatttatttgtcctctacttgagccacctcgtcgggccgtgagaaatgaagtctggcgcccgctggcaccgggccgaggggctgccgcgctcgccttacggaagggaggtgcgttctaccggcccgaggtctcccgagcggtgccgagaacggcccaaacaggggcaagctccgaggctggtcggccgcggatcccagcagctgcccacgtgagcagcgacccgcgcgggggcaggccggtgctgacgtggcccaggcaggagggcgggcgcgcaccgggggcagcggaggcgccggggcccctggccacccaggactcctcgcgggccccgaggcaatcccacggaccccctgtgccccgcccgccgcccgggtctccgcatttcctgaggcctagaggggcgcgggcggagtcgggggaccgccaggaagggaggcgggaagggtcccgggagcggcggcgaggggtcgcccacactcacctgcacgcccaggtgcgccagccgggcctcgagctcaggctccaaagccagcaggaaagaggtagctcgggacgtggagccgccgcccaggtgcgccaggaccacctcggccgtcaccttagccaggtggctgcttaggtccactgtgcgcttcacgtcctcattgatcagcggcggtgcctcggaggaggcgctgcccggcgccggggcccaagtcccaagcaacaggagcagaaacaagccggcggctggcgcctccatgaccgggaagagcagtgcgccagggcgggtagggcccgggcgcggtagcccgccctcccgccactgagcagccgttcattgggcaagggctggtgacacaagatggcggcgccgaacaaggaaggaccctgtctccggggcaaccgggaagccgacccggcgcctgattgctaaagccctctcagagctgctcgggatatccttctgttcgtagtgcgagtgtacttacttttttttttttttttttttttttttttttttttttttgagacggagtctcgctctgtcgcccaggctggagtgcagtggcacgatctcagctcactgcaagctccgcctcccgggttcacaccattctcctgcctcagcctcccgggtggctgggactacaggcgcccgccaccacgcccggctaatttttttttatatttttagtagagatggggtttcactgtggcctccatctcctgacctcgtgatccgcccacctcggcctcccgaagtgctggattacaagcgtgagccactgcgcccagccgcgagtgtacttattattactagttttcacttacctaatttttacaggagcggcccttgcctaggtctctactctctcctaccattcttcctgtccaataattctgctcgttttgctccttaaaacagtgaaattttgctcagattgagaaagtaaaagttggccttccccaacatccacggatgaatgctaaaattagtaggcagaacttgaagccgaaacaggatatatgcaaagtttcaaaacatctctactaaaatgtttagtaattaggccgggcacggtgactcacgcctgtaattccagcgctttaggaggccgaggcgggtggatcacctgaggtcaggagttcgagaccagcctggccaacatggtgaaaccccgtctatactaaagatacaaaaaattagccgggcgtggtggcaggcgcctgtaattccagctacttggggtggctgaggcaggagaatcgcttgaacctgggaggcggaggttgcagtgagctaagatcgcgccattgcactccagcctaggcgacagggtgagactccttctcaaaataaataaataaataaataaaataaaattagccgggtgtggtggtgcgtgcctgtaatcccagctactccagaggctgaggtaccagaatcatttgaacccgggaggcaggagatgcagtgagccaagatcgtgccactgcactccagcctgggcgactgggcgagactccctctcaaaaggaaattaaaaaataaaaataaaatgtttagtaattacaaaggaaaaaatagtttacagtggagaatcctggcaggcaccactttaaacaagtgatcaaagttaacatcaccacatataaaatatagtaacattaggtatctactaataggatccattgagaaaggcacatcacttctgtggtattgccacaaaattattgaaaatccattacctcaatctagtcataaatatcagacaaggccaggcacagtggctcatgccaccaatcccagcactttgggaggccaagtagggaggatcccttgagccaaggagttcaaaactagaccgggcaacagggtaaaaccccatctctacaaaaaatcaaaaatcagccgggcctggtgacaagtgcctgtgttacaggaaaggggtctggatcctgaccccaagagagggttcctggatctcacgcaagaaagaattcaggatgagtccgcagtgcaaagtgaaagcaagtttattattttttattttatttatttatttatttgagatggagtctcgctctgttgcccaggctggattgcagtggcgcagtcttggctcacagcaacctgtgcctcccgggttcaagcaattctctgccttagcctcccaagtagctgcgattacaggcgcccgccaccacgcccggctaatttttgtatttttagtagagacggggtttcaacatcttggccaggctggtcttgcactcctgacctcgtgacccacctgcctcagcctcccaaagtgctgggattacaggcatgagcc

SEQ ID NO: 316248 - DNA, 4001 bp, Homo sapiens
gagagaaaagtgatagtggtataggcctatatattcaaaagaatccttggtttcaggacagcggaaatagttacctgatgcttctttcccagtcactagagtctcccctaactagaagggcagggagaacaagaaacctcatctgtttctttcattgcttggcacataaatgttttttagtgttactgccttgatggagctggctgcctaaaataggggagtgaaattagacccagggcttagatgccagtaaaacgaagacttacacaacattcacgagatggacagtggtgatggctgcacagcgttgtgaatgtactcaatgctacttacgataaattttatgtcacgtattttttgcaattaaaaaaaaaaaaaaagacttacaaatgacagcactgccctctgcaggctgttctgacattaaaggagaggatacctgggaaattattttgtacagactggtattaaatatattcaccaggctctccacagatgtgggctcacgaagttactgtcatcgtcatctttaaagtcagtcttgttgtttgttttgagatggagtctcactctgtcgcccaggctggagtgctttgggtcgaagcaattctcgctcctcagtctcctgagtagctgggattacaggcgtacgtcatcacgcccagctaacttttgtatttttagtacaaatggggtttcgccatgttggcccaggctggtctcgaactcctggcgtcaagtgatccgccgacctcggccccctcaaagtgctgggattacaggcatgagccaccgcgcccggcctagagtcagccttttttagtggctgcgcagggatgctcctaatctgacctattagtaataaatctgattctccctactcccccgcttctccatccctacggcggccagtgagtctattaacatctactcaagctacatcattcctctgctcaaaatcttgctatggttcccgttttatccagagtaaggccaaagtccttagagcagcctgcaaggctctgcctcacctgcaggactgctccctctacacctctgacttcatgtcctgccattctccctccgctcaatccccgccaccacacaggcctagcctagctctttctcacgcgccagtctcgctcccaccgctgggcctcggctctagcttttccccatgctgggaaagatcttcctccaggcagccaccggactcacacccttgcccccttcctggcttagctcaaatctcaatcgggttggcccagtgcccttctcggctaacaccgcaccccacccccatgccccgtccctgctttcttcttcgtagcatttgcctttttctatgacaattatgtaactcgtttatctttatctgtacttcccctccccaccccaacaaaagtccactccaagaatcttgctatcttgttcactgctgtttcccaaggccctaaaacactgggtcgtgcacagtgggcgtgcgacgtacaatttttggactaaatcaatcactttaaaaagctcaatatccttactgctgagcacttgggtggctttcaatatttttcaacaaccactatttagcgctcacctcgcgccgggcgcatggagagcgctcaggacacggtcccgaagtctcgcccgggcctctcggccacgttctgcggccgagaccctacgcggcgccgtacagaggccctcagcgcccggggtcggagaggacaagctacccaaggcgcaccgcccgccccgcgcatgcgcccgggtcgcggccaactgagacggctcccagacaaccgccgctctttggaaggcttccacctacccactcttcgtcggactagcctgacgcctgaccagactcctattcgccgcaaggacccgccaaggcttggggctccccggcagcagccacagctgggcccgagaaactcctggtgtctttacgtttggcttctcctcgtcccgccccacgaagcgtgacgcccaggcggatatgacgtcaccacgcggcgtcgtcctaaggacccaggcgcgaatcctgatccggagctgagagcggccgagctcagcgccctctggtgtccactccgggaaagccgtgtgtgcaatttgcttggggtgcggtttagggcgggttttttccgccttggacggtgcttcatagttatccatttcttcatgcattcattcattcattcaacaattttttcgttgtttttttgagacagtttcactctgtcgcccaggctggagtgcactggcgcgatctggcttactgctacctccgcctccagggctcaagcgattctcccacctcagcctcctgagtagctaggactacaggtatgctccaccatgcctggctaatttttgtatttttagtagagacggggtttcaccatgttggccaggctggtctcgaactcctcgcctcaagtgatctgcccaccttggcctcccaaagtgctgggattacagacgtgagcaactgcgcccgagtcattctacacatttttttcattatattataatttatttattgagatggagtctcgctctgtcgcccaggctggagtgcagtggcgccatcttggctcactgcaccctccgcctcccttcaagtgattcttctgcctcagcctcccaagtagctgggactacaggcatgcaccaccatgcccagctaatttttgtatttttagtcgagacgaggtttcaccatgttggccagcatggtctcaatctcttgacctcgtgatctgtccacctcggcctcccaaagtgttgggattacaggcgtgagccaccgcgcctggcctaatttttgtatttttagtagagacagggtttcactatgttagccaagcaggtctcaaactcctgacttcaggcaatccacccacctcgcctcccaaagtgttgggattacagacgtgagccaccgcgcccagcctacaaaattatatctagcatctcctctcctcaagatctcctatgtcaagcactccccaaagataggacccactctcagtgtcccttgtgactcccagcacatagtaggtgttctatctaggccgtcctggaaagacccacaaagtaaagacttactttgtgctaggcactatgcaaaatattttacatatgtcatctcatggaaccctcacacaatcctgagatggctattactatgatcatcaccattttagaggtagaaactgaggcacaggccaggcgcagtggctcatgcctgtaattccagcactttgggaggctgaggcgggcagatcacttgaggccaggaattcgagaccagcctggccagcatggtgagacccccatctctactgaaaatacaaaaattagctgggcacggtggtgcacacctgtaatcccagttactcgggaggctgaagcaggagaattgcttgaacctgggaggtagaggttgcagtaagccgagatcacaccactgcactctagcctggcaacaggaaaagaaactgaggcacagagaggctaagttatttgctcaagatcacagttataagcagtggcatgggctgtctgattctagccagtgctctccatactgcactgtattaccaccaattgaggggctgcagtgggaagggaaactttagtgtaacccccatgaggatggggccttgtctgtgtttctcaccactgcatcccagttcctggtacccaatggtgacccaacatctatttactgaaggcatttgttcataaatggatgtgctggttttgcttgggttggggggcaaagggttgccttgcacaggacagttgagtcagcggggatctccttcctcaattattttctcaaaatcccactgtgttgtttccagaagcttcagtcctcaaccttggccatgctctccagttctgtggttcctactttcttcttccttcagaggagacagggcttgttccagatgtgggaagaggtggagaaagcaaacacagaccccaca

SEQ ID NO: 316249 - DNA, 4001 bp, Homo sapiens
atgtgataagccactttaatagaatttctagatatttagtggcacaagtctacacaaaatgaaattataaagttcaacatactgccagatgcccagcatgtatgttgaaaaggtcttacaggctgggcgcagtggcttacgcctgtaatcccaacactttgggaggccgaggtgggaggatcacttgagatcaggcgtttaagaccagcctggccaaatggtaaaaccatgtctctactaaaaatacaaaaatcagtcaggcatggtggcacatgcctgtaattccagctactcgggaggatgaggcaggagaatcccttgagcttaggaggcaaaggctgcaatgagccgatatcacaccactgcagtccaggatggacaacaggcaacagagcgagagactgtcttgaaggaaaaaaaaaaaaaaaaaaaaaaaggaaggtcataggtcataagggcgatttctatggctcagtccaacttaagatctcttaacagtggagtttgagttttctattttctttttttttttttttgagacagagtctcggctctgtcacccaggctggagtacagtggcgcatctcagctcactgcaagctccgcccaccgggttcacgccattctccactttggcctcctgagtagctgggactacaggcacccgcccccacgcccaactaattttttgtatttttagtagagatggggcttcaccgtggtgtggatctcctgacctcgtaatacgccggactccacctcccaaagtgctgggattacaggcgtagccaccgcgcccggcctgagttatttctgttttcttatgtctttctatgtctcacaatgtctgtaagctttatttctataatataaaaactaaccactgttccacaaacctggccagtattcctggaggatataacactgacatcagcagggttttcaatggcaacaattgcacgagctgccagcagaagcttctcccaggtcctcttgagatttatgatatagatgcctaagtgagggcagaaggatttgtaacacttgacctggctgtgcaaacattcttctcaagtttactctatgtggcagcgagtactaccaaactccagtcatagaggcaagctctactggtgttagcgaaaatcctgccattgatatagcacacttccgacactcagaagttcatgagccaagactggcctccaccctgagctttaatagtgtgcagcctagattcagttggctaaatccatctttcctttctctttccctgtacttattccatcattggttcttaataatccacttcctggctttctgccactctttcccttttataatctgcactgatgcaagattcatcctaaaactcctttacagcatgtcactcccaagtccttggtagctttatctctaaaataagtaagtgccttagccaacttaatgccttccatcctctggttcttccaaaccatattgttcattcccacctcttaccccactttccactcaaaattcagttcaatagcctgtgtaagtacctatgaagttgaaggcactatgcgagctattagaaactcagccaatgaactttctcatgttcatgacccaacccaagtcccgtaactcagacaactgacatattcctcccctggagcagaaatcttttctctcaataacaagaacatttatttaaagtatgttttcaacgtaggggtctggcttcatttaaggaagatagaaagaaattacccagaactaaccacgagaatagcaagctcaaaatttgtacttacagctggagtaacaaaaaattaaagcaatgactaaccatcacttttccttttatagatgtactgttccatctggaagtcaagattggtgccacctaagtgggttcctgctgcaaggaacttaaggacatcctcctccttcatttgcaggacatcaagggctccggacattgtgaaaatttccctttaagttacgacgggaatctgaaataagagagcaacctatttcttttcattccattgagttaagtagggcacacccttaaaagcaaccaaaaactccatctgctatagtgtcaggcattgagcttacagtgtagtgaagggtaaacagaaagttaacccatacatgtcgtgtattacggaacagcgcacatcttactgaggaaatagtgtggacggcagagtaaccgagtaataaaactacacgaaattagcgaatggaaattcaacacttctcaagataggaattaaggaaaagttgtggatgcgccaagttaacaactagatacaaaagagcagccatgtttggaatatgcaaactaaaggcaaaaaaggcatgaattgttttcagacattttcaagcagattgtaggcggatgctttggaattacttcgctgtgctgtcaccacttgtttgtctaaaaacccgagaaccttaactcctgacccgcacggcgcgaagggaaaacccgaccagcccaagtagctggtgtaaatcagcgcctgggcctagactcaccgccgtgtgggactccgaagggatagcaacacaggatgttagcccgctttctgcactcccgcccacccgcggcctggtccgaaccccagctcggagcctccgctggagggcggcctccacccgctcccggggcactctgggaacccgccagcccgagcctggccacgtgcgggccgcaggcctaaggtggggcgcgccgggcgggagacagatccagtctgaccggctttcatcactagtcttctcacccttcatttgagcaggaaaagctcatttttctagccctggaaggcgccagggacgctacacggaactcacccagaacaacgccgtatggacccctctgcaggtagcacggaaaagacaggcggcaggaaatgacgtccttatgtactccgttgtcagccaatggcaaagaaagtcgagcggaagaagggcggagccggagaagaacgctgccgggactgggctttttcttcaggaaggcgggcttgcgccgcaggagcgggcctctgggctgtagccggtagcggcatcctggtcggatctggggcgcttgtgactttggggtttctagtgccacagcgacgccctgtgcataattcctgtccagagcgcggaactcaagttagtcagccaggcggggcgttcttacccagcccttgtacctgcgaatatgagcggctttctagcctaagctgccattttgttacctgaaaagtaggaaggtttgttcgacacaacaaattgttaggtaaacaaaaacttgaagatttattttattttattttcctggagaacagtttaacaggacgtaattcagatttaaatgttcacttaagggaagttttctctgaaaaagttaaaaaagataagattgaactgatcgtatgcgttatgtctatctcatgtatctatccatctatcacctgggggaagtttccctgaaaaagttaaaaaggacaagattgaacagatggtatggattatatctatcttttttttttttttttttttggtagaagaaaaattttgcaatatccatcagtaggagataagtttgccgggcgcggtggcttgtgcctgtaatcccagcactttgggaggccgaggtgggtggattgcctgagctcagaagttcaagactagcctgggaaacatggggagacccccatctccacaaaaaatacaaaaattaaccaatcatgatggtgcgtccctgtagtctcagctactcaggaggctgaggcaggaggatagcttgagcctagaggtcaagtctgcagtgaatgtgattgcaccgctgcactccagcctgggcaatagagcgaaattctgtctccaaaaaacaaacaaaaaaataggagttaattgaaggggcgcggtggctgtaatcccagcactttcggaggctgacgcgggcggatcccttgaggccaggagttcaagagaccagcctggcc

SEQ ID NO: 316250 - DNA, 4001 bp, Homo sapiens
tcctggaggatataacactgacatcagcagggttttcaatggcaacaattgcacgagctgccagcagaagcttctcccaggtcctcttgagatttatgatatagatgcctaagtgagggcagaaggatttgtaacacttgacctggctgtgcaaacattcttctcaagtttactctatgtggcagcgagtactaccaaactccagtcatagaggcaagctctactggtgttagcgaaaatcctgccattgatatagcacacttccgacactcagaagttcatgagccaagactggcctccaccctgagctttaatagtgtgcagcctagattcagttggctaaatccatctttcctttctctttccctgtacttattccatcattggttcttaataatccacttcctggctttctgccactctttcccttttataatctgcactgatgcaagattcatcctaaaactcctttacagcatgtcactcccaagtccttggtagctttatctctaaaataagtaagtgccttagccaacttaatgccttccatcctctggttcttccaaaccatattgttcattcccacctcttaccccactttccactcaaaattcagttcaatagcctgtgtaagtacctatgaagttgaaggcactatgcgagctattagaaactcagccaatgaactttctcatgttcatgacccaacccaagtcccgtaactcagacaactgacatattcctcccctggagcagaaatcttttctctcaataacaagaacatttatttaaagtatgttttcaacgtaggggtctggcttcatttaaggaagatagaaagaaattacccagaactaaccacgagaatagcaagctcaaaatttgtacttacagctggagtaacaaaaaattaaagcaatgactaaccatcacttttccttttatagatgtactgttccatctggaagtcaagattggtgccacctaagtgggttcctgctgcaaggaacttaaggacatcctcctccttcatttgcaggacatcaagggctccggacattgtgaaaatttccctttaagttacgacgggaatctgaaataagagagcaacctatttcttttcattccattgagttaagtagggcacacccttaaaagcaaccaaaaactccatctgctatagtgtcaggcattgagcttacagtgtagtgaagggtaaacagaaagttaacccatacatgtcgtgtattacggaacagcgcacatcttactgaggaaatagtgtggacggcagagtaaccgagtaataaaactacacgaaattagcgaatggaaattcaacacttctcaagataggaattaaggaaaagttgtggatgcgccaagttaacaactagatacaaaagagcagccatgtttggaatatgcaaactaaaggcaaaaaaggcatgaattgttttcagacattttcaagcagattgtaggcggatgctttggaattacttcgctgtgctgtcaccacttgtttgtctaaaaacccgagaaccttaactcctgacccgcacggcgcgaagggaaaacccgaccagcccaagtagctggtgtaaatcagcgcctgggcctagactcaccgccgtgtgggactccgaagggatagcaacacaggatgttagcccgctttctgcactcccgcccacccgcggcctggtccgaaccccagctcggagcctccgctggagggcggcctccacccgctcccggggcactctgggaacccgccagcccgagcctggccacgtgcgggccgcaggcctaaggtggggcgcgccgggcgggagacagatccagtctgaccggctttcatcactagtcttctcacccttcatttgagcaggaaaagctcatttttctagccctggaaggcgccagggacgctacacggaactcacccagaacaacgccgtatggacccctctgcaggtagcacggaaaagacaggcggcaggaaatgacgtccttatgtactccgttgtcagccaatggcaaagaaagtcgagcggaagaagggcggagccggagaagaacgctgccgggactgggctttttcttcaggaaggcgggcttgcgccgcaggagcgggcctctgggctgtagccggtagcggcatcctggtcggatctggggcgcttgtgactttggggtttctagtgccacagcgacgccctgtgcataattcctgtccagagcgcggaactcaagttagtcagccaggcggggcgttcttacccagcccttgtacctgcgaatatgagcggctttctagcctaagctgccattttgttacctgaaaagtaggaaggtttgttcgacacaacaaattgttaggtaaacaaaaacttgaagatttattttattttattttcctggagaacagtttaacaggacgtaattcagatttaaatgttcacttaagggaagttttctctgaaaaagttaaaaaagataagattgaactgatcgtatgcgttatgtctatctcatgtatctatccatctatcacctgggggaagtttccctgaaaaagttaaaaaggacaagattgaacagatggtatggattatatctatcttttttttttttttttttttggtagaagaaaaattttgcaatatccatcagtaggagataagtttgccgggcgcggtggcttgtgcctgtaatcccagcactttgggaggccgaggtgggtggattgcctgagctcagaagttcaagactagcctgggaaacatggggagacccccatctccacaaaaaatacaaaaattaaccaatcatgatggtgcgtccctgtagtctcagctactcaggaggctgaggcaggaggatagcttgagcctagaggtcaagtctgcagtgaatgtgattgcaccgctgcactccagcctgggcaatagagcgaaattctgtctccaaaaaacaaacaaaaaaataggagttaattgaaggggcgcggtggctgtaatcccagcactttcggaggctgacgcgggcggatcccttgaggccaggagttcaagagaccagcctggccaacatggcgaaacccggtatctactaaaaattcaaaaattagccaggcatgcctgtaatcccagctactggggaggctgaggcgggagaattgcttgaacccaggaggcagaggttgtagtgagtggagattgcgccacttgcactccagcctgggcgacagagtaagactccgtcaaaaaaaaaaaaagtgcaggttcctctctggggcctgctgagtcaatctgatttctgagcccaccctaaaatgaactcgtagacccttatggccactcttccaaaggacagcacatccaggttctcctgcaagtggctctgcagctccactgaagccagtatgattttctgaggagcttggaaacccttggaccctagcacaggtcacccccaggctgctctgcttcatcacccaccaaggctgaagcacctggggcttgagggacaaattcagagaagtcacagccccttgcggcaaatgcaaatgcctcccgcttctacgctttgttatgggaagaggaggcattcagtttgttggcagaaactcaggccacaagcctcctcagaggcccctgagtcccaaaacaatgccctgccccctgcacccaaatgtactcctgcttaacccttcacgtgtggattgggattgctgagtagtgagtgcagctctgcagggttcctccaggggcctcagccttggcattaggatcacctgggcagcttttaaaatcttacacctgggctgaatatatcagaatctctgagtgagacccaagcatcagtagcttttaaagctcttgtaggggcttcccctccaccctctgagtgttcactgctaaaatgaactgacaatagacaaattaacaggagaagaaacatacactttttttttttgagacggagttttgctc

SEQ ID NO: 316251 - DNA, 4001 bp, Homo sapiens
ctgagccctagggactggctcagctctggcagcactgagaacaacgtcagctctcctggttttcctggaaagtaagaaagaaaaattacaagaggccaaagcttcatgccttcacttttccctccctcagtcacgaaacccccttccgctgcattcccttcccacatccccggcccatacctgtcactggtagaccctgtggcttgttcaacgtcactagaggtcctgaaacatacatcacacgaacatcagcaaaagcaacggtaaccctttatgcagcactaaagagtttccagagcactttctcacgcatcttagcacatgtccccatcatgactctcagacatgagttaactaccccacaccaaattcaacttctttctgttcctctgccacctcagagcctcggcacttgctgtttcctgtccccaaatttcccaggtctggctccctatcatcttggctcaaatgtcacatcacggagaggtctgaatctccaatctaatgtctgccttcctcctgcagttcctcaccatcataacaccctgttttagtttatgcatagcacttaccactagtaacttgttcatttattttctgacatccatttctcccgttagagagaaatccatttctcccctgagagcagaaaccatatctatctttttcagcactgtatagcctgcctagaacagtgcctggaacatagcatatgttcaagaaatagttgagaaaaggaataaatcactgaatagagagtggggttcagagaaattcagttattttcctaaagccgcacagcaagctgatcacagagcctaggtatgtctgactccaaagcctgtgttttgtccgtcgataaataatcattatttatttatttatttatttagactgagtcttgctctgtcatcccaggctggagcgcagtagcacgatgtcggctcactgcaacctctgctatccgggttcaagtgactctcctgcctcagcctcccgagtagctgggattacaggcggacgccgccacacctggctaatttttgtgtttttagtagagacggggtttcaccatgttggccaggctagtctcgaactcctgacctcaggtgatccgcccgcgtcagcaccctaaagtgccgggattacaggcgtgagccaccgcggccaataaacaataatctagtatagcaactcccgtaactgagcgccggctatgtgcaaggctcggtagttatttgcatcttctccccactcttaaccctactgcatcatggcagtagggttaaaagcggggagagggtgcaaattaggtggcttgtcccagctcatgctgctagtgggaggcagaagcagggctgatcccgtggcttcaatggagagcccaactgcacgccgaggcagtcccctcccggtccttgtgcggccgtgcctctcacccctcacctttccggtccaccacggctgcccgcagcgcatcaaccagctcctcccgactgaggttttttggcagcagccccgcgaagggctggtccccgaggggccccgaccgttggcaggagccgcggggttgcctctgatgcctggacaaggagggagaagcaatgggagtcattccatcccgaggtgccacccattcctatctccggacgcctcttcccaaatcctgcggcctctgacaaatgcctcacaatgtctgggctgacctcgaaaattcaggtacgaccggtcccattctacagcggagggcaccgaggctcagagaggccaacggggctgttttcgggtaacatctacctgatccagatcccgcacgtgccttccccctgccctagcctccgtcccgcatgagagagggggtacttaatcaccgggcttcggtgccaaagcctgcgtcctcgggcactgggcggacacccaggccccgccgccagccactccagaaccggcccaaaacacggcggccgtccatctcccgagccaggacagcgcgcatgtgcgtccagaggggcagacccgcgctccagccagcgcgctgattggtcagctggagtgtcaatcggaatggtgaccgggcgggactcagagcctgaggaggcggggcttttcctccgcccaggaaggaaatgcagaaatgccttcctatgcttttagggagagcgctgtagcagaagaatttgatctgatcaaaaaacctgtcttagcaaaaaacctgaagccgcctttgcaaaaattatattacaaaattatgacagcgaaagagatctgatctaaccaacccgcagcttgcctttaacctctaaacggtccttggtcattcctgggcttgggccaagctaactttgggagaaattagttcgtagtctaaatgataattgcccttcccccgaactaaactggcttcatagagttaatgaaaggccaccaggttaggagtagtagagggacctgaattctgctaagggttagaggtaactgattaccagcggttattccggaggtcacagtgtttgcagcttccccagctcacgattgtccaacctgagattggcctttggagatgtctttccaggcttttgcatttctgacggccggatcaccccacccggaccctcaactcttggctctactagtcctgtggcccctcgaagtcaggagatcgagaccatcctggctaacacggtgaaaccacgtctccaccaaaaatacaaaaaaattagccgggcgtggtggcgggcgcctgtagtcccagctactcgggaggctgaggcaggagaatggcgtgaacccgggaggcggagtttgcagtgagccgagatcgtgccactgcactccagcctgggcgacgagcgagactccgtctcaaaaaaaaaaaaaaaagaaaaaagaaaaagaaagtagaagaacacagaaaaaaaagaataatataatgactgcccacattcctaccatcagaattagtcattgtgaaacaatatatatatgtataggtttcctgtttttcttgtttaagaaatgaaagggataaaagtaaattcccctttactgcgtgcttccagttttcactccctccccagtctccactttgagtttggtgtgaacattttcctaatgtgttttggtttttgttttttggagacagagtctcgctctgtcacccaggctagagtgcagtggcccgatctcgactcactgcaacttccacctcccgggttcaagcgattcccctgcctttgcctcctgagtagctggaattacaggtgcggtgcccgccaccacacccggctaattttttgtattttagtgacggggtttcaccatgtcgcccaggctggtctcgaactcctgagctcaggcaatccgcccgccttggcctcccaaagtgctaggattacagacgtgagccactgtgcccggccactaatgtgtttttttgcttgctctgtcatccaggctggagtgcagtggcacaatcacagctcactgcagcctcaacctcccaggctcaaacgatcctcccacttcagtctcctgaatagctgggactacaggtgtgcaccaccatacctagctttttttttttttttttttttttttaaagatatggggtctcacgatgttgcccaggctggtctcaaactcctgggctcaagataagaaaataaaaataacaaaataatttttaaaaaatcaaactcctgggtttaagggattcacccacctacttcggcctcccagagtgctgggattaaaggccgcacggggcctttgacagacacttctttttttttttccttcgagatggagtctcactctgtcacccgggctggagttcagtggcacgatcttggctcactgcaacctctgcctcctgggttcaagcaattctcctgccccagcctcccaagtagctgatactacaggcatgcaccatcatacctgcctaattttttgtattttttagtagagatggggtttcaccatgttgaccaggctggtct

SEQ ID NO: 316252 - DNA, 4001 bp, Homo sapiens
caataaccttcggattaagaaaagtacattaatggctgggtgtggtggctcacgcctataatcccagcactctgggaggctaagatgggcggatcacttgaggtcaggagttcgagaccagcctggccaacatggtgaaactccatctctactaaacatacataattagccaggcatggtggtgcaggcctataatcccagctactcaggtggctgaggcaggagaatcacttgaacctgggaagcagaggttgcagtgagccgagatcgcaccactgcactccagcctgggcaacagagtgagactctgtctcaaaaacaaaaaaaaaaagtacattctttccatgagcaaattaaggcaacacatactcaattttagaagcgagttctaaagtcaactcatagggaaggcactaggattctctggtccaagagcctccaacccacagggtcaggcctgacaccatgcctgaccctttgaaaacctgcaagcaaccacacccatcacctgcagaaatgagggaggcatccaaagccctctacaatctacatgcacttatgaccagtcctcctgtttttgtgtgtggtttttttttagagacaggatcttgctgtcacccagactggagagcagtgcatgatcatagttcactgcagcttcaactccctgggaagggatccccaaaccttagcctcctgagtagttgggactacaggtgcacaccaccatacccagctaactttttttttttgtacagacaagatctcgctatgttgcccaggctggtctcaaactcctgacatcaagcaatcctcccgccttggcctcccaaagtgctgggattagaggcatgagttaccaggcccagccccctttcatcttttctactgcccattctggcacacttacacctcagactttcctctgatcactgaatgccttccctacctctccgtgagagactcctcttcatctctcaagaccctatttaaatgtccctcctctgttcccagaacacacaactataaaatacacacctcactacaacacactctcttcacccgcctgcctatctctgcacttccaacagcaaaggcagtgcctggcatgttaagagacggggagcccagtaattgtgaaattgcaggaaaactggcaagggaagaaggatgcaagaaatacttgacagctttgttctgttttcctgcaatttctcaatcagtccagtccctgccaaaacctaaggaggtctcaatggcctcggattggggcccagggtccttcccacccagagacctcgcagaaacaagactttgcaggaccagaaactaaaggaaacagccacgatctcagagccaagggacagagtcttggattctaggctcagttctgttcggactcactcagtcttccgtgcaccatgggactcagttttccctcccactatgtggaaaagaatagctcacctctcgctctcagagtcgctggagatctcctcattcatcttgccgccacccttggatttgcccctgtcccccgcagagtcggcctgggaattatacggtcttttctttggtcaggggtccagaccaccctggcattgaccaagggcccccccccctcggttccctcagaaccccaggaatggggaaggcggtggttcccgggttaagcgaacggctttctaggatttggcccgcggagagagggacgaagctgactccagcaggggtccagggcgaagggctggggaagggccgggacccaggtcccctggatgggatgacggttgtcccagtagcagggctgaccgcggccctcagaagcgccatgctcacctttcgccgccgcttgccggcccccgcgccagccccggccccagaggccggctttccccgcttacgagcagccgctgttgccgacatgctgcccaccaggcgtgtagcagcggccgcagaactcacgtggcagctgaaccctcccagctccccagccgcctggcaagaccccgcgtattgataggcttccaccgcccgccgggccccgcctcctactgctccattgggtccttctgcaggctctgccacgcccccaggcacccataggatgcacgcttgtagccccgcctcctgaagttcctaggctcccgcaccaggctcgagtaggaagcccgcatctccacggcgcttccggcctgatgctgtggcgcttgcgctctgctgctggcccacttcgaagtcggagcaagagccttctctgtgtttgcgccccttggccgctggggggcgccagagacgcggcgccctttcgcgttctggaacgtgactcctcccctccatgggcagcccggcgctagacccaacggggatccaagcagccccggggagagggaggctgcgtctgtatccgggcccaaggtcaccgcgcgaccggcagatgcgtgctgcaggccccggccacatgagcagcgctacggacgcgactgccccggccttggatatgccagatcgagtgtccacccgtccgtgggactggtcgcctgactcggcctgccccagcctctgcttcaccccactggtggccaaatagccgatgtctaatcccccacacaagctcatccccggcctctggcgattgttgggaattctctccctaattcacgcctgaggctcatggagagttgctagacctgggactgccctgggaggcgcacacaaccaggccgggtggcagccaggacctctcccatgtccctgcttttcttgggtgagtgtcctatggtcctgcccacggcagggcagggcaaggcctggtgggactggcctttgccctctatcagttcaaggccactgatccggagttctggctcctcagaactcttgagtccattgggaagggcttctacagctctgggttctaagctccgggaggataatctggccccaagaatcctgcccccaggatcctctgcccaccctcccccatagctcggtgactcggcccggcaaccatgccagggctgaactagctgacacagggggaggagccccgaagtggaagagagagagcctcctttcactttccctacccctcaggacacacaggtgagctgcagagggtagggagccaggcagaccctgttgaccagagtgggcagactggacagagtcctaaccttgcacttgggactggggaaaggggtgtttctgagtgacaaagagctgggtgtggtctggggctgggaatgccgtcagagtggacacaggatgcagtgggaggccaccgaagggccaacccggggtggggcaagttggtgctgtgctggcccagggcaggggtggggactgagagtgggtcgttggggatgaggagaccatggaggcctaagggcctctctgtgccccaggacagccatggctccaaagccgaagccctgggtacagactgagggccctgagaagaagaagggccggcaggcaggaagggaggaggaccccttccgctccaccgctgaggccctcaaggccatacccgcagagaagcgcataatccgcgtggatccaacatgtccactcagcagcaaccccgggacccaggtgagctgcagtccccagtcaggcccagagcctgcccactgataagcacaaacacacccaggccacccccttaggactctgttctggttttggagcccaaggcccccaggtaagcgccagagcaaggccatgttctcctgaccccagacatcagggctgtgtcccgtcaggtccaggcgggtcacatctgcccttcagaccccatgcaggcctcctcccaccgcacttagggaaaggctgtgactacatcagtctcctgggcgcttgcccatgtcccctcagggcagagccatgtccctctcagattcccccatccagggcccagctgtgtcccccccagcaccccccatacctccatgtcagggtttagccatgtcctctcacaccgcatcccctagggaaga

SEQ ID NO: 316253 - DNA, 4001 bp, Homo sapiens
aaactcacccaacaactcccactacagaactgaagccatggcatgtaatgactacaggaggagatcaatttacagaaatatcttaatgtaaagttcacgtgcctgattgaagaggtaaagccaacatgtggtcattcaagaaaagagaactcaaaggactacacaagtagttcctttgtccagttattgataagggtacaagaagcagttatctctttcagaaaacaggcaatcagtttgaagaacaaagatttccaaaggacatgatagcttataattacttctccactactcactcagtatatcaaactataattttcttgattctggacacatggccagaaaaagtgaaaacaatggttatttcaatgggaaatccacctcaaagaagaaaagtaaaactggggtgaaaactaacatattaagaaatccataaacaagtacacaactctttatctcaaaagagataaagaattctgtcaaaacacttctcccatcacaattaaaaacttgcaagcatctctctttttaaaaaagcatgatcaatcataggaatttatccccaatggtttgaacatgaaagcaggaaatacaactatagatctactataaacaacccgctttcagaacttttccaattcataacacccctctttgtgagactggttgagttggcaaggccaattaacagaaggtgccagctgtttttgtcgtttcagattctgacatttttagccctcttattgaaaaacataaagtgttatatcacttagcatgaaatctttgcctgcaaagaaagtgaatatttataaactctaagactagagaggctcttaaaggatacctagtttcccccaaggttgcaactgtcacacctgctccaaatcttaaacctgggaactctgcttacctccttcacttagaacttttataatacatctaagttcaaagatgacaactcgaatgctttcttgtgacaacataagacatttgaatttatttatctactacctagttagctggaacacaattgggttactgctaattctgaaagtgtaaaaaaatatttttttgtttaggtttccagtgtgcatttaaagatacacaacctctgagagagaaattacgtcaaggttaacctaaaatcaagagcaggcaacatgccttacggtgcattgtaacatcttgcaaaagtaaacagagccatatgctcttggtcacatgccaccagtacagaagtcaaaggaatatatagtgtgtttaaggcgagcatatttatatttcaagagaggaacatctatttcaccctgcaccacttctctcagcaagccagtgtgagccagaaagggtagggcggaatcagaaagagagctggatctaaggcagggacagtggagtggatgggatagagggcaccagaatccagcctccctcttgctccaccctacctagagctagtgaggaagcgccaggcttatattgcaagatgagccaggaaacccaaaagcagctatgaagaaccaggaacgtggggcgaggggaggagtcggcgaactctccgacatgtcctcaagacagaaggccaagcttgaggcctgcggccacccacccaccctacagccaccagccttgacccaaggagtccggagcctcccaggtgcgggacgcatgcgcacggtgacactgcgcacgccccgaggccgcagcccaccctccacagacactgagccgcaaactgcgccaggccccgcgtcgcctctcgccggatcagggcctcggagctccgcagccacggctgccgctccccaggccctggtcgtgggcatcacctgggtccagacctttgggctcacacctcccgttgacgtgcaagcgccgcagtccctgagtcgtttctttagatcagggcgccgccggcgtccaccgaacttgcttcagtttaagctcagcgccttcctggttctagcgccaggcagcttcagccgagatatcgagtgcatcgatggacgctgccaggcgctgggaatgccgagggagtagattgtaacgcggccgattttttgtttggcgtttgttttgcgtgcctgtttattttgattttattgttaccaaaagcaataaaggtgggactggagagtgttattgtcttagtagtcgtcgttatcgtcatgggtaatcagtaaacaaatctgcatcgtaggaagttttgtttatgacacctacccgaaacaaaattggttatctcacgctgggggagggggaaactcgcccaacgataataaatcatgggagtgtgtctgtatagagtcgtgtgtgattaaattgtaatgatttatttgcaaaaatgcattaaaagtcggtgtttcttctgccctgaaggtgaaggcactcacaagttgagtgcaaattagtttctcagattaaagtaactggttagtagaggaataggagagagctgcctgaggcgaggcggggagcggtttcttctgaaagagaactcaaatttataggtgtgtggagtttttttatttaaaccaatagaaattaaagagactcagcattttctgtaattcatactacattacttatttttccttacatggaaattttttcctcatttactcttaagcaaagctaaaaagataaataaattgttggcctgggttttggtcgactatgagaatcaactcattcaccactgctagataaccaagctacagttttccgcagacatttgagatggtgaaaaatcacctccacaatatatttttcgtaaataatgtaccttaactagccagttttgaggcaccgttttaaaacttaactactacaacactacgtgtatattttaaataattcaagagctggggaaacccttggggtcctgaattttattggaacctgtgcatctgtccacagactgtcagctgagctttaccataaatgcttttttttttttttaaacaaaaactgtattttgaaatgccctgtttctggaagatatttgctgtttaatgaaacaacatcattggaactttgtgagcatttattaatgtatgaatttaaaaccttgaaatattttttaaagtaacttcccttaggccagtggaaatctgtggtcagacactaaagatttctcatggctccatctgttatcaacactactattcctaaatatgcaatgagccaaaaagctgagatcatgggaaaatttattggtttgaattacacaatagttgtgtctgtgacttccctgattaccttcaaagtggtcatctttccctcaagctcagtagatgaaatatgacttcaaacctaaaagtcatgtacttaaaaaggcaaacaagtagctggtgggtctcctgattccttaaccgacttctaacagtggttatttttgagttatttgtgaatatgtatttaacacctcagtttgagagcaccttgagcaccgtatcctcttagctctccctattactggcccttctgctaaataatcttaaaaacagattttcataaaggactaaagttgtatgattattttcctctgataatatcagaaagtagttacaaagagtaacccaagactcaatgtgaaattgtttctaaattcgtataactttgaaactttgtcccttttgtggtgtaacaaaacaaaagcaagtactgataacaatgtattcatacctaaaagctatagctgcggaaaaattatagacattagctctcctaaaagtggcaaaaaatgaaatgttttaaaaagggaaaacaacgtttctaaaaagcatgatatacataatccttaaactcaccaaacatgaacattttaatgtgagtattgtagtataacataaggttatatccagcttctatctacatctatttgagaaacactaatatattaagttataattgtgttctctttttgcaagtgtttcaggttgttttgacggaacttcttaaattatctgctaatttgttttgatgccttaaccaatata

SEQ ID NO: 316254 - DNA, 4001 bp, Homo sapiens
atggcgtgaggggacgtggaggctaagcagagcctggaggtggaggaagtgtgttgccggcgccctgggttcattagctttccccaggaagccactcagccttgcaagtgcccctaggactacagcaggttcctcaggatgtcaccgggcatccagcagtgctctacctcctcagtgctttccagaggcctaactcccaccaccccagcattgggcgtcattcttattcctcatgggcaaaatgcgcttggtgcactaggtgagtccttccttctcacaccagataagaaacacataatccatctgcacatttctatctgttaacactgactgtgaacaggctagatccaaattaggagaaaatgacaccattactagctatcaacgtccaggccagtgtcagagttaatgcatcacaaggcctggaggtggaggcagtctgtgcccagatccccaaggcctgtagtctcccaggcctgactggggccagctggggattacaggtccccagccaggtctggggcagccacaagccctccccactcagcccccacagccttccaggtcttcaagaagctcctgatcctgcctgtaagtgtccagcccttgacacccctcctgtcagccagtttaggagcttcacattttcattctcttcttgttcacacatcttttggggactgtttcctctctcagaccagactacaaaacctggattgaaaaatgtcgtaactagagggacctggaaatcacctaattaatgttttcttttatgctgagacagagtgagagaggcatccatgtacacacagctagaggcagaaccggcgcccagcacgtaacaggtgcccagtaatgtttcctgaattgaagtgaattggctgaaccagggcaagcaggaaggccttgcttctgacttccaggctgcaccactcagcctccccatcttatgtctcaaaggtaagcccctacactctggacccatgaacaagagtgctagaaattcatctcagatagtttttacatactaatcacctagaactcttcttgaaatcagattctgattcagatctaaaaggggcccaagattctgctttcttaacaaattccaggtgatgccgatcctgctgctctgtggaccacaggctaacctctcactgtgcaaaaggagaaagccaggtccaagaagaaaatcgagttcctcaacagccatggagccaatgatagagccagtttctggcacatctcatgtattcaatattttaagtgaaattaagttgagttaaatagatttaaaccggtcccaggaccagagcacggacgtctcgacccccagtgggcctcaaacccttcttctctggttttaaactactttttaagagactgttaaaatagaaaatatgtaaaatgtcagtgtgtaggactcatacgtatattctatgtctttattttccagacggaaaaattgtgactcagagaggaagagtaacacaggtgatcagtagaagagctgaaatccaactcaagtgtcgtagttcccagttagggactctttctctgacttccagtctacgccagcctaatagtgagattgaagctaaacacttgggttctacgtaatcttcctctccttggaaggtgccccagagctagggacctagaggcggcctgcagggatccaccttcctgggctactcacctgcctgaagcatgcaattccaggtactgcttccaaccagggctcagcacattgtgcttgaggttggggtctatgatgaggtcccagctgtcagccggctttgcctcctccatcttctcatagaagactttcttccactcatctgtggtcacgcttttacacatggtctcgtcagtagtgagggaaggcaatttccaccttagtgagaacacggagagtgagggtaggtgcagggcagggcagcgcagtctccacggtctaaaaatcctcatcgacaagaccaggaggaagcaggacccagctccctcctttgtccgcagtggaacctgtttccacggcaaccaggcaggttgccagaagacagagcttggggaggagggagtctctgaagaggtgtttcaaggccctgaactgagattgcagaggcagagtttgtgggtctaaatgatccaagacagagtgggggacctgaccagagattgagcttcagaccatctcaccctggcctggaaagagtatggggaggtgaggactgggaactggctcagtttcaccttgccgtcccctggaggcatcatcagcatctggctgctacggtaaccatgatgccttaggcagccaaggagaaatgagggatggggagatgtaaatttgttagtagatggagcaataataataaactctctctcggcttccccagccatcttgtgaccagcactttgccattttcaaaacacaattggaggtctcttaagttatgattactattgctgcagtacagatcaggagcctaggactcacctagcctataaatggcggagcctgtatacaaattcaagctgttgaccccagaccggttcattaattcattcatttcaaacatatccgagcatgtgggtagggtttgcagacatgtgccaagctctatgtcagtgcttgtagctgactgtgtactgaataactgtgcaataggatccatgctgcaatggccttgtgcaagaacagccacctgtgcacaaaggtaggagcattgcatcagccaggcaggagcagacaagattatttccaagctgattatagaagcgcagaagaggagcaccacccacaggcaaaacagcctttactatacatgcctctgctgctatttttaataaattatttttccttttaaaaaatcatatgggtttattctagaaaaaatacaaaatatagatgaaagaaaagagaagtaagactcttccataaaaccccacccgagatgactactgttaacattacgatatgtacatcccgcttaccatttttctgtacatgtacaagtgtatgtgtgtgtatatacacacacattctgtacaccacatacattctatataccacattgtgacattttcaaaaaataatacgtcatgaatatttttctaggtcatattccgtagtagtacattatgggctacctatattctgttatatggataggcataatttatttagccaatcctgtcttttagggcattttggttttatttcagtttctcacattacactcttcccatctatttgtataaacttgttgacgaagctcatcgcatgcattagaaacaacacttcctacaattggaaaacacgtctcttgactccactctctccaaaagcttggtgtggctagcagaatctgagcaggctcttcaaacagtatgaattttggacagccagcagatcttgaagtttagtgatgaaaaagagggacttaaaatcacccatctgataccagaaaccatcttccaagtgcttctcctgccgcttcatggatgtttgatgccttgatttacactattttaacctcagtttattcatcttctcagtgggataataacaaaacagtatctgctgtgattaaaagcaggggctttagaatggcttgcctggttgtggtgttgttgttgttgttgttgttgttacagagtctcgctctgttgcccaggctggagtgcaatggcacaatctcgactcactgcaacctccacctcccaagttcaagtgattctcttgcctcagcctcccaagtaacagggattacaggcatgcgtcaccacacctggctgattttgtattttccgtagagatgggatttcaccatgttggccaggctggtctcaaactcctgacctcaggtgatctgcctaccttagcatccccaagtgctgggattacaggcatgagtcaccgtgcctggctgcttttacaaaaaaaaaaaaatttccatatagactcataggtagcaattctaatgtatataatctgt

SEQ ID NO: 316255 - DNA, 4001 bp, Homo sapiens
cctcttccaccaggcagttcaaatgctttatgttttcagtctccttctacacctttttacatcaaaccaacccagaattgcttcacctacatcaagttaggcctcacatcttaaattcaaaaatatcagatctgggggcaggcgagcttaagaagcatctagtcagccctttatttcactgagaagagacagaagcccagatagtaagagaggcatccatgtacacacagctagttagaggcagagccagtgctcagcacataacaggtacccaatagatgcttcttgagttgatggaactgacatgaatcagccaacctctggttttctgtctttttttcacaaggcaggtttactccaataattccaggtcttgggacaagagtacaaacgtaagctccctacccacatcttgcctcctctgttcccaccctcagcaccattctgcaccatgagaagcttcacacacatacacgtgaacaacccagcctttgtgtccatgttctggctacatctccagagcacagccacttactggcctctcttgaatccaaggacacaggaaaaaggcctgcacagacactacagatggacttgaggtagtctggggaggaatttctgtagtcccagtccccaatcatgatctaaaaggaggaaaggcatgtggactttagacggcctcgtccccttggcctcaaggactctttgccctgtggtagatgtgcagctcctataaagagtgggaccctgggctctaagttcctaaagaaagttttgctcaaagctaaatctttttatcacaggtgcatagataatagagctagagtggattggatctattatctaagaccaaccccctcattttgtaaatataaaaactgagagccagaaagggaaacagacttgccaagtttacaaggctacttagctatatagagccagttcgtagcacacagcaggtggtcaataaatgtttatgtattcagatcaaattggattaattcactaaacatatctaggaacagagcatagctgtaccccctgcattcccccaactcctagattaaaactttccccaatggacctcatggcctccttccttcagttccaactcactctaaatgtcagagattgcagggacatagatgatattacagctcttcatttaatgtggacaactaagacccaaagatggaacataactttctcagggtcacccagggagttagtggtattgctaggattaaaagcaagaactctctgacccagccggctgtctttgtctttttccccatctgagctgacaccagaataagcccgcgactgggctctgtctctccttggaaagtaccccacagctgtgacccaggggctgtctgcaaggtccctccccactgaacctctcacctgcctgaggcgtgctgctccaggtactgcttccagccaggggccagctcactgggcttgaggttggggtctatgatgagctcccagctgtccgctggctttgccacctccatcttctcatagaagactttcttccactcacaagtggtcaagctggtacacatggtcctgctggcagaggtggcagttcgagctcagccctggtgagaacacagaaagagcacggataggtacgggacaattcagtgtctacggtcagaatcctcatcggcaggactgggagtaaacaggacccagctccctcctctgttaccctggaacctgttaccatggtagccaggcagggcaccaagagtgagggctggggagaagggaagccccaagggggagtttcagggccctgagttaggcttcagaggcagcgctgggtaggcctgagaggagcaagcacagtgggaggcccaacctcagaccacactcatctggatttccagaggtctccaggaggcaaggactatttggtggccctgcttcacccaactgctcttctagcattctccacatcatgtgctatggtaagtacgacaccctaggaagtcaaggagaaatgagggacagggaaaggcagagcctgctgcttccacaccccctgatatgctgtgaccatcacttaccatgtgcctagcacaaaccgcttgacctgtgtgctggccaaagcagatcagatcaggaaactgaagtttatgcaacccctaagtggctcatccaagattcagatctaggccttctgaaaccgagctcatttgtttatttattttagtactattgtgctcctaacagggaattgagtgagaagtaacatctctttgcccagggcaatcttagaccagttggtgagctagaatgtaatttcatatgccatgcaaagcacagtaataacatttcagattcatagcgtcatagaactgttagagcccatattcagttcctggtcccaagccaggctaaggtggctgctggggtaatgagtttgttctgtgctgcaggctcctgctgcctccattactgctgagctggagcaagagagcatccgtagctctgtgatgcccaattcaaattctttagaaaccagaggggaatctgacttcaaatttggtaatccaagtgaagacacggttacctgaagggaggctgccttgagcatggaaaagaccaggcatatggctgcttaccctagctttggtccaacttccaactgtaatcatcttacgattctttaacccggaagtctggatccctagacacgcagagttccaacagtaaagagcttcaagaagtgaaacaggttgctaagaaccggaagctcttggtgttgagttgccaagtggttttcaggaagtgtgaagtcagggacaatgtcactggattctctcttgaaatgaaaagtgttactctagcggctttgtgctaaagacctcagaaaggacacaattgtctttgaaccattgactgacagctctagaagagctcttttatttttaaaaatctggtttatttcttgaactcttcatttcttaaccaaaatttattgacattgaattaaaacaactgaggcctggaaatggaaaattactggcccaggctctcaggactgggtagctcaaacctcactggggattcccttagaagccagttaccagaccaggtgagacagagggatccatgaatggccaggaactgaacgaagctgagatgagcttatggcctggcctagaccctcgtgccaggaaagaacctctgagaaatagtatacccttgttcccagaacaaatggcaataaaggaaaaacagaaagaggatgagaattgtcagggtttacctgtattttcttttttcctcaaataatgcaatccccttaggcctagtatcaggtttaatttagcatagcagcttctaagcagagaccaatagaattcatctttctgtgtaacagcactgttttcacttttcatacaatcagtgagcacaattactacttcaattttccgcgaatgacactatcttattccagaacccacgatttaagagctcacaaatgtatattgtgtacagctgtggccacatcacactctggcagcttcattatacatattttgtctaggcaatactttttcaaataaagaaattgttatttctttataaaataaaatactgagcacctgtattctgcaaacaaatcagcaagggggaggggatggataaaagaatcacttttccccttcaatttggaatgcaagttaatgaagagctttgtaaaatatttattattcaattttacttattagagtaatgtaagaaatgccagtgtggagcttaaaatgacaaagtaatgaagagttgaaaaggtgtgtacatcaaaatcacctggagagttctgaaaactgtatacacctctgcttcagagatttcaatacatgttcttgaggagacaaatttgctctccacctactccagtcctgggaagaatcccttctattgccagccattgttactgatgggatatgttgtcccacaggctactggaggccaaaaat

SEQ ID NO: 316256 - DNA, 4001 bp, Homo sapiens
aaagcaaagcttcttcaaatgtagattcaaatgggtcagaggccacaactgcaacagcagccagttcagttcaggaccctgaaatccacaaatgcctataggtgggtgttgattaagttatagactcatgggttggcggtgggagcctgaagtgtccagggttctcctagaggaaagcctttgcctttctcttggctgccgagggtccctggtctgcggtattgcagggagatcacagtgtccagctctctcttcatttgtttcccctccaacccagttcccttgctcaaggtagcctggaaaacttcatattctgaatgccactggcttcagacaggatacaagataatacaccttgtctcagcagggaggagggcagtttttgagctaaggtatctggacaaatacatgtcaggaggtagagagagaagaaggcaggaagcacatggctgcacctgggaaaggaattatgggagaggcagagagctgcactgtggcggagacatttaatgctcaccaaattatccatgcactccctcccacttcccagcccctttgccgtgaggctggggccatgggaccagttgggcaatgagatgaggccagcagtgatatatgttccttccagatatggtcacagaagccttggtaagacattccagctctctcctcctctgcttcggtgaccttgggagccacgtgtaaggttaaatcagtgatatttccaggtttatttgtcactgtggctgagcccccgatgcctggatacagagaaattaggctgcaggtggtgaattggagggggctgggaagagggagttagtccagggtgtgctcctgtatcttgactctagccgcaacccacagggtgaatgcaaggttgaaatgagagggagaggccaagaagctgtgatcactgtgagaggaccttgctgggagtcacccagagtcagcagtgcagaggggcctgggccctgttctgagcagaagtccactgccatcccctgggtctcagtgctctgttcctgtgcttgttcagagttcaaacttcccatggataaatggactgagactttggtgcaatgctccctatggcagctcctggcctgggatagccataggccagtgggagagctctgccccctctatgtagactctccctgggaggggacagcgggtgggacccggcctccaccctctgtgcactgtgggcaatcagccccaagccttggggctccccatttccacctgggaaagagaggatgaggcttaggatgatttctaagactcctattttaaaaagattctatcagctcagagtagagaggggcaggattgctgcctgttgcccaggccccctgctcctccggcctcccccgagggtgtctgctcagtgccgtgagtctctcctcctaggggctccaaggtgggtccagcagtctccctaggcatggggcacatgcaccgcccgtgggtgcaacagctgcccttcctcccctcccctttcctggctgctccctctccccacccccacagactgatttctctgtatccaggcattagctcacaagggtgctcaggcctgctcttgctttggggttcattgtaatagtgaaaaaacgatctttaatgaagttacaacttcttggatgatgggcatcttattacccatagtcttcaatttgaaagcacagaatagaacaagaaaagtaacaggtatacctagtaagaaatgtgcaagaattttctggaacgtgtaccatcacattccccctcacctggcgaaggtccactgctggtattgcatccagcctggcttcaggacgttgggaagaaggcccttgtctggtctcagggtccacctgtgccatggcttcacctcccgcattaactcctgaaacatttgcttccacacttctgtgtccccagccatctctggggctatggtgtgcctgggtgggtcgagctctcctgggccctggcaggtctgtagtgggagatgaggtttctgacttcagagggcaaggactcagacctgccctccctttgaggacctggattgggcccatgaaccatgtctctgccccaaggacaaaggtcagttggctccaagttcagaggatggcactaggctccacaaggaatttcaaaagacacagaacttgtgattttattcatcaaaatgttgccaaagaagagctctaaactccaaatcaggaggagtgaatttcagtctggctccgctgtctacctgcctgtgacctggaacacatcttttcacttccagcaccactgtaaacggtggagacaggctacaggtgttctttccagttctaacattggaaaatccttctccatcaggctgctgtgctcatgctggggaggagaggcacagggaagaaggatgaagtggtcctgggacctcagcgggattcggattcccatgtccttgctccatgctctttacgttccggcagacagccaaggctgcccacccatgagaaaccaaagctgatgcaatcactgtttgcccaggcgacaggtacaagggcacaggtcggtgagaggccattagccctaggcaaacccagagtcactgccctccttcctgagggggttctccatcctctgcttcctgcaagagaggattgaggaggaagaggggagattagggagtgggtactggagtgggcaacactccaggaaggtgcacaagactctgggtgtccgcatcccaagacccgtccacaaactgcatgtgtcttcctcggggccaggcactgacctatgtccctggccacctcccaagaggaggagaggaaggaagggagcagagcaggaaggaaaaaggaaaggaggctggggatgcagggggatgaggaggtcttccagggcagttggaaacaaagccacctccttcctcctctccagcccagctgcctgcagctcttgcccttgggtttagctcctcggcaggctcaagtcctgggtctcccctctttccaagccagttttgtttctcagcattagagctgtccctcagttccaggtggattggttccagcgccccctgcagatagcaaaatcctcagatgctcaggtcccttatacaaaatgacatagtatttgcatataatctatgcacatccttctgtatactttaattgatctctagattacttataatacctaatacaatgtaaatgctatgtaaatagttgttacactttattgattttaaactgctaactaaaaataagttcctaagcccccaaaccaactgaatggactagcttttggccaaggggacccctgagaaacctgaaaaactaaattcccagctatgacaggaggggaggttggaaacaccttatcatactccctccctttgactttagggacaactcaccagcatcaaggttaaaacagagatcataagactgacaaaatagactgcttgttgcaatcagataaccaatttataaacaagacctaaggctatgcatggtaaaagttatgccctacaaaccataatatctcattaaagggagttttattaacctggtataatggagctactttccaacctgactctggtatagcatcgcatgacagagagcagactcccttgactttggcattccttttgctgacttcatctgtatacaaggcttaagtcattgctacatcccgaaagagatgtccacctttgaatgtgaccacatttggaaaaagggtttctgcagatgtaattaagtgaaagatctagagatgaggtcagtttcatgaaatttaaagtttcttttgatggcgggacacaccacaatgacacgaagatagataaaaggcagaactatttgttagttatacctccaaacaaggcaaggctgccaggcaggcccacagagggtgcctgggggcagagcaacagccagctggagctgtgagggacagtttatgggtaggaagttggggagttgcgtggggctagctaggtttca

SEQ ID NO: 316257 - DNA, 4001 bp, Homo sapiens
aatatccagataaggaaactgaatcatgaaaaggatacgcaacctgcttaaggacacacagggtaaatgttagaggcatgctgctaatctcaggccatctgaaattcaactcatttacctgctgtaacacgttgcctctggtgagtagtgtagctaatctctcacacctggagaaacagactgcatccctcatacctgggttgaagatccagtttacatcaggaagaccttgggcaaagcccttcccttctataaccctcattgtttgaatccataaaaaaaaaattcaagggttatattggcagcatcaaaagagacgatgtatgtgaaaacactttgtaaactacaaaatgcttttcaaaagctgattgatattttccaaaagtacactggtaggttgcttttccgatctcgaaatgacaatcaaatcaaatcatcccaacaggagaaacaccttctttctgtttggaggagtgccaaaacgttgtaagacatcatgagtccctcaaaaagctctggctggtgtggacagaaatatttacacatttccctggattagaaagcagagcaacatgactgctatacgggctctgacaagtgacttgagaactgttctggagacgtttaggaggctttatttaaacaacagattctgcagctaaaaataagcatatactgtatttgatacaatatataataatacatatattatttataaatttattattctgaaatacatagtacatatgtatatataattatatatcatttatgtatacatatacatatatattttatcttatcccattatcttatgggaatgtatacgaaggaatacttactctgcctaggagaaccagagaatgcttttaggaggaggaggcactagagtgggccttgaaggatgagcagggaggggtgaggggagggtctgctgaacaagcagaactccatgaacaagagtgtggaagtctgaagatgcatggcatagctaatagtccataaggaatggagtaggccatacctgaggcaggatggggcaggcaggcaagctgagtaataggtcagatgaaaactataccgaaggtcctgtgtgtcatttaaaaataaatttgattatccaggtcagcaattctcaccctcctaacatggtcaaggaaactggttcctgcaacctggaggcttgctgggggttaaagagggaagtggtgagtaagggaggagtattacttggtgactccatgaactgggttttagatttagtttttgcaacatcattctatactattatccccaggccttcagtaaagcaatgttcagagtaactgcttgatcttagccaattcttaagatatttaaaaaaaaaaaaaaggctccgtcccaggcttgtactgaacagtgccaaggcttggagagctggtgcagctgggggaagctggtcaggactgctggggagactgcaaaagactctagaggtagtctggaacaaatgacgtggtgagaaactagaagggaaaatttatggaatagggagccttctccagggttttccagaaatatttacggagggaaacctagtaaaagaagaaacttccagcagttaaacaaaatggaggtttggagtcgtcttatcatgtcgaccctaaagagtactatgaccacaataggatggaggccctggtgacatttactccttcaacaagctctcagaggaataaatcatgctaagctgagcctgagcctctcttctcagaagagctattgcctgggaaacccacactcaccagccaaatgctctctgttggtattgcttccacccttgagccaggcagtctagctgaaggttgccatccaacttcagcgtccatgtggcccggggttttgcctcttggattagttcttgaaatgtctgctcccaagtccagaaatctacaaccattttttccctctgaagctgagagagtagctttcaggtttgctcgtttctcaggaagagacaaacagtttcagtttcggtgttcggttcagtttctgtttctgtgtatggacatgagctgtttttttcaaccttcattttagactgtctgagtacacagaacaagtctttgttctgaaaacagacagcagcaaaactgtgttagttaataggccttgctgagagagagataaagagctctgttctagattctggggtcacatataaattcgcttttattttctctctctcattttttataataggcaaagtgagaggtgacagcatgctggtagccctcgcagccctcgctcgctctcggagcctcctcggcctcggtgcccactctggccgcgctggaggagcccttcagccagccactgcactgtgggagccccttcctgggtaggccaaagccagaaccggctccctcagcctgctgggagatgtggagggagaggcacgggcaggaaccggggctgcatgcagggcttgcaggccagctagagttctgggtgggcgtgggcttggcgggccctgcactcggagcggccggcaggcccccagccctgggcagtgaagtgcttagcacctgggccagcagctgcggagggtgcgccaggtcccccagcagtgccggcccaccggcactgagctcgatttctcgctgggccttagctgcctctctgtggggcagggctcgggacctgcagcccgccatgcctgagtctccccaccctgggctcctgcatggcccaagcctccccgacgagtgccaccccctgctccatggtgcctggtcccatcgaccgcccaagggcagagaagtgcgggcacacacgcaggactggcaggcagctccacctgctgcccccggggcgggatccactgggtgaagccagctgggctcctgagtctagtggggacttggagaacctttatgtctagctaagggattgtgaatacaccaatgggcactctgtatctagctcaaggtttgtaaatgcaccaatcagcaccctgtgtctagctcagggtttgtggatgcaccaatcagcaccctgtcaaaacggaccaatcagctctctgtaaaacagaccaattggctctctgtaaaatggaccaatctgcaggatgtgggtggggccagataagagaataaaagcaggctgccccagccagcactgacaaccggctcgggtccccttccacgtggtggaagatttgttcttttggtttttgcaatgaatcttgctgctgcgcagtgtttgggtctgctctgcctttatcagctgttaacactcacccggaaggtctgcagcttcactcttgagccagcaagacaataaacccaccagaaggaagaaactcagaacacatccgaacatcagaaggaacaaactctgggcactgtgcctttatgagctgtaacactcaccatgagggtcggtggcttcatttttgaagtcagtgagaccaagaacccaccaattccggacacaaaagcactgtttttggcactgggaaaagagtatcctgtagctaagaaacaattcctgcccccacagatgctcacacccaggtggagacagggaggttaggagcagcgtaggggagcacgtgtttaatgctcatctcctacaccccatgtatcctcaccagtcccgcgaaggattattcttggagttttgcaggttaactgcacagaaagctggggtactttgtccaaatcccctcagttaacgagcagtggaagtgagacttgaacccgggtctgtgtgactccaaaacctgccatgtgtccgcccacctcactccctgaagagaagctgagaatggcatttcaggttccaggctggcacactggagccagtgtcagaggaaccgtagggagatttcctgggtcctgaggcaggaggtcagctgcatgaagggattatcaaactctgccctccactctgtaaattatgtggaagggcaaatacgcacaggtgtgggggccgtctttcagtggtaggatacagag

SEQ ID NO: 316258 - DNA, 4001 bp, Homo sapiens
ggagatgtgcgtttatttacagaccaggacctcttccatccattctccctcaatttccactccaactactctcaggtgagataagcttgaattctaacatttaaaaagaattggaagggtctttaaaagatcacctagtctaactctcatttttcagggaggttactgatgtgaccagagtcacacaagaacctggtagctgaggtgggtcttaggcatacagcatcactcttaggcatagagcatgcacttaggcatagagcatgcactctgggtttaaatacatagacttgagttaaaatactggctctcgcacttaccagatgagtaaccttggacctacttatttgacctctatgaaccagaatttcctcacttgaacagagttcatactagtcaatggcacacaggttaaagggtgtaggggtaaagtgtagtgatgcctgcaattcaccttgaaatgtaaaagtggattgggagagggacagatgaaaagatatatgataaagcagcacagtaaaatgttaattatagaatttaggcacacaagtatttacaagtctttcaactttttttgtgtctgaaaactgtcatactaaagcggggaagggacaactaatacgttggatatgacaaggcagtggacatatagctacttagcacagtgcttggcacatggaaagcactcaaccaatgttagctacttgcagtactagctgcttagtaagccagggtcaaacacttcctttttggaaagatgatgctcaaaatggaaacctgaggcttttctttgaggcctttccatttagaaaaatcaggctaagaggcagtagcttaactttatattaagtgaagatttttgtagaagctaaggctctccaaaggccaaggggcatggctgtgaccttagagaacagcaggcagagagggtggctgtatcatcatagagcactgatttgggagtcagaaatacacgtgggtgcaaaccccaggtttaccgttactaaaacgagtgtcaagcatatacgtgaagtgccctctccccaactcaatattttcacctgccaaaaaataatatgtatgtgaaagtacttggcatcaccagcacttagaaaaaggagatttaattggaatggtcaaaaaggatgcttggaggggtggataaaccagattgctcttctccataattcccacttctctccctcagttcccggatcctgggaaccaaaatgagcttttaaagtttagtcaattccctactttaaaccgtcccatagcctgccactgcattcacaataaaatccaatttcctgaccgtggccgacaaagccctgcagtaactaaccccaccaagataagataattatttttatttattggtgtacacgtttatcgtctctcactacactaaaatgtaagctcctatcttaattcccgctgtatcccagtgtcgcgaatagagcctggtacgaattaaggggacggggttgtgtgggtttatatcagcacttgtccatgagttggcaaaccgtcaactgcccccagtggatcgtcactaggtatcctggggcggcccctcacccagctccagggcggcgcccctccccgagcccctggcccattttcacttccctgaggaaataatggcgggagacccctggcgcgcgcatcccgccccgagccaccgacttcagcagctctctcgccgcagcagccctgcttgcagcccccaactccctggtccactggccacacctctcgcgcgttctcctggcccacaagccctgaggccgcctgcttggccaagccgctctcgtccagccccagccctttcacgtggctgtgggaggcgatgcgctgcgtcttcgtagtgctcttcacctcctcaatcttcattttgcagacgccgggagctaaaaccagcgtggaaaaccagcagctaggacagtgcgcccggcgcctgagttaccatgcggccgttactagggcaatttgcaaaggcccgcctagaccggctttccattggtggaagcgggaacacctccgctctccataggctcacggctgcgcccatcgcggctgctgctagagctccggtcacccacttccgtctgtgtctccgggttggcttcccccgtagccggcgcttcctgccgaggctggggtcgggagcacagtgggaccacgccccggatttgatctagggctggggcgttgcacgaggcagtggcccccgggtaccactcctaatccttccgtcctatccattagcacatttgaacgtcatactcttacgcaaatctcaagttattatttccgttttggaaacagaagaactgaggttcagagcttaaactgggattggttactaaccaatgttttctgactcccatacctttgcatctccctggaaaggcccagctcaacccaccaccgtttccgtggaattgtcttcccctgcttctatcctccatcctccaccgagagataaggttcctgctgagttcagttgactgtaaataacattttgcagttttcaaaattccacagccctgtaaggtagtgtaattacgcatgcagctacaaacaagcggaaagaggcccatccgcccaagaaagcatcacaaataatcagaactagaaatcttcaggcttcaaaacctatataataatgctcatcacgtcccatgactccagctgagacaatcagccagcaaattgtcccttcaggtttcataatgatattagcacaacctgcaccacaattgtacttgccatccatccatccatccgttcaacaaacacgagccagacaccacaatgcactggggatacagggataaaagtcttgatgcgtttacttcttgcttagaaaacttgcaacgtgagatgtgctgagacaggtacacccaggtggcgagaagaccagagcagaagcccccggaacagcctggagagccagggaaggcatcatgaaggtgatgttgccttggctgaattccaacaaataggagagatttcctcagaagcaaatggtatgacaccatttttacagaagaggatactaacatccagaggaagggaaggacttgcccagagtgcaggagagtttatgttagaattgagacagacctgaaatcaaatccaattacagtagttccacagtctcacaccgcctttttttttttttttttttttttttttgagacggagtcttgctttgtggcccaggcgggagtgcagtggcgcaatctcggctcactgcaagctccgcctcccgggttcacgccattctcctgcctcagcctcccgagtagctgggactacaggcgcccaccatcacgcccggctaatttttttgtatttttagtagagacggggtttcaccgtgttagccagaatggtctcaatctcctgacctcgtgatccgcccgcctcggcctcccaaagtgctgggattacaagcgtgagccaccgcgcccggcctctcacacctccttgtacatcttgattctaacatttgaatctaggtttctatatacttttttcttttcttttgaatctaggtttctaatgatttgcataattactgggtcaatgtttttctctcccagtaaactgcaggccttttgagggtgtagaccacatttgattgtttaccattttaacctaagtgcctggcacacagcctacaacacagctcacaattaaggcttctcatgaattcaattaaggttctagaccacacacaaacacatacacttgaattcatcagttttgctgcatgtattttacacgttggcttttataggacttggtaatgatttccatcagtgaatggaatcttttggcattttcagggcctaaaagaacagaggccaggccttggaaggctgaggttgttactagggcatgtggttcatcagcactagagacagcaccccacaaagttgcttagcccctcattgacttgttcctggtcattactcttagaaaagaag

SEQ ID NO: 316259 - DNA, 4001 bp, Homo sapiens
aaattctattaaatgacatcagaaaattactcgaagacccttaaagtagacgcctttccctgttcctgaatagactctaaaatattttcactgtaaataattcagtagttttaactaagtttcaacagtcatctgcggctctgaaaaaactttaaacatacatacataccttttttaaaagtcaacaccttccatgtgcttccgaaaaattgatgagtaaggttttttaaaatacatgttaaaagctgaaatgcacttcattatgagataatcattcccagcgataaatcagacataaacttttgaatttggtttacgtttctcttcaccagtaatgttctcaagttcttaggagtttcctaatcatttacttgaacaccatctacggtaacactcaaagcaaaaccacaataaagaggtttggcctctgagggcttctacatgtaaaaaacattactcataaataatatacaatcactactgctttaaataacaaatacatttctaaaaactttcatgccatttgatggaattccctattttagacagcaaaacaaaatctatgaaactactgatgcgtgttttttactttagatatattccatgataatacaaaacaccgacaaaaatttcttaaaacaacgtatggagtaatatttttagtttttgattatttttattcaaaggtatcatcatttaaagagtgcaattcacagaaacaataattaggccaattaatctcagagttagattattttaggttgcccaataatcctatttaatcccaagtataaataaaccaatgaaaccttaacatgacatattcatctaatcaaagaacaatatccagttggaactgtgaagtactactacacagtcacactgaaatgtcaccaattcaaaaataagtacctgataaaatgagacttttggcaatcaactgtaatgttctaaaggatccaccaaaaactcattcttgtctcacacacacacccaatgcctgttcattaaatgacaccaagaacagtttaacttcaaactctaacgccaatgaaacaaattcagacataaattaaaagatgaccaaaagactacatgagtcttgacattttatccaagtatttatgaatgttaaatctaaagtagttaactcgttttaacatcacatgcagtttacgaccttcatcaaaatgaaaaggaattctttcaacattcttttcatcatcacagagctttaaacacaaacttccacagtcactgctcatttcaccattttacaaaatcgtcccccatcaccaccccacataagctagtcaaagaaaaaaaaaactgacagctcagtctcccacaaaatgcacttactttatcaaataccgacatttattttcaagtgcaagaaagtaacagacatttgcagctcaagacaggaaaagcacagccagccttactacccccactaaatttctcagacaagagaaaagtaactcgggacaggcaaattaaaaccattctacacatggcaaaaatataaaacatctatgtcctacaatccatagcgatagtactgcttcctctcttccccagccaataccaataagccaatagacacaagtgtcaaataaatccagtgtccgtttgaaataaaatgaaaacctggaaaaattccctcccataaatcatttagcgaacacaaggcttttcacccaacacttaatacactcaacccaaaaacacacacaacccacccgcaaatacaaaaaaagccgtaatcaacaagttggaaaaagggcagaaagtaaggctcactaccctctcacttaaaaaaaaaaaaaaaaagtcctttaacaaaaggtaacacagatcttcaagtacctggtggaggtgcctttcctcacatcgcagatgctgcatttaaaggcttcagcactgtttctgaaggtgcagacgctacaatcccaaaacccttcgtctgcggcaggtttcgcttgtctttttggccttccgaggagtggagagtgggggaaaagggagggaagaggcagggagcaggaaaacgggggagagacagcaaaacacagacgcgggtgagccgtcgtaatttcgcaggaatccagtgctggaaacttcgctcgggagaccacccacccaccctttccggggactggaagagagagcgaggaagggaaccgggcgcccccactggcaccctgcaagccccgggcccgggccggatagcctcgcacaccaggcggtggcggcggcgccccgggaagggccgcggcgggcgcaggaagcgggcggacttgtggacttgagcgtggggctgggggggccgggaggggagccgcgggccggatctggagggggcgcgcaggggcagcccgaggccggcgacggggagtgggccggctccttccctctccactcccaagctcgcgccctccctccctccccacctggttaaatccatcacagtctccggacgagactagtccccgccagcgccgcctccgccgagtgactgacgaggggcggggcctggcgccgcgcgtcacgcgccgtgcggccaatgggagggcggcggccggcgccgcgagggcggaggcggggcgcgggggaaggcggggcgtggcggacgtgggccgggcggtcggtgtgcgtgcccgggagtgtgtgcgcgctgggggcgcgcgtgcctgtcggtggccccgcggcccggcgcggcggagcgtgcaagcccggcggggcgcacgtggccgcgcccgggagctggcaactggcttcgggccccgcacggcgccccgtgaggctgttgccgggaccccggccccgaagccgccccggggaagtagttccacgcagtttgcgcgcgccgcgggagcttgcaacagcctcaccgctcgcagcgcctcgaggcttgcagtgcccaggggccgacaaggtccacctttggaccgcgttcccccgcgcccctctgttcctctgccatgcggagctttgtatttgcctcttctgaagtccctgcgtccggccgagacgctggcccgaagccccactccctgtcaggcccctgtcgcgggagggaacagtagagaaagggcgtggcataactaaatgcccccaggccagactctgagcttctgctggcggactcctcctgggatcctcctctcccctagagtctaaatagggcgtttccttagggaagttgctattcaaattctggcgaccacatgcccgcattaaaacctcgtgcctcagctccttcatctccaaaatggggctcatcctcccagggttgttttgaatattcggagaaatcaggcatggaaggttcgctgatggatgcctggtattcacgaaggaccaaaacaagatattgggtattaggagctattataactgggcctgaattgtgcaccatttcccccgcgttcgatttttgaagtcgaggaacagggtagtgcccttcactttctgccctgctccaaaaacgcttgccaaattgacttgaacgtgactcaggaccctctgtcctcaggcagggagatctggtaggaggacgaccccagatgataaaagacacagacgcggctgtgctgaagccccaggttaggggagggacggagtcttagaatgctgctaggagttggggcccgggggtggggggattggagttaagacagaccctcagccaggtttatatgcaaatataaaataggttgttatcaggactgccccatggaagggaagcatatcagggcttgccaccagggaagctcactgagactgagcacccagggagcagaaattcctagagatcagtccagggatcagaagggagagaataaaagagagaatgaatgtgtcaacaataagtttgatcagcacgcagtgtcctctccaggcaggcgcacccaggagggccaggagaagcaacactgtttagcaagggtcagcaacctctcaaggcctcaatgccacagctgcctccttagggg

SEQ ID NO: 316260 - DNA, 4001 bp, Homo sapiens
ccgagatcacgccactgcactccagcctgggtgacaagagcgagactccgtctaaaaaaaaattaactgtgtgaccttgagcaagttactttaaaaccccactttcctcatctctacaataggcataatgccacctacctcactgggccccgagaaaattagaagaaattatgtgtataaagcatgtaggggcaggtatatggcaggaattcaatgtcagtccctggttgtcttctgtctcctacctacacctctgactttgtttacccatgtaaacaaagtcacaagctatataagtgcttttaaccaaaaagcctttacaaaaccatgcataatacgttaatatttctaaaattaatgtgatatgagtcgtcttgtattatttttcctaaatcttagtcttgtgttccaagtactaccccaagtagagttttaattcagctaaactacattcagctaactcagctagactaagaaggattaagaatgagcacgacttcataaaaagagcattcttctttggctaaaaactgcaaatccgtacatgtaatgtctaaagagtctgctttcagtaattccatttctacactgagtcaatctcaacacacctcaacaaagtcttattacttaaaaaaaaatagaatactgacaaataatggatgcaatagagaataatttttcccctcaaacactcagaagcaccaccttcagatgaaataaagatactgccataataacaaaagaatgcaaacgtctaggtaccaaggacttcctttttggggggtcgttcctgtcagatcttcctctaaggggtcatttccagaatccacaaagtcctaacataagaccccagcaatttttcaaattaattccccaaacaacaaagctaagcaagtaaatggaaccacaaaccgacccaagactaagttcttgtttcccttcaagatactcaaaagtaggagagtggcccagaagtacagagtcagtccaaactcccaacacacccaatgcaaaaaccaaaaaggtattgaaactaaaaaggtctgctacctggcgattcattcactaaaaatatgcttagaatctaagcatatgctccaaatctacgtcccaagagttggaggctgccacgaacatttggtgcccttataacctccccttctttctctctcgttttttttttttttttttttttttttgtaaaagggtaagcacagagcgtggcctctactggagcatcaaaaccacagcaaagggtttgcaagttcagtctaaaacgtgaatttcgagatattcaaaatcgagggccctagagtgacacacatagaaagcgtcaaaaaaacttcgtgcagcaaggaaaaaaagttgtaagggtgactgactcttctagggagaagggctaaggaggcagtgaggaggatgggatggggtgaatctgggtctatcgcggcggggcagcgagggcggcacgaaggctgacccagagctggggaccgggcagggaccacacctcccagccagcacggcaggcagagaccgggccgcgaggcgaatccgggcgcggggggcggggagggtactcgcccgaggtccacggctcgcagactgatccgccggcggccggaagctgccccagccggcccgacctgcccgccccggcctcggcggccccactcaccgatcagccggcgcacctcgtcctcgctcaggtagagactcacgctgggccccgcggaagccgactgcagctccgggggccgcggggcgggggcggcggcagcgccaggcgcgggcagcagcggcaacagcgcaagcagaagcagcagcggcggcggcggcggggccctcaggccgcgggcccccgggaggcaactccggcccggccgccccagccgcgccgccccacgcatggccgccgccgccgccgccgaagaggagcgtcggccgcccgccgcaccgccgcccacccccggccccgagccgctcacagccccgagccgggggcggctgcccagctcatcgcaccgccggcccgtggcagccagcagtggcttcagacctccggagcgcgccgccgccgccgcctcctcgctgcatcgtccggagttgggggctgcccgcgggacgcgcccgtgcgcgccgccgcctccccgggagcgcgcacgcacctttcgctctgggcgggccggcctgggcaacgcgctggggttttaaagtgcctcggcgggcgaagggctcgggtcaccctctccgcaagagccggtccccgccccacgcggtcactgcgtctaatgtttgcttgtctattgtctgtaaccctcctttcccgacggacgggccaggctggagccaccggccgcgcctgcagctcagtgggcgccccaggtccccggaaacgcctggatgcggccgttctggttgcgaaaaagcagcatgctttcctgtttagtgggaaaactcaaataaatagaaatcatcctttatcttaccatcggtgatcaactttatcgtttccgtatctattattagaatttatactacatatatttgttttccagaaagatcttagcacgctttactaaccctatttttacgttacaaaattttatttatttttatatttttatttatttattttgagacgaagtcttgctccgtcacccaagctggagtgcactggcacgatctcggctcactgcaacctctgcctcctaggttcaagccattctcctgcctcagcctcccgagtagctgggattacaggcgcccgcaaccatgcccgactaatttttttgtatttttagtagagacggggtttcaccatgttggccgggttggtctcgaactcctgacctcacgtgatcaactgacctcggcctcccaaagtgctgggattacaggtgtaagccaccgcgccctgccaaattgttattttttttataatcgttctgcatcactataatcaacctgcctttggggttgttaatctgtggtccataccaggcttcgacagccttccaataatatgaaactgtgtgcaaaagtgtatgtgtctccgtgcgtatttgtgtccacgtccatgtttctgtgtgttgtgtgtatgcttgattgcacacagagaggtggtatgtcatcatttgttctagggagtccttgtgccctcaaagaggttaagaactgcagatagacctcgtgtacttaaaggcggtggagccagccagtgcatggacttccgggcctcctgatgtatttttgtgagccgcccaccatcgcggtcaaacttgcaccagtgccccctctcttggtgaggctccaagggcccctgccctgtcctgggacacctcgtccctgcggacaggcccccgtcctgaccccaaggctctcgcggggccgtgcctcggggagcagctgctctgacagctaggcctggcttcggggcacagttgctccatcgcagtgaggccctgggaagcggttatttttatcctcagggaagggtagggaaaaggagaggctgataaggagggaagtgctggaacttgattttctccctccctagcaagatacacggattccatttagagataggctggcctcaatttgtcaagcttcagcgcctcagcacaaaatcttacacccttcatcctgccggaggaggctgagaagaggaagaggggaggaaaagtgctccatcagagaaggcttttaagccacaaaagtcagcaaaaatacttctgttgggacagccactgctaccagggttctgccaggaagggctggaggctcaaaacatgttgtgtgaacaggaatctcaattcagatgggaagcatttttttaaaggatggcatattctttgcacttttaaaaaagctcacagtcctcaaagaatgaaactcctagcttctcgaggttctttaattactaggtcttgtcagtgacttcttcaggcggcctatgatgtaaacagcagagagctcccactcaggcctggctgggttct

SEQ ID NO: 316261 - DNA, 4001 bp, Homo sapiens
acactctaaacttttttttcagggggaaaaaaagctaggactgacaaatgagagaatgactttcacataaccccagtttgactttatcacccaaataatttaagagtttccacttctcacaaaaatcaatacaaaaacatcattcttactacttcagggacaaatttcctttctcttttatgtatgcgaggatttgggtttgttttaaggtctgaactggttaaatttagtgttctggcagctgaaaaacaatcatcataattctcaagttctccatcctattcaatctttgccacgctaagctgcatgaagccatggctccatatggcttaaacacatttgagacctggtgtaggatcacattaaacccttcagtgcctatcagatacacaataacctaattagctagcagagcacatgtgacagtggcctggccagaaacgcagtggaagacacttccttcaactctttcaccaaagacgaggtgagcactttgcaaaggggaactgggagaaaatagggaaaggtggagaggaaaatgtggagggaagtgtgcagctagggttttcaaagaacattacagtaaacagaaatggcacccacagggggtgcactgtagaaaaagcaatcatcttttttgcaacacatacaatgtggaatagatgacctctctgaattttgcacctctaactttccactgaacctttcagaaagttactagtgaggttgaggtctgaggagcttaagtgcccaaaccacattttggtgtcatttccctgcaaaagaaatgcggtatctatgcctaactgccaaggtattttagctcatatacagggatagataagcttctaaaaaattacatttgtttctcctaccagatattcccaggctgtggccaccagattttcaaacagcctaggggtaaagcattaaacacgaagtgagtacaacaaaattattcacagacaagaaaagtgtggatgctaatgggtaacactaagggaaataaacacatgttgtttttaatccaagacaaaccaaaacccttaaaaacacctattttataactcttaacaaccacagcctctgtatcaaagactcaagaacttggatttaccgaaaagtcaatttgcagtaccaaaattaccgagattagcctctggctgtcgacactgacttaagaacctgctttaggctggagctgtttaaaatttaaaccaaagtaaactccttcaggaccttaagactactgactgtactttaaattttttctgcacactgaagagggggcaggcaggcttcggtacccagataggctgtaagcaaaacaaagatttgttgatttgtgcgtagactctaaattgctgctgtaggtccgttaagtaagagaaaactctttttctctgttaagtcatacagataaatttagtcggtagctctgcatagaaagtggggacaagcgtgccctgaagggccgcatcataacgccgaccccggctcggtgggggccagtcggcagcttctctcttcagccgtgggcgctggggccgagcacggtggagaaaggccggcgagccgctggttcccggcctatggctactcgggcgaggcctaggagaggccgcgccggctgaggaaaaccggtaaatgcgaggagctcccacaccctatctgcaatccgggactcagaagccctccccgaggccagggcccgcacctgccgccccgcccgccgcgcctcaggcctctggcccgtgggactcacagcttcagctgctcgtaggccgccgtcgccatcctgcacaaccacctccttccttctctctccgcccgccccgccccgcgccgccacctcggctacaactctaccggtcaccctggcacagcggccgcagctcccagcctcttcccacccctttccccgccccgcaggagagccggcctgaacgggaggcggtggaggacaaattagtgcgcaagcaagagcacgcgagagatgccgccgacgcggcgggttggagtgcgacgaagagcgccgtgacgaagccgctgcggattggtggggcgcgttttggggaaaggcagagcagcgggagcgcggcgcaagggcaaaatggatcgttggtacccggaagcccgttcaaactgtataagggtgatcagctatcacggagaaggctttagcaagtcggggccagtggcgcaatggataacgcgtctgactacggatcagaagattctaggttcgactcctggctggctcgcgatgtctgttttgccacacttgacccatgtactactgggtcttgtaaagatgtatattcacaatgtgaaagtattacaagaccttggaaaggtgtatggttagaatgtgaaagttaaatatctgaaattttgatgccgctttgctcacaatgtcatcctttatcctttaaacctggagttgtctgaggtggtttgcaaactgcaaagcgccctgttcccaatgatgcacctgagaagtctgtaaatggggtaaatttaggcaaacacacctggaaaagtggcattttggagtggggaatgctgtggccggaggttagcaaccggatgatgcaaaagcgtatttaaggcagcagttctggcctttccccgccacggagcagaagcccccatagtgatgtgagaagcggcgctgtcccagtttactaggatgggatgggctttggatctaaccagcagcgaagaaaacctgcggtgcggctgcgctcggtagtaggggtccacaaagcgtcagaatctgcagcagccccggcctttgcgagctccagctccgaagtcaacccggcccccaaattccactgggaaaccttaagacaccggtgtttttaccgtaagaagacctcaggtaatctagtatattacccctcattgtatggatgcgcgacttggacacccgagaaggcgcgaaacgtctgcggcctaaagggactcgaaccgggggattatatgagtcatcggacactgtccgttaaccaatcactcaatcgatcaattaatttccgcaacataacgttttcccctgataaaattatagatttttaaaatatataaaattattgggaatattaacgcgattcccaccctaaatcattactattattttttttttccttaaagcctttttttcttctatattttttaacatgggcatacttgcacatgtgtttttccaaattggggttgtacggaaatgggttcctcattttgtctccttacctttttgtctgagatttaaggtcattaaatattctttgaagatatttcatcagagagctagatattttaagcagaatccttatgctgggaatttgggtggttgtcagtttaacacctagaaaaaatgatgctgcttaggagttcgagaccagcctgggcaacatagcaagacctcatctctatttactaaataaataaataaattttaattagccaggtgtggtggtgtgcacctatagtcctagctactcaggaggctgaggtgggaggatcacctcagcccaggaggttgaggctgcagtgagctgttaccatgccactgcactccagcctgagcaacagaatgagaccctgtgttgaattattattattttgagacggagtctcgctctgtcacccaggctggagtgcagtggcgtgatctcggcttactgcagtctctgcctcccgggttcaagcaattctcctgcttcagcctcccaagtaactgggactacaggtgtgtgccaccacgcccgactaattttttgtattttttagtagagacggggtttcaccgtgttagcaaggatggtcttgatctactgatctcgtgatccgcccacctcagcctcccaaagtgctggggttagatgtgagccactgtgcccggccgaattatttgtcttacaaatttctagaggtggaacgaccaggtggacatctgtaaggtccattttatggacatttttaagacttttgtt

SEQ ID NO: 316262 - DNA, 4001 bp, Homo sapiens
tggaatataaattttcagtgcagagcgtgtctggtaatcccaaagtgagggagtgcagtggtgcttaggtctgcattcagcctggatttctctgacccagagctctaatcctggatgcccagcacattaggaggatgaggactccttaatctctgtcttcagactcttaccctcaacaaacccctccaggcagcacatagatgatttacctagtgctaattctgtctcaactgattagggcagtagtagtaagacatgaacttcatgaactaaagcccttgccaaatcagcagatattcacggaatgatttcccagtgcccaggagccgggtgccaattttattatatttgtctgttattggctatactgtgatctttcattaaaatcagtgcaatttgagtttggaaaaccctatatttgactaatcgtatgtagaatatttatggtatgtatgatgcatgttttctgattacatacattaaaatgaattaatttttaagtaactgctgtatctggtaagtttttgtatgtgaaaagtagatcagtagaattaaatgtttccacagttctgagataaataaatgtaagataaatagatgtaaattcttaaattaaaatgagagcaatttttacaattcaggcctggcttcttgcgagttttcttggccttctcttaggcagtaccccaacaactccaaagtaattcctcctacttatgttttgcagaggcctttgtagtccatctcctccaactctctctgagcacaacccaaataggccttctcctgggtccctccatatcttgctccccttcccatctctgccaaggacggaggagaactttagaaagacagttcataccgaagcacttggcagtgctgctaaaatgtatttcacttttcctaaaggcataagctttaggacttttctaactgcatttcaccatagcacataccctggaaagcattgaagacagtgggttacgtgctggctgctgtcacttcttatttctttttactctggaagctcattttcattagacctatccatgtcttcttgaaatgtcaggttctaggcacaattacaagtattgtaaagaaaaaggtaaacctttgacatcattaaagaagtcaaaattatgtaatttctactggactcaatataatttatgtgcaactacagtttgtataaattatgttcactttcttcaaaagattgtgaagcaaagtccattatatataaatctgtagagactaaagtgaaattctagcagtactcatataatggaactgaatagtaggtgttttagttagatagtcttaaagaatgaattaaggaatatcaatatagattttatttcatgattatcattgattgttcctcaatgtttttctgaaattttctactctgacatttcatggttcatacatcatgacaatttttggaatatagatatctatagtaatggggggccattaaaataataatatatagtaaataaacagcagtaatacatagaggtaggtacttcatctgtttgaagataataaaactacagtaaatttacatacaactttgaactgactttatcttaaataaacttcattttactttcacttaaaaaactccaaaaactaagaccaggcagtgtttatttggtaggagtggtatatcatctttactcgttagtaacttcagtcaagtaggaatttattagctcacatactgttagtaatagccagtaaagtctacacataaacctaagcatttcctttaagataaagatgtccttttattttatatgtgaaacattttactcagagtaactggcctcaattttgggctaatcaatgtgtagagttacatacttacatcctctatgaagacttcttgtctttgatattgcagatggaagaaccatacaaagactttctggccttcaactgcagaagcttctctggctgcgggttgaaaggtacatctgacaattctttcaaaaatggtcttaattcagtttaaccttgctttaaatacaaattcaactaagttgattagtcctatttcatgacagaaactttgccctctgatatcctctacagataggctaaaagatgttaagcccaaggaaagtgccctgcaaggtgcataaacctgtctcagagcttagcctttagtgtaatccttccttagcctttaagatgctttgtgggcattcacttaataccactgttcaacttgacacaaaagaaatatactatgcaaataagtaataagcttttctttgatggaactatatagcctattccatatttccaacaggtttcaagtggaaacatttcttttgcgagtaggaaaaaacctaagttattttccacagagctgaaacatttgatgaaagatggcagtctattttaaaaagaagcttctataatggacaactgtactttaattctcacaggcagtgagaaaaccctttatcatctgtgtgagagctgtgatctatataagagggaaaacacggaattttgaaaatgtgacctgttatatttgctagagaaacatttatagcttgaaaaagaacatccatattttttgattcctagtaatttactagtaggaagtacaaaataagaattgaatataagaaatttaagttgtgtttcaagtaatgctttaggcttccagtttgaaggtaacctgctcctttgttgacacacatttttatcattggctgttgaactcattataagaaatagcatgtggaactgactgtatttattccagggttattgttcataaagcagtggtcaacagcagggacttagatgaccaacagactcaataagcctcagcaccaccactcattagctgtatggcctggccaagttactgaacttctctgagccttagtttcctcatctcagaagagcccttcttgggaaagggaaggcaacaaggtagacaaaatgcttgaatagttctcactaaacattagccattatgttaggtaactatattgcacagagtcctctgttgaggatccatgggaggaatttttctcagcttgtagtactagggacaattgttttgttgttgttattgttgttgttgttgttctgaaaaataaggccaaaataaaacctcaggaatcacgtaactagtgtgttgcattctttgtgttggttagtaggaagttcaggacctgcctttaggcatgcattttattatatttttatttatttatttttgagacaagttcttgctctgccacccaggctagagtgcagtggcacaatcatggctcactgtagcctctatgtccccagactcaagcaatcctcccaccgtagcctccaagtagctgggaccactggtgcacgaccgcatgcctggctaattttttttctgtatttttttgtagagacaggctttcgccatgttgcctaggctggtcttgaactcctggactctagcaatccacccacctcggcctcccaatgtactgggattataggcgtgagccaccatgcccagcctagacatgcattttaaaaccagaaatgatctatggcttcatcttatttttcctaacattattttccctttgccctaatttttactaaactgtctttcttgtgttgtatatgcattttgaagtgtctcataaattattagcatttataatatttatgcatacagtttttgtttttttttgttgttgttgtttgtttgtttttttgagacagagtctcactctgtcacccaggctggagtgctgtggcgtgatctcagctcactgcaagctccacctcccgggttcacgccattctcctgcctcagcctcctgagtagctgggactacaggcgcccgccaccatgcccagctaatttttttttttttgtatttttagtagagacggggtttcaccgtgttagccagaatggtctcgatctcctaaccttgtgatctgcccacctcagcctcccaaagtgctgggat

SEQ ID NO: 316263 - DNA, 4001 bp, Homo sapiens
tagtttaatacttacagaaatatatagcagcttctacaaacttcagaaagtgggaatactagtgcgtttttaagagccatattacgaggttacaagatctacaaattcaaatcaaccaagataactcaaatagttaaccaatttgatagaattgtctaagtaagcctaagtccagctttaaatccctctagtttcagtaacccattgttttgccattctagaagccatagtgaaaatccaggtttgagatttagacaatgaaataatcttagaactacctctgtgattaactgctgaaatgtatgtagaatattaggttatatagagttttaagtaatcacaatttggctaaagaaaaagtgactaaaattattccacaaaaagaagtattaagaggagcaaaatcaattaaataagcttttaatggattatgttggccgaagtcatcaaaaaacaagaaaacatgggtatctcaaaatacaatttggaaaaactaaaaccactgaggagcaataatttctaatgacactggaaagaaaaaaaaacaggagaaaaattttataacccagtgaaaagttttaaaattaagttgctttagtagaaaacctttcataattctgaaccaaaaccctgactccatacattctaaaagattttttttaaagaatcaagcaagcagccgcttgtatgttaagagtatacatcattcttttttaacatggttgttaatatatagttaacatgtctcagaaaaggctgtaattaactgtctactgctctaataacactaataagcatacagtattattaaaatacagtgattctatacaaactgtcattgttaaacttttaagataatgttctaaattgtttctgagtcctcttgaaccacccaaagggaaatgcaactctaagaaaatttttaaaacatagttattaaaatattgttttttcctcccacagtctggagatcactgtctaccattaaacagtacatctaagtatcatttcagttggtgaaaatacaatgggaagcatttggattattttacaaattctatagattttttaaaaatttaaaactgtatgcatcttaatttagtacttcattcattgataaaatattttctgggggaaagaaaggcttgctatatcaagaatcacatagccttgttgttaatccccaatgatttccattgtctgtttcactagaacaggaaaactcaattgcattcaatatcaaacagctaattatggatatgctatattcaagactatctccatttcaaagatatctgcatacactaggttctatttataataattattacaataaaatatttataacataaaacctcttttgccttaaagtccttaacattataaacattaaaaggccaaattgtcatttacatgctcttaatggcatatcaggaaccaatgaataagactatagaggaatctctagcaatcaactctactacatgcctagcttccaggaaaactgcatctaaagaatgccccctcacacagattactgactaccttttctttaaatatttcaagaaggtctaataattctccctgggaacttgctactgtatctcaccacccaaaaaagaatgcccactgaagaatttttcttagtatctggtcccaaattttctagagctgagaaaaagcaacatcccaacagaaagccctcccccgaacactcaatgcctatctgtcactgtggctggagtcctgattctccacatgtaacattacagtaacttttctggcacttaccctccaaatatcagaagctgctctctgaatctagccctacaggagatgtctgaaaaagtagtctttgatgaggtgacaatgatgaagttctctctggcactgctagcaaggcagaaacatccccaaatgaggtggttaccagttgcctgtgaagcagctggaccattactgcagttctgagggtgcgtcacaaatcaggtcatagctctgggtagagtccacccacttcacccagtataacgccctctacttcctgcacacctgggggaaaggggtgcggggggcgggcagcttaagtccacataggtactagtaaaggcacagcgaggtgcagcctgacatctgcttcttccgcaagcatttcagcctcatctggggacctgcacccctaggtattcaaaaatgtgtgcaacaataagcaggctctaaaatgagtgaggagtgtaataaaatattgcacagttaaatgttttatccagcgaaatcttttctccactggaaactgaaccaactcttaatttttgattacaagccacttctctaccaaatgtcaaataactggactgaataaatttcagcagaaaccagggacataaatcctgaggtaccagttaactaattttcatctcttgtaactaaactacatcaccgcataaactgaattacatccttgaaagtccattgaaagaggttattagaatttcgcttctgaactttcaaactgcaacaactgtaaaagtgatacaaaataacttgaaagcataaaaataggccaatatgttgaagaaatgctacactactaaatctcaccctgaatatatacacacacaatctgtatctatttactctgaaatatctaatcttaaaaaagacttaaaaaaataaacagcaaaagataccattggcataagttcaaaagtatgaaataatgtgtgttaatgtgttgatcacactctatgaagacatcaagtttaaatagacttaccactgagaacagcatttaggaacgatatataaattactatagtagacactttttcttcagtgtagtgaaggagaaccttatgtaacagatttgatttatatgttgttattaagaccatattctaccctgatgtcagtggaatatgtgactaggtattgataactgtgtatagacagttaagtgtaaccgctttttagataatttaagtgaaaataagccttttctcaagttaattgtgagttctggaattcaactttaacagtattttgatgtttcaaaggggtcttgaaaaagaaaggatttttatcataaaagaaaaacaacaaatacatttagtattacaacaaagtagaaatctcccttattttaaggatggcagattaacaagaagtcaaatgaaggagttaagaatattttcagagaaaagcttagcgagtcaatcaataaatcaatcaatgagccccactttatattcatattttcagaactccattaaaaacttaaacattccatctaagacttggaagaggagacactttattgaagttattatctgaggaatcaaatagtttaatctttttggaactttgtagaaagttaatttagcaaaacacatttgaatgtgtttgaacatatttatcctgaggttgctttaagatgactattttaagtggcatgcagattcttttggggttttgatgttatagttgaggtatgcaaagtaaaagtgcataacatttctttcaactggttctcacatgacagaaatgaaaagatgaaattacttgtctttaaagttttgccatagggaaatgataagaaaaactcctctcgacccctatccccaaccaggaagagtctgaagccctggattatagcacaggtagatattaaaatggagacagagccgttatttagtggtgacaggaatataaatacgtgcactaaactataaactggtatttacttcaggaaggtaagtaatatttttcctctgattgctgcactgtcagtttaatgcagcgtaaataaacagtaggtgcctgctagctcgaagtaggaagtgttcattccacacgaggaacagattactgaagcctgatgctcatcatgctgaaacataactttcattttaccagaaaatataccctactgtggatgatttttcgtgcctgatctattaattaacttaactctgttctgtcaaaatgtaaaccaatttgta

SEQ ID NO: 316264 - DNA, 4001 bp, Homo sapiens
atttcctttaaaaggaaagaaaatctcgaaattctagttttttaggaaccgattttttgcaaagcgagatccttttcaatgagtttctagctggatcgcctccttcgcccccacacaaccccataatcacattttaagattgtgcccttatccattccatatggccggcacgatccaggccaagctttcactgtgaccttttaaagagacaaagaagcaaagtactatctagaaacagaaacactgcagttttactgagtgaaattagcaaaaccgacctgaaactcaccacttcaaaacttgacagcacataaataacaaaaacaaaggagatttcctttgcagcccgggttcttgaagagaagttcaagactgatgttttctatgtcctttttttttttaattaaaaaaaaaaaaataaaaaagcagcagacctgaaggcgacttcccctgaaattgtattattttcctttcccctacccccgcccccctaagcgggggaagggcagaaataaacgtctagaagagtagccatgagaaaggggtttaaaaaaaaaatcacaattcgaaaaccaacatataggggtttgtaaaatgtctaacctcagagaacagggtttgcgatggggaggaggggagagtgggaagcagggaggaggaagaagataaaattgatctgacaagtgattcgttggggggaaatcgtaaaaacaaagcaaaacccgttatgagctgtacactgtgatggtgctggggaaacgacgtggtgactgaggattctcttaaaaaaaaaaaaatcactgcggacaaggtctccaaaaaggaaaaaaggtctcttcgcgtctctccctccctcctgctcactcgggttcttcggtgtgaggacagaaagtctacttctggctgtcacttgcaatattattcttcaataaccccgaataacgcgcattgggaaggccacctcgcctcccttccaatcacccccacccccctcgccaacaatcgcgactaatattaacaaaccttaaacttttccccacagcctcgcacccccaacgagggcatctagcgggggacagcgagggtggggggcagggggtcgcgagaaaagccccggaaaggcactaaaatgccacttttgattctgccctcgctgacaacagccgcaaggaccctctccctgcccattgacgcggggctgtgagcgtctggggtcccagcaagtgaggagagaagaggttcggggggagggggaggaggaggaagatcagaaggcacccccagccacctccaccgcctaggcagcgacaaactccccgccccctccccccaaaaagtcgccaagctctcactcgtccagagtccgaggtaaacaacgagcaccacaatggcactaggactttgggggaaaagaaacccagaaaccccgacaaaactgatcaggagtttcccgaaatgaaagaggggggcgggcagcgtcctctagagtcgccctggctttcggctgggcccccgggcaggatagagggcggccgcggctgttgttgttgtgacgaggccgggtgttgctgggtggcacagggagaggtgtgtgtgtgtttgtgtgtgtgcgtgagtgtgagcgcgagtccccggacggggctgcttctctcgctctctccctcgctagctctacccctcgctgccgtctctgcccccattaaattattagttgactcatcccggccgctgtcgctgccgccgccgtgccccgctcggctccgcgcgtccgcccgggctgcagccctctccgccgctgctcctgctgctgctgccgccgccgccgccgctgccgctgtgggtgcctcttcttcctcctcctcattttaatacaaaatcaccccgctcgcagccccagccccgagcacgcagcctcctcccggccgcccgccgccgcccggagccttccccagcggggccggctcatccgccgcgtccggggaacgggagcgagcgagaaagtggcggcggcggcggcggcggcggaggaggaggaggggggaggagaggaggaagggggtgcggagccgaggaggaaggcggcgtgggggggcagggtgcacggagcgggcggaaaagggatggggattaaaacccgggctggagggccgggattgggggagggggcgggggcggcgagttaaaaagccgaaagacaagtaactagtgaatgagtgagggaatggggggagcgcacgatttccggccccgggcgcgcaagaatttgtaatgagcttgattagagtgaggcggcccgacatttattacacacaatacccagaataacagggcgctgtgcgagggctagcgccggccgccgccagacgcgccagggagggcgcagaggggaggaggagagggggcttccctggcagcgtccgccggagcggggaggggagcgcgcggcgcgcgggcggcaggggcaggtgtgtgagtgggagggaggaggggcaggacgggcaggacgggcacggggggcggggggaaggaaaatgacggggaggagggggcgagggccaggggagaaaactaaccaaccacccacacgccacaaaagccacaaaaaggagtacgcctggagcgtcgcagagggacaggcgaggtggggggacagggagacgcaccggccccgtgggagaagggcgcgggtacgcaggtgacaggcgctgaggaatgaggtagggagccatcaggaagtggctggaggggtacagacggaaggcagttctctccggggaagcgcggagggtgcagaaacgtgtacagcaataaaggccaggagcctcgaaacgctcggaatgtttatcctctaaggagggtggtccttaaactatgaggagccaacattagaaagaactgagtaagagcgttctgtactagtcagacgttggttcaaatcgccctcacttctgagccatagaatactttggaagaagaaatacgtggccgagttaaacaaaatttgggtcacttgaaagagacctgacttgttattataaaggaaaagatgccatcattcttcaaataatttacgctaggcaaaagaggaaagtttgggttggtaaatacatctgttgtagcaataaacacttctgctgtaatctagggtaggttacccagttagataaatggtcattaccacataagtatgatcctattatttagacaatctattaaatatagttcatgtaaaaataaagaatattacaatgtaacccaaaatagaaatgcctcatttatcgcttaggttttagttctaccattttagcaccctgaaggcagttaatcattaacaaaaaacaagaattatttttcagaatttgctggtagggaaaagagaaaaatcagtcagataaacattttgttacacataaaaaagcaacaagttagcacaagtactgagataaaagggaaatttgcaaattaagctctgtaaagccaccaatacactcttaggcacactgtttacattacaaatctaaagaaaagccaaaaggtaaagcagaaaagtgtaggaaatgatggcctcctaggggagagtaagtttaggagaaacaaaatgaaaatatatcactctaatagcacccacgtttcacccacaaaccagaaaggttagccaaatctgggaaggcaaccgtgaatcttggcacacaaacccaagccttgagcaaaagaatgaacatgtgataaacagaaaacacagcatcaaaaataggaaaagaaatttaaggcaaatttttagtaaaaagcccaaatgatagtaaatttttaaaagttaaaatgtggggaaatctgaaggaagatatgttagctaaagtataagaaatagaaatatggtaggttaaatttgaaatttccaatatggatactttaatagttgcttcaaactagtaatgcctgacatgtttccctgaaacctgccttgttttcagtagggactgtgcactctagtgccttgttgt

SEQ ID NO: 316265 - DNA, 4001 bp, Homo sapiens
aacagcaaaagaaaagagagagcattcaagccaggcgcggtggctcacgcctgtaatcccagcactttgggaggccgaagcggacggatcatgaggtcaggagatagagacgatcctggctaacacggtgaaaccccgtctctactaaaaatacaaaaaagtagccgggcatggtggcgggcgcctgtagtcccagctacttgggaggctgaggcaggagaatcgcttgaacccggcaggcggagggtgcagtgagccgagatggcgccactgcactccagcctgggcgacagagcgagactccatctcaaaaaaaaaaagaaagaaagaaaagagagagcattcaaacatcagatcagttcataataaatttaaaaagcctaattctttccatttcaatttatgaccaaaagaataaatatggaaatatatttatacagtgttaaatatatttatatagtgttttttacatcatgtgctcagtgggaatactgcaaatgtgtaaaacacctaaaatgtaaactatattaacacacattttaaaagatacaggtcttggccgggcacggtggttcacgcctgtaataccaacactttgggaggccaaggcttgtataatgcttgagcccaggagttaaagaccagcctgggcaacacagcaagacccccatctctacaaaaaaatacaaaaattagccgggcgtggtggcacacacctgctgtcccagctactggggaggctgaggtgggaggatcacctgagcccaggaaatcaaggctgcagtgagccgagatcgcgccactgcactccagcctgggagacagagtgagaccctgtctccaaacaaacaaacaaaaaacaagtctttaggcatcactgaggaacacctaaaatggatacagcactaactagacaccctcgaccctgactccctaataaaagcgtcagtcttttgctcaatatcctgacctgacagcaaaccaataaagacacggcataaccaaactccacaaatttttggccaaataaaagaaacacacgcaacgctaacattaaaccttttctatggccgcttcacgataagtattacaaaatccccagaaagagtttattcacctagctccgactgtcgccatacaaggtggagcagtgagtgacccgaaccaggggctgacccctgccagagcccccacagcgactcactgcccccccctccgcattcccatctgcacaactttctgtgattcaaacagtccggagccagggctccctgcaactaacgctatcgtgacattataagccggttaaatactgaggtcataaacccactcagaagtaaacagaagcaacattagtgagcaaagttgaggtttaagcaatacggaaaactagaaaccaagcaaaaccagcaaagcaactagcgttgtctctcaataagatcttccaaaagaggcaaagtggagaacctgctctcccccgcactccggaaaacccaaacagcaccaaagcaggttctacaacagcttcccggagcaactaggccaggggatgcgacgccgcgcatctccccccgtcacaccaggggcccgcggaggtctggtggggacgcggagctccaggggccggccggtgcagggacacggccgggttgggggtggggacgcgcggccctgcctccttgccggcctgcggtctccagggccggcccgcacggctgctggacagcgccatgcccacgcacccccgaacctagcggcccccattccggaactcccagctccacgcggctggggtcgagctggggcccgcgggcaggcgccctgagcacccgcgtgacggtacctgtggtggcagcacctcccaagctgcggcggcggcggcggcggcgacgggggcggcagcaggggcggagcgcggcgtgcgcgctctcggcccgcagtccggtgcgtggcgccctccctctctctcctggccgccgggtgcccgccccttcacctctcacctcctacctttaccctcccgccccgccgccctccgcacgtgcgcccagcggcgtgcgcatgcgtagtcgaaccacattcgcgtctcccgttcgccctctggtggacaccggagggaagtatggacggccgggccgggccgggccgggcggagcgtgaagccgggttagggcccgccgggtttgggcccaccggctctcatcggtcatcaagaacttgcagaaagccgggcacggtggctcgcggttgtaatcccaacactgtgggagtccaaggcgcgaagatcgcttgagccgaggagttagagaccaacttgggcaacgtaggagacctccgtctccacaagtaaaattaattagccggctgtggtggcgcgcacctgtggtcccagctactcaggaggctgaggtaggaggatcacctgagcccgggaggtcgaggccacagtgagacaaaaaacaaaaaacccaccctgcacaagatgctcatgttccctgttttataatggcaaaaaattagaagcagctgggccgagatacactgcaaatgcagatgagaagaataaataatgtccataaaactagtttccctatagacatttaaaagcataagttgacatttaaccattttccacagggaacaggtatttgttataatagcaacagctacgttcactgtttactaggtgtcagttgcggagctggtattgtacatgtcctcgcatttggccctcctgaaaatccgaggtaggtcttgttacagggcctcacagaaggggaaggggaggctgcctcccctcgagggaaacacaggtccccacctgcccagctctggcccaactagagacgctgcccggaccactctggggggactttgatcatgctactgcatgcccttgctgtacccaggtcttgtgtcagaggtaagcctcccctcagcccctgcctactgcccgagacacccgcacccaccccagggctacctggataaggcaggccctgtacctgccctcaaaggcaccagcaaacttctctgggagttccagaaagtgcagatctagtcaccaatgcaaggcagaaattagaggtggcccttctgaccgcaccagcccccgacccactacacattcttcagatacctcctcctaaaacccagttcccaccggactctggcctccctccttgcccaccacactattgtcacaatgaaagtaacaatggggacagtgggccttggcccaaagtgactttcagggttatgacattttcagcattgtcttttggcttaatatgggaattttgatcctataaagaaagtattcgctgggcgcggtggctcacgcctgtaatcccagcactttgggaggccaacacgggcagatcatgaggtcaggagatcgaaaccatcctggctaacacggtggaaccccatctctactaaaaatacaaaacaaacaaaaaaaaaattagccgggcgtggtggcaggtgcctgtagtcccagctactcgggaggctgaagcaggagaatggcatgaacccggggggcagagcttgcagtgagccgagatcatgccactgcactccagcttgggcgacagagcgagactccgtctcaaaaaaaaaaagaaaaaaaaaaagaaagaaagaattttttaggttatttttatttttacatttgaggtctcactcctttacccaggctggagtgcagtggtgtggtcatagctcactgcagcctcaacctcctgggctcaagtgatcctcccaagaaggtaggactacagatgagcgccaccatgccatttttgtttttgttatttttatcaagatggggtcttttgctgtgttgcccaggctggtctcaaactcctgggctcaagcagccttcccatgttggcctcccaaactgctaggattacaggcatgagccaccgtgcccatcctgtttgttgtattaaatgagagagaagcaacaatagagagcattcaggggaacttac

SEQ ID NO: 316266 - DNA, 4001 bp, Homo sapiens
tgaaacttaaaaaaactgaaatcataaatctacctttcattcttttcaaaaactgaggccttttaaatactgacatcaattatggaaattatcagtggatctattgagcaaagatgacaaaaatgtatactaaggtctcctttatataaaattgttacatcctctaaaattatgcacttcatacactgtcaaaatgtaagtaccatttatcccaaaatcaaatgccaaattactgaagagttaagaagcaacagtaattcacttggaaattatccataacagaaagaatccattatatttgaattggaggtcaagctgagtaaattgcatttactactggtttttaaatatgaagaaaactactaaaggaaataaattttataatacaattatataaaaatatattttattaggctttaaaataaatgattctgcataaataaatgttccaaactaagtttaattggcctgagaaaagaatcatgatttgttaaagttactttttaatgacaatatgttctcttagaaaaaaatttgaatagctaatcaaaatatctgttggggtcattctgggtagtaattcaaagtattatttcttcgttggttgtgtcatataataatatcatagaactacaaatttgatagtctaaaagatggagttaaaagatgtttttgaagaaaccattttttttatttctggtttgaagatttaaattgaacattttgaaactaattattttcaataatgctaaaagtactatttcaatagcccatatataattttataaaattgtctgttatttctacttataataagctgccactctatacatttcataccaataaatttgagattttttaagtcatcaaatatctcccatgtattgacattagaatacctagacatttgttcttttggtaactgaaagtataatctaaattgaaaaagtttaacactgatcttcccaaactgtacaaatcaggaactactttccaaagagagtcttgtgcatacaaagggcaacagattgtacatttggaactatttacatgtgtatattaaaatgctatttccaaagtccactgcaatgcaattagttttggtgcactacaaaaaagaacactcaaacttagattctcaaaattcaaagcaccaaatatccacatactaactatgcaatgagaaagtatttttttcaaatgaacattccaatataccttaaatgcttaattctgaatttaaaaatgtaatgaaggccatcagcttaaatttaaagttacttagttcgactttgaagttttctctcttcatttgtaaaaatatgatacacctaaaatagatggtagacatttgtaaaacttacactgtcagagtgcttgccctggtcacagtcccacgttgtaacacgctgcccggacctctccatggtgctgaagagttactcttgcccatttgagagggaagagttgtttattcaaattggctttgaaagaaatccgtaaagggtcacctgggttagctagtaaggttgtctaaaaaatttctataacacacactaaataagtgatgcttttgcccttcggttatcaaccaccatgctcaagcagctcaaagtagattttggagcagaaatcttcaagtattggcaaaaaagagcgagagctttttgggagatgaagtttgctgatttttgccagtgttcttcaaattgataaaacacacagagaagacaaggctactcggagaacagaggattccagaaaagttcttgatcttaatgcagaaaagaagatcccattagtccaaagcagccgattcacttcatgctatcatctgatctacttttcgattaaaaataatacaataaaatagagttaagaattccacaaggcactgcacacaccatgtaaacaggtctgcctcattctcgccccagcctcggtctgctgaagattatcacagcagaaatcaggctctgtggctttcacagattatctctttctgaggctgaaacgtataaagagccacatgacacccaatgatgtcatctctaaagcaggtcacagttgctgctgtatatagataaagtccttctagtgaagtatttagcatagtgattttcttgaaaatctacttatattaaatagcatggtcttctatcaaaatacttaaccctatcgatacagtgccatgaagagaaaatcaatttgctgctcatatgtgagatgaagcctcccctttaagctaagatcagcttctggtactgctttaaaaaatgaataactgccattaatttgtggtgaatatagtgaagaagggcttttccctggagaagctgctgtgggaactagaggctctctaaggatatagaatctacttctaaacacctctcagaatatttagcatgtccaaaaattattttttaattcaatccataaagattgcaaaataaaaattaaggaaaccatcttcaacttctaacaacagtttatgtaacaaaattaaaaagttatataaacataaaaacatcttactatctctgaaacgattggagtatattttcaagtgttggttaaagaaaaacgttctttaactcactatttttagatgtttttcagttctgaataaagtaaaaatagaaaattagctatattattactaatctgcacacctaactggtaattcatagtacacatattcttttaaagaatgtttaaatgagcaatgtccatgatcattctttgcaacatatttttctctttctatttagtcatatgccataatttatgattttcagccataattgtcatttatgccagttaataaattatctaatcccctttcatgccaactaaacaattcttatagcccaagtgaagaataacttgaaactaatctaattagtgcttattaaatgtattccctcccttaaggccaaatggatcaaacaaaagcagctttcctttaagagcacagtattctgtcatatttttgagaaaaaaccataaatctgaggagaaaacaattttccacacaaccagtgccactgaacaaattctattaaagcaatggtgattgttctggcatctcatcaggaaaatattgcctcaccagcttctcaccgcgtatctaaaatatccaaataaaaattgagaatgctaaaatatccaaataaaatatccaaataaaaatttatttggataaatttttatccaaataaatttatgctaaatatccaaataaaaattgagaaaaatatccaaataaaatttggaatattttattccaaaggctaaaatatccaaaaaaaaattgagaaaaaaaattgatcatctaaatgttctgatccacttcagtttcctaaataaagcagatatttttggtcaatttctacagtttagtattttctacactttaacaatgatgaagattatctggggaatttttaaaaatttaaaagtccctgtaatcccagcactttgggaggccaaggcgggtggatcaagaggtcaggagttcaagaccagcctggccaagatggtgaaaccccatctccactaaaaatacaaaaattagccaggcgtgtagtgggcacctgtaatcccagcttctcagaaggccgaggcagaagaatcacttgaacccaggaggcagagattgcagtgagctgagatcgcaccactgcactccagcctgggcaacagagtgagactctgtctcaaaaaaataaaaataaaaataaaagtcccaggctgcttctcagatattctgacatgatagatctgttgtggttctggaatatgcatttttataaaaagttccaaaagtaattattatttggaaaactctaattaatatattactatataaaaaatcatataaaaatcaaactgactaaaaagtatttgtgattcttaaaatgattttttttaaaaagcccaatttttgcttcctgaagtatccagtgttgggcacccccttcttattttctcaggcttcc

SEQ ID NO: 316267 - DNA, 4001 bp, Homo sapiens
gaccattattacccaaccaatacacttaattttattgtgaaaataagcaataaatacttcaaaactattaaacacataatgacactgttatatattgcagctcatgtaaaataaaatcaatttatcttcctttggaagaagtagaatgctaatataaccccttctctccagatgaaattgctgatatttgaccaattttcaacctacaaaaacaatgcttttatgttcaacctaatgaaaagacatatggaataatcttatagtagtttgcccttcaaaaataaatagattcttggaaaagagagagttattttaattattatagtaattcaatcacctggagccatgccatgtgtagattaggctctctatggatacttgacatcccctaccctcaagttctgtattatgtgtaagtgacatgttggtttttttctcagcatctctgacccctttctcgtggaaagaattactgtgaagcatgacgctcaatatttaggatctatggccctaaatgtaccataaaatgaaaatactatgaaataaatctgtaagtacaaatttctagttattaagcaagacaaagtatataaatacatttcataggcacacgttacttagctgagaaaccactgccttgagtcttgtgaaatgtactattttgcctgcacatatttaccattgtgaaatctgaccttatgagaaacacttgcttgtctcaggtaaccgacctcacacaaggaagaagcattgttaagttagagaattggtctctcagagattctaaactcagtcagttgagtaatatcccaatattaactctccaagatttggaccagccctgcctgctgctgcaaagagcaatttctctgagaacattcttgctgtctgttttcaacaaagatactttctatgttgcctcaacagtccaagtcctaccaaggagttactaaacactctagagctgatcttttgaaattgtctaagtgtttaattcataactccagtagcaaattagcatacaaatgaatatgaattactaagatttttctatttggagtttttgatgcatgttgatactttaatgcttatttaccaaccatttaaaacaacatactagtaaaaataagttcggaaagacacacaagtgcaactttaaacatcaagtgcatactggctgatttttgaaaatttccaagattatcaatcgcgactatctatttacataatttcttaaagatagtcctaaaagctggatgtgaagcaactcacatcctatgcaacgagcaaaaatcacgtttttcagtgttatcgatgtgagattccaaacagattttcctctgaaattcccttaaattcaaattacagtccaaagcaattcctcttttttgcagacgtacaaaatatgcaaagcacatatcacctccgtgaatttcacaaatgctttaaaggccaaggaagcagtgttttctgccccattactccccagaaaagctaattacaattcagatactgcacgtgatgaaggccaggcgcggaagatggcaaaatccctgaatatccggaaagaggcaacctgctgctttggaagaggaaggcctcctctcccaaaggatgccggcctcagaatcaggctttaaattttacctgatacgagcagttatcctgatgtaccatctcagtgcatcctagggcgcagaccccaacgcaggactgctgagcgaggctgcggagggcaggcgcggagcatccaccggcgggcggagagaacgccctggtaaggcaggggctccccgcagattaaaatggatgctgtttcgctgatcaacctgcgcagtggcactgcctgtgccgggaagcgcgcagctagcgagctgagctgctctccagccctccgaaaccagtgaggcaggcttaggaacatggagctgggaccgggctgggggagggggcgctcatcacccgcacaatcagccaattatattataggcacaaagaaaaggatcagtctggagctggtgtgaccttctggtgctttatgaaggcagttaactgatgtggaaacattctagtcctcattaacgagaaaaaggccagcgagggagagggagagggacagacacaaatcaatgttgcagttgaacatttctaacctccggcatcatccttcctacccactaaggctgcttggctggtgcttatcaaaaaaaaaaaaaaaaaaaaaaaaaaaaaagaaaaagaccttaaagataattttagaacttttaacatgctaaagagagaacaatccattctgaataccaacaatgaaaggatgtttttctatgttgagtttttgaagtgtttgtcaactttataactaaaaggtctttactctttaaaaggattattttgtaattctttaaattccctgcttatttttggctcctagcttctttttaagtcaaatagaaataagatagaataattgctgttataagtttttttagggagagagcttattaaaatattaaagtcactataatttacttcatgaaaactaaactcttaattggaaggtttttttttttttaatgtaaggctttgtacatatattattacccaacgctgtgacttgaaaatatggacaccccccaatgcagcacatacaattcttggaacagacccatcctccctgagacagagtaattctggacttgcggacaatactcaaaggaaatacaagtcagacaatacatgtttctgggaaaaaactggggccagtttctgagtggcttcagggccacttcaggacttgaggatacacaaaaagaaaaaactgggctataaattcttcaagctaatgtaatgagaaaattaagggggaaaagttaaataaaattttcttatttatattcctcagttgccacaggcaattagttttgttgtttcttttcttttttagcttttttttttttttttgagatggagtctcactctgttgcccaggctggagtgcagtggcgagtggcgagatctgagctcactgcaagctctgcctcctgggttcatgtcattctcctgcctcagcctcctgagtagctgggactacaggcgcccaccaccatgcccggctaatttttttatattttttttggtagagacggggtttcaccgtgttagccaggatggtcttgatctcctgaccttgtgatccgcctgcctcggcctcccaaagtgctgggattataggcgtgagccaccgcgcctggcccatgttgtttcttaataaaatagctctgagtacataaatggtacttaacaaaaatgtgactgaatttaaaccatcaaattaaaaaaatcaatagggacattatttttaagctattttagtatctatctgtcctatgttctatttatgtagccgtctcaaaaactcttcctcttcccattaaccacgcagtttcactgtgctactgacagagaaaacaagtactttttgcatgagaaatggaattgacatgtttgacaagttttcctatcaagcactctcttaaaaatggtgggagtttatgttaggattatttgctaatgtaattttaataacttatctgttttgtggaatgagaaaaacctatttttataaatattcttaatttttactatttgaggttcaagcaggagcaaagcctgctattgctatctcaattcgactcccttgacgcactcacaagcacactcatttcagccttcctagtgaggagaacgaaaagatggccctgaaaactcaactcctggtatcctcagaggcttcaatttcagcagcaggttcaaaggaaaagtactctggagactcaccgtgcagaagctcactgccctaatccttcctagtccaggagaggggtgggtcacataacacgtgcaggactttctaggcctgctcactggctgcacaatgaaagcttgatgaataaagcagaagcctgggggtagggaatgagtcaagatgaagacaagaagat

SEQ ID NO: 316268 - DNA, 4001 bp, Homo sapiens
aattgtaacacgtggaagaggcaatcgtgcaaaggatatgagtggacagacactttgatggccgttcttctgatcaggttgaaaggactgaatagccacagggcccgagtggcactaaaccgggaaatggtcctccctttgttcagcaccataaatgtctgaaacaaaacaaaacagaaagtggacctccaatgagaaacaagattccttatacaaccatgtttttaaacatgagaggcattatctcaggcttatgagcaagaagggctctgggaactacaggtcaatgagagtcaaatgcaggtacagagaggcagagaggatcaaggactaaaagccatatcctcaccctctcagcaagatcctcatctctgggactgacagtgcaccaagatgagcccactgagggtactttaatggacagacagccaatcctcaggctggtaagaggtgttatgcccaggggaggactctggcaacaggatggtgaagttatggttgcatttaatttctcttctgacaagagaaccatccttgttttgtaatgtttcttctgtctccaccttctacatctctgtctcttaaatcctctcctggtttctccctctgaggatttaggaggatatgaactcttggcatgggagaggaggaagaaagatattcagtgcctttttatttactctgctagccatatttgagatggctgattcctgtcctcctaactcccaaacatgcattcaccattttttggctcgtagaacatcaaaaatacaacacaggtgagataattgtcatgaagaagctcttgtttaaactactgattctcaaactttttgatttcagggattattactctcaaaccttattgaggaccccaaataacttttgtttatgttgatacctttttgtttatgccagatatatgtatatcatattagaaattaatatatatgtatatatgcttatatacctatatatacataactagctacatggtctagttgtatgtatatacatagttgtatgtatatatatagtgtatagatgtatacacacatatatacatcatatgtgtgtgtatatatatctcatattagaaattcaaaactcaggaaattttaaaacacgggaatatacaggcacacattccagtagcttttagagtgatgacatcatcccccatcaatagcctctatattcaccaatgtatgatcataagagaaagtgtgtgaaaaagacaaattacatccaagtattgttatacaatagttttcattttataaacccactaaaacagttttggggacaccaggggttccaagatcatagttgaggaccactggcttaaattcatcctgctttctgtcctcaccgccatgctcctcccccaacctcaagatgtctgctctccacctgcaaagagacccaactcctctggaggccccaggccagaggtcatccaagggaacagccaactttccctgaaagctctgcagcagttatctgcttttgaagatgtgggtttagttagtttctatcataaatgtcataaaaattcaaagagatcatcaaataagttagagatatatatatatattttttttggttgttaacggaatctttagcagactgccacatcacccagggccaaggaggactttctgggctgggtgggaccgagacttcctctccaagagctgagagcagacattcctactagtagctcttacccggtgtgtgctgtagaacggatctagatcctccaggggctccccgatcagttctgctgggagctcaccatagaacttgggcagctggttgcaggctttcaagtccagctggggccgaggcttctcttcttggtccttctgctccctatgcttctctctggctttctttgttccctgcttggcagcaatttgcttctctatctccaccagtgactccggagtaaagcgacggaagttgttagtttcgagggatccaatggggaattccatcttctcattcttcttcaggaagtatttatactcttataagagtggacataaccacagagaggtgacagcttgcccactggccctgtccctctcatctgtcccatcttgattgtcagaacagcccttctcccaccctcatatctggcccctccctgaactcacacttggctcctcccaggaacccattcccctgcaaggcattcaggggaggctgtttattcaaccctcctccaggtgcctcagggttatgtctttgctccccatgtgcttctatgtcattgcttcttcaccactttgtaccatcctaccaccaccaccagatttagccatgctgccctctctcctcatttccaggaccactgagttccaggcactctcccatattcatcaaagactttggtttatagtctactttatcttaagtctcatgctactttcttatcacaatcttttatttattgacattgtcaacatttctccacctgtttgaatttcatttggacctccaagttactggagaactccagattattggagaatttcattgggacctccaatttctctgggacctccaggttcagtctgtggctgaacacttttccccataaccagattagacctgtggtccacaattttgccactccctcacccttatcctaaatcccaaggctaagtcaatctagaacagttcccctgaactgctgaggggttatggggaacctcagtattgcctgggaatcatatggtatccctagtcagcagtttcttctagtctgaggtttcaaatacactcttttctcactattccctgtcttcccttgcagtaagccaatgaccatatttcctagttcatggagaaaaacagaactctgccaacttcataccatcaaacctccaactcacctgtgtctgcagccttctttcctccttcccttctcttacaacatgagaggtatcttcctacattctaaggaccattcctttccctctgcttaggatcttatctcatatctacctcatttttttctctctccttgtctgccagctctttcctatcagcatttaaagatgcttaactttcctccaactttaaaaactttcccttgatgcagagcccatccaggtcttccctcctctctcctgttctctattggcttttaataaaggacttacttctactcactgtttccagtcacttttcagtctttgaagcttggattttgccctcctatctcactaaaatgcttccttgcagggatacaagagattgccttgtggctaaagtcagggggcccttctcagttcttgtcttttttgtttttttctttttctttttctttttttttttttgagacagggtatcactgtcacccggactagagtgcagtggtgcaatctctgctcactgcaacctctgtctcctgggctcaagcaattctcccacctcagcctcccgaatagctgggctataggcacatgtcaccacactcggctagttttgaaaaaatttttttgtaggcagtgtaccactatattgtccaggcccatctcagttcttatcttgatggtcctattggctgttttgacaatttcctccttaaaatactgtatattttggctaccatgacactctcttggttttcctaactttctctcttctccttctcagtctctcctttctcagcttttcccatacatgattgtgaataatggcactctatcttttgttttcagaataataacaatagtaacaacttcaacagcgctagcatttactgagattccactgtatttcagactctggattaagcaattttcatgcattattacattaactatcactgtacctgtgaagtattatctctaatatataaataagataccagagcagcaaagttaaaatttccaagatcacattactaatgagtggcagaacggtacttaaactcaggtatgtttgccacaatctcttggaaacatctcatcattcccatatcttca

SEQ ID NO: 316269 - DNA, 4001 bp, Homo sapiens
ctcagggattgtaaatacaccaatcagcaccctgtgtctagctcagggtttgtgagtgcaccaatcgacactctgtatctagctgctctggtggggccttggagaacctttgtgtctatactctgtatctaactaatctgatggggacgtggagaacctttgtatctagctcagggaatgtaaacgcaccaatcagcaccctgtcaaaacaggccactaggctctaccaatcagcagaatgtgggtggggccagataagagaataaaatcaggctgctggagccagcagtggcaacccgctggggtccccttccacactgtggaagctttgttcttttgctctttgcaataaatcttgctactgcttactctttgggtccacactgcttttatgagctgtaacactcaccacgaaggtctgcagcttcactcttgaagccagcaagaccacgagcccaccaggaggaatgaacaactccagacgcactgccttaagagccgtaacactcaccgcgagagtccgaggcttcattcttgaagtcagtgagaccaagaacccaccaattccggacacaaaagcagaaagggtttgttaatagggttactctaccataggataatagcttctttgaggactttctctacagccacagggttcaaactagacactgaaaagaagcagtagtattcaggttgaatgcctatttccccatgccagccatcctctttctttcttatttactggatgctaatctagggctgactcttacacccactccaggaaattatagtaagaaacccaacatatcactggtttgttccttcaacaattatatgccctgtgtctgttctaggcatggtgctaggcactaacggtgaagaaacacagtccctggtccaacagttacactgtcctggagtagtagaaaagacaaagacaggaaactaaaatagaacaaatgctactacagagagaagtagtggggctatgtctatgcataggataggtgtctcatcataggataggcgtctcaacagggaatcagggactgttgtccaaacctttaatgtctaaattgagacctgaaggagatgtaagacttaggacaagagaaaaagggggacactaggatgctccagggagagcaaatagtgtgtacaggaaccctcagctgagaaagaacatgatgtccagcaactggttctgtttgccaggaatggggatttcatggagtggaatggccaatagggctttactcagcagagggagagagtgggcaggcctgtaatctttggtaaagatcatggacttcccctgagggtaatggggaattactaaaggtttgggttttcattgctgttgttgttactgcagaggcgaaacactatcagatttgtttttttttgttgttgttgttgtttttttaaagaaaagccactctaactattgggaattggcagggatatggatggagctggaaggcccttagcaaactaactcaggaacaggaaaccaaataccacatgttctcacttataagtgggagctaaatgatagaaactcatggacacatagagggggacaacacacactgaggcccatgggaaggtggagggtggaaggaaggaaaggatcaggaaaaataagtaatgggtgctaggcttaatacctgggtgacgaaataatctgtacaacaaacccccatgacacaagtttacctatgtaacaaacctacatgtgtacccctgaacttaaaatacaagttaaaaaaaaaaagtccctctaactgttggggattgaaaaggcttgagataggaagataaaggggaggctaaaatcagagaagtgagcttggaaactcttgtagcaaatcaaattacaggggatgatctaatgacatgcatggatttgagagttaataaatagccttgacatgagattaatgggaagagagagacttgagggatggtccttaccgagattcctggcttgagcagatgagaggacagtgtggccactcactgagacagagagtgcaagaaaaggagggcactgcgagggaataaatttggtttgcaacacacgaagctgaagctgcctggggaacctgcaagtggagagaaccaaaaggcactcgaatatagggaaatcatagttcacacatgtcaggctctgaaaacagcgtgaaagcaaagaaatgtagccaaaatttctcttgaaactccctcaggaaggcaccatactgaagaggcatcccaattcattacttaaacgagttcaatacaaccagcttttcttccagggccagaaccagacactctttcttcaggttagccccaaacaaagtagttggattgtgtttcagggccatgataaaggcaatgtatgatccttcaagtatactatgattagggcaagcaatgataatactgtgagagccatatgtcagctgaaactgaatgtaggactgtagattcatcactgtctgtcccacattcatccagagtcaagctcattattgataggtctggatgatggaattccccgcactatttcaatttccccctcctcatgaacatgtgtaattgaatttgtatgaatgaagtgggcatataatgagactctgctgcatttgactctagagctcaagaaagacatttaattcagagcataagtcttttgcagtgaacacaatatggatgctagtcaatcctgtaaaatggatgcgctgtgaaagaccctggatggtaaaacctggaccctatgctcagttacagcaaggagtccagtggcaggtgctgccatcctaatggggcgattaaagaagcaactggacactttcaccctgccattttgactctgggagatattttgcctgggttcttaagaaagagaaacttgctaaaaataaatataacacaaaataaaactgacaacccctgaaactgtacacagtaaaatttgttatagatgataaaaaaacaaacaaacaaacaaacaaaaaaacaaaaaaacacacacacacctaaagaaccacatcttaaaagtaacattggccaggcacagtggctcatgtctgtaatcctaacactgtgggaggctaaggcagatggattacctgaggtcaggagtttgagaccagcctggccaacatggtgaaaccctgtctctactaaaaatacaaaaattggctgggaatggtggcatgcacctgtaatcccagccactcgggaggctgagcaggagaatcagttgaatccaggaggcggaggttgcagtgagccaagattgtgccactgccctccagcctgggtaacccagccagactctgtctcaaaaaaagaaaagaaaagaaaagtaacattgaggccaggtgcagtggcttacacccactgggaggccaaggcagacagattgcttgataccaggggtttgagaccagcctggccaacatggtgaaaacccatctctactaaaaatgaaaaattagctaggtgtggtggcgtgtgcctgtaatcccacctactcaggaggctgaggcacaagaatcgcttgaaccaggaggtagtggttgcagtgagctgagatcactctactgcacttgagcttgggccacagaatgagactctgtcccaaaaaaaatgaaagtaatattgaaaactgcaaaaattgacccaggaaaaggaaaactgaataaaaattatgaactcaaataaatctgacaaaataaaaccacatgcagtatgcagtaaaatttccttattaactgaaaaaacaattaatggaagaatcaagtattctttaataagtaaactcaggaaaattcgactgtgaaaatcaaggctgcatccacaaaatagataaaattgataaattaatagaaaatcaatatggcacaagctgtaattggtaaaatttgaaatgactcaaacccttatggtgaaatttgtacagaaatacttaattctgaaaattttctgtgcagaaaatagattgcatt

SEQ ID NO: 316270 - DNA, 4001 bp, Homo sapiens
gccactttcccagctaggctctggtttcctcatctgtaaggtagagtgctaatcatgatcacacatacctcacatgactgttgagggcactggtcatgtgagatcatgggtgtgcagagctctaaacagatatcgtgtcttcttatttaaagtgaggacccaggctgagaagtggtggtcctagaattaccacccaggctggaatagtcctgttctcccggactgtcagctgcacaccaaactgctgcctgactcatgcgtctcctctccagcattgatgcagaaggagacctctacagttaactcacctccaacaactatacctccaagaaggccctggaatcctggggcatcagaaaaaggagaaacattggagtgtttttgctccttcaattctttcccccttgcttgtccttcctacttatactctactttcctctgtatatgtggtcctcatttggcctggcaactctaagtctatcccaattgaagtacatgcaaatcaggcaatctttctttgaaaggtcagtttcttatggatgccagccaaagatgctctcagcatcccatattttctagggcttccccaaacctcccagcctcctaggtctctaacctcagtatggcaaggtggggtttccaacctctgctggatcacactgcgaggtgatgatggcaaaatcttctgagcctttcctgaaagggccaagtgtgctcacagcctcaggctctagagcagtcatgtgggagctcaaagtttacattccctcactcgggagccccttcaagaaacctttactagaatttccctgcaagaactgcatccaggcagataaaatagcaaggctttcacatatttgcattgagtttacatagaatctgcatgtgcccacttggttaccattttcttaggtttcatttattgagctcctactatgcatcagttgttggtttgagccctattagtctcatttaatagcctagaaagcctattatccaagagtttttaaggtaaaatcttgttgctataatgagcatttctggaccatgatattaatcctttgtatcagtataatgcattatagtgataaagtgctttcccagcatgtctatgctctaaggtaggaacatcaggcattatttctattatacagattttaaaagtgaagattagtaaagtgacttgcccagagtcataaagccaatcaattgaaatggcctgtatctaacttctgggactactagtccagtcctctttccagacttcattttgtgttttctctgttttccttttatccttttgcagtccctcatcctcatcttctcctctaatacatgcattgcagagaaaaaatgaggactgaaaggggttttcaggactatcaaggcaatgccaggggatgacagcaaagaagaggcacagcctgcctgctataaaccctaagagtggtgtttggagaacctgtaacaccagttacaactgcatggttagaacacccccacccccaccccccccccccgcccaatgaagtaccttatgatttcggtagaatgggtccaagtcttccagaggctttcctatgagctcacgaggaatgtcgccatagagcttgggcaacttcctggaggcctttaggtcaagctgaggccgaggctggggtacttctcctgtctggtctttagacttctttttctccttttggatggcaatccgcttctcaattgcagccagagagtcggaagtgaaggggcggaaattccgctcatctggaaagattactgggtagcatctgtcatccatcttcaccctcaggacagagacaagccacagatcctcagaaaggcctcaggaggcgggaataaaacagcctgccctaggattccagtcttaaaggatggtgtcataaggatctacaaaagctgagctgaggtcaggggccttgggagctgattggctgtgaagatcagaagagatgaccaccactgtgggtatagcaggaacttttggcatagacaaaaccaaagcagggcatcattcctggaggacctggcaaaaggcgggaagttgagttcaggaacaagtgagcagaagaagcccagtctctaaaactgagacccagacattaagcaagacaataaggctgagccggctgaactgctgaagtgggatctgcaagtagcaggcaagtggccacatggcccaaacaagagaaaaaggaacagggaattgactgggccatagttatggattgcaaaagcaaaactgaaagtgcatgggtcttttctcacatccagtcagtaaagttcttaaaatgtgatgaaatgggaacaaaagagccataaacataggcatgaactgcgacccccatgccggctctctcacttctaggacttcgaccctaagaaagtgagaggtgacagcgtgctggcagtcctcacagccctcgctcgctctaggcgcctcctctgcctgggctcccaatttggcggcacttgaggagcccttcagcccaccgctgcactgtggaagcccctttctgggctggccaaggccagagccggctccctcagcttgcagggaggtgtggagggagaggcgcgagcgggaaccggggctgcacccggcgcttgcgggccagctggagttccgggtgggcgtgggcttggcgggcgccgcactcggagcagccggctggccctgccggcccgggcagtgaggggcttggcacccgggccagtggctgcggagggtgtactgggtcccccagcagagtcggcccactggcgctgcactcgatttctcaccgggccttagctgacttcccgcggggcagggcttgggacctgcagcccgccatgcctgagcctcccactccctccatgggctcctgtgcggccggagcctccccgacaagcaccgccctctgctccacggcgcccagtcccatcgaccgcccaagggctgaggagtgcgagcgcatggcgcaggactggcaggcagctccacctgcggccccggtgcgggatccactgggtgaagccagctgagctcctgagtctggtggggacgtggagagtctttatatctagctcagggattgtaaatacaccaatcagcaccctgtgtctagctcagggtttgtgagtgcaccaatcgacactctgtatctagctgctctggtggggccttggagaacctttgtgtctatactctgtatctaactaatctgatggggacgtggagaacctttgtatctagctcagggaatgtaaacgcaccaatcagcaccctgtcaaaacaggccactaggctctaccaatcagcagaatgtgggtggggccagataagagaataaaatcaggctgctggagccagcagtggcaacccgctggggtccccttccacactgtggaagctttgttcttttgctctttgcaataaatcttgctactgcttactctttgggtccacactgcttttatgagctgtaacactcaccacgaaggtctgcagcttcactcttgaagccagcaagaccacgagcccaccaggaggaatgaacaactccagacgcactgccttaagagccgtaacactcaccgcgagagtccgaggcttcattcttgaagtcagtgagaccaagaacccaccaattccggacacaaaagcagaaagggtttgttaatagggttactctaccataggataatagcttctttgaggactttctctacagccacagggttcaaactagacactgaaaagaagcagtagtattcaggttgaatgcctatttccccatgccagccatcctctttctttcttatttactggatgctaatctagggctgactcttacacccactccaggaaattatagtaagaaacccaacatatcactggtttgttccttcaacaattatatgccctgtgtctgttctaggcatggtgctaggcactaacggtgaagaaacacagtccctggtccaacagttacact

SEQ ID NO: 316271 - DNA, 4001 bp, Homo sapiens
agctgtctctggtgcttcccactagtcctccaagcccaatcttcatgctgagtgagtcaatactagaatttttccagaggagctttgatcaacacacagagagggagccgagcaccttggagcacagcagctgcccttgccacattgggctgaatgctggctcttggcaccccagggccagttccccttctgctcagatcctcctggctcagttctaggcttatttgccccacagaaagtagatctcaaggtgtcttcacattgcgtggtgcccccaatccactgattctctagatgacattgaataagtccttgagctcctctgggcctcagtttccccacttgtatgatatggtagtgatgacatgattaaaagtttaatgaggctcttttcagcacagagctggacactgtaacatagaatctgtgttccacaccctggctgtcacctgacctcaccctctccatgctcctgcaacagcagcctgaccaccctcattccacctcgcactcattaccaccgattcatatgcacctgcccaattctaactgagtggagatgaggtcaaacagatggagttgagggcagcggcaatggcctgggcccccagtagctggggcctctgctgctcacggtcccactagatcctgaaggatggtgggaacctgggagagggcttgggatgccatggcatggtgggggtcacgtggtttgccatctggatgatactgcctaggctcactgggagacacacctggggtctcagcaggaggcgagcagatgcctgggaatggaacataggcccaggaccttaagaggagatagatcccatggcccggggctgggctgaaggcactgaggagcacaagagtgagtcctgcactatcttagccatggcatcctgatctggctgtgctctgctctccaacaggtgtttgcaaggcaggcctacagccagggacttgtccccaacatcatttccccccatcctcatcaccaccactaacagtccccacacctctggcccccaccagctcttggcctctcggacaaagcttggcacctccactttcttccagagcgccaccaaagacgatcaaataacacagaggtcgagagccacctcccatcagggtgcgtggatctgttccggctcagagagaggagggcagagaactctctccaatctcaccgcaaagagatctccaccccttcgagaagcacagagatcagacagaggagatgcggcccctttagggcgtcaaagggcaccgagatctctacatggtctaaacgcgcagagatctcgtcccacagagaggacagccccagcggacggttccccctgggcccagagaaagggggtgcgtggcttcctcccccatatccagccctgctcggtcagcccccgcaaaccccgctctctggaaccacattcatggcgcgcctagtcgccgctctgaccttggggtctccggcctccggtatccgggtcccaatcccagaccctccccgagcctgcgccagggatggccgggaagctggggccgcagctccccctcccccggccctcgacagcgcaccgggaaacccggaaggaaagggaagggaaggggggcgcacggtgtttagagacgtctcccccggggataccctccagccgggcggatctgcgccccttctccccctccggctctctggggcactgatcggggagggagcggctgggcggacccggggcagggaggagcacgcagggactggaggcttcggccctcggggaggaaagttgggcggcggcaggcggagggggctccggccgggccagggctgccgggcgcgggggcactcgctcacctgctggtcccccggccgggccccggggtgggcggctgctgcttggcgcggactcggctcggcgcggggctcggggcactgggcgcaggctcagcggccccgggggagcgatccctgcatcctacgggcgccgccgccgtctcggctccgcggctctgttcgggctcccgggctgggcaggcggcgcgggctcgggctgggggcggggtcgggggcggggtcggggcgggccccgcctgggttcggcctggggcttggggccccgggctggctccgccccagagcgacgcgcccagggctccgcacgtggtgctccgcccgctcggaggggggacacaccagcgcccgccggggcgcacactcccacactgacccgggggctcacagccacagacagccgcacacgcggccgcggacagacagacataggcgggggtacacacacggcgacccggcgacgcttcaccacagatggccacccacgcggacgcggacaggctcacattaacaaacactggcatacacaccagcacccgccagagtatacacacacacacacgcaaccttgctgacttgggaaggctaccagacacccacccacccacgtggacacgggcatacactgacactcatgccgagacagacacacgctgccataggcatacctgcactgacacagacacacacatgcaccctgagacagatacacacccccacacacccacacagacacagacagacacatcattgacacacactgacactgaggaagacactctgacaaacttagacacccacatgacttagacacacatccactgacacactgacacagagacacacacactcactcgaaccacactttcctggagacacacttagtgatgccacagaaatctgcacaatggtacacatctacctgaacacacggacgcacatgctgacagaaccaaacacacacccagacccagaagcaagcaggcaaccaacacagagacacccacacacgcgcgcgcgcaaacacacacacacacatacatatatatacatgtatatacctctttatatatatacttccaccctcttgagccacatacaaccttcaccttgacacatgcagagcctggagtcacatacttacacacccactgtttctcactcagagacatggtcacaggcacacacacacggagacatacgctgacaaacagttgctcccatgcccatgcccaggacctatggggacacacttcttgtttaaacaaaacaggccatcagggcaacccgcttgggtccccttccacgctgtggaagctttgttctttccctcttcacaataaatcttgcgcttctaaaaacaaaaacaaaaacaaaacaaaacaacaacaaaaaacaggccatcagcttttgcccacgaaaaaagtacagtcattggaagggatggtacacttttctgccacattttcagggctcccaaaagcaagaaccgctcttagagagccaaatgggtgccagggtctcagagggcacagaggtgctgggtttgggagcccagaggctgggacctgctcctccatgatggggatcttgaagaggtgggagggcaaagaggggggtgggggacagcgtccgtttgcgacctgggtgtggggcttcgttggacgccttaggtacatacggaggggctgctctgcttgcaggaggggatcagtaggaaagtcagtccacaggaaagttcaggacatgggcctctccggccccgagttgagtggggtgtctggggtacagacggatggaccacacaggtcggctgccagcctttagcgcctgacgagcctcaggttggctagcagctcccactatcggccagaaggggaagtgcaggcagtgtcaacgtttcaacccacgtgcagccgccttcccagagtcacacctaccaggcaggagagtacagtagcaggaaggtcctacctcccctaagaacttccatcacgggcttctcggcctcagaatgaagcttctacttgcaaactgacattgggtcaagcaggagacaaggctaggatagaagctgctgggagtaggggtggatacctgcctcccttccgtccatatgtagcagaagtggggttttcactctcct

SEQ ID NO: 316272 - DNA, 4001 bp, Homo sapiens
gctgtctctggtgcttcccactagtcctccaagcccaatcttcatgctgagtgagtcaatactagaatttttccagaggagctttgatcaacacacagagagggagccgagcaccttggagcacagcagctgcccttgccacattgggctgaatgctggctcttggcaccccagggccagttccccttctgctcagatcctcctggctcagttctaggcttatttgccccacagaaagtagatctcaaggtgtcttcacattgcgtggtgcccccaatccactgattctctagatgacattgaataagtccttgagctcctctgggcctcagtttccccacttgtatgatatggtagtgatgacatgattaaaagtttaatgaggctcttttcagcacagagctggacactgtaacatagaatctgtgttccacaccctggctgtcacctgacctcaccctctccatgctcctgcaacagcagcctgaccaccctcattccacctcgcactcattaccaccgattcatatgcacctgcccaattctaactgagtggagatgaggtcaaacagatggagttgagggcagcggcaatggcctgggcccccagtagctggggcctctgctgctcacggtcccactagatcctgaaggatggtgggaacctgggagagggcttgggatgccatggcatggtgggggtcacgtggtttgccatctggatgatactgcctaggctcactgggagacacacctggggtctcagcaggaggcgagcagatgcctgggaatggaacataggcccaggaccttaagaggagatagatcccatggcccggggctgggctgaaggcactgaggagcacaagagtgagtcctgcactatcttagccatggcatcctgatctggctgtgctctgctctccaacaggtgtttgcaaggcaggcctacagccagggacttgtccccaacatcatttccccccatcctcatcaccaccactaacagtccccacacctctggcccccaccagctcttggcctctcggacaaagcttggcacctccactttcttccagagcgccaccaaagacgatcaaataacacagaggtcgagagccacctcccatcagggtgcgtggatctgttccggctcagagagaggagggcagagaactctctccaatctcaccgcaaagagatctccaccccttcgagaagcacagagatcagacagaggagatgcggcccctttagggcgtcaaagggcaccgagatctctacatggtctaaacgcgcagagatctcgtcccacagagaggacagccccagcggacggttccccctgggcccagagaaagggggtgcgtggcttcctcccccatatccagccctgctcggtcagcccccgcaaaccccgctctctggaaccacattcatggcgcgcctagtcgccgctctgaccttggggtctccggcctccggtatccgggtcccaatcccagaccctccccgagcctgcgccagggatggccgggaagctggggccgcagctccccctcccccggccctcgacagcgcaccgggaaacccggaaggaaagggaagggaaggggggcgcacggtgtttagagacgtctcccccggggataccctccagccgggcggatctgcgccccttctccccctccggctctctggggcactgatcggggagggagcggctgggcggacccggggcagggaggagcacgcagggactggaggcttcggccctcggggaggaaagttgggcggcggcaggcggagggggctccggccgggccagggctgccgggcgcgggggcactcgctcacctgctggtcccccggccgggccccggggtgggcggctgctgcttggcgcggactcggctcggcgcggggctcggggcactgggcgcaggctcagcggccccgggggagcgatccctgcatcctacgggcgccgccgccgtctcggctccgcggctctgttcgggctcccgggctgggcaggcggcgcgggctcgggctgggggcggggtcgggggcggggtcggggcgggccccgcctgggttcggcctggggcttggggccccgggctggctccgccccagagcgacgcgcccagggctccgcacgtggtgctccgcccgctcggaggggggacacaccagcgcccgccggggcgcacactcccacactgacccgggggctcacagccacagacagccgcacacgcggccgcggacagacagacataggcgggggtacacacacggcgacccggcgacgcttcaccacagatggccacccacgcggacgcggacaggctcacattaacaaacactggcatacacaccagcacccgccagagtatacacacacacacacgcaaccttgctgacttgggaaggctaccagacacccacccacccacgtggacacgggcatacactgacactcatgccgagacagacacacgctgccataggcatacctgcactgacacagacacacacatgcaccctgagacagatacacacccccacacacccacacagacacagacagacacatcattgacacacactgacactgaggaagacactctgacaaacttagacacccacatgacttagacacacatccactgacacactgacacagagacacacacactcactcgaaccacactttcctggagacacacttagtgatgccacagaaatctgcacaatggtacacatctacctgaacacacggacgcacatgctgacagaaccaaacacacacccagacccagaagcaagcaggcaaccaacacagagacacccacacacgcgcgcgcgcaaacacacacacacacatacatatatatacatgtatatacctctttatatatatacttccaccctcttgagccacatacaaccttcaccttgacacatgcagagcctggagtcacatacttacacacccactgtttctcactcagagacatggtcacaggcacacacacacggagacatacgctgacaaacagttgctcccatgcccatgcccaggacctatggggacacacttcttgtttaaacaaaacaggccatcagggcaacccgcttgggtccccttccacgctgtggaagctttgttctttccctcttcacaataaatcttgcgcttctaaaaacaaaaacaaaaacaaaacaaaacaacaacaaaaaacaggccatcagcttttgcccacgaaaaaagtacagtcattggaagggatggtacacttttctgccacattttcagggctcccaaaagcaagaaccgctcttagagagccaaatgggtgccagggtctcagagggcacagaggtgctgggtttgggagcccagaggctgggacctgctcctccatgatggggatcttgaagaggtgggagggcaaagaggggggtgggggacagcgtccgtttgcgacctgggtgtggggcttcgttggacgccttaggtacatacggaggggctgctctgcttgcaggaggggatcagtaggaaagtcagtccacaggaaagttcaggacatgggcctctccggccccgagttgagtggggtgtctggggtacagacggatggaccacacaggtcggctgccagcctttagcgcctgacgagcctcaggttggctagcagctcccactatcggccagaaggggaagtgcaggcagtgtcaacgtttcaacccacgtgcagccgccttcccagagtcacacctaccaggcaggagagtacagtagcaggaaggtcctacctcccctaagaacttccatcacgggcttctcggcctcagaatgaagcttctacttgcaaactgacattgggtcaagcaggagacaaggctaggatagaagctgctgggagtaggggtggatacctgcctcccttccgtccatatgtagcagaagtggggttttcactctcctg

SEQ ID NO: 316273 - DNA, 4001 bp, Homo sapiens
tgacttgtgatttcagaaaggcagacagtggaagaggatggctgcaaagcagttcaagaggtacacaccaagtaagcacaggttctctcatcagattctagactctctaaaaaccaggtccccgaagtctgcaaaggcaagtaaggacaataaggagtttcctccatgtgccgagctgtataggttacaaagtgcacaggaaggcggggagggcagggtaccaagggcacagtcaatcagagacctgcgacagactaaggaaatgaagaagcccagagaagagaaagcacttgccaaagtcacagagctagttcaaggcagacctgggaaaagagccccatcccctaaccttctaatgctgagtccacaaaacttcactccaccaggctgcctgtctagaatgtaaagcagttgttacactgagttctgtaaagctgcggttaagtaggttcacgaagaaagtttactgagaggtagtttcaaccaggttaccaaaggaccttagaaataatcagcatttaattctaaccactctcacccaccagtcagggttgatgaaccacacttctgaatgagagagagagagagagagagagagagagagagaaggcgggggggggggggggggaggaaagagggagggggagagaaaaggacggaaggaaggaggaagggcgggagagaaagggagagggagaggaaggggggaggaagagggagcggggagagagagagagaagagagggagggggagagagagaaagggagagggagaggaaggggggagggagagggagtggggagagagggagggtggggagagagagagagagagagagaacttcttagagtacttcttcccagggacctggtattatctggtccctgttaacacctgcactcaaaataattcacctctttgagatcagataatgagttaaaaattcatttaggatgagctgaatgtcagagcataaaagcctcaactctaacctgcagtggaagagccagaggtgagtgatttacacctaaccctctgcagaacaagaacacagtgttctgatttctaggttcctgcaggttccctcaaacctgctgctgagacacacccatgtttctaaaagaatgcatgtactagatattccaggctcagcccagatacttccattctttagttctccttcagtcattcattcactcaaggagtaagtgtggagtgaatgtacactgcagatgccacagagacttaaaaaaccctgagcccctgccttcggagggtcgttcaggccatctttacgtttcccgaggtgcccatcctacctgggggccctaccccgagcaacagttcaatcatctctgctgggagctgcagtaggcggcagaaaggaatggttaggagggttcaaatctcggctctactaccacttaagcagctgtgcaagaggctccacgtctccgaacctcaagtgtcctcatctgtaaagtgttgagaagaatagcaccttcttcacaaggctgttagcaggcggagattacgaacaatgctgagggctcggtatacagtagctcctctgctgttcctcgttttgttttcaattgttgaccgaaaagaaggaagggagactggcaggagacgcaggagcggcgcgccccgcaaagtcagggaggttcctcggcctcacctctggactcccctcggaatggtccgcaaggacggggccagagccccccaaatctctaagcggtggaggggagctgaacggctccagcttgggatttgggactcaggacggccgaggaacccgtgaaggccgcgaccgtggccttcaccctgctaggcctcctcagtaccaacactcaccatgattgcggcggtggctgctccaggtctcggacgtggcagctcccggcggcgcctcggaacagctcacttccggcgccgggcccgacgggccgtggcgtaggagcctccgggcagcaacgcgctcggctcgcacagcagttccgcgccttccagagggcgcgccccgccctcccgtggcccagcccctatcctccagtgacgtgcgagaccagagggctggggctctggttgccgcagttaccctgacccggagggctttggaatctgaagctctggtgggtctactctcccgaccaagtctgcccttttcctgagatccataaatgaaagaaaggattaatataactatcggccgggcgcggtggctcatgcctgtaatcccagaactttgggaggctgagctggggggtggatcacctgaggtcaggagttcgagaccagcctggccaacatggtgaaaccccgtctctaccaaaaatacaaaaattagccgggcatagtggcgcgcgcctgtagtcccagctacaggctgaggcaggagaatcgctggaacccgggaggtggaggttacagtgagccgtgactgcaccattgcactccagcctgggcaacagagagacactcttgtaaaaaagaaaaaaatctatctatctatctatctatctatctatctatctatctatctatctatcatctatctatctgcagcttcacccgcctcactacggctctgggtgcgactggtcttatgatgaatgttgtaggatgagtgacatcttaggagtaagtagactgtcctagtgcttccttgttgtagtctccctctcagtacccaaggactgggaccagggcagaggaggccagggaatgcccctcgccagaggctgggacctctggccctgccatccctaacccctatataggactgccccttccaaaccgatcccctggggtcctgagtaagtcccatcaaggagacccccctaggcaatgaaggatctcagccaggctcctgcagctagagccccagacctaatcctcagggtccccaaccccaggtctctggcttcacaaggtagggcagctgaaggctccccacaagcgcagtgagaatgccacactggaggacagagcctgggctccccgcctcagccacatatggtctagccctgggccccttgtgacattaaggaggcagatgagctgggggaggccttggctccccttgggcaagtcacagtccttcagtttcctctgctgaaactgggagtaaggaccctagctggagatggtcactgcttgaaggaagatgttaaggctcagagaatgtgatagacccaaactgtcaaggagctttggaggggaggccaggggagtagggtgttagaattaagggccaggcctctgggcaactcttctaccccactgcagctttcaagattttttattgccctctagtggagaaattgttgcaggggtgtgagggggtggtggttaggttagagcagggaacaaaggcaggtttcaggggatctcttggatctcctgttgttttttttgtttttttttttttggagatggactctagctctgttgcccaggctggagtccagtggtatgatcttggctcactgcaacctctacctcccgggttcaagcaattctcctgcctcagcctcctgagtagctgggattacaggcatgtgccaccatgcctggctaatttttgtagttttagtagagatggggtttcaccatgttggccaggctggtctcaaactcctgacctctggtgatctactctcctcggcctctcaaagtgctgggattacaggtgtgagccgctgcgtcctgccagatctcctgttcttcaaggaacaggctctggccttggctctatagctgcaccactgactttctaggtgataaggccaagtcacttttctctgagcctcactttctttgagtggaaaatgaggacaagggcatattagatgtaaatataatgcatcaggcataattgtgattaaaagaatttccttgtgtagacactgatgttgaagagattggggatttgtgacaagcaacagaactgtatcttattcattaaggtatttgctgtaaggtatttggccca

SEQ ID NO: 316274 - DNA, 4001 bp, Homo sapiens
gttattttttttctttgctcaaccactcttctcttaaattcttgggatagaaaagaggacttaaaagaagtttcagtgtggaacagacatttcttaccattttccccatttcatcttttccagcacaagccctgtaggtataaagtttgacttgtgatttcagaaaggcagacagtggaagaggatggctgcaaagcagttcaagaggtacacaccaagtaagcacaggttctctcatcagattctagactctctaaaaaccaggtccccgaagtctgcaaaggcaagtaaggacaataaggagtttcctccatgtgccgagctgtataggttacaaagtgcacaggaaggcggggagggcagggtaccaagggcacagtcaatcagagacctgcgacagactaaggaaatgaagaagcccagagaagagaaagcacttgccaaagtcacagagctagttcaaggcagacctgggaaaagagccccatcccctaaccttctaatgctgagtccacaaaacttcactccaccaggctgcctgtctagaatgtaaagcagttgttacactgagttctgtaaagctgcggttaagtaggttcacgaagaaagtttactgagaggtagtttcaaccaggttaccaaaggaccttagaaataatcagcatttaattctaaccactctcacccaccagtcagggttgatgaaccacacttctgaatgagagagagagagagagagagagagagagagagaaggcgggggggggggggggggaggaaagagggagggggagagaaaaggacggaaggaaggaggaagggcgggagagaaagggagagggagaggaaggggggaggaagagggagcggggagagagagagagaagagagggagggggagagagagaaagggagagggagaggaaggggggagggagagggagtggggagagagggagggtggggagagagagagagagagagagaacttcttagagtacttcttcccagggacctggtattatctggtccctgttaacacctgcactcaaaataattcacctctttgagatcagataatgagttaaaaattcatttaggatgagctgaatgtcagagcataaaagcctcaactctaacctgcagtggaagagccagaggtgagtgatttacacctaaccctctgcagaacaagaacacagtgttctgatttctaggttcctgcaggttccctcaaacctgctgctgagacacacccatgtttctaaaagaatgcatgtactagatattccaggctcagcccagatacttccattctttagttctccttcagtcattcattcactcaaggagtaagtgtggagtgaatgtacactgcagatgccacagagacttaaaaaaccctgagcccctgccttcggagggtcgttcaggccatctttacgtttcccgaggtgcccatcctacctgggggccctaccccgagcaacagttcaatcatctctgctgggagctgcagtaggcggcagaaaggaatggttaggagggttcaaatctcggctctactaccacttaagcagctgtgcaagaggctccacgtctccgaacctcaagtgtcctcatctgtaaagtgttgagaagaatagcaccttcttcacaaggctgttagcaggcggagattacgaacaatgctgagggctcggtatacagtagctcctctgctgttcctcgttttgttttcaattgttgaccgaaaagaaggaagggagactggcaggagacgcaggagcggcgcgccccgcaaagtcagggaggttcctcggcctcacctctggactcccctcggaatggtccgcaaggacggggccagagccccccaaatctctaagcggtggaggggagctgaacggctccagcttgggatttgggactcaggacggccgaggaacccgtgaaggccgcgaccgtggccttcaccctgctaggcctcctcagtaccaacactcaccatgattgcggcggtggctgctccaggtctcggacgtggcagctcccggcggcgcctcggaacagctcacttccggcgccgggcccgacgggccgtggcgtaggagcctccgggcagcaacgcgctcggctcgcacagcagttccgcgccttccagagggcgcgccccgccctcccgtggcccagcccctatcctccagtgacgtgcgagaccagagggctggggctctggttgccgcagttaccctgacccggagggctttggaatctgaagctctggtgggtctactctcccgaccaagtctgcccttttcctgagatccataaatgaaagaaaggattaatataactatcggccgggcgcggtggctcatgcctgtaatcccagaactttgggaggctgagctggggggtggatcacctgaggtcaggagttcgagaccagcctggccaacatggtgaaaccccgtctctaccaaaaatacaaaaattagccgggcatagtggcgcgcgcctgtagtcccagctacaggctgaggcaggagaatcgctggaacccgggaggtggaggttacagtgagccgtgactgcaccattgcactccagcctgggcaacagagagacactcttgtaaaaaagaaaaaaatctatctatctatctatctatctatctatctatctatctatctatctatcatctatctatctgcagcttcacccgcctcactacggctctgggtgcgactggtcttatgatgaatgttgtaggatgagtgacatcttaggagtaagtagactgtcctagtgcttccttgttgtagtctccctctcagtacccaaggactgggaccagggcagaggaggccagggaatgcccctcgccagaggctgggacctctggccctgccatccctaacccctatataggactgccccttccaaaccgatcccctggggtcctgagtaagtcccatcaaggagacccccctaggcaatgaaggatctcagccaggctcctgcagctagagccccagacctaatcctcagggtccccaaccccaggtctctggcttcacaaggtagggcagctgaaggctccccacaagcgcagtgagaatgccacactggaggacagagcctgggctccccgcctcagccacatatggtctagccctgggccccttgtgacattaaggaggcagatgagctgggggaggccttggctccccttgggcaagtcacagtccttcagtttcctctgctgaaactgggagtaaggaccctagctggagatggtcactgcttgaaggaagatgttaaggctcagagaatgtgatagacccaaactgtcaaggagctttggaggggaggccaggggagtagggtgttagaattaagggccaggcctctgggcaactcttctaccccactgcagctttcaagattttttattgccctctagtggagaaattgttgcaggggtgtgagggggtggtggttaggttagagcagggaacaaaggcaggtttcaggggatctcttggatctcctgttgttttttttgtttttttttttttggagatggactctagctctgttgcccaggctggagtccagtggtatgatcttggctcactgcaacctctacctcccgggttcaagcaattctcctgcctcagcctcctgagtagctgggattacaggcatgtgccaccatgcctggctaatttttgtagttttagtagagatggggtttcaccatgttggccaggctggtctcaaactcctgacctctggtgatctactctcctcggcctctcaaagtgctgggattacaggtgtgagccgctgcgtcctgccagatctcctgttcttcaaggaacaggctctggccttggctctatagctgcaccactgactttctaggtgataaggccaagtcacttttctctgagcctcactttctttgagtggaaaatgaggacaagggcata

SEQ ID NO: 316275 - DNA, 4001 bp, Homo sapiens
tatgtataagacctcaggcttcacaacagattttacccacatctaggacagggcccccaatacatgctcaaatgtgtcaatcccaacatttttatagtgccacatagttcacggttgggtaggtaaaaccaccattttacagatgaggaaactaaggctcactttctcaatgtcacactgctagtatatagcagaactggtacttcggtctaagtttctagtatctctacatcactatgcttcatcagtctcccaaaaccaacaagacacaagaaaccagggatatagaaactatctattcacttgctgcctgggttctaatcctggctccaccatctaccagccatgtaaatttggacaagctttgcctttctatatctcaatttccacatctatatattgtggctactaatagcatctatctcataggcttgttttaaagatgacaatagtatctatctcataggatcatgtaaagtgcctgaaacattgccttgtaacatgctaaaagcactacattaaatatttgctgtattatttattgattactctccatggaccacgcactttatacacattacctcatttaagcgttccaaaaacctgtgagataggtattattagttccattttacctttgaggaaattcaagcccagaaagcttgaggaattttttttaatccctaaacgagtaggtgacaaagtagggatttaaactcaggcccaattctaacaactctgtgagacactcaaggaaggtcacaggcacccctgtgataagacctaggcctctttcatataccaacataagatatacttcgattttaaccagttgcacgcaaaaaaaaaaaaaaaaaaaaaaaaaaaaaaaaaaggcactaaacagatgtgatggttttcaacataggaaatacccgaatgtcccattactttaggatatggtcacaggtgtcagagtcaaatactgaatgaaccttaatatatcagaaattgtaggtaccgtttaaggcattgcctgattccttacaatcttagcatgtaagcaaatatcagtaacatggaaagtgattcagagtttgaaaagtggctgttcccctgactgaagatcccaacatctccagtctggtggctgatacttttgctctgggctaggctttgccttggctgaataggcataggagggactggttctcaagctcgccccctgccccaggtggatgatccaggaaactaagcagcagggaaaaattatcttaagctgtcttcactggcagagagattcaagccagctggggcttgtccttttcttttggaagcctcctccacttgccgagccaattgctcaggtctcccttctgccacatcgttcccaaagtgactcttgagacagggtctcaagagatttccgtgagccaacgcgggcaaatatctgggctcagggctcactccatccccacaaaacgtaaagtaagacactggttcaagtcccattctgcctaaaagaaataggaaatgccacctcaagctctcatgggccacctacacaggtagatcaccgtgtttctgacacctgggcgccagggaatccccaccaccatgctgacagccaagtgcgactgtccctccccttcaaacactcctttcctggctgcccaacacccgaggcggctcagacgaggcgcaaccgccgcccgcctggccccagagaaccctcaagtcgaaggggacggggtccccgcttgcccgtccctccagagctccgcggccccgactcccatcccaaaggcacggacttggctcctgcccgtggggtaggtcttcaatcccgagggcgaaggccgaggctgtggcgagaggcagggagcgggaggggagaggccggcagggattcgaacgacccctaagaaaggaagaagaggactgggaggggccggggagtacctgtcgagacgggacccgccgctccgagtgacgcgccccgaagtgcattgtggggcctgggagggacctttcggcgacgctgcggcgcgtccaacgtggctcgcgcccgcggaatcaaaccacgcccccgttccctcagctcacccaggccaatcgggttctgcaggaaggacacaacaaccccccagctcccggggccctccttagtcccacccgctccaggagagattggcagcttctctcgcacctgcgccagaaaagtacagcatcctctgatgacagaactacgttgacttcagaaatagggccaatctcttccgctcgccgccctgtttctgcaggcattttgtctctcacacgcggccctacagcagacacttataaaggggacagggagaaaagccccctctgggtgagcaaggagaagacctggccccgtctattcccacacacaagaaggaaactaaccatggcagagaagtgccagatgctgaccctgcgaccccttccagccttcgcatcggtcatgcattattaaacaggcatttcctgactgtttaccatgtgccaagcaccgtgttaagcacggggttacaggagtggacataacacttgatggaatttaaggagtaattggagcaagagatattaaagcataaatagttacagaactacaaattgtcagtattgggagggaaaattagtgggtgcaatgatcaattaattttggactatcagggaaaagacttctgaataagtgccttttaagcggcaggcatattgaagagccttagagaatgttccccgccaaggaaatattgtgtgaggttgtcggggcatgaaagaacttcttgtgctctaggaactaaaagggagtcagtgtggatggagtgtagggagcaaggagaaactttgcccgttgaccttaagatatcttccaaaatacagcctgaaatctgtaatgtggccaataagagtcagcatggtctggcccttgtctcatctcagcccaaggtcaatgggcagctaataaagactattaagtaggatcctatttgcatatttaagaatcactcaggctgtttgtggagaatagtgtggaaaagggcaagaagggctgctggaaagccatttggaggcagttgcgtcaggcaaagccagaaatgatggggcttgaactagtgtaatgggagttagagacagaaagaggtagataatttcaagatatgtataaattagaaatggtatccaagggacttcataacggattggtttgccgggaagggtcaacaaaaaggaatattaaggatgactccttaagtaactagatggattaagaagccatttactgactcatggaacacagaaagaggagcaaatggtttggaatatgttaaatttgaaatgcctataaatggagatgtcaagtagatttggatatgtaggtctagagttcagaagaaaggcctgaactaacataaattttgtcctagatatatactcaacataaatgtattcatatattcaccagaaaacatatgtataagaatgttcatgaaataaataaattttagaatattctgaccaggcgcgatggctcacgcctgtaatcccagcactttgggaggccgggggcgggggtggatcacttgaggttgggagttcgagaccagcctggccaacatggtgaaaccccatctcaactaaaatacaaaaaaattagccaggcatggttgtaggcatctgtaatcccagctacttgggaggctgaggtaggagaattgcttaaactgggaggcagaggttgcagtgagccaagatcatgccgctgaactccagcctaggcaacagagcaagactccttctcaaaaaaaaaaaaaaaaaaaaaggaagaagaatattcacatagtagaatactatacaggaaagacaataatctacaaccatatgcaaagcatgcatgaatttcacaatcataaaaattgagtgaaataagtcagacacaaaaaagattactatatgattccatttacataatgttcaaaataaaaaatcatata

SEQ ID NO: 316276 - DNA, 4001 bp, Homo sapiens
tcagcctcccgagtagctgggactacgggcgaccgccaccacgcccggctaattttttgtatttttagtagagaaagggtttcaccgtgttagccaggatggtctcgatctcctgacctcgtgatccgcctgcctcggcctcccaaagtgctgggattacaggcatgagccaccacgcccgcccatgtaatgtgtattttatagtttaaaaaaaaaacttataaaatagtgtggtactcagacacagatcattggaacaaaaatccagaaacagacccacacatatatggtcacaaggcgaaggtaattcaatgtataagagtcttttcaggccgggcgcggtggctcacgcctgtaatcccagcactttgggaggccgaggcgggcggatcacgaggtcaggagatcgagaccatcccggctaaaacggtgaaaccccgtctctactaaaaatacaaaaaattagccgggcgtagtggcgggcgcctgtagtcccagctacttgggaggctgaggcaggagaatggcgtgaacccgggaggcggagcttgcagtgagccgagatcccgccactgcactccagcctgggcgacagagcgagactccgtctcaaaaaaaaaaaaaagagtcttttcaacaaacggtaatggaacgactgtatatcccaataggaaaatgttgacacttacttgacaacataagcaaaaattaatgatattagatcatatcatagacttacacgttaaagactatgtaaaacatatatgagaacacagaatatcttcaagaacttgaggtaggcagagatttcctagcacaggaaaagcacaaaccattaaaatataaaactgaccaattgacttaatcagaattaaaaacttctttgccaaaaacgtcaaaacaatgaaacgacaggcccagattgggaaaaagacttcgcaatcatttatgtaacaaaagattttcattcagagcatacatatatctaacaaaacatttgtatccagaactgttaaacacgaaggaccagatttaaaaacgggcagaagactggaactgaaacttcacaaaagatgcagaatggtcagtaagcacaggacaaaaacggtgccagtgacgctggtgccaaagcgggaaggaacgcattcttcagcctaaaagacctaacagtaggacacggacataaccactcccggccaaaaagaacacagagcaacacaacgtcttggctaacgaaaactcaaagcctcaattcactcagttccttcacagcgctcggaaacagagaagtctcgcggtatcggaaaatgcgcggcgctcacagccacacctgacgagatggagggcgcaggcgcatccacggctttcagattgggcgactgacttcaaaggggggggcaaacagggaacgcgcaggtataggagcgctggctggaggctcctcgagagctccccagacacgcccccgtgcgtacgcccccgtgcgtacgcccccgctgccgccaccttcggttgaccacccccatctagactgtactctcgcggtatttgtcccgactctcgcggggtttagcgtggcattgggaggcccggcctgggggaggagacggcgttccgttagcggcgttggggtttggctgcagtggcagtgctttctcttctgctcacggggacccgctcaggctggaggccagccaggtgaagagctcgcccgcatgcgtgcgcgctgcgtgggagccgcgaggcccggggcgggagggggcctcgtcttggcctcctgcgctgtcgcgacgggccggcgtgaggcaccgtggcgcggacttcgtctcagccccgccctcgcccctgccctcgcccccgccctcgcccctgccctgaccgcttttctccccctctctcccagctcttgccgccacctcggtcgcgatgggggcgcaggaccggccgcagtgccacttcgacatcgagatcaaccgggagccgggtgagctggaaactggggagcgctgctggggccgaggcctgccttggcgaaggggaggggtctaccctcagcaaccctcccccggcctttttgggagcgggtaggaggcgcaggcaactttccgttttctcttgagagaaaatcagtgggagaggaaggtggcctgggcacacccctaactcgcagtccgggcctcttcctgccaaaccccacacaccccgctgcatctccggactgagtcctcgtagccagcctggcgccaagaaaaggaggtgcagttctttgaggactttttctctcccagtgtctccgtgaggcagacactcccgatccgatttccggttatcttgcttggtgctatgaagtttcaactagtaggaaatattgtgtgtttcctaatcacgatatatcactaatatgttaattttgcctctatttttccttaagaatctttagctagaatttcgtggttcctgggaaaatggcttagtgaagatcttttgtgataaaccagagcattttgtaccagcagaattgcagcatgcatgcacttagcattaatgtttgtctttagggaatccagacatttgttagtgtattttttttaaatgaaacatttccttctaaagcatagttatttcattctaagtagcagagcgtgcagggtttcaaactgttttcttagctttttttgttatccgtgacaaaagttttaattggagacatatatatatgtgttgtctttgtgcaacatcttgttctgcatattcttatgagagcctgctactgttctagggtctggagatagagcagcgcataaaacaaaggcctcttccttttatagtttatattctattggggggaagacggacaactaggaaaaaaataacagtgacttgtagttgggatactattttaataagttggtcagacaaggccattttgagaagatgagatttaagcaggtatcagaaggagatgaagtgagccgtatttaagaagagcattcgtggtagagggaaacagcacagccctgaggtgaggagtagtatacagtcaggcgccaaatgacatttctatctttaacaatggtcttatatataatacctttttttggtaactttttaatgtttagctgtgtttagatatacaaatacttcattgtgttaaagttgcctacggtattcagtggagtaacatcctgtacaggtttgtagcctaggagcaaatagactatatagcttaggtgtgtagtaggccgtaccatctaggtgtgtttaaatacattccatgatgttcacacaatgacgaaattgcctaattacacatttctcagaatccgtcctggttattaaacaatggaggactgtacttgcatgtttgagggacagcagggtgcccagtgtggctggagtagaagaggaaagagaatagtaagaaatggcctgtaggactgactcagtgaggtaggaagatattaaagggtttcgagcaaagggatgagataatcctggaaatttggttgccttctctctctttttaatgtttttagccttgattgatcttttttttttttttttttaaataagtgttactagaaagccttgatggaccttaatctttattttgtagtgaatccatgctttagataacagggttattttctattaagaattaaaaatagctcacgcctgtaatcccagcactttgggaggcagacgcgggtgtatcattttgaggtcaggagttcgagaccagcctggcctacatggcgaaaccccatctctacaaaaaataaaaaaattagctgggcatggtggctctcttagtttttgcctgtagtcccagctatttgggaggctgagactgaaggactgcttgagcctgggaagcagaggttgcagtgagtagagattataccactgcatgtcagcctgggtgacggagtgagaccctgtctcaaaaaaaaaaaaaaagaaaagaaaagaaaaatagtagattgctgaagagtagaagt

SEQ ID NO: 316277 - DNA, 4001 bp, Homo sapiens
aaaacatattttaatttgcctcccttatttcctaaatcttcttcccagcatctgtttataaactgctcatgtcatagattatctctgttctattaacaaagactttatgcctatgctgcaggctacccttgatcctgttttttcttccaccttttacccttaacccctcctcaagcccctaccacatgcactgagagagagagaggctgagagagacagaaagaaagagaaaaacagagagaaagagagagatgactgcaccttgcaaaataggaatttagacaaaacaggcttcatttggcacacaaatattcaaacacaaagtgttcaccataaagtatatacagaatacagaagactcaaatacacaatacagaagacaaaactgagttgtgccacccttactgaattcaccttcagccacaggacttgagaactggttaccaaatctgtagattctattaaggctccaagttgcttggggatggagtgaagaggagggtagaggtcagtttcgtcatttgttaggaactaagaggggtagggaactaaacttgataggaccttttacactgataatgttattaaatgcttgtaactataaggtagacataatctataccggataggtgggaaaactgcagctgtaaggctcaagaggtaaagctagattcaacccagacttccttacttcaaatattctaaagcctaggatctttccaccacatccttcttctacaaatccaactttgggaattacagctactccctttctctaaaataatttcttctccttagagcactaataagctaatcagagacctgttggtagaggaaggagcctgagattacacttgttacaactgctctttatccactgtattaccttgaagtcaggttgtcctctctatgatcatgttactttttgaatttagttgatttctaagttattctaagaataaaaaacactgactccaagatggcttctgttgcaaatgcaaacacttaaatcagagctattaacattgtccaaaatgtactttccagaggaaacactatttgtttatttaattctatctggcaacgttaaaccatttccagttgcttccatttttcattttactaaaattatctttagtgggatcaactcttctctgcaaaatgtaattaaatattaccctatatgttggttctgagctgtatttttttctgaccatgtcacaaatttcaccaattacttttcacactggcaatagtcttccgtggcttttatttctacaaacctaatttttccccgagtgctttatccttctggctctggaggtacatgtgtaaatctgtaatgaacacaaaacctgtaatggaacgtcctacacctagtgctctgaaaagttggttcagtgtatccaatatttaaagtctaataacacgggcatgctaagggaagtttgctattcagattaaacaatgctctgacgtgagcttcgtgaatggttaaagaaacaatcgtcccctttctcactccccatctcttccaactgggagaagcccttggcgcccatctgtcagcccagggttcctgcaggcgcgtgccttgggtggccccggggtccgggaacaggctgacgggagaaaggggacagaggactccaagaagcccagtgaagccccgtggggagccccatggtcaaggccgggactgagggccgggtgggccctgggccgcctccacctctgggcccgccctgcgccacaccctaacccgcctgctcttggctaacgggccgcggcacccgcctccgcccgccagccctcacctcgcccggacggcggccttcggaagtcggcgcctgccagctacccgccgcctcctcagcaatcttagccgaccgggagggctcggcccaggtcaccggcagcccaggcgcaggtaggccgtggtgcgcgtgcgcgagtcttgagccaccccacctcccccctaccccgcattcgctgctgctaagcgacacccgcacccaaaccgaccaatcccggcgcgcctccacagcccccgtcccggcgaaggcgcgaacgtagtggttcttaaagggctgcgacccaaacggagagggagtgtgacgggggcgcgcgcctcccaactttcttcccacctcccggctctcaccgcggcggtttgagatccaagcctgtaattctcacgtccggaggtgagaaggagccttcgtgatctaagctcgattcctgccggggtagcaaccggactgacgtctggaggcggggaggctccgcgtgacagagtgataacgcccggggcgtatgttctgcggtccgcgcggctgggcgggaggcccgagataggcaaaccaaagagcacaacctactgccagcctggatggggcgccaaagtccgacccagggggacacaccccaagctggggaccgaggcacccacagatggatgactggctggaaggagattaggtaggtagcagagtccgtccatttattcatttagcaagtattgagcacctgctatgtgccaggggttgtggacaaagcgaggaattcctgacacgaaaaactatgttaagagaggaggcagggtgagagcacccttcaaacaatcaaacacctgtataaatacaaactgctcttcagggaggagcaggggttttgggagaatttacagaagcttctaggctggtgttgggaatcacaggaggctaactaggcaaaggggagaggaagtgtgtttcagatggagagattagcatgtatataagaactctgtggaaggcagcagagctcctttgagggatgaaaagaaacccagaaagggggaaatggaaagttagtgcttaataggtacagaatttcagctggagaagatgaaacagttctggaaatggatagtagtgatgatcacacaacaatgtgaatgtaccaaatgccacagatctgcacacttaaaaatggttatgtacattttaccacaaaaagaaaagaaactcagagtttagagaataaaggagtggagtgagatccactagagcgaatagaaggggcaggaccatgtaggattttatggaccatagtggaaagtttaggaccatagaacactggtcaaaattgcattttataaaactcactttggctgctaaagtgcagatcaaaatggagaagtctcaacagagctatggtgggactggcctgggagccagtgcagtcatctgggcaagagagaatggagctggagtgtggactagggtgagagtgaagaaaaagagatctaagaaggctgcagagaaatgtaggagcaaaatcaataggacttggtgatgagttggatgtgaaggggcgatgaagcagcttcaaggatgatgccactgttcagccttggataaatggatggatggtgcagggattcacagatatggagaacactggaagaggagataagattgatcttgagctccatcttagacaagttgaatttgaggcacctttgagacttggttaggattttgcgatgattagttttagatgtcaacctgactaggttaagggatactcaggtagctgggggaacattacttctgggtatgtctatgagggtgttcccagaagatattggcatttaagtcaatggactgagtaaggaagatctgtcctcatctaatatgcgcaggcaccacataatagaacaaaaaggcagaggaaaggcaaattctctactctggagttgggacacccctcttctgcccttggcatcagaattccccgttcccctaatctcctaactctaggagattaggtagtagagtccgtccatttattcatttagcaagtattgagcctttggactccaagacttgtaccagtggttccccaggttctcccggcttgggccttggactgggagatacaccattcagcttccctggttctgaggccaagtctaagacagggtagtcttgaactgaagcagtctaccagcctcc

SEQ ID NO: 316278 - DNA, 4001 bp, Homo sapiens
ttcagagtaacctgtctgaaatgaatcttgatgggaaacaaagagcagacaattttttcaaaactccctttctaatcaccaagtcctctctcctggttacaatcaaatttaacatcaaaaccccaaaagctctttatccaagtcctgtctcctctgcttcttagtagcccctaaatccattcttgctcagtaccacagttcatcctctgatgtgaaaagcctctaaaccaactctagtcctctccttttcttccaaagtgacattctcatgtctggcccttgttattcatctcctaatgttccccacctacaattatgttctatcaatagcaactacatctaataacctcccatccaaacatgctacactcttgtcaccaatgcctttgcaaactatatactccttttatttggaattcctttccgtcccttcaaggagacttctatttctccttcaaaaccaccataagacatcatgtctcccagagttaatcccttcctgagccactgctataccttgcacgtatttcccttgttccgtctaccacactgagttacaaggccaaggtcacatagctattaaggtgctatgtaaagggtgggacctaggcttgcctgcctccagagccatgccccttcgctacactggaattgagggggtaaagctttacaaattcgtccattaaaagcagcacatgggcatttatatgaaactattttacgtaaaaaaatgaaagtggattccaagcacccaagtgtccatgtgaatgctttaacaacagtttgaaaaataatgtgaggacacaaacattttattccccactctctaacctaggaacctaatgaaactttttttcgttgacagctgtagttacactggcaacactcactccacacaatttctgattcagcacagctctaaatttaatctttccttgttttaatacaccgtctgtgaaaagcagcagacttcacaaaagaatagcctttattccccctattgtgacagcctacataaaaggtacaaaatcatttgtaaatactaaagtgacagcccttccctttagcagctggatacaaagggcatctcctgggaaaaaaaaccaacccgtgatctgctcccgttggaggtgaaaaagggagggtaactcaatctgctatcctaactgaggccttattcattcatggcccggatccatttttgggacagggcaaccggaggctttgttctcggagcaacatccaccaaagatgctccaaataaagcacagtgatttcagtggaaatttccacacaaccaggtcacctttcgacagctctccggaataacagagcacaactacactccaagggaagagaagggagagtttccattgccgtgctgaagccatttttaatcatactgtaaacttccagagtccagacagtttcctgaaaccttctttgttggcgatttggggtacttaccttcctctctggcttctgaatttccggcaggatgacacagaagggcttgatgacttccagaaatttgactttgatgggagaaacaaaacaggaagagttgggacacagagaagtaaccttccgcgctacccagggacgccttctgcccacgacgagtgagagcaggggccaggggagccggccgcaccccggacgcgtggggatactcgagaagggccgggggcacgggccgcgttctgcagggggccggtcagggttggccggcgggcgcccgaccgcacgggtgtggggaagggggatctgttccgtcccggcctcaatagggcttccctacaggactcacttgccatggcggcggctgctcgggctccgggtcccgcttcagctcagctctgctccgcgtgaggcgacgctgcccgcggcccagcgcgttccactgcacagcagctccgccgagagacacgtcagtgctagcccggcggcaagcggcgcggcgcggcgcggggcggggccggggccgggcctcggatcgcttccgcttcctgccacgcgcgcccgccggccgccgcgcttcgccgcgccgcgccgcttcgccgagacctcaagccccggcatgcagcggggctcctggggcctgtcgggaaggggcctggcgcgcggggcccgccgggactgggggtgtgcggctgcgcagacttggtaacgcgagagcgcgcggggagggtgtgtcacgcctcccgagactggggctgtgcggcctcacggagaaactgaggcaggcgcgaagcgtcgagtgcgcgcgtggccctgcaggcaggcggagaccctggtggctcccatacacgtaacagcactcactgctctttgacgttagtgaatagaccgtaagctccctggagcagggaccttatcccagcgtctaccgcggcgcccgtcacctagtaggtctccgtcattacctgctgagtagggcgcgggctggtggggcttaccgagcaccctcgctgtctgagtcattaagcaaacccggaggcttgtcgtgggtgtgggtccccttccatctgagaacgaatgggatgagtttctggagagacttggccggagaagggccggggcagctcgggaagtagtctgcctcacagaagaattcaggaaggcctcctgggagagtacctttgtgccgagccttgatagattctggcgagaaggaatgagggaacaggttgaggagactgttgtgggcaaagcatggcggtgtgattgcctaagatcggtgtgggaaagggggataacgggtagggcaagggatgctggggctgggggttggaatttactttcaggcatctgtagtcagtaggtatgatgtcatctaagagaaacagacttaatgctgtgagcatttagcagggaggaggtgggcacgccttgtgggatcaggcaaggtttcatggagctaaaccttgaccaggacaggtagaagttgagggtacatatgtggcaagatgcttttttgcttttaatttaggtgtcaactatttggatttttccattctcacccatttctagcagataatcaggttttgtacattcttggctcagaaagttggacaggacaggaagtcttttttggaatacaaacccactggtggaaaattcaaaggactactgggaacaggcaggtaacttcagtgaagtggtctaggtgtgacatcacttgatatccatcccccaccaaaaaggggaaaaagaagacattgactctttattcagagtctgaaatgcaacccatcttcacttccaggacccactgatgatctcttctggagttttggcctgaagctaaaactggcagcccctggactaagttcagcatatagactagatccgatatttagccattatgcaccctgcaccatattgatggttaaaatgttgaaatatttcgagggtaaatagtatagtaattacaataaatattacaattagttaatagaaattttaatataaactcattggtttgtgctaatagttgtaggatgtcagtaccattgataacaggcctcctgttgtttccacattatgacacaatctggcctgtgtcactgcagggactgcagccaagttacgtgtgttaaatcactgattgctttaggagaatcactagtttaaaatatttttattggactgggtgcagtggctcacaccagtaatcccagcacttcgggaggccaaggcaagaggatcacttgagcccaggagtgcaagaccagcctgggcaacatggcaaaaccctgtctctagaaaaaaatacagaaaaaaattagctaggcatggtggcgcatgcctgtagtcccagctactggaaaggctgaggtgggaggatcccttgagcctgggaggtcgaggctgcagtgagctgagatctcaccactgcacttcagcctgggtgacgacagagtgagactctgtctcaaaaaataataaaatatttctattgtaagcacatacattaattcttcggaaaataggtatgc

SEQ ID NO: 316279 - DNA, 4001 bp, Homo sapiens
agctatactctacataactcccaacctaatagtttactgaatagagggttgttaatctttcttcagcatatcaaagagtagttaacaaaaaataaaataacaatccaatctaaatccttcatcctgggtaaggagtagaatagaagggaggggctgcgtgccaaacacttttaataacttttaataaataagttgactcacctattattttcacagcaatcttaaagtttttcttttttcttgctttttttttttttgaggtaaatatgttttcttaccgatgcagacagggaggtaaaaattaacttgctcaaagttactcagccaataattggtggaggtggggtacaaacaggcagtttggctcaagttttagctctctgccactgtcacattactccacagcctctgtttaatataagatcacaactaaataagagcagctattcaaaaggtgaattatatagcccttacaacaatattaaagagcaactggaattgtaaaacaatgtgtattgaagggcataaaattgtactgtcaagtgtaaatctaaggagttctgtaagtacaaatctgacagacaatttcaatatacaatctaataaaatactgtatacccacgtcagaggaataacactaactcttgaaagattaagaacagtataattagaaacttctactgatcttaagacctagtcttatctgtctgaactcgaaatctgcctctttctaattcccttctgcaccctgttcggaactactttatttctgccaaattccaaaattccaaatttactgatcatgtgtgtctttttcacagcacttaaaaagtttacagaagaattttaacttgcatagctcaaaacatctgtattgtacgccaataaatcgataaacttaaaaaaaaaaagaagggataaaatggaagaaagaaaaaatcattctaagcaatgaaatagtaaggaacagaaaggcaatgatgaatgtaacaatttatgattatagtaacaatttactacatgtgatcaatttgagggcttatgaaggtttctcagcacatcagctgatgagacgactaataaatatcctgagtccaagatgttctacataattaatcctcttggcaaagaacaagaaccagggaaaatcgcaaggaagaaatgcacaaatgacacgcatgtggaattagggggagatgttatgtacgttactacgaggatgacacactggcatgtgaaaggtttctgggctccaccagctcgttgcagcaccaacgaggttgtggttgtttacaccacgtcgcccggaaaaaagccggcaagcttcaagtggactattaagttaataatattgaagggaaagaagggcaacgcaactgaacatctggatgagcagatccctgcctaggccccgaggcagctgaccaagtccagatcattcccccttacggtctatgcgcacaaagaaccagctgctttaggtcagtccgccgcctcctgctacccctattaccgtggccttaatttcaggccagctaaggccagaggatggggtgaagggaggggaggagccccgggaagggtcagcgtctgcgccccaggggaggctgaccttccagctcaggcccgggacagcgcgaccacaggaactccaggcccacagccgcgcctccgcagccggattctgagcgcggcgcctccttccttcccctgctgctccaccaccacctccgtctctgtctccgccgtcgccaacaccgccccccctcaggcccctcacaacgcgcagcctgcagccagctgcctcgcggcggaaccccaccccaccccaccccacctcgcccttgctttcgctcgcccttttagggggctttccccgccccttccactatccagcgcgccgaagccccctgcccagagctcggctttgctacctggatccgcttcttgtgtctcctgcgttccgccatgttggccgctccgcccggttccctctgacgtggagcgaggagggggcggtggaaacctcgcgagaacgcgccccgaggcccgttatgtaatccgccggctggcgcccctggaatggggaggtcggccgcctggcggggccagcggtccttagcggtgccttctctcccctcttccctccgctcctgctgtgcgggaactggagaatcgttaggacgtggaggaagcagagaagtggatcagagaacaggagggctgggaagagtcctggtttctcaatcctgactgagcatctgaatcacctgagaagctactaaaatgcagattccccgaccccatccccttagagtcagagtctgtgcatttagggtgcggcctttctcagagggatcgactgagacctactgaaccctagaagtctttacctgaggcagttcctgcaatgtactgtatatttcatgacattccatgtaaaagatgacaagaccgagaccgttgagtgacagagataagaactgacttatctaaggctccacaggtggtagatggcagagccgagacctgagccaattatcttttctcctgcactgtgcggggtaatacagctcgtttaaaacaagctggagtctccattccgttttccgcgttgcttctcacaactcactgttagaatccagaagtaagagaacccggggaagcgtaaggaagatgaataggacaaagattctaagaaggtgggaaggaagaaggctgcagtctatttcaagtctggtgaatttcaatcactgtagcctttattgttattttagagccacctagaccaaaagagaaggagctcaaattgctggtaagtgcttagatagaaattcccttgactgactttatagagatctttaaagcgtttttaattgtagaaaattgggaaaattcagaatagaaagatgttcttttttttttgatgctgagtttcgctctatattgcccaagctggagtgcagtggcgcagtctcggctcactgcatcaccgaactcctcgtctcaactgatctccctcctcagcctcctgagtagctggaactacaggcatgagccaccacacctggctaatttttactttttttgtgtggagatggagtttccttatgttgcccgggcgggtcttgaactcctgggctcaaaacgatccacctgtctctgtctcctgagtaactggaactacaggcgtgagccactgtgaccgttcagtttattttcttatagtattctgactttgtgtgtgtgtgtgcatgtgtgtttgtatttatattttttcctgtttcccaaattgagatcatatgcaataaggcagctgcttttttcacttaatgttaggttgtaagcgtttattataccattaaaatttttttccaggtttcccatattatatatctaacctaagagcaattaaatatgtaagtaaggcaaattgcagcatcttgatgcctaattttttaataaagtaagattgctgaattttttttttttttttggactatgcagttctggtctcaggagtcatttaattcctttctcctctataatctataatttgggtgtgtgtatagtcagggatggggtgagaaagaagtaattattcttgccaattaacccaaaacataatatagaatatgaaatgtctttatttccttcaatccctctacccacccagaatgatgaatctgttttgtgctgttttatgtggacataaacactggactattttataggagacctggtctataaatgaaaatattattgcattcagtaggtattgagtgcctactagatagatgtcaaatgttaggttaggactatggtggggaataaaaatcctttatagacaatgactcatcctcaagttactgccttactattttcttcatcagcagagctttaatttagtgtcctcttgttctgtcattcactccttagattacaacaatttggtttctacctccaccatccagtaacaattattttgtcaaacccaatac

SEQ ID NO: 316280 - DNA, 4001 bp, Homo sapiens
tgcaaatcaagatgtcagaatattttcggggaagagtaactgtcaactacctctcctttccattatcccaagagttaaccccactcacctctacccactccatgagggtttacttttcctcttttcttgaccagcttaatttcagatacccacttggatctaagctctcactgtgctactgagagcaaggggctacaaaagtttagagggtgggtgacaggcttagttctctgcctcttactagctctgcttcgttggctgatgtgacattttctttctccaacaaaaagtattccagggctagccatcacataagatttttggaaaaaaaaaagtcatctgacagcaagagaaagattttgtcaagtgctgataatacagtcctaagaaggtggatctaattggaacctgtcatttcttcctctgtgattctatcttgcttttccactttccctttcttaaggcagaatgtcccttccaccaatatccccagagagaagtaaggtgtttgaatgcagttgtgtttctcaacttttaaagtacgataaagagtcctaatcggctacttatgtggaccaaatgaaataatgcgaacacagtaagacacaacaaatacaaggaattattcaataattcatacagaagcttccagccttaagcttatatcacaaaggctataaaacaggctataaaacagactaaagtctgaaagcgcccaaaactaagatgaaattttgatgcttttctgtagtgtccatcaatctacttgtttcaaagatttttaagtgggagatgagaaggggagatttttaaaagtcaagaaatgcaaaagtgcagtcagccagaaggctcctcactgactaccttactcgtctctggagaaaaacagatgactcaaatagaaccaagacctagttccaatgatccacaactccttgttaagactgtaccaaagaatttcacctgagtcaaacaggtgggcaggcagctctagcactgatctgacacagtcatgtccttcctttccggtcatcttctttgtgggttcgcagaattaagtctctcggattctccattccggtaataattaacttgctcctaggggaagatagtacttcttcccatgccccttgaaattcgagcaaaaaattccatgtttgactagctaccctttcctggggaaaaagcctatgcaaagctttcatctaattatcatcctaggtcggctcggtctttttacacgttgtagacagaggcagcataacagataacaaggacgctgacgtcagcctacctgtgatcgaatcccgactcagccattaagttacctctgtgacttaaatagcccaggcaagctatttaatctatctgagcctcagagtttccacccgtaaaacaggattgaatgtgacgataagcaaataactgaaacactgtccagggcacaagcgctacgtgtacagcgtcggcatcattgtccttactagttttaaggataccgacacccgagagaggaaagaccaccctcgcaaatccacaatcaagcgcttgctgcacgaaggcggggttgcagggctcccagtactcaacgtgaggccggcgggacctcggcccccgactgccggctcagagaccatcggctgacgcgccgcaagccgaggcgacttcggtccagctccgcccggccgcggggcgctaagcccggggaagccgcaccgggctcaagactcagcgagcgacgatgaaaggaacctggagtccgatcttacaagtcaccggtcgaagccacagcccgctctcaacttaccgttcgagatgtaaaccatcttgtcccacttccccgcttcggagccaccgggcgcctggcccctgtcggtttctgtatctccctctgctccccgcccttcgagcgtcacaggccgcgattagacaaaatgctgacgaggacgaaggtgggcagagcccattggctgctgaaagagacgcgcccccgacgggcgtttttgcatcgtcacatctgcgacttctggttaggcggaggcggccgagctgacaaccggatatgacgttaaggactgccctgtagtgcccgcggttgccagtcctctatccgacttgatcgtgcagagttggttcgcaccgcccagtgaggggaagctgttttctcgtcgattgataggctccgggtctgggtaggagaggctgccctgtatgaggtagcttgaagggccgctgacaggaggaaacgcttccgaattttccagacgtgttgacgtttgagggtgctgactacacgttaaggaactttattgtcacgcctttgggaatatactgccaggctcttcctagatatattcattctctttaaaatgagcatgtctacctgggttcaccagaaactaagtttttcttagccttttgtgaggcaactgaaaaataaattgaactgtaggccctttctctgcttgtttcttattgatggcgactgcttatgaccactttggtgacagacgaattagaagacatgtcttggacattcagtaaatgtggaccacataccatggatatttactctgctacagccagtgggctgcctctgttccttgaacgtggccatttcattcccttctcaaggcctctgcacttagctattctttcagcgtggagacctaatggctgcttcctttgacttcccgcccccagttctcaagccatgtgtcatctctttggaaagattcctaatcaccttccagaaaatgaaaattacatgctgaaaatctattttgagtttaacaactttggttaagattttatgttctaatacttagaactgacaaagatctaattttatgttgattttggagagagcattttccccagaaaagttcataataggacaagacaacatccttcacctcatttgggatttgtgcagcacaatcataaaggatcatttctgcaaaaatattagggcagggccgttaattttcccaagggcctttcttaatctagaccatgccaccatcatctctcacctgctctacgctagtttccttctaaatgaaatctcaggttcagtcttttaccatccttaggcagttttacaaactgtagcaagatcgatcttaaaacggagatcatctcgttcccttgcctaaaaccttttggacactaaaatttagtgacttcctattgctcttaaaatccagttccttgtcatggcctgcaggcccaaggtgacttgtcctcttgattgctcctctcactgtacttccagccacatctccccacccagattatgctctggcaacattgttgttttagtttatgaacacccccacccagattatgctctggcaacattgttgttttagtttgtgaacaccccgggttttactgatacctccaggactctgcccatacttgtccctctacctggaaccctcttcctcggactccttgcacatccagctcattttatcctttagccctctgcttagttgtcaccacttctgggtgcccttccctggccactcatctccgtgtttattttcttcatagtaattcacattgtgaaactgtctgataattgatttgtctcttgtcttcaagaaaatataagacgtaagaggtcaggaatcctgtctgccttattgtcttttatatcttcaaggtctgtcatagttcttggcaagtagtaggtgctcagatatttgttggttggttgaatgagatttttttagacaattttttgacaattgcttaaaatctctccaattgccaaaagaggaaagaaactaacattgggatctcctgagtatcggacattgtgaggctatctcttcctttccattcctttatctagatcatttttgcctgagatttaatgcagtgatttcctaatgagctacctctagtttctccgtactccatttcatgctatcttcacctgttagtttaatccaatcttgcctctcccattcacagaccttccgtttctt

SEQ ID NO: 316281 - DNA, 4001 bp, Homo sapiens
agataaaagtaggatacagaaaaattaaataatttgaaaactgcaattttttaacacttaaatccgtaagtatcacaacccttaacaatctttaggttagtaagatgattaccaccttctaatttaaaaattaaggaaaaaagttaatggataaaccattctcccatttgcagtattacatgaaagatgatatattccagaaacatagtacattgtacagggaggtttttttttttttttttgagacggagtttcgctcttgttgcccaggctggagtgcaatggcgcgttctcggctcaccgcaacctccgcttcccgggttcaagcgattctcctgcctcagcctcccaagtagttgggattacaggcatgcgccaccacgccaggctaatttttgtatttttagtagagatgggggtttctccatgttggtcaggctggtctcgaactcccgacctcaggtgatccgctagcctcggcctccaaagtgctgggattacaggcgtgagccagcgagcccggccttgtttgtttttaatcaggagaaattgcaatgttttagttttcactcaaaaaaataaagtctcaccatcttattttctaactcaaacatcaccttaagccgatttttaaaaattattttaaaggtttgcttggtcttcagtgagtaagtaaaaagctagttggagaagtagaaaatcaaaactttaatatactaatacatgaagttcttaaaagaaggttttaaatgaatgatgtccaacaccaacattccaatgtatccggactctgatgatttactaatctggctattctgggatggtcggtttatcctgagaaaatgtcatctttggaggtgtaagattctcatttctataattttacaattttggtgttttttcccccatcttcagagcctttcaatccccacccgcaaccccacttaccgtataaaatgcatcattgccctgcttctaacgattaggttaaaaacaaaatcatttaaagaacactgtcgaaaactgccgagatctgctggatacacaagacaactgaaaggtagaaagagatgccagagcaggcaactcctgggaggcaggtgaggagggaatgcgagcgaactgtcaatgtttagaagaacaacgtgctccttttctgacactttggaaatggcaaacagaaccagcatccccagaccttccttccaccccctccagctgtcagacgccccattcgcaaactcaacagtccccccagcaagttcaggagaaaaacggcgtctgtcactcccggatcctctccaatgacccgaattaaccttcatctagccaggcagcgaagccgcccggcattaccccggaaaagagggcagaaaaagtgaactgacaaacggttggcgctcctccgccgacgcggcgcctactcatccccatctccgcaggcagccggggtggctatggcgtgacgccgccaaccagtcctccgtactaacaggtgtcccccagtcttcgcctttcagcgtttaaccttctcgcgccctccttccccattcccactgttctaggaggcaaaaaacaagtgagcagttatacctggaaaaggagggcggcctgaccgcgctaaggggccgcgagaaggctggctgtggaagggcgccggcacagttctacgaggccagcgaagatgcggccatttaggccgcgaagccggggcctcgcgtagccaatggcgccgagcagaggcgcggcggggtggccggggcccagtgcacatactcaccaaatctggaacttgagcagcggccccgtggcgtactgcatctttaatctcttgctgggcacgccgcccagattggccgaggcctcgctccggaccatcgcagacgccgccactaggagaagcagcagaagcctcatcttaaatgagccagccacttcggccgccctcagacagactgcagccagcccaaagcccaggagcgagctgctccccactgcgcaggcgcgatcagccaaggtcgggggaggggagcagtaatgcgcctgcgcggcccggcgcccgcgcacactcctggagtgaagagccgacctgtttcactgtcctgactcaccaccatcttggtagtgtgcaagactctgggacggcatgagaaaggcagaaagggagcaaaggagctggtggggtgtcacagggcctatgtatgaggcagatgtgagttctgcatccagttttgcaatttatccatttacctgcctgagacttggaaacacctactttatagtcctgattcaagtgttggcggatggaagggaggagactcctgaccctcagaatggtaatgctgaaattttttgggtgcgctgttatggccttttctttgatcttacaatattgctttctcctgaaagaatattaaacataagttttaggaaacctttggacaattccaaacatatccaaaaatagaataactaccttagcaagctttaacagttactatacattttgacaatcttgatttgtctatatctctaaacacttcttcccttcctaggcatatttggaagcaaatctcagacatcatatcatttcatctgtatatatatatttttaaacacggtctcactgtcacccaggctggagttcagtggcgtgatcatagcttactgcagcctcacacccctgggctcaagcagtcctgcctcagcttcccaagtggttaggaatacaggcacaggcaactatgcctggcttacaattatttaagcacatatttctaaaaaagaattattattaaaaagaaaaaaaattgaccacagtgtttcacatgtccgtgtgaagagactaccaaacaggctttgtgtgagcaacacagctgtttatttcacctgggtgcaagcgggccgagtccgaaaagggagtcagcaaagggtggtgggattatcattggttcttataggttttgggataggcggtggagttaagagcaatattttgggggcaggggttggatctcacaaagtacattctcaagggtggggagaattacaaagaaccttcttaagggtgggggagattactgatcaacaaagtacattgatcagttagggtggggcagaaacaaatcacaatggtggaatgttatcagttaaggctattttcacttctgtggatcttcagttgcttcaggccatctggatgtatatgtgcaggtcactggggatatgatggcttagcttaggctcagaggcctgacattcctgtcttcttatattaataagaaaaataaaacaaaatagtggtaaagtgttggggcagcgaaaatttttgggggtggtatggagagataataggcgatgtttctcagggctgcttcgagcgagattaggggcggcgtgggaacccacagtgggagagattcaactgaagaaagatttgggggtaaggggtgatattgtggggttgttagaaggagcatttgtcgtatagaattattggagatggcctggatgcagttttgtatgaattgagaaactaaatgaaagacacaaggtccgaataaaagaaggagaaaaataggtattaaaggactaagaattgggagtacccaggacatccaattagagagtgtccaagggggttcaacgttgttgtctgcttggttggagagtttttgggctctatctctatccttaagtttttttatgttgtcatataccaggccagattgatttaggtaaaaacaacactcttcatttaaaaatatacaaagtcctcctttttcagcagtgagtaagtcgaggcttcagtgattttcaaggaaagagaggaggtgggaaggccaaactgaggaattatgtctgacagaagggaagaaatgaccgcggtggccttcttagaccctgtgggaaaggcctctacccacccagtgaaatgtctacccaaaccaagaggtattttagtttcctgacttgaagcatgtgagtaaagtcaatttgcc

SEQ ID NO: 316282 - DNA, 4001 bp, Homo sapiens
agaaagcacgaagagaatgtgggcagaggctgggggctgaggcccggacagggttaactggaggtggcctgagagtgcccactaatcctaccagagtctggtgacaggcacgcacatggggcaacagccaacacagagccccctggccatacggggaccctttcctgcccacctcaagctgggccctcccgcctgccaggtgcacctaccttggaaggagagccgaaggcgtggggggctgggggcggcactccccagccccactgcccagagcagggccaggcccgggatcacggcggcagccccggcccgccccatctcagcagctcagggtgctcagggttcagcgggtgtgtgtgtggaggagccttgagctgccctggactctgccccaggatctggaagaggagtcagcagtgagggcgagggcgggaggctagggggggagtccccagggatcagattacagcccctaggggaaagaggctggggggtcgcattccacttccgaaccctcccctccgagggtgccccgcctggccacaatcacagacacacccacgccactgggcacaccctcagggtcaccctgcactggcaagcccgcctcaccacgtcacccttcccagtaatctcctctcttgtatacacactcacagacattaattcacaatgtgccacccacttcatgccagcctagacctgggaggagggatactgggagacatagacaaggtccccatgtgaaaggggacagagtgccaacaaggaatcagatggatgcagagggtgccaagtgcaatgagcaaaacaagccagtcaaaagagtgagagtgacaggagggggtcaggcctctggaggtggcagtgtccccacagtcccgcagaaaaacacagagacacttttgaggctggagccaagggtgtgggtgcctgtgaatgtgtttccgagtgtccccttgtgatgtgcgcatgtgtgtagtgtgtatgtgcatgtgtgtgcacatctatgtgcaaatatatagtgtgtcatattgcacatgtgtggatatgggttggtgtgcacacacatgtggcactgtgcaatccatgcagtacatatgtgtgatatgtgcatattttgcacacagatgtgttgcacatttgtgcatgtgcaaacgtgtgcacccataagaatagacatgtctctgggcatgcaagtgagcaaatccaactgcagcatcaatcactccattcctcagagggagaagtgctacccaggagacccaagacctgggcagaagcctcagcctctgacttggggactgctcccaacccagctgaagcagcctctgcatttgagcttgagggctctctctccacacccctgaggaatcaaagaggggcaaggtgaggcagcccttcatttgcaccccagcctcctggcctcgctgagctggccttccctctcaacgcctccacagcctctctgagcctctcccttcacttctctcaccccttgagttcttccccatctttgagccccttcactctaggagccagacacctccccctggccctcagctggggcaaagacctggctgctatgcccaccctccttcccaggggtcagctgggcaggtgctggacacaggagcccagggagtgggacaaggttccaggtgggattaagcaagtggagcagctgctgaggcaggttccaggcccctccacccacactcctgcccagctcctggccccatcccaggccaggacccccacctccctccttccctccgctgacacttgccgctgcctcttctcaggttctagaggtcttccaggccaacactggctgccttctcacactccaccgaggacttccgcagcagcatctctccactctggccccttcccaccctggggccgctggggaccctctgacggctcctttaagaagcagcccccgcccccaccaggccagccaccgccccacgcaccgcccgccgtgccgtaaagtttagagggcggatcgggtgaccgggcaggcagccgggaccagctggagacggcagccaggcgggagtggaatgggcacaagggaggggctggtagggacgacccctcccatattgggccttaaagcagaagggtgccccaggtggcggtcccagaagccaggtggccagccaaggcaagggaggaagaaaccccagctccaggggctcagcaggcaaagggaatcactgagtgggggcaccacccgtggactccaatatctcaacctctccctccacaggtggggagctgtggggaaagataatggggagctcagctgccacctcagttcccagggaccggctggggtggccgggcagctggaggtcaggggaggggctctcaactggaggtcggatgggccctcaggacccagtccccatccttcctcaacacttgggccacttagtacttcagtggcctggccagcagtggcttctaccatgacagccagataggggagggagaggagggcaggagaggggcagacgcaggaggagcagcaaatctcacttctgcaccacagggcggggcccatctggagtccgccatcctggacaggtagctttgcatctctgctgagaggttggggggcagaccatgtgacctcccttcctctggcttctctttctaggttggaggtgggaggaacaacccccaccaaacccagagccgaaaactgagggagttttacagacaggacggagctcctgcacctcggagcctcagttgggaatgacctggggtcttgtcctgaagctgagtctggtgaacgtgccccatttgtaacatgaggggtacttctctggagggactgtatgttgacagtggcagagtggagccctgaagtccacctgagtgaatataccagggcttgagaatgggctttgatccttccatccccgcaaaaggcattttcctaccacctcccaaggctgatggggcagtgtgggcatttcaagtgttgcagttctgttgcccagccctggatgcctccagccaagcaaggacagaggtggggggcacatctccaagtcccctggaagtggaagtggggctatgcccctccttcctgagcctgaggacctggtatacctggcctggcctggccagctggcaggtaaataacaggggccagtgggagccgcagggcccttcaggagggcaagtggaaggacagatccctgcctgggctcgtgggcttcctggatgtggccttttcctactccaggagtagctgcctctagccttagaggacctgggcaggctctcctggctccatgcaagcagacaacattctttggctgtttacagctttccacccaagcagccaggatcagcaagtgcctcagaggctcccatccactcccactgtgcccccataggccctcactgccttatgtttttccaggcccaggggccctgtctctgtttcatcaccccgcaccttcctccacctgtgttcactctgggaaacggtatcagaaacccccccgccaccgccattatctttccaatagcctgggagtcaacccccagccaaaaggactagactgtctctgtccccattgagtgctgtgccctgtcctctgtcctctagatgtgtaccctcccttgagtaggaatggaggtctccagggatgggaggtcaagttgtccctgattccacatggtcccctttctgttcctcagccccaggtccagtgtgccaggccatgggtaggggcccccatggaggtcagcactccaggagcaaggtcactgcctgtgggtcacactgggggctggaactcctcgaggattctggaatcaggcagcctgagcctgagtctcaacagaatggggcaaaccaggcaaggcagctggggtcccttttcctgcctgtactcctaccctggacctctctcttttgagggagcttccatgggcagagacctgcctgggtccttgctctggggctgcct

SEQ ID NO: 316283 - DNA, 4001 bp, Homo sapiens
ccacttccacaaaggcacaggttgggtggaaggctcccgtgccacaggccagcaaatgggtgcggttgtaggcatgcagcaacttcacgaagttcatgcactcagtctagtagggttggaggtgtgaggcttcccccagggacgtagccttaagaggtcccagctcaccagtggcatcctcacccctccctctcttcggcatcagcccaggcaagtactaacatgggctacagggacctgggggcccttgctgaccagcccaggcctcacgagggtgggtgtctggggaagcacaggcctgcaaagcctcccatgactcagaggcaccccagaagaattacacgagcccccaccctgactcaccacccccagacctcagccacctcgacctccctgccctcatcccagccagaacaggcaggcctctgttttagccctgccctgtctctggggtgaggggctgaccctccccactcccggcccgggcagctggcactcacaccaatgtccttccctgcccagttgcactcctctcgccattccacaggggccggccaggccagctatcgggaggttgggggagaggggacacaggtcaggaacttgggatattctctacctcagggagccattcctctgggtctctccaggctggagtggggtcccagggctccttccctggggagtgctggggttgggagtccctggcaccttcttggcccgcttgctgatgttgtccaggttgagggaggccacatggttctcggcacccacaaacaggcgtccacgctcctcatccaccagcaaggcctggtagcagcaggttcgctccaggctgaaagtctggagaccatgccaggcctggagctctgcagggcaggacactgctgatgactcgccagccatgctggaagcctcccccaggtcctgcctggtggtgactctatcggccaaggttgccattaggacctggcctgtacacatgtgagtttacatgtgtgtgagtttacacacgcaaacccaagcccacccaggtgcacgtgtggagctgccagggtaggtggtacatccccccaggaagaggaaggcaggttgaacttgggcatgctcagacaggtggtgtctccaggcgggcgcactgggaggcaaggcttatggacaccagagtcctgggggagactggcatgcagggatggccagaaccccaactcccaaaagtcaggctgagagttcctttcctgccactccaccaccagcctgagctcagcagaactgcctattcactgccactgcccaggggccaccctcctatacaggaggcatgagaagggggctctgacttccctgttgctctgctgaaggagtatcgccttgttgggggtactgaacggaacagagacaaggtctgttgctgtggggacaggaggggtcttcctgagaaagcacgaagagaatgtgggcagaggctgggggctgaggcccggacagggttaactggaggtggcctgagagtgcccactaatcctaccagagtctggtgacaggcacgcacatggggcaacagccaacacagagccccctggccatacggggaccctttcctgcccacctcaagctgggccctcccgcctgccaggtgcacctaccttggaaggagagccgaaggcgtggggggctgggggcggcactccccagccccactgcccagagcagggccaggcccgggatcacggcggcagccccggcccgccccatctcagcagctcagggtgctcagggttcagcgggtgtgtgtgtggaggagccttgagctgccctggactctgccccaggatctggaagaggagtcagcagtgagggcgagggcgggaggctagggggggagtccccagggatcagattacagcccctaggggaaagaggctggggggtcgcattccacttccgaaccctcccctccgagggtgccccgcctggccacaatcacagacacacccacgccactgggcacaccctcagggtcaccctgcactggcaagcccgcctcaccacgtcacccttcccagtaatctcctctcttgtatacacactcacagacattaattcacaatgtgccacccacttcatgccagcctagacctgggaggagggatactgggagacatagacaaggtccccatgtgaaaggggacagagtgccaacaaggaatcagatggatgcagagggtgccaagtgcaatgagcaaaacaagccagtcaaaagagtgagagtgacaggagggggtcaggcctctggaggtggcagtgtccccacagtcccgcagaaaaacacagagacacttttgaggctggagccaagggtgtgggtgcctgtgaatgtgtttccgagtgtccccttgtgatgtgcgcatgtgtgtagtgtgtatgtgcatgtgtgtgcacatctatgtgcaaatatatagtgtgtcatattgcacatgtgtggatatgggttggtgtgcacacacatgtggcactgtgcaatccatgcagtacatatgtgtgatatgtgcatattttgcacacagatgtgttgcacatttgtgcatgtgcaaacgtgtgcacccataagaatagacatgtctctgggcatgcaagtgagcaaatccaactgcagcatcaatcactccattcctcagagggagaagtgctacccaggagacccaagacctgggcagaagcctcagcctctgacttggggactgctcccaacccagctgaagcagcctctgcatttgagcttgagggctctctctccacacccctgaggaatcaaagaggggcaaggtgaggcagcccttcatttgcaccccagcctcctggcctcgctgagctggccttccctctcaacgcctccacagcctctctgagcctctcccttcacttctctcaccccttgagttcttccccatctttgagccccttcactctaggagccagacacctccccctggccctcagctggggcaaagacctggctgctatgcccaccctccttcccaggggtcagctgggcaggtgctggacacaggagcccagggagtgggacaaggttccaggtgggattaagcaagtggagcagctgctgaggcaggttccaggcccctccacccacactcctgcccagctcctggccccatcccaggccaggacccccacctccctccttccctccgctgacacttgccgctgcctcttctcaggttctagaggtcttccaggccaacactggctgccttctcacactccaccgaggacttccgcagcagcatctctccactctggccccttcccaccctggggccgctggggaccctctgacggctcctttaagaagcagcccccgcccccaccaggccagccaccgccccacgcaccgcccgccgtgccgtaaagtttagagggcggatcgggtgaccgggcaggcagccgggaccagctggagacggcagccaggcgggagtggaatgggcacaagggaggggctggtagggacgacccctcccatattgggccttaaagcagaagggtgccccaggtggcggtcccagaagccaggtggccagccaaggcaagggaggaagaaaccccagctccaggggctcagcaggcaaagggaatcactgagtgggggcaccacccgtggactccaatatctcaacctctccctccacaggtggggagctgtggggaaagataatggggagctcagctgccacctcagttcccagggaccggctggggtggccgggcagctggaggtcaggggaggggctctcaactggaggtcggatgggccctcaggacccagtccccatccttcctcaacacttgggccacttagtacttcagtggcctggccagcagtggcttctaccatgacagccagataggggagggagaggagggcaggagaggggcagacgcaggaggagcagcaaatctcacttctgcaccacagg

SEQ ID NO: 316284 - DNA, 4001 bp, Homo sapiens
cgatgcctggggtcataaggactcttccccttgccatcctctatccttcctgggtccagccggaggacgggctcctgggaggtgtggcaagttgtgactaccaggcccttcttaccctcctgacctccctccctgcctagatccggccttacctctgcccggtggcccacttccacaaaggcacaggttgggtggaaggctcccgtgccacaggccagcaaatgggtgcggttgtaggcatgcagcaacttcacgaagttcatgcactcagtctagtagggttggaggtgtgaggcttcccccagggacgtagccttaagaggtcccagctcaccagtggcatcctcacccctccctctcttcggcatcagcccaggcaagtactaacatgggctacagggacctgggggcccttgctgaccagcccaggcctcacgagggtgggtgtctggggaagcacaggcctgcaaagcctcccatgactcagaggcaccccagaagaattacacgagcccccaccctgactcaccacccccagacctcagccacctcgacctccctgccctcatcccagccagaacaggcaggcctctgttttagccctgccctgtctctggggtgaggggctgaccctccccactcccggcccgggcagctggcactcacaccaatgtccttccctgcccagttgcactcctctcgccattccacaggggccggccaggccagctatcgggaggttgggggagaggggacacaggtcaggaacttgggatattctctacctcagggagccattcctctgggtctctccaggctggagtggggtcccagggctccttccctggggagtgctggggttgggagtccctggcaccttcttggcccgcttgctgatgttgtccaggttgagggaggccacatggttctcggcacccacaaacaggcgtccacgctcctcatccaccagcaaggcctggtagcagcaggttcgctccaggctgaaagtctggagaccatgccaggcctggagctctgcagggcaggacactgctgatgactcgccagccatgctggaagcctcccccaggtcctgcctggtggtgactctatcggccaaggttgccattaggacctggcctgtacacatgtgagtttacatgtgtgtgagtttacacacgcaaacccaagcccacccaggtgcacgtgtggagctgccagggtaggtggtacatccccccaggaagaggaaggcaggttgaacttgggcatgctcagacaggtggtgtctccaggcgggcgcactgggaggcaaggcttatggacaccagagtcctgggggagactggcatgcagggatggccagaaccccaactcccaaaagtcaggctgagagttcctttcctgccactccaccaccagcctgagctcagcagaactgcctattcactgccactgcccaggggccaccctcctatacaggaggcatgagaagggggctctgacttccctgttgctctgctgaaggagtatcgccttgttgggggtactgaacggaacagagacaaggtctgttgctgtggggacaggaggggtcttcctgagaaagcacgaagagaatgtgggcagaggctgggggctgaggcccggacagggttaactggaggtggcctgagagtgcccactaatcctaccagagtctggtgacaggcacgcacatggggcaacagccaacacagagccccctggccatacggggaccctttcctgcccacctcaagctgggccctcccgcctgccaggtgcacctaccttggaaggagagccgaaggcgtggggggctgggggcggcactccccagccccactgcccagagcagggccaggcccgggatcacggcggcagccccggcccgccccatctcagcagctcagggtgctcagggttcagcgggtgtgtgtgtggaggagccttgagctgccctggactctgccccaggatctggaagaggagtcagcagtgagggcgagggcgggaggctagggggggagtccccagggatcagattacagcccctaggggaaagaggctggggggtcgcattccacttccgaaccctcccctccgagggtgccccgcctggccacaatcacagacacacccacgccactgggcacaccctcagggtcaccctgcactggcaagcccgcctcaccacgtcacccttcccagtaatctcctctcttgtatacacactcacagacattaattcacaatgtgccacccacttcatgccagcctagacctgggaggagggatactgggagacatagacaaggtccccatgtgaaaggggacagagtgccaacaaggaatcagatggatgcagagggtgccaagtgcaatgagcaaaacaagccagtcaaaagagtgagagtgacaggagggggtcaggcctctggaggtggcagtgtccccacagtcccgcagaaaaacacagagacacttttgaggctggagccaagggtgtgggtgcctgtgaatgtgtttccgagtgtccccttgtgatgtgcgcatgtgtgtagtgtgtatgtgcatgtgtgtgcacatctatgtgcaaatatatagtgtgtcatattgcacatgtgtggatatgggttggtgtgcacacacatgtggcactgtgcaatccatgcagtacatatgtgtgatatgtgcatattttgcacacagatgtgttgcacatttgtgcatgtgcaaacgtgtgcacccataagaatagacatgtctctgggcatgcaagtgagcaaatccaactgcagcatcaatcactccattcctcagagggagaagtgctacccaggagacccaagacctgggcagaagcctcagcctctgacttggggactgctcccaacccagctgaagcagcctctgcatttgagcttgagggctctctctccacacccctgaggaatcaaagaggggcaaggtgaggcagcccttcatttgcaccccagcctcctggcctcgctgagctggccttccctctcaacgcctccacagcctctctgagcctctcccttcacttctctcaccccttgagttcttccccatctttgagccccttcactctaggagccagacacctccccctggccctcagctggggcaaagacctggctgctatgcccaccctccttcccaggggtcagctgggcaggtgctggacacaggagcccagggagtgggacaaggttccaggtgggattaagcaagtggagcagctgctgaggcaggttccaggcccctccacccacactcctgcccagctcctggccccatcccaggccaggacccccacctccctccttccctccgctgacacttgccgctgcctcttctcaggttctagaggtcttccaggccaacactggctgccttctcacactccaccgaggacttccgcagcagcatctctccactctggccccttcccaccctggggccgctggggaccctctgacggctcctttaagaagcagcccccgcccccaccaggccagccaccgccccacgcaccgcccgccgtgccgtaaagtttagagggcggatcgggtgaccgggcaggcagccgggaccagctggagacggcagccaggcgggagtggaatgggcacaagggaggggctggtagggacgacccctcccatattgggccttaaagcagaagggtgccccaggtggcggtcccagaagccaggtggccagccaaggcaagggaggaagaaaccccagctccaggggctcagcaggcaaagggaatcactgagtgggggcaccacccgtggactccaatatctcaacctctccctccacaggtggggagctgtggggaaagataatggggagctcagctgccacctcagttcccagggaccggctggggtggccgggcagctggaggtcaggggaggggctctcaactggaggtcggatgg

SEQ ID NO: 316285 - DNA, 4001 bp, Homo sapiens
gaggcttgggacgcgccaggcacaagctcagtccatcccaccccgacccccatcctggtcactcaccctcttggaagaaatttgcatgctggtgacagcggccgagtcctgagagggaggaggggcgacggggtcagggcttagtggggtgggggggtcccgggcgactgggggtgaggcctcacctcaaacacgtgcagctcctccaggagcagcccctctgcgctgggcctactgcccttggggaccgagatcaccttcagcaccgtgccaacgtctgcagggatgagaaggggtaatgaccattggtgctcccggacagctggggctagtgtctcctcgcctttgaggcgtctaccctcagcatgtttgggttgtgaagagtgtggactggaagagtgtgggttgggcagcatccacagggtggagacacagcccaggaaaggatgtggagatgggactgaacagggagagcttccatcagcagcccacagggcctggctgggagcctgggggtcgctgtggagggaccctgacctgtgccaatgaagaggacgtcatagtgtccgtcagcggctgcaacccggtccgcggcaatttgagtgaaggtgtaattggctccaacttgtaggaaaagagggcgccccccagtgggcaggacagagttgtacatgagggggtggttccgcgcaaactggatgacatcgtctgggaagtccttggtggaactgaaggtgccaaaggtcttgctggggcactgggggtgggggaaagggaggcacagcagggatatagatatgggggcttgataggcagccctccatgcccagcctctgggaacatggagggggatggggacagaaccctgccctgagaattagagaggagatcagccttgccctaggaagtcagaggcgggaaacaagccttgtcttatgatggaaacgttttcccacccataactaaaggaagaaaccacattcaccaagaagaccccaggccaagttctcaaacccttgaggctttgaagtgggttgtagcagaagtccctgggctacgaaccatgcctggccgcgggtaggggacgcgaccctggtatgacacccactggtgcatgggcccctccttgtgtgcaaagggtcccaagaaggcccggcgcacgtcgttcatgctgtacacgcacaccgcagagccctggaagatgctgctggaggcgaagaccagggcgaggtgaggggccgggtggagcccagcggcccgccccgggcgctccctacctcctgcccctcacctggacgtggagaagacggcatagagcagcggggtccggtggtcccgcgaggacaacagaaacacatcctctgcggggaaggggcctagctggggtagggcgcacagccccgctgcggcgggggctcccggagtctgcgccgctgcccccctccccaaccccatacccactcccgcactcacggagctgatcgaagtgggtgtcgccctcgacgccgggcaccgagcacaccagccgcgccttcaggaacgtcgtccacttgttgaccaggctgcgctggccgcccacgtcgttctgccgggacgatcaaaggggatgagggcgagaccagggcaggcaaaggggtaggggcagggtcgccgggtgtggcccagggactcctcacccggcagatctggccaacgcgggacacggacaggcgtcccagtgccggcgccgcctctaccgccgtctcacgaaagaagaagtagattttgtcgtcgtctgggttctcgctctccgggatccaaaataccttgacaaacttgggctctgaccgcggcaggaggcatgggtcagcgggtcctggccttgcctcctgatgcgagacccacgcgctgcttccccttcccgtagtgcgggcacagcacccgggatcacagtgtctgaccacccaacctctagcaccatgtccagttggcgctctgcgcggaccgaatccaaaggatcagggcctgcgaggcaagaagcagccgcgagggggcagcagagaccgtggctacctgggggcgcaggcgtgaagcccggctagcctccgatctcgccccacacgtcgcccagcaccttaggctggggtaggagggagatgaggtaatctggtttcaccttcactcatgaatcttcctctctagcataaccagatgctccccactcctgcttcaaatccttctgctgggtcccattgctctttattattattattattattattatttgtttatttatttattttttgagacagtctcgctctgtcgcccaggctggagtgctcgatctcggctcactgcaacctcagcctcccaagtagctgagattacagtcagagcctaccaccacacctggcttttttttttttttttgagacgaagtctcgctctattgcccaggctggaatgcagtggcacagtctccattcactgcaacctccgcctcctaggttcaagcgattctcctgcctcagcctcctgagtagctgggattacagatgcacaccatcatgccggactaatttttgtatatttagtagagacggggttacaccatgttggccaggctggtctcaaatgcctgaactcaggtgatccgcccgcctcagcctcccaaagtgctgggattacaggtgcacaccactgcacccggccaatttttgtattttttagtagagacagggtttcaccatgttggccaggctagtctcaaactcctggcctcaagcgatttgcctgcctccgcctcccaaagtgctgagattacaggtgtgagccactgtgcccaccagcccatagcccttatttaatttttatttgatttagagacagggtctgctctgtcctgcagtggcagcatcatggctcactgcagcctccaactcctgggctcaagtgatccttccatctcagcctcctgactagccaggactacaggtgtgtgcatgccactgcccccagctaattttattttattttttgtcttgctttgtagcccaggctggtatgaaactcctgtcttcaagcaatctgtctgcctcagcctcccaaagtgctgggattacaggtgcaagccattgtgcccagcccccatgactcttagaataaatgactctggcccctgacagtccaggcccccttttcattgctagctctgcaagtctattcctttgcttgttcttgcatccaggcctttgcactagttgctccctctgcctggaatgctccctctgcctggaatgctcatccctaaattttgctggctagctgtcttgtgcttgggaattagctcatactcccctcagcacagcggcttcctttacccaaccccctccagccacccagtctccttttcccttcctcccttgtctctctctggcctcaaggccattggacttgatcttatcatgtatgtgatctgtgaactcaaagaggtcacggtcatacctgtcttgtctgtctctgtgacgccagtgcctgattaaggagggtatttggtaagacctggccacacccactgctcacttactttatgggccttgcttggcacctgccctgtgggagggtgacgacctctacccaccaaccccaccagcctctcaccattgagccagcgggagtcgtgtggctctgttcggagacttggacgttgccctaggctgcgaaagatggtaaagtctcgtcccatgaggtctgctgccacccctgagtatagctcctcccctgcagacagagcaagggccactcaggcaaatggagggctcttggggcaggagggcctggggagctctgggagtgagtgaggttatgggggattccctggagctcttgggggtcttgggactttgtgaggttctagagtttctaaggggttctcttggggccttagcccttggactcacccaccagcacggaggcagcccgatgcctggggtcataaggactcttccccttgccatcctcta

SEQ ID NO: 316286 - DNA, 4001 bp, Homo sapiens
agaaggagggaaggaaggctggtgggagggagcaagggagggaggcaggcgggagggaggaggagagagggaggagagagggagggacggaggagagacgcttgaacaaagaaacgaggagccggggctggcaaggggtgcagggaagaggcggccagaggaaggagtccggaggcacctgggatgggacagggggccaggtggccaaactgtacagccggatccagaccgcccaggcttggagttgggggtgggggtggacagcctgtctccaggaagggaggttggctcctccgagctgaggactgcctggatggaagggaggcaggaacaggggccgtaggggaacatggggagattatcaacagcaccccacccgctacccagcccctcagattccctcccccacttcaacaagagctctgtctccttcttggctcctcagcttccccatcccccaacacctcaaggaccaggaagcagagccaccccagcatagctgggactgaaaccccccttttgtggccagggtttcccagtcaaggtcacctgagcctggctccatcctccccccaaggtatgctgagcagcgaggggctgaggctgggtgggctgccgccttctctctggcccctgctttctctccggcccccacctccccacttccgggcctggctccttcggagctgaagggggagcagcaggagtaggcatgcctgtgccccccgcctgcctagacactataccctacggggtcctggcacaccccttgggtagcctgggaagaggcctcagctccatccaactccctgggctgagatggggctcccaacccctgggtgcagttttcccttctctgcaactaggataactactgggagactatctgggtgaattcaggaggacagaggtccccaacctggcccagcttcagggtggacatactggtgtctttggttggcgtctcccttacctctcccaagcagtaatgttctggtggcaaaacacagctatctcaaaaattaggagttatttatccagtggggcccccagccccagctccagccaactcccgccagcactgcctcattcctaggccaactttgataccctcctgtcccatctgctgggggcaaccccgccaagcccccgctgtcccctgcccacttcaccactgggacccctggttcaaactagggattgaccgcaggctctccaagctcacctacacactacatacagccgtgcccctaatccaggcaggactctgctgtaaaagcaaacccaaggtggcagctgggggtcaaggggctggcacaatgctgggagaaatgcctcaggactggaggtcctcccactctgctgatgtgggagaccccccacgtggggactgccagtataccgcttcccttcgggctggccagtcctcaagtagagacactgaggtagggcaagcgcatctacggggaagagcgctgcctcgggcgttaatgggagagagagctgaggcagaagggggatcggaactcccgctccagaagcgtgaaggtgggggtgtatgagagcacccacccagaaccttgcaggaaaaagttgctttgcacatgggtgaccccgcaggccacatcatccacacatccatacgccgccccgtaggtaaggggtccgggcctccaggacaggtaagaatcccaccccagccttgttgcccctatgtccgcgggcagccccccggctcgacgagacccgctccccggacacttctgcggagttgcagtgccgcgggtcccagaggggtcgcggggtggcccggccgcctgcccgctccctcccggttcccgctgcactcacctcttccgcagcggcggggcctgggcgcccgggcggcggcggcggcacggagcggctcccgttgggccggtccgcgctagcggccccccggggccatggccctgcccgcgacctctcgccgctgcgcctcagccgggatcggcgccgcggccgcggcttaaccggttccgcgggcttcgggcgcgtcagcagccgagggcccgggccccagcccgggccatgggaaggctcaggggcgctcggggccgcctcccctggggtgggctgcgggcgccccctggccggcgcgccgagggcgcattccccagcgcggggcgcgggcggtggcgcgcactcggcttcgaagcgctgcgctctcctggctgctggacccgggccgggcggccgcgctgggctgcacggttcctcgcggcgtacccaggtcctgcgctgcgctcggggctctccggaccgccgcggttcgttcgctcgctctggtctcgcggccgccggcgggacggggcgctcagagccgcgcggggagcgccggcaattggccgcccgtgggcgacatttgcatagcgcagccccgccccgcccggcccgcccagccccacccccggggcgggacccgcccagccaccgccccgcccccgctccacctgtccgtgggccgggctcagggttcccaggcggtgggcaccccgcgccgggggagactagtctgcacccctcgcccccgcccccgcttcgcgggcggcgcccccgccccgccctggctttgtctctctgtgaatacaccgcacacatcgcgcctggtgtttacccgggcattcaactccctggcgagaagggctgcagcgccagggagcaacgagcctgcgctcacctgagcacccccttccgcgtccctcattcccactcgccgccggccgtgcccctggtcccgtgcgtgggccccgcggcgcaggacccctgactgcccgggctgctcagcaggtggcggtgcagcccctgggacggctggcaccgccggaccttcccgcgggctcagcctccagcctaggccaggtcgggggcagcccagccacacagctctctccagccattcaacgactccccgtgatcgcctcaatcgccagcccttatttcaggccagcagctcccacagactctccttatagttccataccttagagaggccagatcagctagcaccttctctcctcaaggggacatttgctttcaaatggcctggtgatgagccaatggctcagcaactgagaagggcctaccgtgaccccaggaagggaccctctgcccaacccaactttccaaggtcatggcctcaccaccaggaccacttctcagccctgccccgggcaccctgcggaggctcccaggggcgttggccctttgtcctctccttcatcctcttcctgttctgtcttctgtgccctcctctttctcctctttcctttctcctcttctccctctgcctctccttccttctcccctctcttctccctcttcctctctcctcttctccctcttttccatctccctccttttcctccttctcctctcttctcctggatttttccttctctgccctctcctcctctcccttctcttcctccaccccatgcatttccttctcttcttcctcctccttcttcctgctctttaccctcttcctcctttctctttttcttctcactcctcctctccgccttcttcctcctcccacttctctccctggctagcaagacctccaggaaaagacctctctccctctgacccattgactggttgactccaagtgcaaggtggagctgggcactagggatcctgctgagggtctcctgactcaggacttagagtgctgcctcatgctccaagcacaggcagggcatttgaggtgagcaaacaccatcctggagttatggagctgctgtgacagcacctgcacctctcccctttgtcacgcctcattgaaaacactgtgacaatccatctctcctcatccccactcatctgtatgagggtcacccctgaggtcaccaccactgcaccaccatcaccaatacagcttaagccaccatctctatggcttccaacaccatcccttccatcctctcacagcctccatggtctccttatagcctggc

SEQ ID NO: 316287 - DNA, 4001 bp, Homo sapiens
tttccatccacatggtgctggaaggctttcggaccatggctcctggggacaggtgggacgggaggctcagagcctcccacctggcccagcctaccctggggcctacctcccacccctccattccttagcccttcatcatgcagctaacatcttcccactgtcccatctgtgccctacccagtccccagggaagaaggccccaaccagcagaaactagagcaaagtgctggaagatcctggaggaagggcgggagtctttgcaggccgcctggctcagctggagggtgggccagcaggcgaaactgttcccagcagaggggacccctggcaatggcctgggtgcagaaaagggaaggtatggccgggaagggctcccacctccagtccagggatgcggccaaagacaattttctccccacagatgctggctatcccaccccagagatgagagcggggagctgtctggggacatcggtcccaggagttgaggatcctgaggtaggtcctccgggcttggctagggaggtggaggtaatgggggcagtaggatgtggcaggaagagggtgctggccacctttgggaaggcccagagtgtcctatgccttccctacggaagcacctctacccaacacccattccacccccaaaactcatcaacggtctcttccgggaagccctccatggatgacagtaccttggggaactttccctatttggggctttttctagcagtctgacctccccgcaaaaccacagctcccggaacaagaccacattcccctcagcctctccagggacgagcgccatctcccccagcagactgggcttcccaggggaaggtggtcacccctctggtttcctcaggaaggatctgccaagagcctgtctcgggccttccctgggcccatccgtggaggcctgagccggctcacatgtctagggtagaacacaggaacccccaggctgggatgtgcaaaaaggggaggtgaaactccccctgggctggggcgcttcttgggtgcaggagcacatgaacaagcccactctgggaagtgggctgcaaggggggtcctccccttctctgtggccccaggaccaagggatagcatgctgcctgctctcccgttggccaccctgggcaaaaagtgccagttgagcccagacagacccttcagccccaccctctctgtcactctcccctgcctggtcccttcctctgtctcctccccatctttattgagctctctcagggtctccatctgtccctttctcagcactccccctcaggtgcctcccaccgccaccctggtcctgtctcccaggacctgcctccctcccactccccgagagctgtgcagggagaggctccctcccctacagctgaccaggcacccaagagcccaagccacccaaacagggcacacgcacacaaacagggcacacgcacccaaacagggcacacgcacacaaacatggcacacgcacacaaactcggcacacgcacccaaacagggcacacgcacacaaactcggcacacgcacacaaacactgcacacgcacccaaacagggcacacgcacacaaacacggcacatgcacccaaacagggcacacgcacacaaacagggcacacgcacacaaacacggcacacgcaaactcggcacacgcacacaaactcggcacacgcacacaaacacggcacacgcaaactcggcacacgcacacaaactcggcacacgcacacaaacactgcacatgcacacaaacacggcacacgcacccaaacagggcacatgcacacaaacacggcacatgcacccaaacagagcgcacacacacaaacagggcacatgcacacaaacagggcacgcaggggctggtacctcggtaggagagccgcaggcggggcacactggggccggggctggggccagagctacccccatggagcaggaggccccctagcagccagcaaatggcccaggccgagggggccatgctggggaactgagggcaccgctgccgcctgcctgcagagccgccctctggtcccgctggccgccggttgtagtttgctctgctgccaccaggccaccacttataaggcagtggctccacccagtcctgggcgggaagaggggcggaggagagaaggaggctggggccttgccgtccacctgccgcttctccttccaccttgttggcccagtgcaggcttttgtgccacactggccagctccccattgggaagaccttcccagctagggcacaggccatgtgtacagagatgtccacaaatgcaggtccccaggctccagcaaagtgacaagtggggagagagcctggaagggaggtcagggatcagaggttaaagttgatgggctgggtaggggcctagctgggctctgccttgttctctgcccctccactgcccacagcagagaccttccaaactggccctgccccaattccaggatattccagccccctgaagctttggccagactctccagctcccctgggtaagggtggagggccattcccagcccaaggggcgccatgtcctagacaggtgtttgaggtccggcaacacttcatagagccagcaagagatgactgcccagcctcttccacccaggcctgtccccatctggcttccaggcaccccagcctctccccacatctacatgccccatctcagctcaccaggcttgctttggggtaggggacaggggcatcaggggactccatgccgagggaacctccccttgccctgcctccctcaggcctccagtccttccagagactcagggtccagagcttccccaggtcagtgatggttcttcccagggaccccatgccccataggccctacagacacctatgatctcttagaggtcacttcccccaccctgaatactgactgggtggcggggggcacagaaagccacagaagagggccaaaggggaaatgggactgagggcctgaatctggggtgagtgacgggacctccccatgctccctgccccagaacagtcgccacctcaccccaccccagaaccctacactcagaacctgaggccctgggcactaaagagattttaattttgagctggagtttgagttcccaggattctaacagctcctgcaggttgggcctcccacatggaccggcctgggccctctgatggtggtcagggaacttgcggggcactcagagagggaaggacctggcccaggccacagagcaggctgagaatgggtccagctcagctctgccccttcctgggaccctcctttgcttctgggcgttgttgggagtatggggaccccaccctcctcccctacctcaatcctgaaatggaaacaggttggcttcttgggtcagcatgacaggtctcagagacctacaactctgcctccctgtccccagctcccttcactcacacatgccttcttcagcagggggctggcctggaggtgggcaaggggctgcccacagaggccagtgatggagctcagcccagccctgcctctggccctgctggagagccttggccaaggcccttccatctctgggtctgcctcttcctcccagggccagggaccagccaccctgggtgtaagcagccttcataacctgatgagtgggcttgcgcaggggctgctgtcagggtgaccatatcctgggaccttggagtggactgcttctgtctctgtttccctggggaggtgtggccagcacactgcccaagctggggccaacttctaactggagactgagctaggcagcccttcagccagcatgtgaccaccagcggcgggcaggaggcccaacactcctcagcctgccagcccatcctggggtctcagctcagccagacacccagcaggggctgcagggaagcctgggtcgactggggaagggtgtgggggcagcctactccacactgcggaaagagcctgtggcaggctgggagtccgaactctactgttaa

SEQ ID NO: 316288 - DNA, 4001 bp, Homo sapiens
attttatctcctttcctcctccgttgaaaatctagacttcgggaaaggtactggctgtttctttccaagctgctttcaaatctgccccccttttccgtaatcttgaggtccagttacaaggttcaagttcccctcttgccccttcctcaaggtcatctgtcccggcttagaaaaggtgagaggccactgctgattgtcaagaagagaacaggcttaaaaagatgagctgaagtggggaggccgaggagcaagcaggcagggagggctgtggagagaggccccgaggccgaagtgggttggggtgcctgagaaaagcggaaggaggtcggattcactaggggctgaaggaaaaagatggggttagggccagagaaggtaggatcgtggtgaggtctagacacaggcaagcttccaaaccctcagtcccaattccgttggccgggaaggagtgcatgccagggtagcccgccctcccggctcctgctgctctcaccccgcccctctgcagaaagcctgggcaggatcgcaggggtgcgggcagaatccagcgctcctctctccccatccagactctcggcccactcccgcctggcgcggcgggcagtcggaactacccaaagactgggctcgaggtggggggcgggggcggggaggagggggccagaacggcgctgcaggtgatcctcctccttgtttaaagtttgcggtgggcaaaggagtcggctccgttgggccgggttttctcgagcctcgccttcttcctccgccggtccggcgaccacttccctcttggctcccgccccgcgcgggtccccgatcccctctcccgtctgcatccctctctgtgcccgagcgccccccgctccctccctcctcgctggatctcccgcaggacgtgagcggaaagtgaatgggcagccccaaccacaaagacaaattaccatgagaaacataaatcgggaaatcgccgctcgcgtccctgcttccagctgccgcacccctctccaccctcccagccgggagtgcggggccctgagccactgcccctggagcctggtgggcagagttcacgctccgcaggcctggtcagggcaagagtgtcctggaggcgggtctgggaagaatccgggcggcggctccgcaggcggcggcggtggagcagggacgtccctgagcgggagatttcacactctgggcgggccacgcgttcccacgcgcctcgccgcccgcactctccctcagtgctgtttactagccggccctctctgagcctccatctccgcacctctgtccctccgtccctcagcctcactcgtccgtctccttctccaggcctgggtcccgggtccccatcgccgctgcagcccagatgcgccgaccacagccctggcagggcccagtgcaacccggacccaagctggctggcggcgggaacgcagcagcgatgagggctctcaagccgaggtggcagcgggaggcgcggaagccaggggaccccctgtcctcccgcccgcagcctcacctacctggcttcaacttgccagagcccggacccctacctctctaccccgatacccacccgagttgctgaagtttgcaagttgcagccccaacccgcgcaggggaagcgcccggggctcccgggactcacctcccagaggcgggtgcaggtgcccggttccccgcggctcccgactcccgggcggcgcggagcggcgggagctaaccagatgggctggcggccggtctgggaatggggcggccgcgcaggaacggcctccagctctcagcgctccggtgcagtccccacccgggcccgcgcccgctgcgctcgggctcccagcagccgctggatgcgctgccgacccgcccggctcggcggagctgggctctggcaccaacccccgcgctccaactagctcccgacccggcgctcggagagagcagggaggaggagaccgcgggagcagaaggagggagggggcggtgggggaggagttgcaagcaaagggagagaaggaggggagcgggagcgaaaaagaggagggggctggagcagacctgccgcggcgggcgctgcacccgccagcctcgaggcgcgcggaggagcgcgagggggcgccctgcatcccgcggctgctcggccgactcccgccccgggcctgccgagtgtggtgaccagcccggtgggccgaagccccttccccggccggcattccggcggcaagacctaggactccgagcacttgccgccgtttgccacatcccgccttgccgttctcggtcaccccatctcgaatgtgacatccccgagggccatcggcgcggcctgcccaccccaacactcagggcctgaggaagctcccccaaaccccactccggactcccacattccccagccccgtcagttcggaacgatcttcctgcctgtggatttgaaggggaagggacctcgtgtaaaacgggggagagccgttataacctgcagcggcagagagggaggctaggctgctgggctgggctggaaagccagaactggccggattagggttaaccttgcaaactgtacgataccgagcgaacctctccaagcctcagtttcctcagctgtaaactggggttagtaatacgcaccctacagaattgtgaagaacgagtaggggatacggggagtaaaataacatcaggaacagtgggagggcagccaagagatgagcgatccggggaggtggtggagcgttctcagctgaggacggaaggtttagcgcaatcacaaggagcgaggccgaattgtttacaagtttaagtgatctagtgtttctgatggctagaaggcgggagagaaagattcaaggggcaagcttcaaatcctagctgcccgggctgcaagagggatgggaagggagccctctgctgaacaaaaaatatatttgaaaatgtaaaaaaaggtgacctaagaacgagtgagaaagacaaaggatttgaaaaattaaaaccaggaaagtgtgattctaagagataaccaaagagaactatgaaataaaaatagataagttggaggaaggaaaatatcaaaagactttctagagtatgccaaaaattggataattagaacaaagtctgagtgaagcattttacataataaaattctgggtaaaggaaaacccagataaagcagaagaattgagacactaagagccccagagaagcacctcctgcctgccatcctcctacccctggaccatggcaagaagcagtttgacaggataatgggaaagaaagggtggttctgaatccaagaagggagtttatgagacactgtaaaaagagaaacagtgcaagatctcaaagatagactttctagggcaacagaaatgctgaaactcataatgtgcagaatggagagaaacttgcaaagggaaaacacgctctggacacaaaggcagagatgcagagaagaaaagaaaggaaacgggcatgtgtgggcataccagtctggtagcccagtctggggtaaaaatcaagttggaagaggcagcatgggatattgagtccaaatctatcattttatcaacaaggacaatgagctctggaccattctcccagagtcccaggctgagatagggataggtctcctgatctccaccgtggaacctttccactgcaatgagcgtgccccccccccaacccccattccctgcagagccatggggaatgtttttgtcatcacaaaaaatagaagtatgtgcaatatagagataccttttaattaacacaaaaaaccacgaagctattccatactgcaggaccagggaatgaacaggagagcttccaatttgtctggttgggagaatagacaaaatgccttctgagtggctctgtcagccacagctctcccttgaaagataaccaaaatattctccacccttcacacattctctcacctgccctcttgtttgctaccatgttttgattgtgttcattcttttcttcccactatc

SEQ ID NO: 316289 - DNA, 4001 bp, Homo sapiens
tccagacatggttacacttcacttggctaggatgagaccgagtctcaggggaccaaaggccacatgagggcccaaggagaagatgtagcagcagcagtgttaacctgaaccagtagttctcagccaggagtaattttgcccttgggggaactttggtaatgtctggaggcattttgggctgtcacaaatgaaggtgctactggcatcacacaggtggaagccagggaagctgccaaacatcctacaaggcataggacagtccccttccgccacatcaagaattatccatctccaatttccaatgtgctgctgttgagaaaccttgacctaaacactgctgcaccctccacgccatgattactgagttgtaagaaggaaaatctcagatgagtcagaatcatggtccttcagccctgccttagatttcaggcaagctccaaaggataggggtatattgggtgggggtgggggtgcaccagagttgtgccacacacaaccctctggaaagttggaaatgttcccagtgggacctcagaggttatcttgtcgaaacatactcatggtatgagacttagggagatataagcaaagaccatactatcacaaaggagagaaaacatgatcgcaggcatgttaggaattctaggaagatgggcatccctgtgacggcaaaacagatggctgagaacccgttacggatacaggaagcatgtggcgacctcctagatctccttattcccggaggcagcccaagctgaaaacaaaactgtaaccaccaaggggaatggttttgatgggtaggcaggggtccaggctataacagagggtccctgggtccaagggctgtggttctccaccctcattgtgtttcattttgtgcacgttctaagtggggacccaccactgtttgcaaagaaaaaaagagttcccgtgccctttcctggcagtgctgatagcaaagtgactctgtgaagcccagcagcccacgggtcaggggctccagggcaaaagcagaaggatcacagagacttttcaatggctccaggacgatgatgacagcgtgggaggagggataagccacatggccagggaaaggaaagggcagatctcactctgcattctgtgcccttcacctagcaggggttatgcagcaagagtacaagtgaaagcctggagcacctgtgggtgtggggcatttcggagacaccatccctccacatgcttttagacacatctctacccaaccaggagagggaagcagtaggagaaacttctccttccagggtctcctgactcctgagaaaaatacctgcagccccagctccctgatgccccacctcctcaccccctattggccctgctccctagatctcccaccccatccagttggcatgaggtgaggcaaactaatgtctagtctctctgaaaatacagcttcagagctggtccactgtgactcgcttaggtacatcccagcaaacgcagaaagggacatgtgtccaagtactcacccgtagcagctcagctgcgggcaccatgcagggaaatcagacagcaggcaggagaagcagtctcggggaagccagcaccatcagcctgctgtctgccaaagcccaggcagcagctgggctctcccactccttgcccccagcgacagaagtcaggacttcagcccacgcctgggagcagacctggggccacaggcacaccggttccagatccctgaaagggggtccgggcttcctggggctgatgaggagttctcagtccaggggagccaggactgctgctactgctcccagggagaaaacaacatttccctgtagagtccacccaggccactgtggtcaggtgaggtcagcaagaaaacctgaccagcagctccagacggcttggtctggccgcagaaaagcaggacacaacgcggcagcctgcccccgagcatctccaattgtccctcacactgctgagcctcactcccagcaccagacaaaagcactggaagcagctcgcagcacggctgtgacacaccaatcaccagtgccagactgtcctcccagctggccaagccctggccaccccacaagggctggctccctctcccgtgtttcctcaaagctgcctgaggatggtttaggatgatttatcctcgtggggtggattatttgtcccaggaatactccaactttggctggaccagagagcagtggtgtaatgccctggcttagagagtgagacagcgaggaagagaaagagtgtgtgtaagagtgtgtgagagactgtatgtgtgcatgtgagcaagagaggagggtgagaagcagtgtgtgcatcttcccagagtatctatcggtccctctctaatttcatgcaatccctctctcctcctgggtttggagacagggggatgggcggtgagagacacagaatccagaacaggcaggagacaccatcccttcctccccgcccccttgccacccgctctgggagggtgataatgccacccctcccgctcctgcctcccccacagctgctgctgtcagcagtcagctccccctgctgaatactcttggggaacaactttggaagaagcatttcacgaaatagtcagcggcatcgcccctccttttcccagcccaggtcctttcatgctcccattttggtcattggcccccccacctcaagcccacctgtccccacacccattctccataagcctcagaagcctctccccacctggccccatctcagagccatatcctcttcaccaggcttcctgcgggtcctgggctgggaggacagcaagcccttctggagtgtgccatcagcccggcaccactacagcccgacttcctcaaccttccctcctctgtgctgcccaccaagacaccccacagataacaagagcgagtggtaactccaggctgcctgcacaattcatttggagggaaaccaggactgcagagagtatagtggggagtagaggatattccacagcctctcgtctctccctctcctgtaagattagccacctgtaggtctgaacacctctctgtttcatatcttggctaccacagaggaggccaggaccccatctatggctttcatatttacctccttctttgcaaacaattatagtggttctcaacgagtacaaaagtgattactctttcttggcctgtgaaagtggggaggcccctgcttctccttcctacgtttccctgccatgatgggtgtgtgctgatgggtctgtagggagaaatggagaacaaggtaaacagtgagggatttggtactgggaggagctctttggagacagatcaccacaggctgtgccaccctagtcctaagggttattggcttgaccatgagaggtgaccgcctaggcagcttactattgtggttgactgccttggctcaggggttaggcaggaccaggagtgtaaatgtatcaattgtgtgaccttgagcaagctgctaaatctctgagactcggtttccctgtgtgacaagtgggaatattaatatctacttcatagggctgttgtgagaaatcaaattggatgaaatgggtactgtgccacccacgatgcctggccctcagagatgctggatcctttatttcttcttctactgaatcctgggaaacggaggtagtggctcttgcagtgggaaggaggcctccaggtgagctgcttaaaggggaagggcctagctggaaggagctgagaggggtgtttagcaggagggaagccggggtgtaaacccagagagaagaggcagaggggcaacatgtcaggttggaaaagtgagtccagccaaagaggcagaacgtaacccagggcaagccaagctggaaaccaggaccatggccagggctggagggaccctgtgagaagcaggacatcgggtggtgggggtggagagagctgcttgcctgggaaaaatgttagtctggggttttctggaacagaacccagggaccatggcagagggtggctggg

SEQ ID NO: 316290 - DNA, 4001 bp, Homo sapiens
caggcggggagggagaagccggcaggtggttggctgatgtagagtggaggctgggagaaagaacaaggaccagcacaaacccactgtccagccctggccagaagcatttctgggaactgctcccagccctactcccattgccaggtgagccccctcgctcctgcacacacacaggtgaaagacaggtctgagtgaaggccaggcctgggactccaccaccactactgccccagacataggaatgtgtacgtgggtgcacactcgcctgcgcacatgcctgagatccagatcattccttcaaagcttctttgcaggtgcaatgatgcagcctcactgctgccccagccctgagcacctacaaggcagctgactggtccttctgggtttgggtatatgggttggggagagtgaggcagggacacgtgcctgaggacttctcaggtggatggtgtccaggagctgagcaggccatggggcttggttgtgggcagaatagagagttccagccctgggccagggggtgggaagagaaggggaggggggtctttaagagaagcacagtgagctctttctgatctggtataaacgaagcccttcttggagacagaaagatggtcaagggctgacaaaacccttccagtgcttaatgaatgtctctctttaaacctggccattggtgccaagccccttaagttccatattcatagagctcagttataataagaataacagctaacaggcttactatttgcaggactttatctatgactcaccctgcaggcccagcccccacccccagctctccttttccacaatggaactggaatagagttatcttcatagaggcctgttggaggagcatctgaaatgcaagaattctggggagggagcctggaagtgtcctctgctcaggcccacaaggacagcagagaaatggaagggagtgggaaaccgtgtcattttcttaccagaagacttagtcaagtgctcacaggtgtggtctgcaggcagacgtgggcagcaccagacaaggagagatggagggtgggccctgggtccaggggtgaggagcagtggagtaaggagaggcacagctgatcccctgcctgccaggagagctgccgctgctggctggcgggaaaggagtgtgatggatgctcccctgtccagctgcgcctcagccttggcagaggaaggaaggacgatgagcccctgagccagggaacacggatgtctgcctgaggaggcggagaccaaggcagagacctgctctcccacttctcctccccaccacccccctgcctcggcacagcctgggtcgacactgagcactcacaccacaaaacatgcagccctgggctcaaatcccagcccaggctcctttagcctctctgagtcagttctctcaaccgtaaaaccacacagggcagttgtgaagattaaaagataatgtttgcggaagcacatagcactgtctggcacctagaaaacactcaataaatgtcagtcactattttatcatcattattagtgttgtgattatgcagaccttccatctctctctccagacgctcacaatagcctcctaagtacgcttcctatctttcatctctcctctccaatccatcctacacaaagctgccagaacacagtctacagcaatgatttggtcacattactctgctgcttaaaacccccaccagctccccactgcctacacaaccaaatccaaacaccctgcatagcaaggactctccatctgcctcagactccctctcctgccccctctctggccattccccctccatccaacctcctcaacacatcccaaatctagaaactcttcatgtcatgcacttgcccacctcgatcccttcgcttctgcttgcccgtccctgtagaatgccctctcccaaatgccagctcatctatgaagctccttctgaccctcacgcagccaatggcttcctctgctgacagatgcagcatgtggtttatacactctcatcacttcctcaccctgtgttgggctgtgcagatgcaagaagtgcttctcaaaatgtgctcctaggaccagcagcatctgcacctcctgggaacttgtttaaaatgcaaattctcaggcctcaccccagacctactagatcagaaagtctgggggcagggcccagtaatctgtgttttaaccagccctccagactctattgcacactcagttggggaaccactgatgtaaggtacctgtaccctacaggtgatgcttggtacacagagagaaatgatgggttagatcagaccacttgggtggctttgaaaaaatacagctggttgggcctcacctgcagagattctgatttaattgatctggggttgggcctgtgcatccatgtttttttgtctcccaacattttattatcaatattttcaaacatacaaaacagttaaaagactgcacagtgaacacctgtatacccgccatctagattctgtcaccaacattctgctgtatttcctttatcacacatctatctacccatgcacttatccattttattttttgatgcatttcaaagtaagttgcagacatcatatacatcacacaaacacatctgagtgatttaaaagccctccggggccaggcgcggtggctcacacctgtaattccagcactttggaaggccaaggcgggcagatcacttgaggtcaggagttcgagaccagccttgccaacatgatgaaacccggtctctcctaaaaatacaaaaattagccaggcatggtggcacgcacgtgtaatcccagctactcgagaggctgaagcacaagaatcacttgaaccggggaggtggagattgcagtgagccaagatcgggccactgtactccagcctgggcaacagagtgagactctgtcttgaaaaagaaaaaaagccctccagatggttacactgtgcagtcagggcctctctgatcccaggtgggaaactgacagtctcttaggctcagctcctgctatgaaatgaggaggaggaggaggatgcctactatgccttcctgtcccactcttacaaggattgaatgagatcacatttgagaaagccctttgtaaagggccatatggttaacagaaagtaatccctgactccgtgctggaggaggaaggtgtccagagctgttgcaggatcgctgaataataaacgaattgcaaataaatgacaaataattctttagcataagtgcatcccaaatattgcatgagacatactcataccgaaatactctttgttgcttacctgaaattcaaatgtaattggacaacctatatttttacttgctaagtctggcactcctagaactcagtcctgtcttatggagagcatcaggatcagaaccctctacccagagaagagtcagggctggcaacagggactacagctctacctagccagcctctcatgctcctaggatttaaatgttaatgtcatccaaaaacaccctcacaaaaacatccagaataatgtctgaccaaatatctgggcacagtggcccacccaaattaacatataaaattaaccaccacagtcagcaagtctcaaacactagagtacaaaagtctcactggggagaaccaattaaaatgcaggtctccaggccccaccccagagattctgatgcactaggcttggcacaatgcccagaagccagcattttagccatccctccagatggttgcgatccaagggctccatgggcccactttgggaagcactgcagttgtcactcaataaatatttgccgactaaagggatgttggaggtaggagtgtgggcagcaaggcatctgagccagggccagaccacctctgcaagactgtgtcctaggggctctgtgaatggcccccagtggagtgatggcagatgcggaaccagccagccagtcctgcccccaggcagggacccacagctgagtttgcagactgacgcaggagacagaattataggc

SEQ ID NO: 316291 - DNA, 4001 bp, Homo sapiens
ctactaaaaatacaaaaaattagctgggcgtggtggcgggcgcctgtagtcccagctactcgggaggctgaggcaggagaaaggcgtgaacctggaaggcggaggttgcagtgagccgagatcgcgccattgcactccagcctgggcgacagagcgagactccgcctcaaaaaaaaaaaaaaaaaaaaaaaaattagccggtagtggccgggcgctgtggctcaggcctgtaatcccagcactttgggaggctgaggcgggtggatcacgaggtcaggagttcaagactagcctggccaagatggtgaaaccccgtctctactaaaaaaaatacaaaaaatataagccgggtgcagtggcaggcgcctgtaatcccagctattccggaggctgaggcagaagaatcgcctgaacccagtgggcagaggttgcagtgagctgagatcgtgccaccgcacttcagcctgggcaacaaaatgagactctgtctcaaaaaaaaaaaaaaaaaaaatagccgggcatggtggcgggcgcctgtagtcccagctactggggaggctgaggcaggagaatggcgtgactcccggaggcagagcttgcagtgagccgagattgcgccactgcactccagcctgggggacagagcgagactccttctcaaaaaaaaaaaaaattaacacttgatcactaaagttgaagagggggcatagaatttgtatagtattttattttccagatttttaggtaaggaggtcgatacaataaaatgggacactccaaagagtagatgctaaataagaatagcttttggggctgagtgcagtggctcatgcctgcagtcccagcacttccaaaggctggggtgggcggatcacttgaggtcaggagttcaaggccagcctagccaatatagtgaaaccccatctctactaaaaacacaaaaattagccaggcgtggtggtgcacacctgcaatcccagctacttgggaggctgaggcaggggaatcgcttgaacccaggaggcggaggttgcggtaagccgagatcgcaccactgcactccagcctgggcgacagagcaagactccgtctcaaccaaaagaaaaagaaaaaaagaaaagaatagctttgcgtttcccccaaattttaaccgaatttaagagtacagactagtgattgttttaaaggagtgaggcacctaagcctttttactcattcactaattctaaagcacaaaacccttctggccccaaacacacagactgtttgacagctgttttggaacaaaacaggtgctgtttcttgctgcaaggacagtacttgcagtcaaaacggctttgggcaagctatgaatctcacttcaactgcacttaatgtctgcagatgacacttgcgagggtgctttgtaaacagtgagccacaacaaagacagtattccttcaatgttagtgttcagcctaagagcggcaaagccccatttgttatcagcaaccagcttggcctctgacaagaatgtcaaagaccctgccatcaccggccgctacgaagacgaccagctcctccttcatcaggagctgcctccctacagcctggcgggagcgactacgtcactaggatcccggcgacctgtttcgggtgagcctggctgaatcaaagctatcacggccgaggagcccgctgtgggggagggggtaaggccaggctggcgctcagccccctctcgtctcacctgtctgagcgccgcctcttcaggagggcccgggcagggggcaccgaccggtcgcagaaacggaaaatggtgccgagaatcctaaccagccatctgtacataccaggcccaagcagcagcggcggccgacacaccccgagacgcaaaccccagagctgtcgccgccgctgccgccttcgccgtcttaaccaccaccgccagagttcggtcgctgatttgtgacgcgattcaagagcccacagatacagcgtccccagggctaccagaggcccccgcccgccaccactcctgacgtcacctcctcccgcccgaccggaaagctccattctcaatctgcgcacgcgcaacctagcaccgctccctatttccgagcccagcaacaagagtaattgtgggacggtcccggcccaatcgctgacgagatcggaagggctgtcggcagggttttctcttcggcggagccaatccggagccggcccgtgggacaaggcccacaggccacatgtgaggctgctccactccggaggaggcgttccggggtcccagaggacattaggtgctcagtgtttgctgaatgcacatgtaaaggtagatcaggttaattaacacacgtttaccgttttaggcgccctttattttgcacttaccttttgcctcgtacttttcacgcattgtcaccttaatatgcccagcaatggcgtgtgacagagagtcttaagccagttttataagtcaaggaaattgaggcatagagcgattaagttatttgtctaagatcacaaaactagctagagacgtggctggaacttgaacccggggtctgagtaccagcgccagtccctcgcccttgaggtcagtctacttggagacatgtacatagataattacaaattacaatacaccgtaagtggttgctgtgataaaggtatgtgcagagtgcagtgggagccagagaaaggaaaaccacacactgagggagagaaggaaagggcagatgtcctcaagaaaggcttcacagaaatttaaggatgaaacctgcggcccactaatgtctcctaccctgggctagtaagtaatgagtctcgttactctccctctataattccaatgtcacacttctagttaattgtcaactataggccgggcgcggtggctcctgcctttaatcccagcactttgggaggctgaggtgggcagatagcttgagcccaggagtttgagaccagtctgtgcaacatagtaaaaccccatctttacaaaaaatacaaaaattagccgggtgtggtggcacgcacctgtagtcccaactacttggtaggctgaggtgagacgatcacttgagcccaggaggttgagactgcagtgagtcgtgatcacgccactgcactccagccagggtgacagagtgggaccctgacgcaccccatcaaaaaattatcaactgtaaaacaaatcccaccctatttagtgatagaaaatccagtcccctcttccaaacaatcctaagaatcctcaaaggttttcatgccccacaaatccattcctgattaacttgtttcctacttgtgattcagttaaggccagagttttacacttgcttgaacttcaacgctggcactccccagtacagcctcttcctttcctcaatagacagcattccaggccgggtgtggtggcacacgcctgtaatcccagcattttgggatgccaaggcaggcggatcacttgaggacaggagttcaagaccagcctggccaacatggtgagacaaccccatctctactaaaaaaaaaaatacaaaaattagccaggcatggtagtacactcctgtaatcccagctacttggaaggctgaggcaggagaatcgcttgaacctgggaggtggaggttgcagtaagcggagattgcaccactgcactccagcctaggcaacagagcaagactctgtctcaaaaaataaataaataaaataaatacatgtgtgtgtgtatgtgtgtgtgtgtgtgtgtatgtgtgtatatatatatatatatatatatatatatatatatatatatatatgtagcattccagaattgtgctgcaagccaccccctagagcttcagaatcaccagccacacacctgaagctaccaccactctggcctcgggggctggggtcatatcctagaggatggaagcaaatcctaagtgtggacacacccgcctcccttattcccctaagcatagcaaacaccaaccaggctgttgctgaaagtttggggcattaca

SEQ ID NO: 316292 - DNA, 4001 bp, Homo sapiens
aaaaaaaaaaaaggctgatttagaaagtaatatagcccaggcgcagtgactcactcctgtaatcccagcacctttttttttttttttttttttttttgagacggagttttgctcttgttgcccaggctggagtgtaatggcactatctcagctcaccacaacctcgcctcccgggttcaagctagtctcctgcctcagccttccgagtagctgggattacaggcatgcgccaccacgcctggctaattttgtatttttagtagagatggggtttcaccatgttggttaggctgatctcgaactcccgacctcaggtgatctgcccgcctcggcctcccaaagtgctgggattacaggcgtcaaccaccgcgcccggctgatcccagcacttttgagaggcggaagcaggtagatcacttgaggtcaggaggtcgagaccagcctggccaacatggtgaaaccccatgtctactaaaaatacaaaaattagccgggcgcgatggcgggcacctgtaatcccagctactctggaggctgaggcaggagaatcgcttgaacctgggaggaggaggttgcagtgagctgaaaagatcgcgccactgcactccaggctgggtgtcagagtgagaccctgtcccccctccaaaaaaaaattgtgagcccaggtgtaaatgaagcccccctccccagcaccctcctctacataccaagcttttctcctagaaaagatgcactgggaaaaagctatcttgagtaaagatcaaaactgatataagccatccctcatataccaataatatgccatcaataagcgtgagacatgtggatggctaggagagagtctggtttcttcctgatgctgcccacccaaaacagagactgcagttaggctctgaccacacgagcgcctggcatctctaggcaaccttttccataccaagcttagttattccgggcaaaatgcaaaaaaaaaacataagtaggaacctatcatgaagtgtcctggatattcttaaattaaatttaaccagattctcaaaacatttcataactaacgtctgctttcttcatttaattctccaaacattataatttacattggtagaagaaagtcccactttacctgcggtgaaaaaggtcgaaatgtctatctagcatgagatgaaaaacactaccagagagcagggtaggatttcacctcggctattctcgctctaagtccaaaactcccacatcctctccgcatccctccaccccgacagagtggccacagggcgtagagcggaggctgataccgctcagagcagaccgaagggaaaagacgtctcccaccgcgctcatgcccaaccgggctctctggaaaagggtcccggggagcgcgaggaaagaaacgaaggccggaaggaggcagagcggtctaagcaaataaaaaccccggacttccacggcggccggagctggaggcctgtgacagcggctcctcctctcagagctttcccggcttcaggaggagctggggggcgccagcttcccggtgcctgcgacgcacagcccggctggagcgagagcgcagggcagcggcccctcgggacgagctcgctcgcctcccccggaaagggaggctgtggccgagacggacggcggcctccagctcgggcgggggagggcggctcgaggcctccggaccgggcgctgaggtggcgcaccggcgcgggaatggccccagccagccccgccaggcgatcgctgagtccgtcactcgtctgcccgcgtccccgcttacctgctaccctcgttcctggcagctgccccgccgccggccccgtcgcggcagcagcctggaccgcggaccccgccttcgtcagctccaagggaagccccgccagcgacgaggcgtccggcctgttcgccgcggccacagccgccgagcttcctctgaagcggctgccgcgacgccggcgctggcctatcgcgtcacctcctccgcgcccttccgcctgcgaggctgggcctggcaccgcccgcttccggcgctcccgccccgcctcccgacccggggccgccccgcccccgcccgtcaccgcgtccttagccccggcctccctcagaacgcgctgggatgggaaccgcgttcaggagctgctaagcgcgtttgagacttcagccccttctccagcttttaacctaaaagggctaaatcagaccgcagctagtgtacacccctaccctccgctgatcccgtcacccctgcgccgaaagcaaaagacccattccagctctggacgttgtgaggcctggcccaggcgtccgctctctggttttcctattgatcttacccctggtattgtgattggcctctttatctatgtcttacccgccccaactgtgaatgctttccaaaattataagccgatgtcctgacaggcaaaaacataataatagcagatttatggcggaagatgagttcagttttgaacatactcgatctggaagaataaagtggaggtgactgcaatggaaaaccaacagtgcgttgctgagagcctgtgtaggcagtaaggatatgcattgatggtggagaagataaaaacaataccgaagccaactgcaggatggtttgcttttaattatcatcatgtgtcagaaaattctaaacaatgttaatgaaaaagtactcctttccaaacaaaagctttgtttagtcttagttctaagcaatggctgcaattactgttgatttttttttcttttttcttttcttttttttttttttccaaacagggtcttgctgtctcgcccaagccggagtgccgtggcacaccctaggctcgctgtaacctctgcctcctgggctcaagcgatcctcccacctcatcttccagggtacctgcgaccacaggctcctgcaccacgcccggctaattttttattactattactatcattatttttgtagcgatgacatctccctatgttgcccaggctggtcttgaacccctgagctcaagtgatcctcccacctgggcctcccacagtgctcgaattacaggcgtgaaccaccacaccaggccctctcacttctttttaacagtttctctttgtcagtgattttttttttttttttagaggagtgtcgctctgtcgcccaggctgcagtgcagtggcgccatctcggctcactgcaagctctgcctcccgggttcacgccattctcctgcctcagcctcctgagtagctgggactacaggcgtccaccaccacgcttggctaattttttttgtatttctttagtagagaccgggtttcaccaagttagccaggataatctcgatctcctgacctcgtgatctgcccgcctcagccccccaaagtgctgggattacaggcgtgagccaccgcacccagcctgttagtgatttttagccatttattttgtgccctatctttgttttctttgtatttatctgtcttggatatcattgagtttctctgatttgtgggtagatgtcttgcatcagttttgagaaattctcaatcattatctcttcagatatggtttttgctgcattctctatgcctgttctccgagacaccaattacatatgtaagattattattattattattgagacagagtttcactctttttgctcaagctggagtgcagtggcgcaatctcgtctcactgcaacctctgcctctgcctcccgggttcaagcgataatcctgcctcagcagtattatctactgaggtagataatactattataatagtattattatcgagtagccagaattacaagcgcccaccaccacgcccggctaatttttgtatttttagtagagatagggtttcaccatgttggtcaggccggtcttcaactcctgacctccggtgatccacctgcctcagcctcccaaagtgctgggattacaggcatgagccacggcacccagcccatatgtaagattatttgatcttgttcaccgtgtcttttaca

SEQ ID NO: 316293 - DNA, 4001 bp, Homo sapiens
aactacttacatcaagttactgtgacaaataaataaatctaagtgtaatcaggtaaaaaggaacgtgacttgttgaattacaaggcaaatatcttaccttccctcctcaaaaatgtattaaacctagatgaaatgcatttatttaaaaaaggttgtgcatctcaaaggaagatatgatcacacctaaagttctgtgttaggaagcccgcaaatgacaccagctaagcattgtgcgttttcctaatgtgtccattttacttagaggtttggtggggggtggagactattaaaacactcatcagttggaggcatatacctacatgtatgtataaatatacatatatatcatttatacatgtgctttcaaaggaaaaaactattatctccagaatatacaccaagaacatcgataacattggttgcatatgaaaagggatttcaggttttcaactgcttcaagcagtgtccccagagatccataatcactctcctttgcaattaaggctgaaagcagtttgagatgcactgccacagggcactcctaaataaatttggaattggttttttttgttttttttttgttgttgttgttgtttgatacagagtctcgctctgttgcccaggctggagtgcagtggtgcgatctcggctcactgcaagctccgcctcccgggttcacgccattctcctgcctcagcctcctgagtagctgggactacaggcgcccgccaccacgcccggctaattttttgcattttttagtagagacggggtttcacaatgttagccaggatggtctcgatctcctgactttgtgatccgaccgcctcggcctcccaaggtgttggcattacaggcgtgagccaccgcgcccggccaataaatctgtaattgttaactgtctctgcagaaaccaacggtaccatcagaaacagaaaaatgaaatgaaataattgattcattgggcgttcgtttgtgtactggactgtaagcatatgagtcctcgtcctctcctcctaccatccataggacttaacacaaggacttgaggaccccctaatggatgaaatgtttgataaaaacttctcaactgggaggagctctacctcacgtttttataactccactttcttgtttccaagacgttgtacacaaaactgaagatagtcatttaaaacaaagtaacgtccaaaacaaaaaatatgctgaaaataaaaacacaacgaaagcacggcttcaaatcctttgtttgactttccaatcacttttggaagacgcagggtaggctggaaaagaaaaaggctattaggcgggcctgttcagcagaacgagacccggagaggcattgtatcaaagaaaaggagtctccggtcgcaagccccacctttcctccccagcagcagctacctgctgagggaaagaggagggagaggggaagggacgcaaagtcgagaatcaaaggaagagaggaaagtggggtcaggcgctgagaagccgaaatgaaattggaacattggtggaattacgaggaaggcgtggcagagagtgacaagccaaccgggaagatccatgggccgatgagacgcaaggagggtgttcgcgggaggagggaaaaaataaaaggggttttgaggtgaagagcgcccgaggcttcgatgacagctcggaccgggtcttcgactccaggggcgggggcgacccgggagccttccattgtgcgcgccccttcctctccccgcccccgccctcgcccccgcggcttcgggccgcaaccccagctgccgcctgcgcctcccgtttcccccgggtaggagacaatatgttcagcccttctctgaccctttctcaccggatgaagatggccgtcgcccgagctttctcttgtccatcttctcccgctgctgaaatttcagttgcaggcgctgtcacctcaggacccctccggcttggagagggagggggaggggaaaggaaaaaaaaaaaaaaaaaaaaaaaaaaaaaaaagcccgcaaagtgcgaagcgcgcttgcgcaagagccgtcgcctgcccttcgaccggaaatcagccgcccctcccaccttcgaccggaaatcacttcctgggacttttcactgtgggctgcctcttccagcgtttttttggtggcgtttatttcatgatctgagcccctctggggaggtgaaccacctgggtgctcgattttagctttgttgactttgaagattagattgacaaaaattaaaagggaaaaacaggaactcctccggttcactggatctcgcgaggtggccaaacaactatgaaaacaaaacgttagcgtttgcagtattacatccctcacagcctctcttacatatttgcccccaacgcctttcctcgaactcagaaaccaaaagattttaagatggcaaaatcacctaataatagcctagctattagtttagcatttgctgtggaaatatgtcagcagacgaggaaaaatgtcttaggattcctttttaaaattcgaacttgtgatttttaaagttccttaaaagaaaagctagaacttaatttttcaataactgaaatgctgatatgacagaaagtgggtggctataaacttggaatttgttcaattaacatttaccacgatacttaagggactaatccagtcctcaatgaactcaaggtctggtactattagcctgattatccctaatggtgcatatctgaataatttttaaatgcacgtgtaagctttcatgacgatttaatcacaagtttaacaaaattcagcacagtgctctaagcagggaaaatgtttctggcatgttcaaagcccgaagggactctggaagtagggtttgattcccaagctggcccctttatacccctaacgcctatccctccaacccccatctcccatcctaacggagtcaataaagggatcggcccaactcgtccactagagcagtccccttcatcgtgagttaagccttcttaattataatgtggtcagtccccaggtagaggtaaggccccaggtgttgtggggtgttgggcctggggaagtgttctacatggcaggaatgactgcaaagcagaaatactttaagtcttgctgggattgaagtttactgtaaggatttcgttttatttggttaatttctgtttaacaaaaacattgctttctgaaaaataattgaattttcagtttcctcacaaattaacttttttttttttttgagacggagtctcgctctgtcgcccaggctggagtgcagtggcacaatctcggctcgctgcaagcttcacctcctgggttcacgccattctcctgcctcagcctcccgagtagctgagactacaggcgcccgccaccacgcccggctaattttttgtattttttagtagagatggggtttcaccatgttagccagcatggtctcgatctcctgacctcgtgatccgcccgcctcagcctcccagagtgctgggattacaggcgtgagccactgcgcctggcccaaattaacttttttaactaaagaacttaactgattctaaagtcaagctgggccggacacagtggctcgcgtctgtaatcccagcactttgggaggccgaggcagaatagattgagccaagacattccagaccatcctgggcaacaaagcaagacccccctctccacaaaaatatacaggccagatgctatgactcacccttgagcccaggagtttgataccagcctgggcaatatagtgagacctcctctctacaaagaaaaaaactagccacacgtggtggcgcatgcctgtagtcccaggtactcaagaggctaaggcaggaagatcacttaagcccatggagttaaaagttgcagtgagccttgatcaggccactgcattccagcctgggcgacagagccagactgtctcggaaaaaaaaaaaaaaatgacccgggcacggtggagcacacctatagtccccggctactggggaagatgagatttaa

SEQ ID NO: 316294 - DNA, 4001 bp, Homo sapiens
aagacaggcctgtctgaataaataaaacaatgaaatatccctgagttatttttttatcttagcttcgctgaactttatgtctaagtatccaagagaacttgcagataagtaatcattttacaaagaacttaaagcaccaaagccaacaggtttttccagcatagaattattttggtttataagcatccttttaaggcctggcctgtaacacatgcatgtttcctcattctcacaaagctgaaattcaatcatcttcaggttatataaactgcttggctctcatccatttatcaggaaagcttccaattggtaagtgaagaagaaaggcaaagtgaaacgttaaacagaaatctcagtaattttagaatgtggaaaacaaacatctacttcaatattaacagcttgcatattaaaatgataaatgaagagaggaaagaccttttttttgtaatctatttgcaaaggcaagtgtctgttactcttaggggacagcaggctaccccgacactttttttttaaaccatgtatcaaacgtttcttttattaacctaaaaacatttgactcacacattaaaatgccaatcaggtaatttcctctatagtgaatcaattctttgcacaagctttattttataaaatatactcaattttgacattaagacattagattctggtatatgttaaatcaagttctaacatctatagtacatatttataattttctttgcaaagactgataatggagttacaaaacattctaaattctcatttcgttaggttttgtccggtcttaacatttattccaactggatcattaccaagacctgacctcctttttgatctcctgtgagtacaaattaagctgggagaagtttctggagcaccaccctctgtgcatatgtggaacaagtaatttggttcagacgaaacagaattatgtggagtcctcggcaggtgggttgagaactacgcaggtaggactcactactgaccggtcaccacgtcatcccaaatcctttcaacccaagactctacctgatgggagcccccaagccacttaccagaaccacagacaacaaaaatgaagagagccaataaccagggtcctacagacgccttctcttcgggggcatttctctgcaaaagcgaaaatccaccatttcagatgcagagaaaccactcggaccccaggctcccacgcctgcacgccggtcgccggccccctcacctcacaggtctccccttccgttcccgagcccccacagtctggcggttcgcagactcgggcccctacccctccacggcaccagcccacggtcggccggatccgggagaaaacgcgacgcggccccagggacccggactcagctccggctgcggaacgcagaggggcgcccgctctttccttaccgaggtcttggcgacgttgccgcgctgggtgatgttcttgctgtgcttctcgttggccatacggatcctttgcttggcgaccatcttcgcggcgccaccacctgccccggccacccctcggactcgctcactcgcctgcctcctctggagccgctgcgaggctcggctcgtggtgcccgcgccgccggagcgccgaggttctcaggccagacgctagctacggccgctgggcctgggcgccgcaagcgcgaggtctgagcacaagccgggcgccggccgccgactgactgaccgagcggggcaggtgcgcaggaggaagagaactggccgccgggtcgttctcgcgccgccgtcgccgccgctttggccgccgccgtgagcgcggagtgaaagaggaaggaaacgcaacgcaacaacgggaatgtgcagcccgccgcctcgatctactttgggttcggctgccaacgtcagcactagacggactccgccccgcggaagtgcgcgcccctcccgctggagaaggagggcgaaagcaggcgcaccctcccaagctctgtcaagcgtcgccctagatttgcgcgtgcgcgtttgggcgccttttccgcgtcactccgtaaccggaagtgaattggccccgaggctgatggctccggaaacaccaattcgctgtctccacgcatgaggagacgtgtaggggccgggttcggccctggtgaactctcacccgagcggtttctctttccgggacaacatggcgccgtccacgccgctcttgacaggtgagttctgaagaagcgagggactctctttcttcagactagtttcttatttttgtctttgcctttgagaactacccgaggagccggggagtctgatctgccttttcttgtggcttgcggaaaggccagactgttggctttcttgatatagcgtggcaatcggaagtgaagtctccgcctctgggctttcgtattccccctccctttcacccatccatcattcttgcctgcggattcatcttctacagaaatagaagaagggggagaaaaacaatgtgctagttgaatttgtgacacatgggtctgcaatactggtgttacacgggcccttgtgaagtcatttaggtctacaataagaacaaagacaaacatgagttagtcctctagaatgatcacgcactttaaatacacctggacttaagtaattccagattctggccttcctgccttaatgaggtttgtaggactgaatagggagagtggagctgtaatgcaggtttcaaatgatgaaggtgtggttgggagagggtgtagcagtgagcatgatagagatattctagcaacatttgattttgaaatggttatgagcatattagaaatagaacattagaggactcttgaaattttgaagctaaagactgtagtgttggaggagataataaacttagattggaaaatgctggggaagttgctttactagggtgtggctaagagtctgcatatgagtattacgtaaggaaaagagagtcgggaaggaaaagaaggttttggttaagttctgataactatatagaaggaaaaagtcattaagagaaaggttgtctgcatttaaggagggaggctattccctcccttcccccccgcgaaaggaaccttaaaacatttttgcactttttgccagtctacatttctatttttacattttaaaatctttgttattaagcgccatgcccactgatgctcagtctgtcttctgcagtttagtcatcatttatcaaacgccgagtataatcttctagataatataccaggcaaagactgtttaaaaggcaaagttacataataaatttttttttaggtttgtaaaggtagcttgttattcacaatttttaatactaaatgcttatttgaactctaatgaaaaaattacattctaaaatctgataaataacccctcctttaaaaatgcctacagtaggtagttcctctctgcttacagggtagattccatcctatgtagcatagttatgtaaccatttataatctttgaattgctcttgagactcatttatttccttgccatcccatcttatttggtgctccatcaatactgaactgcttctgagtccctttgaacaacctgtttcttcagtctagtactatcctatgcctcttgttgatttggcaaactctttttcatctgttgaaattaaaattcattttagatatcattgctctgtgaagcctttcgtcactctacccagatagagtcagtcacttcctgggctatttttgtacctgaaatatatttgaaattttatttcacttactaagtaggataattagacattcacttgcctttctcccctgctagactgtgagtccttcaatgtcagcgacagggtcttattcatatctgtcttctcagtactagtgcagtgcctggtagacaatagatactctaaatcaggggtccccaaccccctgggccggactggtactgggcaagcattaccacttgagcttcccctcctgtcagatcagtgggggcattagagcctcataagagcgcaaaccctattttgaactgtg

SEQ ID NO: 316295 - DNA, 4001 bp, Homo sapiens
gggaaataacccagcgacagcaattattcagttttacaaaatgaattagtagtagggtctgagaaagaatctaagactgattcaagacaatccacttaatcacaaataacaagggcaaacacagtcttttccatgtgtcaccctaatacccacttttttttttacccccaaaatcattttcacagggccatatcagctatgtgaattaatagattctccagtgctgtagcaaagataaaacctgatccttatagtggttaagtttagcagctactgttgctttttctttcttctaagctctttgctgtttttgatacttagctgatttgcttaggggtaattaaaaagcagctgtttttctatgatctatctgtctatatatttctatggtatgtgagagtgtgggagggaagagtatacacactgaaaagtcacttaggcttatcggtagtagcactcagtaggactgaactttaatctgggaagagaattcatttgagccatttcttttcaaaaagaaatttgggatgcattacaaaaataaaatttaaaatcccgagaactcaggaaagcatagaaataggagaaaacaagacaattactccattttattgaccctggttattaaaaaaaaacataaagtattgagacagactctgaaatatgcaactgtcacaatgaaagcatttcagagcaaaatttgctgcaatatgctactatgattaaaagccatgtaatctgggaacctctgtaacaaaatgaaaatgaactaggaaaatagcttcttactacttctctaaaaataaaaggctgtaattttgtcataattacacaaaggtaggtgagactttcatctttacccagcattacaacttatttccatccataggtattacaattaacgttgctttgaatgcacatatagtttaataccgagaataaactattattttatgacactacatgtgttttaaactgaacccactatcataacacatattaagggtagtccttcagcacatactctctacccagagaaaagattcccacacagctttccatgtactcgtttttaaaatgtacacatattatcggacacaaatgagaaactaacgagcagcagtgaggtacaccatatgtttccattgtaggctgaatccaggtctttgttccaatattccagagccactgggaagaaagctaactatccattcattaaaattcatttttacattattgctggcaaaagttatacttttgatagattaagtcagagcccatcctatcctgactattcctgcctgcacttgcttctttaatacggatttcttgcaattctaggaaactgcaaaataaccaccctggataacaggtcggtagcaggacaatctgataaaccaacgtaaagggtagacactgaagaagaatgcaaagttattttcctagtgaaatagttcagaagttattctatatcaatagcaaaatttttgctttttataggctacgcacctataacatccaccagataacatccacctcgtcctcaattagcaggatttttctcaatcttcagatctcccagaacagttttactggtgcaactcaaaccaaaaacactaaccacgccctttatacccagagtcaagcttccttttgcttttttgcccttaaagtcgaaaaatgtaaatctttcacccgagaggttttgcaccggtttcctaacccaacgcggactcttttagctgtgtcttgatgtaattcctattggaagacgttttctccagggcagtgcagacgccccgaagaaggacccacgcttacctcccacacacctgcaacccctgacgggatgctggagcttgtgctcggcggactgtgctccgctccgctctcgttcctgctttcgtctctcccgggaaactacagtccagactgcgcctctggcttctacagggacccaagctccgcctctccctcctctagttggcgaatttggcagctgttgctcctccccctgctgtttctgcagctgcccggaccggaggcagcggaaagcagctgccctggtacctttccgctccctgcacttctgcagctgctctgccacttccactcccgtgggggtccctctcccctcctctgtggctcacacctggagcggcctcctgccccacccaggcgtctctgctgggagccccggctcagcctatccttccccgacctgtgtgtccggatgcccggtgtgcctggggcttagctgctctcagggaagctgcccctctgcccagtgcaagtccccacaccaagccctcccttcacctgggcgatttccccgaggcttcctctccacccacacggcatactcagcccgacagccccaggatccccaccacaggcccctcacccccttccttcctctgctctgtcagcccgccccctcaatgggtgaggcgcctgcggggcctactccgcaccctgattggcgcaggtgagggcttgccccgcccttcctctcctttccgtgcaccatctctcttcatctcacctcctcccgcaaaggcagggaattctcctactattggctagaagtgtcaccacccatcgcctcaggatcccccgcatggcctgccgggaagtgtagtcttccgattgcaggaattgcggacaacgccggcgagcgggactacgagtccccataagcctctgcacgactccggctgggcaggattccggacaacgcctggttcctcttgggtccttccggcgtcgccggagtgaattgatccgggagttgaagagggctgcaaggtgggaagtgaagtcagtgcctcagttgctggtaaggtgtagctgttctgtcccagtccccgtagctctgcaccgagcagaagaggtctagggtcacgcaggggccatggctgaggcacttgggcttggttctggcaggcggagcggacggggctgagagcggggccctacgggcgtaagcgaggttaccctacgcgagtggcgtaaagcgggtttgtaaatgccgcctgccggcttgggcccgaacgcctccaggaagtctcctctaggtgggggcgggaggggaagggcgaggttggcccctggtgccccgggagaggggacagggcggatgtgcctggggtggggtcctttgaaggtgtggcttcggaccgagaggtgaggctgctgttttccccctgctttgtaagtaagagaaaagggaggaggaaggaaagggtgcttgggagtcggctcttgggggtgactcgggttatgccctttgagggaagaggagcactggaagaaggaagagacaaatgttggggtctacggattcagttccagtttaatgatgtggccctctaaggagataattttgccttaaacagaaagacttgaccctcttaggtgtcatacctaaggtatgtttttactcctttactgctttcagagcgctttcattttgggatgctgatgaggaaaccgagggattatatgacgtgcccaaggtcacacacgtagggacagactttctgaatctagttcggttcgagtccagctttagagtagggacgttggttgtgctttttgaaaagggtggaggaagttacaaagtaaatgtattttatatagtatatctaagaagccattgtgagataaaaagttgtttcttgaaccggagtgaaattcctcaataaaggaaagatccttttggaaaaaataaaaatggccagtttcaacttttacagatttttcccctttttttaggggtgtattaaatgatagactctactctcacagttcatttttacgggtaggtaataggatgggagaacaacagttaaacaatatatcccatccttagaagaatattcttttctttttctaccttaggactgtttttactctcattttgtaaaactgataatagtgggattggaattctttcacaaaactacacttttttcaaataatgtagcgttaggagagtt

SEQ ID NO: 316296 - DNA, 4001 bp, Homo sapiens
ccaataaaactctttcaaacagatcttttaataaaggctcggaaagaatttcattggtagtattataattattacataggggaaataacccagcgacagcaattattcagttttacaaaatgaattagtagtagggtctgagaaagaatctaagactgattcaagacaatccacttaatcacaaataacaagggcaaacacagtcttttccatgtgtcaccctaatacccacttttttttttacccccaaaatcattttcacagggccatatcagctatgtgaattaatagattctccagtgctgtagcaaagataaaacctgatccttatagtggttaagtttagcagctactgttgctttttctttcttctaagctctttgctgtttttgatacttagctgatttgcttaggggtaattaaaaagcagctgtttttctatgatctatctgtctatatatttctatggtatgtgagagtgtgggagggaagagtatacacactgaaaagtcacttaggcttatcggtagtagcactcagtaggactgaactttaatctgggaagagaattcatttgagccatttcttttcaaaaagaaatttgggatgcattacaaaaataaaatttaaaatcccgagaactcaggaaagcatagaaataggagaaaacaagacaattactccattttattgaccctggttattaaaaaaaaacataaagtattgagacagactctgaaatatgcaactgtcacaatgaaagcatttcagagcaaaatttgctgcaatatgctactatgattaaaagccatgtaatctgggaacctctgtaacaaaatgaaaatgaactaggaaaatagcttcttactacttctctaaaaataaaaggctgtaattttgtcataattacacaaaggtaggtgagactttcatctttacccagcattacaacttatttccatccataggtattacaattaacgttgctttgaatgcacatatagtttaataccgagaataaactattattttatgacactacatgtgttttaaactgaacccactatcataacacatattaagggtagtccttcagcacatactctctacccagagaaaagattcccacacagctttccatgtactcgtttttaaaatgtacacatattatcggacacaaatgagaaactaacgagcagcagtgaggtacaccatatgtttccattgtaggctgaatccaggtctttgttccaatattccagagccactgggaagaaagctaactatccattcattaaaattcatttttacattattgctggcaaaagttatacttttgatagattaagtcagagcccatcctatcctgactattcctgcctgcacttgcttctttaatacggatttcttgcaattctaggaaactgcaaaataaccaccctggataacaggtcggtagcaggacaatctgataaaccaacgtaaagggtagacactgaagaagaatgcaaagttattttcctagtgaaatagttcagaagttattctatatcaatagcaaaatttttgctttttataggctacgcacctataacatccaccagataacatccacctcgtcctcaattagcaggatttttctcaatcttcagatctcccagaacagttttactggtgcaactcaaaccaaaaacactaaccacgccctttatacccagagtcaagcttccttttgcttttttgcccttaaagtcgaaaaatgtaaatctttcacccgagaggttttgcaccggtttcctaacccaacgcggactcttttagctgtgtcttgatgtaattcctattggaagacgttttctccagggcagtgcagacgccccgaagaaggacccacgcttacctcccacacacctgcaacccctgacgggatgctggagcttgtgctcggcggactgtgctccgctccgctctcgttcctgctttcgtctctcccgggaaactacagtccagactgcgcctctggcttctacagggacccaagctccgcctctccctcctctagttggcgaatttggcagctgttgctcctccccctgctgtttctgcagctgcccggaccggaggcagcggaaagcagctgccctggtacctttccgctccctgcacttctgcagctgctctgccacttccactcccgtgggggtccctctcccctcctctgtggctcacacctggagcggcctcctgccccacccaggcgtctctgctgggagccccggctcagcctatccttccccgacctgtgtgtccggatgcccggtgtgcctggggcttagctgctctcagggaagctgcccctctgcccagtgcaagtccccacaccaagccctcccttcacctgggcgatttccccgaggcttcctctccacccacacggcatactcagcccgacagccccaggatccccaccacaggcccctcacccccttccttcctctgctctgtcagcccgccccctcaatgggtgaggcgcctgcggggcctactccgcaccctgattggcgcaggtgagggcttgccccgcccttcctctcctttccgtgcaccatctctcttcatctcacctcctcccgcaaaggcagggaattctcctactattggctagaagtgtcaccacccatcgcctcaggatcccccgcatggcctgccgggaagtgtagtcttccgattgcaggaattgcggacaacgccggcgagcgggactacgagtccccataagcctctgcacgactccggctgggcaggattccggacaacgcctggttcctcttgggtccttccggcgtcgccggagtgaattgatccgggagttgaagagggctgcaaggtgggaagtgaagtcagtgcctcagttgctggtaaggtgtagctgttctgtcccagtccccgtagctctgcaccgagcagaagaggtctagggtcacgcaggggccatggctgaggcacttgggcttggttctggcaggcggagcggacggggctgagagcggggccctacgggcgtaagcgaggttaccctacgcgagtggcgtaaagcgggtttgtaaatgccgcctgccggcttgggcccgaacgcctccaggaagtctcctctaggtgggggcgggaggggaagggcgaggttggcccctggtgccccgggagaggggacagggcggatgtgcctggggtggggtcctttgaaggtgtggcttcggaccgagaggtgaggctgctgttttccccctgctttgtaagtaagagaaaagggaggaggaaggaaagggtgcttgggagtcggctcttgggggtgactcgggttatgccctttgagggaagaggagcactggaagaaggaagagacaaatgttggggtctacggattcagttccagtttaatgatgtggccctctaaggagataattttgccttaaacagaaagacttgaccctcttaggtgtcatacctaaggtatgtttttactcctttactgctttcagagcgctttcattttgggatgctgatgaggaaaccgagggattatatgacgtgcccaaggtcacacacgtagggacagactttctgaatctagttcggttcgagtccagctttagagtagggacgttggttgtgctttttgaaaagggtggaggaagttacaaagtaaatgtattttatatagtatatctaagaagccattgtgagataaaaagttgtttcttgaaccggagtgaaattcctcaataaaggaaagatccttttggaaaaaataaaaatggccagtttcaacttttacagatttttcccctttttttaggggtgtattaaatgatagactctactctcacagttcatttttacgggtaggtaataggatgggagaacaacagttaaacaatatatcccatccttagaagaatattcttttctttttctaccttaggactgtttttactctcatt

SEQ ID NO: 316297 - DNA, 4001 bp, Homo sapiens
tccaaatagttatacaatagtttttttctatcttttctcatggttaagtgggataactgtaactctgacatcaggtaaaccttctgtgctgtctactctacagtaatttatagatcaagaggaagaaatggaataaaaacagacttactccagtgtggttttagacctataatattagaaaattaatgtattctaaagcaactgagtaatctggctaactttttacaattttcctcacgctttatttcttaggacaaaataacccaaagccctcttcctgcttttccaaaagaagacaaatacaatgcagaaaacctgcaaagtttgaaacaaaatggcaatcaaatataaatgatacaataaagtactatgctcactacctgggtgatgagatcatttataccccaaaccttagtgtcaggccatatacccatgtagcaaacctgcacatgtacattaatctgtaataaaacttgaaattataaaagaaaaaatataaataaaatgaaatataatatcaaagaattgacagaaatactaacaaatgtaagagtagcagcaattaaaaaccataaacaattcacaagactaataataccctattaaagtgctctccactaaaattgcaggaaattcaaccatttgattatatctcaagcagaattagttttgcaatattaccacatatttggtagaatgttgactccaaggcctcataaattttagtaacaataattttaccttataaataatacatgttagtaatccttaaaaacttatccatcagtaagttactaggaagtaacccttaattaggggtaaagatgaaagcctttagaatagtctgttgtcagccttaagtagagacttacatttctagagtgttttgcagatcattaagggtaccataaatggtaggagtccctaagaacaactatatttatatataaagattactaatagtcaaatattgttccaaattaaactatggagtcattatttatccttcaatgtattttgttaaactgtatttgtttagatatatatttgcaaaagacaaaagcctcaaaaaacaatccaaagcaattgttagaaaatgtgttggtaaactttagatatagacctatatgctattaatatcaagcaaatgtttcattagggattaatttagcatatgagcttataaatgagagtgcaacaatagttaaaaaccagtgagtaagagaagttttacatgcaaaataaatgtctgtgtatcattatcttctaatatattcaatttctcagaagacttctgaccaaaatatgtgtttgtagatacgtagtcaaaatgttattagtacctttaagttatcaactggaaatacattagatatagctttatgtatttggtttatattggaataatgaacagtattattaaaaatgtaatttttttctttgtggtagaatctcagtattagagtttccttctcattattattaataatcttaataattaaatttatattatttgagcatccacatccattttttctagaaaatttctaagcacttaataaattataacctcagacaaatattggttttaaaaactcacttacctcatcaggttttggatcatatcttatcagaaagcacaaagtaatgctgaactaaacaacctgatgaatagtcctataagaactggatcttctgatttgtggtgaaatcatttaaggagaataaaagcgatatgttaattaaataaattcaaatgatttttacaccaaagtaaattgaaatgccattccatactctactaaacattcataggcaatgttattgcatacatacttattcaaaagctatttatttctaaggtacttaccccaaactgacttctgattattcactggaatgttacaactaaaatacgcttgctggaaaactcttgtacataaacacctgagcgatcaaggccaactccatttatcttgaccattgcttgattaattcctctagaacaaaagcaggtgttcactacatttgtattaagaactaacacaatcgggttaatgatcaactgatgaaatgtgcaagaattgagaaaaaaacaattatagaattttttaaaagtattaaatttatattattattttatccattattttgcttcttttaaaagttgcacagaatttgaaaggatgcgctactggttgtaaatttgctagtaattagttctttttgtttctcacaggactcctacatcagattaccaatgcactttgtcataaatatttcagaatgcctatgagaaaaagaataaagctaaatcaagtccagaatacagagacaaatcactgctgcattgacagagttctcaacattcatcaaattatacaatagtcagaggagtttcctgtggatataaggtccatttgaatccttaagaaaaagagtggatattgaagaaatatgttctttattctgagcagaaaggccagcaaaaaagataatggatttgccaaaatatatcaggacaatactattagccataggtaattggatgataaaaattgctgttacctttatgtgcttttgaaactctacatgattttctttgcaaaaaggtcattaataaaaaattgcataatttaatgggtttcatctcatttttgtagttcaaatcaatcacctcaatggcaatcagatattaagcacattgtattatttatctatagcctttgagaagagaaaaaaaatttagttcacttttaattaaatatctgttgatccccaaatttaatactatttctgataaactcatgtaaaagaaataaagtgaatatagatagctttaaatggaattcatttttaaaaacttgtcagaggaccctgttaacatctttccatgtcctaacatggctataacttaaaaataggcctgagaatagatcattataggccataatctactaattaactaaaattttttgatttcccatataggcatctccaaatgttttctagatcttgagttttattctaatattacctactctatcataagcacactctagtgtagctttaacttaacacagagataattttccaaaaagagttgtgcaatacaagaatactatcattctacttgcttcacactgcaatacataaatattaagtctgaatgtcaagactatcattcaatcaatgcttttctacccatttactgacaccagcaaacatatatcaccagtacccttggctaccacatcattatgtctgtacactgctcagatcacaatgtgatttatccagaaatagtccattacttttcctaccaatggcagagaccgtcactctgtcctactaagaccatttaatgaaattgttctgtaaggaccttatattagagcagttcaggcagaatgttcattttcctgtctcttgaggagtaaaaagcaatagccataaatttattctccctggtttaacctcttttaatagacaatgacgacaatacaattgtccataaaatattaccacaaatttttaaaatattttcccaaaccgcttttttctacaattctattttgctcctagaaaatcggggtggggggagaattattcattaatgagagccaacgtgtcttggtagaaggttgatcgccattactgtccgactgtaaagtataagcctaggaatatatataaaaaccacagcaaagggttacagttatcatctcatcaattttcttatccttttatagttttttcaagtaaaagtgcacttaattccaaactttaaaaatgtataagcaaatgccctcatcagtaaagaacttaaaagttaattcttccatttaagcatggactcatttcaggcaattttttttggtaagattgttcctaaattttgagtgataataggaaaatgttctgacaaaagaaaatgttaaattatatttagtgtaaatataagtaatacaaacaaggtagcctattgaaaattatgacat

SEQ ID NO: 316298 - DNA, 4001 bp, Homo sapiens
gcagtggatttctactacattaaagcaataaaaataaaaactccaaaacatgtaaaaccataaaacattcttgattccttccccactcaggtctaccaaagatgcacttctgagtccattttcccacatattatgaaaaattgtttttccccaagaagtgtaaggatgtgatccttaaagcttccggacttcaccaaacaacctggtaaaaggaagtgaaagcaggcacttagcctattcaggggttagcatgttactttgtacagagcaagtgctatataagcatttattgaatcgtgatataaaattttttttgaggtttttcaaactaaaaacctataacatgagctttgtaattggactgatggtgcagtaaatcaaaacaatcttacctaactgaccctgccagtagcaaaacaaaaagaccaatctaattaaggtaatgttaaccaatggccaagaacccatgaaaggaaaaagccatgttaacttactattgcaagtaagagttgggtttttagaaaagcaaaataatgatttatcttgttgtgcagaaatgaccaacacctcaacagaatccgtttgtgttgcaatcaaaactatcaattaagatccagacatttctggaccaatgtgagaagatgtggcaagggattcaaaaacgagccagagcaaacctaaggtaaaatgtgtcaaaacagcaaagctcttggaatcatcctggtcataaaagtttgacagtttcatgtgaaacccctatcaaccgataagttttaaatcaatagtatattcctaggtctaacaccagcaaacggtgtttaagaacggcttttcaaaacaatggtctcgtgagggttcagggaaagaagtgactccaggctttctgagatagcagatacagcagcagattcagacctcaagagaaatgtaaaggtgtcctagactgaaaaattactattgggcaaaactgtgtgtcggttttccacaacattgtcttctttagagaatcctcaaacgattcttggtttttaaccaagtcttcacaagaaatagaaagtcatccgtttagggtaagagattcctgttaccaagaaaattgtgtccgaaagtgtgaaaatctcacaacctgcaagaaaatgtatgtccctcaggaggctttcattttcaagcggaaaaacaaacccggtgtcacctcaacaacgggaccacacaaacctcgccattacaaaacccaagtgccaaaggtgcacaatgtgaatccggaagcactgcaaggccaggatcgagttcccaggaggaaaaaatcaaactcaggagtgcagcgcgggcccctccacggcccgggggccaggcaacccgcgctaggcccttccggtccgaggcgccgccgtcgcggggaggtcgggcgacgggtcgagcttccacccgagcccggggattcgcggcctaccctcaccggcgccctcttgccgggcccggcaccggcagctcctccgactctgccctttggctagcagcggggcccggacgagccacgaggagcccgagaggaccgccgagccccgggatggccgggtcggtgcggacacggcggtaaccgtagggaccgtggccgcccctcccccaccggcccggcccaaccgccgccgcgacacgagcagcggcgccaacgccgggcccaaccgcgggcctgctgcggccccggccaagcggctcgaagtggcggcgcgggcctgctcccgacaccgaccgcgcgaggccaccgtgggcctgttactcctcgcgccggcccgcgccgccacccgtcaggacgcgccgccctcggctggggataaggcggccgacagcagcggggggccgcggagctgatacttactcaggggtcgggtgctccgggtcgtagaaatcccccatcttcggaggcggctgcggctgcagctgcttcatcgggagcggctggagacggcgacgcgagccccctccccgcagcagggcgacgcgggggaggggaggggaggaggccgcaggtccgaccgcggcggcggcggcggcggcggcggcggcggcaggggcggcccgcgtcgctacctcgctcgtcgctccctccctccctcggacgcccgccagccgctctctccctctcaccctcacaccgggagcgacgcacaccccacccgcccctcagcttcgcaggcccggccccttaaagagacacacacgggccaccgatctgccgccagtcggcgtgccttgcagctgttggcttgaccccaggccgggacgggcagagcggaacactgcccggcgggtccaggccgaccgtgcctgtggctctccggaacaataaacccccggccccagtgatgtgggccagaccggacctggagaggcggcaccgcgacccctcccgcaacccgcctggcggccgggggcagcgtgacccggcccgctaccgtgtcacagctggcgactgacaaacagcaggcgacgtcgggagaactccccgagacacccgagacatcagccttctcgctccgcggccctgcaggacctgcccgccgggagccccggagtccgcggcagcgccgagggcccctcccccaggcctctgggctctgaggtaacgcggccgcggctgctcccgggcccctcgtcccactcgcccctctcttttttatttttcctcgccctctctctcccttgcccgttcatctcgaccctttagcaagcatggaagcccagcgaggcgggggattgctcggaggccgagctcccggcagcctcctccgccttccttcccgctgtgccctcggggctcctacctccacctcggcgcggcgctctgcccccacccgaagtctccaaggcggcagctcccctctcctgtgtggttcttggggccttagaggcaatgtcatgaaaaaaagggtattaatcactttcctacagaaatgataagatgagactaagtagaataacttgaaagagctacgagttgttatttttggaaggagagataggaacgcgtaaatccaatagctaaactttctagacgctgaagagtttttggcgatagatcattttgacattgggggttcatagggttagcgttttttgtgttgttgttgctgttgtttttccactagaattttgaatcggattttaccagcaattggtaacggaaaggaaaggatgtgtcttccaattgagaaacagtggttaaaaactgaaagtgggccgggcgcggtggttcacgcctgtaatcccagcactttaggaggccgaggcgggcggagtaactgaggtcaagagttccagaccacactggccaacatggcgaaaccccatctctactaaaaatacaaaatttagccgggcgtggtggcgcacggctgtaattccaggtacgcgggaggctgaagcaggagaatcgcttgaacccaggaggcggaggttgcagtaagcccagattgtgccactgcactccagcctggcgacagagcaagactccatctcaaaaaaataaataaatgaatgaaaataaaaaataaattagctgggcgtggtggtgcgcctgtaatcccagctactcgggaggctgaggcaggagaatcgcttgaacccaggaggcggaggttgtagtgagcccagatcgcaccattgcactccagcctgggcgatatagcgagactccgtctcaaaaaaataaaacaacaacaacaaaaaaaaactgaaatatgatacgaaagaataaacatccttcagtggttaactttttaaaatagcctttatatgtatgtaggctacagtgtctattagtgttttataatcattgtttttcacttagggattattttggcttttgtttttttttttcctggtacctttagggttagcatggaggtccagggtccatctgactccctaggttcgaatctcccaaggccatttttttacacaccgtgattattactaatttccctgtggtttttctcattata

SEQ ID NO: 316299 - DNA, 4001 bp, Homo sapiens
ttaattaagccagcagtttaggagtgaagattaagctttggtcttttgaaagccaatttcccaagcactctacaatctaatttaaatttgcagctagaaacagagccttgtgtcatgtcctaccaaagggcataattcatttttctacacataatgacagtctgagtaaaccttaaagactctaatcccataacaggccagaatttttggctacagaagagaactaatgatcctgagaaaactggaagaaatccaatagaaaaaaaaaagccctacgtcctctatggagcccagaaacctctgattacgtgggtattctctgctttagtcctagctcagatcccacacatctaaaattaccacttagaactttctgtgacctaaaaacattaataatataaaattaacaaccaaaaaataatttcaaatagggagtacacactctcctaaaaagctcagcacactccactcagctggatcctccccaatcacaagtatagctatgtaacatctgtccaacaaagaaatgtaaatatgaccttggtcacaaatatgtcatctaaaaacttgtttagtcaactgatgaaggtaattagcacagaacttggggattcgttcagtacctatgtgcaggaaggaaactggagaaatgaacttaaatatagacaaagcccagtggaacccagaggtctgggaaagaaatgagttaccggtgaatacattgcacaagtaacatgagaaagcagaaaatgcaggtcatacacgcacccctgacccagaccagcagagctgactgcagcatccatatccaagagaaagaccactgacgcccaagaagtgagacaagcaaggactctatagaatcaattagcatagaaggggctttcccaacagtttaactttccctctcatgcgatttacctacttgaaccagggctctttcctacactcctcttcacattcccgacttacacgcagagggaaagagaattcataaagggaatatttttctgcctttgaagatattctcacaagatcgttctccacgcccaaggcaagtaaaacgacacaatctggctcaactccaggctcgaaccctacacattcaacgaggctatctcagacacgctgtggcacacgccacggggagccagagaacgtgtggtgggggtggcgaaggtaatgcctttgggaagcagccatctgaggtgggaagccagaaaacgagagggaaggcgtccaggaagattacggaggggagatcgcggcccccagagcgatcagagttgtctgtcacaaggccgcgagaacgggggtagggagtgggggatcggggagagaaaaaaagtatgcctgtgtatttcgagcggagggcagcaagaggcctctcctcaagggaaaggtaaacgtggagtaggcagttcccaggaaagggggtgaagaggcgttgggggaggggaagcgtcctgacccaggaaaaacatgaaagggggagttgggtcgcctagattagagggggatctctctccctgggaaaatggggtgttgcaacggtgtgtgcaaggcggcgaggggggtgagaagtggcagcatcctcctaagagcttggggagggccaggcccacgacccaaggagagcgagcgcggggagacggaggaggtgacccttccctcccctggggcccgatcgtgaggttcggtctcttttctgtcggacccttaccttgtcccaggcgctgccggggcctgggcccgggctgcggcgcacggcactcccgggaggcggcaggactcgagttaggcccaacgcggcgccacggcgtttcctggccgggaatggcccgtacccgtgaggtgggggtggggggcagaaaggcggagcgagccaaaggcggggagggggggcagggccagggaaagaggggggccggcactactgtgttggcggactggcgggactggggctgcgtgagtctctgagcgcaggcgggcggcggccgcccctcccccggcagcggcggcggcggcggcggcggcggcggcggcggcagctcactcagcccgctgcccgagcggaaacgccactgaccgcacggggattcccagcgccggcgccaggggcacccgggacacgccccctcccgccgcgccattggcctctccgcccaccgccccgcacccattggcccactcgccgccaatcagcggaagccgccggggccgcctagagaagaggctgtgcttcggcgctccggctcctcagagagcctcggctaggtaggggagcggaactctggtgggaggggaggtgcggtacactggggggatgggtggctaggggggccgtctggtggcttgcgggggttgcctttcccgtgggaagtcgggaacataatgtttgttacgttgggagggaaaggggtggctggatgcaggcgggagggaggcccgccctgcggcaaccggagggggagggagaagggagcggaaaatgctcgaaaccggacggagccattgctctcgcagagggaggagcgcttccggctagcctcttgtcgccgattggccgtttctcctcccgccgtgtgtgaaaacacaaatggcgtattctggttggagtaaagctcctgtcagttacgccgtcgggagtacgcagccgcttagcgactctcgcgttgccccctgggtggggcgggtaggtaggtggggtgtagagatgctgggtgtgcgggcgcggccggcctcctgcggcgggaggggagggtcagtgaaatcggctctggcgcgggcgtcctcccaccctccccttccttcgggggagtcggtttacccgccgcctgcttgtcttcgacacctgattggctgtcgaagctgtgggaccgggcccttgctactggctcgagtctcacatgagcgaaaccactgcgcggggcgcgggggtggcggggaggcgggcgttggtacggtcctccccgaggccgagcgccgcagtgtctggccccgcgcccctgcgcaacgtggcaggaagcgcgcgctggaggcgggggcgggctgccggccgagacttctggatggcggcggccgcggctccgccccgggttcccaccgcctgaagggcgagacaagcccgacctgctacaggcactcgtgggggtgggggaggagcgggggtcggtccggctggtttgtgggtgggaggcgcttgttctccaaaaaccggcgcgagctgcaatcctgagggagctgcggtggaggaggtggagagaaggccgcacccttctgggcagggggaggggagtgccgcaatacctttatgggagttctctgctgcctcccgtcttgtaaggaccgccctgggcctggaagaagccctccctcctttcctcctcgcgtgatctcgtcatcgcctccatgtcgagtcgcttctcgattatgggcgggattcttttgcctaggcttaaggggctaacttggtccctgggcgttgccctgcaggggagtgagcagctgtaagatttgaggggcgactccgattagtttatcttcccacggactagagttggtgtcgaggttattgtaataagggtggggtagggaaatggagcttagtcattcacctggggctgattttatgcaacgagactgcggattatcactacttatcatttttggagcatttttctagagacagacataaagcatgatcacctgagttttataccatttgagacccttgctgcaccaccaaagtgtagcatcaggttaaatcttaatagaaaaattttagcttttgcttgagaaaccagtgcttccctccctcaccctctctccccaggctctctacccctttgcatccctaccaggcatcttagcaactctcactcatacttgatcccattttccatttgttgtacttgctcctctagtattcagacatagcactagctttctccctctcttgatcttgggtagcctggtgtctcgcgaaaccagacagattg

SEQ ID NO: 316300 - DNA, 4001 bp, Homo sapiens
agaccagcctgggcaacatggtaaaaccctgtctctactaaaaatacaaaaatcagctgggcgtggttgtaggcgcctgtaattccagctactcgggaagctgaggtggaagaatcgcttgaacctgggaggcggaggttgcagtgagctgatcgcaccaccacactctagcctgggtgatggagtcaagctccgtctcaaaaaaaaaccctttatcttaacctaaacatttctattgatcccaggtcttcagacaaactcaaccaattgttaaccagaaaaattgttaaccagaaaaattaaaatctacctatagtctggaagccccccccaccactttgagttgccccgccttctgaaccaaacccatgtacatgttaaatgtatttgattgacgtctcctctctcccaaacatgtataaaaccaggctgtgccctaaccacctgggacacatgttctcagcatctcctgagggctgtgtcacaggccatggtcactcatatttggctcagaataaatctcttcaaatattttagagtttgattcttttccttgacatctttgaaagctgctattgaatctcttatcttatctgatcctcacaaaaacccctaggaaaaagaaagggcagatagggttcattgttgataatggatgttaaaggggctatgcatttttaaattattattttcattttgcagatgaagaaactcaggctctgggaagtagctaagatgtctaagctccgaaccatactctccaacttccacgtccagcgctctttccacttcaaaatctttggtcattccttattccttgggtaacgctcaggccaaggtcggagggataagaaagtcagtagaggctgggagcgtggctcatgcctgtaatcccagcattttgggaggccgaggcgggcggatcacctgaggttgggagttcgagaccagcctgaccaacatggagaaaccctgtctctactaaaaatacaaaaattagccgggcgtggtggcccatgcctgtaatcccagctactcgggaggctgaggcaggagaatcgcttgaacccgggaggtggaggttgcggtgggccgagatcgcgccagtgcactccagcctgggcgacagagcgagactcagtctcaaaaagaaaaaggagagtagaaagggctttgaggtagttaatagaagcaaacatttactgagttcttacagcaaaccggaaagtgtattttccttgccattttcaaagcactccggaagagaggtactgttccactgtacgctggaagactctaaggctgagccacagctaatttacactcgcccaagagcccacagcgtgagggagaccacagctaaggctgactcgaggggctgtttttatgcacgacaccggctgcgatccattaataggccccacggcttatcctacctgtgagagacacctgagaccagggaggtaaatgactccccccgtgatgcctccttgagttctgaggacaggactggacaaaaagccaggttctcacaaggcctccggttctgcgcttcagggaatggactgaaaaggacaacacccttgctaaggtgatgccgtgggtcaacagaaaaaggcccaggccggggcatgcacacctattcccgcgcaccaacgggtgcgctgtaagagaagacaaaaggtcgcgactgggaggccgtcccagcgaggcggcttgaggagaccacgtgggggagccgcgcgcccgcctcccgcgccgcctggccccgcccctacctggaagggcgccggcgcggcccccgggggccacgcgcccaccggcaagttttcctggccgcacgcgacatccagctgctcagtcggggcctcaggcttctccttaaactccgccatcccacaaggccgtgtcgtctttgccgcttccgcgaacatttacccgcctcacgcaacgcccactaccctgacagtcctgggccgcgcggtggatgctgggacttgtggtcccgtggccccaccgcctcatgggaattgtagttcgtttcttctcaggagtggcctggaaggcgcttcccttccttgactttttgggtctggctcccgttttgatttcagccagaggcaccacagataattacaaaaccatgtaaggtacggacgaaacaaagtgaggtgctttagtttttcctgggagcatcagagagggggctttcgaggtgaggtcatttgtccaggtttttgagggctcactgcacgtttgtggagtggaggcaggggtgcgttctaaaccgagcggggaaacgcacaccaaggtttctaaaggtctgcggcttgccgggaagttgactgacatgtgatagggtttgtgccaaggcgatagcctcacagggtgccttaaggaatttgtgtgggggcatgctcactccctgatggaggtatccgtgcccctttgcctgtccttttccctcctctccatccctctaccctcacccctccaaacccctgccctgccaaaggattctgatagcctcaagactgctgaatccggtggagcattttcaacctcactgaagctctctgacatgattgtcctgcttctccttgaaactgtaaaccaaaaataaaattccaatcctccaaaccatctgaagggacccctcctctctgccaaggttaacctgagaaagtggttcaggccatgatgggaaggggggtccaacatgcctcattatgcccttcttccttttggaattcaggaaaagccagccagcatcaacatcaacacacaccttaagtctgataagaaacatttacaatctgttctctgaaatttacctcttggaggcttcatctccacgatcaaatttggtatccacaacctcttattgcaacccagacattcgtttctattgattttaggtctttagataataaccagttgccaatcagaaaatctttaaatctacctatgacctggaagccacccctcacccgcttctcgttgtctgcctttccagatccaaccaatcttacatgtattgattgatgtattatgtctccctaaaatgtgtgagagtaagctgtatcccaaccaccttgggcacatgtcatcaggactgcctgaggctatgttgggggcgcattcttaagcttgggaaaataaactttctaaattgagacctgtctcagataattttgggttcacaaacccttctgaccttgcagcttctgaggtcccattggcctaaatgtgtttccatcttgcagacctttccttgttagtatcctcttgttgttttcctgcctgactgtttctgaaaagtgggtgtgattcagggttctgcccttgacctttttctttgctccccttccctgaactttctcattaataacatccactcccatggcttcaaatataaaggattaggtcaccagtctccaacccagatcagacgtttctcctcaaatccagttacgcatattcagctaatgattgagcatttctgttttctgtcctacaggctcctcaaactcaaaataatctgaattgacttcttctgccagtcttgctttttcttctttaaagttaactgggaaaataatttgtgatctacagagccactaaagcaacaaaccagttactctgtattccttcacttcactagactcatatagctaaggacgtggtgggtaagtcttgttgattctgccttcatgttctcatttttgcctcttctcacttagtcctaggctctctcatttcttgcttggactttggaagttctttgctttaagtctgtcattctccatatccccaaatcacccttactgccgctgctacaatgacctttgaagatccttgtccagttattatattttgctgcttagattcttatttgctccattttctctcaaagtttaccttctatattctgtcttatgagcctttgaggacccagactttacctatttccttggtctcttttgctgctgttctctgtt

SEQ ID NO: 316301 - DNA, 4001 bp, Homo sapiens
tcggtaggttatacatacctccataaaaatacattgttaaaaatctattcaaataatcatataaaaccattctggatctagctaccaagatgttttttccaaatgaattttaataaagacacacattgcgagcacttttatgtagtacctctcaaaatatacactgtgatttctaagaatctttcagttaagaaagccaccgaattttcgaactgaaagcacccccaaacatcatctgtttatcttaatgttgcaaataaggaaaatcaaagctacaatgggtaagaaatgtgcccaagataaggcagttagtcaatgacaacggtaataacagaactgtttcctgatctctggccgtttctaccaggccgtaacttttctgacatcgcaaacaaatcttaactccgaatctacctacggcctaattcaacaaatgcctcaaaacgctagtcaacaggcctcaaagtgtacacatgaagacacatcttccttcatcctctcgccagttgacaaattaatgattacacgttcaggcattttacccagatgcaataaaattaagaatgacatcttagaaaatgtggttcaagagaagacatacgcagggattgacaaaatccatcttacttcctttcgaatctctttgatggttacttggttctcaaacacagatcactgctaacaggactcaaaaacaccacttgggaccatcaaccagtgctgcttcgggcgacccgctgggaacacccccacctgacccaagcgtccaccactccttgagcacaagctctgggggtgacctgtgcctgccggcttagttttagaccctacgggaacagctgacatcttgtgaaaaacttagcataacgtacatcctttccgcgggaatttatttctgttcgcacaaggcgtttctgctccgcacagagcaggccttgcttcccaggacgccgctcgcccctccacagcctccttttcagcgtccaaaatcggactttaggaacagaaatcgaaacggtcgcggacctcccgagcggcaggtcggggcgctgccgggtcggcgcggggtccagcggcggtgcccggcgggccgcggcgcgggagaggcccgctcacttcacaacggcggcccggagccaccggttgcggcggccactagacgctccgccaccgcgcagcgaccgcccgggccctccgaagttccgaccggccgcgcgcccggccccagctgcgggttcgcgccccgcccggagcgagcccggggggcgggtccgcgggggctcggcgggcggagcgcggggcgcgcgcggggaggggcgcgcggcgggcccggcgcgccggggaacttgggcgcccgccactgccgccgcccggccactttcctttcacgcctcccgcgggctgacgcgcgccgcgctgcctgccaggggctgacggccgccgccgctctccgccgcggcgaggcgcccaggcgcgcccctgcagccggccggccggcgcgcgggaccgcggggccgcgcgcgggcgccgcgctccccccgccccgcccccgcccccaacgtgccgccgccgccgcccgttggcgcctcagcccgcgcgcccgccggcgcccggcggtttcccgttggcaaagttgcgcggccgcttcgaaggggacgccgtacggtcccccgccccggcgccgccgccgcccctccaggccgccgcgcgggaaggcccagccggtggccccgcttttttacctgcccggagttttcgcgcgcgcgctcgctcgatcgctcgcttttccccctctcgcgctcgttttctttctttctttccgtcttttcgctcccccgcgcggaagctttttcctcccgtgctgcccgcgctcgcccgctcgcgccctccttcctgctgggttcggcggagcggggcggccggcagctctccccgcccccctccacccgcgctccggcggaggcggcggcggcgctccgcgctccgactcattccaatatggcacggacgcagggcgcatgcgcccgcgcccccccacccccagctccgcggtcctccaggcagcctgcgcccctcgcgccgcgcccgtggagctcccgggcccggctgccccgctcccgccccagcgccatccctcctggctggggccgcgcgggaggcaaggactccgcgggctggtgtgccgggggtccggcgccgcgggccacccacgcccccagccagcaactcggcgcggacggccccgaggccgtggcgcaggacacgcggcggcgcctcgggcccccgacggcgctgtggccccgagcggaacggcccggaagaggagacgcgtccccgggaacccagtgcccgccctggcccagccccgatccagcctgcgcctcacctcgggttgtagacagagcggcggggatcccagaggggttcgcgggtcggacctggagtaccggcccggcgaagcgcgccgctgtcgcccgcacgtgactggctcggacaagatggcatgagcggagaagcggccggatcccagatgcgcgcgtgccgccgccgcgggcactgcgcccgtttgcctgcccctcgtcggggatcgggcgctccctctgagacctgaaagggcacccaagtgccccctgtctgcgaagtccggcgcgggcccttcggcgcccccgatgtctctaggcttccgcaggaggcgccctgtaaatcttgagtcttcctgcagcgagggggcacaggacagctgcgaattgggacgaacgagcccagagccccgggaaggatcagaacctcgaaggcggcttcaagtcggccccgcagcccgaggtgaccgtgggcggttacgttgcccgagctcgccccctcctcctgagcgcaggtgcccgtgggacatacacccgcccacctgctccggaaagttccctccagaagggagttcccgcgccaccgagacccgggagctcccgatcagactcccaggccgtgaaaggcgttatcggacagggcccagaggcgcccccacagcaagaagaaagtctggggttctcaccgtgtgccaggtgcgagctcaagccacctccctcaaccgctctgagaaatatcccacttcacaaacttgctcaaagtcacgctgctggctggatttgaatccagattttttttagcaccactgaaaaaacaatatgacaaccggagaaagaaaaatctaaaaagaatacagtaatccatattgttacaaagaaatgcaacttttcacgacatgaaacatatatatactgtgtatagttgcaaccacactttttttgttactactttcactaccatttttatttgttcacgattcatttttaaggtgtgcaggtgtccttaactattcactcagccccctaatgtttttggttctttacggttgtttgctaacgtatccttgaattctgcacttgggacaaatacctgggagtggaaaggctcccaggtagaaggctatgaatggccaagtggtcttggcttacagcgtcatatttttcccaagagctgccccaattattctaccgcctccaaggaacaagtgtaaggagtttaacacacttataaacattgagtgccatttcccccctactttaatagtctattgctagttcaaggttacttagcatttcttaggtgacacaacattcaaaaatgaatgtttttccatgcatttactatatgcattccctctcctgtgaataatctattcatatccatcttctggggacttgaacctcttctaactttgaacaagcatttttttatgttacagatattacttctttgtcgtcattgatgcaaatattttctagcctgttgttctttcttgttttattctaatgttcagtgtgtcattctaatgttttaattgcttcagtgctgacaaagtgagctttctgctgcccatctgatagtcttttttctgctagttttgtacaatttcatttcatatttcattctctgatgactatccc

SEQ ID NO: 316302 - DNA, 4001 bp, Homo sapiens
atttctgatattctctcttcctcctcaggcactttatagaaaaggtttattgaatatagatttccaacccaaagattccacaatatgccacttattcattctttaacaaatactcactgtggggtatatgccagacactattgaaaatgcttattattatattttgatgcattatttacactttttatagaaaatgtttaggaccaacttttactgcttaagcttacagcattagttctgaggcaattatatatttgggttttgttttccagctcttctctaatgattaattcatcagattaggtcattcaactatttttccatactctttaaacgcaattatcacttatgatatgcacacagtctcaagaaagtcaaggtactccttagaggtttaaactatgtagcactacatacaattttaataggctattgtaacaagtacagagctagagcaggaacttgggcagaggaacactctagtattctcaaactgtggctaaaagttagggctgttaactcccagtaaattatgaacataacaaatcagacattaaatattgttgtacatacagttaaacgttgagtattaaatacataactatacttaatctttcaacgttgcaaatcaggtaggctttagcatgctactaaacatgtcaaaccacttttcacaaacatcttttacgctagattgcactttgcagatcttaaaattgcaaaaaaaaaagacttgtttccaataacaatctatgcacagaattttcactacaaaggatatcttcatctcctctacgatagtcaaatattttcctaaaccttacacttaatcttgagtatttcctccaggccttattttcctctatgcagtgtctggaatcttaaatataggtattgtagataccacttaagaactttctttctaccaaggtatatacaatatgtactgggaggttcctagcagagatagggtagctatttttaaaagcacgaacggtaaaggggttgttttacacaattaagttagaattggagatgtttgagagtcatacagattaagtaacggatctagtttagttaaggtattttaaaggcaaagccttacctaaaaagctttcgttattacttttaatcaagttaaaaatcacaaaagaaacttgccatatcaaaagttttatatcctgtctaaataaggcgatggttattagcagggggtgtggtagacagaagggatgaaagcaaagacagaccacagcgcgagatgacggtctcaatctgtacagtactcgtgtaagcgctctggatttaaagaacctagcatatttgatctccgtccataattctccaattagtcctgctgcgaagacagccaggtaggatactagtcagtgccggcctctccagggtaagtgaggaagagaatggcctggacaaggaggacgtcaacggtatcacgctgcacaaagaactgctgtcaattttcttgtgtccttacgttgagccaggcttttagctattgtaaaagctttatttgcacatcacttaatctacacaattttgcaaagtaggaaattagggtctccatggaagccggaacatctgaaagcgcagatcgagtggctgaacggcgaaaagcgcggcgagtgggactccacggcccgagctttcggccaccgaatttagaatgatactgaaaaccgaagggaagtcaaacagggatcactacgcccttgtttcgcaccttaaaacctacttcttcctctttcagggactccaggaaggccggggggaggtggggctggcggaagtggacgcggcgaccctcctgccgcaggcgcgtccagaacgataccttggccactacttctgcaacagctatcttcctcctcctcacatttcaaggctcttcgaagctctccagccacggctagccccgcgcactgggccctccaggaccgtaccaccgtccgccgtcgcctggaactaccgccgccacattcgaaattttccgcctcgctcctccattggttggctgggaggcggtcacgtggcgcaggatgcacccaacaccaccgtcgcaggcagagtcccgccccgccaggcgacgtcacgtgacgcacattcgctcaagtccacatccgggcatccacctggccctggggcggagcctgcggtcgggtctcggcgacccgccgggactttctaatcagagtcgtggggattttacgggtggagttactccgaaacctttaaggccgagtgtgataggtagttcaaagcttcctgtttcttcagtctgacagcttcaaatgtcccgggttgtgctcaaagcctccctcttgtgagaagaatctctttggttgcctgttaaagcggtcagccagcttgcaacacggaagcagcttttagaggaattaaaaccaaaacaaggagcaaattctggattaaaaaggtattagggaaactgcagatacctgaaaattctagctccatgtttctctttgccggctatctctggctctttaactcttctcgagaaatggcaccaacatccatccagttaccgactagaagcctgagaaatcgtccttaatgattatttatcctctcttaacctttgcccgtccagtcggtcacacgatcttctcaactctgctttccaagtttctctcatgcccatctttttccccccaatccagcttccagcctaatctcattccctaaattgcactagtacccactctgaccgcagactccactccctatattcttcatagattaatatttttacaaaacaagtatcaaataggaaactttacaatggctccctattgcatttaaggtgaatttcaaactcctttaagatattttgtccttaaagagccccatgattcctggttccatcacttgtacattttctttaattttcttaaaattcttgccacttttgccaatgctgttctgtcaagaacactctttcccttggccgaacttactcctatgtatactgaagtttcactgtacagatgaattcttccagaaagacttatctacccctaaagcccctgagtgtctgctttacactttcttagtgccctgcattttccccttggtattccttgtgacactgacttgtcgttcattgcctgtttcttgaagttgaataagggcaggaactacatctgctttgttcatagctaaattgtcagcatctcgttgcaatttgaagtaagtagtaaatattcactgggacaataaaggaacaaataaatgaaaacgaaacaaatgttttgaatctaggcattctttatgaaggtgtgttgttgttttttaaaggtagctaacacatgcttgctctagtctgggtacccatcctggcttgagtggaagaggctgaaacacccttctccagccaacaactccctcgttttccaagttaaccagaccaactccattaaccctcagtttactgccactgggcaatgtggcttatatgtgtagaagcatcaagaaggaatgggcagagaggttttttgttgtttgaggtcagaaaattatgaagtggaacatgagagcagagaatagggccagcttcatgagcaggcaaccggtgcttagaagggctgtacatttggtttaatgctctgctgttgccgtcttgaaatgcttaggagtttatatttgaacttatgttttgtaagtgatgtctgatgagacaatggagcaatcttgtgagcagatgtgattcatgcaatgtgtgtgtctgtcactgtttcttgccccatgtcatacaatgttcaggatgcgcactaaatggcctccatgaaccacttattttgtagttagggacctaagtacaaagtgctcagaagggctcacccttgccctcttgaaattattattattttctttgagacggagttttgctgtgtctcccaggttggagtgcagtgacatcatcttagctcactgcaacctctgcctcccaggttcaagcagtt

SEQ ID NO: 316303 - DNA, 4001 bp, Homo sapiens
aggcactttatagaaaaggtttattgaatatagatttccaacccaaagattccacaatatgccacttattcattctttaacaaatactcactgtggggtatatgccagacactattgaaaatgcttattattatattttgatgcattatttacactttttatagaaaatgtttaggaccaacttttactgcttaagcttacagcattagttctgaggcaattatatatttgggttttgttttccagctcttctctaatgattaattcatcagattaggtcattcaactatttttccatactctttaaacgcaattatcacttatgatatgcacacagtctcaagaaagtcaaggtactccttagaggtttaaactatgtagcactacatacaattttaataggctattgtaacaagtacagagctagagcaggaacttgggcagaggaacactctagtattctcaaactgtggctaaaagttagggctgttaactcccagtaaattatgaacataacaaatcagacattaaatattgttgtacatacagttaaacgttgagtattaaatacataactatacttaatctttcaacgttgcaaatcaggtaggctttagcatgctactaaacatgtcaaaccacttttcacaaacatcttttacgctagattgcactttgcagatcttaaaattgcaaaaaaaaaagacttgtttccaataacaatctatgcacagaattttcactacaaaggatatcttcatctcctctacgatagtcaaatattttcctaaaccttacacttaatcttgagtatttcctccaggccttattttcctctatgcagtgtctggaatcttaaatataggtattgtagataccacttaagaactttctttctaccaaggtatatacaatatgtactgggaggttcctagcagagatagggtagctatttttaaaagcacgaacggtaaaggggttgttttacacaattaagttagaattggagatgtttgagagtcatacagattaagtaacggatctagtttagttaaggtattttaaaggcaaagccttacctaaaaagctttcgttattacttttaatcaagttaaaaatcacaaaagaaacttgccatatcaaaagttttatatcctgtctaaataaggcgatggttattagcagggggtgtggtagacagaagggatgaaagcaaagacagaccacagcgcgagatgacggtctcaatctgtacagtactcgtgtaagcgctctggatttaaagaacctagcatatttgatctccgtccataattctccaattagtcctgctgcgaagacagccaggtaggatactagtcagtgccggcctctccagggtaagtgaggaagagaatggcctggacaaggaggacgtcaacggtatcacgctgcacaaagaactgctgtcaattttcttgtgtccttacgttgagccaggcttttagctattgtaaaagctttatttgcacatcacttaatctacacaattttgcaaagtaggaaattagggtctccatggaagccggaacatctgaaagcgcagatcgagtggctgaacggcgaaaagcgcggcgagtgggactccacggcccgagctttcggccaccgaatttagaatgatactgaaaaccgaagggaagtcaaacagggatcactacgcccttgtttcgcaccttaaaacctacttcttcctctttcagggactccaggaaggccggggggaggtggggctggcggaagtggacgcggcgaccctcctgccgcaggcgcgtccagaacgataccttggccactacttctgcaacagctatcttcctcctcctcacatttcaaggctcttcgaagctctccagccacggctagccccgcgcactgggccctccaggaccgtaccaccgtccgccgtcgcctggaactaccgccgccacattcgaaattttccgcctcgctcctccattggttggctgggaggcggtcacgtggcgcaggatgcacccaacaccaccgtcgcaggcagagtcccgccccgccaggcgacgtcacgtgacgcacattcgctcaagtccacatccgggcatccacctggccctggggcggagcctgcggtcgggtctcggcgacccgccgggactttctaatcagagtcgtggggattttacgggtggagttactccgaaacctttaaggccgagtgtgataggtagttcaaagcttcctgtttcttcagtctgacagcttcaaatgtcccgggttgtgctcaaagcctccctcttgtgagaagaatctctttggttgcctgttaaagcggtcagccagcttgcaacacggaagcagcttttagaggaattaaaaccaaaacaaggagcaaattctggattaaaaaggtattagggaaactgcagatacctgaaaattctagctccatgtttctctttgccggctatctctggctctttaactcttctcgagaaatggcaccaacatccatccagttaccgactagaagcctgagaaatcgtccttaatgattatttatcctctcttaacctttgcccgtccagtcggtcacacgatcttctcaactctgctttccaagtttctctcatgcccatctttttccccccaatccagcttccagcctaatctcattccctaaattgcactagtacccactctgaccgcagactccactccctatattcttcatagattaatatttttacaaaacaagtatcaaataggaaactttacaatggctccctattgcatttaaggtgaatttcaaactcctttaagatattttgtccttaaagagccccatgattcctggttccatcacttgtacattttctttaattttcttaaaattcttgccacttttgccaatgctgttctgtcaagaacactctttcccttggccgaacttactcctatgtatactgaagtttcactgtacagatgaattcttccagaaagacttatctacccctaaagcccctgagtgtctgctttacactttcttagtgccctgcattttccccttggtattccttgtgacactgacttgtcgttcattgcctgtttcttgaagttgaataagggcaggaactacatctgctttgttcatagctaaattgtcagcatctcgttgcaatttgaagtaagtagtaaatattcactgggacaataaaggaacaaataaatgaaaacgaaacaaatgttttgaatctaggcattctttatgaaggtgtgttgttgttttttaaaggtagctaacacatgcttgctctagtctgggtacccatcctggcttgagtggaagaggctgaaacacccttctccagccaacaactccctcgttttccaagttaaccagaccaactccattaaccctcagtttactgccactgggcaatgtggcttatatgtgtagaagcatcaagaaggaatgggcagagaggttttttgttgtttgaggtcagaaaattatgaagtggaacatgagagcagagaatagggccagcttcatgagcaggcaaccggtgcttagaagggctgtacatttggtttaatgctctgctgttgccgtcttgaaatgcttaggagtttatatttgaacttatgttttgtaagtgatgtctgatgagacaatggagcaatcttgtgagcagatgtgattcatgcaatgtgtgtgtctgtcactgtttcttgccccatgtcatacaatgttcaggatgcgcactaaatggcctccatgaaccacttattttgtagttagggacctaagtacaaagtgctcagaagggctcacccttgccctcttgaaattattattattttctttgagacggagttttgctgtgtctcccaggttggagtgcagtgacatcatcttagctcactgcaacctctgcctcccaggttcaagcagttctcctgcctcagcctcccaggtagct

SEQ ID NO: 316304 - DNA, 4001 bp, Homo sapiens
ctggagatggaaaaagtgttctactaaaaagaagagcccaggtgcggtggctcacacctgtaatcccagcactttgggaggctgaggcaggtggatcacctgaggtcaggagtttgagaccagcctgaccaatatggtaaaaccatctctactaaaaatacaaaaattagcctggcactgtggcatgcgactgtagtcccagctaccagggaggctgagacaggagaattgcttgaacccaggaggcggaggttgcagtgagccaagacggcgccactgcactccagcctgggtgacagagcaagactctatctcaaaaataaataaataaataaataataaaaagaagaaagagtgcttgcttcggcagcacatatactaaaattggaatgatacagagaagactagcacggcccctgcacaaccatgacatgcaaatttgtgaagtgttccataaaaaattaaaaaaaaaaagaagaagaaagatcctattgaagtgacggcctttgctaaaaaaaggggggaaaaagaagaaagaaagttctataccctgcaaatcaatgagcataacattttgcagacactattctagaatgggattttaaggaggagagaatacttctgtgtcccgagaagaaaaatgactcatcaccatgacccagcttgggttaaccaagaacaaatcatctcagcacagccctcacttccttatccatggcttattagtctaggaaatctaaggaaggaaataggcaagatagacaaagataaatggtacaggaaaaggccacttaaataaatccacttataaaggaagccaaaattccatattaaaatggtgaagaaaggtatttattaggactttactctggaagataaaacttaaaataatgttaagaaatttttcttgtattttaaaaatacaagaaatatttatttatctgacaagtatttattggccatctattatgtgacagcctctggcaagtgaaaatatgacagtgaacaaaggagacaaagcatctgctctagtggagcttatagtccaagggaagacagacaaatggttaaatacataaaaaagcaacataggccggcatggtggctcacacctgtaatcccaacactttgggatcacctgagatcaggagtttgagaccaacctggccaacatggcgaaaccccgtctctactaaaaatacaaaaattagccaggcgtggtggcaggcacctgtaatcccagctactcaggaggccgaattgggagaatcacttgaactccataggcggaggttgcagtaagccaagatcgcgccactgtactgcagcctgggtgacaggagagaaaccctgtctcaaaaaataaaaaaaaattaggccaggtgcagtggctcacacctgtaatcctagcactttgggaagctgaggcgggcggatcacctgaggttgggagttcaaaaccagcctggccaacatggagaaacctcgtctttactaaaaatacaaaatcagctgggcatggtggtgcatgtctgtaatcccagctattcgggaggctgaggcaggagaatcactggaacccgggaggcggaggttgtgatgagccgagagcacaccactgtgctccagcctgggcaacaagagtgaaagtccgcctcaaaaaataataaataaataaataaacaataaaataaaacctattataaaaaggctgctataaaagcacttttataaacctaaactcttccctggggcctcccaggccccacctcatctgacttgtgcccacatctcacacctcctctcaccgcccctcctcctcgctcaccctctggcaccacatgggctgtcagctggctctgtcctcagggcttctgctgtctgcatcgctatctcctccagggcacggctgcctgactccttctcatcatccacatctcagcccaaatgtcacatccatagcaaggctttctccaactcccatctggaacagtttgtcctccagccctctctatatagtttggctgtatccccacccaaatctcatcttgaattgtgtcatgggagggacctggtgggaagtgattggatcatgggggcagtttcctccatcctgttctcgtgataatgaatgagttctcacaagatctgatagttcataagtgtctggcatttcccctgcttgcactcactctgtcctgccaccctgtgaagaaggtgcctgcttctcctttgccttccagcatgattgtaagtctcctgaggcctccccagcaatgcagaactgtcagtcaattcaacttctttcctttaattacccaggttcaggtatttcttcataacagtgtgagaatggattaatattcctctctatctcattaccctgttttgttttcttcatagcaattatctttatcactagctagtctattttgctttttaatttttattttttatttttaaaaaatagagatggggtcttactaccttgcccagactggtcttgaactcctgggctcaagtgatccacccaccttggcctcccaacgtgctgggattataggcatgagccaccatgtccagcctttataataggttttataataagtttttacagttattataaaagtgatgggaagcactgaagggactgaattcaaagaatgacacagtcagtatatttgcttcagtgatcactggggctgctgtgtggacatgaaatggccatgaaggcaagagcaggagtagggatacaggtcagcaggctgtcccaggggccctagtgagagacgtggctgcctgggcttggggtccgatggtagtggggagatggactggagttgatttaggttatatttggaaattagctccaacaaaacttgcaattccatccgatgtgggggcagagggggcagaggcagagacatcaagaataactcaaaattttgacttgagcaagcagctgactgaagctgccatttacagagtgaggtatgggagacttaagaaacagttttgcaatcaagaagcctgttttcaggcacccaagtctgacaggctattaaacactcaagtggagatgtgaagtagacagtaggatagacgtctgaagctcaggggacaggccaagactgcagatataaatttaagagtcgactgcatgtagatgatatttaaagccaagggactgaatgagatcaagggactgaaatcacttagaataggggagatgtggaggaaaagaggaccaggacacagctctggggcgtcccaacatttagagattgagacttggaggggaagccaggcaagaggacaccagccagctgattcttaaaataacaataatcacaaaaatgaatcaatcaactgttgaggaattttttgcatatgtttttctggtaaaattatatgatcatataataaaaaattggtcgattcagatttgactttcacagcacaatcattaacagtgtaattttggcaaaaatagctgaggtctttgttaattttcccaggtgtctctcttacctctttgatattcaaatcattctcatttgaagtatctttttggtccttatcctcatagatttttctctcatctaatgctgctgtttcctcatatgtcaatggcttagcaaatgattagggcagttccccaaaattgctttcctaatctttttaaaaccttattttgcaagactgacagtttcactttgccatcaatttttatgtaatttatgttggcattgtgctgttgtaacctgacaactatagaggaaataatggacaaagactgtgacacaatgggcagcggtggaagcttggttttgaaaggaatggatatgtagtcagtttatgagtgattaattttgtgtcacaatgatgttagctgtctatagtggagataactagctgtccaccaaatccattctccccttccttaagcaataaaatcaacagcatttccctacctaccatttggctaggtgtggctttgt

SEQ ID NO: 316305 - DNA, 4001 bp, Homo sapiens
cagtccataacctgaaaaattaccccagcccaatttgcaggaaaagggaagaatcagaattaattcttacggcaaacagttgaggcttgactagaaaagcaaatgaatgtcggcatttctgaaaccattttcttgagggtgtcccttttgacaatgtcttcagagacatttggaatttgtcagaggtcaactattccaggtacatgccttcaggtaaaccccacctgttacaaatggtttaatggcctaatcaaaacagtaccatctgccttgagcaagaactttgcttagaaaacaataaaagacaataagcaaggccaagccaaaaatataaacccagtgaaatcatcaagggcagaattctggtattaactcaccagaattatttttctgtaaagggtgaaaatcttttcacactgccaattattcaacctacttagctggacgttttaaactagctttaatcccattcctttcaataaacatttacaaactgacattttgtaaaaaaagtatccaacatgaacttaactcatcattactatgcaaacaaaggatcttgctaacataatcccataccagtaacacacgatttattccaaaccaattactttaattaatagcattcctaatgcaaggattttttttccacctgatctttatcttgctaagctgacaaaacaattcatttaaaccccaaccactgagttaagtgagcttttaaattgatctgtgcactaaaaaaccaattaggtatccagaaattacagagcatgcttaaaagcaatttttttaaaaaaatgatttattgaaaaggtagaaaaaaaacgggccttagaaagggatttgctctgctttttgcttaggggtgaagaggtgaaactgtcactcctagatctcggcttggaaattgttttttaatcatctctcttggaaatggaggcacagccagccagcccaatcccctcgccgcctccacgcgtcagctttgcgcatcagttgtccccgatttcttttcatgcccaacctcacaacaaggaaaagcagggttttaagcaatttcaagccaggcagaacgttgagccagtgatgacaataagccgctcagttcgctaacaatcaatcagagaaggaaaacggctcaggccgggcaccttggcaagtgaggactctgcacccggggcaccggtgccagcccgcgctgcagggcaacgcccacccgcccacggtgcccggcgcccacgcgggcgacacctcctcgcagagcctggacgccgtgccatgcccgcggtgccgcggccgggcaggggtacccccgaggataccatggcgcccccgccccctttttccctttgttgcacatccacccgaaccaccaggcacgctgcaccgaccccgatcctgctacgggtcggcgggggactccccgcaatagagtcaggccgcatccacgcgggcactgtagcctcctcattgtggagacgatgaaacggagcatacagaccgtctcctgccaccctatgtggccgccagtccccggaccacagttactgggggctgcgaagtggctgtacgcgtagacaccgacctccgtagcagccctcgcgaagcccggatgcggggcgaccccgcgcgccctacctggatccggggatccacctcttcttcctcctccagcccctgctccatcccctcttcctcctcctcctcctcgtcccgggcaggcggcaggatttcggctggctcctccgagcggctccgcttcagtgccgcgtccatgcaggcagccggcacgcgcgccgcgcagtgggctccggagcgccccgggggtcgcggctgccacaggctgggctggagccgcctcgccacagccgggcacggtcggggagccgccggggccgacacccgggagacgcagctcgccgatgcggatacctccggccgcggcggagcagaggaaatgggcgcggccgccccctttctgccgcggcagtcagcgcagcgcccgctccgcccccgtcccgccccggcctcgcgttccgccgccagtcccagctatccaggtctccgtcgcaaaaccccagctccctccacatctccaaggtggcaaaataggacagcccccacccccttgtaacttagcagctcggatatatctcaactacgtaacgcaagcctcccgctttcgggagtcccctcctccagccctcctccgaggctcgttgtttgtgtggtagggaggcgtgggtgttttcacactgaagtcgccttctgaagcctacgctcagtgaccctggccctcaggaccaagacttgccgaaaccctatacccaaagcacactcatcctcttgagcgaaccttgggaatggcggaggttccgtgcactgatgcattgccgaaggctgcggcctctctgggcgagccccataccgaaacacagaggtgcggcggtcctacctgaatagccaggagcatggagaatgcattgagctgggatttaaggaggtggcaagtgtaacccctgttgatgggcacactctggccaagaatttatgaattagtgagactttctgcccaccatcaacaagtagggagacagagttggcctggcagacacagcatccgaaaaggccaaactgaagaggcacgtgtgtgtgcttttatgaaatgtcagggccactgtgatgtcaggggaacgcaaaggatgaccttggcaaagcagatgagcacatggctgctcacgtctccttgccttgagaaatgcagaacgtgcacatgtcctacacggaggcctgtagcccatcggctctgagtttggaggacaaatttgcttgagaaaggagcttctttctgagaacctatcatcaaagccaccttacaaaacctgggtctggcacaacgtggtggctcgtatctgtaatcccagctctttgagatgccaggacacaaggatcacttgaggccaggagttcaacaccagcctggacaatacagccagaccccttctcaaatgaataaatagtcctgctcctggtggttttatcagaaactaggctagagggttactccttgggcaaggcaccaccccatacacgctggcactgtagtccactgtcaaaggaaatttgtcctgtctcctggaggtagtgccatggtttgtttctaaaaaggtcagacctgttcattgctctttaaatcaaggatgagtcagcaattctgtgagaggtgcttcaaagctccttgctaaagacatagttgcttttggttttccaatgatagatgaagccaggaacaagatagccataggggtcactttggaacacaggagccaccaaccttctctggtggcttggaattgagcctccaactttgcaggtacatcctagctctgaatgaactgagagacagagtttgaaataaacagaactctggggtcagccctgactatgataaatgcttctcagctagcagaaccctatcctctccattctaaatggcaaactccaaactacattcctgcttaagcttaggtcaagagcaaaatacatctatgagacataggccaactgctcaagaacatcagttcagacttttgttgtcttattttttggagatctgggccagctatagtgttaatcctaatagtctttctaaagataaaatgagaaaaataaataaaccacaggcagtactatatacagtcaaccctccatagcctctcaggttccacatgtgtaaattcaactaaccacagatagaaaatatttgggggaaaaaaacacaacaattaaaaaaatgcatatttaaaaatacatggccaggagtggtggctaacacctgtaatcctagcattttgggaggctgaggcaaggaggatcactggaggccgggagttccagaccagcctgggcaacaaagcgagactgccttgctctctagaaaaaaaaaaaatacagtatatgacaactatgtacatatttgcattgtattaggtattgca

SEQ ID NO: 316306 - DNA, 4001 bp, Homo sapiens
gcctggctctcacagaccaccccataaccatgatggcaggctagatcctggtcagaaattgtcacacccaccataccagcgttcataaagcacttagccccgcgctgggcctgcagcaggtgtccaggaaatgtctgtgccttccaggagtttgagaccagcctgggcaacagggctccaaggcagtggcaccatctgtagccctggagccatcacaagactctcagcacagagttgggatctactgacatccttacaagtctcaataaacgaggtcatgctgaggggatctggctgacaacaaatgtggaaaataacccaggtttttggatgaccacaaggtttacaaacctccaggaagatgctacagtcaaatgttcccatgtatcctcaggctacattagcagagacctgtgcccactaacaggaaggaacagtaccggattctgccagggcagactccaaagagaatacctagtccagcaaggcccacaagtccgcagtaggcaggggacaggtctgatgatagccctgaggcataactacatcggcctggaaacagtctgccatagcacgtggcctctggagacccagccaggccaggcacctggccatgtgcagcatctggtgcccgggcctgatcaggacaccacacaccccgaggctgtcagtagagtgaagcccagagacagagacaccaagtgacctccttgggaagagggaactttagtggggagttggggggaactgcacttcttggcagctccaggcagaaccctgctctgggcaaagccatggagcagaggattggaccattgacaagcccagtttggccagctgcccacctgaaagctggtatcatcagcatggcccgtgcctggtggctcaggtgaacccatatgcagcaaggtcttcacagcccaatctgagcctctgagctagggctgaagacacaccggtgaggctgtttaggctgagtccatggcacaaatgctctctgacccccagacctcactgaatcagtgaccgaccctcctacaggctcactccaggagtgggcggattctgggcacaagtctcccctttctcatttctctagcccaggtcctctggattcatcccagcccccaggaaatacagccttcccctccacgaagccacccaccccaaaagggtctttggcttcccatgggtgggcaggggattgttccaattcctaaccctttaaaggacccgcccccagccagccttccagactctgtgaatcacctatctgcaaccaacacacacagtggtgtctccaccccagaggccagcctcagcgccgggctctacaggaacacaagggccaacggaggcagcggtgggggctcccagacattaaacagaggcaaagagggaaggcctctgatggaggggccagctcgccctgcagccacccgccagactaaagccaggcagggaaccctaccctagcctctggggactccatcccctggaacatgggcgggagggcagacccctccccaccgttccaggacagacaaaggtggcagctgcctggtgtctaggcagggttgttcaggcaaggagggtgctggggtggaggaggggtccgcagtcgtgggggttcgctgacggcctcggggcaatcaggggtcagtggggggcatagtggggctggtgctgcccggctcgttggagaggcagcgcggggaagtgtctgcccggtcccagggcaggacgggccgcccccacccccggctcaccacccggaggcggcgttagcagcagcagcaacagcaacggcaacaggatccgcggcgcggggaccggcgcagtcatggctgggcgggcggacgggcggacggacgcgagcgccgggcgcagtgccgccacagcctcagtgatccgcgcggccgcccctctccctcgccccgccccgccccggcccggctggttcccggaacctctgtccgggggagcaggaggaggaggagggaggaggagggaggagggaggagggaggaaggtggaaggaggaggaaggaaggaagcggacgacttcccagcctcggggccagcttcgcgcccggggtctgcgcgaaaacttggtaccggttcccagactcggacaggcgccgggcgacgcacggagtttccttctgctcaccggatgcatggggggcggcggcggcccccagctctcaggcctggagggcgtccccgggaatatgcaccctgacactgagcgcctactgtgtgggctgggggacagccacagccatccctcccagccgcagtcccggcggatcctcacttgcccgagggctacgtgaggactaggtgaggcggtgcgaggacagtgcccagcgcagaccttggcactcagtagacactccacaaatgccggttcccttctacaggcccagtcgccagctcagaggacactcgatctcctgccccctgggactgacaccatcatcccaaggtgatccccagccccagccctggcaggctcagcgctggcgcagtgggccaggactgagctagaaactggcagctcccagggcacacagccaggccaacttcccacacagggctccgccccctcacttcggggcaggggtccaggcagaatcagggatgttgagtcattcttccttttatgcccagagttcctgacccacccccactctgcacctagcacaatcagaacatttcactcaagacagaaaacgtgaaatgtcacactagtggggcacccaggctgggttgtgcaccctgtgtgccaccatatatttctcacctaaaggtgggggcatcgctgtggacaaagagaaacccaaggggacaatctgggatgttcccagtagtttcccaggctagggtgttagaacagggagaggaaggcctgggtctccaataagcccccatcacctcctggccaagaagggcttaagactcaccgtgctcaatacacatgtggggggcagggatatgacagttcccaggcaggatgccctctgggagggtcttagtgagggactggagtcacatcctccctgacagcccagcctggttatcccacctctgcctcctgagcgccactctccaaagctgggtgcagcctaggtcccccttctgcagaatggccagtgtatgctcctcatgtccagctctagagccatcctgtgttccacaccctgggtgcccagccctctgcctccctaaaggttgctcattccactctgcaccatccacaagcttggtttcttgttccttggttttccagtccctgccccccagccaagctcctaagagttgttctaagcctgggcaacataaggagaccccatatctacagaaaattttaaaattagctgggtatggtagcaagcacctgtggtctcagctacttgggaggctgaggtgggaggatcatttgagcccaggagatgaaggttgcagttatgattgtgccactgcactccagtctgggcaacagagcaagaccctgtctcaaaaatagaaaaacaaggcctggtgcagtggctcacacctgtaatcccagcactttgggaggcagaggcaggcagatcacctgaggttgggagtttgagaccagcctgaccaacatctccatgttggatagacatggaccaacatctccatgttcagtagagccccgtctctactaaaaatacaaaattagccaggtgtggtggtgcatgcctgtaataccagccactcaggaggctgaggcaggagaatcgcttgaactcgggaggcagaggttgtggtgagccaagatcgcgccattgcactccaacctgggtgacagagcaagactccatctcgaaaaaaaaaaatgaaaaaaaaaagaattgtcctttcccacctcctatgcttgcctttggcttctctactctgctgcccccaaccccagatcctttaggggcctctcacctggcctcttcctccctacttttttggtcttt

SEQ ID NO: 316307 - DNA, 4001 bp, Homo sapiens
ggcctctggagacccagccaggccaggcacctggccatgtgcagcatctggtgcccgggcctgatcaggacaccacacaccccgaggctgtcagtagagtgaagcccagagacagagacaccaagtgacctccttgggaagagggaactttagtggggagttggggggaactgcacttcttggcagctccaggcagaaccctgctctgggcaaagccatggagcagaggattggaccattgacaagcccagtttggccagctgcccacctgaaagctggtatcatcagcatggcccgtgcctggtggctcaggtgaacccatatgcagcaaggtcttcacagcccaatctgagcctctgagctagggctgaagacacaccggtgaggctgtttaggctgagtccatggcacaaatgctctctgacccccagacctcactgaatcagtgaccgaccctcctacaggctcactccaggagtgggcggattctgggcacaagtctcccctttctcatttctctagcccaggtcctctggattcatcccagcccccaggaaatacagccttcccctccacgaagccacccaccccaaaagggtctttggcttcccatgggtgggcaggggattgttccaattcctaaccctttaaaggacccgcccccagccagccttccagactctgtgaatcacctatctgcaaccaacacacacagtggtgtctccaccccagaggccagcctcagcgccgggctctacaggaacacaagggccaacggaggcagcggtgggggctcccagacattaaacagaggcaaagagggaaggcctctgatggaggggccagctcgccctgcagccacccgccagactaaagccaggcagggaaccctaccctagcctctggggactccatcccctggaacatgggcgggagggcagacccctccccaccgttccaggacagacaaaggtggcagctgcctggtgtctaggcagggttgttcaggcaaggagggtgctggggtggaggaggggtccgcagtcgtgggggttcgctgacggcctcggggcaatcaggggtcagtggggggcatagtggggctggtgctgcccggctcgttggagaggcagcgcggggaagtgtctgcccggtcccagggcaggacgggccgcccccacccccggctcaccacccggaggcggcgttagcagcagcagcaacagcaacggcaacaggatccgcggcgcggggaccggcgcagtcatggctgggcgggcggacgggcggacggacgcgagcgccgggcgcagtgccgccacagcctcagtgatccgcgcggccgcccctctccctcgccccgccccgccccggcccggctggttcccggaacctctgtccgggggagcaggaggaggaggagggaggaggagggaggagggaggagggaggaaggtggaaggaggaggaaggaaggaagcggacgacttcccagcctcggggccagcttcgcgcccggggtctgcgcgaaaacttggtaccggttcccagactcggacaggcgccgggcgacgcacggagtttccttctgctcaccggatgcatggggggcggcggcggcccccagctctcaggcctggagggcgtccccgggaatatgcaccctgacactgagcgcctactgtgtgggctgggggacagccacagccatccctcccagccgcagtcccggcggatcctcacttgcccgagggctacgtgaggactaggtgaggcggtgcgaggacagtgcccagcgcagaccttggcactcagtagacactccacaaatgccggttcccttctacaggcccagtcgccagctcagaggacactcgatctcctgccccctgggactgacaccatcatcccaaggtgatccccagccccagccctggcaggctcagcgctggcgcagtgggccaggactgagctagaaactggcagctcccagggcacacagccaggccaacttcccacacagggctccgccccctcacttcggggcaggggtccaggcagaatcagggatgttgagtcattcttccttttatgcccagagttcctgacccacccccactctgcacctagcacaatcagaacatttcactcaagacagaaaacgtgaaatgtcacactagtggggcacccaggctgggttgtgcaccctgtgtgccaccatatatttctcacctaaaggtgggggcatcgctgtggacaaagagaaacccaaggggacaatctgggatgttcccagtagtttcccaggctagggtgttagaacagggagaggaaggcctgggtctccaataagcccccatcacctcctggccaagaagggcttaagactcaccgtgctcaatacacatgtggggggcagggatatgacagttcccaggcaggatgccctctgggagggtcttagtgagggactggagtcacatcctccctgacagcccagcctggttatcccacctctgcctcctgagcgccactctccaaagctgggtgcagcctaggtcccccttctgcagaatggccagtgtatgctcctcatgtccagctctagagccatcctgtgttccacaccctgggtgcccagccctctgcctccctaaaggttgctcattccactctgcaccatccacaagcttggtttcttgttccttggttttccagtccctgccccccagccaagctcctaagagttgttctaagcctgggcaacataaggagaccccatatctacagaaaattttaaaattagctgggtatggtagcaagcacctgtggtctcagctacttgggaggctgaggtgggaggatcatttgagcccaggagatgaaggttgcagttatgattgtgccactgcactccagtctgggcaacagagcaagaccctgtctcaaaaatagaaaaacaaggcctggtgcagtggctcacacctgtaatcccagcactttgggaggcagaggcaggcagatcacctgaggttgggagtttgagaccagcctgaccaacatctccatgttggatagacatggaccaacatctccatgttcagtagagccccgtctctactaaaaatacaaaattagccaggtgtggtggtgcatgcctgtaataccagccactcaggaggctgaggcaggagaatcgcttgaactcgggaggcagaggttgtggtgagccaagatcgcgccattgcactccaacctgggtgacagagcaagactccatctcgaaaaaaaaaaatgaaaaaaaaaagaattgtcctttcccacctcctatgcttgcctttggcttctctactctgctgcccccaaccccagatcctttaggggcctctcacctggcctcttcctccctacttttttggtctttggctctcccataccctcttatctgcccacagctcatggttgagcttggtgggtgttttgggctccacccagggctgtgcatgggcaggagtgagtggaggctaggatcaccccagtggcttggaaatcgcaaccatgcatctcacaggcatgtgcccatgtgtgcaggcattttctgtgggtctaagggaggagaccacccctcatattgtcttatgccccatttctgcctccaaagaaagaaaaagtaaaaactaaaaggcagaaatgaaatccacaagcagacagcccggcgccacaccctgggtctggtagttaaagatcgacccctgacctaatcagttatgttatctatagattacagacattgtatagaaaagcactgtgaaaatccctatcctgttttgttctgacctaattactggtgcatgcagcccccagtcacgtaccccctgcttgctcaatcgatcacgaccctctcacgagcaccctcttaaaagggacaggaattgctcactcgggggactctgctcttgagacaggagtcttgccgatgcccccggccaaataaacccctt

SEQ ID NO: 316308 - DNA, 4001 bp, Homo sapiens
gccatagcacgtggcctctggagacccagccaggccaggcacctggccatgtgcagcatctggtgcccgggcctgatcaggacaccacacaccccgaggctgtcagtagagtgaagcccagagacagagacaccaagtgacctccttgggaagagggaactttagtggggagttggggggaactgcacttcttggcagctccaggcagaaccctgctctgggcaaagccatggagcagaggattggaccattgacaagcccagtttggccagctgcccacctgaaagctggtatcatcagcatggcccgtgcctggtggctcaggtgaacccatatgcagcaaggtcttcacagcccaatctgagcctctgagctagggctgaagacacaccggtgaggctgtttaggctgagtccatggcacaaatgctctctgacccccagacctcactgaatcagtgaccgaccctcctacaggctcactccaggagtgggcggattctgggcacaagtctcccctttctcatttctctagcccaggtcctctggattcatcccagcccccaggaaatacagccttcccctccacgaagccacccaccccaaaagggtctttggcttcccatgggtgggcaggggattgttccaattcctaaccctttaaaggacccgcccccagccagccttccagactctgtgaatcacctatctgcaaccaacacacacagtggtgtctccaccccagaggccagcctcagcgccgggctctacaggaacacaagggccaacggaggcagcggtgggggctcccagacattaaacagaggcaaagagggaaggcctctgatggaggggccagctcgccctgcagccacccgccagactaaagccaggcagggaaccctaccctagcctctggggactccatcccctggaacatgggcgggagggcagacccctccccaccgttccaggacagacaaaggtggcagctgcctggtgtctaggcagggttgttcaggcaaggagggtgctggggtggaggaggggtccgcagtcgtgggggttcgctgacggcctcggggcaatcaggggtcagtggggggcatagtggggctggtgctgcccggctcgttggagaggcagcgcggggaagtgtctgcccggtcccagggcaggacgggccgcccccacccccggctcaccacccggaggcggcgttagcagcagcagcaacagcaacggcaacaggatccgcggcgcggggaccggcgcagtcatggctgggcgggcggacgggcggacggacgcgagcgccgggcgcagtgccgccacagcctcagtgatccgcgcggccgcccctctccctcgccccgccccgccccggcccggctggttcccggaacctctgtccgggggagcaggaggaggaggagggaggaggagggaggagggaggagggaggaaggtggaaggaggaggaaggaaggaagcggacgacttcccagcctcggggccagcttcgcgcccggggtctgcgcgaaaacttggtaccggttcccagactcggacaggcgccgggcgacgcacggagtttccttctgctcaccggatgcatggggggcggcggcggcccccagctctcaggcctggagggcgtccccgggaatatgcaccctgacactgagcgcctactgtgtgggctgggggacagccacagccatccctcccagccgcagtcccggcggatcctcacttgcccgagggctacgtgaggactaggtgaggcggtgcgaggacagtgcccagcgcagaccttggcactcagtagacactccacaaatgccggttcccttctacaggcccagtcgccagctcagaggacactcgatctcctgccccctgggactgacaccatcatcccaaggtgatccccagccccagccctggcaggctcagcgctggcgcagtgggccaggactgagctagaaactggcagctcccagggcacacagccaggccaacttcccacacagggctccgccccctcacttcggggcaggggtccaggcagaatcagggatgttgagtcattcttccttttatgcccagagttcctgacccacccccactctgcacctagcacaatcagaacatttcactcaagacagaaaacgtgaaatgtcacactagtggggcacccaggctgggttgtgcaccctgtgtgccaccatatatttctcacctaaaggtgggggcatcgctgtggacaaagagaaacccaaggggacaatctgggatgttcccagtagtttcccaggctagggtgttagaacagggagaggaaggcctgggtctccaataagcccccatcacctcctggccaagaagggcttaagactcaccgtgctcaatacacatgtggggggcagggatatgacagttcccaggcaggatgccctctgggagggtcttagtgagggactggagtcacatcctccctgacagcccagcctggttatcccacctctgcctcctgagcgccactctccaaagctgggtgcagcctaggtcccccttctgcagaatggccagtgtatgctcctcatgtccagctctagagccatcctgtgttccacaccctgggtgcccagccctctgcctccctaaaggttgctcattccactctgcaccatccacaagcttggtttcttgttccttggttttccagtccctgccccccagccaagctcctaagagttgttctaagcctgggcaacataaggagaccccatatctacagaaaattttaaaattagctgggtatggtagcaagcacctgtggtctcagctacttgggaggctgaggtgggaggatcatttgagcccaggagatgaaggttgcagttatgattgtgccactgcactccagtctgggcaacagagcaagaccctgtctcaaaaatagaaaaacaaggcctggtgcagtggctcacacctgtaatcccagcactttgggaggcagaggcaggcagatcacctgaggttgggagtttgagaccagcctgaccaacatctccatgttggatagacatggaccaacatctccatgttcagtagagccccgtctctactaaaaatacaaaattagccaggtgtggtggtgcatgcctgtaataccagccactcaggaggctgaggcaggagaatcgcttgaactcgggaggcagaggttgtggtgagccaagatcgcgccattgcactccaacctgggtgacagagcaagactccatctcgaaaaaaaaaaatgaaaaaaaaaagaattgtcctttcccacctcctatgcttgcctttggcttctctactctgctgcccccaaccccagatcctttaggggcctctcacctggcctcttcctccctacttttttggtctttggctctcccataccctcttatctgcccacagctcatggttgagcttggtgggtgttttgggctccacccagggctgtgcatgggcaggagtgagtggaggctaggatcaccccagtggcttggaaatcgcaaccatgcatctcacaggcatgtgcccatgtgtgcaggcattttctgtgggtctaagggaggagaccacccctcatattgtcttatgccccatttctgcctccaaagaaagaaaaagtaaaaactaaaaggcagaaatgaaatccacaagcagacagcccggcgccacaccctgggtctggtagttaaagatcgacccctgacctaatcagttatgttatctatagattacagacattgtatagaaaagcactgtgaaaatccctatcctgttttgttctgacctaattactggtgcatgcagcccccagtcacgtaccccctgcttgctcaatcgatcacgaccctctcacgagcaccctcttaaaagggacaggaattgctcactcgggggactctgctcttgagacaggagtcttgccgatgcccccggcca

SEQ ID NO: 316309 - DNA, 4001 bp, Homo sapiens
cagagtttcgccatgttggccaggctggtcttgaactcctgacctcaggtgatccacccatcttggcctccaaagtgctgaaattacaggcatgagccaccgcaccccagccagactgtctagttcttaatcctcgttcactctctccctcactcaaccacagcaacctcagcccctgctgggcaccacaactgcaggggcctggctctcacagaccaccccataaccatgatggcaggctagatcctggtcagaaattgtcacacccaccataccagcgttcataaagcacttagccccgcgctgggcctgcagcaggtgtccaggaaatgtctgtgccttccaggagtttgagaccagcctgggcaacagggctccaaggcagtggcaccatctgtagccctggagccatcacaagactctcagcacagagttgggatctactgacatccttacaagtctcaataaacgaggtcatgctgaggggatctggctgacaacaaatgtggaaaataacccaggtttttggatgaccacaaggtttacaaacctccaggaagatgctacagtcaaatgttcccatgtatcctcaggctacattagcagagacctgtgcccactaacaggaaggaacagtaccggattctgccagggcagactccaaagagaatacctagtccagcaaggcccacaagtccgcagtaggcaggggacaggtctgatgatagccctgaggcataactacatcggcctggaaacagtctgccatagcacgtggcctctggagacccagccaggccaggcacctggccatgtgcagcatctggtgcccgggcctgatcaggacaccacacaccccgaggctgtcagtagagtgaagcccagagacagagacaccaagtgacctccttgggaagagggaactttagtggggagttggggggaactgcacttcttggcagctccaggcagaaccctgctctgggcaaagccatggagcagaggattggaccattgacaagcccagtttggccagctgcccacctgaaagctggtatcatcagcatggcccgtgcctggtggctcaggtgaacccatatgcagcaaggtcttcacagcccaatctgagcctctgagctagggctgaagacacaccggtgaggctgtttaggctgagtccatggcacaaatgctctctgacccccagacctcactgaatcagtgaccgaccctcctacaggctcactccaggagtgggcggattctgggcacaagtctcccctttctcatttctctagcccaggtcctctggattcatcccagcccccaggaaatacagccttcccctccacgaagccacccaccccaaaagggtctttggcttcccatgggtgggcaggggattgttccaattcctaaccctttaaaggacccgcccccagccagccttccagactctgtgaatcacctatctgcaaccaacacacacagtggtgtctccaccccagaggccagcctcagcgccgggctctacaggaacacaagggccaacggaggcagcggtgggggctcccagacattaaacagaggcaaagagggaaggcctctgatggaggggccagctcgccctgcagccacccgccagactaaagccaggcagggaaccctaccctagcctctggggactccatcccctggaacatgggcgggagggcagacccctccccaccgttccaggacagacaaaggtggcagctgcctggtgtctaggcagggttgttcaggcaaggagggtgctggggtggaggaggggtccgcagtcgtgggggttcgctgacggcctcggggcaatcaggggtcagtggggggcatagtggggctggtgctgcccggctcgttggagaggcagcgcggggaagtgtctgcccggtcccagggcaggacgggccgcccccacccccggctcaccacccggaggcggcgttagcagcagcagcaacagcaacggcaacaggatccgcggcgcggggaccggcgcagtcatggctgggcgggcggacgggcggacggacgcgagcgccgggcgcagtgccgccacagcctcagtgatccgcgcggccgcccctctccctcgccccgccccgccccggcccggctggttcccggaacctctgtccgggggagcaggaggaggaggagggaggaggagggaggagggaggagggaggaaggtggaaggaggaggaaggaaggaagcggacgacttcccagcctcggggccagcttcgcgcccggggtctgcgcgaaaacttggtaccggttcccagactcggacaggcgccgggcgacgcacggagtttccttctgctcaccggatgcatggggggcggcggcggcccccagctctcaggcctggagggcgtccccgggaatatgcaccctgacactgagcgcctactgtgtgggctgggggacagccacagccatccctcccagccgcagtcccggcggatcctcacttgcccgagggctacgtgaggactaggtgaggcggtgcgaggacagtgcccagcgcagaccttggcactcagtagacactccacaaatgccggttcccttctacaggcccagtcgccagctcagaggacactcgatctcctgccccctgggactgacaccatcatcccaaggtgatccccagccccagccctggcaggctcagcgctggcgcagtgggccaggactgagctagaaactggcagctcccagggcacacagccaggccaacttcccacacagggctccgccccctcacttcggggcaggggtccaggcagaatcagggatgttgagtcattcttccttttatgcccagagttcctgacccacccccactctgcacctagcacaatcagaacatttcactcaagacagaaaacgtgaaatgtcacactagtggggcacccaggctgggttgtgcaccctgtgtgccaccatatatttctcacctaaaggtgggggcatcgctgtggacaaagagaaacccaaggggacaatctgggatgttcccagtagtttcccaggctagggtgttagaacagggagaggaaggcctgggtctccaataagcccccatcacctcctggccaagaagggcttaagactcaccgtgctcaatacacatgtggggggcagggatatgacagttcccaggcaggatgccctctgggagggtcttagtgagggactggagtcacatcctccctgacagcccagcctggttatcccacctctgcctcctgagcgccactctccaaagctgggtgcagcctaggtcccccttctgcagaatggccagtgtatgctcctcatgtccagctctagagccatcctgtgttccacaccctgggtgcccagccctctgcctccctaaaggttgctcattccactctgcaccatccacaagcttggtttcttgttccttggttttccagtccctgccccccagccaagctcctaagagttgttctaagcctgggcaacataaggagaccccatatctacagaaaattttaaaattagctgggtatggtagcaagcacctgtggtctcagctacttgggaggctgaggtgggaggatcatttgagcccaggagatgaaggttgcagttatgattgtgccactgcactccagtctgggcaacagagcaagaccctgtctcaaaaatagaaaaacaaggcctggtgcagtggctcacacctgtaatcccagcactttgggaggcagaggcaggcagatcacctgaggttgggagtttgagaccagcctgaccaacatctccatgttggatagacatggaccaacatctccatgttcagtagagccccgtctctactaaaaatacaaaattagccaggtgtggtggtgcatgcctgtaataccagccactcaggaggctgaggcaggagaatcgcttgaactcgggaggcagaggttgtg

SEQ ID NO: 316310 - DNA, 4001 bp, Homo sapiens
agcactttgggaggccgagatgggcggatcacaaggttagcagtttgagaccagcttggtcaacatggtgaaaccccgtctctactaaaaattagccggtagtcccaactactcaggaggctgaggcaggagaatcgcttgaacccaggaggtggaggttgtagtgagccaagatcgcaccactgcactccagcctgggggacagagtgagactctgtctcaaaaaaaaaaaaaaaaaaaaaaaagtcagccttacattttgtactggatgataaaagattttaaaaaataaaaaacggttgggtgcggtggctcacacctgtaatcccagtactttgggaggccgaggcaggtggatcacctgaggtctggaattcgagaaagtataaaaaaaattagccggacatgatggtgggtgcttgcaatcccagctacttgggaggctaaggcaggagaatctcttgaacccaaggaggcagagattgcagtgagccaagatcacaccattgcactccagcctaggcaacaaaagcgaaactccatctcaaaaaagtaaataaataaaaaataaaaataaaaaactggccaggcgcggtggcaacacttctagaggccgaagtgggcggatcgcttgaggtcaggagttctagactaccctggctaacatggtaaaaccctgtctctactaaaaatacaaaaattagcagggcgtagtggcgcaaaactgtagtcccagctactcaggaggctgaggcaggagaatcgcttgaaccaaggagggaggttgcagtgagctaagattgtgccactgcactccagcctgagcaacagtgggagactccgtctcaaaaaattaaaaaataaaataaataggccaggcgcagtggttcatgcctgtaatcctaacactttgggaggccgaggcaggcggatcgcctgaggtcaggaatttgagaccagcctgggcaacatagtgaaaccccatctctactaaaatacaaaaaaaaaaagaattagccgggcgtggtggcacgtgcctgtggtcccagctactggggaggctgaggcagaagaatcacgtgaacccatgaggcggaggttgcagtgagcagagatcgcgccactgcactcctgcctgggtgacagagcgagactctgtctccaaaaaaataaaaaataataagttttttttaaaaggtgtcagccaccatgcccaacccaagctttattccaacaaaaggcaaatgcttggtaactgcatcaaacacatccaaaaactctaggagctttgttagctgtagggcatcccccagcagcctctgcccaacagaggcccaaggagggtgtgggtcccaccctaccccgccctgggactgcacaacttcagcagggccccacagcacagcccagggacagagctaaagactccaggctcaaaagcacccctcaggactctcaaagcaggagccatcagccccaggccgtccaggacaaggccctaaaacaggaccagcagactacaggtgtcttccggcccaaccagaggcaggaatggagaaacgcacacacattcacacgccatcaatgacatgcgaccgcaaggccgttatcatccctccagagatctctcagtgtttgtctctcaaacacacacgcagcatggcgcccaagctcaccccatgttagcctctgccttcacccagaggcctcctgtacccctgggctttcccctcttcccatcgtgggccactcagtttcaatttcctccccttttggagaaaaagaaagcaaatctcctccagatgacgtcagccacaggaagcacagacgcgaagccccgttccaccctcttaaagacacaggatggccccgcccagcagccggctagcagccaaggagccaaggggcgggggccggggaggaggggaagcagaggtgccccatttgcctcccagagctgcctccctgagccaagcctacagggcctgacctcagaatgcagcctggccactagggggtctaagagccaccccagcctcagtgggccccaaccacactctagctcagcagcacccccacccccacttccacctaacccaccggccctgttccaccagcctccaggaggagcttctgcatccatctaggcccagagggcgaccctggggccctggctgacacacatgcaaggagcaaagtccagcctgtccctttagctcctcctctcccaccagcactctctccaatctgtctccccatgttctcccggccaccctactggggccaccatgcaaggtccatcatgtcaccacctgctcaaacgccagctatggctcctgtagctcttgcgattacaaaggaatttgctttataattacatgttaaactgagtgtgtctgtgctttcctgtgtatgtattatagttgacaataaaagaagaaaagaggccatgtgcagtggctcacacctgcaatcccagcactttgggaggccgaggcttttgggaagcttgagcccaggagttcgagaccagcctgggcaacatggcaaaactccttctttacctaccaaaaaatacaaaaattagccaggcttggtggcacgcacctgtaatcccagctactcaggaggctttctccagcctgggagactgagtgagaatctgtctcaaaaaaaaaaaaaaaaagaagaggaagaaaagaaaaatctgggatttgtctcaccagacagtgaaatttacaataaaggaaattttattattattatttttttgaggcagggtctcactctgttgcccaggctggagtgcagtggcacgatcacagctcactgcagcctcaaactcccaggctcaagtgatcctcccacctcagtcccccaagtagctggaaccacaggcatgcaccaccacactcggctatttttttattttttgtagagacagggtctcactgtgttgcccaggctaatttttaatctttaattaaaattttattttttaatttaatttttttttttttgagacagagtctttctctgtcacccaggctggagtgcaatggtgcaatctcagcccactgcagcctccgcctccccgggttcaagtgattctcgtgcctcagcctcccgagaagctgggactacaggtgcgtgccaccacacctggctaatttgtgtatttttagtagagatggggtttcaccacgttggccaggctggtctcgaactcccgacctcaggtgatctgcccaccttggcctcccaaagtgctgggattacaggcctgagccaccgtgcctggcctttaattaaaattttaaataaaataaaactccctattaggcccacaaagccatgtgtggtctggaactgccccctctccttcaacctctgtgctgagtcccatccccctcctttcagctttgaaagcaccatgctgtgtcctgctcaaggcctttgcacatgcagatactcctgccagctcagccctttcctcctttcatctcagccacacctaactcattcctgctcacccctcaggcctcaggtcacttccccaggagcaccctccccaccatgcagaagaggccaggcccctcagcacatgcccgcacggaattaaattcctttctacttcagttcataaacacacactctgttgtgtgtgagcatttgatcaactacgtcttgcccctgctttgtaccattatcatccaatacagctttcggccaccactatatttccagtgcctagcatatagtgagtgctcaataaaaaaaaaatttttgcataatgttgtgaattaatcaataaatattggacaggtaaatgaataaattcactcagagaccccacccaggcacggtgaccttagaaaaccaagcaacattcaaggggtggttgcagagcggggctagggtacaaggccacacgtggctacagtaccaatggaactacgcctccgagaggaaggaatggggtctcccaaggctggggccaa

SEQ ID NO: 316311 - DNA, 4001 bp, Homo sapiens
ccctgagcttggaaatcaacaatcccaggaactgcgcccgccgggggttcagacctgaacctcgccgtcaggcgcgctggcgaacctgtagttcgggcctgtagttgtggactcatggccgggaggctgcactgggcaccttgacggtaactccaccactttacaaatttaggaagacctggtgctggtttggaggaagaagagtcgctagatctcggccctgccgggcattctagctacggtgatcttaaatattgccgtattttctagttctcagagttagttttgtggacatttgtcctttctttaggaaggaacattatagtaaacattatgggccaatttaatagcaaagtatttttactgatattgtattgaaatttaaatatgaaaacacacccttcaaattctgccaatgaggtgggaaggctttgtctattacatgtcatctacacagtggatgccactcaaagttttggggcttcgaggagatgtccaaatttcaagttgatccatagacttaataaaatctctatttttgtccccaaatttccaattactgatctaaacaggaacagaccgtgtcataaacaacttaattgcttgcttaaatatgtgattccacgcatgccacatattttcttaattggaaaaatatggcagtacaccagttactgcaggcaccaagtgccaaatcaattttattgttgaactcctttgaattggtatagaacgctctgccattgagataaagacgtttcctaacactgagctagcaccaaaggatttttgctctaagagaaccgagtactgggtgattgaaaacactaaaggaattgtgtaaatatagatccccacctcccccgccgccccccccccccgcccccaacacaccaagaaaccgaaacgcctcgcccgggagaagcagcgtagcctggacctcagctttcgttggcttccttctaccttgaaagagaatgggaagttttggcccctaagatccaaagattcaggggctctgcggagttcgaggggtcttggcggccccaaacacctaggcgaccggagggttaagctttccacctctgccccttctccctcccggcaaactctgcgctagaggctagctttagtcccgccgtctggttcagcaccccctcctgcagcccggccccgcgaacttccacgtccgcctgcgggccatccgggctgcgggcccatcctcccgctggtgaaaaatgcatttcggtggaatgggaacatctgggaagggcgcgcacaaaccccacacgcttccccccacgccacccccacaacacactaggaccccacccatgaccgagcataccaccggacccccacccttccactatcactctagctgacaaagctggggtccagggccctctccgtgtccctctcccctccccgctgggcctcggagtcctctcccgcccgagaggagtccggaaggcgggaaggggaaccgctgccgggggtcagtcaggtcgttaccctccgtcagtcgcgggctgcccggctccctgcttctctcggcggcgcccatgtccagctcccggacgggagagcgccctcctccagctcctccgcctgctcctcctcctcctacacctcctccgcctcctccgccgccgcctccgcctcctccgccgccgcctccgccggccgcccggactgccgggctgctgcggtcgtcgcggcccgcctcggtgcagccggtcggctccttggccccgcgcagcggcccgctctccagcacctcccggtacgtgatcgcctccttcttctccttcactttctggtcaaaagacttggagacgaacgccgtaagttcttccatcgccgccgcacgtcagcccggcgctcaacctctgccagcagagccccgctctttttttccttcttctttttttactgctccagcccccccaataataacacatcaatgggacaggaggtgggggaggagagggaggaggagaaagaagaagaaaaagaggagaagaaagaagaaagaggaggagaagtagaaggagaaaaagaagtaagaagaggaggaggaggaagaagaggaagagggggagaagggtgaagaggagagggaggaggaggaggagaagagaaggggcgggggctgccggagggaaatgggaactgatgcttccctgccggagcgcgcttgttcaatgttaagatctttgacaattcttcctgcggagagttcagatctgatagcgacgctgcgcttgaagtcccactatttatacttcctaacggcggcctcttgttttgagtaaattacctcccctcgcaactcggagtgagcccccttcccgggtagcagtcgcgcctctaccgggggttggggaggggaaaaggagagaaacagagagagagagagagagagagagagagagagagagagagagagagagaagaggagagagagagattggagttcgggcgggctggggctggagtggtagggcagcacagggggaccggagggggcggggagagaaggccggtccccggccgctcaggttttcagatagcccctgccgcctgtgctcttggccattaatccaggattgacaagaatccctaattaatttaattaggcgtggattttgcgttggtgtcacgacttagttaaacactggggagctggatagaccccgcggggtggggccaagaggaaactgacaagtgcgcagctcttagagtcagtcaggtatcccgacactgcatccttccctacagccttgcttcgagtcagggtgcctcgcaatgctcagcttcgcattgcttttcctcgtccctgccctgcatcaaccgcccagcagtttacaggccccgcatcccattcccgcatcctgaccccgcatcccaattctgcatccccgcctctccctcacaatcccacccctgccggccgtagctccaccgcccagcatcatcctgcccagagacagggttgcctgcaccttctccgacccgcgcagcttctcttaggagcttcccggctcgcaggcaggctgagtccgggtcttctccaagctcctcgcccctcggtccgtgttattcgctctattattcgtgtcctggagcccagctgactcctctatggacagaccccgctaaaagggaccagtcgatttaacaagtttccccagcagctgttagctgacagatctcattttaaagtgtttccttagcgcccggtcaaggacagctcgacttcgttcgtttcctctctgaggtctcagaactcccacccttctcccttactctctgcactcggacccctctatggtgaattacaggacttcttctttagcatcttgggaaacatccgagtttatttactaatttgaaaaacaagagattatccctcttcgagtctgaaaaaaaaatcgacgttaagtttgtaccccctctaatttcatttattacggagagctaaaaaagagacgctcgccaggagtaaaggtctctctgcctaccccccccaccaccccgcttacgatttaaaattctatttctgggctattttcatcggaacggtttgttacgttagaggaacatctatattcctgagtcatttgtctgtattgtgccggacagggcttgctgtgagaagtgtggctatgcaaatacatactcacaaaagaatatttacatatgatgttatatttaagtgtgtaaacaaatatacctctaagtgtggcttaggggacattttcaagtactctgaatattaatgcagactttctggaagttaaaggtaacttgatcattattttggatctaatactcttagtaaaaataagaggaattacagaacattaatatgtatatcttccgtatattggttaaggcatcaaaacaaattagcagataatttaagaagttccgtcaaaacaacctgaaacacttgcaaaaagagaacacaattataacttaatatattagtgttt

SEQ ID NO: 316312 - DNA, 4001 bp, Homo sapiens
atcaagcccagataatttttttgtatttttagtacagatggggtttaaccatgttggtcaggccggtctcaaactcctgacctcaagtgatctgcccacctcggcatcccaaagtgctgggattacaggagtgagccaccacatctgggggcaaactgtattatcaaagaatgcccatctcacagcactcttcccaaccatgaaggtctatgttccctccccttaaaattcagcaggctctgggactgttttgatgaatacaataaagcagaagtgacacaggaattagacctttaacatatgaatttggggacaagagttgggggggtgcccacaaataatccatccacggcaacgggtaaataataaagcctcgttgtaacactgtcctaataacaaatgagataatccgtataaagcactaacctggagtaaaaattcaataaatatttgctaccaccataatcttcttcctattcttcacatcttggcttaaatatcgcctccccagaaaggcttttcctgaccactttataaaacatgggccctttttcattctctattagtgcacttctttctcctcatagcactcaccacaattaagtacactgtttattgttttcctctccccagtgaaaagtacatgagggcaggactttgtcttgttcagcacaataataccaacactgaaactcaataaataaattaaagaaataagtgaattaaaaaactggaaagtgcaataattcaaatacggacgttatatggtctaagggaaatctgagcaaaactggttcagcaacagtgaaaaaaccaccttgactggtggagaaggtttgtaccacaaaagtacttgggtgggaaaagtaggatgcagctacacttcagaaagattaggaggatggataaagagaaggacaagagattggcaatactttaggatgaatatgtagcagcgggttctgtggaatggggttaatagcagtgcttatccctaaggatcaccgtcaaagttaaatgagatacaccatcataaagcacttaacggaactgcttgtccaccacactacgagttatcagtgttagctgctaccaaggttacgattctgcaaggagaataatttaaacagatcaagtgctgacagaccctcacggagacttgggggaaacaaccacacttcagggacaaaaccaaacagaagagcagcagacagcagggaagcaggagaactaggctaatttggtgtcaagaggtccaaaaaaggtaagaatttcggtaagtagggagcggacagacaagagatagatcaacagaaggcggcctgggcaaagttaaaaggaccgacgggttgggaagtcacggagatgtcagcgcgcgccgttcccaggaagggagagactgggagagcaaacgcggagtgaaaggaaagaacagaacaagtcagaacgggacgagaactagggcgacagggcagaaacgggaaagtgacacggtccaaacgtcactttttcaagtgattccgcaatcctttgatatgggatttaagaaagctcaagaaggaaaagggcttccgcagcatctaaaacgcacccctggaagagggcagttccctggcaccaagagaagctgcggaaacgtcgggaaaaggcattcgcgcaatcgagcactgctctctcgaccttgcattctccctctaaagcagctatctaacgaatgcgcctttcctgcggccaggcaccccgaactcgcctgagaaagtatggcttggcgtagaacttgaagtcagacccctcgaagtagacgtcgaactcggagacccgggcgtagggcacgcggatggcgatagtcaggaagtccggatcctggctgaggtcgaacgccggggtcagcatcgccgcaccggacgcaagggccggcgccgctcgctctcactgccgccgcgttcccgccacgcaaactctccaactccccacgcgcaggaactctcggtgtgagggacggagcttccggctcgaggcggaagtgctcgcgcgtaaggcaggaagtctctccccacgccaatctccatggagacgggacgccgttcgagaagaggcggaactttcaaaacccccgggcggagaaagggcgtggcgagtggtgcctgggagccggcgttgaaccggcgggatgactagcaaccgagcctttttcgaggttcttagagatgattttaacagcactggcttgacaggtaaacagacgtgcgtttgaatcccttcctggccacaacttctcagctgtaagaccttgggaaagttacaaaacctctctatatcttctgtaaaacgcggataatgcgagaacctagccccatagaaatgctgtgagggtagcatgaaattgtgcatgtagaactctaataacgaacttggcaagttgtcaacgcttgatgtgctgaagtagtcaccgcagtagccacagcagcaccgttacagtggtttcccttagttctcacctgccttgtgaacaattcctcttacactttccctttcctccctctctctttccacttctctttttctgcagctttctctctcattcttaacggcttatttgaagagttttctctttaacagagcgtccgtcccgctaatctcatctaatctacgctgcaaactctaaagaaaacggctcagagaggttaatcagtacgttttataaccatgcattttacagtaattagaactcagaacgtttgactcttaaaccgtgtcggtgactgcattcacaaattaaggtccctctgtattccccttctttcctttttctcactcttgtccttacacttgtctgaggacatcttttctgtctttttttctacttgtcttccttgtattttctccctttggagtgtgccccttacactctctcagtgcctctcccgctggtttccctcttcccccacatattcccttggcctttccacacatgttgtttcctgttattccaccactaattagaataatccagttgtggtatttattccgtggttttaagtatcagtggaaaagggatgaaaagtactctcctaggacagtggagataaccagaaaacttcaaaagtcttttcaatctccagctgttttatgattctaaggagacattcttgaaacttcattaggactcagaaaaaaaattaatagtaacaggggctaacattaactgaatatttactatgtgccagcactgcagcaaaccctttgtaatgatctcattctccctcctgaccgctctatgaagtaggcattatatattcccttggcttgcacaggatctcacagctagtaagtggtgcaatgggaattgaaacccaggtgagtctgattcctaggcccaggctctacactattacagagttgactccctctgttattaccacctactttgtttcacattctaaagccaagcctgcctgctttagaccatactgagccttacaagtaataggcactcaatattgacaatgaattgatgccaactttgatttaataaagctctcaaaaggtcccttgagataggcctgtgactaaactattccaaattagcttctttacaaagaatcttggccgggagcggtggctcacacctgtaatcccaccactttgggaggccgagggggtggatcacctgaggtcaggagttcgagactagcctggccaagatggtgaaactccgtctctactaaaaatacaaaaattagccaggcatggtggtgtgtgcctataatcccagctactcaggaggctgaggcaggagaatcccttgaacccaggaggcggaagttgcagtaagccgagattgtgccatttcactccagcctgggtgacaagagtgaaactccatctcaaaaaaaaaaaaaagaaataatctttacatctgccatgggacctcattcctgtaggtcacaagcattaatatttttaaattattaatgccagagaatcaactgaaacaagct

SEQ ID NO: 316313 - DNA, 4001 bp, Homo sapiens
tcagtttttttcttgaactctcctctctctaattccaacactactttccacaatattgtcgaaaagaacataaatacatatatttgatagaatagtatatatttgggagttgctactctgtttaaaaatcttttgaattttcaccaagttccttcatcaaacagcagcaaatgagatatacaaaactcttatatcaaaaatacatatttattattaaaagacattatacttttgaggtagcatatggaagatacccaaatgtagacaggaaagaacacatctccaataattatctgaaagcatatttgtttaatttaattttgaccacatatatcttatttttcttagttctcaagtttccatggattatctgtattctatgattttagtataaatcttaattcaaagacatataccaaagtagaacttagaattactacagtaagtgctttaataaattattgggtttaaaatcacggtttgtttttttttttttttttggtctcacaatggtccctgttctgtaactatgtcaactcatgtacccagttgtcccaacctaaacacctttttttccttcttccatatgttttacaacattcaatcattcaataagtccatctgactttatcttcaaagtatttttagaattatgccttcattttatccccagcaccacagcataatttttagataacatattgccttcatacctgctgttcaatttcaatccctccccatccactcttctaggtgaattctaaattttgctgaattcaaatgccatggtgagttccttaccactctgaggcacagttaatctagcctttcttcatttaccatagcatattaaatgtccattgcaattatttatgtatatgttaatttcctcaattagatcgttacattcttgttagcaaaaattataaaagtagtcagagaataatattaagtaagcaaaaacttaattttttagtatagcttataaatgaatatctgcagattagcatttattcttagtatacaattttctgttccagatatgtaagctgtttattgcatcagtaattttcaaagaaaatgaatgtaaagtaaacagagcaacaggtaacatacaaagctgttcgaaaaatgaagcccagttgcgtgatgttatgttgagaaatgacaaagttacatttagtgtacaactttaaataagtgtaaatctcatttgaagtgataacctactttgctaccaagaagtcaataatgagaattgtgctttcctttttgataagggaagtcttaaaaaatgcatttttgtcatgaaacaaactctcctttgtctagaaaaatcaaaacaaaatttaaaacaattgcttaaaattactgtgataaaaaaatatgatccctgtaattttggattacagtaattttaagcaactcttcttggaaaatatatattgataccctttctctgcatatttattatgaagatgaataatactttattgtataacaacttgatgaatgatctttaaaaggtcagctagaaaacagtaatgttttataaatgtagcattctattttatatagattttcttaaaatatatttaagcatactttattattcatctatttttcaaaatcttaatcagtactcattttctttcatatagagtcattaaacaaaacttgctatgattccacctaagtcttacaaaagttataatgaagagttgggccaaaaaaaatcctgtatttaaaaaaaaattagaaatattttttcctgtttaatacaaggtactacatatttcaaatggcaacttaaaatatatgatattgctattttagcctagtgcagatagatgggaatactgctaacacaaattaagaaaaaatataattagttgaaaacataaaaataacaaaaaacatatgagccatagacttaccttatttcatagcctgttctctttgctatgttgtaccagacttggataaggctgccaaaataatgatcaaggaaagctgcttaggtatatattgacctactcataaagttttattgcacccttaccagcctatcagtgtttaataatcttctgctcaacatacaattgttaaaagccttaaccctgaaagtagtttacataaatgtttctctctgggaatctaagttaattagtaattgtactgtcagatactctttgatttctcaaagctgtgaactattaatatcttaagaacataaaagtagttctttctattttttctcttttcaaaattatatttattttatatttggattttgttataataactattttgtccattgtgtgcaatttagatcctcactggagagtagaaacatatttgaaagacagaatctgtgaaaaattttcaggatataacaattagaagataatattttataaaaagtaatgattaaataaaaattattccctgtatcttgtctttgatcttaaggttgaaaaagtgaccaaatccttaagtataaaacataaaatagaggtgcccagatcagtaatttagagataaaatcaacatttttatctatttatttaccacagatagcactcattgaattataaaaaatcatattgtaaaccttctcatttcatgtagtaaaatgtataaaattaattacactactggtttaagctagcataatgtttaaaagcaatggatttgatataataaatttggatataaatgctggctgtactatgcttacctgagaaattgtgggcaaaatactacctataaaatcactaaaagaattatatgagctaatattgcttaattattattgaccccaatttgactctgaaattgtcagagtctaagccttgcataccatctggatactatcttttcaacaaaatatatattaaaataatgtgtttgcataaagtagagcaattagtttttgaagcaaactaaatatgagtctaaaaagaaaatttaaaaaaagtatgcatggattgttgtaagactcagtagctatataaaggagaaatttcagtatataaaatcagttatatagcaataagtttaaaatcagtccagaatgatctaaataggaaaaatataataaaacttttgagtgatttactctctattcatatgccacattattttatatgtgtaaaatctcactaaatgaactcaaagctcctagaaccaataggcaagcaaagcaaggtcacaggatataaggtcaacatacaaaggtcaatcatgatcctacctaatagcaaggaagaattggaaactgaaactacaatatagatatagacagagatataagttgatagatagctagattatcaattagaatagcaccaaaaaatgttgatgaaaaagttaaagattttaaaaattgagagatacgccatattcatagactgcaaaactcagtattaagctgccaatttgccactattagatctacacataaaatataatctaaatcaaaactccatgaagtaaatatagacaagctgattgtaaattttgtataccaatttgtataacagctttattgataatttccccaaactggaaacaacaaaagtgtctgtaaactctggcatatccatacaatagcaaactactcagcaatgaaaagttataaactactgatttatgcaacaacattgataaatcttatatttcagatcaattgttttccctttaattttagttctctgatagattcaagagaaatagttaacaagttgtctttttatttcttcctttagaagtgagagcaaagattctttccagctttccacatctttgaattgaaacgataagcctctgtcaagttttaactagtcctcctttacatgttcctttatttatagaaatatttcaagtaacagcttttgttctctccagttaaaaactttgtgtgattttcatgctgctaaaaagacacatgcacatgtatgtttattgtggcactattcacaatagcaaagacttggaac

SEQ ID NO: 316314 - DNA, 4001 bp, Homo sapiens
ttgcagatgccatttttggagaaaaacttacatctatgtgtgggtattaaaaaacctccctgacatacactgacatctatgattctatatttagctgcgagggtgtatgtatatatagtttaaaaagatacacactaaacctaacaatggtgggaaaggaggggagagatcttggtctttcattttacttcttgtcttggtggcttgcatttttcgcaagggcattgaaaactttttacattaaataaaaaatgaagtgatgagctttaaacaactgtaacaacagctcttgagtgcccttgttaatttcttgattgactgttttcaccccacttagtacaacaacgcagccacaactcctcagtccttcccagtctttggaaggctaggagagaaaaaggcgtggcttgcagggttttcttctagctagaggaaaacaggctgtaggcgccctttttttagctacaatcccgagagctcccacgtgtcaggggtgcgcagacggtaggcgcggggtgcaggactccaattatcaattcagccgagcccagcgctggtaaagggggcgtttagctcgcccgtttcctccctcctcaatccccacacagtcagtttctcggtccaagttttactggtgcggcccagccctaccgagagtacccgaatacacgtctgcagaggacgcgggcattgggccgggtgagctacgatgttctaacgatcagcaaatgccaattaatctgttaattgtctattaacaattattactcggtaaatgtcaacccagacctacacccaaagtgggcttgagggagggtggacgaagtgtaaacattttttcttttttttttttaaatgagagatgccgcccgcctctccgggcctgcgagtgggctggcggataccggagtccctgaggtcaccggcggaggtacgtgggctgtccctgggcttaccttacagggaaacaggactgccgaggccaccttctccatagccaggttcctgatgctgggcgtcagggcgcccctgcacgtcgggcagcagctcaacttctggcggcattggttacacaccaggtgcccggcctggcactgcagaataggaggcaggacatagtcaaagcagaccggacactcgaagagcgaggtcagctcgtggtgctgcggggacaccgggccggccccgccgccgccgccggggcccgagatcaccgccgccgcggcgggcaccgcggacgagccggggcccgcagccgagatggtggcggcggccgggggcgcagccggggacggagtgtgctggggctgcggcggcggctgcttgctgcagggtttattagcgctggggccggtggaggacgggcggctcatcgcgctccgaaccaaccatggaactgcgggcgcctgcctgccgcggggccgcccgggtcaaggcggtgcgcgccccgcgggcagcgagctccgaggcaacgccacggcgcccagcccaggtccgggcggcggagacgctcggcgcccggcaggcggagggctggaccgcgctgatgcactccgcagcccccggcgttccgagcacgcctccgcgtcggaccccgcgcggtgccctcctcccggcggcgtcccgggccccgaaccccagcggtgcgcagagccctggcccacccgcttctggaacagccgctgacgcaagccccgggggcgcgcgcggacgtgacgcctggacacgtgtgcggccgcccaggcgcgcggggactggcagagccaccctgcgccggggcgctggctccgcccggctccagctggcagcgcagggggccgcctagcgccggcgcttcctgctcgggctgcgggccgggcctgcgccagtgagcatgcctggctcgctgcagccccgcggggttgtcttttctgggttgaggaggggggctactctcggggaagcgtcgccgaagtcctctggccacaccccggggtgcctggctgacgcgtccctcagctcaaacgagaaaggcaacttcaggcggggcgggagcgtggacggtgggtgggaccggacgcgggcgggcaggggcggggcgcgggcgcccctgcactagtcggaaaaaaccgagaggtttctcttctcagggctgagtcaccagcacgcaggagaagagggcgaagcggccacccgcgttctgtgttcggagtcaggacgagaagcattgggtgggagcagggcgaggggctcgagttgggtctgcagcgggcacaggacctagttttgtacagttaacggtggggttgagtaaagaggggggcggtggggaggatgtaagctccctttattcctttcccagcggaccaggaggaagcttcgttgaattgagcgcccctggctcgtatagcaggccgaggagggagctcatgggcagcgttggctaagagttcgagatcatctagaaatgtcagaaacgtaggttgggtcgtgaggtctctgaagacagtgggtgaaactccagtgtaaggcgctgcgtccgcttggtagagagccggccgaagtccgagtctttgttgcgaggcgtagggccaccctgcgcgcccagcagaagcgctagagggcacggttgcccggggtgaaccgcatgtccaaatgtaactgtgtgctccgagttaaaattgtttttctgcagactttgcttgagccaacgattccggaattggggaaagggttaccttaggtagaaatcggaaatttataggagacacagaggtaaggaccaactgttaggactgagtgaaaaatggttccctccaactgtaaaagtggaaaaaaaaatacctatcttataggtggggcagtgaggagtaaatgagtttaatatatttcaagcttttaaaacaacctcgcccatcataagcactgtttaaacattagctcttatcttttaaaaatattagtggatgtttaaaatgaatgaatacaatttgtccaagaaatatggcgtaagagcccagaagaaataaagtttaatcttacaaagggcttctgtagaaagaatacatgcatggaattgatggaatttggtataaatcttgaaaaaacttaataggtgtattcaatcgttcagtaaatgtttcctgagcatttatcatgtgtcagctactgttggagctctgagaatggttctcatgcagtttacattctagtaagagagcaaggcccaataaccaagcactcgtgggagaagaaggatttcagataccacggggtgggcaggcattatagcaggagctaaaaagcacagagtgaaagcatgtattctgggattgcattgggacttggaggggatataacgggagtgtaggggtgtggcgttagcacaaggggagcctcaactggcttaataagacatttacctcaatgataggggtaaaccactgtagggttttgtttgtttttttaagaacacacaacaacactaggttttgtaggtttttggaagctctttagtaacatggctgaacctgagtttttggataggtagggagcataaaataataactaatgttaattgagtgcccactgtatgttgggcatggatagttttaagtatttatcataactctctgtgatgaatactactgttatctccattttacagttgaggaaaccgagacataggttactttgctcaagatcacacagctgagaatgtgggaacacgctaggagcccttcttaactactagtctgtatgcctctaaattatgcctgattcctacttacagtcttgttaaacagttaagattagcacactcaacagagtcagaaaacagttgttcagcctataataaagcactaaattttgtgggcaaactttacataaactctttccttagctggtctagagagaaaaattaaatcatgttctatttatttcattttcacctttttatgacacaaaatataagtgataacacaaaaatcacctactgttttactgttattggaggaaat

SEQ ID NO: 316315 - DNA, 4001 bp, Homo sapiens
cacacagctggaagatgtctaggagcagtgttaggcacattggtcccccctgctcaatacaaaccaccctcactttgggaagtgatgaggttttctagttccgatctggagtgagaatcagacggaggcatatcatggtatcccaatcatctagttctggaatttccctagagggtaggggatgctggtatagtaagggatacataaacacatttatatgggaagaagatccagaggttggtacactggggagtctctgtctctgtctctgtctctctttctctctttctctctctgtctccctctctctccccgcccagtgctccagaggtaccacactagaggaaagaaatgaactatatgcatcttcttacgttatataatcggagtatatatgtcaaagggatagtcactggaacatttttccctccttatcttccctcaacttttgtcaaaaataggtctagaactttcacacaattatccatccttatttaaaatcaaaacctggattgatcagctgatggctgcagttctcacgtctttgcccaggtcttctggcgtctctgaagcacaacgtgtgacaatggcacaaaaacgcaggaagtgactgttgaatgcacagaggttctgcagcttccgtccattttcacacaatttccattttagattctgagcagttctccctccccatgcgctatgaaatagaagggtctggctgaatcagccacttgaaattaggtttcttccctgcaggggattaggaaccgaggtgcggttcttcttcgcactccacaccacaccccgcaaccctagaaatcaggactttcctggagaaagacccagcagggacccaggacccgcagacggtgcggggaactggtgcctctgcaaagcccagcaatgcccttgaccaggccaggagaggcgcgaggcgaagcagagttgtccccgaggcgtgttgaggcagctagggcagggcagcgattgcttcggaggagaaagggaaagaaagtcccctggtccccgaagtctcccaaggtcaattcccaggggactccaaagcagcgacggggctctgagatctggcaagttctaggagtcgagcgaggggagcgagtgtcttacctggtcgggctggctggtgtagttgaaagagtagatgttctcggtgctgaggttcaccaccccgctgtagacatgatcgaaatcggcgcccctggcagcgtcgaaggggtcgcggcgcggtgccgggggctgcctgggggatttcgccgggtgcccgggcgacgccgccagcaggagccagggcagcgcgcagagcagcgcgagccgcaggcagccgcgcatggtgggcaccgcgcccgggctcgaaagcggagccaccctggggagggggcgagcgcagagagggtccttccaaagcccggtgcagggccaggcgtccgcttcagagccgagcgggtgatgcctggcgaacccagccggccagggctggcagcgtgctgacgaagggccgatcaaatactgatgctgccgcctggggtctccactggaggtcacgggtggagagtagggcggactggagaagtggagatgtggggctgctgattttcctccggcttctaagtcccccgtttctcatcgccgagaatccccccacttacccagccagaatttagaccgatctcttctccctcaacctcaataacagcaataataaaaaggcattggagtcattaaaaagaaatacccgctagtctcgaaaagtcaacctgacgccacatcgaggaggaaattcggtctgtttcaaatacgtgtgcaccctggctgcaggagaagaaatagaaagcaaaagagcccgtcccccaagagggtgcgcgagttcgctttcccaggctgctacctgcagagaactcttgcctgtctgaacgataattactctctattctcccctctctaatagaacctctcctcagacacctgttttatttctttattacctcctactctccatggagagtctcacgtcatcacgttctctccctcaccatatgtgtatgtatgtaaatatgtacagttaaaaaaaaaaagatatggtaaagagaacaatttccagcactgcctgaagtctggtcccggaagttgtcaaaaaacgactcagactaactagatttatgcagaaggcatttctttccaccccagcctcttacctactttaccattgcaatgacttcttccagattctgagagaaaccccaggattgtttttttaaaggcagaaaccacagcctatcgtaaaaaggaaatacttttctgataaaaattaggggattagatttaaagagttaaagaggcaggtaaggagcagggtgagaatggggccatcagaagaccttgcagaacattgaacaatcacaatttacgtgtggaagagaactcactgttttatttcagcttcattactgtatactataaaagaatgtaattgtgttcaacctgaaggaccatttaaaaagaagtcattaagaaggaaaagatctttttcaaaaatttaagattacagattaaaatcctagtccttgccatctttaaagagatagatttgtttttgtttttaccttgtctaattcctttaatttcttaaaacatcaagaatgaatgcaatacatttgttgtaaagttttctgtgaaatcagaaaacaatgctgatggaagattaagttagtagactccttattaggacaattttcagttttaaagttttgaatgttcttggccaggtgcagtggctcatgcctgtaatcccagcactttgggaggctgaagtgggaggtgggctagcttgaggccatgtgttcatgacaagtctgggcaacatgatgaaaccccatctctacaaaaaatacaaaaatagctgggcgtggtggtgcatgcctgtcgtcctagctacttgggagttgagttgggaggactgcttgagtccgggaggtcgaggctgcaatgagccgtgaacaccccactgcaccccagcttggatgacagagcaggaccctatctcaaaaggaagaaaggaaggaaggaagaaggaaggaagaaaggaaggaaggaaggaaggaaggaaagaaagaaatttcttgaaaatatatgggtatatgggcaaaaatactaattcaaaggagagtctgggggtaaaacttcaaatagaactcactgtttttgaggagcataacgaaataatttcatccagaatttgaatgactttaaactgttgtattcaaaatatctgtgcctcttttcaaagttcaacaacatttcataaacttgaaatctacgaaggtcctggaggttagctggtgtgaccagttaaaggagtctctaggattatggagttctattatggcgttctttttaaacactataagagatgaggaactggttctttcacaagtcaacaccttcttttgggggcaagtgtctcattattagaaagacatttcatattcttagttgaaatctgcctgtcttctactcacttgtactagttctgccctctggagtcataggaataaacctaatacttcttccacatgacagacctgtgggtatttaaatggtgctatgacccttccttcaagattttatctcaactttacgcaactaaattggaagcaaatggaacagatccttcatcatagcatgaaacccaaaatatttattttaaagccatttgtatggattatctatacctaacaatttgagttatatattacaagtcactctgtaatattatctaatccttattctagccaaaagtcattcagtgacctcaagtaattaacctctcaggatcacaaggttgttgtaaggataaaagggagaatgatgtatttgaaagtacattaaaaagtttaaagtgttgaatgaacaaatactgttatggtgtgactgctagttcaatagctaaaaaataaaatgtggtccattaggtaggtggtttt

SEQ ID NO: 316316 - DNA, 4001 bp, Homo sapiens
ttggaaagtcaaatgaggaaacatactgcaaagcactttatggcctaaaaactgcaatacaaatatatcaatcggtattttgttgttgttgcatgagcaatgttcaacatacaggttaagttacacactaaacatagaattttcatttcaaagtaaaccattaccattattaaaaattgatataaaaaacttgccttggattgatttctctttccacttctcatgctaaacttctccttcatttcttctaaaattatcttcagtttcttttcttcaggtgttcctaagtatttttggttcacatgaagatagcaatgccatttagctgattcaaagccccagtggcaagttcttttgtcaggtgatctgtgagaatgcatcacaaacgtctggggtgcaaacattccacaacactccagacattgaatacacggagcatcaggctgaacataaaactggggtgcaaataaaccctgacatttgcctaggcattcatgctccacttcaaaggcactgccagtttcctttaactgggccaatgagcttttagcaggaagtacgctaccattttgaggaaaagttcgtggccgcaataaagcattacataatctttgtgcatcagttaatgtaatcagcccacaggatggggcattgaatggaagtatgcccagtacctttaagatatgaagctggtctgaagtacaccttgaacaatatatgtacagttcatcacacactgtatttatttgctggagtgtaaattctcggagaacagaatttaagacttggggcaaacagagtctcttttctcctccaacttgaaaacaagaaatagattccccttccaacacagtctgagtgagttctgtggagctatctgaagggatgagcaatgggccaggaagaacctgaggtgatggaagaggcagaaatacagtaggcgacatgctttcttgggaatgccgagcagaaaatgctgctggtccacccagcgagctctgactacttaaatggaattgtgccaatgtgtgtttcaaactgggatttaaatgcaaagtttcaggaacagaagtacaggttcgcttaacatgctctccatcagtttccactggtgcttctccatagtcatccaagtgttccttcttaactgttggcaccttgtttatcgtttttccatttgcatgaatgtccgttatcatttttttcgctggggggctgccatcatctcccatcccattcagttttttagttgagccctgaaccaaggagaaatttgtctggaggttttccatggtacactcttctgttaaataattaagtctgagattagcatttctatttagttgcttatttgaaaagaggaaagtaatgaatggatacaaatgcctatcgtaacttactctcaaactttcaaagcgagagccccttaaattaataaattttgcgacttagttttggttctccttataatctggtataatttcactacaaatcctataaaattgttcgttttgcctctaataataaagaaaagaggcacacctctgaggatgcctttgttttcttgaattcttcagatatacatattaaaataaagttaccaatttctcaattaaagatgtccagggtcaatgcaatggtctggtttgttttaaccaaaacacatgaaaagtttatgccattccttgtgccataaaatctagactcaaacacaagtcaaaatgatgcaaccaaatttaatctttaccaccaaggaaaccaaaaaggagggcagagggagtatttcctctaaaaatgatggtctgctggtctgtgctgaaaaactgaagacgtgtgtaaatcctcacaccagtaagaacagcctccgacttaaaaaattgcccagttatcttcaaggattatagttcattcttcttttaattaatctggaagaagagaaggggggttggggaagagttacatttgaatttgctccagaggccaaagggccaatttgaaaccagtttcttttatttttttttttttcttttttttacggagtctcgctctgtcgcccaggctgaagtgcagcgatctcggcatactgcaacctccgcctcccgggttcaagcaattttcctgtctcagactccggagtagctgggactacaggcacaagccacgacacccggctaatttttttgtatttttagtagaaacggggtttcaccatattagtcaggctggtcttgaactcctgacctcaggtgatccgcccgcccgggcctcccaaagtgctggaattacaggcgtgagccaccgcacccggccgaaatcagtttcttaatcttaaactgagttcagtttaccaaggtgaagcttgagtgatttctttaaatctaacaccagtttactagaagaacattcatttaaataggaaagcaatttggagttgcgtaaagcgagcaataatataacataaaaggcctttcgagttcagaatatgaagactcttaagcagatcatctcaattagtagtaccggggctttctcagctatgccattttaagggagggaaaaaaatccattacttcatctcctatttaaaaacaaaacaacagtttcatccaaaaaaatcagataggagttaacatatctaccatatgtaactaagttacaattttaagtggattaattcagctagtccgtgtacactatttttctggaatgactgcaggcaaaaattaactttctcttaaaaaaaggttagcgattttacttaatggaagccaaaagctatagactccacgcctgggaatctccatccttcaacaagactaatccgggacaaaaagcacaaggcagacaaacctcacaaagaatgcaaatggaggaagagggaaaaagaaaagactctttttccacttccttcttgagagaaaagccaaaagaaatccaataaatagaaatttttgcttcccaaactctcagcactttaccttaaaacagacccaaaggattaaggaccaatgccaccaaccatcgtacagactttcgtccaccacaggaacacaccttactcaacacaggccaaggaagagagcaagaggcatgacctagaatgggggagcccctaaaaccctgaagtcctccgcccactcaaagccacccacctatctctaacccggagagagggagaacaagggacacgggaagcctgggggtgggtgtgcaagggggtggagggaagtaaagggaggagtccccccacccccaccggcgagcctgggataaccccaagtgccctcccaacaccgcccccccgcgggggccgcgggaaggactgtggaaatccacccccccgcgcaccctctccctgggaagttctcgggtgtcacctcagcgcccctaatgctgcacctccccgcgccagccccgggccagaacgaagaggacaccagggcagtttaggcgccgggcgcggatccctgcgccgccgggggctgacggaccgggtcgagaccagggcatccccgcggagcgctgctggactgggggaggggggcggtgacgggcgtccgggtctccggggtccccgcggctcccgtcaactacagcgccctgccctgccggcgcccaccgcctggggccaacgaagcgtgatcagccgtggaacacccgcctagcgaccccctctggccccgaccccacccgggacccgcgcatccaaaccccctactcgggcctcggtgcccgggtaagctcgacgagctttgtgaattccccaccgcccctgtcgccgccgtcgggctcctaggagggtgagcgcctctggcctcccgccgcctccgccgcgtcgccgccgtaagccggagccgcacctgtgcccgccgccgccgccgtcgccgctcgcccgctcccttcggctgtgccggcgcggctccgaaccccacacacatcgctacacacagccctctgacgtcaccgagtcctcggcccgcccacgtcactgcggagacaca

SEQ ID NO: 316317 - DNA, 4001 bp, Homo sapiens
aggggggttggggaagagttacatttgaatttgctccagaggccaaagggccaatttgaaaccagtttcttttatttttttttttttcttttttttacggagtctcgctctgtcgcccaggctgaagtgcagcgatctcggcatactgcaacctccgcctcccgggttcaagcaattttcctgtctcagactccggagtagctgggactacaggcacaagccacgacacccggctaatttttttgtatttttagtagaaacggggtttcaccatattagtcaggctggtcttgaactcctgacctcaggtgatccgcccgcccgggcctcccaaagtgctggaattacaggcgtgagccaccgcacccggccgaaatcagtttcttaatcttaaactgagttcagtttaccaaggtgaagcttgagtgatttctttaaatctaacaccagtttactagaagaacattcatttaaataggaaagcaatttggagttgcgtaaagcgagcaataatataacataaaaggcctttcgagttcagaatatgaagactcttaagcagatcatctcaattagtagtaccggggctttctcagctatgccattttaagggagggaaaaaaatccattacttcatctcctatttaaaaacaaaacaacagtttcatccaaaaaaatcagataggagttaacatatctaccatatgtaactaagttacaattttaagtggattaattcagctagtccgtgtacactatttttctggaatgactgcaggcaaaaattaactttctcttaaaaaaaggttagcgattttacttaatggaagccaaaagctatagactccacgcctgggaatctccatccttcaacaagactaatccgggacaaaaagcacaaggcagacaaacctcacaaagaatgcaaatggaggaagagggaaaaagaaaagactctttttccacttccttcttgagagaaaagccaaaagaaatccaataaatagaaatttttgcttcccaaactctcagcactttaccttaaaacagacccaaaggattaaggaccaatgccaccaaccatcgtacagactttcgtccaccacaggaacacaccttactcaacacaggccaaggaagagagcaagaggcatgacctagaatgggggagcccctaaaaccctgaagtcctccgcccactcaaagccacccacctatctctaacccggagagagggagaacaagggacacgggaagcctgggggtgggtgtgcaagggggtggagggaagtaaagggaggagtccccccacccccaccggcgagcctgggataaccccaagtgccctcccaacaccgcccccccgcgggggccgcgggaaggactgtggaaatccacccccccgcgcaccctctccctgggaagttctcgggtgtcacctcagcgcccctaatgctgcacctccccgcgccagccccgggccagaacgaagaggacaccagggcagtttaggcgccgggcgcggatccctgcgccgccgggggctgacggaccgggtcgagaccagggcatccccgcggagcgctgctggactgggggaggggggcggtgacgggcgtccgggtctccggggtccccgcggctcccgtcaactacagcgccctgccctgccggcgcccaccgcctggggccaacgaagcgtgatcagccgtggaacacccgcctagcgaccccctctggccccgaccccacccgggacccgcgcatccaaaccccctactcgggcctcggtgcccgggtaagctcgacgagctttgtgaattccccaccgcccctgtcgccgccgtcgggctcctaggagggtgagcgcctctggcctcccgccgcctccgccgcgtcgccgccgtaagccggagccgcacctgtgcccgccgccgccgccgtcgccgctcgcccgctcccttcggctgtgccggcgcggctccgaaccccacacacatcgctacacacagccctctgacgtcaccgagtcctcggcccgcccacgtcactgcggagacacacagcttcccgcagacgccgccgccgtctccggccgcccgggggagagcgagggcggcggggagggggaggggaagggaacggagccagcggcggcgccgcgcgcgcgggcccgccggcgtcgtcgccgccgccgccacttcgcggctcccggccccctcgtggacgcgcgtgccgtctggcctattgtggctcctcagagcgcccccctggccccgtcgtctcgcgcgcgtgcccctccccccaggcgcgcgcccggcgcttctggccccgcgcgccgtctgggaagctggcgcgcggcgctgtctgcggtgcacccggcgcagacaggatgttccctccccaccccaccctcaccgccgccctccctccttccttcctctagtcgcccagccggctgtctggggccaccgccccgcccccgccccacccgccgctctgtggtgatgggccagacgcgggggcgccctggccgctcggacgccgcgcagcggggaagagggggcagggcagccgcgcggtgcactgtgcgcgaccccagcagccggcagggcggaggcagtgcccgcccggcagagtgccgccgcccgaggtcaggcacgggcgaccctccccctgcggggccgcagctgggccgccccgccccggaggcagccgggcggcggccgccctgcagggcccccggggccggctctgctccccgcccccgcgggacctccctcctgggctgcccctcgcccccgcggggcctcctgcccgagggccgcccagccagctgccggcgctccgccccgccccggcggccccggcctcgcccgggcggcctccacccagacgccttcccctggctgacctccatccgccatcgggccgggcgggaggggtggccaaagttccggcaaaaccgagagcaaacatttctgtccctactccccagcctcctgcctccaccccaccaggctgctctctcggttccagaagggagctataaattaaaggtttttacagtgtttactgagggtgtttttttgtgtgtgtgtttttttggagagggacgagacgaggtagggaagataggactcaagagctttccggctgtgaccctctgaggcgtgtagggtggtcttcctggttcccagggtagccgattagcatattgaactctgcagagctgctccgtcacatttcgaaacaccaagaaatccccttttctccaccccaccacaagatcaggaactgaaatagtccaccgagtagcagtgcacaaaattcaggagactcgagctttgtcccttttttcccccccattttcgtccaatttcttctagttttactgcttcgggttgttcctgtgggggcccacatttgcagtcggccggctggaaatactcttgtgctcgtactttttattttttttttcctcacaacaggcctccgaaaggctcacaagcctctcaatccccaccactccccgcacccccacccaagttcccttccttaggcctccaccgccgagctcccaggtcgtgccccctctccaccccgcccccccaccttttcttccttcttgactgcctcctttcctgaacatgaataattccacagcactttccatctgttattgccatagagacagaagcgtggcaaagataatgatgttctgtgcagagccagtgggggaaaaacagcatctgcgagtctagggggatagattttctaactgtgagaatattcagaaggcctagctgaagatctgatgtgaagactggacagtcctgaaacttggcaccaggtcaactctcagcacctggctcctgtgtctagccagaagtaacaatttttagaaaccaacatgactggttaataaaaaagtaattccaaaactgcaattattaataaatgtttagcagtcattttaccagccataagaataattactt

SEQ ID NO: 316318 - DNA, 4001 bp, Homo sapiens
agtaagtgcccactaattggtagctattatcattttctcaccctcccacctggaatatgcttcccaagtccaccatatgttccacttccaccattactttaagacttaatgcaaatggcaactcacccaattcctagccaggtaagttcagttcagtagaaccaacactgatggggcaacttctatacacaacacaccatgccaggtattggggatacaaaaataaataagacatgcccctgaatttaagttcacagctttaagggagacagaaaagaagcagctcatttcaatgctacatggtaagtgcagtgacacaggatgctgtggaacagaaggggtgagttaaccatcacggagggccctggcggccaagatgaggagtctgagctgaattctgaaggcagtgagaagctattgaaggaatttaagcagaggggtcaaatgcacagatctatgcttcataaaagcatcactttagtagcaatgtggaaaaagaacttaggagagtatgaatcatccaatcaagaaatggtaccttaacaagacagtgcaggggagggagagagaaagaaaggatggatttctaaatcatgaacaccaaaggccttaaaattgggcattgggccatgtccaatccttcgatgtttagctattaagggagaaggaggcaacacagaggtcattgtatccatcacattttagaaatcaactctctcttagggcacttatgacaatttaacttgcattgtggttttctgttgtttgttcatgtgatcaatcaactaaaatttactgtccacttaaataccaatttaaatacttaaataccacttaaatacttgggtgaaggtttcagtgacaaattgttgataagaagcatcagcaaagatcaagggaaagatataagctctggggaatggtgtggttcagctggaaggtgtggcaggaagaagaagatgtggggaactcgacttgagactcaggtggggtcagactgtatagggctgaggctgaagagtttgagccctgagtggtgcacatgaggagacactgaaggttttaaacaggggagagaggaacagatgccatcacaggggagatctcagaatgtcttatttgtctctcctttgggaattcctgggcctcacattttctgtctgggtttcttgttcattgttgattctctcccctctgatggggcttgtccccctgttacaaggctgggaaaccctcctgccactctctagaagcaggaaagaaacccaagggatggtgaaaacttcatgttgagtgatcatggatggcaaagaccctgggtgcacatagtttctggataaacactttagtatggtttattattattattatttcttaagggatcagctctccatttctgggtagagccacttcaattccatatctacagaatgcatgtaactaatgatcagcagggagaagataaagaaaaaagaagaaaaaaaaatagcaaacaccagggcattcagaaatccttttggcttcagaacataagagttttttcagaaataaatttaccttcttacattggtttgattcagaattaaaatgagttcatattatctgagtcctcactgtgactgtctgtggaagacctctcaggatggagtttggagttgtgggggatcccaggattcaaaatccaccacaaataatgccaaaggttttctgtatatgaacagttaataatggctataatattttggctataatattttctcattgaactggatgaccaaaatagactttggagttaattacatctaaagggtgcgctgtaatgtttgcatccagcccactgtctggggatccccgtgctcacaggcctccatcacagaccctggcacatcctgagcctacctgctgggctgcctcatggaagagctcctgcacctgggacatctgggtcattctccagcaagcagggatcctggtgatctggacagggagactgctctggaaggtaacagcatccttggtcaggctggcttctcctctcctctccccttgttgtccatcctttctctctactagaattgttcaaactaccaggcgaggccctggctgaggaagaaaccttgtctacctcatctggaaacttggccgggttacctttttggtacccaggtagatcccgctggtccttcagtgcccacctgtgctcaaaccttgctgccctagaacctcaggcactcccagctctctccttccctgagctccttaaatacgtgagggtcagagccagctgccctgctgcccagcccttgaggacacagagtcacactcctctcccaccctcaagtgcctcgtgaacccctctctccaggaggagggcatcatgacgcactagacctggctgcaggtggtgagtgaatgtagctgcgccctgagcagaggggagaggggccatgaggaggctgttttggggcccttctggagcagggccggagaagggtaggagattgaagagggtgagtgagaaaaggctggacaggactagggcagctcctcaacccacccccaggcaccctccccttcgcgctggacctggctttccttgaggggaggagggagtttgtccccttgatctgtgtggcgcctctccccagcacagtgctgcaaggtagacggggctcaggaccctttggtagaaggaggaagggggaggaagagagcgagggggagggttagagctgatcttcctgggaagaaggcgactaaggacagcagccagcgctggcgaggagggaaggcgcccggagcactgagtggggggttgggagaggagggttagcccagtgggaagctgggaaggctgggggacttggtgggctgcagtcctgccaaaagccgggtgacaggtagggagccagagcacccgggtgtccccggctgcccgcgccgcacagagcaagggaccccaggcctccgctcgcccttcccgccgccccgcggcctccgcaggccgccccgcaggcctccgcccacattcacctggctcctccgcggagcccctaccctcacgtttgggccacgctgggacccgggccccttggcaccccacgcagacgcggacccgcaccccaagtactggggccaggcccgtgtgccggcgcgcgggtgaccggcggtaggagaggatccacctgggcggggaggtgggggcaaaggtgaccccaggcctggctcctaactgcgggccggggagaggaactgtcccgagaccaccctctccaccccccacagcccttccgccctcacctgctcctgggacagccagctcccagcgcccggcccgcccggtccccgccccgccgccacgtggctgccccggctcggctgcgcgggtcccagctgtcccgtcccggcgggggcacccctgccacgccagcaccgggagtctcgggcccaggtggcgaggaggcgctgcagaggctttccctccgcaagggtcgggccttcgcgcctacctggacaagaacattcacctgggtaggggcagggctgggggaaaacagggagtaggggccgcaagcccacaggctcgaagtgaccagccactgcctctcccccctcgacagtgcaaccagcggaaatgcccagccccgggaccaggggactagggacaggagcctaccctgtgcggctctgaggagtggctgtgagcactgcacgcaggactgagaaagcccgggataagcccggagtgcagggaaacccgcagccccctgggcagatgtggagaagaatctggacaagctgaccgagaccccggtaccgggggtctccgtgtgtgcctggctgcgtgatcaggtgaccccagactctgagggcgtggaactgcttttgccaggaaagcgctctgggcatgctgtgtaggggtgaattacccttacccccttcaccaagacccagaactgcctttcctaggggtgaagtaaggtttccagggcctcatgttg

SEQ ID NO: 316319 - DNA, 4001 bp, Homo sapiens
attatttcttaagggatcagctctccatttctgggtagagccacttcaattccatatctacagaatgcatgtaactaatgatcagcagggagaagataaagaaaaaagaagaaaaaaaaatagcaaacaccagggcattcagaaatccttttggcttcagaacataagagttttttcagaaataaatttaccttcttacattggtttgattcagaattaaaatgagttcatattatctgagtcctcactgtgactgtctgtggaagacctctcaggatggagtttggagttgtgggggatcccaggattcaaaatccaccacaaataatgccaaaggttttctgtatatgaacagttaataatggctataatattttggctataatattttctcattgaactggatgaccaaaatagactttggagttaattacatctaaagggtgcgctgtaatgtttgcatccagcccactgtctggggatccccgtgctcacaggcctccatcacagaccctggcacatcctgagcctacctgctgggctgcctcatggaagagctcctgcacctgggacatctgggtcattctccagcaagcagggatcctggtgatctggacagggagactgctctggaaggtaacagcatccttggtcaggctggcttctcctctcctctccccttgttgtccatcctttctctctactagaattgttcaaactaccaggcgaggccctggctgaggaagaaaccttgtctacctcatctggaaacttggccgggttacctttttggtacccaggtagatcccgctggtccttcagtgcccacctgtgctcaaaccttgctgccctagaacctcaggcactcccagctctctccttccctgagctccttaaatacgtgagggtcagagccagctgccctgctgcccagcccttgaggacacagagtcacactcctctcccaccctcaagtgcctcgtgaacccctctctccaggaggagggcatcatgacgcactagacctggctgcaggtggtgagtgaatgtagctgcgccctgagcagaggggagaggggccatgaggaggctgttttggggcccttctggagcagggccggagaagggtaggagattgaagagggtgagtgagaaaaggctggacaggactagggcagctcctcaacccacccccaggcaccctccccttcgcgctggacctggctttccttgaggggaggagggagtttgtccccttgatctgtgtggcgcctctccccagcacagtgctgcaaggtagacggggctcaggaccctttggtagaaggaggaagggggaggaagagagcgagggggagggttagagctgatcttcctgggaagaaggcgactaaggacagcagccagcgctggcgaggagggaaggcgcccggagcactgagtggggggttgggagaggagggttagcccagtgggaagctgggaaggctgggggacttggtgggctgcagtcctgccaaaagccgggtgacaggtagggagccagagcacccgggtgtccccggctgcccgcgccgcacagagcaagggaccccaggcctccgctcgcccttcccgccgccccgcggcctccgcaggccgccccgcaggcctccgcccacattcacctggctcctccgcggagcccctaccctcacgtttgggccacgctgggacccgggccccttggcaccccacgcagacgcggacccgcaccccaagtactggggccaggcccgtgtgccggcgcgcgggtgaccggcggtaggagaggatccacctgggcggggaggtgggggcaaaggtgaccccaggcctggctcctaactgcgggccggggagaggaactgtcccgagaccaccctctccaccccccacagcccttccgccctcacctgctcctgggacagccagctcccagcgcccggcccgcccggtccccgccccgccgccacgtggctgccccggctcggctgcgcgggtcccagctgtcccgtcccggcgggggcacccctgccacgccagcaccgggagtctcgggcccaggtggcgaggaggcgctgcagaggctttccctccgcaagggtcgggccttcgcgcctacctggacaagaacattcacctgggtaggggcagggctgggggaaaacagggagtaggggccgcaagcccacaggctcgaagtgaccagccactgcctctcccccctcgacagtgcaaccagcggaaatgcccagccccgggaccaggggactagggacaggagcctaccctgtgcggctctgaggagtggctgtgagcactgcacgcaggactgagaaagcccgggataagcccggagtgcagggaaacccgcagccccctgggcagatgtggagaagaatctggacaagctgaccgagaccccggtaccgggggtctccgtgtgtgcctggctgcgtgatcaggtgaccccagactctgagggcgtggaactgcttttgccaggaaagcgctctgggcatgctgtgtaggggtgaattacccttacccccttcaccaagacccagaactgcctttcctaggggtgaagtaaggtttccagggcctcatgttgcagaaaaaaagaaccctaaattaacatacagagagattaaattatctccattcccaatctggcatatttcctaaaccttaaataatttgagaggcttccatgtgggcttctgagaaacaggagggcagctgggagaacttcccacgcccacaagcctttgtgtgaaaatccctaaaaatagaggttgttcttctaaaaacaaaagggaaggctaagccatgggaacactgacagaacctaacctctcgcttctgctccagcaaagacgcgtgtgaagatatagaacatcatatttgccatttttaccattttaactgtacagttcagtggtattaatcacacacaatattgtccaaccatcatcgctatttccaaaactttcatcgtccccaatagacactctgtacccactaagtactaactccccgtttcgtctaccctcagaggtaactcccctcatctacttcccgtctctatggatttacctattttgtgtatttcatgtaagtagaatcatacaatacttgtccttttgtgtctggcttacttcactcagcataatgtcctcaaggttcatccatgttgtagcatgtgtcagaatttcattcccagcaaagaaatttttaataacccatctctgccagaaaaaaagaccccccaaaagttacagattaaccatctgtgaacaaaggatgaatgggcggacaggctgacacagtcacgttactggaatccattatgcagtcaccgcttggcatctgcaggaaattagttccaggccccctgaccaataccaaaatgcgtagatgcttaagtccctgatataaagtgatgtagtatttgcatttaacctacacacatcctcccacatactttaagtcatctccagattacgtataatacctaattcaaggccaggcacagtagctcacacctgtaattccagcactttggaattacaaaaattccaaatctccaggccaaggtgagaggatcacgtgagcccaggaattcaagaccagcttgggcaacacggtgagagcctattcttttccccacaaaagaaattttaaaaattagctgggcatggtggtgcatgcctgtagtcccacctacttgggaggctgaggtgggaggattgcctgagcccaggaggttgaggctctagtgagccatgatcataccactacattaaagcctgagtgacagagtgagatcctgtcttaaaaaaaaaacaaacaaacaatcaaacaaaaaaaaaaaactatgtaaattgttgttatactgtattgtttagggaataatgacaagaagaaaactttgtacatgctcagtacagctgcaaccatgcttttttttttaacca

SEQ ID NO: 316320 - DNA, 4001 bp, Homo sapiens
tcatttatttcaaatcatcttggtaggtaatggagcaatggtctctactcttcatgacacacctattaggtaacactaaaagtgcttatattactgatttagaaataatagaagctactctgaatattattttgtttcttatttattttacatggacttgctcaaatattccttggacctgctcatcttcccacaactactaaatgaaaagcctagggctctggggcagaagaatggtgatatttacttcctaggaacagaataaagaggtagcctatggaatacctgatatccaagcagtgagattcagatgtcagtctctgcttagccccactatggggactcttgtccccagctgttctgtttgccatgctgggaggaatcctggcaatatgatagcttctacttcagaggctgctggagtcaggcacagagcccaacatggaggacagagattcctaagggtaagctaattgatcaccttgactttaggcagagttcttaaatcctgtaaaattaaatgtctactcttcctactaaagagattctataacattttcatgataatcctactggacattaaaagaattatgcttttcatgtaatatatcagtcagaatataaggaatgttatgttttattttaattccctatctattacaatagaccaactaacatgagaagagacatagaggtatctgtcctcagtacagtcaaatcttgtaagatttatattgcctcatttcatgagaagtatatacatctttgcaagtagccctaaattctttgggaccagaagagatatcattaactaaaaaaataggcaaaataataaagtaatgtattattcttttaaccctagggatatatataaatgatcctcctaaatattaatatattttaatgttttataatagcttgtttgaaacatacaatgaactgggcttcttacctttgcagctcacagcttgagaattatgcaatctggagtttagccgacacactgttagctagttaggcaacactgccactggctgtgttaacatactgatactggcattgtcactacacctgtctcaaaacctctgttctgttattccaaagaaatgagaataacatcaccttttggcccactgtaagaactcagtaaattttggctatcattactatatcctccccacttacagaattttagtgtaagaattgactgagatgatgagtttagaagtgctttagcgagtatataaatgcaaaacattactattctctgtttctctgtcctatctcccacagtaaactgggaacacatagtaacagaaattggatctattctgaaacttccattggtgttcagcagaagactctgcacacagggagaactaagggcagagtttttatattggtaaagaaagaacaatcacacacagttcttcagacaagaatgcttgccaagtttccctggacattcgaattgcttttttcccccagggaaacagaatatgcaatgaaattcagcaagtccctggatcccaactgaagaactttgactacctcttcctgctgctttgtcttcttatgtaaaggaagcttctgtttagatttggtttcaggtgaattctaaatccaagagagaagcattttaataccctaatacagctcagctggaagctccagagcccaaggaagagagccaaaagagggaggccattcctctcagaggcaggattgaatctaaggactcaccggagatggcttctttggagggctaggtggtcgaggtggtacctcttcaatggagacaggtgaaaaaagagtttccttggactcatttttctggaaaggattcatggctggctccttactctctctctctcctcaagcatttggctttagtaggcagttaggacagctgccagcctactctgaaaagaaggactgggagggggagctggtggcttcagcaactcagtttaactctgtgggtgtcagcttcaatagcttcctgatccagagcaaagcaggaagctatagttaaaaagaatgtgtaaaagtacagcacagcaaagtgaaaacatgccaaagacagaatgaaacaatgctagagaactgattagaaagtctatgtttaagaaagattatctttgcaaaggagtagaagatagttaagaacacaacacctcgagcacagattgaaaaactgattccatggtcaggcgcggtggttcacgcatataatcctagcactttggaaggcccaggcaggcggatcgttttaggtcagcagcctggcccacatggtgaaaccccgtctctactaaaaatacaaaaaaaaaattagctgggtgtggtggcgggcgcctataatcccagctactcaggaggctaaggcagaagaatcacttgaacctgggaggcggaggttgcggtgagctgagattgcaccattgcactccagcctgggcaacaagagcgaaactccatttccaaaaaaaaaaaaaaagaaaaactgatttcagggtaacaatagctgtaatttattgaacatctactattgaaaggttaatatatatgaattacatctatgttgtatatctataacatatatatttattctaattcatattactatccccattttatagaaagtaatgttcccagaggttaagaaatttgttcaaagtacctgtccactaagtggcagatctggaattttcactatgccatgacagctgggaaaagtggagttagtgtcagtcattattcaggtatggaggttacataaatggaatgtaggaatgcagaggattaaaatgcattggagaaggaaagtcatcataaaactgagtttggaagataagaaagatggtgagttttggctgggtgcagaggcttacgcctgtaatcccaacactttgggaggccgaggtgggctgatcacagctcaggagttcaagattagcctggccaacatagtgaaaccccatctctactaaaaatacaaaaattagctgggtgtggtggcacgcgcctgtagtcccagctactcaggaggctgaggcaggagaatcgtttgaacccaagaggcagaggttgcagtgagccgagaccccaccactgcactccagcctgggcgacggagcaagacttgaaagaaagaaagaaaagaagggaaagaaaggaaagaaagaaagaaaagaagggaaagaaaggaaagaaagaaaagaaaagaaaggaaggaaggaaggagacttttgttttcaacatcataaaagttcagctagaaatagcctataagcaattaaagaggtggggctaaagaaaatgagagaaaaggattggtgatatacatttgggaaccattgttcttctttgctaaagtcactccttatattttcattttctcacttcaagattaatctattctttcatttaataaataaaatttaatttgagcaaaaattgtgaaccagttactttctaggtactgttgtgaacaccattttccttaattatacatttagtccttatcagaagaggaacaagaacaaacatcataatgctaggtgcattttatgctgtgttatttttgtcaagccaaagaagtaaaaggataagaaaagagcatggtgcccctctagttgtttgtcaaaagaaaagggaaaagaaaggctagagagctataaaagaaataagaaaaatgaagactaaatcaacaaggtcaggcaacatcagaatgaattattttatttgaaaatacaagagagaaaacctataactctatccctcacaaaatttttactttaactattcaaataatttattgacaaatagggccaggataaactgtcttttcctctctaaactttaactcagactttgaccatatcttctcagcttctattacacccctcatttctactgtctcccaccaacctttacccaaagaagagtccagcttcatttctgactgtggcattaataattaaggtatagttattctt

SEQ ID NO: 316321 - DNA, 4001 bp, Homo sapiens
cataccacttccttcagaaagttgcctgcccattcccccggaaccaggaggaagcaaattctgggccttagaacccgcccagccctttattcctctgcaaggggcccagacctttcctgaccactagaggaacaaagtacctttcccctctgacttccccgcacagttaatcctcaggggcctttggctgaatacggttgcatgaacagtccagcatggggtgtgaagaaggcctagagtagtctgtgagcaatctggaaggttttctgggctttgagaatgatgatatttggccaggtgggcagagagtttaacacatacaggcatatcacaacacgttagggctggtgaaggctggcaccagccatggatgtgatgctggggagatgatggagaggacagtaagggtcagaaggggctaagctggccagcctcagagcctgggagcatgcacaggctccctagagctccctgtggtgtggggtggggtggggtgggggagagttgggagaaggacaggcaggacatatccgcaggctgccaggcttctgggagcagttttatggtcacacattaaaaagtgaaagttaagctttggttaacacattggtctctgacaacctctaaaaataaatactttttcagccatggggtggggaagaagtgaatgtttaatcccagattttccaccataaagaagatgagaattatacagatcccctcaagcacccatgcccctcaggtttctggactatctgtgctgcctcacactcctgtgggaatctagacagcaggtatctggcatgagagccccagctccatgatcagctcactgcattgccctggctaagccatatcctcattctgtgcctcaaccccaacatctgggaagcaacagagtgggactggatgctttcagagggcccctcttgctcggaggtggctaggatgggaacttttctgcctgcatctctcctaaaagaatgaagttagcaagaatgaacgcttagttatccacaggacaagtcctagagtcctggatgttctccagcgtcccaagggcaggctggcagagacctagagagaaaagctgaaagttttgaagcccagcaagcaggaaggcagtgaaatggacagggaaagggatggcattagagggttaggaaaataggaacataggcagacatgcaggggtagactgaaagacaaagagaactggacagacagatgagcacactgggtagagagaaaggcacaaagataggaaaagaggagaggacaccaactgggtagatagccagagagacaaggaaagacagagacgacagaaggatgggcaaaaaatggacagatgggcagacagactggacagagaagatgacagacagatgggtcaataggcagaggacaaagaggaaaatgagattgacaaaatgaaaaacatatgtgcccatggttgaccatatgggcatggggcagatacagagccagtgactgagggcgaagagtcaggcacaagacctgacagacccacaaccggtggagagaccagcaaaaggacaagcctacctcattcttcagggatgggagcctgttctcaggatattcccagcccatatcacaaggctgcgtctcattgaagcggtggctgaggatgtcctgcaggctggcattggcggggggtggccggaacatgaggcagggctctgggtgacctgcagtgtccaggggcacgctcagtaccagctgttcagcagcactcaggttgaaagtgtggttcttcacccaagccactgcacagtggtggggctcatctaggaccatgaagacatgggcaaaaaagtagaagggagacaggaagttgagaacacacagcaggatcaatagctgtatctggaagcgaccaaagtcacctatttcagccaggacctggacaaactgagccatgtatgccagtcactacctcctcagcctggggacactagggtagctctgtagcttggctctgggaacttgctcctctgggcagtggtgatagctgcattaatgtttaatccagccttgccctgctccacctgtcactcctcagccccctaggtgtgacttgggaagggtagaatatgatgaaaaaatagtccacatggatgaagttggaaacaatcatcctcagcaaactaacacaggaacagaaaaccaaacaccgcatgttctcactcataagtgggagttgaacaatgagaacacatggacacagggaggggaacatcacataccagggcctgtcagggggtgggggacaaggggagggagagcattaggacaaatatctaatgcatgtgaggcttaaaacctagatgatgggttgataggtgcagcaaaccaccatggcacatgtatatctatgtaacaaacctgcacattcagcacatgtatcccagaacttaaagtaaaataaaaaaaatagaaaaataaatagttcactccagcttataacatctgaggatgttttattaactgtgtaaaagatacagtcatcacaagaggaaccaagaggaccttgtcaggcccagcacacaggagtgagcttagccaaatgttaagatggcttatagcaaccagccagcccgcaccacctctaattgcaatatcctaaacaattcacactcaactcaaatgagacaggtagatgggtcaaccaataggcgaggtaaaaccactacagtaaaaccctgagagtagttgcagcactcagagggacacagaattcccttctagggacagcccacactaggcagcatggataagcaggagagcaacaagcacttagcctgcagataaactttgccagcagcccaatctggcctcttgatcctgatgatttttctctcctgtgggtgtctggtatgtggtgatatgcaatacctgccaatcctaggaagcagcatgcaggccaggagccccaccaaaagcacaagtgcactgtcttttcaacatcaaagacaaaccaagaatacagagcaatgacagagctgcattttgagctctactttaatcaagaaggaaaccattaacacactctaaagatgaaaacaaatgcacgtaccccagcctccctgagcaatgtcagtgacaatgaacacaagacaaagtatgcctccaccacagcccacacacacaccaggtgcatacacatattcatgtctgcttgtgtatgcataagaaagcattttcatgttctcaattttgaactattttaaggcatgagcagaggaacattgctgaagggaatgcaaggaagcaaggttgtgcagggcagccctggccacctgactggcacagctgctggaagcctgttaatcagtcagcctgcagtacaggtcaaggcagggcagacagtggagggcagaagcaaggcctgacatgctgctcagggagcatgctttgctctttgccccaccccaacctctcccaccaggatcaccactgtccccagctcttttttccttcacttagcttccttgagtgttcttattcttagcattgtctttattgaattgccaagaaaacaactgctaccagtcaccactgcctagtctggtattccccttatggggaagaactgagatggagacataagccttgtcctctgccctcatcatctcctcattccagtcagaaaaggaatttttgctttgtttggctccaagcaaccaagagagctagagctaggaggtaggaaacttgagctctgccactgattcaccctgagaatctgttcctggctctggccctcaattgccccatctaggtaaaggatggtctctaaagattcttctacttcttggtgtacaattctaaaatagagaaagacagaatgattagcagactcctgacaagagtgaggcctgatcaaagacctccctagagtcagtctccagctgaactatgatccccaaaccttggaactgaggcaccgaatgtcactggtctcacattatctc

SEQ ID NO: 316322 - DNA, 4001 bp, Homo sapiens
acggagatcccttccacttctgcctgtccaattaggcccctgactctgtgtcctgtgggatcccagcagatgcccacgctgccacacccccgccatgccctcttacagctacaccacgcccccttgccatctgcctatgccgccacgccccctgccactatgtccccttgtcacccgcctatgccgccatgcccctgtgccaccctgccctgccccattgaggcccagtctcacccaaagaaatgctgctgatggcgtagcccaccactgactgcgagatgccaaagcgaaagaacaaatacaggtgaaagctgttcatgaaggctgtcccaaagccgaagatgatcagccccagcagtgacagcaggatggcagggtagcggcccatcctacaggtgtcaaagggaggctgcaccaagtgccgggatctcccgggctggccccagccggatacacctgggccaggccctgagccatccatgggtccctggagaacccctaccctcacctccctcagcctgacacactccaaccctgaatgcccatgaggaggagttgggatggctcggggaccagcagaaactcccggggactcacttgtcagttatgagcctgaagatgagagagcctatcgggagccctgccatgaacatgatctgtgcagtgtccttcttcgtctccatgccacataccaagtcaaactgtgggtcagacacagagattggccacgggtgcccacctttgggtccagagactgagactcatcccagcgtgggacctataggccaaggggacctggggtaggggcagttaacagtgtgcagcgtgcctcagctgttgcctctgctctgttacctctgcaacccctctggcacctgctccaccctgagagctgggcctggagagagtgaccagaggcataggccaagatgtgtgtgtggggtagggggtagctgagcaaaggcaggaatcagtgcagaccctttcccaaaggcaggtgctaggcccaacctgcagattcatgctagggcggtctgtgttgtaaagggcctagattgcagctcgggttgggaagccccgtaagagatgcctgatcaaagctgcttctttccccgagccctattttttgtgagttctgaggtcagaaccacaactacaggagcgatttcttggacagatggaaaaccctgccatgcagcacccatctctaccccaaatgtactctatagataggcagggccagggctgggcaacaggaatctaattttctgcccagaccctgcctctgcaggttgacctcaggccaatggcttcccatctctgagcttcggtttccccacccattcagtgagggtgggaggcacaactctgagcctgtagggtagttacagacaacccatgacaagacatacctcattgatcagcgatcgcttcttagcgtcaggatagatccacccatcttggcatgtgtctgtgtcattgaggccaaactggatgatagaatccagattccaaggcacaggaaggtacatgaagcatgtcaggaaactgccattgggtgcttggggtatggtcagattcagctgctcagctttggacaggtgggggcccactgccaggatccagctggtattgcaatagggcttctgggctgtgaacacgaagtggtcagcaaacatgaagaaggccgacatgatgctggggataaaggtgagggctactagcctctgctggaatgtgccaaactcccccaccgcatccaggaggttggcaaacttgtcatcctgcttggtgtggacagccctcaatctgcgtaacagcatctccagagaccaggaatgtggatgtcctgctacctcatgctggttcaagttcctggaagcatcctgggatctgagctcttccttgaagttctcctctcctgccatctgtccaaagaaagggtgcagctcagtctctgctgacaccacttcctaaacatcagagaccagcatgggagccaccgactaggaactggcctctggcttgaagcaatatggattccaaccttgacgttctcagtagttccctcccttgctttcttagttaacatgatttattcccccctggcccaaccatcctggagttttagtgtaattgagatttttaatgttttagaaaatgctgtgcttctgttgtcatgaaggactaagttcttaggaactctcctacaacttccccacaactcaagctttttgtttacacacacactgagacaccagtggtcttgcaaaaggtaggagaggtctctagggaccttttcttcaaaaacaaacaaagatctgcatcgtcggctgtagccaggaggtgggcccaaggtgggaggctggaagcctgggccacagagatggggcaccaaggctggtgcagtggtgaggcagtgcagcatggagccaaactggaaaggcaggagtggggaaggaggaaggtgagcagtactgactgtcagcatattaccttgcaacagcagcaaggaggggaaactaagcttaaaactctgttttgagccaaaactctcagaaggggtaacagttcctggtgcggggcaccccttggctcagagcagaggcagaagcgagccttctctaaaggaaaatttcttcaagttgattctgcaagactctcacagaggtacatcaagcaaagagattatagcttgagaaggcaagccactctacaagtcgacagaatccagaaaccacagacttttagactgcagatgttgaaactgtcagatacaaaatttagaacagctattgtatgaactttttaaggatttaaaggttgtaattacgaaaatgaacttaaaacaacaatcaggaaaaagcagacacttttggaaggaagattatgaacttttaaaaatgaaagcttgttgaacggcaagttgttgttgttgagataaaaacactaagaggaaagttaaacaaatttgacacaaagaatcagtgaactggaataaattgctgaaatgtgagagagaggtaaagagacttggtagatagaagatttaacatgtatcaaattggaagcccacaaggagaaatggagacgaaataaaaacaatacgttttctaaaacttttaaaacaaattcttagatccaggaaatgtaacttaggcacgataaataaaaaagaaaaccatggctagacacattgcaatgaagctgcaggacaccaatgacaaagaaaagatcttgaaaatcagctggagagaaggcaggccactgactaatgaagagcctcagcagtctcctgttagaagcaggtgcaggcaggtagatcacttgagcccaggggttcaagaccagcctaggcaacatagtgaaaccctgtctttacaagaaaattcaaaaaaatttagccaggcttggtggcatgtgcctgtagtctcagctactcgggaggctgaggtgggaggatcacctgagccagggaggtcgaggctgcagtgagccatgatcacgccaccgcactccagcctgggtaacagagcaagaccctgtctcaaaaaaagaagatgaaagttaagcaacacggaaaccaggagagcgaagaatattttcaaaatgtggatggaaaattatagaccacatagaattgtatacccagcaaaattgtctgtcaagaactagggtaaaataaaggtaattatagagataacaagaaattgagagaacacacagtaagagacctgatttgattgaactttttttttttttttgagacagagtctcgctctgtcatccaggctggagtgcagtagtgtgatctcggctcactgcaagctctgcctcccaggttcacgccattctcctgcctcagcctcccaagtaggtgggactacaggtgcccgccaccacgcccggctaattttttgtattttttttagtagagatggggtttcaccgtgttggccaggatggtcttgatctcctgacctcatgatccgcccacctca

SEQ ID NO: 316323 - DNA, 4001 bp, Homo sapiens
agcgctgcagcttttgccttgtcaggacacacagcccacagctcagttacactatcttggacttcttttttttcttcttctccttttttttttttttttttaaccttggaactctgaaagtaccttaaggtcaggctttgattggagcccacccagctcactaaggccaaaaacacagcagtcagcaatttgtggttttggtttaagctaaaaagaggctttctggttgctaaatatgccagtgagcatttcagttatttgcacttcagtgcagaggtcatccagtccttcttgggagtgacatcaaggacaaaggtgatatggaggtaggagcaatatttgtgtgtgtgtgaatatatatatatatatatatattttttttttttttttttttaagggcggccccagaggcctagaactaataagatatctgcctatatggaccaagagcaggaagaaaggccagacaatcgtccctcagtagacagtgccgcttggaatgaccacagtctgggaagcactaacacatggcatttaccaccagctaaataaacatttgatttcatgttgcacaatgacctagccagtccagctactttaaccctggtcttcctatagaatgaccccagtatgagctctacttcagggcagctcctctcttggatgaaaggcagcaaagagcttgctgcccaagctggccaagaggaagtgcccacaaaactatttcgctgtggaagaaatctgacccaacatcctaacaaaccccctcacatgggcttccaatcttttaaaactcatgtctgctccccacaggcccaccctggcaatgacttgtcaatttccttcacgtctacgtctagaaaaaaagtgagaaaactggatgcagcttcgagtgctaagccatgggggatggactttggtccccaagcaaagcattaatgaaggtgttgcaaggggaatagttgagatatgatatgaggaagaccagagaacaattcctgatgaacgtcctccctcccaagcctcagtctgaccatagcttcctcatctgggagttgtgagaatgaggctggccttgtgcaaagctgatcaccttgctttccgtggaaggggctcggtcactgaggtcatcattgcttctcacagggatgcctctgcccaggaggctgagcaggccaccgttgggtgacaggccgaagagtgtcaagtatctccccgggccgggaaaggtgcgaaagagatgggtactcttgccccaggggaatgtatcaaaggacacctccagaacaaccgtaccgctctgtctttagttgtcttcctggggcaggctttacaggggacctgtttcaaccttaacgataatattagtgttggctgaaaccaaaactatggagagacgtttattccttcccatccctaaagaagtggcgcagggtcagaagagactgcgggacagggaactttacatcagagctcttgacaggcagttagaggctgctcactttgcgccgccgcctggctctttggggcgcaaggtacagcttcctgcccacccctgaaagagagattccctagacttctcacggaagctcacacatgcccctcttctgcccagcgtccgcgcctcgcgggggaccatgctttccgcgccccgcccgggcctcctccccaaagcctgcgacccagcctcccgcaccttgaccgtgtccagagggtgaccgacgaacaccaggcacacgccgccaaagccgccggccagcaggttcttgagcgggctgatgggttttggctggtcggccatggtcagtccgtctgtcactccgtctgtcagttctcgggccgtcctggcttctcagccccagctgcagtgccggcgccgccgacctttcacccacttttgggtgggcggggcacgagcccggggcaggtcgggaggagggcccagttggcacggtagggcttccgcccggggctgcttccggcctcggccccgcttcgatgggcgtggcagagcgcaaagccgcatgggcggggtttgggagtgtgggccagcgggcctattcctccaggaagccttcccagacttccatgtttcctctgagctcccattcatccactcactccagagagatcaattgcgccctgccatatgccaggcgtccttctaggtgctggaggcacccctggtagtacaacacacaggtccctgtcctcctggaatttacagaccataacaaagataaataactaaaaaatgcatagtgtatcaagtagtaataagtactacggagaaaaatccaggaagagagttagagggtgtgtgggacaagtgatttgcaattttagttcgttgaataagggagggtttaactgaaaaggtgacaggattcaagacctgagaagatgagagagggagttctgttcacacataacagggtcaagggtgaggaaccttccacccagaagaaaaagaaaatgcaaaagccttgagatggtctgtgcctgacatgtttgagaaaccacaggaagagggagggtagtagctgatgaggcgacagaggttttggaggcactagaagacaggtttgggcctggtgttatggctcatgtctgtaatcccagctctttgggaggccaaggcgagaggattgcttaaacccaggagtttgagaccagcctgacttatatagcgagactcttgtctctaaaaaaaaaaagttaggccgggcccagtggctcacacctgtaatcccagcactttgggaggccaaggcaggcatatcaactgaggtcaggagtttgagaccagcctgaccaacatggagaaaccccgtctctactaaaaatacaaaattagcggggcatggtggcgcatgcctgtaatcccagctacttgggaggctgaagcaggagaatcacttgaacttgggaggcagagattgcggtgagcccagatcgtgccattgcactccagcctgggcaaaaagagcgaaacactgtctctacaaaaaaaaaaaaaaaaaaaaaaaaaaaaagttaaaggcccgacgcagtggctcatgcctataatcccagcactttggaaggccaaggcaggtggatcacctgaggtcaggagttcaagaccagcctggccaacatggtcaaaccccgtctctactaaaaatacaaaaacttgccagccgtaatggcagacgcctatgcctgtgatcccagctactcgagagtctaaggcaggagaatcgcttgagcccaggaggcggagcttgcagtgaaccgagatcttgccactgtctctcctctgaaggacgtagaagtcattgcagggtactgagtggggagcgacatagtctgacatcgttatcaggatccccctttgattgctgggtgaaaatagactccagggggcaagaagaaacaaggagccttaaggaggctaaaagccatggccagagatgttgacttgcgccagggcataacagaggaggtagtaagaagtggtcagattcggccgggcgtggtggctcacgcctgtaatcccagcactttgggaggccgaggcgggtggatctcaaggtcaggaaatcgagaccatcctggctaacatggtgaaaccccgtctctactaaaaatacaaacaaaaaaattagccgggcatcatggcgggcatcgtggcgggcatctgtagttccagctactcgggaggctgaggcaggagaatggcgtgaacctgggaggcggaggttgcagtgagctgagatcgtgccactgcactccagcctgggtgactgagcaagactccgtctcaaaaaaaaaaaaaaaaaaaaaaaagaggtggccagattctggatatagtctaaagaaaaaaaaattttaagttgtcaattaataggatataaagcagctaggcacagtggttcacgcctgtaatcccagcactttgggagaccgaggcatacagatcatgaggtcaggagatcgagaccatcctgggtaacaca

SEQ ID NO: 316324 - DNA, 4001 bp, Homo sapiens
cacctgggttggaatatgagctccaatacttacacagacgaaatggatctcacttgtgtgattttgaactagttatctaatctcttggtatcccacttccctcatttggaaaattaggataagagttcaattattgtgagaattaaatgggataatgtatgtaaagagcttaccccagttcctggcacaggaatgttagctgacaaactactgctgctgtgtcaccagctagacaggaaagctccttaaaagcggtaacattggccaggcgccgtggctcacgcctgtagtcccagcactttgggaggccgaggcgggcgggatcacgaggtcaggagatcgagaccatcctggctaacacggtgaaaccccgtctccactaaaaacccaaaaaattagctgggcgtagtggcgggcacctgcagtcccagctactcgggaggctgaggcaggagaatggcgtgaacccgagaggtggagcctgcagtgagccgagatggcgccaccacactccagcctgggcgaagagtgagactccttctcaaaaaaaaaaaaaaaaatcagtaacattatttctttatatttctaagacctaccttatacaagtttcaacaaatctagatttaaagctatcatcctacaagtctggctaagacatccctacttccatatattcccctaacaccctgaacctagcccacctgttatttatcccaacagtcattttactattttgtctctaacacctgacccttaggagcaggtctatcttgttcaccatgttatcctcaacacctgcaacaccaaaattcgataattaagtgactaaatcactgtgggcctccattttccctatgaaaatcattttaaaaattatttgtctgtctctgcccattccacacaatgaaaacgtaggcagccaaactctgttttgttaactgctgtatctagtatcctctaccagacgctccaaaatatttggtaaaggacttttttttctgttaattcatgttgattctcgtagttttctgctacggaattaaatactaagcctgtttattgactccgcagcgttcccgatgagctatgtgtgctcaccaatatttctccaaagcctaggcttggagcagaaatagcagattatgtattgaatgaacagaaggacatgtcattttctaagactgaaaagagatgcagcaaaatgagaaacgtagtattgaatagaagggctgggagcgatgtgagtaaggtttttgttgttgtgttacatacatttctttaattcccaagatctctagagtagttacactatttaatgaaagagtagttaacagtgtataatagaagctcttttttaagtaaatgagggtgcaaaagacaatgactcaccttccttcccccacctggctcttatgacctggcagtacagacatagccttaacacctggcccgccggtggcctgggagcctcgtgctccctctcagacctggctgccagtaacccgaggacagtccagcccgcaaaaccggaagaaaaccagtgcagagaacgcccgcgggctccaatgccggacgccggcactctgagcaacccaccccaccgccccgcactcaccaccagcgctgccacgaaccccggccggtccatggtcgctcagacctcgtcaaggctacaatccaagccggagcagaagcggatcacgtcctcgcgcgctgggcgccgccatgtttgaggcgggtctgtcttgaacttccgggaccacgtgacgtagaaccacaacaactgcacgtgcaacgcgagacacctgggcctaggggagggccagagaggaggggcggggcctcggggagtgtggtggagctaagtctcggcaaatcccttacctcggtttcctgcagcagcgttgtgtgcagctagacggaggaactttcgcgagcaaaagatccgtggccgagatccaggagagagcagcggtagaatgaggccggcgtgattctgaactgtaaacccagaagaggcgtggctgtggcggagggaggagtcgtgaggggtagtactaacctcgggaggcgcgattcgggatcctaatcggatatttcattttggtttatctcttagttttgtcaaaaaattttatctgagtttatattaaattaactcattatcagaagattattaaataaagatatagaaaaatacatcagaagtttcctgaccggagttaaaaattagcatcctccatttctctttacagagttactgcatttaaaattatttgtttgttcagttatttacctgctcatgttgttcgctgttgtactcatgtgtacacctcaaagcacacgttattaagtacttaataacatttcttggagtggacctgtctttattaaacaaacaaataccttgtaaacttctgtatatattaagggccaactacatctcagacgtggtgctaagtgattgacagacattttttcatttaatcctttcaccaaccctatgatgtcagcaacactagtgtcctcattttacagaggctcctgatgctccaacaagtaaccgactcaatgtggctacagagaacacagcagagcaagcactgaaaatatacttaatgccctcatcatctttcctcaaaaccgttataataacctgagcaggctccttgcctggcctttcttcaatccctattctataacactgctagaattattcttataattattcttattctcttctaggtaaaatgatctagaaatgatacgcagaatagctttaggtgttagatggaattcaaattctatcacctgctgggtttggggataagttttccaagattaagttttctcccctgtaaagtggcgataatgatagtcactttgtcatgcggtactattatattaatagattaaatgagataatgcactcaagttcttagcctagttcctggctcatagaaagtactctctaaaggtgatggtaatgttatttccctgcttacaactcccctctgctgccaatggagacagtccagctccctagcatggtatacacctctcagctggtgtctcctgtcactcttcccactagccggactacacacagacagactatacacttccaagcctcctaattttgcccatgttgttctctctacccagaatacctttccctaagctgcctgtaggccctctcaaaacatgctagttcactttgtcaatgccagcagaagaatctctgttgctgctattaatgtctttcaaagtctcatgtgctttggtcaggcctacccaggataatctccatttttattaactcaaagtcaactgattagagaccttaattatatctgaaaaattccttttgccatacgtgacaacataatcatggtggtaatgttctgtcatactcacaggtcctgctcacaatcagtggggtgattatgcaaaacacattaggggccaggaatcttgagggccaccttagaatcctgcctacttcacattcctataaaccctcaccggcagcctcctcaaaggccatcaagtttctattaataagctttcactgacatttccctcacagtcttcccacctttcacctactgcctggtgccaatggcactcccacagtttaggaattacagtagcgcccacctccaagtaccaaaatctgtattatttgtctatttctgcgtaacaaattacccccaaaatttaacagactaaagcaacgataaacttctattacctcacacagttttcatacgtcaagaatcaaggagtcatttagctgggtgtttaagactcagaaattttcatgacactacagtcaagatggtggccagggccatatcataaaacttgatcatgaccgcaggatccaattccaagatggctcactcccataactggcagattagtgctagctattggcaggtagccttaatccctcatggcatacatctctccatagtactgcttgagtgtcttcatga

SEQ ID NO: 316325 - DNA, 4001 bp, Homo sapiens
tttttggtaaagaataggtctcactttgttgcccagtctggtctcaaactcgtgagctcaagcaatctacctgccttggcctcccaaagtgcttagaatacaggcatgagccactgtacccagccaattgttcacaattaacaattgttcacattaaaatattgccaacattaatgattctgtaatactgtgattaactaattggagagatggaatacatgaactttaaggccgcttcaaattctacaactgtaggatttgagcatgtaacgtattacaatgtttatattttactaaagctaagtttcagaaagattaggagtaaattgaaaatcgccctgaaacaaagttaaaaacatttctgaaattcaaatgtaagttaattaaaagttgataatacaaaaacaaaattaaaaacaattttcagtaaaatttgaactttataaaaccaggcttttccttatttaagaaatattgacaggccgggcatggtggctcactcctgtaatcccagctctttgcgaggccaaagtggctggatcacctggggtcaggagttcgagaccagcctgaccaacatggtgaaaccccgtctgtactaaaaatacaaaaattagcccgacattgtggtaggtgcctataatcccagctactcgggaggctgaggcaggagaatcgcttgaacctgggaggcagaagttgcagtgagtcgagatcacgccattgcactacagcctgggtgacaagaacaaaactccgtctcaaaaaataaaaaaaaaaataaaggaaagaaaagaaatattgacaaaggatgacaactgtcaaagaagaaaagtgacaaaatctccaactcagtgtcctgatcaatatggaaattgatggcaaaacatttccaagactttttccaaagacatggacatgatttttagtgatttttaagtcattcctttgcaagtccttaaacgctatttcaataacaaaaagtactgttttatagtgagaaaggtaactaaagatacattctctaagcaattaaggtaacttgagggtgtttggaagttgatttcttaatttcatcgtgactcaaactcagatttccagtgaagttctgcaagtctgtcaacattttcccactggccccagattggctggttcttatttttggtgcgggggcacttctctgtgacaaacacacaactcaatgattctctcttcgccatttataccacccaagccctcagataaacttagtgaacccagcaaaggaattcaaataacatttccttctattcacaaaaacttcaacttttatgttcagtaattaatggtgctgtgtaaccagggctaacattacaaaataagggcagttattatttactgcggccatgtaataaagtgtcaaaggttatcacaacaggatatctgtgtttaaatggaaagagataaaaaagaccaagtcaaactagttatccctgttttgtttttccactggagggaagtctgttaaaataacttctaaatagctaagttgcagtctcagcacaaatagaaactttaatgttctagcccttctttccttccaattgtgggtggcgctgagtattagaaataaatctaattgagtacctgcaatgtgaagatgcattttctttgcgtcttttcatgatctgtatgtagtacgcattttcattccatcttatagaacgagggtagctaagttctagaagcaatctggaaacagatgtgatgagcccgtgttaatggctgggcaaccatgagcatgaacttcatcagggctccactcgaaccgccttctctctgctttcaactcatggccttgctttctcagatcccgctaccatttctcaatataattctaactgccatcatctcagcccttcatccttgtatttatggaaagaggtacagcttttggaaaaccactgattcctctccctgggctgatagatgaagacagggaagctctgagagcttcaggttacatatacagtcatgtgttgcttaaccaccaggatactcttctgagaaacgcatcattaggggatttcatccttgtgcaagcaacatggagtgtaagttacacaaacctagctagtatagccaactacacgcccaagctatatggtgtagcctattgctcctagctaccaaacctgtacagcatgtgaccgtcctgaatactgtaggcaactgcaacatagtggtaaatatttatggatctaaacatgaaaacagaaaagctacagtaaaaatatggcatgaaagctcaaaactgtccacctgtatagggtacttaccatgaacaaagcttgcagaactagaagttattctgagtgagtcagcgagtgagtggtgagtgaatgtgaaggcctaggatgtgactgtacactactgtagactttataaacactgtacacttaggctacactaaatttactttaaaagttttcaggatggacagcaggaagagagtgaggatcaaaaacccacctatcgggtactatgctcattatctgagtgacaaaataaactgtacaccaaagtcctgagacatgcaatttacccatgtaacaaacctgcacatataccttctgaacttaaaagttggaaagaaaaaaaaaaaggaactgaatagatgtgagtttaaatccaattaaccatttattatacagtcaggcaccccataatgatgttttggtcaatgatagcatataaaacagtggtcccataaagattataaaggagtataaagaaaacctattctgttttctttcttcaataataaattaaccttagcttgctgtaacatttttccttttgaaactttttaattttttaaacttttgactcttttgtaaaaacacaacttaaaacacaaacacattgtacagctgtacaattttttttctttatatctttactctgtatttttttctatttttgaaatgttaaatttttttttttttgaattttgttgaaaactaagacaaatacatacattagcctaggtctacacagtcaggatcatcagtatcactgccttccaccttcacatcttgtcccagtggcagatcttcagtggcaacaataagcatggaactgtcacctcctacagggacaatgccttcctctggaatacttcctgaaggacctgcctgaggctgttttacagttgatttttttttttttttttttttttttttttgagacggagtcttgctctgtcgcccaggctggagtgcagtagcaaaatctaggctcactgcaacctccgcctcctgggttcaagtgattctcctgcctcagcctcccgagttgctgggactacaggcatgagccaccatacccggctaattttttttgtatttttagtaaagacggggtttcaccatgttagccaggctggtctcgaactcctgacctcaagtgatccatccgcctcggcctctcagagtgctgggataacaggcatgagccactgccccagaccaacttattttttatatatgtaagtagaagaatgaagccaggcacagtggctcacgcctgtaatctcagtagtttgggaggccaaggtgggcagagcactcgaggtgaggattttgagaccagcctggcccacatggtgaaaccccatctctattaaaaatacaaaaattagccaggagtgttggtgcacacttctaatcccagctacttgggaggctgaggcaggaggattgcctgaacccgggaggcggagttgcagtgagccgagatctcaccactgcattccagcctcggtgacagagcaagactccgtctcaaaaaataaaaaattatcatatcctgtaaatatctaaaccagtaatgtagtcgtttattatcaactattatgtactttacataattgtatgtgctgaagttttatacaactaacagtgcggtaggtttgtttacaccagcattaccataaacttgggagtaatgcattgtgccat

SEQ ID NO: 316326 - DNA, 4001 bp, Homo sapiens
aagctaacatttatttcaaatataagtatgccccatttttaactaaacttgatacatgaatcctgaacgcagaataatagaaatgttaggagctagagaagggctttagagatcatataatacaacctcctaattttatagatgaagcaattgaaataaaagtgtccatttttcacccaaattaaaatagtgctagactacatctgcggtctcctcacttcagggttatagatctaattacaagagggagctcaattatttgcatgagatcttttcaagagcatctacatagctacagaatttttttaaaaagatttaatttgcctgattattggcagtaaacatttcagaaatatggaaagcaaactgcctaaactgggtctcacagatcaatagaaaaatattgtttttatgccagaacagtggccggcccataattggtgtacaacaaatatttgttgatgaaagtgtgccaacctaaagaaagtattgccatcactggctcaatagagtccatatgtccaactcaaagcaaggcaccgtgaatagaactgcgtgtgtatttctttcatattcttaaaagtcgatctaaaaactgcaggatttaagaagatgccggtaagagtctcagcataattcaccgaaggcatttttgataagaaaactctttataatcctccaaataagtaactcttaaaattgctatgattctccaaatgatttagaaggagcaaatctaaacaggaggctaaactggaagctctaacactcattttggcaatcagggaactaagactttaggcttagtcctaatcttgcacacacatagtaactattaacactatcttcaaaaaatctgacctctctccactcctactttctcctaagcagcagaaaagcaagcggtgttcaagaggggtggttttctcgaaaggaatctgaccccaaaggtactggaaagctttgcaccccattcaccacctggaaaacctcgggcaagaaattttccaagggctagaaacaccctacagcaaccacgggagaataccaaagccttccccgctcgatcccgtagcccccttaccacccaccttgcaaagccgagcccggaaatgagcggcccgaggtccgaggtggggcgtgagtgacgtgcagaggcccaagcgagcgctgcaaggagcgagggctaaaggagtctccggcgcccattttgtcctcagcctccgcactttccgccccgtccccttgggccatgcaacctacgcgaaatccgaagccaggctcctcaaagcggccctggatccccgacgcctgctagattgcggcgtgcggccaggtccagcggcgtccgggtaatcaagcgccgaccccagctcttgcccgcgtctcctcagacgcatggattcggcctccgcctcaccccggccccgcgggcccaaaacctcactcccggcccgggtttcatgcctcaaccctctttgcccgggcctcactctctcgccctcgggcccgggcctcacccccttgcttccccgaaccggagcccccctcaccacccacgggctgggtcgctcccctcacccgcaggcccgtggcagctccccgcccaggcctcactcccgcccccccacccccccacccccctcggcccccctcgcccccctcgcctgcgtcttcggccccagcaccctcagccccagtgcgcacgccccgccaggaccttaccctccggcaaacagatgcaccagcgtgtccctctggctcattctctctcccgcatgtcctccggccgctgaggcgggacgcggatctggccgcccgctacggcaggcggcttcggtcccggactggagacgcacagcgccccggggacggcgaggagagctggccgagatgcggctgcagaaagcaaccggcacagccctccccgcggcactccagccgcgccaccgcctgcctaagcgcgccgcccttcaccagaggctgaaagcgacgcagcgcagcgcgacggagagtgggcgggggatggtagggggaagatgactatttgatggctcccgacataaacagaggctcccattggtgtgagcgtcgtgacgtcacgcactctgcagtgttctttcacgtgatccctacgggctctttcaatgaaaggggccgcgaggcgtggccagaacgcgtgcccggagggtggtaggtcaccgcgctcctagcacctgagacctggggcgcccctggcctgagtgaacgcgccaatcacggctgcactctcctgaacagggaactggcggggcgggaaaaatcgacttggttccgggttcgcaagcggatttactttgaaaaaattggatttatgacccagcagttcccttggtgtctatctcagagtaaccctcgcacaatgcataaaaaggtttgtgcacggatactcctatataggctcacaaacagtacagaattatgaacaatgcttgcagttgcagaaaattgaaatcagtgggggaatgaagaaataaatcatgaaacattcctactatggaatattatgcaatcgtgacaagggatgaggtgattccatatggcaaaaaatctcccgaagtgtgtaataagtaaaaaaggcaagtagaattaaaatacttgggtttgtttttaaaagaataaaagttcatgggaaatggaattaaaagataaaatttaaaaatataaactttgtttttcaacgtaagctccatcaagttaaagacagtttggtaagtgatgataccggctctttagtccatctgtaaagaattgagggttctgggaatttaatcatgaaaatgcaggcttttttacgttattaactgaagaaaaatgggtgccatttacagatttttcacgattagaaaacaaaaatatgtcagaaggagccaggtcaggaatgtaagatggatacctgatagtttcccatcgaaatccctggaaaaatgcccttatttaaagagaggaatgagcaggaacattgtcctgatggagaaggactctctggtgaagatttcgtaggtgtttttatgctaaagctttgcttcactttctcctatagtaagcggatgttattgctcttccaccctccagaaagtcaacaggcaaaataccttgagcatcccaaaaagctgctgctatgacttcggctcttgaccagtctacttttgatttgactggaccacttgcacctcttggtaactattgctttgatccagaatcatactgagaaagctatgtttgatctcctgttacaattcttcaaagaaatgtttcaatatatgatcccacttgtttacaatttccattgaaagccctgctcttgtctgcagctcatctgggtgcaacagttttgcacccatcgggtgaaaagtttgctcaacttcagtttttcagtgagaaatgtgtaagtagaaccagttgaaatgtctatggtgttgtatattatttgtgctgttaattgtgggtcctcttcaattagggcacaccgaagaataatcttttcctcaaaaatcgatgtggattgtctgccactgcaggcttcctcttcaacattgtctcatcccttctgcaaacaagttatccatttgtaaacttcagatttctttgggggaattttccccatcaaacttttgtaaagcatccttgatttcaccattcttccacccaatcttgaccataaatttgatgttttttcttgcttcaattcatgctgctctgataggggctgttttcaagctgatgtcttatcctttttagtgcctcaaactagatcttgttcagatacattataacaagtgagtacgaatttttggtgcaaaaaagtttgaaattcatacatagttttttttttagttaggaaaaatgtttatataaatttaaatttacatatattccatccttctcttaactgaaaagagtaagaaactttctgagattttctttgttaccagttccttttttttttttttttttaatat

SEQ ID NO: 316327 - DNA, 4001 bp, Homo sapiens
tgagccaataacttttttagctttgtacttttcccagtccattagcacagagcagatgttatttatactagcagtatagatcaacttctaataggcaaaaacaagacaacaacaacaacaaaaaccatcccaacaggtaatactgaatggtcttaagatttttgtcaatggtgaatggcacacatcctttgcgagtgaacttaacttttaaaaagtagctcaaggccaagcgcggtggctcacacttgtaatcctagcactttaggaggccgaggcagacggatcacttgaggtcaggagttcaagaccagcctggccaacatggtgaaaccctctctctactaaaaatacaaaaactagccgggcgtggtggcgcacgcctgtaatcccagcaacgtgggagactgagacaggaaaaatacttgaacccgggagtcagaggttgcagttgagccgagatcacgccactgcactccagcgcgggcgacagggcgagactctgtctcaaaaaaaaaaaaaaagaaaaaagaaaagaaagctcaaaaatatattcaaggtaaataaaaaagtagtttctttttaaggggagaaagaagagggcataaacaataatacgcacacgaaataagtagcacataagagtacaaactggatccacaagcaattcctactgccctgaaaaaactatcctaagtccaattcacatctggaggcgagggctggagagccctgaaaaaggtaagcaggttttcaaagacgtcaacgtaaagtcgccaccgccgccgtctccgcctttaaggattaaaaaaaaaaataaaagccgcccctacctcgggcgcaagacctcagagggagagctgcggcagctgcagtggcctcaggcctttagcgtctaaagactggttgcaccccgactccacctaccgggcaaccacgccgccagccccgcctccgcctccaccaatagcggcccggcggcccgggcacgatgaccaatcgaacgccggaggaggcgtggcgtcgctgggggaccacgcgccgtcccaacaggctggaagggtgccgccacgactggcccctccaggtaggccgccgcccgcgggcgcacagcgctacccggccagctcgctgcggcatcaacggcttctcagcgtcagcgctattatcaggccttgtgaccgtcccaaatctgcccgggtgcccttccacctggcagcctactcgcaccttgtgggggccgcgcgggcacactccccggcacgcgtccagtccaggccccggcaattccgccctttaccgggacatcggccctacagcgcctgcccccagggctggcctgcagctcctggcctctcctcactccctgcccccttctcaattcccttagtcagactcctctcccgccgcatcctaaatcctgagcgcaccctggggcgcggaaaagggtagccgagccttagcaacgccccgaattctccggcccgagcccgcggttcggacccctgcccttccttccccgcagtgccctcaccataagcgtttccaccgtgtctccgacatcttggggttgcagcagcgacggacgtgagttctgaatcattggagatgaggcccgcgagtcctctgggcccagggtgccgtcgacgggcgcttgggcccagccctggaggccttgaagaaggctagggggtggcgctagccaggcgacgcgctttaagccgcgggctctctgacgtctgcgcctataagcacgcagccgccggggttcggatcctgctagtccaggggctgcgggcgcggaacaatcttgctgcgggaattacgcgccgctcttcacccgcgccgcagactccgcggctctgctctcctgcccatcctgccctgctgcaggcttcagcaccgtaggagatgaggttctgtgtatcccggggtggaggaagcgccggaggaactctgtagaaggggagatttcgcttccgggtgggacgcttgtcacgtgagggtgttctgagtgccacctggtgaaaacgcccagaactgaaggatccgcgcttccttgcacccagaacttaatggagcgtctgcagggaactttgcttttgcgtggaacgtctgaacgtatttacaatccagacctggtctgcccagtaaggcagccactagccaacgtgggctattgatttattaattgatacattaattttaattatattaaaacaagcagtgtggaatgctttctccttaaacaggcgtttttttgttttgttgtttttttttcaggaccatatttccctttaaatgctgaaaatttagtgtggaattgatatgtactgtatgcataaaccacacgctggatgtctaagactggtgaggtaaaatctcaataatttttatatgttgaaatgatattttggatatattgggttaggtgaaatattaaaattaacttcaggccgggggcagtggcccaggcctgtaatctcagcactttgtgaggcctagtctggaggattgcttgagggagccaaggagttggagaccagcgtggacgacaaagcaagaccccgtctctaaaacaaataataataacttcatgtgtttctttttaaatgtggctagtaaaacatttaaactttaacatgtggctcccattacatttctgtaggacagcgctggtctagttggtcaaaattctggtttattgctcacctggaatctgtcaatggcttttttggtctcccaacttccccttatgcctgtctggctgatccatggaaaagcattactgctgggatcctgacactcctgttgaaaatgcagtggccctggtaataaagtccaagcttttcatagcaaccttcgctactttccaccttcattcatcacccaagaactagatcagaaaggaaagtgacttagggagcaagataatattttttcaggcttcattcctgtgcttctgaggtacatagaacaggaaggaaagtggtcccagaggaggttattcccagaaaggattaaggaaagtataaacattaaaaaaaaaaaaaaaattacaggccgggtgcggtggctcacgcctgtaatcccagcactttgggaggccgaggcgagccgatcacgaggtcaggagatcgagaccatcctggctaacatggtgaaatcccgtctctgctaaaaatatagccgggtgtggtggcaggcgcctgtagtcccagctactcgggaggctgaagcaggagaatggcgtgaacccaggaagtggagcttgcagtgggccgagatcgtgccactgcactgcagcctgggcgacagagcgagactccatctcaaaaaacaaaacgaaacaaaattacaaacctgcctggtgattgaatactttgctaccctttgttctaagctgcaaggcttatttttctttgtgcagtagtgatgttgataactatgcactgaaacttctttttaaaggaagacctaattccaccctgacacccacccccgctgcactgattccataagacaagaatccctacttttgagaaatcatgggttggcgtattttagagactgctcttggccactctgggtgtgggaacacaggtgggatctagagtgaaagccggccctccactccctcacccttccaggtatgcctgcttggctgtgggctcagaagaaatgggctggctttcaagggtggcagctggcagatttccctcctctgtatctgctcctgccatgcttactcataactctaaagcccacaggcccttcttttcccacatctcctcccctggatgtttgtggggatgcagagatatataatgatcatggggaaagagcatcacccattggcagatgagtggggggtttggagcagtacttaatggcaaagttggaggagtgaatttttttttttaaaaagaaaacattgtgactttaattcaaaacaaggtcattagcataaggcaagccttaatggatttatctgcagtcaaggg

SEQ ID NO: 316328 - DNA, 4001 bp, Homo sapiens
cacctacccctccctccccctaccctcactcacatagatgagggacagtggcccagagtggctgctcagatggaggccaaacacatacttgagctgtgagacgaagacctgcacagctgcagctgtggtatagcctcggacaagaggttctgacaggtaggtgaccacgaagccgaagtggatcaggcccagccccacctgtggggcggccaggggcagtcaggagaggcaggggtcctggggttgctaatgaggagcgcagggcaagtgggatgggagggggatgagtagacggcaagaggaggacgacgatggtcagacactcaggggagtacagacaggacagtggcgggagcagaagtggtggtggggggcacatactcctgactgttccacacctggaagaggccaaccaggacactgagtgtggaggccacctgtacccgggcagcatctctggctgtctcattgatcatggagtcgttcaaggcctgcggggccagggattctgtcacactgcccaccatcacagacatgacagcaaaggtccctgtaaggacggcacggggcaggtctgaagaggagaggacactgccctgccctggagccctggtcttaagagagaggccaggagacttccagttctggataaatgtactcagattatggctgcatgaacagggacagtgctggcggttcaggtttggccaggccaggagtaaaccctgagctcacaggcccttaagcatggctagaaatgctggccctgtctcatctaccctgtcccacctgtgtctactggtcccgggacacagaggctctctgtggagtagggaaggggtcagggctggccttaggctgctcaggcctctgccaagttccaggccccttgggctgcctcacccactctcatcttcctggagccagggctttgaggtcacctgcctctgtggtcctacagtcaggggtctagtcctgcctggggatgactcgtgggctagcccagggatgcagcaccaatgctgccctcttccccagccgctcctgccctgctcagtgccccctcaccctgccctccatgatggatgtgggcatcctcctggaaggctaggcctgcctccacttacccacggagatgtgccgggaagtgccaaacaggaagtagatgaagacagggtagaaggagctatagaggccaaacacggggggcaatccagccaggagggcgtaggccaagcctaggggtagaatggtagcagtgcaggcctggagagcagatcttgaaacgataagggaatcccagccctgggttaggtgccatagttccaaggtagaggtcatggccccagttttgggcatcacagaccacagggtttccaggccgacgcactgaaggtggctcaccctgcggaagctgcatgatggccacactcaggccggataacaggtcacccaggagccagtcacgcacaggataccggggtaaccagaccaaaaccgggaggtgttggagcagaagggcataggcccgagcacgggagcacctagggacatgatatgaggggtaggtgtcaggaacaggggctacctgggccccgccagcgcccccaggccccaatcttggccttactgcaaccaggtccgccactggtgggtcctaggtgctgagccccagcgccccagctcctccaaatgctcctggttcagcagcggccgttccatgtggtagtctcgcctccgcaggtccattgcttgtgttgcagacagcagtgcctgtgtgtccctcggtctggggtggcaagaccagagagacacagtgaaggcatccctggcccaacctcccctacacctccacctaggaccagagagttacctacctgatttttccaggccctaagatcaaggtacagtattccagcccccagctggcatctgtgggccacatgtccaaactcagacaggggcagtacctgaactttggctggtgagaaagcctctttctaggacaaagtcccccaagtagggactgcaggatgagcactagctatacctccagccgagatgtggcagcccagtgctgagtgttctaccagtccaggtcccaggctgctccctcccccacccagtccctctccagtccccaggtcctcctccagctgccccgggagcccactgctggctgagagcacactcagggaaggggtccagcaaaccaggggtccagctcctcaagcaactcctttcccaagcctcaggcctcagatgagaccctcccctctaagggaaggaaagtgttggagccaagcttgcccctgggcctccagccccagggtccaggttgtagacggctcaggcctgttatggggaagccaaggactggctctcacctgagaaggagcttgctcttggagtggcaatctctcacctagagggagaggctcccacatggaaagggaagtacccacttgaagtgggggaaagagctcacctgggaatagaagctttcaaggggaatctcacctagagggatctctgacctaccagggaatctttatcagcctggcaagttctgatacagggggaatcttccctctgcccagaggcacctacttgaagtcagagaaagatctcacatgggaagaaaagacctagagggagagggttctcacctggggggtactctcccatagagaaagctctgacctcgggcgaggctcccacgtggaatggggaaaagctgtcacctgggaatagatctcacagaaggatcttacctgggggaaaactctagcctgttggggaagctttcaccagtcaggaaagttctgatctaggaaaagccctgacctggggagaggatcccatttgagggacaggaactcacctgggaagcgcctctaacctggctgtactgttggaggagtgtggagtgggtgcaaggaagatcctcagagactcttgggaccgctatctcaaggagatcgtagagccccctctcctttcctacgtgagtcactcaggtcttcttaaagggctccctcccccgacaacttgggacccgcgtttggagggcggagccttgatcattggcccctccctgtaggaaggcaactggggccagaaaggccggagcgctcactccgggatcagtggagctgggtggactcgggactcagctgaaagcagctagtccacgggccgctgccagggactcccgtgccccacgcacccccgccggcacatctcctggccgggctcctccgcacgcagctgcctccctgtggcccgggatggccctcgggcgtcacaccagcggctttccgcacagcccaagggactggggtcgcgccggctcccgcccccaccccttgctgcagaggggcagccgcctgcagaaaatcagcagaggtaaaccgaggcgtcgcaagcggagaatgcctgctccagcgaggcgtcgcaagcggagaatgcctgctccagcgaggcgctcgcgcggggccaccgggaatgtgcgctgaactcaccccgacgcatccgccagccccatggctcgcaagttgtccggtgcgggctgctcctgctgctcgagctagaggccgctacgctccggaaggcggcgccgggaccgggtgaggccagctgcgctctcccgggggctaatcccggggcaggacggggaggcttgggccaatcagcgcgctggggcggggcctaagtggcgcgcgccgggcggggagagactggagaaggaggatttaaccgcttcctccccggcgacctggcctatgaggcctctcgctgctcgcccggccctctgcccggagctggatgggactgcagaactggaactaagcacccgcgccgggctggccgcagtcgcgcccccaggccctgagtaggttggagctgatcccaggtcctggctcggcggaaggtgctcacggagtgggaaaaggaaactccactggccggtgaccccagccttaactcgtaggggatcc

SEQ ID NO: 316329 - DNA, 4001 bp, Homo sapiens
ctggtgggtcctaggtgctgagccccagcgccccagctcctccaaatgctcctggttcagcagcggccgttccatgtggtagtctcgcctccgcaggtccattgcttgtgttgcagacagcagtgcctgtgtgtccctcggtctggggtggcaagaccagagagacacagtgaaggcatccctggcccaacctcccctacacctccacctaggaccagagagttacctacctgatttttccaggccctaagatcaaggtacagtattccagcccccagctggcatctgtgggccacatgtccaaactcagacaggggcagtacctgaactttggctggtgagaaagcctctttctaggacaaagtcccccaagtagggactgcaggatgagcactagctatacctccagccgagatgtggcagcccagtgctgagtgttctaccagtccaggtcccaggctgctccctcccccacccagtccctctccagtccccaggtcctcctccagctgccccgggagcccactgctggctgagagcacactcagggaaggggtccagcaaaccaggggtccagctcctcaagcaactcctttcccaagcctcaggcctcagatgagaccctcccctctaagggaaggaaagtgttggagccaagcttgcccctgggcctccagccccagggtccaggttgtagacggctcaggcctgttatggggaagccaaggactggctctcacctgagaaggagcttgctcttggagtggcaatctctcacctagagggagaggctcccacatggaaagggaagtacccacttgaagtgggggaaagagctcacctgggaatagaagctttcaaggggaatctcacctagagggatctctgacctaccagggaatctttatcagcctggcaagttctgatacagggggaatcttccctctgcccagaggcacctacttgaagtcagagaaagatctcacatgggaagaaaagacctagagggagagggttctcacctggggggtactctcccatagagaaagctctgacctcgggcgaggctcccacgtggaatggggaaaagctgtcacctgggaatagatctcacagaaggatcttacctgggggaaaactctagcctgttggggaagctttcaccagtcaggaaagttctgatctaggaaaagccctgacctggggagaggatcccatttgagggacaggaactcacctgggaagcgcctctaacctggctgtactgttggaggagtgtggagtgggtgcaaggaagatcctcagagactcttgggaccgctatctcaaggagatcgtagagccccctctcctttcctacgtgagtcactcaggtcttcttaaagggctccctcccccgacaacttgggacccgcgtttggagggcggagccttgatcattggcccctccctgtaggaaggcaactggggccagaaaggccggagcgctcactccgggatcagtggagctgggtggactcgggactcagctgaaagcagctagtccacgggccgctgccagggactcccgtgccccacgcacccccgccggcacatctcctggccgggctcctccgcacgcagctgcctccctgtggcccgggatggccctcgggcgtcacaccagcggctttccgcacagcccaagggactggggtcgcgccggctcccgcccccaccccttgctgcagaggggcagccgcctgcagaaaatcagcagaggtaaaccgaggcgtcgcaagcggagaatgcctgctccagcgaggcgtcgcaagcggagaatgcctgctccagcgaggcgctcgcgcggggccaccgggaatgtgcgctgaactcaccccgacgcatccgccagccccatggctcgcaagttgtccggtgcgggctgctcctgctgctcgagctagaggccgctacgctccggaaggcggcgccgggaccgggtgaggccagctgcgctctcccgggggctaatcccggggcaggacggggaggcttgggccaatcagcgcgctggggcggggcctaagtggcgcgcgccgggcggggagagactggagaaggaggatttaaccgcttcctccccggcgacctggcctatgaggcctctcgctgctcgcccggccctctgcccggagctggatgggactgcagaactggaactaagcacccgcgccgggctggccgcagtcgcgcccccaggccctgagtaggttggagctgatcccaggtcctggctcggcggaaggtgctcacggagtgggaaaaggaaactccactggccggtgaccccagccttaactcgtaggggatccaggtctgtggggcctctcttgccttcagctgagagcgccacccgcaggctttctgcgactacgcatctctttgagacccggagccaacggtccccaagtcctcccctttaactctggccacccaggccagaaatggttggaggatcccctccgctgcactaagcacagcccggacgtagctcccagaaggttactgcgcgggccgccgaggagaatggtgggggtcagtgctgttgggtgggcgtcagtgctgttgggtgggcaaggcaggaactgcaagagcagttcctcaggttggtttcaccgcaggtgagggcaaaaaatgccgggtcagggctgcagaccctgaagaattaggaagtcctgttgccgttgccttgaccagcggggaggttttccttagcaccttattttcagcacctgtgctccaacatcaggccccaattacaaagtgaggggccagatttcaaggtgaaagagatctgccatgaaatgggctaaaaatagctggatattcttgggaggggctcagattcctcccaaaggtcagtctggcttgaatcattcacagcttccatcctacctccccagcccccaacaggaaaaggcaacaactgttttctatagaagtttattcccaaaacagagcgcggcttcacggaacaatttacacagacaggaaagagggccgctgggctggaggaggggaaccccagagaggggcatctacgaaacctaggacatagtaaagacaccctcccacccccagcaggccactcagcccttcaagagctggggtccttctcggtaaggagagtttgggtcctggctggtgggatttagctccagtcagggaagtagaatttctaatctcccaggaagctgcttcccaagagtatgcatggggtggtgggtgaggaggtgtctgcacagaccaccccccagccctgcacagccactctcccccgtggttagaggacgcctactctcaaggtcttctggatctgctgttaaacgggactcaaggctgaccttcggcctgggagacctgggggttagaaaacccctcaagatggccaggtcagggtcctcacaggtgggtcctccaagtccctctcccactttccctacctttcacttggaaacaaaggaaaaaaaattatctactgtaaacaaagtgtaaaactcaaagttttgagttgtaaacaaagtaaaaacattttttgaatctggacttgtaaacagtaacaaaattttaaagtcttcagttctggacagcagacaaaatagcaaaagtaagagttttgtgaacagggtcgtaacagtcatttttccctttttaagggaataaaggaggagtggaacggagtcacttcctgcagcccaggtgcctagggccacggaggatcctgtaaacataggaggcagtggcacctacattctgggtcttgaattcccttgtttctgctccctttgctcaccttcccaccctacccttcggaatcaattcaagcagggggcagtgtcagggaatcaaatggcaccacagacaacttttgcttgctgcaggggcaggtgaatgacccctccaccgaccctctgcaggaatgtctgactagaggcccgagcccctccccgtgggagaca

SEQ ID NO: 316330 - DNA, 4001 bp, Homo sapiens
tctgcgatgtgccagacactatgttaagcacattaccttcctttttgcagtagctttcaaactttagttatttgattactaccttcatgaattttgccaaatctacataccatctatgtagttgttaacttaatgtttgtctttatattgaccttaaagttctaactactttagctttatcctgggctataatactcatgaaatcatgatgtgctaattattctttaaatacatactatataaatgctatataaatagcattttatatttaactttaaatatcaaacatataaatggtgcttatataatatgtatttaaagtgtttatacattataatataatttatcttttataatttataaatactatttaaatatgtatttaacactattaataattatataactattaacattaaaattgttgtctaagcctctctaatataatctcatttaattactccctaactctaaagtactagtataatccctgaatatcccatattatatcactgagcccaagtttctttgcctataaagggtatattgtatcctaatatgtttttgttttctcacaatagagaaaacccaaagctcagttaaataacttaacccaggcctcacagcagtttagtggcattgctagaacccagatccaagtctggctgactccaaagccagtgcagctaaccatgccatctaatgacatgaaggaatgttcagcagagtaagttgcaccagatgagaacttaaaggtgagaccctacagggcacagattgatcaacttatatgattgtgtgtacaggggtgggtgagtttagaaaccacgtataagggagcaaggacactatatcctttatatttttaagtttttttttaaagtatcatatctagagagaagttgaaacagtagtgaagtgatcattccataaccttcgcctttattcaccactggttaacattcaccaatttgttgatctctcgctctgtagtgtttgtgtgtgtgtgttgttttggctgaaccatttacaaataagctgtagatatttgtgtcatttcacccctaaatactttagcatgtacaaagaacaaagacatcctcctacataattagataccattattatatccaagagtgtgaaattgatacagtaatattatttaagatgcagcccatatttaaaatttcccaacgtctccatagttcccttattgctatttttttcttccttccacaatctaaatcatttgttgcatttggttgtcagtttgtcttaatcccttttaatctagagaacaacccttctacctcttttgtctctcctgcattgacgtttttgaagattcccgatgagttttcatgattaaatttaggtcaatctgcccccttttttttttttttttttttggttaggaggggacatatttctttagtaatatggttatgcacaattacttgaaaaaacttatgcagactagtcagttaacagagcaaaaatccttaaaaccccaattactgaataagaaacagttcttcaattggcaaagtaaagagaattaattttgatctgtggtagctacacccaacctcccccaaatcctctgtatgacttgactgtattcccctaactatctcctgaaaaccagacttgaaatgaatataatgctgctttaccttatcttctgtcattgtactagttgggagtcctgtcaattccaggtcttgtgtgagtgtggcacatgcacctgactagctcctgcctgtttattcgcagctctgcctaggcctagttatgcattgcaggaggaggagcaaggagagggaggagttgggctacccagacctgagagtccaagtctaatcttctcagcggcagctgaatattgatgggaatctaatcaataagtgctttgcctcagcaacctgtggcttcaatacctttgttccactaggaaagaaaatgggagcaggtcccttaggcataagttacaaaccagaggcaatcacatttcaaggcatgtgttatgtggcagtaattgggagctggtgaaaagagaaatctttggagtcttttgtagaagatgagatatgctgagctgccgtgctgtgctgtggagcatgggaggcacactgcactctgctccacagataattagtgctgtggtgtttctgtttagagctgagctgtgtggccggagaccattgttgacttgaatggttacctggatgagctttggattgttagggacttgggtttgaatctcaacattttactggggagtataaccttaagcaagtggctcactgtgacttttctctgattagttttttatttttgcctgataaaatagaaataacacacattttgttttgttgagtggattaaatgagataatatgtgaaagtgtttggcatatctcaacatataataagtacttagcaaatagcggttgttattattattgcttcatatatgtcaagaagcacttgctggaggctttaacgtagagttctcaaataaacctgctcatatggcttgatcttgggcctaagtatcccttatgatatccaaaccctgtgggggttcaggagatatcaaatttattgagctttaagtgtgtgtggcaactggggccacagattgcactgaggctcaaatggaaccagttcccagcggaacaaaaatgtaacaagcagcaacacaatgaggggtgttatgaagaaacagggtgagaaaatgaaggattagaggagattcagatttcacctttttattttgccaccctgttttcatttctgtcacctctgcaaggtgacacacctgaaatgtttggtttgagaaggtaattcaatcaaactacaaacttttactgagtccagcacagttccatgctccgagatgactgagataaataagtcacagcctcctctttctaggtgtttataacatataagatgagacatatgtaatgcagacacaatacaataatttcatagtggaaaagcgtgagcaaatattaatagtaatgatggttaatctttactgaggtcttgccgggtgccaggtgctgctctcagcacttgacatggattaactcgtttagtcataacatgaggtgctctgtgtcatagtgccaagctttggggagcagctttgaagtcagactttaaagcgcccagttagccacgctgactttccgcatcagttttggctggtgatgagcacgccccattgccagagcggtccacagtcaggagcggttccatggcatttgccagtgacatgacattctgcaggaaagcgtctctgtgccgcgtcgtaaatgataccggtgtggtttaccaacctttgtcttttgaacctgccttttcagaaacggaatttgccttgagtgcgcgggcggccagtgagcctttaacttcttgtgctcagccccggcctgccggcgcggagcacggcggcaggaaaccattctcttctcccattgggagcgcgacccgccattcactagcgggccttcggggcaccctgatcagtttcctcaggttcagccaaggcctctgtggttctgctctttctcagaaatgaatgagtaatctctgcaccatctgggatatgctaaaactttatctccgtgcggggagggggtgcgattcatttacattgatgctctgattgcttttgcccgcggagaactgataagcgattccagcctttcaggagagcgtgtcttggcgcccaccgaggagctgcaggtcgttgcactcctggctgtggtgaagtcagtcttttcgcactttgccattggagtgggcgctattcaataacgtgcaccagtgcctgcaatcacccggagatttccactgggcagggcgaaaccagttctgtgtggttgttctttaggcttcatacttttaagccctctaggtcacattcggattacttcgctgattaatgtaatcttggtggatgccagaagttctaggtggtgacaggac

SEQ ID NO: 316331 - DNA, 4001 bp, Homo sapiens
taatttagtcacagcctttctcagcacgatttcccaaacccagttccacaatttaggcaatgtcctgtacttttttgtactttcctgcctcagtgcacttttactttgtgttgtgcattctggtgtgccatttcctggcctcgtggaatcttattcaagaacaaagtcaaatgttatctgcaatgtgaagcctgactcccaaaggcagttactaactggcaactctgaactctcctaaaatgttcatcttccttatttcttgagtgcagaactctgccttattcattagaggccttagaatcccgtcccttagctggttcaataatgtttgaacgaataaaccctgttccattcactagaaggctggattctgggtacaacggtaggggtagaaatggattagaaagtatagagctagaaacctaaaaccaacaagacaaaaggaaaaatgtgaaccatatgagccacactttttaaaagtgtgcatttgtgtattaagcaagtggcatgaatccctggactcggttgtgttatttgatgggttgcctctccctgttaaccgcatagtgatcatttgattgctctaatatcattcattttggctttaatatttcaaagaagctcatttggacgaaacagaaaacttaccttgagttatctcccatacaatgatttccagtaaattaatgagcttccctccaacgtcacacactctttcaaaaggataaataaacctaacaccataatagcttaaatacactacctgaaagagtaacgattcctctgggttgaggctgaaaccgcaaatatttgttacaaaagtcggcagattcaagggccaaaaacaaaacattgcccaaaaagtaacccgctgtttggcccaccgaattgcaagtagaagcataacccacattttccctggataacatagttaacgcccaaccatcgacggcaatgtcctgagtggcggccaagaattcaaacaaaaagaacgccacagtgagagcaatcacgtcgggtgttctgtcatcggtattcccaagcaaacggtccacctgagtggataaatagatcatgaagagtcctagtatatactgtgtcgggacaagccaagatttgcgacgaccgaagttcttaacgtagaccgcatcaaccaacggggcccagagtaatttgagactgaagggccaaaagacaaaactgaagaaagcttggtctgtatagctaacatttttgctttgcaaaatgagtgggatgcttcccgccaagcccaggggaataccctgaagcacgtaaagaaagagtagtagcaaaatgctgcttagttcggcccggaagctctgtggggcttttaagaagtcgccagtgccggtatcccccagaagagcttctctgtccccttcccggcccgctgagtccaaatgactgtcatcccaaccgcctggcggcaggggaccgctcttcatatccagagagtgactgaaattccctggccgccgttgccggctgctgtccttgtgggagatggtgggtgacatatcagagacgatgcagagccccgtctgtggggggccgaggctgagcgttttggatccgtccagtcccaggtccaaggctgtcgcgctggaccagggtttcggtggttcacgggatggtggcagggctcagagcgataagggcacttcttactgcagcccggagtgctgaagccgggagccagtcctctggctagaggcccagaggatgcctggataggtgccccctggaacggcgtcaaagagcctgaaggagacccccgggcagcagcgccgggctcgaggctggaggtgtgtgccgtggtgccaggatggaaaccagctcctacctgcggcgggatcgaacggctggtctcccgacccaacacctccagctctcgctgctatcaatgcggcagagagcactttctctacaggactccagaaaaagcatataacttcctgcctcgcgcttcaggaagtggtcccagtctctaacaggtcccttcccagcctccagagcaagccaatcagggacacgctctcgtggcccagttcggaaacaatgcttggtgggaacctgcaatcttggctgccggaaccttcggggaggattaacgccggcgcaccgtgcggccggggcggggcgccgcccaaactcaggccctgtgacagcgactgtggcggtctggaaagcgtgggcctcggtcattgggcacgagcggtcacgtgacagcgggttcctccaggccagcgctggtggttgagtgatgtaatcacgtggggtctgaagtcttcgtgggtgtaggtttcttcgttatgctgacgacaggcagtgcccgaactctaggctgggagttgtgccatgctgctgctttcgtgggctgaccagaaaagggtagaaggattgacgtttacgaagtttttgaatcaggaggcaaggtcgccttgtgcccccaaaaggatagaaaaaggcctggcaaactggagaatcgcgtccttacggtgcctacatatttatagtacgaattaaactgctcaaggggtgctaggtttgtctgcagtccgtttctccctcatggtggaagacgcgtggggaaacttggtaaccaactctaattacattggtgattggaagactcgttacatcctgtttttatgttgcaataaaacgtcttgtggccgggcgcggtggctcacgcctgtaatcccagcactttggaaggccgaggcgggcggatcacctgagattgggagttcaagatcagcctgaccaacaaggagaaacccgtctctactaagagacgtacaggaatttgagaatctgattaattttttttctgctctctcacctctggcagaaagattattatttttttttcttttgagaggaatctcacactgtcgcctgggctggtgttcagtagggccatctcggctcgctgcagcctccacctcccgggttcaagcgattctcctgcctcagcctcccgagtagctgggactacaggcacgcgccaccacgcccggctaatttttgtatttttagtagagacggggtttcactatgttggccaggctggtctcgaactcctgacctcgtgatccgcctgcctcggcctcccaaagtgctgggattacaaacgtaatggcaggctaggcacagtggctcacgcctataatcccagaactttgggaggccgaggcgggtggatcacgaggtcaagagattgagaccatcctggccaacacggtgaaaccccgtctctactaaaaatacaaaaaattagctcggcctggtggcgcgcgcctgtagccccagctacttgggaggctgagacaggagactcgcttgaacctgggaggcggaggttgcagtgaaccgggatcgtgccactgcaatccaacctggcgacagagtgagactccgtctggaaaaaaaaaaaaaaggcaactgtaaagtcctctaatctttgttaagtagaagaatagattgcagaaaagaacagtgttggccgggcgcggtggctcacacctgtaatcccaacactttgagaggctgaggcgggcagatcacttgaggtcaggggttcaagacaagcctggccaatatggtgaaaccctgtctctactaaaaatacaaaaatcagctgggtgtggtggctcatgcctgtagtcccagatactcgggaggctggggctggagaatcgtttgaacccgggaggcggaggttgcagtgagccgagatcatgccattgcactccagtctgggtgttaaagaaaagaacggtgtcatttaagtccaatcaagattaaaccaaaacaaccatgagtgggatttatattgtgctggattcaaaccctggctctaacagtagttgtgccttggacagattacttaacctaagcctccattttgatgaaaattaaaatagagttcataacatctatttcagagagttgtgggagttaaaggaagcagccaa

SEQ ID NO: 316332 - DNA, 4001 bp, Homo sapiens
aaaaaagatttcttaaatacatacttatcaaagcttataatttatactgttgatacaatatgaccgcacaatataatgctgacaccttaccattgatacaataattacaatagtaagtacctcacaaatgccaagtgaccaaacaaatatatccttctacttcaaaataaggcgcaattacacattttgctataggtccagaaacacctgttgattgaattaacagtcaaatgttacgactggttcttcaccaaagggtttgatttttgtatctgattgactcacatttcatccattatcaaacattttttcttgttgaggaatgcaaggttaaataatcaaatttaaatatgctttatcactcacatgaagcaaaaggcattattatttccatgttatatataacagaaccaaaggcaagagagagatgtgtgattagatggaagtgctccatgcatataccaagtcttaacttaccttcattggcagaatacttcactagtaagatgcgacttgagcttaaagcaatgaatatggcacctagcaggaatgtatacattgttgacaaggagcatattacaggatgactacagcactgtttttccattccactgttttttaattaccttaaagagaaaaacactttcatgaacgaccttgttggcagaccctaaacgcaaataccattgatcgtgaggacaaaaaaggaatttttaaaaaattttggctatgactatatcagcaccaagaaagttgaggcataaagaaactatgacaaaaggaaagtgaaaatctgataagagggagtactctggagacagaaaacgtagaaccagattagacctgctgacaaaggtagcaggtgagcaaatgacactttgcaacagcagaaaagaattcttcaaagcaattttgaattttatttttaaattttatttatttatgtattttgagacggagtctcgctctgtcacccaggctggagtgcaacggcgcggtcttggctcactgcaacccctacctaccggactcaagcgattctcctgcgtcagcctccagaatagctgggactacaagcgcccgccaccacgcccggctaatttttgtatttttagtagagacggggtttcactatgttggccaggctggtctcgaactcctgactgtgatccgcccgcctctgcctcccaaagtgctgggattacaggcgtgagccaccgcgcccggcctcgcttttactcttattagtaaataattttgctgtaagataaggctttcagaattgtattttcctcctcttttccctcggaggaaaaagcttattaggacagacttcattacaataacgaccaaaatggaaatatctgaaacactgctgtaaagttttactgaactagttagtgtttgaaatggaggagatcgtagaaatcaatgaatctaaggccctcttttgataggctgaggacactaaaccccaggttgggtaagtaacttgcccaaagcctcccagcgtactgtaggaatagcgcatagagcctgcggggagtggggagaaatgccaatactgacagccccattgggcgcacgcctacaggacgcctccccgacaggagggggccagatttcccttcacagtcagggactacccttctagtcacacatgcgcagtagggctcttcactggcgcaccctcccctcagacgcaggcgcaattccttgcccgcggggcgcggttacctccctcagaagagcttctagtggaagaacgcacatcctagagctgagacagtaactgtctagccccgtagtagcagcagtagcctttagggtccatacgtggagaagctacagtaggtataggcgaaaaagcccctccctctaagccgcctattgcagaacaaaaaccacgattacgtccggattgggaaaaagcggacccgacacccattgcgcaggcacgttcagtgttacgcttccggaaggaggggagaagcggcttatcccgccccagcccggcccctttctcacgtcacgtgccgggagagtctagtgtcacgtgaggccccggtggcggcgcagctacggcaagagagtgagaaggaagggaagccggaaggggcgcgagtgaagcaaagcgaggacagacagctcgcagagggcgaggggtgcgtgtgcgtccgcttctcacctcaggtctcccttcggccccgctgccctccctcgcggctgggtgacagctgggtccggtccgtcgcgggctgcctggggtgcgaggatcgcgcaccccgtcttcgcgcgctgtgcctgccgccccgccccctcgtcccgcccgtcccgtcgcgtcgcgtcccgtcccctcgggtgctgccagccgggtgctgatgcgagtcggtggcagcgaggacattttctgactccctggcccctgacacggctgcactttccatcccgtcgcggggccggccgctactccggccccaggatgcagaatgtgattaatactgtgaagggaaaggcactggaagtggctgagtacctgaccccggtcctcaaggtaagccaggccagggttgccgggagctgtcaggcacatgctcgacttttcagggaccaggcgccgcaggagtccccgctttctccggcggggcaaggtgtaggaaggcagtagggctcgagacacagggaagtgtgcagcccccacccgtagtcttaaccggctgttcgttagggctttctgactcctcaggggtaaacttggagcgacgctctgcgtgttcctgccttctcccgtcataactctgcgcggtcgggtacgtcgggttggaagggtgttcggaggctgagtagattgaagaacgttaaatccaaacactggaagtcttttagcctttttaagcaaggattttgcttctctttaaaaaatgaatttagtgtttgacacacagaggtcaaaagagacctgaggtgaggtcacttttcctttaagtttcatgaaagtccgctgtagtggggaagttgtgactgcgatcccaactcgtttagatttcagaggaaggaggtgaaattggcaacattatctcattcagtaaccttgaacccatctaacgagcaaaacctttttcccaagcttttcagatagccgtagctggttattagtgataacaaggcacggtttgaccttcctggctgtataatttttaaaaatatattggcaacagtacagcatttttaaagtaaaaaattgtgacacattagctgttacagtagtgactgattttttttttaaaggtaaatttctacaactgccttcaagcttttcttttataactcttttggagtgttttgttgtaacttcatttttgctttctgaaaagtgagcaagaatagtaaattaatgggaagttcttgcttagtttttgttttttttttctagttgtttttaagctttcagttagaatgtaccaatctcagtgtgggggtgaaataccttaatatgctaagaatagtggagagttttgctttgctccctttccatgacaaagggaagtactaggtctatactttttaaaatacgtttttgtaaagctccttttaaaagaataacttattggccaagtaagaaataaaccagcgattataaatgagaatttcaactgttgctttgcttacatttgtttactgtgaaagtcattttaagattattcagtcaaactaagattggaaaataattttcacatttgaatcaaatgcttttacataattatgttaacttttcagaatatcatatctacctaggtatacagtattttaataatacaccattgtacaactttttagtttccgggagagaggagcaagagactgcccaaatgaaatataaaatgtatgatgtagaattatgttttcaggagtccatcatacttgctcaccaaactgaaaaggaactgttggcatgtcagtatgtatggtatatgtctttagtaaaaaggaaagaatgaatg

SEQ ID NO: 316333 - DNA, 4001 bp, Homo sapiens
tatgatacattttagtcatatgttaagattataaatttctatgattatttatatgttgttcttattaaaatttacattaattcattttccttaagctttctttaaggaatttttttggtatcaatatcaattttacatcttcctagacttttgttctggaatgtaaatgagtataaatacttaattgctcagccaaataccaaacacttcaatccacaggctctgtgcctttggaacagatgattatgaaaataaatggctctgcagagttcacatttactagaagtgtcaaaaaataaagatggattacaaaagctctaaaaaatgtgtggcttgtagtgtgtaatggttttcaaaagggatgagtgtatttgcatgtgtgttaggtttgtgcgtaaatgcacatacctgtatctttcataagtatatgtgagaattcctgtttacgctcatggtgtgtactttctcataggtaataaaatctgttatgcatatgcttatctgtacctccaaggcaagccacatttgctttcgggttatgttcaggaaaccagcctcaacttgtctgaaaagagtttcagtgttgggcctgctccactctggccaccagccatggagatgggctatttttggcaaaggtgcagagtagaagggcaacgcaggccgcggcccaggaagtcagtcgacgagggcgcgcgaggcacttcagcaccacggacataggcaagcctgagccaagtcctttcccgcggaggaagatcgctcctccggagctacccccagccctctggacctacccccagccctctggacccacccccagcactctggacgtggggggttactatctccaggtcctcgatcaacactcggacccgagctttccgcctcgctcctcgcggagccgggtgaaagaaaacctggcccgagatgcaggtccgcgctgagccttcatccgccgcaacacgagtctctttcctgccggcccgcgcgacccttcttccctctcctcctctcaaatgaggccaaatgggtgcacgtggcgtagaaattctacagcgcccagagcactgtgaggaaagattcgccttttcctccccgtggctgctggaggctgtgcggacttgccctgagccttctccgccactctcggccgtgacgaggcccttcctccactaacccttgccctcgtcttcccttgggaaaagatgtctacaaaccgtcgatgtaccacgaaaatctcagcgcccacagactggcgttcaagagtcatggacatgagacaagagagtaatggaaaatacaaattcttggccatatttctaaaatcatccagccttttttaaaacttgtatttgaaattgatcccatatgacgccacagtgactcaccccttgcttgggttggctactgggcgagaggaaagcaacagcccctggccttcatcatggacgctgcaggagggcccagacacgcgacagcggaaagaaacgggaaaccgggccgtagccgatgctggccctcccgtccccgtgtcccggttctccaggagggcagcacagagaaatgcgggccccgcggcctttcaggcgtcgtgcagagcaccccgaagtctgcaaagcgggcggggcgcgtcgcccccagcccggcccttacccaaaaagactgttgtgccccttaggtgtggcggctaaacgcgggtgtgtggagttcggggtccgctctcattcccttgtcgggcggccgggcaggcaggatcaaggtcccagtccgccgccgccgaccggctcccggggcccggttacctgcgtgtcgtggcgaggaaggtgccccggaggcgactgacgcgggcgtgccctcgcctgggaaaatcgaggcgggcgctgcccggagtactgcggagggagaggggcgccgccgcgcggactctgcgcctgcgctctccgccctccgccgcccccaccccacaacctgactggcgccggagttggagactgcgggggacgctcagggttgtgcctgaactgaaggacttcctctacccgcgaggtgggagggtccacgggaaagcgcccgcccgggcccctctagcttacgcccttggagggcgcttgtttgaagcaattgcctgtctgccagggctacgtagtccgctgcaagtgggcacggaggcagtttctgtccatttccacccattgtttgcgcttaaaagtcgcaagtctattccttcatgtttaaatatgtgtccagcatcggaaaatcgtggtccggaaaagtcttcgggcatccccgagtccacccgccattttactgataaggtctctgagggaagggtcttgacactgcacagctggttcttctacccaagtgcatatgccccagtcccaagtggaatgaatatagcctcttggaaacagactggtcattaaaagcagtggatttgatgggtccaggggacaggcaagaaagggtaagggctgaaccaaggtgctggctgtgggaaaaaacaggaggtgcttgctggtttttcctctgtcccttcagacccactctccactctgctctgtgactcaggactgacctttatgggctacgtcaactataatctggctttcaattggttttggcaagtgggaggcacctgcagatcagaaggcaggatgtgattcaggacctcccctgcatccccagcgggccaccctgttagcagtggctatgttcttcatctgaaagccattactcccatcctgtggccctctcctgcagttttctccaggttctggttaccactaactacccttgccccttcaggcctggagtgggtaatgacgcccagaggtttcctttaaccccatccacacctttttaaatagtcccttcattaaactctcctcaactatcccatcttttccccacctttccaggacgctataatagattttagtccattgcggttggcaaaattcatgaggacaaaaatatatgtaaaagaaatacggggcttttaaaaggcgagaagtcttccagagccatcttgacagttccctgggctccaggcagccagcatgctaggtggtctccccactgggccccatagcccgagggtgctagtttaggtagacccaagaatggaattcagactgctcataaacagtgtgatcaccaaagggctggggatcatttcagagtccagcataacaggattttggattcctcttgaggtagagagacaatctagatctttatagagcaagtgctggtgctctcccaactacagctgggctgcttttgaatgagtcaatattcttaggacacttaagagagtcctggaaacagtgtctgacaagtgtgcttaacaagaaactgctgagtgaggcaattgtcaattgagagcctctggctgtttctgtagaaaatccaagaatgttcccaaagagggggaaaaaggcaagagggtaggaagtcattaaattgcctctagcacactatggtgtgcttggtctgaatccaaaatttgaccatttctcgggcttgtaaaaacaaccaaactgatttgactactttgattccttccccatccccttgaaaaacaaaacaaaaacaaaataaacaaaaaacccaccaatgcagtatcttagcaagacttacccaaagggacccccagctgtagctatttgcaaataaaattaatgtccaagcaaacacactatttgtactgaatacaaatgagaccagaacagaacatttaacatgtaaatatttccaaactttcacccttccaaagagaaaggatcatttgttgttcagacatgcattaattgtgctgatctcaataaggaatagaggtaaagaagcaaaaggagcctcagaaggctcggctgatctgcaaggctcagattttttgttttggagaaggtgggatggggtggggataaggaaggcgaccagcaaagtttgagtaagggagtaagaaaaaaagacctggaatgagctgactagga

SEQ ID NO: 316334 - DNA, 4001 bp, Homo sapiens
ggcccctggccatgtctacactaaaacatcctcccactgggtcccaattctactatagcatagactgcacattccacctcagctttctgttcacagagacaccaaaactgcacctccctggtggcccaccccacaccactcccctccaaatatgtttccctctcaaactggatgcttgtcctcacacccagcccagacttccagggtgtgtccagttcagcttaaaatccttctctgactcaacccagagaccatgaaccacccagccagtcttgttgtgcctcagtttctccaactgtccagggcttcaaggctacttgctagggcagtggcacaaggacaggagcaaccagttgtcatgatctggcaacctggagccctggactggtgtggggaccatttgtgacatgggccaaaaaaaccagcacacaacaaggagtggcttgagaagccagcgaagacatgggtcccatgggcccaggcagaacaaaattctgagatacagactcctaccctccccagagattcagccccctgctcccaatgtcaagaaatcagattcccatttctggtttcagtcattccagccctctcagagacgtgccaggcttggcctcttccagtcctgatccctcccgtcagtgatgcttcttgcaggaagggtaccgtggctgtgccgaatttcccccattcaaaatggaaccatctttgggtctctttagctttctatcccccagactgagagccccgagggatgtgcttcctttccagaaggaaatgagccccatcccagaccttttacagaacagaacaggaaggggtgaaaggtccaagggccttttccaggggcagctctgtggccagagtcggtcatggaagaaaggacagggttggcaggctgaaggaaggatgggcatgagtggggaagtcctccatggtgttcctcagggctcaagagcctttgacttagcctttctcagacctgtttgagagcccatacctggactcaggactcaggtccccgtggggggaaaagggcgggtccccgcaggtccctcccctggcctccccctgcctgggtgtaaacaaacgcacgcatttgctgtggccaatcgaaggggccaaccgggcgggggcgggctcttgcaaaccaagtcttggttccttctctccgccgtgcgctgcgcgggctctaacttacaccctacccagcgccaggtggggaggagctcgcacggcgccccggcctcaggtcagggagccactcgcgccctgcgcccgctgtgcccgctggctcctctgcaaatggcaccggctctgggaccagcatgtaccccgcggcccctcaggcggcccggcccgatctgccctcaagcccttgtccggagcagccgagataaatatacccggattcccatcgtgccagccgggctgctctgcctgtcaggcgcccgtcggggcagcgctccagggactgctccaggcccctcttgggtcctcccctcgggccctctccagcctgccccatgggccctgcctcaggaagcctgtggtgtgccgcccgagcccccaacaaggcgtcctgtggtcccagccccgggtgccgccgacctcctgctgtacctcgcagccccgccgagaggccctaaggcgacgacgtgtccctcccggtacccccagggccctgcttaagctcggcgctgagtcccgactggcaggtccccaagaccagcgcctggagcgcgcggggctttggctcgccggaggctggggcgcctgcccgggtcaggacggtagaggagagctgcccagagcccggctacggacaggagggtggacagtagggctcggcccacccgattcccctgtgcgggtgggatgaactcccgaagcggtacctggcctcgcggttgggaacgtgcggcgctccgctcgggccggtgcggttcgctctgctcccggctgaactcggctgcaacagcgacaacagcgacgcgggatgaagggcgcccggccccgcccccggcccgccccccgcccgccaatccctggcggcccgcgggaggaggggctggtcgggggaatggcgggggccggggcaggccgggagcaaaggggcggcctgagcgttagggagcccctaggtgggagagcagagctgccagagggactccgttgagtcttgtggggggaatgcttcagtccaaagcagattctctctgaggtctgtgggtgtcacattaacccctgaaatgctttgcccacaccccccaaagccagaaggggagcttccgccaagaggactggcaatgcatagcctcagtgagagatgcttgaatgggggactttcaggcgacactcaggcaacaaaatacctcttctacctgcctcccccttcccaaccaggggtggggtgggggcgagggtgggagggcttcttatatcaattctgtctccaccccagatattcagaggaggctgaggctggaacacagagggcaggggcagtgaggtcaggcaaggagtaaggcttggcttgcttgagcctcacctggggccccccgaccatgacccccgtccttatttagaaggtgtaggagacagctgtcagcctgtccacaagaagggggctgggacttggtgtcctggggacagacaggggttttaggatggccccgttcttggctgggggctccttatcccacccctgcctgctttccacacaggcccttggtgctcagagacgggtggtgggtgttaaggtcccaggttccaccagtaggaagctgggggagatgctgaccttcggggtgaagtgggggggttctcagaacagctgtgccccttgcttctcagtcactggctctgatccgattaatctcatggcctctgctgttcctattcaagctggtcttctctgtgtcatgcctgccccacttcccagtgcggggggaatgccctgagaggacatacccgaccctcccctgccctgggctgggagtcaggactccaggattttctcctgctgactcacagaaccaccacagccaagccctggcgtaccttggtttccctctgtgacatggaaatggctgtcttttctcctgaggggaatgagtggaggggaagctgtgagaccgggcaggggactcagctctggctggcagggctagagagaaaggcattgggatggtggcaacccctgaaaacctcaagccactcgaacttctgccttgctggtggctggaaaatgggaaagggctgcctttcactcctggtctggggctgatatcatccttagatcagagctcactttgactcccaccctccaaatgggcatggttctgccatgggacagccatatagaagaggtgctgacgagggtctcaggcctgcctcccacccctcaacctcccacttgcagacaccctggatgctcacaggagctatctgcaaagggctggtggctcccactggcagttcttgaggggccagggctggctcaaggtcacctgggatatgggtgttggggtcctcaatctagactggaggaagcaggggctgactgggctgggctgctgtgggaggcccagaggagggtatgatgtggggtccctgggtcagaccagttgtggccaggctgggggaggggctgactgtttgttgttgctaggcctgggccccagccagggcaaacacagctcggaggcctttcccaccacctgccgaatctcccagcccagcctgtggtgaccggacagctggacagctaggatgtggctctgagagctgccggtcgccttcttccagaggctagagggaatgtccatccaagcaaccacagagttgcaggcggccccttgggatggagaatgggggaagctttatcccaagcttcagcccagcctccgcctccactgccccatctctgaaaacgtaaacccaggcctgaaagactgccagacccatgcagcagagctcagggctccaggaccgctcag

SEQ ID NO: 316335 - DNA, 4001 bp, Homo sapiens
agatgccagaagatgccagtggaggcattgcctccaaggtccccacagaggacattgggcaatgtctgcacatggttttggttgtcccgacagggggtgatacaggacagccccccaaaacaaagaactgccccaccccaaatgtcagtagtgtggaggccgagaaaccctgctatggggcagtggtcagagacccttgtgccttgaaaggggctaggctgggcaggacaggttgtggaccacctggggccacagttcagagccacgcctgagtctgtgaggctgcccaccctcccagctgccagcatggggttggggggtatccgcccccatcagactgaggaggaaacggacactctgtcacccagaagcatccctgtgtcaccctgtgaggttggccttggacccaggcctctaggcgccccgtcagcaccccagtgcgaacacatcctgcccggggacctggacccagcagctcacacagaccagggctcgcccaaaggcaggcaggcagggccactgctgaccacgcacctggctggtcgtgattctggaactaatggtttctgcctggcagggaggccgccaggacctctgggcttcacccctccccaccttcacaggggacctcgcctcagtgggaatgttctggagccggaacccaaggttggaatcccagctcctcccctttctaggtctgtgaccttggaaaaattaaactttctgtacctctgttgcctaatctgtgaaatggggtaatactacctactgtgtagggctgtgaagattaaatggagtcatgcattatcatcacagggcacctggcccatcctcaaccccagttcagactcctcaaagccctaaggtttcagatcaatggtcagaaccacgaggaggacctgctaaagacaagtatggggacccacccccaaggtttaggatttagaaggtcagggtggggctggggaacccgcatttctagcagatctcaggaaaggcagtgctgctggtcctgggaccacagtttgaaaaccactggtgtaaaaaaagccttctaaaaaaaagtgggatttgatcactaaagtcatatggaaaaaactggaagaaagaggaaaaaataaacaaataaataacgggattttaaagagacctatcccaccggctctcctggatggagagagtgtgggactctgagacagactcccggctgggcacccccaggaggttttcttcaccagaggtttgcaccgagcccacccaggacagtgggctgagcctgtggtagaggctggcgggaggtctggctgaggcagcgaggggtccctgcgcgcgggcgctgcaggagtcacgcgtgtgacatccaaccaggagccgtgccctgagcaggccaggaaggaggagacagggccgctgaatgcacaccgcagcggtgtggggagcggcctcagacacctaagggtaggaccggccggctcccccgcgacccccagcgcctgggttctctcccggcctccccgaggcgtggcctaccccaggcatggccccaccccgccccaggccgcccctccgacccctcgtgtttacctcatctcccgcgcgcctttcccccaccgagtcccccaaatcccggtccccacctgactccccctcccgccgagcccccagggcccggcgcccggctcactcgcctcccgcgcacccactcccgggcgccctctcccgcgcgcctccccgaccccccttgggccccagctgaccccaccttccgccccaaccccgcccggaacagggccgcgcttaccgggtcccctcccaggcggcggcgggaaagaggcgggcggaggacgcaggggcgggcctgcggctcaggcaggaagcgggaaggccgggcctccctggccccgccccggccgggcggccggacctcggacgacttggcgctccgggacagcagcagacgcccaagctccggcagcgcagagccccgccgggggcccggggggctgggagccggggatcgcggggacggaagtgggggaccgagtctcgcgagcccgggccctcctcgcagctggggccccactggcgcccccgcgggagcgctacgggagaggcgcctatgcggctgcaggttttattatggagctgtcaaggtagaaaggtacggagaacgggaacccaccgacagccaacttcccttgggacccgccttttgctttaaaaacaacaacgacaagtctgtgcttcaccccacacatgcctttcgttttcccttttttcccagagtaattttaaagcatcccagtggataaattctcctttaaatactcgagtatgtttaatcagtaaggcctatttttttaaacattctcatagtattacggtcacacctaacgaaattggcaattcccagtccgggcctgagggaggcctgatggttcacaagacttggtaaaatatatcattatattttaaaccaaaaaataaatgataaggcacctccccgttcccaaccaccaaatcatccgaatggacttcttcctcagccaggacttttagaatttaacctgaaaaactggttcaggccataaggggaagtggaggccgaacatgcctcattatccctctcctgcattaacatcaacacagactttaagtctgataagaaacattttacagcctcttctctctgaagcctgctaccctatccgaatacttcatctgcgtgataaaacacattggtctccacaacctcttaacccagacattcctttctttaatcccaggtctttggacaaactcaaccaattgtcaaccagaaaatgtttaagttgacctataccctagaaccaccctccccctctttgagttttcctgcctttctggatcaaacaaatttatttcttaaatgaacttaacttgaagtctcatgcctcctcagaatgtattaaaccaagctgcaccccgacctccttgggcacatgttctcaagacctcctgaaggctgtgtcactggctgtggtcactcatatttggctcacaataaatctcttcaaatattttacagagtttgactcttccacaataatttggcacccagcgtggggcctcagagaagactcaggaccccaaaggagttgcctgaactcggagcgaagataccagtggggcccattgaagcctcccagacttctagcttctcccccgatggaactggttaagttctcctgagccccagatcgccctttggttgacagtccttcgtttagtgtgagctggtttttctcctaggaagttgttgtttaaggattctaattctagttcagagacacattctaaagggttttctttattgctttttctcccaaaattaatcttgattcggcttgtctgcgcatttgtgtgaggaattgaactgttgttttcataggtaaatgagagactgagttttctcaactccaaagagaaaggcatttgctcctcccagccaaaacgtgctcctgggtgactgggggccttgtgggagtgtctgggggggggttgacatcctgtgacatgcagcagccctatggggaaatccccaacaaaaattaattttaaaaatggcttgtccaggaatgcatataaggactgatcacccatcattttgagccctctcaaaggtaatagacctctggagagagaaactgagacatgtaacagggtggaaacaactcagtggtgacacatggtggggtcctgcccacaagcagcacacattgatccaccacacaaaaaccctaggccacagctcagttcctacttctaagaaaaaaaaaggtgggaaacaaatgatctaagaatgaggagaaaacaaggagaatgacctcatttcgggcactctgttggttttatggtgcgtctacttgccagagcttatgtaaaatggaaatataatgatccttgtgcacatttacattaaggaaaagagccctaaggtcaacctgtacactatagagttc

SEQ ID NO: 316336 - DNA, 4001 bp, Homo sapiens
gcccagccctccggaacgcctaatagtctctctccccagcatcagcagggtggtctcagggaaggagcgacaagctctcagcacagctctaggatgaggctattgggggaacaagtgggtattcaggttgcaagcccacagaagcacaggctttctaatggggggctggccaggatgcaaaaggccaccccagccccaaaaggggatgagcgtcccatcaactgagacgagcaagcagaagccacctgggaggcatcgtgagctcagattaggaggctgggtggcctggtgggtacagactgcccctctccaacttggacccaggggcacagaaagactctgagtggccattaggaaggaggtgctgcatacactcgggaacatgaaatgctacttggggtgtcctcatgggttgaaattttaaatttatatttacagattaaaaagcaaaactgcaggccaggcacggtggctcacacctgtaatcccagcactttgggaggctgaggtgggtggatcacgaggtcaggagttcgagaccagcctggccaacatggtgaaaccccgtctctactaaaaatacaaaaaaattagctgggcctggtggcgggcacctgtaatcccagctacttgggagctgaggcaggagaatcatttgaacccaggaggcggaggttgcagtgagccgagatcacgccattgcattccagcctgggcgacagggcaagactctgtctcaaaaaaacaaaaagcaaaactgcatactataaaccatatatgtatatgtttatatgtacatagaaaattgtcttgaaaggtccacagcagcggtgatagagatgaagggacagccttcctccattgcttgggtgtattttccaatttttctaaactgactctacgaaatgtttcagttgacagatagcacaaacctctcaatgattccaatacgctgcccaaaccatgctaggggagaaacagactgtgataagcaaatctccctcagcacacgcctccactgcagggagaccgccatggccctcccacctgcacccccagggctgcaaaccttgtccttttttaccaggggccacgccaggatgctgcgggctgggcacactgcagctctgcccacagggaccacagcatacagactcagtcatctggtcctcacaattctgtgaggtgagggctttcattatccccattttacagatggggaaatcaaggcagaacagtgtgactaaaaatcccctccactggtgagtggcagactctgcctcctgagcccacatacactgggaggaaggcggtttgagctccttgggctgaggaggcacatgcaggctaaggttctgacaaacctccatcattctgcgaatctctaatgctgaggtctcagcgttggaggtccctcctgccagcctcgctgacacccgggacgcccaagcagcaagggcaggttgagggctgccctcccactgtagaggcccctcatgtctccagcctgccctgtctgtggtgccaggagacccagtctgtgtgtctcccacccctgatcccccaaacacccagtacgcacttgaatggtgttcatcaccaggccggctgtcatcatgcacaagccggacagcagaatgggcaccacgacctggcacatgatggtgaagaaagattcaggcaagaccccatgtggggaccgggtaagctcacagctgaagcctcgcagcttcttgccctgaaagcaaaactccagattcagctgggtgaccaccatggccaggcaatgcaccacgatcccaggagcacgaagtcagagcctggggtgctccagtcctctcctcctggcccacaccaggacgctgttcccaagaagtccacacaaacagaagcttcccagtcaccaggtgccctgtgcctgcagagagttccccaacagcccctcggctgagggccagcacagatgagtgaggaacaaaggccagtgtgactcacggcctcattacagagactctgccaggccctgctgtccctccctgaaggtcaggctctcctcagacagtggctgtgtgtccgccgggacctccctctgccagtctgccatggaggctcatggtccctctgcaccggccttgacagcaatcagcagcccagcaggctggtccatactggcttgggctggacagagctgaagcccacgtggtgcctggccttggtgagtgcccacacggaggtctgctgccacctcgccctgtacaagtgtgctgggctgttcccctcctggcagaggagggcctggggagagatcagcacagagggactgcctcctcaggccagctctacagacctcgagttttattcctcaaggtcaagcagtctatgggtccccaagcaggaagccacgccctgggtcatctcaagttgtgtccagccagggggttcatggccacaggaagctgtgttcacagaaaaaaacgcaggcctgttctccctccatggcctggaagactcataaacatgcttccaaagtggcctcgctttcttcagctacaaatgtcagactggccctgctgacccctcctcacccagagaaggagaaggggctgggaagccacctctgactcctggggttctgttgttgggtgtgtcctctgcgcattccacaggcaccaggaacagaatgttcaggcctgagggcaggctggggcaggcagaagcccgaagctgggggtcagactcacaccagctgaacccagcactgtggtcgggtctaggcctcacttccactcccatccctaaactgtcgccctagtgggcacgttacctggttctcccgtcggactatcccaggcttaagtgcagaccccagcctggagtccactgccctccccagtgtggatcctaccggcctccccaaggctgtccctgcaaccgaactccagacgaatttctccagcacctgttcccctcgtgcccccaatatttcttgcactgcgtctttgtgcacacccttcatttactcattcattcaacagatatttttaagcccctcataggagcaatgcataactggccctaaactccagcacaattcccactgagagctagagtttctgaccccctcttccctctgtccccacagcttaaccgagagaacaaagtggaagagacgctgtggtagtcagtttctaggcatggatcttaagaaactgacaacttctatgtcctatctcttgggctgctcatgctcccagccactctgctgtgaggaagaccacgtggtcacacatagaggccgtatgccagggtcctgctcacagcccagccttgcacatgagtgggccgtcttgggctggcccaacagccaccacgcacgcagagcaggcggttcttctcaccgggccctgcccaacctgtagattccgcatcaaacaataattggctttaaacaaactgctaagcttgggtgtccttcgttacatagccgtagttaactgcatttggggaatctcttcctcatccgtgatctcgctatttcagatgtagcaactcccaaacctctcacagcccagacctctcctctgagctttcagatcatatacccaggctctggtagggatgagcatgtatctcactccaccagtctctcaggactgccacttccaagcctgcctctcccaagtggcctgcctcaaggaaaggtgcagccagaaatgcaagcctcactcggagcccctaccatctcagtcccacatccactctgcctgtccccacacctctcccacagctgtcccccactcctgcccacagacgctgccttcaccacggccctttgtccctctaatctgtctcctcacaaaaccactgtgtgctcttcacaggcacaacccacaggtgcactgtgaggatggcccttgctcacacagtgtgtggtcaacacactgcctgagaaaggagcatccggaccccttgcaatctggaaagacacatccacgtgagcc

SEQ ID NO: 316337 - DNA, 4001 bp, Homo sapiens
taaaaatacaaaaattagccaggcacctgtagtctcagctactcgggaggctgaggcaggagaatcgcttgaacccgagagggggaagttgcagtgtgctgagattgcgccactacactccatgagtgacagagactatctaaataaataaataaagagggtagaatgaagatattcaggtagttaaggttgggaatcattgttttaactcttcctctactgtttgctgttttggttgctccaaaactttataactgcgttataactgatacccagagtctgtcactgtggccatcaacacagccctgagctctcagtagcttatgacagcaaggattaatttcttggtcctactcatgtccactgtgggttggcagagggaatagcggcctttgtggaggatgcctaatggatgtgcagtccaacctgatgtggtgggctttgctctgcagtctgttcctgtttgtgtctctgtagctaaagaaatcaactcctctttgagcttgcccaaaaggggtcattcccacaaagaacagggaacaaagaggaactgttgattttggaggggagaaaaggaagggaattttcattacatactcccgtattctccccaaagacaggtctccactctgccacggagggtcctcttccccctccctccccctcttgccacgtaccgggccctcctctcttttccacctcccttaggattctccttccctttattacctggagcaagtctgtggccagcctttgattctgaatgtcccaccgccccagcttcaccacatcagaatgttctaggtaaatgcaaagctctctctggaaagacttctggtgaattccacttcctcaccctatcccagttggatgaagtcagatcagcagagcactagagccctggatccagcgtgctgccaccccatgcacacactccctgccctggtgagctgctggtagtggcggaggtttaatgtgcattcagtcacactggggaaggtcataagaaacagctgtgtgcaacttgccaccatatgaagtcacataagacggcagtcattatattataaaacatttttaaggaggattcatgagatggattactatctctatgagaagcagttatctctatgggaagcagaaacactaatttgtttctggcatctggacaccgtgaatgaggtcaccagtcaggtgtccttgcactctcagcagccagaaagctctgagctgaattgtggcccagctttagaagggtatgcagtttcacagcctgcagtctggatacaaccacactccgggtttgactcaccaccactttcctctcagcccccgttcactcatgcatatttttgtttattatacttctaaaccaccttaaatgcttctgttaacatggcgagacataaacgttctcaaaggccacaaaagcttataaaagcttatttcccacagaatagcctggcagtgagtcgccccgggggagatgagcctccatgatgttggactcggcttcctccatcgcgggcagccgcacacccctccttcccccgggtccaagtgctgcccacatccgcggggttgggcaatgcccatcgccgtgtcactgggtctgcttccagccagcccggggagggaaaggagggcaacagcatgaccccccttcagggtgcatgttggaaaccgcacagatcatttgcagccagatcctgttgactagaacttggttccatgaccaacacttagtgcaaagtatgctgggaaatccagcctttcttctgggcagccgtgtgcccaggtaaaatgcagaggttatatgacttaagaaagaaggggacaaagaaaggaaattgggggataacgaagtcttatgtccttaccttacactttcaggagaattatggaaaggggaagaaagctggaaagctgggtccagtctcgcccatctgcaccagaggtctccagcgtgactgcagtgggcgccctggctaaaaccaagctctgtttgtgtctgaaaagcagggagaggcacttcctggctctgtttgagttggatgggcctgtgctcgaggctttgcctgctcttctgtcacgaaggatgtttacggggaagccaggactgaccctatggagacaccaggctggcttccacctcttgttgggaggagtgtgagcggcctggctgtgggctgagaggcagctgcatgtgcttggatgctgccgtggataccccagccctggtagtgtttgaggcagaacaaagggaactcaggaagcagttgacatggactcatctgttctggtataagtggcacgtgctagggcaagtcccaccgctagggacgggaacagcttctctccgggaagctgccatctccagcaccaggcattgtggtagaagaccaattctgagctaggaacagagcccagaaggctttaagcagaagtgaaggcacattcttttctgtctggaggcagcaagatgtgaggctggacatgccaggagcacgccggggtctgagccgaccctgccgcagaaggcaggtgggaagtgggaaaaaggaggctcccggggggcctggcttgggcctgggcttcaggctctgaggaactgcacagagtgggagttggtgggtttctcctggacttctagaaaggcctgtgagctcagcctgactccagcagtgcacggggcatcaccagcaaggcctgctttggtggggtggccatgggagagtagagcctcccctatggtgggtgtgggtgcccaggagcacagccacctctgccaggccacccccagccaaggcctattccgggagactcggcacctgggaggggtgagttcctctacaggcagagggagcttcaacgtcctcctaacttgggaagtaaggggaatacaatttcacagtagctgtgcagccttgggcagttagatgtctctttgcctccatttcctcatttataaatgttgataaaaatacctcctgcctccctgggatcatgagtagcaagagaaacatgcatggaggatttggattcttgcctggcatcgagctggggctcaagggacagaagtgtagccagtatggagcttggcactgcctgttgttattgctgctggcagccttcgaaaggcggggtctggacaggcctttatggaagcacacacttcctagaagagcaggaatcataaaggaaagcagggcagggaatccctgaggagacggggaactcacaggcctctgaagggcagcatgacgcacagagaggcctgaagatgttcccagacatgcagaggctgggcctggagctctcagcatggcctgggcctgtgggagggacagaggggcctgcagtgggcctgtgggacccagaggggcagagccaggtgggtggggagatgagatgctaagaagagagctccatgtggggaaactgaggtaacagcaggtaggtcaggttgcagtgtttggtgcctataggatgtgggtgcagagaggagggccgcaagctcctacagggagagggcacaggaaagagagctatagctcaggtccctgggccaaggagaagccataaaggtacataggagacaccgtgtcagacggaagacagctctgcctggcattcccagctgggcccagccctccactgcaggccctcgggctggctaccagctgagagcacggccgtgctgacagagcaggggcgagggcccggccccatctgctgagggagtctgagctgcttcccagtccagggctcacccagctcaatccccgtcttcccacctgtttcccaggggttacccttccaaacctcctgcagccctgactgtcgcagcttctgctctttggggcctgagatgacccacacccatttcctcctgtctctctccccaggtgtctggctctcccaggccaagcaacaccatcatacccaggtgattgcgcaacttccaggcccacccaggaacacccacaggtggagcagag

SEQ ID NO: 316338 - DNA, 4001 bp, Homo sapiens
atacttgaaatacacagagaaagtactataaaacagtttattcaaaggctacacaaagaattacagaaggccaggcgcggtggctcacgcctgtaatcctagcactttgggaggccgaggcgggtggattgcctgaggtcaggagttccagaccagcctggacaacatggcaaaaccccgtctctactaaaaatacaaaaaattagctgggcatagtggtgcgtgcctgtaattcctgctactccggaggctgaggcgggagaatcggttgaacctgggaggaggaggttgcagtgagccgagatcgcaccactgcattccagcctgggcgacagagcgagactctgtctcaaaataataataataataattacagattatttaggatgagtttccagtattccattaccatcactgtgaattatcttccaataaccactgctaaatgacttcactgtctggtgactgagttttcttctatgttagagaacttatatgaacgtactgaactaatgaatgactactttccataaccttaactataatcctaaaagttaaaagggaaagccggcaggcagttttaaagacaactcttgaataaaaacataggagaagtaattttcctcttagttgtgaaagaccggacaattttccctgcaaccttcccgcctttgctggttgcatagtaaaaattagaagtaggaaaatttagaatacttccatctcctttgagtcacgaacttggaaaggagaaagagacaactgcggggacgcatgtgctctaaagaaagcaggaagtccgcttcttgagcatgggccgttcacccatcatcacaaatgggaacaccggccttaagtccatccccattctcttctaaccctgaaatcaaagccagtctcagtaggaaacgcgatcttgctagctgagttagagaaggagcaccagacagctcaggacaccctcctccttctacttggcctgcggcaggaggatactccccgggtcccagccagtggagaaggcggacccggcaggcaacagcgaaagagccttggccgggaaggagcgcggccagtccacgcggccggagaactcaccgaacaaagcgcaccgcggagcgggaggggacactcggaaagagggggaaagattcaaccagctcttcaccactgcctggggctagagacaggtggagccgccgtcctccttagaaggagaagaaagataggttttcgagggctaatctgaaactcctgcgccaaggcaaccggaaccgggaccccgcctggggagcgcgctaagaaacaggggaggcgagcgctgagggaagggatggatggtcggggtcacaggcggcctctgcggggatgtcggggtcccgcctgagccgcgcagaggatgcccgcggcgcgccgccggccgccccgactcgggcctcccgagcgcagccgctggccccctcccacccgcgccccaggccgccacacaaaggggatggcgaggcgcgccggccgccgggaggtggaggggcgacgggcctgggacgaggtggccgagccgcgacgcccgccgcgccccccgcctttgtctgcctcgccccgcgccctccccctgcggaggagccccaccgccgcggcgccctcaccctgctcgttacccgggtgagtagcggtctcatctgctcgccggccccatcagcctccatggccggccggccagcccgtgacggccgctacggtactgccccgcgcggtctgcctgcttctgccgctgcccctgccgccgccgccgagcccccggcgcgcgaggacaaacgtgggtgcgtccgtgcgcgaggtgtgcgcgcgtggggagagccgggcgccgggcgcgggagacgcggggcgtgcgtgtgcgcgctgcgactgctgggctggctttagtaggagagcgaggccgcggcgtggaacctgaagctagaactgagcgaaccggcggaccgagcgggaaggaggagagccgcgtaggaggaggggttcgggggcggagccgcaaaccgtgacgagcccggcgccggggccaggcaagacacgcccccccgccccgcctcctcgggtcacgccccctgccagtctggcaccgccagcctcctcagcgcgcccgcgggccgcgccgctaggccaccgggagatggggcgggagggaggcgggacggacatttgtcccagccaatcggcggctggcggacttccgctcgcctcccccgtgccacctcctcaggacgcaccgcccctctttgtataagcttaattgaccgaagctgagcgtctaactagtttttcaagtcggaagctcccctgacgttctcaatggggtggggggtcaccacctcccttggctcctaactacattctttagaggctgcagggaaggaggacgccacctctgtcaaggacgcccaggataaccctccgaagcaactaacgagtcttcacgactcctggaagtttcttttctgtcaatccagtaggcacgaaccccaactcagggaccgtgaaagatggggtacacttgaccaggtgtcctcctgtgcttgctcgcccactgagcaccacgacagctgccactttttttttttttttttttttttttgagacagagtcttgcaccagcccaggttggagtgcaatggcatgatctcggctcactgcaacctccgctgcctgggttcaagctattctcctgcctcagcctcctgagtagctgggactacagacgcgcgccaccacgcccggcaactttttgtatttttagtagagacggggtttcaccatgttggttaggctggtctcgaactcctgagctaaggtgatccaccagcctcagcctcccaaagtgctgggattacaggcatgagccaccacacccggccagctgccacattattgagtccaccctgtaggccgtctctcaaatatcccttctgtaacgggatgattgtaatacctgccatgcaggctcattgaaggattaaggggatttatattcataaaagtgcctggcacatagcatgctgataattttcattattgttaacaggtttctcttgagtgtttcataaagatgagaaatttggccgggcgcggtggcttacgcctgtaattacagcagtttgggaggccgaggcgggcggatcacctgagatcaggagttcgagaccagcctgaccaacatgacgaaaccccgtgtctactaaaaatacaaaaattagccaggcatggtggcaggcacctgtaatcccagctactcaggaggctgaggcaggagaatcgcttgaacccaggaggcagaggttgcagtgagctgagatcacgccactgcactccagcctgggtgacagagctagaccctgtctcaaaaaaataaaaaataaaataaaaaaagataaggagaggtttagttgggaagaactgaagccatgcaatggaaggatatataaatacatcagcggatccagagctcacatcctattcatctccaactgggtattagtaaagctttttgtcagcaataggtagctaggtatgctggatgactcattccttctttgggccctagtccccttttgtcctaaatttcccagagagttacttccagtccagcacacattgttcacttacttgtacaagagcagatgtgcctctattaatagctactatgtaaagaggcctacaattagagactgtgacatttggcaaacatatttcatttctaatcctctcaatactgcaaaatatctgccgtcatctttttcttcggcaaggcaactgagctgcagacgcagagacgcagatctttgtgaagaccctcacgggcaagaccatcactcttgacgtcaagccaagtgacaccattgagaatgtcaaagccaaaattcaagacaaggaggtatcccacctgaccagcagcatctgatacttgctggcaaacagctggaggatggccgaactctctcagactg

SEQ ID NO: 316339 - DNA, 4001 bp, Homo sapiens
tgcctattctaaaagggattaactgctcccattccaaactttcatttaggtcgcacaattgccaggatatgaagcaaaacaattaaccctcaccttcaaataacaacaaaaaggactcaaaaacagcttaagttatataatctcacaatacttataaatatattatttactatacttatttaaaatacacataccctttgacctctaaatatctatcatagataaatgctcccacatgtaccaaacatgacatgttaaaaaaaaaaaaagagcacatcctctcatggtctacacaggctgctcccactatatactgtctgtgaagtcttgggcaagagaaagttcaacttctctgaactttcattttcactgaggcattgtttccaatatttaaaaaaatgaaacaaaaatgtgtgtcaatagtaaggagacaatctcataccaaggagtgctaggaaacagtttgagaaaccagacccaaaaaatggaagtagatctatgtgtcctggtaagaaaaggtctcaaagatagttgtttactgcaaaagcacattgtagtgaataagatcaagtttatgttaaaaatatttacaagactaaaccaaaattttatttccacagacatgttttcatatgtatttatttgtattaagtaaaaagccggggaaaaggcttgatgggatacacaccaaattcttaactgctcctttctggaaagggaactgggtttgaatggaagtcaagttaaaatatgaatttattgttattgtttcagttttcaatgagagtgttttcatgcgtaacttgcataactaaattttttttttttttttttttggagacagagtctcattctgtcgcccaggctggagtgcagtctttgggaggccgaagcaggcagatcacttgaggtcaggagttcaagaccagcctagccaacatggtgaaaccctgtctctactaaaaatacaaaaattagctgagtgcggtggagcatgcctttaattccagttacttgggttgaacccaggaagtggaggttgcagtgagcgcatagagcgccaccgcactctagcctgggcaacagaacgagaccttgtctcaaaaaaaaacacaaaaaacaaaacctagttcataaatttaaaaacccagcatcaacacattacaaaatcaaaattcaattcaacatgaaaatcccagcaaaatcaaatctagttttgttagaaacagatttatgccttcataagatattttactaattcctctcatagttatttatcttgcctgaaaaagcaaaatccacaatttatatttttgttggtcaaattatcaaaaatgacacttaacatgccaaaagcaaagtattagaaaaaaaggatgttaaaagacacctttaaaatatagtgtctaatatccttttgacaccctaaggtttacaaaaatccattaaaacagccatcagagatccctgtcacaaattaatttttccattatataagacatatggctatagcctaaagtaatgcctcccataaattatgatgaaccatatggagtaaattcatagttatcgaacactttagcttcaaaacacacttaactattaagataaagtgatttctttcctaatatcttaaccaaataatttttaaagactcgttcaagtaatattaactatccaaagagttagttttatagaagaataaagatgctacaattatttttaactttacacaaggaattactcttcaacagatgacttccacagccaaggacacaaaggatgatactattctaagccagtgctaataagcctgacatttcttcaagcttcactattaaactctgattcaaattcgtttgtaaataaaagacaagatcataattaggtacatacaggtaacttcttctccagacgaaatctttccatagtaatatagaaatgccttgtttctgatgatgtaatgcagtaactcccttgaagattccagggacagtgagcacatatctgatttaggtcactgtgctttgcagagatgaattcttctaagttacttttatggtacagccaatcactgtgttctaagttacctaatcttccaagctaataactacaacttacacagggtcacagcataacagatttggaaagtaatatacacatttagttataagtaaaaataccaagaggaatgcagcaatccgttttcaactgaaacctttctgcaatgttagtacaaagagtgcatactctaagaatatatgtggatggatgtgtgagagtatggtttataattatcattgtaaccaaaaaacaaagtattaatatggacaatagctagaaaaaaaaaagagtagcacccctctaactactggacttgggattctctacattcttaaaaattcctgaagaccgaaaaggaccttggtttatataagttaccacatcaggattaaaacagaaaacttcaaagtacttattcagaattatttacacaataataaagccattacatgttaatatacataacattttaatgaaaataacttttcaaaaacaagacaaaacttagaggaatacctctgttttacatttttacaaatctcttcaattatctaacttaatagaagacaactggattctcatatctacttctgcagtcaatctgatgtgatctgcccttggttaaagtatatttaaaaatccatattcacacagatattctgctggaaaggggaggcatatttcaatattctcttcaggtagttatggacattcctctgatagttcatcaaactcaacaagtatattgtttcttaatagttgcaacgtagaatctgaaaccattccaaatgaacattttacacattgttacatcaaaatccatttgtctactatgcactttgaatggatctctcacatttttggaatgtatgtgttcacagggtattagagcttttccaaatgtcacatttcattaaacaatatcaaaaatttttttaaatcacacttgttaataatatcaccaacaatctcataagtccaagtattgagaaactgtcaaagtcaggttagcagatgcaagttttccaaaattctaagttttgcctgaaagtctgaattattatcatgggtaacaaacactatcagttgtttttcttgaagtgacaagttcacttcattcatttttgacaaaatatctgtcaaatgcccaagtatgattaaccaagtctgtcattttttctttcaggtaaaaatggtgttccatgaaaataacagctagttgagttcacaattcaggcaattaaccagtgatttttctccaaacaatcattctatttggatatgcagcagaaatgtttttacaaatgcttattttgtcattcagaatattaaagcaatacacaaaggcaaaaatttaataagataactagtttttactgcttcatcaaagtgctctttgtgtatacagatttgtttcttggtaccctcaattctataagctagcaaaatagatgatatttaatattttctataaaaatatttatatcccacagctaaagtcttactacccagctcatcctggagaattcactgatgacgtgcactaaataagtagcaaaataagaaataaatctttcacaactttacatagggagactgactgtacgtaacaggtgatagacatgtcatacacttcaaatacaactaaggcttctaaacttctccaagaacagaaatcccaataacaccaacagctaaataacatatataattaattacatatttgaaatcttcacccttgttatgtatgatatatacttggcaaataaacataaatctaaagaatcaaatacaagaataagacatatgtcagtcaatgatttttttaaattctcaatacattaagccccaaagaacatctgcaaacaatcaggttaaaaaccaatttctggctgggcaaggtggctcatgccagtaatcctaggaccctgggaggc

SEQ ID NO: 316340 - DNA, 4001 bp, Homo sapiens
ccatctgtccacctgagagctcaggggtggaatgaggcaaatacccacaaacacacacacaaaaacccgacaacagaatgctccagtgaggacaaaggtttttcagaaaggctggatcgtaaaacaaatacaactggttcacctgtgtgaagcacgtcactcaccgtaaccaccctctagagtgacatgggtccagggcggatgccgtgcagccctccaggagacccgatggggcttggaccacttgggcaccatcttgggtccccagatggctctggggtctgaaaaagcgccccaggtcgcagtgtccgcagtttgaatgagctttgaggccagttttgtggaggcccaacatgacggttgctctccggagccaggctctcatgctacccttttgacccactgactccttgaggcattgcccttctccagagccttaaccacgatgacagacaccgggccagttattctccccggctgcccaggtgcaccagctcagggccgcctctccccagctccactcagctatcctggtttccctcctctcagttccctctgaggagggtccccactcacctctcaggagttgggctgctgtgggaggctgagagaagcaggcggaggggatgccgtaattggtcttcagcacctccagaagatctgctgtgtacctggcgagacaccagcctgtgctcagaaccatgggggctgggggaagggggagggttgcacactggaccctcaaccactcctgagtgcaggactttgtccatttcccctcagggcctctttctctctctttctttctttccttccttccttcctttcactctctctttctctttctctctcccttccccttccccttctccttccttccttccttctgctctctctttctctttctctcttccttccccttctctttccttccttccttccttcctttttctttctttttttttctttttgagacagggtcttgctctgttgtccaggctggagtgcagtggtctgtcttggctcatacaggcagccttgacctcctgggctcaagtgatctactcaacccccatccccatgagtaagctgggactacaggtgcacgccaccaggcccggctaattttttatatttttggtagagacaggatttcgccatgttgctcagacactggtctcgaactccaggactcaaactggaactgggcttaaactcctggactcccgcctcagcctcccaaagtgctgggattacaggcgcccggcctcagggcccttttcttagagggagtggagaactggcccaggtgggggagtaagacaagctgccacctagccaggctgtgcctggctgccgtgcctgaagagcccaccgtggattctctccatgcgggtcgggcagcagcccagggactgaccagagaggaagagcaggatcccagaggaagggtgagtccttacagacggacgggccccctgctgctgagggatgctgccatttcctctgcgaatgccttccacagcccccgctctgcgacctttctctccccacgctggggggcaaggccgaggccctggagtgtcacaccctggcccaaacccacgttgtccctgaggacctaggaacagctagagcatttccagtcctgtctcattctgagtgcggccgccaaagggctctgggagggagagaggacaggccgcgggataggggccaccgctgcccagcgactggcccagggcccgccgccctcacttacctggggtcaagctttatctgggtcctgcccggctccatcgccgcgttctctccagcaatcccgcaggcaccggggtgaggaagggcaggcggggcgggcaggtgggggccgggggcagggtggcttgcctgggccggggtggggggcaagcagaattgcagagtcttcccctctgccgctctccctccttgagcttcccgggccaactttctatctcagagttcaccccggaggaatttgatcctctaggctggcggagttccctgtgcctgactcgtccctgcccccaggtgtggtccctcccacctcttggacaggtgcctttggccaccccttgcctctggcccggcccatcctataggattttgctgccagtctgccctgcccttccaggagccttctggggtggggtgggctcaccacgaagcccctgccctgggccggggtggggacgaagtcctcgctcctcaccgcagtgttccctggtcagcggcccctgaagaacctgctggaactcaggcttgggcactctgcagcggggagactcagggctgaggcctcggccgtgtttggtgctgtcagcctgatgtgtggaagggaggacaggctggaaaagccagatgaggccggtgtgggtttcccagaccccagttcatcacatctggatgatgggcttagccacccccacgctgggccggaagatgctgtatttaagaggcagagttgcagagtgagattgctgggcatttgacaggtcttgaaaacctgctgaattacaggcttgcaaacgattttattggctgatagcttcccttttctctctctccacatagactgaaatctcttcgaagccagacacagcatcttgtactgtggtacggtggtacctctaggttcctggcacgcagcctgacacatacgaagggccccttagaatttggttgcatagctgatgaaagcagccagcgtctgtcagcatgtctggtgtgccagggcccgcaggacatgcagtgtgttccttagcttatttaaactttaccaccgcgttacaagggaagtagtatccttattcccattttacagataaggaggctgaggtccagagaggctaagaaaccaggtcagacagaaagctgtggggtgtggagagcggccaaaggggcctgggggaggggctctgttggggcatggtggagatggaggtagtgagaagagggcccaggagagggtgcagagggtcaattctgggaagggagagggggcttcctgcgctgggctggtgaggccatacaagcagtggaagcagtccctgatggggtacccggaggactccccactcctgtgcccagacacctcaaagtctctcccaagagtcaagctgcatccccctccagcttcccctcctcctaaagtccagttcctgggacaggacaatgtcgtgaggcaggcgtctcaggggccagctgcctcctaaggtggaggtcagggaaggaagaggcctgcaagggccctgacccccagagggtcactggcctcagcccaccctgacaaagacgcagactgactcagcttcctcccagcatctccgcaggcacgttcgccaggtcattcacccccagcccactgagaggccttgggtttaattacccaaagccctgaactttagacttcccagagctgacaacagggcgctggggatgttcttagaaacttcaggacacagtggggaatggcaggaaaggtgaaagggcaggagggagccggggggggctgcggttgggctgagacgggtgcttccccactgggcagcagagactgggagaccccaggagagaccggcagggtgtcagtgagggaagggggcttctgccccacccaaggtctctacggggttgtcttctgtacagtgtggcccgggatccagccagcgggaggccctgcctggaggccggcccatccccagctaaggcttggtcagagaggatgagctgtggccgccagggtctcctcttggcagttggggcctgccagctctcagaaactgattttagaaccaaaaagaataagtccttctgaatttcatttctttggcctattttttcccacaaaattatatgatagcatcatctgacacttattgagacagaggagggatgggactcggctgccaactccactaatgcattcgctaatgcattcccccccccaacatttttctttcttcctttttttttcttac

SEQ ID NO: 316341 - DNA, 4001 bp, Homo sapiens
ccatctaagttcctggagacccacttctcatcaagcctccagacctgaaataaagtgtcccacatcaggacagagggtccctgattttacctccagagtggctgcctctctcctgtgtgttcctaggggaaccccactttccagatgctctgccagacaggccgggctgcgtctctctgcttgggactcactgtttgtcctccaaggactggccactgagccagtgcttggctggagacagagctctttctttgtttgctgcctgcctgacgatttatttctgaggctcaagggaggctcagccattttgccagggctgctctgggaaaaggtctgtcccactcccccagggactcccacttctaagggcaagttctttttccccttctctgccttggagagggtctgtcctgccccaatcagaccctgatctggagctgggtcagtccttcccaatgtgctccaaagataaagagataacatgcaaaatgcgagtagctttcactgacctcttttgttttggaatttgggggactggggtagcagcctttttggctcccttaggaggacacttcccccaaagttcccaaagacacagaatctaggcactatccagcacccaacatccctactctcttgccaaacacccaccttgtgtgtcatagaaaaacaaaggtagacccccaatgccactcagtctgataccgtctctgatttttggggtgtcacaaatctcaggagccattttattcccgccctccccgcccccccagctcttcatggggataaggctgagcttcctgggaaagggaatgagcgctccagccccacatccggaaagaacgtggtgttatcatttggcttttaaaaaattctccttgtggttcatgtctattttgggaggatattagctcagagcctcaataggggactgcccggtctgagtttcttgtctgaagaccgagccaagcctagaacaggacatctgtgggtgccacccgtggggacgtgtgctcagaacccaatgggcactgcccgaggctaccgtggtgagcggtgtcgcgccggggagtacacgcagagaccaaaagcaagaaggggagcgcagttcccgaagcagcaaggaggcaccgtcctccagccctctaagggaccgcccgcaccccacatctcttggagaaagtcggggctgggagagcgcggcgcgagctctggtgcactaggcttagctccggtgcactcagcccaagccccggtgtgcttttaagccaacgtttctgagagctcgggctgtcccagagacgtcccatcctcaagtcgcacccgaccccgccgtagcccgcagagaacaaatgaggggcatagctctaactcggctcagctgaccccaggattgggaaagtggcgcacggccccccaacgctgctcgtgtcattcactccgcgtcccctccatgccctggggaatgaatagggagcttcgacggctccagcagaatccagtgccaacttgcggggccagtggggcaccgcgggagggaaggggcatgcaactctcgcctctgttccagccctcctgcctcccgagtgtcccaggggacggatggcctgggcgcacgtcggggtccgagcggcgcctctgctccttcatgtggctcagggaaggtgcggcgcgggggcttgaatctcgaggtgtccgccccccacccggcccggctcgcggcagcggctcggggctctggccgttcctgcgccgttatcccaggctctgcgccccgcgccccgacgccggccgccctttcctacctgcggccggggctgcgctgcccgggacaggcgctgcatccgggcggctcggccgctccgatgcgctcgggacgcggggccgctcgggctcgggctcagcgctactgcgctcccgactcctcggctcctgggctcagcgcagctcacccgcaacctctccgctgtctcggtcttccgagggcgggcggagggtcgcggggaagggagaggaggggggagcgagtccggagggatggagggggagggcagggcccgcggcgcccggagcccgcccagctcgggtatagccctgcccgcaccgcccgcccccgcccagcgctcccccaggcccgccgcgcgctccctccgcagctgcctcttgcagcttcgccgccagcaggctctctccttttcccttcacctcctctccccttctacgcctcccctctcccttctttcctctcgcattctcccgctctcttctccctccttctcccctctcttcctccctctttctcccctctcttcctccctccctctccccaccccctccttccctcgcctgccccgccgtcccgctccaatctctctccttccttctccttcctttgatggctctttccggcctcatcctgggtcaccagcctgtctgcctgtccgtcttggtctctgtctccctgtctttcacagcaagcactcccctcctggcttttctccttccagccttgcagtactgcttccgttggcctgtcctttccgtttctctctgcggtcgtcctcttttcgccctctgtgggtcgctgtgggttggggtgggcccgtgccccctccctgctctagtcctagggcagcgtctgctgcccgttacacctggaaacacaggcctggcctggggtgaccaggctctgggtaccagctgggagtgtgtgtaagagtgggggtgggaaggacacccttccactgccagcggttggtcatggagacacaagtggctgtgtgtatggatggacagatggggaaacagattacttaaaagggaaacagggatggtggcaggagccccagacacccttctctcagttcttgaggtttgagggattctcccagagaagtcccctttccagccaatcccaatccagcacgtagggactccttcccttgtccttgccaaggcctgacctccccaccctcttttataaaggcttctgggaatggggccacatctgcccttccctctggggtccccaggaactcagagaaaagattccttctctccagcccagacctactcttcccctcctctctttgtccccagggatggcctttgctgatggacctcaggtcctctaccccacctaatctggcctcctccctgctttcatccatcctcgagtcccccagggcagtgctcaccaaggtcaccctgacttcttctgtttccccacactctcactcatgagcagggaatcttggtgtctttcttgacccattcacctcccaccactgatcaccaggtcatatgtgctgtggacttccgttggtatttcaaataaatatttcccgagttccacctgtgtgccaggcactgtcctaggctccagggacagagcgatggacaagacaggccacagctttcaaggtgatgccagtccagtatgggagacaggctttcatcaaataaccgcacaaacccagaatgacaagctctgccaggagcacacatgcaggggattctagtccagcaggggattccagtctagtgtgggatggtttgggaaggtttcctcaaggaagcgccatttgaactgaggtctgaaggatgagtaggagctgtctggatggagatgtggggcatagctttgagtggagatacaagggtagcaaaaatgaaggctacttttgcttgcctgacattcatttcaacttctttgggtgacagaacctcaattttcatttgggaaacttcccctccttcactcatattcaatatggttgggtggggctccctcctcctggagacagacatgtgacccagggcacagataatcagagcacatcactctgacctcaatgaggggacgtgtgacatatgctgggccaatgagaactctgtctgggacttttgctaaaactattgtcaaacagaaactcaatctccaccaaagctcctaagcatagaggtgttggcagccatctttgcagaacttgagcagaccc

SEQ ID NO: 316342 - DNA, 4001 bp, Homo sapiens
tgacctgtgtattcacaaagctactaacccttaggacaataaactctaccaaaccaggagatctatgaatctcaagaaaactcttggctagtcagaaaaaaaaaatgactcatttaaaaaactttactcactacaacctttttttttaaaaaaaaaaaaaaaaatctgtgacagaatttgtaattaacccaatttaccgtgttttctgcttttatgaatgctttttgttttggcacaacaatttcctgtatggaaaaaaaagatgttaaaacaatttgtgcctggggactaccctaggtgtgcacaggtttccaagtggacgcagcttacaaacgctgtatctgcagagaggcaggattcacagccgagagcacagggcacgttgggggtctccaagtccactccctctctctcccttgccaagccgccaacaccagcggccacttcattaccagtgcagagcaggcttggagcagcctgtgccttcaggatgaatgtccccaaagaaagggcctgggccaagcagtacccttctccctctcccggcagctgctcgcacaggaagtcctgctctgcacagactcatagcccggtccctgccagccaacttctgagccaccttcgctggggtttgggaatttgctggaggggcaggggcacagcaaagagaagagagaatatacagatacaggctcttccttcgagaaattgtgccaccgaaggaggttttataagatcccttgccatggacccgcccagctgtcctgccgatatgacaggagggggtcctgaaggctggagccccttccctgagctgggagagttacggattcgctgctgcatcttttgccaaactgactttgagaggctgtcaccagaaaggactctctcatcactgtcctttccctctccccttctacatctctatgcagagcatcaacattaaaccagtattgctgtttgtcgtgggtgactctcagacccgtaaaataaactgttcgttgtcaattcttccaccagaggggccccaaatattggccctagaaatgggcttaagagcagacgaaagactaggcaggaaaccatagagcaatgcctcgcctaaaagttctccctgttgtgagtccagtcccagtttaaaatagggcctttgacatcagaatctcatctttatttttggtcgagtgagacttctctgaccctcagtgtcctcacctgcaaaatgggtagacccctgcctacgaaagtgactgagaggatgagatgagatgatatggtcaaaggtgctcggcacttcagtaagcgcgcaaaaactgagaccactttgatcatcaggagtcccttccccacaggccgttttcccagttaggaaagctgaggctccaaggggccaagtgcccgaaacaccagggcgcctacccaaagcaagggctccctggcctcggtctgcatctcatgctggggacagaacgcgggcaagtccccgcgctggcaggtggaaccctcaggtgcgaattggcacgtgcgcgtgcgcactggcacaggtgggccgcgctccggggcgagctcacacgcgaggtgcctggagtcgaggttctccgctcgggttccgctccacgcaggcgcgggagggggtctcgcgctcgcccctggctccccgcccccaccgggcggttggcgccccctccccttctcctcactatcacctcacctcctccgttcttgtagcacaggtaggggaagcgccacacgttgcccagcccaatgatctccccggccacgctcagcacgaactccaccttgttgttccagtggccgcgctcgtggaccgccttgtcgcgcttgacgcgcgggtggcgcgcgggcgccgcgcccccgctgctgcagccgccacccggcgcctcggactcccgcgcctcctcagcagccttcccattgcccaggggcagcgccttctccgccgtcatggccgcgctggctgcctcgtgcgccggcccggctctgcgccgccgccccgggcgagctggcttttcaggaggcgcgagcgggcgggagggggaggcagggggtggagctgagggaccgggccagaccagcgcggagactgggactgggacgcgccgcggaggcccggcccgcagggcgcccacgccacctcagcccggctgggcccgggagcccgcgagcaccttgagcgcgcggagcccctgcagcgcccgtccttcccgcggccctgcccactggcctgctgggccaagagtggaagcgcccattccggcctaggccggctccactcaccaaaccccaaagttctaccaccgtccataaccttcaaatgcttgggcctcggtttcctgtttctaataagaggaatgggctctagaccagacttctccaacttgaactacacaccagacacctgcgggtcttgtttaaactacacatcacggtctagtaggtcgcagtaggctgaagagcctgcgtgtctgactacctccccagggacgctgatatgtctggtccagggaccacaccttgaggaaaaggcagtaaatgaattcgtggcttcttcccagccctagacactctgcaggtcttgttcatactggtgtccgcagctctcaacatagtcaggaccgtgtggcagttaagtgcttgcgtctggaaacaggtgaatctaagttgtgtgattttggccagtcatctgatccctctgtgcctcagtttcctgatctgcaaaaggtaatatcagtagtatcttgtaagttttaatgtaggggatggatttttaggtaaaaggttattaagaaatgcttataaaggtcttgataccttgaaagtgcccaatgaacattacccattgttagtattatacaatatgtagacctacacacatttgtccatcttcttgtataatatttgtctcctcacttagttgtaaggatgatatacactgtcctgttcattataatagcaacataacctagcacaagacttggtgcatagtatgtgctcaataaatgtttgtggctagagaggaagggaggaaggtaggaagaggaaaaggggaagaaggaaagactattaagctgctgggggccacagagatgaacacttccacctcttccattgcacaggcctggaaaagtccagccacattgagcccccaccaaccctactctccatctgtccctcggagctccctctggagctctcttagggacaggctccttgctttgaagccttcaaactcctgccttccgcttctcctttcattctggctcacaactgctcaagtcgctcccaacctccatctccccagaaagcccttccttccaccatcttcccgtttcccctccccccactatcatatttcttgaaagagtaagttgacaggctgccagccctgtctttacctcccacacgttccttggcccacagcaatctggcacccacccccaccactcctctgaaaatgctgtgaagtcccggacgccctctcaatttggcaaattctacggttccttttccatccctatcctgcctggcctctaggtaactttctgcaccattgctccctcctttgcttcttaaaattcccactggtgtggttttcttggcattgcctggcgcagctaccatttctctccctgcttctctggttctcctttctctctccttaaattcagcctttctcatatcttgaaccactgaactaaatgtgggtgcctcccaaacctctgtccccatgtgctgcctaggttatgtttaaaagcaaagatcctgcggtgttcagggtgagactatactgaattcagatggatgtggctttgcattcaagctctgccccttaggtgctctgttacctctttgcctcatgcttctcacctgttaagtgggcttcacatgagttctgacctcacagggtgggtgtgtgggttaaaagcctcagtaggagctctgtgaacagtagctattattgttgtttattattatttttt

SEQ ID NO: 316343 - DNA, 4001 bp, Homo sapiens
cttgtttctttttcttggaacctgagggtcttgaggtttccctagcaaccccttgatacatattcaactccagaactatcagccccacatgcatccctctgcagactattcaggtgatggtggtattataaacaaggaattaagtagtcatgtgacagtgaggctcacctggactgatgactgggaaacatgtacccaggataaaggtatcatgggtaggtctactgagcacagaatgatgtggaaatctcattctgacaaataattctttttaagagtcagttatagagctgttagagcacatggtaatgctgttagagcatatggcaacatatgcccttcacatcattatggtgtatttatgcacttcaaattttaaaaaggaatcaggaaattaagaatgcactgttttaaaaactctatgaattaaccttttgttgatttggggtaaggggaggagggagcagtgtttagctcttggtcttctcaaatgggttcattttcgtaaatactttggtctaacatcttccatgatcttttatggtgaaaaaaacatgctaattatagaagtcctaatacacaaacacacacatacacacacaaaaacacacacacacgacaaggtaaacaaaaatcacccagaaattttgttaacaatttgatgtcttttccccattcttttctctgcatatttttaagtaattgttttaaaatgtcaaatccattttatatagctttgaatctgatttctcctccctccacttaatacaggatacgagaaaatacaattttttttttgaaaatgccgccttaaaggctgcgaagagcaaccttgaatggatgctctataatttactgaaccaatcccctttatttgagggcttaggaagttgccaatgttttgctcttattaaatgatggtgaccatccttctacctctgtcagaactctgacaatttcctttagatacaattctagaaacgagacaaccgagaaaaaaagtgttttagatgctgagacttaaatccctcttgccacattgccttccaaaaaggtacttgggcttcacgaggttatagacatgtgtagaaggtgttcccagctttccgcaacgctaggggagtgcggtaagagcgcgtggctggctggctgtccccggagcgtgcatgatgcttcggaggaaacatttatttaagaaaaacaaaacaaaacagaatgatttgcatttcctgctttctgtcgttccaaactcaaaccaatctccttataaaaaatttaaagaaatggctcaagattctcttaacctgagtttcaaaccgttgatttaagtttcggatctgaaagttgtataacgagtttctgttgaataagacaatttcctactcactttttacacctaaacgtaaggtttactcactaagacgtcagaccattgacacttctctcgaagaaggagaccgcgtcccctgcgctctcagagccgcagcctggccaacaagggtgagggttgggggcttggccgcccccgggatggggcgaggggttcccgagggcttgggagggcggcttgggagagagctccggctccggaacgaggtgtcctgggaacactcccgggtctgtaacttcggacaaatcacgctcgctttcccggcctcagtgtgccgttctgtaacttgggtctaaccccggctcgcacacacggcggggacgcgcacagagttgggctggggccggggcgcggtgggcactcacctccgccgtacatctggcacaggtacgggaatcgccacacgttgcccaggcccacggcgtacgagatgcaggcgaacacgaactgtagcgagttggcccacagcggccgcgctttctccatggccccggcctcggcgcgctcggctccggctcgggggtccggcacggcagtctcagtgcgcggtcgccaggcgcgccgtcccaccccggctcggcttgggggtggccccgcgcctccgccgccgacgcagctagctggtttttaaattgctaatctcattaacggcgcgcccgtccgagaggcgaggctggtaaatggatgacggcgagccccaccccgcccgatcgtcgcggccgggaaggcacccgagattgcagaggacagggcggagtcccctggggtcctccggctcggcggggcctttcttcaggctgcggaactcctcgaagtgggcgccttccctcggccactcacctgtcatttatcgagcgcctactgtgtgccaggcgttgtctggggacacggctgtgaaccacttcccagctccgtcttggagctgacattctggtagagggaaacacttgaattggactgcatgaaatgccccattttcaaccattttttaatttatagaaaggacaatgtcatatggttcaacctagcccacgtataagactgagagacgcgaggaagacacctaaggcaaagtaaaggggtaagcagttgcggggggtggccagggatggttagggagggcttctcagaggagagaacataacatttgccaggggccagaaagaagtgagggaccttcccggcagtcccgtcccctccgtccacccaacagcttggccctgcgtgcctactgggtccggggacggaatcaggttttgaactgctgtgggggactctactgctcaggccagcctaggggccagaaattttgattcattaggccagggtagggaactaagaaacctcgtatttctgccagtcttacaacgtgatttgcttgagggtggtcactagataagacagagcttggtgctttgcagtaatgtggaatctgggtttgtataccaactctgctactgacttagctgtgtgaccttggacaaggcacttgacttctctgagtctctgtgtactcctctgtaatgctaacagatatcttcccctctctcctgcctggcaaggaagagctcatgtgaggattaattgggaacttagcttactacctggcacagagtaagttctcaataaagaggccattaccaagtctccagcaggctgaatgaatgaatgggtaacatattaatactaatgccacgctttgaacagtgcctaatacattgtaacagataagaaaatgctaaataataataataaaatttaaaagagatgaaaagcagagttgctagtgaaaatcttacttgaagccaaaatgaaatcagtgctctaggacagctccttgttgggctttccctggagttcctgcctgtctggtcccagaggagaagggtgagtagggtgagggaggtggaggcttcctcagacatattacctgtcctggaacttcctacctcgaaaaagcaaagcagaaaaaaaaggcagcacagcaggagaaactactttaatttttttaaacttcagattctagataaatgttttttcctacccattgcctcctccccaaaggaacctaccatcctggtgtctaaccccatgggttagttttgaccttgatgaaaatggaattaaatgggatgtactttttctgtgcctggcttcatttgctttccgttgtttgtggggttcattcatgttctagtgtgttgtgtagctgtgggtcattctctctcactgcagtatacttgtcggtggtgtgagtatgctccagtctactactgacagatgtctgtgttgtctccagtttggggctgtcatgaatagggctgcaatgcacattctagtgcacgttcttccgtagatgaatgcactcactgctgggaacttcttggccttaggataggtgtgtttggctttagcagatattgtcagactgttttccagagtgtggtagtacaagctgacactccctttgggtttcagttgcttttgctttgcatcctaacacttgtcattctatttctaaaggtctgcccagtcttgtaggtgtatagtgatagttcattgtgcctttttttttttttttgagacggcgtctcactgtgtcgcccaggct

SEQ ID NO: 316344 - DNA, 4001 bp, Homo sapiens
gggacaagctcctacctctggtccctggtttactctataaccagtctgccccacccattttacaggtaaggaaactgaggcagaaaaagggttgcccaaggtcaactgggggctgagccaggcctaacacctcccaccattctaccagtcccaccctgttgggggttcttagccgtgctaggccccctttggatcctctccaacaccatcttgatgaaattcctcccccaccccacctcctcatgcccaccccacaatccctgggtgactccctggtcgagagggaggcaggtggttgctaagcactcacccgctctctctctcataaaaataaactccttctggctaggagactctggacaagatcccctcccttctagccaacaaaaaattaaaaagaaattttaaaaagatctcctcagtgacatttacttgaacgtcagctgtgccaaagcgggggccaatttagtgaagtccaaatggagccatgcgccagtaaacctcagcccgaagaccctccattcaagtgtctgggcaattactgagctgatttatttccccagacaggaaacgggggcccaggctgcctcccaagcttttggggctggtcctggggatgccgggatctggcagaggcccaacagtgaccaaaatagccaggccggtggccctacccggcacacacctccctgcctgggagagctgcccacaggtctcctctccagtccaggctgaagtccaggctgaagctttgaggctgtaggaggaggtccctggaattctctctgtgtggcttccctagtgggagggggacgagaatctcctactcaaaagaggaacccacagaaggaagagaaatagtctggagggggaagtgtcctgctggccctgccggctgtccactaccccttggctgcccctccgggccttggtcccaccactcaggactgctggacgctggcgctgccacctgcacaccacctatggagtgcatgcacctatggagccacgctgccctatcacctctccccactcagcgccggccctggagaaccagctctggccattggaccctctaggcaccagggacaccctcttgggtacagccgaggacacacgagtgcccacaaccagggacctggagacacaaccacactcagggacacgcacgtgcacctagccagggcctggaagacgcagccccccacacacagattcatgcagacacaaacggggacacacaagagcacacatccaaagacagcacactcaggtatcacacacagagaggcacacacacacagcccagcacgcagagaataacagacatgcaccggaacacacatgtgcacgctgctggggacacggtgaaacagtcaccctcagaaacacagacacagggatacggaggcacatgtaggcatcctgacggagacaggcacacagatatgccacacacacacacacacacacacacacacacacacacacacacacactctcctgccgcccgcaccaagagccggagcccttttgccggggaaacaataacagccccgccagcgggactgagcaggcgactctcggtcccttccgcggtggtgaaaggggcgccggatgggcgcacgcggaggggaggaggccgggactgcggcgacgcggggatggggaggggctgcagacggcgggcagcgccggctgcgcgcccagctcccggtccctccggtacctggggtggctgcggcgccgcccgcgctctgctcggctgtgccgggttccgccggccgggggctgcctgcccgctcgctctctgacccgctgggtgaacgctccgcactccctcttggcgcagcttgtcctctgggcttgcggtcctcggggctcggcgttggcggcggcgcgaaggaagcggtaatttataagcggcttcttcctgacctcgcgtgtctgttgtctgagcaggcagctctcagcatcacccatcctgctgggtggaaaaataccagctcggccgggccgggggcggggccggggcggggccggggcttccagccccgccccaagtgcggacacacgcgcgcacacatacacatgcacacacatacacgcaaacacgcacgcgcgcatgggctcggacacacaaagaacccgggctcgccgagcgcgcgcgcacaccctcatgccgcgcggcgaacgttcgttgccaggtgcggcagcccgccctgggcgcctcctgcctgcggaagaagagcaggacagacccgacccgacccgcctagtcctttccttcacagcagcctccaaactccaccgctcgcctcttccgccaggctcctaggatgaggcccagggctcctggagcagccaggtgcaaaccagaccgggctcgcactccactgcgttgccctgggcgatcgtccacgttctgggagactcggtatgccccgggagggtggcctgagcttgtggtgtgaagccaggtacagagctccagaatcctggccttgccatggctgtgtgaccctgggcaagtgactcaatttctctgcctcagtgtcctcatctataaaatggaaaggaaaatagtagcgcttgtctcctccggctgttatgaagatccaaggttaacagcgtagagaactcggaacgcacccggcatctaggaagtgccaagccagtgtcagctaatgtgactatttttaaatggagatggggagtgtgccattattcttgtccttatttgaatgaacgggccctcagggaccattttccactgccccgccctggcagcatgagagggaaacgctgtgagaaccccgaaccccagccttctcctgtccctctctctctctctctctctctgcacctgggaggcggggaggagagagccgatccttccaccatttacacggagaatgaaagaagaaataccggccaggcgcggtggctcatgcctgtaatcccagcactttgggaggccgagggggcagatcacctgaggtcaggagttcgagaccagcctggccaacatggcgaaactccgtctctactaaaagtacaaaaattagcctggcgtggtgccgggtgcctataatcccagctactcaggaggctgaggcaggagaatcccttgaacccgggaggcggaggttgcagtgagccgagatcacgccactgcactccagcctgggtgacaagaatgagtctcaaaaaaacaaaaaagaagaagaagaagaaataccacacaggtccgaccaagagctgcccccactcaggccaggatccctgcctggaagggctctgcagccactctccctgtacagccccaggatgctaaggagcatcccgaagtgacactggctctccctggaggcccctgccatcggactccaacctgaccttccagtgggtgctcctcatactggctccagccaagacagacgaggaccactgggcacatgcccttccttgccttcctgtcacccttcccacccttctctgcgggccccgggtggccccttcctccaggaagcacctggggatcagcagtgcctctagggtcccagtggcccacgtgacatctgcttctggccacctgagcactctcctttgagttcagggtcactgtacccttttataggtgagcaaacgaaagctgaggaagaggagtgactgggtctcccacatccctctgcttcagctatgaggttccctcatgaactgcaggaatagacgtcaagcaaaaactcctcagacgccctgtgcatgtgtggtcgcacagggcacaaagactgaagcaaaggggcaggtcctagcgtggggaggggactccaggattgaagtttgaaccaaaaggaggctttgactaagccacgagcagtgaagccggcaggagaggaagcaagttctagcagaggtgcctgccgtgcgaaggcctgagagcaaggttgttggtggcagggctgagcttgagggtctgagagagtgagcaagggcagtgg

SEQ ID NO: 316345 - DNA, 4001 bp, Homo sapiens
tgtgatacttttggttggcagctattgtgaagtttaaatgaaatattattacccagcagatagaggtgttcagtacaaataggcctccccaaattggctcaatcctttccccatcttgcccataatataaaagactagctaaagaaacaaacatacagggctgcttagcgatctttatctagagcatgtaaataacatgcagtggggaaagaagggttctaagaagaggaaaaagctacaaccatgaagcccctcctttgtgtagcctaacaattctctgattcctgaaagccacagaaatgtttattatcaaaacagcatccctaactgcctttcaacactttaccgacaggaagtctcactgctcaggtataggaagtagaacgaggaagctcccgaagttagcaaaactggatcctgaagtgacacccgcttcctgctcttccactcaggaaagccgggaaccttttcccaagcggagtcctggggaagcagaaaaccgggaaaggcaaagccccttcttctcctgtttctctaggtcgcttgcttagaaccctttagggttctaacgcagtttctgctcgcagggaatgtgggccctggcggtattagcacccagcctctgagaactttcagcaccgcggacagcgccattccctgcactcagtcggaggaggagagctaccttgcccccagcgctctcctagaccctatacctagggggaggcagggtgacatcctgcggcccttgggcaattcgggccagtgacgttcaccgacactcaggcggggatcccttcgccagagccagttcctttgagtgtctccgctcaaaatctcaaggaaacgagcttcacacaggtggggggatgaggagtgccagaacaggagcgagccccgctgctctagccttcctgcatctcttctcgcctttgctttgctcactcttcaatcgcaatataaaatactcatttggggagggggcagggtgacacaggagagagaaggagggtgggggctgcatcccgcgtggccacgcagccctaacctggccctcttggattagaggggagctgatgtgctttggaatgggagaagagaggagactgagggttgaagcagtgcaggagagctccccttgctggggctgccggctctgggcagggagcttccctggacaccgctcccgtcacgtcctcttcgccgctcccgggagagtcaccactctccggggacagacgcccctcggggcgccaccatcctggtcggggtgctgggctcggcgggagtccctttgaggagtttgctcccaggtaaaagggcagacgttgctcccgacctccccggagtctgcggccggaaaagcgtctccgtttcatggtctcggtccgaggcggagaacggagctgcccgtgcggggtgcgcgccaaggcgggggacaggacgggcccggcgtctgccgagacctaggctgcccgcattccgctcgcggctccccttctgcctcccgctctagcggcgccggagccgcgctggcccccgccccgcccggcagctcccgcgagtcagagcccggtgcccccagaccgcgggcagtcggggcctcattccgggccagagcaggaaagagcccgacccacctcctcggttcttccagggaaccccttctcggagggcgccctgggcctccgcgccatattcctggtcccccgctcccggtgactccggctccctgggtcattccgggagaggcggccatcccagttgcaggggtcccgctggggcgcggggggcgcggagggggacaaacggcagcgaagggggccgttcacttaccggggtcggggctggaggcgacgagctggctgccaaggctggtggctggcagtccgcacttactgcgcggagctgtctctctagctgggatgggaagtggtggtggcggcaaaggaaggcaggaggcagccgctgctgctgaacagctcctcaattattcagattgggcccccaccccccgaacccctccccgtgcctgctcgtcctccctccagctcgcctgtctccgcctccttggagtcacatggcctgcccaaccccttacatactgggcccaagcctggcaccagaccacctcccacctggcccccctgccttcccctctgtctgccgctcacaactcctcgctggccttctgagcctccagttgtgacctccagtgtcttatgtcaggctgcagggaggttgagggggccgtggatgggggcagttctttgccctgggaaagcagggaccagcaggactctgcaatgtctgtgcgttgggaaggcatctgccgcagctctgcccctgctagactgggctgtccagacctccttcctgccctctggaagcttccctcatcctctgcggagccttcgttgctcttaaacttccacatccctgagccctacaggaaagaaaaaatgagagaggttgatttctcctctcctcctaaagaagacaagacccacctctgtcttcaaagcttaagtttatcgttgggttcacaacatcttatgggtgcaaagatcatggacttgagatttgaagagccattaggattccaatctgtatgaccttggagcatttaactttctagcttttcttctctcgtctgtgaaataaccaccttgcagtattgtcatgagattgagaaatcatcatgttcttagaattgcctagcctagagttggacaggtatttggagctcaataaaggagagttctttttcccccacctttgttaaaataaatttcacaaggcaagaaggatgtgatgtgtgctaatacagtgaaagcatcttttaaacatggaaggaggcatctgtgaggtcaggctagacaagtaccagtctaaacggagacaagagtgagataaggtttctgttttgtattagctcctttaagatgagtgtcctagagccaggttatgtcccaaaaggattgggactagatgggaccaacccaggcatgcttggccacatcaccgaatgaattatttaacaagcattgagtagactgatttggatgaaagttatctacataaattcttgcactttggcccaagccctcaaaacacatgggaggcaacaaaatgtaactctcctatccttggaaatgaattcactgggcttgtgtttggggagaatactggctgactgatactcctctagggtggagcagttcaaatctagctctactttgtgggtctgccctgggctcttcccagaaagttgcttgatcattgccaggacagtcttggttagtccacctacctcaagcttgttactgccttcgatgagcatctaagcctgacaatatccccatattttaagctttgagtagttctgcaggatatgttagacctcctgggatcaccaagaagctgtgagacattgtaggaaaagtgcaaagttaaaaaatcagaaatttggaatctcagtgcaggttctgccagctacttatcatatgatttttcacaaatcacttaaattgtcagactctcatcttcagaatgggaaaggaatgtctacctgccttctatataagatggttgtgatgtttagatgggatagcacatgagaagtcactgtaaaaggtaaagagtatgaatactatgggctgaagaaaaccctgagtctattctagtccaaatgaattatgagggtgataagatgggaagatgggatttgtcatggaatatgcagctactaaaatgttggtgtgttgctctaagtctgcatgtatgcctgtagctcaggggatgtgattattggagaactgcattctttgtttcacctttttctggataaatttctgatttaaatctccatatttccctggccttttatttctggaacaccagccacaatcacaatagttatgaatatttactatctgagaaaagtttgtgcctatatttcaagacagcagggtttagacttttctgcctttgctaggtaa

SEQ ID NO: 316346 - DNA, 4001 bp, Homo sapiens
aaatgagagttttcttgtgcccgttaagaccctcaatactggctgggaatggtggctcatgcccgtaatgccagcattttgggaggccaaggtcagtggatctctttaggccaggagttggagaccagcctgggcaacatagtgagaccctgtctccactaaattttaaaaaataaataaaacaatacagcaaaaaaaggttttttttttttttgcatttgggttatgttttttttctttttttaattatactttaagttttagggtacatgtgcacaacgtgcaggttagttacatatgtatacatgtgccatgttggtgtgctgcacccattaactcgtcatttaacatcaggtatatctcctaatgctgtccctccccactcccaagcaaaaaatttttaaaagaccctcagtaccaaggaatttaactctgtgctctgaatggatcagcatatcagcctcctgagcctgaaacttccgccttatagctcaagtatctcacagtgggatccacttaaggcttaggattccttaggttctgaaatcacaactatacactgttaatatcaggacaccacaggattagcatatacaatgtgcattgatctgtaccctgaatctcaggcttaggaaagggtttcaggatttccaaaatgaggaaaccccaaatataaaagtatgttatttgctataaattatagcaatgccttgcctgttgccattgtgttcaaacttcctatccattatcaggctgagataagagcagtgaagtaaactatttcatcagtaacaccagtaaaaactggtgtctttcattttactttaaaagatgagagtacagacagataatctctgtcagactttattaaactttctgaaaggaatgatacggtaagttgcccagaaagagcaatactgcaggtgttaaatatttttccacaccttggcctccaatacataaataggagatacataacaaataacactagcaatgatcattataaattagaacatctgaaatcaggctaagaagtaaaaagtactgcataaagaaactctcgtttatttataactttttattataagaaaataagacactgttcgtataaataaaaaggacttggacacaatattctcttaagaggggtggggttagtttctgcaagttttcttcttgaaattagttgatataagaggaattactccaggcattttgaagtgatgttttttctagaacttcgtaatgttcatcggtgcagccagtgagagaaggctgctctttgtgactgcagagccatcacttcccaacatcattacaaaaacaaacagctcgccctcgactccccacatgacaatggacccgcatctgtcaacagacttgcattatgtgccgtgtgagaacatgactgtgacatttgctctcgtgacatggcaaatttcggcggcttgtctgtaaagagattagcattcgttacgctgcagcacctttcatcaaactaatgacatttcaatcagcacattttctccagtttcggtactttgctatctgagcacaagtctctaattacgctcaagcaacaagtttcacatcaatctcacaatttatgcactcaccatacaccattgctcctccagtttcatgcaagaagcggaatcgatgatttttaaataaccagattgtcaaaatggtaaggatgagcaaaaaattgaagacaagcagctccaccgctccctgatgttgaaactgatactcatccttttctgacataacccttgactgtctctccattccccagtcttcttgggattccttagataaaaacctggataaaggctattttatcaagatttgcctaagacagtctgactgcctgagaatttcagaagaaacactgccactttagttgctacttcacaagcattctgccctggcttagtattcagatggcttctagttacaacttcctgtttctctcttaaagcagccctgtctcttttcaaactcgagagtgtgtggtttcatcactgactcttaatgtctttaagtgattcatctcatgaaaatatctttcatactggacaaatctgcaagcaatgatgctaagatcttgaatcacggtcttattattccaaataagtcttcttaagctgcataaatatgaactgtagattaataataaaaaaggtagccttacactagcaacgttttctaagttcaaaaagccaattcctgactcaacttcacctaaatgcaagatctttcctctctaaccaagacctgccaaagtgatggggattgatagcacagttatcaatcagcctctgtgctctaaatggatcagcatattagcctcctgaaaagatattacactgcttagcctgaaacttccgcctcatagctcaagtatctcacaatgggattcacttaaggcatagggtttcttatagggtttcttatgctctcaaatcatgactgtacattggttaagcaaacctaaagtgatttcacaggattttttttttttttttttagttgagaagcaagaaaggatttagtatatgactctatttggctttatataattgatagttgcagagcagcctttaaactctaaatcaattgtttttcttttaacaagagaaaacaatgaaagcaaaagacaaataaaattccatccccatctctacaactgtactgtttggatacgttgagacaaaaaagaaaaaaaacaaaacacattacttcgaaagagaaactcacgcagccatcctcagcaacgccacatgcatggatttctctttgtagggttcctggtctcggcatccaggacccacagaaatctgcaatagatcacaacctcctctgtcctatggcaaaacaatgttgctcactgagaaatggttctgccaccagaaatgaaagctctgtattcacaggattctgatcataagagtgatgattcttcagatcatcttccatgtggcaggttgctcctgtctgatttcatatttttctactttaaaatagttcaagataataccatgggttctgcagcttttttttccttttctttcttttttcttagcaaatattatgacctgcttgcttttaacacttgatcctataacacatttgggtatatcctggggttagctgattttttttttcattttaccatatcattgtaatttgggagtattaatcacttatgatccccattttgacacaattaatgctcaatttatacaatgtgatttcttattgagtaggctgagcccaaatgcgtcctgaaacaatttttgtcactaaaagctaaaggtcaagcatgtaatattattgggagctaactacctcctcaacaaacagtttcaccatgagagcaagtctatcaaccccttaatacaaagctctgctgtttcagcatctttgctttgtgcaactttggaagcttatttcctctctgagtttaacttagcagagggtatttatgtgtgctgcagatgttcttctgacacgctaccctttttggcaggaatatctgtgatgactaatattcatactgttttgaaacctatcagctaatgcttgcaagcatttcatggagctttgctagcaggttctacctttatgattttgcaactccacaggttcagtcgagttgtcagatatacaagataacacaaattcagaaacttcctgtccttttgttttttgtcattattgaattactttggttttcttttatcacaattattccatctgagtagaataaacattctctggttgatccgtgacatccagtttcactcttttaaccaatgaagcaacttgacaaaagattaatggcccatagaatgttttgattggcttacacgtctttttaaaaagttttaggtttgatgtcaacacattcaaatcagtatatttaacatttaaaaaatcatatggctttttgcaagaaaaacttgtaagatctggcacactgggcccttcttaca

SEQ ID NO: 316347 - DNA, 4001 bp, Homo sapiens
atataacaaacctgcacatgtatcccagaacatgaaagttaaattataatcacattaataataataaaattaccacgaatcctgtttactcttaaattcagagatatatatgatcaaattcaacacaatttatctctctggctatgcatatgtgataaataccatttggcttccccaacctctactccaaaatctcataagaaatctctatttgagaatagatgtcatcttaaaatagttttaaaaatactaacattactgtagcttaatatgttaaatgtatgggtaaggaaatagctatgagaataaacaggttttcttttttttgttttttgagacggagtcatgatctgtcgcccaggctggagtgcagtggtgcgatctcggctcactgcaagctctgcctcccgggttcacaccattctcctgcctcagcctcccgagtagctgggactacaggcgccagccaccacgcccggctaattttttgtatttttagtagagacggggtttcactgtgttagccaggatggtctcgatctcctgaccttgtgatctgcccgcctcggcctcccaaagtgctgggattacaggcgtgagccaccacgcccggccacaggttttcaatataattagaactcttcatcttaagctgacttttgacagctttgtaaaagtctgtgagtccaaatcccattaaagaaaaaaatattggtttatcacataggtcctctgcattaatttaacaataagttagttgactgagcacagtggctcacgcctgtaatcccagcactttgggaggcctaggcgggtggatcacttgagatcaggagttcgagactagcctggccaaaatagtgaaactgtctctactaaaaatacaaaaaaaaaaaaaaaaaaattagccaggtgtggtggcacatgcctgtaatcccaactacttgggaggctgagacaggagaatcaattgaagaggcagagattgcagtgagcctagattgtgccactgcactccagcttgggtgacagagtgagactctatttcaaatatatatatatatatatatctctcatgttagctaatatctcaattctctttgtgtgtggaggaaattaatgactgccctctcaaaaatgacatgaatttgtccttgtcagtcagccagcattgagaaattttgtctcatgaaccgtaagtcacactaatttaccatgttactgaacatggaaacagtcttcttccttcagattggaacgttttgcaagaattaggtgaagaaagcatcctgaagagggcactgtgggatctcagtaatcttcacagctacaaagctcatgcttaatggtttattttatattgataccagaggctggattgtctccttagtaaactctcctaccacacaacgcagacatcttactgactctgaaggtgggtgggctattgccctcctaatgcccctccactcagaatgagcccttcctccagctcaagatcagctccacacacctgaggcgattccctgaaccagtgagctttcccctagggctggacttttcagtttcagtaacgcaaagggaacacatgccactggatagttcacaaagagttgatgtaaaaagcataatggaggaggggaagcagctaaggggtagaagttcaaaccgagaagctagctgatctttgggaaagtgttccatggtctgccacaagaaaggcagaagcgccaagagggagtggctgaatctctagcaggaaaacagtgggagcctttgttcatctaggaggcgagactgagagagaaagtaccagtaggaaaggtcaacttccagaaaaggaaactagagactggagagctcaccatccggagcctcaggaggagtatcccgtggtgtgcaagtgagaagtggggggcagctatttcgctcacagccaaacagcccagaccaactgcaacctcactgacagttacttgctccaaactcgcccctagtctgcaccggttagcttcaggcccatcatctcttacttgattggctgatgaaatgcaacgtcattgctcctgtatatctcaggcatttgacggcttaaggctttgttttattttttaaaaataaacaaataaggggtgaaaatgaacctacagaaattgcgccattgtgttaatttaagactttgggacagtggatttctgacaaagagctgttggacactgctttcccagaattctagtaaaaggaagtttcctggataagatagtgtggtagagatatgaggacgcaggttgctgggttagggaaaaagtgaatggatattgtgggcatgtaagagaatgaaatcaagatgacaaggtgaactttcactctgggttatatgtgaggaaattttcaggaataatgatatactcatttgttttttctaaacataatatgtaaaaaatattttaattgaaattacttagttattactatagagccaacttttcacattcctactctcataaaatatcttaaagttatttaaaattgtatttaatgttttgttctctgtgtttcatctctttctcccgacccacacgtttataagtgaatggtggtaaaattcccaactcttcatttggcctcctctgatactaccctgatgaagaaggcaggaggcaacttgtttggctgggttggagcagaagtccaggctccctacatggtctccaactgaggcatggggtgcatctttatggcctggttgttatggaagttccagctcccacaaggccttttctgatactgctctggttggggtggggaaacaggcagggttctggcatcttgtatggtatgggtgaagtttaagcttcctactcagtctttgctggtatgtgggtacagggagtgggtgaacacttttctgtggtgtttggttaaagtagagcagttactggtgaaattttctgtcttgctgggctgccccttttcttgggtctttaaaaaatctattctcggccaggtgcagtggctcatgcctgtaatcccagcactttgggaggccgaggcaggtggatcacctgaggtcaggagttcgagaccagcctgaccaacaaggtgaaaccccgtctctactaaaaatacaaaaattagccgggcatggtggcaggcgcctatagtcctagctccgggaggctaagaaaggagaatcacttgaacccgggagatggaggttgcagtgagccgagattgcgccactgcactccagcctgggagacagggtgagacaccgtttcaaaaaaaaaaaaaaaggattctcattgttggaaatacatgccacatatctgtgtgtgggttgtggttcatgtgtggatatatatttaaaaattaattaagttgcaaagctaatatttgccacattatgtatttgtttatatacatatgtcttgctaagtttatatatatatatatatatatatatatataaataaaacaggaaatgtaaatgttgtctaatatttctctttagcaatatactctaatgaccacacactggacatccttgtaatccagaatcattcaccttttttttccaagagatgggatctcactctgtcactcaggctggaaggtagtggtatgaccatagctccctgctaccttaaacttctgggctcaagcagtcctcacacctgaacctcccaagtatttgggtgaatacttctacaggcatgtcaccacacctaattttttaattctttttgtagagatggagtcttgctatgttgcccaggctggtctcaaactcctggcctcaagccatcctctcctcagcctcccaaagtcctgggattataggcataagccacctcccatggtatcagtggagaccatgcagggagcagtaataggacacccttctctttcccatccagggggctatcatcagagacctagtgaagagcctgaagccccactcctacctaagcagtaagaagacaccccttcttcggctg

SEQ ID NO: 316348 - DNA, 4001 bp, Homo sapiens
gatctccaaataaattgctgccataaacatttattttagggaaccagggtgggtctaaacggatcagtctcattcagctgtaccctcactgtcaggaatctgttctggacacccgtccctcctgcccttcttggtgaaaatgaagtgaggttgccccaccctggttcctgcagaggcccctttctttacaccatctaatcctagtccctaccctttcatctcaattcctaatttataaataccaaaggttccaaaattcctgatgaaatttctccaaaatggtggaaccaaaactgcgcacaacatttccatccaggtctggccaaaaatgaggagatttggagattattttaagctatctcaaaatttctgttgcttatccatatacaactacaaaatcaattcagcctgtatttattgcggtgcggaaagagcagaagcaggagtggagatcccagctgagtaagtatgcaggtgagatccactctgacctccagatccctttctgttggacacatataaccagtccacggacacccccatcatccctttgtgtaatctggcttccccttaattgcaccaccggaggctttactcagtcccatctgactgtatgtttgtgggaaacaacctctctacaccatgatcccaccctgaccagaaggggccttgatgcagtctctgcagtctcccacatcctcaccgcagcagctttggcctctcaggaggtatcttccattgttacttctgcctaggcagaacgggcaaaagagcccgagtgcggattgaaccattccaggtcctcctggacctgtgagggagtggaaagcatttccgaccccatgggaaaggtgctctcatcctaacagctgccaacaccctatcttctcacccgctccccataacttgcctggtgagtggacctgcttagaccttactgaaccgtgagagctgtgaccttcctggggccatttccagaccagggaagccaatctgagcacgcgggttggttgccagcctggggaagccgcccgctgagagggaattctaaacataactgcgagcggcacagccaggtagcagagccccccgcccccgttggcgggagaagaaagcctggggaaggagaacatcccttaggccacccaccccaggacgagggggctcggacgagacacagtctgtcccccaaagcgcggggggtccccctggcacctccaagcccatcccattgacgaagtaaccgcccgctggaggccgaaaaagcgttcctcgagatgatctttttcaatcatcgaggacaattctctcgcttataactctgcctggagttgtccgagtaagcggtaagcaggtacttccactgtcccattacttagtccgatgaaggcgtgtgaacacacacacacacactcgcacgcacacacacacgctcacacacacacacgctcacacacacactcgcacacacacgcccagcacgcgtcgcccggggatgagatcggagcgcggcacaggagggagcccggggctcccggagcctcctggctccggcagacagaagcgggtgcccagccgaaggtgcgccaggcgcggctccggcccggaagaccccgcggactccgctcaccttaatgttgccgaagaccgagcgggcacagcggccggctcggctagtagaggtgtcgctgccctgggacgcgccgagcttgggcaggagccccatggctgcgggcggctggccgggcgcggagtggcgcggggtcggggcgcctcgggctggagcggccgggcgggtgagaggcgaccgcggcggcagtggccggaggagattcgcggagcggagactgagccagcgagtgcgcgcctagaagtttttataagtggccgccgccgatgatgaaacgcgctctccctcctccctcttttcctcgggtgtcaaaggcgctacgagcccccgccccgccgccgccgccgccgccgccccctcagacaggtgtgacgccgcagcgacccgcgaggcttgactgccccgagaagatcccgcctgccgggaggcggagagggagggaaggaggtggcgggcccggggaggggaggtgagggctgtgcgggggcaggaggttgcaagggggtggaggttcctggggactggcgaagagagggtgggcgaagcgaaggtgggtgagtggaggggatggagaaagaggttggcagggctggggggcaggaaggctgggatatgagggtgcccgaggcgggcgctggaggggccaacgtgagccgggggtggaggggagccccagcacccctcccgacgttcttggggagatttacggagccagtctctgcttgtttgcactcgcagaaaacctgggccctcagttccggtgatggctctgagactcgctgcagctctgtttgtgttgaggactgatttatatttaaactgctctttgcgctggagagggggctgggtaacaaggtgaaaaggtgggggctgggcccgaagtctctggacctgagccaaggtaaactgcaggggctgtcaagtgtcagcatggctgggtctggcctggggtgctggggggaggggtagagggggtggggggggtgtggacaaacaggacgcaccccactgacctccttctcagtgctggaatgaatagtgggtttattttttccccaagattttctactaacaggattccaagcgccgagaagagacagtgaggcttctcaagggaaggataagaaggttcttccaaaagcagctgcagtgaggaatccagctctggaggcatttttccagctccctcacttctgtagtcccgtgcagagggaacctctccaagcccaccccaaacccaggaaaagatgccgtcaatatccaggaggctttggctaagacaaaggccacaggatagatagaccacataggcttcttattctacccaagacctgatacctttctgggcctggtctggcctggcctgggcttgggggcttctatccacctgcgacccaagttccctggacacggcagcattccaaagatgttgaacagtgggcagcctctggcctcttcactcagccacagagcgaggtacatcctgacaggctttccacagcactgtagcagccccagccccagccccagaggaggcatgaattccaggtcccatctgtccactgggagaacatggcacacaaggacaggtaccagcatggagcacttggtgtgtgctgggcataccaggccctctgctgagcacccacatgcatgatttcatgaagccccaacgttagccctacaggtataggtactgatggagtctggactccacaaacaaggatgctagagcagtcggctaagaaagctgtctgaaagccacacagctagcaagtggtggagctggaccctgaattcagccttgtctgactcctaagcccagacttgaagcactatgccttctgataagttgtctagtccaacagccccattttgcaagttgaaccaaacagggaccagaaaacccccaggccaaggtcacagacaccttagggctaccatgcctggagcttctttctcaaaccctgaggcctcactgtgatcctctggtagaacccctgggaggatcagcctctccagccctcacctagtcctgttccattaacctggccctctgcctcccgtcagcgccagcatcatctccaaaggaaaagcctattcagaaatgctcacagatgcttatcttccttcattgacctttactgggtggagttcagctaaatgtaatggagagccaaccaaaatgacttaaatgagatttatttgtctctcaataattagaagtctgctagtaggtagtccaggggtcatgacctaggcccttcaagattccttagcctgtggttcccatccctgtggctggctcattgtcacaagatggctgctccatctccagcctcctctcctaattccaggaaagatgtggaag

SEQ ID NO: 316349 - DNA, 4001 bp, Homo sapiens
gtgttatcggaacccatgatgtgatggaatcgatgggtaacccggaggctgccctgagcttccagatgacggtaaatgttgtctcggcaatgaagtctctgttatttcttgaactaaaaccccttacgttctggacctgggctgtgtcctaaaggctatctcacctttttccttttctttagctcaggatagcgcgtctaaaggacagggagggctccaaaagttagggaatattgagccatggggccccagttttttccgtgtcctgctgggagcgcccagagccatttgtttgtccagagggaggacaagaagccctttctccctgctgtgcccccttcccacttcctcctccccactgctggatcttacagctcactaattttttcagatctaagattaagtattccaatatggaagcaaaactatcttccctagaacaaataattaaaacgctgcatcattcattttctgaagagctttgagccgtctatagagccttttctaatctgctgtcgtcaggcgaaacgcacaatggtctgtttagaaacggaaaattattaaaagctcaagcctttttccttctacctcttacaacaccagcgagcattccactgggggaggggtccttcgctccgccacctggcctatttgttggagttacttacgatgtcttcacccagaaaagaggtccgagggtatgttagtctccggtacccctccttccaccaacgtccttacacctaactgatccaattcaaaactgcaacaaacccctagcacctgtgagcgtacagaatacaccgcggccaaactcgatgtgctctacaatgcacatcctacatacgagaaatactggtttcaattaggcgaagtaggaaaggatggcggcgagtacctatggtgcagagcgctcaggatctccgaggtttgctgcgaggggctacccagcaggaggggcaaactctctgcgaagctgaattgtatccatcatactgtagccttgtagcttctcctcttctggccaccaactttccgaaaggctaccgaatcacgcttgtaatccgtttaaatgtttccacctttgagacttgcagggaaatggtcgctgcataccaatgggagagcggggcgcgcacctagcgcggcgatgccagcgacagggagctcacgaccacagctccctatgccctcgatggttggtaggcaggcaggcagagtgagtgtcccaggactaggttcctttgatttaaaatctcggtgctctggatcagtggagagcttcgttgttcccgagagcctgagctcagtctctggatttctctctttctctcttcctcaaaggttgtcactcacagcgcaatccctgcccgaggcctccttccatccgagaagatggaattagcccttgcttttccagggtgtctttgctctttgccctttaggtgggtgggagtgggggttggtggcgtgtagatgagagaagaaaagggtggggagaggcggaaaggaggcaggaagggggcgactagatctcagatcccagcattggtcagacggcgaaggtggggggaaagaaggagagggggagagaagatacaaatacacagtatggctgtgcacaccaaattccacttggatttgggagatctcaggcaaagcacgaaggtgaagcgataccgttggcagagagtgagtcctctgaccgctcaccattcaagcaccctcacttctcgagcgggagaaggtgcgggggaggggggtgggagggggaggggactgctgaacgtttcaggccaaggagacgctcgcggcggcggcggcggcggcatcttttaagactgacctgctttaaaagtgccactttaatggcctaggaaataactaaaatcggattacacgttacttaccaacgtctcctcctaaactggagcgccaggtcgtgtataaggagtcaatataggaaacgcagggctggaacctgaatgcaaatccatcagccgcccccaaatcgcgcaccaagggagcggcgctcgggagcccccagatcagcccatcgccggagctccgccagcgcgtcccccccgcacccccggcccctcctccgcgccaactgtgtaaatcagccgccgcagtcctctcgccgcgcatcgcaggcaaaatcccggcttaggaagcaaggaagcaagtgatctctctctctctctctctctctgtctctctctctctctctctctctctctctcctctctctgtctctctctctctcgctctctctctcgctctcgctctcgctctctctctctcgctttcgctgtccgcctttccctctcccccattatcggtcacaacctggcagctcttcaagagacaccctgtgaaattgagtgtcgggaagtcagcattctgtacccgtggattgatttgtaacttttatttgcaaatgagagagatgcctgtttggaaaattacagcccaaaaggtggagggtgatcaaattaagaacatctgagctgtattggtgggcggtatcgctaaacgcctccggggagcggtttccaagtgatttgcagtaatcccccaccttcatgatacatgggtgacgatttgaaagtacacatatttcctcatctgtttacatttgccgggggcggggggcataaaactgtagggcacagggagttgggaggggggcatttgcctgagagatgctggataccatttcgcgataaattagatacggacactggaacaattaatacgtgtaataacacgtatgtgaaagtattattacaacattacagaggcgaccattacccccactgcagtcatactaatgcagtcattcgtttaatgctccattcaatctgcagtgtaaaccaacgcaattctttttaatagatccctttcatcagagactgtgttggaaagagggcagtcttccactaactcccaaagtgaatagaaggtagcctggggaatcatctctgtatctcttgccatttcttcctgaagagaatgcaatacattgtccaaggaaggcaaagttatttagctattataattgtaggtagaatgatcttgaacctattttcaaaagcattcaaagaactctaactcaccctttgcaaagaaacagtactctcttttaatttatgcataaaatccttcgatagacaggcctggatatatgttttacatctttatttagtgaattttgtatatactataatttataccatcgttagttcatattattgacatataataccacaagttagtgtccgtattacctacattaaaagataggaaaggatggagttggtcacagagacagccaggggcctgtggaattttttgggatatatacatatacacacactctaaatttagtatggcaactgtgttggttctgcataaaatgaatttagattatatatatatacgtgtatacgtgtgtgtatatatcatacttacaatgttttcatttgttctttaaaatactcagcattcttcaagattattaagattagtaaaatatctacagggacccagaaagtaataaaaagcaccatgtattaaaatggattctttttaaatatagcatttcagactcactggcatgaattccaaacctctttccagtattttctaggataataaattcttccatgtgaattttacatacaggaagacatagatatacaaagaaaatttgtcataggtgtttcactcactgggtcgccaaattgggcttcaaagtggtatatctaggcagggttgccaaaggagtacatccccataatgaatcagtcagatttaggaaaaaccaaactgcatcagtagtttgatgtgtcacagagatatttttggccttttcaggtggttgcccaatttgaggagactcactcctggatacaccatattttatgtgggcaagtgtgaaatcacacacatgccctttgagcctcagggctggaggatattaaagtaaccctgaa

SEQ ID NO: 316350 - DNA, 4001 bp, Homo sapiens
aaattaaccaggcatggtggcgtgtgcctgtaataccagctactttggaggctgaggcaggagaatcacttgaacccgggaggcagaggttgcagtgatctgagatagcgccactgcactccagcctgggtgacaggagcaaaaatctgtctcaaaaaaaaaaaaaaaggattacgagtaatctatgaagtattttaggcaccctaacttcagcttgcgaggagcgagtgaagggtctgttccacaggtaaatgaggatctggtgttaaacagaaaagttaacatactcttcagttctcatcctacacgtaaagtatagatattatgcagcacacagcacttggacaatcttttcctcctttctttaaaaaataatttacaaaataattccttaaatcagtagctgccgaagtatcatttttttctcttccttttgaggctcaggtttctttcatttcaaaacatattcttgaagacttaagttcttcctttaagaaagatttaattatttaactcagaaagaggggcaaaaagtcaggaggtgaaacctgagacagtcctattagtcttacataacttaaagttggaactgattcagtagctcagctaaaaacctgaggtttaggcacaaagatgagctctttagtatactctccacaaacataaataaacagtttttaaaaatggaaaggatcttaatttctttcttcacttcttaaaataaaagcacatacatgtatagtaacttacgatactaacataaaaatactaaattggttacgcttaaaatgaaaagcactgaattcatcgtatcacatttaagtaatgctataattgacagaatagggtataatttcagaaagtaagtttatttcctaacactaacttttgaatagcacctctgtaagtatgcattaagtacttaataagtgctgcagggaacatcaaaaagtgattttcaaacgcaatatgtgtatgttctccaacttgtaaaaaaaactctgaaaatatataaagttacagttgttcatgcttaattaaattagctttgattattgcaaattactcctccaagggcaagtatgtatcaaacctttcaaaaatcttaggtttatatcagcaattatccttactagaaaggtcctgatctgaactcacctaaagctatgtgttaactacatttcaccactaagacacttgagccccgggataataatggccacggattccccgaattgcttcgagaactgctgcttgcttaataaagcgctgaactgtgaattcacctttctaaacagactaaaagcaagacgccaagtttcactatctagtttgggatttcactgggaatgaccacgttatcaagatgccatagccctcctgaggcttttaattacaataccttctctgttttccattcaaccacctcaatcaaatttccactagaaccaggcacacaaacagttgattcgtggctttgcgcaaagcctcctctggatgcaaaccctgggatcctgcatacattagtcctctcagggagggcaaaaggggaaaaaaagtttgttaaacaatgccgctggacaatgtggtgacattaccttgcccgtcttgtgatcaaaccagacgagagcgtggttccttgatagcactttgcaatcaaaagtggcattattctgcgctggtcgacagcgggccactgagcggccgattttgatgggctcgtccaggtagacatgacgctcctgaaacgggtgcgagttcgggcggcaagtgaagatggccaaggctgacggcatcgaggatagactgggggtgtctctcctaccagggacaaagaggagttcctccggatccggactgcccttcacaagcctatgcccctatcccacccaaaattttaaattaacacaaactgcacattgtctaagcataaccagtgaacatcaactcttcacttgggtgggaagacaagccagcgcaagccccatcacctcctttaaaacgctgcaacgccgtgatcacaaaaagtccccaactggcagctttcagtccatcttcttctctgggaagaaaaggctcaaacatcgggcagcttcggccaagaaaactcctggaacacagtttggggactggaggtatccaagcagatgagtcacacgccaattcttgtgtttggtttgagatcgcggccgcttttcccccttggtggcggaaacgttgcagcactgcagcatgaatgaagggtcggttcggcgcggccaggaaagtccttttgggccgaaggaaggtgtggctgggcacctctgggcagccaccgccagtcctcgcccggagtgaaggggcgagaggtgacggagacggaggggctctagacggccggcgggacagtctgcatcgcccctgctgagcggaggccgccccgggaagggggacgcggtccccggcctggcacgatccgagacggcggtggctgaggttctccgcgcgaggcgtggaggccggcggggcgcgggcagtggccaagtcgggactcctgggcacctggcgagcgtccccgcgaccagggcggggacccggctccgcaggccggtgcggaccgagcgaggcgcgacaccgggaggctcgagttcccaggcggcaggaagttggtccccggacgcctaggcttctgggccgccgctcagcacatgggccgcctcccctcagggtcgcccccgcgagggtcgcatctcagggacggcagccgcagctcccggcggacgagaaggtgggggagggagactggcccggaggttggggagaggccttgaggccccgggctggatccgccgcagcctccaccgatcgcggccgatggggcaagctcaagctgcgcccgacgaggcaggaaactttccgacctggtggggaaaacatcaaaacaaacggccgtcaggcgcctcagcccgcccgcctcagccgtcgccccctccagccagacccccgccagcccacaccgctaggcacgacctccgccgacctctccgcaagcaggctacgaggatttggagccaggacgccacgacgggtcctacctccctagccgccaccaccgcctcagcttaccttgccagcgccggccgccatagtgactctgactgaaacctacccggtgcaccgccacgggaacgcgcacccttcaagggccctcctaccccctctcccgcgccgtagtccaggaatgtcacgtgaacgacgccacggaagccgtgttggtagagggcagaaaaaagggcaaggtaatttttaacgggcctccaggcgccatcttagttaagggctggaagcttcaaacctcgggacaaccttaacgaccattttggttaagggcaagaacaatttgcgccgtagaaggtttttcaaacaaacagtgccaccttcttattttatctacttagcaagggggtgccaacttttactaaattttattctgtttaattctcgatgaaaatactagcgagcaaaagaacagacccagccaaaggagatggtcattagcagccatcttagctgtgggcaacacagtcacccgcagctaccttaagtgtgagccgccaaactccctgaagtcttaggatttgtgcacctaacagaaggaccattctcccctctgctaaattcgttatgttttcttcccggaaaaaaaaaatcttagttcccgcattccatttcgaatgacagtctttctcactgaacctattatgtgcccccagggctcctgcgcggattcttccacagaaggagcgtccagaaagtttaaaatcatgtttcttccaaagagagattgaataatttccaaagtgaaaaaagagggtatttcccccacttacaatatcaagatgaggagtcattggtctaaagaaggaagactttgcaagggctaaatgaaaactttaagaaaaaatagtgagaaggagacttactcatttagaatcaaaggtgacttcattcttcagattcct

SEQ ID NO: 316351 - DNA, 4001 bp, Homo sapiens
cattagccacttctggaagctctattacttacatttaaaaagtgaccaatttatcactgtgtaagaaagggcaatattactaaaaatctacagtctaaatgtaatttcagaggaggaaaagtccagacacctaaaaatataattactgtctctcacttcctcaaacttcagataagaaatgtaatttttctagctgaccttcaaaaacaagaaagaaagaaatgatcatttctgggtctttggtttttttttgttttttttttttttttttttttggagacagtcttactttattacctaggctggagtgcaatggtgcaatctcggctcactgcagcttctgcctcctgggttcaagagattctcctgcctcagcctcccgagtagctgggattacaggcatgtgctgccacacccgactaattttgtattttttggaaagacggggtttcaccatgttggtcaggctagtctcgaactcctgacctcaggtgatccacccgcccggccttccaagccgcgcccggccagaaatggtcatttctgaatgtaccacgtgtaatgccaaaggaacccaagatccctgcccatgcctaataactgccaaacactgacaggcttcactgagctgctgaggccaaaaaaataggttcctaaactagtttatgttttcattcattcaacaaatatttactaagcagccactaagggtaaggcaataagtatcagccacgttcccggatacactgcagtgaacaaagcccttgcttcagtgctatgattctcaataggagaaagtacagaactaaagagggtgataggaaaacttcagaggctggggagccttttcggctacctgcttcattacaccctttaagggagtcctcctgaatatttacacaaaagggaagttggaaaaaaaaaaaacatttgttataaacaaaggattaagtcaaaactttgaaaactactgactcggcggaacttccgttccaaaggtaggagaaatcagtaaatgaataatttcaaaatgtggtaaacactacgaagaaaataaaggtgacacaagaaaagtgctctaataaaaactgggttcttggggaaggcctccctttagaacactttacgtacaagcgaccatcaactctcacgccacacagaaccagaagcacgatgaggtagaaccgtcgttaatagttctcatccatcctagaattcatattgcctgttattaattaacgaatacaatcatcccagtcgtttagcaattcaacaacaggtagcaaaccccctcgagactttgaatacgctctaaacaaaacttgaagctgcttttaccacgcttgctcggtctttagggatcattgttcacacacctaaggcagctgacaaaagagagagagtcacactcgcttagtggctgagctcgacctgctctggcacacgagactgagcaggggctttcaccatgggtgcgtaggctcagaggagagagccccgaaccccagtcaggccccgggatcgcgggcgcccagagcgggcggcgggggcgtggcgggcccggcgcctgcctttgttgtccctcgtggcgtgcgggggggaggggcggcccgaggcccgcgaggccagctgccgcctccggccccggtcgcgtggtctcccggcccccacgggcgcgcgaacccaccttcttgtagtgcttgcccagccagacccgcaccgaatccagctgggacaccgtctccgggctctcccaaaacttggtggccgggcccccatccttccgtcgataaacagctaggcctgcggctgccgccgcaatccccgagcccgtggcgcctaccgctgtccccggcccgccgccgcccgccgctgcggccatcgtcgcagcccgtcgtccccacagcctggcccaccccggccctcgcggtgtttcccggtcgttcccgcgcgcacccccgcgcgcgtagccgccactgccgcttcccggccccgcccagccaaccctcttccggcgcggacgcccggccccgccccatctgggaactggcactgtatctgacgcgagccagcgcacgcgcatgcgtagcactcgtgcggccgtgccttggaatagcacgtcctgcggcctcagccgcctcttccgccatcctccgtaggctgcattctgccctagtgagcgccggtttttgagccttgctcttccctcgctaccgacgtcgaatcattatgcggtcaacaaccgcaggtgggttatgtgtcatagcccgcctccgctggagggaaaaggcctggtgcgagaaatgcccaagggaaagcctgtctagggtatcgagtgctggccgagggccctgcacccggactgggactgcgccgggccccgctttccctcaggccctccacccccagcggcccggcggcatttgtgaacagccatctgggactcccacgcctaggcttttcggcttcacagaccttccactccctcaggggtccagccacagcggctcattcctgccccaggggcccttgcactggctctttcgagacctcagcaggtcttcccttctgatttgcacttacgagacgcgttcagattcactgcttcaaaggacttcagaaagtagttgtcagatcttaacaatcttgaacaactgttcacacccatacactttctgcatagcgctcaccacgacccggcgtttctagtttctcatttaccttccacataaattacatgagaacctaatcttaacttgttcacaggtgtatcctgaacacctgagacaaggaacagatgtacagtaaatacttgatgagttaatgaatggcccacatagaagccgaaaatttttaaattattaacaaggtatattggccgggtgcggagcactttgggaggctgaggcgggaggatcaattgagcccaggagctctagaccaccacacccatccccgtctctacaaaaaatacaaaaatcagccagcgttgtgttgcaagcctgtggtcctagcctcttggagggctgaggtgggaggatcccttgagctggggagatggaggctgcagtgagctataatcgcgccactcactacacttcagcttgggcgacagagcgaaaccctgtttcagaaacataaaaagtatgactggccataatggagttgtgaacataatgctatatgatcgcagagaagcaagtaactaattgcttgtgagaacgtgactaactgctggtaagtttctgagatcttttaaaaatgagggtgtgtacatgttttcaggatctcctgagggctgtgtcacggacagtaaaatatattaaataaaaaagttaatagaatgtgatcaagagggccaggcgagatagctcacgcctgtaatcccaacactttgggaggccaaggcagactgatcacgaggtcaggagttccagaccaccctggccaacatggtgaaaccccgtctctactaaaactacaaaaattggccaggtgtggtggtgcatgcctgtaatcccagctactcgggaggctgaggcaggagaattgcttgaacccaggaggaggtggagatcgcagtgagctgagatcacgccactgcactccagcctaggcgacagagccaaactcgtctgaaaaaaaaagtttttaatttgaaactttctcagatttaacagaaaagttgcaaatataatacaaagaacttttcctgaatcatctaagagtaagttgctgacataatacccatcactatcaaaaagtttaatgtgtattttctacagacaagtatagtctatatattctcttacataatcacaatacaatcatttataccaggaaattaacactgatgccatccccagaccccattcaggtttttcctattgcaccatgaagtcctttatagcaaaagtttccagttcaaaatcacactttgcatttaataaagtttcatctccttcaatatggaacagttccttagtccttaaaccttaaca

SEQ ID NO: 316352 - DNA, 4001 bp, Homo sapiens
agtccacttgctctcttgattgaccgtctcgattttagcgggaatacaataaagatattgaatttttgtttgtgacctgtaccattccacaggtcacaaacaaaaattcacaactgaacccgtttgctcgcccccatcccttccagcgccgttacaccaaaattgcacgggaatcctatctcaaagttgccaaatggctttcctgagcctctaccggaccgacaccggaccttcagatgtcaactccgcgctcaacaaccccagccagcctcgggctgggcgcgtttgcctgccagtcccacagcgcgcgttcccgccgagtcgcggcgggtcactcacctgcggcggtggctgggctctccgtgcggccggacggcggctcaggctccgcgtcgctgctggcgccgtcaggggacggcggcggcggcccttcctctctgcgccgggcagtggagggctgggtgcctttacggggcatggtcgctggggccgggggacagccgggagcaagtcagcccgcgggccgctacaccgcgcccgccccacccggggaaatctcggtccaccggcttccgagagccccgcttaacactccgcttagaggcagcgggacttcgggaagggagccatcgaaagacacgagtggcaagaaggcaggactggtttcttaacaagacctatgtaagtgggaaaatctagacgtgcctgaggatcaatcaacgattgagcaactgcttagtttgttgttgttgtttttaaggctctccacccgtccgcccatagtataagcgtataatattcgctaacgcatttctaattaaggaactcccatacgccagcatttccggacattcccacgctttcggggccagggatgcaagcgcgcaccgacgtggagaaacgagttcgtgtccgggtcaggatcccgtggctagcaactctctccagagcggtgaagactaactggcgactcgccgcccgctttcgtctgcccgccctttagctcctggcgccgttgacggcccggggcataacgaagtctccctcctctcagcggtcggaccgcgaagggcgaaggctgggactaaccactagcaacttcaagtcggacgctggcagcgcttgctaattttggagtggcaagagtttgtctctccagctccccaggcggagtcccgttggacagtaaaccatgaaaggtcaccagcgaaggctgagacccggtgactagtccgttggcagaaggaagaggggtagggggagacgcccttttccagatagagactaggattttttaaagaaaagatctgcgaggctcagggcctccccgagacatttgagtagcttggaaaagtggcgcccgggagctgcgcgcgggagcccgggccgccggggagcggccgaggggggaggggtgacagcaagagaaatctcccagcggcagcttcaagcccggacttcgccgctcgggctcaaggcctctattttccaggcgctcgcggacaaggcaggaagtaagagcgtgacaacctgaccaggaagagaagtactttacctgcaggacagtccactcagaccaaggctggagacggttgtgtagtacccacctccccgctcctaccggtgtttcggctccgggtccttcactcgaaaatggcgcctaaaatacaaactcgaacggaaattcgttacaaatgcgcgcaatgatttctgggatccactaatttgaaaaaaagtgcggcgattatcaccgccatcttattgtcgctcctgcgcatgcgcgaactcctggcgggacctacgcggtagaagtttctactaagtgaaaaggaagagcgagggattcttttctctgtggtctacagcagcagcactattattaaaaatatttggaaagacaacctggcaagttttgaaaaagatttttttaaaaacggtagggttccgctcacagtgggaggcggggctcagtggtccagaaacgcctcttcagaagagggcgggctcgccgagaggcggggtctcgggcccactcggatgacgtgccgcgtagaagtatcgcgggaagaggaagggagcgtaactcttagaagtcactatggtgacggggaggtaccaggtatttgagagcaatcgccaccgctttcctggaacttgaggtaaatcccttcacctctggacctggtgagaaaagggtttggaagttgtagccatcactggatcccatctttcctgttttgaagctgtgtgcttcgtggagcatcattttctgtctccctggcggcagcggggctccgggtgtagcttttgggatgcgaaggaggaagccctaaattttaagggagtagagagacaactggaagacctggattcgtgatagcttagtcgacatgtgaatagcgcaataatgattttcgagatcattggtgttactagtgaaaggtttaggacttttaaaataatttgactaaaaggctctttagtggaaaaaacgactcgccagtgttatggttatttttatgaggaaattatcgatcagcaaatattccctaagtagtgtttgtatacattgccctgggtaaggcataattagaattagtaagcaagtttggcgattcctgttccccgagaacttagttttagtgggtttttaacctgaggtctgtggatctggtggtaggtgattgggcttcagagttcataactcgcctgacattgtatacataattctatgtgcatttttctgggaagttagttttcctacaactttataatcagaatctcatacttgctcctaattccctatattgttaaagagccactggctcatttgactatctccagtattcatgcaacaactcttaagtacttgacattgagaactactagcctcctttttttttctttaacttttgcttacttagggtctggcatgttaaatcaccattaaatctcccttttgaatgaatttacatgatcactctaaatacattatggttcttccctggaagagcatgaagtcaggttcagtgattctcaaaaaggtgtggagagccacccccctcccaaccaattgtaagaatttggtgaggttgggagactggtgtgtattgcataagcgtagactcaatatcgtgatatatctttatgtttgaagttaaaaacgaattgttgttttcataaaacaagctacagaaaataaaccttaatgaaaaaaagttttttggctggtaagcataccaagaagatataaggattatctttgagggcttctggaatttttgcatttccaaaggttgtaaaacactacaaaacctgagttggggaggtatcaactatgcggatcacctgaggttgggagttcgagaccagcctgaccaacatggacaaaccccgtctctactaaaaataaaaaattagcagggcatggtggcgcatgcctgtaatcccagctactagggaggctgagacaggagaatctcttgaacccgggaggcggaggttgcggtgagccgagatagtgccgttgcactacagcctgggcaacaagagcgaaactgcgtctcaaaaaaaaaaaaaaaaaaaaaagtatagaccaaattgagtggtgtatttggggcaacagagcacaatgtagtggaaagatgtaatatagaaaacagaatcccaagttccatcattttttaggtatatgcttgacagtttcctcagtttgtcaatcttgagagtatttatttatgaaactagcatataatacctgtctcatcatactgtttatgattgttcatctagcacatgctccataaggatttgattttgctgtgtttatgacattgaacttatcaaagtatgctaaggatgaataatgggatatcaagttagaggaagggtagctcctgaaggatcttgaaaaccaagtcaaggatgttagatatgatatggaggaaacagcttttagaacaattctgagccaaggaatgacttggtaaatataggaagaa

SEQ ID NO: 316353 - DNA, 4001 bp, Homo sapiens
aaaagttctcattgctaatcacaggcatacgacttgagttttcttacatcaagttctctcttaaaagcttcaacattcaataagaatgctccaattctaacgcagacgttttagaaaactcattttatagttaaattatctaagggttccatagaaggctttaagaaaaaaaaattatccaagggaaaatactctttcaaacagaaacacacaccgactccattcaatggaaaactttgtaactagaggtaccaaagataaccagataaacaaaagataatttcagtgttaaaatcatatgaaacgtgtgtgtgtgtgtgtgagagagagagacagaaagactatcaggataaatagggagtgaatgaattttaggatagttacaaaactgaaacatcttgtaaaaacgtattaccttacaatagttatttaaaaagttataaaatagttatttccatacaaataccttatggaaaggtcccagaattttctccccagcataggatttgaagttctggtttacaatatgagttatcataagccgaggagctccagcttcattggtcattgctggaggcgggggaggaggaatgctgttcaaaatctcttctaaacttctattatcaagttcctcacttgcagtctctaagtcagtgaaaggaaaggaaaacgaaggcaaacggcgggggaaaagcctacattagtgcaattagttcggagaactaatgactgcccatctttaaagtaggggatggagggatgttatttatgaaacttaggagtctatattttccacttaaatatgttattatcttaaactcacgggggtgactaaaccttcagcttggttttactaaaaaagaaattcttgaaagaaatgccaccggtcacaaaattctatacacctatacctcttaagagtcaaaacactacatcatagagcaaatctgggaaaaccgtaacaagctatttcctgctgcctatcctaaacaggaggttaaatcctaaggctctagatgcaattctccgtaccgctgagcacctggaaccttcattttggaaactcatgaacttcagcgacactgccacgagggtttaataatgtcacccaactcctggactcacaaaagctacagtggcttcaaataaattatcgtcttctctttaacggcaatctaacaccacggaggtgaggttagggtcaaaaaacttttcatcatgctcacatagtcatattgattgtctctgggaaaaaagtccacttgctctcttgattgaccgtctcgattttagcgggaatacaataaagatattgaatttttgtttgtgacctgtaccattccacaggtcacaaacaaaaattcacaactgaacccgtttgctcgcccccatcccttccagcgccgttacaccaaaattgcacgggaatcctatctcaaagttgccaaatggctttcctgagcctctaccggaccgacaccggaccttcagatgtcaactccgcgctcaacaaccccagccagcctcgggctgggcgcgtttgcctgccagtcccacagcgcgcgttcccgccgagtcgcggcgggtcactcacctgcggcggtggctgggctctccgtgcggccggacggcggctcaggctccgcgtcgctgctggcgccgtcaggggacggcggcggcggcccttcctctctgcgccgggcagtggagggctgggtgcctttacggggcatggtcgctggggccgggggacagccgggagcaagtcagcccgcgggccgctacaccgcgcccgccccacccggggaaatctcggtccaccggcttccgagagccccgcttaacactccgcttagaggcagcgggacttcgggaagggagccatcgaaagacacgagtggcaagaaggcaggactggtttcttaacaagacctatgtaagtgggaaaatctagacgtgcctgaggatcaatcaacgattgagcaactgcttagtttgttgttgttgtttttaaggctctccacccgtccgcccatagtataagcgtataatattcgctaacgcatttctaattaaggaactcccatacgccagcatttccggacattcccacgctttcggggccagggatgcaagcgcgcaccgacgtggagaaacgagttcgtgtccgggtcaggatcccgtggctagcaactctctccagagcggtgaagactaactggcgactcgccgcccgctttcgtctgcccgccctttagctcctggcgccgttgacggcccggggcataacgaagtctccctcctctcagcggtcggaccgcgaagggcgaaggctgggactaaccactagcaacttcaagtcggacgctggcagcgcttgctaattttggagtggcaagagtttgtctctccagctccccaggcggagtcccgttggacagtaaaccatgaaaggtcaccagcgaaggctgagacccggtgactagtccgttggcagaaggaagaggggtagggggagacgcccttttccagatagagactaggattttttaaagaaaagatctgcgaggctcagggcctccccgagacatttgagtagcttggaaaagtggcgcccgggagctgcgcgcgggagcccgggccgccggggagcggccgaggggggaggggtgacagcaagagaaatctcccagcggcagcttcaagcccggacttcgccgctcgggctcaaggcctctattttccaggcgctcgcggacaaggcaggaagtaagagcgtgacaacctgaccaggaagagaagtactttacctgcaggacagtccactcagaccaaggctggagacggttgtgtagtacccacctccccgctcctaccggtgtttcggctccgggtccttcactcgaaaatggcgcctaaaatacaaactcgaacggaaattcgttacaaatgcgcgcaatgatttctgggatccactaatttgaaaaaaagtgcggcgattatcaccgccatcttattgtcgctcctgcgcatgcgcgaactcctggcgggacctacgcggtagaagtttctactaagtgaaaaggaagagcgagggattcttttctctgtggtctacagcagcagcactattattaaaaatatttggaaagacaacctggcaagttttgaaaaagatttttttaaaaacggtagggttccgctcacagtgggaggcggggctcagtggtccagaaacgcctcttcagaagagggcgggctcgccgagaggcggggtctcgggcccactcggatgacgtgccgcgtagaagtatcgcgggaagaggaagggagcgtaactcttagaagtcactatggtgacggggaggtaccaggtatttgagagcaatcgccaccgctttcctggaacttgaggtaaatcccttcacctctggacctggtgagaaaagggtttggaagttgtagccatcactggatcccatctttcctgttttgaagctgtgtgcttcgtggagcatcattttctgtctccctggcggcagcggggctccgggtgtagcttttgggatgcgaaggaggaagccctaaattttaagggagtagagagacaactggaagacctggattcgtgatagcttagtcgacatgtgaatagcgcaataatgattttcgagatcattggtgttactagtgaaaggtttaggacttttaaaataatttgactaaaaggctctttagtggaaaaaacgactcgccagtgttatggttatttttatgaggaaattatcgatcagcaaatattccctaagtagtgtttgtatacattgccctgggtaaggcataattagaattagtaagcaagtttggcgattcctgttccccgagaacttagttttagtgggtttttaacctgaggtctgtggatctggtggtaggtgattgggcttcagagttcataactcgcctgacattgtatacataattctatgtgcatttttctg

SEQ ID NO: 316354 - DNA, 4001 bp, Homo sapiens
acgcctgtaatcccagccatttgggaggccaaggcaggtggatcatgaggtcaagagatcgagaccatcctggccaacatggtaaaaccccttctttactaaaaatacaaaaattagccgggtgtggtgatgcacacctgtagtcccagttactcaggaggctgaggcaggagaatcacttgaacctgggaggcggaggttgcagtgagctgaaatcgcgccactgcactccagcctggtgacagagtgagactctgtctcaaaaaaaaaaaaaaaaaaaaagccatttggcatactattttgtgttaacttttagacctttaagactatattgcttataggtcatctgtagtttgaaacttagggaagaagtctagcttgtcaatcagtataaaaatttacagttgcagcagttctttggaatcctctcaccaaaggacagtccgaggccgttccagataaatctcaaccaacatgcaaatctcagcgcaggctgttttgttttgttttagtacagttccctagtttcgttaatgacctcaccatccaatcaattgcttgaactagaaatctcagaataattctcaacttttttcttcccctgatttatgtctctctaacccattcctgcctctccatctccatcaaatgagtttctcatcatctttcactaggacccaagattaccgtagcctaactggacccccgttttccatttcccatccatcctccagacacattcttctaaaacacaattccgattctgtgactcaactgattacaaatggtttatgtcatcctggcttgcccagtgatatactcagaggcaaactggatctcctcagcaggaaagtcaagggccttcaccctttgctcctgtcttccaccagtcccctcacccatcctagttaccaattacacgagacatctagttgctgcttgaatacattatgtggttccaagcttacatatggcttatatgcactgtttcctcagcctagaatgccttcccatatttttctccctcataagctcctacttgcactttaagatccagcttaaatgaccctatatgaagagttcctttttctagtgtcaaaggcaaaattggttgatcctcccttcatgttcgcatagacctttaggaacatcaccattgtaaggtcagtcacattaaattgtaaatgtttttcaaacttttctctttcctacaggctgtgagctccttgagggcagaaaccacattttacttatttttgtaaatctaggatttagcatatgcatacattcaatggagttacagcacctgggagcagacttttctttattgttaatttacataggtttgggcctggaagacttaaaccactgtaatagagacggaattctttttttggacggagtcttgctctgttgccaggctggagtgcagtggcacgatctcggctcactgcaacctccacctcccgggttcaagtgattctcctgcctcagcctcccaagtagctgggactacaggcgcccgccaccatgcctgggtaatttttgtatttttagtagaggcagggtttcaccatgttcgccaggctggtctcaatctcttgaccctgtgatccgcccacctcggcctcccagtgtgctgggattacaggtgtgagccaccgcaccggccacagagacagaattctaatgagcatgtctgcagttctttatttctattcttcattcttctcttacccatcttcccagaatagcagacccatgcttgctccctccctatagccctcagcaaccttttcattgcctccttcaaggatatcagggttgtggtttcattgttcatcttctgaaggcaaaaggaaagaaaacaaaaacaaagcaaaacaaaaaaagcaataaatgtttgaatccagaattttctgcggtcttcctctcagcaacaggcagcagtagcaggagcgctcagtctacattctgcctgaaaggtcactcagtacaagaagcttttaatagcctgcagatccaaatatagtttcaaagaacttatctcgtggacacaggtgtcctggaatgcactataacatttgcctttgaaaactgaaccatagtacattaacatacagcaacaaccatgtataattaatgactgtgtacattatggtaaatgtatatacagatacattaacgtaacgtataggattaagtttgatggaaatattactgtcatattttaactgcttcattattcaattacaacctaaattaggtttgaagagtgccccagatcttttatgatgatgatatcaaagcaaaaaatctaactatcattagaaactactaaatacttgttatggctgggtatggtggctcactcctgtaatcccagcacttggggaagccaaggtgggaggattgcttgagcccaggaattcaagaccagcctgggccacagagcgagactgtctccacaaaaaatacaaaaattagccaggagtggtggtgcatgcctgtagtcccagctactcaagaggctgaagtgggaggactgcttgagcccaggagttcgaagctgcagtgagctatgatcatgccactgcactccagcccgggcaagaggataggatatatatatatatatatatatatatatatatatatatatataattatatataaaattatacatataattatatataatatataatttatatcgtatataaaatatatatataattttatataattatatatatattagattaggaattgaatataaatgtggaaataaaataggactgctgttttcatgagatttaaaatctagttgggaagaaagaatatatccttaaatagaaaatgtatatgggatgtgtgctaagtagatagagaccataaaaataatagaaggtgagagactaagtcactgaaatcttgggtccttggggagatattcaccctgaaggtggtacttggcttggccttaaaggtcaaggtctttgattatcagagaagagtgttaagggtgttacgaactggagaaattgtgtgagcaaaatcacagaggtggcaaagtaaatgatgtgttcaggaaacaatgagtaggtatgttttgagcaaaagattcatataagaaaaagaaaataaccacaccatttaaactggtaagagccatgtcacgtatttgttctttcactgaatactttattcacttattcaatatttactgagcatcatagatattaattgaatgtataaaacctacgaatggatgagcagcactattccaggcactggtaatatagtgataagtaaggcgaaatccttgtcctcaaggaacatactagcagggagacagcacataaggcttataagagaggggatgcttctagctagcttggtaaggagtttggacagatgtgagctgttggttctagaagattaatctaggctcaggtgcagtggctctcacctgtaatcccaacattttgggaggctgaggtgggtagatcacttgaggtcaggaattcgagaccagcttggccaacatggcaaaaacccatctctactaaaaatacaaaaattagctgggcatggtggcacacacctgtagtcccagctacttgggagtctgagataggagaatcgctcaaacccgggaggtggaggttgcagtgagcagaaatagcaattgcgccactgcactccagcctgggtgacacagcgagactccatcgcaaaaaaaaaaaaaaaaaaaaaaaaaaaaagattaatctagcagtgatattgtagtataatatgaaatatatttggtcttcgtccccatttcagccacaaagctcctaaaacccttggaatttcctgagtgataggagtgtctttttttattcataatgagccccttttgatcacatgtgagtttatgctaatgaggtgatttagggtggtgcaactagaatagcctccagatggggctggtcactagaaagaccaggtgattc

SEQ ID NO: 316355 - DNA, 4001 bp, Homo sapiens
cctgtaatcccagctactccagaggctgaggcaggagaatcacttgaacttgggaggcagaggttgcggtgagccaagatcgcaccactgcactccagcctgggcaacaagagcgaaactcagtctcaaaaaataaataaattaaattaaaatgttgggatttgacttccatcataatttgcttctgaatggttcacaaatcccaatttctggcccagatttgcctcctgagcttcagctctgtataaccatatctacctcgtcacgtcccagatggtgcccaggatggccctgcctgtgttcggcaccttcaggaaatgcactaccccctgccccaggtgtcccaccagaagcctccactcctcatctcctgagtccacttaatcaccatgccctgtcagtactacctctgggctgtcttttacttccatcccttcttggtatcctttctgccccaacctagaccaggccactgtctcaactctggacagccatacagcgtaactgttcctaccaatctgtccacaaggagccattctccacatgttaaagcctctccctaaaatgactcaatccttgggatccattcttggttctccagtccctttgccaccctgcccaggcacccttctagccatccccactttgttgatctgcttcaatccctcaaacacacagcatactctcacacaagtgctcctaccactgccatggagatgctttcaattccacacaccttcccctcatctgactgacacctactcagtcttcaggtcctactttacttggtagctgcttccggaagccttccctgcaccatctagtccagttgaggcgcccacccgagagtcctatgttcctcccacttccttctcacagcactgatcactttgtatgctaattgtctttatcatcttctttcccattagagctcttctggggtaagggacacctctgccttgttcattatagcccctcaagaatgctcattaagtatcaatgaatggatgaacagaaggactaaggatctttaggaatcactaatgtaacaattctttaaaatgtgggttggcaagtcacaagtgatagcgtttcaggagaggggcaaagcagaaagggccgaggggttggggaagtcctcctgaaaggaactggcctgtccagagttaatgctcagtaatgcagtgccaggcgttaccactatctttacagtgctgatcatctggacccagaccaaagacctggtgccaatgactgtcctgtaaaggtagtggtaattagcaaagccaggcagatcagctccctccagagtttggacagaagaatccaaagagaaatggctagttagcaggagtttccctgacccctcatatccacccccttctacgattgttgtgagcaagtctgttccttaagcccaaacgatgtcaccggcaggggtgaagggcaggcatgagagggctggaagaagcacgtgatctcgcctgtaagtgcagggaaggtcacaaggctggacgccaatgtgcccggcctacaggagagccaggccgccctgactgccaagcgaatggaactgcactcgcccagcgctctgagtggaatgcgcggtctgcaatctgagaatactccccagaaaaacggatccctaccgcctcgtgccttcctgaaaggaaacagagactgctaccccctcacttacagaaggtctcctggcccacgcgcactttaatcatgatccactccatcgttcctcccaggacaaaaaagaagggcaggaaccggtagatgccaaatcgctgcttcccgggcacccgctgcagaatccgtctcacctgggccctggtgaacatgctcgaccgaggtcgtggagagggatatgacggaactaagcactggatcgcccggacgcagccgagaccgccccgcccgttctcgccgtgtaccgcgacctgggagactagcgagcgccgtcctccgccactgtctggtaggcgcacgagtgccggaactgggcgccgaccttctaaagcgaggcggatccgccaatcagactgcagcgggggcgtgcagctccgccaatcagagcacggcagggcgcgcgtgctccctgaagccgagcagggcctcgaaggagctggcgcaggcgcctcagctctggaggtgggacggcccaaaagggaaggacagcccacgtggcgccggcccggccccgccccctgcctccccagtgcaggtctgagctcgcagttggcagccgcgccccctactctgccaccgccatttttattcctaatacccagatagaagtgatgaccctctctgatggactatgtacagcaccacattccaaaatgcaattatgcaatgccttgcgtttatttcggagacgtgattggtgcctagacttctaaagtaacagaatttgatatggagtgttgaaagctgaactttatcaattatcacagcaaaaatctaagtaagcgccccgtgagaaccctaaaattaataaaagctatcttgtatggggcacttacagttccacaggcacttgtaggcgctttattcacaataatcgcagaagagcagtataaagagcatgcactctgttaccaaaccacatccctgctctacaggtgctcccttagcccatctgtgcctcaattccctaagccgtaaaacggaggccttgttctgacgctgtgataatttagtgcggtaataggaatgatgcactgaacacaaccctggagcatagtaactgattaatattagttagaatattcattatgatgataatgattggcagagccctcgctcttcacatgtattcccaaacatggtttttgtttgtttcttgagacaggacctcgctctgtcatccaggctgaagtgcagtggcgcaatctcggctcactgcaaccccctcctccccggctcaagccatcctcccaccactacaggcgtgcaccaccacgcccggctaattttttaattttttgtagagatgggggtcccactatattggccaggctagtctcaaactcctgggctcaagagatcctcctgccttggcctcccaaagtgctgtgattacaggcgtgagccaccgcgccgagtctgaacgtgtattgtttatatgtagtctcttaactgacagtttaagagactatgccaggtagaagcagggctctgacttaagagacttcacttgtaattgcgtcttctcatgctgctgtgcttgctgaagataactgaaaggggctgtcaccccattacctaggactaaagtaaaaactgcaggaacagctttgagaaaggagacaactattagacaatctaaggaaggtaaatgaaagcttagaaccaatgagacgatttggtgatatggacacaaaatatacaaaagcagactggagagagcaagcagggccccagaaagggtcatagggcccgcagtgagcagcctgagctgccgcctgtacaaccggctttggagggccagcccggaagcctctttctcctccgggtagactccgcccaagcatgcacacacacaggcttgatgctcgctcccgtttctacaggaggttttgacggctggatgctgcagggcatcccctcgcctggaggaggttcacttgtggccaggttcccagcacacccacttgctcactggggccctggggacaccgccacactcgagcccatcctacggcctcaatccttaccagtccccaggccatggactgccacactgtaggtcttcaatcaaggttcagtggagtttcgaatgtacacacaccctgaaagacagcgcggccacctcagaaaacaacgcgcgcccagctggctcccctccgacagggcccacggctactgggtcggcctcctccggaccctgagcacagcctggtatgcgtgcgggctcggaatacggatctgagcagaagaaatgcgagtggagagcggttctgcgcaggaaagaggaattttgttggaaa

SEQ ID NO: 316356 - DNA, 4001 bp, Homo sapiens
aaatatcacgaaagcccttcaattttaataaggacatttaaaagcctttcttttaggattatgtgattaaatctaaaccataaagacccaacctatacttctggtctagaaaaataaaattagtacaacttctgagttctagcatgttttagactaatggatcttactgcagtaaaacagaaaaaaatactcagaattattaaaaaatacggtgagagtaatttttgtgcacaaaatgaacaattaaaaactgattatacaaatttaaaaaaaaattgaaaggtggcactgaaagtttcctgcctgaaaagccttcaggatgagagtattataaaaagttagcactgtgcacctgactttctacactgcttcaatatgtgaccttggaaatgtcatgtaatttctctcatttctagttctgtaaaatgggaatgtccacctgttctcctctcaaggacaattacacagataatcagattaaaaatttggtatttggtgttctttaaaaaaagaaacttgtctaattagtatgctttaatcatcacttgtacagtacattcctcttcaagaatccaattccaagagaaatatttaagcagacgttgaggacagatttccttaagggaattattttataaatctggaaagcaatgtaacgagattataaattaacaaactgattacataagccttgacaacccgggctttaaagtacactgctgtatatattctgataagttaaagactggtttgggacatagtgctccaatcccatacaaggagcccaaactcaggcatttcatgtttgataggaacttggtggagattcaacaggatgtccaacacttgcaagccatgcttcaccttaaaacctgacaaaatgtttaaggcattaagtcaactttaccacggttcctaagactttaagaatgcacataattaaagggaaggggggtggaaagtaacatgacagtttgaaaggtcccatatcctcagacctctatagatttaggaactccactgctaaattctccccaaagcctgaaactccctatgaaactactggactgtatgcgatccaacagttacaaatagcacagctccaagaaccccgaagataaaaggctgccactttcctgcaacccaagtccaagtaaaaggcaggaaggtccctgtaaaatggaccagaaagaaatcaacaggcgatgactatggaaaagaacgtagatttcccagtctcccagtctgcaaaaattctagctctccctcgggaatggcactgctcctctttccttacccctttgccctttctctacagacaacatccccactctattgtaaagcagtttgaccacggaacccttttgctgaggccggatttctacagtcttctgaaaggggaaaacgcattcaaagaacacacaccctaccaagcgcccagggcgcggggccccgcgggcgccgcactcggcccgctccggggcggggcgcggggatgcgggcgccttccgaggtgccgcaatcccgccgcggccgcaagggcagggcctccaggcgaccgcggccgccgccgcagtgacggctcccgccgggccccgccgccgccccgccgccaggccgcgccgcggggtccgggccaccgcagcccgggccccgcgtcctcccgggccgcgcgctgcggccggcgccgagagcgcaacttactttccgcctgcggcgagcgccccggcccgggcgcccagcccggcaacagcggaggctactgaggcggcggaggccggccccgcacccctgcctacggccgccgcgccccgccgcgctccgcgctcgcccctacctcagccggcaggcgagcgtccgtccgcagcggccgcggcgccgacaactccctcccggccgccgaaaccccgcacccagcgctaatcataataccgagcgggctgccggccgcggggagggggtgccgggtagctgcgcctgcgcgggctgcgcgtcactgtgacgtcagcgctggggcggggccgcgggaagggcagggcggggcggcgcgcacctgcggccggcgcgcgggctgctggagggcatcctggcggctttctgaccccggcgagtcggggctgaggcggctggcgggacaaagcgggcaaggcgcccaaggaggatggaggacgggggaggaggaagcaccagggacacggaacaatggccgggaaaaagtagcgcgagctgtcaggggaaatcggagggaagggaccgcgtctgtacaggactgcgtcttggcggcagggggcagggagccgcacgcgctttactctttggttcccgcccaggtttaaacaaggataaaaaaattgtaaaaatacatatacatacacacatgcacatatgtatatacatatatatacataatatgatttttttctctgtagtttcttctccctgggactctaatttgaaaaaattcggttgattttgttgttatttaagcaaaattggaaaagcccaacatctgaatgcagtgctggccttaaaggtcagcgggagacacaggccctgctaggcagcctctggcaacagcatagaaaagtaaacggtcgtggggacacatcaaagcacgtgaagtcagagattcaaaacacgccgggcattaaccatagcccttgatggttcagtggtatggtcgccaggccaggttgctctggaagggagcttagggatggccgcagagggtgggaggggactcccgactcccacccctggaagcatggcatgcaatagagaccagctcttcagggttcctggaagggaacaccaacaaaccagacgccagatttcttcaacctgcttttccccttctgttcccacgttgtgtccacccttccccaagaaaggacccctagcaaggaaggacacaagccagaagagctgcggagatgctgcaggcttggttgaattgactggactgcgaagagaaatctagatggttttagcaaatctctgttgacctgcaaatgtcaaaagccttttagcttctatgcatcaactttgcatgtctgaagatgattgggaagcaggagtggattgttgggaggtgcaaacagtttgattcttagggtaataacatagggttttctgatcaaggggactcccagttaccctaatacccttgcatcaggtggtgggagagcaccagggaaagcctcagattaggcctctgcgccttagggtcccacctgggatcactctgacctgaaaagaccataaaagagtcatctcattttgacatggaaatcgtaactgtagcagcatattaagcaagagctcctaacttggatttgtagaatttgtccttttgttgctagaaatcaggaagaccatgcacttttctcctcagggagatatcactattcagggaactctgtagccaactaaagggagaaaataccactgtaatggtctcccaagggatttccagtggtcgaaggcctccacccctgggtctgtagtccctgagttatatcagtaactacagaacaatgacgataatatataagctcttgaaaaataaagtatttatattgctgctgtttaactaggttttgaataaattttctaaggaaaacaaggcataaaagagcaaaacaaatgaaaaagggcaaaataataaattgatttaaatgaagttggctgcaatactcttctagagaaggacgcagtactggccacatggtaaatcatttattcatccccagtatttcttgggtagctgaagtgctgctggcaagaatatgacccagttttggttccacaccataaatgtggtgacatgatttgattatgcttcggcaatattttaagatattcaagtacaaattaatagtattacttaagttggaatttaagcaaatgtgcttatagttaatgaagaaactccttttccactctgccctggggctttctccaacacactgcttttttaatgttgggtctttttatggacc

SEQ ID NO: 316357 - DNA, 4001 bp, Homo sapiens
ttattttggtaaacattctctgagattttagtggagcagccatctgtgtttcaaaatcctttttctccctgccacatagtaaagaaatgcctgcacatggctggccagctacccacgtatatcagtcttccttgtagttttgcagctatgtgactaagttcctccagacggaaatggagcagaagagaagtgaataccttccatgtaagctcctccatgcttttccccattcaagctgactaaggtggaaattatcaggaagactttagaagccacatgctgatcatcctgtgtctcacgtgactgcatggagtaaaacagtcacagacctggaactcccactctggactgtcacatggcaaagaaaaaaggacttcgcattctgtaaaatgctcagactttgaagtttttttgttccagcagcttagccttcctaactaagaatctgggtattatgctgaggtgtgggatgcatgagtgactgatagagacattcctaccctcttggggctaagtctagaaaagaagacagttactaggcaggtaactcgataaaaagtaatggcagagcacatagagagggcaaagaggtaataacctagtctacagtgagggtaatggcactctgcctgagcctaatgaatcagtagtgaagaaggaggaagcgtgttccatgcagaggaaacttatgtgttgaggcctgatgtggcagaaatcaccatatgattgaagaaccagaggaggtatagtgtgggtggcacctagagaaagaaggagatagtggttaaaggccaggcagggccagggcatattgagccttggaggccttatggaggatgccagttattatcctaagggcaacaggaatcacatgatcagatttgcattttaggaaattatttcatggttatatcagaagtagatagaaaaggggccaaattggaggcaggaagttgtatcttgctctcttataaacagcaaatcaaagtttgcttgatttttcaacccccaatggctggagtgttttttgagaaagccagtaaggataatagaatttggtagtaccttggataactccttaaaaggaacttttgggttcaggatctggttttggcattaactacttgagggaactttgtctttaggggttcctcatttttttcacttgtaacattacaaagctggaccctgtgttatctcgaacccttcgtggtcttcttggtgagtgcctcctgctcttctacaacctctgcaccattattatttcctttataagaagaaggacgtttcactttgcacaatgtgcactggtaacatggcatgtatttctttctattgccatgattgagaagggtctcaagggtctgtgagacccttgagaagaaagaatcatgcagttcatatccatatctccttcccctgccctcgcagactacctagaacttgctaggtgtccacaaaaggtttttgaaactaaagccagtctcctaaatgaaattatatgagaaagaacatttttcacttattaaacataactttacacatttgaataatataaaacaatttctctctgttgtgcataatttgagagaatatgctacacagttaagtcatcaccaattttgatttacaaatgtttctcaagaggcaatcaaagatatttgcattaattgcaccatcttttcactttgcagtcaaggctgcaagtttgttgtctttgtttttccaagtcaatttaaagccggattagggtaggtaataggcaccaaactggcaataacttggcttataaagctgttgacataaactctttggaaatatatctgcaagcttaaatgaaactcaataaaagacagccaagtgccactgaccttttgggcattttcctaggtgcgcaggtggatgttggggctgcagaaggattgggatctccttccaagtggagagatttgtcctgggtactgtgcatacagccacccattctctcatcttctgttttgtgtcagtccttcctaagcaacagtcacttgcccactgttactattgtcattcactccatggcaactatacagttgcatgtctagaagaacttttccacagtgtcattgtatttagacataaaatcattcaataaatattttcatgcctactgttagcatggcactgtacaaggtgctggggaaacaacagtgagcaaaatcagatgtagaccctggtcttagggagtttagtgggaatgactgatattaatcaagtaattgcacaaaaagtcacacctgtgaacagtactatgcaaggcagatgccatgagattgacatcagtcagggaggtcagcgaggcatccctggggaagtgatgcttgatgatgagtaggtgttaactaggtgaaaggataagggatccatattgtagacagaaggaatagcctgcgctgagccctggggcaggagggaatgtggtgatcaaaagggactgaaggaaagccagcgtgactgaaccaaagagatcgggggcgtgtgtctcaagctgaggctaaagagcagactcagtggccaggccatgcaggaacttttaggttactgtagggattttttactgtatgtcaaaagaataggaagccatttgtgtattttaagcaaggaggttaatgaagttaaatttacatttttgagagatcaccccaacttcaaagtgaataatggtttagagaggtggacagagtaaatataggaaggccgatagggaggctatttctcttgtagcttagagcactttctgtaaaaacgagaggttgtatcagctcagcgaaatgagtcaggttcaggaaagacatgtcaaacaattgcctaagtcactgatgagctgatgcgtgagaggagctagaattctcaagagaagctaaggataatcactattcaggctatgataggctccagggtctctgccatcttactgctgcttcactggtcactgctccaccatcaaatgaccatgtgtgtcactctcccattgcctgcttctctttatgggttttcttttttttgttccctctacctcttcattaatttccttagcattttcaattcaaatttgggatacaggggaaagtttgactggtcttactaattaccattgcccatgctggtcagagttttagtgccagttcaccccataggtagtcagttaccccatgcaattagctcctgtgggtcacgtgatgaccccgagccactctcactgctcaagtgagaccctagagatggcttcctcagaaggggcagtctgggcaagtttcccaaaatctggattttctttttttttttaatttattttattttattattattatactttaagttttagggtacatgtgcacaatgtgcaggtttgttacacatgtatacatgtgccatgttggtgtgctgcacccattaacttgtcatttagcattaggtatatctcctaatgctatccctccccccgccccccaccccacaacaggccccggtgtgtgatgttccccttcctatgtccatgtgttctcattgttcaattcccatctatgactgagaacatgcggtgtttggttttttgtccttgagatagtttgctcagaatgatggtttccagtttcatccatgtccctacaaaggacatgaactcatcattttttatggctgcatggtattccatggtgtatatgtgccacattttcttaacctagtctatcgttgttggacatttaggttggttccaagtatttgctattgtgaatagtgccgctataaacatacgtgtgcatgtgtctttatagcagcatgatttataatcctttgggtatatacccagtaatgggatggctgggtcagatggtatttctagttctagatccctgaggaatcaccacactgacttccacaatggttgaacgaatttgcagtcccaccaacagtgtaaaagtgttcctatttctccgcatcctctccagcacctgttgttt

SEQ ID NO: 316358 - DNA, 4001 bp, Homo sapiens
tcagaaggctgaggcaggaggacagcttgaacccaaaagttcaaggcaagtctgggcaacacagagatacctcatctttacaaaaaaaaccccaaaacttagccaggtgtggtggcatgcatctgtagtcccagctactcaggaggctgaggcaggaggctcgcttgaggccaggaggtcaaggttgcagtgagccatgattgtgccactgcactccagcctgggagacagagtgagaacctgtctcaaagaaaaaaaaagcacatccaaaaaagtcttcatgctaccttatatacccaggtatgttccacagcaggcaaaactttcaaatcctgaagtccctgcttagctggtctctaaacttaaaagtctttcaggccgggcaccatggctcacacctataatcccagcactattgtgaggcccaggtgggcatgagcccaggagttgcagaccagcctgggtaacatggtgaaaacccatctctacaaaaaatacaaaaatttggctgggcatgatggctcacgcctgtaatcccagcaccttgggaggccgaggagggtggatcactagaagtcagaagttcgagaccagcctgaccaacatggcaaaactccatccttactaaaaactaaaaaaaaaaaaaaatttagctgggagtggtggcgcccatctgtaaccccagctactcaggtagctgagggatgagaatcgcctgaacctgggaggcagaggttgcagtgagccgagatcgtgccactgcattccagcctgggtgacaaagactatgtctcaaaataaataaataaataaattaattaattaatttagccgtgcgtggtggtgtgtgcctgtagtcctagctactcaggaggctgaggcaggaggattgtttgagcctggggggtcgagggtgaagtgagctgtgtgagcaatgcacacaaaaggagactttgggcagggtggtctgatgtggagcactgcagttagtttcttaaaggtttcaatataagcaggtctacaaatcttgaattgtatatgcaaacactttgtaatgaaagcacttacaaatataagatgatacatttttccccttttcctcaagcaaatgaaaatcactaattactaaagggtcttcaaaaagtacatgggttatcaataagtctccaatgggaaacacagcacttcccccaaaacaaagaaattacagccaaatgaggagtctaaaaaatgttttctcatttgtaccttttcttgaagctgacattttcttcaatttcctgatggcagcaccaggccaaccacccttattggccctgacctgcacctcactctagtcccccattcccttccttctcaagcactgttgcccactccccactgtgtccctttaagctactccccagcaaaaccccttagcaactggctgaaacatcagcgttcttctcacggtccagatctcccagctacgcgaccactgaaaaccccctcctccagcctcgcccatccggggcccagacccccacgcctgcgggggcgcccccccgggtccctttccctccccttcgcagtctcgacacttccctcagtcacccgcagcgcctggcgctcgccccacacccagcaccctgtttttccactgagcctcctctcactgcacctgcggaccccgcctttccacctcgctccccctcactgctgggcctcctcggccgagcccactggcccggcccggcccagcccagcccagcccagcccagcccggcccgctaggccaccacacaggccatgagggctctgccgccccttctcctcaccgtgtcgaccccagagctctcttctccggccccctccgcttccttgccgaccgcagcccccagcccagcgtctggggagcccagcggctccaagggcgccggctggagctgccgctcggggtccggaggtgcctgctccatggctgcagttcggcgcggcgaacccagtgcgcctgcgccgccgccgcgcccgcggccaaccagtctctcagctagcgacgcccgcccctccgctagccatcgcctcgcccctcttgtcaacctagagggctcccggagctgcagctggaggcggaaccgggggtgggaggacacgcaagcccgcggaggacctggtcagctgcttaagccaggagacccaggaagcaggggcagctggtgaagagagagacaaagagaaaggcaaggggaaagtgaacacttgaagtaggcacggcgatcctaaagccaacgaaactcaaaagaaattggaggcgtagtctgacctgctccttctgggcctctgccttgccagttattattgggtctgttttctcccggaaagatcagagctctataaattgttaactttcagcaggttgagtaacacattcagcaaaaggtaatacttgcaagttttttttttttctttttgagacggagtttccctcttgttgcccaggctggcgtgcagtggcgcgatctcaggtcaccgcaacctccgtctcccaggttcaagcgatcctcctgtctcagcctccggagtagctgggattacaggcgcccgccaccacgcccggctaatttttatttatttatttatttatttattttgtatttttagtagagacggggtttcaccattttggccagcctggtctgcaactcctgaccttgtgatccgctcacctcggcctaccaaagtgctgggattacaggcgtgagccactgcgcctggcctttgcaaggttttgaggaaagtgaagcgttctgttgaagcagggcttgagttctgttgtaagtgtttcatgaagccctggagacctctgataattttctacaaacatccctttttaaaattttccaaacctgcttccttgacaagctttcactatggcaaccggatgggaaatgctcactggtggtaacagattgtggtaccttgaagtactttctatacaaagtcgggtctcaatttttcaagtacagaaacatttttctgcccacttagttatttcaagctgtaacacacaattttctcttcctggaatgctttatctgtcctgggagcaaattttcattcattcctaaaacctcagctcatttataatcttcaagtgctaagttgttcataaatctgttatgggctgggcacggtggctcacgcctgtaatcccaacactgggaggccaaggccggcggatcgcctgaggtcaggagtttgagaccagcctggccaacatggtgaaaccccgtctttactaaaaaaatttgctggacgtggtggcgggcgcctgtaaccccagctactcaggaggctgagacaggagaatcacttgaacccgggaggcggaggttgatctcagtgagccgagctcgtggcaccgcactgcagcctgggcaacagagcaaaactccgtctcataaaaaaatagattttaaaatcagggcagaatggatctgatggttatttccccctattttatatacacataatacatgttaattgtgggaaaattagaaaagttgagcattaaaaaattaaaagccacaagttaagcgtgagaaaaaaagaaaaataataaaataaaaaatggttcttggccgggagtctcaggcctgtaatcccagcactttgggagaggcccaggtgggcagatcactggaggccaagagttcgagaccagcctggacaatacggtgaaccccgtctctactaaaatacaaaaaattagccgagcatggtgttgtgtgcctgtggtcccagctgcttgggaggctgaggcaggaagaatcgcctgaacctgggaggtgggaggttgcagtgaattgagcaacagagtgagactcttgtctcaaaaaaaagagaaaaacaaggccgggcacggtggcgcaagcctgtaatcccagcactttgggaggccgaggtgggcagatcatttgaggtcaggagtttgagaccagcctggccaacatggtgaaacc

SEQ ID NO: 316359 - DNA, 4001 bp, Homo sapiens
tcaacaaatgaacagagcaacgaggtaaaatccttctaggtacatttccaagacatcgtcaaaacatttatgaccatttaggttgtttttgttcttttaattttttgttcaccttctacttcctgacttcataacccgacattctgtctaaaagtaaacttagatctctagaagcactgctttacacaaagtaaataaccatgtaggtcctttttgttttccctttaaagaagcaaacactatcatagcatggttttaaatagaaatgtttccctttctgtaatttaaaactttgaagcctttcccccccatacatgaagagcaaatggctcctagttgtgtctgatggcaaaacacagagacacagctaactcttttcttcaggggacaaaaggaaaaaatatatgcatattgtagatataatatcagaatctgggagttcagagtccaaagcctatccgaggagagtgaaggggatataaataaagcaaaactgcctacttttttgtccaaagggggtacagtcggagatttgttttgggagagtcgggataggggcagctgtgtagctgacataacgtttgcaagtttccggtacctgtctgcgccttgggtccgggaggacgccccacccttccccctggaagagagaggaaaagtctgggtggtgtaagggacagcggcagggctgaccccggaggcgtctgcaggccggggctaggctcagaggacagggtgcagacccggctttcagaccacgcctcaggtccgggccgggctgggggttacatggccgtagcgtgggctgacgaataagggtctatgccagtcttggtcatgcctgggaagaggatgtaggcgacggggggctgcagggtggaggcagaccaggcggtacagttacagggcaccacgtagccagggttggtgggggacgggtgcgtgtgcgtgtgctggctggggcagctgaggctgccgaaggcgccgttctggtagcccagggtggacgcgtagggcagagcgccggtagccaaggtgtggggcacttcgcccatcttctggatggcgctcgagctaaactgcgcggggtccagcagggagtagggcgccgaggccggcggcaagaaggcccgggctttctcgggcgcgctcaggaggccgtcggaggcccccacgggcaggccagccgccttgagcgggtccgtgtcgcccaggtagggcaaggggaagacatacctgtccttcttgagcaggttcttgggcttgcgccgaggtcggtacttgtagtcagggtgctccttcatgtgctgggcgcgtagccgcttggcttcatcgatgtatggccgcttctctgcctcggacagaagcttccattcggcacctaggcgtttgctgatctccgagttgtgcatcttggggttttcctgggccatcttgcgccgctggccccgggaccataccatgaaggcgttcatgggccgcttgatgtggtctgaaggtttggacatggtcccggcggctaggtgggtgggggtagggagtgcaagggttctgcagacgagcctgggcgcggctggccgtctgtctgtccgtcctgagccggggttctgcgctcccctcgccttggcgccgctgaggggaagccagagagaagcgctgaccccacaaagttcagctgatcatgccagtcccagcgcccaggcagccccgggggagcgagtgggggcagaaagggcgggggaggagagggcgatcggccggggggcttcaggcaccaggggctgggacccaagtatcggagtctccgggattaagtggccaggtaattttttagccagggcaagaagctcctccttctccccctctccacctttgccttctctagttcccttctctcctcttgcgtttccagtcgtggctcccccttcccgtggctttcccggagctgccgcgcctagcgctgcacctggctgagaatgcggggaggctggtgaacgagagccaaaagcggcgaagttcaaaggcgaggtgggccgggactgcacgcactctgacataagcgcggggcggcgactccccaacctgggcgccaatcagcagcagagaagccgagggggcgcacctgccaacacgccggtgcaagaaacagagagcgcgactggtgggggcggggagaggtgtgagggacagaggcagagagagggctagagcagagaggctagctctagactggggacttcggttccacattgtctcgggcactgtcaacaaataaaactcttccgcgtctcctgtttcctttcccggttgtgaaagagaattagggcttgaaatacaaaggccggggaagggacagcaaagggagcgaggcgagagcttgtgttgataaataggacagctttgccgcgaaatgcaaggacagcactttgccctcttgtcaaatatccttggaagagaaaaataacatatagcaggctcagggtaaaagcgaaataaacttttcgcgccccaccctcggcggtgctttggcagtgttctcccgggaagcccctgcaactaggcatccacccctgccccaggatgcggcgcccgggcgtagcgctgggaccctgggtggctgagcaatgttgtctgacctgctcctggaaggcctcgcgtcaggcaatgcagagatttcgaaccctagttggtgagcccttaaaagcactacgacctgttcttcacttttggggcagggatggggctgagatttctattgcagttcccatttatgttattattatttagtgtctttaaacctccaacttttactccacaaatgttcataccgtaagaagagcctagaggctgggtatggggctcttcccggtgccccttctgcagcggccctacagcggagtctcacggtgtatcgcaaccagggtcggtttgtccctgggcgcctcttcccacccagggaggctgcgagactcgtttcttgcgtcaaatgagcattcttcgggtaaagaggacgaaataacccgcagagccaacctgcgcgcctgtttcctttgaataattgcctgcccgatgtgaaatgcccttgggggaaatatttattaaatggaaaccattgtcccaggcccggcgggacctgcgtgtgttccaggcttattggcttttgcaccattctctcttgggaggaccggccagaaacgcgcaaggctccgttggctccgaggggctaggagtgggggagggtgacagggaatgaggaggccggaagggaggatctttctctagcatgtagtgtatcaagtttgaggagaagactttgcttccccttcctaaaattagaaagacgcgtggaacttctcacccttggcgcacttttcagagaggtgggcaatatccccattttacagattaggaaactaaggttgagaaaaactaggtgatttgtcaaaagtgactctgggagtgatgcttgatgtataggatttgaaaatccctattttcacccccattccactagacgtcacgcctagggatttcatggctctgcagcccaatgtggaacacctgatgagactattggggcaatcgacacctgccatgcagataaaccacgctggaaagactgatcctgcgcttgatttgcttagccatgggctccacctccgagggctggcaaacaggtgcacagcctttacattccttcccaaccccagctctggcctttctccagagcctccatccagccctgtaaccctgctttctctgcaggaagtttcatttagcttagggtctcaggaagcaaacgcacttttcagcccagtctggaaagggtttccgagcgtcgctggcaacccctactcaggtctgaccagcggtgcgctatattcagagccagccagggataggagattcaggaatcacccaattctaattctactgggcgatcccgacggctttgggaaggaatgagagaaatactgatatctgcagcgagatccagcgtt

SEQ ID NO: 316360 - DNA, 4001 bp, Homo sapiens
acgtttgcaactgtcctaaatttcagctgcagaatcaaaattcagcaagaagcctctccttgaaaaatattggcaaattctcagcttataaacaatggacattttgattgccatgtttatctcgataaatactgtacaaaagttgcttgcaaatattaaaacatttttttcgtcgcttggagactagctctaaatattattggtaaagacttttgcaaacttcctgcaaagctcctaccgtaccactagaacttttaaaaagtttttcgtagctttctttcctccagatctatacaaggtccattcccccgccctccccaccctccccaggttttctctgtacaaaaatagtcccccaaaaagaagtccaggatctctctcataaaagttttcttgtcggcatcgcggtttttgcgtgagtgtggatgggattggtgttctcttttgcagctgtcatttgctgtgggtgatgggatttttttttttcctttttctttttgagcgtaccgggttttctccatgctgtttcttactctcctcttttgcacccctcccatttccctcgtttttctttgaaaatttctcccccctccagttcgctgtccggccctcacatgtgtgagaggggcagtgtgccgttaatggccgtgccgggcaccgggccgctctggtagtgctgggacatgtgaagtctgctgggggcggcgggttccggcacctcggcgccggggagatacatgctgatcatgtcccggaggtccccggcctggcagggcgccctggagtgggaggaagaggtaaccacaggggggctggagctggcctcggacttgaccaccgaacccatggagccaagagccatgccaggggtgccctgctgcgagtaggacatgctgtaggtgggcgagccgttcatgtaggtctgcgagctggtcatggagttgtactgcagggcgctcacgtcgtagcggtgcatgggctgcatctgcgctgcgccgtgcgcattgaggcccgggtgctgcgggtagcccagctggtcctgcatcatgctgtagctgccgttgctccagccgttcatgtgcgcgtaactgtccatgcgctggttcacgcccgcgcccaggccggcgcccaccccgaccccgctcgccatgctattgccgccgggggccagcagcccgccgggcagcgtgtacttatccttcttcatgagcgtcttggttttccgccggggccggtatttataatccgggtgctccttcatgtgcagcgctcgcagccgcttagcctcgtcgatgaacggccgcttctccgtctccgacaaaagtttccactcggcgcccaggcgcttgctgatctccgagttgtgcatcttggggttctcctgggccatcttgcgccgctgcccgcgggaccacaccatgaaggcattcatgggccgcttgacgcggtccgggctgtttttctggttgccgccggccgccgccgcggtggagttgccgccgccgccccccgaagtttgctgcgggcccggcggcttcagctccgtctccatcatgttgtacatgcgggcgctgtgcgcgggcccggcccgccggcggccgccgaccctcggcccggccgggactttggggggcccgcgggcggggggagaggaggaggggaggcgggcgggggtgtcgggagcgcagggctccgcgaggaaaatcaggcgaagaataatttgggggaaaaaaagagagaggcaaactggaatcaggatcaaaaaaagcgcttccctcctcctctggccgatcctgccgccgccgatgattgttattattattttttggaaaggcttaagcctggggctcaaacttctctccctttctttctctctcctcttctttctctcagtcctagtcttaaagaggcagcaaactactttcccccttttgcaaacactctcttctctgccttgacaactcctgatacttttttgaacaagttaatagacaaccatccatgtgacgggggctgtcagggaataaatgggtttctagcgaccaatcagcgcgcggcggctcctccactcgagcccagcctcgctgccgggttttgcatgaaagggggcggggcctcccgcgccgccggccgcgcgggggaggccgggggaggagggggcaggcgaggagggggaggaggctcccagagccagcctgccagccactgagaaacctttgtatcccctctcgcagcaacaggtcacaccacacgccttttcgaaggaagtgggtaaacagcactaagactacgtgggtttttttttctttaaacttaatattgatttactttttggtgcagggtacttaaatgaggatgggacgcgggaagcagctaaggtgcgggggtggggcagggcacagtgggtggctcagggcggctgtccaactcgtatttctggaaacagccagtgcaggagttggtgtgtcattgttctcccgctcatccacagcactcccccccaactccagcccctctggtgccgctcccgtactgcgctcttccgctctcctctcttaccttacaggtgccaacactctctcacgcccttctcacagtcccgactagaagttaggagacccaaacctctgtcctcaaaaccttccttgcttccacgtaacttgctctgttcttaaaaataaatcctgctcggaccataaggcagactctagagctgagaaccagcaggccttggtaagctgccatctccctgtccaactcagctctttggcccaggaaactgcagctcttcctcttagccccagccacatctcccactagactgtcttcattcaaccgtagcaaaggggatgcttctactgtctgcccccactccccattcccatcccatgcctccccgtaagaagggtttcggtcgtgcggctttcaaatgggggctggggaaagacacagacggaagggcgctcaaaagtgcaggcgatgggggagggtgatttcaacttcctggcatcccacggcactgtatggaggtggcttttgggccgcagtcacaaactccctcccacgcagagttcccaggactccagcagaaccagccctggcattttccccgtagatttccattgtggtggccgcaaagcccaggccgcgcaaggctggggctgcgccgcaaaggggctcaaggcctgggaggcggggtcgatgctctccaggcacaggtgcaggcagcgcacactgggagaaggcggccgggactggggaagggggagcccagcaaggcccgggttagaggaggatgagatgggggcgggggtaggggctcaggaatcttgcccgcccaggacccaagagggtaattttagccgctctcccattgtcccgacgtaaagatttcaataggtaggcgctcaatgcggagggcaatggcagcacgtccgttacaaataggtagttttgtttctcttgttgtcgctacacggagtcaaacaaagcctcgtctaagtttccttccactctcttgttgggatctttgtggctaaaatgcacttgactacaaagggtggggtgggggggaataaagaaaaaaaaacctgatgccatttcttttttataaagggcttaaaccatcagggttacttattttctttcttctgtaacactctctccgccccctcctcccctggtctacccttactcaccctaagaaaatgtactgaatagtatctaccagccacgttccatttattatctttacaaaacggtgcattgttttgttccttactaaccttcttcccataatcactcccccgacccccaatttctccaatctctgccctccctagcctgttactgtcaaactcacactaaatatacccactggaaactcagaaaagttgtaaaaaaaagaattctgcagactttccttaagttatttccaatcaaccttcctgccccccgaaggttctcctttttctctcaagttatggcttgttttagttctt

SEQ ID NO: 316361 - DNA, 4001 bp, Homo sapiens
tgagcctagcctgagcccgagtgggggctgtggtcctggctgggcctatcatggttcccctcccctcggctgtggtagccggtctggagctagacacaagccacccttgccaggctgtgggcttcctcagggtcatcctaacccactcagaagtggcagagaaggtgcttgaaggcactcacccagcgctagagcagtgaggacaggcccagagtgtggagctgcgaggggagggttgggcacattgcctttggatctagtcacatgactgagctgctccagggatcttcctacaaatcccccttctcacccatctagatggagttggatttctcactgctagcagtgagtctagacagatccaatccagtggagcatccctgccccactctctttttttacttgatccttagtccagagcaaggaaagatgtggaaaccctcccaaaggcattattcagggcagaaaatgcttgtaggcagagcagcaccttgtttttgtcacaaccggagaaacaatttaaatctgaacctatgcgggctcagatactgatgctgccatctgagaaggaggacctctctcacctcaggttctttgtctgtaaaatggggatgaaaataattataccacacctcaggactaaatgagttaataaaaattcttagagtggtgagtaacacaggatgagagactgctcactgagagttagctgtggtggctgccagaatcctaaaagtgtaacaggagttaaacatagaggtatcatatagtccagcaattccaaatctgggtatatacccaaagaaatgaaagcagagatccaaacagatacttgcattcccatgttcccagcagcgttattcacaatagccaaaaggtaaaaataatacaaatgtctattgacagatgaatggataaacaaaatgtggtatgtacatacaatggaatattatttagccttaaaaaggaaggaatttctggttgagtgagatggctcacacctgtaatgctggcactttgggaggccaagataggaggatctcttgagcccaggagtttgaggctgcagtgagttatgatcgtgccactgtactcctgcctggatgacagggccagaccccattgcaaaaaaaaaaataataataaataaaggaatttttgacacatgctacaacatgctgatccatgaaagtattatgctacatgagaaaagtcagtcacaaaaggacacttacagggggtacctggaatagcaagtttagagagagaagtattaatacagtaggggctgggagaggggcaggtgcaggaggagttaccgctgaatgggtacacagtttctgtttagaatgacaacaaagttctggaaatggataatggtaagagttgtacaatatggtgaatgtgctagatgtcactgaactgtacacttaaaaatggttaaagtggtatgttttatattatattttaccacaataaaaaagagtataagaggagttggactctcctggactttttctttatagattgaacttatgtcaaaatgtagcacagtgaaaaaacaggcacaggccaaaaaagaagtggtggtggtgtgtgcccatgtgtgtgtgtgtgtttcggggtgggggtggggcggcaggtaaactactcacaagacaccagaggctccttttgaggtctgatactgcaggctgggatctgacgctgcaggatcaggaagagtgggggagatgaggggaaggtgagcctgcacaaagaattttctcagtgactgtgggcagggcagtcaggaccctgggtcacatgggcccagcccgggaccagagcctttgtgagtcacagctcaactcccagcaaacaaagggatatgccagggaggggctgagttgtgactcagaggctgctgctgctgtgagcttcctccaggaaccccatcccttccagtccctgattctgactcctactgtgggggtggggacaggtgtacccacttcctgggcaggttcttggaagggctctcctgcagaacctagacttttttgcagctcctttttgataacccgagtagcagcagctataccatttaagtgcttgctgcatacgggccctgggctaagttccttttttttttttttttgagacagaatctcagctctgtcgcccaggctggagtgccgtggcacaatcacggctccctgcagccttgacctcccaggctcaagagatcctcccacagggactgtaggtacatgtcacacacccagctaattttaaaattttttatagagatggggtctcgctatgttgtccagtcagctcttgaactcctaggctcaagtgatcctcccgccttggcctcccaaagtgctgggattacaggtgtgagccaccatgccttgtccctcacttcatctatttatttttatttttatttttatttttgagatagagtttcactcttgttgcccaggctggagtgcaatggcgtgatctccgctgactgcaacctctgcttcccaggttcaagcgattctcctgcctcagcctcccgagtagctgggattacaggcatgtgccaccatgcctggctacttttgtatttttagtagagatggggtttctccatgtttgtcaggctggtcttgaactctggaccttaggtgatctgcccaacttggcctcccaaagtgctgtgattacaggcgtgagccaccatacccagcccctcttcgtctttttaaagcctcattgtcaccccatcaggcagtcatttcagtcctactttgcagaagaggaaatgtgcttatggagggaagcaacttgcctgaggctatgtgggtggcagatagcagagccagatttgaacctatcactgattaaggagcctggacttgtaatcatgctgctcaccaccctccctccccccacccccaactcatacacacacggggaagaacagactccaaaatgtgacttatctttaggccaagcttgtctaacatgtggcccaatacaaattcataaacttttaaaaaacattatgagttttttttttagttcatcagctattgttagtgttagtgtattttatgtgtggcccaagacaattcttcttccagtgtgtcccagagaagccaaaaaattggacacccttgctctaggcttaaagacaaggcttaaaattttttccctgtgcttatgaaaaaatttagaaaatacaagtaatgaatatattttatagtaaaaaaaggcatagttaagtatgattgcatgtcagcatttcttttttttattattattatactttaagttttagggtacatgtgcacaacgtgcaggtttgttacatatctatacatgtgccatgttggcgtgctgcacccattaactcatcatttacattaggtatatctcctaatgctatccctcccccctccccccaccccacaacagtccctggtgtgtgatgttccccttcttacgtccatgtgttctcattgttcaattcccacctatgagtgagaacatgcggtgtttggtttcttgtccttgcgatagtttgctgagaatgatagtttccagcttcatccatgtccctacaaaggacatgaactcatcattttttatggctgcatagtattccatggtgtatatgtgccacattttcttaatccagtctatcattgttggacattgggttggttccaagtctttgctattgtgaatagtgccgcaataaacatacgtgtgcatgtgtctttatagcagcatgatttataatcctttgggtatatacccagtagtgggatggctgggtcaaatggtatttctagttctagatccctgaggaatcgctacaccgacttccacaatggttgaactagtttacagtcccaccaacagtgtaaaagttttcctatttctccacatcctctccagcacctgttgtttcctggcatgtgagcatttcaagttgttatttttatgcacacttttgg

SEQ ID NO: 316362 - DNA, 4001 bp, Homo sapiens
gatggctcatgctcattcattgcatatattttgaaatttagctagagctatgataaattagtctttattttgctatatttaagctagactgctataatattttattttataacatccctgaaaaactcagcaagctcttcgtgagtgcaaaatgttacaacttgaacattactttccaagaagatgactcaacatattctacactagttgaaagacaatactccaggctttctgatgtaaaaggatttaaaaacccttgagcatatggtgtttgcactgcttttgttactatggcctacaattgttggggtacctattcatttatttcaaactgatgtgtcacataaaaggaacaacaacaaaaacacaacatgcagtgaaattctatgtagaggaatgtagcttcagtcactgtgtgtcttaattagaaagaatagccgggcgtagtggctcatgcctgtaatcccagcactttaggatactgaggtgggcatatcactggaggtcaggactttgagaccagcctggccaacatggcaaaatcatgtctctactaaaaatacaaaattagctgggtgtggtggcgtgtgcttgtaatcccagctactcaggaggctgaggcaggagaatcacttggacccaggaggcagaggttgcagtgagccaagaaggcaccacggcactccagcctgggtgacagagcaagactctgtctcaaaacaaacaaacaaacaaacaaacaaacaaacaaactcctgcagtaaggattaactgtgggtttatgcctggagatcattttaaggttctgtatctcacagttcatgctcattggttgctttcttttagtcataatcaatttccaaggtgctagtttcactgctcagaggatgaacaacttaatgaaattagggtagtttctgttataatactgctagtacatgaaacttaatcataaagggttgaacaaaaacacaatacaaagtttttatgcatttctttcaaactaagtcttactaaaaatggtaaacacttccctgatgcttcaaaaacagagaactttactgatatctattaatattttatgggtaataaatccaaaatgcaaattttaaacaaagctggaacctatttttaattgctcacgctgaacaacctttgaacagcaaggtccttgtaaaagacattcattcattcatttactcattcatacagcaaacatttcagagcacgcattttacgccaggcatgatgttaggatacagaaatgatgacatggtctatgtcttacagggagcttggattgtttctctccctaatatcctactccttgacgttcaatgtcttcaatccacagtaatattatgcgttaaggagacaacaacccgtatcacaaatgataaaatgtgaactctgaattagcagtcatcatctcccacttgactacaagaagatgtcctcaaactatacactttattagggaatatatattagaataaagcaaaacaaaacaaaaaatctgttattgggaaaccaagtgggatcttagtctttactttctcaccagagtggggaaggatagggtgacccggtgcagcggacagggaaccactttggaactacctgtcttctaactgcctgcaggagatgatttcttggttacttattagggctttttataagcaacattcctcattcctcgcgtgggcaggaagaaaggagctcctgttttcccagcttactccatcttcacctgagggtcatctcccttccttcccacccagccactgaacgagaaaagctttaactgggcagacctgaatgattctcctcctacctaagcagttgtggctcagccccgcggggacagggcgaagctctggactcctcccagccacagcatctgccaacaccggcttcccaacgtcccactgcgaggcctgatcaggctgcttgctcgcggggacgccaggacttgaaacgtcccgtgccacgaggcccatcgcgcccacaagtggcgcgggtcactggcacctccctagtctttcctcttgagttgcacttgatgtttccaataataaaaacaaggttatttatatttttccgttcagattctaaaagcaatatgatcaataaaataatctggaagatacagaaagatgtacataaaataaaaattatctgtattctaaagagaagcactgaaaacattttcatgtatatctttgcagtctctttactatgaatagattaaaaaaaaatcataccattctgtctctttcacacaaaactacacagatacaatatagactttatacatacattttataaagttttgtatttgttctcttttaaagaaaattattttaaacattttactctaaaaccatttatgagatctcataagctcctacctatgtatgttttagagtaaaatatgtatattatatagaatatataaatgtatattatatatcaaatgtatcatgtattatactaacatgttatatgataatattatataacatgttatgttatatatgtaattatgtatatttaaacataaacgcactttaccttctatgcattttaggcagcacattactgatacatttgaagaaatctatgtacccctaaggactgcgtcttcctcctagccactgttgtgacttgtatgacaaacatcccttgctttcctttatagcttaacaaatcatacatgcatcactttttattgaaatatgacatatatccagaaaaatgaatgaactgcagtgtgttgaataaattatcacaacgtgaacccatcagaataaccaccacctcaataaaaaattaaattcttagcaccccagaaaccccttctaatttccattccttttcattcaccgtaggtagtgactgttgtggtttctaacaccacagtttagttttgtctgtttttgaacataataaaaatagtccagttatggttttactactctatgctgccattgattacagtagtataatctatcttttacaaagtacactaaatatgatgactaaatttcacttcttgggtaaaaagtttgtcttattcacactttcccacccccactctctcctacctctctgcaaaaaacggggaaactacgcttcaaggtaaggtgtaaggattgattgagatgaggtgcatgaagcctctgctgtgtgataacaggcttttcaatccctctgcagtagtcataatctccctactacctctcactgatgtatctccatcctgccttcaaagctctgcttccttaaaaaatttttttaacctagtaaacagttctgcaagttttgattgtaagtgccacacaattcaagatttaaaacattactttcacccataaaaataacactatgtctctgtagtcaactcagcggatcatttccacaccctggcatctactgatgtgttttttgtccctttagtgttatcttttccaaaggtcaaataaatggaattatatagcatgtagtcttttgaatcagacttctttcattcagcatattacatatgagattcacattgctgtggtgtttatcaggagttcagtcctgtttattgctgagtaatgttctatttgtgtgcatataccacagtttatctattcactagttgaggaatatttgggggtggtcatgaataaagctcctataaatatttgtatacgtatgtttgtgtaaatttaagttttactttacttaaatacctactgatcagattgctgggccatatggggtttaacttcataagaaacagccaaattattttccaaaatttctgtaccattttgctttcccatcagcaatacatgagatttccagttactctcacatcctcaccagcacttggttttgtcagattttcttttcattttaaaaataatatttcctttgggtgtctccttgtggttttaattttcattccctaatagcaaatgacattgagtatattttcatgtgcttatttg

SEQ ID NO: 316363 - DNA, 4001 bp, Homo sapiens
acaaaagcaggtgctgaatcatgaaaacctcaattatttttagcatgcctcttaatttttctttcccctggtttcttgtcgtctgtgcttgattcttgaacaggtaaccacttgagaggatgccggcgatagatgggccatggaggaagtgtcagctgggccagaaaagaggaaatgcataaattatagctattaaaagtttaaaaaatcattacgtataatgccaggttcccaaatgactcctatgctgagggaacaaaaaaacaaaaaaaaaaatccatattcctataaaggctctgtgccaccatccatgcaaaatactgtatgatgatgggaacaggctcactgcctatacaaatggctttaagacctaaaagaaaggtgggggccaggcgtggtggctctcgcctgtaatccaagcactctgggaggccaaggtgggcggattgcttgagaccagcctggccaacacagtgaagccctgtctttactaaaaatacaaaaattagctgggtgtggtggtgggctcctgtagtcacagctactcgggaggctgaggcaggaaaatctattaaacccgggaggcagaaggtgcagtgagccgaaatcgccccagtgcactgcagcctgggcaacaagagtgaaactccgtctcaaaaaatttaaataaataaataaataaaaggtgaagggacaacgtgagcaccatgaaaactcctgctggctttgaccttaagattattagccagagtagccgccaaaggaaataagctgtgtccttttatatagttcgcaccatctgacactattttggcattctacttttccaatgatagcaaagggaaacgctgtttggaaggatgagggaaacgttggctttgggtctcactactgagtaggtctaaccaaaccaacccgactcacaaaacccaagctgccactaatacccacaaatttcttaccaaacatgaaaaagcaaatccggccataactatatagacagtccacccgaactgttcagccacgtacccgtagataaatccaactatctagagacaaatgaagtatattaaacacactcaaactgagggttgggagggaggcgggggcggagattaaatgtaaaaccaatacttactgcagaaaaaagaataattccctgaaacatctgttcagctagcttctggcccttgtaatcctggggtgaagcagaggaaaaaaagaattggttccaccgccgagaacatacaattcctgccctgacctcacaactctggcacagggtaaccccaacatcagggtctcccgctctcctaagggcctgggcaagatattaaattctgggcttcccgggaggaactgaaacaccctcacggagaatggacaggagattctcgcggagtagaagagaaggggacccaggaggcaattcgggaaagagggtggacggtaaccatccgggcccggaacagcgcagcaccgggtcggtgctccaacatgggcttcgaagctgccaggcacaagaacggcgtgcagaggtccccgggttgcgccctcaccatctgcgtgggcagcgagctcagatgctccagcatggctggctgaggaggcgggcagctgagcgcgggtggcaggctgcgaggcgagggcgaccgagacttaaggaccgtgaggggtaaggtctggcactgcgcgtcagtagccgggccttctaagcccgggagagcgatggcggcggccccggaagcggaagtctccgacgggccggtacagcccgtgtccccgccccgcgccatcgctaggcgacgtgcgcttttgccgcgccgtgctgcccgcgagggcagctgaggtggtggtggcggccgccttgtcgaggcatcgcgcgcccgtgaagtgttcgccgtcagtgctgttgggtgcctggagccgcgtcccccgtcccgaaaactgtccttgacagtacttgcgcggcccaacggccgccggcgcccccgcgtctccatggcgacggcctttttccctgcgaggaccccggcggcagggctgccccgcggcgcctgcttggcgcgacgctctagcggttaccgctgcgggctggctgggcgtagtggggctgcgcggctgccacggagctagagggcaagtgtgctcggcccagcgtgcagggaacgcgggcggccagacaacgggctgggctccggggcctgcggcgcgggcgctgagctggcagggcgggtcggggcgcgggctgcatccgcatctcctccatcgcctgcagtaagggcggccgcggcgagcctttgaggggaacgacttgtcggagccctaaccaggggtatctctgagcctggtgggatccccggagcgtcacatcactttccgatcacttcaaagtgtaaggggggccctactgacccttggaatttaggggggctaccctaggcggcatccacaacagagagaattcccttggagaggggaccctggtgctcggctgtccctctcatccgcgtagaaagtccctcatctgggggctcccgaactcagccctctcacattgtggccggctttactgaccctcacagacccaggctgggccctcccgatagaggccagccaaaggttcactcagcctctctttcaaggctggtgtatctctaaatcttagaccctcctccgttaccgtcagccaggtgggatgcccacgttttggagagaaaccgttctgaggaacccgggcctctgggtcccagctggctctccggcccccaggttatgtattctgggttggccacaaacagtggaattctaggcactcccgggacagggtgggactgctgtcctcattcatgcaaccagcaaatattcacggcaccttgtttgtgccagacagcagaccgaggacacggttgttaccaagaccaggctgttgccttggaagagcccagagcgtgtcaagggagacagccacatcacgccagaaatacatgacagctggattagccctgggagagggaggcccagatgtgggagctcaggggaggtgcagctcaacgtggagtttggaggaggctaccttgacctttgaatgccaagtgggagccagccagatgaaagggtaggagaaagtgtttgtatatcctcagtgccctttcatccttgcacgtggcagagaccaaacagtaaaatgcagacacgtttgacacttttctgacctcagaaggactcaggacgtgtagaaggcagaaagagggatgggcaagagtttattcctgtttccttctcatgctctgtatttcttggtgtgtttgaagagactttctgttgtgtgtataaatagatatatctctgtgtggtctttttttttttttttttttttttttgaggcgaagactcgctctgttgcccaggctggagtgcagtggtgcgatcgcggctcactgcaacctccgcctcctgggttcaagggattgtcctgcctcagccttctgagtagctgggattacaggcatgcgccaccacgcccggctaatttttgtgattttagtggagacggggtttcactgtgttggccagactagtctcaaacgcctgacctcaagtgatccacccacctcggccttccaaagtgctgggattacaggcatgagccaccgcgcccggccagtgcggtcttttttttttgtatccacagttttgtatccttggattcaaccaaccacggactgaaattacagatacagagggctgactgtaatatgccattttacataagggacttgagcatccgtgaatttttgtatacatggggagtcctggagccaatccccgactgatactgaggaccaactgtgttgctaatcaaattgtacacaattatatactcttacgaaaatgtagttaactattacagatccagcgtctgtgtgcaatttcgttttgagaattccttctaaccagatcaggaaagctctcttaccaggaatagccccaggaaagac

SEQ ID NO: 316364 - DNA, 4001 bp, Homo sapiens
cttgaggcaggaagctcaagaccagcctgtgcaacatagcaagaccctgtctctaaaaaaaaaattttttttaattagccaggagtggcagtgagtgcctatagtttcagctactcaggaggctgaggtgggaggactgcttgagcccaggaattggaggctgcagtgagctacgatggcgcccctgcactccagcctaggtgacaaagtgaggctctgtctcttaaaataaacaaacaaaaacaaaacaaaaacaccaaatgctcatttctaactacctactatatacatctcccaaatatcacaaatacagtatatcaaaatacagctcatcatcataccccaaatctctacttgctgatatataactggttgactcgataaatatgttcaattaagctgaatttacagaattacaatcctagttgctccaatttaaaacctcagcatcacctctgttccttatctcttagtgaatcagataacagaatctattaactttttccctaaaaatctctcttgcccgctcttctccatctctactaaaaatatttttgttcaggctctcattattctaattagtctccctttcactcttcactcactgacttcatcatccatctattaatgtaactaatattttgaagcaccatctaaaagcgaggcaccagatataacaagaaagtagaatagtctatgcccttgcagagttaagagtttctaagaggaccgcaattaaacaagtatttacaacaaaagggcagcatgggaagtaaattctgtgtgccatgaaagtacctaactaactctatgcagtaagtaaaagcttctcctctctgtaatacccccaaaaatgtttgcactgagagctaaaatacgaataaaagttagaagcaggggaaagaatattccaggcaagggaaaatgcatttacgaagagtttgagaagttcagttcaattaacaaagatctgagagggtgagaggttaaaggaagaaaggcagacagcagattgtagtcttgtgagccacagcaatctgaacacctaagaccataggaaaccactgaagaattttaaaagggatagttatgactggacttagtaaatccactctgactggtgtggaaaactgatcaaagagaaacaagaactctttccaaacactgttgaatcaatcctacctaaatacatggatagagaatagatctgaaccctttacctacttcctctagattcggatggctccccactgtcaaaagcaatccaactcagcttggcattcagaccctctcccccatatggcccggctgacttttctttccagtgttctctcacatctcccgcaaatcctaaaaccaagctctcgcctcacacacagttgcaaccattcttttccctctgcttggaacactcattaggctcactctcttctctactgggttaacttccacggactcctcaaaactcacaggaggagccttctgagaagcccctctgacatccatcgatttaaatgacgctcccggtcccaaagcaccctggatagtttgcctctctcctgctacacggtgaactcccccaacgctacaatcgagcacccccaattaccagctctgtgcaaaagctcccgaaagcggtgcgcacgcgcatactcgaggtgctctggcgccacgcacaaacatacccagacacgcaccctgacacgtacttgcactctcaaaacacagagccgcggctgcgcttcctgaagtaaggattccccaaccgggcgcctggatcccaggcaacagacagatgccaccaccgttctccccacccttttggtagccctggtccctaaggctcgttgggactgcgagctgcaagcctcagatccatcatctcaacctgccttgcagtcggtcccgactgccgccgccaccgcagctaaaacttcaggcgccggaaccgcggagcgcgccacaggttaacccagccagcggcttccgggctgttgcctgggttaccagagctccgccccacgcccttgcgtatatccggcgagcccagtgcgcaggcgcctcccaaagcctatctcgggtcctgagtctaagggagagaggttcctctgcaaggttcagggcaaattattaaagaataggtatatagcaggccgggcgcggtggctgacgcctgtaatcccagcactttgggaggccgaggcaggcggatcacgaggtcaggagatcgagaccatcctggctaacacggtgaaaccccgtctctactaaaaatacaaaaaattacccgggccaggtggcgggcgcctgtagtcccagctactcgggaggctgaggcaggagaatggcgtgaacctgggaggtggaggttgcagtgagccgacatggcgccactgcagtccggcctgggcgaaagagcgagactccgtctcaaaaaaaaaaaaaaaaaaaaaagaataggcatatagcattagccggtgcctcgagaattctccaaaagaaagatgttgctctcctcaccagacttcacatatcacttaatttgctttcatctctattcatttgtttacaaatctttagtagtggaatcccagcacttttggagacagaagcagaaggattgcttaagctcaggagtttgagacaagcatgggcaagatggcgaaaccccgtctctacgaaaaattaaaaaattagctgggcgtgggaacacgcctgtagttccagctactcaggaagctgaggtgcgaggatcgcttgagccaaggagggcaaagctgtagtgagccacagtcataccacttcactccagcctggacgacaaagcaagaccttgtctcaaaaaaaaaaaaaaaagttgtttattacaacctacaaatgtgcgggagagctaggttctatggggctaaaaacaggcaaggtgggaaacttacagcatattaacagacagttatcaatgacaaaaacattaaaattatgacgagtgctaagaaggaagcactctaaccaaatacttagcttattattatagtaatatttgaattactcaggaaagctcagacatgaataggccagtggggaaggggaaagcattcctgcagagggagctgcatgtgcaaagatgtggaaaatgcaagggacaggaagaggtccagtgtgtctgaagtttagagaacagtgggaacttgctgtgaaggggaggcgccctgataggctggatccacgacagtcagagctgcgtggaccacgttaagaactttacaaagcacttgattcaaaaacagagtttatttgctctggtaagacaatttcctctagccccttgctttctgctgttacaatacacccatgtgtggtctgcaaatacatgcccaaaaccttctagaggaaaggtactgcctttaatagttttcactctgattgaggaagtttgatgtagatatatttaataatcaacaatcatccacttgcttgcatcctcaactccctgcccctctctaaattgctgtaatcacttggcaaaatgaccatattagccatccctactttacacttactaagtgcttgcacccatgcagctgaatctgaaaaaaaacacccaatcatgctgactttaaattcatgattactgatgttaagtaggaccttaaagatgcttgaacatctcattacaggtccctgttcattgattttcctacatattagttttataccttcattcatacccaatgccttgtctcctatcctcattctcacacaatgaccttgcttcctactgcattgattacactgaattattcaaaagagaacttccctaagctcccatcattattttaatccttctgtcactatctttacccacagacctgccttcagaagctcagcataagaaatatgaagaaagctaatcaaaatacttcataatcaaattgctcagaacgagtgataaaagaatcttaaaagcatccaaggaaaaaaatacatgtcgtatacagcagaac

SEQ ID NO: 316365 - DNA, 4001 bp, Homo sapiens
tcacgcctgtaatcccagcactttgtgaggccaaggctggcaggtcacctgaggtcaggagttcaagaccagcctgaccaacatggtgaaaccctgtctctactaaaatacaaaaattagctgggcatgatggcagatgcctgtaatcctagctacttggaaggctgagatgggagaatcgcttgaacttgggaggcagtggttgcagtgatctgagatggtgccactgcactccatcctgggtggctgagggagactctgtctcaagaaaaaaaaaaaaggtgtggccgggtgaggtggctcatgcctgtaatctcagcactttaggaggccaagccggatggatcattcgaggtcaggtgttcgagaccaccctggccaacatagtcaaaccatgtctctactaaaaataaaaaaaatttagccaggcatggtggcacatgcatatagttccagccactttgggggctgaggtgggaaactcgcttgaacccaggaggtggaggttgcagtgagctgagatcacaccactgcactccagcctgggtaacagcaagactctgtctcaaaaaaaaaaaaaagtgtgttaatattaggtatgaactatgatatctatatatcttccaccactggtgtgttcaggtaccactcctgacacataacccatgtctagcccagttactggcataaggtcaacacacagtatatatttattggatatgtaaataaatgggtgctgggaaacccagcatagtagtaagggccacatcacaaaggctttgtgtttattacagcagaactaagataagatttgcactaaaaatgacaactattgtagcagtggtacatgggttagagtaagtcaagttagaggcaaagggaacggttaaggagaatataaaaatattttcatgaaatgatgagaaccttcactgaggaagtcactgttgtggaaatgtggaaaagcatgaatttacatgatatatgaagtgttctatcaaccgaacttagtcactggttatgggcatacaggggagaaataggtttgaggcaaaaatataaggccatacaactacaagaacaaggaaagggtgatttgcaagaaagatggagtggtccactttggttgagttatggtgtgttcccgacagaggatgagactcagccagaagggaacacagcaggcttgcagggaggctgatgccaatggctgatatgctcagtagcagtgggggtgaggattgaatgaaaggtgaggaagtgtagaaatatacctagatttgtcaacagatgattaaattggagagggaaggggaggagagggaccaggcttatttgttttttacgtaagatatgagagtcatgaaaaatagttttcagcttgttacagaactctcctaagatgtgagagccttgaaaaaaatgttttaagtgagacgccgtaccaatggaaagtaagagattgaagacaagtaggaaagagttgcagaaatcgaatagaaaaacaacatgttgaggccttcagagattccctactgttaactataagcatgacttttgctaaaacccgccattaaccagaataatatctgagtctacttccacatagtctaatgagtttctttttttgatttgagatatgtaaatatacaaactctagaaatgtacatttctgaggtttaaatatcttaggtagtaacctggcattttgggaagttcaatgttcctggacttggatggtttggattcaaatcccagctttgatagtagcaacattgtatgaatcctttctctgggttttaatttctacatttgtaacatgagaaattaggattaaataaaactgaacagcacttccacttccatctctaatcttcccatgattctagatttactgcagaaaatgtgggcagagcaaggacacataactcaccaattgcaaaggccatccacatggaggtagctagaacaaggatggcgtctgagcagatccccttcatggtgacagaagaactgtggaaatatgcaacttttgatgtaggacaaacatctatgcgaagtacaagttctcacagagatccctcactgaccaggaaatgaagtctaaatactttgttctttcctcaggtcatttggaatgaattgtgtctgatgcaactcaattgtttaattcatttccctaaaatctttggacatttgaaaaaaaaatcttaaaaacagaattttagaagatgccagaaaaagagttagtaaagaatgcttgccaagggaaagaataaatactaagagttttccaataaaatatttaaaagtagccaggcatggtggctcatgcctgtaatcccagcattttgggaggccaaggcaggaggatcacttgagcccaggagttcgagaccagcctgggcaacatagcaggaccccatttctgaagagcagtcactcaacaacatgtgtaagtcaacaggcaataagaaacaagaagggacaaaacaccaaaacctcactcctttacttgtaatcttccctaatgttgttacttggtgttaatacttagtatccagtaaaattactgaaaggaaaaccatagtatatttaccaacagcttacttgcattattgaaattattatagtacataccaattgatattttaattactggtttctattctcttcatcctacacattttccaggcaaacatttttcattctatatcgaggtaatttctacccaaggcctcccctgaggaaaaaaccaagtaataaataatacaacccttaaaagtttgcaaattaagaagtccactttacctgctgtgactcccatggttgctctgagaaactggctgaacaggatggtttttgttgatagtttgttcataatgaactaggaaggaaggcaaagcttatttgtcttttcaaggttccaatgcctggaagtagaagagagtgagctttgaaattaggaagtgtagatatgactcaaatctatttctttcaactctaaattctgtaatgcctaaatcttgtgagttcatatttcaaatttctgagggtgatatgtactgtccagtactactcccaaatctagctgttcttgccaaagctgaacctaccattttagacatatgtcatagacaatttttgaattcctacattttaatttgcattataattattacattcaagacggcttcagatattgacacaatattataaagtaccacatctgcatgtgcagttattttatcaagtcaaaagtgttcactttattgaagcatctgctttagattatttctatattgacttatagaggttctatttatttttatttctttagagacaaggtctttctctgttgcccaggctgaagtacagtggcataatcacagctcactgcagccttgaacgcctagcctcaagtgaccctcttgcttggcctcccaaagcattgggattacaggtgtaagccactgatttggcctgactcacagggttttaaagtagaaaattaccttatatggaatcctccaagttcagtcttatttagcagagctgagaaatctggagatagagtgctcatttcccttaaatgatagcttgttctaccatttgaacaaaaatttctcaaaacgctaacattttttaaagcagaagttcagaagttattggttatcataaattcctcaggtctaagtcctaaatgaatggccttaactggggacatgccacatagttctgggaggtcaagtgtattttctcagcactgctctgatcaaccacagtgtctaccatggtggtcttcagaatttttgcttttaatccctctaaatttggtgcctgcttatatatatttttaagttacatgtaaaattttccatcagaaattttaataggctgggtactgtggctcaagcctgtaatctcagcactttgggaagctgaggcaggcggatcgcttgaggctaggagttcgagaccggcttggccaacatggtgag

SEQ ID NO: 316366 - DNA, 4001 bp, Homo sapiens
tggagaagggcagtaccagacctgaggacccctgggatcatctagattttactctgtggcagccttaaggaggtcctgagctagggagaaatgtgatctacatttttaaaagatgcttctgataaatggttatgactacttgctaatttgatacattaaaaaaaaatcttgtaattttaacttgcatttttcgtattgaggtaaggtatcttgtcatatgttttggtatcatttctattttatttcgcatgtatgaatcgtgtctttgcccatttgatcttttgtttgttgacctcaggaatctcttacatatttaaagagatgagcctgttgtgataggagtggtatatgtcatatgtgacagtttgtcatatatcttttgactgtttctggtgatttcttttccttgcagattttatttttatatcattaaatatatctttaaaataaacgagaaatacaaactggagagatatttgggtagaaggtccagtaagttgaattttgtttgtgatttgccaaaggtggcttaaattcttttcattaccatttttaaaaatggaataaattagagggtatgtgtctcagaggaatatgcccttgggtaaaggatgtttatatcatgcttttacacattttacgtcttccagacttaagctcatcaaattgcgcgggtggggggcagggggccagaaagggggtgggaggatagagggctcagagtctgagagaaaggaactcctatcttcatcccccaaccccccaaggaggagagtggggcgcagaagaggaaaccaagcggggggaggttagagaacttgcccaaggtcacaccgcgagctggtggtggagacagattcgaacccaagcctgactccagaactgagaactctccaccttctcgcgacagcggtacagaaaagtgccctcctctccttcctgccggcagccgtctgcgcttggccatgggccggcgggagcagccactcccccggttctcccgccagtcagaggtcgggggctcggcgtccccttctggcttggagcccctggcgcgtacagagcgaccagggcggacacatttgccgcgctcaagtctctgaccccctccctccttcccagagccctgcgcctagggtttcctgagctcccaaccccctcccttcccgagcatagacaagtttgtattcaagcaaggccaggactggtccctgagtcgctctcgggccaggcgaccagcctcactgccccagagtcaggaataaacggtaacaacagccaccggtgcctattgcgtgacccgtgctttacttccacctctccgaataccccggacgaacagacccccaggaattattgtccccattacacggacgacggaactgctgcagcttcggaaagttggataacaagcttgggctcgcaaagctaataataatactagctaacatatgattgagtgtttcctgtgtgcccagcacatgtctacctacgaacaccatcccatagatctttccaatacccctataaaatgtgcacaattatcattcccatcctacggatgaggaaacaggtttggcgccctgtccaaggtcactcagccagtgagtgacggatcctggatccaaaccaaagcgggtgaatcggatggcagttttttgtgcgttgtccgctacgcagagaagcaaagggcttagaacccatgataccaaaggccgggccccaaacgccccagggctgcgcgcaaatcaaccatctcgaactgccacaacctgcagagaggaattctcagggactgggacgtcaggagcgccagctgtgtcgagtgctggcccgcacaaagtccgtgcagccggatctcggctcccggcccccgcgcgcccctcaccaggagctggagagtacttaccataaaagagagggcaagcgcctgttcgggaagaatccccagcgctggcaggtcctggactccctggagaggggtctgctgccgccgccgcccactcaggggcgcccgagtgacccgcaaatgccggctctctccgcacggccaggggcgcgtcctcacggctgatgcccggcagcagcgccccctctgcgctgcaggatggcctggagttaggagcgttcttggcgaagttggcgctcaggcgccgggggtcgggcctggagtggggaagcgccttactgaagcgatcctgggggcgctccaaggcccgcgctctagccgcttggaagcttggcgcctgacccggagggcgacgagtcccgcgctcagggcgcacgggccgcgcctcggccgctggcccccggcgcgccgggcgtcttccccagcgccctgagcgcacgcagcggtagcagcagctggggcccgggcccgggatgtggtgtgttcatcgccctcccctggggctgggtgcttttgtgcgcggggcgcgccggccgccacggccagctctggatgctgcagccgccgccgcctccccctcctccgccgccgccgcccgctccccgccttcccggccggcccggaggctgcagctgaaagccgatctggctgagctcatccctgaaggccactaatccaatagccgcggaaggcgcggtcgccgggaacgccccttcccccaccatcccgcgccccggccgtcccagctcgggccgctgccggcgccgccaccttctcgaggccaccagctggcgggagagggaagtggagcccgcgcccgcgcccctgtgccaaggcggcggcgcggtcgccattcactcacccgcccactcgcccgctcactccctagctctcgcattcattcctgcgcgcgggtcctcccggattcattcaagcgctcctggagcgccagggtgggtgcccctgacggggaggagacacccagtcactaggcagctttggtgcctttactcaacgcacgtgggaaatagcagccaggaggaaaaaagggtggtttattatcccccttcctcagacacacacgtccacactttatttttgagatcaggctccaactcatctcttaaagtccaatttcataccgcacctgctcaaggagcgttccccgcccacccgaggcgcaggaagtcggtctctttgctctaccagcgctgatggtgggccgcctcattgggagcctgaactgagcgatggggtaaagggcgtggccaaaacagaagcctcgagggtgcttctggtatctgcgcttccttggggaaattgaaagttcttggtttggtggccctcgtctgtgctcccagaattgactttaggtccattacgcagtcatttgctaacccaatccctctctgtgccaggtaccaggcagagtctagatgcagacagagtctagatgcagacagagtctagatgcagagtgcgcatttcatcaaggacatggaaaacaagtaaagacaatccaactctatgaaggaaacgttttgagagaggttctggggcgaatttgtcagactggaaagggcaactgggaatgtttcctagtaaatgtgtctacatgaattagctcctggaggcaggggtacaacatggtcacctggagagctacctatcacagcacagagcctgtgctatgagcagagggggtatgacggaactggagggatggacggtgtctagggtcttgggtggagactgtatcaagagcttgaccttccccatcactttgggaggcctttaaccagggtagtgaccttgtcggatttgcattccagaaagacctcttagcagccaactggatggatggatggaggaaaccaggttggcagctactgtaatagtctaagcataagatgatgctttatgaaccaagataaccatgatgaggtgacaaaagtgtgtattgacacgtatttattgtacttattctaacgtttcatcactgtctgtttgcatgtctgcccctcctaaaactgtgagccccccctggagggcaagtataggtacctcacacatctctggatgccctgcacca

SEQ ID NO: 316367 - DNA, 4001 bp, Homo sapiens
cttttatacttggtggtaagatagtggcaaaactctctttataattagcatagtagagatagaattgctgtacaattataaagggcagtttttataaaagtatttgcaaatttacagtgaattaagaaaaccaatgagagttgaggactggttgattttcaacttcaaatcgactttcaacttcaaatctagtcgaattctagaatgaccatgctttgttttgacaaataatttttaatttattatcattaaatagttgtaaataaatatctggataatgagagtgacagtacatttcatactacagcttgttggttttggtctagttatctatgtacaaagccttcacagcccttgagaaagtcaccgaaatgacctgttttaaacagcataggaataattcagatgtggaaatcaagttattaaaaattcaacacttttatgtatacattttagaatttcactagcaaaaattaccatgtctttcttaatttttgtctaattcaaaataagtactgcaccacaaaatctttttgaaaaacaattttcccaactcccctgatgcagttatttggactttggggctagttcttacatttaacaattcttcaaactccttatgtgattgtggactgggctcatatgtgaattgccaaccagttgaatgtcactttagttgaaacaaatctggagtccaactcatatttaaaatgctactctaaacatttccccaccttcttcatccccatggcaaagttaactatttagctaactctagctggctgtcttttggtgaagaagtttggttacttataaaggatgacttaagtatctttgagaaaatacatactgcttaatacttacaagagaatgttaaaatgtattccttgttggaaattcttcactttttggcaggtgacttgtgtgtactattgcctaaagtacagtagtttaagtagcttatgggcagagagggattgtataggagcacggaactaggtaaagatgaatatttaagaaggaaaccaagcacaacccaatgatattttcctgagtcgttaatggactacacgaaggtaaatagtgaaaatagtaaagaaattttctcttcttttagtttggaaagtttcagtgttaaagtttggcttctactgagtgaaacatcttagtttcccacatagtgaaaggtaaatggaaaaatccatcaattctgaaaattgtaatgcagttaaataataaactgataaattgcattaaagctcagtattaattttttcctcctatagagacaggaattctatcctactaaagctacttaacagttcaagtaggtattttggaagatgcttacctcccagttgggtgtatctccctgcggcttaggtgagcgccgaggctttggctcctccccagctgctgcgagcttcccactgcgccgggcgcctgggagcctcccggagttaggtgttcggccccgccctcaggactcttgctaaaactcaaattctacctggctaattccggtgattaattattgacaaaaggaaaacactcctacgcaaacttgtgtccaaccgcactgctcccagcgactccttccagaagagaatgcctgctgcaacactcccctcccccccttgctctatggtcccaacttctcatacgctgccactcttagtcctgggcgatcagactggtcctcggaggaatgcagcccaacgacttctacattttaaaatctggttttctgcagctcgttcgcagttctccagggaccagcctctcgagagggggcgctttcccggtgcaggggaagccggggctccgagagcaacagaggcggctgaggcgtcgctgtcacctccggctgctgcagtaaaaccccgagccgaggcggggacggggaggaggggatagggaggcgccctcccccgctctggggctgggatccccgactctactgaaggggcacgtcctttggcggtggtagaggggcgggcggataaacaggaggtagaaggtgggagctctggggctttagcctaagctgcgttaaagcgctcagggaaagcccgcgcccagcatccatcgggctgcagactttggcaagggggcgaagaagcccgggtgtaagcgcagcaggactgcgtctgaaactcggcatcaggctgctaagtgagcccagggctcgggctggggcagcgggcggccaagcaagcatcccaccccatttatttgtcaaaaaccgaagaaagcaaagccttttagcactggcagctaattttggtgcctctgaacgtgtgaaacgcccctccccgccccactcgcatcctgccaccttgcccgcggtagctaggaggttaatcgttaaaaaggtggactcccccagggaaatagatgaaaggatcgtgcccggagaacttgtgtgtgcccactcacaagtgcagagaattaatctcggcccggactgcggcaggagggcaaactggggaaagaaggctgggaggcggcccggtggtgcagagacgcgcggcgcctgctcccgcggctcccggggctggcgtgccctgcgcttacgctccgcgctcgaatatcttccccggagggctcgggaccagcgcgagcaccttccctggaagcccacatccatcacccagcgatctcctctccatcgagagcagggcttgctgagagtggcggaggaccttgaaggctcccggttctgtatctccgtggccgagacgctttctgctcgaggcccaggggagtccgggagcgaaagcctcttttgatgaatgagcatttgggcagtatctgcccatcagcccccactgccgaaggaggagacactgcacatgctcggccagggctgattgtgttaaagcgcgaattttagctgctggcaggtctctgctcatcctcacaacgcgctttcagcgggttccacactgccagggctattacgaagagggaggctcacgttattgggcggtggtgtctccatgcaggagggaggatgtccccagaggaagctaaaggtagatgggggcagggaagggaaccaatagaaacagagcacctgcttgggcccgtgttagccattttacgtagttatcatttccttctgctcccgtgtctaaatagcagcaaccactgctagtgttatttatttctttatcactttatgttggtcacattccttatcttttggcttctcgcgacacaccttgcaatattggcagggtagatatgaccactcagggcatgtagatcaggaaatagaaaccctaagaaaggacttggcggggactaccaaggccatgttggtgaggccaattctatttacactggtaaatcttatttttcattatctatttacccccacttagttgtgacactccaccctccatactgtgattgcacatttgtggaaatatagaaatagaccttcttggcaaaggtttgtgaaatggatatgagaccttgcaactactccaactggaggttgggggaaactggcacagctggcagatgtattcagaccattaaaaataatcttaaataacatacacgtattataaccacacacaggaacatctttatgaatatcttagcacctccaaacggagaatacatattaacatgttttccatacaactatagaacattctcgaaacttaactagatcacaaactataggtcaacacttttatttttatttttattttggagacagggtctcactctgtcgcccaggttggagcggagaggcacagtcacagctcactgcagtctcagcctcctgggctcaagtgatcctcccgcctcagcctcctgtgtaggtgagactacaggcacgtgccagtacacccagctattttttaaattccttagagaaggggtctcattttgatgtccaggcttaggtcaacacattttaaaaggcagaagtcatacagaccacatcatccatcaaaatacaataaggataaaattaacaa

SEQ ID NO: 316368 - DNA, 4001 bp, Homo sapiens
cagcctgtgcataacctcaaagataggcctcaaggtccgctgaagatgcattttgtctttactctttctaggagaggccacaacacaccctgtgtcgcagcaaggagaaccatgaccagaaagaaagcggacgccaagaggcacgagcccaggcttcccacagggcacatcctcagagaaaggaggagcctgctggatggagcttttagattttccttgccaaagctgagcctagaacgtgtaggggtgggagaagccccagtctggcctgaatgaggatgcggcaagcccgcatttagccatgcaattgtgttccctttcctatttcgcctggctagcgtggatttagggagcggcttctgaaagaagtatacacccggtggcacagaaggtgcaaccagcagccagaggtcatctcgccctcccggcaggcttctcctggaaccccggaagccaggcagcgctgaccagcccaaacggcatgccgaggtgttggctttgaatgaaagctgatgaacctaaacgccagggcacagagtgattgggctgcacactgcgagataatacattttctgcaccaagctccctttttatgcccaaatgcctgcattagtctggatcaatatgccccataacagttaatccatggcaacccaggccagcccagagacaccgacaaagaagtgccgcccagggatgctgcctcgctgtgcacatgcatgtgaattccggcccagagaaagaggcggaggcaaaaccaccaccaccaacagaaaccaaaaagggggaggaaaaaaagagcagatggtaaaaaaataccccaatattaaagggcttttaccatggcagggaaggggtggaggtagtgactatcaaaatggccttagagtgacatgtcaccgccaagatgatggggtatcagcgacactcctaaagtcaggcataggatcctcctcacacacctgcaatgcagagactgctgcccattccataatccacactcccagccccagcgctatctgcagttgaaaccagtccggacttgtgcggctgccactgttactcctcacaaaaagattattgatgcataacatttcataatggcagagaggaaaacggggggcagcgggggatgggaaccagaacaagagaaaaacgaaaggggaggagaaggaaaactctcccagcccgcatctcaccttttatttgggcttcatattcagcaatgatctctttgtctttcttgaacttagtttgagatgacatcttctgacgtggccaaaggaactgacaggctgtttgatttatttctccttttcttttcgagtcctctctcaagccctggtaatcacacagctctggtcgatttcacaggtttagggactaatctctttcacttggctgcagagcagggagaaaaatccttctccttctggaaggaaaaatctctttacttgccgagaaatggctctagtagcttgccctggtcagctcctcttgcaaaagaagaatcaccctaggagcacagtaacctgccccagattttcaaagatttttcttccaaaaataataataatagtaataaccaagcgcactcacacacacatgcacacgtacacacactcacgcatgcacaggcacactcaccgggacacgcacacagttgtgctgtgcacacaggcatacacacacacaccctcacacgcacacacactcgctggatcactcacacacacacatccacgagaggcgcggcgcctctttggtcgtgcagccagcccctggcttgcttttgaaggctctgctaagtcgatggtcaggttgccaaagggccggtcatctcgcatcctccctcccttcggtgcctctggtctgatgtccagtgaggatcaaagccaggagagcgagatggaagttttcctgctgcaacgcttaagctccggtgaacacaaggctggactgctcgccctgcagggctggctgagctctcccccactgctcacgtcactagactccgcctcccggattttataacaactgacacattgtagcctacaggagagcagaactcactgcaagcaaaaaggggaagaaacgctcacaaaagggaaggcagcaggaaaagtaatcgggttggtaagtcttgagaggcttctgcaaactccaaacattagcacttgggttagggatttttcttccaaaaacttaagatcctccctttttttgcactgtgcaatttaattcagtttctggaatcaacagctatatgatggtttgtcactctactgggatagtctagcagagggcctgacccatgtagggaaaagcatcaatatttgttgagcagttacttggtggcagagacgatgcgaggagttaaaggcatgcagcttagcaaagccacgcagagcaggcacactggaggcagaacagctgggtgggtcattggcttgtggggctctgggcaaattcataagtcagactgagcctcagtttcctagatagtaaaatcagctctctttggaggctatgttattcattctttcaacagatatttactgaatgcttactataggtctagcaccgttctgggtacagggatacagcaatgatcagaactggcacacacaaaaatccctgaccttctgaagctcccggggctccacatcacacaactccagcagtttccaccattcatgctaatattcttagtaaaaagcacccctggagtagaaagcattgtgaatggtgccccctggagttgtacgaggcaagaggccctgggagaggaagaccaaaaataagcacagtaagtatattatataatatcatacaaaatgtaaagtgctatgggaaaaaatattgcagggtaaggaacatcgggaatgagaggagctcttgaaaagatcaaagaaaaatgcaaagctaagcttagcacagtctctggtgcatagcaagcactcaataaacagtagcaactgttattacccttttatatcccccaacaacctaacaacataggtataagcaccactctttcacagacaaaggagcagaggctcagatatgggaagtgacttacccaaggtcaccagccttccaacccaggctcaaagtctcctgcattctacaagggagaccaaacccatttcatgtggaattaaggtagaataagattcattctgtaaaaactgagtcaagcactaaagagtcgctgatcactggaatttcatatgctaagattgtcactaatgtgtattggcccctgactgtcccctgagataaatgttcccaaatttctcaaaataggtatagtcttccatttgcctttttctgagtctataataaatgattctgtttggactcagaaatgaataggttatccatgctagtccatcaaggcttcctagaggacatggcagctgcagtgggcgtccccaggcaagtatggcaaagggagtgaggcggggcaggatgttctcctggagcacacagcatgagctggggcccacaggtggcaaagcacaagacctgcttggagcaacgacagggagaagtccaactggtgaatcatggggcttattatagccttgtacccggaggcaggaggtcaccagttcagaaatagatgccactggcccgcagcccttgccatcaccccactgcctcacgcctcccctggacatgttcaggccctttgctgtcctcttctaactagttcaaacccacaaaagccccacgttacctgagaaagatgggcacagagattaacatccctgctgcaagtctagattcttcaagaaaaatgaaagttaaaaccatacaccttggagtacgacagactggatcctctcctggctctgccacgagccttgagctcatgagaacttgagcaagtggctcaacctgcttgtgtgcccactggtggcaggaactcagtaaatgtcagctattttcaccattattaaaattttaaatccacaaatagttctaggagacct

SEQ ID NO: 316369 - DNA, 4001 bp, Homo sapiens
atgactcttaacgagcatgctgccttcaagcatctgtttaacaaagcacatcttgcaccgcccttaatccatttaaccctgagtggacacagcacatgtttcagagagcacagggttgggggtaaggtcacagatcaacaggatcccaagacagaggaatttttcttagtgcagaacaaaatgaaaagtctcccatgtctacttctttctacacagacacggcaaccatccgatttctcaatcttttccccgcctttcccgcctttctattccacaaggccgccattgtcatcctggcccgttctcaatgagctgttgggcacacctcccagaccgggtggtggctgggcagaggcgcccctcacctcccggacagggcggctggccgggcgggggggggctgaccccccactctccctcccggacgggcggctggccgggcagaggggctcctcacttcccagtaggggcagccgggcagaggcgcccctcacctcccggacggggccactggccgggcaggggggctgaccccccccacctccctcccggacggggcggctggccgggcggggggctgacccccccacctccctcccggacgaggcggctggccgggcgtggggctgacacccccacctccctcccggacagggcggctggccgggcggggggctgacccccccacctccctcccggatggggcggctggtcgggcggggggccgacccccccacctccctcccggacggggcggctggccgggcagaggggctcctcacttcccagtaggggcggccgggcagaggcgcccctcacctcccagacggggcggctggccgggcggagggctgacccccccacctccctcccggacagggcggctggccgggcggggggctgacccccccacctccctcccggacggggcggctggcctggcagaggggctcctcacttcccagtaggggcggccgggcagaggcgcccctcacctcccagacggggcggctggccgggcggggggctgacccccccacctccctcccggacggggcggctggccaggcggggggctgacccccccacctccctaaaaaatagtattgttaactacatatacagtcgtgagaaataaaatgcacacacagaacaatggttggaatatgaaaatgtcttctaaatatgaccagtgtggcacagaactgtcctctcttccttctcaggtcttctgccccatgtcctctaacccagtggtccccaacctctttggcaccagggaatggtttcacggaaggcaatttttccatggaaggtaggggcatggtttcaggatgaaactgttccacctcagatcatcaggcattattagagtctcataaggagcgtgcaacctagatccaggggttggggactcctgctctaactcacttaataaacgtggatgtgtggctcctgctgtcacttccagaggtggtctaacaacttcattgcaaaaagtcatctccagaagccatttatgtcctattattattattattattattattattattattatttttttaacaaatgggaatttacaagatgtgtgattttctaactctatcataagtcacaacctctttacacctagaacggctcgatgtagcaaatgttttcttttaaaaggctgggggggaagttgagagcagcttcttcataggatatacacgggccttctataaacagccagtaatcttcctaaagggtggtgggcctttccgatgggcctaatggcgcaagttattcttacacttctcttttccagcaccagcgtctggtagaaggaagacgagctgggcgatggccgctaaccctaccacccctcattgccggactcccctcaccttctgggcccattaaggactttgtcggttgtcctcgggactaggtgggtgtcgtccacttgggacattgcggccacccgaagacccggatctgctcggctccatggcctacggaggcagctgagccgcgcgcagaccagctttcctggccctctgcacccgctggtggcctccgcggcgttggggccgcctccctgcttcccgccctgctatacctgccgccacccaggggcgctgcgtccaggcggctcagcagaagcttcgtctgagcctggcagggttgggcggggagaccctgcagccggcaggtcggggaggaaaagtggttcgccgctgcttcaagaaatgggcccggtggggcagccgcggccagggctccgggttctaccgggcggagggcctggagggcccagcagagctgtccgcgctcacatctcaaattctgttcgtctttttatactgatttcaaaatatagattagccctttgttctttcttaaaaatcttcacattttatttgtctatttttgtcttacaggacttctgaattttatatgatctgaaattaatattttccttaattgctactaggtttgtggaatgttggaaaatctaagtactatataagaaatatgttaacatagtaattgtttttacgattttaattttatatttaaacctttatacgtttcgaaagtttttactttaaccggtaagttggaggtccacgagattttcttctgcgccaaaattttcagctactctgcttctaaacacttcagtgagtagcctatctgtcccccccgagtataatgccagctttatcatgtaataaattctcatttgcatttaatatctggaacttttattctgcttcattatttccatgtgactaccaccctttccagtcatcattatacatttcattttttaaaataagcttcgttgaatatatttaaggtatacaacatgttatgagatacatacatagttaaaaaaagattactacagtgaaggaggaatcccaaataaagtagaatttattacctatactgtggtccttatgttgtacattagatctctaggcttgttcatcatgcatatctgctacttggttttgttttgtttgagacggggtctcctgtccccaggctggagtgcagtggcacgatcaaatcactgctcactgcagcctcgacctcccaggctcaatccatcctcctgagtagctgggactacaggtgggcaccagcactcctcgctaattttttttgtgtgtgtgtgttttgtttgcttgtttgtttgttgttgttttggttttttggggttttttttgtttttttttttttttttgcagagatggggttttgtcatgttgcctaggctggtctcaaactcctggactcaagcaatctgcccacctctgcctcccaaagtcctgggattacaggagtgagccactgcgcctagccctcctatctgctgctttgtatcctctgacctacatctctccaccctcctccacctcaggttttgttatctctgtatacctgtatttgagtgttttctttagattccccatgtgagtgaaatcgtgtaatatttttctttctgtatctgccttatttcacttaatatcctccagtttcatccatgttgtggcaaatggcaagatattctttttagggctgaataatattccattgtgtgtgtgtgtgtgtgtatacagtttctttatccattcattcttcaacaggcatttaggttgcttccctatattggctgcaatgctgcaatgaacgtgggatcacatttatctctacaaggtggctatctcattttatttgtgtatatcccctaaagagggattgttgggtcatatgtagccctattttcagtttatttagaaacctccatactgttttccacaatggctgtacattctcaccaacaatgcacaaaggttttctgttctcttcacccttatccacgtttatgattaatatcttttgactttttgataatagtcatcctattattatctagtgtctcataatggtttcaattcacatttcccttatgattagtgatgttgaacaccttttcatatcca

SEQ ID NO: 316370 - DNA, 4001 bp, Homo sapiens
tgaaaaaccccactaggagattttgataactttcttacccttgggttgagaattactgtaccaaatggaatgttttgcaaccatttttcatatagaaaaaggagaaggtatttaccataaacttttaaaaatcaaattaccaaatgccagagtcagatgtaaagatttacccaaaaactgatatctctactattctattaaggtattcagtgagggactgtaggtaatttttctagggggtagggattgtgaaacatttcttcagtaacaatgaaataatatatttttctataagaaatgggcataaggtcggccgtggtggctcatgcctgtaattccaacactttgggaggtcgaggtgggtggatcatctgaggtcaggagtttgagaccagtctggccaacatggtgaaaccctgtctctactacaaatataaaaattagcagggcgtggtggcacacgcctgtagtcccagctactcagaggctgaggcacgagaattgcttgaacctcagaggtggaggttgcagtgagccgagattgcaccactgcactccagcctgggtgacagagggagactgtctcaaaaagaaaaaaaaaaagaaaagaaaaaaatgggcgtaatacctggactagattcggaaaagagactcagactctattttctctcattttggtatctacttagggagtgcattaaattattatgcacaatttacctttgacttaacttgtaaatcctttgtttgtctttgtgtgtgtgtcactaacagactgacgggaagttagaaatgagaggaagcttagcagtcaaatggcctgaccccttcacttaacagagaaaggatgaggcagggatccaagatgagaaaggggccatggctctaatctcctgagcttagttttctgtgtgctctcacccccatccctgttgtcatcagccggcatagctttgagtgaaggaggctttgcagtgagaataattcacattttgaagaaagagccacgtctgactccaggctccgcagtgtactcgttgtatggtcttgggcaggttggcaaactctttgagcctctctttcctcagttcaaagaggggcttaactgcgatcaatcacccaagactcttagttcgagaaagcaccgcatcacacaggcttcccctctacccacaggtcaggggcgcgggggtgggggtacttactgcacgcactcgttcccgcggcccttgttctgatactccacaatacagcggatcagctggtcattctcctcaaggagctgaaagatcagagaaagaaagggtcagtgcaggccgggcgcagtggctcacgcctgtaaccccggccctttgggaggccgatctaggcggatcacgaggtcaggagttcgagactagcctggccaacatggggaaaccccatactaaaaatacaaaaattagccgggagtggcgtcgcgctcctgtaatcccagctactcaggaggctgaggcaggagactcgcttgaagccaggaagcggtggtttcagtgagccaagatgcaccactgcactccagcctgggcgacagagcgggactccgtctcaaaaaaaaaaaaaaaaggagagaaagggttagtgcagtgtgacgtctggacggcgggggaccgaaccccatgccggggtcctgccccggcgcctgtgctgatttcgtgcccatctcaccccgcaccccggctgctcagcacccttcacagtcagctgggaggccgctcactacaggatgcttctcgcaccccgcagcccctcgggatcccgacttctctccgcccgcccgcccgcccgcgtggatgctcacccgctggatagtctcttgattgacttccgccttgcccctcagccagtccggtacgaaggccaccgacatcccgaggaacctccggaaccacgaccgccaagcaactcgacccacgataggtggggcctacgctctcgaagttgattggatgctcccgcctacagggcggggtacagaagggacgtcatttgtgactggacgcgcaagagctatactcagcgctttcctcggtcccagcccccagaacgccgggggcgttttcgtatcctttgcgcttgcgcagtctggagagcgaaacttgtgggttggggctgggtctactgctgacctacctggcgtcagcacctccagtgttaggctgtgcatgctttttttttttttgagatggagtctcgctctgtcgcccaggctggagtgcagtggcgcatctcagctcactgcaagctccgcctcctgggactacaggcgcccgccaccacgcccgtctaattttttgtattagtagagacggggtttcaccatattagccaggatggtctcggtctcctgacctcgtgatccgcccgcctcggcctcccaaagtgctgggtgtgcatactcaatctatctgcaggagcggtttgctcggcttcacccagcgtgtctggcacccagatacatggcttcagatccattgtcctctctacatcactctgtgcctccaggtctgcatctggagcatgaacattggctatggcattgtctcctgccaggccaaatctgcaggccaggaaaactctggtattagctttactctttgctgaacgagaaattcgcgtttttccacatagcctggacttatttggggcaggaataatgcttattaggttggcaaccctaaaaagcactggtattttctccattttacagatgacgaaacaggttaagtaacttgcccaaggttccttagcaaagccagtctctgaatacgggcagcctggctttagaactctcacccttaacaacccgggactgcccaggcaccataccgcaaaggtgttgtgccgcaagatgcaaggaggaagctggacataccttcttgggccacatggttactcctggtgaccactgcaactgaattggttgtagtcttctagaccagtggtccccagcctttttggcaccaggaattggtttcgtggaagacaatttttcttgtcttccacggaggtgggggtggttttggtatgaaactcttttacctcacatcagcaggcattagattctcattaggagcgcgcaacctagatctcttgcaagtccagttcacaatagggttcacgctcctgtgagaatctaatgctcccgctgatcctaatgcccccgctgatctgagggggcagaatgctcggcggtaatgcttatccgccctctgctcacctcctgctatgcggtaccggtcccctgttctagccatccgtggtggatgtggtaacaagattcgttttccctggagtgagcagcggccacttcatttaggagggagatcttgggaacctacactcctaaaaaggggaggtccctagagctttattcccctgagtggtggccctgatcctgagcaagctcatctgctttactgggctttctctccacaatccctttattcaaacctgtgaaaaggcagctttcatcccatttcttttttcttttttttttgagacagagtctcgctctgtcacccaggctggagtgcagtggtgtgatctcggctcactgcaacctctgcctcccgggttcaagcgattctcctgcctcagcctgctgagtagctggaattacaggtgcctgccaccacacccggctaatttttttttttgtatctttagtagacatggggtttcaccatattggtcaggctagtcttgaactcctgacctcgtgatccgcccgcttcggcctccaaaagtgctgggattacaggtgtgagctactgtgcccggcctgctttcatcccatttcacagagaggtaaacccggtgagagaagtgaggtaacacctgagctggggcggactcagggcttcctggttaccaagcctgcactgttaactccacatcaggcttcctcctcaggaaaattccccaaagctttcagagacacagagtgggcagaaaaggaa

SEQ ID NO: 316371 - DNA, 4001 bp, Homo sapiens
aaggttgaggctgcagtgaaccataatcatgccactgcactgcagactgggcaagaactagaccttgtctcaaaaaataataatgacaaaaagatcatttctttaacttccaaaaatagtacgtgaagagcccagaacaattctctccataaggaattacatttagcttctgaaatgttaacttacttggtgggtttgtttctctgatgaacctcatattaaggcctgtgtttaagtgttctaattccaccctcaaaatctgcttctgtagccgtgtcagaatgatcattgtctctacttcagttagttaataattcttcctagcatcaatgttcctttcccccaaaatgtttattaatatatatatctcaaattaatgcttattaaaaccaacacacacaaatgatctttaagaagacatataaaaatataacatgtagtacgtactttcacttgaaaaacatacttacttgtgcttgagaacaaatttcacattcttgtatgcaaaggctaccaaatatgtgcttactagggtcatcacactatacaaaacagcagactgaataagatccatatgccatattcgccagtataaccctgaattaaaataaaagggggaagggtacaaaaagaagcaaaacattacaaccccgcaacaaaagcctgcgaaattaattatagctaagcctggtaaaataccaggttattagttatgcaatccaatagtatctgaggatcttcagaagcgagataaccagtaacagtatagtctcaagctttccagttcagaacatttgaaaaacatcaccttcctattactagtccagatgagatttcaacttctaaaatgagaacaaactctggctcaacgtaatcacaagtcagacttcaaatttcattcatcagggtactagcatgcgaaacacaggccattccaaaatgccacgtgcagccccaaaccatagtttccttgctgacgtggctgttatcagaactccaagcagtgctatgtccaattagtgagccatcatatggcttcacatcacgttaatggcacgctgggttgtataaggacaaaagagaaaaatacatttagttttaaatgcccaacaacagtgcagcaaaagacaggagttctggaaacttgagctctactaaaaacgaccttgtccaagtctgcagtttcccaaccaagtgagaattctagaattggtccagtaggattattaaaaagtataaataaggtagatccctaacccctggcacttcaacctctctctttttgcaaaaaccaggaaaattatgcaatggtgtgaagtagctcacgtaaagatgcacttataattcagtgggtcacttcatgggtttctcacctaactaatttatgcaaaataagtaataagtttaaaatttcgtaacggcaagcaacagttgtatagaaaagggcagaggcagtatgcttgagtttgtctgtttaaatagagattcggggccgccaccccagaactagttaaccaccttctcctggggtggagctcgggaacgtgcgtacttttaacaagtgacctccccgagtgctgcacaggacaatcccaagcgacaacactgtgcccaaagaagaggctccgtgcctccccgagctcaggggagctggagagattgccgacccccggccggcacccacgccttccctgctcgccgggtcctgccacgtccccgcccagcccgactagccggcggcctgcctaacccgcctcgctcccagcactcacagatggggatggcagacacgatgaacgcgtttccgaagaagagcgcggaggacttggccgagagattgcggctgaaatcctgcaggagcaggtcctcctcagactgctgtttggagctgcctttaggagccatggcggagctgcaggcgagaacagggaacgtagagccggccgccaaggcgggcaaaggcccttgactccgcccctgcggccgccgtatccgctaacgacccgtcagcgcggcgcgcggaggcgggacccggtttggcgaagagcaagcgtccccaggattggccagcttggcgccactagataggcttccgggcgtgattgggcgagcgggccagacttccggattcctgacaagccacgtgacccacccacctggaggagagagaagggatttgtagtttagtcggtgctttaaaaaaaattaacaaaactttattgatattccacttcagagctgctgacagactcacgagttctcagttcttcagaattccaaaattaaaagctcttctggccccacgccattagtgccctctgtgcgtacccaggactgagtacgttgaagaagaaagaagagaaaggtatagctaactcatgtaaaatcccttctcctttacacatcctttatttcattaaataccttgaagaatcttatgacgtgcgcatcattaccgccattgcagctgaagagcctgagggtcgtagacctgcggtgtgggtctccaaggcgtgggctcttttcactaaacaataggccacctctgtaggaagaagaaaatgggactcttgcttttaagaaactcatgatctcattgatgaaggcaatatttaatatatgtctgatacaagttactactattttattttatttcaactagacctatagagttttgtggcttccaaagccatgctaaataaaacataatactaagaacaggttggctaggcaagactccctctctgaagctcagaaggattaagtatgtctattaaaacagctagattccatttttaactcaacacattatcattttttcttcaaaaaaaaattcaaccacatcactcccagcaaatgctacttttgattactgagaacactctagtgcattaggcacaatttcctcaacctccagcctccttattaaccgtttggtagatatctttcttcctcacagtatccaaattgtaatctacctccacagcttcctattactagtcctaattgggcttttgtcttcaatcttttccagtctattctctatacaggtaccagagtgagttttcctgaaatataaatccttccattatctaccgcaagtgttccttaatgccagaagttttcattaattcaccacaaaatgaaaaagaaaaaaagaccatctagtgaatttttcagaaaatcaaaagtattcatttaaaaatatctgggtttatgtcttttttgatgttaaaaatgctctttattttattacatggtagtgatagaagaagaaattattattttctcttacacatactcctcccccagtttttcctatctcactaagttgcattcttttaaactcatttgttgttctggttaaaatagtgggtttcaacactaattatttttttccttctccatctatgaccaattcataaataaaactttttggatctgtctctataactagattttcttctgcctatttataaacaaactaaggatataaaaagaagataaaagataaaaatcagaggctgggtgcggtggcttatgcctgtaatcccagcactttgggagaccaaggtgggtggatcacaaggtcaagagaccgagaccatcctggccaacatggtgaaacctcgcttttactaaaaatacaaaaattagccaggcatggtggcgcacgcctgtagtccccagctactcaggaggctgaggcaggagaatcacttaaacccgggaggcagaggttgcagtgagtcaagatcgcgccactacactccaactccagcctggcaacagagcaagactccatcaaaaaaaaaaaaaaaaaaaaatcagaaaactaaaagatccaaagagacaacaatcatctttcttttaaaagaagaaaagaagaaatgataaggatgagatttaaaaaaattatgcctgagaaaaatattttaacaattaaaataggaaagataaaagtttgaaatgtttagtggatataaatgttacaattgata

SEQ ID NO: 316372 - DNA, 4001 bp, Homo sapiens
agcaatggtatttctctagataaatgtttacaaactagaaacaaattcagaacctcattttagctatttaagtcagattttttctcaaccaccaaatgactttgttccttccatcttttcatatgttatgtattttacatatcaacctggtagatagttggatttttcagcctaactattcacacacactcatttcaatagtccaacatataatttaggtgtacttaatatgtaattaatgtttatgtcagcctctcccagtaattatcattgaattaaagtttgaatgcatagagttatgtgaaattatttctgtttaaaatgactcatgttataatagttatcatttaaaatgtaaactttattgccaccgagaattttaaatagatgtttgtgaacattggagtacctatctcaaataactttactgaaaccgccactcaagcttattatgtattattgaacaaaaagatttactcaatagaaaccaaattcacatttttcataatttcaccataattttattttgtatttacagttttcagtttctaatgcaagggtctcgctgaagacttggaggattagggaagagagatggggtgtgggggcgagggatcagaggtctgatatggacaatactagttaagaaagctaacaggatgtgaaagtcttccagaagaaattcttgcagccagctttgcgttctcggggtgccatagccgggtttgagttagcagatctctgcagctcaagcctcatttcatcctgctcagcagcctgggacagatcttcaggttccagggcatcattctccgtctggttgggttcagacagcagctctgccaagaagtacttggccagttcctgtatagggcagaagggatagaaaaagagagaaagagaagtggggaggacaatggaaaaaatttgaaaagcctaaattaaagaacagatttggtcacacacaaaatccagtttttacagctgcgcattttttgtcacatttaaaatcaatcaaggatataaaaataaggatagttgctataattaccaagttacacaaaaaggctttaagagctcaaatgtttctgcaacctttctgtccctgtagacttaacacacacacacacacacacacacgcacaaacacacacacacacacacacacacacataaagaccgttctggtaagataaagtgtgtgccaacagtttaattcaattttcacatcacgagctacaaagtagaattgttttaccatttttaccaagtaaactgtaggggaacgagacttctcacaatctcaaacatacggcgttcggtctttagattgcccctttgccctagtcccgacgtttggaagtgaggtacgctaagaggtagcagcttcagaggtctgcgtttcagcacctgggtcagcgcttcccagggtcagcaccagggatagacgccattgtcgcttcgtgcccagacaactacccagattttgtaattttcttgaatgccaagtaagaactcacctgaactgtgaccgactgcgcttatcatgggggaaaaaaagagttagaaggggattctagcctttgatagttttctcaagagcttcgggagctgagggacccagaaaagcaccaaaactctttagaaggactgagcatcccttacgtccaaaccaatggggcaggagcaaggcttagggagggctggagaatccgggagacgtcgagggagtctccttacctgcttccccgcggcagcagccagggacttctgcagaaactgacggagtctggggtccgagggagcgccggtgacacagcccagggccaggacgatggacagcgcagccagcgcgcactggaggcggcaggacagcatctcggcgccgcgaaagccgagctggagagtggctggtcaaactctaggcgcggatcagcaggcagcagcgatggctccgaacctcgctcctaaagcggcttgtgtgctctcaaccgtctccctctgttttaaactctctctctgacgtcaggctaggaggcgcccccagatctcaccagcccttttacgcaccattagcctcgcaaaatcaatcacagaagacaggggaggtgacaagatctaaagtggcttacttaaaaaaaaaaaaatactgcacacgcacaggcacacacaattccacatgccccacgatttatacaatcttttattttcactcagtgctatgagcatacacattccacaatttcactcccacacatgcacactcaattacacacaaacagaggctcaaacactcagctcttaaagagcaaatacactatcacccttaaatgcacacaaatgtacccagacaactccatctgtcatcatactctaacattttaggaaggcccaacaagcaacagggcatgtgtatggtaggtggagatcagaatcattcctctaataacagatttgagaatgaaatatggacagtagaaggactgagccctctttatttcctccattatctcataaaaagccttgaagatgtaacggggctctaaaagaacttcacttttctctacaatgggggagaaggtacctctggctcaccctccctccctctttctcagcaactgagacttctgatctacctgcctttctattgtgaccatatatatgtatgagtgtgtgtatatgtacgggagggaaagagagagagagagattgaaatggacttcattttggtgctgagaaatttagagctggaaggcaatctaagaaattattcaataaacctcagaatttgaatcagtaaggcagagtaatggtcagtaaattgttctccttcacatactgcacactttgagcaaaaccagacctccacattccaaagccagtgttccttctactgagctctgagttttctaacagattcctggccggtaagcatagttttatgtcaggaagccccagtttagacatataaggtctaggaactcccagaacatatgtgaccactattgtatatctatatgtggaaaggatcaaaagattcttggttaaattcagctctgcctgatctcctagaaacaaagaaagtttaagaaaacctgtccttgaattctgattgaactctggttaaatgtttactgttcaggccagagttctgactgcttttatctaaatagttccttactgaggaaggaccagctaatttcctagcatggacgagatgatccctacaggatctttaagagctgttatcttatgagcttcaaaaaagccaatattagctaaaaagatatgctgcatctctggaaaccatgcgaagctcatattaggtattaaaatattctcagtacttagacccgaaccacagtgttgagaggcagaagggtttgggaagtatcctgaatggcttgaataattgtcactatttctttttgtgcttgtaatccaaggcaaagcggaaatgcacagcaagaagtgttaaagtttccaggtcttgacaaggccagccaagactaagcacaaagtggggcattaaaaagtcattcacatgtgttggagtagtctaagagatcaatgaatctggagctgtggaacccagtcctaggaaatacatgttatattctctaaatcttgcaactctctctggcctctaaggactcagagtttagttctatcactgtgactgtctctaggtacctccaaatgatctcatatctcctgtacccaggatgtggtctttggcatacccactgagtaggaaacgaggatttttccaaagcaggagccagccgaagaacaaatagcagctccccatcttcccctgtgctctaggatctcttctgtctccttccccagacgcttgctcccctccttccacatccttgtgctctccctctacactttctcctccttcttattcctccttttccttaacctttctgcaaatttatgtttcagaattttcctcactcaatccttcttttgtctcctctcttgactctgta

SEQ ID NO: 316373 - DNA, 4001 bp, Homo sapiens
ttatgtaaggcctgtagcaggctccctttctgacacttggggaaaaaaaaatctacctggtttctgatttcattaactttttctaaaagtttccctgggtgcctctataccttgcagtgaaccccaagtgctcacctgagttccatcacatctgagaccagcactcaggacaaccctatgaaagactcagggttcctagacttgtaatgggcccaaagacttcacttttctctcaccttgctcaccaaaaggcatgaggtcaaaacaggaacttcacagaagataatatttcccattaatagcagtttacttttaaagttctggggacctgatcatttcgtagagtcaatattgactccatgtctactctgggctggtgatgtattaggcactttgtagccaacgaatctttgatcaatcctgcaagatgacaccatccctttaaaaaaaattatgggaaatgaaattcagagaggttaagtgacttgagcaaagtcacccagaaactaggaggcagagcataggtttgagtccagatctgacctagtccattgctactatgagaaactctaatcataaatggaaagactgctaataaacagtgttttgaagaaaaaagattgcattagaatgttatttgaagcttattagaacaagagtatggatatacaatttccaatatattagaggtcagattaagccctcctccaatacatgctaaaatatctccaggcagtctttcacttcaatatgaaaaaagattccaacaaaatttaaattgagctctctaagtttagtataggttaatttcatattctgcttcaggtctaaaacttaaagctttaagatatcaacattaaagacaagaaagagtgttatgcctgcaaagaagctccagtgtcatcaagtctggtgactatgaagttgtgttagtgtcatggatctctctggattcaaatgaaagctatagacctctctctacatctcccaaaaagcatgctcaaaaagcattttgcccacaccctcatggtcctcagattgagacctaaaccaatctcgttttatagatgagaatattgcagctcagagaggttaagtgatttgcccaagatcacacagccaattcagagcagagccaggacttgaaccctggcctcccacttctcagtctcatgctcttcccctccccactccccgccaccggcaaccaccacccctctgcactgcctgtttcaaattcggattcaaaaatttccctttttaaaacatagcacatttcttcctgaaataccatttccttcatgtttttaaatagctctgagaatccattgtatttctgtcccggtagtgacaggatggggtcacctgggctatgtttcataagcgataatgaacgaactggccgtttgctagagaaagatcacgagtgaagccttttcccgacctttctgtagagttaacatcatctaagaactgaatccaattgtgattgaaataagaatcctgaaaatctcacttagatttggctgggagcaggagacactgtcaactagagaaaagaagaaaaagggaaaagaatataaggtttgcatggtgtcactgtgatagagagaaaagttctcaatttcatctttcaccttccttctccattgtccaaaggctcataacggaagaagagatcgcaagctacaggtaggctttacacacgagaggaaggaaggaaggaaggggtgctctcggcaatccagatgcagacccaggactgcatttagggcagatggaagagttcacacagtgctagctacagagcttattagaaaagactatggatacataacttccaacatattagaggtcagattaggtcctcttcaaatgcaggctaaaatatctccacacagtcttccgtgccatctttgaggctctacttactgtcatcttcattcagatccctgtccatgttccagacgtcctgccaaagagatgtctgcccttcgagtgtgcttggaccgatgtgctctgatggaccaccctcaggcccctcccagaacagcaggcccattgttacccagttggaatacaacaaagggaaacatctatatcgttcatcatagcagctgctctgcacccaatccaccgggttctgggagctcctcttccacaagagccttctactgaccaagctcttatggatgcttctagttactcatgtcctcactgcacccctttgagaggggcactggtatcatgcccatttttctgagcaggatgatagattcaaaccctcatcagtctgactctctagtcagagtgcctgacaactgagctacatcgcccagctgtaggaggcagactcctaagtattgtagggcgcatgcagaaaaaggtcataaccacaagaaggttacctccccaagggggatattatatacagatactcagcctgggcagggcctctgagatcttgagcatcaccagcctcatctccctggggaagaaacaaagctgggattgtgaggccacactgcaaagccacacggcacctcatgggcagagctggctcccaacccagccatgtgggccactactgtcgccacaccagcctcgcccactgtgaaacatctttggatttgtaaaaggtcttttcctaaaccttttccattggagtttgacaccccttcaacctcagcccttggaagatcatcctcctctgcatgagtctaaacacagaacttgtgagctggtccccgaggctctatgggtcccaccccctccactgcatccttggcaatcactcctctgcagctgaacctggggttctctggccagggtgatgaaactgccctacgccttgacttccccatcccagcaatgcacgtgggatgtgccatgatattcctcaatgacaacctgggattgccttcaccaggggaagcatcaggactattttgtcagtgtcctaaatgtcggcctgtctgggatggccacactgcacagagatggctcccagctgctccataaagagcgtgtctttattctctctactgccttcaccctcgtcactgactgcccatcgccgacagcatgcaagtgcaaccttcagcagtattcacaatttcacaaatgcttcttaggtgactcagtcctcacaaatcgatttttatggctggtaggagcactggatttctgatacttgagagtcatataagtttcattactgtgtatacacaaggaagaccatgatcctgaggaacaaatgtggtcttttgatgcctttatacatgaagcaatgattttaagcccttatagaattgtccccatggtaaatggggttatcatgaatttgtatgcctttctctgcgtgtatattttaccctaaacatctgtgtgagcatccattgctgtatctgtttaggtgtgtgtttgcatgtgtgtatatatttgagccaaaacatgataaatgatagattaatgacaaaatgcttgcaacttaactaaaacaatataccactattacatcttgagtactttttaagcgcaatatatgcttacctaaaaccctcctcagcatttaaaaggaacaaccacagaaaattctttaaatgtcaaattgaacaaaatgttgaagagaattaagcattacaaggacccgaaatcttgaggccgcaaaaatgcagacaacgctgagctgtattttcgtaaccaggaagtgctgatcagcagaaatgacagtccttttctgcacgctacttagatcacataatagtaagttaataaaaagctcttaaaacgcatggaagataaacaaaccaacagctagacctttctgatcttgcttcggcatccgtacagaagtgctgtctgcaacagtgtgcttgagtgactcggggcaagtaatgtacccatcaacacctaacatccgtggtagcagcaggaacaagcagcattagctctgggacccacgacagtgtgaggctagtactggtccctgcctcttacta

SEQ ID NO: 316374 - DNA, 4001 bp, Homo sapiens
ctacagatctctacacaaactgttccctcaccaccttcaggcctttgctcaaatgtcactctcccagggaggctgtccctggcccctatttaaaattgaacaccctgccgccaccaccaaatctccagtctcagaccctctttcctgcttttgtttttcttcatggcacttacttctatccaacacattaactaacttactatgtgttttgttcaacacctgtcataatctggatgtaggctaccaagataaaaatcccaaaaagcatatttgtgtctgtttagttccctgctgtatacttagcactgtgaacagagcctggaaaataatagatgctctatagacatgtgatgaatgaatgaataaataaatatattcttatgcagggactttatcttcccattgtcctggacttctaaacagttttctccaaagataagctttgttccaactgtggggaaactgatagaagaaaaaagaaggccactagtaatttttaaataccagtttgtccctgtttctagacatttacttcttcaaaaacagggatccagtctgagtgccacattataggaacagcaggaaggagttcagtttgaccctgtggctcaagccttaatgaaggatgcttccctggaagctgggactacaggacgctccatccccgtggttggaaaactgaccagtgacagctcctgctccatccgtggccttgactctggaagacatttcccagggagctcttttgtgggtcagtgcagatgcccagcctgggggcttcagattaaaccaactaaaaccagtttctgtggttccggctgctgtcctcactgggctagaaaatggaagaggttttaaatcgtggctcctggcaggcaaggagaacagagtggctcatttccagcaaaaggcagagatgctaatctcataaggcagaaggctgcctgccagcaattgcacgcattttgcacggtccctccgtttctcccttccttcctactaatctgatccatttatctacaaagccaatttggaattttaaaaggccagtctgtttggtcactgaaattttcaaacacaaattcaatttgctttgcaaggcaccaccagccttcccaggccacaggacaacactaacttcccgtccttgtgtttgcagaggggtttctgtcataaatgcttcgggatccagcccattgcatctctcggctatctcagcaagcggggaggcaagtgagggaagccatcattgctgacggtgagcacttgttgggacctcagaattctttttgttctacttcttcactgtgcacatggggaaactgaggccaagagaaaggaaaggactcgttcaggctcacatggcagtgagtagcagaccatggcccagggcttcctccatgacaaatacactttgaatgttgccctgaggtccccagaggtgaagtgactcctggggccacacaaaaatggggagcaggagcagaatgaggaatcgtgtatttttttcacatgttattaaagagctttgattccttgcagagaccttgatgggtaccagagcgataagtaacatcagacatagccccactgcagagtctcccatgaagccaaaagtggcagaaatcattttttcctccatcccctgatgttaggcctcccatctaatgtcaactggagagacagccctcagcaaggatggatgtgttcccatggctccaccctaattctctttctccccatgccagctcctcccctcctctgcctcttcaccatcatgcccagccacacatacaggaaacccctaattatcctcaacttctgtctcttctcttcccactacacacacctcctgccaatctctcctccctccatctccgtggcgactgcctcaggcaggctttcactcacccctccatccgggggtctctgactcccctccgcacctgcttagcagtgccagccagtgtgagctgttctacagcgtgtcccgcatgcacagtgatgaccaggaaacggtggaggtcaaccatccatccccagaaggaaaatcaaacaatcacatgatcaggatgacacacagtgtccaaagtgcgacagaactctcccaccttccctgttgagtccttgatccaagcacacagagccctcctcgggatctctctgatcttcctccctctgcacctgtaccacaatctcccccagtcccagggtctcaggtgctctgtgatcaggagtagccttatagaccagtaacagaaatggctttaccatctccagatttttcccaatcagacatccacaagtcaagcaaacctttgtgtcactaatagcagctgccttccatggcataacctcaatgcttatcatgtctacccagactgtcttctattcctgctgctcagagtccccctcccaagaagggaggataagagagaggaaagaaaggggaagggtggaaagcttttcctgcctacttagatctgattaagtgtcttgcttcaaatcttttatggctccttattaccctaggataaagtccaaatcttcagccagcctccaaacagcctttccagccttagccctcacatgttttcccctgatatacctatatcgagttttatgtatacagtttcccccatttgaaacattctccttctaccattttctccctggcaaacttctactcatgctccaaggaccatctcagatgccccctcctctaggaagcctttcatgatttccctgaccagaaacaactgttctctcctctgtgtcttcaggccactctccacaggtctattattttggaatataagcatgtgactgactccccctttccctcaggccatctccctgggagtggggaggagactgggctcctctttgtcctggggatcggctacctaaatgccctgaagctctgccattgtacctggcttccagagccagctccacatccacttggagaaagagaatccacaaccaaaaaccgaaatgatagccacaagaatggacacctttttggatctaaattgagaatcacatggagatgtatgtcatccaactcaaacctggtcatccatctggctggacatgaagaaggtcaatgttaatcacagacctcagagcaagaggcaggagccgcagatgtcatctgctccaaactcactttcattgtcctcttttatttaccttcaccattactttttatatttataaaagaaatatcctaatccttaaaaaatcaaagattcaaaagattaaaaactaaaaactaatggtcaccccacctccaatgtccacatgtcaatttacatgtaaatttgcttataagtgtgcatacacttagaatttttaaaaagcgtaaatgaaatcatgctgtaaatattgctcatcctttttgttaagaagaaacaaaaaatacaatatggatatctttctgtgtcaacagcatacacagttttaccttgttcattttattgttgttgctgtagcagattttacatttagcacacaatccggtttaaattcaggcactgggctgaatacgaataacatagaaataactaaaatattgttcacaagacttttgtttttactgataatttttgaatgagattatttttctttgtatacattttactgaattataacacaaatcctttaaaaagcacaaatcttaaaaacacaactggatgcattttgacaaagtaaatgtacccgtgtgaccaaaactcagatcgggaacagaacatgaccagattctgaagccactttaggccactttccggtactcactctctacctcccgacccttccaccccacccagtgggaaccgttcccctgcctgtaacagcatggctcagttttgcctgttgaacttgatacatttggactcaaacagcaggcacttgtattagtcagctcaggctgccatgacaacagactggtggcttaaatgacagaaatgtattttctcaccatttggatggctgga

SEQ ID NO: 316375 - DNA, 4001 bp, Homo sapiens
taacctggcagcctgagcagatgttcccaaatatttaacatctccctgtaaataaaaagacagttttatggtctgcagctaggtgaggaagattgaggaccggaaagtcaaacattcgggctagcctaaaagaggtggccgctggagacccgaagagttacgaggttcaaaggtcagcgtggacacgagaccacagaccacgaggagctttcagcagatctacagtttccttaactatccacctactcacagcacccagctggtcctcgtaaggcaaatgggacttacgactttagactcggtgtgatttctgatacactagcagtcaccacgttattttcatccctacccccacacactgtttttaaacattacctttcaacagcaacctcttctccccctcctgctcctccccactgtccccgccaaccctcgctactgaaaaatcctaaaagaaggtgctttgggtttgtttttggtttctgggcgtcgctttttataggttttcttttaagccaaaataacagcacacaagaaagaggcttgagattgccgggatctccggagccggcggcctcaaaatgacaagttgcttctcccttatcttgaaaattaacagcagcccaaacactgcaatttactcaccgtcctcctttctcctaaactgcctcggagcttgttttgttaggtctagttccattgtggagggaaaaagggtttctcgaaaaactttatacggtaagagaccagaaccttccagacccctcaaccctcctcgcgtacagacccttttacaagaaaacaatagtgaacgaggagctggacactcctcttggcttcccaattgcacaacctcgccggcgattcgacaaaagagggtcccagagcagattctctcggcccccacggctcctgggcttacccgcgaggctgcgcgtccctcccgcccttcactggggctccaggatccccgggtgccctctcggcggtggctgcggcgcacgccggctggctcgcgggtcccagcgcccatggtccctttacgcctccgcacgccacctccttggtgctggcaggatatgtggaggggcaaacagcgctccgtgtccccacccccaaccctgagcctcagaggctgcaaagccggagggtcggggcagcacagaccccaggccgcccggaccccggcccagaccggtcttcccgcacccccaatttccctcacccgggcagtgcaaacccgcagcgaagccggccggcaagagtgacccgccgaggcccaggagcgacgaccgcagaggcgcaccgggctccgagacctgaggggccgctgctccagccggctgctgcctctctcgcggcgcctgccacatcgggccgcagaagcccgaggccggcagaaaccaaaggaaggtggcgcgggccaggggcggcgcgggcacgattccttccccgcggatctggcgggggagcagaggagggagcagccctgcccggagtctcaggctcccgccagccccaatcccgggcgactgcgccgagcgcctccggagtcgcgggaagctcctcctgctccgcggctggcgccagttgcacggtggccgcccccaaattcgaggaggaaggtgcaaagtggtgggaggctgcgggtctcccggagggtgaggcgttggggaccaggcgggagcacagccgaacccctacctttcgggcggggcggacaccagccgcgcgccctcgccgggcgccgggaccggaaaatcaccgcgaagggagggacgaggaaaggcggcgggtggcttcaggacaaggtaggaggatcgatttccacagccaagaagacactcccatcccgccctggtttgtttggaaagctgcaggagctaaagtgaggggtggccgggtactccccttccccgcccggctggcaggcggcagaagtaaacactgaggcttgtggcgccgcggactgactgtgacacaaggctcagcagaaggtttggtccctatcagaaggggaggagtgttcagagagctcctgaattccggggctctgcccttcaagggcaaatgtgttcgtactttttatcttttgaaggagataaattactttagggagaacgaaggtggaacgtgctgtttgcgttttcttttctctccataggcaaaaccctacgttattaatgtcctcttacttggatggctctgaatactttttaaagtgtgtttgtcaaataattccttgtctagaaacattcaagtcatagctccaacctttgggccctgagcagtgtaatcacgtgccatcaattgaccccagagagaagacccacggacttggatgtaattcaaagttggcaatgtgtcacgaactggaacaaagtccttcatctgtgatgggctttctggtatttgtccttttttttttttttttttttgagacagaatcttgctttgtcacccaggctggggtacaggggcatgatcttggctcactgcaacctctgcctcccaggctcaagcgactctcctgcctcagcctcccgagtagctgggattacaggctgggattaccactcccagctaatttttgtatttttagtagagatgaggtttcattatgttggccaggctggtttcgaactcctgacctcaaatgatccgctcgcctccacctgccaaagtgctctggtatttgtcttaattgtaataacagccctaggaggtatcatttgttgttttcccaaccttactttaaaaaaaaaatggccgggcgccgtggctcacacctgtaatcccagcactttcgaaggccgaggcgggcggatcacgaggtccggagttccagatcagcctgaccaacgtggtgaagccccgtctctcctaaaaatacaaaaattagccgggcatggtggtgcgcgcctgtaatctcagctactcaggaagctggggcagaagaatcgcttgaacccagtgagctgagatggcgccactgcactccagcttgggcgacacagcgagcctctgtctcaaaacaaacaaacaaacaaacaaacaaacaaaaaactcaatgggttcagataattcatattctttgccctttctacagattgcctttgacataacccacacagattttgtaattttaaacgtggctcttgagacatcaggatagtgaaagagttttagggaatttgtctatctgaactaattggtgttgaggtttactttgctcttttaatttctcctgggttcttcactgaccccttgttcatgatcttaaaaactaaaactgtatttcacctcatccactctggccttctggacttcttgaatctgcaaagcagtgtgctaaggagagaggctatctgctgttctgaggtgacgtttgtatttcatatttggtagtggccagtagtgactactgttgaccccaacctagttcaaaagctacctcttctgctgacctgctgtgtgactttgggcaagtggcattaccacagtgggcttcattttttgtcaggtgtaaagtgagataatacagctagtcttgaagggtgattaggattaaaacagtctctgttgtaaagaaggcttggcacagtgcttgcccccaaaaccatcaattcaggaagtaaaatgttgactttaaaaataacgctaaaaatattaactaccagtcattgcccaccatgagtcagccacccaccatgcattgtatctgttcctctcactcaccctgcaagccagtcatggtagaaaggaaggaacagagtcaggtggtctagggctgtgctgcctacattggagctgtgactcaaaggaaagcacctgaggccaaaatcattgttctttctgagatatcactgctatgtaactctctgtgatgggaggggcttttgatcagtgtaacattaatttttaaaaattcaagatatattattgtatgggcacatgattgctattatataaatattttatattcctgtggaaactgacaa

SEQ ID NO: 316376 - DNA, 4001 bp, Homo sapiens
aaaggttttttattattattattgatatagggcataagaacaaactatctccaacaaatctactgaaatgtagtcaaaattgcagtcccattttactgcaccatgtaaacaacatatggtgcaatctgggactgagacattgtggaactatagtaaaaatacaattcaaggaaagcgacatcacaaggaatgaagatctcccctcccagtctacatgaccacaagaacagcttaggaaaccagaccaatgcaacactttctagaaaaattatcttcttataagcaaagttgccattatccaaagaccctctgtggaatttggccttactcagagacaataaactaaataacagtctaagggcatcgtttttcgcagatcttggtatgaaaagcgttcttagtgaaacaaaaaggaagcaacataaaccaacttgcaaatgtcaaatcggcatgctttcaaacggaaaataacctggcagcctgagcagatgttcccaaatatttaacatctccctgtaaataaaaagacagttttatggtctgcagctaggtgaggaagattgaggaccggaaagtcaaacattcgggctagcctaaaagaggtggccgctggagacccgaagagttacgaggttcaaaggtcagcgtggacacgagaccacagaccacgaggagctttcagcagatctacagtttccttaactatccacctactcacagcacccagctggtcctcgtaaggcaaatgggacttacgactttagactcggtgtgatttctgatacactagcagtcaccacgttattttcatccctacccccacacactgtttttaaacattacctttcaacagcaacctcttctccccctcctgctcctccccactgtccccgccaaccctcgctactgaaaaatcctaaaagaaggtgctttgggtttgtttttggtttctgggcgtcgctttttataggttttcttttaagccaaaataacagcacacaagaaagaggcttgagattgccgggatctccggagccggcggcctcaaaatgacaagttgcttctcccttatcttgaaaattaacagcagcccaaacactgcaatttactcaccgtcctcctttctcctaaactgcctcggagcttgttttgttaggtctagttccattgtggagggaaaaagggtttctcgaaaaactttatacggtaagagaccagaaccttccagacccctcaaccctcctcgcgtacagacccttttacaagaaaacaatagtgaacgaggagctggacactcctcttggcttcccaattgcacaacctcgccggcgattcgacaaaagagggtcccagagcagattctctcggcccccacggctcctgggcttacccgcgaggctgcgcgtccctcccgcccttcactggggctccaggatccccgggtgccctctcggcggtggctgcggcgcacgccggctggctcgcgggtcccagcgcccatggtccctttacgcctccgcacgccacctccttggtgctggcaggatatgtggaggggcaaacagcgctccgtgtccccacccccaaccctgagcctcagaggctgcaaagccggagggtcggggcagcacagaccccaggccgcccggaccccggcccagaccggtcttcccgcacccccaatttccctcacccgggcagtgcaaacccgcagcgaagccggccggcaagagtgacccgccgaggcccaggagcgacgaccgcagaggcgcaccgggctccgagacctgaggggccgctgctccagccggctgctgcctctctcgcggcgcctgccacatcgggccgcagaagcccgaggccggcagaaaccaaaggaaggtggcgcgggccaggggcggcgcgggcacgattccttccccgcggatctggcgggggagcagaggagggagcagccctgcccggagtctcaggctcccgccagccccaatcccgggcgactgcgccgagcgcctccggagtcgcgggaagctcctcctgctccgcggctggcgccagttgcacggtggccgcccccaaattcgaggaggaaggtgcaaagtggtgggaggctgcgggtctcccggagggtgaggcgttggggaccaggcgggagcacagccgaacccctacctttcgggcggggcggacaccagccgcgcgccctcgccgggcgccgggaccggaaaatcaccgcgaagggagggacgaggaaaggcggcgggtggcttcaggacaaggtaggaggatcgatttccacagccaagaagacactcccatcccgccctggtttgtttggaaagctgcaggagctaaagtgaggggtggccgggtactccccttccccgcccggctggcaggcggcagaagtaaacactgaggcttgtggcgccgcggactgactgtgacacaaggctcagcagaaggtttggtccctatcagaaggggaggagtgttcagagagctcctgaattccggggctctgcccttcaagggcaaatgtgttcgtactttttatcttttgaaggagataaattactttagggagaacgaaggtggaacgtgctgtttgcgttttcttttctctccataggcaaaaccctacgttattaatgtcctcttacttggatggctctgaatactttttaaagtgtgtttgtcaaataattccttgtctagaaacattcaagtcatagctccaacctttgggccctgagcagtgtaatcacgtgccatcaattgaccccagagagaagacccacggacttggatgtaattcaaagttggcaatgtgtcacgaactggaacaaagtccttcatctgtgatgggctttctggtatttgtccttttttttttttttttttttgagacagaatcttgctttgtcacccaggctggggtacaggggcatgatcttggctcactgcaacctctgcctcccaggctcaagcgactctcctgcctcagcctcccgagtagctgggattacaggctgggattaccactcccagctaatttttgtatttttagtagagatgaggtttcattatgttggccaggctggtttcgaactcctgacctcaaatgatccgctcgcctccacctgccaaagtgctctggtatttgtcttaattgtaataacagccctaggaggtatcatttgttgttttcccaaccttactttaaaaaaaaaatggccgggcgccgtggctcacacctgtaatcccagcactttcgaaggccgaggcgggcggatcacgaggtccggagttccagatcagcctgaccaacgtggtgaagccccgtctctcctaaaaatacaaaaattagccgggcatggtggtgcgcgcctgtaatctcagctactcaggaagctggggcagaagaatcgcttgaacccagtgagctgagatggcgccactgcactccagcttgggcgacacagcgagcctctgtctcaaaacaaacaaacaaacaaacaaacaaacaaaaaactcaatgggttcagataattcatattctttgccctttctacagattgcctttgacataacccacacagattttgtaattttaaacgtggctcttgagacatcaggatagtgaaagagttttagggaatttgtctatctgaactaattggtgttgaggtttactttgctcttttaatttctcctgggttcttcactgaccccttgttcatgatcttaaaaactaaaactgtatttcacctcatccactctggccttctggacttcttgaatctgcaaagcagtgtgctaaggagagaggctatctgctgttctgaggtgacgtttgtatttcatatttggtagtggccagtagtgactactgttgaccccaacctagttcaaaagctacctcttctgctgacctgctgtgtgactttgggcaagtggcattaccacagtgggcttcattttttgtcaggtgtaaagtg

SEQ ID NO: 316377 - DNA, 4001 bp, Homo sapiens
tttaagttttagggtacatgtgcacaacgtgcaggtttgttacatatgtatacatgtgccatgttggtgtgctgcacccattaactcatcatttagcattaggtatatctcctaatgctatccctccccgttccccccaccccacaacagtcccggtgtgtgatgttccccttcctgtgtccatgtgttctcactgttcaattcccacctatgagtgagaacatgtggtgtttggctttttgtccttgccatagtttgctgagaatgatagtttccagcttcatccatgtccctacaaaggacgtgaactcatcatttttcatggctgcatagtattccatggtgtatatgtgcacattttcctaatccagtctatcattgttggacatttgggttggttccaagctataggttcattctttcagcaaatgctgattgcctactgtgaaccagactgcagacacagcagtagagaagccagccagaaatccctaacccctccagcactcaccttatagtgaggataaataaagagtcaaacaacataaatccgtggtgctttgcaaggagataactgatatgcagacaattagagtagggaagagaaatagggacagcttggagtgggtgaggtggagatttaaatcagatgatcagagaaagcctcactgagaagaagacatttgagcaagggttggaaggaggtgtaaaccaaaaataaaatcctaagccccccactaaccaactgaatggactcctttttggccatgggcaccccagagaaacctgaaaaactgaattcccagccatgacagaaaggaggttacaccctcatcatacccctcccttttggggtttaggtacaagtgaccagcattaaggtaaaatagagattataagactgaccaaacagaccctttatgacaataagataccaaactatacacaatacctaaggccataaaaggcaaagattaagtcataccctagaaacaatacagtctcattaaatgggttttttaattaacccagtaaaatgtggcttactctccaacctgactctggtatagtatcacatgacagacagcagactctgaaggaaattaaaatattttgccccaaaatacatttctttgacatatttggaaaaggctgccagacagcctttggactgcaaagccatctttggtgggggaaacgtgcatctccagagaatcgatattaatgtctcttcccttgctaggcctttcccagatctaggagagattctaactgagagtcagacacccaaaggtctgagaagagacaatcactatctattcacccagagggctgctatctatgaggctccaaggacctaggcccccacaacctccttatcttactcaggcattccttcctactgacttcaagtcactagacaataacttgactctctcagctactgttagctaaagaatccctaaaacgcacttaagacttgtaaggcccctcagccctcccctaaccctctaccccccaagtccctgtgtagggaaaactctctgtagccatctttcctctgctctcacaccacaacaatcaacacagaagatgacttatgtgaccatatgtgtgggggtcccaccccaacaccaagcagcgacaccagcttggtgtcctctaattcagttccaacactatctacctggaaatagtgtcagatcctacagattgagggcttagtgtccaagacatcccccctccaccagtcacaagtccaggcctccagaacttctttctgaccaaccagcttccattggggttcccctctccgtgggttcaattaatttgctggagcggctcacagaactcagggaaacaccctacttacatttactggtttatcatcaaggatgctgcagaggatacagatgaagagatgtgtagagcaaggtatgggagaagggatgcagagcttccacgccctccctggttgtgccgccctacaggaacctcctcctattaagctatcagaaagttcacccaaccctgtcctcttgggtttttatagaagcttccttgacgtcagcatttcttcccccagggcatagggtaggaacctctcatgggaaggtttttttttttttttttttttgagacagagtctcgctctgtcgcccaggttggagtgcagtagcatgatcttgattcactgcaacctctgcctcccgggttcaagcaattcttcctgcctcagcctcccgagtagctgggattacaggcgcccaccatcacacccggctaatttttctatttttagtagagacggggtttcaccatgttggtcaggctggtctcgaactcctgacttcaggtgatccacccacctcggcctcccaaagtgctgggattacaggcatgaaccactatgcctggcctcatgggagggttgtaaggcccacagtcaggccagaaaacataaaaaccttgccttggggcaggtgaaaggacggcaggagagagactgtttcttagggcctgtccctgaagtctaaaaagcccagcattctagcaagactgtagcaagggctatggggctatgcgccaggaaacatgcatggaaaccaacacatagtccaggcatgatggctcacgcctgtattcccagcactttgggaggccaaggcaggtggatcacgaggtcaggagatcgagaccatcctggccaacatggtgaaatcccatctctactaaaaatacaaaaattagccgggcgtggtggcatgctcctgtaatcccagctactcaggaggctgaggcaggagaatcacttgaacccaggaggcagaggctcagtgggcagagatcacgccattgcactccagcctgggtgacagagcgagactccatctcaaaaaaaaacaaaaaaaaaaaccaccaatacatatatcctaacaccgcaccctcccccactttgagatgtctcacattttttggacagaactaccagttaccttccatgtactgatttccagatatccttgcctgtaatgcctgtctccctaaaatgtataaaaccagactatggcccaactgcctcagggccactcactcaaggcttcttgggtttgtgttttctctaagctacagtaactcatattgcctcaggataaacttcttgaaaatattttacagaatttggtttttctgttaacagagatgaaggaggctaccatgcagatttctgagaaaagagggttgcaagtagagggaacagcaaaatacctacacaggggcagccagataatgtggcgccttacacaggtgtaggggttttggctttcatctgattaagactttgccgatgtatgtttcaaaggcatcaccggatgctgccttaagaatcaactgtaatgaacagcaggtcttatagatgttaccaaatttaattcttaccaccaccctgtggggtggggtattaacaatcctcttttttaaataaagaaattgaaactcagagagtttaagtcatttgctcaagatgtcactgtaaatggtgaaaccacggtgtgttttgttttttgtttgtttgtttgtttttgagacagagtctcgctctgttaccaggctggagtgaagcagtgcaatctcggctcactgcaacctccacctcccaggttcaagcaattctctgcctcagcctcccgagtagctgggattacaggcacccgccaccacgcccggctaatttttgtatttttagtagagacgtggtttcaccatcttggccaggctggtcttgaattcctgacctcgtgatccacccgcctcagcctgtcaaagtgctgggattacaggcataagccaccatgcccggctgaccagattattctaaccaacaaactggtagtgctcttcatcctatgtccctctactcaggcccttccaagggctactgcgagcctctctgctttatcacaccaactacagttgctaatcactgtattgaccttctggtg

SEQ ID NO: 316378 - DNA, 4001 bp, Homo sapiens
aaaggcttgaaggagagtaaggaattactaaatctattttttctcaacagaataaagaattcttgaaagggataatggaagggtgcagctttctatttgaattactctttgtttcaccctattctgcctaaggccactgccttttaggccaatcacagaatcccggttttgcctttagttgcccgctgagcgatgcagtgggagttgggagacccacactcaagtgttctctctgtggcccgtttcacccggtttaaacttggacaagtggctgaactctccggcctcagcttcctgcctgtaaaatgagaaggctccctagatgctctctagaccttttcaataacagcggaataggattggaggctctccagttccccccccggggacaggttaatcttcagccacactagccaaggtgaggcagcagcccgcccgctcagcaggcacacactggggcggcggcgcctccattcctgctcacactgcacgcccacaacctgcaccaacaccatcgcctcagagaccaattcaccgcgaaaccatctccccgctgcagatcgtgtccgattaacatctgcaaagctgagctgagcatatgtaagcaaagaaaaagcaaaacaaacaagagttctctttttccggacctcggaatttctttcaaataaactcagaactgaaaattgtacgtccccagctagaatacgaggtctcggctggccttgcttgcgaaaatgcattaacaagccaaaaggggctagtgacatctggggtgtctgggcacacggacacgggcctcagaggcaaagagcaagaccgcactgggcgactcgtacattcttcccgcaggctgaggaggcgaccaaaatatccccacagaggcaatcgccggagtgcggggacaatagtgcacccagcactctctttttttgaggggcacccttagacccttaacccaacccacatctctaagagacctccaggaggtgaaggtgaggggtggtccacttcacccaaaagaatgcgccacggccggggaccgactcagcctggagtaacctttttgtagctgctttcttgttttggtttccctttttaagtctggcagtttagtctgatgcccaagcggtaccttttaaatgtctctctcgccctcttccagcaagtggcgcctctagagccactccctcccccgaggctgagacaatggcccggcaccgcagggcggcccctaagggtatgcagtgcgtccagctctccgggcagggcgcacgtgcgtttgttatggtgcctgtgccccctccgctgccgcgggcctcaatttgtcgatccgtaaacccagactctgcaaggcgcaatgcccccacgccaccccaccccatactgacggtgccgtggagaaatccgtgttccccggggctgtgcgcacgtgggtttgttgtggatccgcaggctcgcggagccagagagaagccagggtggccctttggccctgacaaaaatgcacacacccccaaccaaaaggcggccagccccggagccaaggcagctgaggcggagctggagagagattccctgcgccctacgcgcgccgcgggccccgcgcctccgctatcctcccgcgcccctttgcatcacactcctcccgggatagcccgggccgcgccgccgcccaccgcaccccctactcactcgctgcactctcggccgcggaggctgcggttgctcagcacgctcggtggcggccgcccgctccgcgcccacgccggtcggtatcggctccctttgttaacgccgggcagtgccccaggcgtcttccccagcccggccctgcccaggactcccctcccccaggtgactccagaaaacgcgctcggcaagggcaggatcgcccgggagctggggaccccactagggagtctcgaaagaggggtccgctggggaagaacgggggacagaagacgcacagtggaagggactggagaaggaaggaagaagagcgcggcggaggggcgggaaggaagcgagtcgcctccgtatgcaaatagagttgcgaagactgggtcggtctccgcccccactccacctctcgccaccggccacaccgcgccccaaaccggcctggaggtcgctagcgagcgggcttggggttaaagactcttgatgaaggcactgggtgatgctagaatcctgcctgctctcaaggagggtggatcgagggccgagtgggaggggccacgcggctgcgcaaggacccctaaatgcctcttccccgcttggccgcgaggggtcaatccagcagtgtccggcttttggtcctaacatgcgggtgctgtacacccggtctctgctaccggctgactgcgagaccctgaggaagtcgcttaacctctccgaagactcgtgttgctcttatctagaataggaaagaacaaaatctttcactgcgtttggcattaacctcctaacattgaggcatgactcctactgggcgctctcaaatggcaaatacagaaggagaggagcgtcctcgaacccctgcacccagaggcttccaccccaagctgcaggctgaaagactgaagcctcagcctggatggtgaagggagcgaggttctttcttttcacccggacgacggtggggctgctggggaaggaaagaggattaaccaagctgcgtactgaccatccccgatagccccaaggcgatttccctaagaaagaaaaactgcccaacaggagggcggaaggggcctttaaggcctccagtccagcctcccatagcccaaagagaggatgtgactaccagaggcaatagtcatatcccagttgtctactgagtgcacactaggcaccaggctgtgtgctgggtgggaaaggggaaaggaaggagatactggaaggtttgggggtcctctgggaacacaaagtccagtgcacacttaaagtgcctgaagcccaggcccagagttctgtctccaaatgaggtgcctaccccacatcaccaaccttggaaagggaagttacatccgcaccctgtccccagcacccttcttccaaacactgcttcctccctgtcctgatcctggctcccttctgctgatactgtcattcccttccctgctgcccctgaggcatttttgctcagtacaaagagctccaattgaagggagtgccagccagagtgaattcaaatctttatgaccaactcgctgtgccttcttgggtgagttccacatcctgtgagcctccctttcctcttctgcaaaatggagatattaaggaaagcgttgttttcaggatcctgtgaaatgacctacgtgaaacacgtagcttagtgtttggcatatagaaggtgctcctgacagtaaaatgtatgtatgcgtgaatgaatagaagcagccaagttcagaagactatttctggaaggatgctacattgaagattttaggccctattcgaaaaagggaaaaaaaaaaaggaggctattaaaagattctgtgcagtagcatgacatgcatctttgtattttacaaggattcctctggcaccacactggaaaatagatggcagaagcagagaatgcaagagactagattggaagctgacatcaatggagatataataagagcctgaactgtgtcagtgactgtaacaagacagaagaaaaggacatctaaataatagctaccatttggagatctgacatggtttggctctgtgtccccacccaaaaatctcatcttgaattgtaatccacatgtgtcaggggagggacctcctgggaggtgattggatcgtggggggcggtttcccccatgatgtttttgtgatagggagctctcacgggatctggttgtttgataagtgtctggcatttcccctgcattctctctctcacctgccgccatgtaagatgtgccctgcttccccttcaccttccaccatgattataagtttcctgaggcctccccagccatatggaactgtgagtcaattaa

SEQ ID NO: 316379 - DNA, 4001 bp, Homo sapiens
taataccgaatacaatgtaaatgctatgtacatagaaaagtctgaacatggggttgggcacggtggctcacacctgtaatcccagcactttgggaggctgaggcaggtggattacctgaggtcaggagttacagaccagcctggtcaacatggtgaaactaaaaattcaaaaattagctgggtgtggtggcgggcgcctgtaatcccagttctcgggaggctgaggcaggagaatcgcttgaacctgggaggtggagatttcactgagccgagatcacgccactgccctccagcctgggctacagagcgagactccacctcaaaagaaaaaaagtctgaacatgttcagtagagatgccattttatttcctgaatattttcaatccagggttggttgaacccaagtacagggtgcacagatacagagggccaactgcacttacagtggctctcggctatgcagggtgctgggatagaggccacgtagctgtgttagagtggccagcactgctgcagccccatccacaaggagtggtcagagccataggtctctgacaaggaaaaaactcgaatctgaggcccctcactgacctctgtcctcactgcccagagcatgaggaggtggcggaggcctttgaaattcccttgcatggtacacagggggaaactgagttaaggggagggcaggagcttacctgcagggctctcagcacagccctggaacccttggctcttcccccatcactgtcgccttctcagcctcatatcttcctgtccccagccctggcctggtcctgaagctggtgaggcccttctccctgctgcctctctgagggaccacaggcatccaagagaaagcgcctgatggtggcagggggcctaggcccctggctggactgcctgtgggatcctgggcaagtcctccccgctctggactttagtctggccatctgtgccatggggatagtggttgctgctccaggaggcagacacgctcagcctcacaggagagagactacccccatcaccagggtgggaggctcttccagaagctcccagaggcccctaccatggggcctgagcagacctgcagccaggagcctgtcacagggacctgaccgaggggctggctgtggctgcataccaggaccctgtctgctcgccagcacacacggatggccatcacaggcaggggtttggagcatggctttagagtgggaatggcctgtccccatcatcctagggcttcgggttcctcacgaggaggacaggaggagttgccccgaggctgtgaggattcaaggggacctgcccggggctgtggctgctctgtggcagctctgaggctgaagtgtgtccttgccagctgctcataaccccggacactaagggtgagtgactcattctgcttcccggtactcttggggctggacacaggcacacacatgtgcacacacttgccccacgtgaatctgtagtcctcgggggttggaggtgatcacatcttcaacccccaggtgagggccacataagacctgggcctccgtctgggccagaagggcaggacaggcctgcctctgtacacttcagctgcacgctggggagccccggccccgcatagtcagaggagggtgggctgacacacccctgaaccctgggtggctggacgcagacctcagactggggaggtgggcacaatagccagcccccaggcctgctaagaggccagacaggcgccagctgcggtttctccccaggcccctgcccctccatgtcagtccctccctgttcccaccgctggccggcagggcccagacgccgtgtgcccctgcgactggctcacacttacctgccccctgacgaagctgaagcctgccaggcagaaggccaggaggcagagtgggaggaggccccggggccccgccatggctggtgggcacgctgtccaggacagagtcggggcgtagggaatgagctctaggaggcaggcacagcacaggcaggcgggacggggcgggcagtggccttaaaagcagcccggaggccccgccagctcacccccacaggaacccgccaggatttcctcctgcatatcagcagcctgcaggcggaagggaaggtgctggccactgaccccccatgggcggcctgagccctgctcggggcttcccggctgggaccctcctggcatcacaacctggaagtccaggccaccatgagccccgggacctgggctctatcagaggttctgaagcaaatccaaaggcacacgtgaacgagtcccccgcctgcgagcccagtgtgtttcattcagaggctcctggggtgctggtcggcggaaggcagggcagcccctgaatgggtctgtctgttcctgcctccacctttccaactccagggcgctcatggggctctgactcgctacaggcaccctgctagcccaccagacccacatcccctcactagccccagccactcctgagccgctggtcctgcccgccaacccccatccaccctccctgcctccctatctgccctccactcagcagcccatgctcagccagcttgctgcagcacctccaaacccctctccagctggctggtctctctgaactctccccagacaggtctgctccagccgcgcaggcctctctgctccttcagtgagctctcccggcatgtgctgctaccctagattgtcacactctggctccttctcacaggtggtctcaggtcaagggccaccacttcagagcgcctccctggtctcagcctgcaggtggccctgcacctggttcacctggcagcaccagccaccagctgacattggcttgtttcatttgtctcccctggaacattggctgtggaagagtaggggcgctgtctggctgattcgcacagtggatgctcaatacacgtgtgcagaaggaataaatgaatggaggtggctacttttatgatccctctgttactggtggggaaactgaggctcagaggggctgggtagcttgtctgaggtaatcagttttcatatccaatcccagggctactgtctgaagccaccactgcctgcacagccagcacccccaagaggtgcagtgggcccaggctgagggcctctgcgtgccagggctgcacgtggtgggccttgcctccagttgtcactacccccaactgcagacggcgtaacagttggggagacaggagtgggccagagcccggtggccatctgtaaatgctttggtaaaggccaggttggggaaagtttctcctccccagcacacctccactcccatcagtttggaggggccttcaggcaggcctgagatctggctgggatgggggttgcaaggggaaaccctccccacattccccacacccacagtcttcctgggggtgaagggtcctccaggcaggacccccactctgctggcaccaagggaaacgggggaacagaagcaggcctgggacccaggctggccacgccacccacctctccacagccctgcctggcctggctgccccaaggtcctggggactgaggctcctggctgggccaggatgagttatgtggggctcataggccctgctctggcagcaggaatggggttggggaagagtgtggcatggggttggctaccaaaatcccaggtcctacctcagcaggctccctgaagcaaccctcagggaggggcccatgagcctcatgtttcagggacatgaagacagacacagatgggtatgtgcccctccctccactgtccaccacctgggtccacctccccacagacctcccctgctgccattcaagggccaccttggtgagatgccccggcccccaccagccacctcagactctgggatctctctgtcctcctcgcccctcccccactctcaacaggggttgtgaaacaggtggggttgggcccaggggtgactgacacataagacctgcaggacagcctgaagagggtggcatgccccgcacccaggcagagggg

SEQ ID NO: 316380 - DNA, 4001 bp, Homo sapiens
taatttgtacaaaaccataagccagataaattggtggataattatgggcattacatatgtggcttttgctctgccaaataatttccattaggacatctataaatagcaaatccatataatgcatttgaaccatgccactgtttgcccaaatgctaagccctttccagaacacgcctactgcagagcaacaggccaattcaaaaagttcaatactagttttactcttgagttcagctacattcatttatagaattctagctttcctctaaaatggccactaacctatatcactctggggactgatgttcaatgggaggcaatgatacccagaaactttttgactgaggagaggtagtgcatgtgtatgggttatcagattgctttggagtggatcatttgagatgagatagattccatctctttatctcaggaaggaaaaggataaacatgattgagtccttacagtataccaggtggacattagggcctctcatgtactcctcacaatgtctctggaagttggggctttttccctcatttccaaccgagttttagaaaagttgacacacataccccaggtctggcagccagtaagtaacaggaaaaaaataaaaataaataagatgtaaagctttcgggcttagattaccatcattgatggttaacttcagggggctgggaaatgtacagtgcccagtatcacaccaaatccccagagccactcaggctgtgattttcatcctcctgatcatatcaatggcttccagggatgcatgtgaagagagacaggatcgcagtcttccttgccccatctggcctgtccctatcctataaactggcaacccctttcctttgctggtatacacggactgcctcacattccccaaatgcctggggatcgcacaatgaaatcagaataaagagccaggagctctacacttaaaagaatccacataactacaaactccatcttaggatttccaccaccagctgagttgccatttggcattgcactgctagcagccacattttactctatcctcttccaagattttcaaacatgtgcctggcacccacgggagtttcagaggaagtgtaacagtgacaggagaactgctgcgggcttggttttttgtatacgtgttagtgtaactttcataaaagcaagtataggttcttagagtattaactttcacaagaggaacatcaactttcagacaaacgcaggcaaaccctttctttttctttttcttttttagtgagtagtatctgaaggtaggggtgatccctgttaagcaaaaggtctctgagacccttgggatacatacatgcttttctggcccagtactcaagcttttctggaagagtatccctcggctgtctccatccctcagccttcagaagccacctaatacctacctacacgtgctttggacacaagcaggttcaaagcacaaaaaaaaccaagctaccaccccgcaagaaatcgatctctgaacccggagccaccatgaattgcgtgtgtgaatgtgtgggcgggaaggctgggtccacagggacgtggtccagcatcgtgagcagcgggtcctaccggacgttcaagtcctacagccctgggctaactagcaagtctcagacccccacgcccgtgctagataggaggagagacaaagctggaccgacaggagaggagagtgagtttgtgttctcttgggggcaagcgtgctcggtaccttggattcctggctgctggtggatgcaggagagggcggttgctcggcgcccaccgcctccttgggcagcccgtccacgccgtcctcgcgggggctgctcggagggatcatcgtggccgcgcgggaacggtgttgggctcccggaggaacagcgaggcttctgtcctgcgcgccctgcccgccgcgcgccaggctgctcagctccgggtcctggggactcccatcctcgccgaggcgccgacgtgccctcctccagcctcgctccctctccctccccgccctgcccacctccccggcacttccgcgggcgtggaggagagtgcgccctgccccgccccgccgcgcccgcggccacctcgccggcgacctcacagtcgtgactgccactcggcagcgggcgagcgggcttctgctcgcccgcaggaggaggaaggaggcggggaggcagctccagggcggggctgcgcggccagcgcctggagtagtgagggcaggcagggggcagcgccctggaaagggctgggggaaggctgggcgcacgccggcactgggtgggggtgattcttcagagaggatgctgaaaattcagacccaaaccccaaagaatagaaaatctgtgaatgatatagccagaaagagccacttgcaacaactccctcattcctcaccccaacgaatagtgactgagacagtgacttagctaagctatttatagggttcagtgacagagagcaggggtcggagtgggggtcccctgactcacgggcactgcgttttctccattcagctttgatctaaagcagagagataatgcagtgtgtatatggacacctgttcctcgtttgttgtgcacttattgtactaaaccctttctttttaccttatttaatcctcccagctactctatgcgtctagggattatcacttccattttatagatgaggaagttgaggctgtaggaagactgagtaatttgctttaagtcactaaactataattggtgaaactggaattcgaacacatttgggcttcaaaatccatgcatttccgactgtggagcctcaaatctaggccaggtcttggctgaagagcaattggatgttgcagtatagcaagagttgaggactgttcacagaggggcaaaccagcctgccttactaaatcttttggaaacataggaatagccccactgaataaagatacagagggtccagtttcttttgaagacaacctcagtgtgcagggaaaagaaacacacctagatatttaaaagcctcttttcccccattaatacaaaataccctcaattttttaaaacaaaattgcaaacttctgttcagatttttaaaattagctgtagatgtttgcaagaacagcttcatggatgtgcaacctgtgcagtcacacagggccccgcgctgatgctgccatcttgaaattcggtaaaaatatttaacaagagatcacattttcattttgtacttgaccctgcaaattatgtgtttggtcctgcatccatgccctagctcatgtcttttagaataaacttgctcttactctttccatcccagatgtcaattgaaagctactgttcaatgtgtcagcctcttactcagcatttagctttcaaaatgctctaaattttctggtgaccctcagtacggggccagattggctagcccaaatggcttcagctttttccttctcacaacacaatgcctgagtgttcgatagagacagaattctagtagccaaagtcacaaacacaatgacaggagcagccatatcaacacatttttatcaagcatctattctgtatcagaattgtgccagaaactaatgatacagcagagagaaaacacagattaagtctgttttcctggaatttaagtctagtgggagagacagcaattaattaaatcacacacacatttaaaaaaaaactatgataagggaaagtacaagactttgatgagtgtgtacaaatgaagcctgagctagcatggggccagacgagggttttcttaggaaacaaaactcccagggtctactggcaattccagtcttggtgagcaagcatgtcatggcttagaacaataaatttttcatcctttttttcttttggattttctttttttaagaattgaagatgtcatccttacttttagtaagtgcttagctcaagttagcaacagtattagccaatagtatatgtttaaatgttgtcccttgaaggaaatttagagaagctagtacctccttcctttc

SEQ ID NO: 316381 - DNA, 4001 bp, Homo sapiens
gacccactccttctcccctacaccatagtgcctttaaggctttaaaagagccaatcaaatctacagtcattttattagtctcttcaaaggaggcaatcctagtaacacaacaaacttccatattttgcatctatttaaatattccttagccttatcagaacatcgaaactgaagtggatacagaaaaatttccactcaaaagcagttcgtttgtgaaaatgaccactggtagatcacttgaattaatttagtttactcgaagtacgttttaaatatgtaaaggaaaatgcgtggcaaaacacctgtagatcttctacaactttatttgggtaacaatttgtcttataagtattcttaatcatcaaaagcaaggaaataacatttctgcttctttccattccatatttccctacttggttaaaatttttcagtctgaattcctcatacattatgaatattagaacaaggtacgttacattaccatacaataaacaagttatttttattttcactcttctgtatatttccctaagtgcttcaccatcggaatgtgcaattttcttaaaacacgaggaaaactaaaatgtagagtcattcaaattccagataagttacaaatcacacaactttgtgccaattcagatactttctcaagtaaacactatttttgcgaagatgcaagtctttctagtcagaatcacgagaataaactctatccatcttaacaccaactttaacagcaaataatttttttttatgacaaattgcgttttttttttttgttttttttttgtctgtaagtgtccaaaactatcctatgacttatactcccggagcacgattccctgcaatgtgaagagaatcgacagataacatttcaaatgtgggtagatgggggtgacgtgacaatcctaaaacctgaaaatttcttagtacccataccatacaagaagaacccagttcggaccctgcaaacggggctcaggtccaactccaagcactctagtttcccaccccgcccccacctcgagaaaggagggaaaacaacttttattggcctcgtctctcaggggactggcaaactagcggggcagtgcttaggcctggacacgtttcacaaggaggcccccgtcgggggctgagagggcagatagctggaaagcccagcattgatgcatctcccccagccgccaccccgctgccccaccccgccaacaagaagcctgggccagccgccccgccgagcgaccccccaggcccctccgctgaaatgaactcgttgtcatgtgacgccgccgccgctaaaacaccgcagaaacgcaggtcggcaggcggcggaaggcattcgcgccagcccgcgtcggcccggccccgctgggcgcgggcgactcccgagagcccgggcgggggggggcggagggcgggcttggcggcgggcccgagcgcgccacaaaggcttccgcgcctgtcgccgtagtgcccgggcgggcgggggcaaaatttttggtgcccgcgggaggggtggcaagcgacgaagacgccggggtgcccaccgcgcccacagacgtctctccgggcactcggacggcccacgaccgccgcaccccgcacaggcccgcgcggcctccctcccccgcacggggcccgcgcccggcccgcccgctcgccgctcgcgctctctcgctctcgcccggcctccatcttggatcggcgcttccagcccccgcgccgctgccgccgcattccccctctttcccgccccccgccgccgtcgccgccgcccgcactcacctcagctgcccatccgggcgccgccgaccatcgacctagtttccccccaaaagtctccggtgtgttattcccgatgtgggggggttgttacggggtggtcgccgggggttcgggagcgggggccgcgccttcaacggagctgcaatcctaacccgccatctggtggcattttccacacgccaatggcgccgctgcagacttgggtccggaccgccctctgctggccgcggtgctcactgccttgctgacgggacgggcctgcccggaaaggggagggagctgaggcgcgagctaggggccgcggcaggggcgcgcgcaaacgctttccagtggggattgcgcgcacgcgcaccagcggggcgggaaacgtggccgctgcgtggcggccccgcccccacacggagcgctcgcgcagttcagccaatcgcgagaggcgtaggcttctggataagggcgctgtggacggttcttgggccgcccgcggctggcggaaggacggccacggtggcgcctgcgcgtccggctcgccgagttgccgcccgccatttttggagcttcttggagatctaggcaggaacccgccccgggttccttcaccgaggctcctccctaggtctcagggccggcgctttcctctgttcccgcccggctcctgctgcccccatccgcagctctcgagacgccctgcggaaacccgagggtgaggccgcgcagatccctgctcctacttggatttagcaagggcctcagagcttagcattgtattcgcgatttacggctgacaagcgctttcaccaggcaagagtgaaaaggtttcaaaaggactattggggacttccctcgccattaatctagacgaaacaccgccggccctaggccgattggcgtcatcctgcctctgtaaagcacatctttccgtggtgtcggctttgcataaggcggcagcattggctagtttgtgagaggagaatataactagactgagaagatagactcagctgtgaaagtggatttctccctccacaacctaggactactttcagtagctctgaaatacacatgagaatcttagccttctagatgccaaaagagaaataatcagtaaggtgaaatcattaacaaactatttatgtttaacgtcgcctcttccctgatctccacctgcccgtccgtggccatggatccctacctttcacctgcttacaacttttcaccacaaaagtgaatccttactctcctggatcattagccccatatatgactaacttctctatcgctatagccaactctatttcagtatggaatcgctcaactactttatagtcttaagggcctgtctccagtaggttacccctatttgtgttttctctctcaagggtttgcaagatgtgtggcttttcgctggaggaagtcataactgaccagattggatatgaattcgtgactggactcctacttataattttcttgcgttttcttctaatctctggctgatctcctattttccacaaagactgtttcaagctttccatgttgttaaagatgccagtcccagtccatactaatagataaattcatccagtttcctgggctcagagctatgggactccaattccggtttgaccttgcctccattataaaatatctgtgaccacctcctgttcgtgatcccaaaacttctaaccaaattaacccagaacccttctctccaaagccactccctctgcctgaaactatgccatcccttcccaccttctccttccaccactactttcctagcgccttataatgtaaatatgttcttatccactgtcttcttcctttctgtttctcagaagtttctgttgtcttggctgggtgcggtggctcacacctgtaataccagcacgttgtgaggcagaggcgggcagataacatgaggtcaggagttcgagactaccctggccaacatggtgaaaccctgtctctactaaaaatacaaacagccaggcgtgctggtgtgcgcctgtaatgccagctactcgggaggctgaggcaggagaatctctcgaacccgggaggtgaaggttgcagtgagccgagatcacgccactgcactccagcttgggcgataagagtgagactctgtctcaaaaaaaaaaagtttcttttgtcttttttttttttttaattcagtgatgttactccctccagttgctatgctatcaacg

SEQ ID NO: 316382 - DNA, 4001 bp, Homo sapiens
aactgtgaggaagtaagattaactcaaggttgacaggtcaataagataacactagtttaaaaggcatactctcagaggggaaaatcctaactcagggggaaaaatcctaactcgggttgggcaagttgcgaaaaaaaagttaaagcaatctttccatctagataattcacagaccaatgtagtgtctaagttagctagtgttgttaagagtggggtaatttcctaaaacattcaggtcagtcccttacaccatgtgcaacttcggtattacaatctaggactcccatcaccgtggtactgtttgctcttatccacaaaccttcctgcagaccaataaaggaactaatgcaatgctttcagatactgtgcataacacactaagggtgacagtggctaacagggtaaggatcttgttctaaaaagcaacccaagacgatagtgaaacagtaaggtgctgagtgcacttaagagctctgaaaaaaagccactctttaaaatacctaatgataaataaataagagtagctagctttcagatcactttcaggggtattatttccttccctccaacacgccattcactctccttttcccttctcgtatcatgagagcataaaaagaaacagtaaaagcgtaaaactgcaagggtgagcagccggggttccggcacatctggacccacctccagcggcaacagggcagcccccctggccgattccgtctgaactagcaaaaacgcgcccgcaaatatgaaagaacgcgaaagcagcgggcgaggagggcggggaatcgaccgacagtccgcggaggagctacctgccgcctcctggcgtggcgggtccggactcagcgaccaaagcgggctgcgagggactgcacccacactcccggcggctgcacccacactcccggcggctgcatccacactcctggcagtcttcacactagcccggccgagaatcaaggtttcgctcctggaccccgacgccccgcctcaggctgcacggggcaaacttcgcccacgggcagggggcgcgcccggagctccgggatccgcgccggcctcagccaggacgcgagcggggctccgcggcggcgcggggccaagtcgaggagagctgcggcgggcggaggagcgggtcccggttccccgcgggccacgggcgggggaggggcggcgaggcacttaccacgggtcgaactcgtggatgatgctttcgaagcggatgacggcgaagaggcgcgagctgaagccggcaagccaggccaggaagaggatggtgaaggagagaagcgactgccacccagccggctgcgacagccccccggacagccccgccggggccggcttcggcggcgccgcgccgcccgccgccttgtgcgcgcactgggccccgggcccgtggtggccgtgccggctgtttcccagggccatgaggccactccacggggacgagttgagggacgacttgtgcttgctctccggggccgagggctccgccatgttgtgccccggcggcgggtctagctctcctcctccgccgccgccgcctggtgcgaggggtgctgggcggggacccggaggaggaggaggaggaggaagaaaaaggaggagggaagagctctgcgcgctcccgccctcagcgccgcgaggccggcggactgggggtggaggaagcggcggcggggagtctccgcctcagcagcggccgcaatcgccgctctctcaacccagatggccccggcgccccactagccatccgtatccccagtgcagctgcggcggcggcggcgaaagccgacgggacgagggcgccaggaaagaagcagcagacggaggcggcaccacggctctgagaagcaatgacattccctctctagcccgccgcccgcccagccgaaaggagcagggggaggagccccctggagtccgggcggagctcaagcaacctctgactccgcctccggcccgacaggaactggcccctccgcctgtcacaaagcgacaggtccgttagggggcgggcccagaaccgctgcgcccaccaataggggcgcgagctggggcggagcttgacccaaccgtctccccctcccccccaccatcccggcctcgcgccgattcgcccggagtggccgagctgcgcggctacggcttcattgtcagttgaaagacgcggtttcgcgcgcctgtgcggtcggcgagaaagggtactaggcggctccgctaggttcatggagctgagctgggccgaggggcgggaactgcggagcggcctcggtcaaactcgtcttaaaggacgcggaaagcgccgcaccgaccagcaggacgctcgcgggctctccgcggtcgtgacttttaacccgctttgcgcggagccctcaccacgtgacggccgcgcaggcgcattatcctagccctcggcgcgtgggtcgggccgaggggttcagcagcccgtggcgctcctcggctggcgctgcgagtgagcccgcggcggcagtgacacagcctaccttgctcattgcccttcacgtcccgcctccggcttctgcggccgcgggaatccgagaatgtgagcaaagacaagttttccgacaccgaaaactcgttggaaccggcaagcgcgcccctagctccggcaggcaaaatgcgaccttctctcgccctttttcgtttgtactccgaattgcgaaagtactgtatgttcactggaaatatgggaaaatgcagaaatacattaacggctgcatacattccgtcgagtgagtgaaactaacttaccctggacgttaagctgtttccagttctcactttactaaataataatagaacgaaggttcttgtgcacgtctaccttgtatttttataattcctttcctttccccacttccctccttgtccgctaaaataaagtgctaccagataaactcagggcaaaatgagcttaaactaagtgaggtagtggggagactcgaattgctcttatataaaccccatagaaagtacggagctttcggcgtaatcggtgctcagtaaatacttgttcatgtcaattcacagctaattgtacattttattaggtaagtaacatctggatattaaagggcatattaatgtaaaactataaaggccctgaattattttcttaggtgatttaaatttttctctttaactacaaattgtgtttcaatattaatagaagtcttaaaatattagataaatgaaccctagttattttgaggtagctccttgaaagtaaggcaactccagctacccttttaacctgctaagtggttacgttttgtcttgtttccttaaaaaaaccataaatagtcttattaaggaaataatgaaaaggtttccagaaatagactttctcaccaacagtttaatagccgacatttattgaacgtacacattttaatgagaattaggataaaatattaactgcctctgttatacagagaaagatgacatgcttttcctcatagcccaaacggtacatgctgaaatgacagcagaggatttttgtctgtgttccctgaaccaaagttttatcagtctaaaataaaatttgtgtttttattttaatttgtttggatatttctattttattgtctttgtgtatctattccctagtaagttctacgttatcttcttttgcttcctgttttggctgtttaatggccataggcctgatctgaaaagtgacaaagtgaaatagtcccaaattgttgcttactagtcatgtagcattggacaagtcacctgcatgggttgccctttctgctcttaaagtcagttgttaatattaaaaaagcttatctgaaagcattttaggaaattgttaaggaacgtgcaaatacagggtagtggtaaaggtgaaaagccctacgaaaaccccttgatttttgaccttcatttattcactcattcattcagcaagtatatattgaactcctttatgccgaccactgtgagtgaactgggatgcatgggga

SEQ ID NO: 316383 - DNA, 4001 bp, Homo sapiens
acatgcaaggacaggattcatataagcataaaatatgaagctcatagttgtgaaatcatttaattgcttagactaggtgaaattgatgaaattactattttatgcagtctgttatgtaccttaaatttattatgttggaagagttatatacaaatatgaatcatcttttattatgtttaacttgcagcattgctatacagttttgaattttactagcaagaactgtatctgtgagcttaaacatgatatttaaaaaagaaagaacactaactcgtatgtatgataatcaacttggacaacttgttctgggaaatagaaaagtaaactggtgcgactcaaataaaaggttctctgccctattacagacactgaaaatccctagaaacagaaacatgagtaaaaattaccttgtacttttagaaatatgccctgggatagatacttagtgtatttatagatttttttaaagtaggccatttcttttcatagttactgtaatgattaaataaaacatttcaagaaatatgaccagtttttacccaagagaaaacagaatattctgttgcttttgtatatgaagtcaacttgccacatttttctagtgcaagtgaaagcagaggatcttattgtaatatattaacctctttggctactaaagtgagggccaaatagtagtttctaaaaactaaaaaaaaattgcaaattgcatatattgtctaattttgaagtatctgactttttttgcaatgtaaactttcaatgcttttttctacattttatttagtctaaataacttattgaattaacttgtataacaacattaagatcatttttgtttaaatatgatgtataatttttgaacttttatctgattcaagtaagctgtacatacataaaatgatttttatattacatttaaaactgcatagctgtgaagataatgtgttcgaggtattacgtggccaattctcaagtccacctttaaaatacatataaaagtcattattattttgatttgaaatggaatatttattaaattctaacatagtaacaattataactttgaaagtatctaacctatctacatatgttgtatttaaatgatgctgatttaaatttttcaaactatcaattaaatgctaacacttacgttaaatggtataacaagtatttttaatgtactagttgaaatattataaaggttagtgagtacttcgatattttctggtagccctttcacaagattattttctcattttttcaattttagaagattctagtaaacaacaatgaagcaattaagaccattatagcaaattatttcagatttttaaggttatacgtatgtgtcaaatttgggtataagctgcttttcagagtgaaatataaaaatgttctctaaagtaagcacattcatagtctgtctataaaagaaataattttagatctgtttttacatctgactttctagtattttttaaatgagagcttactttttaaaagacttaaaaattttttctttcctctaaagttgatttttattatcgtagtctattttcaagagctttatacccagatcccagtcagcatgtcagtaatatatgtgaacaaatcagctactggtaccccggtccaaatctgagcaaaacaagtaaccctcattatttgttgagtgatttttaaatgtaacagtgtaaccagatgtcagtctatggatacctcatattaaaaagtacagaaaagagtcattatttacctttctgttttcttccttttgttggttttccacctgcggtgttggagtcctgcctttgagagaatatctgaatatcatctcatgttttgaacaaattatctaaatctctgtcttatagggcacagactaatttctgtatagttttcatgttgttaatttgaaagccaaataatgaagtcaaataagagataaagttgtacgtttgctgttaatagcaagtgaaaatagattgcttacttcacacctggagaatctggttctgcctgttagacgcctattctttagattaaaggaagatcattttcattggagctagtcggtaacaggaagtcctcgttaaactgcctacgtagagtatttggcactggatctgcaaatttagtcctacattgtatatgtaatatattattccaagaaaatgggtttgtatttaaacaaaggttactttcttttctatagatatcaaaacttactaaaaatatggaattaaataggaatgaaaagaagcttggtgtaaaagctttttttgttccatttactttaaaatggttgaaatctgtcctattttaggaaatcccaaaagagcttagctcacaaaatcatagaatttcagaaggagaacatccaggaaagagctcatgtctgtaaaccattcatcccacgttacttttaattttttttactttttattatgcctgctgtttttattttaaaataaattttatatagaactaaagttatccagcaatatatgttaaatcatttattttgtcaatataacaactcaaaattaatttataccagagggaaatgtttataggaagaattaaaaatgaaaatttctcttgtactaccaaatttcagacccattttttctacctgacttgttactatttgagggcaagaagaaggaaattgctgtatctatcaaaatcatatatatatatatatatatatatatatatatatttattttttttttatttttttttttttttgagaaggagtcttgctcttgtagcccaggctggagtgcagtggcacgatcttggctcactgcaacctccgtctcccgggttcaagcaattctgctgcctgagccccataagtagctgggattacagttgcctgccaccacgcccagctaatttttttgtagaaatggggtttcaccatgtttgccaggctggtctcgaactcctgacctcaggtgatccacctgcctcagcctcccaaagttctgggattacagatgtgaaccaccatgcccggccaatcacatttatatttattctttgttttaacagttctacttcctggaatctgtactcaaaataagaaatgactcctttacacacctactttttatagcactctttgtaaaaacaaaacactggaaacacaaaagtccttcagcgtagaactggctgaataaatgatggaacattcaaaggggagcattttgcaattatagaaaatagtgaagattttattatactgcttcagggtacttcaaaatttactgttcagttaaaacaagcatgctgcagaagaatatatataatatgctaagttttaggaagaaaggaagggtagatataaatattgtatatatacacaaatacataaaccagtcaatagcattgaatattcacagtgcccaaattatggtccttgaaataccattttctccatacgcttgtttatattttcaaaaagaaataatgggaggatgaactaaacacgaatgaaaatggttacctataagggaagggaaggaaaaggcagagagatagcaaatagttcctttctgattgtaccttgtttttatagttctgaatttagaaccatataaatatttttttatttttattttttgagacagggtctcactctgtcacccagcctggagtgcagtggcgcgatctcggctcactgcaacctctgcctcctgggttcaagcgattctcatgcctcagcctcccgagtagctggtattacaggtgcacgccaccacgcctggctcatttttttttttttttttttttagtaaagacagggtttcaccatgttggcaaagctggtcttgaacccctgacaaatgatccacccacattggcctcccagagtgctgagattacaggtgtgagccaccacgtccagccgatataaatattttagaaattaaatcttaaaacaaatacacaaacgatctctaaaatgcaaaagcacctagaaagaaatg

SEQ ID NO: 316384 - DNA, 4001 bp, Homo sapiens
cattggcccccttaaaatgaacatattttcctattatctacttaatcctagcaacatgctagtagctttattcatttcatactgaacagtgaaataacaatattttctctgataacacaaaaaaccaaacgactatttgcttcttcagttaatataatacacaaatattaaaaattttgtccactattggatcttaacattatcttgcaaattctactttttgtgtgtgctcatttcccacttaaactatcattgctttttaagttgacgcctaaaatatctattaagccaaactgatctacccacagagctttctgcagcagactctgatgctgacatctcaacagtttcctgttcctggtatgtttttccccccttgtttccttacaacagtataataaagaaataataggctttaagccaattcaaaacttaccttgcaaatctggaaatactccgaagtcaaagtttcctgaatttcctctctgagaacccctgcagtccccgccggatgtacggaaccacttccagccccaccaccactgttactgccactgctgctaccactgccaggggaggaggcagttaagccatccaaaacttttcggaaattaaacttcttcattttaaacactgttgagaaatacaaaggaaaaaaagggaaagaggtgacttaacacgtgcaattagaccttggtaaaagcctttctcttttcattagtcaagtcagtccccattttatgagcattggttacgaccgactggaaaaaaagagtcaggattcgttttgccaaattttaattctaaaaagcatatcctttttaaaaaaagataaatataacacaactccaaaagcaacagtattccctcctcacacatcagattttcaaggactgtatccccagctgtaactacgctttatcagcactggggtaaaaataaaaggcagtgtcatcatcgtcattagcattatatcatcattattatacaatcaaaccagagttcaacagaccaagactctgtctctctcttaagggcggactttccttcttcgaaacgttcggctcagagtattttattttcagaaaaacgacgttgggggagccggtatttactctgccaccaccttccgggctcttcccccatcagcttcaacgcttccttttttgtcactatgaaaggcggggaggggggtactttttctagtccccatcccccagcagcccggaccccaaaacatctgcgagtgacccacagcaacagctgccggggagggggggaggaggagaacggcgacaccgtctgtttccacttgtccctccgcctccccctcacctccccctcatctccctccccgcgtcctctttcccccctctccccatctcctgctcccctccctccacctctgcccgcagccgccgccgcgctctcccgcctgttcgcccgcccgccgtccgctctccccgctgcacggcagccgctctcgggggacgtgaagcggtggcggcgacggctgcggcccgagtcccgcctcagcctgctgggcgcgcagagccgccgctcccgctgtccctcccccaggcccagcgctgaggcgcggggctctcgcccgcccgcgggcgcgcgaacacacaaacacctcacgccgaggcattcgcgctcccagccagaacacacacaaacaccctcacacgggcattcgcgcgctggtgcgctcgctctctgtctctgtctctctctgtctctctctctctcaaacacacacacacactcacacagacacacacaggtgcgagggagccacagctggacggcggcagcggcggcggcgtcccagagggatgactatctgacccaggacttaggcaccttcctcagacgcctctagccgcctgccagcccgggaagctgagggggccgaggtaggcgggctccggccgcttctctgggccctctggtcgcggcgcctggcgctctccgaggtcctaaccgagcagtcaggctccagagcaggctccgccctcccgccgtgggaggcaggccccgcccccgggccggcccctagcttgccccgccctgcttcttccccggcaaagctgggaggtgaagggggcggggtgcccggggacgtcaaagggcgggagtagcttcggcgccaatcctagattcgatagggtaagttctgtggtctccagggcagaagaaatctgtggataggccgaaggtaaagccaatgacagtgggaggggggaatttagagaagtaggtgaggtatttgattgacagcggtattggccagtatgctgggggtcgtgctctgggggatgtaattggcgctacctgttgaaggactcaagtgtgaatcaatagaatgcctgcaagcgtgcgaatttggacgcctggagtctgaggatgcgggaagcgttgcttaccttaggtatggctctggacagtatggtgaactgagcaagtgttttgcaccttttcacttctgcgagcctcttcccggtcttcaggagcatctatctggctcccatcactctcctgctacctgcactcaacttgtatctgtgattaacccctgctgttaccaataatggcttaatggttcgtatctgccaaggagaattgtatttcaacagtttcagaatatatagccttctagagcctaaggaattgattgcttaccttgctctctagtaagtagaattactccttccccatcatcctcacatatacaaagatatttaatttctttaaagaaatatttctcactctgtaaaccgtatcaagaatatattttaagctatttctgtgagtcacaataatcattttgaaagatgtattattcagtgcagaaaaaaaaactgtatcaggatagatttggttctgagccctcacctgctattgacttcgggaaaatttggaccccgatgtctttgcgaaatgaatggcagttcagcgggtcacagctaactgagacttcaatttgggcatcacaacagaactcattagtgatcatttcaaatattgtcttacatcttacaatctttgacctctttttttcttttcttctttttcttctttttcacctctcctcttctctctctctcttttctctcaatcaagggagagagtgggaaggaggaagcaggagacttgaaggatgatgacttgtccaaggacatagcaaagaaatggtaaagatgaaatagagctcagtttttcagatcctcagctcaacgttgaatctttctgtcctgaatgactatttcactccttttgggactccctacactgctggtagtctctcattgccacagctagacagtaaccttcttgaaggcaagcatggaattgtatatttctcctagattatttagcaccaggcacaatatttcacttaaaataggcacgtaaagggttctgaagagttggtttattaatattttttattaaagatatatgagttggtacccaattacataatgtttgaaaggggtaaaaataatggtggaaataagtgatatgtctgacacaaactagatcttggtagggttccaaattctgtattgggtccctaacaacaggtatctttttactcttttccaccttttttcttctcttcttcctggcccattgctcacctcaaagtatggacgctagttaaggataaagagtttgctttccttgttttatgtctgtcttttctttttaaaaacagaggcaaggagggttataataaagtggctgagttttcatttttctaataaatgaaagcaagcctatagcaagtagtggtttgacattttgatgggagcgaagaaggagaatagccccaattcagcaaagtgagatgtaatgtttgcaaacaaaacctcttaaactgatcatcactagcaccatattatcacaaactaaatgatggtctttattctaaaaattgggggagagctgaggaaaaaagtacacaaaagattgacagagatccttcttgagga

SEQ ID NO: 316385 - DNA, 4001 bp, Homo sapiens
atgacttggatgttatatagttactactggcatgcagattaatttgcatgttgatataatatattttcatgaggaagtatatactcaccaggaaacagcatggtgtaacggaaacgtaaaggtaagcctttactctggaatgccacaaactctcactgtatcgttgaatatgtcattgaacttctttaggcctcaatttctctacccatgaaatgagctggctggactaaatgattgctaatgtccatttccagttcttggacactgtgtacctttctatctttaaaaaaacctacttttaccttctaagaatttacagaaaaacacatcatccacaaatatgtaaatcacagtaaccagatggggcgtgctaacagatctttttacccagttttcttgacaaaccaagagtatctctccccaaccagattttctcctgtgttgcgttcagcctcttatttcttggttagggaagtaggcttcacatatttcagctaaacactctgcattttcagtttctctgtacaattcatgagttttcactgccctgggccccatgtttctcatcaattcaagtctacactcatggtaagcaccctagttcttgttttttctaacacttaaataatgaataggacttcatctcctagagctattctccttactctattacaacagttattagtgagttttaattagacaaaactgccattccttttgctacctcactatactgtcaagcacctattaagaatattacagtagtaagtattagcaccttttaaatttacattaacaataacagagaaatggggaggcaggaaatgaaaggagaggggtaaaaatagctcacagatgtcataaccaaagtttagaggaactcaaaaaatcattaatcactattttttaaattttctaaaaaactatactatgcacatcctggttaaaattgtatgagtgataatttgcctctcatcaattaaaaatggggaaataggcaaggtcattaactctgctgtggctgaatcccagactgtgctttctttaaaagggaagagagatagtctacggagactaaccagttcagtggttgagtgatttctacaagagtcatcaccaactcaaaactttcctgaagtccttctgactattttaacgcttgccatctgcagaaggtaaaaatctgctagaggccaagttccaatcgctatccagcccaccactgaccctctttgatttcattctccatcaacaaggaggacatggacagggtcaatggtctaatgcgttttagtgacagccctgatttttcattggaaagaggagaaagatcgtttcccatttttctccttgacccacggatttgaccaactcaggcacattaaaagtctgcaaaagcaggtagcctgcaggaagttcaccctagggggtgagttcctagttgggctgaaacgggtttccaggcatgtttatcacgtggtctaaacgtgctcagggttagtgccagaagtttgaaaagcagaattagtagagctgacaataaaacctcagggctccaaaacccggtccaagaaacttttcttaaacttgcgtccagcgcctgcttcagcgccttcgccatgagtctgcgcgggcagacagcggagactctagtgcgttgggtcgctcataccccgaggcacccggggctgccgccgcgccgcccctgccccacactggagcggggttccctgctgcgcctggacccggcgccgcgtcacctcccgaagtggggcgcccgaggggccgcgcagggggtcaggcggagaccaagagtagcagggggcgagggaagcccgggcaggccggcgccgctgctggcgcccgcagctcctgcccccacgctcacctgggacccggccgccaggaagcggggccgcagcgctagggctcgcagaagcttcccggcctgcgctgctacgggggacgccatcttaaacaggaaactcggcacggggcagtagggcgggcgcgggcaggggaaggaggcggaggaggagcagcgggaggaggggtcagaggagaagcgggcgcggggaggaaaaggaggaggaggcagaggcggtctgggccgggccgggcctgacccctgcgtcccgggggcacaggcgttcttaaggctgcagagccctgggtcccccacccggccccggttcactttgagcggtcccaaggcctgagggcctactgtccagtccccaggttatcgtcctgagcaaagacagaccccgagccctgcggtcttggggctcaaacagtccctggatggccaaacaagcaaatattcgccatggcagtgggtgctggaagggtggctcacggagctgacgccctccgcagagaaccgtggtctagtcctgcggtcacgaggcctatctgggacagtggtgtttgagctgagactttaacgaatagagacaggtgaggttcctgcagcccagggcttcaggtgagtcaaggagaggccattggaggctctccatcccttaaggagttgtgggtgttttgttttgttctatccttaacctaaaatcaatgtaaagctgagagatgaagccgggtgggtcggttggggacttggagaacttctctgtctagctaaatgattgtaaatgcaccaatcagcgctctgtgtctagctaaaggtttgtaaatacaccagccagccctctgtgtctagctaatcaggtggggacttggagaacttttctgttagctaaaggattgtaaatgcaccaatcagtgctctgtgtctggctaaaggtttgtaaacacaccaatcggcactctgtaaaaacgcaccaatcagcgctctgtgtctagctaaacgtttgtaaatgcaccaatcagcactctttaaaaagggaccaatcagcactctgtaaaatggaccaattggcactctgtaaaatggaccaatcagcaggatgagggtggggccaaataagggaataaaagctggacaccggcgccagtagtggcccctagttggggtctccttccaggttgtggttgctttgtgcttttgctttttgcagtagctcttgctgctgttcactgtttgggtccgcactatccttatgagctataacactcaccacaaaggtttgcagtttcactcctgaggtcagggagactgcgaacccactgggaggaatgaacaactccgtatgccccaccttcgagggctgtaacactcactgcaaaggtctgcagcttcattcgtgaagtcagcgagaccacgaacccacaggcaggaacaaacaactccggacgggccacctttaagagctgtaacactcactgtgaagtctgcggcttcactcctgaagtcagcgagaccacgaacccaccggaaggaagaaaccccagatacatttgaacatctgcaggaacaaattctggtcacgccatctttaccgcgagggtctgcagtttcattctggaagtcagcgagacgattaagaacccacgggaaggaaccaattccggacacaaagctattggaggattttaagcccagtaatcagagtgataaaagcaacattcatttggagctgtgaaccccaaatacctgacacaggtctcaatcaatttaagaagtttatttggccacagttaaggacacgtgcctgtgacacagcctcaggaggtcctgacatgtgcccaaggtgtggtggaggacacagcttggttttatacattttagggagatatgagacatcaatatatgtaaaatgtacattggtttggtccagaaaagcgagacaactggaagcaaggaggggcttctaggttatgggtagataagacacaaagggttgcattcttttgggtttctgattggcctttccaaaggaagcaatcagctgtgcgtctatctctgtgagcagagggatgactttgaatagaatgggaggcaggtttgccctaagcagttcccaccttaacttttcccttta

SEQ ID NO: 316386 - DNA, 4001 bp, Homo sapiens
aatggtctgtaaacagaccactcctaatatttgggtacccttttacattttaatatttacctgaatttttattcataaaaatgagatttttttatgatgttttataattttttgatacatttgtttcattttttctaagttcataattctaatagattatgattttataaatatgagctgtgcaatatttgcagaccaatttaacttcactaggatacaaaattttgaagatactatatttcaaattggatatgtttatagttgggtatgtttttagtgtggcatcgcaattctataaacatatgaagtaagttgctcctttaagcaaaactcccaattaaagagaaaattccctcatgaaaaattcatattctctcttctgctatctagtggctatattcttaatttttaggaaatggaaatagtgataaataaattgtaactgatttggatgaattattttgaataggtattttttaagagcagaaattaaagtgaaatctttagtttccagtccaaaaatatatctaaaactgttagaattattgaactagaagcaatatctaatttactcacataagcagaccaataatacttaacttgaaaatgttttttactttaaatatattcagccttttgaaaatctgcatttttgaaatttactttaaaatatatatgtgatagtttcttagctttttaattgtttgtttttatagtcatcacaattaaacaaataacatttgtaaaatgtttacttttaagtgctaccttaaggcaaatttacatggtaacatgagaattttttttaacaaattacttttttgattactaaataatttgagcaaaaatatatattcacactgaaaagatataataatttaacatttgtaactttatttttatgtattccatacattacaccagaaattaaggtattaaaaagtaatagtatggcacaaattgtgtattaacttctttaagaataccacacacattttgaaaagttatggaaggtagaatagaaatggtttctgcaatttttcatttttcctaagtaaattaattattgggtaatatcatttttacacacataaatgttaaatttaatttttaggatgcctgaaaattcccccaaatacattattttctaaacataaaaatattatgccccagcacagtggctcatgcctggaatcccaacacttggagaggccgagatgagtggatcacctgaggtcaggagtttgagaccaacctgaccaacatggtgaaactccatctctactaaaaaatccaaaaaaaatagccgggcgtggtggtgggcgcttgtaatcctagctactctgcaggctgaggcaggagaattgcttgaaccccagaggcggaggttgcagtgagccaacacatgctgtaaatgtgtcactctggcactcagacactctagcctgggtgacaagagtgaaactctgtcttaaaaaaaaaaaaaaaaaaaaaaaatatatatatatatatatatatgtatgtatatgtgtgtgtgtgtgtgtgtgtgtgtgtgtgtgtatgtatcaaatacatgattgtttcaaatcatttaggaactttaatttttccccataagtagttatatttatttaggtaaatccaattactattttgttgaaatataagttgttgagatgttagcaaatataataaatccttttacataaaataaaattagtatttgacaactaaaagaagacagttaatttgttgaaaaataaacgtagagataaaaatgacttttttttttcaattattttgctgttttacatctatttataaagaattaatttaaacacttaatactgaaaaccttaattgctcacaggtcacctttagaaggaaatctggccttactttatacactgagaggcacaatttgccatgtagcttaccattctgttggaagacttgatcccttgacaggaactctgccagcagctggatatagcttctgacccagtgttgtgccactggacatggttattacagtgtcctatttgcatatcctatttgcatatcctgcagccaagattaataattcaaaagcccaggaataatttattcagtcaaacctcccagtcagagatgttcatgcagaggaatttttgtgaggcttttattttcacattcacatttattttattttcacatgcagttttgcaattgaatgacaaaaaacaagtaactcatttcacaggaaacacatttaccaaatagatttttagaaaaacactgttgaacttattttatccactaccaaagcaacagagaagcattccttattttcattttatttgcatatttacacaataagaagtggtaaatactgcttatattgggaatacagttgcctctgcttttcttcttttttaaaattaattttcttagtgaattctgtattgagaatataataacgaaacctctgttttcaataactttgagggaactataaaactgaaattttaaagggaaacctggatatatgctatgttggtgtactagcaaaaagatactagagcttcaagttattttccattttattttctgtgcttaaaatcaagaaacacataaaagatacatcagatagctagggattagggagagagatgctaagtaaaataaccttaatagatggcaatttatatatcccaatcaatgctctgaaaaacatctggaagtacattaccaccatttcagacaggaagcacacctggctttttccaagcattatattaggtttagattcaagtaaacactcagtcttcttgatgtgaagcatagggattatactaagaaagcccataattgtgcaggcagcagtaattcaatttaaatgctatgtaagttgaatattgagttagcaatgacaggcagaagcccaaaaagaagctctgttacaggcatcctcctaactaagcatttctcctcaccaatatctgacagcttaaaaactcaggaactcaaaatatatgtatgtatatatacacatacatatatacatacatatgtgtctatattacacactttatatacatgtgtaaaatatatttatacatgtatgaatatttatgtatacaaacatgtgcatttacatgaaataaaaatatctataatttgttgagttcttgtgatgtggcaggcaggtattacactaagtacctttatgcatcaaatgcatatagtaatcctctgaggttgttattatttaagatttttctcattttgcagattaaaaagctaaggttcagagaggtcaattaactttctcaagattgcagaatcaataacgggagggaccagagcttaagcctatgtacttggattctaaaagcaccgactctgattcttgactgcctacagaattgaatgacaatacccttgtgcacaacaaagtctaagaattaataacaggtatttttcagtaatgcaattcttttctacttttagaaggaagaaaggttaaaacattatttttgtctatatttttaaaagggcaaaaagcatttgaataaccaatgccaggcttgttaattttagacataaattaacatgaaccccttccaagaaacaaagacaaatggatgtatttcacaggtttctgccaccattctgatggaagaaaagagtaattccccctttgtggggtggtgggagttcccgagagcttcctctttcttcgtcccacttcctgactaccatctcactctggctgctaagacaaaaattggtctatgcttctcctttttcatagaacacgtcatctagactgtagcctggtagccttgtttccctcccaagtcctacttcctgtttcctccgaatgctctcagttgagatactagagtgttactgggaaagacttactaaaaggtcacgagtatttctgctacaaagctttatgcaggtctgcaaaatgatagctgcacgggaacaaggctggattcagaattatgacc

SEQ ID NO: 316387 - DNA, 4001 bp, Homo sapiens
gggccaacatggtgaaaccccatctctattaaaaatacaaaaattagctgggtatggtggcgtgtgcctgtaatcccagctacttgggaggctgaggcaggaaggagaatcattcgaacccaggaggtggagattgcagtgagcggagatcgcgccactgcactccagcctggtgacagagcgagactccgtctaaaaaaaaaaaaaagaaaagaaaaaagaaagagagattgattatcaattaccaggcaagttagagaggaattaatatcaagtatggccaatacacactaaaacagtaatcaggagtcttcaacacacaaaagataaacagtactgcaggacatgctctaagggtaacaggaaaaaaagtaaaggccaaaaattatacaggatggaaaaacaatgagaagcccaggtatcaacctcctacactctacacctgagagactaaatcatggtcctgaccccatcaccctcacagtccagttggggagagacatcagcagaaaaacatctttaataattgttatgtcagaataaacacataactactgaggcaggatacggaaatattgaaggggagagaaagaggagatcaggtaaaacctactgtggatgttacctctcacctaagtcctaaatattggtcaggattaacccaaaggaaagaaaaatggaatgggaaaaggatagtgtctgctaagtaaacaagaaggagcactagtttaggagtcagaagacctgacctttagacccataagttgtttcgacaacacatcaatatgcaaaataccgggcagacagattgaagtaacagttatttctttctttctttttttttttcgagacggagtctcgccctgtcgcccaggctggagtgcagtggcaagatctcggctcactgcaacctccgcctcccgggttccagcaattctcctgcctcagcctcccgagtagctgggattacaggcgcccgccaccacgcccggctaatttttgtatttttagtagagacggggtttcgccatgttggccaggctggtctcgaactcctgacctcgtgatccgcgcgcttcggcctcccaaagtgctgggattacaggcatgtgagccaccgcgcccggccagtaagttatttatatatcccggcacctaacacatacaggcgctaagcaagacagataaataatagcaataaaacaactacagtttgcttagcccttcctaagtgctaaagtgctaagaatagcaggataaacaattcaagcccttgtcctcaagcagagtgtactcgaggagactacagataagtatacaacaaccctggtgaagatactgagacccaggatcctaatttattccgttaataagagaggaaatggtgatttaaaccataatttgattgccttaaaattatgagatcctcattaagagaacaggttggagggagaaagaaatagggggtaaagaagtaacaataaccctcaaaccaaactccctaatggtcaattaaatggagtcttccggtgaggcacggagaaggaactcctcatacgggaacagcaggtgctcgatttggggtgtggttataacctttacttcccttcctactagtgccttgctttgcctactccaaccccgtccaggaaccgagcagcccccacccgcctcggaggaatcgatggagcacctttgagtgcgcgagttgccgctctccgggtacggggcccggagcgttagcctcccgcgagtatcggtgagcggctgccgaactgccatgggcgccaggccgctggggcgtgccgcagccgcaagaacccgcaagggaccccgcgcccgcaccggtcccggcctcctggctccctgccgctccacacagcagcgagagcagcagcagcaagaggacgagacccagctcagggcaacgtccacacaccagccctagtgcgggcgcagccatgttgtcccgcgggccatgtgacccggttggtcacgtggctgagccctccttaaaggggcagaattttgagctgacttacgaagtgaccaggagagttgctcttcacctttcttcaggtacttctttggcgctgctgcttgcctgtgctaacgtcaaaacgcagcaaaacacaaaactccacaaaactcaaggccttccacagaccgtgcacccctttatgatttcttggttgaaaaataacagtcaaatttgctgggcatttggtaagtgccagagtactatgctaagcacttcactttttaaaatctcatttaatcctcacaaagacccagtaatggcgcgcttgtagtcccagctagtcgggaggccaaggcaggagaatcgtttgaacctgggaggcggaggtttcagtgagcccagatcccgccactgcactccagcctcggcgacagagcaagactccgtctcaaaaaaaaaagagaaatacaatacggaatcagaatccgtggggactggacacagcaatccagggtttcacaagctctccagatgattctaatccacacttaagtttaagaaccactgttctacagttccgtaatcgaacaaaatgcaaaaccaaaacaaaaagaagatgaaggagaaacttacagattaaaaaacaacatagcaggccgggcgcggtggctcaagcctgtaatcccagcactttgggaggccgaggcgggtggatcacgaggtcaggagatcgagaccatcctggctaacacggtgaaaccccatctctactaaaaaatacaaaaaattagcccggcgtggtggcacgcgcctgtagtcccagctactcgggaggctgaggcaggagaatggcatgaatccgggaggtggagcttgcagtgagccgagatggcgccaccgcactccagcctggggacagagcaagactccatctgaaaaaaaaaaaaaaaaaaaaaacatagcagccagctgcaatatgtgaaccttatctaaatactaattcaaacctactgagttcaaaatttttgagataatcagggaaatttaaccactaagtcaaattataatatttgataaaattaaggaattgctgtaaattttgtttttaggcttttaggagtaataatggtatttgtggctatattttttaaaagaatcccctcactgaggtacacacacactcactgaggtatacacacacacacacacacacacacacatatatatatatggataaaaatataggcagtcaaagatttgcttcccaaaaaatgggtaatcagggtctggctaaagatgaagcatgattggccatgagttgataactgtcatagctggttgatgggcatctgggtgtttattgcactattctaatgtagcatctgtttgaatttttttagcataaagaaaagaccagccaggcaccgtgtctcaagcctgtaatcccagcactttaggaggccgaggcaggagaatcgctagaggccaggagcttgagaccagcctgggcaacacagcaagaccttgtctctacaaaaaattaagaaaattaactggccatggtgacgcacaccggtggtcctggctacttcggaggctgaggcaggaggatcacttgagcctggtaggcagaggctgcagtgagccatgattgtgccactgcactccagcctgggtgacaaagtgagaccatctctcaaaaaaaaaaaaaaggccttttctccttgttgactattttacagtttgccaaggcctttcacacattttctcatttgagattacaaccacttggcaagaaatgtattattactatactcatttcaaaattgatgaagctaaaaggtcaatgccttaaccaaggttgtatgtatttactgtgcataatatatagtcaaggtctaggtcaacggtaatctttgttcgcctccttcaaatatcagtctcagcacatgctgtgtcagctgcgcttcagagacctgaacttctttgattcctggtccagctataccattaggctata

SEQ ID NO: 316388 - DNA, 4001 bp, Homo sapiens
tgttcaaagattaatattagctccaatttattctacttgcattctttaaaatcagcttaattttcatggctcaatgtcagtcaaaaaacactacagtgaagaattatcagtaaactgctaataggtatgggattcttttgaggagtgatggaaatgttctggaattagatgcatgcaaaccatggttttcacaacctaatgaatatactaaaacccacttaactgtatattttaaaatgacaaattttatgtgaaatacatgtcaattaaaaaaattagcagtggttactaacagccttcaaagttaaaaatgttttgtctctaacactctctctgaggatatggagaaatacgacattcatccttaattaggaacggagagcttttcaagcctgcacttaaaacagagagcactaaaaactctacgacctagacggttttttccttggctttccccttttcctgacaaccatgctttttttttttttccccatgtcttctagtttcactcaatatcgttggctaaacaagaatcacattttaaaatatacaacgcatcctaaattgacggagggcttttctcttttatcagtctaattcgtcctaagctagaactacctcatgggtgtgagaactgctggctttaagcttgcttccttcagatgctcctgtaccaagtcagcgggattttgttctaatatgaaaacacagctgaattagcttttcaaaagggaatggatacagagctccaatcctgctcattttagggcaagtattacaagctaaattcaggctgaaaaaccaagcaaacgaacaagaagtggatcaattctcagagaacctgccataatctggcccttgcccacttctctacctcatgtctcaagacgtcccctcgcctccaggtactttgctttatcatttgtcccgtttttcctgtcactcagagacagcctttgcacgtgcttttccctctggccaggccattctctctctcttagcctcgctgattcccactcatctttcacgtcttcccggaccaagccaaaatatccgagggagttttctaaccatcggcggtgtcctcaggggcacattaatagacgttgagaaactgagggacggcggaaaatcaccccttagcagaggaggttctagggcaccttagaggtgatttcattcgagctttcttggagaccttaggaaagccagcggcgggactgcgggacctacgcgctcggcgctaagggagggtccaggcaccaggcgggcgtttgggcgcacgggcacgcggagacttggtgggccaggagagggatgctgggtcgcaggaccgcggctcgttcgttcctctcaggcttgcgcttgccgcttgccgggccggtcagagggagcagccccggcgagctacgccctccctgcccggaccccacgctccaccccccgccccgccgcctcccgcacactcaccatccgcccgcaccgaaaggcgcggcagaccgagcaggagcagcgccgccgcccagagcccggggaggcgtctgtgccaacgggcaggcgggctgggtccctcggcagtcatggtccgggagtgcgcgggccagcggactcgggtgagggctctggctgcgtttggggttgcccaggccactgcccagcgtgcgccactcggctctgcgctctgcgctcggctcacgaatcgcaggcttcgcgccgggcgcgccgagagggaggagcgcggagagccgggggaggctcgggacgcagagccggagcgcctgggccgccgaactcccgggggtcttctctgtggcgccgaggaggcggctgtaacccggctccgccttcgcgctgggcacctggaaacctcggtgccaaaaggggctgcgctgggccgcgcgctctgcgggtacagcggggcggagggcgagggcgcagggaggcggggagagtagctagccggccgcaaggagcccccgcccgtctgggggacccttggcgagagggtgacgcagtctgacaggcggagcccctccggcagggccgttagacaacgagtgtctaactctgtcctcggcctctacttttcaactggcctcctccccctccccaccaacactcttttttttttttttttttaatgaagagaggaaaatctaagttacctaccaccctcactctaaggtgtgaaacgcatggaatagcgaaattcctctttcctaaaagcgaagtttgagagtcactgaggaaaggatatcttcaggaacgcttccttcaccacttttcctggtacgctagtatttctcaaggagcagtaagagggctagtgagattgtcaccattatcacccacctcccaaatcagggctttttgacctcgaaagggtctgagattcggactctgtcggtctggtctgggaatctacactctaagttaaagtgtcccaatggattctgctgcaggggtccctgtttgacttgattccttcttcctgctcgcccctagcctgtctccctaccaccagccctgttcagtgaaagaagaacttgctttcttcataggtagagtaataaagatcagtattgttataactgaggcatgcgcggtgctctacaatttgcaaatcccttttatattgatgtatgggtcaacaaacatctattgagtgcccatacatgcctgtccctgtgctagaccctgaatgtggctgcaatcggtcctaaaaatgttcacacttaaataaaatatacttacaattgaaaaagtgattggtgctaaaggggcagatgattatcctcatttaatgaaccaggacacagacattgaaataatttactttcttttcacagtaagaacttggatttgaatccacatctgatttactacaggtgtcatttttcagcttgcattaattgttgaaatgtactgaaaagatttcttctctccttattacttcccatcaactacaagggctactattaatgagtaattattttggataattaaactttgctttcaaaatacaaatactggccggacacggttgcccaggcctgtaatccaagcactttgggaggcggaggccgaccaatcacctgagatcaggagttggagaccagcctggccaacatggtgaaatttccatctttacaaaaatacaaaaattagccgggcgtggtagctgttaatgcagtgaggtgttaaatgcagtgaggcctgacaagtataaatgaatttacttagctccttcccttttttttttttttttttttttttttgagatagagtctcgctctgttgccaggctggagtaccgtggagcgatcttgactcactgtaacctcagcctcccaggttcaagcgattctcctgcctcagcctcccgagtagttgggactacaggcgtgcaccaccacgcccagctaatttttgtatttttagtagagacggggtttcaccatgttggccagatggtctcgatctcttaacctcgtgatccgccggcctcggcctcccaaagtgctgggattacaggcatgagccaccacacccggccagctccttcccttttaacagttagctggtaacctaaggagtgagacttcacatgtctggactggaggggtcattttaaagcctggttagtgctgagaacggaggggagggatcagaaggtacctgccaagagctaccaactcactcactcaggagctttgcctaggaacattttaaaaacagtcaattgaatattactacttaattctcctaacattttcaagattatgcttattcacaattgtcttggcctgtcctgatgtgaggagatggcatgctgtaagggtaattggtatggttgctttagaaaaccggctgttccatctaaacatatacctgccttaggacccagaaattcctctcctaggattatatccaaaagaatgagaacctatattcacaaaaatatttgtgcacaactgttcatagcagctttatttgcaatg

SEQ ID NO: 316389 - DNA, 4001 bp, Homo sapiens
cactttccccattaccctcttccatgtgcctttgtcatttcctggcaaaagtcctttcggattttctactctactctcttgaaaaggccaaccacataagtcacccaaaggactattcagaatggtgacattagcagccagcaggagggcatctccacatctgcatctcatttccaccacacccacacgccagcactccctccctctgggtctcccaaagagagaatgctagagagagaaagcagtgaagcagccaaaagaggaaatggagagaaatagctctgtggtctctctgtgcacccctcctgggaagaacactcaggtccagtctccaacctcaacccctatgagaaaaaaaaaaaaacaaaacccttgctcacattcctggagaaaaggcacccccagattctcggcctcttcatttctccaagcccttcacctatcaatttcaccatcccaccattccctaggttaactataaaatagagccgcttttaactaatttgtcttcagtggacctcattcgtacttttaccaagcagcagccttcaccattctaagttggaaacatgctacctatctctttagaagaaaaaaaaaattattgaagtttcccatctactacattaaggcaggtctccttttatttgtacccctttaatgatccagtatattttaccaaggtcttcatctttcagctagaaaaagctaccattcacttccacgccccgccccccaccacgcacatttcagaaaaacaagcaatcaaaaaaaaaaaaaaaaaattccacacgtcccctccctgctgcacaaaatacaacaattttattattcataaagagacttcagccatgctccggggaacaagcccgtgtacacctgggccactacatgtgtgatttcatcaacctgatgtcaatacttgatatcagccttcatgggtcctggttaaaaaaaacccaccaccaccttctccctccaaaataccaatttccattccaaattcactccgtgcttcatgaagttaaaccttttttactggccctaaatgttccttcggcctcctgggactatttcacttcagattttatgtgtctaagctaacaagtgtgtcccctcctctacccccaaaaaaactatttcctaagggcctttcctgttgcataaagtagctccttcttgtatgggacctgggggacctggggcaattgaggggtattttagctttgggttcgcctttccgggctgatggatgccctccctcaccccgcaaacgcgcgcgcgctcagcccgcacctcctcccagcgggacctcggggaccctcctttttattggtctgaaacgtttcctcggcgacctgggaccgtcctctcctggcctgcggctgccggcggaccccgacccccgagggcggcggcgcccggcacctaccagtcggcgtgcggctcgtcgaccaccagcagcaccttggccttcctggcggctgcgggcgcgggagcgggcgcgtccaccaggccagccgaggcggccgtctgcttcacggcttgggacagcgagctgaagaagctgctgcccaccgacggcgtcggcgcgggctgcggcgcgggcgccgaggcgggcggcggcctccgctccgggcccggcgaggcggtcgggggcgccgccgaggccgaggcggcgcccggaccggggggcggcggcggcggcggctgctggggctcgggccgctgcaggtcggtcatgtagccgttgggcaggttggcgatgaagctgctgtccgacagccggcgccgcaggaagttcatcatctggcttaaagggctgggggcgcgcggggctacggggtctggtggcgcggagggagagcgagggcggaaggcgagattgaggcgactgaggcggctgaggcggcggcttagccagcagagactcaggccccggcaccagaccccgcagacagcagcggcggtctgggccaggcaacccgcgcggcgcgaggctcgcggagagggagcgggcggggcaggggcggggccagagatagcccccgccccgcgccgcagaggcggccccgccccgctcacggagggcacctagccgcgcgtctggcgactctcggggcttgcaggagggggcgacccaggcctccagcaacctgagcgtgactatgcggggagggcgtgggagccaggccttctccccaggggaaggaaaaggaaccagaggccccaccatctttttggttggagagaaaaagagccgtgtcccagctgaaatggaggcgaaggaaaccgaccccactccttttggaaggataagaggtgtcagcctccctatgcggaggtgagaacgaaaggagtcatcccaatcacgcgcgcacacacgcacacaagcacgaacaccctgtagtgaggaggaaaagaaccacctcctttcccaacgctggggagaaagatgtcatctccccagcccccagaagagggggaagggaataatccgctgttactaacacacacacacacacacgcgcgcgcgcgcgcgcacacacacacacacacacacacacacacacacacacaccctatggtgagacaaaaaagaaatacctcttctagggaggaaggcagcctccttactccaaggcgagggagaggaaaggggagaaacagatcctctctactctgtcatggaaggaggggtggggtgtgttttcactcctgcacttctagggacaacaacagtatgtacttctctccccctcctcactgaccagtgagagaaaaccaagagaagactggagacatggtctccaccccaagagggatatctaaggatcccccaaccccaccgtgtttctttcctagcatgcattgatgcatccagtgctataccaagaaggacatctcttcaagatctttctacttgttttttccattttattcgttgccttgacctctgtgaagacatttctgatggccaccttcccatgtgcactctctaaatcttgcgtgactcttggacctttagttttcatctctcattagatatactttcccttgtgttgtaatggagcaggacacagcagataggctttacagcagactaccccgggtgatatgtgaccctggatcaataacccctgtgagcctctctccttagctgataaaaaggaataagtaaccctttccagagttgttacatggagtaaatgagatcatgtatgtaaagcatctggtacacagcagtaggtattccagtagtgatgcctgaattcttttttcaattggttctcagtaagtatgtactgggctgaatggagtcagggagtggcttgtcactaatgttggtgggcagttcttgcttcctgtatcccagctggcactcaactcagggcctagagatacacaatccagctctgagccggtgctatcagagaagtctccagtcaactataataacacagtggtcttcctatctactacatgcttggcacagtggtaagagctggaaaggctgaaatgaatgggaagtggctcttgtctattgcaagttcatgatctatgtgggctgggggatggagggaggatagacacaggaaccacataagatgtgagaaatgctatcatacagttgggcaaagagggttaggaggcctaaggagggagggactcattctgcctctgagacttaggaaggcctctcagaggaggtgacatttgaggtggatcttgaggcagctatgtttaccagtagaaaagtgaagaaggcaggcaggcaggcagccagagaaggcatggagaaggtatgtaagttgatggttcctccaggaagcctttcgtcaatcctccagggcgggctaagtgttccatatcctgtgcttggctttgtcatagaccccaaagaaactatcatacaatattctggtgactagaatgtaagcttttctaggacaggattatgtcttagttatctttgggcttcacaccaaacacaggacctg

SEQ ID NO: 316390 - DNA, 4001 bp, Homo sapiens
ggaacaatggcacaaaatcatgttgccacagtattggtgtgtacacgaactaatatttcagataggtgagcgtgtgagacaataagagattatgtcagaaaatgatgtcagctctttgaacttggttttgagagataatagcttgacaatggagctattattttcttccctaaaggccactacttcacaggaaatatttattgaatggctgaatgaatgaatgcgggcagaattctgagaaagcaaactgaaagtttccagaactgtgaggattgcttgcttgtttaacttgactgtaagggaaacagtttcagaatagccagctctgaaccactaattcaagccttccaaaagctgtcctggtgtatgcaatattgatatacgcatacattttcattcaagtctacaaacaaggtaaatgtaattatcttgtagatcatccgtgtaaacaatcatcacagttatgtagccactgccagatataagcccttggagctaagatctgggaacagagaacaggctcttacataatttcccagctagtcagtgttagggactctgattaatgctacatgacaggctttgaactttctattcagataggtttgcttgccttttggagttcctagcaagacgaaacgtgtgacctgcagatttcattctgaataaccatcatccagccaacaacactgacatggctctgtggccctgtgggtaaccgtttctgtgcctcactcctctgcccatagacaaattgcaataagagcgtcagggtggtttcacggaagtggaatacaacttcctaaagcccagtcgctgaagaaagccatggcaaacaggctggtgggctcttctgggtataatcagaaaagccctagaggagtggccagagaaaagaaactatagtagggaaggaaggagttctgctctctacccgccgccgtttataacagtctgtaatagcttcgcagcatctttccctccctgaagctcccgcggagcagttgaacacgcgcttccagcatcccagtcccgcagaggagctgtctcagttctgaccaactttctgagcttggccaagtcttcccggctcctccgctcaactatgggtccctccacccatcccctcatccccacgaaggtccaggtgaggggccagaacccagcggcagcccttccatgcgcccccctcccctatctcccaagggggaggtttctttccacagcccctgcgcgtctgcaagcggtgaggtgagacgacacttgtctaagcccctgcaaaaatgcgtccacactcccgcctccaagcagggtgcctcgattttgtcctcaccaccttggaacggcatcttaggagggggcaggattgaaatccccggcttgagggttgaatctccggcttggagcagaactgagcagggagcaccccatccgacctctcctcacctgatagctggctgcctggcgcccctccctgcacacacactgctactcaccaattccagggctcgcaggaaggcaaggggctccttcagcacccggaaggtgcccgcagaggccagctttgggggaatgaggcgagagagagaaagcaaagcgtgaggaaggggctgggggcgcctctcccaagccgcggcatcccccgccccctgctcccagccagccgccctgcccagttctgtctcacctgactcacagggtccatagctcgccctcgctcgctcttctcatccaccagttctttttaaaaatgaagttcgcttggcaccaccgtcctcagggccagaagccccttcgggagcagccagaggagcgacaccctggagcagcccggcgagggcagggggcctcggggagcccacccgctaacgctgggctctgcgctccgggaacccagcgcgtcggggaagcgaagcgagtcagcgaggggtgggcagggaagagctggggcagggtagatacaacaggggagggggaaacccatggagccaggggaaggctgtcattggccagccgcgctccagaggggagggcgaggaggtgggcgaggcagggcccacagacattggtgcaggctcagccgtgcgcccggtgccctctggctccggggaaactttgggtctgttggtttgggaaagcgggcttggcaccatcagcaagacggctgtccacctgaagaaggggtttccaggtaggaggaagacacccacactttacctgagacatctgtgtgagttctgatgacttccaaacagcaaaataataataatgataaatacataaaaataaaaaaataactatttgttggctctttcattcattccttcaagcctttatggagcatccttcctgtgggcaggcagtgcttaggtgctggggtacatcaaaaaaacaggataagcattgtcacttcccccaggggaagcaaaaggggaaaaataacttgcaatgtggtctggacagtggcgcagagcagagcacaggggccatgggcacagggcaggggatccatcttggcctgtggatgccagagagaggaccaggacagaggaaactgcctggagagaagaggtggaaacaaattaatcttgaatgtgggaccatgcgccagtggaaaacagatttagcaaggatgaaatggccaaggtaaaacatctcatgaaaggctaaacagggaatgaaatttaggtacctttcaaactcattttatttctactgagatcttttgcctgatatctgacccccaaatgaactcccttgtcaaactcataaatataacactgggtccctcctccaaagttagactgttttcttgaaacttagtgaaaggtggttcacgttgtttactcttagtgggctaatcttgctgaatataataaaaacaacaacaaccaaacaagtgagttctttctatgagctgaaaactgtgctaagggctttacaaacattacttcattcaatattcacaaacccccataagttaataataatattattcccattttagagatgaggaaattgaggcccatggaaggatagtggcctgcccaaggttgcccagctagcaggtagtgaagtcagaattgatttttttaaaatcagaaaaacaaaagaagaagaaggggaaaaaaggaagaggaggaagaagaagaaggagaggagagctcttagctactacatcaagtagtgatatgtcctcttccttctcactccctttggactggattccatttatgagtggtctcccagcaacacagatagtccatctgtttactataaagatttgccaaaaaggtttggagttcatgggtgtgtatgtgtgtgttggtggggggggtgggtatttgatatgtagaagtagatgagaaatacggaaatcagtaatttgctgtctgggagggggaggcagcttctagtgtaaatgccccctgctcatgaattttgctgcagaaaaactagaaatttagagagtaggaactccagtggactggttgcaccatctgcagtcagccagttttgttcctactgctcttcctacatgcagatagagcctaaaacaattagaaacagttgtttcaaaaataagccattatgcaactatgggggaggggtggggggaactaacactatcaattacttagtgtgtaccctaccatgtatgtatatgatcttatgggggaagttacttaacctcttcaagacctcagtttgtttctttgttttaatctgtaaaatggagccaaaatacctatcttaactgttttttgtgagaacccaatgagattttgcagatagcccatctagggcagtctgcatttcataagccctcagcatgtattagttacatatcacttctatagaagcaaaggggaagactcagaggtccatatcagaggcagggtagattgtagcaatgtcctgctgccctcaacagtgcacctcaacatctatatatccttgcccttttggacccagcagtagccatgtgtcttgttttgacc

SEQ ID NO: 316391 - DNA, 4001 bp, Homo sapiens
gggattggatgtgtgtgtgttggggaggggaagaggtgatgttccatgctggtgagtttacttagcagtaattggcaacagcccaaggataaaagttttgtttgtgttttgttttgttttttttccaacaaattatctgctaagatacacttggctccagctaaggtttgtcgtctaagactgacactaggcacatgcttattgggaccagtaacaaggcaatataataacttgggtgggtttgggggattagtgtatttttgaggctgagttagattgatcaaaattcagtctgtttgtcaaaatgagtagcttcattggagtgtgcacagcgtgtgtgagtcgtggcacgtccaaaagggagtagatatgaaggttagtgcactcccagacaggcattctgagctgtcataagactacttcaaaatctgaaaaattgctatcctgaaaaaaatctatgcctacgagccctaggcctgcatgatattcccaactttactctcgaaatctctgaaaaatgtatagtcagacctcgtcttgcttcacatgccatggtgcctttaactttcatcacaaatctattctccagctcgtttcaccatgaaaaagactatgcagatttgttgattgtataacaaaaagagaagattaaagcatcagtttgtttccattaaagcaattatttaatcatcttctcatccctgtctagaataattatattaaaatacttttccccagacttctgaattaacaatgaagaattcagagcatcttttactctcgaacaaaaagaacgcagctaaccaggtaatgcatttaaaaatcatttccagcaacggtgaccggacagtcattttgcagtagttaaatttaataacagcaacttttctcctgattagcttcacatatagaaacacaggagcccggactgggcatctgacagatggtggcagaaatacacagtgcaaagaaagacgaaagagaagcaacagccacttgtgattgtagcttttcatggcatgctaggacttcatttagtgatctgaatactttttctaaattcagtccttttaaaggtgcatgcatccaatcgtaggggaaactcattctttctacatactgctataagaccttataaaactagcacctttcagcacaacatataatatttggtagctgtatatggagtttaagtaattttcactctgacactgatgaagaaactttaattaaaatggtaagcaggttgcagcacaatgaatgtatttaggatattaaacactccaaggaaggaggggtagggtagaatgacattacagttttataaagcaaatataagtttgcttaaatagtttccttactatgttcaaagaaacccagcacatacttaaacagctaaagtaagcatttcagtatcaacacagcctctttggtttaaacatacaaattacaagaaagcaaagtcaagaaaaatagagattattactagagacttaaaaactgatacttggaaagaaaagtgtacaatccaaatgtgcctatggagacacatacatgcacacacatatccccacagccagctgtaaatcaagatagctgtaaacttaccggagcaaatatcaccatacacatttacaaaagaattgataatccaacttccctctcctgaaagaaaatagaggttgtctcatactaaaaataaagcttctctgtccacagcaccagccacttgtccctctttttatgaagcaaaggaggagaagaagaaaatcaatgcagagggaaagtgagatgttataccaatcagatagcagcttcagcctcatttgcagagagatggcaaaacggtcatattattagacagtgacaacccacagctgagtacaggaacctgatactcccctctggtgaacgctgcctgcttggtggggaggtggctgccaccatggtgagctcccacacttggctcttggctcacaactggaagtgcaggactgctttgcacgagcaggctgcatcaccaacagaggcaccatctcccctttactctgccagccccctcctcctgcaagcacagtgcttaaaaacaaactaggagatttttttaaagccagaattttgtgttttaagggtatggggaaaaatggtggttttataaaatcttacgaatagatttgcatagattaagtaaatgttgttatgtttgttaaataaattgccctcattttaatgtaaatgcatagctgttatgcataatccccatttgggaaactcgtacactgtccataaataatcattaaggtgatgtactggaagacaggcttttaaggctctggcaactgtagaagggacagattacaacttggttgctcactcgtcacaggagtgttacttaaagacgtctcctgcaaaacctcaaaattaaaatggtttcagaggcttaagtgcgacatggatctgctttcttcttcaaataaacctctgtaggaaggagttcagctcgactacttcgaagggccgaaatcatagcaccttgaggcaatgtgtgttgggggcatttgtatcaaattcttggagaggctgccacaggtgacatgttctcacactggcatcgtggacaatgtttccccaaggcagataccgcagcacagggagaggaagtctgtgtgcctctccttcccgccccctactttgggtccccactcggtgcgggaatgttgaaatgcacataggctggccacattttttataggtattaatttgttgttaatttggagttgtccaaagtctttttttgaggtccctctctctgtctctctctctctcgctttccttcctatctctgtctctttgtatctctgtctccttctctctctctctttcatgcgtgcacacacacacacacacacacactatcactaccatatcatagccaccaccatcatctctcttactccctttcttccttttcttatacacacagtaacaacttggtggatagggggaggttgggggaccaaaccaaccaaccaaaaaaccataacgaggagtcaggcaacttgggttctagtcctggtctcccacttactagtcatgtggcctgcgcctgagccttggtttcccctttgtaaaatggctacacttatgcctcatagagctgtgagtgggaaggtgtggggaagaaatgaacaacgggcaaggcagtgctttcacctacactacacacctgcaaactgggctcagggagtccagctccctctctcctccatctctttcgatccgcttgttgcctatgcctgagcttttggggtgcttaccaattcttcaaactgtacatgccccatggcccctttgaaattctgataggaaccttttcctccccactcccctgtggccacccctcacctgcttattgacaaatctctgcacttcaatgagagaagttactcaggggagtaaattaagcaagtgaacacatctgaagcagggaaaaaaagccttagaatcacccggcatttaagtgagcactcagtaaacatttacagaataaataaatgaaggattgactgaaagaatagtgtctctgtgctgaaggccacagttcctccaggtggctgataaggggcagagtcagagtagggtcaaagaggcagcagtttccagcaatgcacctgtagggtagaaccatacttaattgtttcttcacggagcccagtgagtaattctcattggctctgaatattaagagtcccattgcaagtaaaaggaaaaaagttctgtcttctacataataatagtgaagatttcttgaatatttactccttgccagatactattctatgtgggtgtttttggtatatcattttatttgagccttacaaaactacgagttacaatttttattccagggtataggtgaaaaaaccaagacccaaagagttaagtaacttatctgaaagtacagagtcaatacctggtaaagctaaaatttgagcctaatt

SEQ ID NO: 316392 - DNA, 4001 bp, Homo sapiens
ggacccagaacacaatgggggatgagtggggtgccaataaaagcttactgaattagaaatcttgcaatttaagaggatcatgcatattcttgtgtattttttgtgtcatgcaaacccagtttgcgtctctctccctctccccacaaacccctgtaccccaagtctcagcatatggggctaactcaatgacccatcccataacttgttgcagtccatctctggtgctggcccctctctggggttatcacctgggtttcggcctcaagcacacgcaggcgccggctggcagaagacagcagggtctccagctccagctgcagggtgtccagctcctcgatgccgatgccatcatcctcagagcgtgccagcactgccgtgtagcggggacagaccttcaggtgatccacagacttgaagtcgtggaactgcaaggggcagtctttcaactcactcatggcccaggatatggggatcctgtggagctggagaggacagggccattgatgggagacaaagtggtctgagaaaagcccaagggcttcttacctccagggacagcctcaaggaagcccagcttcagtcccttactgacaaaattgatggcacagttcctactcacagggcacttaactgggtaccaagctaggtgcagagcactttatcagtttatctcactgaatttctcactcagcaccatgaacaaggaccattgtgatctcgtttttacagagaaagaaactgagactctgtaagggtgggtatgtgcctatgcttccaagatgcaatttgaaccccgctagtcttgagtctgcaccctgatcaccatgctatactgctatgccttgcctcgcctttctgatgctctttccttcccttctatttctcttgggttctgctaagactttgagttccaagcaccccattcttaccatgttctctgggactcttggcctcttttcttaccctattccacctttctcccttctctagtcactaacagtggtttagaacgtgggctggtaagccagacagacctgggttcaagcccaggctttaccattctctacttatatgcccctgaacatgttatttgacctttttcagtctcagtttttccatctgtaaaatggggacaaaagaagtctcggtctgtttccccattaaaagtctgaatctgaaaaatggggataacaatagtacctacctccctgggatgttctgaggattaagagatgatgcccgtcaagagcccagttcagtgtctggcacagaagtgggactgtttaatggctggccccgcccgggggtcgcccaaatgtcccgccttcagagtcctcgttctctagggacaccctagtgcgacccccgccccctctacctcctcgctgcggcctcctacggccccaggggccgcgggagggggcggggagttccggtcgatgtgagcaaccgccccggaactggctatgggcgggccccttgcagttgacgcgggggcggggagtcagcgagggcgagcctactggagtttgccgggggtgggaagaaggtgggcctcgagcaaagccgctagaggtggggtgcgggtggtcggcctcaggcgagccccggggcacagcccggggcgggaggcggagcttggcggccgagatctccgcgctgcagttagccccgccgagcgccaggagctgcgggtaggaggggcgagagaaaggatgggggtacagaaccggaagaaacgaagggctcgtccgcttcggcttgtcctaatttggtgcccaatctgaagctgggctgtaccattgcatacctgggggaggctgtggcaaaggtgacaagaaggccgaaggcacaaagggaagctgcacccattcctggaggagcttaaatagtgactcgagtgcaagaatttaaaaataccgagacagccctaggtggaaaacttccggaaggcccaagcgttcgtaagggctctctaccccgctcggagcatagatggtaccgtccggaagtccgggcggagaccgtagctgcgcttctcgcgaaagggcaggcatcgcggggctggccacttccgtacttccgctttccggcccagccagcgcccgcgatggtgagagagccgggcccccggccagggacccccggctgttcggcctcagggcagtgggtcggtgggagatgtggctttgccgcaggggcgcggggccgagggatgtccgggggttgtggggacacgatgagggtgggaaaaagagacggggcgggggcccgaggtgaggaaggggcgagtgggggtactccctggtatgaagtgggccttgtggcttcacggtcagccttcgaagcaggtaggggcttttcctgagccctgtaggaacccggaagtggggtctcctaggctctttggagcatttcgagggtacgtagtcggcctcttagcctctgaggcatgaagcaagtccacctgcctatccacagtggaacttcacgacatacgccctttgtcctcttctgccttcctgaccctacagttgcttaaggcaggcggccacacttccttatcccattcttggtacctccagccctgcttccaccccattggaggatctctcgtgttgcttccattcaggcccttcctggtcagaactgaactgtgtcagccttagtgtatgttagctgtgatactgctcatccctcccttcctggaagtcctccctttttcatacatgtgggcctttttcatacatgtgggcctttttcatacgtgtgggcattcctgggagttgtgactttggatgaccatctccctcttcgtcacaccttccctggtgataccgatctagtctcctggcttcgataactttcttcattctgatgactcctaatctggcttctcagctctctttcaaggtttgcctggatatcttgaagagaccttgaaattagacctctagttcaaaactcatattctattctaaatttgttcttcctcctgggttccctatcctggcaaacttttgtgacctcatgtctctgctaaaaatctgtattttttttttctagtggggcacatgcctcttgatttttaaaagttcaagtttattgaggtattacatgagactacatctgttttattcatgaaaggacaggcgtcacggagccagtcaccctttttaggtttactttctataactgttgacaaaggccaggcgtggtggctcacgcttgtaatcccagcactttgggaggcagaggcgggcggatcacgacgtcaggagatcgagaccatcctggctaacacggtgaaacctcttctctactaaaaatgcaaaaaattagccgggcgtggtggtgggcacctgtagtcccagctactcaggaggctgaggcaggagaatggcgtgaacccagaaagcagagcttgcagtgagtcgagatcgtgccactgcacaccagactgggcaacagagtaagactccgtctcaaaaaaaaaagcgttgcaaaaacttgctgggtatggtggcatgcgcctgtagtaccatccgctcaggacactgaggcaggaggatcacttgagcccagaagttcgaggccgtagtacactgtgatcactcctgtgaatagccactgcacttcagcctggacaatatagcaagatcccgtgtcttaaaaaaaaaaagtcaagttgtgtaaccactactgcaaccaaaatacagaacatttccgtcaccccaaaaagttccctcaagcccttttgtaatcagtcctctccttcccaccccagacaactactgatttttcccccctgtagttttgcctttttcagattgtcatgtaaatggaattctttagtatgcaggcttttaagtgtggcttcttaccataatacatttgagagtcaaccatgttgtgtgtatcaatagttactctttttttattaccaagtagtagttaattgaatggctggaccacagttcgttggaagtggtttttctttt

SEQ ID NO: 316393 - DNA, 4001 bp, Homo sapiens
ttccctttgtatttacaggtcaagaatgagaagtgaatcctgctcacgtgggacactgctcatccagtttgggcaggagcaagtcatgggccctaggaaggcacgggctctgggctgtgtagccaggctcctatactaagccccaaagacccagaggaccccattcctaatgctgctccttactacagagattcctgtagcctgggagcgccattccctccctgttcctcccttcctttttctggatgagggaaaggatgtttacagatagggaatgatgtgacgtgatgaggacgtgattctagactttcaaaggaggaatgacttagtggctcctgaggttggcagagctcaaatgatagagtctaatattatttcttctatcaaaaggcaaattaagcaggcttcaatttactcatcccatatattttaacaatgtgtaaaagaagtggatgtggtacctttttcccagatatatatatataacccaagctctgggcaacccagcagaagcattggatagcagttatgtaacagtaaatcacagactgcaggaaaggatgggcttgtttgaatcacagagcctgcggccctcaaaccctcaaacacacacgagcatttggtcagaaatgcagttaacaaataaggactcctttcagtttcatgagaacgcatccactcaataaacagacactgaacacttccagggtgcatggctcccacaagaatgtgaaggtggctagtccccctcctcccttctttgttttactgtgtaaccaacacgatcccctagggaaagaaatggccccagaagagctgatgcaccaggaaggctggggaaattacaaggacatacttatctctattctcattagaaaaatcaaaagggcttcgaatttgccaactcagaagggagatgtaatgctagggtgagtggagaacccccaagctagctagggaatagtgcatggagcccaaatcttccaaccctgaagaaataaaggcattctcatcccctcccggtgagacatagagcttggcaacagcagctcttcccgcagccttacgttaaaagaaagggccctggagggtttccctgcccaccgccccagcaaccgagatcgctgccggccttaccgtcccgtccattaaccatttctgaaaatgggccctgccggggggcgggtgctctatgtcctcggcgcactgcaggatgatccagtccaccagcttgttctccaggtccgcatcatacttctgctcgatcttctcctgcacctctcggcttaagccatagctcgggcccctgttagccatctctggaaagaagagaagacacgcgcggcatccacacaatagcagcagcagcagcctccggctccctgcagacggggctgggatatggctgggcaacctggcccagcagcagcaaagagggcagaaagccgggcgtggtttaaatcaaggagccaatgaagccaatggggtttcacctacaaacgggaaagaaaagcacagctacccgccagtaactctagaataaacctccggccggtccaggggggctggaatccccctccctatcccgcctatcaatgagaccagatgatataacacggactcacaatcaagtctgaacccccaggcagcaagggggatgggtggcggacgtttcttcccccttctcagtagcactttgcaaaggcagaaacgatgagatcgggaagagcaggtaattagcaggcagggaggaagcctcctttcatgttgaactgcagccgctgctgcctcgcgcctggaagaatggcacattgatttgattttctcatggctgagggggctcaaccagggccgttgctaagagccctccaaaaagccagccctctcctgtgtcaatcaagcccgcctgcctccctcccgctgagagcctctttctcatctgcacaattctttccctcttctggggagacagccgattgtctacgaggccagcagctgcacaaggggatgagggcctgtgggagggtccgttctaccaactgtccatctgtcgggaatagccaagctactttccccctgccctgaggtaacaactgtctggcaggacaggaggggagggactgagagctgctatcatttacttgttcagctgccagcccaacttcacccagaaacttccatcctgaaactgttgtgcctcagtttgacttattcaagggaggtatttttttcatgctactcttaactgaaagacactaagaacaagttttataaattattattataattcttactatatatttttagacagagtctcgctctgttgcccaggctggagtgcagtggcacaatctcggctggctgcaacctctgcctcctgggttcaagcgattctcctgcctcagcctcccaggtagctaggattacaggtgtgtgccaccaggcctggctaatttttgtatttttagtggagatggggttttgccacgttggtcaggctggtcttgaactcctgacctcaggtgatctgactgcctcggcctcccaaagttctgggattacaggcatgagccaccacgcccggcaagttttataaattaaacaaaactcaacgactaagaactcttagagtgaaaggttttgatagaatgtaaagacttcatctgaagtaaggaccgtgaaggcacaaccgacatattgtcagaagtaactgaatatttctcatgggcaaacaagcactcaggagaaaccattagctctaagttggccccacatttttataacagctaaagggcttggcagtttgtcctcctagactgtaagccatttgtgggtaaagattgagtctcattggtgttgtgtaattctctgggtgtttttcatgagaaaaattccacattttttttcgtttggttcatttcttcattcaacagatatttactgagtgtttatgccaactactggactgaggaggaataaaatacaattcttgcattgaaaacagattgataaattgactcaagcatattaaataaagcaattctgggtacatgggatgatgatctttgtccctgtgggaaattgattagaagctatgcaggaaatgactcctcaaataatacatgtattgagaaaaatctcctaccggctgatgcctggactaatgaaaatttaattacttaggagatatgtgggtggtttgcctgaaaaagacttagcggtcagtcgttgaaggcctggcagacagtcctctgaaaacagaaaactaggagattcaggagagcagtaggtttaggaagagacaagggaagggctgactaaggcaggtcttgatgctgcatggaatcatcagttgaagaagctcaaaagacagcagcactgtgttgggacacttggagcttaggggaagagcttagagcagggaaattgacagaagaattatggaagtcatcattggtatcttggggaggagccataaggctagttccaaccttagactaagggaacggagtcccaaacagaaaccacataattttttccatggctggaatggctctaaggaagttgttggtttgatatgcaaagcttgaaacaattctaaagatgtacatttgcttgactttttttaaacactgtgttttgcaaatcttttgtacccaaagagtccctcatattataacagagtagctggtgtgctttaagtgaatgactgggcccatgcttctagagaggatacaatggcaaagagaggggccacagcagggcatggaagtgtccagaaatccagaggaagtcttcagagaaaaaatgcttcatctcctcaggggtgacagtggaaatcagctcaatgccacatttactaagtgcctactagtattatagttaatgttttcaacaactttttctttctttttttttgattcggagtctcactctgtggccaggctggggcgcaatggtgtgatctcagctcactgcaacctctgactccctagttcaag

SEQ ID NO: 316394 - DNA, 4001 bp, Homo sapiens
ctgtgtcctcagggtgtgtgttccattagaagagggtacctccttttaatagaacataacaatggggaaggcaaacactgcccccaggataacagctgagagcatcttacacacatcaatcggcacagggaagaacactgtgagcagtttttacaaggagatggggcaaaggagagaagaaaagaacaatcccaaaggccagggggctgtttaccttcccatagatccaccgtctgaaagatgtcggtggttctgacaccataggtctccgcagcttttaggaactgggagatttgctccatctgcttaaaagccatctttgactctgagatcttgggtatgggctcttgtcctggtgggtataaactatttatcagcttgcacaggacctgaagagggaggggagagacagaatcaatgtttccctttgtatttacaggtcaagaatgagaagtgaatcctgctcacgtgggacactgctcatccagtttgggcaggagcaagtcatgggccctaggaaggcacgggctctgggctgtgtagccaggctcctatactaagccccaaagacccagaggaccccattcctaatgctgctccttactacagagattcctgtagcctgggagcgccattccctccctgttcctcccttcctttttctggatgagggaaaggatgtttacagatagggaatgatgtgacgtgatgaggacgtgattctagactttcaaaggaggaatgacttagtggctcctgaggttggcagagctcaaatgatagagtctaatattatttcttctatcaaaaggcaaattaagcaggcttcaatttactcatcccatatattttaacaatgtgtaaaagaagtggatgtggtacctttttcccagatatatatatataacccaagctctgggcaacccagcagaagcattggatagcagttatgtaacagtaaatcacagactgcaggaaaggatgggcttgtttgaatcacagagcctgcggccctcaaaccctcaaacacacacgagcatttggtcagaaatgcagttaacaaataaggactcctttcagtttcatgagaacgcatccactcaataaacagacactgaacacttccagggtgcatggctcccacaagaatgtgaaggtggctagtccccctcctcccttctttgttttactgtgtaaccaacacgatcccctagggaaagaaatggccccagaagagctgatgcaccaggaaggctggggaaattacaaggacatacttatctctattctcattagaaaaatcaaaagggcttcgaatttgccaactcagaagggagatgtaatgctagggtgagtggagaacccccaagctagctagggaatagtgcatggagcccaaatcttccaaccctgaagaaataaaggcattctcatcccctcccggtgagacatagagcttggcaacagcagctcttcccgcagccttacgttaaaagaaagggccctggagggtttccctgcccaccgccccagcaaccgagatcgctgccggccttaccgtcccgtccattaaccatttctgaaaatgggccctgccggggggcgggtgctctatgtcctcggcgcactgcaggatgatccagtccaccagcttgttctccaggtccgcatcatacttctgctcgatcttctcctgcacctctcggcttaagccatagctcgggcccctgttagccatctctggaaagaagagaagacacgcgcggcatccacacaatagcagcagcagcagcctccggctccctgcagacggggctgggatatggctgggcaacctggcccagcagcagcaaagagggcagaaagccgggcgtggtttaaatcaaggagccaatgaagccaatggggtttcacctacaaacgggaaagaaaagcacagctacccgccagtaactctagaataaacctccggccggtccaggggggctggaatccccctccctatcccgcctatcaatgagaccagatgatataacacggactcacaatcaagtctgaacccccaggcagcaagggggatgggtggcggacgtttcttcccccttctcagtagcactttgcaaaggcagaaacgatgagatcgggaagagcaggtaattagcaggcagggaggaagcctcctttcatgttgaactgcagccgctgctgcctcgcgcctggaagaatggcacattgatttgattttctcatggctgagggggctcaaccagggccgttgctaagagccctccaaaaagccagccctctcctgtgtcaatcaagcccgcctgcctccctcccgctgagagcctctttctcatctgcacaattctttccctcttctggggagacagccgattgtctacgaggccagcagctgcacaaggggatgagggcctgtgggagggtccgttctaccaactgtccatctgtcgggaatagccaagctactttccccctgccctgaggtaacaactgtctggcaggacaggaggggagggactgagagctgctatcatttacttgttcagctgccagcccaacttcacccagaaacttccatcctgaaactgttgtgcctcagtttgacttattcaagggaggtatttttttcatgctactcttaactgaaagacactaagaacaagttttataaattattattataattcttactatatatttttagacagagtctcgctctgttgcccaggctggagtgcagtggcacaatctcggctggctgcaacctctgcctcctgggttcaagcgattctcctgcctcagcctcccaggtagctaggattacaggtgtgtgccaccaggcctggctaatttttgtatttttagtggagatggggttttgccacgttggtcaggctggtcttgaactcctgacctcaggtgatctgactgcctcggcctcccaaagttctgggattacaggcatgagccaccacgcccggcaagttttataaattaaacaaaactcaacgactaagaactcttagagtgaaaggttttgatagaatgtaaagacttcatctgaagtaaggaccgtgaaggcacaaccgacatattgtcagaagtaactgaatatttctcatgggcaaacaagcactcaggagaaaccattagctctaagttggccccacatttttataacagctaaagggcttggcagtttgtcctcctagactgtaagccatttgtgggtaaagattgagtctcattggtgttgtgtaattctctgggtgtttttcatgagaaaaattccacattttttttcgtttggttcatttcttcattcaacagatatttactgagtgtttatgccaactactggactgaggaggaataaaatacaattcttgcattgaaaacagattgataaattgactcaagcatattaaataaagcaattctgggtacatgggatgatgatctttgtccctgtgggaaattgattagaagctatgcaggaaatgactcctcaaataatacatgtattgagaaaaatctcctaccggctgatgcctggactaatgaaaatttaattacttaggagatatgtgggtggtttgcctgaaaaagacttagcggtcagtcgttgaaggcctggcagacagtcctctgaaaacagaaaactaggagattcaggagagcagtaggtttaggaagagacaagggaagggctgactaaggcaggtcttgatgctgcatggaatcatcagttgaagaagctcaaaagacagcagcactgtgttgggacacttggagcttaggggaagagcttagagcagggaaattgacagaagaattatggaagtcatcattggtatcttggggaggagccataaggctagttccaaccttagactaagggaacggagtcccaaacagaaaccacataattttttccatggctggaatggctctaaggaagttgttggtttgatatg

SEQ ID NO: 316395 - DNA, 4001 bp, Homo sapiens
cacaggagggagaaattctcctagagatgacaaatctgagtcttgaaggacacgtgagttaaacagacttgctggaagcactgggggaagcacagggaagggtagggagccgtgttggaggaaagtgctctgtggatatgggagccagcatgttctggaagctgccgtcagatatgactgaaatagaacacatttatgcggtgggagatgagatcagagagggaggctgtttgccatgctagaaaattttcctgcagaagagctgactggagagaagagggactaagggggtgggggaattagatctgaagccatggcaagattccaggggagaaatgaaattatattagctaaggcgctaaggatggggactgatgtgagaaagatgtaggtgttggaatctacaacttgttcacttgaatgtaaggaatcaaaagtgagggaatgggaaggaaggaccttttcttgcagggaattccaggtctattcaaaggaaaacctccatggaagaatgaagaggtggccatcaggaggctaacgcctgctctgtagagtgtgactctacagaccactggggacacttgagatttggtggcgaggcaggtatggaataaacatgttttttaaaaatgtgtaattatgttaaggtaaattcgggaaaaataactagcctataataacctataatttctcatatgctgccaatttaaagaaaaatattaaatagtagtgtaagtgggaaacagaggaaatccaagcaacagcatagatggcctcaccaggaagtgaacaggcaggatgttaatcagaagacagactacagtcaggtatccagacgcagggggccccattaaaacctgcacactgaattctgcaaattacaaggaaaactgtacccttactgaggctgtgctgagccaactctgaaaagtaacaatgcctagtctcaaacagaccgttgttaaaagtgctgagcgagggtaaatacactggtcacgcactaacttttgatgttagttactttcactgcacctgccctggccctacaaccagtccgccaacttcctgaagtcagaagatcattttgcattttctcctacatttatagaggtgactctcaacaaacttggctgcgcattagaatcacctgggacgtttcttaaattcctgaagcccaggcctcatcccaaaccaattaaatcagaatctccatcggcggaagccgagcattaggattttcttaaaagctccccagaaaattccgatgtccagccgactaaaacactgaaagaacctgataacgatttcttttcctttcttccatttgcccctgcagcagtttttccttctgcctaactgcttctcctgctctagacccacgtggattcctaagtatccttcaacaccgtcgcttcaactcgcgctgtcgttatactaggaaggcaggcctatggttcactctgctagtggacacgtggagtgtgcagagcggacaggcagctctccgactctgaaggaatcgagggcaaaacgggactcgtgagaacagacagttccccgtcgtggggctgcccgggctcaccttctggtctgaactcggccctgcctggcggtacaccccggagccgtagacgaaagccagactcagctcctcggggaagtgagacaggatcttgcggaaggtcacccacgagctctgcagcgtctgcagcgccatggggtcgaggctaacaggggacactcagcgcagcagggcgaggacaaccgggcggggaacagacaccgggtaggcggtttagggtgggaaatggaagtcggagactggatcgagggacacaaggctgagtgtggggtgggactgcaagcacacgcaaggattggggcgttgggccacgaagagcagcggcgagaagacgcagcccagataggctcgggtgggcggcggtcgcacaggcagagcttccgtcccttgctacgccccacgcacgcacaggcgcttccaagacgcaagaggcggtgctcgccttagtgtggggaacgcgaggctttgcattgtcccctcgtggtcggaggagtgccctacaggctggcggctaggttgcgacttggacaaatcggcggaggcgagcgtcacccgactccgcgggccctgagccttgatagcctctgtacttctctcttcaaactacggtttaaagaatgactataaaatcgggagcgtattgaaggtttttaagtgaggcgacactcacataatatggaactagccgttctgaaatggacagtgtagtagcatgtagtgccttcacaatattgtgcccccatcatcgctctagttccaaaattgcagatttcgaagatttggaaaaacacaaaattaaaatgatgcccaatcccgccatgtagagaataccaccgtcaagatttgacggagacttcttcacgctaaagcccttttcaaatacaagggtggatatgggagtgcacagacgttctctgatacttgcatttaatttcaagggtggatcacagtttttgcccccttgccttgtggaatggtctcacaaagggtgcttcaaatgcagtttctggaggaaacaggaccctaggagtagaaaaatcttacagctctcctctttgtataactggagaaacttgctgaagattaccattcaggaggtggtttgacttccaggacagaaactttttcaactaccctctccttcctccccaaaatacactacctctcaaaaataatagaaatagtaatagctaacattcaggtaatgttgacacattttcacatgcacttctcactgagcaccctctagtgccctgtggcaggagggccttggttttactgatggccaagctaaggcttagagaggtaaagccaggtgataggatcacatcagcctgtggcaaaactagagctaaacccaggtctggctccaactctgggattttttcggaaattctgctctgtccttgaagggttttgagcaaggacttatgtaattcacatgttagcctgaattgtgggggactgattagacagttgttatcatagttcccccatgaactggaaacggctaggccaaggtcttaggagcagggatgggattaaatcaattggaaaaatgattacttgcactcacactctgggcctgcactgagatgaagagatctgagctgcctgctgccctgcaggagctaggggtctgtagaggagaggagacagaactgcaaatcagagtagaatttgggtaatgcagccaggtacccagcacagtgccggaatgtaatgtccctccaatgggaacgtcagtcagttctgggtgttggggaaagggaccagaagaggtttcacaatgatggcattttgagccaggcctggaagctgggtaggagtttatcaggtagaagatagatgggaaaattcaaccaagaaagaattgaaaggactcggtgacaataatactaataataggtgtcattattaagcacttagtatgcccaggcactttttagacttctttggggcttttctgtttttgttttttttttgagaccgagtcttgctctgttgcccaggctggagtgcagtggcacgatctcagctcactgtgacctctgcctcctgggttcaagcaagcatgcctggctaattgttgtatttttagtagagatggggtttcactgtgttggccaggctggtctcgaaatcctgacctctagtgatttgcccacctcagcctcccaaagtgctggaattacaggcgtgagccactgcacccaggctttttatacttgtttcttttcatcactccagagatcctatgaggcaggttctctaagatgatgatatttttcatacgaggaaacagaggtcctaagaggagcagtaaatgttccaaagtcacacaggaaagtggtgaagtcggggtttgaacctagggctacctacctctaaaggccaaggtctttaccaccatgtttaa

SEQ ID NO: 316396 - DNA, 4001 bp, Homo sapiens
tcccaaataagactgtttctccactcctccacaggcagaacttctcacttcttaagactcagaccttcaaaatctaggatgcaaactctaaggggaaagtgatctgttttgttagtaaagaatcccaaacacctagaacattgcctggcacaaactaaaccctcaacacatatttgttcaaagccttgattgagtagatgagcgaaatgtatcttctctgtgaagcactccttggtctgctcaaagtacttatgaaaccctcttgcatgtttccattagggaattaacaatttaacctccaaaaaaaaaagaaaaaaaaaaaaaactagcaccaccaagcaaaaccccaacatgctggaaactatgactttggagaaaagctacaccaagaaccgcaattcttggttctgtgattcagagtggttcaaagtacaagggcacacaattctttaaactgacaactaaaataaatacattcttctcttgagcacataatccaccttctactgcagtgattctccaacggggctgcacgtttacaataacctggggagcactgaaaaatctggaagcccagaccacacctcagcccaataaatcagtttctctggagtaggaggcaggcccaagtattttaaagctttccaagtagttccaaagtgctgccgagtttgaaaattacctctctacttaacttcaggccacgcgcctggaagactgctaggtcttcgagtttggggggagtggacttctagaaagaccttccagaccttcaaggatgtaatgttttgtagtctccttccaccaaaattcccatccccaacctctcaagccatgtggaaggggcttcaccgattgcaaagcgtggcagccacctaccttaaggctgcaggcttcctcctctagagaagccatttcttccaaagaggcgttggcaggacgcagaggggatccccctgaagacaggaacccccgagtgttccgaatcaggcagcctttggaggcggccccgcccacaccagggcccaagaaatgtggggagaaggaggaggaggagttatttctgcggcgggatgagccccaggataacctccgcgagcaagccacatcgtcctccttctgggctttcaggcgcttggggctgctgggccctccagaacgcgacgcagacctctgagctggccggctggagggggccacatcacagggctcccggaggcagctgcgcttgcggggacacccttccgacgtgctgctccagttgtgcttgaccttgccccgctcggacgccatgggcacctgcaaggtacagggggcctggattccaacaccacccttcctggcgaccccacctcagattcccgccaccccgggcccaggaggacggcaagacataagggcagagccaggggctagcctcactgacctttccctcttctttccactgcccatcacagttctcaaggtttcagagatgccaaaccgtgttggagaagtcaaagcgatccaaaattgactaaaggctgccgtcggtttccaagcccacaacgtgcttctgagatcaggaagccttcactttgcccagcgctacttcggagatgcctaagcgcttccggggctacgaagcgctttgatcagtttgcaatataaagccctttagaactgtcaagcgcttcagaagaccacatggcgcttcaagatccacacatggctgccggatccgcggccccggggccgggcgcttagcccgtaggccagggccagacccgggcgccgcagcccgccctgctcctgcggcccaaccagacccgggccggaaggggcccgagcggcccctcgggagctggcagcgccctcgaccgccaactcaggacgccccccgccggctgccgcagctgtcccgccgggcagcccgccgcctgccccagccctacagccccgcctggcccggcctccgcccgaactgcgaccactccggcctccgtggcgcccgccctccggaacgagccctgcggcccgcaggccggagagcgacaggggcggggcctgcgccaaacggaaggcgcccattgctcgacccggcaaggggcgggactccgagcaagacgcagcccgcctcaaagccaggcgccttggagtcgggacggtacgccttaggaagctcgtccattggtcagaagccagatggggcggagccactcacgtgggctcgaacagcgggaagttgaggccagccagatgtgcaggcaggtggtgtccgctgacgcgcctcacttaacgctgttttcctcagcgccggccgctgtacctgaagctttcagacctggatttctcatcgagccaaagcaaaccgtgtactgagcattatcaccccactttatagagcagaaaactgtggctcagagagactaagtacacacccagaaatgggaagaattagaattagaaggcaccaaaaaaaaaaaaaaaaagactacacaaaaatgtgaactatccgcctggtgaaaaatattaaagacggctgggcacggtgtctcacgcctgcaatctcagcactttggaagaccgaggcgggaggatggcttgagctcgggagttagagaccagcctggccagcatggtgcgacccccatctctacaaaaaataaaattagctgggcgtgatgccagctactcaggctgaggtgggaggatcacttgaggccgggaggtcgaggctgcagtgagctgtgatcccgccactgcactccagcctggaggacagagcaagaccctgtctcaaaaaagaaaaaaaatcaaagacaaggtacaaattcagaaaaatactcgaaacatatgacaaagggctgatattcgatgtagcaattctcccaaaataataaaataacttagtattaagactggcaaaggaggctgggtccagtggcacacgtctgtaatcccagcactttgggaggccgaggtgggtggatctcttgaggcaaagagttcgagaccagcgtgggcaacatggtgaaatcctgtctctagtgaaacacaaaaattagcctggtgtggtggtgggcgcctgtagtcccagctactcaggaggctgaggtgggaggatcccttgagcctgggaagtcgagggtccagtgagccaagattactgccactgcactccagccagggagacaaagtgagacccctgtctcagggaaaaaaaaaaaaaaaggcaaaggaagcaatgaacaaaaacaaatcatgaaacgctcctaaatataagaaagatggctccacctcaaccattaaaaaagtacatgtaaggccaggtgtggtggctcacgcctgtgatcccagcactttgggaggccaaggcgggcagatcacgaggtcaggagatcgagaccatcctggctaatacggtgaaaccccgcctctactaaaaatacaaaaattagccaggcgtggtggcaggcgcctgtagtcccagctactcgggaggctgaggcaggagaatggcgtgaacccaggaggtggagcttgcagtgagccaagattgcgccactgcacttcagcctgggtgagagactccgtctctaaaaaaaaaaaattaattaattaaattaaattaaaaagtacatataaaattataattttccactcgttagattggcaataatcaaaaaacaaggtaaggggccgggtgcggtggctcacgcctgtaatccccgcaccttgggaggccgaggtgggtggatcacgaggtcaggagatcgagaccatcctggctaacatggtgaaaccccatctctactaaaaatacaaaaaaaaaaacaaaaattagccgggcctggtggcagatgcctgtagtcccagctactcaggaggctgaggcaggagaatggtgtgaacccgggaggcagagcttgcagtgaaccaagatcacgctactgcactccagcctgggcaacagagcaagactccatctcaaaaaaaaaaaaaaagcaggataatatacc

SEQ ID NO: 316397 - DNA, 4001 bp, Homo sapiens
ttaaacaatgattacatgttgaaatatgttaaatagattattaaaactgatttcacctgtttctttttagtgttttttttttttttttttttttgagaccgagcctcacactgccgccgggctggacagtagtggctcgatctcggctcactgcaacctctgcctcccgggttcaagcgattctcctgcctcagcctcccaagcagctgagattacaggcacgcgccaccacgcccggctaatttttatattcttagtagagacggggtttcaccatgttggtcaggctggtctggaactcctgacttcaagtgatccgcccgcctcggcctcccaaagtgctgggattacaggcgtgagccaccgcgcccagccttcttttcagttttaaatgctgctactacataattttaaattacaatatgtggcttctattagacagccctggggcttaaatcctacttattcttcaaagcctagttgaaacactgctgctttcatgaagctttcccccagtgactccaactgccccagcccccaccgccaacctctcgtaacactttgaatcacactcacaaagaataagattaattttaccttgttacaccttcccaactccaacataagcaagttgaagaaaaaaaaactatatctagatcaccatgaagttttcctctgacaccttggagagcccagcgctacggtaatgtttgatgtctgctaatggagagctgaatttcttaattactaattatctatccctttcaacgatttccatttttttcctctgggattaaagtcgatgtctatcaatgtcctgtattatttttaaagtgcccatgagctgtacacatacaatataacgaacaagcaaatccaaaactaatacatgtggtcaatacacttagatcaactgtaaaatttagacaagcctctaaaggtccctttttaaaaaatgatgttgtacaacctaacagtgtatcgtgagatcaactatttcaaaagtagaagcctttcccaaagattaacactgggtgagcagtttaccaaaaaattattggcggtcttcccccacaatcccgagtataaatcaggtaagcatgcaacagcttgggtgcagtaagagcaaagtcccacactgcatccaaagctcagaaatcgagctgtgagaaatgtggtagtaggggaaaagatgacttgcgtgaaggagacgaacgatgaaaactgttggaatgcaaaacgagataacagccagaataaaaaaaagtataccaactaagtgggagggattctcctcgggtcaacctctgaaccctcaggcgaaggtcgcagtggtcatttcaaaacgtcttttcttcacattgtattttagtgactcagatctgcatccaacaaacttccttcttcagcctactccaactcccacagccaggactccggccaaacccagccctgaagccacccactccagcacactttggagactgacagacgacacaggaggaccgttctgaggcccagcacctggatgacacccctctccttgggagtcccgccccagtcccttgggcagaaccaggcaggcagggggcacccagctggcagaggggtagggcagggcaccggacttcgcctaggaccggcctctccgttccatgccgacgccagacggctcctcggggaccggcaagatggtgagaaggaagaataaaggggcattggaaattagccccggctttcactcaccagccgtcgccgctcgacgttggcagcggcggcacatcttctccttccgccattgctgttgacgtccacgtcactttgccgaaaagtggatccggcgctgagaccaactccgagactcaatgtcgtaaaaggtcttcggaagtccagcactgagcttccccagaggggaagaaagagggaggtggcaagggactggaggaacgcaacgtcacggcgtcccgaggccgaaaggcagcgtcttgggggaggagacttggtggaggcagctgcccctccaaagactacatgtcccaagatgccacggtgccgcgggcggggcggggcgcggtggacgccgtcccagttggaggccttgtgtgacaaacagcgtgtctttttagcgtccacttagcgtcttcattccagcttggcgtcgaaattaacaaagttagaatttacagtcctaactattggagaaagcaagggaaatgggaattgacatagggaaggcggacgtaggagaagagccacagttcagtaatttcctgctgtagcaatttaatttgaagaaagagtgggacgtaaggaaaggggcagaccacccctatttgtgaggccccgtcaaaagtgtaaatgaaggcccacatactttttgactgaatatttaaaagttgtaaatgaagctatatactaaaggagatacgttctagcctcctaccttaaatatatcttcctaacagtctggaagatcaagtccgaatttagaattctaggactggaattccaggcaagcagagctgccaaaatccttctctacgcgttccacttcccctttacaccgcatgggcggacacttggccaccgccggggccttggggtgagcacacgctcaggaggatggacctaaagaaacgcttttgcaagccctgaaaacaacagtgatgaagtagaactgcatgtaacaatatggatacatctgaaaaatacgctgttaaatgagcaaaacagattgcagacggataggtaaagtatggtatcatttatagttggtgtttaaaagacaatatatttaaaatagatccatatgagtttaaaatgcaggagaatgatatatagaaaactcggaatggcagttacattcagggaaagggaggagtttccatgaatttttaaatatttattaagggccccaaggtggccacataggtggccagtgttctttatagagtctatacttaggtatctaaaatgtttcatagtttcaaaaactatttgttttaaatagatacaaaacagtacagctatctcatttacaaccaaaaacatgttcactctcttccctaaagggaaataatacagatctgcatggtactgcacccacttccaaggcccggatctctgtaatgttcagttctctgttagggaacatttcttttaacatagaatgagactgtagatgccctctatcaaaaagaataaaagacgtgaatctaggtcacattaccattctaatattcaggacctcccctgggtcccttcaattgttgccagtagattttcagaaacttttcagaaaatggttttaaaacctattcagtcattgacatgagaagcagttgctcactggttaagaagattctagtcctcaattatgattcattttgagtataattaaatcagcaactgctttatagtctctggtaaaatattttcccattaaaaatatgtcacttgacatttttaaacagttctttattctgtcaaaataaagtggaaagttctgacttctatgttctttaatggagccagagccagcttcatgggcatgtagtctatgcaatagcatgagaccacatgcttagaagaactctgtgcttgatttcatgctctggtgttgccatcttgaaattcttaataatttgggaacaaggagccactggttttaattttgcactaggcctcacaaattagggagccagttctagatagggtcaatatcttagtgatgtataacccattggggacaagatttcaaccaaaattgtttagcgatagtgtcttctagcggattttttttttttttttttttttttgagacagaatctcactctcacccaggctggagtacagtggcatgatctcagttcactgcaacctctgcttcctaagttcaagtgattctcccgtctcagcctcccaagtagccaggaccacaggcgtgtgccaccacggccggctgatttttgtatttttagtagagacggggttttgccatg

SEQ ID NO: 316398 - DNA, 4001 bp, Homo sapiens
tcacagaattggaaaaaactactttcaagttcatatggaaccaaaaaagagcccacattgccaagtcaatcctaagccaaaagaacaaagctggaggcatcatgctacctgacttcaaactatactacaaggctacagtaaccaaagaagcatggtactggtcccaaaacagagatatagatcaatggaacagaacagagccctcagaaataacgccgcatatctacaactatctgatctttgacaaacctgacaaaaacaagcattggggaaaggattccctatttaatcaatggtgctgggaaaactggctagccatatggagaaagctgaaactggaacccttccttacaccttatacaaaaatcaattcaagatggattaaagacttaaacgttagacctaaaaccataaaaaccctagaagaaaacctaggcattgccattcaggatataggcatgggcaaggacttcatgtctaaaacaccaaaagcaatggcaacaaaagccaaaattgacaaatgggatctaattaaactaaagagcttctgcacagcaaaagaaactaccatcagagtgaacaggcaacctacaaaatgggagaaaattttcgcaacctactcatctgacaaagggctaatatccagaatctacaatgaactcaaacaaatttacaagaaaaaaacaaacaaccccatcaaaaagtgggcaaaggatatgaaccgacacttctcaaaagaagacatttatgcagccaaaagacacatgaaaaaatgctcatcatcactggccatcagagaaatgcaaatcaaaaccacatgagatatcatctcacaccagttagaatggcaatcattaaaaagtcaggaaacaacaggtgctggagaggatgtggagaaataggaacacttttacactgttggtgggactgtaaactagttcaaccattgtggaagtcagtgtggcgattcctcagggatctagaactcgaaataccatttgacccagccatcccattactgggtatatgcccaaaggactataaatcatgctgctataaagacacatgcccacgtatgtttattgcggcattattcacaatagcaaagacttggaaccaacccaaatgtccaacaatgatagactggattaagaaaatgtggcacatatacaccatggaatactatgcagccataaaaaatgatgagttcatgtcctttgtagggacatggatgaaattggaaatcatcattctcagtaaactatcgcaagaacaaaaaaccaaacaccacatattctcactcataggtgggaattgaacaatgagaacacatggacacaggaaggggaacatcacactctggggactgttgtggggtggggggaggggggagggatagcattgggagatatacctaatgctagatgacgagttagtgggtgcagcgcaccagcatggcacatgtatacatatgtaactaacctgcacattgtgcacatgtaccctaaaacttaaagtataataataataaatagatttttaaaattaccataataattgacctattatcctctatgagtctcatcatctgatacagatttattctcaattatataaaaatcatcagttattgttaaataagaaactcagtatatgtagatcctccagtctcttggatttacatatatagttttaattgtccaataatattgtaaaagttaatatcctttcaatgtatctgatttaaaattaccacagagtattgtgggattaaaggagtactgtgtcaagggaaaaaaaaaaaaaagaaagaaagttttctcatctattctggtgacactgtggctgacagtatctactttaaaatggaagtgagaaaatccagcacccggatttcaaccggggacctcttgatctgcagtcaaatgctctgccccctgagatatacccccttcacctgttagaagctccttccttgtccacttatggtgactcaatacaatcaagttccacccacactagagttctggcaagctatgtgttctaaagccccaccttcttaattatccatcatctgctttggcttgtcccttggccactaataaactgaaagggaacacttgaaaaatgacagacaaaaaaaaaaaaataccacacaactacaaccatctgatctttgacaaacctgacaaaaacaagaaatggggaaacaattccctatttaataaatggtgctgggaaaactggctagccatatggagaaagctgaaactggatcccttccttacaccttatacaaaaattaattcaagatggattaaagacttaaatgttagacctaaaaccataaaaaccctagaagaaaacctaggcaataccattcaggacataggcatgggcaaggacttcatgtccaaaacaccaaaagcaatgacaacaaaagccaaaattgacaaatgggatctaattaaactaaagagtttctgcacagcaaaagaaactaccatcagagtgaacaggcaacctacagaataggagaaaatttttgcaatctactcatctgacaaagagctaatatccagaatctacaaagaactcaaacaaatttacaagaaaaaaacaaacaaccccatcaaaaagtgggcgaaggatatgaaaagacacttctcaaaagaagacatctacgcggccaacagacacgtgaaaaaatgctcatcatcactggccatcagagaaatgcaaagcaaaaccacaatgagataccacctcacaccagtgagaatggcgatcattaaaaagtcaggaaacaacaggtgctggagaggatgtggagaaataggaacacttttacactgttggtgggactgtaaaccagttcaaccattgtggaagacagtgtggtaatccctcaaagatctagaactcgaaataccatttgacccagccatcccattactaggtatatacccaaaggattataaatcatgctactataaagacacatgcatacgtatgtttattgtagcactattcacaatagcaaagacttggaaccaacccaaatgtccatcaatgatggactggattaagaaaatgtggcacatatacaccatggaatactatgcagccataaaaaggatgagttcatgtcctttgcagggacatggatgaagctggaaaccatcattctcagcaaactatcacaaggacagaaaaccaaataccacatgttctcactcataggtgggacctgaacgagatcacttggacataaggcggggaacatcacacactggggcctgttagggggtagggggctggaggagagatagcattaggagaaatacctaatgtaaatgacgagctgatgggtgcagcaaaccaaaatagcacatgtttacctatgtatcaaacctgcacattctgcacatgtaccctagaacttaaagtataataataataaaaaaaagtctcctgggtggcgcacaactgtagttccagctactacagaggcggagttgggaagatcgcttgagcccaggaagcagaggttgcagtgagccaagatagcgccactgcactccaatctgggcaacaaaaaagacttttttttttaaacaaagaatataaaagagaggatatgaacagtatccaaataaataatcgttgaaatttttccagactaactgaagtcacagatggaaggtctgagatgcaagaaaaaactgagagtaaagatgcaggtatatatgtgggtaattccttaacagtttaaaggctaaatccaccaaaattactagaacacaatccctgaccagactagctttttcttttttttttttcctaactaagaataagggctagatgtactataaataaacaaaataaggacaagaggacttagtaaagaaagttattggagaccaaatttcaagagctaaagattccctctcccagtagaaatatactgtccctactgccaaaactgtgtttagtttatt

SEQ ID NO: 316399 - DNA, 4001 bp, Homo sapiens
ctaacatttgtagaatgataaacattttcctaaacacttcacaggtttttgagaaagcatttacactgagatttgttgttacactgacatccttcccaaattcaccattattctagtaataattgatgctactagaagcagcccacaggccctctccgtcaaatgatctccctcccctctcccagctcttccactgctgaccatcccaccaccccgacctcacatttctcaagttctggtacacacactgtacacactgccattccaatgatctacccatgttgagagaaatgtctcaggatcaggtggactagcaccacttctcagactgctgctgctaacaggacaaagctttcagtggtctgagacaaaaagggggttaagagaagggattatatattcatttttaaatgaaacataaattattcaacttacttttattccggggttgtccttcttactttttcagcgttaaaatgtgataatgaccaatgcttcattttctgtatcgtcctcattggccaaataaaaagtcagaaacccagtcaatccctaaacctaaaggttaggataacaaacactaaatctactacgcatacatgtagggtggaggacaagcccaggcaggaaataaaggaataaaaaactttcagaggaagtagatacttttacatttaacagtgactactggtccagtgaacaagtgcaagcaaaacgaaactgcaaatttcagtatctcactcagaaaagattacaagcactgaggcggatgacaaatttgacttttaaaatgaaagcaggccaggcgcggcctggtgtgatcctggtggatcacgtctgtaatcccagcactttgggaggctgaggcaggcggattacttgaggtcagcagttcgagaccagcctggccaatatagtgaaaccccgtctctactaaaaatacaaaaattagccgggcatggcggtgggcgcctgtaatcccagctcctgaggaggctgaggcaggagaatcgcttgaatctgggaggcggagattgcggtgagctgagatcgcaccattatactccagcctggacaagagcgaaactccttttcaaaaaaacaaaaaacaaaaaaaaaaaggtaggccgagcacagtggctcacacctgtaattccagcaccttgggaggccgagatggacacatcacttgaggtcaggaggtcgataccagcctggccaacatggtgaaactcctccgtctctactaaaaaagaacatacaaaataaaattagtcgggagtggtggcgggcggctataatcctggctacctgggaggctgaggcaggagaagtgtttgaaaccatgagggagaggtggcagtgagccgagatcgagccactgcaccactgcactccagcctgggcgacagagcgagagtccgtctcaaaaaaaaaaaaaagtcaagttccgtaaagcacttacaacagtgtccggcactcagtaagcgcttcagaagtactgtcataaatatcaaaggactggaatgaaaattataaaaattatggtactaaaaacttccacaaagttatttagaagtacaacctctgctcagtcagttggagtataaataaaaagaaaaaaattaaaagtacaaccatttctccataaagtgttatgaagttatgtgtgacatttctaaactttttaatttacgtgtgaaaaaattacattagaaaaaacctgaatccagttagaacacccactgtacgactctcaattgtttgcaaatttgcttccaaaactcaggaatgcactactcaactgaggccgcatttgagagcacacactcaatacttcctccaataaaagaaattttcatctcagctgtacactcagagaccaggatttttttcgcctatatgttgataaaacccaatgacgcatagctgagcaagtctttcacctaacagcacaccaagcttctaatggaaaattcacagaccaggtgatgcagtcaccatacagcatacagacacaatatttgcactcttcctatcccctcccctggaatccagactcagcctgctcactctgaaagctttctcagttcatcctgccatttgccccttctcccaagccacctctacacccgggggtgagttattaaaaagaacatgtttattgataaatacaacactttatttatttgcacacaagttatccacttccttgctactcaaagatagtcccttgtccagctgcacatgttatcagaaatgtacaatatcaaaatgcaccataggcctactgaaccagaaaatgcatttttaataagagccccaagtgattcccacccacattaaggtttgagtgttctgtgatactgcagatagctgtaaaaattaaaaatgctcaagtttacaaatgaattcagagatatggtatgaaaagtaccaagacacggaatcagaaaagcccaaagagaaaaaccaatatataaatgaatttctttgccaccgatagcaaaggctcatttttcaacaatacctatttattgcttcctgctttaagtattttgtgcaagagcacaacacttataaaggtttacaaaagaattaccgggtctagaaattccaggcaacctggtccaaacgtgtgaaacctgcatgttaaaatcttaggattttgtccaattcagagttgacaaatgaactctttccagaaagttattattcgaaaaaaacctacaggatgttaactttaaacacagattataattcctgtaactaaaacgagtaactggtatcgaacaaattctaggtcacttgtagaatcgaatcttgtagtgaaggtctgtgtgtttttccaggaaaagtcggggtggggagcgggatttgccctccctgcgaatttttttttttttttttttttttttttttttgctcttatcctgaaagacctccgtttcttacgtgtgaataaacttaagtcgtactaaatccaggtcacggttcccttcctcaaaagtgaagtcaaggcttctctcttctaaagactattaaggtttgaggattcagggcccgtttcgcttccggctagggaaggaagcgtgcttcccggggcccaaatgaacatggaaatttactaagtaggaagttgagcactagtccagccgccaggccctgcctttactgcagttggccttccagtctagaccccgacctcctggggcagggaaagcaggcagactgcaagcagccaccccgcccagctcgccctgcccgccctgcccgccagggagctgaagggtccacccctcccgccatccacccccgacgccgactccgaggcgcacaaacggggggcggtgcggcaacccgtccgccgtggcggcggcaccctcaggccctcccgtgagaaggcggcggcggctgcggctgcagcagcggcgcgaaggggggcgaaacctgtcctgaggctgagtgggaggccggggcgggaacgactgcatgtggggctgcactggaggaaggcggaggcgttcagagggcttgggcttttttacgatcatcatcattattttattttacctgtggcgcagaagggctccccagctcctattccctgaatcctcctcctcctcccctcctctttctctctctctccctcagtctgcagggcgctcgcggaagcggccgggcccggcccgacctgaaagagaacagggcgggagggggtggcggcggtgaccagcggccacgtgaccacgctcgcgccgtaacggcggccgcctcccgccgcgcgccctccccgcgctccacctctaataacctcgcggcccgcgcgcctgggaagctcgtgcgcaggcgcccgcacgggacctgaagtctgcgcgcgagcgcaacgcgctcgctctcgggtccgggtttctggggcccgcgaggcgcgagaagcgagtaggtggggagtgagccgcgggcagagctctccttggctgagccggcaggctgctgagcgc

SEQ ID NO: 316400 - DNA, 4001 bp, Homo sapiens
caatatagattcatgctctcatgaaactggcatttcagtgtgtaagtctagggaccagggatgaaaaaaataggaggccgggcgtggtggctcatgcctataatcccagcagtttgggaggctgaggcgggtggatcacttgaggtcaggagttcgagaccagcctggccaacatggttaaacccagtctctactaaaaatacaaaaaaattagacggacatggtggtgtgcgcctgtagtcccagctactcgggaggctgaggcaggagaatcgcttgaacccaggaggcggaggttgcagtgagccaagatcacgctactgctctccagcctgggcgacagagcgagactctgtctcaggaaaaaaaaagaaataaagaaaagaaaacagggtggtgtaagagtaaggaactcagtaggggctaattttgattaattggtcagggaaagtcctccctgaggtggcgacctttaagctgatatatgagttaaagaaggaatcacccatgctagcacatgagggagagtacagtgtttcaggcaaaggcaatagctagcacaaaggccctcggcaggaatgagctcggtgtatacaaaaaaaagaaaggaagcaagttttgctggagcatggttaggagtataataggtttacaaagcataaacggctttgtaaactagcatggagttgggattttattctaagtgcaaatgaagagccattccaggcttttaaacaggggagtgacatgatttgacttttattttttatttatttatttatttatttattttgaaacggtgtgtcactctgtcgcccaggctggagtgcagtggcaggaactcggctcactgcaacctccacctcccaggttcaagcaattctcctgcctcaggctcccgagcagctggggttacaggcgctcgccaccacacctggctaatttttgtagttttagtagagacagggtttcatcatgttggccagcctggtctcaagctcctgacctcaggtgctccgcccgtctcggcctcgcaaagtgctgattacactttgggtgggtgagccaccgcgcccgggctttttttttttttttttaaatcatggagtgagggacagggatgagcaacatatattaagatattaaggaagatattaagagtgggggcaaggaggccagttaggaggccctggccaggtgagagatacactgtgacccagaatcctggtaatggagatgtagtgaacagattgaagtatagttcagaggtaaagagttggatagcttatgcatgaaaggaataaaaacacctagagctttgtcctgatcaactaggtgttgtgtaactgcgatgagcaaaatcggggggaagatggggaatcaaagagttctgcttgaaccgtaataatggtttttactcgttgcctgcttactatacgcccgatgatttaccgatttttttccctgttaaaattcacagaactgccaataagtgctttgcctcagttttgttgataaacttaggctcagacttgggaggaggggaggggtggggggtctcaccactaagaagcggtggaagccgaatccgaacttaagtcggtctgtcatcactgtagcctttccgagacagttgtcttatggagttgcttggagaacgtaaaataagaggcctaagcaatgcgtctgatgtacacctgtcgtggaataactgttcccgctcattcggccgctgtacctctgctccctcattcggagcgtagctgggtatgaatgaaattccgggcttgtagcacagagaaaacttctctcccacaattggttggtgctggggaggaagctcctgattggtggaaagtccgaggaagtgggcaagccggagggatttcgtgtacctcaggtgccctcactctgaccggccccctatcattacgtaattttctacgactcgcggtagctcaggcagagcgggttcctgcagcggcgcgaccctctgacgtctccgcttctaattggtcaagagctgcgactgcagttctgaagcctaactggttgcccgtgccgcctcggaggtgaagtgtactgcgctgattggcttccaggcgccggccgcgtgtgatgtcccgggcaacgattggctctcgcctaccgggggcttctctcaccgggactcgggactcccgggaagtggaccggcagaagagggggctagctagctgtctctgcggaccaaggagacccccgcgcccccccggtgtgaggcggcctcacagggccgggtgggctggcgagccgacgcggcggcggaggaggctgtgaggagtgtgtggaacaggacccgggacagaggaaccatggctccgcagaacctgagcaccttttgcctgttgctgctatacctcatcggggcggtgattgccgggtgaggaacagacactcgcagacaacggggcctgtgggtcagcctttgctggggggtgggagggggtgggggaagtggcattgccagactgacggagtggagaggggcatcgctgtgggttggcggggtggcggaggaaggggtagtatgggccaggctagtggggtgagaggagaaccgtgggtgacaccagtgagagggccttaggtccagagagggtcttaggtagagctagatttgcccagaggagtgggagttggatgcattgccaaacggcatttgggggatgagggaaagaaggtggttgcgagctgaagcagtgtcacgtagagctggggaagaaagagggatgcctgactgtaaggaaagatagtgacagtgccaggctgaggttgaggggatggacgtttgtttgatcaaagaggtgagttgctgtgccccgctgaggtggagaagcggacgatgctctatgccaagccttcgaagagccattctggggctgacattaaagtgggtggatgatgccagcccgagttgggactgaacgaaattggatgcgggatgggaacaagaagatctttagacagcccttgtacttcccagcttcttgagctatttattatcttaagttgcttcatctttaacattctggcagtgctactgttaggacatttatgtggcataatctttttaaagaaggaaaatcatcctttgagagtgttatttgacttttagaaaagtcaaaatcatttggagccagtatagggaaaggggggaagagttaatttgattatatggttattgcctaaagataacatgagaccataaaataaggaagtggttttcttgaccgaaggtggttctgaaagaaaagtgccacagatgttttgaataatccgaaaagaagtatatagcctcttactgtgattacttcaatatataagattcattacaaattctggtgttctctctttagtcattctttgtgtgtgtatgtgtcacataaaccttcatttttatacctctttgctcagatacaaacctaaatgtagaggaaaaataaatcttttactttgaaaaatgtaacatgtaactctttaatgaagtattctctccctctacttcccagacgagatttctataagatcttgggggtgcctcgaagtgcctctataaaggatattaaaaaggcctataggaaactagccctgcagcttcatcccgaccggaaccctgatgatccacaagcccaggagaaattccaggatctgggtgctgcttatgaggtgagttgggaaaagtgataaagtacgaataaaatctgtagctctagaaaaaacatacaatacagagaaacactcctttcagctcacatttatttatttatttatttattttgagactgagtctctattgcctaggctggagtgcagtggtgcaatctccgctcactgcaacgtccacctcctgggttcaagcagttctcccgcctcagcctcccaagtagctgggattacaggtgcatgccaccacacctggctaatttttgtatttttagtagagacagggtttcaccctg

SEQ ID NO: 316401 - DNA, 4001 bp, Homo sapiens
tcgcctcagcttcccaaagtgctaggattacaggcttgagccactatgcctggcctctttgtcttttttctacacataaattagatgttagtttttgaattttcacagttgtgatgttacatacacaattctgtactgtttcaaaagctttatagtattctaaataaatgtatcccattttattcaactcttctcccatttttagacaccttactaggtttcagatttttcacaaaaacaacataggcaaaatactgatcattattgaagtggggtaatgggtacgtggggggctcactgattctatttttgtgtatgttaaaaaatttcattacaaaagttcaaatgttgtcacaagtgtaaataatgctatcactaccatctttcttcatattttctgcattacgaattatttctgtgtgaaaattttcagatgtacttttgtgaaattaagtaattgacatttctaaagcttgtgaaatatatccttgttgcttccaaatgattttatcaaattgtaccatcctttgactctggtacctacttcactgtgcactcctcaacattagcaacatcatttttttaaaaatataaaaactaatttaaaaaatcaattatatgactgatgaaaattttattgctattattatattttgcatttgattctaagaaaactgtgcttctctcttttttttttttttgagacggagtctcgctctgttgcccaggctggagtgcaatagctcgatctcggctcattgcaacctccacctcccaggttcaaacgattctcctgcctcagcctctcaagtagctgggattacaggctcccgccaccacgccaggctaatttttgtatttttttagtacagacagggtttcaccatgttggccaggctggtcttgaactccctgacctcaggtgatccgcctgccttggccttccaaagtgctgggattacaggcgtgacccaccgcacccggcctgccaactgtgcctctctcgagaatcatctgttcggaaaaataactgacatcaatcgagtgcttactatgtaccaggtatcatgctcatgattttgcatacttcacctcctttcatcctcacaaccacctggagatacagtacttaagactgtacacattttcgatgaaaaaaaaatgaggcttagcgaagttaagggatttccctaaggacacctacttagctggcacagctctagattaggattcaggtctgacttgagaactgcattactataaatgtactctaggaatccagttttgggagaatctcttaaaaacgggagtggatccagaagagaatttccagaataaagagtcttagacaggaagccaggtgaaagaaccagggagagtaaactcaaaagaagggcgtggaagggcaaaaggcagctgtcttccaatgtggagagactggagtcgttttgagtaaaaccagacgataaaagttaggcgaggaagacctcggttctctccaaaatgtaaagaggctgctctgtgaggtactgagcccctgtcaacagccagatcccagagatgagccctccattctaactccgagaatcgagagggctcaatccgtaaacaaacataaactggggctctgaccctggcggtgccctgaggttaaggtttttcaggtcgggagatcggcgtgggtccaaggcggctgtcctggggcttcgccgccaccttggacgcgatccggggtgggactctgcgtgggccgccccagcgtcgcgaccggacttcaggaacacagacgctcacgctgacagggtcggtagctgacccgagacgcggtaagcgcgaaggcagcctcctcgacccaagcctgaagcctgactaacccacaccgccctccccggcgcacccagtgcgcggttacctgctaatgcaggcgccgctccgccgcacttctccgcgcgccgccgcgcccggcgtccgctcgctgggcccgcccctcaccctcctccgcgcgccgctgccgtgcccactgcgcaagcgcgaggccccgcaccaccgagacctggcggaccccgttgctagagcggcagattgcggctcaagcgtctgagaaaatctaggctggggtcgagagtccgcaacagtggcacctggagccagacccaccgctttctggtgtcgcgcctttcaacccgggggggtaggaagctttctgttgctccgcataactgtggtcagctaatagctgctggtaagatcagcacgctttcatcagaaatgctactaatactaatggcagtttgcatttatagagcacttactatggtctcagcactgtgtaaagcaactttatgtgtatttcctaagtcttgtcaagagccctttaagtacattcgttttactgatgaagaaactagggcctagaaaggtgaaaataacacaaccctaaggtcacacaagagatggagccaagattcaagcccagggcgtctgaagcaagactggcactccctgccgcccctcggtgtcagctccttaactctgttagctttcctgccgtgtttccaccttcatgaagctttttcagattaccgggcagaagccatcactccttcctttaaacttccatttcagaatttctggacatttcctgctttttttagttcctttatggcctctctaggtgtgatagatacaaaggtaaattagaccgtaaaatgcaatttagttcctcttttgtgtggccattgtccctactgggtatcttcctgaaagcaggggcttcaaatttacacatacctgggttaggatccaggctgcaccacttattagctcagtgaccctgctgttacttgttgagtaccactgtgtgtctggcacagtggtacgcactagaatgacagaagtgaacaaaacagacaaggtccttgctttcttggagtgtataacagggagaatagacaatacatattaaggaataaaataagataatttcaaatagtgaaaaatgctatgaaaattggggcggggggtcagggaaggccactttgtggtgccaaatttgagctgaggcctgaagagtaagaagccagccatacaatgatcaccatcccagtaactttgactcaaaagtacttcagcacctactccatgccaggcactgttctaaggtgctcttttatacagctgtgaacagaacaatatagattcatgctctcatgaaactggcatttcagtgtgtaagtctagggaccagggatgaaaaaaataggaggccgggcgtggtggctcatgcctataatcccagcagtttgggaggctgaggcgggtggatcacttgaggtcaggagttcgagaccagcctggccaacatggttaaacccagtctctactaaaaatacaaaaaaattagacggacatggtggtgtgcgcctgtagtcccagctactcgggaggctgaggcaggagaatcgcttgaacccaggaggcggaggttgcagtgagccaagatcacgctactgctctccagcctgggcgacagagcgagactctgtctcaggaaaaaaaaagaaataaagaaaagaaaacagggtggtgtaagagtaaggaactcagtaggggctaattttgattaattggtcagggaaagtcctccctgaggtggcgacctttaagctgatatatgagttaaagaaggaatcacccatgctagcacatgagggagagtacagtgtttcaggcaaaggcaatagctagcacaaaggccctcggcaggaatgagctcggtgtatacaaaaaaaagaaaggaagcaagttttgctggagcatggttaggagtataataggtttacaaagcataaacggctttgtaaactagcatggagttgggattttattctaagtgcaaatgaagagccattccaggcttttaaacaggggagtgacatgatttgacttttattttttatttatttatttatttatttattttgaaacggtgtgtcactctg

SEQ ID NO: 316402 - DNA, 4001 bp, Homo sapiens
acacgcctaactgctctcaggcatactttcttcctgcagcccctcccccacaggtaaatgctaactatttctagaactctcaactatttgggaagcttgccatcaactcccatgataccacccaacccacaccatgttttcggggagacaaaggtgccctacttccccagactataaactattaaaatggtgagaacatacaatcccaggaagtcggcattactaaaatacatcaatgtagcatgggtcttattttaacaaaaatgaaaatgaatcacactggaaaacccaaacagtcactcattgtatcttcaacgtgtaatcgaaattatttattccaagttatttcaggtaagtagatgaacacaccacgagggccttattatccaaactggtgaagaagcctttaggaaaaacggagggggaagatcacttaattatatgaggtggggggtagagcaaccattcagtcttaaaattcaaactaaaaataacctggcattttcaccccccacattttattaacaagcttgtttagatcagcatacggttcctgtttggaaaacaagaaagtgaatagtaaactttcctaagtcaactgtaaatcacataggtactaaaactcttcacccctggtgcctgcacagtccaagatttcaagtaaactccagacactgagaacacctaatttttaactagtttccaacatttctcatttgtaatcaccaaattatcttagagacacttagataacctaacaaagagagcattttttaaaagccacaacccaaattttacatgaaatacaccattttcacaacctaaatttaatcccggttgccactgcgaagtgatgcctgtttcagcaaattaagaacttccaaaaatactgaacacgttaacacatgcatggcttccctcgagctgccatttaagattaatattccacttaaataaaagtctgcttctgttcaaaaaattaaatcggttgcaaagaggaagttaccgagaaaccaccctcacaacgtggcctttacactgtcagaaaataacgtgactctgtgccacccaaaacttaccaggaagctggcaataactttgccaattctacactcctgaacccaacttcaaagagcctccaccaaatacctccttaagacgataaaaagcactaagttacaaataaacacgtcccggagcaaggcccggctgccgcgcgcccctcccccggccggcgcccccgccccggacgcgcggccccaacagccgcccgcagcccccagcacgccggccggggtcgccgcgcccgggccggggacgcgcccggggaggggagatttccattgccgcccgaggtttcacaaaatagcatgcaccgaaaagctccttctcctctgctaaaaataggctataaaggagtcggcctcatgatggctccttgattcaatttgctgcaaatcctttcctgaaagcctccccccccaaacacacacgcacaaaaagggggtgtaaatgcacgaagggaggaagagggggagaaggccgaggtgcacattttcggggacaacataattagggtgaggatcccccgagaccgggaaagggtaggggggtgggcaggcacgtgagcatttcaaagaaacctgagagaggaaaacggggggatgggggcgccccaagtgccctccctgccttcccttcccccacgcaagcccagttcccccaagggccaagttgaaaaatgcatgttccactcgcgcccatccccccgcggcccagcgcccccggccgcctctggcccgcgccccccgcccaggcccccggccgcccccactccagggtccggcccccagcgcttacctggaaacggtggcctccaacgccgctcccccctcccgggaatggaggcacaaggaaattcccctcctcgccgccgccgccaccgcctccaaccacccccaaaataacccctccggggggtgagaggcaattataaccccagcgagcggagggcgcgggggatgggcgccgggcgggcgggggcggggagcgcggcgcgggtccccaggtggcgagcggaggtgctcccgccgcggggggaggggcgggggcgcacgcggccggcggcggggggaggcggcgcgcgggggaagggcgcgagcggggagaggaattgaggcagaaggtaaaagctgttactaagggaaagagccaaacggttcggagcagccaacggctcagacactcaacactggggagagaggaatggggaccagccaggcacaaatgagctcgcgaggcccgcggcggcggcggcggcggcggccgcgcagcaaaacaaacccgagcggcctgcgccgggcgggcgggcgagcgggcgggcgggcgcgcgggggaggggccggcgggggaggggcgccgcggacgccgggaggcggcggcggcgcggcgggggggctccagcggccgcgctcctctccttcccggcccgctctggcggcactgggggctgggctgtgcggcgcattcttttaaaaatcaggcgagccccgcgggcactcgaaggcgcctcggggccccgggccgcccgccccgcccccaccgccgcgggccggcctgggtgtgctcgggtgtgggccgctgggcccgagacgggtgggggcggggaggcccgcgcggtggccggggtggagccgccggcgaagtttccccaaggacgccgcgggctcccgcgtgtccggggggcggcccggcggcgttgggggctgggcgcacacgcggcgggcatgtgggggagtgcggcgcggcatcatatggacatttgtttgtgaaaatctctgtgaacacctttgtgtgcgtaaatacatatggttctccgaagcgtacctggaaaggtgctttatctgtaataagcgactttcaaaatgtgatccagagcacgggatctggagagaaaacacgcacacaagaaaaggtttttgatactaaacacaaagctgtaattgaagtatttatgcccaaatgtactgtgaatcaagcatatggtggtatttatcatctggtgggtctgtttgaaaggtttgctcgatcagttcttatttcacaaaaataaaataatgtaactaaatgtttactaaatatatacctgcacagtggcatccacagtagaagtttatccactttgtgtactttttgcatgtgtgaagcacagcaaggcggtttataaagtataacttagatgagtgataatgtggcagtatggttgagggagggttgtttttaaagaagggaggcacctcacaggttttaaagcaaatggggtggtaatctttctaagactttcagaaagatggggtagggtgctttttagagctttgtataagctcaggactggagaagcagccacccttttacattaagatacgacttgaaacctttttgttatttcgcttattactgccttcaaagcaaaataatgtttgcagctttcttaaaggtgaagggttctgttttcctactttcatcagaatatttgaaaatagatgtagtgatcactttaaagcaaccatcatttcctctcaatatcagaaacctgaagttttgcgacacacacacacacacacacacacacacacacacacacacactactcgtaacttgcaccagtctggactcctggtggcctaataagttcagtaattagacaggtgctttcttggccaaggtcaatgtctctttcccccctgagcccttgcttgggggagctgccagaggcctttcctgaatgacctagtggggcagggagcaggaaaaccatcagaggaaagggagtgggattggaaactcccttccaaccaccagagagttcaaagcatattagtggtgtgtccttagagctattttcatgtatgaaagtgggaatgttggattaaacaatgtcacccgatgggaatttagataactgcaggtttccaaaacactatgcagagtgtacagggaaa

SEQ ID NO: 316403 - DNA, 4001 bp, Homo sapiens
atgtccagcaggttggcaggcatggctgcctgccgcttcacaacgcccagatcttgggttagtcttcaaccttgtaagaacagaacccaattttatcacttcaagacagaaatacgtgggccttggggaagctaaattagaaggcctgataactggaatgtcaatctgtaaatttactttgagattataactgctaagacaactagaagattcagatctaatgttcttcctctttcaggactagctacacagaaaatcaaattactatcagctgactgaagacacattgcttcagagtagagttgggtgctctcattcagacactagctccaaaagtctgggacatccacatcaaccgcaggcttctcgtcttcagataaattcttacataggtggttcctgtccatactgcacttagcccactatacttccacttggaaaatgctataaaataactgaagaggttgcactgtcttatcacacttgggaggcataccgagtctttaactcacccattcatcaccacttatgggccaggtcctgcgtaaagcattgggactagaaaattattaagacaattctaatactcaaaagacttttagagggaggggggagtgtaaaaacagacacaagcagataagtataaaacaacgcagtaaatgcaataatacaaacatgcacagaatatgagaaactcccagacgcaacacttggaatggggcggggagagctcaggaaggtcttctctaaggaaatggtgcctttcctggaagagggcagaggaccgggaaggataaaatttatttacaaaccattgtaaatgactactttaatctacttaacagtgatattagtttctgtttcataaagtgaaaatttctaattttacctaaaatctgttctaagtgaggcattaaatctgtgcagtttcaaaccaaatttggtggaaagatacctaaatcagtgaaaaatccaaattatggaagagtacacgaaaaacggttttgttttgcttactttcaactaacaccgagtgtgtgccaaatagagctctcaggattgagctttgaccatttggcacaacttttatttgaaagtaatttattttaacaaaattaatatcatgccactctcatttgaactgtgacttcccttagtgactatcttgtacggtttctgaaagcagtttgttatatcaaggagggacaaaagcggtaattttcatggcttttcagttgaatatgaacttcttagagtaggggaaaaaggcaaagaaaaagagcaaaagcaggaaatgctattagatacattagcctagattctgtagcttccttttctaaatctcgctatatgagatttagtacgtaacaatttcccgtaaatcaaagacctcggaaaaatataagtcggaaacaataaaacctaaatcgtctttgcgttctcatttcacagcgagttaaaatgtagatgcgatgcggatactgcgtcccctggcactgcctcaattcaaaagttagcactttgcgctaaggtggctctgagcactcccctccgaccccgcttcccccctagaggagcatgaatgcaccaccggagcccctcccctcttgctccttacagttctggcaagggtccgacgcgagggctttgtccgactagttccacctcccacccagtacaccagaagggaggacagtcgctccgcccgcagggctgttcggacgcgcatgcgcactggggcgtcagctggccaaccagcgcgcgacgcacggccaggcgctcccacctgccctcgccccggtgggcgacaggctttgacgggctcctagccgcagtgccctctgagcccccaaccctgaattctcagctgggccctcccggctccacctgcccccaacaccctccccgctccggcggcggcagggcgctcgaggcaagcccgggcagggggacgagctgcaggtgacgccctggttggctggagcgtgccaggccttccccctacggcgcctgcgcacagccagggcgtggattcaaccttccgcggtgccctgcctctagctgacgtcagcaccctggtaactgctgcaccttcgccgcgcgctttgagcccccgcccctccgccttcttaccggccgccctgaggggtctcggcgcgctcggctgagagctttaggaggcgcgagcgagcactccgactaggccggagggactcggaaaatgatggtccggcaggtggtgggtcctgacccaagggcctgcaaggaacggagaagggcaaccgagcacgcgctggatcttggggaagaaggggaaagggactgctggaggaggcgcgcatgcgccgtgcggtccttcgccccgggcgccctggcagggggcgaggctctgcggaactcccggagctggcgccagggaacaagtctcagtggagagcctcgaattttaaaagtctcatttaagtatttcttttggttttccttgtataaatatagctaacttttaaacatttcttttccggcttgtgttgtttgctttggacccttcagcacctatttttaaacgttaagcattccccagtcagcatgaaagttttactgttagttttattttgttcctataattttgattccccccagaaactgccacagatgaaatcaagccaatagaattgaaagcaaagatcacctggtggccatgaagccgaccatccttaggcagaaactccttacctgaggaatttagaggtaactagacttccctgttacctaaagccagcatctggtaccagacttcttccctccaaatttaaaagtaactagaatttctatgcatctccgtaatgcacgcatgtcaaaactcattgtgcaccccttgccatctgctccatgccccaatcaacccctgtcccctaccatccagatactttattaccctcacatacttgcacaggagttacatatgccactagtacaaagtcctcagaaaatcccccaagtgttatgcctctccacaaggtggcaaacggagatttgggaacaatttgagttcatgtcccttttccattgtctgaactttggcaaattcaatccaagttgggttcatttagccaggatccctctaagttcattcaagaatttcgggctttattgcctttgatttaacctggcaagacacatttgtggtattaactatttgctgttcccacgaagaaaaaatcacggtctttagctcgagtttgggcagacgaaactcatgttggcaatcctaataatagagccagggcagaagctgtccccaacacagaacccaattggcaataccacgctgccaatgccagcccaaacagagacaggggaagagaagattataacatgtttgttggaaggaatgaaataaaacctgttaatttttctaaattatgagagatcactcaggaccaaggacccttcccttttccaagctagactaatggaggccatgcataaatatacagatttagatcctgaaagccctgagggccaatcccttctggccatacattttataagtcaggcttccccagacatcagacaaaaactccaaaaattagagcaaggcccacaaactcccttttgtactttattaaaagcagcctttaaggacactgaagttgagaatgtcccaaacctccaggttgcaagccatccctgggaccctgtcctcactgcaaattggaagaatgagtgtccctccctcatgaagggggggccacctcttccttctaggctatgacagccacagtctcaccaacctacctgacaaggggatcctgcagaacgagggtgagggtgagggcgagagcaagggcaaacacctctaattctattcctggattatgatcaagcctctgaaatgtcagtcatccatcctctagatggggccttgaagccatccacggccctgtcttttccatctctgtggatgatcccagggcaaatctgattgtggctgaacaaca

SEQ ID NO: 316404 - DNA, 4001 bp, Homo sapiens
aagtctgggacatccacatcaaccgcaggcttctcgtcttcagataaattcttacataggtggttcctgtccatactgcacttagcccactatacttccacttggaaaatgctataaaataactgaagaggttgcactgtcttatcacacttgggaggcataccgagtctttaactcacccattcatcaccacttatgggccaggtcctgcgtaaagcattgggactagaaaattattaagacaattctaatactcaaaagacttttagagggaggggggagtgtaaaaacagacacaagcagataagtataaaacaacgcagtaaatgcaataatacaaacatgcacagaatatgagaaactcccagacgcaacacttggaatggggcggggagagctcaggaaggtcttctctaaggaaatggtgcctttcctggaagagggcagaggaccgggaaggataaaatttatttacaaaccattgtaaatgactactttaatctacttaacagtgatattagtttctgtttcataaagtgaaaatttctaattttacctaaaatctgttctaagtgaggcattaaatctgtgcagtttcaaaccaaatttggtggaaagatacctaaatcagtgaaaaatccaaattatggaagagtacacgaaaaacggttttgttttgcttactttcaactaacaccgagtgtgtgccaaatagagctctcaggattgagctttgaccatttggcacaacttttatttgaaagtaatttattttaacaaaattaatatcatgccactctcatttgaactgtgacttcccttagtgactatcttgtacggtttctgaaagcagtttgttatatcaaggagggacaaaagcggtaattttcatggcttttcagttgaatatgaacttcttagagtaggggaaaaaggcaaagaaaaagagcaaaagcaggaaatgctattagatacattagcctagattctgtagcttccttttctaaatctcgctatatgagatttagtacgtaacaatttcccgtaaatcaaagacctcggaaaaatataagtcggaaacaataaaacctaaatcgtctttgcgttctcatttcacagcgagttaaaatgtagatgcgatgcggatactgcgtcccctggcactgcctcaattcaaaagttagcactttgcgctaaggtggctctgagcactcccctccgaccccgcttcccccctagaggagcatgaatgcaccaccggagcccctcccctcttgctccttacagttctggcaagggtccgacgcgagggctttgtccgactagttccacctcccacccagtacaccagaagggaggacagtcgctccgcccgcagggctgttcggacgcgcatgcgcactggggcgtcagctggccaaccagcgcgcgacgcacggccaggcgctcccacctgccctcgccccggtgggcgacaggctttgacgggctcctagccgcagtgccctctgagcccccaaccctgaattctcagctgggccctcccggctccacctgcccccaacaccctccccgctccggcggcggcagggcgctcgaggcaagcccgggcagggggacgagctgcaggtgacgccctggttggctggagcgtgccaggccttccccctacggcgcctgcgcacagccagggcgtggattcaaccttccgcggtgccctgcctctagctgacgtcagcaccctggtaactgctgcaccttcgccgcgcgctttgagcccccgcccctccgccttcttaccggccgccctgaggggtctcggcgcgctcggctgagagctttaggaggcgcgagcgagcactccgactaggccggagggactcggaaaatgatggtccggcaggtggtgggtcctgacccaagggcctgcaaggaacggagaagggcaaccgagcacgcgctggatcttggggaagaaggggaaagggactgctggaggaggcgcgcatgcgccgtgcggtccttcgccccgggcgccctggcagggggcgaggctctgcggaactcccggagctggcgccagggaacaagtctcagtggagagcctcgaattttaaaagtctcatttaagtatttcttttggttttccttgtataaatatagctaacttttaaacatttcttttccggcttgtgttgtttgctttggacccttcagcacctatttttaaacgttaagcattccccagtcagcatgaaagttttactgttagttttattttgttcctataattttgattccccccagaaactgccacagatgaaatcaagccaatagaattgaaagcaaagatcacctggtggccatgaagccgaccatccttaggcagaaactccttacctgaggaatttagaggtaactagacttccctgttacctaaagccagcatctggtaccagacttcttccctccaaatttaaaagtaactagaatttctatgcatctccgtaatgcacgcatgtcaaaactcattgtgcaccccttgccatctgctccatgccccaatcaacccctgtcccctaccatccagatactttattaccctcacatacttgcacaggagttacatatgccactagtacaaagtcctcagaaaatcccccaagtgttatgcctctccacaaggtggcaaacggagatttgggaacaatttgagttcatgtcccttttccattgtctgaactttggcaaattcaatccaagttgggttcatttagccaggatccctctaagttcattcaagaatttcgggctttattgcctttgatttaacctggcaagacacatttgtggtattaactatttgctgttcccacgaagaaaaaatcacggtctttagctcgagtttgggcagacgaaactcatgttggcaatcctaataatagagccagggcagaagctgtccccaacacagaacccaattggcaataccacgctgccaatgccagcccaaacagagacaggggaagagaagattataacatgtttgttggaaggaatgaaataaaacctgttaatttttctaaattatgagagatcactcaggaccaaggacccttcccttttccaagctagactaatggaggccatgcataaatatacagatttagatcctgaaagccctgagggccaatcccttctggccatacattttataagtcaggcttccccagacatcagacaaaaactccaaaaattagagcaaggcccacaaactcccttttgtactttattaaaagcagcctttaaggacactgaagttgagaatgtcccaaacctccaggttgcaagccatccctgggaccctgtcctcactgcaaattggaagaatgagtgtccctccctcatgaagggggggccacctcttccttctaggctatgacagccacagtctcaccaacctacctgacaaggggatcctgcagaacgagggtgagggtgagggcgagagcaagggcaaacacctctaattctattcctggattatgatcaagcctctgaaatgtcagtcatccatcctctagatggggccttgaagccatccacggccctgtcttttccatctctgtggatgatcccagggcaaatctgattgtggctgaacaacagataatgttactcatagatacacgggacagttattcagctttataaacatttactatggcccaatgtgccagtcctccattttcctcatggatattgatggaaaaccccaatgaggctgtttcacacagccattcccttgtaaaatgaaaggctattcctttactcctttttagccctgttctattaggttgtgatttacaaaattacaagctaatttacagctaaggccccaccttctagctgtattaacacttcaccaaaagagcccctgcagcttctcccagatagcaatctacttcagtatgtggatgacttactaatctgtagtccta

SEQ ID NO: 316405 - DNA, 4001 bp, Homo sapiens
tgcagtggcgtgatctgggctcactgcaacctctgcctcctgggttcaagtgattctcatgcctcagcctcccgagtagctgggattacaggcgtatgccaccatgcccagctaattttttctatttttagtaaagacggggtttccctatgttggccaggctagtctcaaactcctgacctcaagtgatccgcccatctcagcctcccaaagtgctgggattacaggcatgagccatggggcctggcctcttctctaagacagaaacctgggcagtggcagcctttctaacctctagccctaactcttggacccctttatctacttgccatgaagtaggcatttataaaggcaaattagatcagaccacagccttgctgagttagtctttcaatggctcccagggtccaacaagctctcacgttcaagctccagcatcacagtcttacctattctaatatgtcacccgtattcttccctcttagccttgctcaatccattccctttgcttggtacactttgtcaccctgtggcatttgatctcggcttaggtgtctttcttgggagaagccttccctgaccacccttgccccatgcactgccgccctcccctaataaatccctggctccccatgagcagggcccgggttgtctttgttctctgggcctcgtgtggcccctatcacgtgataggggcccagagattatctgaatgaatgccctgattagtgagcgcatgttttgcagaagaggaggctgaccctgatgaggtcaatgtgctcaggacagagattactgccttcccaactgaggggattgtgcagagtggaatccaacaaacctgtcatttcatctctctgaaattatgacaataccaccacctatcctacaggctgctgaacagcatgatgatggactgtccagaccttggtgtcaccctaacttgaagcctgagctctacgtgcagacttgaagcttgctgcaaaggccattaagctggtgggcttaaagcctgagaactcccctctctgtcaccagcacaggagtgtccttggaatgccaagcatggggttgcggtatggacagatttactcaccacgaagggaaatgcgtggagccatcaggcgtggatccattctgaccacccagacctggaggcagaaacacatccagagctgcagaaggctggggtgggaatctgagcaggcatcagcccaggtcaggttagagaccactggtattgtttggtgaagtctggtgagggtcctaagggactaatggtattgccaggtgagagttctgaggaacagatacaatgtgatgggtggactggtggggattctggcgtaaaatggtatggtggcatgagtcagggcacaacgttaagttctcccatccaagtacctggcttagcttccgaggtcagatgcgttcagggtagtaaggccgtgaaccaatgttaagttctgatgagcctcttgcaggatagtggggaacccaatggtacagtcgggagagggtgggggcgggggcggccagcccacggaggttcgtaggaagcctcacctggacggtgatacaacccggtcactgtattcccgtagaacccccacgccagctggatgcccaggagacttaacaccaaccacagcagcagcagcttgaagagggtcacgcgcatgtcctgcgcctcccactcccgcaagaactcgctgcccagcgcgcccagcaccgtggccggcagagcctgcaaggcctgcccagaccaggactccgccatgactggccctcgccccacccggggtactgtcaccgtagtccccaccacgcacgcgtgtggtcttccgggaccaggcccgttagtgcgcacgcgtaaacccagccagggtggggcctacttcgcgtgcgtgaagagttggcagttcggggaggagtattaaaaccgcgcacgcgcacctaaccccaccctgcttgcttaagggatgagtgactccgggagtacaaaatagcaaccaggtcttttatagccccggagttcccgtgatgccccacgcggctgcaatgattggttaagggttttgcttttagggcgtggacgggctcctgagcaatagtggatgagctgtgagtgcgcgcgcgtgcgcggggccgcgacctgtgccggctcgagcccgctgggcactcggaggcgcgcacgtcgttccccgccctcccgccgccgcccgccctcgctctctcgcgctaccctcccgccgcccgcggtcctccgtcggttctctcgttagtccacggtctggtcttcagctacccgccttcgtctccgagtttgcgactcgcggaccggcgtccccggcgcgaagaggctggactcggattcgttgcctgaggtgagcggaagggttccctccaggcgccgcggggccccaggcccgccagcccggtactcttccggccggcaggccgccgcaccgccgcggccgcgccccaccggctgctcgtggccgagccgcccctggcccctgacccttgacctgactcccagcccgggccccgcgccccaagcggcgaccccgcccgcgcagtccccggaagcgcgcccggtagtctcctgtgccccttcccccgcccggccgggcctggtggagcccaggctgcccgcctgcccgccctcggtccccggagcttcctctcccagcggcgccgggcagggcgggggctttgggccgggccccgcgaccgcgcagtgtagccggccgctgaaagcgcgcgtggctgtcggagttgaaatgggaaagaaactctttacaactccattttgctttttacgtttaacgagaaacgacaatcactgtttcatattgattaaagtccagttacactttgggtaggttttcttttaatgcagacttgttggagactgtgtaagtaagtaaaagattgtattgaacgcttaggggtatgatctacggccataccacctggaacgcgcccgaactcgtctgaaagctttggggtctgttttgagtggaaaaggggtattttccatttggaaaaaaaaaacaacacacaaaactgtaaatgatttaagcgatgttgcatgaaaatagatgcaatgttgcttagtcgaagtcgctgtattgattaggaatgatctaaatatctgtaccttagttactgattggatctacagttacgggtcgtcttcattgaatagcgctattcgcatccaagttgatttgttcacaaaccttgtttagtagtttacggtggaaaattggaatcctttttacctcaaagttggttccacttgtgttttttaatagttctgattttaaatttttacctctgttgttgacttgtttggttctgtcttgaagaaagtcttaaacgtttcttgcaggtgtgtaagtagatatttcactctgcctttctgaaggagaaaaattgaaaaaccaaaaaacttccataatttaaaatgttgtatgtggagagaatttttcaaccacttagtatcacccagatgtgtaatgtgtaccatgcggatgattgtcaccttagatgtggctagattggcggagatactgttttgagcatttggcacaagtgacattggactgaaaaactagtttttaattgtaaagaatgacttattgaaggatctctggataacttgtcttaattggttccatctacttttgtggagcactgatggctcttggggacattaaatatataaggtgcaccttggtttgagttaaagtctagtgctagatttatcctctctgttctcataaaaatctgtgttggagggaagaagagagtaggaatactgtgtagttcttgagttttagatctaagaggaatctttcaggactggttgtccaaccccatttgcagatgagcaaactgagtcccagagacttaagtaaatttcccaaggttacctatctagtcaggagcagaccagaactgtctgctctgttaaggtattctccatttac

SEQ ID NO: 316406 - DNA, 4001 bp, Homo sapiens
gcaacttctcccatctttttgtcattagtaccacttaatccttctttttcatattttttattataaaatataaacaaattaagacaaatcataggccacatgtgtatcttcaacctggacctgcactgaacttcaacacattccaactcatgctccatatgaatgtttattaggcaactcaatacatccaataatgagcttctcatactcccctctcccccaaaacaaaatatatacttgttgttaattttgttctgcacgctttcacaaaataaaataaaataaaataaaataaaaaaatacggctgaatggcattctgggcattcagaaccttttaccaagataactgagggtatctttctctgtgttcattctacccaagggaaaaatcctgtatgaaatttgtatcactttttctgtgagttaccaagagaataaaaataaacaaagaaatttgtatcacattataatcaaaattcctgttttccatatttgccaagcaaatatggggtgtgtgtgtgtgtgtaaagttagtgatcttacaaacctagctgagtaccctctgctctggcccgtgagcctgacatttttttcagtgtgtgtgtgtgtgtgttgtgtggtgtgtgtgtgtgttgtgtggtgtgtgtgtgtgtgtgtaaagttagtgatctcacaaacctagctgagtaccctctgctctggcccgtgagcctgacatttttttcagtgtgtgtgtgtgtgtgtgtgtgttgtgtggtgtgtgtgtggtgtgtgtgtgtgtgtgtgtgtgtgtaaagttagtgatcttacaaacctgagtaccctctgctctggcccgtgagcctgacattttttttcagtgtgtgtgtgtgtgtgtgtgtgtgtgttgtgtgtgtgtgtgtaaagttagtgatcttacaaacctagctgagtaccctctgctctggcccgtgagcctgacattttttttcagtgtgtgtgtgtgttgtgtgtgtgtgtgtgtgtaaagttagtgatcttacaaacctagctgagtaccctctgctctggcccgtgagcctgatatttttttcagtgtgtgtgtgtgtgtgtgtgtgtgtgtgtgtaaagttagtgatctcacaaacctagctgagtaccctctgctctggcccgtgagcctgatatttttttcagtgtgtgtgtgtgtgtgtgtgtgtgtgtgtaaagttagtgatctcacaaacctagctgagtaccctctgctctggcccgtgagccttaatcctagcgagggctcgctgcggtggtctaagggcctccagatcccacccgggtaggacttcgcacagatgcagctcccgcgccgggagtgagcccatcctggcacccgtgtgcacagtcaccctcgaatcacggctgaacggcatccgacgcgagtggcttcctgcctctattctacccatctccttactcaggacgccatcgcgggtttcccagggccaaccattcccgccgcgccaccctaagacgcgcccggcgcccaaacactgaggaagcgggtggggtcccctgcggcccctgcagcgggaggggcgcccggacgtcacagcagggccgcccgcccgcctcgcggcctcccgcctcccgccccgcggaccccgcgcgtcccccgcgctccttccgtggcccaggtcccaggcgagctccgcccctcagaccagcgcgctcgaggtcgccccgccacagcccgtcctctacccgcctctgctggaaaacaggccgcagaatataggtgttctcgggctcccctgcgttcttctcagcctcaggcaccccgtcgcccaccgagaaggacactccgatggacgtggccatgccggggcttctcggtccgggcgtagctcgcgatgaaggcctagcgggttgcggtcgcggccggcagcagggaaagcgtctccagggcaacagggccgccctcccgcctcgctgaagcccgcgagcgccccgcacagccgccctccctgcccgcgcctgcgcaccggctgctgggcgggaactggtcgcgtccggacgcgcgacagcttccacccgcctcaggcagtatcagccgcgccgcagtcggaggaaatagacgcggggcctgaggctcctggacttgaggtattaggctggtgcagaagtaattgcggcggccgggtgcgggggctcaggcctgcaatcccagcactttgggaggccgaggcgggcggatcacctgagtcaggaagagttcaagaccatcctggccgacatggtgaaaccccatctctactgaaaatacaaaaattagccgggcgtggtggcgcgtgcctgtaaccccagctgctctggaggctgaggcagaataatctattgaacccaggaggccgaggttgcagtgagccgagatcgcgccactgcactccagcctggcgacagagcgagactgcgtctcaaaaaaagaaaaaaaaaaaaaaaggaaggaaggaaagagacttaggctgcattccccgcttttaaaaatatatatttatttttatttttttaaacgaagtctcgctctgtcactcaggctggagtgcagaggcgcgatctcggctcactgcaacctccacctcccaggttcaagcaattctgcctcagcctcccaagcagcagggattacaggcgcgccccaccacgaccggctaattttttttgtatttttattagagacggggtttcaccatattggccaggctggtctccaactcctgacctcaggtgatcgcccacctcggtctcccgaagtgctgggatgacaggcgtgagccatcgtactctgccgcattccctgcttataagcaccagtccctggtcctgttttagaaggctgttgtatcttggcctctgctagcttcaaaaactaaggcccgatgaggtagctcgtgcctgtaatccctgtttacaggagaggctgaaagggcagggattcctttttttttttttcccacttgagacagggtcttgctctgtttctcaggctggagtgcagtggcacactcaccgctcacttcagcctcgacctcttggactcaagcagtcctcccacctcagcctctggagtacctggaactacaggcgaatgccaccgcgcgtggctaatctttttaatttttgtagagataggatctggctatgctgcccaggctactattgaactcttgggctcaagtgattatcccacctcagccttccgaagtgctgggactacaggcatgagccatcacagccagctgggatattgtttttcgaatcgctgtcatgttctgtactatatgcagttcctgaaagaatggaggcaagaaggagtcagctaaccactgtgaactgtcttagtgccaaggacccacccttctctccttggggtcctgctgacccatcagaatagggctgagccaggatggggcttgtggagatgatgtgtatgagtgtgcatgcacttgtgtgtgcatgcctaacatccaaaactagatataaattctttaaacttttcattagttggccaggcacggtgactcgcacctgtgatcccagcactttgggaggccgaggcgggcggatcatgaggttaggagatcaagaccatcctggctaacattgtgaaacccggtctctactaaaaatacaaaaattagctgggtgtggtggcatgtgcctgtaatcccagctacttgggaggctgaggcaggagaattgcttgaaccagggagtcggagcttgcagtgagccgagatcacaccactgcactccagcatgagactctgtatcaaaaaaaaaaaaaaaaaaaaaaattctgcgtgagttgtgtggaggtgtcagtacctttccccagcaagagaagcttctccatatcaggcatatcctagccatgaccctgaaactaaccagccaagagggaaatgtgagacaagcccaggcaagcttcctggatgttgtatgcaggaataggatgtgctct

SEQ ID NO: 316407 - DNA, 4001 bp, Homo sapiens
tggatccacaggtgctgggaagaggtgttatttacttctacacatgattttttttttttttttttttttttttttgcgacagagtctccctctgttacccgggctggagtgcaatggcacgatcttggctcactgcaacctccacctcctgggttcaagtgattctcctgcctcattctcctgcctcaacctcctgagtagctgggattacaggcgcccgccacaacgcccggctaatttttgtattttcagtagagacagggtttcaccatgttggtcagtctggtctcaaattcctgacctcatgatccacccgcctcggcctcccaaagtgctgggattacaggcatgagctaccgcgcccggccttacacatgatcttgggagaagcaaacgtaaaataatttgtattgggggagtgaggccccatccagtcaatggtgggatgcagcaacatttccaactccacagcagttgactatttcattcctgctgcgcttcgcctcctccctgtgtggccttttcaggtgaaatgcttcaggtagcatgctgagattcacaggggacaggggaacatggcctgaagctctaggaggccggaggtgggggagggctccgcaaaggagaaggctagccctggagctgcaaggaggtttaaagatgttactcagtgtggtacatttgtaaggtagcttgtgcaccacagtcctcaccagtccaaggtgctaagtagataagtagcgcccacaatattagtctcactttatggacaagacaactagttctattgggggatttggatgtcttgtctttagagactgggcaggcctgtggcagaactggcaaaagaacacacccctgcgttgctatttccttatctaaagctcttgtggaatttttagagcttaaataggacccctggaaatcactgcattttcagaggaagtaactgaggtctccagtctggcgatgttgtcattgacgggaccagaaccccaggatgccagcttttcagccacacaaaatcccttctctaaggaccagaaccccctgaagagattcccattccccataggtactgactgcagaggaagccaagtggatccagggtattcagagcctgggccaggttttgggatggggggtggggagaaggggaagggaagggctgtggtgtttaagagaggttagatatttgccgttgggctggagatgtaagggctatttaacaggtatttgatgtctactactgggcggcctgtagactggagtttggcgctggagaaacagttgtgagaagtaaccccactgtgaggctggagagaaagaacagtaattgttgattctaattgtactaactgcaaaaagttgttgctgcctccaggtgggggaattgaatggctaccctaggatggccactggtcacctctgcttggtcactgttgaaactgggctgctggccagcctccaggccaatgagtgctttgtgtcaaaaggtcaggcctaggattgggaagtgctgtgcaacgggggttccccaatcacaggcagcccatctcatcccttacaaaaggcactgagagcagaaaatgaaaaacaatgctcttggtgttggccatttcttggtactgcccttgagacattgtgtattaaaaactggggcagaattgtgtttaaaaatcacacaaataagcatttgacttaaaaccatccaaacaagaatggtggaatgaaatacatcataatcaaaggacagacttcctgtgtctgcctaaaattcaaggaagaaaataaacttggagaatgggatcaattttagctatcaaaagccaattcgaccttgtttaaatagttgagaacacgtagaactaaattccaaccaaagagttaacaaaagaatgccatgtctgcactacaatgacagtatttcaaggtaaaagccttcttttatcatagggcacttaggtcttacctctgtcattgttcccttgaacatccaggcaggccagaagataagagagagcagagggggcgggggagttctgtatatgtatgtaccctccagctgaggaatgctggggcctctaatttcatcaagcttagcttctgttaacacctgagctacactcctgcggaagcattatccacccaatgtgtcctggccacacttcattaacaagttaatggctttctgttttcactggcaaacttacaaattgcaactggaaacttactctgtatttgccaaaggtctctgtgtgggacataaaaggacagattcctgcattcaaaaatctgcaatttcagtggggaagacatgctcaagcaagtcattttagagccatattgttacataaatggcgtaagaggaatggagaagggcttaagagaggacttcattttttttccgtgcgccatgggggccgtatcatatttcttcctatgtagacatagtatacattattttatcaatgaatagacatgacatgtttccacgttttgtggtgaacttccttgtacatatatcttggtgaacgcttgagagcatattcctcttgtaaatttctagcactggaattgcttggttaaagggtggatgcttccaaattattttcgaagaagcctgcaccaatctcctctccgcccctcctccctcccccttgagttggtattgagagcttatctcccaagtacttaccaggtctggctgcagcaagcatcttaaattttgttaatacagtatgtgaaaagtagtatttcattgttgcttggttattgggtgtttgtatttcattttctatgacctggctggtccttcttacagagcacttggactggcttctttgagactcagcccaaatttcatttgctctgggaagtccttgctgagaccatcctccctactccagcttccagctgttctgagagccctgtcctggcaaccaccgtccccagattttatcttgtcttcactgcatatatatatatatatatatatatatatatattttttttttttttttttttttagatggagtttcactctttctgcccaggctggagtgcaatggcgcgatctcagctcaccgcaacctccacctcccaggttcaagcgattctcctgcctcagtcccctgagtagctgggattacaggcatgagccaccacacctggctaattttgtgtttttagtagagacggggttttaccatgttggccaggctggtttcaaactcccaacctcaggcaatctgcctgcctcagcctcccaaagtgctgggattacaggcatgagtcaccttgctcggtctcactgtattgtaaactgctttgtgtgtgtgtgtgtgtgtgtgtgtgtgtgtgtgtgtttgtctttcaccaactcttccccctatcctttattcccttggactaagaggtccagaaatctggtcttccagaaaccttagcttctccaacctctagtgcagtgtttacctgtgctgattttcttttggcttagtctttctccaccagccacatctgtgacagacacatattaaatctcagccctattttctaaaatggggttggggcgagggcaaggtccttgagaagtgccacaggaaaacaacttgtttcctcaagcctcatcctagaaataaaacaaagaataccctcttcccccagcaaagaagggaaaaaagacaaatttgaaatacgtaacccaaaccaccactgatattctgggctgaattctgggcaacttgttaagagtatttaccatatacggccgggcgcggtggctcacgcctggaatcccagcactttaggaggccgaggcgggcagatcacgaggtcaggagatcgagaccatcctggctaacacagtgaagccccgtctctactaaaaatacaaaaaattagccgggtgtggtggtgggcgcctgtagtcccagctactcaggaggctgaggcaggagaatggcgtgaacccgggaggcagagcttgcagtgagccg

SEQ ID NO: 316408 - DNA, 4001 bp, Homo sapiens
gtggttctgggttccccagtgtgaagtggactcaggggaggaaaactgcactctagggaagtaaaatacacaatccttgtctcacttccaaaaccaaaagcagtccagcacctgcacagttccagaaccaggtgcccttttaggtgaaagagtgttggaaagatactcaggagacacatgaagggccagggcagaagcatcgaagtcaggcagttcttactgtgctgtatccccatgggcggcacacgctgggaagaccgaggccgaattgcaggctcctcctggggccaaatgctgtcatctctgaaggccaggtatccccgagatggacgagcaaattcctgatggcccagcccttaacgacaaaatcaattcatggagtctgtattttaggccacataaaaattgagagtgatcaaaagaacaaaaggtctctcaccggcaactaatcccagttcaaagactttagaaatggccatgatccaaatcacactaggaagaggaagtcagacatgagttagccaaacaaaggaaataaaaccttacaagttaacacccaggtcctctcatcacaaggacaagaccacagatcactgaaaagaaattgtagagcaccatctttctttttttaatggctaattcatgtaacaaagaaaaatgttgaaaaaaagtcaccaatatccaagtctttttaatatatattattatttcttaggccctgtcctcacataagtacctaattttaagtaggtatatgtcttttatcttctatttcacatgttttcccctgcatacaattttcatataaggattaaaaaatagctgcatcccatgttaccgatgaatcattttacaaactactgtatttatttatttatttttgagagggagtttcggtttttcacccaggctggagtgcaatggtgcgatctcggctcactgcctcccctccccagttcaagcaattctcctgcctcagcctccagagtagctgggattacaggtgcccgccaccatgcttggctaatttttgtatttttaatagagacggggttttgccatgttggccaggctggtctcctgacctcaggtgatccacccgcctctgcctcccaaagtgctaggattacaggcgtgagccaccgcacccggccaaactattttaaccaatcacttaaaaggtttttaggtaaaaaatgtgggtttttttttttttttttgctattatcttaatagttttgccaagtattgaatctgcttatacctttaatcttttcggaagattttaaatttggttgtagtactgacctttatttgtacaagaataaagaaacactatttcataggcagagtcattaacataaaatgaaaattaacattaacacgaaaatgttaaaagccaatggcaaagttagaagtaaccatgtgaaattccaggtctttcaggaaaaacagcagtgcggttggcagctcttttaaggcttgagcaagagaaaaatcaaatgacaggtgtagaacattacttcctaagctggcaatctctagcaatcaaaaaaagttcacattcaagattagctcatacctgtaagagaagcgggccatcttcctgcagtccatagcttttaacaattagggggaaaagaggcgttagcatcgctttaattcagagtcattgccaaaacagccaaaggaaaacattcatctcctaaagcgaaaatggcaatttaagaagaaaatgagaaattcgttttccccagaaggtcgtagcagaagcaggagcaaggcgtccaggggaaactggagggctttcggccttggacgttttgaccttgagctggagactcagcctttccggggattctccttcttcaacaacaaaccccagtcggggcggggagacctttcaggtgggcgggacgcccaccagcatgacaatggcccacacgcgggaagaggagtcttgtaaaactgtggttaactagccctaatatctctatcattagttgcaggctaaaatgatcagaggtactcttttgggaaaaaaaaagaaaaaagaaaaatcagtttctctaatcaagttggtgattccaggttggaggggtggtggaaagtaattgctttaattaggaaaacctgaaaatgtatgggtctcaaggcattcgatattttattttatttcaggaagttttacttcctgaaatttgcttccacctttgtttttccagaagggtgttttgagccccgtactccccctgggggatacccgggtggccaagaaaggggtgctctccgcctgaggagctaggtgtgtgtgtgtggggaagactaggaagcttgaaactgagatagaagttcagggtcaggaggggttccttgggggctccagacttgaagtgcaaattccaggcggacgtgaattcctgaaaggacgcgggagccggcgccaggtgcccgggagaggggaggggcggccagaggcgcagcagctgggactctccagtgggagtgccggcctgttccaggaaaaagttctagaaccacggcagtccggcatgggaggccatttcagcccccaatcacgggaatttatctcagcctcccagctcccacagggcggcctcttccagcccctcgccgtcctggccccacgacaccgagaattacccccggactctgatgtgccgcttgcaggggtaaacgtgtttattgagtggttccactaagtgccagacgccccagatggagaggcgcgtctatgagccggagtcgcctcacctaacatttcaatcctccgggttatttcatgtgttattaaatacgcccaaagtcgttaatagtttctaaatcgcatttaattccaatttctaaaggaaagcctgacggttacttaatgttgccaggcacacaaatgcgaaacttttattagatagttgtttccatccatctctgtttattggatttaggcctcggcagaaagaattggtagcatctgaggccatttcagcgtcagtgcctacctgtgtgaatgccatggatccacaggtgctgggaagaggtgttatttacttctacacatgattttttttttttttttttttttttttttgcgacagagtctccctctgttacccgggctggagtgcaatggcacgatcttggctcactgcaacctccacctcctgggttcaagtgattctcctgcctcattctcctgcctcaacctcctgagtagctgggattacaggcgcccgccacaacgcccggctaatttttgtattttcagtagagacagggtttcaccatgttggtcagtctggtctcaaattcctgacctcatgatccacccgcctcggcctcccaaagtgctgggattacaggcatgagctaccgcgcccggccttacacatgatcttgggagaagcaaacgtaaaataatttgtattgggggagtgaggccccatccagtcaatggtgggatgcagcaacatttccaactccacagcagttgactatttcattcctgctgcgcttcgcctcctccctgtgtggccttttcaggtgaaatgcttcaggtagcatgctgagattcacaggggacaggggaacatggcctgaagctctaggaggccggaggtgggggagggctccgcaaaggagaaggctagccctggagctgcaaggaggtttaaagatgttactcagtgtggtacatttgtaaggtagcttgtgcaccacagtcctcaccagtccaaggtgctaagtagataagtagcgcccacaatattagtctcactttatggacaagacaactagttctattgggggatttggatgtcttgtctttagagactgggcaggcctgtggcagaactggcaaaagaacacacccctgcgttgctatttccttatctaaagctcttgtggaatttttagagcttaaataggacccctggaaatcactgcattttcagaggaagtaactgaggtctccagtctggcga

SEQ ID NO: 316409 - DNA, 4001 bp, Homo sapiens
gaagctaaaaaggccacgctgcaactttgtggaatacttagctctgtggaattatttcttccctgtgggtgctgggtgttgattttacgctaaaaaaaaattgtctttggagtcaatgagcacacagtatttgctcacaaagaggcaaagtaaatttctaaactttcggtgtcaagaaattgaggtgttgcccactagtctcacccatctgtgcttctacccatcagtatctctctcttttctgcctgtcctactcatcttgtctccagtaactttcattccaattttctttgataatgatgagaaatcttccactgaatgcttactatacgccaggcactgtctaaatgttgaaacacagctacttcattcaccctcaaagcaatccaaagaggtaggtaaggctaaaggttcaagtagttagaggttaagagacttgcccaaggtaacacaggtattaaacagagccacgtggaccaaaatgcaggcaacacaagcccagacagtctgattccagcccctcatttccactttctctctcctctctggtgactggcttccaaaacgcctgaagcattaaatccttgttggacatctctgagcccaaagctggaaaactctcagcatctaggcccccacttgccttgggaatgacaagccctcaccctgatctgccatctcagctgaacacttcctgtctcctcaaggaaacttagtatctacctttctcttcctctcacttcccaaactgctcagaaaacggcgggggggaagaaaacccacctgggggtctcagagccttggtcggcacgtggagaggtaacgtgaatttcccctatattcaagagaaaaggaagaaggtctgggagctcacctgaaatgccaggctcacttttagtaactgctggcatccagtgcggcaggggccgagcgctccagtgctgggagctgaaagaacagtcacccctgcccaggaaataaccactgagccaaccatcatgccctgattaccgtcctcagggaaagcctaccggtccctctaaagcaccctcgtcccattctcaaaccccctgtggaaatcagaagccaaacctagctttacaatgtcaggtctcttcgctagagctctggtcacgcccctcttcctggagtactccaatcacacttggcgcccagaaactgccgctgccgctgaccttgggcagactgcgccctccctctagcctcggctccccctccgctcagaggcccgggatggacgcgtgcggccggtgccagcgagcctcagggaaggctgcgcccagccagcttcctggtgccgctcacgtgcgcggcggcggagggccgggcccttaaacggcccccgtcctgggctaaacttcggtgctagcagagggcggaaggactatggagggtggggggccgccgcctcccactttcggattccagcccctgctcaccccgggccttgcctatttactcagagcctttctcttcgcccacctcctcacggagccccacgcacgtctgtaacttaaaggacgctaaagtttgcagcccaggctgcgaggcgcggccttgggggacgggggcggagttaaaacgcgactcgcgcctctttccctcacctccacggccccggggcatgccctgcaccggtggccgcggaagtgggctgcccggaagagtaggggctgccccaaggtcgcatccaggccctcggacctggccgaggccagctgtgggcaagacaagatgcaaagagcggcccgggccgcgggggtcacggaggggacacggagagtcctgaggtcgcgccagggcggacagggggagtcccagacctacgccccagtgggtatgcctctcctctggcccggccctcacctcagcagccgcccgctgcggacgccgatccgcgcaggcggctcagggttcggttacggagcctgcgcgcgcccgccgcgcacgctcgctccgccccctctcgcggcgggacatggccgtggccgtgggcgcgtgcgcgcgggacccggagggcggaggcctgccccgccccgtctccatggcaacgggcgtgtgcctagccccagcgctggctgcggcggaacccacggcgtaccttcccgcctccaacaaactatccggttgctgaggttgatttagcaacaccccagggcatctgggttggcaggagcaccacagtgacagcctggcccaggctcgggtacgggaggcagcccagtggcccgcagtagagggccaggctggggaccagggagctggggctgaggagaatttgtacagcctagggaggcgcagcacagcagtatcagcctctggcatttgtaccacctttagtcctgccactttctctcactgtggcttcgcaacagacttgggaaccaagaaaggcataggtgaggaagctgaagcccagtctgggctcgcggaagaaactggtggatccaacttctgcatagcgcaaatatctgcttcctgcctccacccacccattcccacttccgtgagtatattcatccatccaacacttattattactccttgccaggacagttctaggggctggggatagagtgaacaaaaccaaggttctgccctcctggagttcacgttccatgggaatgcccttcttccaggctcctccctcagtgcccaggttgtggctgtgggaggctggtctacctttgtggtttagcggtaacttacgtgattcccacgtcaagtgtaagctccttgatgattggttcaatcttcacctcaaatttctgaggacctacaaactacaaagcactcttctaggggcccaaagataaaacgctcccctcgtgaaaatcccggacttttggtgggaggtggggaaggtgacaactatgctcataagcttggctacaagaccggcgaggccaagagctactttggtatcctgacaaggactgatgtttgggagggggatccagcagatgggaacaccacgaaggtggtggtgggaaaagtcagcagtcacagggtggttcaccttgtggatcccactactgcaccagcaaagagcaggctgggcacacagagacagtcaaaatcccagcttcctttccctctgcttcacattcttccttccgcaggcaggggagtttgaaccttatccacagggccaagcctgtcccagccctctaggcaaactggcagaacaggcagctggcccctcacaggcactccgggctgggccagtgcaggtcgcagcagttgttttacctatgaacatcaagcacatggtcaaaccctcagcttaggtgccccaggcaggcgggctacacacttggtagcatttcctttgacacaaggagcagccatggcccgggctcagagactgacagcctctgcctgcagggtctgcgtggtcatttctcctgcttctcagaaggtggtgagcttttcccaggaaaccattataaggaagtgcccattctttatcttgttctctctgctcacttcccttagcctgattggggaactctagagccccacatcagagttcaacatgtgcctcaggagcttcagcacctcttttgtgggaggagagtccgctggtgactggggctgcaggccatgacatcagcctgcccagcttcacctcaggctgcttccaacagtgccaagtgaggtcccttggcaggatccctgcaaggcagcggctggccaccaggaggcagcagcctactctacaaggcactttcttcattccaaccccttgtaacaggtctgaggaaacctgttcgcccagccatgtgctgcaaccatcctccactcccaatcttatctcccaatagcacagattcccctatcatgagtccagacttggccttcatctcctcttgccttcctctgtccaaggaatcactacagagattctttctctatccttctttgtaaatttccagaaaattgtttccccagggcccctccccttgaagaaattaaac

SEQ ID NO: 316410 - DNA, 4001 bp, Homo sapiens
agagaagactgtttaaagaggaagggagccatgtgacccactggggggacattcccaccccaattatttaaaagtaatatttaacatttaaaaggttttgaagctaaaaaggccacgctgcaactttgtggaatacttagctctgtggaattatttcttccctgtgggtgctgggtgttgattttacgctaaaaaaaaattgtctttggagtcaatgagcacacagtatttgctcacaaagaggcaaagtaaatttctaaactttcggtgtcaagaaattgaggtgttgcccactagtctcacccatctgtgcttctacccatcagtatctctctcttttctgcctgtcctactcatcttgtctccagtaactttcattccaattttctttgataatgatgagaaatcttccactgaatgcttactatacgccaggcactgtctaaatgttgaaacacagctacttcattcaccctcaaagcaatccaaagaggtaggtaaggctaaaggttcaagtagttagaggttaagagacttgcccaaggtaacacaggtattaaacagagccacgtggaccaaaatgcaggcaacacaagcccagacagtctgattccagcccctcatttccactttctctctcctctctggtgactggcttccaaaacgcctgaagcattaaatccttgttggacatctctgagcccaaagctggaaaactctcagcatctaggcccccacttgccttgggaatgacaagccctcaccctgatctgccatctcagctgaacacttcctgtctcctcaaggaaacttagtatctacctttctcttcctctcacttcccaaactgctcagaaaacggcgggggggaagaaaacccacctgggggtctcagagccttggtcggcacgtggagaggtaacgtgaatttcccctatattcaagagaaaaggaagaaggtctgggagctcacctgaaatgccaggctcacttttagtaactgctggcatccagtgcggcaggggccgagcgctccagtgctgggagctgaaagaacagtcacccctgcccaggaaataaccactgagccaaccatcatgccctgattaccgtcctcagggaaagcctaccggtccctctaaagcaccctcgtcccattctcaaaccccctgtggaaatcagaagccaaacctagctttacaatgtcaggtctcttcgctagagctctggtcacgcccctcttcctggagtactccaatcacacttggcgcccagaaactgccgctgccgctgaccttgggcagactgcgccctccctctagcctcggctccccctccgctcagaggcccgggatggacgcgtgcggccggtgccagcgagcctcagggaaggctgcgcccagccagcttcctggtgccgctcacgtgcgcggcggcggagggccgggcccttaaacggcccccgtcctgggctaaacttcggtgctagcagagggcggaaggactatggagggtggggggccgccgcctcccactttcggattccagcccctgctcaccccgggccttgcctatttactcagagcctttctcttcgcccacctcctcacggagccccacgcacgtctgtaacttaaaggacgctaaagtttgcagcccaggctgcgaggcgcggccttgggggacgggggcggagttaaaacgcgactcgcgcctctttccctcacctccacggccccggggcatgccctgcaccggtggccgcggaagtgggctgcccggaagagtaggggctgccccaaggtcgcatccaggccctcggacctggccgaggccagctgtgggcaagacaagatgcaaagagcggcccgggccgcgggggtcacggaggggacacggagagtcctgaggtcgcgccagggcggacagggggagtcccagacctacgccccagtgggtatgcctctcctctggcccggccctcacctcagcagccgcccgctgcggacgccgatccgcgcaggcggctcagggttcggttacggagcctgcgcgcgcccgccgcgcacgctcgctccgccccctctcgcggcgggacatggccgtggccgtgggcgcgtgcgcgcgggacccggagggcggaggcctgccccgccccgtctccatggcaacgggcgtgtgcctagccccagcgctggctgcggcggaacccacggcgtaccttcccgcctccaacaaactatccggttgctgaggttgatttagcaacaccccagggcatctgggttggcaggagcaccacagtgacagcctggcccaggctcgggtacgggaggcagcccagtggcccgcagtagagggccaggctggggaccagggagctggggctgaggagaatttgtacagcctagggaggcgcagcacagcagtatcagcctctggcatttgtaccacctttagtcctgccactttctctcactgtggcttcgcaacagacttgggaaccaagaaaggcataggtgaggaagctgaagcccagtctgggctcgcggaagaaactggtggatccaacttctgcatagcgcaaatatctgcttcctgcctccacccacccattcccacttccgtgagtatattcatccatccaacacttattattactccttgccaggacagttctaggggctggggatagagtgaacaaaaccaaggttctgccctcctggagttcacgttccatgggaatgcccttcttccaggctcctccctcagtgcccaggttgtggctgtgggaggctggtctacctttgtggtttagcggtaacttacgtgattcccacgtcaagtgtaagctccttgatgattggttcaatcttcacctcaaatttctgaggacctacaaactacaaagcactcttctaggggcccaaagataaaacgctcccctcgtgaaaatcccggacttttggtgggaggtggggaaggtgacaactatgctcataagcttggctacaagaccggcgaggccaagagctactttggtatcctgacaaggactgatgtttgggagggggatccagcagatgggaacaccacgaaggtggtggtgggaaaagtcagcagtcacagggtggttcaccttgtggatcccactactgcaccagcaaagagcaggctgggcacacagagacagtcaaaatcccagcttcctttccctctgcttcacattcttccttccgcaggcaggggagtttgaaccttatccacagggccaagcctgtcccagccctctaggcaaactggcagaacaggcagctggcccctcacaggcactccgggctgggccagtgcaggtcgcagcagttgttttacctatgaacatcaagcacatggtcaaaccctcagcttaggtgccccaggcaggcgggctacacacttggtagcatttcctttgacacaaggagcagccatggcccgggctcagagactgacagcctctgcctgcagggtctgcgtggtcatttctcctgcttctcagaaggtggtgagcttttcccaggaaaccattataaggaagtgcccattctttatcttgttctctctgctcacttcccttagcctgattggggaactctagagccccacatcagagttcaacatgtgcctcaggagcttcagcacctcttttgtgggaggagagtccgctggtgactggggctgcaggccatgacatcagcctgcccagcttcacctcaggctgcttccaacagtgccaagtgaggtcccttggcaggatccctgcaaggcagcggctggccaccaggaggcagcagcctactctacaaggcactttcttcattccaaccccttgtaacaggtctgaggaaacctgttcgcccagccatgtgctgcaaccatcctccactcccaatcttatctcccaatagcacagattcccctatcatgagtccagacttggccttcatctcctcttgccttcc

SEQ ID NO: 316411 - DNA, 4001 bp, Homo sapiens
ctgtatccgccttgtctcctcccatcactgtcctggcccctggccccccatggaacataagcctcagtatgcacagggcgttttcagctaccccaacacattggcttgctacctcaactatggaaaaccagcgggggaggaattgccatctttttgagaagagggagtgagactcagagaatgatgcctttttttttttttaacccaaggtcaccctgcttgtcgttggccaagccaggcctagaatctgggtctccagactctgggtctgctactcagggcacaaaagaagaaaacattctgagttacaccccttcttggccagtagttgagggtaaattaacgaaaagaattaatttgtctgtaactcttgtctgttgctctctgtttaggaagaactaaaaactccacaaattcaacagtctcccctctgtctccactgaactatccctccattttcaccacactttttggctgccattcacaaaaaaagctgaagccagccatgggtaactattaaaatccatgtggttgcagagacagcatccctatcacatgagcttttgccctgtccccaaggccctctgtcatctccactccttgtgggccaccacagcaaggctgactcactggctctgaagaagatccacaaagcctgtggagaggaggcccacagctctccaggatgcatgaggaggggccaccagggatggccaccccagcgacccccattttccctcttggcccatgggaaatcctaggaggcaacataagcctgtggcagcccctccacaaagccctgcctccagagttcccataggcgagaatgtgtcctcagtggagcattaccttgcacagcctgtgaagtgctctgtgcggggataaaggcaagtaacgtggggtcctctctcaaggaattgctagcttatggggagagaaaactaaacgtggaagccccaacagtgtgacaaatgccccatgaatggcaggcagaagttagagtatgaagggggccccacctcaggaggtcggggagtgtggcgtcagccactgccccatagcaggatgtgtgcaacatctgccactggtactcagcatctgccacctcgctgaccctcatttgaccctcccaggcaagtgctgtgatgaccccctccctggtgaggagccggccaggacttggatccaagaagtctggcttcaaaccccatgctctgaccgctcgatggcaccgcttccttggcaggacatctacagctcccagggcacccaggggacatcagcctctgaaaggggaatggtcagacccgggaggccttgaatgccatgctaaggagttcggacttgacaagaggcagcagcaaagggttttgataacctggttagacgtgctctgatttattgtatttcactgctgcaagatttactggacaaagaggaggagggggagaagacagtgagtgcagtgaaaggtgtctagaagcccaagcaaaggccaggggtggggcgtagagaggcaatggaaaggcacccagacacccaggcttccagcctgagcgcggagtgcatgcaggctgcgcggtggccgcccgggttgcagggaacgcgcgggccagcgactctgcggtgctaccccgtgcccgcactcacccaggacggcgcagaccagcagggctcccacggcgagcctcatcttccgggtgcggcgctgagcagcgagcacagtcggactcgcttctgtgcagcctccggcgccccgcgtccctttattccattcccggcctgggcgggctgggcgcaatctttgacctcccgtgtttgtgcagccgggttgcccaatcgcccctctcccaaccccccttccttactcgtcccactgatcacctcattttctgagctctggagacgacccgcgagtggaaggagtccagcacagaaatgttgatgggaagggacatgaagcacaatgcagccattgtcatcgcggctcgctcggtgccaggagcggctacggcgggctgggagccggggggctctgctcctgactccagggctgcagagctggtccgtgccaccagtcctatctgcgcagtccacagaggaagactccgaggctggagagggaaaagaactgcgcccagaccccacactagaactgcagaatgacaggcaaagccccttttgggggaggatgcaggagaaacaagctgggctcaaggtcaaagacagactcagcaccttttgctccccaccaggtgtccctcgaaatcctgctcctgggctctcaaaggtcccccacggaggagctgctccctcttcctgccccgctgagctcaggctcctgggctggaaaacttcccgccctcaagcttcctgtgggacaccttagactagggacagagtcataggggaagatgaactccctccaacaagaaggttccaggaacatggtcaagacactgtgaggctcagaacaaagtgtcatcttagcacaaagcaagcggcccagtggacggtgtggcctgttcttacagcctggggccaccatgtccccctctagtcgatgagtctcctaaccagtttaattacacatccttatcatgaaaaatattgaacttgtgccttctatatgcttatattttaactaaaaaatgtgtacacttcaatcatgcacaaggaatagaaatttgtaaaaggatgagctaaagatgaaactcattttcaaatgtcgttttgcttatgcggccttatacaggattattatctcaaggcataatatacttggggaaaggtcaagattccttccacgaagtgtaaatccagacttcagagattttgccaaaagttacttcttatccaacctgaccagatggtcattcattctgtctcatgttttagttgaccaagctcatatcaagcctagtggacacgtcaggtcagtcatttgatttttgttcacttgtttttgtgttgtcagaattgtctcctaattctagtttctttgtaagaatctttttaaggcatgtgtgcatctcgtgaaggttggagttaaagccagattatctaatctgtacatccgtttaactgggcacatacaaaccacaaagtatggaaataaaaatgccaaaacaaagggcagggtcggcactccccttttcacctttagcattgtgaggtgaaccccatcttcccttaggacacctgaaaggctccatctgtcatgactgcagactcaggtgggagatagggccaattcacacattcaatatgaatgaatgataatttgttaatcttttgcaataacaataaatataactggaagttagattatgttctcccacactccaaaagattatctcatatgcaaaggggttacatacctcccactttagagtccactacagaagctttctgtttacagtgaggacagaagtcaagtctggctttcccaacacatcagcctcaccagcgagggagagtgaccactgctgccctgtcttactccccccttgcccgtccacgggccccttgtgcttgagccatagggaaagaagactgttagcatgagggccatattcctactgcccctgcagcaggctctaggcagtggtctggattcatttggagaccttgaggtaaggatgtgagatgagcaggaaaagtcaggggcaaggctaactggaaggcacccagcagagcagcatgcacacatacagctgatgcatggacaggccctgtagtaagcttgcagggtctgccagagagcaggaagtgcagttacgaaaggttgagcccatgccacaaactcagggaagctcaacgcagggcatggaaagaagatggtcagtgattctccttttctggagcccatctacattcgtagactaagccccgctgaggccagtcctccagccacaggcccatagcctagccagagcccctcagcagggagcaactacctactggccaggctgagtcctctccagagcagccagctctat

SEQ ID NO: 316412 - DNA, 4001 bp, Homo sapiens
aaatgagaatatgaagtattacacactgcaaaaattcagctttcctttttaaacacctagaaatgaagagaactgaaaagtaagagtttagtaagtcttgaaccttttattaacaaatgtaagggccacagtgctcaaactgcaactgcacagccagaacaacgctacagacaccatgtctactcttagactagactagttacaggcacaagatgttctaataaataacaaacacatccagagccagtacacaagtgtgacagaatctggggtctaggcatttgatttttctcctggtgctgtctgagaatggacactgccattaaagattaattacagtaatctgatagtgataaagtttagctaaataacaggctaaacaatgaaatggaaaaggaagctgcaatatagatcaattaaactatttttatatctacttttaaagagagacagggacatgattatgccatatagaaaatagatgaatatatattcacgagctgaaaaaaaaaacaggtaaattatttattaggtgaagataaattcaagccatgaagagaaaacacatggcccagaaaaaaaaaaaagtaggttgtgcaagtcaaatgaaaagacacaaaactcagatctcggggagacaggggaaggagaaggctgagctaaaagagagccttactgaaagaaagcaaataagtgagagggagtctgtgccctctgagatggaatgaggaaaagataaaagtattcatgggctcaaaggcagcttcagcagtgaatatggaaaaggaatgagcccgttcactgtctcaacactaaaagggaaataatatagggtctttttctaaaccagcatccatggcagtcaataataaaagtgcctaactaatgcaaggcatttaatacgtggaggattttcttacgattgcattccatacattagtccattcactccccgaaacacaccgaataggtggatgcatctaatttacagatgaagaaaccgagatcacacaatgggagatagcacaggctggtaagagagactggggcgctcatccacttcgttgtactgtctctcagcgagatcctaggaaaacccttacacttctttgtgaagacagaccttggctttccagattttctcaaaggagtctgggcccaaaaagcgatcctctacttcagagaaaagttcctttatggggcatatgaggttcttccaagcacacaaagcttagaaactctttaaaaacaaacaaaacacctggtggacacagaggcctgtgagtcatgaaaggagaagggaaaaatcggaaaaccagatttagaagccatccttctttgaagagaacgagaaagtagaaagcagcccttcccctcttccacgaggcgtgactcagggacgttacctcccccgatttgctctatgcactaagagggtgaccctcctctgctttcgactctggcccagacactcacgggttacccggccaggcctggagaacccaggtctaaacagatgggactcgtgggggaacaagggggcccctgtgcgcagggagggaaacctacccaggaacgcgcccggccgggtccaaaggccctccgcgcgcgggcccgcgccctcgccccagaccttaccgccttcggctgcagaagaactggcggccaagcgaggctgtcgggccgagccaggagcgcgtcttcgggcgccgccgcttctgtggcgcccgcgcttaggcggcggccgggtcccggtggactcacacccggggagacgcggcctgcccggtcaaggcccaggagtttgaggccccagaacgccaaccgtgcgcgcgccctcgagcctgcccaaagatgaagggtcagggcgcgccccgcgggccgggcagctgcggcagcgccgcagccgagatcgctaccgatttcgtccgccctctccctgcccagctacagccccgcttcccccgcgcgagctttggcggcggagcagcacagtgcgcgccgattggccctcagaatgtgcgacgcctggcgccgctccccacggattggccgggccggcagtgcgtgcacggagtaaacaaaccccgcccccaggcttccctttgagagtagggggccaacagatggaggggcgggactcgtgcactcagccaccgccccttggttccccctgtggcctccctgggagccctccgcaggacccgaccaccccgcttccccgccgcctccagggacagctgcgggcctgaggcctagaattttagacacacttccttcatcactcctatctcatcccccctactcccaccctgcgacttgggtgggaatctcttttccaactgaccccgaagccagaaaaccccagctctcttggaaggagggggactggggcagttccattcggtccccaggcctttgcggggtcgccctgggggagcatcaataagggacaggggggcgagtgatcgtgattgaggctatgcgtggggccaactgtgggacaccttgaaattattcagacaatgagttagagaccactgggaatgtggaggttcttcaatatcaaggcaagttaatacccaaaccaggacaggtcattctgtcccgcggaaactgcacacaccccaaatacccgtacacttggttccatatgaaaagattttgttcattcgttcgtgccgaagttaaaaaccccgtgtgaacagcgcattaaaacgattagatctttctcattttactccagtcaaatcttatagatcttctatatgccactttgtttgtttttgagacggggtcttgctctcaccgaggctggagtgcggtggcaggatcacggctcattggagccctgacttcccagtctcaggtgatcctaccaccacagcctcccgagtagctgggactacaggcccgcgccaccacacccggctgtttcgccatgtttcccaggctggtttggaactcctggactcaagagatcctcccgcctgggcctcccaaagtggtgggattacaggcgtgagccaccacgcccggccccaaacactattcttgatatggggagacatcagtggacaaaatagagacaaaaactcctgccttcatggagcttacattctagcaggatgggaaagataatatgcaaaagaatacgtaaaacaaaaactatattacatgctggtatgtgtgctatgggaaaaaaatataagcagaggtgttggaggaatggcttcagtcctaaatagagtgatctgggaaggtagcacggagaaggtggtatttaagcaaatgcctaaaggagatgagataggtaagagagcactttcagatctttctctggggcagggtggagagacaattgtatgcataattgcatgtaactagtcctgagagtccaagaatgtcaaatgcagtactccactgactgattctaaaatgcaaaaaccccagtgattacttcacattctccagtaacaaatcaataaaaatttagtttccacaaaaaatataactttaagaaaacttaaagttatattcaacaaatacttttcactctaggtactacgtatacaaaaatgagcaagacagacaaaacatccaccctcaaggaactcagtgtagcagaggaaatggattgtaaaccacctcaattcaatgcgtaaataaccatgatggaagtacacacacaaagtgcttgggctaatgtagggaaaggggtcgctgtcatagaggagctgtaactatcttaggatctctttatctataaaagatagtactaaaagattcagtactaaatttggagtgaagttatggctatgagggattccctaacctctttataggtcagagtctgaagatactaggttgaaccacatgaaattgctgatattgggcaattttcatatggttcaacttactctcttgcagaggtagtatgaggattttgctatgtaatgcatgtagtaagtgttcaataaatgatggcaattattatattc

SEQ ID NO: 316413 - DNA, 4001 bp, Homo sapiens
gctcccatttgaggtagggagttcgagaccagcctggccaacatggtgaaaccccatatctaccaaaaatacaaaaaaaatcagctgggtgttgtggtgcacgccggtaatcccagctactcaggaggctgaggcagaagaatcacttgaacctgggaagcggaggctgcagtgagctgagatcgtgccactacactctccagcctaggtgacagagcgagactctgtcaaaaaagaaaaaaaatttgaagtactgaagttggaggtaaaaatatacttttaatattcacttgatatgctaaggaaaatggagttttaaatttcagagtcctcctaccaaaaatccagacatccttaacttaaatgttatcatgtggtttctctgacaatagaattagttactctgggaaaatcacatagcaattgaacattactctgaacattttcctgccctcaatcaacatattttatgtgctactgccatctacagttaaaaaaagccaagacagcatatgtattctaaagggaaaaaaaattacaaaattataaagtggtatattaagagatttcactatttgatggaattttggttttcactataagaagcatgcagtttttactcttctaaaataagacagccattagattatcttatacagttgacccttgaacaacatgggcttgaactgggcaggtccacttatacatggattttcttccacttctgccacccttgagacagccagaccaactcctccctctttctcctccgcagcctgctcaacgtgaagacgtcgaggatgaagacttttatgataatccacttccatttaatgaattataaatgtattttcctaatgattttctttgtaatatttttccctaggttactttattgtaagaatacagtatacaatacatattaacatatgaaataacattaatataacataaaatgtgttatttgattatttatgttatagtaaggcttctagtcaataataaggtattaatagttacattttgggggagtcaaaagctacccatggatttgtgactgcacaggggctgtgcccttatcccttgcattggtcaaaggtcaactgtataaataatcttaagatctataacatataaccataagacagcctgtaagaaaagggcaagtatctcaaactaaaataggtactgctaaactagtttccataaccacacaaaacttttcatggggccttttgaaatttctatctaccattaagatttggcttccaaaagacatgtaaagttcaaagggcaagcacaaaaagaaggctaagaagcaaatgggtgagtttgtaatgcaagaattccttttttttttttttttgagacggagtctggctctgttgcctaggctggagtgcagtggcgtgatctcagctcactgcaagctccgcctcccgggttcatgccattctcctgcctcagcctcctgagtagctgggactacaggcgcctgccaccacgcccggctaattttttgtacttttagtagagacggggtttcaccttgttagccaggatggtctcgatctcctgacctcgtgatctgcctgcctgagcctcccaaagtgctgggattacaggcgtgagccaccacgcccagcctaatccaagaattctttaactaaacaaaaacttttttaaaaatcatggatgagggagttagaggagaagcgataaatggctgtaactgggtgtcttagtccattcaggctaccataacaaaccaccttagactgggtaattaattaattttctttaaagtcttctgcaaggagtacaaaactgggtaatttacaaaccacagaaatttattgctcactgttctggaggttgctgagaggtccaaaatgaaagtgccggcagattcagtgcctggtgagggtttattctctgcttcaaagatgatgccttctggttgcatcctaatagcagaaagggtccagggtgctcccttcaacctcttttataagggcactaattccactcataagggtgaagccctcatgacttcatcacttcccaaaaggccccgcctcttaataccaccacagtagggattaggtttcaacatgaatttttggaggaacccattcaaaccacagcatccagttcctggccctctaaaattcatgtctatttcacaggcaaaatacattcatttcattccaatagtctcacaagtcttaactccttcccaaaatcagatatgggtaagactcaaaggtgcaattcatcctgaggcaaattcccctccagctgtgagtctgtgaaatccaacctgtttccaaaatgcaatgatgggacaggcacagaacatgcattcccattccaaaagggagaaaatagaaaagaagaaagggataataggtcccaaccaatacaaaacccaacagggcaaacattaacttttaaggcttcagaataatcttcgacttgatatcctgccttctggacacactggagcaggagttgggcccccagggtaccaggggcccccacccccatgactttattgggggcagcccatgctgcagttctcctgggttagagtttgagtcttctgcatgtggctctcccaggctggagttgcatgctggaagctctactagactagggcctcagggagcaaccccgcgcacctcagctccaccaagctttgccctggtgagggttcccaatggtggcctcacctctgtagcaattctctgccaggatctgctaaggctctccagggcatcttttgaaatctaggtggaagttatcataccccgcagcttgtacactctgcacccactggagatggcatcactcagacactgccaaggttcaccacctgtgccctctagaggagcagccactatacttgggcctactggagccacacctggaatggctaaggagcactgtgccaaaattcggggagcagacttgacacagtgccaggaagggattgccagggtttcattagcgcctgaagcccctcttttgatagttctgtcccccatgccttggcactctgggcctgtgatgggaggagcagcaccggtaatcactgaaatgctatgggtttattcttccattgttttgatgaacaacaccaagcttccacccatgcacgctaatctccttatcaaaaggtgactaggccactcttttggtgttctctccaaaacatgcttttttattctttacatggccaagctgagaatttcccaaatcttcacttctgatgataaattatatctttaattcatttctctcttctcacattttactataaacagccaagagaagccatgttgatccctaaacactttgcttagagatttctttgaccaaatatccaatttcacggctcctaagttcctccttccacaaaacattaaaacaggaaaacaattcagtgaagtcccttgccacttttttggttgttgtttagttcttttatttttttgagatagagtcttactctgtcagggtcactacagccttggactcttgggcccaagtgatcctctctccttagtctcctgagtggctaggtgccaccatgcctggttttttttttttttttttgtctgagacaaagtctcgctctgttgcccaggctggagtgcagtggtgcaatctctgctcactgcaacctcagcctcccagattcgagtgatcttcctgcctcagcctcccaagtagctgggattacaggcacccgccaccatgtccggctaatttttgtatttttagtagagacagggtttcaccatgtgggccaggctgttctcgaactcctgacctcaagtgatctgccagccttggcctcccaaagtgctgggattacaggtataagccactgcacccggcctagctaattttttatttttagtgtttttttttttttttttttttgataaagatgaggtctcactatgttgctcaggctggtcttgaactcctgg

SEQ ID NO: 316414 - DNA, 4001 bp, Homo sapiens
acattatacaacagcataggacttctttgtgttacttgtaaaaggaaaggttttcactttcctcattatgaattccaaaaattcaaaaactgtttttcaaaattttgactgctttcattacacgcataatgcttccacactcttcattcctactcttttcagcagataaacattctcctctttccattagcaaccaatccaagcttattatctttctttttagaggcaaactgcaacatatcatttcaattaaacccaaaatattactcccatatttcttatgcaaaggtcttaggaataagcctcagcttctcacagaagatgaaatcatctatcaacatatgtaactgatgtttctcattttattttcattttgagattttgtacctactgtctagtgataaacttttgcaactgtttcctctatattttagatggcttaggctttaaaaaaatggtctatatgatttaattatcaattttttccttaagtgaagttcaacagaattaattttctcacattttcattaattatacaggctacaggcaatatttaaagtttttttttaaatattgggtatgttactcattttgttactctatgactttcaattcctgaatataaaataataaattttaaatgactaaattttatttattcactgattaaatcagatttatgacctcctctctccattccagctactctgagttttgaatgaaacaacctcaattgtaacagaagaaacatctgttgctttttttcttcaccagggctttcctaactgaaagaagaaagactctctgcctgacctcctctccctctccctctccctctcccactcccgctccccacccacactaagttccttaaaacttttttaagtaaatgtattatttaaaatttcactgtatctattaaaaacatcatagtttagaaacattcacttccttattgaacttcaaagaatgactaaatgctattatatatcaaaaaataagacgtgtctaatagaatatacgttgtaactaaaatgcaaacttcaagggtataattgaaatgatcaattcaatcaagttgtcatatattccggggtcattaagaattgtttaggggtaagattttcttcacagtatccagattcatatagcatcttgtatgctatattttctttgccagtccaaggctaacataatggcagtcactaccccaagaggcagacaccaaatggtgccacccacactctcacactgtgcctcataataaaccataaagcagtggaatgcaccggcccctttatgagcaaacaatgcctaagcttcattagaatacagctgacattttcaaagcacaaatacttttaagaaaaatgtactagggaaaaaaaggaatgaaacagctataaaagctgaaatatttttcaagtgtcaggttgatttccaaggatccttgggaagtatattttgctgttggcaatttaaaagttttcgtaagtggaaaaaatgtttagttaagggcaaagcttattttattaactactggggaaaaaaatgaaagtaaaaactatcctttgaattgctttcacaagtaataaccatgaagtacctttaaaattactgatttcctcaactgctgctttagttcctgaattaagaaaactgagctccagaattattttcacattttaattaatttatataagtaactgagtaataaactaattcttcccctccccccccaccccaacccccatacataaccctgtagtttttctgtctgcaacaagcaaggacgtcttgaaatcagcgtgctcctggctatttatcaatttaatattgctgctgcttaaagaatataaaataagagctgtaaaaactcacccagcagtgagaaacaaactgatctctcttacctggtctaaggaagcatgcctctcactgcagtaccaacaacattctacagtctttgttaccattcagtggaaacttgagactgtgtcagacgtaagcaatcgagctcagaaaagctcaatttaaaatacttctcagtaaaactaaaaagatgctcaagaaaactgtttagttaactggctttcaaaagacatatgaatactgtttacaacaaagacatctcaaaagaaattgaaaagtgcaggtcttagatgaaggggcttttctatgtagaaccttgttttcttattaaattaaaaggatatttttattttaaaaaatgcttaaagtacacacttgatcttagccaaaaggccgagaagcaataaaaatgcttaaagtaaaaagggtgaaataactacaagttaacatttttctaaatatcacttgccttttaactaacttaaaaaataagattaaacttactcgtgaaacctgcataatttgaattatacatatcagagtatctgctggctccaaagcagtcacaaagcaggagacttaatgcatcttgaaagcagagcaaaagcaccacgagtttcagggggaaaagaggaggagaaactcttgaaaaactggtcggggctttttgaacctgtaataactgtccagctcttgtgggaggaaaaaaatgtcccagtcctgccccgagataggaggctatgcttcaatgccaaaatgaatgacaggcccatttctgatatcaacaaagagcagcttagttgtgctttttttttttttccactttcccacacagaagttctaaaatttccaggttagtccctttatagctagggttaagtacctttctccattttctcaagagggaactcaattatgttgtcctggtttttttttaaatgactaattaaatatacatacctaatcatcttacttagttttcctaggcaggaagctgaacaaaagatgacctcttaggttcctttccaaatctattcttttcaatatcagataaccatatgactgtcaatattaataagcttttccagcatcctgatgtatggcacaagtagaaacaaaaagcaaggtaacattaaaaacaaagcaactgagataaaattttcaactagcaagatgtaaagataatttaccaaggtatgtgtttgattacagaaattcaaaacaaacactccaatcaacaacatatatttgctgaatacttattatgagccgagcactattttgggccctggagatacagtagtgaatgcaacagacaaaagccaaacaaaaaatctctgtctttcgtgagcttagtttatttcagttcactctaagtacaactctcctagatgactaaggtacttttccttcgttgactagttatcacctattctgaaatattccccttggaaagtatgtcttgacaacagctccaggagacgctgtaaagtatttggtgctccgttcagtgttgtatcaccagtgtctaaaacagtgtctgttagacactcaaatacatattgaatcaaatagatcagagagcttcttcttactcaaaattttcctttgccaacacatattatacttacatgcatacagagatatgacaacaataatacaatacagggtgtaaattaaactgggttgtaaacacgtgttagtataaacaaaactgaaaatacaacctatatggccctctatctttccagattctacaataaaatctgttttcactactggatgtgaggtcagtataatatctgagtaaataaatcacataaaattctataaagtaagtttttgtggacagtcagatttcagaggagttttgaaagaaaaaagaaacttggaaattacacagaatctgatcagtttggtatattaaaatcttacatgtttatattcatttacattcccacatttggaaacaattttaaactccccatcctgctttgcaccattcttgatcatcttaccagatgacgcttcttacagagaaaataagtgtacacctttaacctgtcagatcagctagaagtgctcacctgtgtcacccaaggccagaatattcaggggctagatatggt

SEQ ID NO: 316415 - DNA, 4001 bp, Homo sapiens
tctctactaaaaatacaaaaatgagccagttgtcgtggcgcacgcctgtaatcccagatactcaggagactgaggcaggagaatcgcttgaacccgggaggcggaggttgcagtgagctgggggatcacgccactgcactacagcctgggcgacagagccagactccgtctcaaaaaaaaaaaaaaattgagtcacgtatactttctatctgccgtgtttacctgcaaattcactttttgtgtttcctattgactgtaaacatcttgtggccaggaaccagtgcttctttcctaaagctgtcgtttgctcttgcagtcatctccccagagtaaacacaaaagtatctcaaaagtaagtgtgcaacaaaactttcccttcaaggggaaatcccaacccaacattacttcacatacagaattctggtactcattttctcttccaaagtagagactggtattaactagttcctagaactgccagtaggagccctacgacaagctcttctcccatcttgtccttgccccgccccctctgaagtccagaaatgactcggcttctaacttgtataatataaccctctaccaggtacacttttctcagcactgggaataatctgacacgcccaaggtcatataaaaagcctgcctcctgaaccaggttctaggttcggcggacaaacttctggttctactacctctaagggtaagaccctgctcaatttcagaggctgtggcttaagcacctcctgaggggagcagtttccttcaagaaatactaagccaagtcaacctgtaattattctaaagaatgccaagaggcctcaaaccctgcctcaaaggcagtgcagcaagacggtaaagattctcactactagctatgtgatcttaagtcctccaaggctcactttcatcacattcgaaatgaaaacaaccatatctgaatttggaggaatccttgtgatgattaaatgagacagtgcatccaaaatacttactgtagtgtccagcaaagcaaactcttaaagttagctagaatcatcactataaaccaggctgggcctccagccggcgcttgattaagcgctgacttagccaaggaactaggctccgattctatgaccccaatcaacttattcccgtaggcgccactccacacccttccgagctccttcgggtattgggcgccggccgccccaaacctcccaaagcccctctcctctcaatccaaacgcttggaggcaggctgcaccaaggcattagctggcgcactcccctcccggagccccccaggcgcgcctcctggccaccgcagccaggggttgcctctctcccctccccctccgcgacctcccttcccctccccccatgcaaggccccgcccgccctcccccccggcctcgtcctccctcccaccccctcctccctcccaccccctcctccctccagccccttcccacagtgcctccgaccccagctgccgcgcggttcgaacgaggccctcccagcgcctcctagtctcccggcctcctcggacagagcgcccgcaacccccgtctccagtggccataccggcttgcggaggccgcggccgccgcctctccgcaggtctccgctgaatgggcggacgcgaggccactggactggggcgtcgcggggaggcggtggtcacggccccctcggttgcccttcgcgaccgccgcacctcgctcgcaggctcgcgcgggccccggccaatcgcgctgacccaacaagcctagcgagaacttgggctctgtacgtggcaggtgggggaagaacagaggcgggagcaagaaaaaaaaaaatgtcctttcgcccctccttattgcgcgtggacatacccaggacgcatgcgcgacggcgcgaggcgcagggctggctgggtcccggctgcctaggccgaagagtccctgctttctcactggatgacgggatttaggaagcgtgagctgccccgatgcacgcatgcgcggggcgtgaccacgcacttccggttttctcgaaagcgggtatttccgtttctcgccaatgggcggggcgtagtgcgctgttctaaactttttgagagttggttgcagtagacgtctgtccaactttaagtggtttttgtcgttattgttgaccattgtagtaacagctgaaaaagaaaaaaccttttcttctataaatccattcattcattattgggagcctatgctttgccaagcccggttctaggaatgggggtgaatcattttgtgagcaaggagtttccaattaagcagggaagacctacagcgtttatgagcaaggaaaatctgtaactgtgtaaaggacaaaagctgggaaattaaggctaaagattcctgagtgatttttagaggataaggcatttgagtgtgtcctacgtactcttcccttctcccttacctgttcaaatagaaatacagtatgagtaagtaggaatttatagccaaggggtggaagtcggtcagtggatggaaaattactaagaggaaatatcaggggcaagggagattctggctaaaccaacacaacaggattctagacgaagataggccaggatagcagacatcacctgggggtggtggaggatgaggaaccccatcaagggtgagggattctcactacactgccttaacaaggttctttgctgaaactgagttttacaagaagatgcacagatggtcctaggagaaggcccaggagcccgaagtttggccaaacggagaatgtttgtcacttctaaggtggagactaagctgataaataaagcatttagaccctacctggtctccagttgtttaccagttataaaagaaaaacttaagctgaattaaatttaaaggagtttaattgagcagtgaacgatttcacgaattgggcagcccccagaatcacagcagattaagagactccagcagagccacgtggtggaagatttatagacaaaaaaagggaaatgaggtacagaaattggcagtgaagtacagaaacagctggattggttacaggttggcgttggccttatttgaacacttagcagtctatgagtgattgaagtgtggcggctggaattggccaagactcgcttattgtaagagacgcatacttctaagttaggttttcaatcttgtctgttaagctaggttacagttcatccacaaggattcaagtatagatgtatggagtccttctcaggccatatttagtttgctttaacaccagatactcctaaaggacctggagtaaattctggtgtttcagggtgagaagctacgttcttttacaaccataagtagtgtgatctttttcagttataagtctctgaaacttctgtttgagagtgaaataatgtaagtttacactgttcacttctgatttgtattttccaacagttgtattgacctttgagcaattgtttgcagggataagggagtggagtactgcagaagaaatgaaaaacagttcctaattgctctccaaagaatgttattcattgcttattttttaaaactgaataatacagatttggggagatgcactgctgtcagataatagtattatgatgtcattaagatggtttgggatggggtaaaaccacaaccatatggcaaaggtaaaatattccctgaaggaagtgaattatactactgttatagtagtatatttaaactaaaaagaggtcagatcctgaggcaggagataaggaggtgaaccttggcctattataaggtgaaaagagtatctgctgaggatccccagtgagggggcactcaagagtcctgctactgaggagaaataagctggtccctgttacactgtggtcatctgtacgctaggaagagaggcacccataagctggccttgtggaaaagctggagctcatggagctcatggactccgaaagcaacttgaggctctttatgttgtaatttccctcatgcttcatcccgaagccatcagtaaagtcttctttatgg

SEQ ID NO: 316416 - DNA, 4001 bp, Homo sapiens
cttctttatgtagctagaagtgacttccatcagacacactcctaattaagaaaaaaattccagctttgaagataattgatggtatgtccttctgactggggtacgggtttgttgcccaatttcaatggatttaaaatttgagggccgggcacggtggctcacacctgtaatcccagcactttgggaggccgaggcgggcagatcacgaggtcaggagtccaagaccagaccgatcaacagggtgaaaccctgtctctactaaaaatacaaaaatgagccagttgtcgtggcgcacgcctgtaatcccagatactcaggagactgaggcaggagaatcgcttgaacccgggaggcggaggttgcagtgagctgggggatcacgccactgcactacagcctgggcgacagagccagactccgtctcaaaaaaaaaaaaaaattgagtcacgtatactttctatctgccgtgtttacctgcaaattcactttttgtgtttcctattgactgtaaacatcttgtggccaggaaccagtgcttctttcctaaagctgtcgtttgctcttgcagtcatctccccagagtaaacacaaaagtatctcaaaagtaagtgtgcaacaaaactttcccttcaaggggaaatcccaacccaacattacttcacatacagaattctggtactcattttctcttccaaagtagagactggtattaactagttcctagaactgccagtaggagccctacgacaagctcttctcccatcttgtccttgccccgccccctctgaagtccagaaatgactcggcttctaacttgtataatataaccctctaccaggtacacttttctcagcactgggaataatctgacacgcccaaggtcatataaaaagcctgcctcctgaaccaggttctaggttcggcggacaaacttctggttctactacctctaagggtaagaccctgctcaatttcagaggctgtggcttaagcacctcctgaggggagcagtttccttcaagaaatactaagccaagtcaacctgtaattattctaaagaatgccaagaggcctcaaaccctgcctcaaaggcagtgcagcaagacggtaaagattctcactactagctatgtgatcttaagtcctccaaggctcactttcatcacattcgaaatgaaaacaaccatatctgaatttggaggaatccttgtgatgattaaatgagacagtgcatccaaaatacttactgtagtgtccagcaaagcaaactcttaaagttagctagaatcatcactataaaccaggctgggcctccagccggcgcttgattaagcgctgacttagccaaggaactaggctccgattctatgaccccaatcaacttattcccgtaggcgccactccacacccttccgagctccttcgggtattgggcgccggccgccccaaacctcccaaagcccctctcctctcaatccaaacgcttggaggcaggctgcaccaaggcattagctggcgcactcccctcccggagccccccaggcgcgcctcctggccaccgcagccaggggttgcctctctcccctccccctccgcgacctcccttcccctccccccatgcaaggccccgcccgccctcccccccggcctcgtcctccctcccaccccctcctccctcccaccccctcctccctccagccccttcccacagtgcctccgaccccagctgccgcgcggttcgaacgaggccctcccagcgcctcctagtctcccggcctcctcggacagagcgcccgcaacccccgtctccagtggccataccggcttgcggaggccgcggccgccgcctctccgcaggtctccgctgaatgggcggacgcgaggccactggactggggcgtcgcggggaggcggtggtcacggccccctcggttgcccttcgcgaccgccgcacctcgctcgcaggctcgcgcgggccccggccaatcgcgctgacccaacaagcctagcgagaacttgggctctgtacgtggcaggtgggggaagaacagaggcgggagcaagaaaaaaaaaaatgtcctttcgcccctccttattgcgcgtggacatacccaggacgcatgcgcgacggcgcgaggcgcagggctggctgggtcccggctgcctaggccgaagagtccctgctttctcactggatgacgggatttaggaagcgtgagctgccccgatgcacgcatgcgcggggcgtgaccacgcacttccggttttctcgaaagcgggtatttccgtttctcgccaatgggcggggcgtagtgcgctgttctaaactttttgagagttggttgcagtagacgtctgtccaactttaagtggtttttgtcgttattgttgaccattgtagtaacagctgaaaaagaaaaaaccttttcttctataaatccattcattcattattgggagcctatgctttgccaagcccggttctaggaatgggggtgaatcattttgtgagcaaggagtttccaattaagcagggaagacctacagcgtttatgagcaaggaaaatctgtaactgtgtaaaggacaaaagctgggaaattaaggctaaagattcctgagtgatttttagaggataaggcatttgagtgtgtcctacgtactcttcccttctcccttacctgttcaaatagaaatacagtatgagtaagtaggaatttatagccaaggggtggaagtcggtcagtggatggaaaattactaagaggaaatatcaggggcaagggagattctggctaaaccaacacaacaggattctagacgaagataggccaggatagcagacatcacctgggggtggtggaggatgaggaaccccatcaagggtgagggattctcactacactgccttaacaaggttctttgctgaaactgagttttacaagaagatgcacagatggtcctaggagaaggcccaggagcccgaagtttggccaaacggagaatgtttgtcacttctaaggtggagactaagctgataaataaagcatttagaccctacctggtctccagttgtttaccagttataaaagaaaaacttaagctgaattaaatttaaaggagtttaattgagcagtgaacgatttcacgaattgggcagcccccagaatcacagcagattaagagactccagcagagccacgtggtggaagatttatagacaaaaaaagggaaatgaggtacagaaattggcagtgaagtacagaaacagctggattggttacaggttggcgttggccttatttgaacacttagcagtctatgagtgattgaagtgtggcggctggaattggccaagactcgcttattgtaagagacgcatacttctaagttaggttttcaatcttgtctgttaagctaggttacagttcatccacaaggattcaagtatagatgtatggagtccttctcaggccatatttagtttgctttaacaccagatactcctaaaggacctggagtaaattctggtgtttcagggtgagaagctacgttcttttacaaccataagtagtgtgatctttttcagttataagtctctgaaacttctgtttgagagtgaaataatgtaagtttacactgttcacttctgatttgtattttccaacagttgtattgacctttgagcaattgtttgcagggataagggagtggagtactgcagaagaaatgaaaaacagttcctaattgctctccaaagaatgttattcattgcttattttttaaaactgaataatacagatttggggagatgcactgctgtcagataatagtattatgatgtcattaagatggtttgggatggggtaaaaccacaaccatatggcaaaggtaaaatattccctgaaggaagtgaattatactactgttatagtagtatatttaaactaaaaagaggtcagatcctgaggcaggagataaggaggtgaaccttggcctatta

SEQ ID NO: 316417 - DNA, 4001 bp, Homo sapiens
caggagtccaagaccagaccgatcaacagggtgaaaccctgtctctactaaaaatacaaaaatgagccagttgtcgtggcgcacgcctgtaatcccagatactcaggagactgaggcaggagaatcgcttgaacccgggaggcggaggttgcagtgagctgggggatcacgccactgcactacagcctgggcgacagagccagactccgtctcaaaaaaaaaaaaaaattgagtcacgtatactttctatctgccgtgtttacctgcaaattcactttttgtgtttcctattgactgtaaacatcttgtggccaggaaccagtgcttctttcctaaagctgtcgtttgctcttgcagtcatctccccagagtaaacacaaaagtatctcaaaagtaagtgtgcaacaaaactttcccttcaaggggaaatcccaacccaacattacttcacatacagaattctggtactcattttctcttccaaagtagagactggtattaactagttcctagaactgccagtaggagccctacgacaagctcttctcccatcttgtccttgccccgccccctctgaagtccagaaatgactcggcttctaacttgtataatataaccctctaccaggtacacttttctcagcactgggaataatctgacacgcccaaggtcatataaaaagcctgcctcctgaaccaggttctaggttcggcggacaaacttctggttctactacctctaagggtaagaccctgctcaatttcagaggctgtggcttaagcacctcctgaggggagcagtttccttcaagaaatactaagccaagtcaacctgtaattattctaaagaatgccaagaggcctcaaaccctgcctcaaaggcagtgcagcaagacggtaaagattctcactactagctatgtgatcttaagtcctccaaggctcactttcatcacattcgaaatgaaaacaaccatatctgaatttggaggaatccttgtgatgattaaatgagacagtgcatccaaaatacttactgtagtgtccagcaaagcaaactcttaaagttagctagaatcatcactataaaccaggctgggcctccagccggcgcttgattaagcgctgacttagccaaggaactaggctccgattctatgaccccaatcaacttattcccgtaggcgccactccacacccttccgagctccttcgggtattgggcgccggccgccccaaacctcccaaagcccctctcctctcaatccaaacgcttggaggcaggctgcaccaaggcattagctggcgcactcccctcccggagccccccaggcgcgcctcctggccaccgcagccaggggttgcctctctcccctccccctccgcgacctcccttcccctccccccatgcaaggccccgcccgccctcccccccggcctcgtcctccctcccaccccctcctccctcccaccccctcctccctccagccccttcccacagtgcctccgaccccagctgccgcgcggttcgaacgaggccctcccagcgcctcctagtctcccggcctcctcggacagagcgcccgcaacccccgtctccagtggccataccggcttgcggaggccgcggccgccgcctctccgcaggtctccgctgaatgggcggacgcgaggccactggactggggcgtcgcggggaggcggtggtcacggccccctcggttgcccttcgcgaccgccgcacctcgctcgcaggctcgcgcgggccccggccaatcgcgctgacccaacaagcctagcgagaacttgggctctgtacgtggcaggtgggggaagaacagaggcgggagcaagaaaaaaaaaaatgtcctttcgcccctccttattgcgcgtggacatacccaggacgcatgcgcgacggcgcgaggcgcagggctggctgggtcccggctgcctaggccgaagagtccctgctttctcactggatgacgggatttaggaagcgtgagctgccccgatgcacgcatgcgcggggcgtgaccacgcacttccggttttctcgaaagcgggtatttccgtttctcgccaatgggcggggcgtagtgcgctgttctaaactttttgagagttggttgcagtagacgtctgtccaactttaagtggtttttgtcgttattgttgaccattgtagtaacagctgaaaaagaaaaaaccttttcttctataaatccattcattcattattgggagcctatgctttgccaagcccggttctaggaatgggggtgaatcattttgtgagcaaggagtttccaattaagcagggaagacctacagcgtttatgagcaaggaaaatctgtaactgtgtaaaggacaaaagctgggaaattaaggctaaagattcctgagtgatttttagaggataaggcatttgagtgtgtcctacgtactcttcccttctcccttacctgttcaaatagaaatacagtatgagtaagtaggaatttatagccaaggggtggaagtcggtcagtggatggaaaattactaagaggaaatatcaggggcaagggagattctggctaaaccaacacaacaggattctagacgaagataggccaggatagcagacatcacctgggggtggtggaggatgaggaaccccatcaagggtgagggattctcactacactgccttaacaaggttctttgctgaaactgagttttacaagaagatgcacagatggtcctaggagaaggcccaggagcccgaagtttggccaaacggagaatgtttgtcacttctaaggtggagactaagctgataaataaagcatttagaccctacctggtctccagttgtttaccagttataaaagaaaaacttaagctgaattaaatttaaaggagtttaattgagcagtgaacgatttcacgaattgggcagcccccagaatcacagcagattaagagactccagcagagccacgtggtggaagatttatagacaaaaaaagggaaatgaggtacagaaattggcagtgaagtacagaaacagctggattggttacaggttggcgttggccttatttgaacacttagcagtctatgagtgattgaagtgtggcggctggaattggccaagactcgcttattgtaagagacgcatacttctaagttaggttttcaatcttgtctgttaagctaggttacagttcatccacaaggattcaagtatagatgtatggagtccttctcaggccatatttagtttgctttaacaccagatactcctaaaggacctggagtaaattctggtgtttcagggtgagaagctacgttcttttacaaccataagtagtgtgatctttttcagttataagtctctgaaacttctgtttgagagtgaaataatgtaagtttacactgttcacttctgatttgtattttccaacagttgtattgacctttgagcaattgtttgcagggataagggagtggagtactgcagaagaaatgaaaaacagttcctaattgctctccaaagaatgttattcattgcttattttttaaaactgaataatacagatttggggagatgcactgctgtcagataatagtattatgatgtcattaagatggtttgggatggggtaaaaccacaaccatatggcaaaggtaaaatattccctgaaggaagtgaattatactactgttatagtagtatatttaaactaaaaagaggtcagatcctgaggcaggagataaggaggtgaaccttggcctattataaggtgaaaagagtatctgctgaggatccccagtgagggggcactcaagagtcctgctactgaggagaaataagctggtccctgttacactgtggtcatctgtacgctaggaagagaggcacccataagctggccttgtggaaaagctggagctcatggagctcatggactccgaaagcaacttgaggctctttatgttgtaatttccct

SEQ ID NO: 316418 - DNA, 4001 bp, Homo sapiens
agcacgatctcagctcactacaacctctgcctcccaggttaaagcgactctcgagcctcagcctcctgagtggctgggattacaggtgtgcaccaccatgcccagctaatttttgtatttttcgtagagacggggtttcaccatgttggccaggctagtctcgaactcctcaccacaagtgatccacctgcctcggcctcccaaagtgctggaattacagacgtgagccaccatgcccggctaatttttgtgtttttagtagagacaggatttcaccatgttagtcagactggactcgaactcctgaccttaggtgatccgcctgccttggcctcccaaagtgctgggattacaggcgggagccaatgcgcccagccgagggtcatttttaactagcattgtgatcgattcaggtttagctgggaatcttgctccatgacatttaaatacattatcagaggcaagtaactgcctcgccttagggcggagttagccaaactgctgtctatctaacaatcttcaacacaggctaggtttacagccaccattacttgataagaacatccaaaggaaattgaaggatgctatgctatatataaccttgcaaaatcgatgacaaaaattatcttaactctgagttttcttgagaagcatattgtaacccaaaattcagggccggggggcggggggaaccagcagggtccacaagtactctagacagcctaaccttaattttcacagtaagcttagcatataagcatggggtagccaaatacaatttcctactttaatcctcttatcaacggggaagaaaatggaaaaagctgcagaatccagtcccccgggtaagtgaggtctctacaagcagtaagcagagggaaagcgttatccgaaaagagccgaatcagaatgtattttcttacccaccctcccaaccttaaaagaactgtccagcagaatgtgacacaatcggcctctccggcgcccatcaatccagcacagccctctgaccacaccgctaatctccaagtatctttcacaaataagtcactcctatggctcccgtcttgtagtgagaactgctagcaatattcttaatgtgaacacctgcggcgttcagtcggattctgccttgagaaaacagaatccacacacaaggcgaacaggcagagcatggcaagatcaggttgtaccagagccgaagggtaagtttacagaaacccgtatctaattaatgcctgtaacacgctagtaaccgaatcggggacagctttgtccctttccgcagtgagaacggggcccgcccggagcccggggaaccgaaggtttaggagcccaaggtcacccacgaatcccagccgttccctggggcgacttcctggagcagccacgtgttcccccggcgccgcacgccgcgcagctgcaccttggctgcgcccgcgctcccggacccgcagcccggagccggcgcactagggcctgcggccttcaagggcgaggacccgaagtccccggggctgagagcgacagtgggggtacacctggtctcgtcattcgtcgctctgtgaccgaggaggcgggcaagaaggcagagagaagggaagggacgagaggcgaagggacgagaggcgcagggacgcctctgcgcacagccgccgaccccgtgtacctgcagccgctcgaggcgccgccacagccccttccccacaggctcgcggccccgctccatcccggccgccccgcctggggccgcgaccgctttcccgctccccgtgcggctccctatggctgctggacagcaccggagcggccgctccagccagccccgcaggatgaagggaggacacgagggtcggtgtagttctagaagcccgcactcacactagcgcgtcctccgtcccgagccgccacccgatatcccgacgctctgaggggatggcggcccctaaccggcggtttatagcctggccccgcccccggcccccaggggggctgtgcgtcacttcctgaggcacgtacgctcgcgaggtgctctgacagatcgcccggggggcggggatgcgcgcgcagcgggcggggccctatgcggagggcgctgcgggcgaggcgaaggccaagggaaaaggcgccaaggcagcaggtgccccgaggagccgcgcgatgggcgcactggcctctgcctcggcgccttcctccaccctggtagcctggcagcctccgcctgaccttgaccaacctccagtccctgcagtgctaggtccaatctgttggcgttgacgcttaaatgttggatattgcactgcggcagtgccttgaaatgtacgtgcaggatggaatgttaggtaactattaaagccactcttgtgaagatgtattttgcagcctcagaaatacaaaaaggaaaagaaaagcaaaatgcaaatttttattcagaatgtatacaagctgcactttaaccaagactagcggagtgctttgcgtaatgtttaatgcatgagggaataaaagggaaaatagaaacaagtgacttaatagggtgataggattgtagattaactttcgttttcattgccatcgctgttattggattgtgcaatgaataacaaataaataaaattcaattcttgtcactgtttaaactctttccaaacaatcacaccctctccctccctctggtcagtaaccagcaggccagggaggtagtagctacaatgcaagaaagcaacccataccttaaaaagcattgcacataaactgaccttcaggcccgtagggacacagaacagccctttaagaagcaaatccgtttctgggccttgggcttttactcttccctttatttcttctgctctaagatagagaaagtacttgggattctcaccgcctttctctttactcccattctctaaaatctctctccccaaagagaagtgtttaaaagtcatatgagttgccaggcgcggtggctcacgcctgcaatcctaacactttgggaggccgaggtgagcggatcacgaggtctggagttcgagaccagcctgaccaatatggtgaaaccccatctctactaaaaaaatttcaaaaaaaattagccaggcatagtggcacgcgcctgtaatcccagctactcaggaggctgaggcagaagaatcgcttgaacccaagaggcggaggttgcagtgagccaagatcgcgccattgcactccaacctgggcgacagagcaagattccatctcaaaaaaaaaaaaaagtcatatgagcaggagcattgctgcacctttaatgatctaatcaggaaaaggttaaggatgcacatccacagagggcctaccttaacattcagacaccaggcctgctcccctgtggtgttccttctttatttctttaattattaattttatttatttttattatttttacttttaagacagtgtcttgctctgtcaccctggctggagtacagtggcatgatctcgggctcactgcaacctctgcctccggattcaagcgattctcctgcctcagcctcccaagtagctgggactacaggtgtgtgccaccatgccaggctaatttttgtattttgaggagtgacgggattttatcatgttggccaggcttgtctcgaattcctgacctcaggtgatctgcccaccttggcctcctaaaatgttgggataacaggcatgagccaccatgcccagcctatttattttttatttttaatttgacgcagggtttgctatgtagcccagactagtcttgaactcctgggctcaaacaatcctcctgcctccggtctcccaaagtgctgggattataggcatgagctaacatgcctggctttctgcctttccttgactgaagtatcttttaaaaagaaacaaacaatgctggtatttgcaggtgaaaatcttatagcctcatggaggacataggtttaggtggccagatgcgatggctaatccctgtaatcccaacactttgggagactgaggca

SEQ ID NO: 316419 - DNA, 4001 bp, Homo sapiens
ggtttagtagggagtttttttgttgttgtttttgagatggcatctcgctgtcgcgcaggctggagtgcagtagcacgatctcagctcactacaacctctgcctcccaggttaaagcgactctcgagcctcagcctcctgagtggctgggattacaggtgtgcaccaccatgcccagctaatttttgtatttttcgtagagacggggtttcaccatgttggccaggctagtctcgaactcctcaccacaagtgatccacctgcctcggcctcccaaagtgctggaattacagacgtgagccaccatgcccggctaatttttgtgtttttagtagagacaggatttcaccatgttagtcagactggactcgaactcctgaccttaggtgatccgcctgccttggcctcccaaagtgctgggattacaggcgggagccaatgcgcccagccgagggtcatttttaactagcattgtgatcgattcaggtttagctgggaatcttgctccatgacatttaaatacattatcagaggcaagtaactgcctcgccttagggcggagttagccaaactgctgtctatctaacaatcttcaacacaggctaggtttacagccaccattacttgataagaacatccaaaggaaattgaaggatgctatgctatatataaccttgcaaaatcgatgacaaaaattatcttaactctgagttttcttgagaagcatattgtaacccaaaattcagggccggggggcggggggaaccagcagggtccacaagtactctagacagcctaaccttaattttcacagtaagcttagcatataagcatggggtagccaaatacaatttcctactttaatcctcttatcaacggggaagaaaatggaaaaagctgcagaatccagtcccccgggtaagtgaggtctctacaagcagtaagcagagggaaagcgttatccgaaaagagccgaatcagaatgtattttcttacccaccctcccaaccttaaaagaactgtccagcagaatgtgacacaatcggcctctccggcgcccatcaatccagcacagccctctgaccacaccgctaatctccaagtatctttcacaaataagtcactcctatggctcccgtcttgtagtgagaactgctagcaatattcttaatgtgaacacctgcggcgttcagtcggattctgccttgagaaaacagaatccacacacaaggcgaacaggcagagcatggcaagatcaggttgtaccagagccgaagggtaagtttacagaaacccgtatctaattaatgcctgtaacacgctagtaaccgaatcggggacagctttgtccctttccgcagtgagaacggggcccgcccggagcccggggaaccgaaggtttaggagcccaaggtcacccacgaatcccagccgttccctggggcgacttcctggagcagccacgtgttcccccggcgccgcacgccgcgcagctgcaccttggctgcgcccgcgctcccggacccgcagcccggagccggcgcactagggcctgcggccttcaagggcgaggacccgaagtccccggggctgagagcgacagtgggggtacacctggtctcgtcattcgtcgctctgtgaccgaggaggcgggcaagaaggcagagagaagggaagggacgagaggcgaagggacgagaggcgcagggacgcctctgcgcacagccgccgaccccgtgtacctgcagccgctcgaggcgccgccacagccccttccccacaggctcgcggccccgctccatcccggccgccccgcctggggccgcgaccgctttcccgctccccgtgcggctccctatggctgctggacagcaccggagcggccgctccagccagccccgcaggatgaagggaggacacgagggtcggtgtagttctagaagcccgcactcacactagcgcgtcctccgtcccgagccgccacccgatatcccgacgctctgaggggatggcggcccctaaccggcggtttatagcctggccccgcccccggcccccaggggggctgtgcgtcacttcctgaggcacgtacgctcgcgaggtgctctgacagatcgcccggggggcggggatgcgcgcgcagcgggcggggccctatgcggagggcgctgcgggcgaggcgaaggccaagggaaaaggcgccaaggcagcaggtgccccgaggagccgcgcgatgggcgcactggcctctgcctcggcgccttcctccaccctggtagcctggcagcctccgcctgaccttgaccaacctccagtccctgcagtgctaggtccaatctgttggcgttgacgcttaaatgttggatattgcactgcggcagtgccttgaaatgtacgtgcaggatggaatgttaggtaactattaaagccactcttgtgaagatgtattttgcagcctcagaaatacaaaaaggaaaagaaaagcaaaatgcaaatttttattcagaatgtatacaagctgcactttaaccaagactagcggagtgctttgcgtaatgtttaatgcatgagggaataaaagggaaaatagaaacaagtgacttaatagggtgataggattgtagattaactttcgttttcattgccatcgctgttattggattgtgcaatgaataacaaataaataaaattcaattcttgtcactgtttaaactctttccaaacaatcacaccctctccctccctctggtcagtaaccagcaggccagggaggtagtagctacaatgcaagaaagcaacccataccttaaaaagcattgcacataaactgaccttcaggcccgtagggacacagaacagccctttaagaagcaaatccgtttctgggccttgggcttttactcttccctttatttcttctgctctaagatagagaaagtacttgggattctcaccgcctttctctttactcccattctctaaaatctctctccccaaagagaagtgtttaaaagtcatatgagttgccaggcgcggtggctcacgcctgcaatcctaacactttgggaggccgaggtgagcggatcacgaggtctggagttcgagaccagcctgaccaatatggtgaaaccccatctctactaaaaaaatttcaaaaaaaattagccaggcatagtggcacgcgcctgtaatcccagctactcaggaggctgaggcagaagaatcgcttgaacccaagaggcggaggttgcagtgagccaagatcgcgccattgcactccaacctgggcgacagagcaagattccatctcaaaaaaaaaaaaaagtcatatgagcaggagcattgctgcacctttaatgatctaatcaggaaaaggttaaggatgcacatccacagagggcctaccttaacattcagacaccaggcctgctcccctgtggtgttccttctttatttctttaattattaattttatttatttttattatttttacttttaagacagtgtcttgctctgtcaccctggctggagtacagtggcatgatctcgggctcactgcaacctctgcctccggattcaagcgattctcctgcctcagcctcccaagtagctgggactacaggtgtgtgccaccatgccaggctaatttttgtattttgaggagtgacgggattttatcatgttggccaggcttgtctcgaattcctgacctcaggtgatctgcccaccttggcctcctaaaatgttgggataacaggcatgagccaccatgcccagcctatttattttttatttttaatttgacgcagggtttgctatgtagcccagactagtcttgaactcctgggctcaaacaatcctcctgcctccggtctcccaaagtgctgggattataggcatgagctaacatgcctggctttctgcctttccttgactgaagtatcttttaaaaagaaacaaacaatgctggtatttgcaggtgaaaatcttatagcctcatgg

SEQ ID NO: 316420 - DNA, 4001 bp, Homo sapiens
ctgtcaactcctctacatttcatccaaagtctacatgggtcatctccaagtcaccagaagagccaggggaaaggaggggaggggcacgatacgtaagatgttaaacatgaagatgatgtaaaattacccagattcaagctggccattttacagatgaggaaactaaggcccagaaaaagctctatgacttgcccaaatactcggttacccagaccacagctgcagatactgttatttggatcatagctgcaaaaagtctaacttttggccgggcgcggtggctcacgcctgtaatcccagcactttgggaggccaaggtgggcggatcacgaggtcaagagatcgagaccaccctggccaatatggtgaaaccccgtctctactaaaaatacaaaaattagctgggcgtggtggcacgcgcctgtaatcccagctactcgggaggctaaggcaggagaatcgcttgaacccagaggcaaagttgcagtgagccgagattgcgccactgcactccagcctggtgacagagcgagactccgtctccaaaaaaaaaaaatctaacttttgaagtctcagaggttttacactttccataacaaatagttaagaacccccattcctgcatgcatatatatattaatattatatatatttatatatataattatatatatatttatatatatataatatatatatatatttttttatttttattttttccttaaaaaccttcagagacagcgatcaggtgggtagcctagttaggattttaacccttcggtttccaacaaacgataattgcatagaaccatcaactccctgaagacaggactatcttgttccaggcaaaatctacagcctctagcacccagtaggcattcagtgagggattctcggtttcacctgagcatctccactccctatccatccatgccaaggcgtcagtggagccagctaactttcttttggaaatcgattattttcttgaaacttgtttccaaaaactccgggccaagaagccggcctgagggaaagcgtggccgtctccaggagctaaggactgaggagctggccttttgaacgggtggctcagaaagagctgggtgggcacgcggcatcgccatgggcggagtggcccaggtgcgctggctgctttggcagctcaggctgccgctccgggccgctgctccccggccgccttcagataaccaacttctcaaacttccctttccgggggtgggggctcgcctcgaacgcggccaacacaacgcctttcctgctcgcacaaaggggaccaaacgtgccccgcgccccttgcaactgaactttccttctctttttcaagaaaaactcacaatccctgcagctacgggagtcgggctgcgtgagtgtcgcgggggaaactttcctcgtttccgcccgggggccgggttgccgggcccgactgtcaagcgcagcggagaggcggggaccccaggaagacccccggcgccccgccgagcccgggctggggaccactcacccgacttctgaacgtgcggtgggatcgtgctggcgatacgcgtccacaggacgatgtgcagcggccacaggcccctgagcagcccccgacccatggcagaccccgctgctcgtcatagaccgagcccccagcgcagcggacggcgccttcccggacccctggctgcgcctccgcgccgcgccctctccggaccccgcgccgggccggcagcgcagatgtgcgggccagatgtggcgcccgctcgccagccaggagggggcctggaggccggcgaggcgcggggaggcccccggcggccgagggaagctgcacaggagtccggctcctgtcccgagcgggtgcacgcgcgggggtgtcgtcgctccgtgcgcgcgagtgactcactcaacttcaactcagcgctgcgggggaaacaggaaactcctcgccaacagctgggcaggacctctctccgcccgagagccttctccctctcctcgacgtccagcccctagctctctcgtagctgccaatcatgtttcctagaccagcccctccgagagctttggccgactttcagctgcccctcaccgccctcccacaccactcaggagttcctcgctccaagtatttactcaagaatgactaagtgcacacagttcacaaagtaacaacagaaaacgtccacgttttccctagtagatcagaacatctgccgcctcccctcagctttcttcagattgctcctaggtgctttagagatgcgttttcaaattgcaagttgagatccaggagtgaatactccaatctattgagtcgcgagcacatttctttcccaaataaaatagtaacggtaaattctacttcattaaatttgtgcttcagttgtgtctatatgcatgtatgtatgtgcatacactgtcaagttgtaaaatgtttttctttaggtcgaagtctagaggtttttctcaagttttaatgtacatattgatcacctggaaatcttatttaaaaatgcagattctaattcagtaggtctaggaggcaggcagagattctgcatttctaatgagcacctggatagagcgtcccattttgcaccgcctcttcccgggactgagtcagtgagtaattgtaaatgatcacctatcacgaagtgatagtggtgggaaatgtaattttcagaatgtatagagtatagcagaaactgtaaaattaaaagtgggttgggagtcacctgaatgcttgtgcttttattcccttaatgcaggtgaagaaagagaatacttaccctctcatgtgcaaacggggtaacatgggagcagaacagtataaactttcaaatttcctttcttgctagggcaaccagatttgcccaagacattcctggtgtacatgttttgtagtttaaatattaatagaaccccctttctctttcagatatgtcctgattggataataaactatgtgatcaacctacttcccactctcaaagatatgattctgtacagccctctggtcagtagatcttctagcaattcatttaatgaattcctttacctgagaggaagattgcagaggcaagggtttgtgccagggtctccagggaataaaggtaaatagccctcccccaaacccaactcccaaatctttcctgtcattctaagtgttcatttgcttcatcctggaattttaactcatgctccacctagcacccaagctgcctctggatgttttgccacttcccagtactcatgttgaagatgcagaaagtgcagtgaaatcaggagggctaggcatcttctttcccaccaattaattgccttgccaaagctggagtgactttgtcaatggaggaagattgagttccaaatcttctccctattccctcttctgccaccagcccatgccactgccatggcttgtgtaggagtctcccacgagtcaccctcagccacggccgttctgggctctttcactcagtttctcaaacgagagctgaattcagcttttcaaaatacaaaactagttataccaaccctctgattaaaatcatttaatggcttcccactgctcttgagataaagagaagataaaaaccagatccttgaacgtgtcttcaagcctccaactctcccgtaaactttcatttggcttctccttgcttactgaaagccttctccaaatttcgtgaatatgcctctgtaatcctcctaccctttatgcttagagccttccccagtgtggacttccttcctctgacctttttttcttcacccagccaactcctggtcttcgtggattgaatcataacttctttgatgggcaagctttccctcacctccatgagtagatcttgtattacacgttctcttggcaccatatgcttttcttttaacagctgtaactttataattatttgtgtcattctttaatttatatttctatcctccactcaactccaaatttcttgagggcaggtattatgtatctttcc

SEQ ID NO: 316421 - DNA, 4001 bp, Homo sapiens
gattcgttgtgggataagccatgagatagatatctggctttgtttttctctaaatactaaccagttgtcctaataccataaagtgcacaatttctcatttcctccatttatatgaaatcctacctttatcccacacatatcaccatcttccaggtccctatttggatgtcctgacctcctagagtggttggaagaacaaatgaaatcatattcatgaaaacaccatggagtcatcacaacttgctaatgttgtaaggtggcatgtgatggttacttgcacaagcccatcagaaaggacacctcagggagcgtcagctcccctcaccaacaccccaacactggtggccaggagatgactgtctttggtgatttagaccttgagagtaaagtcaaattgtgcccagcagggaggcagcatagtgtggcatgaaatgaacacacgccgggtttgtgtcccagctctgccacccatggctgggacctcagtcaagtcatcaaacctccccagtgaacaggtcacacctcttgaaaatgacagtgtgggtcaggactacctttccttcaggtagtcctcagtaatttatatagtgctttcacgggattgatgtaacctgcccaaagccacagggctatttagacatgaatcttctctcaaatcagcaggtgcttcccatcacaccacaccaccctttctcagtcctaaggactctgtaccctccaagactgagtctagctgaggcgtcagccatctaaggaggaattcaaaactctgtggccttgggactaaaaagaagagtctgatttatttcgcaatgtcaccctccaaaaaagaaggtggaaactaggagggtctggcttagtccctttgcagagtttcaaagcagccattccttggcttatcaagcagcttctcaagcaagagagaaggctgctgagcaaaccctgctgggaggttacagagggcttgtgggctggggagtcagcagaggggttcaaacccagcctcgttgttccctagcagcacccggactccctgaagtaaaactgagggctctggtgtctgctcttggtggtggtaggcggctgcatcctcatgggacacagagcctggcacatgactccgctctgctattccccactctgagaagcaatgacactgctgacagcagcagacagaccctctgcagtagggaaatccatcaggtgaccttgagaaaggacaggacacattgagagacattctacaaaataactggtctgtactcttcaaaagtgttgaagtcacaaaactccaagaatgacagaagaactattccagacaaaggagaccgaagaggcacaacaacggaatgcaaagcctaacccaggattttcttctgctataaatgacattattgggacagttgatgaaatctgcataaaatctgtgggttggataacagtattgaaatggtgttcatgtcctggtcttcataattgtattggttacgtaagagaatgtccttgtctttaggaaatacacaccaaaatatttaataatgtaatatctgcaacttactctcaagagttcaaaaaatatatatttgtctatctatctgtctatatcatctatctgtccactgatcgagaaggataaagcaaatgcagtaataatttagggaatctggataaaggatatatggaaattcttctttttattcttgcaatctttttgtaaatctgaaattatgcctaaatgaaaagtttgtgggttttctaaaaagggatgagacagaaagcaagcagcaccagggccacaagtcagggtgagagggcaatggccccaggcacccggcagaggcaagagagcagtttagggccagctggctgaaggggcatgtggggctccatggagatttcacccactcaccttttgatgcatccatcatcccttcagattctctcctgcaatgccagggaagactctatctctgatgcctggtgcttccacacagtcggtcctcaggggaggaaacagccctttttatgtgatcctgggctagatgtggccttgctatggctgccaaggggcggggtttgggaaggcgatgttgattagaaataataaaatcccggaatcttccatatcagacccaggaaatcaggagccaagatgagctgatgtaaaagggacagacaacggacaatggcacctccttgtctgttatatgagcctaacagtgggtgaccaaaagccaggaccctatgacctacaccacatgtggcctgacattctggttactatcaagcttaagtctaggaacccaggctaacctttactgactttagggttttcttcttcttctcttttcttcaagttgaaaaagtaagagatgcttgtgagttttttgttttacattttgaatatataatgcatccacatggttcaaaatggaaaaaaatgccccctgtccaccttgttgaatcctactaccagtttcttttagatctttccagagatgttgtatgcactgagaagcaaataatgtactattattattattttgttatttagtttttatttcataatcataaacttaactctgcaatccagctaggcatggaagggaacaaggaaaacatggaacccaaagggaaccgcagcgagagcacaaagattctaggatactgggagcaaatggggtggagggtgctcccctgagctacagaaggaatggtctggtggttaagataaaacacaagtcaaacttataagagctgtccacagtcagcaatggtgatcttctggccggtcttgccattcctggacacaaagcactccatggcctccacaatattcatgccttcaccttgccaaagaccacaagcttgccatccaaccactcagtcttggcagtgcagattaaaaactgggaaccatttgtattgggtccagcatttgccatggacaacatgccaggacctgtatgctttaggatgaagttctcatcatcaaatttctccccatagatggacttgccaccagtgccattatggcgtatgaagtcaccaccctgacacataaaccctggaataattctgtgaaagcaggaactcttataaccaaatcctttctctccagtgctcagagcacaaaagttttctgctggctttggaaccttgtctgcaaacagcttgaaggagacgcaggtctaaaggcttgccgtcaacggtgatgttgaagaacacggtggggttgacgatggctgatgttacagggctcctggcggcagtggcatctgcaaagcaaataatgtattattttgttttatttacacaatgagagcatatcactgcattgcccaggctggtctggaatgcctaggctcaagggatccgccccaccttcacctcccaaagtactgggattacaggtgtgagccaccacgcctggcaagatggagctgttcctattgcacatggagaggtggcccagtcttttcacagctgcacatattctgtttgtgtggatggtccctaatttatgtaactcacctcccacccataggcatctgggttgcttccaatatttccttattacaatcagtgttgcaaagaataaggttatacagagatcattttaccctcacatgagtgtatctataggaagaattgaatgccttgaagtggaaatgttgggccaaaaagcataagcttttgtaattttaatggctatctgctctgctctccacaggggcacttgtggtatttttcaatgatgttatgtctactgaaaggagccagcctggcatagtagcagaaatgccagaggaagagaggagactcctgacactgaaaccccaacaccacagtaacttgccgtgtgtcactgggaatgttgtcttcattagctccttacctgaaaagtgagggggctgaataatgatgccaacggtctcttccagaccaaaagcccagggatgggcaattgcctttgctggctttaaggcaagccagagagc

SEQ ID NO: 316422 - DNA, 4001 bp, Homo sapiens
tgggactacaggtgtgtgccactgtgccagaccaatttttttgtatttgtagacatggggtctcactatgttttccaggctggtcttgaacttctgagctcaagaggtccgcctgccttggcctcccaaagtgttgggattacaggcgtgagccactgtgcccggcatgtgtgtgtgttttaatgccaatctgattaacaccacaccagtgttaaaacttttaatggattcctattgcccttagagatctctggctcataactttctaaattctagcaatacttgtcagctttgagttcttccaacatcttggggtctttatacaagtggctaccaacccagaacaccagtccaatatctatttattcttcaaaaatgggattaacttcgaggaggctttctcatttccattgattggataaataatctttgttacatgttcctacagttcccaaccttgtacttccttgtggtaatatttgtcactcttaaaactcattagtcaatgtttctttcccttcagaccaaaattttggagagggaaaagttcttgcttgttagttctgggttgtaatcccaaagcctagtccaggaaggataaatatccactaaataaatgaaactggaatgaagcaaagctgaaattccacatgaagttcctgggtctttagtagcctcccacctccactactctttatcagtctggaaatttgggcctatcactgttcttcccatggccaggccctttaatgtggagaccctggtggtcttcaactcttaagaagtggcctctccacaggcatttacagttaccggtcaccatctcctgaaaaacacccaagagccctagatatccccttcccagatatcaaaggacctccttcctccctaaccagataccttgtaggttctccctccagttgccaatcatgccccttcccccaaagtgtcaccttatttccgctctcagtccatagaccatctcccttagactgtccacaaacccagcctttgcccctctaaattcatcccagctgacaaccacccttcctaacacacacacatacatcttttatcgtcctgatctaccctagacggtctcatcactatactggctcctccttacccccgtaaatctcccaggtacacttcctgatcaccctccggatacctcatccctatctattccttttataaataattccctgctcctccttctcacccacaatccactcgcagttcaaggcctcattgccatcgactccactgtctgtgagtgcttcccaatatgccccaggacccctcctggtgtcacgctctgtatcctgacaccccttgtagacgagtcccgaaattcccgccccgtccctggagctcccactccctcccagacctccacaaaccttccaggcccccagccctaagcccggcaccactgtccacccttcgcggctcctgggtcctcaccgcgcccctagacaaacccggactccctctggtcccacccgcccttgcaccgcttctagccgtctcggccacccacgtgtgttcccagcccaccgaccacgctcccggcacaccctatagccccgcgctgcctccgggagagcggacggggaaagccgagggtctccgaggggcgctcgggctctggcgagaggaggaaggactcagggaagcagccggggaggcccggggctccggggagaggtcgggaaggccgaagcgctctggcgaagaggccggggaggccgaggggttcccggaagcgggccgggaggccaggggtctcaggggaggcccagcgggccgtgcagcgggcgcgtgtggcggcgagcggggcctcaccgtcagtcacggctcccatggcgtgcgcggcggcggcggcggcggcggcggcgcaagctgaggcggcggttggcggcggcggaggtcaaactcccacaatgcagccgggtaaacagccatggaggaggaggcggcggcgcccgcggccgcctgctccgacgcctgagccgcgccgcgccgcgccgccgccgccgccgccgccgccgcgggacccgcgctccccgcgctcccggtactccccgggggcggccgcggccggcgcgagttggggcgaggcttggcggccggcggcggccccggctgcagcccgggctcccgccgccccccttgcagcccccgcccggcccacgcccagaggccgccccggaggccgcagccagccgccaggtgagctcgcccggacgccgccagggctgcgggggtgcggcgggagctgcgggccgcccgcagtcggggtcccggcttcttccccgggaaggtgactgcggccccgccgccccatccagggtgacgctgctaggggtgggctcgtttccctggggggtggggagggtgacggggacgcccggatccggctgagcccaggagaggcgggactaggggtaccgaggggggcgcgtcgctgggggtccccgcgaagttggcgcccacgcgcgctggggcgggtctcgaacgccggcacttgcgcggggcgcggccggcaatcaaaaaaggccccgggttccaggtcgcgcggttccggcccctgcggccgcccccttccttcctgggctcggcgggtgcgggaaaaagggtgaaagagaaacttggcgacctcccggaggagttcgcgaagcgaccaggagcgtgttgccatcgtcctcacccggcacccaattccaccacagagtcgggatttcgtcggtgatcgtgatggggtgcttttatttttctctttgattttcaaaaaatgtctatgtgactgtccctatcttaaggggaagttgaaagtgggggcgggggtgctcaatgagaaacgttgccttgtgtgtagttgtttggagcacactgcaaattatattggcatctctttccaaaagtcactttgattcaacttcgatagctttctcgtaaatggcacgtttaggtggtgagaggtggatgaggaaacaggcaccagtgcagctgatttgacctccagtgggatagatacgattagcaccaggatcgtgtctcattttgaacccaggtttgttattttattcagccataccgttgttttccaattttcctgtcccccaagtagatcttgcatcttcatatccgggatgaagaagttgtgtaggataaacttggttgtttcactttccttactaaatttaggtacattctccctgttttcccccagttctttcaaagaggagaagttgcagatgcaaatgtattaaagtgaagtgtgtttaacctctagcaagaaatatgtacaattttagtcatattatgtgagaccagtgacttcaataataccattacagtgctctcaagaattagtgctcaagaacttgacttttgtcacaaagacaaaaattactttacatgaagattctgagatgtgacttgctctcccctaaggtatgaagtttccgactttgaaaaaatactgacctaaacgctggctgtaggtgggcatcatcagaccctgttcatttccttggttttaggagacagggcactctaagagaagaattgttttaaatcttaagtactacagattgtaaactgaaattgtcaattgattggggttcacaataccaagttgcattttggtggggatagttattgtttagaaagtaattgtcggccgggcgcggtggctcacgcctgtaatcccagcactttgggaggccgaggcgggaggatcacgaggtcaagagatcgagaccatcccggctaaaacggtgaaaccccgtctctactaaaaaaaaatacaaaaaattagccgggcgtagtggcgggcgcctgtagtcccagctacttgggaggctgaggcaggagaatggcgtgaacccgggaggcggagcttgcagtgagcccagatcccgccactgcactccagcctgggcgacagagcgagactccatctcaaaaaaaaaaaaaaaaaaaaaaaaaaaaaa

SEQ ID NO: 316423 - DNA, 4001 bp, Homo sapiens
gtgtgtgttttttttttttttaatgagacacggtctcactctgtcacccagactggagtgcactggcgcgatcttggctcactgcagcctcaacctcccaggctcaagtgatcctttctcctcagactcccaagtcctgggactacaggtgtgtgccactgtgccagaccaatttttttgtatttgtagacatggggtctcactatgttttccaggctggtcttgaacttctgagctcaagaggtccgcctgccttggcctcccaaagtgttgggattacaggcgtgagccactgtgcccggcatgtgtgtgtgttttaatgccaatctgattaacaccacaccagtgttaaaacttttaatggattcctattgcccttagagatctctggctcataactttctaaattctagcaatacttgtcagctttgagttcttccaacatcttggggtctttatacaagtggctaccaacccagaacaccagtccaatatctatttattcttcaaaaatgggattaacttcgaggaggctttctcatttccattgattggataaataatctttgttacatgttcctacagttcccaaccttgtacttccttgtggtaatatttgtcactcttaaaactcattagtcaatgtttctttcccttcagaccaaaattttggagagggaaaagttcttgcttgttagttctgggttgtaatcccaaagcctagtccaggaaggataaatatccactaaataaatgaaactggaatgaagcaaagctgaaattccacatgaagttcctgggtctttagtagcctcccacctccactactctttatcagtctggaaatttgggcctatcactgttcttcccatggccaggccctttaatgtggagaccctggtggtcttcaactcttaagaagtggcctctccacaggcatttacagttaccggtcaccatctcctgaaaaacacccaagagccctagatatccccttcccagatatcaaaggacctccttcctccctaaccagataccttgtaggttctccctccagttgccaatcatgccccttcccccaaagtgtcaccttatttccgctctcagtccatagaccatctcccttagactgtccacaaacccagcctttgcccctctaaattcatcccagctgacaaccacccttcctaacacacacacatacatcttttatcgtcctgatctaccctagacggtctcatcactatactggctcctccttacccccgtaaatctcccaggtacacttcctgatcaccctccggatacctcatccctatctattccttttataaataattccctgctcctccttctcacccacaatccactcgcagttcaaggcctcattgccatcgactccactgtctgtgagtgcttcccaatatgccccaggacccctcctggtgtcacgctctgtatcctgacaccccttgtagacgagtcccgaaattcccgccccgtccctggagctcccactccctcccagacctccacaaaccttccaggcccccagccctaagcccggcaccactgtccacccttcgcggctcctgggtcctcaccgcgcccctagacaaacccggactccctctggtcccacccgcccttgcaccgcttctagccgtctcggccacccacgtgtgttcccagcccaccgaccacgctcccggcacaccctatagccccgcgctgcctccgggagagcggacggggaaagccgagggtctccgaggggcgctcgggctctggcgagaggaggaaggactcagggaagcagccggggaggcccggggctccggggagaggtcgggaaggccgaagcgctctggcgaagaggccggggaggccgaggggttcccggaagcgggccgggaggccaggggtctcaggggaggcccagcgggccgtgcagcgggcgcgtgtggcggcgagcggggcctcaccgtcagtcacggctcccatggcgtgcgcggcggcggcggcggcggcggcggcgcaagctgaggcggcggttggcggcggcggaggtcaaactcccacaatgcagccgggtaaacagccatggaggaggaggcggcggcgcccgcggccgcctgctccgacgcctgagccgcgccgcgccgcgccgccgccgccgccgccgccgccgcgggacccgcgctccccgcgctcccggtactccccgggggcggccgcggccggcgcgagttggggcgaggcttggcggccggcggcggccccggctgcagcccgggctcccgccgccccccttgcagcccccgcccggcccacgcccagaggccgccccggaggccgcagccagccgccaggtgagctcgcccggacgccgccagggctgcgggggtgcggcgggagctgcgggccgcccgcagtcggggtcccggcttcttccccgggaaggtgactgcggccccgccgccccatccagggtgacgctgctaggggtgggctcgtttccctggggggtggggagggtgacggggacgcccggatccggctgagcccaggagaggcgggactaggggtaccgaggggggcgcgtcgctgggggtccccgcgaagttggcgcccacgcgcgctggggcgggtctcgaacgccggcacttgcgcggggcgcggccggcaatcaaaaaaggccccgggttccaggtcgcgcggttccggcccctgcggccgcccccttccttcctgggctcggcgggtgcgggaaaaagggtgaaagagaaacttggcgacctcccggaggagttcgcgaagcgaccaggagcgtgttgccatcgtcctcacccggcacccaattccaccacagagtcgggatttcgtcggtgatcgtgatggggtgcttttatttttctctttgattttcaaaaaatgtctatgtgactgtccctatcttaaggggaagttgaaagtgggggcgggggtgctcaatgagaaacgttgccttgtgtgtagttgtttggagcacactgcaaattatattggcatctctttccaaaagtcactttgattcaacttcgatagctttctcgtaaatggcacgtttaggtggtgagaggtggatgaggaaacaggcaccagtgcagctgatttgacctccagtgggatagatacgattagcaccaggatcgtgtctcattttgaacccaggtttgttattttattcagccataccgttgttttccaattttcctgtcccccaagtagatcttgcatcttcatatccgggatgaagaagttgtgtaggataaacttggttgtttcactttccttactaaatttaggtacattctccctgttttcccccagttctttcaaagaggagaagttgcagatgcaaatgtattaaagtgaagtgtgtttaacctctagcaagaaatatgtacaattttagtcatattatgtgagaccagtgacttcaataataccattacagtgctctcaagaattagtgctcaagaacttgacttttgtcacaaagacaaaaattactttacatgaagattctgagatgtgacttgctctcccctaaggtatgaagtttccgactttgaaaaaatactgacctaaacgctggctgtaggtgggcatcatcagaccctgttcatttccttggttttaggagacagggcactctaagagaagaattgttttaaatcttaagtactacagattgtaaactgaaattgtcaattgattggggttcacaataccaagttgcattttggtggggatagttattgtttagaaagtaattgtcggccgggcgcggtggctcacgcctgtaatcccagcactttgggaggccgaggcgggaggatcacgaggtcaagagatcgagaccatcccggctaaaacggtgaaaccccgtctctactaaaaaaaaatacaaaaaattagccgggcgtagtggcgggcgcctgtagtcccagctactt

SEQ ID NO: 316424 - DNA, 4001 bp, Homo sapiens
gtttccatatggccctagcccctcaggtgtgttctcaccagtcagctccattctggccggggtgtctggctggcgtggctccctgtttggggcctctcccctgaatccttcctggggccatggaggcggcttaggctcttgcacttctgggcagagtagggtggggcaaaggcgggccaagggtgaagaatctatcctgaaagtagcaagaagagtgaacatttaaccaagtttctaggaagagactgcctggcagggtgaacagatgctggggagggcttgagatgctgaccagcctggaactgccaaagccctgaattctctcacattttcttgtgatgaaagcatatggtgtgccgggtgcagtggctcatgcctgtaatcccagcactttgggagtccaaggcgggtggatcacctgaggtcaggagttcgccaccagcctcactaacatggtgaaaccccggctctacgaaatacaaaaaaactagcagggtgtggtggttcatgcctgtaatccaagctacttgggaggctgagacaggagaatcgcttgtacctgggaggcggaggttgtggtgagccgagatcgcaccattgcactccagcctgggcaataagagtgaaactccgtctcaaaaaaaaaaaagaaagaaagaaagaaagaaagaaagcaagaaagcatatggtgtctcctttttgtcaggactcctcagtgaatcggacatggatttggtgccacctacccctgctgagagcagcaggacatgatatgtatacacacatatcttaattagccttaaattctgagcaaccttggttgttaggtcagagaaaatctgggatggggatagagaaggaaagtattgtggcttcagcctggagaagagagtggaaaatgggatgcagggcctgggtgaggaactggcaaacgggcgcaatatgttgaggggtaacttctgcggtggggagtggggctggggaggggaactgcacaaagctgtaactgggaccactagaggtcaggattaaaaggcggtatgggagaaattaacctctattctttccctatctacccccacacataaagccactggagcttttctctggactccaagtcctgaaatactccattatctgaggccaagagatgggctaacagttctgggacttccttcctgagaccagctgcccaggaacgggcacctgctgggtgatgcccaccttaggggcttaccttgtcttaggcgcccactaacatatctgtctcatagctcacacctgcctccctgcccccttggcagaaccccttccggttccttcacaggaccccccacatggcttcctcctcctttcacaagttgtgcaaagaggcttgcacctgattcaatattgggatttcctgtaggtctgtcaacatgagtgggccctcctcccattaccctctccttgcgccctggcttgcctggcccagcttccccagcaccagattcagaaccttaagctaacgaggaatgaccagctaagaatggggattggggctgtgtccatcttactactgtgtttgctaagccctaagtgcagctccctctcttattttctccctgggctcatgtcccctttccttagggccagccagggctgtgctgtattccaccaagtaagtgatcagtccctcagaaaccagcaccccaccccctacccctgctctgccctgctcctcccattctgggaaggctacactcttctcgacaaaggtcagtgcctgtaggttccagtttgcctgcccctcccccagctgggagcccatttctctttgctgtcctttctaccctcacataaccccacaccctgctggccactcaccgggtggagaagggctccaggacccaagtgcacagcaggcagccctctggggagcagatgggtaggaagacatgtggcggtggggcacagcccctccacagcagcaggtcatacgcctgcctgggccacttctgcccaatcagagaagggagccaccagacactggtgaaggcccccggaagtgacgccttctcttccctggagcccctgcctggaccagggtccactcctccacccacacacaccacggagaagatttggatagggggatccatcttttcctggacatgggcaacctgggacctggagggggacaggagcagaagtttttttccaggaggaatctggcaggacatttgtgttgctggggaagaagcacagaggtcttgtttaagattggtggggttttcactccctggctatccaaatttcttttccctggacatcatacctgctgctgaaatccaacaggatgcttgctttcctgcttttctttctgtaatcccctagggagtcctatcttgtcattccccctttcgaagtgggaacacggatattgcccacatgagagaaatctcctgttatgggttggtgttatggggaaagggtttggacgggttgagtggactgtcaggtgcggggcacatgtatgtgcgcacacgtgcactgggttaagcctgagcttaggtgctcgtctgctggggtccagtggcttagatggctacacacacagacctctgtgcccagggccctcctttgcttgttctgtctccgtcttccatctcctaccgttccacatgtgacaagaggaataaccaggcccatgtgtccctgtcttaggaaagacagctgctggacctcccccgcaaatacctccctgctggccccccttttcctttggccctggctctagctcctttgctttcttcccagtcccagtctccccacagtctctgtcctcaggggcttcctggcctgaccttgatcccatcatccccctgtcccccagaacttcctcaggctctctcctgttcctcctccccaaggatgggcatgtctgctgagaagtgtggcctagatcctggaattttcccgtccagccagacgagatgtctcccaagattaggaaggagggtgctgggatagctgggaggatagtgggtgtgtgtgggagggagagacaggagacagggaggcaggcatgaccagggaaccaagagaaaggaggctgggagtgggctggagaggcagagggtcccttgggtgaaggaagggggtgagaaagcaagaggggactgtcgaatgcgcctgaggataagttacaatgagagggagatactgtcactccacagaagggggaatgctgccggtttctggctaggtccctgtcctgggtaacacaagaatgaggagcgacctcagagagaaggtagggaggcaggctaggcagtgagagagggtggtgagggtttggggggcgctgtgggcccaggcagggggagatcggctgatggacctttcctgtacgttgtcatctttaaagacaagtcttcatccttcgggcggaaccgggtcctcgctcacagagcggtccaggcctcaggcctagcctctgcccctccctagcctgaggctcccttcctgggctggacaccgacctcctggtccagccgccctgtggccgccagcagcggggggctccgggcccgcctctcctccccctcttcgcgccccctggtccctcccctccccctcccccgctcccccttcccctcccgcccctccctcctcccctgcccggtcccagcccctccctcccctcccccacccgcgatccgggccgctgctgctgggtcggaccccccgggctcagcccggcccctcgccgagctgccgccgccgccccgtttgctgaggaggaggcccccggccggggcgtcgggcgcggggcataaaacgggccggagccggcgcccggggcagtagagccgcgtacggcccgggtcagcgcccgcccgcccgcgctcctcccggccgctcctcccgccccgcccggcccggcgccgactctgcggccgcccgacgagcccctcgcggcactgccccggccccggccccggccccggccccctccc

SEQ ID NO: 316425 - DNA, 4001 bp, Homo sapiens
cagcaccagattcagaaccttaagctaacgaggaatgaccagctaagaatggggattggggctgtgtccatcttactactgtgtttgctaagccctaagtgcagctccctctcttattttctccctgggctcatgtcccctttccttagggccagccagggctgtgctgtattccaccaagtaagtgatcagtccctcagaaaccagcaccccaccccctacccctgctctgccctgctcctcccattctgggaaggctacactcttctcgacaaaggtcagtgcctgtaggttccagtttgcctgcccctcccccagctgggagcccatttctctttgctgtcctttctaccctcacataaccccacaccctgctggccactcaccgggtggagaagggctccaggacccaagtgcacagcaggcagccctctggggagcagatgggtaggaagacatgtggcggtggggcacagcccctccacagcagcaggtcatacgcctgcctgggccacttctgcccaatcagagaagggagccaccagacactggtgaaggcccccggaagtgacgccttctcttccctggagcccctgcctggaccagggtccactcctccacccacacacaccacggagaagatttggatagggggatccatcttttcctggacatgggcaacctgggacctggagggggacaggagcagaagtttttttccaggaggaatctggcaggacatttgtgttgctggggaagaagcacagaggtcttgtttaagattggtggggttttcactccctggctatccaaatttcttttccctggacatcatacctgctgctgaaatccaacaggatgcttgctttcctgcttttctttctgtaatcccctagggagtcctatcttgtcattccccctttcgaagtgggaacacggatattgcccacatgagagaaatctcctgttatgggttggtgttatggggaaagggtttggacgggttgagtggactgtcaggtgcggggcacatgtatgtgcgcacacgtgcactgggttaagcctgagcttaggtgctcgtctgctggggtccagtggcttagatggctacacacacagacctctgtgcccagggccctcctttgcttgttctgtctccgtcttccatctcctaccgttccacatgtgacaagaggaataaccaggcccatgtgtccctgtcttaggaaagacagctgctggacctcccccgcaaatacctccctgctggccccccttttcctttggccctggctctagctcctttgctttcttcccagtcccagtctccccacagtctctgtcctcaggggcttcctggcctgaccttgatcccatcatccccctgtcccccagaacttcctcaggctctctcctgttcctcctccccaaggatgggcatgtctgctgagaagtgtggcctagatcctggaattttcccgtccagccagacgagatgtctcccaagattaggaaggagggtgctgggatagctgggaggatagtgggtgtgtgtgggagggagagacaggagacagggaggcaggcatgaccagggaaccaagagaaaggaggctgggagtgggctggagaggcagagggtcccttgggtgaaggaagggggtgagaaagcaagaggggactgtcgaatgcgcctgaggataagttacaatgagagggagatactgtcactccacagaagggggaatgctgccggtttctggctaggtccctgtcctgggtaacacaagaatgaggagcgacctcagagagaaggtagggaggcaggctaggcagtgagagagggtggtgagggtttggggggcgctgtgggcccaggcagggggagatcggctgatggacctttcctgtacgttgtcatctttaaagacaagtcttcatccttcgggcggaaccgggtcctcgctcacagagcggtccaggcctcaggcctagcctctgcccctccctagcctgaggctcccttcctgggctggacaccgacctcctggtccagccgccctgtggccgccagcagcggggggctccgggcccgcctctcctccccctcttcgcgccccctggtccctcccctccccctcccccgctcccccttcccctcccgcccctccctcctcccctgcccggtcccagcccctccctcccctcccccacccgcgatccgggccgctgctgctgggtcggaccccccgggctcagcccggcccctcgccgagctgccgccgccgccccgtttgctgaggaggaggcccccggccggggcgtcgggcgcggggcataaaacgggccggagccggcgcccggggcagtagagccgcgtacggcccgggtcagcgcccgcccgcccgcgctcctcccggccgctcctcccgccccgcccggcccggcgccgactctgcggccgcccgacgagcccctcgcggcactgccccggccccggccccggccccggccccctcccgccgcaccgcccccggcccggccctccgccctccgcactcccgcctccctccctccgcccgctcccgcgccctcctccctccctcctccccagctgtcccgttcgcgtcatgccgagcctcccggccccgccggccccgctgctgctcctcgggctgctgctgctcggctcccggccggcccgcggcgccggcccagagccccccgtgctgcccatccgttctgagaaggagccgctgcccgttcggggagcggcaggtaggtgggcgcccgggggaggcgcgggcggggagtcgggctcggggcgagtcagcgccagcccggagggggcgcggggcgcaggtggctcggcgcggcgggcggcccggagggtgggcgggggcagaagggcgcggtgcctgggacccgggacccgcgggcagcccccggggcggcacacggcgcgagctgggcagcggcctccagccaagcccgtccccgcaggctgcaccttcggcgggaaggtctatgccttggacgagacgtggcacccggacctaggggagccattcggggtgatgcgctgcgtgctgtgcgcctgcgaggcggtgagtgcaccccgcggccggcccgggccctggcgggtggggagcgccgggtcgcgcgggcgtcggagtggactcggagctgctgagaaggagcccagtcggcagatgttggggatatttttctggtggaggaaggggaatcagcccctccaattcttaggtgctgttactgatcgcccactctgtgtgaggctctgtgccaactccgtttcgttccctgctcatctaactctcatggcagccttgctagatagagagtattattatccccattttccagacagggaccttgaggcccagagagatgaagtagcttgtctagggtcacgcagcttgtaagtggcagagctggctgactctgcgggacatccttgcctgggggggtctcatcagttggcatcttgcactcacttgggtttcccgccttttccgggagcagcctcagtggggtcgccgtaccaggggccctggcagggtcagctgcaagaacatcaaaccagagtgcccaaccccggcctgtgggcagccgcgccagctgccgggacactgctgccagacctgcccccagggtaagtcttgctccgccctgcggggagggaggcagggccacgatactaggtcccgggccacttggatggggcgtcggactggcctttcccatggccagctgaagcccgtgttcttacccccccgcccgcagagcgcagcagttcggagcggcagccgagcggcctgtccttcgagtatccgcgggacccggagcatcgcagttatagcgaccgcggggagccaggcgctgaggagcgggcccgtggtgacggccacacgggtagggggctggcgaacagcggggttgtggttgaggctgggccaccaaagcggcgtttgacagtg

SEQ ID NO: 316426 - DNA, 4001 bp, Homo sapiens
aaaagtatacctttgcattgtaatgccaacaggaattatttcactttaaaaaaccagttctgtagctatactcagtattatttatttttcactggctataaaataaagccaaactgtatttactagcagatggtctcacttccaatatataataaacctctgagatcaggtaaaaatagattctgttagtatttctttaacatgctcaaattataaatgatcgttcaccaatgtctttgtataaaacactccaaacaaatcacttggtactggatttctgtttgactcaattaaaacacttagccacctggcatgaaaacatcctaaaaacatcaactgcttaaaatactttgcactgaaacacgtttttcattgtttcctagcctctgactgatttcggaattagaaagaattaagcagaagtgaattggggagcaggtcagtcactgaatattcagaatgaatcatgaacacgttaaaatgcaatttttatttctttgcagtgcattgcatgctatacattcttacaatttaaataagcatactaaactaaagccaaataatgtgaagattgcccaacaggtctacattacctaatacatttatcattatataaactgctgtgcttgatattaatacactgtgcaaggaatgcttaatttcttgaacttccacacaggtctttaaaactgaatctcactagtacccaagaccaataatgtgctgaggaagaaggtatttcaaatatatttactgattacacagtgtttgaatcttcaaaaattctaaatttatgtggacaaaggagaatggagaatctgaacttggctgttcatgcaaactctttcctttctttgactcactttatgaattgttatgtttctagatccttcttttaaaattttccatttggggaaacttgtacatttaaaaaaaattcatctcattttctccctccccctccttaaaataaataagaaggcttaagaattaacactaataataatcccacaatggtcattgggaaatcctcccccaaagtgacaactgccgctaagaagggcaaaatccactaagaatgaaaattcccccaaatgagtccttctccgagggggtggaggtcacacagttggcacaattggtatcacaaccaactcgaggagacccagaggaagatgctgcgccaagagaagcaaagcgaaggagcgcgacccaggaggctagcgaaatccccgccaagcccccaggaggcggagagaagcccagtcgccaggcaccggccacggcgcacgccaacatccaggataattctcctttccaagcccgggagttccggggcaggcgaaaaaggggggatgggagacccacagtccctttaaccctcccccctggcctgccaaccttttccgaacccccatgtcacacaacttcctcatcatggaaacttccactgggttcggcgctgaggatgccaaactccatttcacaaggaacatgtcaacagctgggcttggggtttgaggaacagagccgctgcgattggaacagagcccggccaccctgttccaccactgtccactccgtagctcccagcctgccgccgcgcggtgcccgaacacgagagggcacctcctcccagatccggggcgcagaagccccgcggaggcaggtaatcaggctgatgacacccccaccacccacgctcacccgcctgcccgcccgcgcgcgctcggcttagccgcccgcacccctccgggttcttgcgacgctccgtcaccatcccgcccaccctgtggacagttggaactgtcgccccctcctcctctcaccccgctgcctccgcgcggtcctctagccaaattaccagtgccctggagccggttgggttgagcgcccctgcccggggaaggtagcctgcgggctcttgccccgagcccgcggagcaggaggtctcttttccaagcgcactcacattattcatgcaaagttaatccccgccgcgtcacggccgcccgcccgaggatgtgcgccttccttggccaagccccgcagtctccaccctcctccgccccctcctcccggcggcggggtcccggggagcgccggcgactgggcgtcgcgcgagtcctgcaaaatgtcaactccttgggcgaagagaggcggccgcagccagggccgcgccgcacctccccggtctctccacttttataggcgtaggaagctactgcggctggggcaccagagtccccgcctctccgggtcccccgcgtgcccggcccgccccggcccgcttcccgggcgctgtcttactccgggcccggggcgcctgctccgcgccgcgtctgcgaaccggtgacctggtttcccctccagccctcacggctgtccgacttgcgcggcggtggcggcggcggccaagagcaggcaaacccggctccgccaggggcgcagcgaggaaatggcctcctggcgcacaccccgccgccgccgccagccatcgccaccgccccgggctgcccagccggtacagacgccccctgccaggctccgggccagcgctccgacgcgctcacagcgcccggcttgccgaccccgaccccgaccccgagtcctacgcactcgaggtccccgggccggccgcctccgcacctgcctccccaggtgtgggcgctccccctcctcctaatcccggccgtgccctcccagggttggtgacggtgctgtgggtttggtggccgcgcgtccacccacccgattgcctgcgcgcataggtgcgggtttgggcgtcattactctagttggagaagaggaaagaatggggaacgagtgacaccgggaccggagggcgagtcttccaggagcacgtctcggccttctttgcccggcccgaccggcccgacccgtgccgcagcgctcctccctccgctcctaaaccacttgtggcgcgtgtcgggaatacagggcgctctggctcttcttggggcctccgctggtccgaccatctggcagctctcttaaccaccacggccaccccacgaatggaagtttgggacgtgcctgggttgcccttaaggaggacacccccgcccccaccgccattatgcatatcgtgggagaggcgcgtacagggctgagacactcctcaggtcccagaacggccgccctattaatttgtctttgccctggaaatgtatagataaaaccaggaagacaaaaataatgtatactcttcaagagatctttcccgggcaaatataggtctctcaaatgcccccgaccttaagtcctggagaccaggaagagacttgctttctgagctagaaggatacttgggaaataccgagtcctcactcagctaaaaggtagtcaataaggaactatagttgcaacaaaactactttgacaacagagtacaattaatttcttatagacagtattaaaataattccgacatcataatttaatattcacatctattcgtgtaacacgcagtataatagagttatgacgatatggatcctcagctgcctgacaatgtataggttatttattggaaggttctctagatttccagccagtgacatgtatgttttattctcgcttcttctgagcgtcccagggaaaggggtgagaggccccccacccctgctgacagcattaacaaccaccccgctggataagcagggtttcactgatgcacttttaagaaagttgcaggccccagagaccccatttccctttggtcctcggtgagaagtccgtgctttcttctctactcttaataagtctgcaccataggacttgcaggcttctgtagttggagagctgttctcctttgcagggaagttcctgggctttgctccaaagctgccccggaatgttttggttggtttggagaaaagctgtggcgtctacaccacttgttccaagcaggcggccccctggtggctaacggggggtgagaaagctggccactgaggaagaagtctggcgcaggtagg

SEQ ID NO: 316427 - DNA, 4001 bp, Homo sapiens
tttaaaagcagtactgtcctttaaaagaaaaagaaataaagcccaaatattatcatctcatatttcagttataattaaaaacatgggctctggagggcaggaagaacaaggcaacacatctgataaacagtcaccaaagtaaaaagggttgaataaacatgggcacagagtgcaggctgtaaaacatgatgttattattaaagaagcaatacagataccatgggagaaaaagagacaagaagtatttccatagcatgcaatgtttgctttggggtaacccatgttgacaaaagccatttcataactacgacagaaactgcagatcacattcaaatccatttctgcatctagatgttaagaacatggttagttaagaatatagggcttggctgggcgtggtggctcacacctgtaatcccagcactttgggaggccgaggcgggcagattgcctgaggtcaggagttcaagaccagcctggcccacatggtgaaaccccgtctctactaaaaatacaaacattagccaggtgtggtggtgggagcctgtaatcccagctacttgggaggctgagggaggagaattgcttgaatccgggaggtggagattgcagtgagctgagatcatgccactgcactccggctggggtaacagaacaagactctgtctcaaaaaaataaataaataaataaaataaataataataataataataatatggggcttttggagtttcagatagatacaggtttgaattcttgcctccaccatcataggttgaatgacttatggcaaattaattctcccaaaccttcaaatgtaattaagtaattagtaatacctctttcctagagtcgttaggagacaagtgagagtagtacctggttaggccaataattaaaacttattaataggctatctatcttcttccctcctgtgaaatagcatttcatgcatttaaaaatgattaactgggctgggcacactggctcatgcctgtaatcccagcactttagggagctgaggtgagtagattgcttgaggccaagagttcgagaccaatctgcgtaagatggcaaaatctcatctctaccaaaaacacaaaaaatagctgggcgtggtggtgggcgcctggagtccagctacttgggaggctgaggtgggaggactgcactccagcctgggtgacacagtgaggccctgtctcaaaaaaaaaaaaaaaaaaaaagaaaaaattaaaaataaaaatggttaactgaatacttactatctaatgattacaaatgttcaaacgcctactacttgccagactctgggatccatagatgggcatcaggagagagatcttggaagtaatccgaaatagtaaaacaaatttcctatgcataagcttttgtgtgtgcttggggtgggggccgggggaagtattagagaggtggaggggccatagcttacacgagattttcaaaaggtctgtgactcaaaataacttaattgagtacagaatacctataatgtccttgtgctgtgccagcgatacacgacagtgtttaacactacgtcagttcccgccgttaaaaagctgacagtcactgtgaatacaatctccatcttctaaaaaatgcagctgaggtcagctaaaggacgcgttccgcacaaggtcagagagccaatgagaggcgcagaatgaaagagaactcacgtctcccaactcccacctacagggcccgggaatcctagggagcgggtaaaggcctgggagagggagcaagatgggctccgccacgagatccgcctgaagtccggctcggcgccggcctcaactgcaagaggaaggccacccctctctccccaagctgaaacaccagaagagccacactcggccgttcccaaccgccgccagttaccggccgccagcgaagaccctttcagctcccacactccattggcctcttgcggtcaggtcacgccgccggaagccgcccccggaaacggaagtcaggctacgagtcacggtggctccgcgctggcggcgggttcccccacaaggtcttggggaaaggagcatgcgctggaagctgtgtgctgttggttttgaggatcttcagtaagctgaaagcggagagtcaggggccttgtgtcctaccatggtatttgctaacgtttagagagtgcttccccttgccgagcactgggtaagcgcttcacatgcgtcatctcatttggaacaagtctcttttgttctagcacctatgaagtggcagagactgatttctgttttaaagctggagacaccgagtctctccagcttatttaaatatctttctcaaaatgtcatgccactagttcctgatttctgtattgccatcactattttagcactgtttacttcatatttttctttagtttaaaaaaaatagaaatagtggggctcactatgttgcctaagctggtctcgaacatctgggttcaagtgattcttctgtctagccctcctaaagtgctgggattacaggcatgagccactgtgcccaatcagatgaactttatttctcataaagggttgaacctggccgggcacagtggctcatgcctgtaatcccagcactttgggaggctgaggcgggtggatcacttgaggtcaggagtttgaggccaggctggccaacatggtgaaactccatctctactaaaaatacaaaagttagctggatgtggtggcctgcacctgtagtcctagctacttgggaagatgaagcagaagagttgcttacccaggaggcagaggttgcagagagccaagattgtgccactgcactccagtctgggagcaagacatcatctcaaaaaaaaaaaaaaaaaaaaaaaaaaagagttgaacctgcatggtagccattttgacagactgggaagcctagcttccagtcagaagccaaaaacaggcacttccagggttggaagaataagacagggatttatgctaaacacagtggccaaatatacatgttaaataaactgtaagaggggtcacgaatatttatgaaaggagcaatttgtgcatgtgcagttgagcttcatgcctctctgtggatcccatgtttaaaaaatggtggccttagcatgatccaagggtagagttttctaccgcttgacttcaaaaggtgaagcaggggatgtgaaaaccctcactgcacgtcctctgtcgactggccagaaccactccctggatggtgggtgatctcttatcaggaaggaatgctagtcggttgttctattgaaactgcaaatgggagggtcagcatcaggctggtggagtgagtctttcaaaagggctggtttctgtttaacccttaggaaagaaaatctaatggcgattatagagggaggggttataaagaggtgtgtccgacttcccatcctgtcatgagtaggaactcagcttccaagttttttctagggtctccttggccaagagagggcctgttcagtcagttggggggcatagaattttatttttatttttcagttgacaaaagttaacttattgtgaaaggaacccaacaacaaaaagataaaccgaatttaaaacaaaacaaaaccaaaaagaacacaatttataaatgtgcaaaggggctgggagtggtggttcatgcctgtagtcccagcgctttgggaggctgaggtgagtggctcgcttgagctcagagtttgagactagctctggcaacatggcaaaactctgtcgctacaaaaaaatgacaaaaattagctaggcatggtgacactcacctgtagtcccagctactcgggaggctgagacaggagaatagcttgagctggggaggttgaggctgtaatgagttatgatcacatcactgcacttcagcccaggtgacagagtgagaccttgtctcaaaaataaaatgaaaaatatgtaaagggcttgaatagatatttctccaaaagatggacaaatggccaataagcacatgaaaagatgct

SEQ ID NO: 316428 - DNA, 4001 bp, Homo sapiens
ggtgattcaaatgtgatcccgaattgagaagccctgctgtgcagtgtttcaggattgcattttctatgctagagggagaggtttatccaccaacttgctccagcaggaatacctgagctttctaggacctccaggaagattctcccagtgtacgtcccatcagggtaggtgtgatagatgcagaagtactcccctgtatcgttcacggtcagcgactggagggtgaggcccaggccgggacctggggccactcgatccttgaaggatggggagatgtgccaccccaagtcagcattacaaatggccagaagctggtcctgctgctcccagttgacctgggtcacttgtgccgtggtggaggagaggtgacattgtaagatgatagagccacctttctctgcagaaatgttccccgttgtttctattgtgcctgtcatcattcctagggaagaggacgaagcacatgtgagtcctgggtcagcagctggccttcaaccttcctagaaaaattctaagggcctttgaggccccaactggattttggaatgatagtttctccagtccatcctgttgctcctccatagaggctgtaattatttcctgtttcttccatttcaagagacgctcctctccatgcctgttattcaaggctcccagtcccccattcaggttgtctttccagtcttctcacccttctccacacatctctactccagcccagcccagcccatctcctccccacccactgccctatgcttccagagctgacttctgcccctctttacacctcgcccacagggaggcttgtcaaggctgcactccctccccgcctcctagaagacctcagcccatctcaacctcccttttcctttcacattcactgcctgtattgtataattagcaccttactaaatgcctggcttatgactacacaacttagcacgttgccccctcgcatattctgctatgtagcttcatggccagcttgttattttcgtaggcctattttgtctacccacttagaatataagcccttgtcagctgataccacctcttctgtttttattttgttttgtttttatgtttcttcctgcggcctagttctatgctggatgcattatcctttgaaataaaaccttgctgtttggttgattgtcatttgcagtgcctgaaaaaaccttcaggaaagccaagaaatccaatagcaaaggaagcttagcaggaaaccctgcttctcccaggcataaccaccctctcagcacttaacctctccccagcaaccctgggcacatctccatcctcagatagttcagaaggcaacataaaaactaatttataccacagtttttaaatatttgtgttcccctccctcagaaatatttgactctgatttttaatatagaagaaataaatttaacaaaaaatcagtctctagtggtagaacctctggaatctgtgaaaaagacattttcaattcacagagaacttataatgttttcctggaaagttcctgaaaggcaacagaaaagaagctggagcaggaatgagcttctaaaagcaaactggcaatgcctcctgcccagcccttcttcttctcctgctccttcttgtgctggccagtcaggctcctccaaccccggaagtctgcaaagtccttcatctgccaccaaaaacagaaccccacctcattctcagagattgtcctttcttaaataagagtacacaggactctaaaagttgcaatttctttctctcaagcagctgtggcatgctcttggagtcttccctacacaagcacccaagtctccaaccaagcttagccttgtttttcctccctgctgctctgctgggtttcaggccttacctgaggcgaggggagcctgcctcagcccctgggcccagatcaggaggagacaccagcgcatgcttctgcccagagggcctacaggaagcagatgtggcctcttctgccactgaaagtagccgactgcagataggacggtaaaactgagcctctgagaaaagacggtctcggaaaaaccaagtttggcaaaaaccatattaaaaacacataaagttgtcaacaaatacacaaactgcatagggtgagccacaagaaaggccatgaaggaaacatttaaaaataaatgaaaattgtggttagaggtacactcgtctttggattatagtcaatctattgtttttaagttctgtcttaatgttttttctaaaaatcagcctttattcaaagagctcaagggcatctgtgtagtgcccaagattctgaagaatctgctactgatgaggaactgttggctgagctcctctggcatcctcctgatgaagaatgtgcaatgataagagaagcttatcattgtagggacttacaggccagggactgcacttgaaatctaatgaacaggtgaacaagaagtgtttacttgggggatgatacatggatgggacaaaggtcttggacaaacacagcaactttcccttgaaggagatcttctactcgaatcttatttcttttgtcttgtttatctggactgagactttattgaattctggcttgatttctctggtgcagtaggatcagaggagattagaggagagagctttcctgtgcacaatgacctcatgagagctggaaatgcaaagaagggtgagcccctgggagctgacccaggagagggattggttgacatttgcctggagctcccagcccatcaccaggtcctactatggacccatccttctttcctccctccctcccttcattcatttgaaagtccctgggtgcctacaaagcaccaacctcaacaccaggctctgaggatatgagagtaaataatcacagcccctaccctcaaatagtttacaaagcttgttccttggtgaactcagtcaggagagggggtagaagatccacattcacctgcctcgcaggctctcaacacagttgccttggggatgctccatgttgtacatcctgaaaatctgcatctgcacccagaagcatctgaagcctggtgccccaccccctccattccagccatgcacctctagcatttcacaccatccaggctcctaccctccttctcccttgcaaggtcttctatctcaggccagttttctcccctctctgggttctgcctatccccaactctatgacttgtataccccttataccccacctccagacccttagacaatatacgccttaccagcttctctctgcctacccaaagcaacctgtccttcaaggctcacatcaagagatgccttgcctttcaatagctacaaagccttcagctgaaggagaaataatacctaatgtgtgtccaagggaaggtgccaaggttgaactggagggatgtttcccaaactcactaaggccggggagccaggagtggcagggccaagagcagctagtgggactagagcacagaaagtggtggacactaggatttgggctataaaaatttacagcctgtgtttccatagttgagctgggtgggagccaaagaggtgagacctctcttatataatgagatatccagagaaacttagaggtggttttaaacaattgttaaataatttttctgttttttgctaagtaaccagtccaaagaggaatatggtcaagtccattttgatcaatggtgctctagagggggatgattaacagactgggtccaaagtcatcctgtttggtgaccttggaaaactttctcaacctcctgaaggctcagtttccccatgtgcatataggaataagagtacctctttcatagggttgtgaggatttaattctctagtgtttggtgaagtgttcagcacagtgcctggaagatggcaggagttcaatacatcaacagtagtattgataacaatattaattaaggaagtgaaaggaaaattggaggacaatatccctatctatataatgtgctttgtcaagagtaaaatcctagtctccagactccaaggccagggtt

SEQ ID NO: 316429 - DNA, 4001 bp, Homo sapiens
aaaacgaagctatggtgttagaattaggatagtggcaactcctgaaaagacaatgaccggaaaaggcacaaggggagcttttgggatgttacaatagttgccatttctttcttagtgctgggtacagctatgttcagtttgtgaaaattcatccatcagtatacttaggcacatttttcgaaatgcatttcctactccaataaaaagttttttaaaaggtgcttttgatgactattacacccctagaaataggaagaatttgtgagttggatagagagaccaatatttccgtttaaatcttaagttaacttttagaaatcacaccaactcgtgagattttagggcaatgtatgaaagaataaaaacgtggatgtaagacaaaaaatctaaattctattttactaaataatttcatgaaatactcagataggactgtactaataaaagcactgggctgggcacagtagcacacgcctgtagtcacagctaacttaggaggctgaggtaggacttgagcccgagttcaaatccagcatagcaacatagcaaagatcctggctctaaaaataaacaaataaatgtttttttaaaaacgcactgggaaagttcactatgcagtgggtggcacatgccaatctaaaataacaaggaaaaactactatttaattcgatttgttactctcaaatgcataagaagctagaactgctaatgaagcttccaagatgtcatcctgagactgctctaacaaatagctgtcttaagtattaagttactataaaataattgcccttctaggccgggcgcagtccagccgcggtggctcaggcctgtaatcccagcactttgggaggcggaaacaggcagatcacgtgaggtcaggagttccagaccagcctggcgaatggtgaaatcctgtctctactaaaaatacaaaaattagctgggcatggtagtgggcaactgtaatcccagctactctggaggctgaggcaggagaaccgcttgaacctgggaagtgaagagtgcagtgagccaagatcgcaccactgcactccagcctgggcgatagagcgcgactcagtctcgaaaaaaaaaaaaaaaagaaagaaaaatacgagtttgggctggcgcggtggctcacgcctgtaatcccagcactttgggaggccgaggtaggcggatcgcctaagtccaagagttcaagaccagcctaggcaacatggtaagaaccctgtctataaaaaatacattaaaaaaaaattagccgggcgtggtggtgcgcgcctgtagtcccaattaatcgggaggctgaggtgggaggatcacttgagtcccagaggcagaggttgcagtgagccgagatagcaccacagcactccagcctgggcgacagagcaagaccctgtctggaaaaaaaaaaaaaaaaaagaaagaaaaaagatacaagcttgggttacaaatatcagaacctcaaatataatctaaaaatgaagcacaccatccttggtgtcctaaggctgacccaggctgcccacgctgcaggacaccgctttcgcggccccctaccccacttcacaccctaggcacttttactctttgccaaacagctcccggaggcggtcccatccagattccgggtaatagggctctgggacgtagggaagccgcttctgacgctcctcaaggacttccgaatcggcagtcacagcttcggcagcaaagactcggggaaataggcacaatgctctacagagaaagctccgcggtgccggtggcggcacctccatggccttctctcgacctacggacaaacttgagcgctcaggacttcaagtcctcgcggacgtgccgcgggagagcgtaactgtacgaggtgagaatccgtgcatttgacccaggttaaccctctgccagagggctcgacacccacaccttcagtccccggcctcgctttggagtccttggaaatacgacacaggaagtcccgcccgaccggggcaaaggccagggggcggggcgacggcgaagccggagcccaaaagacttccggttgagggcgggttgggccactgctgtgctgagtgcacccccggaagtgagttggctgccagtagtgaagctcagcgtggtcccggcaggccttcgctccgtgtttgtggttcctgggtcatgcaaacggtgtctgcggctacttatattcagcttgaggtggtcataggttgaagtaatttatcgtatttaaaatgccaggaattagccgggcatggtggcgggcgcctgtaatcctagctactcgggaggctgaggtaggagaatcgcttgaacccgggaggcggaggttgcagtgagccgagatcacaccactgcactgcagcctgggcaacaagagcgaaaatctgtctcaaaaaaaaaaaaaaaaggcaggaatcccgcttcagtaaggaagaaagtgcaatattcagtgcaagtggagtagggaaagagggaaaggcgatttgtgcaaaaacaagtccaacctactctgccaacattagagaagccttccaggctgggcggggtccgtttgtaccttgtcagttctgctggaaaaaaaacgaggcattggggatgggtgttggtgccagttacactaagatttcgagaacacttttttgaagaatcagctttttggcaggtcttcctaaggtggatttcactccctttagttcatatgcctactgcttctcaaaaggcaggagaatttctggaatttctatcaagtgtttgtataatttgccgtcactacaacctctgctaacatatgcttcgaagtacagttttcattaaaatgaatgcatttaaaatattctcaatattcgtgtaatttcattcaatccttgttaacaagcatactcccttattcattttgccaatcccttcacctccttgattcctttctagttgtcaatcaaaactgccacactgtagtagaatacagtaagtggacttaggaatttgatagctggaaatgctacacataagtccctgagaagtgactgactagagtgaccagctcaattagtgacagcgccatgaagactactctgggatatgagatttgattcagcactcatcgtagcacttacaacactgcatcataatttcctattaatctgtctcaataaactatccttgagatcacagaccaaatatattcatctctgtatctccaggacctagaaccgcagtaggtgctcagtaaatatttgttgaataattcagatctcctgacttctggctctggattactgcttatcccatgttaggtagaagtgggcaccaagataagttaccaaggcctgaaagcccaagaaaatggctgtacagtctgtttctaacctatatgtagaaaaagctaaatgcataagatgaccccagaattattctggggtgaaggaggacttgaaatgggtaggagggtttgggtgggtgttgggaagatactgacacaatcacttatgtacaactcaaatgccccaggattcactagcctgtagatgaggtaatattaacaggcaaattttaaattccataacttgtttctcatttgggtaacggaagactcatttgtaatgttccttttgccacctgataactcaaaaaactcccctctcctttggctactgctcgcactgttgctgctcttccatctgagccctcccacatttcctacttccccaatcccttacggcttaccttcttttagaacaagggaaatgctcaccctcctctgtagtctgcttattttattttatttttgatacagtcttagcttcgtcacccaggctggagggcagtggcaagacctcggctcactgcaacctctgcctcctaagttcaagtgattcttgtgcctcagcctcctgagtagctgggattacaggcatgtgccacaagcctggctaatttttgtatttttagtaaagatggtgtttcaccatgttggccaggatggtctcaa

SEQ ID NO: 316430 - DNA, 4001 bp, Homo sapiens
aggggctacacatcccagcctgcccccatgtacctttatctgtttgatttcataccggagcattttttcagtgtcagcagggtctgcactggccggaactaccttctcactggagattttggcccgaatcactgcataggaagagaaaagagggaaccttcagcagctggtgggggcaatacacctgaggtctggatgatccagggtccatgaagaagtctatagggcagttcttggttttggtgtggctgggttgtgagcaacgtgatgtgtgagaagggggacctggaaacacctcccctgcagtcactggaagttccaaacccctcaggcttattaggtcctataaccgctaagctgtttctgccttttgaaccagttagtctggagagctctagttctccatagccgtttgtgcagtggggcacagggtaggagtcagagtagagaagggaggaggagccccttcagggcagtcggtgtgaagtttatctattgctgtggtcaaggcctctcatcccgcctacagttgatattagtaaatgtttattgaattcataaatgttctgaccctgcactgaggtattgcatctcttgccatttgagcattaataaccaaaaactgttgatgatgttcttcctctgtgcctggccttgcactaggcactaggcccatagatgtgattaagacagggtccccatcctgccgagctcttgatctagtggagtgcacacgtgtaaagaacaacagcacagcatagtaggagcgctaagacggttagagatgctgaggcggcaccaaggagcccgggagcctgcagagaaggggagagacctaagttagcccttgaaggatgagtaggagtctgccaggaatttaagggtgtgagggagggcattccaggcagagggaagagaaaggacagaacgtgtgtgttgccataggggcttggtggcaacctcagttataggcctggacagacacgggtagttacaatgcaagccctctcccctcccctttctgtccccagtctagtagttcagaataatcatcagatagctccggtgacaccttgtgtaatgacactccataattgcagtatggccggagtgagggaggtcgctatggaagtccctgatgaaatcttcatttccttatgaatcagtcaggttctgggcttgcaaggttgctatggcgcctggtccttctccacccatcagcctcagcaagagacaaccggtaagaatttgagctcctcccttttcctctggactcctggtgtactgctggccagatactaatcccccacaaccaccccctgctgtggacctcgcggacctcggactcaccaagtgccgagtggcagatgtgctgctgagggtgcgccggggcgcagctgcatgcctcacccagccccgggggccgcagcaacgccagcagccgcagcaacagcacccagcttggcgcgggccgagggctcccaggcatgacactgcagatccgcgactgagcctgtgaggtctgggggactggacggccccagcagggctccttcccaaggccgttgtgcccctcgccccaggctttatgaggtggccctaagggccaatcccgccccgacgggctccgccttcctttggctctaggccacccgcggaggcaggacccgaggctcttccgacctgcatactcagtaagatgcagagggaagcctggaaggaggccctgacctctgtttccctgcctaagtcatgaagcgatctggaagcagaggggaagcactgggagaggggatggtgtcaagggcagaaagacggaaagagccacaaagacaaatgcatgaggacagaaaaactgagggctgtgattcaggcagaaagaacaagagtgaggagaggcacagacagaaagagtgagacaggcagagtcccagagaggcagacagaattacaacaggcaaaagagacagtgacagagaaggacggaccccttgctgagctgcacgctgggaatgagacgagctactcagggcttctttcagctgcaggaagtgctttcaatgccctatttatgaggctccaaagcaacagcaaacagtaatagaacaggacagagaaagttggggtgtgtgtgtcttggctctgttgcctggggggtggggagagatgtcaaagaagcagccagtgctttagaaaccctttctcactcccagagcctcagactctccagatagctggagacagcgctcttggtgtacaaaacacaaagtgtcccatcacttagggcaaaccttggacctcaaagccctctcgaggccctagactacattgatttttattgcatgtcccttctcactggagactctgtcatgttctagaaggtgggacagcttagaaaacaaagaagcaggctgggcgtggtggctcacgcctgtaatctcagcactttgggaagccaaggcgggttgatcacctgaggtcaggagttcgagatcaccctagccatcatgatgaaactccgtccctactaaaaatacaaaagttagccgggcgtggtggcctacacctgtagtcccaggtactcaggaggctgaggcaagagaatggcttgaacccaggaggcggaggttgaagtgagctgagactgtgccactgcactccagtctgggcgacagagtgagactccgtctcaaaaaaaaaaaaaaaaaaaaaaaagtaaaagaaaaaacaaagaagcaggggacttgggggtgactgtgaccagagccttgtctgctgtttgggcacagtgttgcaagcctccaaatcccaaatctccatgggattattgctgtgggatgtttccacatggtgctggactggatagtgggaggctgggttccaattctgactgtcactgtagctttgtgacttttgcctctctgggcctcagttttttcttcataaagtagagttgaactacgtgatttctaaagccctttgaagttcttcttcccatccttggctggcctcaaccaggaatgctgagatcctcaggccagatacccccagtatctgttcaaatcttagttcccataggagtctgacttttcatcagggtcaacattatttccttcaaaggataccttttcattttgatggtgttagtgatatttgaaaagaagggaattgaaagagagctgagtctgactgaaagatgaaatgcccgggttagcatccaggctggttcttcatacaatgttcagaccaagatagaggctgatgtactatttgaagggagctcagaaagcatcccatctgatctcttcattggacagatgtgaaggctgaggcccagtgagatacagtgacttgtagaaagtccgtggcagaagaggactagagtactcgtctcctgacatctagcccagtgctccttccactccacaatattacttcttacatcaccattttgtagcagcttgaaatcttgcccttagaggataatccttcttttaaggttttgttgctcctctgttaaagtatggctacctcagtgtagagttcgctcccctaaggatctctctgcatttataaacatactgaattcttctaccggctctctttcaaaccccaagctgggaagaaatgggccttcacatgcaaagccttgtttggtggtgagattggggtattggtgagcagtgaagagtgtgaaagagggagaaaacaaccaggatcattacaggaaagctgggcctttgaaggttgtaggtaccaagagggtacatgctgacagggacatcaagatgccaaagatgtgtttttaaaataaaaatacaggtttattaaagtacatctacatatagtaaagttcactctttcagagatactttctttttttaattctctttgtctgagggccagtcctgcccaggttttgtctaatgcagagaaaattgacagtgcattttaaagatgtagggtataccaaataagagtacagggttcttgtagcactg

SEQ ID NO: 316431 - DNA, 4001 bp, Homo sapiens
gaagacaagcacaacttggtaacacagaaaaagcctcctagttcttgccttcagaaaagttacatacatacatttttaaagagcaaatgaaggcatactatagaaaaataaaaaaaaaatataaaacacacaccaaatttcagattcctaatcaactactgaaagagacgaaaaagtcctttcttccaagaatcagaccccttgaaaaaaactgaaatttgaaaacatttactgagattgtgccaggtgagaaaggaatggtgatgagcaattaatcctcttctctcttgtccaataaactgaaagagatctgtgacgcaaggtcccatgacttaatcaaatatgcatcctaggtgcccaataaagtgcctagctaccacaatgcacacagctggtgttccatatatattttgttggctgaattagttaagaaaagcacatattaaatgcttagttctttgttgtttgtgggtcaacaacaaaaggtaaaactgagtgtccccaaaagtgaatattaaaaatttaattggagagtcataaatctatgtgtaagaagtccatcaaattcagaaaagtaaaatacaaagcagtttataacgaagtattaaatttacatgataagtacaaaaggaaaaggcagaaaaaggagagttcactgtaagctggcattgttagggaaagcttcacgaagaaggagggatctgacatgagacataaatcaactggaaaggagccaagccaggcgttattattcatcatttggtgttattgcctcaaggcacaattggcacagattgtggtattccctctccaccataccaaaccggcctgtgctttccccacgcgcacactctctaaccactcctatcaaacccaatcaaggtaaaatagacactaaatcgattttatttatatgtgtgtctgcgcgtacacacgcaagcgcgcgcgcgcaacttttcctattattgccctttcatcaaactcggaaacaaaactgggaggaagaagcagagaactggagaagtggctggagggggaaagccactagaacctagctcctcaattagttttcataacagaaaaataaagatgagaagaacacatcctccggtctccagcggcaggcgacacaccgcgacacccctcacctcgtgacgctggggttctgcggcactcccggccaaaagcactttccgaaaaaactgccgctccaaagcctgcccgcccgccgccgcgcgacaccccggcgccgagcccgggtccgagtgacgcctcctgttggccgcggcggtttgctcagctcctggtcccgggccgcgccaactccgcgcagtgcagctgaggcgccgcccggctctgcaattccgggtgttcccgggcgtccccgcccccgccttcccctcagcaggcgcctgggcgccccccaactcctgtccagcctccttcggaccaacgacccgccccggcctccctgcatcccagagactactcgcggcgccttctctctctaattcttctttaccccctcagctcacctcccgaggagcgtccaacgggtcttgggggctcgcagaactgagccgcgaagcgcgggggaaaggcggcgagcgcttcccgcggcggcggggaggaagacgaagacttgtgcgctctcaaagttaatgtgaaaacatcttccaaacttctgggctgcagcccgaaacgcggggtagccggaaggctcccgtagctgccgtgccctcccccccggggtctgggaagggctcctaggcgcctcagagcacccggggtcggcccgcgggggaggccgcatagacgcgcccccaccctgacgaacggggaaggggcaggcgcctgcgaccccaactaaatccttcggcgcctcggtctgatgtatacacctgccacaggctctaagtgcctaagaagtgtaaaccaattccatcttcatgctgacgggacccgagtgaattcggtacaaagggcagtctcaaaatcaatcaccccgatccgcgagagccccgcacactgccggcgcggggccggggccggggccggagccgcgaggccggcgctcgcactccccgctagggttcttcagcccctcagtgccctcccggagccctttacctgaacgggagcctgagagaacggacgacaggagccgagtggaaagcagtgcccgcgccggagatcagcgccgagggcgggagccgacgtctagggaccacagagccgcgacgcggcgagccgcgcacgggccattccgccgccgcgaacgcagaaagcctcgaccgcgctccgagtccagccagctcgcctgtcacctcgatctctgctttaagtggcttccggtcgcctcctcccgacggcccgtcgcggaggcggagcctgggcggccggagttcggtggggtggggtgaggaggccgggcgctcagtgggtgtcgggaagaagacccgccccctgcgcgcgcgtgcgcgttcgttcgaggggaggcgcgcgagttctgtgcggtggacttatgctcccgcgagggggcgtgtcctttctcgcgtccgcagtgtccctgagggtccgcgtctacacgcggctgtgaggaaggaaggcgcgtgccgcgtgggacgggctccacctgcctgcggacagatggagggtcactttgttccgagaagacccagacacccgagggaggatgtgaaacggaacgacccgtttcggtgcggttggctttgtttatttgcctactccccagacgcctccagcctctgattccggcacaccctgtgaggaagcaaacggctgcctcccccactgccaccagacgaggtcgcctgccccgagccggacaggctggacaggctgcgcacctgcggcggccgactatttcgtgggccttgtacgccaccttgcagaagggaagctgtgaggttttggcgatagaagcgcatttacttgtgttttaaagcccacaaacgccgtagtgactaacttattcattcagcaaatgtctgtcagagcgtctattacgtaccaggcatgtagcctgaacttcacgcctgtcctcatggagcttgcagagcacctctgaaatacacaccacatacggaatggccatattttctgggttgtaaaatactttgaattgtaactccatatattgaatagattttcagtagtgagggaagaaacaatacatttagttcatataatccatatgtacgaaaaagaagtgctggtaattccagacatggaagtcagtaaaactaggagctaagaggtaataatcatagacattatgattctaagcctttgttaaacggttctaaaccagactgggtaagcgcaccagcaatgaatagattaagggtgttatctccttagcagcttatttcaaattgcatcaaggcagggccattaaactaaggtgagaatgatatgggcggaattcagaggacaataggtaaaagatgaaaatctttacatttaaaatcttattgagacaagatcttggtcagtgtctactcatacatagaattgcctagaagctaatatttgagtttaccatattactgttggctttctatttttctcatttgttctgtttcttttctgtccttttgtgccttcttgtagattattaattccactcccttgtaacaattaggttgttatacattctttatgcttttagtagtatttcagttatttattgctgtgttcaaaccacccccaaaatataatgacttaaaacaatggctcttttatttactcatgattctgaattctctggcacaggaattcagtcagggcatagtacaggtggctcatttctgctccatgatgtctggggcttcaattagcgtgggcatactggggcctggctggaatggcttaactagggtcataagtcttgggacttaaggatggagatggagtttcatgacaaaaatgaagtgaacatgatgtggaaaatatggacatggaagccacgagctaag

SEQ ID NO: 316432 - DNA, 4001 bp, Homo sapiens
cttctctatagcatttaacaacagttctacaagttgttataaatacatacccatacttcattctcattctatcattttctgggttacagtaaaatctttccaagtgctcctgagaatcattgaatacactctgccacttttgagtagttgtccttttgatctgccaatgatatggcaagacagtgtggtgcttcaaacaatccctgccataaatacaagtgccttgcagaaagtccatgcaaatttcaattccgttctcttggtgagtgtggtactgcaactggttcaccagctcaaacacgaggtcaagggaagcctcttcacttttgtcctgaaagagctcagtactcagcttatcactggtgtccagaatgtattggattgtaaaactgttttcttggaaaatgcctggaacataatctatgactttgtctaagcagtcaggactagtaggaacatcacttgaaactgggtgcaaaagatcagtctggaagtgagctggtgtggaatctgccaccgtcccactgagggtttctgatggaaagctgtgatcttggattggaaccactcgttctggagcttcagtggaaggatgggcttccggtatctggtccccaacatttgtcctatcaggaatcagaacagacatattattttctgctggtgggcatgatgaattgatttccatggctttcttcatcataggttcatgtaagctgttctcatctgtactctggttcctagatctaaaaaccccatcaagtgagccagattctagaagagtgtttaatattggcctcaaagacctcagggttccagttcccaatcttttctgatcctttttcttaaaacaagtcttcaatggagtgatcttctcagagagtctcatttggcatgaaaagtcatcaggaggagagggaggctgcactacacagtctggctcaggttcggtggtttccatttccataatgtggattagctccaactgctcctcagagtctaaaaatcctacgaggaaaggaaggaagatgatcatttacaaactgacagcaactggatttcattcattcattaaaatgttttgtttttgtcctgactgattccctgaaaccattcctcttatactatatttagtttttacaagtcaattttaaattttatcgagaaattaaggctccaaagcacccaaggctattcaaaagcacacagcaggtaaaagtagaagagtctttcaacaggccattggcatgcatttgtggactgaatacataagagtttgcaattctgctaggttaagaatttctactataaggttagagtggggtgggaaatgggaggtagaaataactgtatctagatgatgacagcagggaaaccacatttccactcagctttgcggttctctttatagttgtttatgtatcacctatctcatgagttgacaaaaagtttctttaaaagttcatcaaatgaaagataaacttcaaacttaaaacagtgagtcaatttaagggtataagaacatacacaagtaacaggggctctcaattgaaatgttctatgggagaaagccaggagtctgttaagcatttctatattcagaaagctctaatatactatccaagaatgttaagagtctacttttacaacccccaaaaacattaccgcttctgatggaatacaagggtgtgtttagtaacagaagccccattagcaacaaccactgcacgatgtgtcagaagacaagcacaacttggtaacacagaaaaagcctcctagttcttgccttcagaaaagttacatacatacatttttaaagagcaaatgaaggcatactatagaaaaataaaaaaaaaatataaaacacacaccaaatttcagattcctaatcaactactgaaagagacgaaaaagtcctttcttccaagaatcagaccccttgaaaaaaactgaaatttgaaaacatttactgagattgtgccaggtgagaaaggaatggtgatgagcaattaatcctcttctctcttgtccaataaactgaaagagatctgtgacgcaaggtcccatgacttaatcaaatatgcatcctaggtgcccaataaagtgcctagctaccacaatgcacacagctggtgttccatatatattttgttggctgaattagttaagaaaagcacatattaaatgcttagttctttgttgtttgtgggtcaacaacaaaaggtaaaactgagtgtccccaaaagtgaatattaaaaatttaattggagagtcataaatctatgtgtaagaagtccatcaaattcagaaaagtaaaatacaaagcagtttataacgaagtattaaatttacatgataagtacaaaaggaaaaggcagaaaaaggagagttcactgtaagctggcattgttagggaaagcttcacgaagaaggagggatctgacatgagacataaatcaactggaaaggagccaagccaggcgttattattcatcatttggtgttattgcctcaaggcacaattggcacagattgtggtattccctctccaccataccaaaccggcctgtgctttccccacgcgcacactctctaaccactcctatcaaacccaatcaaggtaaaatagacactaaatcgattttatttatatgtgtgtctgcgcgtacacacgcaagcgcgcgcgcgcaacttttcctattattgccctttcatcaaactcggaaacaaaactgggaggaagaagcagagaactggagaagtggctggagggggaaagccactagaacctagctcctcaattagttttcataacagaaaaataaagatgagaagaacacatcctccggtctccagcggcaggcgacacaccgcgacacccctcacctcgtgacgctggggttctgcggcactcccggccaaaagcactttccgaaaaaactgccgctccaaagcctgcccgcccgccgccgcgcgacaccccggcgccgagcccgggtccgagtgacgcctcctgttggccgcggcggtttgctcagctcctggtcccgggccgcgccaactccgcgcagtgcagctgaggcgccgcccggctctgcaattccgggtgttcccgggcgtccccgcccccgccttcccctcagcaggcgcctgggcgccccccaactcctgtccagcctccttcggaccaacgacccgccccggcctccctgcatcccagagactactcgcggcgccttctctctctaattcttctttaccccctcagctcacctcccgaggagcgtccaacgggtcttgggggctcgcagaactgagccgcgaagcgcgggggaaaggcggcgagcgcttcccgcggcggcggggaggaagacgaagacttgtgcgctctcaaagttaatgtgaaaacatcttccaaacttctgggctgcagcccgaaacgcggggtagccggaaggctcccgtagctgccgtgccctcccccccggggtctgggaagggctcctaggcgcctcagagcacccggggtcggcccgcgggggaggccgcatagacgcgcccccaccctgacgaacggggaaggggcaggcgcctgcgaccccaactaaatccttcggcgcctcggtctgatgtatacacctgccacaggctctaagtgcctaagaagtgtaaaccaattccatcttcatgctgacgggacccgagtgaattcggtacaaagggcagtctcaaaatcaatcaccccgatccgcgagagccccgcacactgccggcgcggggccggggccggggccggagccgcgaggccggcgctcgcactccccgctagggttcttcagcccctcagtgccctcccggagccctttacctgaacgggagcctgagagaacggacgacaggagccgagtggaaagcagtgcccgcgccggagatcagcgccgagggcgggagccgacgtctagggaccacagagccgcgacgcggcgagccgcgcacgggcc

SEQ ID NO: 316433 - DNA, 4001 bp, Homo sapiens
aatattaaaaatttaattggagagtcataaatctatgtgtaagaagtccatcaaattcagaaaagtaaaatacaaagcagtttataacgaagtattaaatttacatgataagtacaaaaggaaaaggcagaaaaaggagagttcactgtaagctggcattgttagggaaagcttcacgaagaaggagggatctgacatgagacataaatcaactggaaaggagccaagccaggcgttattattcatcatttggtgttattgcctcaaggcacaattggcacagattgtggtattccctctccaccataccaaaccggcctgtgctttccccacgcgcacactctctaaccactcctatcaaacccaatcaaggtaaaatagacactaaatcgattttatttatatgtgtgtctgcgcgtacacacgcaagcgcgcgcgcgcaacttttcctattattgccctttcatcaaactcggaaacaaaactgggaggaagaagcagagaactggagaagtggctggagggggaaagccactagaacctagctcctcaattagttttcataacagaaaaataaagatgagaagaacacatcctccggtctccagcggcaggcgacacaccgcgacacccctcacctcgtgacgctggggttctgcggcactcccggccaaaagcactttccgaaaaaactgccgctccaaagcctgcccgcccgccgccgcgcgacaccccggcgccgagcccgggtccgagtgacgcctcctgttggccgcggcggtttgctcagctcctggtcccgggccgcgccaactccgcgcagtgcagctgaggcgccgcccggctctgcaattccgggtgttcccgggcgtccccgcccccgccttcccctcagcaggcgcctgggcgccccccaactcctgtccagcctccttcggaccaacgacccgccccggcctccctgcatcccagagactactcgcggcgccttctctctctaattcttctttaccccctcagctcacctcccgaggagcgtccaacgggtcttgggggctcgcagaactgagccgcgaagcgcgggggaaaggcggcgagcgcttcccgcggcggcggggaggaagacgaagacttgtgcgctctcaaagttaatgtgaaaacatcttccaaacttctgggctgcagcccgaaacgcggggtagccggaaggctcccgtagctgccgtgccctcccccccggggtctgggaagggctcctaggcgcctcagagcacccggggtcggcccgcgggggaggccgcatagacgcgcccccaccctgacgaacggggaaggggcaggcgcctgcgaccccaactaaatccttcggcgcctcggtctgatgtatacacctgccacaggctctaagtgcctaagaagtgtaaaccaattccatcttcatgctgacgggacccgagtgaattcggtacaaagggcagtctcaaaatcaatcaccccgatccgcgagagccccgcacactgccggcgcggggccggggccggggccggagccgcgaggccggcgctcgcactccccgctagggttcttcagcccctcagtgccctcccggagccctttacctgaacgggagcctgagagaacggacgacaggagccgagtggaaagcagtgcccgcgccggagatcagcgccgagggcgggagccgacgtctagggaccacagagccgcgacgcggcgagccgcgcacgggccattccgccgccgcgaacgcagaaagcctcgaccgcgctccgagtccagccagctcgcctgtcacctcgatctctgctttaagtggcttccggtcgcctcctcccgacggcccgtcgcggaggcggagcctgggcggccggagttcggtggggtggggtgaggaggccgggcgctcagtgggtgtcgggaagaagacccgccccctgcgcgcgcgtgcgcgttcgttcgaggggaggcgcgcgagttctgtgcggtggacttatgctcccgcgagggggcgtgtcctttctcgcgtccgcagtgtccctgagggtccgcgtctacacgcggctgtgaggaaggaaggcgcgtgccgcgtgggacgggctccacctgcctgcggacagatggagggtcactttgttccgagaagacccagacacccgagggaggatgtgaaacggaacgacccgtttcggtgcggttggctttgtttatttgcctactccccagacgcctccagcctctgattccggcacaccctgtgaggaagcaaacggctgcctcccccactgccaccagacgaggtcgcctgccccgagccggacaggctggacaggctgcgcacctgcggcggccgactatttcgtgggccttgtacgccaccttgcagaagggaagctgtgaggttttggcgatagaagcgcatttacttgtgttttaaagcccacaaacgccgtagtgactaacttattcattcagcaaatgtctgtcagagcgtctattacgtaccaggcatgtagcctgaacttcacgcctgtcctcatggagcttgcagagcacctctgaaatacacaccacatacggaatggccatattttctgggttgtaaaatactttgaattgtaactccatatattgaatagattttcagtagtgagggaagaaacaatacatttagttcatataatccatatgtacgaaaaagaagtgctggtaattccagacatggaagtcagtaaaactaggagctaagaggtaataatcatagacattatgattctaagcctttgttaaacggttctaaaccagactgggtaagcgcaccagcaatgaatagattaagggtgttatctccttagcagcttatttcaaattgcatcaaggcagggccattaaactaaggtgagaatgatatgggcggaattcagaggacaataggtaaaagatgaaaatctttacatttaaaatcttattgagacaagatcttggtcagtgtctactcatacatagaattgcctagaagctaatatttgagtttaccatattactgttggctttctatttttctcatttgttctgtttcttttctgtccttttgtgccttcttgtagattattaattccactcccttgtaacaattaggttgttatacattctttatgcttttagtagtatttcagttatttattgctgtgttcaaaccacccccaaaatataatgacttaaaacaatggctcttttatttactcatgattctgaattctctggcacaggaattcagtcagggcatagtacaggtggctcatttctgctccatgatgtctggggcttcaattagcgtgggcatactggggcctggctggaatggcttaactagggtcataagtcttgggacttaaggatggagatggagtttcatgacaaaaatgaagtgaacatgatgtggaaaatatggacatggaagccacgagctaaggatgctggaacagaaagaaggctgttagctacataccttggtttttctctacatggcttctccatatggctaatttaggcttcctcacagcatcataatcttaggattgcaagaggggacattccaaaaagacaagcctcaatgtgcaagcctttacttttatcatgcttactaatgtgtcactggccaaagcaagtctcatggccaagctcagcgtcagtgtggggaggaactacacaagattgtgaatattgggaggtgtgacatattggtagtcatttagactagggacagaccaccttaatccaatcaagagaataattaaaagttacttccagggtatagcccagttccaacttaaaatctttcctccttaggtcctgaactcaatatttttacccacccaatcccacacccactccccttgaggcagttgaaaactctggctagtttctcagcctctctccattactgctttctgaatgttaattgcctcgaagggaaaagtgg

SEQ ID NO: 316434 - DNA, 4001 bp, Homo sapiens
aaacatctgcatgttttatctagccctgaaagatgctcagatgtgcaatactacttagttgggtaattgctgcctctctccagctagacctcagaccccctgaaacggccaaaggtagcaggtccaacagtaccaaataagcaatacaaggcctgcagagctaccgtgtgccaggctggtgaaaggggagctgagagtaagccaggtccctgcccaggcaggggataccccacataagtggtaagactgacacaaacccaggagagctaacaggtccaaagtgtgcaaggcagtgggtgggggaagggctttgaaagacatctaatcccttctgagaacagggtgtcttagaggcacaaagggtgaatgcgtatccacccagaaaggtgaacagatttacttcttaataatatatcctgaatgaaattggccagaagccagaatcttgtctgtctgaaacagagcttgtttgggaaggtcccgagaaatcatccatcacgcagccctcacaaccctgtcatgagcccggagcactgctggcactgtggcctcaaagcagcctccaagtagagcactggagtccttgaaaccacccagcgtggttaagtgccattactgtccccgctttacagagcgggaagcaggctctgaagtaattcactgactgaccccctcacccaccccactggacacctccagctgcatgcacggtggccctcattaattatccctgtctccgctacagaggaggctccttgggtgtccaccttctgggccaaaagggctggccagggaaggatcttggggcctaggcacgccagctcctgcctgggagatacagcacctggtggctggccctgccccaggacgtcactcccggcgctagggccctggaactccgtccttccggcgctcagccttctcagtctccttgccctccgcctcctcccgccccaggtcaaatcttagacctccttttcacaatggatcccagggttctgcacccacgtgccaccgccctcctcccctcttcccccaatcagccccgccgctgcctggcgtctcagcagccccctgctccaaactcggacccaacccaggggtggcaggagacaggggtaggggagcgtagtctgaggtggggagaaggccgggcccccgagtctcctgcaagaggaattaaaaacagggtctctagagtcggactgctggggctcaaatcagatctccctgtgtgtaactttgggtagctgactaactcggagcctccgtttccccatctggaagggggaacactcccggcggcgcccacacagccaggtggtggagagggttaagagggccgcgttctgtagaacagcagtaatggtggccttcccggcatcaccctagagggtacttggcgagtcgcgagcccatcccccgcgccaccatgcagctgcgcggccggcgatccgcgtggggaagagccggcctgaggcgcacggaggaccagaggcccacgcggccgagcccgggcgtagggcgagtgtgcggcgcagcggaagccgcctgcagcccggggccctgcgaggcgcgcgtctccgccctccgacggcgcccgggccaccttcctcgtctaggcatctcgcagcgcgacccagagcccgcggcgactctggccgccgcagacgccccccgccccgcccgagccgcgtccccggccggcgccgcgcactcacccagagcccgccgcagtggtggcctggatggagctgatacgtaggcggttggccgtgtccttcaaggcctgcagcttctgctggtcaggcttgtggtagctctccatggtgcggcaggcggggaccgggcgcacacgcggacacacagagatagcggctgctcccgcggcgacaggcggctgccgaggccgggcgcggggcgggggcgcgttaagtcgccgggcggggcggggcggggatgggagaggcggggcagggggaggaggcggggctcggatcaccccaggccttcagccccgccccgcctggggccgcctcctgcccgctcccctcccctaggcgctgggccgctgcggactgcgaggttagcagttaaccacacacaccaataataataacataacgaacaactcaggattcgagtctgggctcctgactcgaaagcctctcagtctccctcctccacacagtcctccgtggacttgtcacggcgaatcccattttagagatggacaaactgaggcttggcaagggcaatcaaggtcacaaggctggtgggtgccaggcttggccccagccgaccaaccccaggcccaagagactgcaggacttaattttgagactgagtttcgctgttgttgcccaggctggagtgcaatggcatgatcttggctcaccacaacctccgcctcctgagttcaagcaattctcctgcctcagcctccctagtagctgggattacaagcatgcgccaccacacctagctaattttgtatttttagtagagacggggtttctccatgttggtcaggctgatcttgaactcccgacctcaggtgatccgcctcggcctcccaaagtgctggggttacaggggtgagccaccgcaccaggccctatttcttttttctaataattaaaaaacttgttttttctttgagacggggtcacccatggtcacccaggctggaatgcagtggagtgattacagctgcctgaagcctcagcctcctgggctcaagtgatccttctgcctcagcctcaaaagtagctgggaccataggtacacactaccacgcccggctaatttttgtatgttttgtagagatggggttttgccactttacccaggcaggtcttgaactcctaggctcaagccatctgccctcctctgcctcccaaagtgccggattataggtatgagccaccatgcccagccactcagggctttagagccctgcacaggggatggggattattgaaaatgagaataggatagtggtagccatgacaatgccaggtgatgataactgagaaattactaggggaagatcctttacaaattattagggcctagaaacactactgacttttagggagattattgggtttgcttccaggtctgtagggacaggggcacccaccactactgttatcagaccccatggttcccagaggtatgaagctccccagagtgggattagggaggggactttcatcacagacactgtttcattcaatctgcccaccacacttggccagtgaggtacatactgcctacaatgcctattttacagaggaagaagctccatttgacagaggaaagataaaggcaagaccctcaaacggatggctgggcagggagctaaaaccctgagagatccaagaggcaccagtggccgccctgtgtcctctgtgtcctccctgcattgcccatactcagagagctctggctcatgaggcgattgactgaatttgagtgagtcccccagctcgcctccaggtgctcctctgctggcctgacccccagatgcccaatcagaccctaagtatggcatcccatagcacctggctcctgctggcccagcccgcagaggctggccctatggtgtctggctggtgagggctatgggctaggattggaggggggccccacagtgtgccaccctcagatgcctggcaggtgccacctctgccctcaagctgctcactgtctggaaaaagggcaaacccttgaaaccctttgaaagctctgtgccttccaactctgtggcccttagagcagtggctccctaagggagtggactccatttccccatctgcctaatgggactcatccttatcactctggtctctgacaatggcacagaactcaccatggctctggggacctaggagtaatggaaagaaaattgtcccctccccaccacctggagctccagggacctcagggaggctctctctcctcctggtgttccacatgaatggggcctgtgatac

SEQ ID NO: 316435 - DNA, 4001 bp, Homo sapiens
ttcaggaacagccagttgcagttcaccaggccgtggggctggagctcacagggtaggaaggcaggcaaggtacccagggccagggtcatggccagcatgatggcctgcaccaggagagacagcgggtgcagggcgctgcggcagaaaccctgtgggggtgggagggctgtgtgagtggccggcccccagctctacctccacccactccacttcatgggcatcttctagcatcttccaacccctctctccaagccctacctgcagaagttcttcctggctgccaagccccattcccatcccccatggcttgtggggaacctgaactcagtctcagacccagtcttggactcagaattaggcttcagaaccaggactgagacctagaatccagacttatgatctacagctttcacttaaccaatccctggctataccaggccaggcaaggtggcccacggccccccctggtctctccccgactttcccttcctgctcctgagcaaggtggcagctggctccctcccctccagctgccctgaaatccgctctctgccctccaccagccaccccacaaccccttccttttccttcggccaagattcaggcaggtgtgagagtctcccactatggcccaggccggctgcctcccagggaccctggccagagggcactgcacagctccatcactctctgcctgcctcacctagcccgagagcctttgccttatgggtcagaacagatggagagaggggtggcctgcaaagtgccagacagagccagccccaagctacaggcccagtgagacccaaacccaggctccagccccagctccatcagtgcctcagtctcctcgtcccctctgggggtttgggtctcattgctcagaagagggcttcagtggctgggcacggtggctcacacctgtaatcccagcagtttgggaagccgaagtgggcagatcacctgaggtctggagttcaagaccagcctgaccaacatggagaaaccctggctctactaaaaatacaaaattagccaggcatggtggcgcaagccataatcccagctacttgggaggctgaggcaggagaatcacttgaacccgggaggtggagattgcagtgagctgagatcaagccactgcactccagcctgggcaacaagagcgaaactccgtctcaaaaaaaaaaaaaaagaaaaaagaagagggcttcggctctgaagtcttcaggattcagtgagtgtccccagggccatgtgggtgacaacccgtcactgttgcttgcagctgccaagcccacttctttccccaccccttcccaggatatccccttccccaggggactgagagctgttgtcctaccatgctggggggcaggggcttctccagagggtctggcgggcagactggacagcagctacagggaaggatgcttcacactcgaggtcccttcccacaggggcagcagcggctcagagaatagaggaagtaagatttttataccagcctagtagctccccctccactccaccctgcccccagtgaggaggacagggtcccatgagtcaaaggccatttgcatagtcaaatggcagacagctccttcaccccttcctctttccactcccctctcagacagcctacatcccatgagggcctcacacctgtcctctaccaagcccagggaggagctaaggcccagagctcaggcagagagcagggagagatgggaattctggatagcaccagtagcgggtacaccttgctgggcactccccattctaagaggacacttccaccctcaggtcttggctcctgcaccacagctggtgccctcaggacagcggctgccgacttgtccttttctgcccttgtaggcaccatctccagagttctgcagggcctcatgcgtggagggccagggtgtagcttgagcaggaggctaggctgcacctgccttcaccacagccttgcaacatcttccggaaacaagacctcctcctccacattcccagagcccctggggccccatcagagcacacaccacgtcactccagatggggctcctagaggccaggtgtgtgctggcccagcagggccgccagccagtcctccccatcagttcttcccactctccttctgatctaggtgaggagactcagattcctcgggcccaaagccttgggtgaccccgggcccctcagcaagttctgctgggtccaccatgctgaagggtgtgcccacagcccaccgtccccatgtccaccagcccccatcctctctcctagacccatgcaggtgccacctcccttctggctgtcctgccctgctctctgccctccaggggctggtcacattcagcccctagagggaactgttcaaacctaagtcacactaggtccctcctctgctcagacccctccctggctgactctggagtcaaagccacagtccacagatggccaacaaggccctatgggacctgccacccgctgttcccctgagtgctctccaggcccactggcctgcttgcagttgactgtgtagcccctgggcattctcctgcctcagggccttgggatgtgctgttccctctgcctgaaaactcccccaagtctcatatgacccctcctttgcctccattatgtctctgctcccatgtcaccctctcaacagggccatccagccttcttacaaacctcccaccccagatctggcactcctgagctcctttgcctggtctatgtttctctttgtcctaacattttttaactgctagcacaccggatcattgatctttcatggtttattgtatatcgtcttattcccctgctggaatgtcagcttcttaagggcagtgatcttttatctgcatccccaggatccagtacagtgcccagcacatagtaagtgcttgatatctgctgaattatgtacacccagcagtcagctctgggcaggcacagagagggtatttctgagtgaaggctgaatgaatgaattaatgaattgttgctgctgggaggaggcaaggctgcacatctgccagcctgctccccccaggcccactctgggtggtatcatggcaggcaggctccatagtgccaggcatctggctggctcagcagcagggggcgatggcatcgtcttcctgcccacctgggagccaatgtttcggctgggcaaggacaagcctcctctgggtcttagctagtctggctctcctctctacaattctaggggcttgagcaggggctcagaaaggcgccagggatagaatgttgccctgagccaggaaggagagcagtgcccactcagtagctgggctgcaggcatcaaccccatgcttccactcctgcctgcctggggtggaaggcacctgcattcattccctccatccacctctcagagggatacaccaaagctcgggctcctgtggagccccaagcctgagactttcccagagtcccttggaccagggacccagacccccatacccagcagtggccctgccttctttggaggcagaaaaccagagaggccagtaagctgacagaggggtctgcacacacaggtacagacccacgcacatggacacactcagcttggagacaccgatatcgatgtccacagaaaaacttgtcctggcctcagcccagggaggctgggaagccttcgaggaggagcccttatcccatgtgggaggctgcataaagtccctctcagagatccttgtcctaattccccaaacctgcaaacacgtgaccccaacaccccacagtgtggcaaaaacgacttcgcagatgtgattaagttacccatcttgacaggggtaggtggtgggggcagggagggtgaatgcaattacaatgtcccttatgaaatggagacagagggagattcgactacaaaaggccatgggagcccagaggctgaggaaagcagaatcagagatgtcacctctggctttgaaggtggaggaaggggccccaagccaagg

SEQ ID NO: 316436 - DNA, 4001 bp, Homo sapiens
caaacaaagtcaggtcattgtcttgctcaggctcatatgggtcaggttaggcatctcttggtaaaatatatttatttccaatgacattaactggctttgattaggttgaccagatatctcaaagaatgtaaacctctgaggagaaaaagaccatttaaatgtcatatctgcttgttttcatgtaatctgtcaaagcattttttagggtgaggatgtaacatgggaggagtaaaataataaactgtaaacgtgtttattccacaagagtttatcacacgaccccagataacaaactctgttttggaaatattaaaccctttctttaaatctgattttttccacttgtaaaatgcagaatataccaacaaatctttaatagaataactgaaacttttttgtaaatgggagacatgaaagctatatataataaatattaactgcttccttgattatacaaatgcatagttttaacttaacaatattaagctcttaaaatatagtaaatatgaaatacttcaggttcaagatcgaaagaaacttaagtgtgatgttatgtttaagacaaataatcatgttaacatgataataatgcttaaatttgaggcagacgggcactgtggctcatgcctgtaatcccagcactttgggaggccaaggtaggagggtcacttgggcccatgagttcaagaccagcctgggcaacatggcgaaaccccgtctcattaaataaaataaaattaaataaaatctcattaaataaataatttagggcagatttgccatgccataatcagtgtattaggtttaaatgttttactatcttttacttgattaagaaaatttatcacgtatggtaccattccataaaatttctccttaaaatttttaatcccagcactttaaagtagcaaacttaagtttgctcacattctttccatgctgtggttgaagctaatgctttcagctcccaggttggcagggaaattcctctcacttcaatcaaaaacaattcttggaaaaaataacacattccactattagcttcagacaccgacctgctgctaactgtagggtttttcctagacgccacaccccagccttacataaaggagaaagcttagagttcttttaaaatagcaatgcactcacaattcattatttttccctatcacagatggctgaaaataaacagcagagaatttggattcaaaactgttgatttaggcagagaaccagccaaccccttccggctccccagagcaaatgttaaatgactgcccgttctagtagaaactctatagtctctcaaatctgatttaaaagcgaatatctgtttcctacctatagagtttagcaaaaaggcagttcacttttagttgaaagagcattttgtaaaacaacatctcataaaattactacgctatactgtaccaatctcgcttttgtataatctgctttcaaaggaatgaacagcaacaaaaaagtcacttgatttagaaatatgcattacaaaaaactttccatgaaaatacataatgaaaacatctaggaaacaggagagaattcagtaataatcctgaatgacttaccagcaggccacctcctacgatgccagaaaagaaccacacgaagcggctgaggtggttttcggaggcatactttgtttccccattgggaaagtaaagcaaaatattagccgcgatgcacaggagggcgagccccaccagagaatgtccgatgcatcgtgcacacttcccatagcacatggtggtctgctaggttttctcccccttctctttgtcttcagctcagtgataccccaaattagatgaaagtgtgcccttctggtggagaaagcaaacaccactctcagcccattcctgctacctcttaaatactgcgattcttagtcactgaggggatgaggtactttgctttcattggtcctaatggcaggctctggctgtggtgcgaagaggcagggggaatgtcccgcccttcagacgaaatccttgggacaggcaaaaccaggggcaggatgtgagaaacagcctcagtcataggcaacagggaaaatgattaatcttgaacaaggcattgactgtgcaactcctccacaagataaagaatcaacaggaaagcctaacatgactttccagtaactgccaagtgtccgagatgcaacagccctggttgaggctttgaaagacagtgagctgtgcccctgctccatgcagctgtctggacagcttccaatctgagagctctgtgttcatttctacctttgtgctgatttaatttacaacctggggcaaatctcctgagctcatttccttgtctattaaatacaaggtgtctgagacgtctcccatggatttgagaaggctgttgggaaaactacagagcaaacttctttactctgcctacagcaagctctgcaggatggatttcagtgttcagcgtccctggacatctgcctctaaaacaaatctgcaccacaacagaggtggcatcagtcaacacaaagggctcaggtgctttttaaaaattattgagtgttgctgtcaggaaaagcaatgccaggaagggccaaggaaggcctaaagcatgggacaaaaataaaaagaggaagaagagagggggaggaagagaatgggagagaaggaaagaggaaaggaggaaggaagagaggaaggaaagaagagaaggagggagagaaggagagagggaaaaagggaggaagggagggagggaggaaggaaggaaggaaaaaaggaaggaaggatggggggagggaaggaaggagggagagggagaaaaaaataagacaaagggacttggcaagcagagtggagaaacaaggttcagagaaacagaactggctaggagtgtcagaacccacacagaggtaaacagatggtttacccagccagatcctgagaccagcttccacaggctccccacacagggcagagaaagggtgttagactaactttctaggtggttaccttgcagaaggaggggctgggcactgaataaatttatgccttgaacagcagattgcaccagccagtggatggtggtgggaggtggacagggtggccgggtggggccaggcctggagggccttgtcaccaggacaagatagagagtacagaaaatagaaaaggaccaaggtagggaggcattagcttagaagaagaaggtgaatgaggttcacgaatctagagtctgaaggatttggcccggaactagagggcgggacacataccaaatttgaggagaccagctgtggttagtgatgtggcatgggaccggaggagggcccaagaagtgtggcctcagcacactaacaggggtgaagccagaatccaggatggcctgaggaaataaatcagtggagttgggaagcgtggaaccacccacctgctcaggcggaggcaggcaaatcctcataagagtgtcattgggtcaccactatgtgtccaacaacagggaacgtgtgtttggcccgatggcttagagacaggattccactggtgacagagcctatgggtgaatgacggcatcctttgttgaagcataatcattgcaaccctcctgtctgctgatctatcccacctggggccaaaatgggggaaagtgatgcttaaactactgatatggttaggctttgtgtccccacccaaatctcatcttgaattgtaatccccataatcctcacgtgtcaagtgagagactggggggagggaactgaatcatggcagcagtttcccccatgctgttcttgtgatagtgagtgagttctcatgagatctgacagttttatacggagctcttcccccttctcttgatgattgtctttcctgttgccttgtaaagaaggtgtcttgcggccaggcgcagtggctcacgcctgtaatcccagcactttgggaggccgaggcgggtggatcacaaggtcaggagatcgagaccatcctggccaacatggtgaaacc

SEQ ID NO: 316437 - DNA, 4001 bp, Homo sapiens
ggtctaatcttagttatgtcttgcaactcttccatctattgcaattgcatattgagggaaacaatgatgagacaaggccaaagcatagtaaccagcttcattacaatattgatagagataatttgacctagagcctgtagtcttattgctcaggcatcaactgttgaaagagacactgccttctttttttgttttaaaatataactgcaatacagaggagtcaagaataatggaggtaaagtacacataattccaccaccctcgtgagtcttcatgcatttatttctggtgttttcccacatatgtctatttgacacagctgcaatagtaatttacccacaatgttattgtgtctcttttcacttaacatgaaataatgtgcattttccacgttgttacatcttcataattataattttcaccactgtatgaagtgaatgtaccataatttattttgctacttctctgtaagatgcttcttctagttatttactattataccaatgcagccacaaacatctgcacacatagctcttcccttattttggatgatttcctcagaaaaaatgatgagatgtaggattactgagtcaaacgacataagcattttcatggatcttgatatattataccaaactcttcccgaaaagactgacatttatttgtagtgcagccaatattagttatgtacttatttcatagcaacatcaatagcattggatattaatattttaaagtttattaatttaatgtgcaaaatgaataactaaatgaaaattgctttacaacacagctattcaaatataataattaaaaacccctaaaagatgtagaaatagattataatgaattttcttctacattattggtggtctgattagcttacagtccataatgcactatttttagaaatgacttgaccaggaaattgtcttttcctctgagttgccaacatgatttactctcagtttgtttatttttaaagaacacaaagtcatcaggaaaacgttcatggattcttgccattgataattcaatttacttttcaaaaactccctccattattagggtctaatgtaggactattttaatgatgacacagctcattctttaataatcataattacaacagtcactggctatctactacatgtcagtctctctcctgggcactttatatatattttatctttaaaagtaaatgccattattcacatttttcacattagaacactgaggctcaaagatactgagtaacttgctgaaggtctcatggaacaaatgacagagcttagatttacatgcaggtttgtctgaatagccaagtctctgcttttttttcatgctgtcctaatgccccttcaagctagaaaaacatgagtgcagacagaaaatctgttctagaaaacagtaatgccactgaagatcaaatagcttaaattgatatgcagggttcatgagaacatactgtttttacaggccagtgtcccacagactttcattaggactaatttcctgcattactgaggctgcattgctgagcagcttattgaaaacagagctatgtcccaaatgccagcagattacctgccccttcacccccatccctctttcaaatcctacacccaagattagcagaatgatttttccattattcattacttctactagttacaaggtaagtctcaattacaactcccccttctctcccaagtctccaaattcatacttaccatgatgcctgagaaacagattccttcaaaataccacacgtagttggtgagtttattgctggatgcataggaagtttgcccattcgggaaatacaataatatgttcacgattatactccaaagtgcaagcggaatcagcaaacaacttaggcagcctccacacttccgagaccccattttgccctgcttagaacctgcgggagatttcaagagtatacagtcacagaaagtctatttttcttcttcctacctgaccttttttttctctctctctctcttttttttttttttttttgagattacctaccacttccagggtcagagcccttcacttcatattcatgaggagacggggaattggaatatacccgcagccgacaatctcagtgtgaaatactggtttactgtttggagaacaatagacaatgatcaacaactgaagagctgagctggtcttcatcctgtgccaaaggaatgcggtgtttttcactgctttttaaaataagtaattttcctctggattaaagcaccgaaggcttaaccctgaccttgtgttaagaaggaagttggggtgggaactggaattgaatgcagcaaatttcatccaacagtggagagagggttaaagagaaaactaccaaggaggcttatatttagagcttgataggtttgttaaaatatcctgactttaccctttttatgtatctgtctttcacctagtgtgctttttgtgtgcacactattcaccaagctttgttcaaattgcaagggataagaaaggactgagaaagtgactggtggatgagaaaaacaaaatatcttggttagatcagtacagctttccttccaagagtttgcatctattatctctacctctctgaaaaatcataacagaaataaaggcatatttttcctactattaagaaaacaaaggtagggctggcgcaatggctcaagcctgtaatctcaacactttgagaggctgaggcgggtggatcatctgaggtcaggagttcaagaccagcctggccaacatggtgaaaccccatctgtactaaaaatacaaaaattagctggcatagtgctgggcacctgtaatcccagctactctggaggctgaggaaggaaaatcacttgaacctgggagacggaggttgcagtgagccgagatcgttccactgcactccagcctgggtgacaaagtaagactctgtttcaaaaaaaaaaagaaagaaagaaagaaagaaagaaagaaagaaagaaactagcagtccaggttccaaagaggtttcttggcacccccttgtggatatggttttttttccctctagtgcttttgatctaagtgcatcaaaaaatctgggcattagacgttttttccagtcacatagaagcagcataaaatcatatttactagagttcctgggatgattgggaagagaataacattgttggttgagcattcattgagcatctcttatgtggcaggcactgtgcttgatgttttaaaaggttcactctggctgctgtgttgtaaataggtggtaaagggtgtggaggagatagagatgagttctgaagccatttccaccatccaggtaagagataatgatgactcggatcatgatggtagtagcagcagaggtggtaaaaggaagctggataccaaacaccgcatattctcactcataggtgggaattgaacaatgagatcacatggacacaggaaggggaacatcacactctggggactgttgtggggtggggggagcggggagggatagcattgggagatacacctaatgctagatgacgagttagtgggtgcagagcaccagcgtggcgcatgtatacatatgtaactaacctgcacaatgtgcacatgtaccctaaaacttaaagtataataataaaagaaaaaaaaaaggaagctggatttgggatatattttgaagcttgtgccaacaggattggtggcagattggatgtgggtataagagaaagagagaagtcaaagacgacatcatttgggcccgagaaactgggagaataaaattgtcattaacagaaatgagcaagtcagctgaatgagcagggttgggagaagaggaatgatatggtcagtttcgaatgtgctaagttttgaaataccttttagaaatccaagtggagatgtcaactaggcagctggatatacaaatatgaagttcaaggaagaggtctgggtgacatataaatgtgacagttgtcagcatataaatggtattt

SEQ ID NO: 316438 - DNA, 4001 bp, Homo sapiens
tgttttcccacatatgtctatttgacacagctgcaatagtaatttacccacaatgttattgtgtctcttttcacttaacatgaaataatgtgcattttccacgttgttacatcttcataattataattttcaccactgtatgaagtgaatgtaccataatttattttgctacttctctgtaagatgcttcttctagttatttactattataccaatgcagccacaaacatctgcacacatagctcttcccttattttggatgatttcctcagaaaaaatgatgagatgtaggattactgagtcaaacgacataagcattttcatggatcttgatatattataccaaactcttcccgaaaagactgacatttatttgtagtgcagccaatattagttatgtacttatttcatagcaacatcaatagcattggatattaatattttaaagtttattaatttaatgtgcaaaatgaataactaaatgaaaattgctttacaacacagctattcaaatataataattaaaaacccctaaaagatgtagaaatagattataatgaattttcttctacattattggtggtctgattagcttacagtccataatgcactatttttagaaatgacttgaccaggaaattgtcttttcctctgagttgccaacatgatttactctcagtttgtttatttttaaagaacacaaagtcatcaggaaaacgttcatggattcttgccattgataattcaatttacttttcaaaaactccctccattattagggtctaatgtaggactattttaatgatgacacagctcattctttaataatcataattacaacagtcactggctatctactacatgtcagtctctctcctgggcactttatatatattttatctttaaaagtaaatgccattattcacatttttcacattagaacactgaggctcaaagatactgagtaacttgctgaaggtctcatggaacaaatgacagagcttagatttacatgcaggtttgtctgaatagccaagtctctgcttttttttcatgctgtcctaatgccccttcaagctagaaaaacatgagtgcagacagaaaatctgttctagaaaacagtaatgccactgaagatcaaatagcttaaattgatatgcagggttcatgagaacatactgtttttacaggccagtgtcccacagactttcattaggactaatttcctgcattactgaggctgcattgctgagcagcttattgaaaacagagctatgtcccaaatgccagcagattacctgccccttcacccccatccctctttcaaatcctacacccaagattagcagaatgatttttccattattcattacttctactagttacaaggtaagtctcaattacaactcccccttctctcccaagtctccaaattcatacttaccatgatgcctgagaaacagattccttcaaaataccacacgtagttggtgagtttattgctggatgcataggaagtttgcccattcgggaaatacaataatatgttcacgattatactccaaagtgcaagcggaatcagcaaacaacttaggcagcctccacacttccgagaccccattttgccctgcttagaacctgcgggagatttcaagagtatacagtcacagaaagtctatttttcttcttcctacctgaccttttttttctctctctctctcttttttttttttttttttgagattacctaccacttccagggtcagagcccttcacttcatattcatgaggagacggggaattggaatatacccgcagccgacaatctcagtgtgaaatactggtttactgtttggagaacaatagacaatgatcaacaactgaagagctgagctggtcttcatcctgtgccaaaggaatgcggtgtttttcactgctttttaaaataagtaattttcctctggattaaagcaccgaaggcttaaccctgaccttgtgttaagaaggaagttggggtgggaactggaattgaatgcagcaaatttcatccaacagtggagagagggttaaagagaaaactaccaaggaggcttatatttagagcttgataggtttgttaaaatatcctgactttaccctttttatgtatctgtctttcacctagtgtgctttttgtgtgcacactattcaccaagctttgttcaaattgcaagggataagaaaggactgagaaagtgactggtggatgagaaaaacaaaatatcttggttagatcagtacagctttccttccaagagtttgcatctattatctctacctctctgaaaaatcataacagaaataaaggcatatttttcctactattaagaaaacaaaggtagggctggcgcaatggctcaagcctgtaatctcaacactttgagaggctgaggcgggtggatcatctgaggtcaggagttcaagaccagcctggccaacatggtgaaaccccatctgtactaaaaatacaaaaattagctggcatagtgctgggcacctgtaatcccagctactctggaggctgaggaaggaaaatcacttgaacctgggagacggaggttgcagtgagccgagatcgttccactgcactccagcctgggtgacaaagtaagactctgtttcaaaaaaaaaaagaaagaaagaaagaaagaaagaaagaaagaaagaaactagcagtccaggttccaaagaggtttcttggcacccccttgtggatatggttttttttccctctagtgcttttgatctaagtgcatcaaaaaatctgggcattagacgttttttccagtcacatagaagcagcataaaatcatatttactagagttcctgggatgattgggaagagaataacattgttggttgagcattcattgagcatctcttatgtggcaggcactgtgcttgatgttttaaaaggttcactctggctgctgtgttgtaaataggtggtaaagggtgtggaggagatagagatgagttctgaagccatttccaccatccaggtaagagataatgatgactcggatcatgatggtagtagcagcagaggtggtaaaaggaagctggataccaaacaccgcatattctcactcataggtgggaattgaacaatgagatcacatggacacaggaaggggaacatcacactctggggactgttgtggggtggggggagcggggagggatagcattgggagatacacctaatgctagatgacgagttagtgggtgcagagcaccagcgtggcgcatgtatacatatgtaactaacctgcacaatgtgcacatgtaccctaaaacttaaagtataataataaaagaaaaaaaaaaggaagctggatttgggatatattttgaagcttgtgccaacaggattggtggcagattggatgtgggtataagagaaagagagaagtcaaagacgacatcatttgggcccgagaaactgggagaataaaattgtcattaacagaaatgagcaagtcagctgaatgagcagggttgggagaagaggaatgatatggtcagtttcgaatgtgctaagttttgaaataccttttagaaatccaagtggagatgtcaactaggcagctggatatacaaatatgaagttcaaggaagaggtctgggtgacatataaatgtgacagttgtcagcatataaatggtatttaaacccatgagacactaaggaaatgcatgttgatagaaaagagacccaaggactaaatcctgggcagcccaggactgagtttagggacatgagaggaaggcagaaaggatactgagaaatggccagtgagccagaaatgaagatcaggagcttattctcaaaggtgactttctaagaagaagaaggcgtgatcaacaaagttaaatgctgccaaagggcacatcatacgaaagaactgagaatcggctattgggttgagcaacgtggaggtcactggtggccttcataa

SEQ ID NO: 316439 - DNA, 4001 bp, Homo sapiens
agccacagcgcccagcccagaaaactcttaaaggggaaactaaaaatgatggacagcgagggaaaactaccagctggagcatggcttttggatgagtggaattcagagccctggctgtccgccaatcaaacactaaaagcacttgccgcactgcggcttcgtgtgaatttcacccctcctcctgactttattcccctagaaattataacatttggagaaacccttccaaaaatgtgaaccaggaggttagcaaagaggtggcctaatttgatatctgaagagacaagcaagatcagaaggtaaaaccttaaaaccaggctgctggggagttccttgttctgtcctgaggtcctagctaggtgagcacgtcatcggctagatgtccaggcaacaacagaagtgatcggctcaattccatggaggaagagaccgcacattctctacatctgtgtctctccctcgccacccagcaaggcttttctttcattcttccttcagtcggatatttattaagtgatcactacctgacagacacttggggggctagggatataacgatgaaaaagatgtaatccctttccttgaggagcttaaagtctagtggggacactgctgacgcaaaaagcaattctttttttttttttttttttttttttttgagacacagtctcgctcttgttgcccaggctggagtgcagcggcatgctcttggctcactgcaacctccgcctctcgggttcaagttattctcctgcctcagcctcccaagtagctggaattacaggcatgcaccacgcccggctaattttgtatttttagtagtgatgggttttcgccatgtgggtcaggctggccaaaaagtaattctaatcaagtgtggtaagaaatagagcagacatgagcagggcgggagagggcctctaccccagtaatgtcaggtgactatcaggtgatggccaggcggttgttacactgtctttctaaaataatattggtcacagccagcgttgggaaagacagtctcccaatagatagaaaatacctgaacttggtgatcagcagcttcctggtaagagctcaggaattgggcgagtgggctcaagcatctacactaagaagcaaaatggtggagtttagctggtgtgtgtgaccttcctctagtgctgctccgcgggtaagggaaaaacgcctcaagtgagcatgcgcacgacttcagtaaacacactgcgcatgcggcccctcccaagtgcctgtgcggcaggcaggcgccaagtcaagggtctaacagcacatttgggtgtctcaagtcacgcacttggcccttttccaagtgtactttacttcctttcattgctgctcaaaaactttttaataaaccttcactcctgctctcaaacttgcttcagcctctccctctgccttaaacccacttctgcccctcagccgaatctctcccccgagaaggcaaggattgagtttgctgcagactcgctggattcacagctggtaacagtaagtaccaggcaggggcatccaacttaaggtgtcatggaagcacatggaggaacctaatcctatctggcagaagcaaaacgaagcttcccggaggaagggctgcccatgcccaaacttgatggacgatgagatactaggcaggaagagtattctaggtgcaaaggccagaagttgacagactgaggcaacaggagaaggtaagtgaatggcgcaaagtcacacagacgccaagctgcagagccaggctcactggagtggaagcgtgcactctcatctgtgaggctaggctgttccctggccgtcacctcaccctttcatctctgcttacctgcatctggtgtcaagaatcagaatgggagagacagaacctggagaaaggctgcgtcttcagagtggggctccactcctccagctccagggctggacctgaaggttgtctttccaggactctttccaggagggccagggaggctctgtatatacgtagaggtcacccaggcgtgtgtgtgtgcgcgcccccacgcccctgcccacaggcctgcattgaaggcgcttccgctccccggagagccctgtcctgatgacccaccctctgctcattttcatgtgattctaaggcaggaaacgggagacatggcctcatgagctccgctgtcctgatgagtcactggatgcacccgtgagaaacacctcaccctccgctctccccaggcagcaacacttgccacaccccagctgttcctgtcctcatctgccaccccgcgaagaatttcggctctttgacagaacagcaccgagcagggcagccacccctttttcctcatcactctccttaccttgcccttggctgactcgatgtgttgcatggttcctgtactagacgtctaacttttttttttttttttttttgagacagggtctcactctgtcacccaggctggagtgcagtggcatgatctcggctcactgcaacctccgcctcccacactcaagcaatcctcccacctcagcctcctgagtagctgggattacaggcacctgccaccatgcccggctaatgtttgtatttttaatagagacggggttttgccattttggccaggctggtctcgaactgctgacctcaggtgttcgcctcagcctcccaaagtgctgagattacaggtgtgagccaccgcactcagcctcttgttcaagccccaggccactatcatcttgtaccatactctcaccaaattgctgaggattttgtggtgctctctgtgtgggagatccgtgaccctctatggacaagctcctattcaagattcagttcaaacattcccagtgaagtctgccaggatttctttactccgagttaggtacttctttctctatgctcccattgcattttaaacatctagatattatatacagtaaagtgcacaaatcttttcttttcttttttttttttttgagacggagtttcactcttgttcccaggctggagtgcagtggcacaatctcagctcactgcaacctctgcctcctggcttcaagcaattctcctgcctcagcctcccaagtagctgggattacaggcacgtgccaccacgcctggctaattttgtatttttagtagaaacacggtttctccatgttggtcaggctggtctcaaactcccgacctcaggcgatccacccgcctccgcctcccaaagtgctgggattacaggtgtgagccagcacgcccagcctaaagtgcacaaatcttaatgttaaagtctgatgaatttttacatgtataccctggtgaaccagcacagaaatcaagatacaggacattccaaatccccagaggtttcattgtgtcgcctgtcattcgtatcccttgtccccagtgttaactttcattttggctcttataataattgattaggttttagttgttcttgaatttcacataaatggaatcaaacagttttctttaaaaaaaaaaaaaaaaaaggcggttttgctgtgtcatccaggcgggagtgcagtggcacaatcatgactcactgcagccttttgccttcataggctcaagtgatcctcacacttcagcctcctgagtagctgggaccacaggcaagcgccaccacgccagctgattttttaatttcgtgtacagatggggtctcaccatgtagcccagtctggtctcgaactcctaggctcaagtgatcctcctgcctcggcctcccaaagtgctggattacaagcgtgcgccaccgcgcccagcccagtatggcttttgtgtgtggctttcttcactcaatattctatatgtaagattcatccatcatgtaatttatttttcttttattgctgagtattattacattggatattacaactttttctactcttaatggacatttatattttcaacttttgcctgttataaataatgctgctatgaatattcttctgcatgtcttttgaaggaactatgcactaatttt

SEQ ID NO: 316440 - DNA, 4001 bp, Homo sapiens
gcagagcagtagaatgacttgctcaattgcagaatgggtcctgtccccatgtcccagcattctttccactgcactctggaactttgatgcctaacgtctctagttcaagatcgatggccgcatgaaacaagagaggaaacagaagtcctgaagcagagcctggtggaagccagaggcgctgggcctcagaaatagagaacatggaagtggtgtgagtgaggaacctagaagcctactggggaggggaggataccatcttttgtcctgtcccaagtcccctttgcagatgaggcaattcagggccagaaaagggaaatgacttgtccaagttcttatggcctctcagtggcagaggaatgctgcagcttcatctctgccttccaggcttgcattctgtatatgggacccctctgaatctccagttctgacatccctgtcggtttgtaaaatctaatacaatattcataccctataagtatgagggctatggtattttggaaaattattattatttcacactggcaggaaaaatcacagttttatcccttcaccagctgctcccagagtcctggctggagctgataacttgtctccatccccatgctgcccagcacaaaagcacagagcaccctggagtaattctagtagctgccccccatggtaactcaccgcaaatcgcttcccacagccctcgttgccgcagcacccacagcagtcattgttcttcaggcccaagaacaccagcgcagggaagatcatctaccaggagaagaggcacctcagagagagtccaggagttgaagggagggcccgagcctgcctgactgtataaggagccccatccacaatgagggatttggaggcccaaagggaatggcaaagtaacagagcatggctggaggggtaatggagtgttatggagtacttagattccatttgggctgactaaccagcttcaatgaggcaagatttcaaaatctgagtttccatttagatggtgtgttagaaaaaagaataacaaacttttcctcaattgtcatgaagagtgagtctctctccctttcactctctcaaacggaggttcccaattctattggaaaccagaggtaaagaaatcattaggtcctaagtggaagacgaccacactgacaacagcttctcatggtggttttaagtcaatttgcttttctagtgggtttgcatcgtgggtttgttgttgttattgttttgggcactatcttgttggaatcaagaaactatgcgaccttcacttcggttcatgggactcaaatgacccatgagaactgtcagcccaagcttagagattaattacttagtaaatttagctgacgtgtccttgtcagatcctaacagaaacgagaaaaaaattaaggcattgacctctcaccatgcaatgcttgagcttctattaccaactaaatatctccctgttcaataagtacctgatttaaaaaggattgtggggaagggaaaatctcccttagggggattttaagcttccctactcaccaagacaccgcttcctaatattcctccgaaaaaccagatctcttgggaaaggtggtcgttgtcatctatcacttttcctccaggaaaaaataacaggatgttagccaggaagccaaaaaaagcaaggggaatgagggtcccccccaggcatctggcacagcccccagtgcacattctggggtggtacgacacaggtcagcaatcaaaagctcctcactgcctccttcacggggcctcttcaagggtttttggccagagagtccttgtaattgtctccaattcaatcagtattttggggctgagaaccaaatttctgtgaactgtgtccttggagttgcttcagcttctcaaaaatagcagaacctcgatggcaatggacatttatacattctccctgacctgaagtgctttgttttttgcacccccataaatgagattacgttcagagcaatcattcaatcgttttgccatggagaccaataacctctgttaataatccaccagcacagacaagacactcacattgttgcaatcgaagacagggctggaacaaacagcatttagaaccactgcacctttaatctgacagtgcccatgcccaaataaagaaatattttctccagactctttataaatcactaatataattgagttacatcctggttaaaatcatgtctcccaagtacttaatggtgtacagtgcgtgtctttgtcttttccactgaaagcctggaattcagggttatccaaaagagcttctgttttcctcaatatcaaaataatttgatggtctagttgtgtatcattgagctcagacttaaaagaattgtttaaggcaaaaagctactgttcattttattgtctgattgctgtgtttctctacttgttacgcaattaagtaattaagttctatcttttccctacacgatgtgatggaattagcaaaaacagttttcctaatcaactttctcagctatgtcttccatataggaataaagaaaccatcatccactaaggctaaggggaaaggaaggtcagcattggtagagagggagagaaaaggtcctgatgagttgactggggagaagacacagttggaagagcagttatagagtgcaggaggcagtaaaacacacccctattagaaagtttgccaactgccaggggcatgattcattcatttgctttgtgtcacttaagaagttctctgccacgcctggaccaagctctacattatgcgatggccctgcctggtactggtattacataacagctgaaggattaagaggtggaactggaagtcttactagttcttcattgagaatctagaggttaaaataggtcgaatattttagggagtcaaattttagctaaataaaaagcaagtgacattattaccatggtaagacctgtcctaccgtggaataggccacctgctcacaaggaagccatggactgggctttgccaaggctcagaggcccttggaaagggaagctgtgggaaggattccagaaaagtcagactggaaaaatgttgaggctccttctaaaatttctaagaaatgagtactggttgctttataaagatacttagaaatctcagggtcaggatgagaaagaaagcagaaaaacagcaaatgtttattgagccatgcataatactccaagcacgaatgagcaccttaaatgttcttcacccttctgtgaagaaggtgtcatgcccccttcacaagtggggatgcttctgctcaaagtgatttttgcaagctcatctcagcataagaagaagagctaagattttattttttatttatacatactattttacacatttatggggtacgtgtgatattttacatgtgtagaatatgtagtgattaagccagggtatttgggggtatccatcactgaatattgatcatttctatgtgctgggaacaatttaagtcctctcttctagctactttgcaatctataatacattatcactaaccatggtcactttactgtaatgtcaaacaacagaggttatccctttggctaactgtatgttcatacccattagcctacctcctctccagctctgtgttgccaaaacccaggctatgttctctctcatagattttcctttttgaaaacaaacaaacaacaaaacatcatcttttaaatataaacaatagaatgacactgtgtgtgaggtatatgcacacagtaggagacccttctgaacacaacaacaaactgtgattttattccttattacaaaataatgtgactttttttggtagaaaaattggatatacagacaagcaaaaggaagaaaaagaaaaccagctgtgtttccaccagaagcaaacaagggctgtcatcactgtgctgacagctgttttccaacactccaggcaggtgcaaatgaactttatttataacccactggcttctgacagggagtcttgagcatatgaactcta

SEQ ID NO: 316441 - DNA, 4001 bp, Homo sapiens
ttttttttttttttttgagatagggtctcattctatctcccaggctggaatacagtggcgcaatcccagctcactacagcctgaactcccgtgctcaaataatcctcttaccttgaactcctgggcttaagcgaggctgcctcagccttttaaatagctgggattacaggaaacgggccgccaccaccaccacgcccagctaattttaaattttttctgtagacagggtctccctttgatgctgtgaactcctagccttaaataatcctcctgcttaggcctcccaaagcacttggattatggtcagcccattctgtgcctggccccttacaccattctgaaaaggaatctcaagagctagaaatctcagtgctgggtaggtaaacaataatggatcaaacccactgggagagaggtcttgggaagccctagatgacactcccaccatccttgtctccatcatgcctagcatggctcacagtgctcaaatgggggcataaacaactgtggaggaaataatcactagttggatcaatgtaaaataatgcttatgatgcacataaagtactagaactgctgggcctgaaaaatattttgaaatgtaatgaatttctcctacataaaagatgtaaaaaaggtggaggattcagttagaaaagcatatggagcaacagcacactgaagagcctggactttatcttttagtctaggcatacccagaagtaaaaagactcagaaagcaaaaaagcatatattagagataatataagcagtacgaaaaaaaaaaaaaagttggccaggtgctgtggctcacgcttgtaatccgagcactctgggaggcagaggcgggtgaatcacttgaagtcaggagttcgagaccagcttggccaacatggtgaaactccgtctctactataaatacaaaaaaaaactggccaggtgcggtggctcacgcctgcaatcccagcactttgggaggctgaggcgggtggatcacgaggtcaggagttcaagaccagcctggctaagatggtgaaaccccatctctactaaaaatacaaaaattagccgcactccgtctcaaaaaaaaaaaattagccaggcgtggtgccaggcgcctgtaatcccagctacttgggaggctgaggcaggagaattgcttgaacccggaaggtggaggttgcagtgagccgggatcacgccactgcactccagcctgggagacagagtgagactctgtctcaaacaaaacaaaacaaaacaaaaaaacttctaagtcaagtaaggttcaaacactagaaggcagtgaaatacgaatttggggcaaaagattgcggacgacgtcagactttgagaaacttaactgtgaatctgcgtctgaggtaaatacatttcactgtttccgtttctgcagctcttcctaaggaatggaagcccagactgcctgggaggcaggagacctcgtttccagctcccggcccttactgccgctgcaaatcctagactggctagagaccattcgctgcagcggacgtcggaaaacgagacctcgcagttcaggaggcaggaaaaagacatgcccgcgccctcatcccaataggtgctcatagcgtttggccagcttgagctccattcggcccccacttacccaagggccccttccccgcggccttcgcttttagctcctcgagtttcttctgctcctctttttgtttctgcttgaaagccttatcttcctggggagaggcagagcgtgttcaactcaggcctgtctcccagcgcccccgcacccgccagtgcctccgcgcccgccctcacctcgtccatctccttggcctgcttcttgggctgtttcagtggcttcttcttgccacctgtgggcgacacgagcacgttcggcctgcccctgccgcccggtccccaccccgccgtccccgcagtcctcacggttccggaacacttaccttcgcggccggacatggcgcctgccgccgcttccccagaccctgccaccggaaacggagcgtctgccccaccctttgtcgtagacagcgaggcggccccgctgattggctcctagtcaggaagttgaactctcgctaccggatgcggcgctccaggggcgggtactaacaggtcagaggtcaactgagtggcagacgattggtcgggccacgccaggtacgaggagctagggttgtcctgccagggtagaatcggaaccgtaggaggggtacttaaccggacggcctaccaggcctgtggccgtgcgcgggaagagcactgcaggtagacagcagggcatgtgcatgtgcaaagagcttcaagctcgtcgctttcctggaaccaaggaaagcacagcttgggtggagggagattaggcggggagatggcagaagtggacgggagttatatcacgtggtcctatagctttggaaaaccctgtaaggagttttataatatagtcaggggtgcagcagtttgcgaattctgtttgttcatctatgaaaatggtcaaaaaaatttattttggtgatggccatacaactctgttaatatagtaaaactactgaattgtacacattgggtgaattatatggtatgcaagttatatatcaataaagcttttttttcttttccccccgagatggagtcttgctcttgtctctcaggctggagtgcaatggcacgatcttggctcactgcaacctctgcttcctgggttcaagcgattctcatgcctcagcctccccagtagctgggattacaagtgcccgccaccatgtccggaaaatttttgtatttttagtagagacggggtttcgccatgttggccaggctggtctcgaactcctgacctcgtgatccccccgcctcagcctcccaaagtgttgggattacaggcgtgagccaccgcacccagccaaagttgttatttttttaaataacagtgctgagcgctgggatgctacagtgtccagagattaggcagatgagtacattttttgctgggtacgtactatatgtaggtaccaagctgaaattctagtgagtgagacagactataaccaaagcaaataaatgggatacatgttgcaggtcatgtgatatatgcatggaaaaaataaagcagagaaagtgggtcaggagtgctagggtgggagtgggatggccatatctgatagggtgcatggggaagacctcccaaggggctactatttgagcaggacttgaagaaggtgagggagcgagcagcacagatagcagctgtcgtgaaggccctgagctggggacaacttggtgcgttccagcaacttcaagaaggtccatgtgcttggagtggagtgaggaaagggagactagtgggagatgaggtcagagaggaatgagagccagtgggtaggttccctgtaggccatggaaaagacaggcttttaccttgagagaagtggggaaccattgtagaggttgagcagagagacaatggttccacctgtgtttggaaaggaacactgactgctcgactgacaataaattgtaggggctggaatagaagcagggtgacatctgtcaggaggctcttgggataatccaggctagagatgtgatgtgggtcactgggaccatttggtagcagtggcagaggtgagaggaggagggatcctggatttggaaagccaggggcatttgctgatagatggatgtgaggtgggagagaaatgaggaatcaggggtgatgcgaggttgttgatctgaatatttgaacttggtattgctgtcatccatgatggagaaggctatgggaaaaaaaggtttgggaggggaagatgagatccccattagattttcaggcagagatataggttgggaagtttgataaatgagcctagaaccctggggagagaggtctgcgctggaggagtcaagagtatagttctgttttttttttaaaaaaacaactttattgatatataacttgcataccatgtaattcatgcaat

SEQ ID NO: 316442 - DNA, 4001 bp, Homo sapiens
agtaataggctccaaactagtatttctgcttttgtccttgcccaatccaccactatctactcagcagccaaagaaatgaaaatgtcaaaatataaatcagatcatgtcaccctgcccaaacgctccaaagacttcctattttgctcagtgtaaatgctgaagtcctacaaagaccagcagcagcagcagcacctgggagcttattagaattaggccctaccccagacctatgaaattagagtctaaattttaatagaaacccccaaggtaattcatgtgcacattgaagtttgaaaagcacttccataaagcaccacaaaataaggacccaccctcaccattcctcaggcaagcttctgtctcaggacatgtacactgtgattcactatgcctagaatgctcttctcatatatgtgtatggctcactccttcacttctttcaagcccttactcaaatgtcaccttctgtatgaagccatctgtgaacactcaaccccttcccctcaatacattctattcctgctttccttttacttttctctttagaatttgtcatcataaatttaaaaatgacatttatgcattatttatttatttcaggccagggatggtggctcatgcctgtaatccctggattttgggaggccgaggtggaaggatcacttgagcccaagagttcgagaccagcatgggcaacatagcgagaccctcatctctacaaaaaataaaaatattagctgatcacagtggcatatgcctgcagtcccagctacctgagacactgatgcaggggactgtttgtgcccaggaatgtgagattgctgtgagctacgactgcacccttgcactccagcctgggcaacagaacaagacgttgtcttaaaaaaaaaggttttcagaaagaaaaattgagtctttgagtgaaaacaacagatatacctataactgtctacaacgcaataacaatcctttacattgataaaaatctttcatgcaaattttcttatctgattctcaataaccccatgagctgtgtaaagcaagtaatgataagcccattttaaaggtgagaaaacaaacatactttaactctcaaagcatggaagtaataatgtcaaacctgggactgaagtctcaatttttagttcaaaactctacaatatcacacctcctcttgccaatgaaactgaaccagactatgaaatcatacagccataatattatgctaacgttactaagctttcctaaaccatccagtgtctatgcagaatgagaacaaattcagtttacccaagtcacaatttcaatttgagaaataagaatgcaagctacagctgggcacagtggctcacacctgtaatcccagcactttgggaagctgaggtgggggatcacttgagcccaggagtttgagaccagcctgggcaatacagcaagactctgtctctattataaaaaataaagatttaatttaaaagaaaaaaattcaagctgctccccgttacttgtaagtctaatcccgtgtctaataacattcaggaagaatgtaggaaatgagctgtttcattatatacattaagaaagttcttgttgagctacaggtgctagaaaaaaagagaaaatgggagaaaggaagatggaacaagtaaatgaatgagaactgagttatagagaggaaagtataattattttatactgttctgagtgcctgggtgatgtgattttgcagtagaagaaaaaacgacatacctcctcaaaatcccagcaatagcttccctttctttgcataggtgaggatgaacagttgtaatccaaaaggtttcccaaaaagttattttttaaaaagacatagaaacagaagatccatatgaaaaagagatccaatctgggaggatggacactgtgtcttctaaatcttgtgaccaaaggcaactgttcaccgagcgtcagcatctgaagaaagtgctaactgtggatgtgtcttctccagagattaatacctgctgggacagagaagcaagaaaaggagaaagaactactgaatgcaaatgactgtctgacaagcaatgacaggctgagcatcccaactttgaaaggccaaaacccaaaatgccccaaaatctgaaaacttttgagtcccaacatgatgctcaaaagacacactcattggagcatttcagagttcagactttccaactagggatgctcaactgataagtataatacaaatattccaaaatctaaaaaaaatctgaaatacttctggtctgaagtatatcagttctcaggctgcaaattttttttcttttttttttttttttgagacagagttttgctcttgttgcccaggctggagtgcaatggtgcaatcttggctcactgcaacctccacctcccaggttcaagcgattctcctgcctcatcctcccaagtagctggcataacaggcgcttaccaccatgccaggctaatttttgtattttcagtagagactgggtttcaccatgttggccaggctggtcttgatctcctgacctcatgatccccctgcctcggcctcccaaagtgctgggattacaggtgtgagccacctgcgcccagcctaaaattttttaaattaacattagtgaacaaaaagtgatcacatggaggtaataccagtgaccacgcccagctggcactgagttatcaatgacagcaataagcaaaagtacacttttgcaggtaatccagctctctctctgataatagtaaagaaaatattaaaatctatttcaagttttttgtagcaaaatcatggtcatatcatgcaacgaatcatagataaatatttgtctgcagtctgccaaacagagcaaccattctggcaacttataaaacaaatatcatagaactactaatgcagatgtccactctcagcagaaaatgtagaataatcatataaaaaaaacatatgtaggttttggcagagaaactaaaagttgacatgaaaacaaagggacataaatgttaatatgacatacagggtggtttgcatacctttttagctaacatacagaacaagaaatctgttatattttcgcaacaaattaaggcagtatttattgatacctgctacatcactgcatttctatcaaaccacaaattatagaatatataaaatgaaatacattggatggaactagcagcagtcaagacacagcagaaggaaagacgagtgaatgtaaagacacagaaataaaaactatccaaaatgaaacccaaaatataagaccaaagaaaaagagcagagcatcagtaaggtatgggacaacttcaagaacctaataatatatatgtaactggaatccgaggagcgatgtgtgactatttggagaaataatagccaaagatgttccaaatctgatgaaaagtataaacccacaaactccaaaagcttaacaacaagagcaaaaaactcaaaagaaagcttatactccaccagggcacaacaaaatcaaattccttgaaaccagacataaagaaaaatcttaaaaggagccagaggaatatggaatgagagaaaatatttacagatcatctatcatccagaatatacagagaactcttaaaactcaaaacaaaaacaacctgataaaaatgggcaaaggatatttctacgaaggagatacatgaatggctgataaacacataaaaagatgctcaatatcacaaataattagggaaatgcaaatcaaaactacaatcagataccactcatacccattagggatagctatgattaaaaaaaaaaaacagaaaacaacaagtgctggcaaggatatggagaaagtggaacccttgtgcactgctgataggaatgtacgatgctacagccactggggaaaacagtatggaagtcctaaaaaaatgaaaatagaattaccatatgatccagcaattccacttctgggtttatagcaaaaaagatttaaagtgtggtctgtaagagatatctgtac

SEQ ID NO: 316443 - DNA, 4001 bp, Homo sapiens
agcttactaaccactgatttatatcattatctgaaatgatcctatttgcttgtttgttgtatattcctcattcccatacatacagaataaagcttaattagggaagaggccttgtctgttttgtcccaacaatgtagcccagtacttagaaaacatcctggaacaaagtaagggctcaataaacatttgatgaattaatgaatgatccataaatgccactctgaggagcttaaacctaagccctgagccattatatgttctgcacatttatgagaggcataagcagtcttgcagaaaaggggaaatattctactatcaagaaggcccagtttaaagtaatggtggttggtcaccaactagtctagggcactggggttcttcatcaaattgtagactacaggtcttttgtgctcataaaagagtccttctgcaaggtgtcccaacactgtcagcggtctgtgcttctgtttatcttaagatgcaaatgctctgagaaatctcattcttatacacagtacacagcacctacaccataccaaatcttaatcaatgctcataattataacagttctacatcacatgctaatgaatttttaacgtctaaaattttcctatgctgctgatcagcaatctataagcagctcaaaactcttcagaaattaaaaggttaccacccacagaccagaagcagctttttaatctttctacactagccagagagtgggtgattgcaaaaaaatacaagccaactctgttggtagaggacagggttattaagttaaaatcccatctataagcatcgttttgtcacatgacactagtaaaactaccacctactcacaatttgagtttcaatctcctaatatacagagaaaaaaatgtatctacctcctggaacaaatcaaagttttgttttattttaaagcagctatctgatatttatgccctggattttttttttttaagaacagaataagctaatttaggaattcacacctttcgtagagatgcttatggtacaggtacctctgacggctaggctctaccaacactaacgtgtaacgtgtcacaaaagccaacgggcgttgcgggggccgggggtagccaacagctcaagtgggctgcttcactccgtggcagattcacctggggattcctcaccaagaatgttgttaagggacgaaccaaaccaaccacaaatgatacccctttaccgaggctgaaaaagcagagattcgcaagctataaacgaatctctggccctttagggaaggtgcaactcgctgcacctctttcccctatcctacaggggttaacagggggcatcctgaggccgagaccaagcccagccagctcctcctcacatcccacctcccactacatattctccccagtacgccgggctccctcctcccctcgaaagacagttcaaaatcaaaacaataggtgcaaaactggtttcaggtggaaatggctgagtcctggtggctaacttctgggacgccatggcgatcgagggctcctaaaaccccagattccgacgggaaccggctcctaaacagtccctcgggcctcggcccgacttctcacacgcccctccctcacctcggccctgggatgctgggaagggaacgaggcgaggggctggaggggaaccccaggtcaaaatgacagcggaatgagccgggaaaggaaagaggccccgtgggatgctgggggtcgagtcctaggcccggggcttcaacctcgaacgggggcgacggcaggtcccagccccgacaggccgcgagcgggaggccaggcccgcgtccgctgcgccgccaggccacgctccctcacgactgtccccacccaccgcggagggccgtgagggggccgcgaccgccgccagcgtccggggcgggggcgctcactcaccggcggggaggggaggagcagccggcgtctccgccagcgccgtcgctcgagctcaagcgcctgctccttccactgcggccgccgcacccggtccatcccccacaaccacccccccctcccgaccctccccccgcgccgcctcagccgccgccgcctcagtcaccgccaccgccgccgccgcctcagccccggcgcgggagggcgaaccggcgcgagagagcgagcgcgcgcgcgcccccgccacagccgccaccgcccacaacctccgcccccggccggcggcgcacgcgcaagggagcgggcggacgggcgcgcgcacgccgcaggggcggggatgggccctggaaggcgtggcccctcccctagcccgccttcccacgcggtctctgggctggttgagctgcgccgctgcaggtagtgctgagttgctccaggtaagctcctcctctcaaaaagctctaggaaccgagccaccctcgccctaggagcaacgcccctgagtaatatggggtttcgtcggatttctgcccgccgctctggatcacacgtttgttctccctatttgagtcgcaaggccttccttcattccacctagcaggctgcttggaaaagggcagagactcattactttgcaccaggtattaccactgaagggattgtaagcagccaccagcccatccctttataattcccattttcctaatttattttatttttattacttatgtaatgaggcttcttccgtgttcaaggagctgggagtaccatatggggtcaacggagtccctggtctcatgaagtttgagatctggtggagaaggaaaacattcatgggagaatcagacaaaattaagttttcaattagtaaaaatcttctgagaggtatatggtactaagagaatctttatgggggaattgatttagttgaggatgaagagggtagaatctgaggaattgagttgggaggagttagttgctccaaggggtgaggtcttggcatggccagaatggggagcgctaaagaatattgaatgtggagtagactgcgagtgtgggaagaggtaggcgagaacaggtgaggattggggacctatttatttatttatttattgagacagagtctcactctgtcacccaggtcacccaggctggagtgcaatggctcgatctcagctcactgcaacctccgcctcctgggttcaagcgattctcctgtctcagcctccggagtagctggactaccagcgcacgccagcgcacctggctaatttttgtatttttagtagagatggggtttcgccatcttggccaggctggtctggaactcctgaccttgtgatctgcccgcctcggcctcccaaagtgctgggattgcaggcatgagccaccacacccggccggatttgggactttaatctgagtgcttggtagaagctattcaggtttttttcagcagggttgcaggggaaataacttgatcattatgtctgttttttgtttttgagaggcagactggagtgcagtggcgcgatctcggctccctgcaatctctgcctcccgggttcaagtgattttcctgcctcagcctccctagtacctgggactacaggtgcacgccactgcacccagctaatttttttagtatttttagtagaaacggggtttcaccatgttggccaggatggtctgaatctcctgacttcatgatccacccacctcggcctcccaaagtgctgggattacaggtgtgagccaccttgcccccagcccattatgtctgtttttaagttacttagatagcaacgtgaagagtggtctgatgggagtctcaaagctggggccgggaagccagttaggaggccactggccacatagtcaaggcaaagtaggagggtagtgacagagaagagtgctaatgtagtggtaaaatggacaggacttggcaataaattgaatgaggagtgaaggagaaggaggtggcaaggtttacttagatttgaggttggtggaggatgcatttatagatttcagaagcactgaaggagccacctgaggtaactcaaaatggatgataaacctaaatt

SEQ ID NO: 316444 - DNA, 4001 bp, Homo sapiens
gaggttacagtgagccgagatcgcaccactgcactccagcctgggtgacagacggagactccgtctcaaaaaaaaaaaaaaacaaacaaacaaacaaaaaaaactgtgataaagtttttaaattattcccactaatttggtttgtgtgaagtctatcaggtgacaacctatatttcactttactagggtcatttgtgatattctaaatgagctttgcagcaacttgttcttttactttcattcatctcagaaaaccgacaaaatttgatttccggtggctgataaacctgaatttgatacccctaacaaatttaggtgttccctcttaaaaaaatatatttatcttgcctagtaaactgaattcttggcaagtgtaggcatttcacaggcatggggtgtgttttagaggtttgaaatcaggtcatttcctaaagaaacatgttgttgtacagggaatgtaagagctataaagggctttgaaggtatcaggatgtctccaagggacaaggtagagagacccttatccatctcataccagaaagagttctgaataaattacgtggaaagtccagaacacagtaatatcttcataatgagttagttgaaccatttcttacagagtagattaccaggtgtatccaacaaatcaagaagttaacccgtggaaaattgaagggactttttatgtttgcctatgagctgtctggggaaatggaggagaggcagggaatactttccatagcttgacctgctcttaagttcctggacataccttcccctttttaaagtatgatttaaaggcaacaatccatctcccccggactcccatacaaacctcttttggcagccaaatggtcttcatcgagcacacacttttcaaagaattaaggacgtgtgagtaggtttagtttagaccctgccttccctctccccacaacccagtaacatgctgaaaataagtaataaccttcctgggtacccccagaaaaacctgtttgcagaaactacaacctttcctccgaaaaaaacccctatcttcttaaggaagaatctcagtgtggtggtctgcagttcactgcaggcatttccctcctcaccatttaccagtcatcagttacgctgcatctgaaattggtttttgtagactttcatttagaccggctccaccggtgcccaactgcttaaaaaaaaaaatagcccctgaaccaatctctggattcctccagcaggctcaaagcgttcaatttcgctgcaactctggggtgaaaaccgccaggtccagccggcagagcaacctcccgggcagcacggaggctccgtccccggcgaggccgccggcacctaggcaggagggctcttcgcacagctgcgctaggaattcggctccgctcgcggccgcaggattagttcgagtccctcgggctggccaaagtgacactacatttcttcttcttcgtttccccatgtgacaggtccccctgcattaaagccacctcctcctcggccccagcccaggtccagcgctcctgacgcccgcgccccatcacccgcaccctccacctggggagggggttcatgccagcaaccctccaggcgggaaacaaaggcggaggcagggctgccaggtgggcaactcccctcgggcagacccgtcacgcagtggggaggatgggaaggtgcctgagaggataggaaaagggaaaccaaggcaaccggggctgcatcctccctgaagctgggctcccggggcaagctgaccccacacctccccgagccccgcccagcccagcctaacccgcttgccgggacccagcatgggaaggactggggggacgccccggagcgccgcttacctcgggagaagcgctccggctccctccgacggctcaggagaaagccccaccgctcgcgcacgcgctctcgcgcactcgcgccttcgcccctcgggcccccgcgcgcgcccctccgaccaggctctggcccgccccggccttgtccgtcagcgtccgcgacagccaatccggtcgcacggaaggctcagcgccggtcacgtggtgagaccagccaatcaccaaattgccctcggcagcgcccgctccgatgtctctgggggttcggttgctacctagcagagcgggtgcgaggcgggcacaaagggtctctgttttcgggggctaagtggcactcagttgatcaattaccagatcaattgacttctcaaattctaatataaataagaatcacttgactctcttgttaaaatgcggattctgatccagaaggtctggggtggagacctgagatcctgcatttctaataagctcccaggtggcgatgacgaagctcttggtcggaggatcacgctttgaattgcacctgtccgaaagtaatggctgtagccccagctccacgtaatttgaaacttgcacgacctttcttgtccttcttccactgatgagaagcgttcctgtggctacatggggtgtcccggtgatgcttacagtttgggcaccagctgagggaaggtgtgtttaatccccacattacccacccttggtctatggagcagcaatcatgccaacttggtgactggagtgtggaaccagaagtggagacggaatggccatggaagagaacactgtgtctacgttaatcctaaagggttgggcgtgtgtgtctgagtggcgcggtgccagacacttggccagagaagtggtataagtggtccctgcttctcaaaacgtaacaatttgttgtagaactatacaggctagttcagaaagaagcatgtggagaaaacatccgggaagctaacagtcacagcacaaattcaggcataagctaaagaggttgtaaaataatatgccttgagggtcttaaaaactgtccaaatattcttctgtcagtaattccagagtctagaagttaggactcccactggccctgtcatttctcaaatttgacctaaggactcagtgttttcggactggccagctagaacctttgtcgttcagcgtagccaagctcttattacccagtagtgtaccgccgtggttcaagattcttaagtgctgaattctccaaaaccttcatctctcatctcttgaaaccaggtggtataaccctgcttcagcatttctctctcactatcaaggtgatcaaactgtcgcttagagaaaacttcacctttgtcagtgtgtcctgaacttctctggcttctcatccccagaagtgaagcccacctagcaatctcagacattgttcatcacattgtccctatcagagatggcatcgcacaaaattcagagtttctgggaacatgttaaacctgtcacagcaatggttctggctacagcaggagtaaagaaatgtctaagcaagaaaaatgttttgaaagcctcaaaaaaagtttgtttgctgtcattaaaccagtggttctcaagcctagctggatggtaagtatttatggaagtaggttgtggggccctgtgcctggagattctgattgggatgagaagtggggcttgggcagctataggtttaaaaagttctactggcaatttgatatccatccatgcttgagaacacctgcataagctgctagatcgatagacgcattttttaacagggaaaactaaactctgcaacacaaatcactaatgacatacacactctgaaaacagaagaaagtttccacataatttttgagaactgatttttaaaggccaaaaataattcataggtaataaatactccaaagactagtcaatggaataaattgaaaagctaggttcacaactaggtttaatttcaattgattaactaaatatttctaaaagaacgtattgccttttgttaaccatgccaaactgataaactctctggtaatagctttacttgttttatgcccttcttaactaaaacagatttccatttgagcatttattttttattttttaagttccggggtacatgtgcaggatgtgcaggtttgttacaaa

SEQ ID NO: 316445 - DNA, 4001 bp, Homo sapiens
tatatgggaggatgtgtacaggttatatacaaatacttcattttatataagggacttgggcatccacagattttggtatctgtggggagtcctggaaccaatcctccatggataccaagggacaactgtacatgttgaaataatatcttgaatatattaagcaacataaaatatactgttaaaattaatttcatgtttccttttattttttaatgtggccactagaaaatttaaaattatatataaagctcatacttgaggtttatattacatttttattggacaatgctagtctagactctggagggtctagataagaccaccactttctttttttttttttctggggggggcggggacaaagtctcactctgttgcccaggctggagtgcagtggcgctatctcggcttactgcaacctctgcctcccaagttcaaatgattctcctgcctcagcctcccgagtagctggtactacaggtgctcgccaccatgcctggctaatttttgtatttttttagtagagatggggtttaaccatattggtcaggctggtctcgaactcctgacctcatggtccacccactttagcctcccaaagtgctgggattacaggcgtgagccaccgcacctggtcagaacatcacttttttaaaaaaaagattatagtagtatatacttgggcttctttgtcaaaatcacactagggttcaccatgtgaaaagcccaaggatagtctttcttattagattatactctcccagtaaattacaatttggcatttggcttacaaatttgcctcagattagttaattgatgtcagtcagccagcatacggtcaactgtaaagtaaaaatgacattggtgttccagatcaaaggaactgatagaaggaaacagccctgaaataaaacagtgactataattcaaatatttgagactaaatatcacatccctttagtcttcttttacatgaccacaaaaagaaaccacataagaaggaaacagcaatatataatcccaacatatacattctgaagaagatactattttaaataccctctgaacatgaatcaaatatatggcaaatgataaatttatatatacacttcatatgcacaagtaaaactttatccgttaaagaaaggtttccttaagattgtgatctaaaagaaaacatttgttctaaacaatattgactgactgataattaagcctgtcattatcatagcatgtaccctaggatctgatactacccccacctaccccccaaattgtattcaaatgagaacagcatccatgctgagataaggggatagctatatcacctcttattttcggagctggataatcaattaatcagggaggttaaatagcacattcgaggttcaacatttgctaaaagccacttatttccactcagaccctcagctgtcattctggaagctgccaccagatgcacagggtgcttgttaatgcggcagtaaagcccacatcagagggtctcttcaaggtccaaggtttcatacaatttggtcaactgtgccttttccccctataaatcagaactcgataaaaactataattcatgaacagatatttaattactaccttaagagctaaaataaagacataatctgacataatatttacataaatacaaaatacctaccttcaaattaagtatctcttcccactaaattgccctattttaaatctccatctaattcatttcagagtctagttggaattctccctgagttaatttgggattgtaaattctccaacgagtctcagatcttcagagtagcataagagctccccatataattttcctgagttaatctgctctttattttccccacatgtttagcttctcgtggcatctagggtctcatctgctcctgcctctgcatggcttgcctccgctctactgcccactctgggttcccattcctgagcagaaagaaccgtagatgctgccgtcttgctctccccactctgtggtcttgttccaatcagggaaacattcctatggcaaccaacacacaccaccatctcactccccttctctgaaagttccctatttgcctggcagacgtttggcaaggacgctgaattactttaacttgcctagcaactactagcctgttccagcccctctaaaaggggttggctttttgtcgcttatcttttaaaacacactcaggggctggctggctggctgtggaaagggcagctgccaagtcagcctcactggacactggcctggaacacacacagcagttgggcaaactggagcctcttcttgccccagggtgaaaaaacgtccacaggcttgaggcaatggcatgaacagacagctctgagggtctcaccctaggctaactccagccgaattttaattctcagagaacctcaaatctccttcatcttcagctataagaaaagtaaaattatcaatagctgcctccactcagaaaaccaggtttatcccattttgccatgtacgtcacaccttttggtttttatttaacaggctggaaaccagctgttttaacttacagattgtagtttcttcatttcggttattttggtatcaggaaacaacacggtcccaaatgactgatgctgctttccatatttttttcccctcagtgaattctaaagaatacttgaagtatctataatctaatctgggtaccctaagatgaaatacttcttctaataatccatataggtggagaagcttgaacaatgaataaacagtttattgagctcttggcttgctctgctgataggattccatgcttgcctggtgccctttcagaacagaagccaacagtgggtgctttctcctaaaagcaaccagtgagataatcaagtcaggtcctggagaaaaaccaaagctactagataggcatttctactcctacctgcagccaactttcttccaaaatgaaagcaaggccactattgcagaagcagagagttgccaatttaggccgacaacagaactgaaagttgacatgggtggacactatcttttatagacaacatttcctgctggtagggtgcaaaagacccacttttctagttttgcaacctttgaatttcttctaaaaagaggcttcttattcacttccatggctcctcaagaacaaggacatttttttattgccatttcctatttcagtgatgacacacagtgagtgctcagtaagcatttgcttaaatgaacctcaaatacagcagcaacagaatgtcaaaataagatactattttcacttattgtatttacaaactgaaatttttgtcatatttagtgttgacaagggtgtggagaaacacgacattcttctacactgttgatggaagtataaattagggcagccattttggaggacaatttgccaatatttagtgatgctaaaaacggacaccctcttttaccagtaattcccttgccttgaatgtatcctacaaatatacttacaaaaatgcaaaaagatatatacaaaaatatttattgcagtattgtttgcaacaagataaaactggaaaaacgtaaatgttgataaacagaaggtaagctaaattatggcaaaccaatgcaatggaatacaatatagccattaaaaatgaaatggatttatacatactgatgtgaacagatgtctaaggtatatgctaacatatccacaatggaatccatatatgtatccgtacatacacatgtaagcatagatgtgtgttacatgtatataggtatttatgtatacgtgtatgtgtgcttgtatacaaatagaacattaggtcatttctggtagaatttgcagagacttaacagtggttacctttaaggaatgatatttaggattgagacaataggaaggaaaacttttatttccaccttatagcatcttaaaatgttgaccaatttttttttttttttttttgagatggagtctcgctctgttgcccaggctggagtacagtgg

SEQ ID NO: 316446 - DNA, 4001 bp, Homo sapiens
aagaagtgaatatgtccctgaagactccactcagaacacattcaacccgatacacttctcagctgtgagcaactctgccctgtcatcatcacatttccttctctgaatcacaagtgtcaaaccctaggggacaagccgggccatcagcatcaatcaaacctatggaaacagccagagctaggctaagaaacctcaggttagggagcaaaagaaaaatttaacctacacttccttcagagagaaaggaaggctgtctggaggacagagaagtaggaggggtatgaagatccactcaccatgtcttgaaaacacacacgtacagtacatgcgcccaagtcagcagcggattttggctaagttgtcacaaattattactgtgggaacaagtgggtatttgtttagcagagaaaaagcaaggcaagttgggactaaaaaggaaagaaaaagtggcaaacatagacagttgggcacttataagacttatcaaggacaggccaccagaagaacgcggtatccatgatcagagcctcttcagggttacttaaagcctgagagaattcactcaaagaaaccccaagttataaacaagcaaggtggccactccagcaactggaccccacaagacaaaggcacacagctgcaagatccctcctgagtaccccaaagcatactttctgcaggaactctccactctgtccacacaagcacagtggggaagttttgagaacaagtcatttttggaattaatgactctgcacagatagttataacctttccttccccctaaaacgcagtcacaagggcactcctaggcttacatgtcgagcaaaacttcttgttactttaataagggaaggatgcacacgatgaaaaacagaagcccccccccaccccccatcagcacacatgagaacagggtgggggcttccttctctattcagccactaaggtgcccaagtttaatggaaaaggaaacttaaaatataaagaataaaagtggaaagggaacagccaggggaagctatagatgcggcttattaggaaagcttgggacagagatggaacaggtgggcctgttccggaagaaacgagaggaaggggatctggggaagaaggcagactgggtgggtcctaccctgacaaaagggaaactaaagctgaggaagaagggccacggagagggaggcgggtactgggaaacggaaggcatggccctaacactccaggtgttgagagggatgcaaagtagcaggatttaaatgtgaacggagaaggcagatccttgaagagtgaaggggcagaaaagagctcagcatcgcactggggattgagggatgtgggttctaagcacgaagagcccctgagaaggggcggacaaggggatgtcacccttgggggtcatgattccaggctgggaagtggggtaacaattcgagatggtaaggtgggaggtaggcgagttttagactggcgtctcaaaagacagacgtttaaggtggaaaggggaagggtcactcctgtctggaggccacagcgagtaggtgaggggctcgggctacccctagtgcaggaatacccagcctgggtttgcgggggaggagcaattcgggtcccaaggcctgaactctccgcgcaggaggggcccccaggggggccgggccgcggctgccgcgcagggcctccggagggtcggggggtcccagactcacgcattaacgtgctgaaggccacgacgccgagcagcccctgcaggaagatgccgaagctgtgcatgagcgcgccgctctcgcagcggcccgccccggacgcgactgtggagggcggcccgcctggcagtccccggctcgcgttcccggcggggccctgcatgacaggcctcgcgggaggggcgcgagggcccagggcccgcccggcctcgctgcctgccggcgcagcgccgccaaacccgcagccgggatcccaagcctgagccggtacctccgcccggccgccgactccgcgccgcgcgtaacccgacgtctgagatcgcagtgcctgattggcgcagccaaggttggggcgggcctcggccgcggcagctctccccacccgcccccgaggggcggggctccggccgggccacggggcggggtcgcgggtcccgctcccctctccaaccccgccacgcccgcaggtagacaggccaggtgagccggccaccgcagaccggaatgagagcctgggaatcacgagctccaggtccggaggtaggagctgggacggcctgtggtcaaattatttttccctctaaggaaaatccctatatcctggagaaattatcatcattcctgaattccaccctcagagatcgtgattcagtagttctggggtgggtcccaatagtttgcagcctggattattctgaagcaagtgaataaggaaaacaatctgagactgagtacaggagtcttccctccaacccagacatttgagtctttttcctacttccctagctaaaggcttatcaaggccccaagtctattttcttttttcatagacataatttaaatggtcacctgaatccaatcactttcatttggaaatataccaggtttcacactgaaaacctgacgtgcacatgtcccaccttattcacttggggagcacaactacctttagagtgtaaaagacaaatggttggtattttccaggctccaacatccccctgcacacacacactcccatctaaccctttccaacttctcagaacctgtgctctgcctttaacaagaccctgagtccccattctctcacccattctcccagcccaatctgggctctctctggataccttcttgttggtgctctagagccgctgaccttcctgctgcagaatgtcagtgaacacatggtgtaagtccagttgacactcacccattctcccagcccaatctgggctctctctggataccttcttgttggtgctctagagccgctgaccttcctgctgcagaatgtcagtgaacacatggtgtaagtccagttgacactcacccattctcccagcccaatctgggctctctctggataccttcttgttggtgctctagagccgctgaccttcctgctgcagaatgtcagtgaacatatggtgtaagtccagttgatactgagctacgtgttttcaacggtaaatatcatctctaggaaaaagtttcctattaaatagccccccaaattccaattacctaagagggttatatgctagctaaaagctttcttggtgaacaggaatattaacctgattagagaataaaaatgcaattctccagccttctcttacattttcacacctctgtgcctttatgtagcattctagctgcatggatgccattcccttttccctgctccatgaactgctcctcatgtgtcaaagcctttctgacctccctctccctcttgctcccacattacctagtgtgtactgttccaccaaaacttttcagactgctaaatttgacagctgtacacatgtctctctcccacagctaagtgtgagcctcctgagggcaggaattatttttatttacccttcaattcaaattcagtatggtgcctggtacagagaacatgcgacaaaatgcttaatttaaatggaattttaatttataaaattttaaactctccacaagtactggccgtgggcaaatacagaaaatcagattaaaaaaataaatggataagggaaaattaaaattgcatgactgtcttttagtctaagagggatcttatgaggatgctcaacagttaacagtacatgtttagagagaaccaaacaagaggctacgtcttaaagcagaatagattgtggttgggcataaggagactattgattgcttgaagacacagacagctcaaggaaaattggacatagagctgaaaagtgatgtttttgacaaagaattgttctgcacatccagctgtggaggaatccttaaggctcacagaggaacaaacaagaa

SEQ ID NO: 316447 - DNA, 4001 bp, Homo sapiens; identical to SEQ ID NO: 316446

SEQ ID NO: 316448 - DNA, 4001 bp, Homo sapiens
tttaaaaagatccctcctgccctggccaaagtgcattcagtgaataattcagctgggactcctgatgctgtggatagcttggtttacagataatgaaagggtcatcgccactccctggtgtcagcaggctccctcagtgggtcatgtagcctgtccctggttttggtgacacatgcttgctggagacagaggtaaatgtggtaataccccaagcttccctctcaataagtaagtggcagagaagcacagcatctgagttaaagcccaggaagaggacacagcatttggaaattggagtggcccagatcaccttttgaggaccccaggcctccttccctgtcccttcctcacaggggaaagtaccagcaggttgcttctggctcccacaggcccaatgtctaggattctgagattctgaggcaaggccagggttctgtgtccctccactgggacttcacagcaccaaaggaaactgcatttcttgagacttattaagtggcccgagtggtgagaaaagtgcctcgtggaccccagacacctaactgctgagttccttaaggccaaagactgattttgtctttccggatgtgccccaatacctgactgtaggtctccacctatgtacagcgaacacctcaacagatggcatgtgactcgaccagtatgctcctagcttgacaagattttggaaaatttcacagtaccttctccgctcggcgtcttgagggtctgtgcctggcaggctgatggtgatggaggatggggcacccacatcgtagcgcttcaccgtcttctggcatatctttaccttcaccaggaggctgtgcaccaagttcgccagcaaacccaccacaggctgcaggatctcagggaagaaagtggcgaaagcaaagtggtcagccatgtcccctcggccccggctatggcgctggtagaagcgaagatatacccaactggagagcagcccgaagccataggaagccagcgccgggctctggagcagcgtggcgagccgcagcaggagcagcagcgccagcagcagcatgggcatcacactgacgcgcacctggggcactcgcaggaccacacagtcccccatggtttgcttgagtgccaccaggacgccacctaggaagcccaaggcgccgtggatacggacagtgaacaggtagaccaggttgaaggaagccatgtaggtgaggaggtaggcgaaggcccccagcagccctacagacacattcaccactgagaagaagatgagcagctccaaggccccccagaggggctccagcaaacgcccggccaccaccaccgttgtcaggctgatggccacgtcccacacatgctgctccatcagcccatgggtggccagggtccagatccagaagttgggaggaaagaggtagcccggggtgaccgccaggcagcctgtgtccacggcgaaggagagcaggtagaggaatagtaccgccgcacacagagccttcaccaccacgctggcgctggccagaatggcccccaagtgctggcgggcgcctggcagggcacgttgcatcttcctggcggctgtcggcctgagaaaagggtctggtaggccaggggcctccccggggcctcgtcctagtccggccccgatgggaggcccaggcccggcctagtcactggcctatggccctggtaaaggatccgcttccgatcgggtggggctctggtcccgaggggccgagtcgggccttgttgccgggccgcagcgtaggcccctcgcccgggacctgagggaaggccctggacggctgcggcacgcccgcctacccaccctgtaggccccgtgccaggctagcctggttggcgttgacctcagggctgggcctcctccatccactgcgaggcccttcggttcgcaaggggactggtgcctcgttctgtacccgagtcaagcctggtcagctcccgctcggcctggctcctggcttcgaccgtacctcttctctcggggggccgacaaacaggggtgctgcgcctgcgcgtccccggcggcagcgggctgtcctctaagcgcctgtcttccggctcctctgcatgctgggatacggagtccttggttgcagccggggaagagttgaacagggttctggctagaactacaagtcccaggaggccatgagcacggaccggtcccgttgtggtgagcgcggggtgtgctgggagttgtagttctcagggaccgtttccgtcggttctcaggaggtgggaagggatgaattagcatctctaacccctgaaagcggcggtgagggttcgggaagcaacacagctctagcccccacacttgctgaattccctaggaagagtagctctatttgtgcgtgtacctctgagcgagtgtgtccttgttggctggcgtgtgggtaggtgtcactgtgtgagaaacagaacctccgtggtctggtgaatgggacctgacccaggctggaacccttgctctgcctcggaggctgtgtggcattggttggttaagttcctgaacctttttgaaactcagtttcatgggccataaaatgtagctgatgacatgatcttcctgtcctaataatcaaaggggaaaggggtgtaaaatgccagtccaccctgggtgctcagcgagtgctgcacatgttgcctttttttgtttgttttctcccacttggaaaagttttttgtttgttatttcacgttgccctttttccaagtgaggtggacctggagcacgaacctagggctccctcccgcatagggacgaggctgggcagccctcagtgaccctcctccccaccagggacttctgataactgcggaggatgagaggtctctctacaagccaggtctctccacaagcctgggctaggcctgttctggtcccacttcacgccacagtgacttctgacaggttgtgttctgtgtcttttttttttttttgtatatggagttacttttaaaaaactgtacatataggctgggcacggtggctcacgcctgtaatcccagcactttgggaggctgaggcgggcagatcacctgaggtcgggagtttgagaccagcctgaccaacatggataaacctcatctctactaaaaatacaaaattagccaggtgtggtggcacatgcctgtaatcccatctactcgggatgctgaggcaggagaatcgcttgaacccgggaggcggaggttgcggtgagccaagatcatgccattgcactacagcctgggcaacaagagcgaaactttgtctcaaaacaaaacaaaaagctgtccatataattaaaataattctatgacaaagtgcttttataaaacacaggatcccttcctttcagccactgatttcagtgtgtgctgatgtgtgcatggcctacaggttaaaaagggtgctgatgctttttttctggggtctgggttcccactggttgccacatctgggtaaggttgccagttttagcaaatcaaaataaggatgctcagtcaaatttgaattccagataaacaatgagtaatcttcgagtataatcatgtccccctgcccccttttttttttttttttttttttgagacagggtctagctttgtccaaggctggagtgcagtggcacaatcatagctcactgccacctctaactcctgggctgaagggatcctccagcctcagcctcctgattagctgcgactacaggcacacactactgtgcccagctaatttttaaaatttttttattttgtagagacatgggcaggggcggggtggccatcctacccaggctgatctcgaactcgtgagctcaagcgatcctcctgcatcagcctcccaaagtgttgggattacaggcgttagccactgtgcccagcccccagtttttcagtataggtatgtcccacacaatagttgaaacacttccatactaaaaactcgttcatgatctgaaattcaaaatagggtgttctgtattttatcttacaaccctatc

SEQ ID NO: 316449 - DNA, 4001 bp, Homo sapiens
aaatggttaaagataaaatagaaattattttttcaaataccgatgttttatttgcctctgtgttaatatttaaaaccaaaaacatttaatgaatatatcttcaaattcttcaagctgaaattcttaaatccataattaattcaaaaggaattagaagagcagttcaaatcttagttggtagtgctagggatgcattactgtcctttgtcaaaagttactgcttagtattctaactatggtgatttcttgctttatttttagattttaaagggaaaaaaattaaaataaaaaaactttttgggaaaaaaattcactacatatggatataaataacctgaatggaggatacttgtggagaggtggtaagggtgtgtgtgtgtatgatgggtaggggagagagatcagcagcatcttaagttaacaatacaaaacacctcttcagtgttatgagtttgtgacagctgttattcagtgcccccttccttttcttttttttcccccgcctctattttcaggcagtaatctgtgaagtgatattaagacacctcttctaatatgagatcattgttggccttactgtcagtttaggtcttctttttttcgcccatttgttttcttttcaatattaacttaattccttaaatggtttccccttgttgaaattaacgctattagcttactaccacattggagccctttaatttcaatggccaaaaatgcaacttaatttttaaaaatgaaggaaaatgtttactcatagctgaacaaaatgaaaaatattgatctttgacagtgtttattaaggatgctttttatttttagtaaactttatttttattgatatttcatttaacataatttcagagtagctctgtgctgtaagatgagcaaaagaacagataccctaaatctcaaagagctttttctttcgtgtttttcttctgagtagggcatgaggtttcagattccccagtgttgacatctattattttctaccttgagattttacctatagacacagaaagaggagataaaaaggccaggcatggttgctcatccctgtaatctcagcaatttgggacgtcaagaccagaggattgcctgaggctgtaagaccagcctgggcaatatagcaagacattgtctcttcaaagataaagaaacgaacaacaacaacagtaaaaaactgggcatggtagcaggcacctgtagtcctagttactcaggagactgaggcagaagtattgcttgagcccaggaggtcgaggctgcaggcatcactgcaccccagcctgggcaatagagtgagaccttgtctcaaaaagaaaaaggggagataatatcaacatgcaaaaactgaacaatagtaatctcttgtggtgtatacttgccacctctgtaagattgtaatgacaatgactgagttttttcctgccaagttcagttccattttttttttaagtaaaatatcagactatgtgaatttatagacttatttctcagagtatattaaaaatagtggaagttgggagatttttaattcttcatgagtccaagctgagacatagctacaactgacaggatctgttcaccatacatacttccaagtttggaaactatcagcaggcacctgcaactaaacccacaagcgtaaatgttccagagtgttagaatcttattcgcataatacctagcaagatcccagatgtaaacgggagaactcaaatgttcctttggattccgtgatggctgagaagcatccaggcctgctaactcactgaagaagaatccagcagaaggggactggacagaacctacttttgcataaccactgatcccacctaaagcagccagtgctgcatagacaaagccaagccagtataaaggcacctgtgggccagggtccatctgcattgttctcttctaattctctccagacaggagactgcagcaggcctgcacctataccactttcctgaaggtctgggtaaattgatgaggggacacaaactgtacgatgcttattttttaaaatgaaaagatgtttaacaaagcattttattcatatatgaaaacattcaagtttattccctctagacttcaaagtataactaaatgaaatgttttgaagtgcattaaaatgggtaattctttcatatataaaaacagaaaagtgaaattttcatgcttttattaacacttatagtgagtttataattttttaaaatgtgtggcacagtctcaagctagtggttagcattatttgcaagtttgtctatagagtgcattttgtcttttctatttctagaactcttaaattcccttgggacaagaaatgaaacaaatataagaatgtaaattatgaattctctttcttggaagtttaattttaaaaaatagtttaagtacttttagagtgggaatttagaacacttaattcacaaacagtatgaagtacttaatcactgaaagtattagaagtgagtgttaattctcaaaataaggtctcaatcgcagtcataatttctataagaatttctgccatcactctgttcataagactagtactgctcaattcccattgtttcctctctcccttctgttctgttctgtttttggagagcatgggagctgtccataccggtaggcaatgaggagaatgtttataattgagattgagtaatgtcaaatataagccttttatgatacgattatttcctttgttgtaataaatttctcagcctcattaggcatatccatgtagaaaataaatttaaaaataaagtgtgtacagagcagctaaaagaggtggcaaatatagggatgagcccagatagtgacatttttggtactttaagggactgtttcacttcaaaaacaaaatattcctgtttattatttttaggtggaaataaaagctcactgaatcagaattattcaaaattaaaatggtgtctttagttaatggtagtaatgtatggattaccttttaccttcagtcccattacaatgattattttatttatttttcacaaaaacaccttgaggtgtagttagcattatttcacctatacaagtgaggaaactgataccaagagaaacttggcctcacagctggacacaggattcaaactcaggaagtgtggctccagagtccatccatccttagaggtccttgttagttgtaaatctggcagtgagtgccagttctcaaatcagtcctaacccttttcatagcctggtaccagcaaggggattctgtctgcacctccttccaactcaattttgggttgccattcacttgctggctatttgacctatcctctctcagcaataatcccaccctgtctaaaatatgaataatattgtctccttctcagggtttttatgaagatttaattttacgagacagagtatgccaagcacttagcacaatggctagcatatagaaaatagccaataaattattgatgttattatgtaatgtttccagggtcacacaactagaaaaagattgagtcagaattcaggcccaactctgtcttactgggaaactaaacaaaacacacacacacacacacacacacacacacacactttccacaaacaacaggacctacaaagcaaaactcgtgctctttctggattataacactacctctcaactctaaccataacttttagatgagtaaataaggatgtcatgtatgtgctgaagggataagtagcatagtttagtggcttagggcaaactttcaaattgaggtttccattgtgtgacagcaggcaagttaacccctctgaggttcgttaactacacatattaaactaaaaacagtatcagttgtattgcattatcatggataataaattttaatacaattaaagagctccaataaatgttggcttttagtaattgatatagatataaatgtttctttaaaaatatattcacaaaattgggatgcatagttagtgaaatcataaacatgtaaagtctt

SEQ ID NO: 316450 - DNA, 4001 bp, Homo sapiens
tctctcacagccaggtaaaggagacagaagtagcccttctctaacttttccgagattcccttgctcaggttttagggtaacgtcttgcaattctgggattccctttcccaaatcaaataaagaaaaagctacatacacatctctggaggaaaatgtctgtattaaaagccaaaaaaccacataagtacaagaagaaacgcccaccaggccacgtcactggatagatcaacttggaaaaggttcataaagttcattttcagcggtaacaatatatcggtgttaaatccttcccatgccctccccccaattttaaataaattaaaaaaccacaaatttcaaatacaactatgttcagatacaaagagcttctcttactacagcaatagcaatttaatctttttgttttgtattttttttactaaaactttcatttaaaacagttattaaatatataaaacaaatacacaggatttggtcattttctgccatgaatctagggcacgtgggtgcggggaaggagtcgggcagggggatgcaatagaggggaaagggccccatttccctcctctccgtcttcggagctgcgatcccaccctcagtccaagggcttaaacatctgcttttcggaactggaagcgcagcacaaaccttgcttttcaaaggcgctggggtctctcggcggccccatctcgggaagaggaactaacgataactacagcacgaagcacaccggccgagtctccggcgggaaaggcacccgcgcgcgcggacacaggacggacacagggaggagcggagcgggtcacttggtcgccacccccgaagtgacggccgcggcggcggcggcagcggcggcggcggcggcggctgcggtggtccctgcgggcactgcggcgggggtggctgcggtggtgctggcggtggtccggcgctgttccatgccgttgggcaggaagccggcgatgatgggcaccggccagatgagggcggccacgctccacaccacgatgaccagggtcatgaagcaggccaccagcgtggactcaatgggcttacggttcagccgccagcccggctcgccctgcagctcctccaggctgaagtctaggcagcagaaatgcagcggctcgccctgcagccacagcggcccgggcggctcggccgcggggtaggctggcagcgcggtgggcgccccggcggtggcggcggcggcgctgggggcggcggcgggccggaggcggccggtgcggcgaccgcgcacccagccgcagcccacgcagaggcgcaggtcctgctgcgcgccgcccgccgccagccccaggtgctcgatgagcagcggcggcccgacgcggtggaaggcggcggcgaagaaagcgcggccgtgcgcgttggtggagaagagcagtaggtcgcactggaagccccgcgggcggccccagcgcacgagcagcgagctcagcatctgccgctgcacgctgatgttgcacggcgccgccgccgccgccgcctcctccgggcccgggcgctcggggggcccgggggccgccgaggccagcagccgcggggcgatgggctcgtccgcggaggacgcgttgactgaagcattggagggcaccccgaggaggccgggcgcgtccgcggccccgccgcggacgggcggcagcgggcaggcggcggccaggagcgcggcgagcaggggcagcatggcctgcggcgggcgcctacgcgcgcgaggccggcggcggttgcatggcgagcgggcgacgggccggcgagctcacggtgggaccgcgggagccggcggccgggcgcagtgcgggcgcgccgggcgcctgccaagcccgcaggggcggcgcggaggcggtgacggcggctggctcggcgcggggatccctccagacccggttgcgtttggggttccccgccgcccccggcgccggggcccttgggctgccgcgctgctctgcggggccgggtgctatcccagagcaggattccccggctcggctccgcctcccgcgtgccccgccccgccccgccctccgctcgccaggctcggggactcaggggagggcggggttccacgcgccggggctgggagaggaatcgccggggcggggctgggtgcgggggcgcggcggagagcggatcgcccggggtgcgtgcgggcgggcggggaagcctgcggacgcgcccgggcgcccccgcgctccgggtgaatcgcgttctcagagggaggctccagggcccggagaccatccttttgtcaggcctgaggggagcttcgctgtctcgccttagtgctaccgaacctcctttgttttacagaaggggaaactgaggtcgagagaggggaaagggcctcgctaggccaactcatgagccagaaacaagtccgcgccactagctctttctgcctttttacggtgtctcttacctcaaatctgtagagtttggctgctttttaatggctccaacacagcagactcacttgggattctcctcgcagcaagcgaggaaaattccaagaactctgtggagtttcgagtggagagtgactggctggggggaatgtgagccctgaagctgtgccgcctgggggtcccgaggacacaggtcctgacaggtcgagtgagcgcgtgttcatgaaacagttgtaggttagaacccacgtcaaaggggcagttcatcccctttgggatattatacgggaggagggctaccaagaataacgtgtcaagagatcagatttatcacatttatattgaaaagcactttcttagtagttcggcccctcacacttggaaacaaacttcaacgacccttcatcattcccatcgttctttaggggacatttatgttgaattattatctattttattttagttggaagcccttgtactccatgagcaccaagtattcctgattcggagaggggaggggtggagggagcagagaaaggcctcaacaaaaccgccttccttctaaaccagctaatcctgagaggtctgccaagagtccagctacattgctaggcatcctggctgattacttttctggaagcttttgtccattgttttctaacaatgagtaaaatgggactgagaaagttgcaaaaacgcctcaaaataaagctccccaacttattccacctcttgccatctaagcaagccattattctgacttagccttggtttccccatctgagttggggggtgggtggtacctcctcacagggctgctgtgataatactcccaacccagtgtctatctgtccccagatgttcccacatggtggttgctgtgatgtggttactaacagtgctgcccaagttggctgcctagagtggtccttggtttctacagaaatggttcatttccccaaggggatgggactcccttttcgtttcagcctccatcacttttgtgcttggaagtggtgctaccagggagaacaatgtgaattttcctgcttttaataaaaatgacttctcctttcaacctttgcatatcaggaacagaagctgctcagtgatgtggcagaacagttttaatttaagccatgtgtctggtgaaccctgaagaacaggaatatcaagtgatcctgagggctgagggaggcctaatcttcaaggggtgcgttttgagccaggctgttgcctgtgactgcagatgacattctctggggtttcagtcagaggcagaggcttcctgagctttcctgagacactcctggctttgtctgtgcaggggggaaggcagcagcaaagggaaaagacaagagatctatttggggagccaagcagttccctgcaaagttgcgccactgaagctctgcatcctagcaacctgcattctgcccacttttccagcaggtgccgtcctgaggactccgtcacctcgccctcattcagaatgtaattacccttcaaatagtaacacagatcctactttctagattgatttgctatctttttggaatttgagaacagaagatagcg

SEQ ID NO: 316451 - DNA, 4001 bp, Homo sapiens
ctaaaattataatatttctagaagaaaatgaagaagtctttgtgaccttgaattaggcaaagaattcttaattaggacacagaaaagcatgaatcacaaaagaaaaaaatgataaattggaccttatcaaaaagtttttaatttctttctttatactacaaactcatacactgataatgggaatgtaaaatatggtacagccttttggaaaacaacttggcagtttcttaaaattttaaacacaaacccaccatatgactgagctattgtactcttaagtatttatcatggaacttttttttttttttttttaagattctgaaaaccctgtcacctgctttatttctggagaagggtaaagggagaagggaaaatattcacttgaatttgaggggcagctaaactggaagcaacaatttcaggcctctaaggttcctctgatccataagggaatgctgaaacttccttgtttggagattcaaagagtttaatttttccctacagcaagatcaacaattttcactgggataaaagaataaagaacaaactcaatagcaccaaatggggttttaacacagaaaacagggccactccttttgaatgcaaatttttacattaaaatatgtttataaatcatagtagttgttttccctcttgattcaacatttctccctcccctaacaggagccctagaacctgaagagcatgtacattactaacgagatatacaatccagccaccctgtccaaactggaatctgattactaatggactacactcgaggctgcccccaagggatgggaagcagtaactacgctctcagggagaatgggtactgaggatgccaccagtcaaagagccgaacgctgtgcactgggtccaggatgacttgcacaccctgttcactgcgcagtttccgaccaccatggacaggggaatcttggaacaccagtctcactcgatgatgccgcatgtccgtgctcacattgatagtaaacagagtaaatatcattcccatgacaatcggaataaagatgaaattgagggtggtgacctgcagtaggcagcagtcctggtctggattggtatgaacatcttcgtactgaacgggaggctgcaatcctcctgtacacttgctctttaacctaggggactgttttttgaacttgaagttgaattcccacattggttcctgtctgttcccaacaatctttctgcaccagaaaagtaagcatttggaattctttaatgtgctgggggtgctttctggaatggctggattcttggagattcgagcagcaaatggctcatacatatggtacagagatcggatcacacaagcccggagacagtgcagcttctccattgactctggtcgcagacgcaaaggcagggaagcatccagcgtgtagtgccttcggtacaacctggtccaaaaggcagcagtgcaagtgacagtccaggcattcttacaaatcagggaaaaattcacaatgtcctcaggacggatataggaggccagcaatagccaaatatccatgggatactcttctcctccagccccgtccagttcttctttgtgtctcttgcttttcttttttctggagacagttctctcatggatgttttcctcctgggcatccatctcatcactgctgtcgatgatgtcatagggctcaccagccccagaaagagcttcctctgcaggaacctgagaggcttccaagccacaaagagattttacttcctgccgaacagcgttggctacggctttcttgactcgtccagacctcacgaccgccagatccgagtcggcgtaatccgccacggtcactcggccggagcaggcgtcgtgggcccggaacttgagtcgctttcctctcttgggcatggcgaccgtatcggggcgaggcctgcctagcgggccgggcccccgggccatgtctccggccagagagccggccccggtagccgcaagccagctccgcccggctccgcggccatcccacaccctatcatggaactttaaatcacatgtttacacaaacacttggacaaaaatggttttagcagctttatttgtaataaccccaaactggtaaaaaactaaatgtccatcagcagaggtatggattagaaaattgtgatgtattcatataatggaatattattcaacaataaaaaataacacatctgatacatccaacaacagtgaatcatgtttaatgaaagaagccagaccactccccaccacaaaagagcactaactgataaagctgacctaagaagctttgaaatgcaatattttgacttgatactacaaggcagacaaaactacacaaacactacactctggttggtaaatctgtttctcacaggagcttggttagcaattctgaaactcttttacatgttgtgttttctaaggctgctgtaacaaattaccacagacttggtggcataaagcaggagaaatttaatctttcacagttctgaaaaccggaagtccaaaatcaaggtgtcagagctgcggtatctctgaagtctctaggggagaatccttctttgtgtcttccagctcctggtgacttcaggtgttcgttgacttgtggctgcttcactacagtctctgcctctgtctttacctggtcttctcgtcttgcctctatgtttctcttctctgcgtgtctcttataaggatacttgtcattggatttagggcccactgggataatctaatgtaaatgaatcttaagatccttgattatgtctgtgaagaccccttttctaagtaaggttacattcacagcttccagtggttaagacataggcatatatttttgaggatcaccaatcaacctaatacacatgtatataaaatgaataagtgctttgcaaacactgtcactgcccagagcccctgacaccagccatagtcgaccccaccatgctctttgacatcactgtcagtggtgagtccttgggccacatttccttagatccatttgcagacaaagctattaatacaaagacagcagaaaattttcatgctctgagcactggagagaaagaatttggttattaagagttcttgctttcacagtattattccaggatttatgtgtctgggtggtgatttcacatgccataatggcactggtggaaagtccatctatgcggagaaatttgatgatgagagcgtcatcctgaagtatacaggttctggcatcttgtccatggcaaatgctgtactcaacacaaatggttcccattttttcatctgcactgcaaagactgagtggttggtaggcaagcatgtggtcttcggcaaggtaaaagcaggcactaataaggtggaagccatggaatgctttgggtccaggaatggcaagaccagcaagaagatcattgctgactgtggaaaacgctaataaatttgaatcatgttttatgttaaccacaagagaattgcttctgtagctcaggagagcacccctccaacccatttgctcacagtatcctataatctttgtgctatctctgctattctttaggttccatattttccttattcccttccatgtctagctggattacacagttacatttatgatcatgaaataaaaactaaataacaaaaaataaaaaataaaaattgaataagaaaatatattgtaaataatgagagccaggtttctcactgacatgagaaagaagttacaaatgggcaagagtgaaaggttagaatgacccctgtggtgctggattagagtcacatttatcagcatgagtttatattaatatgtatacagatatatgagcataaatacaggtattgtagatacatgggttagtatacatacatatatctcctacttctgttcactaacagaagctgaagcaatgacactcaagtagtaacaagtagacatactacttagatctttatttctaaataccttttttttgtttgtttgtttgtttgagatggagtctcactc

SEQ ID NO: 316452 - DNA, 4001 bp, Homo sapiens
tcctttaatacaagcagcgcctagagacaatgtgggtttatatcatttcgtttgcttttttaattaaaagctctatagcagagtttattgttggtacacagaattttaattgaaaaaatctctgggtggattcttaagctcagcagtggcagaagatatatattgtgaaccagattccatttctacataccaatataaatggattttacgacaatttttgttttttctatatgcagattttgcttgctctaaagagcttttgtgcactttgcattttttgttttcatgttgtagctagaggtcagaggttcattattagtgagtattattttcacgcaaaaaaaaacaagttccaagtacatacatggaaacagaagtcaagcctattagcattaatgggcattaaatatatattcatgaaagggcgactttaacctgctctaagggtaaggtccatttaagatcacatgacattccagttgagatttacagtcttctctttatcagagaagagaaaaaaagtaatcatctttgttgctttgtttgaaaagtccaatactataagcattctaaaataatgctcttagttatctgcactgagtgtcataggttacaacatctcatatactaaatcacaaggaaaaaggcacttctttctaaagatcttattatctatttgcttgcttgaccctttgaaccaggactccttccttgtacaaggagaaagtctttaaacggcatttatgtgtagctctgaacacttagttgatgaagtcagttgaagtatttattttcctggactataacacgcaaataaaagtacaagtaagaagttacaaaatttaaagtgatagacttgggagttctgtgtgagatgtgtcttttccccccttaatcccaaaagcatcttcttcagcaccttgtatttactccaccaagtttatctgggcaaagagatttgtggagttgcagatggagccatgaattggccatcagagagcatggtaatgaacaatttataagcacagaaaatgagttgcattcttttttgctagaatgctgcaaatagatttgcatactaagtgaaaggaaaatgaacattcacattttgtccataaagaaagtttatttatgagtagatgaaatcgtttgggatccagcttaacagataaacaaataaaaccagtatttcactttcaagtcacttccgtgttttttctgtgtgttgtaccctagcaatagtacacagtattaaattattagcacctcactgccaacacattagctgtcaaacttccagttattatgaagaggtaaggaaagctataatttactttagatctaaatctttcagataccttgcattgaagtcacacagatctagagatgcacgtgttagtcagaaggggatgctggagcagaggaactgaaataaatcctaaaatggttctgtctacatcagtcagcattgaaaaactgtcaagcatcaagtatggttgtaggcaatagtaaacatgtcttaaattaatctagccatagcattttgttctgtgtcaatagcattttgaatttaaaaaattacagcatagcaaagttaaacaaaggttaaatttgcaatcacgttatttcagtagcaatagaactaattgaaggagaaataagactaatgccttggacattttgttttgtccctctgaccagtgaatacaagaaatcataagatgctagtaaagcttgaaggaaatcttttaaatgtagaagcagttaagttgctcacatataaatctatagcaaatcaagtcctcagagtacctcagagtacctctgaaaaccttaacccagaaagagagatagttacctggaatagcggcaaacacaagatccctatcgttgagatcgctgaggtgacactgaaaagtctggatcttgacatatttaaaggacagtcaacttaggatagtggtttggtgcctgtgtttatttccttctttctcagaacttactagcttctctataagttatgcttcctaccaggacatgcattaataatggctccttgtgactcgtaaagtgcatgctaggggaaggaatgttgggtacatgtttacaggtactaagagcccaaggaatttaagtttaaggtgagaactttagcactgtttgtcaaggcctttaaaagtaggggttataaatgctgacctacagagctagctggctacttaataactttccacattcaagtgcatgttttattccagggaacttctgggtttctaatagtatttcatatttggaacatttattcaattttcttccctttgttggtactctttgttctcctacacaccattttcagttccaggtctaacccaaacttaggcataaagctttccttgttttattgtgataatacccctcttttaaacaaggtatatttcaatgtttattttatgaaacaactccatcactaccactgaaaaataaagcaagaatatctagggaaattctgagaaaaagaaaaggcactaacctattgtacattaagatgtcttaatctatgcattttacaaaaattagtactgatatgtgtaaataataaggtaaatgtaaaagagtagagagtttagaaatggagagtttagactcaaataaacaaatttatttaagcttccatttgaaactagtggagagaagatggatatctttcagggtataatgaagagctaaatggttatgtggaaagaatgtaacaaatgattgttaagatgcttaacctcagtcataattagataaacataccttagaattataatcagattggcaagttcaaaaaattgataatatagggaagagggataaatactgggaaacaaatactctcatatacggttgggaaaactgtacagcttatttggaaaacaagtaggcaatatacatcaacataaaaaataaatatgcccttagagcaagaattctccttgcaagatacatgaatgtaccccttacacatggcacaaattactatatgcaatgatgttcatcgaagcattgttggtgttaacaaaatattggaaacagcaaatattcatgaaaatgtgacagactaagtacaaaatggttatataaattcaacagaatactaggaatctgttttaaaaggtggagacagatcacagatgctgatatagagaggtctgtaatagttattgaataaaaggaacaaaaatcacagaactttgtgtacatcatgtcacatttgtatgcaaaaataggaaggtagagctatagtattctctccgtacacaaaacttatgcatatatacttatatatgcataggatgtctctgcatgaaactgctaacagtggttgctctgtgaaagggaaattgcaaactaagaagaccagagtgggaaggaaatttacttttcactgttacttccttgtatttttgatattttttacaatgtctatatgtcatctaattattttttacatatattcacttctaagagccaattttgaaggcaatgatccacaatgcagaatgagaatatcgtaattcaagctccagtgtagttcaccacatccaattcaaattgtaatgtatgaacccatttacaatcacacacatagattgctctagaaacaaaccagcagtattaggtatctaaactactgcacagagttggccatcgcggtatatggactagttgagctgcatctggatgggtgaagccgtctgtgtggtgactacgctctgtttagtatgcagccacggtcgcagccatgaatttcaaagcagaggaaggcttggtgccaatgccaataggagaaaagtaaaccaaacctacagtattatttatcccccagatacgctccattttgagtgtctctgaagcctgtaattaaacagaatgaaaaataggcttttcactggtgaacttatttattaggcagtcagaagcctgacttccgtcggtggagtcaatgatcttaagaa

SEQ ID NO: 316453 - DNA, 4001 bp, Homo sapiens
ttgagcaacttttgttttatagatatataaacatctactatacatgtatatacataatagatgtagatatctatttatctagagagaagaatgtagatgtatttatgtacattctgggtcctcacctaaaatatttttctgactctgagtcaccaaaaaaaagtttggaagccacttgaataagtgtaactgccatctctgcattccagtagaacttaaacaaatatttctttgaatgaattgtggtttcaggtaggtgttggagaaaagaagggaagatcaagattggggtgatagatgcaaaagaatgtattgaaaaagaaaaaaaaactgagaaagagaaagataaccctgtggtttcctcattccatcgactctcccataatcccactggcttccgtctatctgcacacattcatcaaaccccactagaccaagttcctttaagatgaagaccttgttggatccttcattgtaactcaacgacatagggggctattcataaatatttatctaataagtagattaaaatttatatttcctgaggtctagtttttaggtggtatctcagttaaagttttaactttttaaagatttaagatactatctcacacaacagtggctacattttgtttgtttgttttgagatggagtcttgctctgtcacccaggctggagtgcagtggtatgatctcggctcactgcaaactctgcctcccaggttcatgtgattctcctgcctcagtctcctgagtagctgggattacaggtgcatgccaccacgcctagctaatttttgtatttttagtagtgacggggtttcgccatgttggtcaggctggtctcgaactcctgacctcgtgatccgctccccttggcttcccaaagtgctgggattacaagcgtgagccaccatgcccggccaagtggctacattttaatagaagattccttaagatcaaaaagcttcaatattgaattctccagtctccagtagtgtcaggcgtcacaggaatcaatgagagaaggatttgttggacaggtgggtctctgtaacttctcttaaatcataccagcatggaagccagttactcccaagactagatgtgcccatttttttttggttggagagctaagggaccaggccaatcgtttatctgtgcaatgattcaatgagcgcacacggagtactacttagtgtcgtacgctgtacttggcacatgtactttcctagtgaattgtgaagtccatcttgaattattgaattatttgaattattttcaaataattgaaaattattgagttattttcagttcaaacagttgcttgcaagagaaaggtggaaaaacaaatatttggggtttgtaaattttggggccatgtacatcttagtgtttgcaatgaaagcattagtttgaaaattattttactttgttctgtattttaaaattacttttcaaggtttatgtttttttctaaattcaaaattcacatttcaaaagattctaatttcttagcatatcaagttaagtggattaaaataaaataactttttaagaatttcttgagcagcatgtcattaaaaatacataatatacatgtatacatgataaaacaatattaagatcatttttatacttaaaatgcaattaatagaaatcaatgttccaaggcggattctgattttttgtggaattttgacttctttgtattgttagaacaatttaaaaggatatgttcttctgttttccctttccctcccaccttcttttattttctcaatatatttaataaactattttcataccaaagctccattccagataggacaagcaattcgaacactccatcctgtgaaccaaggcttgtaagaaaagacaggaaagaaagcaataactccagagcatacactgaggatccccagagtaacaagaatccggccagcagcctggtagaggcccttcattttccttggtggcttgaggccttggtctcaaagatgttttgttaccaaaacatgagcgtatgacaggcctcagtaaatagaagtttcttagagacagtagccacgacacatacgaactgttgatctacttggaaacaagattctatttgttttaccaaagatgaaatgtactcaaatagtccttggcataaatttgacacaataaattctaataacaatttatttaagagaaagagagaaaaaaattatcccttgctttggattgctgccttgattcccttcattctgccctgtcctggggagtgaccacttcctggcttaatcagattcaaaggcttgctgactgagctaattgtttctcaactcaacctgcctagtggttccagcataaagccaacatcctttgtgtacaatagatccacattcccagcacaatttcccacaaaacaaagtaaaaataagcaccctggtcacttttcattatatttaatttaaatgatttcaacccaaagcaagaccttcacctcctttcaaagtttaattccactacaattatttttgataaagatttttgatatggattcattcccaaatgggcatgaactttattatggagttttgcattgttttcactaaaccagtttcaccttattttactattaatttaattttcaattaaagtgtgatgatggaaatgtatgcagttataaaataaaataaactttgaggagcaattcatcagttgaataaaatgctgatccccattcattcttgaatcataattctaatttgagatattgaacttaggtacatttaggcagttacaagtcatctcttactttttcatgcatttgagaaaatggtgttatttgattttgactgattggatatatgtggatgtctgttcaaaaaaatatcttaaaaacacaggtcagtttctgaagccatctgaataattttcctatttaacattaatacattattcctttttactgaaataaaaggatgaaaaataattttatgaatgcaaatgaagtggtttaggacatcgattttgagtcagatggagctgtgatccgattctggttccactctctaccaggtttgtgtccttgagtaagggcaagttacttaacttctctaggtctatttattcgtatgcgaaatgggaataaaagttagtgtttatctttaatggatttggttgagaggattaaatgagctaaaaccataaatgcctagcccagagtttagcataacgaagatgttcagaaagttactcttgttaaattgggatgttccacctttggggtccttccatcgtgggacaaaggtgcacttattgtggtttttttttaaattcatcaccttaaaaacatcatgtttaactcttcctgaacaatttggtaaaaactcccaaaggaccctcccatatgtggtggaaagagaagcttctctctgattctctgctttttttctttctgcctttctgtctttaatagccattccacagtttgacccagattttgaagcagttgcattcctggatatacagaatccaggaaaccaactcatgctttctggtacagctgctatttcttatctcctctcaacactgtgggctatattctctgattttttttttctaacaccactagataaatttcacaagggcagagaccttgcaagtcttatacatcccttaaatgtatgagatattcccagcgtctacaaccttgtctgcatcagagcagatacatatagtaataagtatttgttgaattagttgattaatacattaaactttcccctttgtatttgggctctcctgtccccctgaagctgcacaagtatagagccatgtgaatccaccaccgtcaatgagtgttgatgctagtttgttccactgatatggggggggaaggggtcgagagtgaagaaagacttgtttgtattagtatttggtttgagctgttttgactttttcctttactttttatctcaaggttatagctagatggtatgtcaatatgct

SEQ ID NO: 316454 - DNA, 4001 bp, Homo sapiens
acttctcccttcttctaatagataaaaaggggataacaagaatttagatgatcagccaaaataaagaatgggactgctttcactttgtgggccccatttcacatctttttacctccaaagtattttggaattctgaattttgtcttgaagggcaggatttctaccacagtgtcaagaataaatctcaataagcaaatatctgaatgacatgatgacttttatgttagtcttactgatcaaaggacattaaaattatatatagccttattttttctttacctgtttctcaagcctgttccattgccacagcctccaccaaccaaagtctgcaaagaaggtaaagctgaacggcttagctgttgccgactagggcccctccttccaccgggcatgtccaggaaccagtctgcttccagtgccacctgtagttgcaacccaggttaatggttgtcaaccagtttcaactctgaacgacaacaaaaacatttaaacatcagtagactatttttaaagtaggcaacaaaacaacgacaaacactgagtaagcaggccttacaaaataagattttcaaacgaatgttcccagtgtctactacttacgttattcgaattaaaggactactcagactctaatgggtcaaaagcctaagttctgatctaagctctgttcagctttaggcaagtgatgatttgtgtcttttgtcaactgatttgtatcatctgtaagatattataatcaaatagaagtttacaagaaacatcacaccttatacatttccagctcaatgtttcacacttaaactacttgaaatatagaagaattggcactttataaaacattaggttttgttatcaagggatatggcttgtgagctcagatggtcacatattatctgaccttatccggataagttaacttctgagtgtgttcttctgagtgtgtttcttcaaggggggggggcggggggggggagtgtcccctgttctgcagaggttgtcaggactgaggaagtggaatgaaagggtaccagtagttcttttaacagtttaaaagtaaaactgttcgagtggtatctctatatgttagggttaaaatattgaaagaaactcttcaaggggatgcccgctccagaaaagctggtgtaaaatcatacagaaattactgaaactgcaagattaagaagcaagtaaaagataaagatcctcactggaaaaaaaaaaaaaagctcttttcatcattctacggcaaaaatcatgattctgtcaacatggataccaatgtttcctaaacaatacaactaaaacccaaggatgacactggaaaaaacccgtgttttcaaatgctccctattcctaacagccttcggctgtaaactaaccccaagtcaaacaaagcattcaaaccgctggatgcaggggctgctggtccttgctccattaacaagcaaagggaaagaaaagtgcagggaaaaaactgggacggaagaggtgagagtatgcggtgtggtggactgcaggagaccacaaacttcaacagactggtccctaagagaagtcggcagaaaggtagacaaagcagtctccgccgcacacccaagagggccgaggcaggtccaggacagccggaccttggggcagctcagtaatactcacgcatggaagagtcccagccggtggggcggggtccctagaaagcggcgacaactttacagactggaccccaggtaagggaactccctcccagcgttggaacgctgcaaaccagctgcttggacgcaggcagcccccgcctagagaatcaagaaaaggtgtccaggcttcgggctgccagactcagacccagactccgacgcagttccagtgccagagctaaagctagagccagagcctgatacttcagcacccatccctagcctccattaccgcggagctgagcagacgtggcagcgcacggcgatgacgtcagctacgcgaccgcggtctgccccagccgcgagtgcgtccccggaatcagccggcacgacaacccctaccatttgcacctgcgcagtggggcgcgccttctcctcttaactcgcggtcccgccccttccggccagtgttggccaaagcatttcctctttcggcctcagtcagctagcggctgctaggtgcgggcaccatgctactgatccttcttgctgtctcttggactccatgtagtaaccatgtacaagttatcaccgccattttacagatgagtgtagattaggaggtgtcacctagggtcacgttactgctaagtgagggagcccaagtcatgaagtcatgcgtcagcatccaaccctgcgcttattgtttgctaagaactagacagatgctgtggttacaaagcgaataccacaaaagctcagagtctagtggaagagaggcgacactaagaaaatacagtaattaccatttgttacaatattaaaagtgtgtccaaggtccagagatagcatgtaacactaacgaattctgtgggatggtggtgatgtcaataccaagaaaagctttgcagagagcttggggtttcagccaagactccacaaaggcataggggctttgtgggagaatggcagtcctcctggagaagtggcagataaaaaggtaaagatctgtgagcaacgtcatcttgagttcaggaattgacaatagtttggtattagaagaagataagagtgtcaaaaggagcatttgtgtaatctttcactccagagattttaatctccttaatagaaagttgtttgtattgattgaatgattaacctttattaagaattttgttgtgtcaggcactggattagtagctttacacatttcatttaaatctcacattttgatagcttctactatggttattattttacagaagaaactgaagttaagagaagttaagtagcttgttgaaaatagcctgcctggccaggcagggtggctcatgactgtaattccaacactgggaggccaaggcaggaggatcacttgagcccaagagtttgagaccaccctgagcaatatagtggaaccttgtctctatgaaaaaagtaaaaaaataaatcgggcatggtggctcacacctgtagtcccagctacttgggaggctgaggtgggaggatcacttgagccctggaggtcaagtttgcagtgagccgagattgtgccactgcactccagcctgggcaacagagagagaccctgtctcaaaaataataataataataatagaaaaaaaagaaaatagcctggctaataagagccagaaccagaatttagagccagaatgactgatatcgaaaccagtaaagttgctaatattcccaaatattcctaatgtcctaatgtaccacagagctgtcacttaggaatacacacaagtctccaacttaggatggtttgactcacaatttttcaactttatgatggtgcaaaaccaacactcattcagtagaaactgtacttccagtactcgtacaaccattctggtttttttttcatttttaaatacagtcatgtgtcccataatgatgtttcaatgaaagaccacataaatgatggtgagcccatgagagtataataaaactgaaaaactcctattgcctaatgatgtagctgtctttatgttgtagtgcaatgtatcctggtgtacacaaacctgcactaccagttgtataaaagtatagcacatacaattatgtacagtataacatactaaataatgataataaattactttgttactggtttatatatttactatactatacatttattgttattttagattgtactccttctacttattttaaaaaaatgaaagttaactgtaaaacaacctcaggcaggtctttcagaaggtattccagaagaaggcattgttatcctaggagatggcagttccatgtgtgttcttgaccctgaagatcttccagagggacaagatgtggaggtgaaagatggtgatattgatgatcctgacc

SEQ ID NO: 316455 - DNA, 4001 bp, Homo sapiens
tcaccttctctacggtcaagtatgagctctgaggtccttagggtctgttttacccacagattagagaattggggtgaagagagaaatgaagtaacgtacccatcagatgggagtttatctgagccctgggtccctacaggcctggctagatagaaatgctctccattcgcagggcaaaagcagcatgggcaagactcctctgaactccactgctctgagcaggggccccagaaggtggtctccaaggggacgggaaaacaggatgactagggctgattcaccacccagcactactggacttaacaaagaggcaaggagggtcaaaggcctggtctcaccttgaggacctactggggctagtttgtgtccagcatacagctggagcttttagggaggaatatggtgcagctcctgtctccacaccccttatagcttgtccaggaagcaaaacttgtggaagtgtcatagttacggactcaagagcagaatggaacactaaggaccatcattgcccctcagccagagaccacagtgtgtctggaattggtgggttcttggtctcactgacttcaagaatgaagccacagaccctcgcagtgttacagttcttaaaggcggcgtgttcggagtttcttccttctggtgggttcacggtctcgctggctcaggaatgaagctgcagaccttcgcggtgagtgttatagctcttaaggcgacgcgtctggagttgttcgttcctcccagtgggttcgtggtctatgctggcctcagaagtgagcctgcagaccttcgtggtgagtgttacaactacataaagccagcgtggacccaaagagcaaaacaacaaagcttccacagtgtgaaaggtgaccccagcgggttaccactgctggctggggcagcctgcttttattctcttatgtggccccactcacatcctgctgattggtcattttacagagagccgattggtccgttttgacagggtgctgattggtgcatttacaatccctgagctagacacagagtgccgattggtgtattcacaatcccttagctagacataaagattctccaagtccccaccagattagctagatacagagtgccgactggtgcatccacaaaccctgagctagacacagggtgctgattggtgtgtttacaaacctgagctagatacagagtgctgattggtgttatttacaatcccttagctagacataaaggttctccaagtccacactagactcacgagcccagctggcttcacccagtggatcccgcaccgggggccgcaggtggagctgcctgccagtcccgcgcagtgctcccacagtcctcagcccttgggcggtcgatgggaccgggcgccgtggagcagggggcagcgctcattggggaggctcggccctgcaggagcccatggcggggcggggcggggcagggcgggccggggccggggccggggcggggcggggggggcggggggggcgggggggcgcggcctggcgaggcacaggcaaggcgcactgcaggtcctgatccctgcctctcagggaggcagctaaggccctgcgagaaatcgagtgcagcgccagtaggctggcattgctggggtacccggcgcaccctccacagctgctgtcccgggtgctaagcccctcactgcccgggactggcggggcctctccaagtgcggggcctaccaagcccaagcccacccggaactgtagccggccctcaagtgctgcgtgcagccccggttcccgcccgtgcctttctctccatacctcccggaaggctgagggagccggctccggcctcggccatcccaggaagggactcccacagtgcagcagcgggctgaagggctcctcaagtgcggccagagtgggcgccgaggctgaggaggcaccaagagcaagcgagggctgcgagggctgccaacacgctgtcacctctcaacaggagccacccttagttaaacaagttaaaaaggctccaccttctggagcaggaggtgagtggaggggtaataaaatgaggctgggacagggtgcaggggctcacacctgtaatcccaacactttgggaggccaaggcaaaaggattgattctggccaagagttcaagaccatcctgggcaacatagcaagaccctgcctctacaaaaaattcaaaaaacattagcctggagtggtggtgtgtacctgcagtcccagctgagatgggaagctgaggcgagaggagttggttatgaaagggacttagaggttactccataggagtgggtgtccccaagtcagcccctctaattcctggtggttcaggagataatcatagctagcaccaataatactgaatcacataatcagaaacaagttccattttcaacgtgtctgggcccttctgattaagaataacatggtgtttatgactctggaaccagacagcatggatttggatcctgactgtgacttaccagctgtttgacctcaagaaagttacttaacctctctgagctctggtttcctcatccataaaatggggatagcaatcgtacctaccttattgggttgttacattaacttagctcacttaaactgcatattggtgacttattacatctaggagaaagtctctgtgtactgttaatgtgtttttaacatgccttgcccattttgagcccatgctcacttttaataaagtattagaatgtatctctgtggagacacactctaattttcagcagacaatgctatctaattagaatgtaataataaccttgttccactttcctggtattttgtcttttttaatagttattttcaatttacggcagataatactgggtttctgtcttgggtagtaacataaagtttcctttaaaaataaattatttcgcttgttggcagggagagggagaacatcaggaagaatagctaatggatgctgggcttaatacctgggtgatgggatgatctgcgcagcaaaccaccatggcacacgtttacctatgtaacaaacctgcacatcctgcacatgtacccctgaacttaaaataaaagttgaagatgaaatagtaattattattaaaaaagaaaaatttttttaagatgtgagttaaaaagttataatgtgtgggcggcaagccacccaggtgccgaggcaagagaccaaggacatgagctgttccagtataataaaatataaaacaagaatagttatactagatatagatcttagatatgattatatatgaatatcattaatcattagtttgtagcaattactctttattccaatattataataatccttgctctataatcataacctaggaaaaaccaggccatacagagataggagctgaggggacacagtgaggagtgaccagaagacaagagtgcgagccttctgttatgcccagacaggaccaccagaagggctccttggtctagcggtaataccagcatctgggaaaacgcccgttgccaggcggaccatggtctagcggtagcgtaagtgtcaaggaagaacacatgatgcttagcagaccgggaaagggagtctccctttccctggggtagtttagagaagcctctactcctccacttcttgtggagggcctgacattagtcaggctcgcccgcagttatccggaggcctaaccatctctctgtgatgctgtgcttcagtggtcatgctcctaatccgccttcatgttccatcctgtacacctggctctgccttctagatagcagtagcaaaattagtgaaagtactaaaagtctctgatatgcagaaataatggcgtaagctgtctctctctctccgtctctctctctctctctctgccttggctgccaggcagggaagggccccctgtctggtggacacgtgacccacgtggctttacctaccattggagatgacttacactctttaccctgccccttttgtcttgtatccaataaataacagcgcagcccggcatt

SEQ ID NO: 316456 - DNA, 4001 bp, Homo sapiens
aaatacaaaattagctgggcatggtggcaggtgcctgtaatcccagctactcgggaggctgaggcaggagaatcacttgaacccaggaggcagaggttgtggtgagctgagatcgcaccattgcactccagcctgggcaacaagactgaaactccgtctcaaaaaaaaaaaaaaaaaagatgctccacatcattagtcattagggaagtgcaaatcaaaaccaccatgggataccccttcacacccactagggtggcttaccataagacatacagacactaacaagtattggtgagggtacgaagaaactggagccctcatacattgctggtcagattgtaaaatggtggtcactttggaaaacagtttgtcagctcctcaaaaggttaaaaaagatttactacatgacccagcaattccaatccctagtatattcgcaagagaattgacaacctatatccgaacaaagacttgtaatgaatgtttatagcagcattacacataacagccaaaaatggaaaagctggaattacaggtgcgcatcaccatgcctggctaatttttgtatttttagtagagacggggttttaccatgttggccaggctggtctcgaactcctgacctcaaagtgatccacccgcctcagcctcccaaagtaatgggattacataggtgagccatggcgcctggccctgaattatacacttttaaagggtgaattttatagtagtgaattacatctcagtaaatctgttatttaaaaaaaaaaaaaagaaagaaagaaaaaggaaagactccacccacaggattgttgtgaaagtgaaataaggcagggagcagggcaggcccagcatggtccctgacgtgcagccagcacttgagatctctctctctctgatccttttcacaaggaggatttcccagcaaaagtaacctggtgctttagggctacactagcttgagttcactccccaccactcccactaacacacactcctgactccttagttagggctctgaactcttctgggcagtttcttaacaaaacagaagaaaataataagcacaagaccataatcattctcattccccttaaaaggaaactaggttggcttgaggcctaaaagccagggtgctctgagcagaggtggctctaggacaaggatgacagcctacgggggtgggtggggggagctctgagaggtctgccaagcccccctccccttgggccacaccacctgtgcctgagcccccaacaggcagcagggccccctccccatggcccagctctctggcatatcctccccgggggtgcctttgagctggaggcagaggacggctgacttcttccttccaagtctcccaaacctggctggcagcccagggtggcttcctccaggaagggcagagagaggggcagctgcctgtagtcactgatggtggtgcagaggctgagacatttgcgggaacacccctcccctcctaagctgttaggttccataacagtgagggtgtgaggtgccttcagagatctagctggacccttcattttacaagtagggaaactgaggctcagaaaggtcaagggtttttctgaaagtcttgcagcaagttggtgacagaattgggagctggtcacctaccatggccaagtataggcgggtggaaacctcaacacaacccaggaaggtgaatatttgtcatcctcccctgaagtagagacaggttctcacacagctaggaagatgcagagctgggactcaaacccaggtccaccaaggaaccacacaatatcaagcctattgaggacactctttctcccgatttccttaaaagctgacactccaccccactgctcacccagccccatgtcccattacctgtggtccttcagcttgtctgggcagcaaggggagctctgtgtagactatgtggatgctgggctggtcaggggaaggagaggacaggctgcacctgtgacagcaaggagggcgggactaccgtgacgttgtccctgggccccactcgctcactgggatggcattccttcctgctggtgctatcagccccaggccttcctgtctgacttgactcttccctacaacactgcggaggggcaggtggggcagctacatgcctggtcctgcctcagggccacagccatgccttcagactccaggagacagtgaaatgggggcagctgtgccacccttggctgtaccaagctctgggaaggaaggaggggacgtgtcccaggtaccccctccacccacattggtgaggctgactcaggccccagccacgtgtcccaacctgccctgcgcgtcccagaggggaaggaagatattccaatgctcccaggaggctgaggttgggcagggagcaggagagagggcctgggggctcaggagactggcagtgcccactcctagggaggaaactgggttacagctagaagtacttttggagagcacccactcgccttgtgcaagtgggaaaacacaggtccctagagaggtgagaggagcagtgtcagacctcacacagccgagggcagggccccagctcagcttgcctccacctctcacctctcacttatccagcactgtggcagcaggacaggaaacaagtcctaccacgggagcccccagccttggagggaaacaggcaaggcccaggagctgtgggctccccaggaggacttcctgaagaggggtcttccataccctaagctcagcccccagatcttgacactttgctttctcacactctgtatctgacccatctggaaaatcctgttggtcctgccttcagtatagcctgaattcagccccttctctccactcctcaactgtcaccttgatccagccagtgtcaacactgggctccctgctccccgcctcgcccctggctattctcatcagccaggcagccagggggtcctgttcaaacccaaagcagctcatgtccctccccgctcagcagctgccacactcccactgcactcagggtaaaacccaaggtcttacaagcccctgcgagatcttccccacacctctggccctctctgaccttggttcccatgacttcctccctcactctgctccagtaacactggaacatgttccagttcccctgggtgggctccctcctcagggcctttgccctggctgttccctctgcctggagtgctctccccctagaaagccacctggccccccgctcacttcagctctctcctcacaagtcacctactccatgaagccttatctgaccatcctgcttaaagtagtaaccccacaccagctttccctctgcctgcttcactgctcaccatctgctgtgctgcatattttcttgttatgtctattttctcattacgtattgctttgctacaggacctaggatcatgtctgacagtaggtgctcactaatttttttttttttttgagtcagggtctcgctctgttgcccaagctggagtgcagtggcacgatcatcactcactgcaaactcaaactcctgggctcaagccatcctctcacctcagcctgctgaggagctgggactacaggcatgcacccccacgcctggctgatttttatattttttgtagagacaagatcttgctatgttaggctggtcttgaactcctagcctcaagcgatcctccggccttggccccctaaagctctggattataggcgtaagccactgcatctggccctcaatacatttgttgaatgaatgagtgacctgaaaggttagcccaagaagtgttccaaggatattccatgcagagggagccatgtgtgagggcttagaggtgaggagcactattgtgtggaggatctgcaaataatcctgaacagccagagagtgggggccttggggatggagaggggagaggaggaagcaagagaggcagggcctcagcagccaggcatcctgagagggatggggagccacctgagagggacatgaccaaacctgtgtttaa

SEQ ID NO: 316457 - DNA, 4001 bp, Homo sapiens
cttttcagagtaggtttataaatatgcccatcatctgatctgctgggaacacatacactcccaatgacagatgacctgatacgacgttgcggagacagacaggagagccctagtttggaagcaagagacctgggttagcatcccaaccctgctactttctgttttacgtccttggactagtccctgagtctctttccttatctaaaaagtgagaggttggtgctaaacagtcattaagttcccctttagctctgggattttagaatctgttcttaagaggcaaatggattcatttccaggcaagttctaaatgtctcaaattgccttcctttcaaggacactgcctcccccacaaaccaagaacaattcagacttcaaactgttcctgaggtgccaagtaaaacgactttttagcattcactataaagccaattagagattcttcaggaaagtatatctatcccataggataaatgtaacttttttgataatatgtcaggcttgaatcgaaccctttcaaagagcctactatttaactctgctcttaatctggtcctcaatgcactttgaatcctgcccaagggttatagtagcaaggctatcttgcctctgccatctgaacagtccttgaatccatcactgattaatcatgagcaaaccctcctacttctcacgagagtttctctcggtatgtccgacacccacagcagagccttcttagctacagcaaaagaatacagtaactgaaaacagctgccttaatagtcaaatatcagtaattcccttaaccacgcaatgctgtactaggcacacttccatgcactttataaagagtatgcagcactcacaaaaaccggccaggtaagtattgctctgcctcctgcctcgaccagtcgttcattagaaggggaaaaggaggccaggcgcgatggctcacgcctgtaatcccaacactttgggaggctgaggcaggcggattacctgaggtcaggagttcgagaccagcctggccaacataatgagaccccccccccgcgtccctactaaaaatacaaaaattagccggccgtggtggcgcgcgcctgtagtcccaattacttgggaaactgaggcaggtgaatcgcttgaacccgggaggaggaggttaaagtgagccgagatcgcgccactgcactccagcctgggtgacagagcaagactccgtctcagaaaaaaaaaaaaaaaaggtaaaagtagagacaaccaggaagacgggcagagtcgataattaattcgtgaataatttaaagttgtctatgcaatatttctcctgaagatctaatgtctaaagtctcaagggcagacctgacgtaagtggggtggggaggaggagagacagttgaaagtggacttgaagaggctgggggcccgcacgggggcgaaggtgggctggaaatggggcccagggctgggactgggaaagcaacggcgcgggcaggctcagcgccgcgtctccctcggcaaatccacccaaccaaaggcaccgcggcgtgacgccctgcacaccctgcagccagcaccacacaggtcccagtcaggcccggagccgggctcccatccacccttctgtccgagaccgtgcggacgcgggcccggataccagacccggattccagtccgataagtgaacctcaattcccaacgcctccgataccggaacccgaatctccgaatctccgattcccagccccggtcctcggacccggctcccttcctctgacccgaacccggattcccgccacgcacctgcctccagcctcctcggtggagcccagtctccgcccgcggggcagtcgcgtcgacagcaagtacaaggcgaaggtgcagccggcgaagaccagaaggaggccgagaagcgggcgcatgtcggctccgcaccccggcccgcggggcagccgagaagctcacttgcactccgggacgcagcggcgggcggactgagcccgcggagcacgttcactgacggaccagggaggggtccgcgccgagacccgcctccgaaccaggccccacctcctgagccaggcccccgcccccgattctgactccgccctctctgtccttcggtggagactccgggaaaaacctgcctcccagtctgccctctctccgtctgtctgtgcttgtttttctacgtttatccctgtcgctttccccacttattctgcaggcatggcgcgcccccagtgccggcttggtgccagggctgggagatccgggggtgaatcgtgagcccggcccacagcgagcttgcagtctagagatcaaggcagtcttgtccacaacctgctgtcacataaagcaaatgtagctggtgtagcaccaggggctgcaatcaagtgcggtggggcggcaatagtgaccacggaaataatcagaattgcttttaattcagctcctactatattcccgcatccctgagcctcacaatcatcctccaaggtaggtatttttgtctttctctaacagatgaaaactctgagtttcagaagaattaaatgacatccccccaaaagagagacagtataagaatccaagtcaacctgagtccaaaaccagtggcccttaacactgtgtggctttatggaggacatggagtttaagtttaccttcaaggatgagcaacacttttcttcaagcagaaaaagaagggaatgggtgaacacggtcccaggtaaggcaccagaatccagtttcagtgaagcctaaggtatatgagaaataagtgagaatctggggacaaacaagagtgcactgaaggcaggctaaggagttagatttttaataatgtagatgagacaccaacagaggtgtttaagtaagagaatgatttcgttcctgttttaggatgttcgctttggcagatgattagaatacgtgctgacttgatagccacaactgtcctgataagaaagtacgccggcctggctgggcatggtggctcacgcctgtaatccgaggattttgggaggcccaggcgggcggatcacttgatgtcaggagttcgagaccagcctgtccaacatggtgaaaccccgtctgtactaaaaatacaataattagccgagcatgatggcatgtgcctgtaatcccagctactcgggaggctgaggcacgagaatcgcttgaacctggaaggcagaggttgcagttactttcccgacattgcaccactgcactccagccttggcgacaagagcgaaattttgtctcaaaaaagaaagaaagaaagcactcaggcctgacccaggaccacagcagtggacatggagggaggaggctgggggtagttggattggtatgatatgtcactgagtaaacgaaggaagggacagaaagagaactccaaagtgtcaaaagcctggacaacagagagaaagcatccttgtcctatcatttaaagcacctgttgggccaaatagggagcacctttcagaatccatgtgcacaagatctcagcaattctacgtccaagaatgtaacctacatccaagaatgtactggaatttaattccacatccaagaatccccataggtagcaaagatgtatatttaagggtattctctcagctttgtttttatgttaggagattgggaacaacctaaatgcccatcagctggtgactggctaggttaactattcacaaatggaatactaggtagcctcctaaaagaggaaagcaattctacatatcctgatacagtgtggtcaccagatagatggctaagatacaaataaaacaaacaagttgcagtgttagagtatgctatgtatcactcctttttaaggacaaaaagaggatatactttaactttttaagataccaaagtatttatttatttaaaatttttttcacagaattgttatagcatgtagaaccaaaaattatttacaaatgaaattattcaatgtctgagatttgtgtcaaaataatggtatgggggtttagtgagtaagcatg

SEQ ID NO: 316458 - DNA, 4001 bp, Homo sapiens
attttctactgaacaccggccccttattggtcccacaatgaccagtgcttgaagatcagtcccagagggccaagtagttcttactccgtaggtagtaagcctagggtagagttcttatttcttgagatcaggcaaagcatgaattagcaatgtctgctctgtattcccacccccaaatcctatacaagttacagcccactaaggctgaccccctctgggtattcttgagcttttactctgtgttaggtcctgggctgtgtttaagcattctcatttattccttaacttcattttacagataaagagccaggggcattaagtaaccttcctaaagtgctacagcggtgagagccaccaggcttcacaagcaggcagtgtacctccatgctcttaactagggcacagccttgcctgagggaaacaccacctcagactatttagtgatcccagacatcccttggagaacttgcaggtattttctttctttttttttaaaggagaaagtctcaagagaagagaagatctttagaagcctcctacacaaaggatatgcagtcccccttgcttggtggtgagttagaaacctgcctggagacaaggcggcggggggggggggtgcggaatctaaatatacttattacttgtaatggtttctcagcagctgaacacatagtgtcttgagaaaaaggtgcttgcttataacttacaccagggtgttcaattttttggcttccctgggccacactggaagaactgtcttgggtcacacatataatacactaacactaatgatatatgatgagctaaaaaaaaaataataaatcgcaaaaaaattcatgttttaaatttgcaaatttgcgttgggccgcgagttggacaaccttgtcttacacaaagcagcatatgggccagtggcaacctgcttaaagggttatgaaggtctagttcctgacaacaaacttcacggcccatacaaagttattcattttactttcgaccacttaccccatgaactacacccaatgggatactaacctgaagcatggcagctactactggattagccctaaataggcttaaccctaaataatcagtgaccactgtccaggtcagaggctaaccttgggctgcagacgcaatgaaacccctatagcaagcagaggctggtctacgacgtgggagggagaggcagagatacaccttagcagacgccaggatgcaagtttaggagttctcagcgtcaggaaaacatccagaacgtctctgtcagtatcctcttatgcctacagtatcccaaactcccaattttcctggtagtggggcagactggtcatctggtcacaacacccgttaattacggagtaaagggatgggcaagaggcttctcaccttaagagtcacgtggagagaaatgctcaggcacaagggacttaaaatgagaggtagagggtggatgtaggaggtgtagttcttccccgagagcgaactagcccaaccggagaaaaggttttaggtccctggtaagggaagaggcctcagtccccgacgtctcttaccacctacactggacgagggtttggcgtgattagaggcgaaacactctctgccaccccagctgaccgcagcgccgcccgcggcccggggccccggcgggacagaccggcgagggtgcggcggcgccctgcgcccacccccgccccaccccaagagccccgcgggccccgcagcgcccctcctccgcccagcggcgccccgcccgcccgcccgcagcagcagcaccaacagcgccccgggctcgacctcgctgccgaaggccagcttggcggaggcggcggccagggccccgaacgcgccggcgcacagacagttgaatacgccccaaaagcggcgccgcatcgcacccgcctggaggtgcggagggaattccgcgggggtgtcagggtacgcggtcgcggacacggcgccgcccggaggccccggcctctcggccatgttgcctgctgacaccgtgcctggcacccgctgcccgcagggcagagcgcgcgccgcgattggatggcagcctcacgtgacgcgacgctcctgtgacgccacgctccggcaggccccttgggaatcgctctccggcgcctcggagggggcgggccaggtggcagagaccctgggctgtggcggcctccggcctaacctgtagtaggtttgtgctctggggaggacgtcgggacccgaggcctgaggccaagccgggtactgtggacgctgtggtagaaggtaaacttctcgcggcttagccgtctccatcccggccacccggctcccggtgaaacttattaaagatgcctaacgggccccgcgccggcccaccgagtccatccacgtcgaccaggcttctccgctccaccctccagcctgaggaccgccggaccaagagatgcctcggcagagggcgctggggacctccagacccagaaagacgccagagccccatatggggacaagcgcatcacagaaaaccgaaaaaatgaggatctgcgatgagaggaagacaatgatccataatcaagccacgcagaatcaacatgacttctaatctcctgttatacttacgtatgtttagaatgtttccggctgggcgtggtggctcatgcctgtaatcccagcactttgggaggccgaggcgggtggatcacctgaggtcgggagttcgagaccagcctgaccaacatagagaaaccccgtctctactaaaaatacaaaattagccgggcgtggtggtgcatgcctgtaatcccagctactcgggaggccgaggcaggagaagcgcttgaacctgggaggtgaaggttgtggtgagctgagatcatgccattgcactccagcctggccaacaagagtgaactccgtctcaaaaaataaaaataaaaataaaatgttcccatttaaaaagtacacgtccttgaaaataaagtgttgaaatgtataaagtgctatttccactctccaggaaaatcagtgttaatagagcatttttctatatgtctatttagttatatatagttaaaatgttaaaaaaattatagaatatgtatatgcattttttaaacaaaaatgatttcacagttgaacatactgtttagcagcattctttttgtatcttctgtttagcaagtttttatggaagtccttccacaccatgctgcttctctcacagggtggttttgtggctcaaataaaagcacggataaggccaggcacggtggctcacgcctgtaatcccagcactttgggaggccaaaggtgggtggattacgaggtcaggagttcaagaccagattggtcaagatggtgaaactccatctctactaaaaatacaaaaaaaattagctgggtgtggtggcgggcacctgtattcccagctacttgggaagctgaggcagagaattgtttgaacccaggaggcagaggttgcagtgagccgaaattgcaccactgccctccagcctgggtgacagagtaaggctctgtctcaaaaaaaaacacggataatttcagtaacgccaatatggtacaaactgtcccattttgcagatgaggaaattgaggctcagaggtctcactgcaccactccattgagtaaggagctgctcaaagatgataccctctgaaagctcttatcaggaaatcaagaggtgttgcattgatcaactctgcatgctttaaagaatgtaaagcaaattttcttagaacaaacgatgcctctactagcactaaaggttaagcatctcagagccacctcctctgtaaagccgtctctgctactcccctacctttgtaccagtcctgtggttgttcctctggttgtctgtttctctgctagcctgcaagctccttgagggcagggactacatcgttgttaatctccaggtccccagccctggtgatgatggctgaagtgatgccatcctcagacactgctgggaagtgatttctgcctctaagaa

SEQ ID NO: 316459 - DNA, 4001 bp, Homo sapiens
gattctgtttactcacttataaagtggagaggggaatagtaccttcaccacaggtactgctgctgctgtactgattgagaattttgttgcctccctgctccatcccgctatcttcttcctcacccagcctagtggctgctgtaaatgtgtactcagctactggatgaatcaaaaaatgcttggcagcagagaatactcaaatgcatgtatattccttggtgaggggtcaggtctcaatgtacccaagatgatctctatccactgggaccatttgtgctaccctgcaaggacaggcttgttttcaagtattaagtacctaccacacatcaggcactgtgctaagcagtctcccttaaatatcacagtaactgatccatgaggctacataaacctggagagatgaaagccacacagctactgggtggaagaatctggattgcccccaggtctccctaactccaaagcctgcccttttcagcatatttccgtgtcacagcatgccaagccggccacgagagcttgggcaagtgccttcccctgctagggaagttccccatctgtaaaatatggtggtggtagtgatgggagcagacaaagagtccacatactacagacaggctggtctcctgactgccctctcgcctggccgagcctgagtctctccgaatacctctgaggcttttctaggtacaacattcaaggcttctaaccctcctgtgggcccgaaatgtcctgggagtgtggatgatactaacccgagacaaagtgtactagggctgtgggtgatgcacaccctggcctctcaaggggtgtgggaggcagagaggacgcttggggacagaggcggtgtctggaaatagggtgtgacaggcaaggggagagctgctaggacactctaccaaagcaggagggagggtgtgtctggggctggctgggctcctaagcgggccctagaagcactttcacagaggaggggagaggtgagtcaccagcttctcccacacccagcgccctggtaggaggcgctgcttgttgaatgaatgttgggcttaaatagtttcccgagaaaggctagttgcagggagaagaggccttgagggaacagccctcagccaggcctcctccaaccaaatccttgctagggggaggaggggccccgacagtagagaaatgctccctctcccccaactccttcgctcccagcccagcctaagctttttggagcatcacagactcggtttacagagactccctagggcggagagctctctgcccgcctggacagccctgtctgtccattgctggacagctccacttgggctggatcgccttcctccctcccaagggactggcgccctctctgaggtcgcgtccagctctcataatgcgcaagtttcagggccccaaggtacaggagggaactgggaatgcaaggaggggccgcggagaggcgtacaagcagatcccagtacgggagcaacacctccgagtccgcctccgcacgaacgccgaggacgaggcgagccaaggaacacggacaaaagaagcctggacaggccgcgagatgagcagagggatgagctggcgaaggcacagacacggcgagcagagggagatgcgggcctagccgcacggaggagctccaggcggcgaaatggacctagaggaccccggggaaaagccccagggcgacggggaagcctgggtgtggcccggctggcccggggatactcacattcgcggccatggtgggacccggctcgctgccgccgcctcgcgctgttcagctaggaagtgggctgacgactggagcgtggtgtccagcggcctcttgccagccccagcttcgaaaatccgcgtggactccagggccaagcgggacttactgcagttacctccccctgtgcccagtgtttctgcgcatgcgcgcggcgagacgtcctggaaactatacggtccgggacattgcagtacctcattgatgcgcctgcgcactgcaaagctttcggggaaatgtagtttctactgcctggagagctgtcgaggagcgcgcgacctgctgggaaatgtagtttccggctgaggttggcctggccgcggttgcgagggcgccgaggcaggcgcgcggcgggcaggcctgggagggggcgggtccgcgcgggcttcggaggagcccgccctgccagaggagagggaggtcacggcgtaaaggtgcagctgccgccaccgccgcttctgcaaggtctcagggacgggctgcagccatgtcctattgccggcaggaaggtagggagggcgggctgccacggagaccggcctacgagggcctgcgggagacacgcgggccccggcgccccgcgaccacgccgggcgcgggccacctgaggcgcggcccaggtgcccaccctgggacactcggaggcgggccggctggggggtcgctactcctgttttgcggatgagaaaaccgaagctctggggggaacggggctggtccaaggtcacagtgaagcccgaaccctgacctcagaggggcctgtgcgtaggaagtcgtaaactaggtccggttggggcacgggaagtgccgagcacgttgcgtgtggctcgaaactgggaatgtatggtggttaattatcactaccgctcctgccataccccacgtgtttacattttgcacgcgcctttaaaaggcgcgtcccgaaaagttgccactcggggtagcgtgtgctgtgctggagtgctaggagttccactaacgggaatgtttttgagccccctgctacctgtcaggcactgttcaaggaaacttgcctggcttgtctcacagatctcgctgcgacctttgtaagtcaggctctgttgttggtcacattttactgaagagtaaagttagacacaggagacatggctaaagccactcagccagcaaatcgtggagctggggtttgagcctgggcattgtgaccccagaagagccttatccaatctagtgcccagtggattgcagggagaaccctgcctacctcccaccccaaagttgagctccgaccacctactgcttccttgatgttactctacccaagagctcagaagtacccgagccacaggtcggagggcctccccacacactgccacaaactggctccttggccctgagctcccacctaacccctccaggccctggtatccagtgttgtaaaatgagatgttgggcttcattgatacggcaaatactcatgaagcaccttctctgcgccagagaagggggatggatggttataaaactacagagagagttggaagtcccccagaaattctttggtgaatactccagctccgtcagttaattcaagcaatctgaagcccagagaaggaggtggcctacctgtagttacacatccagttaggagactagctcagcctaaaattctgagccttttccctggtggcgctgtctgcttctagaacctctcctcctctgggtcgtaaagccataagactcactctttaatgagtactattatatttccgctgattactacttaatgtgtgccataagcaaaagtcctctgccctcaccactcttgtttttaatttcgagtctttctctaatttacttcatttagcaaataatttttgagcctttgggtataatgaggctgtgctgataaacaagaccctcctctttgaggatttacaggaggcagttttctctggaaaggggaggctaggtccatctgcctccaaaacatggagccctatcttttcctgcttcaaagatctctcttagttcggagaggagtgagaattgaaagcactcacttataggccttccttagtatttatcttgtgcataccactgtccccgtaagaagtccctaacttccccccctccgccccccactgatcctttatgcttcccataggatttttaaaaaatgatcccaaactgcttactgtatcagagcttatgtgatctggccctgtctgcctttccagcc

SEQ ID NO: 316460 - DNA, 4001 bp, Homo sapiens
ggtggatgagtacagagggctcttggctttctaaacatttcctgacctgctggcccaagcctgaagctcacagtggcaacatcaacttcagtctgggccctgggctcctaaaaccaattgaagaccaaggagtggagattcttaaattggagactcccagaggcggaccccaattagaaataatttatatcaaccctcccatttgagaggacaaaactgaggcctctggtgagaaggtgagttaatggtggtcttctggcttcacacgcgggggctttgctccgtaccctgttgttctcagccacttccccagctcttggggccagggtgccagctgaccttaacccagcccacacaccactccgaagacacattcttctaagagaaaggggagcaggggaggttcagggatggcaaggccctgaaaacaaatgggtatgtccagatcccaggcagggtgagaagcagaggctcactcttaacccctccaaggttggcaaagtgcctaacagtgctggtctgaggacaactgtgaggaacaaaaggataatgcgtgtccagcgccttgttagtttccagcctctgatctgaacagtttaatctctcttaccagcctgcccctttccaataggatctggggttttggttctttcctttcactcagacaagttatttaacctctcagaacctcagggttccctacagaaagtgggggtaacagcacctacctcctggtgctgatattgtgagtggcaggcattgaatgagttaatgaatgcaacactgggcctacagtaaatgttctaggcgtctttttatttgtattgcagtactgggtagtggggctgcagaatctctgcaatacgaccaaacgccttaggagaatatccactgagtgcctacagggagacagttctaacctctcccaggggtgctggtcctttctcccctgccagggaatgcttgggcggcaccatcctgagcactgctagtggatttccatgcctaggacagagcggctgaggacctggagattcactcttagaacttaggctaccgtgggcatctggacaaaccagtccaggtgctggacagaccagggcaaagacaggccagctggatcatatcactacctcccttcccacctaagaggactttgggtaaactgaggccagaaacatcaagggacttgccaaggtcctaagagttggtggcctagctggagcaatacaaatgatgtttaatgagcatttactaagtgctttaacggtactgattcatcgaatcctcccatcatcctatgaggtattatctccggtcataggaggcccagagaggttctggagcttgcccaggtcacactgcgagtcaatggcgaagggctgacaatagcacccagggctcgcggtgtcctcggggccccatccgctgcaccacccagcctcctccctttggctcacagcccagcttccctgtgcgtgggatccggaaagaagatcccacttcagtctacagagcaatgttccattggatcctattactgagccatctccttcatccccctttccgccccctcctctaggtttccgagagggagcagcaggggattggcgcccgtttccccgcccgacagccccccgacccgtggccccattacagcgcgtgggcggcgatccagcaggaggaggcgcagatccacaggccgaaggagatgcagacgcggtggcgggcgaagcagcggtccaggtagtcccagtcccagagcgcgggcgcggggctgggcgcctcccccatggcgcggctgggcgcgcggcgcggggccggggacctgggcgcagcctccctcgccgcgggcaagccccgagcgccgccgccccgcgtgcccttctctgggttccgttccgccgcggcgcctccggccgagcgcaccgaccgcgggcagagaagggcgcgctcccgggcgcgggcggcggcggcgaaggcgccggggaaaagtttccgggaccgcgcgctccccacccctcgcgctattgtcgggggtcggcagggcggaggccgccccccagcggcgggagccgggagctgcgcgcgcacaaagactgcggcccccgccccccgccgacctcttcgcggtcacccacctccaacatcctggccggagcggggcgggcggctgggctcgcggacggccgagtccctgccggtcgctgtaaggcacggcgtcccttcctgcgtattgtccacatttcctgagccaacagcaattagttgcgctgctgaagcgcatgggtgctgggatcccgaggtgaagggggcgtggtcctgatcgccgacagggcgcagtaaaaagggtggggtgcaagaccaggaaggaggaaacaaacgtgccggagaacaaatacccccacatctgcctctcactctcctttctgaagctgccaacggcaccctccgcccccaggcagtcgcccaagccctgctcctggatgtcatcctagcccacggccccgcagccaagagctggttatctctgcaaccggccgcctcctgtccagccacacaccgcacagttcaagtacacagggctgtttttcttgagagtaaactattattgtaatttttaaatctccttattgattttagtaggtttgtttaaagcaagacatgacttgaaaacaatatttctatagaaggagcaggattgaaaaaaagaaaaaaaatcttttttaattttcaaaaactacagctttatttagatattatttatatgccataagcatagtctttttttttttttttttttttgagacagagtctcactctgttgcccaggctggaatgcaatggtgcgatctcagctccctgcagcctccgcctcccaggttcaagcaattctcctgcctccgcctcccaagtagctgggactacaggtgcccgccaccacacccgagtaatttttgtatttttagtagagacggtgtttcaccatgttggccaggctggtcttaaactcctgacctcgtgatctgccctcctcagcctcttaaagtgctgggattacaggtgtgagccaccacatccagcctacatagtacttttaaaatgtacaattctggccaggcacggtggctcacaactgtagtccctgcactttgggaggctgaggcaggcggatcacttgaggtcaggagctcaagaccggcctggccaacatggtgaaacactgtctctactaaaaatacaaaaattagccgggcatggtggtgcgcgcctgtaatcccagcactttgggaggccgaggcaggtggatcacttgaggtcaggagtttgagaccaccctggccaacatggtgaaaccccatctctactaaaaacacaaaaattagccaggcatgatggcaggcgcctgtaatcccagctactcgggagactgaggcaggagaactgcttgaacctgggaggcggagattgctgtgagctgagatggcgccactgcactccagcctgggcgacagagcaagactccatctcaaaacaaaacaaaaaataaaatgtacaattcagcagtttttagtgtatccatagcgttgtgcaaccaacatcactgtctacttttagaacattttcatcacccccatctgaaaagaacccggcccactggcagttactgtccactcccctcaacactcgcagcccaggaatcgcaaatctaccttctgtctctatggatttgcccattttggacattccacatcaatggaatcatccactatatgacctttctgtgactttcacttagcatgttttcaaggttcattcatgttgctgcgtgttatcagtacttcattcctgtttatggctcatcataatacatggtatgggtatttttataccacatttcgtttatccactcattagtgggatgtttggattgctttcacctttgggctattatgaataatgctgctctgaacatttgtgcacaagtttttgtgtggaca

SEQ ID NO: 316461 - DNA, 4001 bp, Homo sapiens
cactctgtcaccagagctggagatggctggagtgcagtggcgtgatcttggctcactgcaatctctgtctcttgggttcaagagtttctcttgcctcagcctcccaagtagctgggattacaggtgcgcaccaccacacccagctaatttttgtatttttagcagagacagggattcaccatgttggccaggatggtttcgatctcctgacctcatggtcaacctgccttggcctcccaaagtgctgggattacaggcgtgagccaccgcgcccaggctgcaacttttaattattgtactaaattcccatctactgctttctgagccggaaattaaagatccattctatccagctctcccatgatagtaaataacatatgacaaaagtctcaaatccaaaacattggttaaacagaggggattatacatgtttcagatggagtgggtctcaggccactcacttaactgaatatttttcatcattctgtttctaaatcctgtaatgtataccggaactatctgcaagcatgtacatataacaattttatattattttgatagaattattgttttaatatacaattataaggtcgggtgcagtggttcacatctgtaatcccagcactttgcgaggccaagggaggcacataacctgaggtcaggagttcaagaccagcctggccaacatggcgaaaccccgtctttactaaaaatacaaaaattagctgggcacggtggcagccatctgtaatcccagctacttgggaggctgagtcaggagaatcacttgaacccgggaggcagaggttccagtaagccgagatcgtgccattgcactccagccttggcgacaagagtgagactctgtctcaaaaacaaacaaacaaactacaacaacaacaaaatatatagcgtatatagagtatactatatagcatacatagagcatatacaccatatagcatagtgtatacatagcatgtatatagtatatataccatactatatagtgcatatatactatatagtatatatatacaattataagtttatgaacacacaagtggtctgtcacatgtttgtttgtttttaacaattataaaggaattcaggtctcccactatggataggagaataccgaaaagatatatatttggcttgcaactacctccagatttaagtgaaaaatccagcaactacctgcataacccaggttttacgtaatttatattagacatcctattaacagaagcaaacgtgttaattctgaaaagatcagataattttctcaatctcccatcaaaacagtcccagagttggggataaaaaacgattttggctttacaaatacccacagtattttcacagaaagaaaatagagaaataaatttatcaatagattcaattttggagttagaggtttacaacagaatatcagtcacattgctgctcccaggatatttaaaactagctcaccaaaaaaaaaaaaaaaaaaaaaagaatagcaaaccaaaaaaattaaattaaaatgttagtgaaacggaagagaagggagcgaagggtccagtttgtcgcagcaagtgttacttttctccccttgatgaagagaaagctggtgagaacagtaaaaagacacaggatagagatcacggcaagagaaatatgatatccagcacgtatccaaaacttacccaacttggtctgtttactcaacactttatttttcccactttgccagcttaaaatcagacagcggctgggcttttgttgttgctgtttctgttcttttgatcccagagccccatgaaaattaaaccgtgtgttggatgggatctggccacgtctcgcattgggtggggggaggaatttttaaacttgggtccctagtcgcttctttgggaaaacgaataaataataagtggcgagaaggagaggacgtgggggacgtgctcggctgacgtcggcccgcgaggaggccgcacagctgtccagatgtgcttcatctgttccccccgcggggcacgggcctcggcggccgcggctggcacaagccccagctcattggtggccgcagctcttcacttgctgccgattggccgggcggcccgccactccggagggcctcgggcccgcccctctctcaggcccgctggctgcatcctaagggaatgtggaagtgcagcgccgtcgctgatgtggcactcggcggctgcgcggccgggacggctcggggcagagagggaggttgcctactcccaggtcttgcccctgccccggccctgttatgcccctccttttagacagaccgctttgtttaaacaggatgatttgtagccgtttggaggctgaaaataaggcggatgatttgtagccgtttgggggctgaaaataagacgcgcctggtgcttggagtggaagaggctggggctccgggctgcccacgcccccaaagggcgttcaggccacgccttgggattcctctctcttcactttctccagggagcaaataatagggcccaagagcctgctccctggggacggtattctttctttcggtggagggaaaaccttaatgaacccttcgttgaagtccttattaaccagaattgaagttgttcctgcggagatgaccaggactgggtatgagagtggtttggcagacctgcttggttttttgtattgagtgatggtcgttgtagggaaccgagaaatactgctttgttgtgtgagaattgagaaaggactgcgccaaacgttgctttgaacttgggaaagcagttggagggttaaccagttttttgattagtgagttagaaggagaggaggaaagaagagatctgcaaatcaattgccattataatttgtgcatattgacagaaccgttccctcattgaaatattaagtgggcaagagccacactcactgggctgcacgccagggaaggcaccagaccccgcattaaacagtttttacctgcattatcacatttaattcttacaactaccttataaaatagatattaaaataatctccaagacccagcacctatcccagcctaccacagatgtctccaaacatatgtttgcagcactccatcatagatacataaactcatctgcaatttgccatccctgcaggggtcagaatttattatgagtgtccaaagctttcactacaatgataatgtcttgtttgttggtgtatttgtcatctattgctgcgcaacagattcccacaaacttagtgctttgtacaacacatgtatatcactgcacagtttctgaaggttggaagtccaggcatggccaaactagatcctctgcttatgctctcacaagggtgcaatcaaggtgtcagccgggctgcattgtcatctgcaggctctactggagaagaatcatttccaagctttctcaggtcattgacagaattcatttctttgcagctctaggactgactccccagtttctttctagatgtgagctagaggctgcccttagctccgaaagactgctcttaggctcccaatggccatccacggttctgaaaagccagagaatagagatcacaggggccacctacaagtctgtctgccacaattggatagtcagacacctcaatttcaatggacctgactgcaatgttatcataactctgtaagacccccacaaatgcaggagcctgctcagcaagtaaagtggcactacatgagtgcaaccacaacactccaatccttctggcagtcaaggaaacccacaaaggagcaacatttgaatgtagcccttgaaagtaatgtgtcatgtgttcagctttctgaatcatttgtaatctcacaatgctgcactttttatcacagaagccgctcaacagtgggctgatagtcaaggtattgattaaccctccacactcattaccatcaacaggcatctgatattgaccaaaaatcactaaaaaaaaaaaaaaaaaaaaaaaaaaagaatccttctgctctcaggaagatg

SEQ ID NO: 316462 - DNA, 4001 bp, Homo sapiens
gacagagcagtggcctctcaagggagggccttgcagggcctgggaagaaggaagccagagccagctgctgtttgatggcaggactaaagtcacctccctgaggtggtgacaaggatgggtgaagccaaagggtgtgcgactccacagtgatgggggcttggggctctcagtcccccatcagagatcctcagcatctggttccagcttcaccactgcccccacccctcttctcagctgaccaggtccctcctcagctcaccctgtgcactggagaggcccagtaccctcactcagcacttgaggccctttatcatgtgcactgcccaccttgcccatgtgcagagagtaccaaacacagcacgtggcttttgctcagaaccagaccgccacctggatttcccttcctcacacccatttcccctcagggctcagccaggttgttggctcctctgggcaacccttcctgagccacccaagcctgtcccgttggtaagtcctctcccatcacacagggagtccccaggtactggtcaggccagaggagcagtttttgtttgttttgagacaagttcttgctctgtcacccaggctggagtacagtggcacaatcttggctcactgcaaccactgcctgccaggctcaagccatcctcccacctcagcttcctgagtagttggtactacaggcacacaccactatgtgtgtgctcagctaatttttgtttgtttgtttgtatttttcgtagggatggggttgccatgttgcccaggctggtctcgaactcttgagctcaaatgatcctcccacctcggcctctcaaagcgctgggattacgggtgtgagccaccacgcccagcccagaggagcagttgtgtctccaggagggatccttagggaggaaaggtcagttggtgggggcaatggagcagtgtgagccagcctatgccccacctgcccgcccgtcctggacaccaagtcagctgactctaaaagctgaaaagggacacacggtccagacaggcctggaaagagcagacctggcccaggacctcaggctgtcaggcaaagagaggcacatgttcggtcacccactctgggtggaagtcccctttatttggatttgccgctgggtggctagatgacgtaggtggccttcgatgtggaccaggagggcatccagcatgtgcaggaccccacggagcagggtgtggtctgagattggggcccgccgtttccagggtccgcagggctcagtggtcacctgcggatgctgagaccaggaccaagaggcaggagtgagaatggtgggcagagagggagatgtgacaaggggcagtgatggagctggggagcagggagtagggtgtggggcagtgcccagatgggatgggagggagactcagggtgatagaggatcaccgagggtctgttgtgggctacagtggtcatggggcccacaggggctggatgagagcaggggtactaaaggggagagttgggggcagggtgctggctgtgggtggtggacatgggttccacgaaggtgtgtggacacagggacaatgggctgtgagctgggggtgggggtgtgggaggtccacaggccagtgtggacccatggggcagggttgggtggaagacgggctcactgagcgtacgtatattgaggcaggggctgtgggggagaaagaagagctgtgctcacctcacccttggtggcctgtgagcgccgccgcccctgcagtatcttgcggcagatcatcagcatcgtggtggtgatcatgaccgcagccacggggtagatgcggcttgctccagggcccagccagtagccaggacagctcaggccacccctacagccctccacactctttggctgacacccccagggctgcaagtccagccccacctggtaccagaggggtctcgaccaggcgtgggtggaggcagacgtcaccagcaggagcagcaaaggcagcgaggccagcacatgcagcatggccgtcgctagtgccagggccggaacccgggcacctggcaacgggcaaacgcccctcccccgggaagaggcctggctctaaggcagcaggttccagccaggcccatggcctttcatgagcagcctggccagaaactggctgtggtcagggggctggagtccagggcttgaggacaacggcagacctgggttctgggtcctgctgtcccagcgggcctagctggccccaaactgagggagcacctccttttgaagctgggccctaggctgggtgtagtggcacacacctggaatcccagcactttgggaggttgaggcaggtggatggcttgagcccagaagtttgagaccagcctgggcatcacggcaaaaccccatctccataaaaaatacaaataattagctgggtatagtggcacatgcctgttgtcccagctacccaggaggctgaagtgggaggatcacctaagcctgggaggtcaagactgcaatgagctgtgattgcaccactgcactccagcctgggcaacagagtgagattttttctcaaaaaagataaaaaaagaaactaagtcccaaacagttaaagaaaccagtaactaacagaaattctttttttttttttgagacagagtcttgctctgtcgcccaggctggagtgcagtggcacgatctccgctcaccgcaagctctgcctcccgggttcacgccattctcctgcctcagcctcctgagtagctgggactacaggcgcccgccacctcgcccggctaattttttgtatttttagtagagacggggtttcaccgtgttagccaggatggtctcaatcttctgacctcgtgatccacctgcctcggcctcccaaagtgctgggattacaggcgtgagccaccgcacccgaccttacaaactttttttttttttttaactaggctgggcaccatggctcaggcctgtaatcccagcactttgggaggccaaggcagatggatcacccgaggtcgggggctcgagaccagcctgaccaacatggagacctgcctctactaaaatagccaggcgtggtggttcatgcctgtaatcccagctactcagcaggccgaggcaggggaatcacttgaacctggaaggtggaggttgtggtgagccgagatcgcgccattgcattccagcctgggcaacaacagcaaaactccatctcaaaaaaaagaaaaaggccggctgtggtggctcacacttgtaatcccagcacttcaggaagctgaggtgggtggatcacgacatcaggaaattgagaccatcctggctaacatggtgaaaccccgtctctactaaaaatacaaaaaaaaaaaaaaattagctgggcgtgctggcacacccctgtagtcccagctacttgggaagctgaggcaggagaatcacttaaacccgggaggcagagtttgcagtgagttgagatcatgtcactgcactctggcctgggcgacagagcgagactccatctcaaaatacaaacaaacaaaaactagctggggctgggtgcggtggctcacccctgtaatcccaacactttgggaggccaaggcaggaggatcacttgaggtcaggagttcaaaaccagcctggccaatatggtgaaacttcgtctctacaaaaatacaaaaattagctggacatgatggtgggtgcctgtaatcccagctattcaggaggctgaggtgggagaatcacttggacccaggaggtggaggttgcagtgagccaagatcgtaccattgcactccagcctgggcgacagagcgagactccgtcttgggtggggggaggtgggggaactagctgggtgtggtggcatgtacctgtagtcccagctacttaggaggctgaggcaggaagatcgcttgagcccaggaggtcaatgctgtagtgagtggtgatcacagcactgcactccagcccggggaacagagcaagagccgatttaaaaagaaaaaaaaa

SEQ ID NO: 316463 - DNA, 4001 bp, Homo sapiens
aaagtatgtagaaaacttcagtttggaggcatagttctacacattcatttgcacaatatccaaaccagagaaaatcaaaattaaatatgcaaatgaacaaccaagattatgtctgattaatttaaatacattcaaaagatgacaggaattaattttgcctcttggagaatactttatataatcccagggttatttggtatccatctaaattataccattctgaagactatgggcattttccgaaaacaaatatccttatatgtaaaacctatattctatcttatctaaagtttagtaattctaattaactggggcacatatgaaaaaacagagttactccagcaaggttatatgacatcttgtaaaaagtaaagaggatcatcacatacacacatggaccaaaatatcttaaactgaggtacctcaaatttaggtcctgacttttcaatgatgtaaaattaagaacagaaaccagaaaggagtagtcaagtacatctcttatcctttttcacacaaaggttcacatcccccaacaccagcaaatctttaccccacacatcaaatgctgaactgttccttagacttaagagtcaaaagcaactgaatgaagatccctgaaagattaagctcaatgaaactgcaaagagagacttggctattcagaaataaaatgtgataccatccagaaatcttgggtcacacattttccggctaatacctccggcacattctaatcctcctccgccgtgtgacctagagcaagttacttggccattctgggcctcattttcctcttatgtaaaacacggatataaaccaagctctctctgggagttgttctgaagatgagaaggccataaaaaagcacattacaggctcgtgcctgtaatcccagcactttaggaggccgaggtgggtggatcgccttaagtcaggagttccaccagcctggccaacatagtgaaaccccgtccctactaaaaatacaaaaagttgccgggcgtggtggtgggcgcctgtaatcccagctactagggaggctggggaaggagaatcgctagaacctgggaggcggaggttgcagtgagccgagatcgcgccactgcactccagcctgggcgacggagtgagactccgtctcaacaacaacataaaaccacattacgcgctaccaagcgcgaaatgttcactgactgttagcgattgttcttcccttccctgatgatttacgtacttcagaccttggatcccaacagtgcccgagacgcgaagcaattcgaggttcaggttcgggaaggttgtgcttggaagctgcgtcgagggagagcttgagggcaagaccaaccaaccaagtcccctgtcatccaagtccacaagcctcgcacccaggaccaaagaaagacaagggggaacctggatctgggttttccctcaggaaaacagcaaagaccgacttggaggctgaagcagcattagggaacgggccggggagaaattacttcctgaaaactctctcagcaaggaaggacccctctctacaccacttaacctgcctgcatcaagagaacagcagcctccgggagccaggaaccccgctcctctctctcttacccggctctccatacggaatggtctcggcccagatgctcggctcctcttcctggatgtccagaaccctgtcaatagacttctgggcctgggacagggcctgcttagcgaagctggagagctgggaggcgttgaaccaactcatcgcccctcctcagccggcagtggcggcggcagcaccaagcgggaaggcctcaggcctggggaagggtgcagaggaacggcttcgctccccttttccactcggctggttctgtcagcgtgtggccattaccccgacagcctcccgcgagcccgggatgttaccctcggccgttcccgcacagctgagacgaagggggcccatgtgcgcatgcgcttgcttcttccacgtacacagcaaccaaatctacgagcccagagttcggtcgacagacggaagaacagaagaacgttgacgtcacatccgggagcgcagggttgccgttagttaccgaggaacgcggaagggtttctattgatgtcgatttcgtgcttacagcagttcttagcgaaggggaagctatggctaccgatagaggtcgatttccccggaaggaatattcaagttttcgtgtgtgtgctttccaggaaaatagttcacgtgctaaaagcttgcaccttgccagcaataattgcaaagggaaattgggcctcacacttctcttagccctttgtctcaaatatttaataagctctgtattaacttggtattgtaaggagaaacacttgtttgggcttgcctaaaagacaggatcacgtatgaacactgtgtccaactcgtggaacacatggtgcataaagcacaacctctctctcaaaatagtagtaaactcattgctgcagtcaaaatacccctaatactgtggtctgtcggtgtcccctgcacaaattcctatgttgaaacctaatctccaatgggacagtattaaggggagcctttaggagatgattagatgatgatggagccctcataaatggggttagtgcccttataagagaggcccaagggagctcacggcaagaaggcaccaactctaagccagaatagcagccctcaccagacaccaaatctgccggctccttatcttggacttctcagcctctagaactgttaagaaacaaattgctactgcttataagccacccagtttatggcaatttgttacagcagtccaaatggactaagacacctaggaagcactaaagctgttatcctaacaatgtgcactgtgcatattacttaaaacataaccttttctgtgtgcattctcttcgaacatttggacatgggaaaataccttaaattggtggccttcctaatccagtctgcagctatatttggtttgggcccaagttaaagacaaaatcctaactaaaagccagatttcattcaaaaatctagatttccagctgcttttgaaaaatatgaataccaagcatgggaatagtcagccagagtggtcaccaaataattttcactcactccagtttgccacagacccctatcactcatcctattacaccctccctgctgtgattatttaccttatatgcctgcctcccatatttgaatattttaccccactgcaaggaactctgcaaaaaagaattatttttcttttaaaaaatcagattgaaccccttaagaagttataatcatcttccaataattttatctaactacagtaaaaacttgcatgttaaaactaacaatttagtcatgtacacaagtagtaccaagtaactcaagtactttcaaacagctaagtagtctgcagaggagatttggggcagattcgggttgaaattagctgtacagttacagttccaagacttctaattgtacagctttggtgaaatgacctacctaaaccatctaaaactatttattcagctctcagatagagtcaccttcttacaatgctactttgagaattattatagcacctatatggtgctaaattttagttccttcactttcaaaattgtaagctacacctgtaacttttcaggtagagcttataaatttattccgtatggttttataataaaacttatttgtcaatatgtagctagaaagattactgaaaacttaactcagtgacacataagtaaccaaaaaacatttgaacagaaaactgccatatctaagtcaaaaacaaagaatgagaacacatacatgttctcatattaaaatactagcacctacttttttagtatttgtacttaattttgtttgaagttttattcacttaaaagaaacaaaaacatggtcaggcatggtggctcatgcctgtaatcccagcactttgggaagccgaggggggcgggggggggtggatcacctgaggtcaggagtttgagaccagcct

SEQ ID NO: 316464 - DNA, 4001 bp, Homo sapiens
gatgtgggtggagctgggcctactcttactgataggggtcttgggtggacggcagcagatgacagctggtcttctcctcatgttgggccctgctggggtctgatttctggagcatggaggtccccacctccttcagagcctcacgggctgatggagggtgatggtgacccacacagggctaaggtgggtggtgacatggcccccagccctgcccatgtctttggtgcttccgtgagggaagagctaaggccttgctcagactgtaggcagatgtcaggcagatggcctccaaatgcaatttccctagaactgggaaaagatgagttcctgggggtgagggagaagagtccttggctgagaactgacttaacccccacccccagctttctgtctgcacctaggccagctcagtttctgtacccaggcctcagggcagcctgtgaggggcccaagtacgcctcacagggctcaagccagcatagctccccttacagggacactggagctgacacctgactctagcccagccttgtggtcatgccctctgggcaacagcagggacaggctacatctgggtccagggctctgtccctatgtccccatcaaaccctccagttcagggctgtgtccccccataacaacttccccatggctctgtcctctctatcccacactgtccccaagcccccacccctcaggacttccctgggcacctctcactgcctcttgcatttctgttttcctgctccctctggtccgcccctgcctgcacagcctccatcccctgctcctccctggccctggctcctgggccttctccctctggcctcacaattcagaactctaggtctggtctgccagctccctcgttggctcccctttcaggctccgcaggagtggggtacaagggggttagggaggctacagatggccccacccttcctggccccagccaggctctccaccagggctctcccccagcttctgtgctatctcagcagctcctcccacctctcccactgtgtgcctgctcccaatttaccctccttccaaaccagaactcatcatgacttgtccctgagcagaaaccttctaaagctcccggttatcaccaggaccaagtcagacttcccagtccctaggtcctgccctgcctgcccctctggacctagtgctccacatagcttctctgtaaagggtctcctcatcctgctgcccccaccctccaacttggaatgccctcgtctccatcttaaggctatgtctccccctccattagacaggggtccctggaacatctctggagatagaggctgttgcctccagaagaccctaaattcagggtctgttccatcagactagaggtccaggaaacccagggctgtgcacctccctgccagtgagaccaaaggctggaggatgggggcccagtatcccccatcagtctgggcagggctgtgtccccaagtcaggctgggaatccctaaggtcaaggtgagtctcccccgtcagactaatgttccagaaatcgggtactgtgcccttccatcagaccagggaccctaagagtggggctgagtctctctcacagcctggcagggcttggggcagggctgcatcgcccgggagactggatctctcagggcaagagtaagggatcaaacaagctccggatcaaaaaggcgtcccctctcccccagccccctgcctggagggtgacagcctccccagtccctccgtgccgcggcctcacctccaccagctgcccggcaacccccgcgaggcacaccccgagtgcggcgccgcccagcacgcagaggggacccgcgcccggccaccccgccatcttcgtgccaccgcgccgcttgcggagcccagggacgaacgggccggccgccggtcactgcccctgccagccggcgctcggtggccacgggctttggccacgggtagtcagcgagcatcatttattcatcctcggtgtcaggttcccgcgccgcccgcccccgccatcgctgcggtggagggcccgccccctccttcccgggagatcgggccgcaggctccccctccctgcccccaccttccgcatccccagggacactgaggtgggggtgggcgggagggaggacaggctggggccaggtccctaatcaacaggtccccctcccttctgcaaatgggcctcagtttctccatctgggacaagggggtgggactggaatctgctgatctaggaggcccttcccattctgtcatgctggatttgaaaaatatactggatttgagtttggggggggggcagagcgggcaggttgccatggtgacaggcgctcagggatgtcctgggctttctggcttggcttcctgcccagaggcggctctggtcaccctggacaccagagctggagagcaggggatggtatggtcagagctgccagccggcagtgttatggagggttccagaagaagccagcatcttcagccccacaggacagaagtgggctgtccctggaagggctggaggaccattttctgaccctggctgccctcaatctctgccccagcctgaacactgactctgacttcagtctaagccaggaccctgacctcatgctgaagttgacccacactgcactctggccctgaccccatgttgagccttgacaactgagggacagagggaggttctgaggagatgtagagacctgggtgggggctgaagacttaggaagaggagtggggaggcctggagttggtagactccccttccctccttttcttccttccttctattcttatttatctcctgctgctgagtgttaggagaagcagcccaggtgttgggcccctggaacccttatcaccaggggcactggtgaaggcctgcgcaggctggggatggcccagcaaggcctgccctgagaaccagggagaccctgtggctccagagccctgtgaggttctggcctggacatgccatgaatgggcaaggaccacagcaggctgcagcagggagcggagggccacctgcggtcacctgccagtgtcagggcccggagatgacagccaggcaggaaaacgagagctgttggagaaggactgcagcccaggagacccatcgaggaaacgctcaacagtgggaggtaaagtctggggactgagtgggctgggccacccagtcctccccaggcatgccctggccaggcaaacaggaactctgctaaaatccaaatcacttgttgcagcactccaatccccacttcctcatgctgctggtcacaggccaggctagggaaagccacactgaccagtcagggaggtcaccctcgggacatggggtcagggaggctggacagggtgaggactaagtgagcctgtcagtaatgcactgagcaaagcattactcctctgtttctgtttcttatccatggcatggggagggtgagactcccatgattgatgtgaggatgatatgaattaatgaatatgggagtgctggctctccttagcaggacaggcagtgctctgctgcttacaggctcccaatcacagctcagcccagaggagagctgtttctgttttctgtaaagttcatccatccatcaagaagtagggcaagcctagtgaagaaatctgaaagaaaatacaatcatatgtgtcccccggtgttccctgagatggccactgctctgcgtgggttccacttctctgcagactcctgaacacagctgagatcttacagtacactatttctagtatacttttgtacccagaactttttttaaccaactcaagtactctagatcctccttgaccccaccacagccaaatactatcacacgggcttcaaaatcaaactgactgaacttaaacagcagggtgtcccaaaagtctcagtgcagttgtaagctttaataacctcagaagtataaagctacaaatgtatgagaaacaccatttagccaggcatggtggctcacacctgtaatcccagcacc

SEQ ID NO: 316465 - DNA, 4001 bp, Homo sapiens
tgtaaaacagtgcaactcttcaccctaaaatttggggagaaatactattgtttttcaaatatatatattgtttattaacgtgtaatgatgtagtatttcttaacaaatagtttaaaatattctctagggctgggcacagtggctgacgcctataattccagcactttgggaggccgaggcaggcagattacctgaggtcaggagttcaagaccagcctggccaacatggtaaaaccctgtctctactaaaaattcaaaaattagccaggcatggtggtggatgcatgtaatcccagctactcgggaggctgaggcaggagaatcacttgaacctgggaggtggaagttgtagtgagccaagatcgtgccactgcactccagcctgggcaaaagagcgagactctgtctcaaaaaaaaaaaaaaaaaaaaaaaaaggaatattctcttaatttctaggacagctaaaatttagttaaaatttgagaaccgctgggtcacgaggtcaggagatcgagaccatcctggctaacatggtgaaaccccgtctctactaaaaatacaaaaaaagaaaaaaattagtcgggtgtgatggcgggcgcctgtagtcccagctactcgggaggctgaggcaggagaatggcgtgaaccctaaagaaatgtaaacaaggagataatggaaagctagactgctggtatctttctttagctgtgggcacagaagcccaagagggacacctaggcacctgaaatgagaattcctggggtgatgccagcctccctgtgtgggcctcaggtatggcagccacagggcatccaccctgacccaatgacgctgcacaagactgatgagctcacatcagacagattgaccctgtccacctgttcctggttcataaatccttctctctctccctacccccactcccagatactggttaagatctgcctttcccctagccccttaccctgccactgttctcctgaactgtgccccagttccaccttccccagtggttctcacagctggctagctctgactcctaaggtcctacgggccttctggacaagaaaactctgtctacatactggggtaggggaaccacagacggggtgaagagggagcagcaaataatctgtgctgactttttcccaaaatgaaaacattttcagcagctgttttccaaatacttaagatgttcaatcttggttgtagataaatgtaccacttttctctgccctaggcacgttattgaaagcgttattaaagggtgtaacttacaagtcaacggtgtcaaatgctaccagctcttacttaaagcatactgcaggctcagcccacctacaccctggaggaaccaaagttggtccgcggaacgtgcagaggagcagcttgcaactacccactctcctttccgcaggtgtgatgcaaacctccccaggcagcgctttggagcccctcagccagtcgcctcagctcggacgcagcgagtgaagctgtccttcctctcccaccaactgtgcacgccccgcacctcacctattcgcctcgccagccctgccccgatcaacgatggcatcccccggcagcctgcctattccccccctcaacctggacccccaaacgccgaaggaaaacggtcccacaaatacaaagaaaaacccaagccaaagggcaggcgacggggagtggtgagaaaggaacaagatgcacgaagagggagagcacccagaggggaaataacccaatgttcccactgcaagggcctctcctgaccccatttttctccttccggagcgctccgcagagcaccaactgggaaagcgagggcgccccaaaccagagccggaggcaccctctaacccgcgcaacttggaatcccctcccggaaagccaacttaggaaatgtttacacgcacctcgtctcaacacctcgttacagatggggaagtggatccaagcgcaaagggcggccggagcggaacgcacaagcgaccgagctgcctggaaggacgcgcgccccgcccggcccgcccccgacgggaaggccggtccactgcctgcgttccgccggccgcgagcctgctggggggcacttcggggctcaggctccccgccctgcgggaccgcgggtggctgcgaccccagcccggttccccgccagcctgtcccctagcaatgcctccccgtacccgggtcccgcagacttacgcgcaagccgcgcgtagggcccagaagcagcagaaccagcaacagagggaggatgcgaaccaggaaccccggcatgaccaccagcctcccggctctgcagtcggcgcccaggccggccgcttcgcgtcacttgactaaggacccacggcctggcaccgcccctcgtcggcccagcagccagccctcgcgcctgctcagccccgcgccccgccccgctgtggccgagccgggcgggtgggggcggctaggaggctgcgcgccgccgcgtgactccaggatagtactatctgggttttgcaggcgtcttccctgggaagggaccctttggaactgcagtccggagggcctgctttcagcagcttgataacgcgcctcggggattggacatgaatcatggtctccctgttccctggctgccttgagagagcagaagagggaaattgttaatcattaaacctaaacgccctagatggaatccgcgtctcatatacgggctctttgaataactctaagccgggggttagcaaaatgtggtcggtccctggagccactgtatcaactcacctggaacttgttagaatgaaaatcctgctcacgcctgtaatcccagcactttgggaggccgaggcgggcggatcgcctgaggtcaggagttccagaccagcctgaccagtatgatgaaaccccgtctctactaaaaatacaaaaattagccgggcgtggtggcaggcgcctgtaatcccagctactgaggaggctgagacaggagaatcgcttgaacccgggaggtggaggttgcagtaaaccgagatcgagccattgcgctccagcctgggcaataagagcgaaattccgtatcaaaaaaaaattttcttttttaaaataaccttagtttatgccttggtgttccaaaaagcctttttacattgtataacaaagtagccaaaattctatttgttcactcctttctcctttcctaccggacatgtccttgagagattgagaaagtatcagaaaggacatttcattgagagattgagaaagtatcagttactggcttttcttaggtttttgttttttggtttggggggttgtttttttgttttgtttttgtgttttttgagacagggtctcactctgtcacccaggctggagtggggcgcaatcacggcttactgcagctttggcctcctgggctcaagcaattctcccgtctcagcctaccaagtggctgggactacaggcgtgcgccaccacacccggctaatttttgtattttttgtagagacagggtctcaccacgtttcccaggcaggtcttgaagttctgggatcaagcaatctacctgcctggaactcccaaaatgctggaattacagacatgagccaccgtgcctggcttcttttcatgcctgtagtaccaattccgtgtccttgcactgtgaagtcctttccaagctctgcaattctagttcagtattaaagaacaagggctctggaggaagtacacttgagttggaattccagctctgccacttactgtctgtgtaactgtgggcaaattacttaacctctctgagcttagtttctttgttggtaaagcagggctaataatatcaaattcactggataattggggaaattaccagagatgatgacgataagaagcttggtatatacaggatgttagtgggacagttgatgaaatcagaattagacttgtaggttagattagtaccatgcatcaatgttaatttcctttttgggggggtggggggacagagtctcactct

SEQ ID NO: 316466 - DNA, 4001 bp, Homo sapiens
ataatttctctctgtctcctttatgggctctctgaaggaataaatggtaatttattttgattcctcagcccctaatgcagggagtgcctggcttagctttgaagctcaataaacatttgagggaaggaagggagggacaaagtgggtagagggggagagaaagggagaaagagtgagaaagagagagagagaatatttcctcttagcacaaggcccagcacatggaaatgctaaataaatgatggctgaattaaaaagaatttgcaactgctgtgagtgataggaaacagcttcccctctaagatccattcaaggtcactttagccctaggaagtgtagggaggctggggaggggaggaggaagcacggggtaaggggcagaaggattgaactcctgtccttgatttgttttttcaggtaatgtgaccttggactgatcaccttgcctctaggccgaccatataaaacaacagttgttttttggtttttggtttttttatttttatcagggaagtgcgtcctagattttttttttttttttggttgcagactctaaaattcaaatgaaagctatgacttctttccagaagctcacgcatccttctcatatcagtaagtactctacagtcagaacaataaccatgtaagaaagatcaattaatttagcattcaatcagactacatttacctaactcttcagttcagcctaatgtacaagatcctccgtagtctccctgtttacctgtttctctgtctacctcctttttcaaggccaccctccatgcccagatttcctgtatcaaaactaacctgatttctattgaaaaattcttactggtccataccagtctccctttgcttgtactgatctgtttccatgaagtggccttctctgatttttataagccaacaaactacatctgcacaaggatgttctaaaactttatgtaaaaatgctaggacagtgcaaatgtgtcagctggggaacagcagagaaaccacggcaaataagcttctttgttctgggttggggttgtgtgtgtttgtcttaatggcccattgacttgacttccccaccagtttcctcaaggacagagatcttatcttgctcaccactctgctcccatgcctaccccaggacccaacacataatgaacagtctcaagatgtatcaaatgaatgttcgggaaccagttcatgaacccttctctggatgccatccctgggcaatttggatgtctttcttctgtcatcacaagataatcacttaagcaaaaaaactcacaccttctctctagcactgaactctgaactttctgaaagtagaaaatgcatctgtgagctttctgaaggtaggagatgcatcgtggtgtgtttgatgccctacattctgccaagcaaatcacaagtgatcaatttatgtgcatataagtgacctgaaccgttcaagacagtattccttcattctttgcctgaaagtcttcccttccaatcagattttcatatctctgagagtacatctaggaaaactgtttctctacccataacacttctgtcaccaaatgtgggggtgggggcaggggttccgcacaccaagcaactctccaattcattgcagacaccaactggatgtccaatgattcaattcaattctgacaccagctaccaagagttcgtgtcagaccccaaaggttaaaggcacattcttactagactgccccccaatgcagatcccaatcagaagtagtaggtccccaggctacccacactgctgtccaaattggctacaaattggctgttctcataaagccctcaggtttcataatttgctaaaatgactcacagaactcagagaaacactttacttactattccttctttattataaaggatacagatgagcagccagatgaagaagtacctacagcgaggtccagaagggtctctagagtaggagcttctgtccctgtggagttggagcatgccaccctcccagcaactggatatgttcaccaacctggaagctccttggtttttacagaggtcagttttaaatcattgtgcattcgtgattaagctcaatcttcagccccctcttgaaagttacaatcctctaagcatgtggttggtttctctggttacctaggggctttcagccaccagtcactttgttaatatacaaaaagacattcttagaagctctgtgttaggatctaaggactacaatcaaatattataacaaaatgtatgtatataaaccaaaagatgctcctatcactcctatcattcaggaagttacagaatgttagaagctctgagccagaaatctagggcacagaataactatgtatttcacattatatcatggtgcatgattttgtatcaaatacattaacatgtatagatggcaactccgatacaagtcaacaaaggctatacttgcagtgttgcataagtgagaactctataggaaagggcttagttatgacacctgtccaaaaggatcagtcagatcaacaaacacgtaataacagaggagagaaagatgcatgtgcaaaatggagctcagggagccggaaattcaaggttgcctagaaacaggtggtgggtggaatgaggaaatgaaacagcttagcattccattaatttttttaaagctacaaatgcattacatttctgaaccagtcaaaatctcctgagcatccttctcagctcttcccatcctatccccaatctcctcctcttgctctcctatggggagaaaatggtgttggtaaaaaaaaaaaagaaatgagaaagagaattctggcttatgtctccttaaaatatcaacaccaggccgggcaccatggttcacgcctgtaatcctagcactttggaaggccaaggtgggaggattgtttgagtacaggagtttgggaccagcctgggcatcatagtgagaactctgtctctacaacaaactttaaaagttagccagttagcccaggtgtgctggcatagacctgtggtctcagctactcgggaggctgaggcagcaggattgcttgagcccaggagttcaaggttgcagtgagctgtgattgtgccactacactccagcctgggtgacagagcaagaccttgtctcaaaacaaaataataaaaaaccatcaacaccagttttggaaatggtgtatccatattggaaaaaggaaaatcccatcagaaatacctatggcagattagggctgcattgctaatgctggactcataccataagccctaaccccaaagaaacacagatttttaacttactgatatacagccacagaagtgtccaggctatgactgctaggatgaataaaaatactgtgaagagaatgattttattttgtacattccaaaagggaacttttttcttggattgcttcttgggtttggctttgccaatgggtctttgtggtggtcgtcttcctggcaatggtagtcgtctccctggcaacggtggtcgtctcactggcagcttcttttgggcactgaccacttggactgagatattggatatcttcaaaaaaaagaaataagatatgttaccaagtagaagtagacaggatcttaaatgaaactacccagtcaggagatgttggtactaaaaggcctaaatatgactatttaagcattcatatttatgtaagtatatcaaattatttacataagtataataacttgatttgcaccaagtcacaaaattaagatcagataaactagacattactgtatacaaaccctagtgaaatggtttctattgggggaaccagcccccgatatttcaatgtaggttcttttctattttccctaagtgtcggccggtctgagaaataaagagaaagagtacaaaagagagaaattttaaagctgggtgtccggggaagacatcacatgtcggcaggttccatgatgccccctcagccacaaaaccagcaagtttttattagcgattttcaaaggggaggtagtgt

SEQ ID NO: 316467 - DNA, 4001 bp, Homo sapiens
ctcactccagttagaatggtggtcattaaaaagtcaggaaacaacagatgctggaaggatgtggagaaataggaatgcttttacactgttggtgggagtataaattagttcaaccagtgtggaagacagtgtggcaattcctcaaggaaccagaaataccatttgactcagcaatcccattactgggtatatacccaaaggattataaatcattctactataaagacacatgcacacatatgtttattccagcaccatttacaatagcaaagacttggaaccaacccaaatgctcatcagtgatagactggataaagaaaatgtggcacatatacaccatggaatactatgcagccattaaaaagaatgaattcatgtcctttgcagagacatggatgaagctggaagccatcattctcagcaaactaacacaggaacagaaaaccaaacactgcatgttctcactcataagtgggagttgaacagtgagagcacatggacacagggagggcaacacacacactggggcctgtcgggggtgggaggctaggggagggagagcattagaacaaatcctaatgcctgtggggcttacaacctagatgatgggttgatgggtgcagcaaaccaccatggcacatgtatacctatgtaacaaacctgcacgttctgtacacgtatcccagaacttaaagtaaaataaaaaaatttaaaaataaagaaatctgtttgccagaattcacaaagagcaatagacctcatgtgagttatgaatctgaacttcatcctgctgtgtgctattggataaagactctaagagctacattacagattttttcgacaggaagtatcacagtaacaaggccctatttaaaggctgttgctactgctgtggaacagatttacccatttgtgtttgaaagcaggaaagaaattttatcattcaccacttaattggttagaatctcttactgtgcaccttttaaaacctgctgcacattggactcaaaaggaaaactgaaccaacggtaattgaggaaatagactcttttatttattcatggctacagtgtaagctccagtccctttggattttattccaaaccttgttataatataaaaaaggaagtttacaagacatgtcattgctgcttttacaaaaggacattctatttattttcgcaggaattctcatgtccccataagcagagctgtcacagtgtgcactaccttaggttgttttattgttgtcattgttatttttttccattttgagctaatgtgttttatctgtgaatagtcttttacatttttgtatgctgaaaatgggcaccaaagaacctgtaaaaattatctttttcaattgaatgtgcacaaataaaagtttggaaaaggaaaacaaaagaactacaaagcatttagcagaaagctttcatgaagagttgcaatggctgatattataaaatacacatacttttaaaaacaaaaaatccctcaggagttttgttgcccacatctgctagtaactagtgaagccagttgtgtaactgcacttagtttacacaatttcttgaacttacagttttgcaaagacctcagttgttatgtgatttagcagttagagtgtacccacagagaaaggaagcaggaaagtcttcagagaggggcaagctgacatgcaaagaagcaggtaaccagacatttgctaagcgcctcgaagactgagtgcactgcactgcactgacctgcttcagctcgttggtaaagtacacgtaagttacagccacacagagagactgcaggagcactgtgaagatcacgatcagcacgcaggtctgtcccaggctgggtcccccctggacctccatcatagccatgatcctgtcagagtctgactgctgtaagtcagccaggcagccggtcactgaagcccttccttctctattcttttatagtcagtgaggaaatgaaagcgaatgagttgtttttctgggttctgtggccttggccccacccacatctattgaacctgcaactgtccctcccctttcctactgcccagggacagctcttgtctcaaagtagtcgttggaaaggagggaaactgaaagaagctcctctccttgccctcaggatccatgcaccccttatctgcactcacctcaagcccatttctctcttctctttcttgctctccttttgataatgtcctcagccaaagaggggagggattttctttgcttttccctaacatatcctcattctaccacagagctctaagcctcatggcctggctgtcataggcacaaggcctgttttctaaattataagataatttttatgacctgaaacttccatatgtggtttttctcatgctactgtgagggtgggaagagggcagggtgggagtggataaaggaaaatagaaatactgtctcatagcaatggtcttgctacataattccatcttgaatgtcagaatctaaatattgacgacttcttcctctttgcaaaccttcagacacaaattctaatctccttctcagatctccatccctaccaagacaacatgcctgtgtgttaggctggacaggtaggaagtagttgacacactcagaaaggcaaaggaaaaaaacatgtggatgttttccaaaatattaaccccatcacaatgtctcgctgtcactatccttttacagattaggaaaagaagttacagggagttaattaccctcagattcaggacccagccccaaatctccccactatcagatgtcataagctggcccagctgtatgttgtctctatatcttattcagcatttctttctttccttttcttcctttctttctttctttcttttcttttctattctttccttctttccttctttctttctttctttctttctttctttctttctttctttctttctttctttctctctttcatgtatttatttatttttttgacagaatctcactttatcgcccaggctggagtgcagtggtgcaatggcacaatctcggcccactacaacctccacctcccagattcaagcaattctcctgcctcagcctcccaagtagctgggattacaggtgcatgccaccatgcccagctaatttttttgtatttttagtagagatggggttttaccatgtaggccaggctggtctcgaactcctgacctcaagtgatcctcttgcttcaacctcccaacgtgctgggattacaggcatgaaccactgcatggggccattgtttagttattccattcttgacccactgagtcagagtttctggcagtggacttaggaacctacatttttcagcaagtactccaagagatcctttgaaacctaaagtttgggaccctagatctacagttacattcctgagttcattcaggcaccgctggtcaccatcacttcctgcccttgccttctatctgtaaatgagtctatatttaagaaaatattttcaaattttaaatttgcctctgtcaaattgccaaatttttaaatgcaaattcctttcagacacagacaaattggcaaggtagcatttttcctactaaaagttttagacattatgtgaacctaacactatttgaacacacttacactctaagtcctagactgaatgagttttttaaatcaggtgaaagatgagtaggataaccgtaatgcacaagacacacagccgggcagggcagaaacaagaaacgagagatggcagagaaacacaggggagaagaccaaagaaaaccaacttaacacctttgttataatccagaaatagaaacattacggctatgatgtacgtgaaaggcatgaaacgaaggaatgggaaacgtgcaggaagtcaacatctctatcttataagcacgtaagaaagtctagagtgtggaaataaggaggcttatctcggggtcaggtcaagagatggggtgatttgaggagttacaagagtcggctgggcgcggtggctcacgcctg

SEQ ID NO: 316468 - DNA, 4001 bp, Homo sapiens
aaatgcaaatcaaaaccataatgagataccatctcactccagttagaatggtggtcattaaaaagtcaggaaacaacagatgctggaaggatgtggagaaataggaatgcttttacactgttggtgggagtataaattagttcaaccagtgtggaagacagtgtggcaattcctcaaggaaccagaaataccatttgactcagcaatcccattactgggtatatacccaaaggattataaatcattctactataaagacacatgcacacatatgtttattccagcaccatttacaatagcaaagacttggaaccaacccaaatgctcatcagtgatagactggataaagaaaatgtggcacatatacaccatggaatactatgcagccattaaaaagaatgaattcatgtcctttgcagagacatggatgaagctggaagccatcattctcagcaaactaacacaggaacagaaaaccaaacactgcatgttctcactcataagtgggagttgaacagtgagagcacatggacacagggagggcaacacacacactggggcctgtcgggggtgggaggctaggggagggagagcattagaacaaatcctaatgcctgtggggcttacaacctagatgatgggttgatgggtgcagcaaaccaccatggcacatgtatacctatgtaacaaacctgcacgttctgtacacgtatcccagaacttaaagtaaaataaaaaaatttaaaaataaagaaatctgtttgccagaattcacaaagagcaatagacctcatgtgagttatgaatctgaacttcatcctgctgtgtgctattggataaagactctaagagctacattacagattttttcgacaggaagtatcacagtaacaaggccctatttaaaggctgttgctactgctgtggaacagatttacccatttgtgtttgaaagcaggaaagaaattttatcattcaccacttaattggttagaatctcttactgtgcaccttttaaaacctgctgcacattggactcaaaaggaaaactgaaccaacggtaattgaggaaatagactcttttatttattcatggctacagtgtaagctccagtccctttggattttattccaaaccttgttataatataaaaaaggaagtttacaagacatgtcattgctgcttttacaaaaggacattctatttattttcgcaggaattctcatgtccccataagcagagctgtcacagtgtgcactaccttaggttgttttattgttgtcattgttatttttttccattttgagctaatgtgttttatctgtgaatagtcttttacatttttgtatgctgaaaatgggcaccaaagaacctgtaaaaattatctttttcaattgaatgtgcacaaataaaagtttggaaaaggaaaacaaaagaactacaaagcatttagcagaaagctttcatgaagagttgcaatggctgatattataaaatacacatacttttaaaaacaaaaaatccctcaggagttttgttgcccacatctgctagtaactagtgaagccagttgtgtaactgcacttagtttacacaatttcttgaacttacagttttgcaaagacctcagttgttatgtgatttagcagttagagtgtacccacagagaaaggaagcaggaaagtcttcagagaggggcaagctgacatgcaaagaagcaggtaaccagacatttgctaagcgcctcgaagactgagtgcactgcactgcactgacctgcttcagctcgttggtaaagtacacgtaagttacagccacacagagagactgcaggagcactgtgaagatcacgatcagcacgcaggtctgtcccaggctgggtcccccctggacctccatcatagccatgatcctgtcagagtctgactgctgtaagtcagccaggcagccggtcactgaagcccttccttctctattcttttatagtcagtgaggaaatgaaagcgaatgagttgtttttctgggttctgtggccttggccccacccacatctattgaacctgcaactgtccctcccctttcctactgcccagggacagctcttgtctcaaagtagtcgttggaaaggagggaaactgaaagaagctcctctccttgccctcaggatccatgcaccccttatctgcactcacctcaagcccatttctctcttctctttcttgctctccttttgataatgtcctcagccaaagaggggagggattttctttgcttttccctaacatatcctcattctaccacagagctctaagcctcatggcctggctgtcataggcacaaggcctgttttctaaattataagataatttttatgacctgaaacttccatatgtggtttttctcatgctactgtgagggtgggaagagggcagggtgggagtggataaaggaaaatagaaatactgtctcatagcaatggtcttgctacataattccatcttgaatgtcagaatctaaatattgacgacttcttcctctttgcaaaccttcagacacaaattctaatctccttctcagatctccatccctaccaagacaacatgcctgtgtgttaggctggacaggtaggaagtagttgacacactcagaaaggcaaaggaaaaaaacatgtggatgttttccaaaatattaaccccatcacaatgtctcgctgtcactatccttttacagattaggaaaagaagttacagggagttaattaccctcagattcaggacccagccccaaatctccccactatcagatgtcataagctggcccagctgtatgttgtctctatatcttattcagcatttctttctttccttttcttcctttctttctttctttcttttcttttctattctttccttctttccttctttctttctttctttctttctttctttctttctttctttctttctttctttctctctttcatgtatttatttatttttttgacagaatctcactttatcgcccaggctggagtgcagtggtgcaatggcacaatctcggcccactacaacctccacctcccagattcaagcaattctcctgcctcagcctcccaagtagctgggattacaggtgcatgccaccatgcccagctaatttttttgtatttttagtagagatggggttttaccatgtaggccaggctggtctcgaactcctgacctcaagtgatcctcttgcttcaacctcccaacgtgctgggattacaggcatgaaccactgcatggggccattgtttagttattccattcttgacccactgagtcagagtttctggcagtggacttaggaacctacatttttcagcaagtactccaagagatcctttgaaacctaaagtttgggaccctagatctacagttacattcctgagttcattcaggcaccgctggtcaccatcacttcctgcccttgccttctatctgtaaatgagtctatatttaagaaaatattttcaaattttaaatttgcctctgtcaaattgccaaatttttaaatgcaaattcctttcagacacagacaaattggcaaggtagcatttttcctactaaaagttttagacattatgtgaacctaacactatttgaacacacttacactctaagtcctagactgaatgagttttttaaatcaggtgaaagatgagtaggataaccgtaatgcacaagacacacagccgggcagggcagaaacaagaaacgagagatggcagagaaacacaggggagaagaccaaagaaaaccaacttaacacctttgttataatccagaaatagaaacattacggctatgatgtacgtgaaaggcatgaaacgaaggaatgggaaacgtgcaggaagtcaacatctctatcttataagcacgtaagaaagtctagagtgtggaaataaggaggcttatctcggggtcaggtcaagagatggggtgatttgaggagttac

SEQ ID NO: 316469 - DNA, 4001 bp, Homo sapiens
atgaatgagctttggctgcccaactatcagaacagcccatttcaaacggcatctctgtttcttctcaactccttacttgccttgctgaaacctcatctcttagcccaacagattaagacgaagagagaaagacttattcaaagagatgtggaggaaaaggtttaattaaggagaccaaagagaaagtaccactttgatcacaaaggtagcactttaatatatcagtgcagatagcggcaatgtcagaagtactaggaatccaggtaaatggccccaagattcagcatcaatctaacaatgtattcctcaggagggcgtgtgaacttccatgcttcatccatcctggtgtctccctgtagagagccaccatgaattccttctcatccaccctccatacatcaagtatatgcactcgctttctttttaattttatttttggttcgggagaggaagaagcagtccttaaattggtgtccaatccttctcagacacccgctgctgccaccatccccacccctcacccccttccaggcaggcagcatctaattaaaatggcaagaaagctctgcccccttccccaaaggagtgtgttgggatcgggagttgggggtggggaagcgtcgaagcagcacttggattcctggtattctgatctcaaaacaacagcaaaatggattctatatcagtgatgtcttagtcaatacaatgaaacggcgtctgaggtaattcacgtgaaggtaaacgcaaaccagtggggctggggggagggaggtgctctacaaaggactggccacagacacggggaaaacacacacagacacacacacacacacactcgcacacactccagggagttccggtctgattgaggaaaagcagaaaacacatccctttcacctgcttaagttcagccataaaactgaaacgttacagccacaaagtcagaaagaacaggcagggctgagttaaagccataaataaaggtgagtggcagactggcatttaagggagcgctgagagggcgcccgggcgcgggaggtagaaaagggggagggggaggcagttgccatctacaagaccagcatagcaataactgcccccttggagcggcaggttcggcttcgcggggacagccagcctcacaatgtcatcttgcaggtagctggaaaacgtgaggggccagtgcctttattcacgctggcattctttttgcagaagggacagtcgggtctcgcgccttggcaccagacaactgcccggggcgtgtacacacacacacacacacacacacacacgcacacacgcctttcattttaatgctcttacaccggtataagatgaaactggcataagctctacgagccctcgggagagcctaagccacggccagaggaagacacgtaccgcacagcccctgccgtaggggctcagccaggagcacctcagcaaccccgaatcaaaacgggaatccaggttccctccccgacgcattctcccgctgctgtccccctgccccagccccagcccccagtccacgcaccgagcccattcaccctaacccaaaccactggaaagaaaccagaaaacgtcctgctcaccctcagagccgagagatctatttcatccaggcttcgagccggggagtcgctcgccatgtctacttcttcgctggagaaatggaccaaaaccaccccgaagcttttcccttggaaattccaccttggtctatttcactcgcgtcctcatgcgggtgtcgcgccagaggccccgggcccagcctcccccgcccaccccagccccacagcgccggatcccgatcctccgcgcgtcggtccgccgggtccgggagcccagcctgcgcggatctccaagccccgagcagcggtgcgtgtgggctgagcgccccgatcggctaagggcgctggggctgcgtgggtgtatttaaatgggacatgcttctttgcttgtgcgtggatggcggctgcattggctgttataatgagacacatcaactcctccactcagcagggggagggtgggggtggagaaccacgcagaactgtctatcaccgcttcctgggaggagtgaagggggagtggggaggcggaggaggcgtggtcttggactggggagaggccgcgcttcctgacccggtccctctgcaccagcgtggaggggggaggggcgcgcaccctttccgcccaggcttttgcgggctcctcgggccgaacccgaaggggctgttcctgaaccttgacttgttatcatagggacccaagctctatttttgtgtggccaattcgtgcactgcagcaaaatggcccttcagtcgcgtcttggggtttctcctcggttcaaatgctctcgcgctgagaaaaagccggaggaaaaaaaagcgacaccctccctcccccattaattatttgtggggccggagtaacgcgggctggtgcaaccggtgcatataaggacttgtgtgcaaggaaggggatccgcctccaggcgcggaaagagtagggaagaagcgcacacgcacagtgcacccagctgggcgcttcggcagtttgcagctgcggcggggtcgggtccacccgcggtccccggaatgccggacggctgatcccgggtgctggtcactcgccgattcggggctgggaaggtttgccagaagcgggaaagatgggagatctgagcgctctcttggcatcgccacacccaggacttgctcgtgccgcaattccccacggaaacaaccgagttgaaacgagaagcttgctctctgggtgcagtagctagaaggcttcaggtaactccaaagccaacactgggtgaggcaacacacgccgcctcaggactcagcatttctttcaggctgcgttttcgtggcagacctacccagattgatggagaaagtttggctggcggataagaagtaacgcggaagatgtgtacgtgagagcgatttcacttcactcactttctcatttaaaggttggatgttttacagtggtatacatgattctccttctgtaatcaagagtgggaagtcgcttcccccaatccccgcgcagcccttcttctcccgccttagccatgcaaaatacctagaaagaaaacactaaaactgaacttttttccaaatacagcagtagctttgaaagcattctttgctcctctgttaacagcagaatgtaattctgaccactgcactgatggtttcttaatcatgcagtatgaagatcagcttcaaaataagtcttatgaatgaatgaatgaaagccagtgcagttagttcatcatgactgcagacattagaggactttgaaacaacctttggtgtacattgtactgtttttgttactgatattgtatgtattcatatgcattgtggatcatgcaccatgaaacttgaaaattgttccaacatctcaatggccacaacagtttggtagcttttgcctgtaaacgttgtatgtaaacatttgaacgtgttatactaaattactaaactcattttttactaaaatcatctggttcgacatagtaagtaacgtgcagtaagccaccacgtcgaaatgaaaaaaaaaaaacagattatttcccatcattgtctttgtttttttctcttctgtgttcctgtttttttaccgttcatctagacaacaggttaatgtattgtctcagggttgaaagaagataatttaagatcaagtattaagatctataaacaactatttttttaaaactgcaaacataaggaaatatgagttaaatattttttccatggaaagccttcgttttatactcatgattatatttgaaacatcacaaacagatcaacttttttgacattagtgagctgtttgggccacgagggtgccaagttggcattcagatttagtttagttttagatgagaaagttatagatgcagtatgatgccaggtgctaaatggaggagggcttcctaagagcctgagaagttgatgagacagccaggg

SEQ ID NO: 316470 - DNA, 4001 bp, Homo sapiens
cccgtggggccctcatgtttctagaactgacaaatgatctctctggccctcctcaaagggtgccagctgctcttacacccccctcgctacggcccccagacacacctgacagctgcaggaagccctctccagctccccaggcacccccctccctgctgagccatgcctagggagcccctgtttcttgcacactgctctcttgtccctgtccagctggccaccagctcagggagcctcagctggctggaggggtgggcagctggggagcagggctttggggactcagcatcccaggctcccttcccagggcctctcccagcacttgacctccctgatgatgccaaaagggacagccatttcctggtctaactccaggaggtggggagaaggacacccccaacttcagtccctcttcctcatccccctgccatccagcccacaaagcttgtggagatggcaggtgtggatggagtgggggctgaggtcaggtggacaagatcaggcctgcgttacactggagctgacttttccccaaaccttggctgactgtgcccttgcatcagagaagcctacagccttaccctggcaccaagcacacctggaaggagacccagggaccgggggccggggaacaatttaagcagggttattccctctatttcaaaatgggtctgctggatcagaatggccagattaaaaactctagcgtccccagaaatatgtgtctcaaagtcaccagaaccccatgcctgaccttggatgtccagtaagaacaagacctgtaactggcccagtaatccagctgcgggaagaagcaaagtatgtgtgggtcagcgccaggccggctcctggaacccccaccccctttttttttttgagagtcttgctctatcgcccaggcttgagtgcagtggcgcgatcccgggttcaagtgattctcctgcctcagcctcccgagtagctgggattacaggcccccgccaccgtgcccagctattttttttttttccgccatgttggccaggctggtcccgaattcctgacctcagcgtcctcgtctcaggtgatctgcccgcctcggcctcccaaagtgctgagatgacaggcgtgagccaccgcgcccggcccggcccggccccctttctcctcgcccaggaaaacagcccgaccttaagccccaacgctcctaccgagtccccctttctcctgtcagctactgccctctgccggtcgggagaggaagtgcgttctctccaaggggaagggaagctaccccatccatcaacaccgtgaccatattttcaaaagcaaacaaggacatctggcttgatattcatattcagaagcctagtaaacgggaatgcccaggacatacagactcagttctcctaaaagactgaaccccaatcctagcagtacttcctggactcccttggggcatggaagaaagcccaacgggcagctttttggggtcccaggggatccatgcacacacaggcagatgccagcatcactaagtcaccaccgccacacccacataaacacaccgctctctgtcccctggcccaggagcagacactctcactcctgaggccgccgcagggggcagggctgagcccggctcacagcagacgaaggggtctggggcccaggtatctggctatcccctagccttccccattacctgcggtccctcctcgcccccagccaggcgctggtaagcagatctctcccccatggagccccaaatcccagcggctgcggtcagggagagaagcagcgcccgcagcccccgccccgcagcggcaccggcagcgtcactgccctgcgtcctggggggccgggcctcgagcatcctccagaagtgcagggccgctactgcgtctcagcccccatagcctcatccgccatcggccggcggccgggtggtcgcgcccctcctcctgccggcctgcggccattccctcctgcagcccgtcccagctccgttcctcctctccggggcgcggctcccaccctctcccagtgagccagctgtgccagccccgggctgacccccaccgagagccggggctctgccttcgccggccgcggaaccgggctccactcagccctcagcccgcctccagggccccagagccaccaactggggccttggggattcacgagtcccccgtattcacggtaaggggccatccgagaagcccacagcagaggggcctccgtccgactccatctgagaccccctcctccgaggcatcccggggctgcagcccaccccgcccccagcctgccccggcggccactctgctcccagaacgccgggcgcccacctgccccgcagctcggccctgcgctcagccggctccgcgccgcctcccagcgcccgcctcccgcgcaggccacgcccccgccccgaggcccccgcggccggttccccgcgcgccactcccgcaacgccgcacgcgctgtgcgctgggcacgcactgacctccttgacttcagagcggtgacacgagggcccggactcctgctcaaaagccgcccaacacaggcccacgcgggggtgccgcgcccagcactggcgcgaggccatcgccggcacaggaagtcccagggcagaggctcttcctctcccccggggccccaaggcaccgcttctcattctggtggcatctgaagcagccactgactctttagtaccaggtatttagggctgagctcagggcaccttccctgggttggggcagaggagagacagatgctgtgacctctcctccccacgcagcgtcaaggctgagccagaccctggaaggtcactaggtgaggctccctctacggcccactctcctcacacagccccttccacaccccaagcacaccagggtaggtggatgactgccggcgaggcccccgaacgcctgcttctatgctgtacagaagctcctcggcatcttactgcagctaaaggcacatactagtcttgggagtagctgcaaagccgggagactgtagaaggcaaggcagaaaataccaggcccctcccttcttgccctggctggataaaggatctgatccaaaccagtgccctttcctgctttctccctgcctcacctccccctgtaaatctctggcgtcctagtaccatcctatcgtaagacatccacaggatctaaactacctctaggagttcgagaatccaccccacgtgtacaccccctctgctcttcacttgtctctttatatctccactctgcagagctaaaggaaacaagaggctggaaaccagcccagctctgctgtccattcccctctccagcctctccaactgcatgcgaagtgacaaatccacaccaaggcgcagacatgacaggcaatttccggccaagaggatttttccaaaacaatctaccgtattctcaggaatatatgccaaccctacctcccagcccgccctctcccacctccacctacctcttctccaagccctgaaggaaaaaagaacatactgatgaggagaggggggcttacagctcctcccccagccagaggattatcttgcttccacatgtcagccccaccaagtttagtcagccttaactcacccctctgtgcgcagagcccaggcttctggagcaaggccaggctgggtgccctcagaacctcatcccagaggaacctgcaccaggcaaccctgcaccttcaggtcggctgggcctgacatcacactggtctggggaggaggctggccagggcccaagaaagaaaagggagtgattcagacacacgccatgactgtccatagtctctccatctccaggacacgggggcccactccctcccaggggggcctggcagctgaggtcctgagggcaggcaaggctgtgtctgctggcagtgctaggcccatggtccagccctgaagcctcttcaccccacatgttttttgtttgtttgtttgagataggatctcactgtgccctagactggagtgcagtggt

SEQ ID NO: 316471 - DNA, 4001 bp, Homo sapiens
cccaaggaagttacacagcttgtaagcgatataaccagatcaaaagcaatctgtgtgatgccaaggcctttctcccattcatctaccacaagttcaaaaacgccgacctgaaataagtaggtgaagattgtgtgtatgtgtttaaaacagaccgttctctccactgaagccagacagtgagagccactctggccattccagaagcgtcaggcaccgtgggcacagcagctgaacttccggtgcatgagtgtttgggtggcagcgcgacaggcatgggatgaagctgacaggcgggtttgagtttgtctgaggagcgggctaaccggctcctccagcagctgctacctccagcaccactccctctgcccccagaggagagcacccagtctggttcgggacaggggtctgggtccatctgactcacagccacacctcgggctggggcagaggagggtcctctagctaaggccctgggcaagcagcaaccctgcacccatccccacccaggggcaggggaagcaagcacctgacagtgccaggtaagaggcgaacagctctaggagagtaaggcccacaagcagcccgccaagccccctgggggcacgaggcggaatgagtaggtctggcactcaggccacgagggagtcaacaagccaaatacagcccccacccttggcccctacaagccctacctctagactgggctgggagctcctgtcctgacaggtgcagagcccatgataccacagcggcccatctgcaaacctccccagggtggggccacagaggcagcccagagccctggggtgcaagtgcaccctcctctcccgcccctctaacgctgggtcgtcccacccagagacgagagggctcaccagttgctctccctccttccgcccactaatcatccttggctctgggccctcagggtaaatcagctgtgacaggacggcgtggcagaagcgggccaggctcgtgccgtacccaagccactagctgtcacactcatctcagctcacgtgaccaacagggttacaagataaggttctgttaatcccacgctgccctcttcccttctgtgggacgtgttttgaggacttgtgtgttgactgcaccatgcagagcatatagcatggaggcacccctactgccatcggggggcaggtggaggggggaccgtcctgcagctcctccctggggctacccctctcttccctctgcacagacctggcagccacccagacgtcccgcctgctgcctagactctaagaagatgccctatcactccaattaccatacacagtactggcgggggagaggtcctgccttgccgctgaaaactgcactgcttcctccctccagggatgaaaggccaaaagaacgagggcagtgtggagtctacgctctcgccagggacctgcagcctctcacttccaagcacaccaactccagctaacaggactgggcttccttacctgccgccttccgctgcctccccgcagacacagcttcagcgacgcccaggctgagacggcagaagaggttcccgccggccgcggcctgccctcaggcagtggctcccagagctcagcggttccccgcactcttctgcgcccgactccccatgcccctacatcctgcgtccccttcagccccggaggtaccgtggggcccgggcctgccagtcaccacctcctcctccgccggcgcctccgggtcctgagcccctcgccgggtccctctccctcctggggctccttcccgttcaggtaggtttcctggacagcccgcaccacctgtccctcctgcaccccgggcagccaattcgcctcttgcacccccaggcgcccctcccccgcaggcccccggggccccaccggccgggccctccccaccagctcggggcggcttcggggcgccggggccgctcccaggaccaccgcctcccgcccgacgctctcccactgccgctcccccagttcgccggaactttccggcccctccctgcgctcgcgggggccttccccggactcggacgccggttcgggctgctgcagcagcctccgcgggctcccctccccgcgctcctgcaccccggcccgggcctcgccgcgctcctgcactgcggggctgcctccgcccttctcctggtgctgcccgcggggccccagcccctcctcctgcgccacaggccagcccgccgagcccgtccaccacggcgggcgcccccagcccgcgccgtccggcggcccccacaccaccccccggctgggctcgtggccgcggccgccgcgctcctgcagccccgggcccaccccgccctcctcctgcaccgccgggcccaccccgccccgctcctccacgccgagcttcagcccgcggagctgctgcgggccccagctgagaacccctacgcgctgcggctgctgctccggcagcgcagggctcagcccgccgcgctcctcctgcgcgacccgccgggggcccccgaccggctcggcccagcgcactcgcttgccccccagaggccgcgcgctcccacccctccagatggtgctgccctcggcgcccgctcacaccgcccgcccgccccggccctcccctcccgccccgggccgcccccgagtcccgcgcccgcctccccgccctcgcctccgggcgtcaacgtcggcccgccgggcgcccgccccgcgccggcccccgcaggtgagcgcccgcccgccgtccctcctgccgagcgccccgagcccgcctgcgcctgcgcctgcgccgccccggggtggggggtgggggggagtcggcccgccctcttaaagggcccggcctcatcgctcctcccccggctcctcccccagcctccggggccctaccccgctctccccgactcccccgggcccggcctgcgccttcctgcggtgccgaggagcggtggcgccctgggtgaagaagtcccgccgagtcgaggggcgcaatggaggagcgccggaacaggtctctcattccgagtagctaccgttgcactgtgcgagtgtaaaagtcacttccacccggtctcagttgttccaacctcagttgaagtgaggaggttggactggaaggtttctggggtcactccagtgaggctggggttctagtcccaatctcaccgtggcaccccaaaggcccagaaacccggaccatcacctctctttccccggggccaacggagcactcctgaaggagggagggtttgtctcaggcctgacgattcctgatgaggacttgggcagaaacagccccaggcaagcggaccttcattcctgcacttgagccgtctcctccctgcccccaccccagaaggagaaaacccagcgctcggattcccagcggcggggcagcctgcaggccctgttcccagcccacagacccatgtcccagcccaaacggaggcagccctgggcagcgggcgcgtggagcccaagggctcagggccactcagcccttgttactgtccctcatctagaaaatggatgtaataacaaaacagttcacggtaggtggcaagatcagacacatcggaaactgtgtagggctggctctttctgcgctcacactgtccagcaatgggccccagggacttggccagagcgcagtagggcaatgagaaaggggtggcttctggaaacctacacgaggcccagtctgggtggatttgggtggcggtcccttgcctgcgaggtgggcagggcaactttctactaaattatctaacactgccagtaatggcagcccttccccagggagccaggaggctgggccaggaccacccccctgtcgcctggcttcaggaaagaaagtggggaagacaacagatttgggagaaggaaactgaggaggttttctcccagtctccctcacgctgcctcagtcatggccattgctaagactcacagagcccaactgtgcaaggccctgcacttcgcattcttctcatccaaccccatgacaacccaaggagacac

SEQ ID NO: 316472 - DNA, 4001 bp, Homo sapiens
gagccagcattccagcccccagccagctggggttcttctggagcctggggaggagggggctcaccgtcctcgtccacctcatcgatcatctcctgcagctcctcaggggtggggttctggcccagcatcctcatcaccttgcccagctccttggtgctgatgcagccatcctcagcgcccagcacgaagatgtcgaaggctgccttgaactctgtgttcaggggttggggggcacagtagtcagggctcagcagccaggaccacggagggccagaaccctggggccacctgccaacctgcccacctccctcggagacctctctgagggcagagcaagagggaccaagcctctggtctctggcctggggtcctcttctgataaggggtccccatgccagcctggacccgctggtctcccacatgtgtgatagggattctcaccatttttctgctcttctgtcagctgctctacctagaaaggaaagggaatctcaaggctcagactcaggtatagctgctgctgaggaaaccaacccattccacaggtgagaaggctggagctggaggaggcaggctatttccaggccacagagtggaggtctcagtcctccctccctgcccccaaagccctgacgtgacccagctggcctcactgcgactgggctcagggccagggtgacaggtgggcacccccttcaggaccaaggtgaccctcagtaacaatagtcagtgaccactcaatgccctttcggcccctgatgaaactcaagctgggtggcccgaaggacagctgtccctcaagttgggataataaaaccagtgtggaggcaggcaagccacccacggtaacctgaccagggtggccactgggctatttttaacgaggaacaaagttaaacctggtgattgttctggggactttggcatgcagggggtggggcagcgttatctggccccctggcctgctagtgccgcctcagaagccaaaattagtccccaactccgccaggccttgtatgggcactgggtggagggctgtcccaaccccggctccatggactcccacaggataagcaggcgtgcccccagagctggctatagcacttccctgcccaggagtgagggaggctgagggaggggttcccctggggacagctggccatgccaggatgtccttgctctggggttgggggaggtcaccaccacccaggatagaatagcatctgaagaccctcagtgacccaggaggttgcaggggcttggggtgaccactctccagccctcattccctcgctctcacccctagctaagccactgagccctgagcctgccaggcatgatgggagctggggccccagttctctgttccttcttccttggttctccctcatgtccagaacttccctgcctcaaacttcaaagccccatctccagcccaggactcaggctctacagacccctcctctcacaccctccaccctccaaagcatcttcggcccgccaaggggctggagtggggtggcagattttgagcatgtgagaagcagaatgtgaggggcagaaatgggggttggggacagggagacagtaatggggactcagacagctcaggaggaagagatgaaaagagaaaggcaaaaacgtccagagacaaatgcagagacatgtggctgagcgacagtgccacagaccacagacacttggaaacagagagtgagacacgatgctgaaagctgcaacctcctccaccacccttcagacccggaaccccctaccccttctgcatcctcaaacaccagaatcactgtccctgtgagggcctgggttgaaggcacgtaggccttctccttggtccccaccacttccctggggctactaaccccgcactctcagctgagtgagcccccagtgggcctgcccaccccagccctacccagccctgtccctcaccgcagccttgtagatgtcatccatgctggcggctcacaggacagcttgctggggttgccagccggcccttgacttaaatagccctgccccgctgcattcctggcccagcccagcccagcccagcccacccctgcgtgtagtatcctccagcccctcctctggtcccagtgatctcaggctggcctgagtccccacgtcctctgcccagggcagggagcagacgaacggctacaaggaccaggtttctttccctcctgtcccccacactccccaaagggactctctgaaaaggtttctggaatgaatgaaaacataagcccagtgcaggacaggagctacaaagtcgtgggccccaggcaaggtgcaacacaacagctcaggctcccatccaaccaggttggcgggttgccatgacctccactttccagataaggaaactgaggctctggaggagtggtgacttgcccaagatctgactgacttggtaacccccgcctttaactaaacctctctggaatgggggtgcaatgtgcaaggagaggctaggagtgcagggccctgccaagagaagcctcgaatgccaagctcatagtaagatgctgtggaactggtgaaggaggaagtgactgacccaccttaggacagggtggccaggagcccttctgccagaggagcctgtcccagacctcccatctgcccagggagaagtacccacttcgggcttaagtcagctgctctcagttattcaacagcacccctatagatgccccatctgtggcaggctctttccctcctcaccctccaattaggttaccacctccctcttctaggtctcatctttccccggtttaggattcagcactgtagttcctgggtccagatcaacctgtctccctcgttttgaactttggcaggccaccccgtggggttcttgtgctcagtggcagcacacacccctccatccacctacaccttccttcgtacagagttcgtatcaagtttatccctcttgataaacacgctccctgcctcgagcactactgcgtgctgggccgcgcatcaatcaacccactcagttgtccagaagccccactgacaagagatctccgaatctcagagaggttcagaactggcccagaatcactctcgccctgctccggcggtaagcacaggtcctattttcccctccaacctgccttgccctaaagagaaagagcccaacagccaggtgaggcactattatggcctcctttatcaggaggagtaaactgaggccaggaagagcagtgacttgcttcgtgtggcctgggagactcgggaccttctgtcccctcttcccgaggacccaggggcgatgcccagagctgtcaccacccggggtctcagtttctagcaggctgtgcagggtaccgccggcggcgccacgcaggtagattacgcaagcgagcacctcgcacgcgcgccctgagtggcccctgtcagtcacgcgcgggggcggggcgagggcgcaggaagaaggcggggccaagatggcggcgcagcgcgcggcgggggcgacgggcggcgggggccggggggcggtgggacgttgaccccgccccctgctgctgctagtctgcgccgggcggcggtggcggcggagacccgaacatggcgaccgcgcgcaccttcgggcccgagcgggaagccgagccggccaaggaagcgcgcgtcgtgggctcggagcttgtggacacttatacggtgtgttgggggcgcgggcacccgaagcgggggtggtggctggaaccgggagtccgactcgggggcttggggaggggtccgggatctgcagccccgaggagcgggtagaagggtctgcgattgcgaggagggggctgggacgggggatctaggaaagggatctgggccccgcaggtccgggagaagggttgctcggggcccggggaggcggtttggaaaagggtacgcgatcagaaagggaggctcgggttgggggcggcatctggggataaagggggcttggggaggggggtgtctagatgaggcgg

SEQ ID NO: 316473 - DNA, 4001 bp, Homo sapiens
aaaactgggagatatttgaccaaacgtttctctgacctcgacttactctggtactaccattgaacaactccagacccagagaaaatccaccacacccaatcccagtattgtcaaatgcagccagactaattctctgcacagctgtcagataccaaaaggatttaacagtcagttcaccaaaaccatacaaagcagttcactaaataatccaatgcttggcctcacatcagagaaactgtatcatgcatattaggcttggtcatgtacatttccaggtgaaatggaaaaactgaatttaagatgcttccaatcaaaaagtttaagaagtcactcccattttttttttttttttttttgtatgtgtgtgtaggcctggacctggggcagggggctgtgtgcaaccaagcctggtgagcattgctgtggccgctactcttgtgcagcaagaggggacagtgcagtgcagagcgttttctgacaaaggccaaggggtccggagtgcaaaaggacaccttggggctggggcatggcaggagaggttacgggcgctgagtgcttgcagccaagggggcttcggggttgctgagagaggacgagccttgggagcttgacagttctgcttacagttcagaggctgtaaaacaaatgccactgaacaccatttcactctttagaacctgtgtagtctttctttttctatgtagaaagccatctaatcgtttttgtttttgttttgcttttgtcaactaaccgtcactgtagttgcccacttacccccagcaaaaacacactccaaaagggggagtggctcattattaaaaggctcttagcgattaggttgtaggctttggaaatcacagaaacagttcgtatcacgatgtaccaattgttaatcgaatttagcttccttcacttattaaatacaatcatcacatttgcaaatgccccactcccatctacaacactagggataaatgctgtgtcactgagaagaaaagcaaaggatttttctgaaaccaaaagcaaactgtcaaagaatgccagtaacctgtcatcgagctactctatgccctccactggcagccagaaatgagtctccctaaacccaagtgttgtgctgccgcttggcagcttccgtctgatgggaagccccctcactgacacaacccgccaaggaaaagctgcacgagccagtttcctcctctacggcctggggctgcttctcaccatgtccaagtgagcaccgggaccttcagggtgtccgctgcccggggccggactggccctgccctccggggtcttccgttcgctgttgcgcttcaggccgctggcgtcgccccggcctctggcctcccggcgccgttgctgccgactccacaggtatatggcacccgcgcccagcagcaggggtgccccgaccgccagagccagctgccatcgcggcagcccccccgtgcccgggcccgcagtcccgccgccgcccaccccactcccggagctcggtacagcggctgcgaccaccgctgcctccacaggtttagaggcggccatgacaagtgtcctctgccaccgcctccctgtctgtcgcgagcgccacaatcaccaaacagcgtgcgaaggaagaccgagggagggaaggaaagcaatgagcgagcgagcacgctaggcagagagagcggacgacagaaaagggccagaggtcaccggaagcccagggcatgccgggccagacctggccgtccttctcctccagtatcaaccgaagagggagaggaggggcggaaatcacttccgggttaagggaaagcgtgggtgtgagtaggagtcttcggaaaccctttttctttcttttcgccccgctgctgttcgggagatggacttctggagtccccgtcgtagctggtgttgtcccctctaccttcaggaaagaagggcagatggccctcttgcctactgaagccgaggaggggcgcgtatacagcgggctaagggcgctcaagagatccgagtggaagaaaaagcagcggcacagcactggaatgggcgggagtggcagaagagttgtgaaggctattggctagcaagggtggtgggcggggcgtagaccgagctacccagtttactggtcgatttcggatccagttttccagttatagccacgttggcacctcttgaacctctgtggccgttagcacggttttctgcccgcgtgcccgagaaaccaacggattagaaggacttttaaagatgtgtgaggaaagagctcaccgctgaagaaggctgctgcatcactgaacttcttatcactaacatagcgagattttagtttggacgaatttgaggttataggggagatagcgatggcagaagactaggtggaaatggcacatctaggttggctgcagtcgaaacggtttgagcgtggtcgctgtggctcatcgtcggcaccaattaacgaagcgatgacatctgcgttgttaggggtttcttaaactgagttggtagaaatgcgaagcgtcagggttcccgccggcttcgagcctttcttggcgtatttgtatcttgagctgatttctgcgtcagcccacatctcgctctgatccgcacgccccccgggttgttttgcagtagcagtctcagccctcttctcgtctcattcccaaatcgtaatttcagttcacagctttttatctataatagctttatcaactctttttccgatgctctgcaccagatctcttaaaatataaaattaccttgcaaggtattgtttggaatacacggtattttcatgaagacaactattaatagaaaaatcagagtccagaactatggttctccatttctggtatactggtttgcagaagccttacattaagatttcataaatgattgttttgctgttaagtgcaacaacatcacagtagagctacataaagattgaaaggagatattttatcaagtggcaccagaatggactgattaaaatagaatggcctaattggaaagaatttcaggatcaccggtttctcctgcttcatgtaagttcctattagtaaattgccttcaggcaatagggtttcttagcaacagactaaaaaaatgggctaaaaatagcagtggaattgagttgatcgttgcaggcaataggcttttctcccctcctgatcccccaatccccaaaggcaaattttctgccccttaatataagctctgccttgcctttttcagaacacaagttaggatttttttttttttctgaaatttcagttttgctgtggcctcttggaggattgtagagtgctaacaattacaaacttgataggaactaaaacatatttgaagttttttttttaaacctttttcttatttattggagtaagcaatacactgttacggttaaactccaaaagttacagagtttactgtgaaaagtcttccttcagtccctgtcctcagctgcacagttcccctctccaaagggaatcggtgttattttcttgaaacattttttggattaatatttatctaaaggcctgattttgtttggctttatttttaaggttggcattagtaaacgaatctgttctggttacttttatactttgataaacatctcatttccattctctagcctatgctattctctcattttctcctccatttcctaattgatggtactgtagagccaaatagagtgtcgcttactggctttgggaccttactgatctgatgcatgtttttctaatctgtgaaatggtgaaaacatctacctctcaggctatagtaaagatttaattagagaatatttaaagttcttttgatgtttgttacaaagcaatagatatttgatgattagttctcagtttttctaaattttaaagtaaagaagtaaaatactgcctttcatttctaaaaaattaaagttctgtatatgtgaacatagacattatctttttcttggtagattagtggaactcaactgaagaagctttcttcac

SEQ ID NO: 316474 - DNA, 4001 bp, Homo sapiens
ctcatataaccttagagtaagcatcaactcttaaagaagacttacaggagtgattatctttttaataaacttctaattccataagatatactctataaataaaacactaagtgatcttcacttctctttattttactgcatttcccatattttccataatctgctttataatgaaaattcctttaatcaataagtcaatttcagtttcaaatggatttttctatcttgaatgagatgctccaagttttgctaaattagcaatgagtttcctatggagcttgaaagaaataaattgtcatttaattatctacaaaattatataacagttaattaaagtactgctatcaaatgttaaagccaacaatccactacggagcaaaatgtttaccattatagaaccagaggtcttcagaggaaacaccgatcaggcctcaacacttccaaatagtgaatgagaacttacaataccatttggctgtctaagtcaattttccgatgtctgattttagtgacaggggtaaaagccattaattctgaaagtcattattttgcatgtatgtgtccatctcctccttcttcctctcacataccctctactgcaagtccacatggaccactaacttagtatctgacattttctctcctggccctagtcccttcatactttcattctacataatcggagtaatatacaacattcaaagaatttcaacaataagagcatggcaagttattttgcaatgtaccctggcacgcaaacataagtgattaaaatgttttgctgctgtcagtagcaccctttttataagaagcagttgtcaatatagcacaaattgctattcaactcacccaaacctcacccaaacaaagagaaaacgaactaagtaacaaaaatgcctatatgaaagctcccttgaggtatttaaaacagggacgggggaacagaccgtcaaaagtccagaaaaatgtaacactttttacttttctccgaaatacctaggttttctgtataggaaatgaccctggtctgaactctacgctgagcaagtgaaatgccggcgaattatcgatctgtcgtgggaatccagtctcccttcctccttccgctgcagttacttctacttcccagcaagaactgagcgtcgaaatcctttaacttcaggactaagcacttcagtcacctctccaggacatccattcagccctcaccccgttacacctgcgatgctgacgtagacaagcacttcttttaataatctcaccctgacagagggacgacctacagtattaactgctgtgaaagtcatccccaatgcgctctcaattgagcgcattgaatgaggctttccaaattgaagtgcaagttgctgtagaaatcccaatgcattcttctttgagattaaagccccagaaagagctgcatttagaatacacacacacacacaccccttttcccagggttttcttgaactacatttggagaaaatgctgccccacacagacacacttgcattatcgccatccccaccatttcaggttcggctgccccggaagagtctggttaaaaagaaaagagaggaagcgggggctgtatgttacgttcgcggttttgtccccccaaagtttcaagtacacattacgctctggcagtcaggacttccagagacgtacagagaaagaaagaaagaaaaggcgcggggagcgggctggaggattctgcaagcacaggcccctatggagcgcccgttcgggggacgggatttccctccctttcccctcccccgcccgttcggaattccgcccccgccgcgggcccggaacaatgcagccgcccgtcccggggaccagccacttaccacccaggtcagtgccccgttgccgccgcccacgccggctcccgcgccgcagccacccgacttggccatggcgagtgcctccagctcacaggccctgaggccgcagccgccgctcccgcctccctgcgggccgctgggccccgccgctccgcacccaccgctccactcgccgcactcctagccgcgccgacccccgcgccccatcgcgaagatccggagcggacgtccagccgagcccgctgaggaggccgcgccgccggctgccctcaaactcgaggcgcggcgtccgcgtcgcccgggcctagcgcggcggctgaggagaaagcagggagcgaccggcggcggccgagcggcggcgttgccttctcgcccgcccgcgggcgccgctgcaggccgggctgaagcccgggcgtgcgagccgcgagggcggccggggagcccgaggcgctcggacgtggcgaggacgcagaggtgccttgtccttctcacactccgcgaaggccagccactcgagtcgccagagtagtcgtcccggtcgccgccgctgcttcaaaggcagccttagcctcgctgcagccccgatttcctcacacacacacaccgagagggacaataaacagagccgccgccgccgccgccacggtcacctccctcttgtccggcataacaccgcacacacacatttgcacaccggggagagagggagggcgcggcggccgcccccgctgtcagtcagcgccatgctgtccaatccgggccttgtcgccacagcctctcggccaatcccaaaattccaagccccctggaggggcgggacccgaggggggaaacgtcattgcgggtagcaaccgaaaggaagacttggggtttttgtttgtgtgtgtgtctgtgggttttccatttgaagggagagcaggggctgcttcaagggtcaattgagggcggcaaagggaaagggtcgaattggcctcgggtcgattgtaatcctccaagcgtgctgtttactctgagacctaaccgggaatccgaagcgtttgcctggggcctctaaggatgaggatgggggcggggtggggatgggggtggcaggaagaagccgggggccgtcccaaagggaaattattttaaaagagcggttgtaaaccgcaggcaagacgttgtagaccactggtgcaaggaggccccgtgacccggcctccccaagggcctaagtggacgctgctgtcgaaaaaaatcatctcagaccttctccatctccttcttccgtctcctcccctcaccccaaaagagcatatggtcagtttcaagaaaactacatatgaaaagcttaaatgataagggacacacagagaatgttctagggaaagaatgcagggtgggttgagtgttctatttctactctttgttgacctttcttctctgaacaatgcagagatgtcactgtcacttttctcatctgtccagaactgtgccccctgcctctaagagggcatgcttaatttttaaaactgttttcagtggaattttcaaatgcacagtaaggaataatttcattcacattaaagctttctaagaatgaaaattaccaatacagcaacatcacagtctttggcagatggaagatggctttacttcttcctgtttttcagtgtaattccactcaagtatttattgggcgcacactctgccacgctgtgccaggctctgcgatgggttcaaagtaaaaacaaggcccctgatttcaaaccatttataacctggcttgtgagacagactaaaagggagccaacgatcaccaaaatgagtacttgaaggcatgaagtgccaccaaagagttgtgatgaaagctttttataaagatgaaaacagtattactgttttttgaagaggtgtttttgtgaacttccaactgtgcatttcctctcaagggaaaacaaaaatgtctcaggtcacatctttaaactgcattctgagtctagaggtggagaactctgaaacatggaaataatttaaacatagtttttttaattagctctctgatggccatgtaactttgccatactagggacttcagaacagtgaagcctttctttaccttgaacttggggtgcaaacttttctgaacctgaccaagtatccatagcc

SEQ ID NO: 316475 - DNA, 4001 bp, Homo sapiens
gtactcattaggtgatttccctatgaagcttttcatcgatttaaaatcctctttcgatgccatgctttcataacctaacggctctgaagcattctctgtttcttctttcaaaagtggttcaatggttttctgaaacacagcatttacatgatgttcagaacttgtttctttttctactgtttctgggacacttaataaatgatccatcaaagagactgtattatggcttacttttctcaaaacatttaaaggacttttagtctctgcttctttaccatcagcaatcatttgattttcttgcaacatcaactcagacttgttatactcattagagaagttcatctcagtaactgtttcatctgctttttcagacaacttcatccttttcctgggttttcgcccaacactgctctcctctattgaatatttatttttttcatgttgaaggcaggaaagcaagccattggttttactttggtataaatcactctcttctggtagtaacttatttactcccattacattttcttctgtttgtaagagctgaggaatactatttgtgtcactcttctctgcaagactcctaaggttttctttctttgagaaattttctgctacatgcatacatccaccatcaggtttatatggcaggttgttttcatcattacaacccttggaatgggggaaacaattgcaatcacgtaattttaaaacggaattattttctacttcaggtgacaagatattacaagaatattttggagtattcttgtacagttcatcttggaattcaaccttaatattttgtgtagcctcattttcggttattttgagaggtgggttttctaagcttttaagttttttatttcgaattcttcttttaataccttctattatactttccttacccaaagactgcaagcattccactgtttggaaagattccgaactggttaatgattcctttcttaccaagtcaagccctggctgtggatcatcacttgaggcttcagtaacttttcttttttccttggctgatcaaaacaacaaaatatatcagaaaagattttatattgaggaggaaaatgcaattatcattgaaattaaaaattgtgaggctatcatttttatttccctgaacagctgtatgtaaatacacatttgtttttaaatgaaagccttaatttctgttaaggaattacatataaacctgtataaattctaaggcaactgaataacccttataacatcgtcatctcatactagccaaaatggaccacaagtaggaattcctcctatcataattctgaccaaggattcctaacagggaacaccccttttaaggaaatccatttttcccatctcctggtcaactatgtgcatcagaaataaccatgcaggttcaagttaaagactagtggtaaaacaaagatggagcacgctgaggtacaagggctaaaggtaagtgatcgtggatgctttcttactgtgtctttccgtttgcaaggggagttcagcctcctttgctgcttctaggcctcgcgggtctgacgagtctgacgggctcaccgggcccctgcgcccctccacctgacgccttgcggcctttccagcccctgatgctgcaaccgacttatcactttccacctcgcctctcccaggggtggcccgggccaccattctcctcttttgcttattttcccggcaccccccggcctcagggccacagcctcccgccgcgcctggccctggcgcctgccgcttctgcaggtttcgcacattgccttcaggccctgaggccgtcgtggggcccaggggtggaggtcgtcgcatgtgccccggggccggcccgctggggcccctctgcaccagctcgcaggaacccaccgcggtgcaaacgctgctcccgcctggaggtacctactgccctctgacccaccccacaccgccagtcaccacagcccggggccggaagcggaagtggggcgcgtaagcggaagtggggcctcgtgtctggggccccgactggtgcttcgggatccaacgggcaggagagccgcgagttccgtgccagcgtctttttggagggcctctcgcggagctccgagggaggcagtggccgcgcccgattgcattgcgagggactgtagtggggctcatcacataacaggcctccgttggcccttccactaggctgagcttcctggaaccgttcagggctcattctcccagctgctgctcttcgcgccttggctgctcgcaaaggccactgtcagtggcttgtaactccacaccaagtctcctagaagcccctgtctaactgtcttcctgatatattcacccggatattccatattccacaggcacctcacactcagatgggcaaaccagctcatcgctcctcacaagcttgctcctttcacataggtggatgcgccaccatgcgcctaattgtttaagccagaaacctagaaaccatcagagacaaccttctttctacttcatccctcacatccactttcactagatctacttgactgtattttgtttgtcagccactctcccgtttgccattaccgtggctctggccctcagactttcttgactgacctactgcatcaagcctctgaatccatccttgagctattccagtcaaacgtccacctccttgccaggccatgcctctccgatgacaggagatcctagcacttctcagtttgacccttcatgaacttcttttgctcaaagactaaaactaacagaaatccaaactctggtgtggtatctgtgaccctatctgatgtggcctctgaaaaattaactagttttctcttactgccactgtagggtaaaagttgtgctttgatggaaaactacatagaagtcacccttctgaattatctgattctgattctatgggagttattttacaactctgtaaattatagataagcgatagcaacacaaaataacggtctatagaaatccaaattctgtccaatagaagtttaattgacttcccattttcactgtggaagaagctagttttgcctccatttccacattcacttcattcctggtctagaatgtttgttgtttggacttaccctttgaaccaatgtttataaaatctgcctgatgggagaatataatctttaatacatgttcatccatgacagccattattttctcttttttgaaaattatctcttatcaccacacatagcctgcccataagccacgttggactactacctgaagttccccagatttcatatacttttgttatgcttgtgcttctgtacctgacagtcctggaaagtcttcctttgcttgtctgcctggtaaactacatatttccccttcaagattcatgcaaggatcacccatcaaggaagccttcctgcaactgttcttgcactttgaggggtaaagtgttccttcctgtctgcgaacacacagttcaactatttacttgtgtgtctcccttagtagcttccttccaaccaagtgcagataccttccattaatctttgctttctgtgtgtttaaagaaggacctggtgaatttgaatacaatgcattaaagaatggtaggtatgatgcatagagtgtgactaatatggcagtttggatgagaagctcaggtcaagtattctgaggagcttttataaaatagaacttaagtaaaagaggtgtaaaagatacagaaattatccttgtttctttctctttgtaagtacccttagtaaaaggaaaatcagtttaagactagcagaatttataaaaagttatcataagcacttcaggctcattccacattcactttatgcctcactttatatatcactttcctcatctgtaaaatgaaatagtgtgtcctcagagttctcatgagaattagatgtgccaatatttgtaaagcagttagaataatgcctagttgattataaacattaaatagatttgttaagtaaaaacttcaacacacacacacacac

SEQ ID NO: 316476 - DNA, 4001 bp, Homo sapiens
agtaatccctttaaaactgtaagtcagatcatgtttactcttctgattatcaaccctccaatggctctccactgagagaaaaatggcccacaaggccctacatgacctctttaccattattctctaacgcattccttagtactcttcccccatccctcactcactacacaacagtacactaaacttggatagagactacaggcactttcccaggggctgtataaggttgctctctctgcctgcaacattcttctccagatatctgcaaggctatctcacctccttcacgtttactcaatatctttttcttcataaagcctaccctgatcacaccctatttaagattataacccccttctcttcccaccccaagaaacatcctctggaaccccttaacgtgttttgcttttttctcttcctaatttatcatgtctgattagtgtctatgtcctcctgctagaatgtaagctctgaaagaacagaaatctttgcctgttctcatcactgataaatcccaagtactagagaagtgcctatcaaatcatgaacacttcaataaatacttgctgaatgaatgaagtttaaaaaaatctgctacaaatgcttctcaaactttaatgcacactgaagatcttgttagaaatgcagattctaagtctgggttggaggccaagattctgcatttcgaagaaacttccaggccatgctgatactgctgggttctgtgagaagcaaggatctacatcacccctactatcatccaattattatactgtacataataaaacataatttttaacaattaaccaaaaaattttcaagtatgaccagtacacaactgactcaaatttctacagcacgcaaaggaccactctggctaggagacaaatgaaagcaacttaatttccaagaactgtaggtcagccatattaaacagcaatgtgataatagacttccagccccccgaaatacataatgatgtacttagatcaattcaaaaatatgtgataatgatatatctgtattaatgtagactataaaattattatgaaagtgaaatatctacttctaagacataaagcccaacaaatcaaaaacacttaaaaacaagaaaatgaattcacggtattaagatgttttcaactcttacctcgagagctttaaaaaaacatttggaattgtctgaagactttaaaaacttcacaaaaaacggttctttgtcatttctggacatttctgaactgtcaaaataaaggaaccattaacaagaacaaaaccacattagataaaaagttgcatgtttaacctacctatttttctgtgcagacaagaatgcctaaagacagacattctggctctgcccgtgaattcgtcaacggcatttctaagaaatcctggaacttggacaaagccaaggtaaaagatgacaacaccaatccttgcaaatcagacagcaaaattaacccgaattgaatacactgaggaaggccctgctatgaaggctctaagccctttaggccaatggacattcaattgcacttgttttaaggatacacagagtgtatctgtccctgcggatacccacggcctgcgaggtacgttcatccctcagtaaacagattttaaatataaacatggaagccagttagcatggtcttggccctgcataaggctagatgctccggttcccatctccaggaaaaggcctggctctgggatcacggaagccacgtcctctcggcgtcaaaggcccacccgccggctccagggccagttaccaggacaggaaaagagggtcctgaaggccacagaaggcatcgcgaaccccagttggggctggggaggagctgtgtccccactccgcgcctcacttacctcgttggagcctcggggtctccgggcggcgagtcgggggacgcgctggccgcagggcggtggctggggtcgggcgccagcccggcgcacagccccctcccccgactcggcgccgcccctaccccaaagcaaacgctggagaacccggaaattgcccagaacgggaaccgactttcgcgccaaccgcgcggccgcgcttgccttttccggtggaagtgacgccatcggcagctgcagcagaagagcggaaatgtcaaacgtggaggtgagcagtctgtgggcggtggggcttcagggaaagcttgggccggaccctttgggtttagggctttgctgggcgggcctagtctccgctgcgagtaggcccagcgccgtcggttcaagaggtaggaccacaggccaggaatactcctttactgttaaaaaagccagggaaagaaaggatttcctcaatagatatttattttacacctgtcttataccaggcatgcacgggaaaaggtattatccaaaacaattccgtgaggcaaatagtggtagttccattttgtagatgtaaaaacggaggaagttaaatgatgggttcaagggcacacggctagtaggtggtagaattaatactgcatccaggtcttctgactacggactgggtggtttccctccaacacagcaggaatagaatcaccgcctaacacagccacaagatggcaagggaagaaaggatgacttattacacagctaatgcaaagggatctttgtcaagatcttcaatggtctcccctcctcctccccttcagtggacatcgccgttctctttctctgcatctgcctcagtactggggagattctgggactgaacctaagattcagatggcagagagcaaagggagaggggataagatgggcctgcaaaccttagtgataaccagcggaaaactgattcgttgttgcttcttttcattttattcttttttaaaaaaattttttcttattttataaaatctagccactatactaatgaggatcattttattattcactgctgagattgagaaaatgactttggatttactaatgtaaaagtataatgccatgtcccttgattgtttttgtttttcttttctttttagagcctaaagatagtaatgagcagcttgagtcttaagtttttgaatacaccgatggaaggtgacaaagattctttgcttggccaaactttagtcagactcctcaaccttctcgtaggtttatctgtgcatttccttggaaaatccagttagaaccctctaccctcaatatctgatcaggttcctcatcctctaccatccaaggtgatgtctgatcaccttgacctattttcagcaagaaacccctttactcctgaagttccttcttagtaattttttatccagtgaccccaagctttttgttccttggctataaattcccacttgcccatggtgtatttagagttgagcccactctctctctcctaattcagaatcccattgccatggttgctatacctatcctgatggtccggaataaaatctgtcttactgtgctttaataaatatcattaatttttttttttttttttttttaccagaaatgagtcagaatcaattaacactggggctcaaaggtaaaggcctattgctgggggaagggtgaagaaagccttaaaagcaaaaaaacaaaaatcactagaggtgggaaaaaaaagaaaccacagttaattgttaaggtgcaaatctgacctgaatctgtaataacaattaatatttctagggcactttacagttaacatgggactcctgctcacactattcccgtttactcttttcagcaaccctataatagatgggtatcattgtctcatgttatggagatggggaaagtgaagttcagggactgtgtcacttgcccgtgcctttcctgacacaccacactgctcctgggcacgtgctgtctgcccatctctgtgtgaagttccacaccggggagggagcccattcctggcatttctgggccaagtagagacctcacaagagaaggagattcatagatgctgctaatgaagatgaagaaaatgcaccctttagcttttacccagccggaacttg

SEQ ID NO: 316477 - DNA, 4001 bp, Homo sapiens
catagaggggaacaacacacgctggggcctttcagagggtggaaggtgggaggagggataggatcaggaaaaataactaatgggtactaggcttagtacctgagtgatgaaataatctgtacaacaaacccccatgacacaagtttacctgtataacaaacttgcacttgtacccctgaacttaaaataaaggttaaaaaaaaaccaaaaatactatgattgcttagaatattacagtatgtcaaaaactgagatgacatttgcttcatgaactaatagatcgtcaaggtaatataaaaagtagtttctctatttctttatatttataggcctctcttatcattagaaatgcttctagagaggtatgtatgcaggattgaagtgtgggttattagtcaatagaaggaagtttcttctaaagcttccctggttccaagtacctagtttaggagagatgccctcaagagtagcattacacagttactatttcatcacaattatcttcttagaactattatttccaaagatgtttaatggaatagataattttgagattagaaacaattttgagaaccagaaaatctttggtgtttttctttttaatcaacccaatcctcaactgcagctagatctaattttcacattatacaagaacataaatcctagagccatttatttgtgctaatattgttgtttgtggtaaacagcaagacacgaatcaagccaccaccaacaaattccactgaaaccttggagaccccaaacttgcttcccctctctcttttttcacccttttctttttatctcctttattctatttatctttctgccttgctctttctcttctgccttttcgcacaacccaccagaaacctcacaggaagagaaacaatctacatagctcacattagtgttctacgttgtagcaaatcacgttaaaggaagatcacaaatctttcacactctactagtctacagtaagtgagtcctgcccagagagagcagaatctgcttctagtatcaagctccaacagacacaggtggtaaatggcaagttaaccctttgtaacctcaccattttcaacacgcaaaggacctctctcattagtcttataaaataaagtacgaaatctcatgctgttaaactaacatcacattgctacatatgacttgaatatctcccataactttatgactggaaaaacactgttcagatttcatttaccagtttaaaaatagcaaagtctaatttgaagcacatacacaattgtgcaccctcactaatattctctcttagtactaggcaaatgtttctaaataaaatttactacaatcacaagctttaaaagtcagatttgtcaaaagattttcattatcaaacataccaaaaaatattccttataaaatgcaatgacaagccacaatctgtttggtacaacaatggctagttatctatttcttaatgtataaatcaaaattatttggtgtttattttgacttgaagattatccatacattattatatccctgcccagtgaaatttcttattgagtgagtaggtgctgaacaaggcaaataatatattttaaacattcttaaatggcgtgataattttttttaaatgggaagattcgcttcaaattttttcactttgtagatccaaatatcaaccaaaaaagacattcagaaaatatgtccacagaccactttaagtccacagaaagtccaaaataatatcactgtgctgactaaacaaggaggaattgttctttgtacacagctgacacattcataatacacaaggcacttcaattaagttttgagagaagttatgtcacattcaaactcaccgctggatgtaagggtcagggcagtactgtagggtggcacaccgtgaagtttcaaaattcatttccttcaactgtctttgatatcaacgaacggagaacaattatataaaatatacacatatacctgtgtatatatagatataaagccgggaggctaaaagcaatagggtcaaatgctatcagacatagaagtttaggcacttctctccttcatacatatttgcaaagaggcggagcgtttcttgattttagccaatgagattcatcaattgactaaaacttcataaacactcgattcttaccagctgggcatcctctctactgttgttcttccccctctctcacggcttcagagtccttgacgtatagtagccacacttgttgttggcaatttggagctggaggcatctctgaacttctgatctctgtcgtgattggatgctggcatgaatggcatcagagtttaatttcagcagcctggacttttgtaactgaactgagctgatgagtgtccaccctgctccagctacataacacttccttgtatctggatactggtttgatttgaggatttctgtgactatttctggggctaaaatgttttgtagagctgcttagggaagttttgttttgttttgttttttcatctatttccctccctccccgcccttcagtttccctttcagccaaccgcctgttgtggtcacaatctcaaatagcaaagacagggaaattccttgattatatttaacttagaactcactcttcctctcagctaagagaaagagatatccctttcacatccccttagaagctttgcctgacccgaataaaagaaaataacctttattgagttaaatatcctacctcaaacacatgcacatgtacttacatataatatagtaattttcttaaagatattaaaattggaaataatatattattgtagaatattctgaagtgcacaaattatttcaaattgcctgttaataaaaatattctagtttattttaatctctcagtcggctccactctattctttatgtcttacagtttttgctgtttttggttttgctttgacttgacctacttcgaaaggaaaccataaaattgttcatatattcccaaatcagtgtaatatcaggaaagtctacacacaaaataatttatttcctttctgaatatgggctgtaaacttatcctggttttgtggatttggaaattgaatgaaatatgattcagaagctcagttaggatagactccaacagggggaaaaaaaaccactctgtgtatctaacggtcactaacatggtgagttcacatcttcccttcaccccctagtcacaggacacacctgtaaataggtgacatcagtagatgtcaaagttgtgagacaatctaaagccctttcagagaaatttgacatttccctgtaagtaaatctaactcaaaatgtgtttcataaaaatattttatttgttgcttcagccaggatggaagggagaagctatttaaaacttgacattctcttcctttacttagcccgagagcggctaacatctgtgaattgtgaaattcacaaacaggccagcctgagccccagccaaatcaaacagcttgctccacaaaatgtaaaacttaaagggaagattgcttaactaattaattatagatttgttaattgcagttaaagagtttggctttcttccctgctattagcaaatatagatgacctaaatagaaggttctgaaattaaaaataatcaatttcctgtgaccacagccaagtgattccatttataatgaaaggtggagtgaagatttctagtgcagagcttctcaagttttaatgtgcccgtgaggcacctagaaatcttgttaatgcagattctggttcagtaggtctggggtgaggcctaagactctgcatttctaacacgttcccaggttacttgatgctgctggtccttggaccacactttggagtggcgagccctagtgttccttctagctctgatatttacaattcgacgtctctaggaaatgaggaagaactcttctaaatattttaaattaacttccagggatatagactcccaaataatcaatttgcaaacatctctagtgtgttgtgtctttaaaatttaatt

SEQ ID NO: 316478 - DNA, 4001 bp, Homo sapiens
tgcaaaaagacatagaaaggtagggaagtgcagccatgttttttacagatattttttgtcgaccttagcagcattccaatagaaaacagacaagggatgccttttgtagctcttgattacatatttacctagagttgtgaaaaactaaaacctgtgtataaaactattttctttcataagcatgccatattctcacatacaatatgactcttttgcctccataaaaggaaataatttctacaaatatcctctaatcacaacattaatgcaattgctttctttcacgacattatatttaacctaaaattaatcatttcttgccactttacatcaaccttgtgcttcacttagagatatcaatgaacagacttttgcttctcccatttgacttacaagatcctaggcggcttataaatactgtgtgtgaaatagttcatgaataaagacaaacaaactcaggtatgacatgatggacagatcattttctgaatgattaaaactggacaaaattggatccaatagaatcaagaagatcttaaaagctaatcctatttaaaaacaaattggtaacattttaagctaactttcaatataactgcaaaacaagaaactcaagtttctctactgaggacaagcaagcctgcttgaatgttttaaagaaaaataggcacttccttttccttctttagataactcgatatttcccctgttgtatttacacagttcaggagtctagacaatagcgtggtcaatacgatagcacaggccctgcttcgcagccctctgctctactcttcctcttgcggtctgcaccggaatactatgcattttgttttgatttttaaggagctcaatttgagtactctagtccacttttccaagcactcacctgcaagcatttttatctgaaacaccgaactctctctctccacaacactccccaccacaacccaatctgattagtgtcaacacagctgccccattctgaggaatgtaaactaatattgttgttagacctccctcaaccttaggaaacttcctcaaagccttacagtctcttcaggatttttttttttatccctttgcacaggtttaaatacctaagacaaacttgctgagaagagatcagaaatgcaaataatcagtttcttaaataaaatcctgtatgctataatacacatttacatgtatgcatgtataaatatttaacaatgcatccctccaaaataactttatttgtcatcacacgtgaaagtacaagtcaccctccagacgacagaaacgttatcacagccccttctggatttaggtgggtctctggattgacagacttaaaaacgaagatggctttaaaaaatctcacctgattattttgaaaaaagcttcatttgcttttaggatgaagtctggaaatagaactatgctaagaagttaagacacagtcaactgatttttcttactggtacatgaatacccatcagaggattcattgcaatgtatctagcagagtgtgatctgctctctgagtctgtttttctaaaaagtgattttataaactcctgaatattattttttcaaatacataatgtcacccagattttctttttcatcttctcctactgtttcatctcctacttaataaaaaaaaaaaaatcttacagccaccacagaaaacattaaccaagaaaaggagattcctatatacaatttgcaaaacattacattgggtgaccgagaaccgcaaatacgtaagtttttttacaaaaataaaaattaaaaagcatctctaaatggagtgctaaaatctaaaatccttacctcactaaattgagtctgggcattgttttccaggtacaacatgttagctgtaagattgatcaatgctgctgtcctttcttctggctccaggattttgccaacccccccaccccgagacccttacaatatgaatctacttaagaagataacagaactcaagtccctctctctctttctctctctgtacataatttaaggtttcctaatatatacccaactataggcatgaggaggcgggactcttctctttacctgtccaatccatcaacttccacctggactcctccactccaatggagtgaggcctctcccatctcattaagtagttagaattccttatcaccaatctttaaaagaaaaagaaagaaagaaaaaaaaaacaaacccaggagacagacaggtaaaactttccctgtctctttcataagaaagtgcactgtcttttaaaaacaaaacaaatctccccaaacaaaccgcaccaccaccacgatttacagaaggcatttcagaaagttattttactctttgtaactgaaaagtaaacttcaggaaaacttttagaaggcttcttttttaaaatctagatttggggtttcaagaatgattacacaaagttagaaattaggagagagtacgcaaatccactgttacatttaaccaatataaaaaattaaaacccactgcctgatagctaaagagtttttaacttattttccccagagaaatgccagtggtttcataacaagcaattacaaaataagctacctgattttttcgagcatgtttcaataacaagttaaaccaccggtcccgttaacttacaaaaacaaacaaacatccatattatgtacgggaaataggaatcctgataaatgtgtcctttctttcttcttttttttttttttaacaaaacgcttatctatttgaatatttcttttctctattttattgtacccagtttatactaatatttttgcttgtgaataggtaataaaaatgattactgcacgtgatgcatctatgtaaatgattagtggaataagtattaaagcataagatatcaattggcttttgttttaaaaatacatttacataaatacgtaccaacattcatgtagaatctggccttggtacgaagatttagtggagatgaaatgcaccctgatggttatcatctgattcattaaaatactctctttactgctgagtatttgtaattcagttagatttatttcttgacatcatcctacacccccaccccccactcagggacccaatttcctctattttgcttgaaaggttgtaagtggccaagataactataagtgaaaattgtgatttcttctaaaatttagaagacacaaagtttagaagagaattggaagccagaagagattagaacatacatttcagaaacaaagtttgcaaatacgttcacgacttcggatttgcctcccctttacttctacttttgcatccataaaatttatgcacttaaaggatgacgtggtcattggctgatatataagacccataggttactggtaataatgcttccttcttttatacacaaaaaccaaaaaactcccataatataatttgatcttgagtatgcaagaatatgacagtactctgtaacactacaaatttatatcagacaaaacattcatttcttcacacatatattgggaagaatgatctctctttctacctataattaaccaaatgagcactgcctagaaggcaaaaaaaaaaaaacctacttacaaaatacagtataattttttgtacaatgtgtctaaattctacacctactgacagcttaagagtcaacagtagaaagcagatggttacttccttaaaggtatgcataattcctgtggcccaaaaacttggatgatcctgaaaatcatccagggtgctttttaaaaacagatttctggacgtggccccagacctcctgaatcagactctgcagggttacagccccaacaactggattttatacagcctgctaggcggttctggatgagtcacgcttgggaatcaatgatctagaggaaatgctgttagcacaactgcctaccaaagtcattattaaattgttttttacactaatgggatcatgtagccatttgaacacctaaatctaaggctcagggtcccaagtattgatatccact

SEQ ID NO: 316479 - DNA, 4001 bp, Homo sapiens
tgcagacatggtgctcagtgctttacacgtggtgacacacttaacaatggcatcgccttctaagggagagaggacaattactgtccccttatacagaggagaggagaggcagagaaggggtcagtcctcagccttctctacttagttctcttagactgatgctcccaagcactgacaaagaagtgggaggggttggtcagctcacgataggggcctaagggtggtgagaaggggtggtgagaaggggtggagcccaggggtgattctcagaggaggaattcctgcggtgcagagcaccctgggcaaccccaggcctcccaggaacagggaaactgggacagactgtttcttccacctgggaggagtctcccagactcacaacattccaggggcctctgcctccctccctcccacccagttgagggacaggatgctggctaggctcaggtcatggtcacgcaatgcaggacccgctgagaacgactgggtaaggccttctctctcctctctgggactcagctttccctgctctctcatctgtgcaacaggattgaccaaaccccacccacagctaccggataggaaaccctggggagaggggccctcagtgcttcccacaccgacgggttgttgagcttacaaaccctagggcctaagggtggtgagaaggggtggagcccaggggtgacaaggtggggaaggctccatagggcagaggccaagtaagttactttgctctcccctgttgtccttcggccttggggctggcaggcgtgtggtccctgtcctaagccggagaccccagtaagatggggaggcctgggcccaatctgacctgcaccttgccctccctgcttgccttccacctgctgagctggtccgttcctcagggcctttgggctggctctcccccagctctctcctgacacctcctctgagaagccttcccttctcagctgtctccagcgcccgagccgcgtctgggtatttactactctctatcccgggagtgctcaggactcggtcccctagaacaaggcctggcacgacacgagccctcaacaggttgttatgacgggaacaactgaatctccagcaccgccaagccccgctggggactggacgaccctgcggcccctcctcactgcagagaagagggcaaagccagcccccacctgcattccccgagtccagagggagcggaggcttcgacatggccccctcacggggcagcaaagccccgaaccggcggcaggcttggctcaggagcacctcggccgctgcgggcagccaccgtggggctggagcccgtgccgccaccccgcgccggaccgggtcgccgaggtccggatctccacccgcactgcctccagccggggccgagcccgacgccgctacgtgcggctccctcccgggcctcgcgtgcccccgcgccccgagcgactcccgactgcccggcacccctcccgtgggttcccacatccagggccttccctcccaaacgccgccttggccgtccgagctgcgcccgagcggaaatgggccgctcgcggagcaaggaggggaacggcggctgggcttcccgccggggcgagggacggggctccccctctagctgcggcaggagacggggagaaggcccctccttacctgacagcccgggccgcgctcaggaccggccgccccggccgccccggccgcccatccgccgccactgggtgtgcgcggatccagcacaggccgcgggactccggcctccagcgccagaccaggcggcctgggccgggaagcgtcgcgcaaggaccgggcgcgaccggctccgtggaatgagggctaggcaggaaaggcgaggcggggtcagctcgccgggccgcgggtctcgcggacaccctgcagcccttcccgacagcggcgaccgggaaagcaagaccgtctttttcgtccagcccaaattgcgaaaacggccacagtcccacaagtcccagagtcccagagtccctgttatcactcaggcccgccctctaacctccagcagcctataggaataagtcatcactgggggaaaaaaaaaaaaaagtgggagagaccaatcaaattcccaagaggcggagcagcccgctgacctcttaaagagacagcacagaggaggtgcagagacaagacgctgcttcacggaagagagaggcctgcgtttctcactcggaaagcgggcggaatcgaagactggaaagctgaggacgcgccacctctcgccctacgcgccttccagctggcagcagttgtcagtggaccagctggcggcagccgcgctccacctcccggcctgggccgcggccggaccgtcggggcggagcctccggggaccgccccctcgcgtgcgggcgcttcgggcgccctgcaggggtgacctggggtcagcttgggggaaggcgtgtcggggaccctccccggcgccacgcgctccagccgcgccacgccgcagggccgccgcctcccagcgccctgctccacgcggcgccgccatgcctcgggcactcctcttagcaaccctgctaggcagtcattatagtcaccttttacagggccacctgaggcttggagaggtcaaataacttgaccaaagccgcgcaatgaggaagcgacacagccaggacgcctctccccaactctaacttccacagttcttcacgcctgttcctctggaaagccctccctgattgcgcctgtcttatcccctggcatcgatgctgcattcaccatactcaagccatgcgggtctctgtttctgtccctcggctgttccaagcttgttcctgctcctggctctacacctgttcccccgcagagctggctccttgccacatcatgtcctctagagggttttgtggacaccctcgctggagcggctgtccagtctcatttccttccgagcatcttaattctcacctgattgttttcatttacctgcctccccgtccagtctccccaccctattatagaattccagcgtcatgaggatggagccaagagagccaagctgcaggatgtcccctgcagcatcctgaggctgactcagagcctcgtgcagattgtaggcactcagttattacaggcaccccaagactcacaccttgcgacagcaccgctgggctggaatgagattgggtcccattcttctccttgctcctgtcctaaaaacacagggagattggggaagaaaccaccttgtgatcctctgggactttcccagcctggaccacacccaaatgtgcatacctaagtttaggcttctatattcgccagagaggctgggcaatgccggcctgcgtaatcacgaatgaccacagccacaatgagccgtggggaatccagtggctcctcaagttcctcccagaaagttatacacatcactctcacgcacattcaattggccaccgcttctagcctccagagggcaggaaactgccaccctaccatgtgccaggaagtagaagtcatgggacatgtgtgaccaggcctaataactaccctctgtaaggttcttgtatcggttcgaaccctgcgagcgcgccgacacacaacacgaggcggtgtggagcaacatgctgtttttttttttttttttttttttttttttgagacggagtctcgctctgtcgcccaggtcggactgcggactgcagtggcgcaatctcggctcactgcaagctccgcttcccgggttcacgccattctcctgcctcagcctcccgagtagctgggactacaggcgcccgccaccgcgcccggctaattttttgtatttttagtagagacggggtttcaccttgttagccaggatggtctcgatctcctgacctcatgatccacccgcctcggcctcccaaagtgctgggattacaggcgtgagccaccgcgcccggccgcaacatgctgttttaatgagcgcctgggtgcaggtgggctgaggcctaaaatggcatcagccccaagtgaggacg

SEQ ID NO: 316480 - DNA, 4001 bp, Homo sapiens
caacatttggccgaagcaaatattccagaagaaccaagtcaataaagagagaggcttctctgacagatttccctgctctaaagggcatgataccatctccagtagatgctaagcaaaggtcaaagtgccctaaaactcttaattggaagaaatcttaaaggacatctagttacagtctccaaaatgacatggctaatgcttctgcttgggactcctagcaccattcactacatattgtgggcaatgaaagagtaagagacccatatgtgacttgcagctccaatgatactggctgtgtgacttgtgcatatcacttcatctttctgggcctcagtttctctgttttgaataaagtaatcaattaaacgatttcttcaggatccttacagccagaaagacaccaagaatatatagaagttccagcctgaccaacatggtgaaaccccgtctctactaaaaatacaaaaactagccaggtgtggtggtgcatgcctgtaatcccagctactcaggaggctgaggcaggagaatcgcttgaacccgggaggtggaggctgcagtgagccgagatcgcgccactaccctccagcctgggcaacagagcaaggctctgtctcaaaaaaaaaaaaaaagaagaagaaaagaaagaaaaagaatatatagaagtctgccaaagattatatagcattacaacccaatgcatttgtggtggccccaagggatgactatcagtactgtcataataaactcaaacagacacacacacacatacacacatgcacacacacacagaggaaacatttccttccacaactaagaatgatataaccttttgagcatgaaaagaaaaatgatagctaaaattagcatcttaaaaagtaaactacataataactgaagatgagatttccttaaaactgtagaacaatgagatactatgatagctgtcacaagagaggaaattgcatgagtgtatttgaaaggatttgggggtgtttttcccccattgagatttgcttttctacataccacagtgtgactgaaaagctaaaatatttccccagggcctgtatgatctgtgcctcactacgctgcctctgacatttggagagtgtcatttagccccgaattaaaacctgcttatacagagatctggaggatgtctcaggcgccaagtagtcatcgctgtctcatttgcctatcacctttcagtttacaactcccctttacatacatgccctcgtttgttctctaaaaacagccctgtttgatgggacctatatattattatgaaatttccctcagatgaattcaaaaataaccctctcaaactgcctgcaaagaaataatcaccttttgtttgccatttaacggttcagaaaggcttttcacttcttttggcttttggggataaggtatgacctgctgggttctataatagaggaagagggaagaaggaatcaaatctaatcttggccttaacctgctgatccaattggaacaaatcacttcaattgaccaagcttcagttcactaagccaccaaatggagaaaattatacccatcctactgcactatagggcagttaagatcaaaatcaatatatagataagtatgtcaagtggctttataggctaaaaaatgctagcctacaagcctcatcaaccctggacagtaaggaagaatagggaaatttcacatggtaatgcaaaactacaaacctaaaccaaactgcaagtcagtgggggaggtgaccagaaactcggcttaggggacagaagcaattggttcatagagaaataacccatctctgcagaaccagtgacaagccacttgatcttacctgactaggctggtcctcaaggctcttctttctctttctgcacaaagggggctagaccacagatagtggccaggagaggtgtgattggctcagataaagccaggcaagacagtgccctgtgctgtgaccccactcagtctgaatctcacttcaccaagtaggctgagagttacactgccaccctcaaatagtcaaatgaaaggactgaggatgtttacagggtggaactcaacccgtcagaggcagagaattgggtttgtgggtggggcctttcttgttctgcaatgacacacctttacctcctgtcctctccctcaagaagtcctgcatttttctgccaactccctctaatacacatccagctgagggagcaggagcagcctatcatccattcctccatggcttctgtatgcctccaagtagttataattaagcttaagcctgaggcctacactcctatcattaatattctttatgatggcttgatttattggatatttgtgattttaagcatcactaccactcttgtcaaaaatgtagaagacatgtagagcagtgtatctctgaaaacaaacacatgtacacacaatctctggtcagtattcctattaggaaatgtgccacatgatattgtctctatgtaagtgtgtatccccctccctagatggggggccccttgagggcaatgctacatcttattctctcatatactcctcaaaacacccagcagatagtaggtaataaataaatacacattgaattaatgatgatccattaatatctatttagtgaatcctgatctgtcatttaatggctttgcagcctatagcaagtcataatctatctttctgaggttttttaattttggtcatctgtaagttgagagtatcatttctccttcagaaatgcagatagaacttgaaaggaagcatatgagaataaacctaggataagatttgacatagcaacggtgctaaaaaaatgaaatagaatcttaatgaacacattctgaaacctaagcaagtgtgttctacatacagagttggtataaaataaagtatgaactgcacaagtaggtggattgctgaaagaaaggagagcacagaaaacaaaatgctgttatgtgtatgattgaatttcaatcttctatcctaaattctctacttcattcagcagactctggccaaatcagattgtatttgtttgatggctggaggaacgggtgtgcgctgacaaagtaaattggttgaattccattcttttaaaagaaaaataactaatattcacccttcaaaaaatgttgtttaaagttccaggaatactgaggtcatgaagcgattccacaggaaatgaagtgcaaactggcaactcgccactcaggagaggtcacaatgaataaacagtccttttacctgcttccaccgtgtcgaggacgtcatgtatactaactcaacagtagttaactgagcaactaccttgagctttctcagttatccacatagacaaggatatgaaaaggaaccaaacacattctctggcataaggagctcaagaagataaaatttgtaagtgaattagcattgcacgatatagaagatgatgagcaccacagacaggatcctaacaagtactatggtaatccagaggagggagcaactccaggaaggctgcacagcggtggaggcggcattagatccgggctgttaagaagagccaggatttcaacaagcacagatggtagagttgggtataaatgttattggtgagatggactcagccacagttacctgatcaaactgatttatgccccctccctaatacagaccccaggctgaaaagagagttttacagaaccggtatctaggtcacaccacttagacgccacaaaactacagggcaattagaaataattgcgaggcaaataccgttcccactcagctccaaatgtctttatgacagctcagggtgggggcacaaaaggcaggaggagtggagacatgctggatcccagcctggtctcttaagagaaggactaagcaatgcactgctgtttgaagtatgctattttaaagggcaagaaactctgtgaaaagacatcaattgttcacacggcatccatctaattatcgttaggtttccagcggccactgaacactcc

SEQ ID NO: 316481 - DNA, 4001 bp, Homo sapiens
gctctagtcagaagccagtcatttagtatttttgaagagtagaaaggtacccaataattgaatttttctgtttaataacaaaagactttaaaatcgcttactttgcagtccaaacaccaatgactgttataacagattcaactgccaatgatcagaagtcacgactttttaacaacttttgagctcaatcccaactttcttacccaagaaagcaagaacttaaaaaaaaatctaaaacactcgtgacattggagtcaatcggcttcgggaaaaacatcaaaaactaaaaactctatgctcatccgagtatgtaaacgcaaggcttgattagttcaaaccaaattaagcagtttgggctccaaaattacgcaggaaactcacgcttcatcactgaaaatttcttcctaaaatactctgaggaatcatataaaatcttaatcaaaagtttgctaagacatttaatagtcttatttacctgataaatcatattcagatcttaaggtagctttaccaacaaggggaaacttaggtaacaaattgttttttttttttaaaaaagcacaaattattcccacagcctcaaaaatcaatttctatggtgcttttctatcacccttctaacagattcctcttaattctagcaagcctcgtatgttcgcatcattcaatgctttccgaatccaatacccagagccccacagaccagctacgtatgctgtttaaaccctagaactgtcttgttcccgcaattcaatcaaccctcactgaacacctttaagaggtggaaacttaagggaaagaaaactgtagccaacacacgctgtggttctaagtattagaacgcctcaaaacaaaggaaataacggcgccgtaaatggttgcccgccaatttctccttcacaatcccgtggaaatgcgatgtccacaaaatcatcttaacgactttgtggtctgtcctaatagaatactgatacagatttttgcctgggaagccctttcggcatcagagaaaagcgcttcatttaggccaaacacaaagccctcacgcaatcccctccacctaacgggcccagaacttagtcggccttggattagtttccatcttaagaggccccaaagacatcccagactccgtcctttccgtggaggcaaagacggtccttcgttaacctaaacaccggcccaaagacccaaaagaacgtcgtctgtccccttgcaccccaccacgcggccttacgaagcgcggcccgctgcgggtcgggtccgcgttgccgcgcggcttctccgccattttgtgcctctggcagctcgcccagcccgccagcccaagatggctgcggcggaccttcgcaggagagcaacgccgaaataagatatcgctcccctcccccaacaccgcggggacgcagcggccattttcatcttccccctcttataacgggaaaaacggccgtctcgggcagaagccacataaacccgccgggggcctccctccttcacgaccaaaggcactaaggcactatccacaaaggctttttttggttaaatgctgtctcccttgcctgccctcccggcttcagacttcggagcctaaaacgcccctgcctcctggcccgaggccgacgggcctagaaaaagatgcaaggagctaggaccacacagccaccccctaccgcagctctacgtacccgctcgccgtagttctgctcgccgctgtcgctcatgactcctggctgctgtcgccggtcgatgtgcttcaatcgaagctgccaacctcttgcaccttccttaaggaggctccgccgcagccccgcacgacgcgccggtcgcccagccgctcagagccgaaatgctccgcaccgcctccgcacgggctctaactctaccggatgtgacgcggcgctccttagccaggctcctcccctcccagaaacgcgcgctttcttggcctcgcccctcctcgctctgcctttcctctccagctgcagcgcgtcccgcacaggaagtgacgtgaccccgcccctcgcagggccccacccccattcacgagcctctatgaggcgggaaagctagcgtgtcgtttggctgctgtagtgggcgccacggagccacagtgatgtcaccagccacttctgaatcccttctagaactttccagggaacctgccgagtgtgcagggaggaaggagatgctgtttcccccaatctcaattcctttctccgccttattagtttcttgttttgtgtctttcctttgttagagaagtgaatgttcgtacattgggttcttacttaattttgtcttacttgtagatatttccttcctgaatacgtcttcatttaaaaaaggtcagatcgggctgggcgcgctggctcacgctgtaatcctagcactttgggaggccgagacgggtggatcacgaggtcaggagatcgaaaccattctggctaacccagtgaaactccgtctctactaaaaatacaaaaaaattagccaggcgcggtggcgggcgcctgtagtcccagctacttgggaggctgaggcaggagaatggcgtgaacccaggaggcggagcttgcagtgagccgagatcgcgccactgcactccagcctgggcaatagagcgagattccgtctcaaaaaaaaaaaaaaaaaaaaaaaaaggtcagatcggctgggtgcggtggctcacgcctgtaatcccagcactttgagaggccgaggcaggcggatcacatggtcaggagttcgagaccagcctggccaacatggtgaaacccagtctttactaaaaatacaaaaaaattagccgggagtggtgatgcatgcctgtaatcccagccactcgggaggctgaggcaggagaatcgcttgaacccgggaggcggaggttgcagtgagccgagatcggaccgctgcactccagcctgggcgacagagcgagactctgtctaaaaaataaataaataaaaataaaaaaggtcggaccttaatacacaggaatcagacacaatctctattctaaagttacaaagtaatgtgctagaaccgttaaacacaattagaaaaaatgattgtaagtgccagaggcatgtataactacaggggtgtcacaaggagggaagattaattctgccatttcgtaagagaatatagttggattatagtgagaagagcccaagaccaagtcggatactttctttcttcttttttttgagacggagtcttgctttgtcgctcagactggagtgcaacggcgcgatctcggctcactgcaacgtctgcctcccgggttcaagtgattctccgcctcagcctccgtagcagctggaattacaggcgcctgccaacacgccaggctaattttttgtattttttatagagacggagttttggcatattggccaggctggtctcctgggctcaagcgatcctcccacctcggcctcccaaagtgttgggattacaggcgtgagccacttcccccaacccccaagtcggatacttaattcctctacacttcagtctccccatccattgaaaaggtggtacctggctgatgaggcactttgatactggtaaagggtcatttgattttttttttttttttttgagacagggtctctctggctctgtcgtgcaggctggagtgcggtggctcattgcacctcccagtctcaagtgttcctcctgcctcagccccatatccccaactcctgattttttttaacagctttattgagatacgactcacctactatgcagttcccttatttaaagtgtacagttcaaatggcttttattcacagaattgtgcaaccatcaccacaattttagagtagtctcatcacattaagaaaagaaacactcattaatagtcattttgcatccctcctcctctccactcctcacaaccctcccagtcctaggcaatcacaaatctttctttctcaatagattaacctattcaggacattttatatgaatggaatcatatggta

SEQ ID NO: 316482 - DNA, 4001 bp, Homo sapiens
tggagaaatacagaatatttaaccaattcctaccaaggcaagaaaggagacaataagatataataggcaaggcaaaacagaatcgactaaagacaatatgtttactctttatttaatcagtaattgcaacaattttaagtagactaaatggtccagttaaatacaaagattatcagactggatttttaaaagtccaactaaatgttgttttccaaggctgggtgcggtggttcacacctgtaatcctagcactttgggaggcagaggtgggtggattacttgagtccaggggttcaagaccagcctgggcaacatagcaagaccccatctctactaaaaatacaaaaaaaaaaaaatagtcaagcatggtggcaggcgcctgtagtcccagctacttgggaggctaagatgggagaatcaccttagcccaggaggtagaggctgcagtgagccgagatggcaccactgcactgcagcctgtgtaacagagtgagaccctgtctcaaaataaaataaaataaagatctttgcagtaagctaaagtactttttaatatacaaaaaaagaaataaatgctgtttcaagggatacatgtaaaacacaaggacacagaaaagtttaaagtaaaaggataggccctagcactttgagaggccaaggtgggtggatcacctgaagtcaggagttcgagaccagcctggccaacatggagaaaccctgtctatgaaaaacacaaaaattagctgggcgtggtggcgcacgcctgtaatgtcagctacttgggaggctgaggaaggagaatcacttgaactcaggaggtggaggttgcagtgagccgagatcacgccactgcactccagcctacacgacaggagcgagactccatctcaaaaataaaataaaataaaaataaataaataaagtaaaaggatagaagaaaatagagtaggcaaacagaaaatagagtacgcttagaggcgagcttaatttctagtctaaccaaacagcagtggctccctcagcatggggctcaggctgtcagcaacacaggcctaaacaaagctttgcaagtaagccagcagccatcagtgtcatgcctgcctttctgcttcctagggcctttagccccacaagaccctgtgattattatcacccaccattcccaggggtaacgctgccttatctcttttgctaggaggtccaaaccggcctgtccacatctgctaggggaatctttccccactagctgtacactcaacagaatggccctacacggtcagcaggacccctggataggggagcatctccttgccttccccatgttaaacgggtttgctgacatggcgaatacattggggtgtctggacagtgagatgactctgggtagaataattccaaaccatcaagtaaggcacagcaaactctcttgggtagccagaagcctagcaggtttctatctggaagaaataaaaggacttgttgatgtggtgaaagctcacccttgcccaggctaacggttttgaaatcacatctgtttgtataggtgatcaaggaagcatctatcttcactgagccatcttagtccccctcaggcttagctcagctatcacctctaccagaaagcctgtcctgacccacttctgcccaggttgggaagctcccgtggggcctcgtctaggaggaaggttctcatcacttgtctggattccggggttggaccgcctggaggcccaacacctcaaggccctgaagcggtacccgggcaaacaccgggccccaacactgcagtcactcaccactgcaagtggaaggtgtggccgcagtggatggcggccacgtcgcgggagtgatcgaagaagtcggagcagatagtgcacagagcacggataggcatgatggctggactcaaggggcccaggcagccaaagaaactgctacaggtccggcttcgtagacgcgcccccgcgcctccgcttgcttcaaatttggctccgcagcacgacttcctggagcgggccggaagtgacaacacaaaactttgggcggagcgtgaatacttcgcctggattggacaaattctcggatgggcggaactatgggcggggcttagcggccccgaggccgtagagaatcctgggcggagcgcggtcgctctcaggcgtcctctggggagactcgacctgccacttgagagcgcagcattatatcaaggcggggagcagcgaggctgccagctggacccttttccagggcaaggcagcgcattgtggtcccatgccagagctggcgcgaggcaggctgggccaaggcagagaaaaccgcagccgcaagggaatagaacaatggtcccgatgggtcccttgggctctggacagtgatggaccatgcgctatggtctgtagttcccatagaccacaataccctaccctctcagtcctcagttccgggcgattctagaaagatggacacataggccccagtccctcaggtcaccccaggccaaccttggcttcatccaagtaagatatgactatccttgagtttggagacactagggccagtaccctgactttagctcttagctctcaggaggatcagttatgcttgagactgtagtagggttggaattttggaggcccagatgcttcaaagactagagactaacaaatcctttttattattcccacatcagagaagttatctttgaggaggttatctttgaggtcctcccagagagcagcatccctggtgagttcacccaggcccacctgggctggagtaagtcaacttttgggtttttaggcttagtatctgtggcagtgttactccctctacccagaagaaaccctgtgcatagtcccataatataaagctgatctgctccagctgaaatagacccagagtgagatttcatttggggcataggtggaaagcacaggtgttcacagaaagaaggaatcaacacagagcagcatagaatctttgtgcattgctcaccctacaccctctccctagctcagggaagctatctttggctatgagcagggtctgtccttgcggtggctggcccaggtagattccagctctatgcctaaatcaagagtaaggctcctcggtcaacaggagtcaaaaacagcagcccttacttgagctctcagcccagggagtattccttggtccaaatgcagcccaagacccactactcacatggatttctagagttcagaggacccccaccaccaccaccattgaggaatacactgtggtgaggatgatcttcaccctcagcccaagaaatccacagggcactgttcactactactcccagccactacttgtgaacctgctcccagcctctcccttccccactgccttccaggggctcctccccagtaggacagaggaagcaaaggcgagagggtggccagaggctttgcagggtgatgtttatttgccaggttcagtaggcacacagttaacccaccgaccttcacacaccagagcagacccacaggcatgcagggagaagggcaggaccaccacggagtgccgagcaagggcgaggaccaatgtggctgcctatccaggctgtggtagggtctgacaaagggcacctgtcaggagcctccctcaggaaactggggagtttaaccctacttcctcatcccagaaaaagcaactcaatgtggctctgaggcacctgggcctctgatagaagtgagctgtagaaagagggagttcctcttcatttcattgttgaactgagcagaaaatctgcccctgtaaagggcaaacctccaaatcagattatgagttattgccatgcagcaagccccctagggtggagaggacttgtgggctgagattgtaggaggtgggcatctaggaagagcaaggaggtatcagccctccctgtttggcccagggtaaggacccagtaaggctgggacactgggtgctgggcttgtactctgccctgccaggtctcattgccacgtcct

SEQ ID NO: 316483 - DNA, 4001 bp, Homo sapiens
aactgtgaaataaaggagattccactaagagaaggagaaaaaaaaaaacttctaaattacacatttagaaaatatgtgttattccctacattgtaatttacattttctcactctgttgtaaaagggatatatatttcactgtccattcttttctgtttcattaatatagccaaataaaagacccatttagattataaattttcaatagaaaacacaaataaaaattatactagagagaaattgacaaggccttaaatttaattaataagatgtgtaagaattccataatgttttatttgagcatgttttcagaggataagacatcaagttttatggcttaaatcagtgatagaaaaggaaaagatcctgggtcaggcatggtggctcacgcctgtaatcccagcactttgggaggccgaggcagggggatcacttgagcccaggaattcaaaaccagcctgggcaatacagtgagtcacgaaataacataacataacataacataacataacataacataacataacataacataacataacacaacacaacacaacacaacacaacacaacaaaataaaaggaacaaattctaagccatggccctttgatgaagagtcctcccaggcagggctactcctgttagcagatttttcctaggcaattctcactcggtttacagcttctcctttacaccctggcccacctctgtgctctgagggcaggaccagtcctctctctgaccccaggaattaacataaaccccagtaaaaacctggccctgggtgcacgctgcttcaacacacaaaaataagtacgattgcctcagtaagatgcatgtttgaagtgtctttaggcttattcaataagatttacatgttttaaagcctaaaactgactggaatggaacaggagctcacttctctcaggaattaactgttttctggcccagacagctctcaggaagcagcgtgtagacaggacagaaaccagatgggtcatcaaccactggactctgaccagcttagaggaagtgagaggtgtcagccccacagcaagagacacaagccacagcagatctgattagcaagccctccatcactggggtgtggatccgagtcccaggcccaagcatttagtaaaggacaaaaaagaaagggagggtggaagagagggaaacgggagagagggagggagacagtctaactctgtccttcaccttctgaaaaactccttgctgacccaagataccaggttagcatctaagaaatcaggataaagacaagacataggattagagaaatcagagctggagaggcggaggaggccttagaaaccctgtccacccactgcagagaactgtgaagggaaagggagtggcagtgcagggggtctgggctcaactcagccctgtgctcatgccctgcaagtgtcacttgcacctactgagcctgggcaaggggacaaggggacctgggaacgggagatgggggggtggtgagggcagtagttgtgtctctgaagtccctttgctctgcctatcattcaacatggcaatttctctaccacatgaccatgaacaacctcccaagcagcacggagcaagagagagacagcttctcctgtggtcttttctcctttccgaccacaccacaaagaaaacagacagcagacagacctggcaaacaaacttaccacaggcgtttgtccgaatgagcttgccgtggcagagtcctggcagaggctgagccctgacgggctgcccgaattgaaaaaccaatgccatgtgcagacataaactccaaaggcacttcagagaacagagagagcctccatgagagctcagccccggcagtacctcgcacagccaccctcccgtgccttcctcagcagttttctgagtttgcttgttagggcaaatcctaagattgtgagctgtcctggaagcacaatgggttatgtaactccaggcagcctgggaaccctatcagctcatcttgttaagccaccccaaacagaaaatgacgcacccaaaaatgtgatacctctaggttgggggaaggggagtagcaaggagaacggggctttgtgatgggcattcggttttgcctaaaaattaaagtggaacaaaaagtctgctgttcatctcagggcttgctgggaactgggggaggagtgaatttatcaagggctgaatgccaagcagtgtcctgagactgcacttggcaaagccctgggaggccacagatgcattcttggggatagtctaggtctctcggagaacttttttccatttaatgtcttcctttcaatgactgcctaataaaactttaatccgagcatgttctccatcacctgacagcccatcccttaaacgcataagagtgtctgtgtttactctcctgtttaccaagccagtgctaaacacaacagcaccgagctgtttctcagctttcctctggtcccaacaaagaacccccaagtcaccacatcctatagggtttgaagtttcagcactacattctgccacttctttgttgtgttttttgttgttgctgtttcgttttgtttttttgagagagtctcactctgtcgccaaggctagagtacagtagcactgtgtcagctcactgcaacctccatctcctaggttcaagcaattctgcctcagcctcccaagtagctgagattacaggcgtccgtcaccatgcctggctagtttttatatttttagtagagacggggtttcaccatgttggccaggctggtcttgaactcctgacctcaggtgatctgcccgcctcggcctcccaaagtgctgggatcataggcgtgagccaccacgcccagctgtgaagtttcagcggtacattctgccatttctttaccctccactgtcacattcaaagaaagtgaaagcactttaacaggctggatgcttcctggatttcactggtacagatgccactagaatcccaaggatcaattcatgtgtttggacaaatgtagatgcggttgggtcatcgcctcctccacaaagccctcgtggtcttctcctgtcctttcccctccaaggttcagcctggcaccctccttggtgccctactgtgctgtgcttatcattgtgctaacctcggtgtacagccaatttctactcactcatctgtctccccaactagactaaattcttaggcagcaaagaacccttgccctggggtcctacagacctggatgcaactcctgccactcaggagtttcaccaaggtgctgaacctttcgagatttagactcttcacttacacaaagaggataatagtactcactgcacaaattgacacaattgatacacccaacaaatgttcactgagcgctggccacaggcaggcactacgttagtcactggattcaggagtgtgcaaagtagacacagagtttgccctccgcgactttagtctactgcaagtttgggagacaaaacacaaatacagtagttcagcagatggttaagtttgggggaaaaaattaaacaggaaagggagatggggaaaggtgaggcagatcactctgtattgggggggggtcacaaaaagcatcaaataaaatgtcacttggagaaggaagagggggtcataaggatatctggagttaaggcaatccaaagaccctgaggctggatgtgcctggtgagttcaaggttaagtgaggcggccagtgtacctggagcacggagggcacagaggaggcaggtcagcggggcaaagagggattcctgtcattcagccccttccttacaggtctctatagaaggggagctcactggaagtttggaggagagttaaaccatctgattgtattaaaagccaactctcatggttgagcggagaaagaattttagggaggcaagggtagcagtaagaggccccactggaaggccagtgcggtcatccaggtgtgagatgggggtggctgggacacagtaaatgctgggtagattctgaacat

SEQ ID NO: 316484 - DNA, 4001 bp, Homo sapiens
taaagggaactggatggtgtggcatttgggtcatggtattaggaaaccttcttcctccacttctaggatggcatccacagagctatggccccacctgactaatccacggggcctctgacagcaccctgctgtaaccagtgctccctaatccaatggtacagtgaggatgtattcaatcccttactttaaaaagttatagagggttcaatgagtcacaaatcaccaaggaaactagaaggaggtcaatgatggtttccaaaaaggagcatctctagaatttccttttggagttaggtaacagaatgggaacttgcttttagaatgaatatattccaaagaaaaaattcactcatcttttcccctcatgaccctgggaactgcctccaatccttgttactcaaaatagttaaagatgtacacagaacgaacatgacaatgtctgcatctaaagctgggggccagtgagattgaactggcatagtttttccacacatttaaataccatcccctgagaaagccttaacccacagtcgcggcaaaaatcagtggataagagataattatgtagtttttcagtttactaactaggccaggtcccagcctgttacatcattcaggttaatcaaatgtagtcaggaatagagcattctgaaactcccgactcaattaaaaagcacttaccttatctattaatggctcatatagggctgggaacatatcatcactggggaacagaccctcaaagtgtatatattaattgggccccttttttgtgaaggcatgtgatatgagggtcactttcaagacaaaattaaagacagattaactgtgtaatacacaattttgatgtccaacaccccaggaacctgagaccccgcccactgtgatgtctctgagaacgcacctcagtgctgttttctgtgtgcttgaaacctcctgagacctgtccagccacacaacttggcctccacccagtctcccttggaatgtgccacaccctccctgcacaaaccaaggtagtgacagaaggacacattctttccctgcccctcccatcacctccccacccccatctctgttggatccaacaagcaaacttcatttgaatcacccgctaagtggtaagctgcttctgccttttctccagcctctgatggttcccaggtctgggctcagaaaagggcagagtcttccaggcctgctgctgacagtccaggaagccacctcctgaacacactattccaagcccccagtttcctatcccctccaacagcaagagcgcagtgaacacatttccacttgcacacattcatgcatcaacaacacactcacgtctcacaccagagaaaattcaatccaatagaagtataacacttacaagcccagcacaccaaaaaccatctccccttctaagcaaacaatcatacatactgcaggagtctttcacggtaaagagccctgcccacctgccacctcctccaccatgcctttggaattgccagagccagtggtgctagttctggtacctcccacccgccagccgcctgtctcccctaaaggtttcaggacaccccccacccagaaggagacaatacccctatacatcccggctctgttttgcaggggccataattaccatccgagcattcttcataataccagtctagttcataataatccgcttcgataaatttctgcatagtcagtagtcttgcagaggaaagaatggacttcacagcaccatcaacgtcaagtaaaacgctgccatgcctccccgcccttccagaatactggacagaagaatatcccgaaacacaccagaattaggctgtacattcttaacgacagtctggagccaaaacagtaaagtgggcaatgaaaagaaaaattctatgggggaaggagggagtaggaggagcagaaaggaaggcaatttgcagagagctaacggagaccctggcagcactgccaataaagcagcactggacagcagccctgaatgggagtagccaggatcgtcctatccagacgcctagagggtgacgtcagagacacacaccaccactggctgtctcactcaagcctcgtctcctgctcgccgctcatctttcaatctaaccgttgccatagaaactggccggctctgaaaaatgatgcagagatggaggaaatgtcttccaaggatgctggcagcagaggctgagagatgccaggcagggaaaagaaagggtacaggcaagggagagacagaggggtcagcaccatcatcaccttcaagaaacgtaaggacaagcttattcaccctactttgggtcacgatagaaagaagactctggatttgaaatctgccaccttttaaaatctgcaaatcattacttttggtttcctttcctcaacctgatttcacacattaaacatcttctataatttttgaccaccacttaaaggaaatgtaaattacttagaaaatggaaacattttcacttagatgcactactattctctgctcatgcttttgctcaaacttctagaaaaacagcctgtcacatacaaatagaggagggcgccatcacaaagggcttgtgcagtacaatatgctgtttcatggacacgtacatgtgtaatcaaggcgttaaagtgcacactagaagaaaaaagtccacctgcaggaagttagttgcctctggggaaggagtgaggaaatgaggttttaaaactttccttataaatgcacccatatgttttatttccttaaaaaatacagttaatattagttctaaatgtttgatatgtttgaaatattcataataaaacaaggtagtggataataagacagattctaggctatcctataggttgaatttcattccctaaagcagggtctctcaacctcagcactattgacatttgaggttaggtaattcttgctgtggaaggctattctgggcatcgcaggatgtttaacagcaaccctggtgcctacccactaaacgcaggtagcactaccctccacccccaagatgtgacaaccaaaaatgtctccagacattgccaaatgtcccctggatataaaactgcttggttgagaaccttgccctaaaccaaaactacttatttacttcattgtcctcttggccaggtactgtaagtatctgttggtgtcaacagcagcatatatacagataatagtgtgtgtgtgtgtgtgtgtgtgtttctatgtatgtgtatgtctgcttctgtgtgtaaaatagaaatttaaaggaaaatcacatagacacacacatcttatatagagaatcttagatggaatccatactttgtatcgatccatctcaatcttcctaaatcactggaagctgaagagcctgtaacgttgtgttgtgaggtcctcaaagaaatctctctctgctctggggtaccctctcctcatgttacagccatgtctggcccttatcattgggccttgcttgcacacctgggcaggataccacatcagaccttcccacttgccaggtggctggccaaccccatttggcccagcctttagtgagagcaggtcctgtcctcttgtggactgcaaggatccaaccctttggcactcactatggataacagagcctcaagtcccggagggaaaagagaagttaaaggcaggggcccaaaccacaagcagacaaagaaaccatccccgcatgctgcagtggaaccactgatgctgatgatgaattttggctaaaattgttaataggattccagaaaagttcagaaaatgtaggagacaagggaatgacaccatccctggccctgctgtctcctggctaccacttacaccctggaggacctgtgcccctctgtcatcatctcttcctcctccaagacactcccaaccaaactgcacattctttctggtcaaagtatatatcagatcccatagcctccctcacttactttattccctctccctgatcccaacttgaatatacattttcagttttctagga

SEQ ID NO: 316485 - DNA, 4001 bp, Homo sapiens
tagaatcatacagttcaatgactggtatttttaaaatcttgctaggctttaaggcagcagctcatctcatactttaacatgcgtgcccatcatctggacatcttgttacaaggcagatgctgactcagtgggtctgggctggggcctaaggttctgcatttctagcaagctcacaggtgatgagggcactggctgcacttgaagcagcagagattaaaggggcaggaagctaatccagctaaatctgggggagccctagttctacaagggcagatggatacctttctcctgatcccttccagggacctaacaaatcctcaatcccgtcactcctctcccctcccccatctccttcaagacaaggccagaaaggcaccagccagaatgcaggcctcagcattgggtccctcaccctcccctggcttctcccagtttcttcccttcctgcaataaaatatttgcagctgtcctggaggggaagtgttaaccatatttttagaacagtaacttcaaaagaaaaatactttcagtatatggctgattataaataatgttgaaaacaaaagttccagcctgggcaacttagtgagatcctgtctctaccaaaaaattttaaaaattagctgggcaagttggtgtgtgcctgtgggccctgctactcactactagggaggctgaggtgggaggatcgcttgagcccagaaggtcaaggctgccgtgagccaggataacactgctgcaccgcagcctgggcaacagagtgagaccccgtcccaaaaaaaagaaaaaagaaaaaagttatcccaagacaggaaaatagaccatcctaaagcagaagtttgaaacatattctgattgtttttactcaagggacctaaagaacattagtcattgtttaaacatcctgatcagcccccaaagctcctttctctgggctgtgggtgaaagccctggaaggccaactagaaagctcataccagcatctgggcctatctttacctaacatcctcccttttccctgcaaaggagcatctctttaagagagccggcagtgggctcccagatttcaatgtcagccttgggctattcattttgaaatatttctaagatttaaaaaatctttatttcagataagtgattaataatttttttaaaaataaacactgccagaacaaaaacatgcttcatttaataagactggtctcttgtccattaacttatcaaaacccaaccagtcacaagataacaactgaatctcttaaaacagaatgctggaatgccatgcacaaaaaaaaattagtgatattagcaacaacaaggatgaatttcaaagacctcagttaagcaacaaaagccagacacaaaggaatacaccctgtttgattccattacaaagatcgggaagtggcaaaacaaatctaaggtgacagaagtcataataattgtttctgggaaggtagatgtaaactagaaagggaccaagggacttcctgaggagctggaaatgctgttctctgggtgagggggtgggggctcttacaaggacacctttaagccatttgcataagatctctaacttatacctcaacttaaaaaaaaacaaaaacaaaacagtgctatgaaatcagcaaaacattcaagcctatttagatactaacaaggaaaggatcaaatctgagccaagtacagaatttaccctcttccaagaggtcctgggtgtcatgctgcctgtgggttggcttcctctcttcatcctggcagtcgtattcaaaacattcttcttccccgcccttgtctcgcagggacattgctgaagtcaccccaaagccaaaacatcaccctaagggaccatccttgggggtgcccccgaccccctacccagaggagccatgcaggcctgggcccccagggcacacactgcgccctggcctgggccgcagacatgccctggctcagctgaagtggaggggtgtacacaaagctcctggcccagcatcacccgggcaggacccggaagggggtggctcctatgagcctggaggaggggcggggtggggtggagcacttggcggggtgggaatgccctgctaggcgcaggagattcagaggaaagccctgcaggaaggtacaggatctcagcaagctctcggcctcctagaccctctccacctttcctcccccagcagcaatgaggagtggtagcttcctagaagtctcacagcaactgcatggggcaacatcaactaagccttgagcaggcacacctgtttaaaggtggggcgctggcggaggaattgtcctgctgaagcactgcccaacacccccagatgagagacttcctgtgggcgggcttaagatgtggagacaaatctgactgtgacaactgcctgacagcgctgagcagaggaaggaagggatcattctaatttctagcaaaagggaaaaaaatgcagtgaccattacctcgttaaacttaattcatcccagtccttctttgataataacctccattttctctttatcaatctacatttcataaaatcctgctcttaccctaaatctgtgtttccacagccaaatttataaagatctctctaattgctagaacaaggtaagaaaaaaatctaaagcctaatagcttgcaaagttgcctgcagaaagaagccacagtttaattgcacaccttgatatcaattcctctataccatttgattttgcctgcaacagtgagaacggcaggttcttccatcaaacccagtgaaaggcagccccgggtgctagcgtctcggagaatcacagctcattctgtaatctctgtgcttcagccatctcccagctacactgtgcaggtctcctgctcctaacagctacaccaggacactcattccaacctcccgaacaggctgcctcccccaggtagccaagagagattttagcaggggcaaggtcttcataaaacaattttctacacaagttcgggaaccatatctcattcgtctttgaatccttagggccgagaattctgctcaggtggctaaaaatgtcagctaaattgaattactacctccataaagactaatatgacatcatgtacaagtgcctctaaatagaaaaccagagataataaagattttatttaaaagtctaaggacatatgcatcctctaattattattattattattattattattattattattattatttttgagacagagtcttgctttgtcgcccaggctggagtgcagtggcacgatctcggctcactgcaagctccgcctcccgggttcacaccattctcctgcctcagtctcccgagtagctgggactacaggtacctgccaccacacctggctaattttttttttttttttttttttgtattttttgtggagacggggtttcaccgtgttcaccaggatggtctcaatctcctgacctcatgatccgcatgcctcagcctcccaaagtgctgggattacaggcgtgaaccaccacgcccagacctctggttaattttttagaacttgaaaattagagctgtattttaccatgttaaagatgtgttcttagccaaaaaaaaaaaaaaaaaaaaaggtgtagaaattcaggcagggagttcaacattccattttgaaatactgcataagctttaaatataaacacactcaaaaaatacttatttaatattaataagctttatcggattagactaattcaattcagatgacagtgggcacatctataaggtgttgtgaatgacacaaatggttattctgaacccctgagaaggcaggagagaggaagaacctccaccttgtgcgtgattcattcagcaagtatcagattgacgataagatgagtaggatattgtgccggccacagtgtatataaaggaaaacaaaagctaatttcaccaattcaaaaatactatcaagtgactttactcataataaatttatttatactcatcttttaattcaaatctagagtatcgct

SEQ ID NO: 316486 - DNA, 4001 bp, Homo sapiens
cccggccccccgtaatcccagctatttcggaggctgcggcaggagaatcgcttgaacccaggaggcggaggctgcagtgagccgagatcgcctcattgcactccagcctgggtgacagagcgagaatccctctggtggggggtggggggagggaatagaatggaaaatatcattgtgcctcaccctgtagaaagaataactataccatgaagctcttgctgcaattttacatgtgtatgtgtgtgtgcgtatatatgtatatataatattacacacatattatgcatatatacattatatacatataggtgggtgggtgtgggtcttgatcgaaaaaagacctagaaacccatacataggccagtggcagtgggatgcgactctgggagtgaatgccacacacacctatcccacctctacccacccccccaccccccgcagaggatgcaaaagccaacaaagagcatatgaactcaagcacctatcctgcaatcctacaaaacagacctgcctggaaaacagttgaaacaaactcctgaccaccgtccccgccctccaacacacacacaccgtagtactttttttttttttctataaaggaccaaacaggatgccatccggataacagccttatatcaaaaaggatcctggaacccaaaacgctcagcacgagggagcaggagcgcatacctacgctgggaacacaaggctttaatcccagctattccttcccgcataaggactaactgagccagcagcaactgggttggagcagataggggaactagagacctcagagccccattctctttctgcttcttaaatttttttttcttttattttccaaattgcacacttccataaaaattttcctaggaagcaccaaagctttcaactgcccagaaacaccccgatctgggagaaaaggtggcttgagctgcacctcaaagatgggctctatctcagccgggttgcaagtgcacagggctccccgcgggacggagacagggagttgggaggaaacgcaacgcgcctcccaggcaacagactccgagctccggttcggaaacgctccgaggcagaagcaagggcttctaagggctccgcttcccagccttgggtccctactactaccttccccctagactcggtgagcccaggctgatggaccgtgcagtccagtttgagccagcccagcagccctcaatcgggcgggcagggaagaaggcctcctactgccgggaagaggccagcgcgctccaagttccccgcaaattccgcccttcccgcctggcacggttcccttgcaccgctgtgctccgctcccaggtttctgcccgccaagaatgcttgccccgggggcgcgctcgctggtcaggaacctgtcggcagcccccgggaacccctgaggatgcggaggtgggcccgagagctgcggcttcgatgccggggtgggagctaggcaggccgcgcgccgccgcagtcctgtcgcagcgcgtgccctggtccctccggaccgaaaaggccgaagccgtcccccgcgaccgaccccgcgcaactggctcgggtctgcacctagatggctgtgggccccacagggatggccgggcgggcccgttcggccgctacctcagggtcgccagtccccgcgcgcggccgcctcccgccaggaagggtggcgggcccggaaggccagagatgccccagtgcttcccgcgccgctacgcacctagctgcccgcgggtcccacatggctgcggccggagggtccgcaccaggaccgccgccgcctggggaagcgcttccctgtgggcagggcgcggcgggcagtgcggaagcccgaaagctaccggagcccggggcaggggcggcgcgatgcagaggcggcgttcgggggcccccagctgcctgcggctcggctacccagccgcgatcagagggggcgggggacgcaggaaccccggcgtccgggcggtgtgcagccgcagacctattccaagtttccacgtagttgcgagagcccaaaaactgtcacgtgcacgtcgctgctgagtgggaggaggtgtttgtcatcgcgttcaaaaggggcgtttcggtgtctcccgtcatgcaagcaaatggtatggctctcggccgcctttgaataaacgagtgcttcgaaccctttaccaggagggactaggcgcacaaccacctccgacactcctcgggcatgcgagaattcggctttccttagtggggcccatcaatgttgtccgggaggtaaagaaagtgatcggccaacggcctcagcgtgggttttctccttccctcgttcctccctccaacaaaggacgtacggagaacaagccccctagctcctacagatgaggagctcaggagtcgggcgaatatcaagtacttactgtgtgcttgcccctccactctggggaggctgggggtccgggagtgaagggggcagcgagaccgcgggctgctccacgctcaccgtcgtgtccatggagagtaagtgcgcacaggcctgagcaggcaacaaaatgaggatcttgccttgtctttccacctccccagtgatgatcgacagagtagtgggtcggagaggaccacctctggctgctacctccccagcggttctcggcctagggagccggtttggtcttcacagcttctctgggcctgggagtactttcctacacaccagagaatccacccaatcagagagctaagcccgccgccctcccctggggcaaggttcggcctacactgcatcccggtggttcgcccatccttctgggggaccaccacaccaggctgcctggtggcagggaggacaccaccagagctttagtgagggggaccacacatttcagcgaaacagagaggctttggtaacacgtggacacacctaaggcacacagtatacttctctccactggtcattctgcgttgtgaactagtctcagtctagctagtggtctccttgcttctagaatctcacagagatttctgtgcattgatcttccccaaacatcaggatgaatcacgtacagttcaaaagccatcagtggcactccattgtctcctagagatcaggttaggtacccgggcatttgagattcttcttcacaatcttgccccacatttccaatcttagcttcctcatgcaaactctatactgcagtgcttcccaaccttagttacacaatagaatcacctggggagcttaaaaacaaaaacaaggccgggcgggtggctcacacccgtaatcccagcactttggaagcctgaggcaggcggatcacctgaggtcgggagtttgagaccagccagaccaacatggagaaaccccatctctactaaaaatacaaaaaaaaaaaaaaaaacccaaaaatatgcgtatgtttggcttttactcccaaattgtctaattgacatgggcgtcaggaatttttgtttttgtttttgttttgagacagtctcactctgttgttcaggtgattctcctgcctcagcctcctgagtaactgggattacaggtgcccgccgccttgcccggctgaattttttagatttttagtagaggcggggtttcaccatgttagacaggctggtctcaaacccatgacctcaagtgatccacccacttaggcttccccaagtgctggaattataggtgcaagccaccacacccagccacatcaggatttttaaaagactataacatgctgcaaagtttgagaatcactgctagccaccaaatagttggactacttgctatttcccagacatcattggtcctttcacttttaggatactttccatatccttcctccaatacttttcccaacatcccccaattctatatttaggaaagcacatgccacctcttctagcatacctctttctgttggtgatttttgggtttgttcagtttgggttttggtttggtttggttttggtttggggttttttggttgcggggtattttttggtttcggaga

SEQ ID NO: 316487 - DNA, 4001 bp, Homo sapiens
gggcactagaaaaattgggacacttgtttttgttctttgctaaagtatgaactgggaaagataaggagaggtatgaaaattgtatgccagcttatggtccctgtgtgatttatgtaatcaattggttttaagatccatcaaacagaacaatggaagccaattcacagaaattataatatatgcaatctttactccatagctggcctatacaaattggtattaaaagtacaaagcatactaattaagcaaaagaggtcatcagactatcacaaatgatagctataaacagtttaaaaatccatgcaaaaatgttcaacctcattataatcaaagtaatgcatattgaacaatgagttagcatgttgtgcttatgagattagtgacgattttttaaaggagatcagcctgtgaaggagaagcactgctagaatgagagggaattggcatcactcttggaaaagcaatttggcaataatgagacttaaaatgccataatctcttaataatttcagttctagaaagttttctgaaaaaataacccttactacagaaaaagctatagagttgttcatctttctgtcatgtaaaaatatttttaaaaactgtatacaacagggctgggcgcagtggctcacgcctgtaatctcagcactttgggaggccaaggcgggcggatcatgaggtcaagagatcgagaccatcctggccaacataatgaaaccctgtctctattagaaatacaaaaattagccaggcgtggtggcacgcgcctgtagtcccagatactcaggaggttgaggcaggagaatcgcttgaacctgggaggcagaggttgcagtgagccaagattgcgccactgcactcctgcctggcaacaaagagagactctgtctcaaaaaaaaacaaacaaaaaaaactgtatacaacataaatgttcagcaataaacaaatgactaaactataactgaatagatatcatttttgtgcattcatttaaaatgattatgcagaagttatattaaaagggacatggttatgttagtgaaaaaagctggatatattatgtacattattatttcagttatgaaaagcaaactatatagaatgtatataaataaaatttgaaaggaaataaaacatattttgtgtttttaaggtgatggaaaatacgtatgaatttttaatatatatatttcacagttctcccacattacataatatgcatgtttccttttgcaacaaaaagatgtttatttaataaattaaaagtacataaaataatacaggaggaatgaaccatcaacatggattcataacagtgagtcaatatggatccaaccctttcacaacagcgagtgaatatggatctaaccctcatgattaatctcacagcaattgaattttcactggccttttcaaaattgttgtctctctgaatgttgacaattgcattgctttctagaaaatactatagtgcctaatctctgaggaattagaattacacttatcctgtttaatagctaaactaaactaaagaggaatacacatagtcaacaaaagcttctttaaaaataacaagtacttcacatggcataattatcagtgaacacttactgaacagctgtaattagatttacgttctaaaatgctgtccacatttttctttcaaaagaaaaatgtcaacttatactcattaacatgtttcaaaatatattttaattacactaaaagttatccaacatttttaaaataactactttctaaatactaagggtcttctcgttaggacttagaaattaagtgaatttttagacacacaaatggaacaaaaagtttaaaatgccacttacctgacatgcttctttttttcagagaaatctttatctagccataagacaaatatatggattaaaaatcctcctacaaacttttttcctaggtgatgttgctctgttatgttaaaagcagcatgacagtaaaacttatctttatctgtgcctcggattcttttctcttctgtttcttaaaatcttttgtgtgtactttgtttcagttacaaacaggaaatgtggtgaaggagttgtcttgagttttgatctgaaaacagtcgacttaaattgtgtaacgtgggaagaaaaatcccacacacctttgtaatctgacatttgaatttttatcaatacctgagtctaattgaaaaataaataaataaaggtaggaattaaaccaggagggatcttcctatctctggagagaatccagtcatctcttcacaagtaaattcacatggaaacaaaataagatacactaaactgatgagtaaatagtaagcaacccgtgggtgtgctcagctgttgtattttcttgagccatgatggaggacagggagttaatattttttgagcacttagtatgtatcagttgccttctatacctcatcttaatgcgaggctagatgcctgccttatttcctgacaatcctcaccttatcagtatgagtttctctgtccaatctagagccacctgacaacaagctcctgttctcaaccaccatcccagaatcttaatagcagcagttcttacatgttggtgtacataagtatgctataagatgctagtttaaaatcctgggcccgtctaaattagactatttagggtgaagcactagaatctgcattttaacaagcagattttctgagtgcattttaaattacatatattgtatatgataagatattttaatatagatgttctggacaatgcttttggaaactcatataaggaatagaatctatattattcattattaaaatttcataactagaattaagcacaccggcacatcgtaagtctcaataattgagacttactctcagtgattgaacaaacaaaaccatgggtgtcttgtgctttctttgtcttccattatagaaaataactccctagtaagcaaaatacagtgcatcttatcctttggacaaagctggctaaacactaacacatttttccacttcaatcactcccccccaaaatattttttggtgaatcgttgactcagaggctgtaaaactgaaagagaccttggagattctctggtctaagcttctttaaaagggatttttaaagtatgttccatagaacactcggcctttaagaaacgcagaagacaaatgtttcttcaacaaatatctttggaaaaaatatatagctttatttttacctccgtagatgcatattaaaggcttaggtaagtcctgcgaaaaggaaacccaaataatatttttatcagagtttttctaaacttatttggccagaggactctttgttcagccgctaaccattagcagagtgacaggttttatgaagcaggcctggatgctgacagaacaagacttcagggaacagcagcctcaggttcatgtagggatcagaggacaacaaagaatcagaaggtttcatcttagaattagatggaacgtagggaggaagactgctgaaaagttgaatcccagacattcaggaagattcgggcacctgataaatcagtttgagaggagagggcctagttatggccttgaggagttgagctttggtcctgaaagagggtaactggtaagaaaagtagaagtcctaggctcaagaaaggactacagaggttacctaagcaagaccttggaatatgggcaaagtagatgcccacaactcgagcttacagaggacattggaaagagaaagggtttcaggactggaaattttggtgctagcattcctttgttagaacaaaattatcgcagaggatggggaaagaaggaaggaagatgctttcatcccagctgatccataaagtgcaattccagaaaaaacggtgtttaattattattggctgtgaatggagagaaggtcaactcagcaagaatgactcaggcaaaaatgcaggaactctgtggtttgctcagaagtatctctcagagcagcccaacaggaagagagacccaaagcaa

SEQ ID NO: 316488 - DNA, 4001 bp, Homo sapiens
ccagcagcccctccctggatagggctccagggtccttcactggaggaagatccttggtacccctgctctctccaaggctgggactagtgttcctggttgtggccaggtgtgcagtggttgtgacagcagatggtcttggcttggtcctagcagaggctgtgaccccatacatgggcctgatggtgccgaaaggcctggcgtgagcatccacccaccgcagcagggcctgtggtctccactgacagatgctgagcagggccaggacatcaccctcagccgtgtgcgagtctggaggggactgcccatacaggcgagtgtagatgctgcctaggctatagctcttccttgggccgtgttctgaggggctgcttgctcgctccagggccttcagcgcagtgatgctatccacacagaaggcaccatccagagcactggtgaggcccagcatagccagctctgcttggagcagggggaagtcgtagcggtcaccattgtgtgccaccaggcaccagggctgtggctggcgccgcaggaaggctaggagcaggttggccaggttgtcatcaaaacattgacgcccatgcgctgccagcacagctgtgctcagacctgtgatctcgctggctgcagggctgcaggccttccccggagccacacacagggagagcttgtctaccacacgcggtggtggaggaactgtgggaggtggcccctgagaggtgggggggctctccagggcacatctgtggacagccagcaggcacagctccgtgaccttgggctgggagaagggcaagccagtggcctccatgtcgaaaaagatgagggtctgcatgggccccgggggcagggcctgcgagcccatggttgggtacgtacctgctgctgagcctggagaggagcatggggtgggtgtgtgagtgcccagtgttaagatccgaaggggagggagtggggtagggggtgggcagaagcacatctcaggccttccctgcacaatcctgccctgtctgcgagctccagggcccattttcaggcaggaagttggagagggtgaggtggtttccttagtgggaccagcacattcgactgtctgagagggtctccctcttcacatgactcggcccctcccctagtgcccccttagtctggggtgggggaacccatggccctcctgccctgcgccatcccattgtgggggccacactcaccgtagcaggcaggcaggcaggcagtagtgactcggctgcacactctcccgcggctctcgctggcagcagtggcgggaagtgaaacttggcgtgggcccgcctacaggcccacgtgagccaggcccgccctgctcgtcagcctgcctggtctgtccctctcaccaccatccgttcccccccacacccactcccctgctcccgggggaccccagaggccttccaagatccacagctgtggcctgctggtggcacaatgcaccggggccatcataccagtgacaggcagctggaaggaccagggcagtggtgccagaccagctcccggtcttacacactgctgggagcccctgctgcggccctttcatgcccacctgtgggtcccagtttcccaggctttcctggtttaggcctgggccaagagccacctccttccctgccacacaatggtttcttcccatggccccagcccaaagcaatgactcaggacaattccacaggcagggcagggctccttcctcaaggcagatcagttaccatggggacgggctcagcaacagccagggacaggaagaaggatcccagccactcagggtccgggtcctgctccacccctcccactccgccaaacagatcagactcaggaaacaaggccagccagttctctgggcagttcctgctggtcactgctttaatcagttgatgtggtaaggaaaggagtggtgctggtgccaccatgtggctggacactcagggcctcagccacactccacctcggggtcttccacatcggtttccgcggcacagaggtcatccagggctgcctctgagacaaaaaggagaggttcctggtgagggcccaaaggtgccagggcctagggcaggtcccacctctcctcccccaacgtccgcaggaactaaccagtcccttccacacccaggccctgctccctcagctactgcaaacaaagtgatacaaaggcaattcagacacggctatttctggaaaaaccgtggctctgccaggcacactcaacagatagatgcaaaaggcatcccaatatgcttggagaagaactgaggcaggaagataaaagaaaatggccccagtgctggaacaggctgcagtgggcgggggcctgctgaggggacacccaggaatctgacttgttggggaacctctggaagaagccatgggggctgggcaggatggcctctggcaggcttaccttcacagtccgtcacatcaggaagccctcggatgagcatgctgacccccggcatcacctggtcaaactgatgcaggacctccacgcagtgcatcatgaagagcttgtccttctgcgataggccgtgcagcagcagcaccgtgtcccgcagacagcgcactgtccgcctctgctggtcggtccttgggggtccccctgccctccgcactgtcagccactgtctgtgcaacatcaccgtgagcgctctgaccacctgagagagggggggtgcagactgaggcctggtgccaccatggcctgcaccctaacaatccgctcagcctagccacctcacgtgagggggtttgcagtggggcctacagtccttgcacggggcccccttaccaccagagctgccagctgttggcccctacccactcacctccacattacactggcagttggagccagtgactgggggcaaggggctctgcacaccaagcttagccaggagccacaccacctagaacaagaacagattggttccatcctgggcagaaggagaccagtccctgcgagggttttcttaagcttctataagagttcacttgcttcagcaactgtttgtctgcacaaatggggtccaagaagtggtgtgggaccttcccagggaagacccaggacaagcactcatgtgtcaccagcaacccacctgcctccagccccctattctgcccccacgtcccaaagccaagacaggatcagtcatcaggcaactctgccaagtcctgtctgcattgcatctgtgtggtgcacagcccccaaactgagtttacctctttagttgctttatcaactcttgttactaaaatgaattaaagctccgtttctcctcagcggaaagaaaggagattctgttggttcttaggatggggtggggacagtgtccagaaggggctctggagtttttacctcttgttccagctggagccattgtgtctccaaggccactctgtcaggccgtgatgtgatgtacatgtacagcagcagcaggaggcagccttctgaaaaggacagcgcacctctcactcagggtgccctttctcataaagagcgtgggctacatactgcagaagccctctgaggcccttgaccctgttcccaccccaacccttcccttgatctgcaggagcagtctagacgcccgccccaccctgctttacctgagtgggaacagagctgaggtgccagctggtcgtggtccgccagcagggagaggagctcaacagccagcagcacgctaggcaggggtgtctctgggctgaggcactttggcagcacttggaacacacactggaacctaaaagacagggacccagagagacgtgacactccccaaccccagctccataacctaccttcacactccactagaggtaacagaaaattgagcaagtcagtatgaacaggtgagttggttcagccagacttgggtttcagtgctggcctgacccctacttacttgctatgaaacttgtttcatgtgaacaagtgggcacttccactgcaagactgctgcagctga

SEQ ID NO: 316489 - DNA, 4001 bp, Homo sapiens
ggttgttaggaagatcaaacagtgtgataaggtgtttgaagtgcttggaatagtgtctggcacagaagtgcctagacagtagtaattcaaactgtcacacacaaagaaactctctccctagcacacagaagcttccccacccagggcctgctctctgtgaaatattcccagcattgagacaggggaggaatctgaccccgaggaatggtcaactccagatcccgcctaggcgcagccagggagggtttctgagcttccgaaaggcagaaggctagctgaccaagcctcccctcccctttgccggcaggtttccacggctctcccaatagcctagccccacagcccccaacagccccatccactcaccggagtgctcaccctggtccccttgcagccgctggatgttttcccggaggaagaggaggcgctccacctggcgcaggaagtcatccaggcccggatgctccgcggccgtcactgcctcctgctgggccgcctctggctgagcacggccgccggggacaccggtcaggttcagggtcaaagccagagcgagcagcaaccaagggccgggcatcgcggcgtctgggttaggggacagagggagcctgagcgcaccgaatcacagcacatcccgctccatctcccccgacgcccgccagaaacaaaccacgcacagttcaaccgccctcccagaagcaggaccactgcccctcgtgcaggggcgggagcagcggcgggttcgccccggctctgcgtccacacctgtcacctctaggcgtcctcgcccccacgggtgcctgtagtgcctgcgcccagttctgcttgcgcaaggcaggaggccgtaggaaccccatcgccagcgccaccgccacccttcaatgtgacgcggaactggggaagccaacgctgggactgcctcgccgggagtgcaaccattgagattgcagcgccaggcacagccgcgacgctaacggttgcgtccccgccaagactcccccaaaggtccccatcgccacgttctaactccaagctccgtggccgacgtcctcattccaacgcgaagatcccatttctatcgctaagattcaggttctaaagctcaaagtctatttgcaaagctaagattctatttctaatgctaagctttcatgactaagccaggaatctgattctaacgctaaaatcctaacttcaacgctaaaattctatttctagcgttgagattgggattcgaactcccaggttctcaggccgacgccctgaatacccagctctgtccggcggcacccaggcagggggtgccgcggagctcccaccccgcgctgcggactctggcgacctgagtgcccagcagcgagagcctccgatgtgcccgcgccgtgcctcccgtcgggtccccggcctgcgctcggggaggacccgggggtgcgagcacagcgcccgcctgtgcaccggccctgttctccaggaagctctcagagaaccgaaggtgagggcgggccgagagggctccctttccagtgctcccggacaccgtctgcggaaggagaggggttggggcggttacctgccaggagtgggctccacaggatgggtccgggatccggggactcgggatccgcagtcggcaggtcaggagtctgcagcgctgaggaccccgggcgcctgccgagccctcttcagatgggccgccgcttatatctgcgccaggcggcggctcgagtgaggtcagcggggaggggtcgcggccgccgggaaggggcgctgacggcagccggccccgcgggaccccgcccgcctgctcctccggaaatctggggcggggacggtggggaccggagccggggcgcggaggcactggccgcaggatggggcgccggcgcggggtcgtttctgcaccacctctggagatctgttgacgagaacacgcgtgtagggggcaaagggagggacagagagattgagagaagcgcacgattaaacacaggcgcacgagagagctagagggcgagacaaagaccgagatccacacggagacgacggagaaacacagggcagacacacacgaaagggacacggccgcagaaccaatgtagaacgcagacgggcgagagtagagcaagagagagagagagagaaagagagagagagagagaatggggggcaagtgggagcggagctctactttttttttttttttttttaaagagatgggatctcgctttgtcccccagactggagtgcggtggcgcgatcacggctcactgcagccttgaactcctgggctcaagtcatcctcctgcctcagactcctgcgtctctgggattacaggcgtgagccaccccgcaggctccagggtgctaatcttaactgtgtcattcctggctagtgcctccgtttctctgggcctcagttttctcctctgtgtaataggagccagaggaaagctttcagaattccaaaagtggcggcctgtaggctacaaccagttcatggacaattttgattgacttccacagtgttttgaaaaaaatctgaataaccaacattttaaaaccaagataacttagaaaattttggatttatggcttctcttgaaaaagaatgggcccccatttcctcctgtcaacagccaggtggagctgagcctggctgctctcggccaccacagtctccaccactccctaatgtcttccaatgtgttgcccctgtcactgaggagggacattcgagtctgcagcccctgcacaggaatctattggagttcacccaactctagcaaaggaggggaggggaagcagggaggagaaacacatgggtgccaaggagcttgccccccgagtcagttcccaaagtcccagatgtgggactgccacatctagccctggggactgcctccatcttgaaactttttttttaaaacagggtctcattctgtcacccaggctggagtgcagtggtgcaatctgacctcactgtagccttgacctccccagttcaagggatcctcccacctcagcctccgaagtagctgggactacagccaggcaccataatttttatggctattttttattattatttcttgtagagatggagtcttcttatgctgcccaggctggtctcgaactcctagactctagcaatcctcctccttggcctcccaaagtcctgggattacaggcatgagccgccacacccggcccatctctaaacatttaacaagcacccactatggtgtcagactccttggtaggtcctgaaggcctagaagtgaatgaggctcagccccagccctcaaaaagttcagaggcagtgagggagacactgcaaacatgaaacctcaggcttggtctcccaactagactccaggatttgaagaaatgccaccctagctaagatgaaatcagatagacctgttgtcttttgtacacaatgacgagggtataaattgatccaatcttttgggtggcaatctgaaaatttaacacatatgtaccttccatgagacaattctgtttttcagaattcataatacagatactcccacctatatacatgagaatgtatacctcagggtattcagtgcagcatggtttatacaagccagaattggaaccagcctggatgtctgtccatcaggagggggacacttaagtcaactaagacccatctaaaactgtggggtactatgcagcctttaaaagaataaggcagttccatatgcactcatgtggaataagctcccagaagcagagtagagaactatgtgtatatgatgctgccatttgtggagtgtgaggaagatgggctgccaggctcttatgttctttttgttttgttttgttattgtttggagatggggtcttgcactgttgcccaggttggagtgcagcagcacaatcactagctcactgcagcctcaaactcctgggctcaagcaatcctcttgcctcagcctcctaaagcactgggattacaggcacgcaccagtacc

SEQ ID NO: 316490 - DNA, 4001 bp, Homo sapiens
ctatcaaatctcctggcttccctcctagcctcctgcaggccattctgcacattagaatcacctgaagcggggtgggggggttgattctaattaattcagatgctcagatggtaccccagaccaataaaatcaatgtttgggggggtggggatcaggcatcagtaattttaaaagatcctcaggtgacttcaatgcacagtaacgttggggagctactgagcctaaggcattttcctaaagcaccaattttatccctttcctgttgaaatgggctcagaggttcagttgctgttgcacaactgaacaacaggtagttgagagaggagtgtggacacaattttccatgttttaggatttctagacttgcatcgagaatccctggatttcctatttatgcaaacactatgagagggtcatgggtggagagctatgtttgttaagcatctactaaatgtttaattgcaagatggataatatctttcccctgaattcaccaaacctttgctcacagaattgcttttccaggcttgaaagccttcaaactggccttccatttttctgcctcttctaatcctgtcatcttatggtgctgtcatctttccgcttctaagaagtgtgctcttactacttcagactcccctcatgtgtgacataaaaagactggtttggtagagcaggtgaggataatgtaggacctgatatgaagggttagcactccaaatgaataattgagaccctaagtactatgacttctggatgggaaaaagaaggtagtaggagttcatggatgtatggggtatttatatggtccgcagggtcaaaagtgccccatagaagttctttcttttccattaaaagttacaggtattaagagttcataggaagagaaagagcaatttatatttttatatcacatacagattacaaagcacatacattaatccttatatctacaatatcatggggggggtattgtctccgttttgcaatacagcattttaaagttaagatcccaaattttaggttccaatcctgactctgtatctttccagctgtgtgatcctggggctacttaacttctcaaaggatcagtttcctcatggaaacagtggacttagggtgaggggttagctggggtcatgcatgaagtgcctggcaagttccttaagcactaagtattagctattactgttttgtacagatgagagagttggggttcagaagagtgaagtgctcatttacatagttaatggcgcttagatttggagctcatggtctacatacatagtgaccatttaggatacaattaattgctacaaaattcttggctcctccttttagataaagaaatgaactcagaggctcactggcctgccctgtagacttcacagctggcaagtggtccctagttttcatgacccaatgcggccccacatctggtgcctggcacttacgaggtatggatgctcctgaggcggcccttgtggaaagtgatgatggtattgcggcagcagcggctctcatagtagtagcagttgagattgctgctggctgtgcagcagcacttacagttgggatcattggcccaagagcagcaacaccaatggcagttggggctctcagaacaggtgcagtggcagaactggcagttccgctcatctttgtaagggcaggggaagcaggtgcagttccgctctgaggtgaagatgaacttgcagcacagacaggagcataactgaggacaacatctctgccatgtacaacatggacagcaaacgcacatagcagtttccatggtgcctacatgattaccaccggcctcccaggactcttgatgcctcctctaccagaatactgctatcagttctccagtggaggagtccttcctcccattcctgaggccgtcagcttgaaagttgcaagaagttggctgttatgaggacttcacagctggtgtccctaccaggaagctcataggctggcatttacatatatcagtctgagggtatttgcttatgtcacaatccctgtctctctaccatgctaggtagatagcaggatgcggccttgtgggtggtagctggtatgttggtggaaactccatgcttccatggaaccagctgtagaggagtggtgatgcaatgagcatcctggaagtttagttgtcatttgtcaccttttggataatggagtagatttctgaagctatttctccttgtttggtgttctgcctgcaatttggacaagtggacttcagattatgtcttcgtagactgaaaggcttgggtatggttaattagaaaagtagattcacatggttttccacatgttagaggaattgatagaattctatttgaacaaaggacagtgtttacaaataatagcaatgccatatttaaagagatatcaccattcagagaaagagttaaagaaaaaaatatataggttcacttaggaacttctttcagtagtaattgattttatcaatcaatgcatagtcgctgctcattttcatgaagctttatacttaagtcactctgaatatttcttgggttttttgtagctgcatggtgtttgggtgaggttcaagctttctgtcttttccccatcctacccccactccaaaaagaggctggaactctacattaaatctttaactgttctgctagtatatgctcagtattcctagaaaaaagaccctatattttagggaagaatttcaccttcccatttaagcagcttgcaaagattaaaagaacagaaatttcatggtcatagtacattatagtatgaatactgtcttgtttttagaaaaagaagcagaagtgagagctgagtttagctgcaggaatttactgcataatttagtatctccccctatggttatcacctttataatagagaaaatcactgagtgccaactatgccagccacacattgatattagatttctacaagtgaaaatcccggctcttagggtatgtcctttatctttttttaaggcaaactgctaaatttcttactcaaataaatgtgccagttaataccagcaaggaacatacaacattcaaaaaagtgaaactccttttcctcacgtttgccaaaactcagttttatcaatctctctctccatcctccaggcacataggttagagtttcattcccagatttatgatacattttcactattggtttctataaggtcttattaaaaacttattaatatgtaattcacttaccattaaagtcaccattttagagtaaacaattaaatggttttcagtatattcataaaattgtgcaactctcaccattatctaattccaaaatattttcatcacccccgtaaaacactcattagcagtctctccctgttcctcctttccctcagcccttagcagttactctacttttctgtatttatggatttgtctattctggagatttcatataaatgctatcatataatgtgtggcttttgtgtctggctttaatttagtataatgttttcaaggtttatctgtgttatagcatgtatcagtatttttttatggctgaataatttcacatggatataccacattgtattcattgtcagttaatggacatttagattgttttcacgttttagctgttaaatgtttaaatgtttctgtgagcatttgtgtatacattttttttgtgtgagcatttttgtagaaatatgtttccagttcttttgggtaggttcctaggtgtgggatcatatggtaaccctatgtttaactttttgaggaaatgccaagctgtttttcaaagtgactgcacaattttacattcccaccagcaatgtatgagaattaccatttctccacatcgttttccaaacttcttgtcttttttttcttctgattatagctattatagtaggtataaagtaggatctctttgtgatttacatttggatttccctgatggctagtgatgttgagaatcttttcatgtccttataggacatttgt

SEQ ID NO: 316491 - DNA, 4001 bp, Homo sapiens
ctaactgataaagaagaaatacatttcatgcaagtcaagacttacttaagaaataactacaactgcaccatttataaacatatataagatttttttaacattatcgcagaaagtctgagaaacaagatttttaaaaataattctgtcacatataaatatacaaaaatagtgagagatcaccttaactttttcaaattaaaaaaatcctatggtcagctgattttaaatctctttgtccatctgtactattttctttcattttgatatcaacctgtttccctaaactaaaaaataaaaataaaaactagaaacaaaacaaaaaaagactattaattcaatttaaccggaattgacttgagaaattaaggctttaattgcttttgctgtacttttcaaagtaaaaatatatctggtgggaaatattcatcaacgtgtttagtgaaaggcaatgtcaaaactaacatcacctaaaatcaaaatttcaccttgccagattaaatagctacttactcatttaaaaagaccaatacatgaatgcatagtgaaaaagtatccaggtaacttaatttgcagttttgtgtagttctgcagatctgtatgtataaaataacaactttgcatgtgttttgagatgtacacattcttgtaaaatttctagaaggatgtacaaaagagttaagtgactacttttaaggtacagatcagagaagggagttgtttatttttcactttatgctccgctccttcgataaaatggttggagttttatacaccgccaacacaatgttttttcaaaagacttctaaatttcactttgtagtttaaatcatacactctgtaaaaacttaattgtttttcatatttatttaatctcccagattacctactttgttgatctcgtggtttgggggctgaatacactcttctccaactcctccagaatcttttattcttattctaaaattaaaataatgttatctttaatgttttcaatttattgtctcatgtcataaaaatggttgttagttcactgtctttgatatttatcttcacgatgcttcatcgtgttttcagaaaagccacaaacaccaacacagttgctggagctgcagtagaggtatcgcttgttccttgaaaatcctaactctgaccaaacagactgtcacaaaggacctcttttcacaacgtcaagtagcttatgagctctcgacaatattacccaacaatggtgatggcagaaaaaacattcacggtcattttagagtgcttaaaattaactgcaagacaaaagcatccatgggagtaaaataccttgccagctctaaattataactgatttagtatagtttgctcatctctctgttctgccatttcaatgctgtgggacctgggtcagtattaccaaatacctctcaaaagtgaggcttcacatctgtaaaatgggtaactgcacctacctcacttaagtcctgcgagcacctcccacaaaggggctcaaaatggcagtactcttcccttccccttctcaaagctccactctcccaggcctccctcctaacgcgcctccacctcggcacccgcccgtccccaaccccgcgggactgaccgactcggcggcgtccgctcagctcaccctcgccaccacagagggcctcctccctcacaggaacgcagctccacagtggagggacgggaaagtggctccccaaactccagtatgggacaagagggaatgagtgcaggtcccaagccactccctccatcgtcgcgcccccaggactccccgcccaacacactaggcacaccagactgtgctacaggaaaagaaaaaggactcagaaccaccttctccgcatccgtaaaggtccttagactcaccgcggggaggaagcggaccaggcaactccacagcacggaaacacagcgccacgagctccaggcggatgctgagagccgccccgagtccccgccctcctctgccccgaagggcttcaggtgcccagaccgggcggggcctcgcggagcctcgcagcgcaggcgcagtctgcaggcaacattcaactgcaaggcatcggccaatgggaactattgctgggctcgttcgaaagtaaacggtggacggcgcggcccgaggcaggtggcgggagtcagtttaaggctggcgcccagctttccgcgcctgcgtgctaggcgcaggccgcctctcggaagcttggcctcgcaggagcggctctctatcctgtggggagcttcggccagtgggcctcgtgagctggggtcccgcctggggaatccgcatggcaccggtggtctgggggagaggctgggcctggcgcgggacgaggcgaagcgccggtggccgacggcttctgaggaattatcttttacttggcgccacacggggcggggcctcctgctatgctgtggagcgcagtgtcttccatcgttgcctcacagacccgctgctccgggaagtcgccacacattctcagggaacacccacatctgtcgcctgcgccctccgccgctcagctgtttgcttttgtttacgcattccggagacctgacccaccggagcactgggctgagcacaggagaaggggctttggagcgctctttgtactcaactccaagagcgagtgggaaactcaggactgggttgggtagatccctgcgtctctccctagccttcgtcctcttcccccgtttttccactttatgaaagtattgcctagagatgagggctgtccaactcaacacttccaacttcaagttcctacttcacctctaactccctagagttagaaaacaacgtacagcttagaggttcctttccctttttttcttgagaaactttattcagctttatctcaagacatcaccgcttccctctcctgtcaaccttaaatagtgaggttctggaaatatgattaaggatagagtttattccagcgtaaggcttgagggtagccacccaggagacaccagctccaaatggggttagcattccaaagtgaagaagttagggtttcgcctaggtggccagagacaaattttaacaggatttcatttcccctaagagaccagtgcatacttacagctatttggtaggttacagattactacattccaagaaaaagtattttgttactccatgagggggggtagtgatctcagggggttgtatctctggtatggtttggtcctcctattttaattatttatagaaacaaaaggcagacgttgcagatgcctgctgcttgactcaggctgtagccacattcctcccaaggctcggaataaagttccaacagctttaagtttgaattatttaacttccaataactataaagtcattttgtttactaatgtgctaaataaagatatgggctctaggccaggtgcagtggcccaggcctgtaatcccagcactttctggaggccaaggcaggtggatcacctgaggtcaggagttcgagaccagcctggccaacatggtgaaaccccgtctctactaaaaatacaaaaattagccgggcatggtggcaggcacctgtcattccagctagttgggaggctggggcaggagaatcgcttgaacccgggaggcggaggttgcagtgagccaaaatggcaccactgcattccagaaaaaaaaaaaagctatgagctctatatactgcacattgcagtacatccaggtcctaggcttttattcagtaaattacagaaaatattaaagatataaagcagaaagtaaggcaatattaggccttagtcaatctcagatagcttcaccaattcagctccttaaaaggttgcttatgaagtgtgaattgtagtggtagctactgtttcatggtggtaaatattcgttttgactttatgtacattttctattaaacattggagtcatcctgatagacatctttgtaacttcctgtcaaaacaacatgtgggacaggcgtggtggctcatgtgtgtaattccagcactttggg

SEQ ID NO: 316492 - DNA, 4001 bp, Homo sapiens
tcgggggagaagacgacactcgcataataccaaagtggaaaggagaaaggggtcacactgtgtgaaaagcaaatgtttactcgacagcccaaagggcgaaatcgagcccgagggttgcaatgtagccctaaaagcctttgcactccggcgttccagcagcgtacggctgccttggtcttttccaaggaagtcgagaccctggttgagccgggtggatacctcctaaccagggaaaccggttcctgtagggcttggagtcggggcaggcgggcgcggcccaagagactcaggctggtgaaggtaacgtcgtccctttattccgcttctatctcggggtgcagccgtgggcccacgaacggcgatttcacgctaggagaattcaggggccagaacacgcattttaaacaatataggaagcagccgcagagagagaagggcttaagactgggggcccttggccctcaaagatccacagacgctcccactcttacccaacataaggaggcaaggactgccatgctgtcccaacaacaaaaaaaccagtcttcccctcacaagtgcgcacgtggaaaccaggtctacggaggcacacaaactccacgcactcacccacacaaccatctcttccgggctcacgccccattttaaaggcaacaatctatgagttttccaaacaaaaatctgaaaataaaggagcgccttctcagcacgttgggaggcctctggtgtgcccacaagagcaggagcaggccacgtctacacaaacacacacacctatctcctcccaactcacgcctaactcaagacgattgccgcgttttgccacacagaaattaaaatcagaaaagggaggaccccacgctatgggatttttcggagcccctcgcgacacgtacacagaatccacttccacatacttcccaggtcatgatctactttggtagcaaggactgccacgtagccaaaggaaatacaaaccaaatccggagagggcctcctcccctcgctgtgggaccggccgggaaacgctgttgagcacacacgcagttatccgatggacacaaacacacgcccccacgcactcacctcgtcgtcgtggtgctggcagaagccgaggcgctcgggaaacactgagaggatggagaagggcgggccgggaaagggcggcccgagcccgagctgctgcgccgctgctgcggcaccgggacccggcgggccgcgctcgatgtagtggtccttggtgaggcgcacgcgctggtgcgctcggacgcagttgtcgcacaggtgctcctggcagtcgaggcagcgcgaagaagctgcgttgccctcatcgcacgagctgcagccgtgaggacggcggagcagcagcgccgacggggaagcggcagggccgccgggtgccgagcgggaaggcgcgggcggctgcggcgcctgcgggagtggcggcgcggaggcggacgcgcgcgggtgcgcgtggtgagcgtggtgccggtggttgctgtggccgcccgctcccgccggagcgccggcgcgcccgttcttgggcggcggctcgtcggcagtggccaccaccgcgtcgagcaggttgctaagcaggaaggcggacgaaggcagcgcgtccatacccgccgcctcggctagcactactttctggtcgcacacggggcagcgcagcttgagcggctctcccgccgcgccgccgcccgccgccggcagccggtgcgcctcgaggcaggggcggcagaaggcgtgcaggcagggcaggacgtgtaggcggcgcgccgccgccccagggcccccgccgccgccccccgacgacgtggacgtctgcgaggaggacgacgacgcggacgagttggaggagagcggcgccggcgagccgcacatctccttgcacagcaagcagatctggaaatcggtctcggggaacgaagccatttgcaacccagcccggaggagggaggagaccagagaggaagaggaggaggaggaggagagagcggacgaggtgggtgggggagtcaccgactcactcagaaaaatgcatcgattaggcctgcaatccgggagccggcaccagagcagcgctgcccgcttggcctcgccacgtccggcccgagcgctgccacccccgacactgcaggcattaaatgccactatccagcggcgacacagattcctccggataacttgggggccgcgtgccttccgaagagggaacgccggaacaagccccgacaggcgaggggcgagcgggggcagggaggtcggaagactccctggagcagctgaggcttcccttcgcgatagacgaaaggagttcccaaaaggagagttcgctgtgcagtcccagtcccggcgagagcagaatttggttccacgagtatttggtgcgttgcttttctttaaacggatttagtctgttcttgggaggggaaggagccccaaactagtaaaggcgggagcggtgcgtcgccaagccggtgtctccccgcgcgacgtcggctgccccgccgcatgacgcggcggccaggggctcctgggtggcccggcgtgctgcgcttggggcttgcgcacagccaggcacggcctcccctgcagggcggtgggccccgcagcagctgcagctcgtggtggcccagccgcggccgcacgcgtgcagtacgcacgcgcgtcccacgcgcctcgagtcttccgcgcgcctgcccagccgggccgcggctgcccgcgcttaacacgcacgcgcgccccacgcggcccggagccctcgtgcccccgcctcgcctggcctgggcgcctcacgcacgctccttccccttcggcttagcgcgcggggccgcaggtccccgcgggccgccctgaattattcatcggcaggaagatattagatgtacccgctccgcgcgggccgtcgtgcaatgctatccgagctccgcgcgcgccctgcgcccctcctcctcctcacgtccgtcctctctgaaaccttggcagagaagggggatcacatttcctttgtcatcgggccatttcgccctcgccttggtcccccctccgatcccgagcctcggggatggaggctcctctcgggcgcgctggaatcagtggaaccggcaacagccccgcgcggcgagctcgggagccgcgtggccaacgccgccggctcgcgcccgcgtcatcttctttctgaaaggagtcgccgatccggacgcgggtggcctcggccgcgctgcgcctaccgagctttgctcccgccgtgccccggcctcctggggctttgcacaactcccccagttcgggttgcgtgcgcgcgcgcgcgccccctctttctctgctttgccgcctctgcctcctcctcctcctcctcttctcttcagtacgccggttattgggactgatcggaattcggaatccttttaatctccaaaggagcaaactcacttccgcccgagtgctgggagggggctgggggaggggaggcaggggagggggctccaggcaaacaggaaacattagccctctcagcacggcccgcttttgtgtgctccctccctccgccctccaacctcctcccttctcccggccgctggggagatgaacgcccccgggcttcagtgtgacgacctttgaaaccttctgagcgaggagcagagaacgactcttccgtttatttaaaaaagaaaagaaaagatttcattctgaatccctggctcaaccgagacatatccactgcccgggagatctcggtttttacccaccttttctttttttctttttacgttttttaaagaactctgcatatctgatcaccaaaacatcacacggtggtgtgcagttggatgcatggaattaagcgagtctgaattctgatcggcagaggggccagagttcccttttgagttttaatggggctggggggaagcagggggcagctgttctggggaggcgacctggtgatggccccgcagccatctgggtggtgcccgaggccgcctgagcggttc

SEQ ID NO: 316493 - DNA, 4001 bp, Homo sapiens
tgtatataaatgtatataaagctccacagttttatcctaaaagcctggatgtccatgagatattgaagatgcttaaagatgtaaaacttgtctcaaatttgaaggaaaagaaataaagggaattcaaatttttacaaaatgcaaataaaacacttgaaaaattccttcttcccttggcttcatttaatgaccctgcacaggctcctaggtttcctgctctctgacctgtgcactgatgtccagatgcccctcccttaaaggtggatgtaactccgcattctatcctattcttttttttcaatctatacatttcccttctgagatgtgacctacttctgtggcttcaatgaccatgcattagaaagacatctcaaatgcaggccgggtgcagtggctcactcctgtaatcccagcactttggaaggccgaggagggaggatcgcttgaggtcaggagtttgagaccagcctgaccaacatggcgaaaccctgtctctactaaaaatacaaaaattagccaggtgtggtggcgcatgcctgtaatcccaggtactcgtgaggctgaagtggggcgattcttctacttcccaggtactcgtgaggctgatgtagaagaatcgcttgaataaggggggcggaagttgcagtgagccgagattttgcaacaaaatctgttgcagtgagcgacagagtaagactgtctcaaaacaacaaaaacaaacaaaaaacacctcaaacgcaacaaatcgaaataacccctctacctttgcttcacaatctgatcctccttcaatgttctgtttcaagggatattgctatccattggtattgttcccaacatatatttctaagcttattgcggccaggtcagcagcatctctagctattcttcacctcacacttcaagtattccaccattacttttcacagcactctggtgcctatgacagtacttctaacactgcactgtaattgcctggttatctatttgcctcactagatggtaaggactaactagtgtccatgaggacaaggactttgtctataatgttaacattgaatccaatgcttgacagtatttggctcacagtaatcacgcaaatatttttctaataccctagatcgatgcttccttcattaaaaaaaaaaaaaagaaaaaaaaagttcagcctccctttattattttttttgagacggagtctcgctctgtcactccaggctggagtatagtggcgcgatctcggcgcaagctccgcctcccagggttcacgccattctcctgcctcagcctcccgagtagctgggactacaggcacccgccaccacgcccggctattttgtatttttagtacagacggggtttcactgtgttagccaggatggtctcggatctcctgacctcgtgatccgcccacctcggcctctcattgtgctgggattacaggcgtgagccaccgcgcccggctcagcctccctttaaagagaaaacaatttactttagaatcccggaaatatttaactggggtccccaggccccaatctaataaacattgatttcagaaggagttttaaaagttttattcttgtaactggcaaggacttagaataccacagaaatgaaaaccccaattgtaaaaagcaatcaagtacatcatttcaggaaccactgattttgtttcaggtactgtactagttatagtttattaaaatcactgggcttcctcttacccgtgggccttccgaacgcacatgctccactaagtgcatcttggaacgtctccggcgtcctcccacccccaacacacacattaggcgaaagaagaaactcgcttaccaggagtgcagagatagtggttcccgctggcgcaaagaacagggaccctggaggacgaaggactccgacgtacggacgcccagggatccgcgccgaagctagcacgcagcctacccaacagtctacacagccgaccagagcggtcgctggggctcagccggaagttccgccctctcccttccggcgctgctttttacgtcacagcacgcaaagaacgctttcttggctaaaagaagcgccttagaggagacggctgtcagtaggcaactgggtactcgaagactacgctctcagttgtcacggagttgtagctgtgttgtgttgtgttttcctccatatatcctaaaaacttcttctgggccgggccagttggcttacgcctgttatcccagtgctttgggcggccgaggcgggcggatcacttggggtcaggagtttgagaccagcctggccaacatagtgaaaccccgtctctactaaaaatacaaaaattagccaggtgtggtggcgcgcgcctgtaatcccagttgctcgggaggctgaggcaggagaatcgcttgaacctgggaggcggaggttgcggtgagctgagatcgcgccactgcactccagcctgggcgacagagcaagactctctgtctcaaaaaaaaaaaaaaaaaaaaaaaaaaactgtttctaatcctcttttcaacctactctctgtttgggccctgtatttataaacatttgctgacagagtactaaaataaagtatgtttttttcacacgtcttcttactcagcttcaaactccttgacgctaggactttaaactcctaatctttttgaccagtttatcaccagtacctggcactatgcttggaacgtgataagccacggtaagtttctgtctcctcctagctcatttggaaagtttaatgtgaaatgaaattaaaacacatttgtaaattggtggcctttggggccaattcagcctccacatatatttgtaaccaaacacagaatgaacatattctgcagccattctactcctagtaatatacccaaagaaattgaaagcagagacacaaacagacacttgtactctaatgtcattgtagcattattgataataaccaaaaggtggaagcaacccaaatatccatgaacagatgaatagattaaaaaatgttgcatgtacatacaatggaatattattcagtcttaaaaaggaatgaagttctgatacatggtacaacatggataaactttggaggcattatacactgagataagccaggcacaaaaggacaaatattgtataagtccacctatatgaagtgcctagaatagtcaaatcataaagaaagaaagtagaatagtgtttaccaggggctggggaaagggaagaatgggcagttactgtttaataggtatgaattttcagtatgggatgatgaaaaagttctggagatggatagtagtgatggttgtacaagaacgtgaatgtacttaatgccattgaactgtacacttgaaaatgactaaaatggaaatgtttatattgtatatagtttactaaaataaaagaaggtaggcatagtcttttccaaatgattttaaaaaacgagatcttgtctaagagactgattactatcatgttagaaaggtgaggtggtgatagcaaaataatcatgagtttactcccaaacatggaaaaaaatcaagaataaatatcgtctagtagttataacaaatagcagtgtagaggttattttttcttgttcctgttctttaaagagatacatctgaagtttttccattaatattttatgaaggtttttgctatatgatctttgtcaagtaaaggaaatttcattctgttaagtttactaagattctttatgtgaaaaatctttggaagtgtttctataaatatagcagaacataatttattcaatatgtctgggatctgacctattctagattaagaatatttccaggtttcagacatcttacctccaacaaaaagcacagtgattttcaaaatacgtttttttgttttttttttttgagacggagtctcgctctttcacccaggccagagtgcagtggcgcgatctcggctcattgcaagctccgcctcccgggtttacgccattctcctgcctcagcccccgagtggctggg

SEQ ID NO: 316494 - DNA, 4001 bp, Homo sapiens
ttcatctcttgttcagatgaaaaaactgaaaacggtgtcagtttgagggattacgactaggtctatgtatctacctggttttgttctccagaagcacttactgtggcaggcggggtctcactagcgcaggcctccataactgtttcagtactgactgactggttgagttacatattaaaagctgaaagagccagccagtgcccttaaacaaggctagaatgtaacaaaagccccccaagagttttgcctaggcctttcctggaccttgaagcatgataaaataacaaaggaattctttttttttttttttttttttttgagatggagtctcgctctgtcgctcaggcgggagtgcagtggcgcgatctcagctcactgcaacccctgcctcctgggttcaagagattctcctgcctcagcatcccaagtagcagggattacaggcgcacaccaccacatccggctaattttttatacttctgggtagagacggggttttaccacgttggccagactgctctcgaactcctgacctcaagtgatctgcccgcctcagcctcccaaagtgctgggattacaggcgtgagccactgagcccggccacaaaggaattcttaacaggacccgtttagaattaaacaagttttactggggatctgaggaaactccccaggcctccacgaacaagtttattaggggtctgagggaactccccaaacctccatgatttagcaggagagaatataagggtaatcaccccagcacctggacccatttagattaagtaaatttactcaggctccagaggaaggtcttcaggactcagatcttatgggtaagaagttaatcacttgtatctttagatcaatgcacacttacacataaacatacaacttacaaggtatataagctctggaaagctctgtaattctgagtcggtctgggatattttccacgccttcgccccgtacctggttacagaaataaactcctttctttcctagtttatctgcatctcattattgggcagcgagaataagcagcccaaccctcggtttggtggtttggtcggggagcattaccacgacactcgcatgccacatggtactgtgatgacactctccccagagcagggcttcaggcagtatgagagggatgcggggttctagaaactctaaccgagtttctggtctccaaaacttgtcatggtcacaggtgggtatcaccctacttccccacctgcactcgaggattcacgaccctgggatagctcctagacattgtattttcccatgaatttagttttgctgcccccattttcctgattcttttcctgccatcttgcaatctcctctgatttctggcacaccgcggccttcccttctacatatcacatcctcgttctccccatacgggggtcctgcccataaggaggccgcagcagctctcgagtgaccccggtgtaaacctgcagagaaaaaccattccattccacggaagcgggtggaggagccgcgcttcccggcaggccacgtggggcggaaagacccactcagtttcctcgcacctccgcctcgacttaggaaaacgctctggggaaccccagccctgaaaaggcgcgtctcaccccccacgccgggtgctggcgacaaggcccagtgaaaaagcgtctcggggccgtccgcgcggaggggaaagtgctgagggaagccaaggaatccgcgcctgcggtcgccggaaacgtggcggggacacgacctccgcgtcggggctattttgcccactgctgaggaggcctctcgccacgtcccgctcccgtcttcctcgaggaccgggcgcggtggcgcctctggcccacagcaggaaggaaggggcagcaactcacgccaccaactctgcccctctgagcggcgcgcgcccgcttaccggccccgctgttgccgcagccgccaccgccgccacgcgcacttccgggctggtgaacgcggtgacgtcaccaacgcacatgggttggcggcgaatgggaagtcgcggcggggcgagggcgagtgcgggggcggggcccggaccgaagggcttccgcctcccgtcgctcctccccaccgtgaggcgaacctcagccggtttcccagccccgccgaggcccgctggggcgaagcggagccccggggggccctgaggaaaccggcgcgggttcgtttaattacgcccttctcgccagacctctggctggccctgagctgctcagaagcccatctgcgcggcatgcccgtgcgatctgagacaactggcagctgtcttcctttgcaaaacgagactgttaataaaacctaccccagggtaggacggactgttcggtaaatgttaacttatccgtgtttgactattctctcctctaatctctgcatagggttaagtccacagttgacagagtcacgcgcattcgaaatctaagcccgccggtcctatgaacttactgggcatattttattttcttacctggtttgtgtaaccattggcctccttggcccggaggcttcccatctgtaacgtggagaacttagatttgatccagttcattaattctttctagagcggaaaagagcaaagagagtggcaaaggagtgggaatacagccgttgagcccttaaagtgcgaaaatgtgtagtttttgttttgttttgtttttgagacggagtttcgctcttgtcgcccaggctggagtgcggtggcgcgatctgggctcgctgcaacctccgccttccggtttcaagcgatgctcctgcctcggcctcccgagtagctgggattacaggtgtctgccaccacgcccggctaatttttagtagagacggggttttgccgtgttggccaactggtctcgaactcctgacctcgtgttccccaggcctcggcccccaaaagtgccgggattacttttgccgggattcggccactgcgcccggccgaaaatgtgtagtcttttaagtgtaactttacatcacttagctttccctaaaattttcctagaaaaatgcttgtgcatgttatttctgttcttttgccctccccacatgcctacctgttcttcccaaacttttcagccccactctctgtagacttcctaaaacgtaaaaagtaagatgtgcaattaccacacctcttcaaggtgttgaatatcctgtttttggaagcacaggactggctttccaaatggacattcagaggcacagcattgatatcatccggtgcaaggattttctgtctctctctctctttggggcaaggaaagccccaaatcatcctttcaggcttgtctgctatttctcaccaccatgaccctagacaaactggaccaaagcctccattgctgtacccacctagaatagattctccaaatcaccacctatgaaggcaacgctaatacaactattatgatgacttacttcgtgccagttactgtgctgggcaccctcaacaatttctggccttgtaaatatatagtttatatatgcaggtgtatatacagttgtccttccgtatccatggggtattggttccagaacatcaccccagccagtgttcaagttctttacataaaatggcataatatttacatatagactatacacattctgtagtacaaatcatttctagattacttataatacctgatataaatgctgtgtaaacagttgttatgctatatcgcttctttgtgttttttaattgctatttaatttttttttttttttttgagatggagtttcactctggcgcccaggctggagtgcagtggcacgatctcagctcactgcaacctctgctttccaggttcaagcgattctcctgcctcatcctcccaagtagctgggattacaggcacccgcctccacgcccggctaatttttgtatttttagtagagacggggtttcaccatgttggccaggctggtcttgaactgctgacctcaggtgacccacccacctaggcctcccga

SEQ ID NO: 316495 - DNA, 4001 bp, Homo sapiens
aaggtatttcacctggtactactaaataggctatacaactatcataaattaaaactctcttttgtttgagatatgtcatgcaataatcctaaatatacacaatgcacaaatacttgctcaaccatattccactgatatttttctgtcctcagtttgacaggaatatcaaatttcctttcttgacatactttctgtttgctttaaaataaccattgcacagtgagctggaatacatggagccagcacttactcattttagtacaacacaatcttctccccttcctctctcagaacttttgagggaagagaactcaggcaacccactccagcaatactaaataattttacataatccacagaccctatttttgtgacgttgtagatgtatattctgtttctttacatctcaaagactgctcaaagttgtgtccatggtgtactttaacaatattattaatattgctttcataatattatttaatactattacataagaacataaaaatggctcaaccacagacataggtggactttgtttatatgtcaattgttttcaaaaaatcatgtaaataaaatcctatttcaaaagcaggaggagaggttaggaaggctgtcatttattaattacacattcacacatacaaacaaacaaacaaaaatcctgtgtagttagtcttttcatagtgtaaactgccctttgggtttgttccagaagtttgcatgtttctaacagagttttcctaagtgtacagccatataaatttggaaaaagaaaaattttagtgtttccatgtaggaaacaaaagcagtcttagggcaatcaatttcctatcccttttgttatatacatcactacaaaggatgattgcgtgacatggccttaatatggccataaaaatgattaacttctagactaaaaaaaggataacgcgctaaatatattccacatatttttgccttgtaattcctgtaattatttttcactatctttatctcccaaagaaagatctgggagcaataaatctttctctccaataaaaagcactaacaatcaaaggcgttccgtaaatccagagaaagttttggcaactaaggcagaatttcttccgtcccgtccttacttcatgtatctccacctaggatattccgttattaatgccagtcaacagtcactggctaaagcactggtcaggtgaagctaaataatagagggtctggttttgtttttaagaaaaacaaaaaccaggtgatgagaaccctccatacgaggcatcctaaggtaaggtgacggaattttccgactggagtgtcggaaactagcctctcgactcccggaaggaatgaactgcgagccagagagaagaccaggtcattcatgcggtcagtagcaagggcggcgctaaaacgctggggtcggggctcccaaggcgctacctaaaccccggaccccaaggccagagccacccccgacggtgcagcgctccgagggcgcagccccagctccactctcccgccagctccacactcacagggcagaggcggtgaggagaagaccgcctgaggcagcaggcgaggcgggaagacactcggcgcctgagacagagggaatgccccgatataagttgaggcgggggagaggactaaaggtctggaggacaggggcgtccagaggagaaaggggcctaactctcacccttgtcgcacgccagcaagaaaagcttctcattcagcgtattctcctccttcacctcccgcacatccttcagcgccatcacctcgttcggcgaggaagaggatggagaggaaggcagggaggaggaggaggcgcccgagaggtccgtgctcgggtacagggccgccatcatcgcggcccatgaagggggcaggccaggagacgggggcggggcccccaccggccccgaccccgaccccgaccccagccacgccccagggctggaaaaaggatgagtcgttcccactgctgcctcggctcgaggcccgttggccccgaagggcgtcgcctcccctgagaaccagcactcgccctccactgacagccccaagttggtggcggcgcatgcgcggccccggggccagcgacccctccccagccgccggcgccccggccgagccggtccgcgcccgtccggggacgacagtgtggcgcgcgccagggcggcagccgagcacggggccgtgccaggagtcgcaggggccgcgcctggggcggcctagcccaggaagaggacgagagatctgtgggagaggagctccaagaggcgcttctgcgcacgttgggctccagggctgtgggaaccgctggcccagctgcgctccgaggagatgttcgcgactctgtcctcacgtcatcctctgctcctctgtagcgacgacactagggaggagcctgcggcaagggcgggcttgggtgggcggggcctgcggcaagcggggcgtgggtgggtggggcctgcggtggggacgcactgggctcctggagcccgctgcagcttccttcgctctggtgaggtgaaccgcagtctgaggaagacttcgctcaatcgtccctttccacacccagggtactggtttaaggtaattaagcaaatatggagcagtatgttaattgagtctctgacgacttaatgtttagtcgaaatcctttgtggaattgtccagctatttcatattctggtgcactatgctttaaagcacaatggagagccagactcgtgggtttgtatgttgtactcattttaggctggaaatgaactctcatttataaaggatatatagatatataattatattatgtttaaataatttatacaaatatataaatttttatttccatattatttccataggtttttgaggaacaggtggtgtttggttacatgagtaagttctttagtgatgatttgtgagattttgatgtacccatcatcgagcagtatacactgaacctaattttgtagtcttttatccctctcccccttcccaacctttccccgagtcccgaaagtccattgtgtcattcctatgcctttgcatcctcaaagcttagctctcacttgtgagtgagaacatacgatgtttggttttccattcctgagttacttcatttagaataagaataatagtctccagtcccatccaggtttctgcgaatgccatttattcattcctttttatggctgagtagtattccatcattatatatatatcacatatatatataccacatatatatatatatatatatatatcacagtttctttatccactcattgattcatgggcatttgggttggctccacatttttgcaattgcgaattgtgctgctataaatatgcatgggcaagtatctttttcgtgtaatgacttcttttcctctgggtagatacccagtagtgggattactggatcaaatggtagttctacttttagttctctaaggaatctccacactgttttccatagtggtgtactagtttacagtcccaccagtaatgtagaagtgttcccttttcaccgcatccacaccaacagctattattttttgatttttttgattatggccattcttgcggaagtagggtggtacatacggcatagcagttttgacttggaattccctgatcattagtgatcttgagcattttttcatatgtttgttggccatttgtgtatcttcttttgagaattgtctattcatgtttttttgttttttcttgagacagagttttgctcttgttgcccaggctggagtgcaatggcgtgatcttggctcaccgcaacttccgcctcccaggttcaagtgattctcctgcctcagccttccgaccagctggtattaccggcatgtgccaccacacccggctaattttgtatttttagtagagacagtgtttctccctgttggtcaggctggtctcgaactccagacctcaggtgatctgcctgcctcagcctcccaaagtgctgggattacaagcat

SEQ ID NO: 316496 - DNA, 4001 bp, Homo sapiens
tgctcctgctgactggcgtatggctgctcagctgttgcgactgggccagaggcgcgggtacatttggcatagtaacagaagtggtagacacactaggcacgcttggagcgggcacggctgcaggcacgtttggaactccgggcaccacggcgtgagggccaccaggtacggctgacagcggaccactgccacccatctgcggcggaggcacggactggggctgcccagccccggcaggaccgaggcacggctgcaccacgcctcccacagtagccgggggcactccagtcggctgacaaggcgcgacctgcccgccttgcgctggtcccgtccggggggccatggcttcgctgggctgggaagacgcgcccatgagctgcgcgcccaccgaggaagcattctggccggtgcccacgggaagggtggccgccgtggcggggctcgctgcggcgccggtggacgagggctgcgcggggcttggcggctgcaggccggccacgtgctgctgcaggtactcactctggccggagggctggacgggcagcaaatgtccgggcggtatctgaggctgaggatacgcgaactgctggggctgctgcgccgcgggggcgcccactgcagggcccggctgcggaggcagggacatagccggctgcgccagggttacattcgtcggcggcagagtctgtcccccgggccccgctccctggggctggctgggctgcgcggctgccatcattggctgcggcccggtcgcggctcccgggaacggcggcagcggagccgagctttgagccacagccccacctacgggtggcggcggcggctgtggctgcccaacgctaaaactctgcggctgggccggagtgggctggctcattttctccgacgggggtagctgtgacacagcagtcaaggagctgtcagttcccgactcgggcccgtgcgccccctgcatggaggccactactaccaccaccgaccctccggtggcgcccaggccgctgtcccgctccgcagtctggtcaaaagtactgctgtgtctaatgcaatccccggatctagtcaggacgctgctgtctgaatccctctcatagtattccatacacgtccatcggccgcgtctatagggctctccgctcccgtggtccagcttgatcacgcgaaaacgggaactacatgtggtgggaggctgagatggggctgcagtcactggcccggcggatgagcccgcgagctgggggccgccgggtgctccgggggcgggggccgaagtggcagccgccgccagggtactggcgagcgccccagacacgctccgggccgaaacgactcctcctccgttggcgggagcagcagccgccgctgccagctgcccatctaggaggaggtttggggagacggtcccgggagtctccgcatccccaacattgttaagcgtctcttcggaagagctgcgctcgcagacctcctcagggccataatccgtggcccgagagacgtcgaaaatctcggaggagacgtcctctgtgcgtgactcgtccgggtcgtccaagctctcggtgtcctcggtgatgctagtggccacctgggccgtggtgacactggtgatctggaagcagctcttcttcttggccggcatcttggacatggtgaagaaggctggagggcagagaggcacgccggctcctctgggtcctgtcggaaaccggggagggcagagcacgggcccccaaagacaaagtccgagtctgcgctggggtctgaggcccgccgctgttaagagtcacgggctgatccaggcgctggccgcccggtgagacatcctcctcctcgtttccttctctgtgtcggtctcttcggctctgcccccgtctcagtcccgcggcggctcctccttcctttttagctctcgcagccgcggcgcctcaattcaattccctcagaggcggcgagagcgcgaacccaggggcgggccggctgcttcctctctcgtctccgggcagccgtggtcagtccagctcggcgctcggcgcggtcagcaggccttggctgggggtgggagtgggagggcgaagaggaggaggaggaggcggtggcggcggcgtgaggggcggtgctgccccgctcgggctcctcaggccggtgccggcgtcagcgctgggctctctgactgagggaaggagcggcgagtccggagtcggagatgcctaattcagccgggagccgcgggccggagctggctgaaggtccgcgggcgggcggtggggctgtggcgcgggcaggcggccctccctccccggctctagccggagctcagccccagggacatgtcgactgcctcaggcggaaacccgctctgggggaggggaaagccggctcggtcctccccttacagggggaaccacccctgcgggcgggcggcgacggcggtctcggcctcccctcgcggcttctctcagagaggggcggcggcggcagaccgctggcacgggaccggaggcgccccggctgtgtgaggtagcggtggtggcttctccggctcctcctcggtgcgcccaattcctaaaccccgaagaaactgaaattcaaactgctgaagcggcggctgcagctccctccgctgggccaagatggggctgaaatggccgcgccagggatgctgggaggagcagcagccccgctgccgccgccgctgccgactaaaatgccgccgctgccgcagccaccgccagcgccgcagccgccgccgttccgtgacgcaccggcgtcgtgacgtcaccgctccgccccctccggtttcctgcagtttcgcgtggaacctggggtggggggcaatgggcggggctaaaggttaaaaaagggagcggtttctttatttaaaatttttaaaatttaaattttgtgttgtaggttctttaagcattgacgagctaaagaccattttaaattctaagcctagggaagcttacaatggaactaatcagatgtttttatgtcggtttgttccgagacagtggaagactggaggtcatgtgcttgtgtctaatgtttagcaaaatcttagtgaaacgagggcgataggaatgggggctggggaagacttagatgggataaaaagaggtgcggctggaagaactaaatcactttaaaacttctgaaaataaatgttgaccattgtagtcagaggagtaaaatgttcagagaaatggggatgattaaacaagaacggcaagccagattgagtcagaaaattatcttcctgccagaaattctgtctcccacaacggcatcagggggtggttacttgcccagggtgtagtcagtttttaaaaagcttaagggttaccaacatattcctaaatttcctgaatttgctgtgattccaggattcatttaaactcttgagactgttttactttcggcacgaaatcagctcatgggctttataaatgtagaacctactgcattatagttcttctttttgtttattctaaaactgttagtagcagccagcgtattatatgatttggattgggccatgaacaaccgtaacgagtgataaagcaccctttcctgttccaatgcaaagaacaactatgaaaagaaagtactggcaaatttatcatcttgtagttagttcctggccaaagaaaatggtaaggccattcttttaagcagttaaaaaaaaatggggatgggctcttaaactttggcatgctaaggccattcttttaagcagtttaaaaaaatggggatgggctcctaaactttgacatactaaagcagtcgtcatttaggtaaaatctaagtcttaatggaaatcgtgatttcatatctactgcagcgttagcaatcacataatgataacttaaatcagtaaatcgttgaactcggttctctaatctttgaagaatagaaatactttttatcccaaaagatgttttgagaattaaatttgcagagaattttttaggtctttagttgtaatttatagagct

SEQ ID NO: 316497 - DNA, 4001 bp, Homo sapiens
gccatgtcctgcaagaatgacttcacagataccagcgtgaagcttctagaaaagatagaaagaaaccctcagggaaggtagagctcacttccccagggggaaaaattcaagaggacaaatcagatgatctctagtttcatggaagagtcctcctgtgctgaactcgaaaggcaaagcagaggagaaaagactgcatttaccattccccatatctgcaatggatattcaagaaggttctttagtgtcgcggcagaacagcatgctgtaagaggtgggatgtgagtaaaataagaagaggaaactgtcataggtaggtaccagatgccagaggcactcactgcatgtgctgcacatgtgggtactatagtcatcccttggtatccacagaaggactggttccaggactcaccccctaccaaaatccgcagctcaagtcccttaaataaaatgtagtatttgcatgtaacttatgcccatcctcccatctactttaagtcttctctagattacttagaatacctaatacaatgtaaatactaaataattgttatatatatatatttttaaatttctttttccaaatatttttgatgcaacattggttgaatccacagattcggaacctgatagcgagagctgactgtactatcctcattccacagatatgaaagaagagcggtgcctgaggtgcacaaaaacatataggaaagactgggtcagttgtcaagaggtttgggatgcaaaggttggtttggaattggagtcactgcaggttatttagaatgatgattgaaaaatgcagattaagaaaattaaacctgggagtggtacatcacacagtggccctcaagcttacctacccttaactcctcatgcccaggcctcacctgcaatcaattacatcagaatttcctgggtggacccagctgattttaacatatagctaaccactggtaacagcaaggtctattcaaattcacttaatcccagtagcccccggaggtaaagactatttttatttccattgtacagatgtggaaagtgactcggaggggccgggcgcacccctgagaaatctttacttcttatttccccaacctgcgcaacctgactccagagctgcatattcttactttctattaaaagcagagtctgtttcttattcttccctcgagcacacaggctaacacctcttaggtgatggtaaatgtctattagaaaaacaaaaaagggagaggtggctccatttaattttccaaccttcctggactaggtgccaaacaaacctggttaaaaaacctcctacccagcaaatctcaccttctcccaaccaaaacacgcttcaagctccatctgcgcacctcctgggcttagggaggcaaggatgaaaggcacaaggtaaacaatcctgcctctggggagctttcaagttagaacctgagaataagccatataaacagatgaccagcctttgaaagttgttgtcaggattaaatgcataattttgcagaaggcgtttcgttcggggcctaccacgtggaaagcgctcaccagacgacagctgcaaataaaataaactgcgcaccccaacagcgttaggggccccgccaattcctaactccctgtcttacccctttgcttctttccttgactacccccacacccgaccgaactccaccagaggctgcggctcctctcgggcattgtcagctgcaccttgcgccccagccccaccagccctgaacaaggcgccggcgtttccaagaaccaagggctgcaggcgcacgaggaaagcgcggaggagtcagtgaccgggcgcactcggaagcctggctccccgtcccggcactgtctcggccggctgtgcgaccccagcacagtacctaggccctttcctctctcgccctggaggactttcggaagagcgagatttcctttcgctgcaaaacaccaaactcggaaagggccgcgctttcctcgcccagggcccttacctttcttggccccacgcgctcgccgttaccccggcaacgccggccgtggggcggacaccgctgccgtcaagcagtgcggccgcaaagccagccgagtgcgcagccgcagagctcccgtcgggacttggcggagtgcgcctgcgcacggccggctggcgggtgttctgtgcgccagctctgccactgcggagtatgaggcggaggctgcgtgcgcgctttgctgctctctgcaggattgtacggaagccagaacgatcctgcaagacgcattttacagatgagatgcagttacccgtcaaatgtcacatagtcacgtgggaggtgggagagacctagaatcttcggccctcggtggatgggatgtttgaggcgaccgacaggactttattaaatggccctgaggaaactgatctcatctttctcaatgtagaaagaggatcacagcagcgcacctgtgtacgctgcagcatgcggggaacttgcaaggacgttttctctggcagacacctggccagaagcctctgtgtgcccagactgcctgtgcagttaagggacaataggcggcaggtccacctgctctgcatccccattttcccccctcactggctgcgtgagcttgaatgactgacaacctttctgagcttgagtttactgaaaaatgggccatcagaattacgggagatgagcaaaactggagtgcaataggaagtgtaagtttctcctgacctggttattttaaaggagccctgtggggagtccaatatatactttcccaaatatgaatcacaggagttccaccacacagactaagcaggaggcaaaggaggatggcaaggaagtgtggcaaatactgctggagagattcatggtgctagatgtgatgatggatgttgaattttggacttctgccaatgttcttgcctccattccttcacgcatgctgttgcctctatgttccctcccctctgttagctgcagtaattcctggtcagcctttaggtctcagctcaaatatcacctcttccaggagacttcttgccttcccagacctgcttgggtgacttgcctctgtgctctgcagtagtctggcatggcatgtgttgtccctgtttttctggccctttttattttttgagacggagcctggctctgtcgcccaggctggaatgcagtggcaccatctcagctcacttacctcactgcaatctctgcctcccaggttcaggtgattctcctgcctcagcctcccgagtagctcggattacaggcgcctgccaccacgcccggctgattgttatatttttagtagaaacggggtttcaccacgttggccaggctggtctcaaactcctgacctcaagcgatcctcccgcctcggcctcccaaagtgctgggattacaggcttgagccactgcatcctgcctggccctttttgaactgcactgtgggcttgctcttggtagagtgagatcatgtcgcagcattcagtgggtcctctgctgcaaggaccttcactgctaggctagggagttcaggttttagataaaccaaaatcaaagagctttgtggtaagaatgttgcaaaagaaagggagaaaattggcaagagtcacaggatatggtaacaggatggattgggcaggggagagacagctgaagagaggctgtaatatccgaccagaacatgccaatttaagaaatactggttttagaattagagggctttaacaatgaaagggattcagaggttgtccagttaaacttccttatttaactgataagaaaacagttccagtggcactgtgagttgtcagagataaccgagcaggtctgaggtggggctgagactagagccaggtctcttaaatcccatcccagctcgtggaaggatttggggtttgctgataatgggatctcaaattcccctcccaaaaacataaaaaaagaaattaaaaaaagaaaaaaaatctgtaaattttaaaaaagaaagaaattttccccaagact

SEQ ID NO: 316498 - DNA, 4001 bp, Homo sapiens
agagctcacttccccagggggaaaaattcaagaggacaaatcagatgatctctagtttcatggaagagtcctcctgtgctgaactcgaaaggcaaagcagaggagaaaagactgcatttaccattccccatatctgcaatggatattcaagaaggttctttagtgtcgcggcagaacagcatgctgtaagaggtgggatgtgagtaaaataagaagaggaaactgtcataggtaggtaccagatgccagaggcactcactgcatgtgctgcacatgtgggtactatagtcatcccttggtatccacagaaggactggttccaggactcaccccctaccaaaatccgcagctcaagtcccttaaataaaatgtagtatttgcatgtaacttatgcccatcctcccatctactttaagtcttctctagattacttagaatacctaatacaatgtaaatactaaataattgttatatatatatatttttaaatttctttttccaaatatttttgatgcaacattggttgaatccacagattcggaacctgatagcgagagctgactgtactatcctcattccacagatatgaaagaagagcggtgcctgaggtgcacaaaaacatataggaaagactgggtcagttgtcaagaggtttgggatgcaaaggttggtttggaattggagtcactgcaggttatttagaatgatgattgaaaaatgcagattaagaaaattaaacctgggagtggtacatcacacagtggccctcaagcttacctacccttaactcctcatgcccaggcctcacctgcaatcaattacatcagaatttcctgggtggacccagctgattttaacatatagctaaccactggtaacagcaaggtctattcaaattcacttaatcccagtagcccccggaggtaaagactatttttatttccattgtacagatgtggaaagtgactcggaggggccgggcgcacccctgagaaatctttacttcttatttccccaacctgcgcaacctgactccagagctgcatattcttactttctattaaaagcagagtctgtttcttattcttccctcgagcacacaggctaacacctcttaggtgatggtaaatgtctattagaaaaacaaaaaagggagaggtggctccatttaattttccaaccttcctggactaggtgccaaacaaacctggttaaaaaacctcctacccagcaaatctcaccttctcccaaccaaaacacgcttcaagctccatctgcgcacctcctgggcttagggaggcaaggatgaaaggcacaaggtaaacaatcctgcctctggggagctttcaagttagaacctgagaataagccatataaacagatgaccagcctttgaaagttgttgtcaggattaaatgcataattttgcagaaggcgtttcgttcggggcctaccacgtggaaagcgctcaccagacgacagctgcaaataaaataaactgcgcaccccaacagcgttaggggccccgccaattcctaactccctgtcttacccctttgcttctttccttgactacccccacacccgaccgaactccaccagaggctgcggctcctctcgggcattgtcagctgcaccttgcgccccagccccaccagccctgaacaaggcgccggcgtttccaagaaccaagggctgcaggcgcacgaggaaagcgcggaggagtcagtgaccgggcgcactcggaagcctggctccccgtcccggcactgtctcggccggctgtgcgaccccagcacagtacctaggccctttcctctctcgccctggaggactttcggaagagcgagatttcctttcgctgcaaaacaccaaactcggaaagggccgcgctttcctcgcccagggcccttacctttcttggccccacgcgctcgccgttaccccggcaacgccggccgtggggcggacaccgctgccgtcaagcagtgcggccgcaaagccagccgagtgcgcagccgcagagctcccgtcgggacttggcggagtgcgcctgcgcacggccggctggcgggtgttctgtgcgccagctctgccactgcggagtatgaggcggaggctgcgtgcgcgctttgctgctctctgcaggattgtacggaagccagaacgatcctgcaagacgcattttacagatgagatgcagttacccgtcaaatgtcacatagtcacgtgggaggtgggagagacctagaatcttcggccctcggtggatgggatgtttgaggcgaccgacaggactttattaaatggccctgaggaaactgatctcatctttctcaatgtagaaagaggatcacagcagcgcacctgtgtacgctgcagcatgcggggaacttgcaaggacgttttctctggcagacacctggccagaagcctctgtgtgcccagactgcctgtgcagttaagggacaataggcggcaggtccacctgctctgcatccccattttcccccctcactggctgcgtgagcttgaatgactgacaacctttctgagcttgagtttactgaaaaatgggccatcagaattacgggagatgagcaaaactggagtgcaataggaagtgtaagtttctcctgacctggttattttaaaggagccctgtggggagtccaatatatactttcccaaatatgaatcacaggagttccaccacacagactaagcaggaggcaaaggaggatggcaaggaagtgtggcaaatactgctggagagattcatggtgctagatgtgatgatggatgttgaattttggacttctgccaatgttcttgcctccattccttcacgcatgctgttgcctctatgttccctcccctctgttagctgcagtaattcctggtcagcctttaggtctcagctcaaatatcacctcttccaggagacttcttgccttcccagacctgcttgggtgacttgcctctgtgctctgcagtagtctggcatggcatgtgttgtccctgtttttctggccctttttattttttgagacggagcctggctctgtcgcccaggctggaatgcagtggcaccatctcagctcacttacctcactgcaatctctgcctcccaggttcaggtgattctcctgcctcagcctcccgagtagctcggattacaggcgcctgccaccacgcccggctgattgttatatttttagtagaaacggggtttcaccacgttggccaggctggtctcaaactcctgacctcaagcgatcctcccgcctcggcctcccaaagtgctgggattacaggcttgagccactgcatcctgcctggccctttttgaactgcactgtgggcttgctcttggtagagtgagatcatgtcgcagcattcagtgggtcctctgctgcaaggaccttcactgctaggctagggagttcaggttttagataaaccaaaatcaaagagctttgtggtaagaatgttgcaaaagaaagggagaaaattggcaagagtcacaggatatggtaacaggatggattgggcaggggagagacagctgaagagaggctgtaatatccgaccagaacatgccaatttaagaaatactggttttagaattagagggctttaacaatgaaagggattcagaggttgtccagttaaacttccttatttaactgataagaaaacagttccagtggcactgtgagttgtcagagataaccgagcaggtctgaggtggggctgagactagagccaggtctcttaaatcccatcccagctcgtggaaggatttggggtttgctgataatgggatctcaaattcccctcccaaaaacataaaaaaagaaattaaaaaaagaaaaaaaatctgtaaattttaaaaaagaaagaaattttccccaagactttctcaagtgcattttaaaccctttgatatggttattttcaaacatacaacacaaaagtagagaaaacagtccaataaa

SEQ ID NO: 316499 - DNA, 4001 bp, Homo sapiens
tagttgaacaacctaaagtaaaaatttaaataaggatttagttaaaagtaatttccgtgtccaaacacagtaaaatatgtttgctggttcagttaaaaaactaaaatctcatgaaactttccattagtttaggaaccaaatatgatggcttatgacagtatacaacatgcatcaaaaacaaactaaaatttgtctaaaaggtataaggattccagtgaaaatgaaatgccaattctccaaagtattttgtctgttatccaatctgtaataccttctgcttttcttcctttttatctgcctggatagatggcaaatacccaatcttttatcgtgacacattagtttaaattcaggactatccatcttgggcaaagtatcttaatataatgtacaaaccacttacatttaattattgtaaatatataaatgaaacttctctccaaattatccacatgaaaatatacaatgccaaatattaactaattaagaatacatatgttcaactacaagaaataagtctgaatatcaatcaacctcaccacgtccactgatacctctttgagcatttagaaaagaacactgtgcctgccaaccagtttaaatttaaaaaatcccaaaaaccagaaatggagggagaaactgggtaacttacactaatttttttaaactatttttctccaattaacatttaatttccaaaagcatcttggcaggtatacttgagcacaactgcatgcaaagatatagttcttgcattgagatgcgttaacaaaaacagaagcaatccaagtaacaaaaataacttactgtgatttctaagtgggctatatctctcatgataccacttcctaaacagatcaacaccatgaaaaaaccgaattcccgaatagaactaattcttccaatcactatatcaccacgctcaatatctcggaaaaacagctctctccgatccatactaggtatctccatgaattgctctaaaggtggcatgattgcataatgatctaaaaaaaaaaaattaacaaaatcactaacgatagttttgagttccgtttcacctgaagtactgttaaaccgaaccgcaatcttaaagattttaaggctaaactgaccttcactgtcttcattaatttcagaagttgcaggtgcatctgatttccaggaaagtgcaaaaagcagatccgcttttttggagatgaatttctgtatctcgatgttgtcaactctcttctcttttcttaaaaagaaaaaaatatatatgaaaattgggttatctgcaaagcctctttacttctaaccttctgcttatggctttcatcgcccattccgctccatcctaagctgcagacaatacaacctcagacaaaaagttttaactaggcattccctcattaaccaacctggaggtggagagcggggaaacttaaaaagtgacgcctccaactcagataggaaagctcaagggatttttagctaaggaatctgcgcctctaccaagcagtgccagagaaaaagttcagcccgcatcccgcattgcacaacccaggagcgccccccgtccacccagcccaagacaccagcgcgcgatcgtcctgtgctcacggccgcggctccacttcctctagacgcaaacccggggctgcggtagtggctgccagagctgcgtcccctcttccgtggcgcagtggcaccaacgtctcattacctgccctgcaacgggtgctggggcggcgggccccgggctggctcggcggccgaccccaggaggctacggaagtgtggattgtcctgctgttcgctccgaagtagagagagcaaagacgacccgtggcaatttagcgactgccgcaaaaggtcccggtccatggctagagaatgcagggcccggaggccgacgggctgatagttccctgttccgtgtccgctacttgagccgggtggtacaggaagcggaagaaactgtctggaggctgccggaagtacacagacagcacaaccagttacacccggaagtgttctggggtcgcccccacggcggcgcggcggagctcagcctcgatctcgcgaaaccgagcgagactacggaaggccgaaggattgggctcagcattgcttgggctaaaggctgactagggcttccaggaagtgatgtatgtgagaagtttgctttttaaagtgtacgtgggatcgttattacgtcgaaatagctcgagctgtaacctagggtaaataataattccttttcgtattcatcaaggtgcttctaagtgccagtgccagggtaagaaccctatacgagtctccaagcttcttccctcgacgtactctctgcgtaaatcaatacctgtgtctctggcgtaaccccattcaaccggctgctccgggaaggtttccaggtggttttaagggcagaagaaaggaaggacacggacatttgttaagcacctggagtggtgttctccatccataccccatttactgttagtgattgtgaattctaaaaccaggatggctttaatgtctccacacgtgcatatgccattcaagttttacaataactaatgaacacatgcatttcttatttagtttatctcaatggttgctcaaaatttagtgtctgtgggacttactgtatagtggtatgtacgcaaaagtcaatatactgttcttatggacaattcaagtgattttcaaagggaatttcaacttaggtcccccatccccttacttactgacttgagaacctaaccactatggtagctattgtactttttcattttagaaaacgaggaaacatgctcagagagtcccagtaaattgctcaatggcacacagctagtaagaggctagagttaggattccaaacgaagtattaattggtcttctcaggcagagttgctggattgagtattttatcatatggaaggtctaactaaccctaattttgagatcatgtagcttcgttttattccagtataaaatttgtaccatttaaatatgttcagtgtaaatagttcagtatagtcctcttgaacagaaataaacggtgacagttagtctctccacttcccaccatgtgtctttgaggaaatcaacttgcctttcactgtgttaccacttttgtataggagatctagcccagaacataatcgatactgccacactgttttgtggaaaacccaggcaaataggtaaacagtttgagacttgagaaaatgcaacaaacaagaatgcaactgtaaaagataaatttgggttaggcacggtggctcacacctgtaatcccagtactttgggaggccgagggtggatcacttgaggtcaggagttcagagaccagcttggccaccatggcctaaccccgtctctactaaaaatacaaaaattagccgagcgtggtggctcatgcctgtagtcccagctactcgggaggctgaggcacgagaatctcttgaactccggaggcgggggttgtaatgaactgagatcgcgccacggcagtccagcttgggcgccggagggagactccgtctcaataaataaataaataaataaatttcaagcttctataggcatatcaactttaataaatggtacagactgacttgttttaagccataactctagagaatggttgtttttaggaaagagtgctgtcactgaaaaggaaagctgaccactaaaaattattatagacatcttgataagtatgtgatttgtgttagagtcaatctgtgatcaaggacctcattttttggagggactaagaaaccggtgtctgagaaccagacaccaaatagtgttacttagcctgggaatgtcaccttctgaggccattcttcagtagcacatggttttatcactatgggatctgtctatacttcttcctaattccaacactaggataaccctcccccacctcataccttgaacatctgaaatggccgtgaacatagaaagcagctccttttagggggtaaacagcatttatcaagagt

SEQ ID NO: 316500 - DNA, 4001 bp, Homo sapiens
gggctattctgccagtcctcagcctaggaccaccttctgaatgtcagcccatctgcacctgcatgggtctcactcctctccctgtacctgtaccatacccacctgtcctcacacctacctcttccccctcctttgcctgcattaccagttctcagcttccaggcctggaattacttcaagaatcatgcagctatctctccaaccactcattttacagagagggaacccgaggtgcagagcagggatagtcagcgctctgaggtctcaaaagtcaactagatatggattacgtaggcctctgtggattcccgtgggaatccagccgctgagtgtgaaactgtttttatgggaccataactaggatacaagaaggcatccaggtggagccagagtgttagggcccagctagtgcctggggtcacaagaccaacactgccaagtccttaccttctttgaggactccataggctttaaagaacttcaacacagggtcattgctgaatttttccaggcccacagctgcagcctgctgcacatggtggaagtacttttcctggctatagtaaatgatcccagcctgtatgaaggaagacataactgcaatagcccagtcccttctctgtctctgttctgtcccagatgggatgagacctgctcccttccctatcccctgctcctcctcagttctgcaaagggaagagaaagaggaaacattcaggcctcatcctgtcctctaacagccctgggagcagctccatgcagttttcccaggaaagagtttggaggtgtttgtttgggggattaccaacagattctggttcaactatgatggggaattcaaccaaggctttgtcttaggaagggaataaggggggaaaaatgaggacaaataataagaaaaattatacgaattgtagttacaagttattgtgggcttcatatccactatcctgtgcatggtcctctcagtatctttcacagctaaggaagcttaagcccatggaaactacagcttgacaaaggggctgagattttaaagttaagtttcacttcctctaaggtttgtgggtgctaggttgggagcagatgtggttggactgtaaacatcctcatgggccatatgaaagagcccagacaccatcctaagggtaacagaaagcagaatggttttaaggcgagggatgttttcagatgtacatttttgcaacaaccactctggctgcttttgcatgtggggggtgtgtgccgtggtggcagcagggactactgatgctgaaaagagccacagcagagaaaccagatgggagggaggctgttgcaggctctcaggggggagagatggtgctggttctgggctagaagataaaaagataaaaagaaaacccaggagacatcaaggagctggcatttcttgtagacaggattagaagatgagtatagggaagaggtatgagttaaggctaggagattaaatggtgaagccatcaactggggtgggaggcgcaggcgagagtgagctgggtggaagaagggatgatgacaagaagggataatgatagtgattggatgagctggtttggggtagctcaagaaacggggatgctaatttggggctcagggtgcgcagaagccaccggagaagacgcccttgccagggggagtggggcaagaaaaggcaggaccgcctgatataactgaggacagcgaagggtggcaggagagtagcagggcagacggtctctgggtcaggggcggggagtcacgagggagccctcggacagcgcccgggccacgcaccataagggaggagtcattgctgctcatctcgggccgctcgcggctccgagtccgggtctggtggggcggtgcagagcgggattcccgaggcagggtcgtgggcactctatcgcggcgggcggttgaaggcgttacagtccttggaaaccgagctgctagccggttgctaggagcgtccagtgtctggagtgggaggaacaaaacgcctcacgtcacaaggcgcaggaatcgagcgccgagagagcgagtcggtgctactggcgtcgggtcggtccgggtaggcgcagcgggactggacctgggtgccgagcggagccgctgccatgggcctgggcgtcagcgctgagcagcccgcaggcggcgccgagggcttccacctccacggggtgagttgccgccgcggcgccggtgaccttggcgaggcgcccgcaaccccgcgcccgggcgtccggtcgccggctggctggcgactgcggcggggtcccggcccgagtgtttccgcctgggtggcgggaggtgccccctgcccggtgggagcctcctgggagaggcggcctcgcgggactcccggaccctggctagtccgcggccgcggtcgggcccagcgcccgccccaagtgccagcagtgccggaagcggagcgttttcctggtccggccgccgggaatggcgctcctcccgggtgaagaatgcaccactaccagtcgggacgcactcgtgcacttagcacacatttacgctcgcctgccgcgggccgctctccgtgctgggcctgggaagagagtcagccacgccgaggacagtcccgggggccggggttaaccgagtggacgcagctgcgggggagcccgtcggcgcgcgtcctgccagtcgtagggtcgtaagggcttccgagggtagaggaccggtgcaaaccagccacgggatagtggggagcgggagggccgggagagtgctgcagaatcctcgaggagagcgtttgcagctggggagggtcccagcctttagatgccgctacatggaggtctgggcgagcaggcttccggagagtggagacggagtggggttcctagaacggagtgtgctgtgagggtgaggagagggtcccgcagccggatggagatttgtgcctgcggtgagggaagggctataatgtaggtgagaggggctgggggtctctgaccccggagcgctgcggggaagaggcgtccctgcaccccccctttccctagtgaaaggcagctggatgcagagatgagtggagacaggcaagcttgtcggtttgtgtgttttgaaggtagggtctgttgccagctaaccacatgagagggctaaaagtttcttaacgtgaaaaccaggctggcttggagaacccagagttgacaggatttgtgcttgggaatgggctttcttatggtgagacaccaaacagcaagcgtggacagtggaatgcatccagccaggagcgtcttccaacaggtttgattaaaggcaaaggaactcaggatattggcaagaggaggggtggggcgatgatgggagcttcgaagacgggaggggcctgcctgatggagagggacaaattggagagggaccagggatcagaggttgtcagtcacaaaaacaaagttttgagctcctactctggcaggcagaattctaaggctctagagataaagcagtgaacagaacaaacatggtccctgttctggagctgacatttggatgatggtagggaaagaagggaaatgaaaaaatacatggtaggtggtaattaccagtgataaaaataaagcaggttaaggggatacagaatggtgagtgggtgctatttttgatagagtggtcaggaagggcctcttctcaagtcacattcgaacagatgcttctgaaggaagtaaagagtggacaatacagatatttaggggaatagtagtattccaggcagaaggaccagcttgtgcagaggccccgaggtaggttgtgcttgtgtgtttgaggaaatgccaggtgaggctggtgtgcttggatggtgtggccagtgtgaggaggagaccagagcagaccgtgtaggaccttgcctgttgtcctgaagatttaagattttattctgagatgtaaaaccatcaggaggttttaaatggaggagtgacatgacctacttacctttaacaacactgaagaacagctgtgctgcattctag

SEQ ID NO: 316501 - DNA, 4001 bp, Homo sapiens
cagtttggctccagaaactgcatacttaatgggatccagagaaactacttagaaatacatggtcagggaaggttgaaaggaagccatgaatgtacagagctgggaaatggcggttcaggcagaggggaatgcatgtgcaaaggccttgaggctggagagaggtcagaaggaactgaagggagaccagagtgagtggaacatggaaaatgatggggaaagccccagaggaggtaggcagtggccagactgtggaaggccctgcaggccttggaacggacttggatttcatactaagagtgtcatgagcaaaaaaggctaactgagggaatctttctaagcttggcttgctgctgtattacaaaaagatgaggggacaggatggaggtagaccagctaggaggctgtcatagtttgcctaggagagaaatcacaattactaaaatgaaggtggttacaacacagacgggagaaggtgctagagttgagaatcgttttggaggtggagatgacaagtggttttgctgatggaattagacctgtgggtgaagaaacagaaagatgagatttctggcgtgaggaactgagagatgggaaagactggagactggggaggacgacaggtttgggcaggaagatcaaagtctggtttgggacatgaatttgaaatgcttgttaagttttctgggtgtagatgacaggtaggggctagatctacgggatgtggagttcgaggctgggctggaaggggcacggagagggtgcagcacactgactggactcagccaaggacacagccaaaggagacagacctggggaaggggccagggggccactaatggctgaggaacctttaaaggccgctgaaaagcagcagccaaagagggagaaaggaaaactaggagcgtgcagtcagacagccaagaggaagggtgtgtggggcagcggtgtcgaaagatacagggtgcccaaccgagatcaagaccgaaaggcactgctgggtttggctccctggaactcaccaggcaccttgattagagtgggacatcgcagggaaccagagtggagggagcccagaagtttggtgctgaaggggtaaacggggaggtagttgaagatgggtgtggtggttgaggatttttgctattgttttttcttttgcttttgttttttaaggatataagaaaacagcgcagggagacaggctgagccgctcccagggccctttctaagcgcccctgcccctcctctgaccttgacagctctctccacgtagattttggcgtttctgagccggttcatgtgagacgccttggaggatcctcgccagaggaccgggaaacctgcagaaagatgcggaataggggcggggtacactgaggctgggcctagggtctcggcctaggatcttttctggccgcccatagccacgcctcttttcttcctcctgccttcatccagatgcccaccctcagccgctcttctcccgacccccagtccctccaccccagcgtcttgtcgtcctcgcagccgctgtaggccagagcgagcgggccgcacgggcctcaccatcctgcggagaggggtcgaggaccggggtgtgcggggggccgagggggtgggtatccgaggcgccctgggcgtgggtgcctgggaccagcgtcttgaaggcgccgctgaggcggcgcgcaggggcggggctgcccgcctggcatctgccgcctgcgtgaccctcctcggactgggcggaggcagggccggcccatggcagcctcctgggtggacggaactcggagcggcgcgccgaggggaaactggtgcgtggctcgagcggctgcggcttccgcagccagttgcacaccgcgccgccctcctggcggtaccaggaggccgagccccggcgcccgggccccagctccctcgcgctcaggagcagtggcgcgtcggggccctgcatgcgcccctcgccgcgctcgccctcccagggcccctgatcccgcgcccctccgcgtcgccgcctcctctcccgggaagttcctgcctaggctcgagccttgtcctccgttccaagccccgccccgtttgctattgccttggaaaccattccctgggcaccatcagaccgctcggggctggttgggggctgcgatgggccccggggcagtcgagcgagggcttccttatgacctggggcctcacccagacccttgatgagcagggcactgaaggcggaagagagcactgagccccagttagttagtgttgcggttccttatccagtacttcctggtgccaccggccctagggtttgagtgattccacagtatttataggcgctaacaaatggcccctgacctcatggagcttactaaaagcccagtgtgaggggaataaaaagcaagtaacaaaggaagagaatagtttacaggtataataagggcaatgaacaagcagaggtgaaaccaggaagggggcgcattttagataaagtggcgcatttaagctgaaggtgtaaatgccaggagtcaggagtcaccagggaaaggggaggaactgcacttcagggaagggacagtcccagcaacagccctgagaagggtaagaacctctgtgcgaactacaagacagccagggtggctggagcctggtgaggccagatcagacctgctgggcctggcagatgggcctagggtaaggtccttagcgagggcagcatatgggggtaacaagaaggtgcagagcacaccctccccagaaactggaaatggaaaaacaatcatttgagtcaactgcgaaagaaatgtaatagttcacaacagttatgcctggcccccaggctaagactgtaagcaacctttttggaagcactggcaaaatattatcctcaaaagtcacaggggaggtaaggctccaagatgttaaacaatttgcctcaaatcacagagcagaggcagcactggaacccaggtctgactccaaagcctgtctcttaaacacctgttatcactcaggttgcctgccagtcacagaaggaccacacagggacagtttgagaggcaaactctagcagtgcccccgcaggcagagtcgaagagtgtcctggtaagagcccagctttgtcagtcactgggtagatgtgctcttaagagtgaaggtggatcccccaccttcctgtccagctgaccccaactcccctttagctgatggctggacttcccgaaaagcatgccccccaggaaaggtgatttagggaatttggaccctgggagagagatacatgacaaatgaggtttgtggctggctcacccaggcaatgctgtcctgtgagggttgttgagtgaccagctgctatatcctattagtcacccagtttcactgtgagcacctttaacattcactgcaaagctagaacatagccatgtgccctggaggagggaacacctaattcagaggggtggcgaggtaggtcacagaggtaatgtcataaaggagatgatagcactttgggaggctgaggcggggggatcacccaaggcagccgaggcaacatagtgagacctaaaaaaaaacaaaaaccaaaaacaaaaaaattagctgggcgtggtggcacaggcctgtggtcccagctactcaggaagctgaggtgggagaatcacttgagcctggggaagctgaggctgcagtgagccatgcttgcgccactgcactccagcctgggtaacaaagcgagaccctgtctcaaaaatgaaaaaaaaaaagggggggggaggaggggggcaatagctgttccaagttgcccttaccccctcctccctttaacatcaccttgtccaccccatcagaagaaacccctctggccatctggaggaatcccttttgaaagctcagctcaaaggttcacccttcttgaagcttaccctgacacccactcctatatttaccccttggcccccagacttccaatattaaatatgaaacacttcagtgaaccttttacacaccca

SEQ ID NO: 316502 - DNA, 4001 bp, Homo sapiens
aagcttccttgttcctcccagatccccccgcaaaagcccccaccatgacaacagatcccatctgggtccacctccacacgcttagtgtaggctctgtgaccgctgcccagcccctcacctgaggaatcagattcttatgcactcgcctcagcttggcccgcttctgcccgttcttggtgacgattgtctcctcatagaactcgtgagccagatccccatcctcatcatagaacatagagctgtgtagagggagaaggaaacaggctgggctggagccccacacctgggcatggcaaatgtcacaggtcacggggaagtctgtggtcttcccaaccccaagtgggaagaaaagaggataatatgcctggagaatcctttttttaaaaaaaatttttcgagacagaatctcactctgttgcccaggctggaggtgcagtggcgcgatctcagcttgctgcaacctctgcctcctgggttcaagcaattctcctgcctcagcctcccaagtagctgggactacagacatgcaccaccacaccctgctaattttttgtattttagtagagacggggttttgccatgttgctctggctggtctcgaactcctgaactcaggcaatccactcgtcttcatctcccaaagtgttaggattacaggcgtgagccacggtgcctggcctgcctggagaatcctttgcctggggtttggggtctactagaagaaagtgggaagtgaggtgatgggtgggcagtgctactatgtcagacccccaagaagagagcccacaccagagcacaccatccaggcagccaccaaggccagttctcatccttgatttgttcagcaagggcagccattctaatatcaggactttgccttcacccaggacttctagagtgggcagggtggtggcctgggcatgttggtctcactccagaagatgctgctggcccagtgtcaaagactgaaatagcagaagcctaagctaggaagaagcacaaaggaatgaaggctgcgtctcccctgaccccacaccccaggtggctggtgaattgccactgttgggtcttcctggtgtctacagccaaatctctagcacagggagcgcccatctccaggagcccactagagccaagccaatctggtactcttgtgcgggcctctgggagactgggctgggggttgggtgggtaggtcagcgctctggatctggagaacataactgggtgagggtcttttttcctcagcctcacccccaatactgaggcctatccctgctttcccagccactacgctcaaaggttcagccccactactgtcaggaaaagcagcctaaacagagggttattatccccttggaataactgggggggaaagggaggctaggacccttcagtatgcaggctgagccggaagggatgaaaggaagagatcttatggaggtcttatggaggccctagcttagctttaccgtgcggaaggtccgaccagtgacaagcctcaggcccactcttccctagggagactttcagagtggccaggccgccaggagaccactgcccggctttctccacccccagctccaatgaggctcaaaatatgggggtcgtcctggcttggctgtagtggggtacagcggtggaagttcccccgtggcgcgggacgcctggccgcccgcctgttccccccgccagggtggaacccatgcccttacccgcggcgcgtgaatacgaaggggggcacagctcggccccgaggccgcaccaaagcttgctcagctcctgctgcctctgagccgccgcctccggccgccgaggcgaagggccacaggccccgagctttggacccgctggcgcccatgtcagggccgccggcgcatggcgggccccgtggccgctctgctcacaccgcagtccgcactaccataacctgccccagccgctgatcgcaggtgccgccgccgccgccttccgcaggctcggctgtctccacggaaacctcacttccgcttccgcacgctgccacctctgattggctgttgctcaagtcgtgggggcgggaccaatgggcgcccttagatgctgggcatcccagcatgcgttgcgagatcccaggtcccagcaagcgcgatctgaccagctgggacagctcccaccgaggaaagtggtggccgtgagtcctcccggtcttttgggtgtatttggcggctctgacgtcccccaacacctgagttcaggcctagcaggacttcgcaagcaccaatcctcaaacctgcacttcagggcctaaggccagaccgccgggtgcccatctggcttctattttcacagctgtatttttgcgattgccacgcttatgtgaactaaccaagttgaaagaaaattaaggaactggccagattcacatagttacattcagttctgaagaacttcgaattcagtgttttcaaacccagcagagtccatgcttaatgaaagcaagaattgttaacagctataccctcggtatcacgagcagtgtctggtccacggtggcagctctgtatttggtgaaggagttatgccacaccttctcccagagcgtggtgtgtgtgtgttgaagggatggttttgtttttttttttttttgagatggagtttcactcttgtcgcccaggataatgtgcagtggcacgatctcggctcactgcagcctctgcctccagggttcaagcgattctcctgcctcagcctcccgagtacttgggattacaggcatctgccaccatgccggctaatttttttgtatttctagtagagacggggtttcaccatgttggtcaggcagtcttgaactccggacctcaggtgatccacccgccttggcctcccaaagtgctgggattacaggcctgagccactgcgcccggccgttttttttttttttgagttggagtcttgctctatcggagtgcagtggtgtgatctccactcactgcaacctctgcctgccgggttcaagcgattctcctgcctcagccttctgagtagctgggactacaagcgcccaccaccacgcccagctaaattttttttgtatttttggtagagatggggtttcgccatgctggccaggctggcctcgaactcctggcctcaagtgatctgcccacctagcccaaccaaagtgttgggattacaggtgtgagccactatgcccagccagtttccctaagttctaactgcagtccatttttgtctccaccacaacctgagccccagggagctgagtgatgaccaagtatgtatgcatactacatcttcacaaattggtccatggtgactttgcaagacacctgggagcctgtccatcacccttggcaacttctggcaccatgaggggcaactgcagctctgcgcctataataataaagagtccaggctgggcagggtggctcacacctgtaatcccaacactttgggaggccaagttgggaggatcctgggcaacacagagagactcatgtctctacaaaaactttatatgtataaaagattccaacagcaggaggatcttgaaatctttattgagccaattctctcaggccccaggccctgatgatgactgtcaccccaacccctttccccacaggaggcattcagctgaggccaccacacattacatacattcacgcacttcataaaaaacacctgagggagagaccctggctttgattagcaaataaggtatgaacctgggccagtgcccacattcacacagaccctggcccagggacatcctcctcatatgaagcattaaggcacatgctgtactgtgagccagcactccctgacctcagggtgtgtgaggagttggcactgtagagagaaaccaagactcttcctcaatgcctgccttattctgagcacccacccttagctctgataaggatatcctgagaccacattcaagatccaaaacctttcctcatagatgagggccgtcacccctgcaaacatga

SEQ ID NO: 316503 - DNA, 4001 bp, Homo sapiens
taccagggcaaactgacacccccacagggaaaggcacatccctgcccaccccagccccaatgcctgcccagccaccatcaataatccagaggccaggcctgggacacctgagcctctattatcaatgattcatgaacaccctccctccgactcaagtgagcctcacattacaggtccctttcctgcctactctgcggtcagcagatccacacctatggtcaggacagggctggcacctggtcctccagggtgatctctgctgccaacttcccaggccagaaatgggaagaagtgggctgctcacaggtggaaggagggctaggggcagcccagtccccagtgaccccctcggtgggcctgtctcactatgggaaaggagggagtgaggcagcagggaaggggtatggggtggctaacttcctgggatctcctccaccagggctggaggctgggaggcagcagctatgaccagacaaaggggaaggaagaagctggccaggaggcagttccctcctgtggggctgagtcatgaagcctgcccgccagctcctcctggagaaaggctggcccatctgggagccctggccctgacccaggcccctgccttcgcggggccagggaaaccttctcagggcagcccagccaccaagtggccacaaccgcaccaggattcaggtggtcaggcaggtcgatggtggcagccccaggcaggggatcctagtgtggtgggaggggtggctgatggccaaacccgccaggctgtctgggcaaacagcccgggccttccccacaggccaggcagctctctcaggccagtgacagaggaggacactgagccccaggtagagtcagggcacctggctcccagccattgcttctctcacagcctgtccaagaaggaaactgggacccctaggggaggggagggtgtgatgcgggaatggtgaagcttcctagggctgggggctgggggtgggagctggcctggattctttagggccaggactctccccacaaaaccccatatctggacctcttctctgtctgcagcctggagctgggatcttccaaccagactgaggcagactcagaaagtcacagtggaaaatgggagggaggtcagaggtcaaggtcagataggcagctttctccatcccacgtagaagtctctgttccgggttttccctagcctggggagagtgagtgtcctgggaggagcaaaggtcagggccttctcctaacacacataaacaagcccattcaagtcagacacatgcggtatatgcatccttggcaaaaatgcacactgagacgcgctccaactgtgcacacacacagacacccacatacatgtgcacactgccatgaaacactgatgtctaaagagggtcctatgcgacctacagtgtccattcaaacagtcactagtgccagtgcatgaatgaccctagatgtacacaagcgagtcacatccagaggtgcacaggcaggactgtacacggaagacgtgtgcacatgcgtgtacacccactcccggaaaggaacaaaaatatacagatgggcacacacagccacattcatctccaggtaggcacacagatacttccaccccagttgtgtacgtacacatacacccactcccagctatgcacaccacgtccgtactcccccagatgtgcccaccccaggcgacccgcggctgcaaaagagaacaggaagctttctcccggctggtgtggggtggagggaggggccgagagccgggggggggcgcttccgagagcccagaccgaggccccctgcccgcccgccatccgccctcaccgtggatgcccgtttggtgcgccatggctcggcgcttcgctccgtccgcgccgtcggagccctccgcttgaccctggcccggcaacgctcgctggaccaagagaggtggaggatgtggcggaggctgtcgaccctcgcgcagcttcccgggcggtgccgcaggacccgcccccagcggcgccccgcccccgacaggcgcggcagggaggcggggactcggggccgcgcgtgcgcgcagcctgcgcctcggtccgggtgggtctaaggatgatgattgatccgccgtgcgcacgccagcgcgttcctctgtggcaggagaggggggcctgcgtgtgaccgagcgtgcgtgggaggacgcgcgtgtgtgtctgtgcgccctgatcacggtggtctgtgggtggggcggatcgtgcgcgcgcgcccgatctgtgcgccccaagccaggtgggtctccgaataggagtgggtcccagcgtacacgggtttgcacccaggaaggggtctgcttgtgggtgggcgcgccagctcttccccaggggccgtttcttgagcgcctcccgtggggtcctgggcacctcggggtgatcatggccgctaggctttgccctcacgggcctaggcccgccttcacccactagatggagtgtatggtggtgagagcccgccgagacaatgtgaggggctgccaggagaaggcgaagattggaaacctagaggggagaatgaaacagcccagcagagtggagggaaaagttttctttctttttctttttctttttttttttttttgagatggagtttccctcttgttgcccaggctgaagtgcactggcgcgatctcggctcactgcaacctccgcctcccgggttcactcctgcctcagcctcccgagtggttaggattacaggcatgcaccaccatgcctggctaattttgtatttttagtagagacggggtttctctatgttggtcagtctgatctcgaactcccgacctcaggtgatctgcccgcctcggactcccaaagcgttggaattacaggcgtgagccacttactagtcccagccagaaaggttttctgagaagagggcactgcatgtgcaaaggcccagaggttgaaagagggccagagcctggtgaggaacttcccatgtcctaatgaccttctgtgtctatatccagcagccttgccttactggtaccagtacctgcctgctgctaccaactagtcaacatgtggcatcttccaggccactgtgatgagtcagggatgagcatctgactctggttggtccaatcagcttgtccagggactttggctgggaagattggaaaggaggccagctttttgggctggggttgctgagagatgtgatgatgaaatgtgtggcctacctggcatctggccccagcttcagctccatttactgtcttgctccccaccctcactagcctgcattgaggcctcctctgtgccccccaacccctgagtttctcatccccagagagcccagctacacagaattgaagggttttctcattcatcttcctgcgctcaccctgaagactgggcctatgtcatctgctaaccactgtccccccagcactcacagtggaaaatggagtgttatgcagccctgcagcttgccttctagaacagttcacaggcaaggcctcccacactgaaccctgctacagccagatggtgccagcaacacagagctacttgttacatcagctcagactaagccacacccacaggagcatctggtgattccacagaaccacaagagacttgacctcctggaaatgaattaaccaagattaatgaaaaagattaaggtcatgtgccctgtaaaaatgtccctcactggatgaactgtgacaaagtagggtactgcgtggtctccccagctgaccctctccatgggtcattctttgcttttatcactacctggcacaaatctttacgtatttgtttatcgtcttccctccaccagtagttaggtgtttgcccttgctgtatcccctgtgcctagaacagtgcccaacattggcaggtggccaataattgcaaaataagcaaatgtatgaatgaaccattagatgctttgtgttgtatacttactacctgctgggcacatttatttaatcctcatgacagcccctgaagtag

SEQ ID NO: 316504 - DNA, 4001 bp, Homo sapiens
tagacatgttttgggtctttatttaaaagtctggtgatttctttttgtggtcagaaatatgccataggaacttaactcttatttctatcgattagcctacaataaaactggttttgttacatgccatttggcttaaggttggtttccaagaacctatcaacaatgttgagtgagcacttactgtatacataaccaaagaataagcatcctaaatatataaagaataagtcagtacaaacaactaaaaaccactgcataggaaaataggcaaaaggcctgaaaaaaatgaaaaacacgctatataatttcacagaagaggaagctcaaatgatgcatgaacacactggacttcatttgggaaatgcaaaatcaaaccataatggaatgccatttcaaaactgccagaatggcaaaaattaaaaatatcaactgttagcaaggatgtagagcaagatgaattgttccaaactaggagcagagtaaattggtatcactacttggaaactcagttgggcattaccttgctaaggtagaaatcatgcatcctttatgacccagcaactcagcttcaagatacctattctagagttaagtcttttataaatgcgctgggagttacgtgcaagaataaacatatagctgtactgttttttaagaccaaaataccaaaaacagcagaatgataaactccggtacgattcatcccagggaatagtcagcaacgaaaattaatgaaccccagctacagatactaacatgcatgaatctctgaaacataactgttgaggaagaaaactgcagaagaatacctatgtatgtatggttctatttatatcaagtcccaaaacaggccaaaaggaaccaaatattgatgaataatatatatatttggtaaaaatgtaaaaaaaaaaaaaggaaattttgcatagtggttaaccctgagggagggaggagacagccaaggaagcttctacagtactagtgtcactttattattcttaaaaatatatatgcataatatatgttttaagaaactatacacatcaatgtaaacttcaaatatatttgaaaaacacagcctataatttcatgaactcaacccaatagtttatgcttttgcatactgtcttccacgtatcatttttcaactttctgtaaaatgaagtaaattcctaaacgttgaaagtctgtaccttacacgtaggttatcacccaaaggctcgtttctaagtgaagtattcttaaacacagaatacatttgtccttagaaataatgccggattcctagtccgccccgaaaagttaaggcagtgtgcatgaagctgaaattacctcagtcgtcctaacaaccttcccgtaccttcgtttcacaaacgggggaactgaggctctgcacagggtcctaacccgggtcgaggtcacgcaattaggagagtttctgttttgataaactatcacaagcccacctcaggggacgaccggggagaggagaggacggacggctgacctcaccgccgcagcccgggacccgcgggcgccccggcccggacccgccctgccccgggtggcgtccgcgtggcgggcccggtcgcgcgcggtggaaccggcgagggccgcgcctacccgagtactatggggacagtagctcttgctgaagatcaccacccggctgcgctcgatgaggcccacgaggtggcggcgcagctcctcgcgggcctcggacgagcggctgggcccgggggacgacaggcgggcacggcgccccggcggcgacaacacgcgcgcccctcggacatggcccgagcggcggttgggggcatcgcccgcctttcccggcccgggcgactgcggcggcgaccgctccagagtctcgctctcgctcctggcccggccgggcctgctcacaaaccgaaacgcaggcggctgcggcgccgggacggggcctgaggggcggcgaacgctgccctcgctggccactctcaccacccgcgcgaatccgcgaggcagccgctcgccccgccccccaacaccgccccgcgcatgcgaaattgggtcccccgcccgcccgcagcctaggtgtcacctgcccttcgcaaaggggcgggtaccaagcgcgagcctctttatctccaggttgtgcctgcgtccggagaccacccaatcttggcgatggcgctctgagatggcctctgtgcaatgccttttactcctaataatccccaacagcccctttaaaccaccttaaaatatacgttcttcaatttttatgggaagtgtgaattggaaagattgatatttttaaaagtttagatcacacaagctaaataaatatattgcgtttgctattgcaatgcagctttaatgagtttcctaggttgctacccgtcagttcccttctacatagaattccagagccgcccctaacaaagggactctgaaaccgcgagaagaggaatcctctgtccatttcggtggatgagtggaagacctcggagctgaacttgcctgcagtgactgagttagccggtcatggtggcgggtgcctgtagtcccagctacttgggaggctgaggcaggagaatggcgtgaacctgggaggcggagcttgcagtgagccgagatggcgccactgcactccagcctgggcaacagagcgagactccgtctcaaaaaaaaaaaacaaaaccaaaaacaaaaacctggagtttccttcttctcaacaattctttacatttcagttaagtcctctaggcggaacccatgcaataaccagagcaggggaaggagcctagtaggtactttatgctttttgttaacctgtgcactcagcgatgctggagtgcctgtcatgtgccagatactgtgctgggcgctgcggatttggcagagaatgaggctggccgccctgctcctatgaggtgtggctgcgtctctccatctcctgggtcccatgaggcacaaccagtcatggggccattgttcaggtgaggacacatgtccaggatgaggggggagtgtgtggaagctacgggccttgaagtcaggtgcatcctccttttccctgagactaatctgtggacatgacccatgtccccagccgtcgccctcagggaggtcgcagggctggccgggtccctgcgtgaagtttcatctagcacccaatcacagtgcctgtgattttcacattagcttgggtcctcctctttgagccgtgagggggagtaatcaggggcacagaccatgacactcttgcatggcacagcctggcccatcacacaacattgatgggtcattgacatgggcagcctgaaggaaacagacattgatgggtccagtgacattcagaaatatccacagggtcccttctcccctgcagttgccacctgtcagggcacaagtctgaaatgcgatcagggccccaggaagtgggggctgagatgatgtgggcagagtcttggggcctggcaagctccaggccatgtgacagttgcagcccccacatgcacagagctgcctctggctgcactcacagcatcttaatgagcacgctgcatttgtcatctcctactcgatgacaggactttccccttggctcagtgtttcccgatgttctcaggtggcacctttaacactcagaaattagaattcattctgggcataggtcaccaccacttccttcccctcgcaaatgttctcccgtgtgtgaatcaggaagcaggtgggtccagaacacatggagaggccaggtggtatgagccgcatatgcagtgtagagttaggagtgggtgcaggttcccactctgccaccagctagtgaccaagtgccctcagttccccaagcctctagacttgcctggtgaggacttccttaaagcatcaccatgaggtgcagtgaaccactgtgcaccagcccaaggggcaggccaggctttgcgggctccagagatggtggctggatgcctatcccctgggaagtcaagtggaagagcaattgatttccc

SEQ ID NO: 316505 - DNA, 4001 bp, Homo sapiens
gccccacagccaatagaaattaataacatctccctcggcttcccactgcactgtttctgccacatggatagcaattaccacaccatactttacaccttttagacacatttttttctcccaaataaaaaagccactccataactaggtcctatgtcagttttctttgggttcccagccccactcccccactgctccattccctgcctccaaagagggtaacaaaatgcctgtctacaaacagtgttcctaactgttagcttaacatttgtcttttaagacaaatggctagaaattgtgaccccagcctatccaatcttaagctaaacagctagtgtggctcatgagagcaagtggcctaaaagagccttgcattgactactgtgtggcatactcaagaacacagaggttttccaaaaggaccttggatgggcctctgtcttgaaggacctctgaaatgctgacatgtttgtaaattcccatgcaaccacttaatattacctgtattcatttatggaactttatcatcattaaacagactgtgatggaattatttcacagataaattagttagatttcacataatacagtattaaaaacttttggaaataatactattaagatgaacatgaaaaagcaattcaagtacttttatcttacatgagatattttgctcagtctcgagatattaattaggggagaatagcttcaaggttatcaccaccaagtagtgagtgtgagggtgaagcatgagtcagcgttttgacagtaggttaaatgtgcctcaaaaaagaaaagagatgactaaccctacacagtgtgtacagcttcctgctaatgcagacagctatccaaatgcagcccacagcagcccacagacactgttcaccagtgagcatgtgtgaattctaggcccacgcactagaaaaccactactttatagcatttcttaactgaaaatatattttcacagaaacaacaaagcaaaggggataaaaacaatagcgaccagaaaagctaacttaggtgaatggtgccactcaaaggtctttccgagggaagctcagtcctggcttgcgagagtcagccttggctcacctcataacggggctccaagctaaggcgtcaaggaagcagtcccactgcttctcgctgtcagcaagaccacaaggcagatgcccactgctgtcctctttccttgtctactttctcatctaagtgtcgtaagacagccctgcactggtccctgagtaacagagcagctgtcatgagcacaggctcattttatccgagagcattcttatctttgagagaaatgagaatatgacaaggagaactaaacagcagcaggcctagcctcagcagcctttctgagtgatgtctagtcctgacgactttgtgatttccaaagtcgtgaacacctgttcaagagaaagaaaacaaatacatatttagatgttagtattgttttaaaaaaacacattctgaatattatatttatgctattctttaaaatatacaaatctggccaggcatggtggctcatgcctgtaatcccagtactttgggaggctgaggcaggtggatcactttaggtcagaagttcgagaccaccctggccaacatggtgaaaccccatctctactaaaaatacaaaaattagccaggcatggtggtgcacacctgtagtcccagctactcaggaggctgaggcgggagaatcacttgcacctgggaggtggaggttgcagtgagtcaagatcatgctactgcactctagcctcgatgacagagtgagaccctgtctgaaaaaaataaaatgaaataaaataaatttaaaaatatacaaatcagttactaatatgacatctttctgacaagtgctttataatagtttttcaaactacatcaactgaagccaatttttaaaacctcctgtttcctacctccccacatgtggggtgaattccaatggtgtcatcaagtagctgttttgtgagcccacatttcattgcagctgcaaatccttgggtaacctcaccggcgtttggtccaagaatatgaaatcctatcacccgatcctttaatacagaaacaaaacaaagagaatcccagtaggttaatggtctgaatatggatccattcactgcaaattcacagttaaaatatacagtatctactacagaaaaagaacttcaatgtcaaagtgagcagagaacattaccatgaaactaagccactgtaagaatctgttaaatgagccagtaaatgcacatccagagttaatttgcactcaaatttactagaacaagcaatttacccactgcatgaaggagttcattagtatgatgtaaatttccaaattatgctgagacaatgctcaacaacaacataacaaatctgaattaaagtccaacattggaataactctagggcagcaggttttactggaaataagaggttgctggcccaggaagcaagatgccctgctcccaacatcaagtggagacaaaggagaggctggtgcagggctgtcacccagggctgtgtgctgagaggtatggggtgcaggcaatgagctgacccaccaagatgggaagcaagatgtgcagtcgttttccacggtaacggtgcattctaggctgtccatttgtcaatgttccttcatcagattatccttcactgtgatcttcaacagtaaaagcatacaatagatgaagagaaagactataaaagggcaacggaggccagggccaggagaaacccttgcccactaagcttctggaaaaagcaacagctcagaacagtcacacgcatccacatctgctgacgggcactccagaggggaggcaggcagaagctgccagggctgggacttcagagtgagttcccagggcccacagaagactactgcattggaacctgaggtggtgggttgctcagcaagcagaaaaggggtgtaaatgaaggtcctgagtgaggaaagtctcatttacaattttgaccctagagctggagtcaagtatttccatttcgtaagttcgagggttctgctcaagaaataggcatgtggccagggtaaagggaaggggcatgctccccatagttaaagagcaaggacaagagtgtggcctagggatctgggcgggagccagaagggtggcgtgggacatagcagaggggctcagagatgggaaacggggctgacagccacagaggtgcagcccacaccctcatgaggaggtcagaactagcatgacagctgcaagtcccaccttcagcagcggctctcccatcaaaccccaaccctctcactttcagagggtaacaatgtgtacagtctctccctactccctttggaaaggccgcccacaactgccaaaaattgacctcagataactctgtcccaaagaatcaggatatagcccagcacatgagcacccaccctcaggagcacagctgtgaacctgcccaacctggagcatttcagggccattatgaccgccatccctgtcactgccctgtagccatatgcaactaccaacagactaagccctagagctctggatgacttcaccattcaggcaaaagagcacatgctaatgggctactagcctgcaacaccctgttttctgttatactgagaataagataaatacagagatgtgagaattaaacaagataatgactgctgttcagtaaacttttatgtagatgtcacttgttgcagttcatatttatctatttgtatgtttcctctccccagatgataaactcttcaagagaagaaccaagtcttaacactgctttctacattcagaattctttataaagcaaattataaacaaactgtgctttaaactacgctactgaggaaggctattaaccattttcatgctcacccctcataactgggaggaggaaagcctccaataatgggctgctgctttagtgaaagcatcaggaattagctcagtaagtcaagtttcactttgtgtgaacat

SEQ ID NO: 316506 - DNA, 4001 bp, Homo sapiens
attaagatttattatgtacttcatagacattatctcatttgatccttatatcaaccatgtaaaaaaagaattatatctacattacaaatgagggaattgaggctccagagtttaagcaatctgccttattatcgcaaatataattaattaccaagtcaggatttgaacccaaatctcttgttaacaaaattcataatcttcccactacattatgcagcctccaaattagttaagatattctgattcctttcacagacatcagtaagaaatctgctaatagcatcaagagattataatctaaggcaatataaacagaaaagattactggataatccaataatttatttattgagaacagccatacattcagtcatgagaagcactattttagaaggaagcctgaacacagacattgaaatgttttcaatgtatccaagacctcaagtagggaatacttaaaatattactttgagaagaaacaaaaattgtgaggcttatgcacgacttgttatgaacgtagctagctttagtaatagctccctaacggtatgttcttgtcaggagtctgttgagaagagttggtagagctcgcccccaaagagagggagacgagaaaatgtactgaggagggggaaaaaaaactgacacaataccttgtaaagaagccgaaactggcccctcaccaaagtttctatgtaactaaacgatgtctgttaagaccattactaattatgaattaattattttggtgtacatcgttcaccaaatggcataaacagtcggattagagaaagcaagtagaaaacgagttatgatgtttctcagaactgtaaacgcaagcttctctcctaccgtaaatttaactttctaatagccgatttacagtcacacactctttaagatttaacagtccctagcacctgaaagtgttacacagcttcttgcatcagcatcggaaagtttaactacctcgtggcagtaccaattacttttaatatattcgagaccagaaacccaaaccaaaaaacgattaaatgtcccgcccaagatggcaactaagaacccaaccgtactaatgcttaactactaccacagctcactggtttcacaatacgtgcccagggttccctgtaaacacaaatgcaatttactaatcgtatgtagcttacaagtctacggagcttctcttttcactgtttcttcaacataaagaaagagaccacgagtcctctaccctcaaaagtgctttttacttcccgttaaggtaaagaccacgtgtagactgtacattaaccttggctatgcagcactgcaaaggagagctgctcccgcctctgcatttcccactccgtgtctttgccctagtggtcctcccctcacagctggcgaccctagaggttattcattccttggagggaaactgagggaggccggaagtgagtgagatccaaaaccgagaaaaaagcagcagacatttaagcaccgggaagcgattcccgcctctctcccaggcgctgtctggcggcctcagggcgcaggaagctgagatacaggagagcgttttcactgcttcagacctcaatctgaattcctgatttcactccaatgccaagcgcgggccgaagcactcacgcctccacccactgggcacgccagtctcgagctgaatcccggctgggactatggggagataccaggcctctcaacctgcgcacaacggtgcggcggcgcccgggcctaccgtcgcgactagaatgcagaccccaatcccaatcgcctctcacaggccagaagcgtctgtgggccccaaacgacagtggtagatccgctgacttacgaaattttgtcagaaattacctttgaactggccttctgagatccgcctggcgttttgtccgccatcttgagctttgcccctccttcggcggcggcagcagcacgggcgagtcgagcaccgaaagagcggatctcagtgaagcccgccagaggcgcctgcaaggctgaatagtcgactgtcgagatagcgaccttaggggcagccgctcacgtgacttccggtgtcagtaatttcctcagccgcgctcactccgctagttttcctgggagtcacggtgcttggtcgcgttattgggtccgggaattcagagaatcagggccagctgatacttcaccctcttatcccaacgccaacccttgatagatgcgaaccagtcgtatttcctttgtgggaaaggagtcgctttttaaagacgtgcactggccatctagggaggagcttttacttcaactcaaaataggactggagctgactggtgacctggcgctcgatggacggaaacgctgttcttgccgcttcggcagctcccatactggtgggagaggcaaacttgcagtctgctcatcttaagatggtgaatgttgagatagggttgctcccgaaaagccgagaagaggagccgtttgacccaacttgagggtgatccgatagacactctttagggcgtctgcagagtgggtgcgcgtggagacagtcaataagagaaaatcgtaaatacagatggtattctaaatctagcatgcatgtaaagttgtgtgacattttaaagattacattttacactttagtattgttttcatttttaatcacataaatgggggaacaccatattaaacttttctgaacttagtacttttttaaaaagttcttaatcagggcctagattcaaagacggaaagcttgcttgagaaggccatgcccgaatcaggccaggcaaggaaagaaaggacattccagacagagggagtaattgaggtaaaagcctgtggcatgaatcagtacagccgatcgtgcaggtcacctaaagcagtcgttttattagaccaggtgtggggagggacgtggttggacaggggtgcgggtgcaggttcacacagcgccctgaggtcaccatcgtgcttaggagttagaattctgttctcagaatgaagatcggcctttaacaaggttgaaatggtcagatttttattttaaagtattgctctgaggactagggtgggagtggagggcgtttgtggacctctccctaaatcatttattcaaaatatttttgagccccgttttgtgtgtaaaagcctgcccaaagtgttgtagggcttacagagacagacaaacatgcactgtcttcatatgatttaaaacttaatgagaaatggaggagacaaggaaaccgcaaactgacactatgcataattaaattgatgctgcaaggaaggatcaatagctgagggacctctgaaagaagtaattaattctgagagtaggagtgaggaaaagagacggggcggggcaggggggggggtggtcatagagaagaaagcatttgaaccagctctgaagaagtagaattttgttgaatggcgggggtggggagcgagggaagcacttagaacaggatctgacacaaggctggctctcaagaaagattaacagacatatatgccagccactaaggaatcagcaggccaggcctcctattctctgtgagggtatgagggtagaagaacagacagtaaacaagaaatgatctgaaagtgacaagtgctacacatgaaattagaatgacttgcaccctccaacccaattcaatttacttctactgctggattctgtcatactttttcagttctgggcctcttccctcaaccttgccctgccctctcattgaagtctaatccaattctactctgggtgaagatgtcccttcctccaggaaggcttacagtcctccctccccaccaatcctaaatcagagacccttctgtttccaaggaacctatactttaccactttgaagagctcagcacactagatcttaacagggttttgttttgttttgtttgttttgagacgtctcgctctgtcgcctaggctggagtgcagtggcgtgatctcggctcactgcaagctccgcctcctgggttcatgccattctcctgccaca

SEQ ID NO: 316507 - DNA, 4001 bp, Homo sapiens
aatttaatatttatgtgtcctttccaaaggtgtaatctaaaaatcactttgatgagaggaattttcacacacttttctcagaaataaggttattttttctttttctttttctttttttgtgacagagtctcactgtgttgcccaggctggagtgcagtggtgtgactgcagctcactgcagccttgccctcctgggctcaagtgattctcctgcctcagcctcccaagtagctgtgcctacaggtacatgccaccatacccagccaatttttgtatttttagtagagacgggtttcgccatgttgcacaggctggtctgaaactcctgagctcaagtaatccgtccacctcggcctcccaaagtgctgggattacaggcatgagccaccgaacctggcagaggtcttaattttttaaagaatctcttaatgctgtgggacggcttttcttgccactaaacacaaagtttcagattacaattacgccacagatagacatctacaaaccttttagaacatacaacagaataaggtgggactcctctacaaaattcatctattttatacttagttaagattcacgtttggttgtgattatttttaattttctaatttcctataactccacagtttctaccgtcaaatatattagtaatatccaatttttacaaaagggaccaagaagtattgcctagcaataaaaaccatacgttttgatgtcagagttgtgttgggttccacaattaacagcactgtgaccttgagcagattacttaatagacataaacctcatctgcaggccgttcatagctacttctttcagccatgaggatatagataatcacacagaagactcagtacagtacgtgggatatggtaagcaatgtttaattgtgatttcatgtaaaagtgggagggaaataaaaggcaggaaagaatgtgaaattaagtttgtcatcccggtcctcttgcagctgaaattcaactgagggacacacataaagatcaaagcactgctactgggaatcggcacggaaatttacaaactcaccataaccaatgcaagagtattttttccctgcccaggcagggaggggagtaaattatgtggcgctggccaggttagaaaacacttcgattaaatctgtctcaccagcatagaattaagcatctgataagaaatagggtgtgtagtaaaagggataaataggctgtttgaagtcaacaacctctttccagatcttttaagagccaattattctgccaaaatgactggagtgcttagtacaatacctgacatgtagagttatcattaaaagtttgcaattagtactactgtctcagtgtttgcaaaaggccacaaaacggtcttgtgtccttttcctgtgtgtttaaggtagattgccttttcacagggtcactgctctgacaatttgggatggaggaagaggagtgcacaagggtccttcctcaagacctttacgtcaagcaccccggagggcccctgcaggagctggggcagtacagcctggccccgacgcccgcaccgggcagataccgggagcggcccgccaggcccccggggctgcggggcggggatcaggggatgaggcagcgcggcctgcgctccgggtgtccccctcccagccccccgggcccgctgcggctggtcccctaggcctggggtggggggaggcgggggtccccggagagggccccggcctcccggcagcactaacttctcagccagcagctcctctattctccttcttttcttctccctaaaagagagaataaaagaagggtcagcatcgcgctacacactgggcgccgcgaggggaggggggcgaggggacggggcggggggtgtggggaccccgggtggcggcggcaaccgcccaccgccgcgctctctcacaacccagcccagcccggcgcgtctgcagagccccggtacttacggctcctcgccatccgccatattgttctccgcctcttcccaggtgcccacgcgcggcagggcggggaggagcgggactggcaaagcggggaggggcggggctggcgaagcggggaggggcgaggccagaaacacaaccggcagggaggtgcgaggttgactgcggctgggctcccatgggctttaaagtcttgccctgtaattataatcttaattacctacgcttaattaggtgaatcttataccgtgcataatgttgctctgcagcgtgaaaatgtagacaatacattatgcgtttacacaaactatatgttaatacgtaattatacaaaatattggtatattctatgaaaaattcgtgaagaaccctcccagtatgccagagctttcctctgggggcaaagatcaaggaaattttcactttctgcttttcaggatggttccaaagtctttgcctttataagtactcacttgaataataaatttatctaaatccgtttacattggtggggtgggagattattattttctttgaacaaatcagcattaatattttcatgtcacattctgttagataagttcagcggaaacaaaatgattaaaacttttcctgagataaatgtgtatatttagatacaaagaaaaaagtataaaggaaaacaatcacaaaaatcaaagaataactgagaacacccataatcctatcacctaaagataaattgtgataaaagtttcaattattttcttctagagtcagaaatacaaatatacactgtgaatctggatggctggatagagggaaatgatcatgttcaaaaatgtatgtatatacacgtacacacacatctccttctatggagtgggacaagaatgatatttggaatcaaaagtaactgattttaaattcttctcagttgtgagctacgaaacccttagacacttctatttcttcatttataaagtgggcataacactattcaccttgtaagactgataattaagtaaaatccagagtggctctcaaaatacagttcctgatcaacatcacttgggaagttttttttaacacaaattttcacccctcaccgcccccaccacgctccccaccgcccccccgccaccccacccttcagccttctgcaaagcctggggtgattctccactggtaaagtttgagggccactgaaatggagtacataaagcctgatgggtactcagtaaatgtagctgctgttactacactgtgatatttaacctcctcttgtcctagttttcagtgaaccttaaggaaagcttgtcctttatggtcccccaattaggttcagttcaatagcattcactgagctgaaagtcaatgccaggcagtgagcgtgggaatagagttcacagtccctatcaagagataccagcctccttctgcatcacatgtctcagcgtcaactatgaaactactttttcttgcccagacaactccacagatggtttcactgaggatttaacctcagtgcttatcaaaatgggctcctgtagcctgaacccccaacaatactggataccctttgattagtggtagtgagcattgcaaccctctcagatagtgaaaagcagcagtcaccttaaaggccacctagtccagtctcacccatttcacaggggaggaaactgaggcctagggatagagtacagctagccgatgaagaagtctgcaaaggtatctggccctgcatctgcttgctttgagactaacagcctgactcaccatggtggtattttgataaacgacaccaggcactctcactggcttagattgattgacggattagaaatagccatctgcccttgccaggaatgaaagcaacagagacatgcaagcaaaaccttcaacagatttattttacttcaaatggaacatatcataaacaattagactatctgctatggtttttaaacagacagatagtctgaatggtcctatctagacacaccagtcccattataaaagccccatcaagcagggctcggcttcccacacctgtagtccc

SEQ ID NO: 316508 - DNA, 4001 bp, Homo sapiens
tatgaacaattcaaaaaattaaagctgaactttattaaaattccatatatcagtgaacagctttgggtatcaaactgccatctcctgtatagcaattttaataaagtcaatggtgcaaatcagatagaaaatactacatatttagacttgagttctgaaagttttgttataattacaatgtcaagggatcatctcatattaaataatgtctgaaagacaacttaaattcatgacccatattcctctgcttttcattctggagggaaaatttcaaagtcttcatttgtaaaattttaaaatgttttaaaaatgtcaaatagtttccacttattctgattagagatgtcagttcatgcttatttaatctctaaaaattctggaccattaaccgttcatatttggcaacacagttaaaacagtgcaccctaagacttctactgcggctttatatatcacaaactaaaaccttttttaaaaatcaaaactgttatgctctttaaaggaaaaaagcaacaataaaatcttccttatctactttaacactatacaatttttagctacacgacttaattgtttttactggggagacggttcatgagaattttacattaagacaaatctaatgcaagacaggccttattatttactaccaaggcatgaacctgaggtggctctctaagcctcaattttctcacttatataatgggggtaaaatagtagcaatctcatagggttttggtgggaggagacaatgcatgtaaagtgcttacacagtgaaagctcaataactgcttgctactaaatgcacctagcaataaaatcttgtataaggcttgccatgtacaagcgctactctaagacctttatacatactgattttttcaatccccacaactatgacagagatagatattactattatcttcattgtacaggtgagaagctgaagcggaaagtttcacaacttgccaaaggttaggcagttacgaagagagtagttagatttgaattgcaatcagtctggcggtagagtccttacccttaaccattgcactatattccatctgctgaattgataagctttgttaggaaagaagaaaagagaggcctgggcagtcttggtaatgtcgaatggtttgagatgttaaggagcacccgaatatctcagaatagagctaaccccgctctcccccgccccgaccccatttaagatgcattgataagcctttaatgaaactcaaagtttaccttagcaggtttaatatttgatctcatcttctgaaagttcttactatcagtcttatacacagcgaggcggactaattaagaggcaagggtgataggaaactggacacacgtcctcagcaggcacaggagcagcaccatatggctgactcactggaggtttttaaaaaagagaaagaatatcttccgatcagtactaagatgtggccttgcccatttgggaacaggattcgcagaccaagaaaagggtggcgggcgtccccatgagcgggacgtgggaagcgcctcacttctgacctcacggagcctgacctcgtcccccgcgcctgcctccgaccggcgacgcaggttacctgtagggattcgaatccaccacctctgagctcatcttctcgatgcggacccggccgccccctccgtcgccgctcctcgggacctgcagactcctctcctgggcaagttcccgctccagctcctggacccgctgctgcaggcgctccacagactccgccatggctgggactccggccgccaacgctcccagcccgggccttcgccgccgccttcgccccacgttgctcggctgggcccgcgaggggtacgtggggaggcacctcgccgctgccttcctagcccagagccctggggacgtgcacccagcgcctcacagacagacacgtctccgagactcccacaggccttcctcggagccgcttccggtgcgtcgcagacatcgctccccctcatcaaaaacctggctctttcggcttccttcctcgctgggccggctaaacccggccgcagcagcaccggggtgataagtgtccagggcaggaggccagcgatgttgccttgctaaccgggtatctaagagaaacagggtctttttattcttaggctcgacagtctgacggccctttttctgaacgggaccctgcaggtcttccgcctgctgttgcattaaatttgggggtggaagaggcttctgcgttgttccttacccgcaacgatgaccatggctttgccttctttaaaattgaggcctccaactctgacgctgactggagaattgaaacccgaacacacattgggctcttttggcacttgactagagctaaaacctcgggattcagcgggcaagcgttgctcagcaacggcgcgtaggctgtgtgcggttggctggagccagaccccaccccggcctcggcccatgctctagaggggacgttgccccaatcctgaaggacttcggcactcgagacctgtggatgccgcgttgctgtggcctgcgggggtgatcatgaagccaggtgctactggcgagtccgatttggccgaagtgctgccccagcacaagttcgacagcaagtccctggaggcctacctaaaccagcacttgtctggctttggggccgaacgtgaggctacgctgaccattgcccagtacaggtatggatgtcagcctttgcctccagcggaaaaaaatttgtacattgagttttccttcctttggccctgggtggtttcctaagtttctcccaccctgattgcttttcctgcagtcagtggacgcaccctacaggcatgagctgctattgccggccctccgaattcgatgctgggggcttcccaattggagggcggtaatggaagcgcaataacgttcaccattctactatccaaaggaatctttgttaaaggatggatttatgtcccttgaggattcaccaaggcaattaaggctacaaattctgagaaatagatgccttcttttgtgatacagccattagatctttttctgagaagctggtgtaattccgtttgattggccgtattccgggaggctgagttaatgacaccagatggaggatccgaattcgagtactagcttttccacttaggaggtcacagcaccactttgggcctcaggttttttgaagtgaggtaatggaactgagtgagaggatcctgagagtagcgttccccaccgggaatctggctttagtctgatgttttacaatagataatacattcttaaaactttattctaaaaataacattgttactaatacagggctacagaaagagtcctatcattcagaaaactggatctgtcacttgctgtctgggagtttaaatatgttacataaacactctgagaactagtttcctaagttgtaatacctattttgattagtcttattaatgaaatgaaataccgtaatataggtgaaagggcgtaaaaattgcaacaacatagtgtgctagtggtattttatcactagcatttatattctttgactactgattttggtgaaaatgaaaataataataaatgagatggatcagggaacattttagggtgtagaatttaaaggtcccatgtcccaatagatattggaagatgaagggaaaggtggaataaagaatagctgagatttctaggctagaagccttgtgttgtaacaaactgaaacagatcaaagttcaaatttcaactatttcaattgctgtggaatttggacaagttaccctttgaacatctagtcctgctttggcaaaaaggagatagtaacgttcatattgtaggagtgttgaagaggtacataactgaaagatacttaattctgaaccaagctgaatgttaaaccataaccgtgttcaaaaaatgaaattagttgtaaattagttgtggtataaaaattgcttccagaaatgttgtataagcttggtttaataaatatatatggaactct

SEQ ID NO: 316509 - DNA, 4001 bp, Homo sapiens
ggtgtgaattagtatagctgctattgaaaaataactcaacatgatcttgtaaaaatgaagttgggaagatacacatgacctatgacctagcagttctactcatagatacatactcctgagacttttcttgtactacagtataaggggacaatctacaaagatgttcattgtactgtttgtaatagcaaaaatccaggaaacaacacaatgtctatagatacagaatggatgaataaattgcagtatattcacataatggagtagcatacaacagtgaaaatgattcagctacagctgtacataacacagaatgaaaaacgtgaagaaattaacagtatattatatacagagataaacttcaagggaatgataaatataaaattcagaatggtagtcactcaaggggaaggacatacagggtttcaaagacagtaattttctccgggtagtgaaaatggtgtttgtggcattactattcctcatgccttaccaatttcataaatactctttttatctgcaagatttacttttaaaatttgcaaaaattaaatcttattggaaagataaaatatttagaattaatcaataatgaaagtattatatagcttgatacaacaaaacttgtgatttgcagctgagtgcctaatatgtatctggcactgtatcaaccactgaggatgtaacaataatcttgcctccctggaacttccattgtatttgtagaagacagacaggaaaatcagcttctgaactttacaatgtagaagttgatatgtaacatggaggaaaagagaataggaaatgtttgggtgtggggcaggaagatttcctcgagcacacggcattcagcaaagacttgaagggggatgaaaatgtgagccatgtaaatatccaggaaaagagtgttccagacagaggggactgctaatgcaaaggccctggaagggatgtgtgcccagtgtgttgaggaaacacagcccaaatgcctgaagtagtgtaagcaagggcaacagggaccctgtcaggcaataaagagactttggcttttactttgaattgagatggagagagacttaaaacatgcttgagcagaggagggaagtaatctttaaacaaacaaacaaacaacaacaacaaaaaaaacagaatctctgcttcttgtgttgagagttgactgaaggggccaagggcagaagcaaggacaccaatgtattacagtgttccagcagggagatatcagtggcatagaccagagtgggagtgtagaatgggtaagaagtggtcatagtgtaagtatatagtcacatgctgcataatgacgttttggtcaatgacgggctgcatatacggcagtggtcccattagattataatactgtgtttttactgtaccttttctatgtttaaatgtgtttagatacacaaatgcttatcattttgttacaattaattgcctgcagtattcagtacagtcacatgctgcacaggtttatagcctaggagcagcaggctgtaccacagagctcaggtgtgtcctatcgggttcaaatcagcctatttatgctaactccaaccagctgagaagtttcacaacgaatcagtgccaattaaatgcttaggaattcacgatttattgtgtggcttctacacaacaatcatgtaactctatccaacacacataggcattaatagagaagggaaacacagcaagtattctgggagaccagcacactgactgagaaaaccaggtttggttttcctcagaatgcccactgacctggtggtgggtagctgctcttttcccagagggcttaccacagccaaaggaaaggaggcctcagagttctcatgggcagagattctgcaggcatctcagccatgattggcttttacggctctccacagacatctccatggccattatcttcagctgacttttggctttactttcttgtcaggtgtcagggatgcctggccacagcagatgctatcttatcacctcagtccaccacacatatgcttactactctgagtggtcagtgatttcactgtaagctgagtcacttgtcataagtgactccattatgagacatttatgatcataaaacataattatatatcagtgcataataggctataccatctaggtttgtgtaagtgcactctaggatgtttacacgtgacaaaaatcacttaacaacatattttccagaacacatccctgtcattaagcaatgcatgactgtattttgaagggtttactaactgattaaatgtgggctaggaaaggaagagacgaagattatttcatttctgccttggtaactgaaagaatagggttattgtgaactgaaatgtaggtgactatagaaaagcagatttgagggggaaatttgaggaactcagttttggagtgttaagtttcaagatgccttttagacatccaagtagatatgtatagtaagcagttggttatgtcttgaggtcggggcagagatctggactagacatataaatttgagagccatcgacaaaaagaagatatttaaagacataagatcgaaggtcttacttagaaaatagttcacataaaaaggaggtttggagactgagtccaaggcaccccaatattaagaagttagcaaattaagagaaacctacaaaggagtcttagaagaagtggccaaagaggtgggggaaaaccatggtttgtattagtgatcttgaaaaagtagtattaatggaaagaagggaatgaaagcttgattgaaatgggtttaagaagataggaggaggacgtgtaatctcttgaggagtttttctacgaaaggaaatagaaatgttttaagtaggggggaagtgaggtcaagagaaagctttttaaaaaataacatcatatttgtatgctgatgacagtaatctagaagagaaaattttgtgtaggagagaggcctggaaagaagtccttaagaaggcaggactctaatatgcaagagaaggggttgcccttagatagaaatgtgcacgtccttctgcagactttggagggaagacagaatatatgtgtacagattattgtatgcagtagatacagtagtgtaagcttgtggaagttctcatctgattgctcctatttgctcgttgaaataggaacctaggtaattaattagctgagaatgaagatggagaagaaagtgtttgaggtttgaggagagagaattatgaaacagccatccaagagaatgggagaataaatgagctaaggaaatatgattgccagatgtggttcactttgaggtttgctgaggtcatgaatttgaagcaagaatagatatttcagtagatattactaatgctttgtccagatcctcttggatccctttctagtgttgctgtacatgtcctgcctttgttggtttttgcttccaataaacagcatctatgcctctttttttggtaaactgccctcaggctattggagcaccctttgctcttactgttgtagtacctgaggtggaccttaaccaatagtgattcagaagtatgaaattttcattatccttgcttcagagacatgttttgaactttgacacggcagagttcccccattacctttacccccacctacacactggtgagatcaggctgaagctaccctctaagggactttgtcttagatcacacctttgcttagctttctcccctttcttgacctgcttccccaaatttcttattagttccccaaacatttccttaataagtcacttgtatataattttttttctcatgatctgtttattgggaacctaacctaaaacagtaattatgactgtatgtgtctttcttcagctatggccagttatatcagtgtaagcaaaaaaaaaatggatttaacatggatgggagttttgccaagcaaacaccatgaagtgaggaaagggcaagtgaagtatactgaaggtgtattcaaggtagtggttatatgatttgctatcaaattta

SEQ ID NO: 316510 - DNA, 4001 bp, Homo sapiens
cttcctgggagctctgggccaccacatggggctggagcagggctgtgtccagggacttctgcaagggcacctggctcagggtctagtccagaatgctatgggcccctcaaggcgaccaagctcccctacctcagatgcacttgcactcacatgtctcacagtcttgggtctcttgacttcagtgatagccccaccacgcaagtaccgagagaaagttgttgtgtctccaatctccagggacccatcctctgagggagttccagtctagtcagtaatgatccttgagcctgagtagttcccacaccccatcctatcttgcatctgtgtcccagaccttgctgcaccttgtagaaggtggagggagaaaaacccatcccaagggccaggctgtgctcacttccagtggaggcttgggccctgcacctggaattggaatgggattggcttaccccgcacgtggatagaccggggatcacagtcgttgagctcaaccattccctcaattcccgagaaagtcaccaagtctccatcacggaagtagtgggtattggcccctttcctcagagtgagaatgccaggggagccctgggtaggaggaggcttggctcagggttgcctggacctgccttccacaggccctggcagcctctccttggtcagcaggtgaatgcctacagctcagcacccacctgggagatgtgctggatggcagctgtcaggggttctgcctctgtggggtcctgcacagtgaagtcctcaccaaagtcacagaacaactgcctgagatggggtggtaggggtcactgaggtggcttacagattgtacttaaggataggggatactagggcagggccagagggccagaattgggaaaggaatgcaaggagaggcttgggaactagaatttgagagggttactggagcaggtctggaggctaggttggaggaaccagagggcaggactggggaccagaatcagaaaggcatgctgggatagacctgaggctggttggaggggcactggagcaagcctggagctgaggacagcatgaggccagttgctggctgtaatatggtaggctgggcaggcagtcttactcaccccacgaggccccgggtgtcagccgccagaaagcaaactccatgcttatgacacaaggtgcccaccttcagctgctcctccagctttgcagcagtcagcaccaccacctgggtggacacagtgatcagcagggccaaaaccattgcccagcccttcctgctcttgagggctgcaggcctgagctgacctggaagtccaacagcaggtcctcagtgatgtcacccgtgtgcacgacgacctggacagctctgttgagctgagccaagagctcttgagaggcctcggctctgctcctttccaagtcctgctctgagaggagaaactagggagagagccagtgcagcctgagcaaagacactcctcttgggccgtgcccccaccttggtctggcagcccatagccccccaggacacttacctgggcagccaggtcggaccagcaggtggggtggggatcatgcagagtgaggctgcccacacccatcagaaccaagttcttggccacctcggcccccaggccctgcaggcctgacaccaggaccctggctccctgaatcctctgcatggcaggtgagcccagcacatacctgtggatgggaagcagaaggcaagcagttgtagatcaaggtctgaagaccatcccactctccaccccccacctcgggcctcacagctgtcttgaatacagctcctcatccagtagcttcgaagcgtccagggcatccatcctcaaacctggggctgaacagtaggctgcagcgctcagagatagggtctttgtgtaggtggcggtgacagtaggggccagtgccctgctgtagccagtgcaaacaggaaccaaggccaagcgaataagggacgctgctggtcacagctctcttcctggagaaaagaaaagtgaaagttaaactatgctctgagctggctcctgatcctgcctccagacgccagccccagacaggccattcagggtctaaaacctgggatgagttccaggactctcaagaggtgatcagtctctgagtgtcagacctgagggtgggaggcatggggcagccacattcacacatgttcttattttccttttagacttttattttgaaataattatagactcataagaagttgcaaaaaaaatagtgcagagaggtcctgtgtctccttttgccttcttaggaacctggggccagttctctgggagatggaccactgtttgtcacgaaactacgtaatagccaaaccaagtgctgtcttaagttcttttttgttgttgttgttaatttaggtgaaattcatgtaacataaagttaacaattttaaagtgtacaattcagtggcatttagtgcatccacagtgttgttcaaccatcacgtctatctagttccaaaatatttcatcacccacaacgaacataccaaacacattcaataattaccatacatgtggccgggcatggtggctcacacctgtaatcctagcactttgggaggccaaggcgggtggaccacctgaggtctggagttcaagaccagcctgaccaacatggtgaaaccccatctctactaaaagtacaaaaattagccaggcatggtggtgcatgcctacatgtaatcccagctactcgggaggctgaggcagaagaattgcttgaattcgggagatggaggttgcagtgagctgagatcgagccactgcgctccagcctgggcaacagagtgagactcagtctcaaaaaaaaaaaaaaaaaaaaaaagaattgcaaaatgtgacctcttatgtctatttcctttcacttagaatgttttcaatgttcatagagtttatagcctgtatcaatatttcattccttttaatggctgaataatagtccattatatgtatataccacaattcgtttatccattcatctgttgatggacatctgggttatttctaacttttggatttgtgaatagtgctgctatgtccttttttttttttttttctttttgagacagtctcactcggttgcccaggctggactgcagtggcacaatcacagctcactgcagcctcgatctcctggggtcaagtgatccggctgcctcaacctcccaagtagctgggactagaggtgtgcaccaccataccctgttaaagtggtttttgtttgtttgtttgtttttgagacagggtctcactctggttgcctaggctggagtgcagtggtgtgatcatggctcactgcagcctcagtgtcttgggctcaagcaatcctcccaccacagcctcctgagtagctgggaccacaggcatgcaccaccacatctggctaatttttcttttttttttttttttgagacggaggcttgctctgtcacccaggctggaatgcaatggcacaatcttggttcactgcaacctccgcctcctggattcaaatgattcttccgacccagcctcctgagtagctgggattacagacactgccatcatgcccggctaacttttgtatttttgtagagatggggtttcaccatgttggccaggctggtcttgaactcctgacatcaggtgatccccccgccttggcctcccagagtgcaatttttctttttttacttttagtagagacggggttttgatatgttgcctaggctggtctcgaatctctggactcaagcaatctgcccacctcagcctcccaaagtgctgggactacaggcgtgagccaccgcacctggctttggctaatttcctaattaattacttgcttttgtagagattgggggtgggtattgctatcttgcccaggctggtctcgaatgcctggcctcaagtgatcctcccaccttgccctcccaaagtgctgggattacaggtgtgagccaccatgcccagcctgattcttgaacaagt

SEQ ID NO: 316511 - DNA, 4001 bp, Homo sapiens
cacactcatcttaaaaattgtgtatagccgctgaatactttgtcagtaacttctactcctaccaataagtttagagtatttctgaaatctcacatccctttccaacgccgatcttgagaactaggttaaatgttatacttaatttttaaagtatgggagttacaggacctcccttaaataaatggttctattctaatacatagttgtaagttaccctcacttcattgttgatctagtaaagtcatcaagtcttccaccttgactcaacagtagcaaaatggcttctctaaataaagctgtgatcaacaaacccttagaaagctggtttcaatttgttttgaaactgaaacacacatatgtatacagtctgaataaagcaagtgaaaaaaacaccccatgaaagtttaactctacaatttaaaagaaaacctttatcaaagccagaaattgtttcctgaattgctctgccaaaagtctaataaaaaatctatatgctatggagtaagtttgaagatccagtgtttaactctaatgttctcttagcttagcagagattgaataagagattactgtagcaaagcagttttccaaaccaaaatgtccttcgcatctgaaaggttttacatcatctttaatggcatatcaaagacccatgattaggcaaggagacacctttaaatttactttagttttgtttcatatatgtaaaaatccactccaaataaatccattacttcttctcaacagtactgagcttgtcagaggctcatcaaaacattatactcaggttaataaatttcagctgttacgtgatgttagtgccataacaagcattagccaaagaatcaaagaaaaagtatataataaaaagaaaaacccaagacaaaggttagaagaattttaaaaatggaaaaaatccgaaaagcaactcacctgcaattaggtggagggtctaaagtgatgtccgccagctccttctgaattctggagtgggagaaatgggaaagacaaacacaagaagcattaaggcgcggaagcctcccacctgtagcgtgcaggtctgcagataaacctaagcgcgatcactggattctactgggcaaagaggaactacacatcaagaacttcaggtccctagtttaggaaaaaaacttttcacggaggaagtgaggcagcctggaatctcctgttctcatctgcaaagtttggcttccaaccttgcctcgcacaccagggcagttctattcctcggtgttttccatgtaggacctaattttaaagtttctcacttgccgaccggtttcctcagtccctcccctgcacctctccccagcacggagagatcacagccatcggtgcgtgggaaggacgccagcctccagcctcccttgcccctttcacccctcagatgcccccatgcccaccccggcagggcgcccccgacaggccgaaggtccgaggcctcgctcaacacccgacccgcccggagtcctcagtgacgaagccaacatggccgctccccacgaggcccctcgggcccgagtgacctgccagccgtggcggggtgcccgggaggcccagaccgcaggtcgctccccagcggtgggctgccaccgcccggccacgccgcccccaccccgcgcgcgcccccgacggctcgcgccgcgccggtgaagttgcgggcgggggaggggaacagggtgcccgcacgggggctgctccgcgccgccccagctctcctctcccggcgcccagaaccttggcccgagaccgcgcgcgaaagcagggcgcgaacacccccgcccgccactcgggcaccacagaccccaagtggccggcccgcggccgcacaggtgcaccggaccctgcctccgccccgcacgctggccgggactctcggcccacctccccggacctgcttttccccgggcgtcctctaacttcccggggtctgcccacttccttcatggtccgctctctagctcacactggggatagactggagacctgcagttttctccctccgcaccaaccctcgacttcacaaagggccccatcccccactcataggccgaagccaccaggcagttcacaccaagccctggcctttgtcttttgcttacctaggcacttagagcatcaattaatacgacagtttagggcctctaagcttcttccaccttctaaacggtgcctaattttataacctttcctcctcctatcatataaagcccaatggggctatgttacaacttaaaaatctcaccgaggcagcactgtagttaaaaaaattttaaacacacacacagagcaatctaattcacaaaggatacgttttcctttccaaaggttttctgcgggtaggaggacggacgagctatatgtaatgaggaacaggttttaaggacgacgactgggggaggttctataaaccttcctactggaggacatttcctgtccctacgtatctgtcaactttagaaaggggtttgttcacaatctcaattgacacgtatttgtgtcctgctaaattctactatcaaaaagcgtttcatttctgagacattcatactcccgctgtttgactcatgactgtacattagactcaaagtttggaaaattggtttcctgattctttacctgaatcttttcaaataactgtattttaagacctacacacgtaggcaaaaatttcctccccggagcacaacgcatataaaaatacatattgacttcagtcctccttgccaacccaactcccactataaaatagtcacaaaaaaaggtagttgtttctttaatacctaagaagcgttaataccaaaaagctttatcaacttcatcttgacagacagcatttgcatttccaaaaaactggcaagagatttgcaggagtaactcatacctatttccagagagtcattcttgttcagaccacttgcaatgggggctttcctctacccacggtttagaaaccactttccaacatgcagttagcagcctgttagtctgccaattcaggcttctttttcactcctactcctggtgaatgtgccccttccaattctatgggcaacacctaccttccaaatcaatatacttcacagaacagcctctatagggtcccactaacatcaattttccccattctctttcctggatacactgtccctctccatttttttacctttttctattaactttaggtctgctttaacactaatagctactctttcagcaagattatcaaggagctaaattcattgcaaaaacaaaacaaaagccctgatgttaatttataggtaaaattactatttgtagcttcccacctttcatttttctacacctatcatctcttttccagaacttccaaataaattcttaacttgtttaaaataaacaaagtatgtctagtgaaaaaaatccccctctctgtaattcactcacaacaaaagcagagtattttctatttgatacctgtgtctttacccccaaatatattcatgtacaccagggatatctagcaaaatataaaaatgcaaattaccaaaagcaagtatcctggcttgagcacgtgaggccaaaacgtgaatgaggatcagagagcctagaggattgaggtggggcgcagtattaaggaagggcccgtcccaagtgggcagagtagatgtcaggttccaggaaaaccgcacagggctaatcagtgagggtcagtcaggcctcctgagaagctgtacaatcaaaccaaacctataaaaatgagaacaatcttgcagaggcaccttgccacttaagacctccacactattttttaaaagtcactccttcatcagcccatggttaggtcaccaaaacactgccaagttttcaaattacaagtcagggagaatgacagaacaaactctcaaaccctgacttccaggctcactactcagtggagagatctaaagtctcatgttctactttattttaaaaatttttaagaagggtatccctatccc

SEQ ID NO: 316512 - DNA, 4001 bp, Homo sapiens
gtttcttattccttatgcaatttgtgaagaaagctctatttagaaaagatcatccatgcaacaggtgaggagaaggtaaaatggtcacagaattcattttgatgcagttctctgggctggtattagtaattaagaaatgggatcatggccttggggaaggtcacagattaaccattagtaggacaagaaatctgaaatcagatttgggggtcactaataaaagtaacgaggaatcttacaaacttcagcaagaaatgcgagaggcaagccgcaacagctgcatgtgagcaatgatttaaaaacagaagcagcaatagagaaaataattagggcttccaaggcccttctttcatttttaagaacacataaaccatgaggagcgtttaagctatcctcattgggaggcagaccaaatgcagcaagaggcagttcggaaataggaagcctgtggaaaaaaaaaagagcacagtacctcttggcgctggtggagaggagtttggagtttttgctcatgctgactttactctccttcttcttgggggtgtttgtttctttctcggtttgctggttggaagacgaagatgaggaggagctggtgctggccctcgaatcgtcatccgacatagcgaaccccccaccccaccccgcaaacagcccctgcagggggagagaaacaaaacagaaacacacaaaccatgcagccagtgtaaataaggaactcgggtgctgtcaggagggcattgaccaggggcgcacgcggccgcccaccgccctccactcgcttttcaaagtctgcaggcccattaaggcttttgcaaatcggacgcggcttgtttatttttggccccaagtggggaacgctgtgggaaaacggtctggagctaggagagaggcccctccctcgccccccggggctctccgctgggcagggagggagtagcccgggaggcgaaggagggcagggcggggggcgcggggcgccacggcggggcagggagggaaggtcccggcggccggccggcctcggggctgtttttgtccgctttccgggggtcgtgaggggccggtggcccgggtgagactgtggggccacgagcggagtttggcgaggtcgggaagagaggaggggcgggaaggagtaagagaggaagccgaaacagggggacggaggcggggagcgggtgcccgggtgggggaagggagaggccggcggggggcaggggcgacgaggcccgaggcccccccgcgccgcgccccgacgcccctcccggcctgcctgcctctggccgccctgctcacagctatgcggccgggcgggggtccggagcacacgcccgatcgccactcctgtagggggataggggctgcggcggggaatgggggggtcggcctccgcagcgaagacataacaatgagcccttccgccccggaggggttaatccccgcgaacccccgcccctggggaaaacggggctcccccaactccctcccacccccgctcccgggcccctcggtggccagtggggggctcttggggcagcgctgacagttcgagccacaatgacccccgtcctcaatgcgggcggcccccgcaccccacgcggcccggggtccctgcccatcccccgcgggcgggccccggacccctggggctccccagcccctctccgctccccccccgcgccggccccgtgccctgcggcccggcggccccggcggcgcgagtcgggggaggcggcgaggggtgtccccgaggcccggcggcgcggccggggggcggcgggccgctggggggatccccgtacctctctttgtgtctggctcctccgtgccgccgcggcggctgctgctgcggctgcggctgggcctggccactcgtgtctctctctcgctgggagagaagcggaagtgcagcaacagcaactattaaacaggcaatggcttcccccagccacacacgctcgcacacacaccactcctccgccgccgcctcctcctcctcctcctcctcgccctcacccctcccccacccggcccggtcccacccacccgcgctcccctccccctgcaacacctcctgggggtgcgcgaggaagacccaggagaccccaggaaaccctgtcccccacagacacccccaccccagcgcctcctccggacgcccgggaagggggcgagggttgtgaattttctcttaagtggtttgggaacctggattctgggcgggagaggggaagccgatggagatggggggcgctgggagtgattggaactagatggaataggggggtcacgagagaaagttctttccaatgagggcttttggaaaggagaggagtagggaggtggcaaattggtgaaaacgttggtaatctggtggtggcaaagactttagagaatgcagcgggtactccacctaaaaagcgattaaagagaaaaaaaaaatcacacaacaagggttttctttggactgacacttgcttctccttctagcaatttacctgctaggagcagaggtcagtttaggtatgcctgtgagaaaatcccaaactaggaattttctgctcaggtcacgcgaggcacgtgcagttttacaatattagattcttccactcactttttatagaaagtgatgtggttttttataagagtgatacaaaggttttggtgacaggtaaaaccaacgtgtaacgggcttgcgaatgtgagacatcactgggaataagctatatactactgaattagactggatttagaattttttgtgtcattttacattagatgtaaggtttggtttttggaaattggatgcaaagttctggggatcgcagaatccccagatcgctaaattgaccaaattatttttaaaatattaagccatttttctctttctttagctacctataaatgctatgcaaataatatttttgaaatgatcagcaattcttctgaattgttccttatttagcatttttgccaatttttttttaatattaagccatcaaattacgattcagtttctcaccttttgtcatttcagttgaagggaactaaagagatgtgtgccattcaaatacaacagtgccacacatacaaggtcttgtacattaaggagacagcctcagatttccataggtcactctaaattatctcattcaaactgccatcattttccacagcaacagtggcttcagttaccacaggacaacacaagatatacagcccatggcatatccagtaaccaggaaaacaagcattctcacgacccagccgaactccttctaaccatcaacctgaaattccagctttatcaagactcataaagtaattgtgcatgcttcttgctcaatccctaccaggaaacctgtatctaccaggagttgtcatagaataagaagttcaaaagctggaagaaatcttcagggtcataatttcagcctcctgcttccagacagaactatttctccaccactgaaatgcatatagattttgaaaaaatttccagacataacctttcttaagtgtttggtttcaggagtcctggtagagtatataaaaatgatgacattctttgctatatatttgaaaaaattttttaaacttctgaaaaactgattgtattctttttgttctgatgaaaagatgtaaattcagaagaaaacaataagaagatgaaataaactcaggatgaggaaaataatctaaaaatagttattaaaattgaaatttcctcctatgaaaatttggatttctgatacttaaaaatatatgtctacattatgaatacaaccagtaaaaaaatcatgtgttataaagacaagaactagcagagatcacaggaaaataaaaggtttgatttgctgaagtgatcaggacagtaggtgaattttttctttaatattggtttgcataaattgcctaccagctataataagaattcttttgtaacagaacatgatattttgtgttgtgttactgatgcttgggttggactgattcct

SEQ ID NO: 316513 - DNA, 4001 bp, Homo sapiens
ataaacttaaatcccagggttataaacaaacagctactctccaatgatactttcaaagatattgagagagataaatacgcttacttcataactcaaagtaaaatttaatttttaaccataaaataagtagtccttcctaaaactatattaagaggcttacatattgttacttcttcaacacaaactgtctaagcttgtattagctatgtaccctatgttgtaattacagtcctggaaattagcaacatacagtgaatgaaactcacatgttccataaaaatgaaatgatttggcttgaaatattactgactacataaaggcaactatagtcattccataaatccagcctactacccaggtaagccttataacagtatctactagtataaaactgcaaaaccaagtgttcatttaagcttttataacaggaaagcgtttaattctgtcatatatgtcttgctgtcttcctactcatgtttctaaacttttctaaaatgtaaaataaatatatagtatatgcacacagcaatatccagctttaaatttaactgcaaagacatttatgcagaaaataacagtggaacacctgatttgggggtaaaaggtgctgcaggggaaagagaatggggtatggcattatatgaaaacactctatttcagcgtcagcccacatacagaattccaaagagccaaggagcatccaaattgccgtagtaaaggcaaatatttagattcacaaagtccagactgaattatcacatatctagaaacatactttttaaagaaatcagggattaaaaactaagaagagcgtaaaatcctttagaaccgcgagatactttgagggtaaaccctagcacttcctttcgtacttttaaataaaaatattttagtagactctcaagaatacacaatacaaaacgatgaatcttgaaaacatgcaaatgggtctaacagccaccgagcacaggatgatgtctttctaaagcagccttaatttccttaagggaagatggattggacatttctggttggtcgtgggggaaaaaagccacaagaagccacgctttatcttcattagaaatggtaaagggcaaaaagatcaaaacattatgagagagatcggagaaaagagggggagaagtggggtgggcgggaagggggagaggacagagggaatccagtttcaaaccaggccagtgggggctgcagagaagagaccagagaaaaatgggcttcggttccaaactgtgacaagcgccaggcatcacaaaagaccaatacaacacacacccctcaccaggacacacacaaatataccccacaaggtcttctccgggcgggccaccggggtgcggcggcgaaggagccaaacccggcactcgccaggagacacaccatgtgcagcaattatgcaattagggaaaatagcaaaagatcaagccgggcactttccaccgtgacatttatcctgtacttttgaaaagacttagttccaggatgcggctaggagaaggaaagcgctgggagggttgagaaggatggggaactgagaacggaagggggtagaaggaggacagggagagaagaggcagaagggggggatgggaagaagggggaggggtagaaagggcgagaaacgggggcaggaggctcgcgggagggggcgtagggaaccgggcacggggagcgaggaaggagggaactagggcacgagcggtgtaagcagagacctgcgacgcggaggggaggtcgggggagtgaggaggacgtcagcgagagggaggacgcccgaggaggggaggcaccggcgcggcccgagcgaatacctgaggggggggtgtccgtgcaggtcgcaggctcgagccgaagccctgggagagagctgcccaggcgcgagggggagggagactggggaggccccagggacgggatgtcccctgcggaccgtctagtcaccgaaagccggacccacgcaccacgcacccgaccacgcctgtccccgccgcgctcgcgcccgcccggactcaccctcagcgccgccgctgccgccgcccccggccgttccagctccggctcctgaggctgctgcccgcggctgtcgctgtggctgcccctgagtcctggaaagtgaagccaccacctccgggagccgccgccgcccggccgtccgcgcgcgcacccgcgagtgcgcgtgcctgcgcgcccgcccgggagagaccgcgagagcgcgagccccacgtcggccatgcggcgccgcgcgcctccctcctccccccgcccctcctcctccggcgcgcggccgcgagggggcgggggcgggagcgcgcccgggcgggctgccccgccggtcgggagagggggtggggaggcggcgaggaaaagtaaagtgacagctgggtcccgcgcgcagactgggctctgacgggggtgagcgaggggcgtcccacggggaaggaacgacaaggacggggagaagtgggggaaaccgaggctgacggggtggcttgaggggaggggacgcgaggaccttgccgggcacgcgcattaaagggaaacgccggctgggggttaggggttaccccaagacggtgcaggcagtgggacgaggaggccttttacccccatccaccgcagcccttgacttcacgctcgcctcgaagctttcgcaaagtagatacggggactgaccctgttgacacactaacccaaactcgcagacgcgtggggctcgcatgtacccaagacaggaaaacttcacgttggcctggaaacttcttccaggctaagcctgagtcttcaccagacactgcagcacgaaggcccttctgccttttggctcgccctggcccagaatgcgcaccagccggtagagaggagcttcgggccgtttagccctggggtattgaagagaggggtgggggtacagggtgcaccactgtcagagtgagtgggaagctgccttcatgcccagttgaaggatatgggaacagtagcagtgctgtaggtggcatgagggaacattaggttccgttgtactcctcatcccaaataaccgtttaaaaaaaaaaaaaaaacgtacctgctttgcgaacttagcttccacgaaatttctcccactccaacctccagcctcacttaccaacggaatgctgggtcgttggcaacggggtgtccagggatgcagcaaaattaacttctatctttgtggaggaaaggattggaagatctttcactgcttaattgctgaaattatggttgctacagtacttcatttgactgtagatgttttaactgctatttactaagttcaaaatgggtttaatacaaatcagttacccttttcatttattcaaggaatatttattgataccaggcactgtctaggtggtagatatatgacattgaataaaagaaaaaaatccttgtcctcagaacttccctatgtctgaaccttctctgttgtacactcagcatcacattcgtcagcaaattctgttgactctgttttcacaaatatatggtgaaaatgtccactccgtctcactcccctccccactgctaatgtcctggtctaaggcatcatctctcaataattatctcctacctgatctttctacctcccactctccgcctcctccctccccaacacctacacacagccgactgtcctttaaaacaaagattagattatgtctctcttcttctcaaaaattccagtggcttcccatcatagagcaacagccaaagtgcaaaatatggatacatggcctgcatgatgtgcccaccattcccagccaggattcccctgacctcaagctgtacgatttcactccatcctcgtctccttccagccacaccggccttgcagttatggacacaccaagcattcctcagcctcaagacctgtgtacttactatttcctatctctagaacattctttcctcccactcctcccccagaacttcctatccacatcctctgctttttctccatgatc

SEQ ID NO: 316514 - DNA, 4001 bp, Homo sapiens
ccagtagagagctaaggagcagaatggcactagaggagtgcgttttcactagagaagcactgcctctaatactcccctctggggtgactccatgactttcagtagctcaatttcctcaacaactgaaacagctgttttagaaaataagccaactcatctacaggccttaagttatacaactgcagagagaagaggtgccaagttcaggaagcccaacagagaccaaatcagagccagacgctggggaactccaggtttaatatgccttccactactcacttccacactccaagaaatgtctccaacctttctgagagttctttatggctcagaatttctccttaagatttaaagacccaattacttcaaggagcagccaccaagattccaggccagctttaacccagaagtcctcctctagagctgcagtaagatgtatgaatgctactgggaaactgtagagcacttccaaaacatcagacattttctaaagaacagaaagctacacttaattcacattattgaaaagctgccaaaccactgatttttagactttattagtcaagtcaacgctatggtaaactatatttcaataaagccactaaaaaaatacagagtttccaaattcctaacagttaaaaaggataaagggcggagactaagctcagatctgtttcaatctctccatattaaaatgaatgactgctggtacagacagcagagactaaacaattatttgtggtgcaatcactgcatcttaaaaccctcaagaggaaacagcctgagagggtagtctccaaaatgagaaacttcactttgagacaatcaaaagaacaaaacgaagtcacagtgctactcccaccgctgctctttcaattataatttactaacatcaagtgattaaaatctgcagccagaaaagatcataatgtaggacaacaaagtaggaactgatcccaaaacgctagacagtattctcccaatataagtgctgccttttcgtacagtgtattctagctccaatgggacttgtaaatcacttataaggaaaagaagccccttcccccaccaacccaagccatcctaatagctgggcgtgttttacagcaaatatgaagcactcaggagcggtccgaggccgacgcttgcggggccatcctcccccacccgcccgtcaccagggcgagcagaggcctttggggttccatggcccccgaccgccacgcggcaggactccgaccccgcagcccaggaggcccgcgcacctctgggagcagccgcatctggcagagactcagggctgcgcaggccttccccaaggagacagaggcttctccccgcccagggagcccagtacctcatgctgtaagcgccggcgcccagttcctgcccgatgcccgagaggctggcgtcgaagtcgtgcaccagcccggactcgatcacctcgtccatcttgagcacccaggccatcttccggcctcgccgtcgccccgcacaccgcggcctccgcgtccagggcgaaggagccggagctccgctggcgcgtcctgggggagggcgcgggtgaagcctccggaggggcggcgagtggtcaccagcggcggccgggacgagagctgcgggggccccactggcagggcacgacgagcccagcgagcaattgcagcgggagcggccgggccgccggcagcgccaccctcccgcggacaccggccctgcgcctcatgccggcgccgccgcccagcccccgcgccgctagcgctgcagccgccgccgaccgccccgcccggggccccccggtcgcatcctcctccgggaccgctgggaggctggacctcgggccgctccgaggaccacacgggggcaagccctccgcccgcccgtcacccgcccccaagccttgactccttgcccccggcccgcccaggctctagcgccacaccgccccggccaaccccgccgacgccgctctgccggccggacgctggcttcaacgcgactccgacttaggttcacgcgccgcttccgcctcccccggccccgccccgaccccgccccggcgttcgccccacgcctcggccctccccgtacagccccgcgcttagggccactccccgcgcctcgcggcccaggaactgtccagagagtgcaatgcggccccgcccacgcggctgttcccagccggggtggcctcgctgcgtccccgcacagcagcccaggaagaggcggtgccaaaagggctgccagtttccgccccttctagcgagcgagatgattgacaggccaactgagcaatacctgcaagggcttggacgaagctcccgtgagtctctgtgtcccccgactaaacaaccaatcaaaatgttcttcaccttgggcgggctcgaagacggaatttgttgccaaaagaaagagttcattggactgcatggtagaaagcgacccaaaacgccacttccggaggtgatttgctcctctgtggtatttcccggtcgtctctgctttatgccctctctaccgagggagtgagcggtttgcaccccatctggtgacagaaaagccagttgtgcagaaaaccttgattggcgtgagaataagccaatcaacgctcctgagaaagagctctggaaagacttcccctattggttgcattgccgagagcagcttggctatcctgagttgaactagctgttggtcatcctaagggcaggcggtctcctgaagttggaccgaaccattaggacgtgccacagtaacagctacgctgctcagaaggcccgaagggtcttcctcagcgacctagcgtgggcacgcgccactgcggccaaaagacagaaatctttttaccggaagagatgaaatagaaagcaggagccagaggctgacttacagagccagtgtgcggatcagagttccttaggagcggctgctggcgcttgacgggcggaatccttgctgaagagaacgtcaaggcccgggcttcgccctgcatcgaacttactgcctaagaataagacccaaatgctgagcgccccgccccaacttgccagtttaagtgcaaaaatacatagattaaaatgtcagcctaataaagcagtggcactgagccagaaaaaaatagtctcaacgcctgtgtgatttagatactaacttacaggctcacgcctgtaatcccagcacttcgggaggccgaggcgggtgaattagttgaggtcaggagaccatcccggccaacatggtgaaaccccgtctctaccaaaaataacaaaaattagctggatgtggtggcgcgcccatgtaatcccagctactcaggaggctgaggcgggagtaaggcttgaacccgggagaagacagagcaacactcggtctccaaaaaaaaaaaccacaaattaacttggagaatgtttttctctttacacaacatttttgcaaacatttcatttgataaagccatactttagagatgaggtaattcaggtgaaaatgtgtaaagattacacagtgcaaggtcacacagtaagcaggtaaaccggggctatttgactaatccagatttctctgattccaggcgaaaacattagattggccatcagttcaggaagctccattccactattacaaataaatctgcacaaacaattggatagtcaagggaaacattggtctcattgggggtctcagatatgtcttcattccatgatctcacctcacttgcataacctagtctataaccagattagccaggcctactattagttgttggaaaatttggagaaatggaattgggggaagataattctctggtttttggagagagtgtaaaagtacaagctaccatcaatttttcaatcaggctgtgccctaaggaagtactgggtcaaatatttagaaattgagcctcaggctgggcagtgtctcaggcctatgatcccagcgctttgggagaccaagacttaaagcttgggaggatggcttaaggccagcaattgggagactag

SEQ ID NO: 316515 - DNA, 4001 bp, Homo sapiens
cactagaggagtgcgttttcactagagaagcactgcctctaatactcccctctggggtgactccatgactttcagtagctcaatttcctcaacaactgaaacagctgttttagaaaataagccaactcatctacaggccttaagttatacaactgcagagagaagaggtgccaagttcaggaagcccaacagagaccaaatcagagccagacgctggggaactccaggtttaatatgccttccactactcacttccacactccaagaaatgtctccaacctttctgagagttctttatggctcagaatttctccttaagatttaaagacccaattacttcaaggagcagccaccaagattccaggccagctttaacccagaagtcctcctctagagctgcagtaagatgtatgaatgctactgggaaactgtagagcacttccaaaacatcagacattttctaaagaacagaaagctacacttaattcacattattgaaaagctgccaaaccactgatttttagactttattagtcaagtcaacgctatggtaaactatatttcaataaagccactaaaaaaatacagagtttccaaattcctaacagttaaaaaggataaagggcggagactaagctcagatctgtttcaatctctccatattaaaatgaatgactgctggtacagacagcagagactaaacaattatttgtggtgcaatcactgcatcttaaaaccctcaagaggaaacagcctgagagggtagtctccaaaatgagaaacttcactttgagacaatcaaaagaacaaaacgaagtcacagtgctactcccaccgctgctctttcaattataatttactaacatcaagtgattaaaatctgcagccagaaaagatcataatgtaggacaacaaagtaggaactgatcccaaaacgctagacagtattctcccaatataagtgctgccttttcgtacagtgtattctagctccaatgggacttgtaaatcacttataaggaaaagaagccccttcccccaccaacccaagccatcctaatagctgggcgtgttttacagcaaatatgaagcactcaggagcggtccgaggccgacgcttgcggggccatcctcccccacccgcccgtcaccagggcgagcagaggcctttggggttccatggcccccgaccgccacgcggcaggactccgaccccgcagcccaggaggcccgcgcacctctgggagcagccgcatctggcagagactcagggctgcgcaggccttccccaaggagacagaggcttctccccgcccagggagcccagtacctcatgctgtaagcgccggcgcccagttcctgcccgatgcccgagaggctggcgtcgaagtcgtgcaccagcccggactcgatcacctcgtccatcttgagcacccaggccatcttccggcctcgccgtcgccccgcacaccgcggcctccgcgtccagggcgaaggagccggagctccgctggcgcgtcctgggggagggcgcgggtgaagcctccggaggggcggcgagtggtcaccagcggcggccgggacgagagctgcgggggccccactggcagggcacgacgagcccagcgagcaattgcagcgggagcggccgggccgccggcagcgccaccctcccgcggacaccggccctgcgcctcatgccggcgccgccgcccagcccccgcgccgctagcgctgcagccgccgccgaccgccccgcccggggccccccggtcgcatcctcctccgggaccgctgggaggctggacctcgggccgctccgaggaccacacgggggcaagccctccgcccgcccgtcacccgcccccaagccttgactccttgcccccggcccgcccaggctctagcgccacaccgccccggccaaccccgccgacgccgctctgccggccggacgctggcttcaacgcgactccgacttaggttcacgcgccgcttccgcctcccccggccccgccccgaccccgccccggcgttcgccccacgcctcggccctccccgtacagccccgcgcttagggccactccccgcgcctcgcggcccaggaactgtccagagagtgcaatgcggccccgcccacgcggctgttcccagccggggtggcctcgctgcgtccccgcacagcagcccaggaagaggcggtgccaaaagggctgccagtttccgccccttctagcgagcgagatgattgacaggccaactgagcaatacctgcaagggcttggacgaagctcccgtgagtctctgtgtcccccgactaaacaaccaatcaaaatgttcttcaccttgggcgggctcgaagacggaatttgttgccaaaagaaagagttcattggactgcatggtagaaagcgacccaaaacgccacttccggaggtgatttgctcctctgtggtatttcccggtcgtctctgctttatgccctctctaccgagggagtgagcggtttgcaccccatctggtgacagaaaagccagttgtgcagaaaaccttgattggcgtgagaataagccaatcaacgctcctgagaaagagctctggaaagacttcccctattggttgcattgccgagagcagcttggctatcctgagttgaactagctgttggtcatcctaagggcaggcggtctcctgaagttggaccgaaccattaggacgtgccacagtaacagctacgctgctcagaaggcccgaagggtcttcctcagcgacctagcgtgggcacgcgccactgcggccaaaagacagaaatctttttaccggaagagatgaaatagaaagcaggagccagaggctgacttacagagccagtgtgcggatcagagttccttaggagcggctgctggcgcttgacgggcggaatccttgctgaagagaacgtcaaggcccgggcttcgccctgcatcgaacttactgcctaagaataagacccaaatgctgagcgccccgccccaacttgccagtttaagtgcaaaaatacatagattaaaatgtcagcctaataaagcagtggcactgagccagaaaaaaatagtctcaacgcctgtgtgatttagatactaacttacaggctcacgcctgtaatcccagcacttcgggaggccgaggcgggtgaattagttgaggtcaggagaccatcccggccaacatggtgaaaccccgtctctaccaaaaataacaaaaattagctggatgtggtggcgcgcccatgtaatcccagctactcaggaggctgaggcgggagtaaggcttgaacccgggagaagacagagcaacactcggtctccaaaaaaaaaaaccacaaattaacttggagaatgtttttctctttacacaacatttttgcaaacatttcatttgataaagccatactttagagatgaggtaattcaggtgaaaatgtgtaaagattacacagtgcaaggtcacacagtaagcaggtaaaccggggctatttgactaatccagatttctctgattccaggcgaaaacattagattggccatcagttcaggaagctccattccactattacaaataaatctgcacaaacaattggatagtcaagggaaacattggtctcattgggggtctcagatatgtcttcattccatgatctcacctcacttgcataacctagtctataaccagattagccaggcctactattagttgttggaaaatttggagaaatggaattgggggaagataattctctggtttttggagagagtgtaaaagtacaagctaccatcaatttttcaatcaggctgtgccctaaggaagtactgggtcaaatatttagaaattgagcctcaggctgggcagtgtctcaggcctatgatcccagcgctttgggagaccaagacttaaagcttgggaggatggcttaaggccagcaattgggagactagcctgggcaacatggcaagatcccgctt

SEQ ID NO: 316516 - DNA, 4001 bp, Homo sapiens
actcctaggctcaagcaatcctcccacctcagcctccccagtagctgggactacatgtcggtgccactacatccagctcattttcttatttctgtagagatggggcctcactatgttttgcccaggctggtctgcaactcctcgccccatgtgaatctccagcctccgtctcccaaactgctaggattacaggcgtgagacaccgcgccaggcccaagtggcatcataaaccatctctaggaaatctaaaggattaataatgatattcacttctctatcagattcactgcaaagatttttctatataagcataatgcagcaacactaacttatatacacaataatcttctccatagcaatgatttgtcagacattaggaaatcctttacatatttaatataataatccaatcctttatatcttcaataatccaatcacaaagttcaaaaatattaagagaagttatcatgcaactcctcaccccaattttattgcaaattttactttactttgacctgatgttccatgcccacaagctagataacaatgcgtcaaatatctcgttatcattgcaaagcaaaaaaataaaacttgctttaatataaaacggtaactagtatacaacctgtagtagttaaaacaatataaaattttacttaaccagatattgcacgttaaactctaggaacattaacagtggaaacattctccgcatctaacaaattacgagataaagtatagatccgttgagagggaactaacattctgacctccttccaaaacgacaaactagaacggcaaaattacactcaggcacattggagtactcttctctcaaatcactccacagagaacttcatcatttgctccgccctctaataactcatgcaagaaaagttcagcaccatcagagagaaacaagacagagagaattcatagaatggctttagggcctttcctccaggcggtaagaggatctgcgtgtgtccttcgcaggggtccaaagggagagaacctaggcctagggtttcggggataccgacacccagaaacagattttctctcaaagaagtttctgccgccatccctatcttatcagcaggaggccccggcgccatcgtctccgtctttatgattttattatggggaggtgggaaacgccaccctggattcttccaggcctcccctattcagcttgggggttccccctcattcttccctcaaagcctcagtccctgaggtcctcctcagcaccccccgcttctggcggcctgtcccccgtgaagtgtaaaggcacggccgaacccaccggccttgccgtgaaggcgggagggcccgaacccgccagggccacggcgatggctccgaggggcccagaaaggggaagggcaggccggggaccggggcagaatgacctggccggggaagaaaggaaaaaaggaggtgaggagatgcaccgcaccgcagggctgcacagagaagggaagatgatgaaggaggaggaggagggcggtggcccgggtgcggccccctactcctcccgcccccgggtccccgggccggcgggggcggacggactcggcccattcccaggtctgggctggcggggggttgggggatctccctccacgctactaggagacagagaacgagggtatcgggagcgggggggggctgtctcccgcctgaacccggagaccccgacgccgtcgtcgcctcttcctcaggagggaggacggcagctgtgggtaaagcccgaaggaggaatgcctgaaggtaaggggaagcccggggcagacccgctgcccgctccggaccccactctccaccttccggtaaccgcgtctcttaccggtaatggtggtgaactgttgaattaaccccttcagcgccgaggacgccgcggagcccccgtgggcagccatcttaccgccgccgccgccgccgaacaacaacacagacacacacggactgccctcccccacttcgccgtgcggtgtgcgcaggcgcattgaccgcccctcgagccccgcccctcccgtccccagcggtctgcgcaggcgcattttccgaccgggcccgcgcgctcccagctctcgggttggctgctcggttgctgcctgctcagtgcatcctttttgccattgctggtgccttcctctccgggctccaaggctagcctcgcaggcgcggtgtcgattcctagattccgaaggaagcttcggtctcggcagatagttcttcgcatttcagcttcgcaagctttattgacagagccaactgccgatgacagcatttttctgttttgcggttgtaccgcactctattaggtttcctgcaggtcccatcaaaatgcaaaccctacctcctcgctttgaagcgactctccccgtactcgccccccagcctctaaactaatggcttagctaaccgattgcgacgagtgaaataccagaacccttcatgccaaagaaagcacttagcgcggggttgccacccagtaggttttcataaacgattgtttagtctgctttccttaaataaattggccatcacgtctcccgttagggtcttaatgagaccccaagaggcgtcatttgtataaaaagaaactctgtatatgcagtagaggaaagaaaacatatagaaaggagactggaaaagtgtgctcaaaacgctggtaacggttacctccagagaagagaacgatcgggacgatggtcaaagcggaccttacttcgagtttcttatttatctttttatttttaaacaaacattattggccgggcgcggtggctcatgactgtaatcccagcactttggaaggccgaggtgggagaatcgcttgaggcaaggagttcgagaccagactgggaaatatatcaagaatccatctcaaaaaaaaaaaaaaaaaaaagatattcgtgtgttccttgaataattttaagtattttgcaaaacagttacatgagtggggtgcgctcaaatccaataatcccccaccttgcccataaagttaaaagagattccaagtgattccgtttgttttagcctcccaccttccaacctccacccacatattttgcatcttcataggaaaatggcccaataaaagatgggatgagctgtctgaagaattgacacatcctaagagtaaacatgctattggggagaattaagaaagagccatgtcaaatcaaggggtatagttttttgttttgttttgtttgacagggagtctcgctctgtcgcccaggctggagtgcagtggtgcaatctcagtttactgaaagctccgcctcccgggttcaagcgattctcctgcctcagcctcccaagtagctgggattacaggcacacgccaccacgcctggctaatttttgtatttttaatagagacgaggtttcaccatgttgagcaggctagtctcaaactactgacctcaagtgatccacccgcctcggcctcccaaagtgttgggattacaggcgtgagccaccacacccagtcgggctgtagtttcaagaagatatgattgatgtaaaagaaagcagactccagtaatcccagcactttgggaggccgaggcgggcggatcgcccgaggtcaggagttccagaccagcctggtcaacatggcgaaaccccatctctactaaaaatacaaaaattagctgctgtggtggcgcgggcacctgtaatcccagctacttgggaggctgaggcaggagaatcacttgaacccgggaggcagaggttgcagtgagccgagatcatgccactgtgctccagcctgggtgacagagcaagactccgtctcaaaaaaaaaaatgtattttaagttaaatgacagattggtcctggcactgccttccaggttgctgcagttctctagatgggctgaggaagggcagggatcagtcataaatttcggcagctgattccttcacatttgatgcagaggtgcaaaaacaggcaagggaagaaagccaaatcaagaa

SEQ ID NO: 316517 - DNA, 4001 bp, Homo sapiens
caggacctccatgtctgctatatacacaatgctcacaggcttgctggtgtcgctttgctttacagataaggaaaccgaggctcggaaaggtgaacacctttgcccaggacagtccgtgcgtgaagtgggacagagtttggttggagctccggcagcctgagccctgtctcctgtgagccctgcatgtccctgggtcgaggctggggatgcaggggtacgtggggaggacagggcctggccaggagttgttcttgcttcatgcaggtttgggggacaagcacccactcctctcagacccctcacgtacccttaccctgctcacacacactcacagctgtcagagactcagccacacacgcacatatgcgcccataagacaaggctgccatggtcacaggcttcctgtgttcgggcctttgtgcctggagacacccctcacagccccgtccatctggggcaggtgctgcctcatggggcacagagcaagcaagtgaccctcagccagcatttctctgtgtggtggcctatgggatgacagacctgtgggcctcagagggactggtcggaggcagtgttgagctctcgtgttgaggctcctgaaagtaacatgatgatgactgcatgtggcggtgtccaggtgttctgtgactatggggcacccagacatagcaagactcgccacagcagtgaccttacgtggcagcatccaagctgtccggacatatattaggtctgtggggcacacaggcatggcaagactccatgtggcagtgacccaacttagcaatgtccaatgtccaggctgtccagacacactgtgactctgtggggcactcagatctgatatgacctgcatgacagtggctccatgtggcagtgtccagacactgtatgcccagatgtggcagcgtccagacactgtatgcccagatgtggcagcatccgtccagctgtgtggctgccctccaggtcttcccatccagggtggccctatcactgtgaccccctctctcaggctcagcagtggccgacacgggccaggatgcgggcgttggtggtggcctgctccctggcagccctggcccgggcttgctccagtaagatctgcaagaggccgatggggacatccagcgataggacaatgcgcgagccagggtggcgggtggggctgcagtggctctgggcagcccacggccatgtgggagcagctgaggggctctctgaggccgcaggtcggggagtggtctggggagaattctgagggcggagctggaaggttgggataggggtcactgggacaaccaggactctgcccaacatcaggaccatcagcaacagcagagcacacctggtcatcgtgaggtcaggctgcaaggagaaaatgggctcagggcaggggctctggtcaactggggtccatggacagagacagatggcaagggcagagtgacagagcgggggatggagagagaggaagacaccgagaaaggggttagagaggccaggccaggccagagacagagaaggggagacaagaggagagccagaatgagacaaagaggcagaaagcaagacagaaaaaaagaaacaaagaaatccagagacagagggacagcaagagagggagatgaaggagatggaggcagagcaaaatggagactagaagaaaaagacagacagaaaccatcccagagacagacagcatgatggaaagaaagattcagacagaaacacagagtccacaggagggcaggcggttctcagcaggagagcttgcagctgatccaggaaacagaagggcaggaatcggatctcagaggcagaaaagcagccagagatcccagagtcccctgggtccaagccctccataaagccaaaccccacatccactcaacctccaagacccttcccatcccgacccaacccagtcctaccgccaccagctgcttctggggtaaggcagcctgctgtggctgcctggggctggggccaggcactactgtcctgtggtctgaccctctaccccgcttcagggcccatttatctccctcagccccctggggtgggagctggtacatgcttcctggcatgaggcagccccccacctatgactcatccctcccgggggtgtccttagcccccaccctatctactcttttccggggacaagttggggactgagaatcacaagacagtgaccaggactgggcagagggactctgtacccatgcagaataataccaaccccccaaggaaaaccttcccccttgaaaccccccatcttcccaaacagtcacaacaggagccttttaaaacagcagctttaatgccccccagaatcagcaccatgtcatcacaggcttgggtcaaggggcgggtcagacgccagtcacatccgctcactgcccacagccacccccccacagtgagtcatctgccagggtggcaggagccacaatgggggtttgtccacaggggggaaggctagacccacgggaccaagtcactgaaataacggacgtgcacacgcacgctcacgtgcacacaagcctctagcaccaaggggagggacagtggggttctgctgagaccccgactcctccaggggatgctgaatctcagctcattatctgggcctcagtcctgggcagtacctggtgaggacaggttggaaacggtcgtcagccatctgaccttccccggagacgctcaggcagaggcaccgccaaggggagggagcggaggctacaacaggaagtgggggctctgacctcagaggggtccatacttaggtctttaaaggagggaacatggaaggggaccctactgggggctccacggctggggctctatattcagctctttggtctgggcgtctgccccaggtcccctactgcgagggagcgtctcctccaggaccctgacctggaaccctggcccaaggactcctcccccagaacccgatccaggcaggctcagtgcccagttccccacggtgggggctcagcccatacctgtcccctggctctggaccacccggggtgggcagcggcgctcgcaggcctcacgggtcccaaaacggttggcattccctccacagccaccatagacaaaagggtgacaggcctctgtgctgcctgtcacagcccgatggtaccagcgcagggtgtaggcagtgcaggagccctcatccagtggcagggaacaggggtctgggccaatggggtcaagtcagcagggtttgtgggaatcagagagggttgaaaggtcagggggaggtcagcagggctcagccctgcctgcccctccccagaccccgctggcagccccccattctcaccatcactatcccaaggagcttcagggtcctggtactcctccacagaatactcggagtattcagagtactcatcatcctcagggggtacccgctctgcaggtagggcagggtgtgctgggagcagtggctgctggccccggggcaaggtgggcagcactgatttccactgtgtgcacacagtgcccatgcgtgtgccctgcatgcagaccctacgtgcttggcgtgtgccctgcattcatggacacccatgtgcgtgtctcggccccacccatagctgccccacgggttcagctgtcctcaccttcctcctctgcatgagagacgcggagcacaggcacagcatggagctgggagccggcagtgtctgcagcataactagggaggggtcctggagccaagagcaggggcctcagggccctgaagtcaccatgggcagccatcccagccaacccccctgagaggaccccagttgataggcagggcagggcctggggtgaagaaagttctgggagtagaaaactactcacgtgatccagatgcgatgaactggccctggcaggctagagggggcagagagggatagagagacaatgacagagagaaggatgggaagatggagagacagacagagacacacaggcagaggggtagagatacacaa

SEQ ID NO: 316518 - DNA, 4001 bp, Homo sapiens
aatttgatttaggccaaattcatttccttaatctttagtcacatctgaccatcaagtcacatgtggacaatttcagtctgaaattaacaaaacacattagttataaatctgcttagatagggtggtttgttactttcaagcatttctcctctctaaggctgtttccttagagtaaaataagaattggatcaaatgattttcttttttttttttggacagggtctcactcagtggcccaggctggtgtgcaggggcaagatctaggctcactgcaacctccacctccagggttcaaacgattctcgtgcctcagcctccagagtagccacctcagcctctggcacaccaccacacccagttaattttttgtgtttttggtagatatggagtttcactatgttgcccaggctggtctagaactcctggcctcaagtgatccgcctgcctcggccttccaaagtgctaggattacaggtgtgagccaccgcgcctggcactaagttatctttcaataacttattaatagttgaaattccatgactttaagattctttgactcagtccaaacacgttccccattacagacttcctaatattcatttttaaagctgtaacctcttaattataaaataaaacacaagtacagaaaactccacagaatacatagtttaatgaattactaaagagggacacccttctaatcaccacccaaagtcaggaaataggactttgccagccacacaagcagcccctctgtgagcctgtctcaatcaccacccctcctgatccccaaaagttaaccaccccctgactttcgtagtcatcacttccttaggtttcttcatggttttctcactcgagtgtgctttcccagaaaccacagtttagtctcttaacctatagtgctcctaaggaagtctctcttaattcacaagttcacctaagaagcatctaagaagccagaaggcagagcaaatcacatacaggtgcaaatgaggcatttaagagtcgggggcaggtcctacattcaaggaacgctgagagcgaacaggtgataagagcgcacaggtgcccactttcagcacaatcatgactcccgcaccagaagcatgagcatcacctgggacttaatacaaaagaaaaagttatcggccctgccccaaatttacggaatcatacactacggcggtagggcctggccttctgtgttactacacgccctggggtgactgggatgcgctcaagtctgcgaaatgccagccaaatcaaccccgagatgtaaccgatggcgcgcgccacactaagcactccataggtgctcctcctcgccgcacttcacagactcaattatcacagactcaggggcgctacgtagtcactcaccccccccccccccccccccgctccccaggcaactcgcggcgggcgaatcggcggctttcgcggcctcgctacgtccgtaggcatcagtccgcgagaccggctgggagcctaggaagcgctgcagggcggtgaagacgcggtccgctctgggaagttaagagatggcgtccataaagcacatctcccaagccgaaacacacaagcactctctctccccgctgcacccaggtcctagaagaggcgtcccgtgtgcccttaactaacgcccggataaaaacgggcggcttttttaacacgagcgcaaagcaggggagcgcagggggtacggggtccactggcagaaggagagagggcggccaggcgccaccacccacccgccccggcaggcctgcgcgctcttccgcgaccgcttaggcagacacgaactcagactcgtagctactaaaaccgccactgccacgcacctggtagctaagtcaagaaaagagtccagtccacttggctgctcccgcggttgcgcgcatctcggcctctgcctcaggacaggtccacaggcccaagaatgggggagaaagcagtgaagcaaagcggaacgcgcggaagaagccgaccagccttacggaggcgacgcccctccaggtttggattcgtccatacggtttccacggcagcacacagaacgccggaagaagctcaggaagccgactggctgtgcagtttccgttcctgttggctggggcccggaagtgagagaccacgagggcccctccctccacccaaagggcatcacgccctgcctttggacgagcccacaggccagagactggggcgggaagtgctggagtaacagtcatagtggtcggcccaccatccctctatgtttggatttgctcattccatctccatggcagcacgcagaacgctggaaaaacgcaaagcgctgattggttaagagtctcagttcctattggccagagtccgaagtgggagcccgtgagggactactcttcaatcttaagtgggtgctgaggctagagtgtggagaactgagacctcgtcatttcttctcttcccgttcccactgtccttctgtttccttccattcttttctttctggcttcttctgggagctcaggtagacatggtggcatagtctggataaccaacgcctcagaagcaggggccccggggtcctcaccatttagaaaagagaaggctgtgaattaccttcctttttggagatggaggaaacagatgagacactctgatctcaagttgattgtgtaaactaaaaataaaagttccaagcccccctaccaactgagtggatccctcctctgggccaaaggcacgccaaagttaacctgaagaactagctcaggcaatgatgggaagatggggtgggacaggcctcattataccctcctcccgttggaatacaggcacagctgaccagcgttaacattaaacagagaccttaagactgacaaaacagacttttttgcagcaataagataccaacatggcagcaggccccaaaagacattgaagtattttatcctgatatatatatacacacacatagacaaacacacacacacatatactcttatgtatacatatatactcatatacgtatatatatatatattttttttgagacagtctcgctgcatcacacagactagagggcagtggcgcaatctcggctcactgcaacctccacctcctgggttcaagtgattctcctgcctcagcctcccaagtagctgggattacaggcgtgtgccaccacaccagctaatttttgtatttttagtagagacagggtttcactgtgttggccaagctcatcttgaactcctgacctcaggtgatccacccgccttggcctcccaaagtgctgggattacaggtgtgagccaccgtgcctggccaaatatatttatttgacatattttgaaatggccttgcagagctatctcttctggggggaatctacattctgtaaagaatccccttgtctttccaggtcttttccctgatgctggagagaattaactgagaacctgacacctgttttaagtctgataagaaacatttacaatctattctctctgaaacctgctacatagaggcttcatctgcagaacaagaaccctggtctctgcaacctcttatctcaacccagacactgccttctattggctccaggtctttatataataactcttttaaccaattgccaattgtagggtatatggatgtgctttggtcaaggaataggccaaggtggacatccgggccagagtggctcagcgagtttaggacacaggcgcatattccacttgttatgtaacccgtttatgtaagttcatacttggatctgagccactattgtctgtagaaggtataactgccctgctgacactgtgcccaggtctgagttcagcacgacacgacccggttcgtgcactggtgcccagagtaatgctactaacccctctaagggagagcggttgcccttaaggtgggcagaggggagccgagccaggaaccagcttgtgcccagagggagagttaagctgctgaccctgacagagctggctttgcaggcc

SEQ ID NO: 316519 - DNA, 4001 bp, Homo sapiens
tatattgactaaaaacctgctttcccaatatgtccaccttctagtcttaattattgcttctggccgcacagtgcaaaattcaactcccctttccaaacagcccttccaagtgtggacctaacaggaagaggctgaggcaaaattaatatgagtagttgccctgactataggcttcgattacagtagttacaagtggatttttaaagcaaaagaaggggcagttcctatattcaccaagaatttgcattgaaataacaggaggtagcccgggggtggcaccaggcatttgtagtcccagctacttgggaagccgccaaggcaagaggatcttttgaggccaggagtttgagacgagcctgggcagtatggtgagacctcctctctacaaaaaaaaaaaatttttaatttggtgggcatgatggcacatgcctgtagttccagctactcagaggttgaggtaagaggatctcttttttttttttttttctgagacagtctccctctgttgcccaggctggagtgcagtggctcaatttcggctaactgcaacctcctgattcttctgcctcagcctcctgagtagctgggattacaggtgtgcaccaccatgcccagctaatttttgcattttcagtagagacagggtttcaccatgttggccaggctggtctcgaactccagaccttaagtgatccacccgcctcagcctcccaaagaaagcctcccaaagttgggactacaggcatgagcccctgtgctcacccgaggcaagaagatctcttaagcccaggagttccaggctgcagtgagctatgatcacagagctgcactccagcctgggtgacgtaagagagatcccatctaaaaaataaataaataaaataataacacaagcgattgattagctatacattgttctttgtatcacacattccaggtacattaagataatgggagaggcagctagtcagggacaaaattcctttaaataattgtcccggggctgcataggggagtatggttgaagtctctctgggctctgataaattttgtatacatcacagagttctggttgttctattttccttttctcaccagtaatttcccagctactgaattctctgcctacccacgttttcccggtctatttgtttgttttttgagggcagggtctcacttgtcgcccaggctggagtgcagtggcgcaatgacagctcattgcagccttgacctcccaggctcaggtgatcctcccacctcagcgtcccaggcgtgcgccaccacacccagctaattttttgtagagacggggtctcgtcatgttgcccaggctggtctcgaactcctggggctcaggtgatctgcccacttaggcatcccaaagtgctggtattactctcatgaggcaccacgcccggccgcaagtctaattttcttaaagagttaaatatacagaattcattcaagtgtgcttcagtgccagaaagcgttccaaactgggtttcccgacttttgcaaaacacgtgtctaagcgtgtgggtgaaagaacagacgactctcgaggagcccaacccctggcctctgtgcttctcatgcttactccccaaaccaagagtagggtcggtctgcctgcttggctcttttgctctcactcacggcccaactcctgtcaccctcttccatttccttgtcctccttcccgccaccaagccctgtcctttcccttcctaggccagcacctgactcagaagacgcggtcgagacacgatgccccgcagatcgatgtagatgggggaggaaagcccgctcttcagcacgaagtccccaaacttgaaagcctgcacgtcgtacagacccgtcaccaatggccccaaagctgcacgagcgaccgccattgtcgcgcgctgcctgtttgcttcaaattcccaggcgccccgggcctccggcgccccgatgacgtcacccgcgaagtcccgcctcttccgcctgcctcgtctgcagctttcccggcttgctgcacccgtgggtttccccgggctcaagggtcaggtggatggtagcgaacctagcgccagtttgtgcttctcctggtttcttctggatggggtcgctggggttcaaagcccagaacagctagattgactgtaggatcatgaagtcccacctttcatgagagtttgcataaatcctgtccattttttaatagccaatgccttctcgactagttctcttaattatctctactccttggcctaacatgttatatttgctagttattagccaagatttaccccccatgtttctccaaatagaatataagttatcaaagacagggacctttactcaattcttttattaacttcatagcatctagtacgtgacagttccatagcagtttgcacataggaatatatagcacttagatcattacagtattcattacctcttttgtctgtactctgcttcctggaggagtacttttttatttcctttggcgtacctcaaatgcttaggtaataggtgtagaaaaggtaagggagggaaggaggagagttagaagacggttaattgattggtatcagggttatccaggaggataatattgctagacaatctgaaaatccaaacatatttggtctttacaaataaatcccttaaagaaataatcaataaataatctgtacaaataaatcccttctccattgtgtatataaggcaatactttattctagcttaaggaaaataacccttaaattcacataaagaatgaaaccttgtcatttgcagcaaggtggatgaacctgaaggacattatgttagtgaaacaagccaggaacaggaagataaataccaaatgttctcgctcatatgcagaagctaaaaaagttgatctcatggagctagagaataaaatagtaatcactagaggctgggaagggtagggggtggttaaaggacacaaattacagctagataggaggaataagtcctagtgttccattgcactgtagggtgactgtagtcaataataatttactatatattttaaaatagctagaagaggggcgtttgaatgttcccaacacaaagaaaggataaatatttaaggtgaggaatatatgaattactctgatttgatcactgtacattgtgtgtattgaaatagcactatgtacccaataaatgtgtacgatatcatgtgtcaactataacaaatacttttttaaaaaagaggaacagataaggcatagctgtatagtgcactacaaagaacatgaagtttcaaaccaaaacatttggattttagtcccattctacttactggctgagtgatctttggcaatgcattttgagctatatgagtctcaattttctcaaaaatagaatgaagaagccgggcgcggtggctcacgcctgtaatcccagcactttgggaggctgaggcgggcggatcacgaggtcaggagatcaagaccatcttggctaacatggtgaaaccccgtctctactaaaaatacaaaaaaattagctgggcatggtggtaggcgcctgtagtcccagctactcgggaggctgaggcaggagaatggtgtgaacccgggaggcaaagcttgcagtgagccgagatcgcatcactgcactccaggctgggcgaaagagccagactgcgctcaaaaaaaaaaaaaaagaatgaagataataatattaactttctccaaaaatcactatgaagattcaataagatagttcactcaaaaacacttgataaaaagttggtagagctgagtgtggtggctcatgcctgtaatcccagtactttgggaggccgagggaagtggatcacctgaggttgagagttcgagaccagcccagtcaacatgatgaaaccccgtctctaccaaaaaatacaaaaattagccgggcatagtagcacatgcctatagtcccagctacttgggaggctgaggcaggagaattgcttgaaccccgagggggtggag

SEQ ID NO: 316520 - DNA, 4001 bp, Homo sapiens
ccagggcaggagtactatggagagtccttggggcgggggggagggggtgggcaggcgggtagggcggtgtgtgatgatggtgccccctcaccaatgtggtctctgtcccagttggtgaatggtggcccatcaagtttgtgggcagcctgcatggctatcaggcacaaattccagagcatatttaaaggctggctggtgtttactctggttaagattgtaagcaggagaagtcaaaaagaagttctgagttttggccgggtgcggtggctcaagcctgtaatctcagcactttgggaggctgaggtggatggatcacgaggtcaggagattgagaccatcttggctaacacggtgaaaccccgtctctactaaaaatacaaaaaattggccgggcgtggtggcagacacctgtagtcccagctactcgggaggctgaggcaggagaatggcatctacccgggaggcagagcttgcagtgagcagagatcacgccactgcactccagcctgggcctcagagtgactccgtctcaaaaaaaaaaaaaaaaaaaaaaaaaaaaaaaaaaagaaaataaaagaaaaaaaaagttctgagtttcttttttttccccttgattaaatgatgtctaaggtcccctttggatgtaaaagtctatgattcttcccagcagttaaaaaaaaaaaaaataggtgagttgattttaaagactattttatagcagaaagcaaaacaatctgttggagcagaaagcaaagtaagaaatttttctcctcactgagaaggttaataaaaagaaaatccacttcttcatagggtctgaaaactatgtaacctaaattttgtttatactcaaagtatgtatatctataaaacctaatgagttctttcctgttgtgcttagcaactcaggcaagaaatgttcaagaaacgttgtctttcattaaaagaagacattcaagttaacaaaacttctttaaaaatttatttttattttttttagagacaggatctcactatgttgcccagcctggactagaactcctgatcacgtggcctcagcttcccgaatagctggaactgcaggcatgtgccactgtgactggctacgaattcttaaatggcttaaaaatctttaaaactagttagaagtggagttttaggtttataaacaaatgcaaacataaaataatactagcattatttgaaacttaaatttgtattttgtgtgaaaatgtgatcagaatgaaaaatatctttatgtcctgcagatcatggtggagcaaagaattggtaaggagtaaaaacaaattatgtaaaaataacattgcgtagataaagctactttgttgacttacttcaactgacacatttattaagcagaagtgtttgcagagaataactgggagtaaattgcttcacacatttcattacaggttggcaggaccaaatgatttctgacaagaagaccaagaaactttctctctgctagcctgaacagattattaagaaataacacgagctatttcgttaaactttctattgcttttctgactccacaaggaaattgggggtctacaaaggtgactgtctatgtgcgatttaatcaggagatatagggtttctcggggtgcttggattttcttgttctttctgtggggatatctgaggttgaaagcaggatggctgcgtaatatctccagaagtttaatgagaacaagacttatatcaagggtattaagaaagcaattccaacggttcaaagtaaaagagaacaggacagtcacaataccctaaattacaaagaaaaaaatgacagactttatgaatcaagaatctaacttcttcccctttccctcccagtctgctagcttccctcccaggagagcaacccagcccttgagcccgggagattccctgcagagggaaagcggtctactcacagcgcctcctctttctgcgcacacggtagggcccgctccgcagtctgcacccgacccaggtgcttttctaccctcctgcaattctttgaacctccaggaccagggaagggtagtctgtgattggcaggaggcacctcacatgggctgagctttccgctgcctgccctgcctcgctgaggcgggggagtaaccggaggctgtcagttgatttctgctgctttggaatgtgtgactctgacagatggaagcaccttgacagccacactcatcgctttcctggatccctcctaggtttgggctttactggaatacaaactcagggattttattttgatttgatttgatttgatttgtgtaatttgatccttactcctgcttttgtgtgttgaaggcttgttagtcctgaccgctcacagcgatgctgatatgtgcttacctgtgtagggccatgtccagttttagtttctataatttgcatatgccaaattcagagagacagtaattgcccaagtaatgctcatactgtaggtggcccaaagactgataaggagcaagagatgtggaaagaaacagattgggaaaaattcacggagagagagggctcaagtgattatctgatgtccaattcttccctcccctcttcttccctccctttctcttctcttcccttcccttcttttttccttcttccctgacttctggagccatcatgtgttatacatggcacccagaacattattttaatggctgcataacctatcatggtatacatgcgccatcgcttgtttaacctgagttaggaatcggtaactgcagtaatgttagaatttactgagtgcttttaccaatagacttgggagttcctcaaaggtcagcatcatctctgttgcaggttaggttgttcaggagcagactttgagacaaaatttagtgtgcaatatatttattagacagtgccctgagattaacacccatggcagggagaggggagaaacaggactgggcagaggaagaagttgagctgcaatatagatgggacagtcttaagcagccctcctcaggaaactctggaggaagatggcctgtcagagtagctctgacactgggctcctctatgatctgcccttcaatgtggattaccctgggaaggcagctttctgtagctgaggcaagtcctgaaaggggctgataactggaggctggaggttgcaagtactcccagcagcagggcaacctcccacttcaagggggactgcatggagcacctctgtgtccatcacaaggccttattcctctgcagctcttcagggccttgttagataaattatcatatttcacacaatagaattctgtgcaatggttaaaaatgacaccacagataaacatttaatggtatggaaataagttcagtcatttatttgacaaatatttattgaaaacttaggatgtgccaggcactcttctagaggctgaaaatgaaaaagcggtttacaaaatagtttgtgtaatctgacacattttaatttttaagaaagtttacctatgacttaaaaagttagaaatagtatacagcaaacattaaccagaatatatctgaatggtaaaatatgggtgacttttacagtcttctatttttgcagttcatatgtttacaaaggatctatattataattataagaacgtacaagttattaaaaacatgtgctgtcctggaaatatttgtgataaagtagcaaggaagcaaacaaggacatgtgaattttcattcatgtcttaggcattttatgttccattaccatgattatatggggagaaaacaaaaagatttgaaaatcttcaaaatagataatgtgaacacaaacccaataacaagagacaagagactagctaggaaaaggaagattagttttcagataataactgcaactgaatagttgaggaacgtcaagtcgttaatgtatgacaggcttatttttttccagttaatttatttctaactctcttctgctaatcttcctttctctctggctaggtggctcccttacccacatcttaacctga

SEQ ID NO: 316521 - DNA, 4001 bp, Homo sapiens
ctcctgctttggcctctcaaagccctggaattactggtgtaagccactgtgccccgcccacaagtgtgatgtcattacaggcacagaatgcacaagtagtcaaatcagggattctgaattatccatcaccagaataacaaaccttgtacccattaagtaatttctttttttttttttgagatggactctcgctctctcacccaggctggagtgcagtggctccatctcggctcactgcaatctctgcctcccgggttcaagcgattctcttgcctcagtctccccaggagctgggattacaggcgtgtgccatgcatggctaatttttgtatttttagtagagatggggcttcactatgtttgccaggctggtcttgaactcctggcctcagctgatccgcctgccttggtctcccaaagtgctgagattacaggtgtgagcctccaggcctggacccattaagtagtttctcatcatccaccccttcatccttccaagtcttcactgtccatcattccactctctacatctgtatgtacgtattttttagctcccactgataagtgagaacatgtgatatttgctttcctaagagatgtcaatgcatataccatatatcacacaatcttagatgaacatgtatttcacatctaacatcttggaatgcaagaggcattttacaatctatagtatcctttgattaaaattggcaagattcttgagattctttctctggcactggagcacagacagctccttacaatctagcacattttagagttcatgtaatatagcattctttactataacaagtgacatataacaaggaagttgcaggccaccttttcctatgcttagtaacaatttaaatcgcaggacattgtttctggaaaactaaaaggatgtgtcaataaaaacatctggccctggggctgggggctgaaaggaggaggagataattatttcttgggaatcttctcacctattcatatatctatctgtgactcaagatttcttgtgtcaatttagagaatttgtattttttggaaaatcacacatttcattgtactgttaaaatgcatttgcttcctaaaatgtatttctggtctagcctggagattatgaccttgggcagtgaggctgacagacctggacccctgcaagtcacctaaggtgtctgaatcccattttccgcattataagaggagacatgatcacttcccttatatgggctccttaacaaaaggctggaaaagaatttggccgcctacttaacgggcattatatgctaaataatgttggcttatagtgaagattgtcccgtgaagccaaggcgtggctagggtagggaatggggccattctcggggtgagtggtcctgggtccgaacccaaaccacaaacgggaagactcgagcccaaggtcacaccccaaccagggaaaagacggcaggcccaacctggaggccctctccccaaaagcgtccccaactcaccgtgcaagtgggctgagaggactgctcggaggccacacgcaggccgttgtccagcaggctaacctgcgtctccggcacgaactggagcgcctgagcgaaggttgccgtactccgcaaggctggcgtccgcagcagggccggctgtggaagggaacagccgcgagtgaggactcggtcaggggatcgctccccacctcccaggtcctcaggaggacccccgaaccccgcccctaggcaagcggcgagatacctttccccgccctccgccgtgaccttcccacggccctgaccccgcgtcctccccacctcgacctgccactgctaacagcccacacctgtccgcttcccgaagccctgtcccgaagccccgcgctctcgccaccacctcaccgagcggcgggcgcgcaatagcacttgtgccccggcggtagcggcccgacagaccacggacgccgccatcttccagctgcagtcggccctgttgcgccgcgcaagcgtagactgggcgcgttggcggtcgcggcgcaggcgcagtaccgtacagttggtgctcggccgcctcctggcgggaaccgggacagtctattgtgctggcctggctttggctgactggctctgaccgcgctgccgccagtccctgcgcacatcagtccacctgccgtccatcagcccgagcaggtccgcccgccgtgcagtccatctccccattccacgcgtggaagtcagagtgcattatgtttctcaccagccgcgctgcgtactgaggtctggcgggcggggagttgcagccacagcgtgtccgcaggttcgagcccagggctaaagtaccagcgtggaaacttacctgggaccacaagttggtgctgaaagtcagtatttttttctctttatttattttttattttctgagacagggtctcgctctgtcgcccaggctggagtgcaatggcgcgatctcggctcactgcaacctccgcctcccggcttcaagcgattctcctgcctcagcctcccgagtagctgggattatgcccggtaatttttgtttctttagaagagacaaggtttctccatgttggccagttttgcgccctgccagttttctctttaaaagaactaagtacaggccgggagcggtggctcactcctgtaatcccaacactttgggaggccgaggcaggtggatcacttgaggcgaggagtccaagaccagcctggccaacatggtgaaacctttccttttctgtaagaggaaaaagaattctggctgggtgcagtggctcatgcctgtaatcccagcactttggaaggccgaggtgggcggatcacctgaggtcgggaatttgagaccagcctgaccgacatggagaaaccccgtctctactaaaaatacaaaagtagacgggcgtggtggcgcatgcctgtaatcctagctactccagaggctgaggcaggagaatcacttgaacccgggaggcggaggttgcggtgagccgagatcgcgccatttccagcctgggcaacaagagcgaaactccgtctcaaaaaaaaaaaaaaaaaaaaaaaaagacttctaaggtatgctttgttatgtcaactaaagaaaaaaaaaaacaagcttttaaatatttaaagttagttctattcagaagtcttaccaagaattgcaacccgggagagcctttcagggagtttctgctagactgctccaaagcagtgtttccgacagtttatacactggtggtggcggctctccatgtgctcagaaattacatcaaatgtgctcagaagttacattagagcataaatctcatcaaggtttgggtgcaagagtacatctgtttataggtcacagaagcataatcattaatcctgtcagacagtatcttaagtacaggaagaggcaagggctaggatcattgcattttttaccatgttggccaggctgatatcaaactcctggcctcaagcaatccacccacctcagcctcccaaagtgctaggattacaggggtgagccaccacaccttacccaaaaactactcttatacttaaaataaaactatctttataaaaatcatgccagatgccatgaccacaggctctcacaccacacccagctaatttttttttattttttgtggagacgggggtctcattatgttgcccaggctgatcttaaactcctgagctcaagtgatcctcctacctcagcctcccaaagtgctgggattacagtcatgagccaccgtgccaggctgactttatttcttataaagggttacaacctgcaggctgggaggtgggcttctggtcaaaaccagagacagacccttaaaaagaggcaggagctttatgtcgaatggcttggctaaacatacatattcggccgggcacggtggctcacacctgtaatcccaaactttgggaggccgaggtgggcggatcacaaggtcaggagattgagaccatcctggctaacatggtgaaaccccgtctctacta

SEQ ID NO: 316522 - DNA, 4001 bp, Homo sapiens
ccacttaccctcccccaacccccagcacccaccacctaccctccccctcatctgcccagcacccaccacctaccctctccccaacccccagtgcccaccacctaccctccccccacccccagcacccaacacttaccctcccccacccccaacacccaccacctaccctcccttgtcccccagcacctgacacctaccctctccgccccccaatgtccaccacctaccctcactgtctccaagtgcctgtcatctaccctcctcctgtcccccagcgcctaccacctacccaccccctcctcaccccagcacccaccacctatcctcccaactcccagcacccaccacctactgtcccctgccccccagcgcccaccacctacccaccccctcctcaccccagcacccaccacctatcctcccaactcccagcacccaccacctactgtcccctgccccccagcgcccaccacctacccaccccctcatcaccccagcacccaccacctaatgtcccccaccccccagtgcccaccacctacccatccccttgtcaccccagcacccaccacctaccttccccctcgtcccccagcacccaccaactagcctcctcccacccccagcgcccaccacctaccctcaccctcatcaccccagcacccaccacctaccctccccctcatcacccagcacccaccacctaccatccccccaccccagaactcaccacctaccctcccaccccccagtgcccaccacctaccctcccccctccccccagtgcccactacctactctaccttgctggcccctcccccatttccctttccctccagcacccgctccacctgcccccagtgccccactcccacaaggacccccagcatcctcctagccccccaactcccctccacccccacacccaccaacctgcttcccctttctcccttccccagcgccagctctgccctgagtgacccctactgtccccactgtgtcctgttaggcctctgtgggtggctccagaaaagtccagtgggctccggtgcaaagggcagccatctttacctggggaggtaggattcctcttttaatctttatgcttgtttgcagtttccacttctctactgtttctgaaaatcttgagtagtttccagtaaaaagtaggaggaaagtctatataaccgtgtcacctactttatttcattactcttctccacaaccccctggtgtcaccattttcatctcaagctgacaaatgacaaaagggaggttcccagacagggcaccactggcaagcgtgcaccatccctggactgctttgctgttagatgaggggatactggcctcagcccatctttccctggcaactgcctgccagctacagggttcagccatgcagccgcacgttctccagagatttgcgggagggacatttgcaaatgaaaataagagctgacctgtgtgcaaacgttctgagtgttggggtggacgcggcgcttggtgtgggacacttcacacccacccaaggcctcctcccactggaggtggccaaagtgccaccagtgaccggctgctgaccttgagcctcagggtcctcatctgtaaacaggcacggcgatcctgcacccaagggcggctgcatccaagagacagagtccactgtgcattgcacccgcacaggctggagcccctggagtccagggtgggcggctgagcagctcccactaagagggcaggaagcctgggtgctcactatggaccacctggaggatgcctagaggccaaggcctcgggagcacgggcccactgcttacctgtttctccacagggctgaggctgggggtcctgacaggggcatggggcaccccagcctggcgtccccggttctctgggaggggccgcaggggcaggccagagcacagcgcctggaggctagacatgtgtgactgagatggaggcagaggccagcactgtggggaggccaggaagagactgggcagatagggcagggacctctagccccagggccacctcctccagcctctcattgggcgcctggcctgtgcagggagccatgtgcaggtcggagggtcactggcctcaggtagggcacttgcagcgctgacctggggaggacattgctctgcgggagggcaggcttcacagtggggaggggggctgggctcacttccccttccaggagggctgtgctgtccgggacagctttgggggtgggtggggctctaatgctggggtgtgctgtggcagccctctggtgcaccacaccaaacattcgatgtggggatctgcatcttgatgatgaggagatgggaagccatgtgacactgaaccggacacagagtgtagagcccctcctcctgctacctcctgctggggggtggggtgacaggtggagcgggagcacccagcagcaggtgtgccctccttggctccccactggagggctgggtgacaggtgcagtgggggccctcagtggcaagtgtgctctcttcagctcccgctggggggcacaccactctaccccctcccaaagctctttttgaaggacctgcctgagggatgaccctcattcccaaatctgttaacaactctgccagaaagcactcttcatgagccctatgctatggatggagaaaccaaggcccgggtctccctcacacagccaagaagtggccgaagctgaattccagcagtccgggggaagcaacacacctgggtgtacccagtgcgagcctgaccagccctgtggcctttggccatgtcctgtctacacaagtgggtggcgatggacagctcagctgcaaggcggtggagtgccgttaggcaagccccagtgcagggcccgcacgtggaagcccagctgccttctgagtgcttgctcctctgagagcatcctgtgggtcagccctgaggggttcgttgcccccattttaaggatgaagaaacaggtggagagagggatgggacttgcccagggttacacagccagtcatggggggagctgagattggagccctgaggacccagaggtctggctctagcaccctcccatccacgctggcccttttgcagcacagggagggcgcccttaatgggggtgatgtgagactgtgatagaataagaaacaggctttgatctcttccctgttcctgccacaaagctcctgaggccctggtagatggaaactctaggagaatcttttgttctaacgtttgatctttgaccctggttcctgacacagagctcctaaagctgttggaatttcctgggtgacaggagcagagctcttttgttctaccgaggggactcttggcagatccctgatatcctcaggattggggctggttgacaagggaaccaacctgtgattagagggttggaaccttcagcagcctcctgactttggggaggagagagaagctgaaggctgagttgatcaccaaaggccaatgatttagtcagttgtgtaggtcatgaagcctccctaaaaacccaaaaggacagggttcagaagagcttcccagcagctgagcacaggcagattcctggagagggtcatgcccagagaaggcacagaagctctgtgcatcttccccacacctcatcctgggcatcttgtccatctggctgttcatctatattcttcgtaatgtcctttataagaaaccagtacacatcaataataaagggtttctctgagttttgtgagccacagtagcaaattaaatgaaccctggaatccccagtttatagccagactgtggtcagaaccacagtccacagaccacaacctgtgcttgcagcatctgaagttgggggcgatcttgtgggactgagccctcaacctgtgggatctcatgccatccccagcaggtggtgtcagagttgagctgactgggacacctagctggaggagacacccagctgaaaagctggctgctggaaaaagcccacatgtactttggtgactgg

SEQ ID NO: 316523 - DNA, 4001 bp, Homo sapiens
gccactttcttcttcctggaggtaacaatctgtcaattgcttaagttaggaccatcatccctctccacctttagaagctattagtgggaactgcccaacactggccatacaatctgaaaatggcattttcaaataatttatggataacatcctaaaaaaggactgccgattgtcacactccactctgtggatcttttcgaaagaaaaaaaaagtaaacaatcaaaaattaagttaggtttcatccctcaaatgatatggagttaccataaataaaaaaactaaatgtcacagagaggatactaactctgatactccagtgtgtgtcgagcaaaagtgctttgaagccagccaaaatcaacccacagataataaaggaaactttggaaatgttgccgctcatttggacttttcttttcccctctgacaatagtccacatgctatgaataaaatacattagaccattgcgagacctgcctcggtccatccaatccatgcgcctcccaatgcattgagatctgccgggtgacatatgagatctaaagtgggtggataaaaataacctggtcctcaaaaagacatgataaacgccagacagctgagtcactttgaagcccattttgacttttgaaagggacattcaccctcctgctgcttctcacacattcacatagaaccaggtgaaaaccaccaccaaccgccccgggtggaaggcggcgatccctctcagcttcctcctcattctccgaggtcacgactcgggattgaacttttaataatttatacttgcgcatgtcagtccaagtgactcatttagaagggcaaggtggggaaggcttaagaaaaccatcgcaatccagtagatcccctatttctgctgcccgagtggaggcaccggaaggtttcgtctgacatttttttttttttttttttgagacggagtctcgctctgtcgcccaggctggagggcagtggcgcgatctcggcccactacagcctcctccttcccggttcaagcgattctcaagcctcagcctcccgagtagctgggactacaggctcccgccaccgcgcccggctaattttggggttcttttttagtagagatggggtttcgccatattagccaggctggtctcgaactcctgacctcaaacgatccgcccgcctccgcctcttaaaaagtgctaggatttcagacgtgagccaccgcgcctggccctgacattctaaagacaagaaaaggagtggggtgaaatgggaactggtggaagaaaagctcagagagcaaatcagaattgtccagaagtggggatccctgagcaaagcaagtggtcccagaaaaagaagggctgtgtgtgtcccggggtgtggggggatcatcccgtccacctacccgccctgcgctctgccccgcggaggacgcaaacgatctgcaacgtgcagttcggaacagggaactcttgtatttcatctatctttaaacggcggcggggctgtgtgcaagctgctgggaatcgggcccttccagcctggggaggctggcggagcaaaaccaccagcacgagccagtcctcggctgcagcagccctggggcgctcactaagtgtctgccgaactgcagtgttcctgagccaactctgccgcccggaggaagagaagaggtcccggccgccactgcgcatcttctcccccggcttcacgtgccgcaggccgccggccccgcgaccctcccccgaggcgcctcacttacgggagagtcgtaggagaaggcgcactcgttcttgtagaccctgtcgccggacctgggcacgcggatcgtgggcatgtggggcactagcagctcgccgatgtctcctgcagccatcttcctgcctccgctgccgcccggcatgccgaacagggcgccccggcgctgcatggcctcggcgcgcaccggagccgagcgagccgagccggagccggagcgcggggtctgccggcggcggcggcgccagcgagcgggctgacgggcgggctgcgcgggcaacggcagccggccgagccggggcgggcggggagagcgggctgcggggcgggagcgggcaccgcgggcttggggcggactggcgacgctatttttaatccaatggcgagtctccggcccagctgcagcgtcaggcggggctggggagcgccagccgcagcgtgccggggagggggcgctggagaggggccctgcgcgtgggccgggcgcggcggcggggggcggagggcgaacccctgaggcgttggcgcgggagctcgagcgggctggcggccgaacgcggcgcgggagggccccgggaaaacaccacggaggtgttttctatcccgaattgttggcttgcagaggggcaactccgaggaggccaacacaaagagcaggattgggggttttaaaaaccgcttgcttttaaaacagccgaagactagggcggtgacgtccccggattggataggggcgggactcgatgtgcaaatctgaaatctaacgtgaggcttaaatctaaatttgcgccatgcacttcagtgcttccccactaagcttcgttccttactttaacatccaaggctcaaaaatagagcgaatagaataagatcgagtgaggatagagggtgtgtgtgtgggggagggcggggtgtgtgtgggagtgtgtgtgtaataataatacaggttttcttacatattgggggaagtcagggatggtcaagattttttcagggcgtcggaaggctttctatttttctctgcctttggagtatcttctatgtgattcaaagttctcatgtcgaacattcagtggcctgatttgaggattttgtaggcaggcatacatattcctgtcttgatcatcagttcctcaaaataaatgatgaatggggttggcctcgggggttgatcatttgcaagcagagcatgtctcccagcatactctcattctctccaaaaaacccacaagacgggttcaatgacattgaggttctctaactacacccaacatatgtattcatgacagagtatccagtgatccctgccagttaatgaaatgcagaaatagcgagaaatagtgaaccaaaacgctaatttttgtaagcctctctcagatcagatagtccttaagttcttttttttttcttactttttttctcttttaactctccctggttctccagacctatctcaagatttccataccctcaagcaagcctcgagcgcaccacactttcttataactcagcactcccaaatgctatctgttggaaaaggaggaggtggcactgagcaaaaaatcagacactactgtcatcttcctcattgggcagatcctctcagcgagcttttgctttgaatttagtctcatcagcttattacctttcacgttaatggatgatgttttctccaattacagagataaacttggttttacaaaacttaaaatttaatcttagattaaatacaaattaaatcagtgagacactgtttttcatcctttgggctggtaaagatatattgagttagcatgggtttgggaagtagaccctcattacattgttggtggggataaaaacgataaacctctttggaaggaaatgtaataataccagtcataactttatatgtgcatactgttttccccagcatttccttgtctagacatttatgcaacagataaattaaggctgtgtaaagatatttgttagagcactgtttcgagtaacaaacgtctggggaaaacctaaagatccttctgtagaaagtggttaaaatacagtaccattgaaaagaatgaagttgctctacgtgtgctgatgtggaacaatctccaaattattactagatgataaaagcaatttaagcaaactagtgtataaaagcaaggaatacatgcaaggctgataatatgcagtaggcattttggcacatcctatataccatgggccttcattccagttggttgtacttgtagtaaatatttttaa

SEQ ID NO: 316524 - DNA, 4001 bp, Homo sapiens
agtcatctcccaaaccccaatctgtataccaataagatgggaggcagagaaggccacaattactctgggaatgccactcccacctttcctaggatctccatccttgctctcctggtttgctcgatccttctgcttcttcttactagtggtgtcctccagtcctgggggccctctccttgggcctgtggcactggccccgccagacatcttgagccgcttggtcgacagccagagtgccccggggtcggcaacagcgtctgggtcagggctgcggcgctttcttcctggcccagctatcttggcaactctttgtggccaaattctccagcaaggaacggacagcctaatggaaagaagccagtgatcactgccaagacccaacaacttgctctttagctacacccagggctcagcaacacaggacactaatgctacagagctgtatcttctcatctcttaagtacccctggacactctcaggatattctgaagaggtaataaataatgcaagtagcagcaaccacttctggccaagcctcatagatacccaccataacagtcccacacaggtgaaagcctcactgagggggcaccaggtcaaggaagtcatggcctgggaccaggctactccaccaatctggagaggagccacggctccagcccacagggctggcactccgagcagggtgctcacttttccttcactctcactggctgcttagtcaccactggagaaatagaaggtggaggaggaaggcaggacaggagacaagccgcaggagaaccaggctctgtggctgtaaacaggctcaacccaggttctaccattgcccagaaaaagtcctggggctaaggcactccacctgcctcctgccagctcccacccttggcaagaacctgctcctatgtactgcttggtccttcttcatttcaagagaaagtcctctccccagctgctgtcccaagcagaaagggactgaaaagtgtatctagatgtcacgctacctcttcagcagcaaccctgctccagtactaaggcaggatgggcatccagtttgagactggaacagaaattatcaccttccttcccagatgccttcactcatgagctctgagccacaaggaccactacagtttcccacagacccaccagtggattctggactgtttcctcctccaaaatgaaggtcttgaaactagatactgagatgaggctggggaggaccacagatccaggactcctggcagcctcaagcctggcctgaaccagtagcaggacagataatgactagtctgtgttcccctaagtgtgtaaaggaggaaggagggatggcaggatacccttctacaggtcagatgtggtactggtgggctggatctttaatgacacctgccaccggcgcctccttcttgcacccaggccccagccgaaggtcgcgtccctcccccatgccccagggacgtcgaggcgggtaaggggctgtttagagacccgagccggcctgaaatggcagcgcggggttactgaccacagatcagcgccccggtcgagctgcgacccagcttcagcctctgaaccccgagcccgccaccacctctcccacgaagttgccctcgctggccgccagtcctctcccaggtgggaggctggccacaggcatagcgtaacggccctgccggcatcagtgggctggcacgctgcggggcactaggggtagggactggcacggcccgtgaccttgaacaggccgccgcggccgcgcgttgcggcctccccgctgcggccaagccagcgagttgcagcctgctccactcaccgagcgagaccgccgcagccagccctcttcgggccctggcaacccgctctccgttccggttccggcgcaggtcggttccggttccggcgcgcccctcccccgtcccggcgccgccgccaccgccttagcggcttgttttgtttcgacttctagctaaggccgagggaggcggagcgccaagctggtgacgcacttccggcgggaatgggctcggagcgacccgcagctccggggcgggcccgagcggaaggaggcggtgctcgggtggcttagcggtgcatgggttctgctgggggcaacctcgaggttcccctggagactcccccgcccgccccaaatcagagtccagacaacacagtgggggttcacactggtttattgggggccctgccgggccaagagctcttcagtgcataggcagacatgcatgtggggcagtgctaggaactggggtaggccttgggcaggggtcactggcaggtgttgtagatctgcacctgcaagttgatggcttgaagcacgctgcgcatcctggcctccaacccgtccaactgggctgccttactctccagtgcccgctcattttcctcataggtgccttccaattctaggaagggcaggtgtcagtttagggggggtttcccgcagtcttgtgtctctggtgccccatttcttaccctgtagccgctgcagcttgtcctgagcggcttgcaacaggtcccgagcctcatcccgcagttgttctgcccttgcctgtgcagccagcacaccttgggccttgcgctcagctagggccttcaccgtctggtactgatcacccagaggaccgcgtagcagctgcagatgtagagggttaggttagcgtggtagctcagtggaggcccatcttccacccctaccttctccagctggctctgcctcaacccacctgctcagcctcctgggcacgaccctgggcactgcctgccgtttcttctgctgtagaggctgccagactatttcctgcccgtttcaatttcagagcctccaggagagcatccaactgccgagccctttcacctgcagagctcagtgcccgctctgcacctgccatcctctcctgtacctgccatgggtgagccaaaggttacacagatctacggttcatgcccataaccttgtcccactgatgtcctaggaagacctcacctggtacagggtctgctctgtgtcccgtgtgtcagccactgccccccggatggcaccctgggcaataccctgtgcccgctgggcctcctccagtgctgcctgtactgtctctgccttctgtttctcatcctcagcccagctcctggggagaagggggaatcagaacctggaggtatcaaaaccaggtgtcagggataggggccagggatggggtcagaccttgcccgccgtgcatcctgcagtagctgctcggcacgacgcacatctcctacagtacgtgccaggatcgcatccacatctgccaggctccggactcgctctgcaatcgcacccgccaggtgctggatctgctcagctgaagctgggatggagagctctagcacccgtgtggccaccatttcaatgctatcaggatcagccccctcctctatagggacacagcaagaacttaagaacatagattctccagcatgggcatgaggatacagttttggggtatggactcaggacatgtacatgggataggggtttgttaccaggcataaggatataatcacaaggacagggactatacaaggggctcagactcaagaacatggacctgggaccacatatgggcaataactcaggagccagtcaagggatcataaacactaatccagtgtagtccctgaggctcaagtatgaaccaagggagatacagacaccgggagttgccaaaggggacaaccacatggcctgggacacgtgggaggctcacggttgaggaagtccttcacactctggataagttcttgaagttcctggttggcctgttccacctgtcccctggaagcattagccttgtccagggctgcctgggcccgctgctgtgcctcgcttgcctgccgacgagtctcagccactctgctgaggatgctaccaccttctgccagtgcccgctgcagctctgcctgtgtgtgccgggcccggcccagtgctaggtctgctgtagcc

SEQ ID NO: 316525 - DNA, 4001 bp, Homo sapiens
atctctgtggagcaacaaagcatcaacaattatattggtgcatccttaaaattttataaccaacaaatgtgagaggaggtcaggcagcttcccagaggtcacaaggatccataaacacatccatctctaaaatgctatttttcttccaaatcccttgagcaataccttccatacaattttactgtatgattttagtctatcttaaacttcctctacttctgctgagtattctttatgaaccctatagaggttaacttaaaaagtacctctgctaggccgggcgcagtagcttccgcctgtaatcccagcactttgggaggccacagcgggcgatcacctgagatctggaattcgagaccagcctgaccaaaatggagaaaccccgtctctactaaaaatacaaaaaaaattagccggccgtggtggcgcatgcctgtaatcctagctactggggaggctgaggcaggagaatcgcttgaacatgggagggggaggttgccgtgacccgagatcgcgccattgccctccagcatgggcaacaagagcgaaattccttctcaaaaaaaaaaaaaaaaagaaaagaaaagaaaagaaaacacaaaaaaagtacctctgtttaccctgcctttcacaaactggttagctcaaggtgaatacataagctgttatctgtactcctcctaaccccaatttttctattctcctgctcaattcctcggcagatcatcaccacaatgatttcttaaagataggtaacactcgggccgagcacggtggctcccacctgtaatcccagcactttgggaggccgaggcgggtggatcataaggtcaagagtttgagaccagcctacccaacatggtgaaacccggtctctactaaaaatacaaaaaattagctgggtgtggtggcgtgagcctgtaatcccagctactcgggaggctgaggcaggagaatcgcttgaacccgggaggcggaggttgccgtgagccaagatcacgccactgcactccagcttgggcaacaagagtgaaactccatctcaaaacaaaacaaaacaaacaagatgggtaacaatcatactcgatgcaaagtctagccttagtttttctactcctacacaattacaccacccaggaatctctccagtagtacaaagtattgtcccctctactaaacaatctattaagatgcctaataactcagcctgggtcttctaaattctggacccttcatcttctatctagctccaggacctaggctatcctcctctcccactccaagacactgctgccgcaaatatttttgacacttgctaccaaaataatcggggttctcagacatttgttcagcttctgaccttgacatctgttggcagtttacaagttacaaagtatctacttctgattttcccctcaacccactgaggtcggtgagccaaatattgctatcctggttttaacagtgaggaatccaggtctgtgacaccttcgcccaaggtcacacggcgagtcctcatggtaaagggctctccccacccttagggtccccaccaaccttccccttctccacatccctcctcctggcccccgccgggcccgccccctagggctccaaatgaactgagacgacactcaggccccgcctgcgctttcccagagctgatcctggagttattctcctgaggggcaggtgtcaggctactcttccagggtcactacataccatccccgcccagcccctactctagccgagaaaaaggaggcccctttttctcggcccctggttctgcatagaggaagagcgagccgggagctcaccactgcgccccgcgttggagtgtggtcctcattaagggtccaagctcggacttctgagtctccgcatccggtcgctcacggcagcctccaccttccgccatctcctccgcggccccggcccagccggcccggacatccgccccgcgcgcggcgtgctatagaccgcgcccacgcacgcacgctcgcgtgcccgcccctgccccacctcgagccgcggccttcggctcctgcagccgctgtcttttctcccctccgctctcgcgccacctagctcaccggcgaacagtggagcggaaaggcacacgcgagaggggtgggcggggagcagcagctgctacttcctcccgccctgccgcccgctacgcggccttcgggcgccccttcctctgctcaggatggcgctacacttcgaagctctgttcagcccgccgatctcagggagttaggcagcaagcccacgacccatcgggcaccccagcctggccttcgaggttatcgtggtcctaaataaatgcaggccaggtgcgagaagcccggtagttaggtctgctcattctcacccctgcaattccgctttcagctggaggccttaggcgagtcagctgcccaaacgtgggatcggggctcctgctccagcggccctacagggatttcgggaagtaccatgtgcaccagcgccttgggaccaagactcaatggtgtgttgtagtcattaacagtcgccttaaacagtcgacgccagagccacctggcccaccgcagaattccgtcagctcttcatactgagctacttgccaagcagccacagaggggcgatagcaacaggggaaggagaggtactccacattagttacccaggcgtgtacttagttcctggaacaagatacaacgtcctgaacactatgttttccagtcgccccgctcacacacacaaccctcctcttggagggagaagtaaacccagaggaaagaggaagtcaggcagttggtctagatgcgtctccatacacttgtctaacagtccttgtcctcagagaaaaataagacctagttcctgccctcatagaatctagtagaaaagaagagatgttacagaaataacctcaatgcctagcagtatgtggtaagtgccattaaagtgtgtgaaccaggccgggcgcggtggttcaagcctgtcgtcccagcactttgggaggctgaggcggaaggataggttcagcccaggagttagagaccaacctcggcaacatagcgaaatcccgtctctacaaaaaaatacaaaaaatagccgggcagtggctcgcgtctgtggtcccaggtacttgggaggctgaggtaggaagatcccttgagcccaggaggtcgaggttgcagtgagtcgagatggcgccactgcacttgagactggacggcaaagtgagaccctgtctcaaaaaaaaaaaaataaatacaaataaagggtgtgaaccggccgggcgcggtggctcacacctgtaatcccagcactttgggaggccgaggcaggaggatcacctgaggtcgggcattcgagaccagcctgaccaacgtggagaccgaaatgtcttaaaaaaaaaaaaaaaaaaagaccgggcgtccggcgcggtggttcatgtttgtaatcctaggactttgggaggccgaggcgggcagatcacgaggttaggagttcgagaccagcgtggctaatatggtgaaaccccttctctactaaaaatacaaaaaaaaaaaaaaaaattagccgttagtggtggcccacacctagtctcagctactcgggaggctaaggcagaagaatcgcttgaacctgggaggcagaggttgcagtgagccgagattgcgccactgcactccagcctgggcaacagagcaagaccccctctaaaaaaaaaagggggtgtgaaccaaaggctgtagaacgccaggcacaacccctgctctcataggaagcctttgacttgagtaacatttgagtgtggtattgaaaaaaaatgctggcagaataaagatgaggatgcatgttacaggaggggagactcaagggaccagaagataatttctggaaaaggcaggacaggatcagagagtggggattaggccagttgaggcgggcactacaacgctacaacagcctaaggggatctaaagctagaaaggaggcca

SEQ ID NO: 316526 - DNA, 4001 bp, Homo sapiens
cccttcgatgaacccatgtcggtggaggaagggggaagagtgatggggtagtctcgaggttcagacatggcacacgtttgggagagaagctcacctctgaggagtggggaaagaggcagtttcccaaaaggaggatgcattctgttgccaggagatgaaacaggagaggttgtctattttagagagatagaaatgtcacaattacaatccaatgtgtgcagcgctataacagagataagtctgacgcctcgttatcacccacagtacctaacatcacacttggtagacacattcatgcgattttgatgaatgaatgactcagttctcccagctgattgtgtacacactctactccaaactggcccagaattttatcagctgctcttcattctgtacgttgtatttggggtttttatggccatctaccatctctcctctaattccgggtgcaaaaagagtgtatgagagagaggcaagcatgcagtaaacatcctgtgttaatctcaatcccagaaccagaccacagaatgctgactacaccgctcacgggaaagactatgttttaggtgacccgtgtggcctttttgttgaggcctttaggatacaaggcccccacctaaagacgcgaccctcccgtaggaggggggcagggcccgggggcgggagcacagcggggccccagcctcaggcggcgcgtcactgagcacaaaggagacaacagcgaggcggcagcgggcgctgatcttcgctcgccagccactcgcaattgcggttacagacctgcagctccccctcccccagccggcccgcccgcctttctgtctcctctctccctccgtactggacggccccggtccatttccgggctccggatatttggtatcgattggggccggggacgcggagcaggtggccgcggcggggcagctgggccgccagcttggtgcctcggggaccgtctcccgctgctttggtcaccagcccctgcccgcccgacccgctccgttctccggcctgcgagccctgccggccggactttgcgccgcgtccggcgctgctgctgcgctcggggccccgctcggcgccggcggtgaccgggaagcccgcgttaaaggggcaaccgggaccctggcccggtatggctgaagtcagcatcgaccagtccaagctgcctggagtcaaggaaggtaagggccccggagggagagcgcgcgggaccctcccctctcccagcccgaggttctctcaggtcaggggcgttgccatttcggctcccgcggccctcgcccggtgcccgccctgcgttggccttgcccggacgtgaaaggaattgaattcaggttctagtgtgggacgttgggcaagtctccgacgttccaagcccgttttttctcaagggggtggttggggggggggggggctagcagcagccccagcaagtaggtggctgtgcccgtgttctcgtgcatcgcaaagcctcagtggacgctgagagccgggtgaatctgacttactccgcttctaaaaaatcgaggcccagcctggctggcttgaaggctgggaagtggagaggggttgacattcagttccgtgtggagcctttgttttgaaacatgactctttccctccttctctccctacttttcctaggccggcgtctggctggctgactttcccaccttcctcaaggtttaaaagtttagtcttggctgtgttctgcgcgggcgggaagccactataagcattttcttacaaacaaaacacacacacacacacacacacacacacacacaatagtgagcgaggggaacaggggactgatggccttgtcattgctttttgtaccaatgtccaggaaagtagagattagtactgacctggctttagctgacagcaagtagccttttgacttcccttctcttgtttttccactagctgcctcaggacctagcttttttttgctgagatcttaggtgctggatcgccttatgccttgagttatctttgtttattctttggtcctaggaagcatagacgttccagagtgctgacgcagacccctaagttccaagggctttgcaaaatcggcttctgttgtgaatgtcatttgtatcgattgaatactgtagcctgaggcgtcttggagatgtggaattgaaaatagtttttgctttcttggaaccgcttgttttattgccaacttaatttgactccgttggtcttgtgtgtgctcaggccagcccaaaaatctcaggaaaatgagggactgcttgattgctttctcagagtttcaagcactaggagactagtgactagtggtcactgattttatgtagaatttctgatgggcctagttctgtcttactgttccggaagggtgttaaagcttaggcgtgagattttagcgttaatacttttctacctttccgtccctggtatggctttgatgaagacttagggctttcacctgtagaaaacagttttcactctgctgtcaagactaaggaggctgagcgataggaaaggcggatccatacttttgagagttcttatcttagagattgtctggttatcctttacttttggatatgagggttttttgtgtgggtatgtgttgggtttgtctctagagaaagagtgatccttgtgcagtgtgtagtgcatggtgagtagaatgagaattggagttcaaacaaaacctggtatgtatagtattaatcatatggtgctatgattttatccaatcccctattcatgtgagtgaaaaaacataaaactcttcatatacatttatattacccttaggtcttctgatttcgtaccaagacatgaatgatgtattctaacatattatttctcaaggagttccacaaacaccttccatataaaaatgcaagatttttccatttccacactctagagtctaatacatttaaattagctttcattttgcgtaatacggtgtttggcaatctcttttatgtaatctggtaaattggtaagaaaattcagtgtggctctttcattaagttacaattaaatattaattttgaaggtggtcaggaatcgatgagatcactgtctttgtaaacatctgacttttctagttccaagatcatcaaaggaagtgatgtattatactaggaatgtcctactaatggtggtgaagtttttgatctgagaagtattcaagtctaataaagtgtatccttccctaatataactcttaattatggcccagttactccctaacagtgtctttatcctaattaaagagaatgaagcttgtgcccctgatagggtaaaacatgtgcaaacattgagactgtggtaatattgaaactccaacttcatttgagaagggttagtagtagtaattagtttaatattctgatgcagatttttgaaccccattcaaaaaaatccctgtatctgtctcctctactttttaatttaaacttttgatagatatatatgcagttacaatttatattcaatttggtatcatggggtagattccaatagagattaagaagaatagtgcagtgagtgtgtgcccgtttccattgctgtttaggaggggatggggcaccctgtgaccttttgtcgtgaacatttcaatagaggtcgtgggtagcagctgacattagggtaaggggatatttaaaaatcttctttcctaggttgaaatctaatgcttgcttacttagtttttaaggaagtcaaaaatattcatcatttggacagaccttttgaaaaaacacacacacatacacctatggtagtatttataccttggtaaatctcttaaactgggagacaaagggaaatgattgagttcatatgtaggtgaaaagaatcaagtcaactaagtgtcaacacatcattttttctggttaaaagtgtgtttggaacatctgtatactttttgtaatggaaaacgctgttgccaatattcaggaataatactctatttcttctgaaacatttgaggttctaga

SEQ ID NO: 316527 - DNA, 4001 bp, Homo sapiens
aataacagtgaatgtttttacagagcagaaatgggctagaatacaatgtatctcaaactttttgtggctgggtaatccaaacacctgagttttccatggaagtgtagcactccttcccgtgtttattagtgagaaaggagtggccctccagggctccagctactttctttactacttttcaaggtgacgtacactcaatgcccactaataaaacattagtggcttactctattatgcatctgtagattctgctaaatgaaaatatacatgaactggaggacttaatcgccacactattgggatactgcctatagaataattgaaactcttgggggagatttcaatcaccataattaactcaagaaaccaacttattctgaagaattcagcctctagcttgcaacttaggttagggtataccctggcttcctcacttcagaaaattctagaatgacaatatttatttacattacgctttagactacattactctgcatcaaaacattttcattttattcacctgtattaaaaatgctcattaacaaacttagacccatttgggctctagaaactttcaataaagttctcagatttttcccttgaaagaaaggattacagattcttttgaaggagcatctttttcacacagcgtgaaaggactacaggcgttcccatgggaattggctgcatacatttcagcccttcccacaagatgtctattgttccctggatgtctctgggcttccttggctgtggcgtgctgctacacttcacttctactgaaagcctctgagtctggcttattctaagcaatgctaaaggcttcagccctgtctttttgctagagtacatacgatctaagtttgtagcaggcttatttcataagtacatgaaaaaaatagatttggtgacctatttagtcaagagcccaaaaaactacttaattttgattacctatttcaacttattaaaacacaaataggaaacatttccttcaaaaaggatgagaaacacttatcttcaagtctaataaactttctaaaatcaaggcttttgtgacttgtcataattttatagtgtattcattttcacctgtaaatgttgactttgttggtcatttttgctctggaataatacaaatcttgctgaaaaatcctaattcaaattcgtgggtttgttcttccagaaaatgtaccaaaactctcaaactacatggaaaactcaatgttaaatgtatcttcatttacatttaagtttcatgtaccaaatatctatatgaccaactcaaatatttctctaaatatttttttctgctttttaaatcaaaaatatataaatgtcatttaatccaatggttgattactacaacaatttaagtgtgtatctgaaagagtaaaaaagtggttagatttaattatgatttgtaagatatctgaaacaccaaaggaaaaaacggcagcagcaacaaacagtaatggtgaccctgttcaacccactgactgtaatgatgctataatatttaattttctttgaaaatccgtaggcagagccagtttctttgctggttgcaaaatgttgattgaagtaaacaaaagtataaaatagaaatgagactagattattacggagtaaaacaaaaatgcacatgatatgaatctagaagcacagctttctgctcctgaggcctagagacatgttttaataacccacagagaagtggcatttttactctaataaccgaaatgcctgcatacatggctagacacacagctcccaaatgtgctttatctgcataatcagccagcccctggaagtttctcagctccattctcctatcccccactctttgcttctttgcagcctctgacatttactttaattagcttttgtttttgctgaacaaaaggtcatgaaagaagatagccatacctctttgcacaggaatctctggtcatagaaaatagaaggcaaaatccttgatctttagagcactgcagctgggacccatgaccatgctcagaggcagccttgcagctgctgcccagtcctgtgggctgcagccgcgtctccctgagctgcctgtcaagccagtggtacatttcattccctccccattgactcaccgtgcggaatcaggcaaatgagtaacttttcttctctctcccaaacttctgcttagacctaacaattgacgcaaagcttcacttatttctacactagatttacagatttctctgagcagatctgtagtttgaaagaattagatttgcctaacaaccagtaatttaggttctgttaatgaataactcactttaagaaatcaaggaagttttaggttaatatcagatgtggggccttttagcaggcatcaggaaaaaggcttggggagggaatgcaggaagggaagcactggaatgaaatggtatttaagccaaatatgatagaagaaaaataccacaagagaagcaaaatagctagggtaaaggagcaaaagtctaattatactattggtattgcttacgaaacacacaacaacttaatgaaacttccctggtagcactagagatttttctgaaccctcatggttccttcttgcatccactcaaatttctaactccttccttttaccatccaaatatagaactcatcttttcaaacctaattcattggggatccctcacaagcactcccacatcgcctcatctctctctctcttttaaggagaatgcactttaaaacctctaatgcataaattaattggtggtgcccagtggattattatatctagaggctcttctctccctttaagtgtatggcatgggctttcttcccttattgatctgaggttttgccttcacataaagtgataaaacatttctgagtctctcccgaccggaactttcagtcaaaccatgtgagggtaacagggagggtgggggcgggggctgcagtggggaaagtcaggtgtaagatgtacaagtggaaataaaaatatttccattcagtggcaatcatgctgcatgtaaaaaaattactagtccaattaaaaggactactcatggggtgaagattactttctcttgtgtttgacactcaacattcacttactctacttttagtcaaaactgcacccaaatttcccttgggaaaccatgtcctttgggtacagctgatgcccataaacaggatgggccttaattggtcttacccaaattagagtaattgcattcctgtgatcatagtgactaatgcagggcaggtgtgcgaccccttctaggccaatgagaggacaatgatgaaagctcagctttgggagtaaaaagtctaagctgctggacttgatgataagaaggtgtaaggtctggctgctattgccctcttgccaccaagaaaactgttgacttcatttgggccccttaaaccacctgcccctaatgctagcaagacctacccttcagtgtacactaataaattccttaatagcttaagtgattttagattgggttttctgccatttaccattaaaaaatttccacctgacagaatcagcctaacctagttttgtgggaagtctctcctgggtgcagctcattgaaaattaagtggactaagagactcaacaggaactatctatgacaaatgggctccttcagtgacaaccacaggcttcctctgacaactagcagatgcaagaaaggcctggaaaggaatgtagtcattcagtgtacctgaaaacaggaccttctaaattattttttcctaaccagctacatagtcatttcctcaatacttgagtcccccaaaataattaaatttaatctcttagacttgcctggcagtacctagccacataccatttgacctcaatacccttgtcatggaatccatccattcatacacaattttcaaaaatttcctaaaatcacttacgctattaaggaatttatcagtggacactgaagggtggagcttgctagctttaggggcagctggttgaagag

SEQ ID NO: 316528 - DNA, 4001 bp, Homo sapiens
acttaatcgccacactattgggatactgcctatagaataattgaaactcttgggggagatttcaatcaccataattaactcaagaaaccaacttattctgaagaattcagcctctagcttgcaacttaggttagggtataccctggcttcctcacttcagaaaattctagaatgacaatatttatttacattacgctttagactacattactctgcatcaaaacattttcattttattcacctgtattaaaaatgctcattaacaaacttagacccatttgggctctagaaactttcaataaagttctcagatttttcccttgaaagaaaggattacagattcttttgaaggagcatctttttcacacagcgtgaaaggactacaggcgttcccatgggaattggctgcatacatttcagcccttcccacaagatgtctattgttccctggatgtctctgggcttccttggctgtggcgtgctgctacacttcacttctactgaaagcctctgagtctggcttattctaagcaatgctaaaggcttcagccctgtctttttgctagagtacatacgatctaagtttgtagcaggcttatttcataagtacatgaaaaaaatagatttggtgacctatttagtcaagagcccaaaaaactacttaattttgattacctatttcaacttattaaaacacaaataggaaacatttccttcaaaaaggatgagaaacacttatcttcaagtctaataaactttctaaaatcaaggcttttgtgacttgtcataattttatagtgtattcattttcacctgtaaatgttgactttgttggtcatttttgctctggaataatacaaatcttgctgaaaaatcctaattcaaattcgtgggtttgttcttccagaaaatgtaccaaaactctcaaactacatggaaaactcaatgttaaatgtatcttcatttacatttaagtttcatgtaccaaatatctatatgaccaactcaaatatttctctaaatatttttttctgctttttaaatcaaaaatatataaatgtcatttaatccaatggttgattactacaacaatttaagtgtgtatctgaaagagtaaaaaagtggttagatttaattatgatttgtaagatatctgaaacaccaaaggaaaaaacggcagcagcaacaaacagtaatggtgaccctgttcaacccactgactgtaatgatgctataatatttaattttctttgaaaatccgtaggcagagccagtttctttgctggttgcaaaatgttgattgaagtaaacaaaagtataaaatagaaatgagactagattattacggagtaaaacaaaaatgcacatgatatgaatctagaagcacagctttctgctcctgaggcctagagacatgttttaataacccacagagaagtggcatttttactctaataaccgaaatgcctgcatacatggctagacacacagctcccaaatgtgctttatctgcataatcagccagcccctggaagtttctcagctccattctcctatcccccactctttgcttctttgcagcctctgacatttactttaattagcttttgtttttgctgaacaaaaggtcatgaaagaagatagccatacctctttgcacaggaatctctggtcatagaaaatagaaggcaaaatccttgatctttagagcactgcagctgggacccatgaccatgctcagaggcagccttgcagctgctgcccagtcctgtgggctgcagccgcgtctccctgagctgcctgtcaagccagtggtacatttcattccctccccattgactcaccgtgcggaatcaggcaaatgagtaacttttcttctctctcccaaacttctgcttagacctaacaattgacgcaaagcttcacttatttctacactagatttacagatttctctgagcagatctgtagtttgaaagaattagatttgcctaacaaccagtaatttaggttctgttaatgaataactcactttaagaaatcaaggaagttttaggttaatatcagatgtggggccttttagcaggcatcaggaaaaaggcttggggagggaatgcaggaagggaagcactggaatgaaatggtatttaagccaaatatgatagaagaaaaataccacaagagaagcaaaatagctagggtaaaggagcaaaagtctaattatactattggtattgcttacgaaacacacaacaacttaatgaaacttccctggtagcactagagatttttctgaaccctcatggttccttcttgcatccactcaaatttctaactccttccttttaccatccaaatatagaactcatcttttcaaacctaattcattggggatccctcacaagcactcccacatcgcctcatctctctctctcttttaaggagaatgcactttaaaacctctaatgcataaattaattggtggtgcccagtggattattatatctagaggctcttctctccctttaagtgtatggcatgggctttcttcccttattgatctgaggttttgccttcacataaagtgataaaacatttctgagtctctcccgaccggaactttcagtcaaaccatgtgagggtaacagggagggtgggggcgggggctgcagtggggaaagtcaggtgtaagatgtacaagtggaaataaaaatatttccattcagtggcaatcatgctgcatgtaaaaaaattactagtccaattaaaaggactactcatggggtgaagattactttctcttgtgtttgacactcaacattcacttactctacttttagtcaaaactgcacccaaatttcccttgggaaaccatgtcctttgggtacagctgatgcccataaacaggatgggccttaattggtcttacccaaattagagtaattgcattcctgtgatcatagtgactaatgcagggcaggtgtgcgaccccttctaggccaatgagaggacaatgatgaaagctcagctttgggagtaaaaagtctaagctgctggacttgatgataagaaggtgtaaggtctggctgctattgccctcttgccaccaagaaaactgttgacttcatttgggccccttaaaccacctgcccctaatgctagcaagacctacccttcagtgtacactaataaattccttaatagcttaagtgattttagattgggttttctgccatttaccattaaaaaatttccacctgacagaatcagcctaacctagttttgtgggaagtctctcctgggtgcagctcattgaaaattaagtggactaagagactcaacaggaactatctatgacaaatgggctccttcagtgacaaccacaggcttcctctgacaactagcagatgcaagaaaggcctggaaaggaatgtagtcattcagtgtacctgaaaacaggaccttctaaattattttttcctaaccagctacatagtcatttcctcaatacttgagtcccccaaaataattaaatttaatctcttagacttgcctggcagtacctagccacataccatttgacctcaatacccttgtcatggaatccatccattcatacacaattttcaaaaatttcctaaaatcacttacgctattaaggaatttatcagtggacactgaagggtggagcttgctagctttaggggcagctggttgaagaggcccaaatgaagtcatcaggtttcttggtggcagaatggcaacagcaaccagatattacacctgtttgtcaaaaatgtatttgagtaatcagttttacagagtattgctttgtctttatttttcccctctgttcttgtctaactctcactccttcccctcctttgggaaacttgaaataaaacattgtctgtaaccacaaaatcagacaaagacgttttctttacagaaaagaggtaaattctaaggcaacttacataggtgagttacatataaacact

SEQ ID NO: 316529 - DNA, 4001 bp, Homo sapiens
attacaagctaccattcttcttctgttccatgagagggttacagatagagaaatggaagaagtaagatgtggtaaaagttagtagatgaagaagacacacgaactcctggctctccagaactcctggtagagtgagatgctatttggacagcttaatgaatggacgatgatcctaatgacaagggacctgccagccttaatggctaaccagtggagttatataatagaactgagtcaccagtcctaaaattctgaatttgatgtctgtgaaacaaagcaattaatgatgcaaacaaaataaataactggccactagtgacctctagtggaagtaggctttagggaacttatgtgatctttgattactgttttgttttgttttcctagtaagaagatgaaaaccagtgtaattttcagccaactgatttgcagaggagtgtgaaagaaggggtttctgaaaacaggacaaaaatcttacccagaaaatgaaaatgtaccaggaacatgttgtgctttgcgtcaacctaagttgattaatgttctggaaaagatgtggatgagtaattgccatcaaagacattacctgagaaaagaagagttttttgagcagtgacttcattggtcactggggggagttcagcatgttaatggcagccagcaagagaaaataggcttgaagaggaggctgcacgggttgccagtataccttttaaatatatcttctttgtaacacagaagagcgctgttgtttctgaaatatgcacacatttgccaattcagtattgtatggcttgagtcccaccactttcatctttccaatgagtgtctgtgccaagtgttggctaacactgctgagctgggaggatgtgggtggatgcctggtggccctaggcctttgaagtgggaccagtctcatggagggtccaagtacaatcaagaaggtcaacatgaaaccacactgggcactccacatccatcccctttgggaagtgctttcagaatatataatcttgacattgaagagaagcgaaggaatgcaagtattgatgggaggttttacatctgtctgatcacactggggactaataatgggtgggtggaattaaatggcaggtccagggagtagggatgcaggtgggtagaaaaagaagcaagggaaagataaaaatagagacaatacagaagtaaacagaatcagccttattaagtcctgggcaactgtcacttctggcagcaaagcgatcgttgtccttgtctcatattacctgcgtggcaggaggtgtcatcctgccttctttcattattcagcctcccacacacaccctgctcttgtttactgatgctgttatgctgctctgcaggtctgcttttccctggattggctccctctcctctcagtgtcatttcaaggacataaaaatagcccctaaataatatttttgtgagaattccatgctgctctgcaattttcagaattctggtctttgtgagtgggcaaaagatgatctaactgccccctactaagccatgacttccctactgatatttcttagatgccaacaaaaccacagagcagattaagagagaccaatattagtggtatttcctctttcccctgcaaagatctttctgccaggatataaacaaatctctagctctaggacaggccatttcagagatgtagtctataaaccagtttacttactgaagatgagctaattatcttaatttgctccaaagcttctgtaaggctgtcttcaatctcagagtcatctaaggagaagaggtccccagctcgtgaaagatctttttgtcccaaaaccagtctgaacagttgatgcatggtgaggatgagtttgatcagttgactttctacagacccagagtcatgtgttccagttatcagaggtcagtaagacaaaaacatgtagaaggaggtatacttcttattccatgaaaggtcatttttctccagactttgaggtcttcattgacactctctgcaagggaaacaaatgacacaatgtagccactggcagaatggcataagctcagaatgtgaactcagtgtccagcggagagagagagaaaaaagaaacttggaaacatgtgcctagactaatagatcctggcttaatgatctttaaatgaactctttccttgtttttgtctcaaaaagtcttgtcaaaaattactaggtttctccagaatttaatttgaactttaaaagtcaacatgagccctacgcttttctcctttctacatccttctcttctctccatgtcacaaggaaaaacaacaatcatgcctaacacttgccagattttcctcaaaaagattctcatgggaatcaaacagaaagggagaacaaaaggaaaagagggagcataggaaacatctcctagacccacttccttgaaccctttcttccagaacctggacacagaaaccagtgcttacctcttggttgggctgccttgctacgctagcagtagaagttccctgctctgtcagtcaaaaaggtgacctcagtacttaccctactcctacgtactctataatcaagtagcaataaaataaagatgctgcttaggagaatggcgttagataaatctctactgaacatgaagatgaactttaacactgaaatgaacatgatagccttgccatgtgggctaaagaggagggctttgggatcaggcaactctccctctattccagttgaagtaataaagtcccactatatttctcacccaattaacagtctacagagaggagggcaatggcacaaattagacatctgattattctcatcagctcccttctgggcctaataaaatcacagaccatttgcactggcagagaccttagtaatcatttaatgtccagtgaggtttaatgactgccccaaggccccataatagctgtggcaaggatagtctactgatttcagtccagtgcacttccctcacagtttacagtagagtggaatcacctcatacatgtgggtagcttacaaatgtagccacatgcttagtgagagccaagagtgagttatttaatacaagtaataggcatttctacctagcattttactctgaatggtttgccagaaagagtgtgaaaagggagaggagaatctattgtttccttgggtagtctcagacctctcctctgagctattgttgtgagagcacctctttgtgttgagtgcaagtttaaagacacatactcttcaaacaccatggcctcaaaatacaagccaaagctttcattacacactcaactaaataagctatctgtagtattgtaagtggtacaattcatgagtcatagggattttaaggaaaatactctctatatgcaatttttgtactatctaccagcttttgaaaaatgaagcctaacacttacatgcctttatctatgtaccaggcataaacactttgtaaatattaattcatctaatcctcataactatatgaaaatatgtcatccccactttgtaggtgagcaacctgaggtagttaaataactgctaaagccatgcagctacaaaactggagagctggaatttgaacccagagactccagtagtgctagactccaagttcataaccattatgaaatattgactccatgtaaaatgtgaggctactgttaggagtaaaggtcctcagagcattattaatattaatgatgaaggtgtgagcagggttatcaagcaagaaaatgaattcctctccccttctacactgctcctggatccttgcccattctatgccctgagatttagagcaaccagagagcaagacagtcacaggagaagacgcttggaggaagagcaaaggagagtggtaagctttcagagggaggtggagcacagtgaggtactgcaaagtagttcgcaccctgggaaatgtgggagggtgaatcacaatatctctaaggaaaatcagcacagtgttttcctacatttttctcttaacacattttcctcc

SEQ ID NO: 316530 - DNA, 4001 bp, Homo sapiens
ctccaagaaggagcagtaatacgtgctggtacagaggagcacccccaggcttttcctgggctctttctgcacactccacatttacatgacacctggtgtggagtcccacattcatgctgccaacttcagctcttactcttgagggcccatcacatgcaaaacattgctttgggccctaaacagaaacatcaagttgtttaacacacagccatacaggaaagctttcacaaacataggggtggagtggggagaggtgagacttacacattatttttcaaagggctcttttgcacgttttcaactgtgatcttcaaaacaccttctacaatatgggagtgaccaagagaaaaatctcctggatactacaaaaagaagtttggggaagtacaagggagagagaagtcacttccaggggaagatgataatgaatagctttatggaggaaatggtatttgagaagcacctttaggatagctaagatttttacaggttttattcagtgcacttgtgctgagttcatactaagtcatctgctcatctaggaaccaagggtcatgtcccagctcagctattcagcgattataggacctttagttcatgttgttttcctttcttgagacttggttttcttatttgcaaaatggggctaatacacacctcgtctatttcatcagggtgttttgagggtcacaggtgataaagtgtaaacgagccctttataaaataatggcacaactgacatttggtgggtgtttgccatgtgtcaggtacttatctcagtgcttctcacatacttagccacttaattcttatgacaattccatgcaatcaaaaactgatgtttagagaggaaagtaaccaccagcagaggcacttgaagagtaagttgccaagtcaggattgaaggcagctggtctcccaggatagttgtattcatgactgtgtgagataattattattgagctgtctcccttcccatcagctctcatccaatgagtacctccacatgctgcacatcccttcctaaataaggactggcaaggcacattatttatttttcagcagctctcattaatattttgctcaggtgtctggcttctcctgctgttctttttgcaatagcagggaaggtcaaagccagatcaaattctacctcatgttctgagaaactccctacccttatgaatgtcatagtcctgtggcctgtgtgcacgtgtacatatacatgtatcatgtacacacaagcataccatatacacacatgcacatatgtgcacatactcaaaatactttctacacatcaacctttttgctagacactagatgctttcttcttttagttctcccatcaactctgcaggtagatattaccacctaagaggaaacaggaccagtgaggttaagtatcatgcccaaggttacacacagagccaatattcacattcaggtaggccagactccaaaatctcatattttttgtatgatttttaaaagctggcttataaaattcttacagcctttaatttgcttccttcataatttccttccctaatctttaaggggttctaatctgaggcccaccttctcattatttagtttttttttttttttttggcaggtatttgctggcgaatcagctttctgtagggagaaacagaaaccacaaaaacagaaatgatggcgcaaaacgtggcacatttcagggagtcacagctgtcccgcgcaaactcgactttacctgcgtgctactcctcaaaggcgcccttgcagttactcagctgcatggtttgagactgggcgggagattcaggcaggctccgagggcacagcgagtggaatccgctcagctcagtgaacctgaagttgttcattgcggagccggtgccgggtggaagaattcaaggaatgcagcctgatgccaccggcagccccagagaccggtcaggtgacaggctgcacctcacccagcggagttacctcccagtgcaacgctctgtttcctgaggtgaaacacaaagcctgctccagtaaaggagagttgtttttaacagagaaaacagaactccctgtgttcgtgaaaatctatactttcccagggaagaatggggggcgggggcgagccacgcaggaaacaattttcaacagaactcaagcaggtgaacggaatggctgtagggagccacctctcagagctccaggggaggagaagagaactgcagcttcattaacacttccctctccctgagatctcacaaacgttttggaaacactgagtgttcgtccagtaagagtcacctcctaaagaaagtatccctttactctgcctctagagtaaaattgttgaaagttgaagtatgcgggaagttgctaataaacagaacaaacttcacaacatacgtactctctttttttcgttatttgctgggaagctattcatagaaatccacgtggaccagaaatattggatttgtacttttaaatattgcagcaacactcaggcaaaaggtttatcctgcttaatctactgacactccgatggagaaaagggcactggaaccttcctttattctttaaacagttaacagtgcactttaaaaagcaaggtttttaagactgcattcttctcgacccctaagtcgtctgttcctgtggtagatctatagctatatcaaatcatctcacttctggcaatgtgtacaggcagctatcctgcagataatctcatctttgtgctcactagggtgtgtctactcaaagggtgtggtcagggtggccacagttaaaccaggtcatatgttccaggagaacgacctcgtaaatctgcctagacagttggtgatcaatcatatttttatgccatccacatttggagaactatccccttgaagaattcctttataaaaatcaagaatccagtcattcatgagtagctgtattttttcattagtagtttttctaatttacaatatactaatgaagtttcgtcttttaatggaatagatgatattgctttagccttcccttttaatcctctattcattattactgatttttaatccctagatttttatccagttttatttttttaaagggtgtagagtcctgaattggacactctatggaactccagtaagaagagcagagtgataagagtatgggaatctagactcaactggattccaagctcagctatgccattacctgcagtgtaaatgtgggcaggttaattagactccctgagcctggaattcctcctttgctcctgaggattgtgatatgggttgttgggaggtttaaggagatgatataaaacatttaacacagagcctggcatatggcaaccacagaaaaagtgccagcaatcatatccttaagagtactattattcctatagatggtccaccagttaacacatccccatgccataccttttaaaaattaatacatgactgtactgttcactaaattgggttcacagagctaaagatgtttaggttgtttccatttgagccatatttatatctttgttgtcctttctctatcttagtcatcctgtccttacctctgggttgttcacttttcatctgtaaacttcattctcttgaatgggtccctgttgattttttggcaaccttatcttgtttcctggagagatagttttacggtgatcctacccacaccaaggttgaacaataacagtgaatgtttttacagagcagaaatgggctagaatacaatgtatctcaaactttttgtggctgggtaatccaaacacctgagttttccatggaagtgtagcactccttcccgtgtttattagtgagaaaggagtggccctccagggctccagctactttctttactacttttcaaggtgacgtacactcaatgcccactaataaaacattagtggcttactctattatgcatctgtagattctgctaaatgaaaatatacatgaactggaggacttaatcgccacactattgggatactgcct

SEQ ID NO: 316531 - DNA, 4001 bp, Homo sapiens
ccacaccacagattcattaatttcacaaccctaaaaaataaagccatatttgaaacaacttctactagtttgttattttataaaggaggaaagtatctttctgaacatgtagagaagttttagtttgttgctcatccacattccaaatgataattgaagacctctgtaatatcagagatgctttgaaatgctggtgctgctgaatattttttttaagaggatagcaagaaagtagggctccttcctcttttgccctaattggttctggttaagctggtactatttagcagatgaatctggggcatgtacccttccagaattagctgaatttcatagttcctaaattctaaacggaaagttagatttctttctaaagagtagcactgtaattctagcaaagagacagaagtagaggaaatacagaaagtaaaatgtcagattaattaacagcccaaacctaagaaggtttgcaataaaacatgtggtacctaagaaagtaaaaagaaataaatcaatatattctatggatggtaatttcctaaccaaatctagttattttttttaagtttctccaaatccgcccaccctaattcccatagtctgaggtggactctattttggtacagcccttgccacatacattttttattttaatgtagcactaactaagccttggcacactctccgttgtatccagagagtaatgtccaagggcgcctcgtgccaaattccccagaactctactgttccttctaaagtaactatatcatctcctcagttcacgaccccttattatggacatcttcagttactcttggaagagtggagactcagcatccagagattcaaggtaaccttttggccgagggacccactgtcaacagactgaacacgtacaaactctgtgctttgctggaattaaaaaatgaatgaagaaccttggaatccatccctgtcctctaagtcacagtcaccgggagaaagattctgtggagaagttctagtaacacccgatagacattatgctagaccagtgttcccccatgaaagtcccagatcatttcgtgaactcactctccaggtagcttcccctacctctgtcagcgcacttcatcttcctcatcaataaaaccctgaaacattccatctttccaaataaacaaaatagttggttgaaaggaagtttactcacatggtcctaagatagatgcccttggtgagcttcagagaactgagtcctaagagctagggtgcctaggaggagcagcctctgagctccggtgaccacagctcaatgaagcccccagctaggtcatgcctcacccacccgtccaccctgctgctctcccttcccggctctctcgggatggctttctgctcaaggacgctcccgcagatcccagagcatcctctgcgccacgcgtgccggcgggacgtcgccgagccccagaccgatactctcgatgcccttcgcccccgcccccagcaggctgcccgtccggtgactcacctgctggccaggttggggcgccggctgatagtaggctgtggggcaggttgtcgctgccatggggttgggcagatactgggacgctccataaggctgggggtgatacatcacctccgcacaactcatggcagccggggcagtggcggcccccgagctgccgccgccgctctacgcgctggcgcgaggggcgcgggcgccgccgccgccgcagctgccgcctctgtcgctgctccagctgctactgcggcgaaggcgggtcctcggcggcctcgggctccgcgcggggcgcggggtcgggagggactggcaatcagcgggggcccatgcgcgggcaccttcatcttcagcccctccggatgttccctgccgcgcttatatagcggctcagggacgcagccgcccgctgcgccgctggggcattaccgcgtccggctcccgcgagggctgcggcgcccacggcagcgccagtcacagccacagcccaggcccgggtcgggcagccgtggggagcccagctccggtttgcatatacacaatgcacgcccggggctcgtcctatcacgggtgctcccggctgtgcgaggacagggaggcgggggcagagggagggggaacgccggggagaagggggagcactttgcctccccaggctctgacgcggaactttgcaaagtttctccaactcgctttgcagcgggcgggtcaccctgcagggggaccccggggaaggctggctgcggattggagcgaagtttgcagccctctccgcctcccagcatgggatggtggtgggaggggaatggtatgcagaggctccgcgccctcaaggctcggcaggttcccaccctgtctctgtcacctggccgccagggcgagggcttccctactccaaggagattttacagggaacaccaactcagaggctgggaccaaacaaaagccgagtgtacaaaggggtaaaacagagcaggcgcagaatacacggggattagctcctacattaaaataatcataagtgaaagttaacatctctgcaagtgcccacatgccaagaatgcaacacagttttccacaagcaatctctgctttaagtttacatcttcatggtatgacactgctgtgagacgtccaccatttctggcttttacagcctggttttcacagagcaataaagggtagttgattaagcccattcgctaataaaggtttatctctttgcaattggatctgaccctctccaaaatggggaaaaaaacgtctgtgagaatatacttgtattctgacataatcagtagaaataattatactcacattattttatttattttgagatagggtttccttctgccgcccaagctagagtacagtgacatgagcacagctcactgcagctaccacccccacgctcaagagatcctcccatctcagcctctggagtagctgggactacaggcgtgcattaccacgcccaggtaatttttttaatttttttttttatagagaaggggtcttgctatgttacctaggctggtctccaactcctggcctcaagtgatccttctgcctcggtctcccaaagtgctgggataacaggcatgaggcaccgcactgggcctcattttataaatgagcaaactctagctctgagattcagcaaacatatctctccttatacgtaggcatcctcttttatgactcacagcaatctctcatttttacagtctatcttttctcagagaaaaagtcagtttgaaagtcaaatgcactaatgtttttatagtttgaattatgtcttcccaaaaatgtatatattgaagccctaacccacaatatggctgtatttgaagacaggacatataaggaggtgataaggttaaatgagatttaaaaggttgggccctaatctaataggactaggttccttataagaagagaaaacacgccagagatatctatgtctcccccaaaccccactccctgtctctctgctctgtcaaagaggaaagaccatctgaagtcatagtgagttacctacaagccaagaagaaaggtctcaccttgaaaccaacactgaccacaccttatcttgtgcttctatcctccagaactatgaaaaaattaactttttttttttttttttttttttgagacggagtatcgctctgttgcccaggctggagtgcaatgtcacgatctcggctcactgcaacctcctcccggttcaagtgattcttccgccccagcctcccgagtagctgggattacaggcacccgccatcatgcccggctaatttttgtacttttgtagagacagggtttcaccatgttggccaggatgatcttgaactcctgacttcaggtgatccgcccacctcggcctcccaaagtactgggattacaggcgtgagccacggtatgcccagcttaatttgtttttttaggccacctagtttgtggtatttatgacagccctagcacactaatgcagata

SEQ ID NO: 316532 - DNA, 4001 bp, Homo sapiens
tgcctcagaagtttttctttcttgttgggggaagcggggatggttaaaaaaaaaaaaaacaagaaaaacaaaaccctgactacaatgtgtgaatgtcacgggaaacaagcccagcaatggctgcttacggctttctaaagtcggctgccttttttaagtgagttcagaagcaagatgttacttaacacatcagatgcaaagaaagaaattcacgaaaattctcatagcaggaactagtaggagtaaagaaaaacaaatactctttttaaaaaacgttaaatatgagatcctcatccatagagttttaaaaaacaacgtgaatgagggttgttgttgttttttttccttgaaggggaaaaatactcttgaaagggtgagttttcaactgattaggaaacaggcctgaagtttttagattaaaaaaatacaagtgaatcaccctcccaagtttttgtaactgttttctttttcaagagaaatgtcccgtgtattattggagaaaaaatggaaactgctcctgctgaatgagaaagagaagagtcccggatgtgtgtgtggttacaacagaaaacactcttcctgccaggccgaactcccccggagatgccctcggcggcagacccagggccattgccactttttcaaatcgcacgtagaggatgtccgagggcttaagaaatagatttttctctgactgctaccagagacagttggaaatacaagacagtgggggaagcacctcgcgggcagtaggaggtaataaataacagttcggcgcggctctctctttttcagggcaggctgggggtcggggtgttgtgtaatcgctcccacagggagcggagcgcgaggaacaccccccagtgtcagcgctccccgggctgcacaggaagcgccagcgagacaaagagcccgcctgtgctcgctgacacggtgcccttccggccccacgcgggagagggacattctccgctgtttgggacgctcactcgcgagcacaaaaactcgctgtaactttggctccccctccgtgagctgcagggcgccgtggcccacagcagggtacagtagacggtgcaatccttaccagcccctcccccaaagaggctcaacttttaccggcgtcctacaagtccttcccctaaagacaatattaacggaaatcaaaaatacatacattttaaagagttaaaaatgtgaggcgcgagtacgttgcaagcaacgagcaaactttgaagggtttctacttcactgcctccccgtccagccccctccaccgccccccgcagcctgagatccgaacacactcggtgccgaaccgaacctaagaaacgccggcctttcaagtgccctacaccccggaggaggacagcgggcgcttagaaggcaggcacccagcacactgaggaggagtggccgggacgagcaacgggcagtaattctacaacgggacatctaccttcgtagcacagaatgccgatattgttgttcatcttgtccaagtactgatagttcaacaggtccatcttcataaatagcatttattgggctagcaaagaaaaccagctctttgcttttgccccaaaagagttaagtttcaaaaatcaattgttgctgagtagctcctggctcttcaacttcacaaaggcagaggcccagcctcagactatcaaaacaaagtatgcaaaagttaaaaaaaaaaaaatcaggcacaaaaaaatcgagctcacacgaaacccttcaagggcttactggtagacggtgtatgtactgtatccccgatcgagtatgaaaacagcgtttcagaagtccttacaagtccttcctggaaatggaaaagagtgaaaaagagaaacgcgcagcccgtttcctaggacaaagcggcgccggcccctctcacagcccgctgcaagccggcagcgctgacatgagggctatgcttggcatgactcctatgccgccgcttcctcttcccgcaggaggccgagcatgctcactgcgccgcgctgccgaggcagggagggcttctgcacaggatcagcctctcaatgtagcaagtgttggaaagaaagagaaaggggagggggagagactctagagacggggccttggcagagtggctcttgacaggaagcagccaagccgctgcaaaaccgtaggaggaaaaaagaaaacccaggaagtttctttttcaggagctaagtacaaagtaaaaaatccatcatggaagcaaactcccatggaatgcaactttcgtgaaacttcatgttggggtttcggaaacccaaagtgctagtgatgcataagccatatatatatatatagtgtctttgtttcttttaaagattgttttataatatccatttacactttaactggatatttaaatttctgatgttaatgttacatatagcttcttccataatccccataacaactgagatggacagggcaaggagggtatcaccctttcacagcagaggaaacaggttcagatggattaaatgactggcccacagcccccaaaatagttgacagaactacttttaaagtgttttttcccacctaatgttataattttatttaaaaaaacgagggggccgggtgtagtggctcacacctgtaatcctagtcgaagcaggcggatcacttgaggtcaagagttcaagaccagcctggccagcatggtgaaaccccatctctactaaaaatacataaattagcctggtgtggtagcgcacgcctgtagtcccagctactcaggaggctgaggtgggagaattgcttgaacctgagaggaggaggatgcagtgagccaagatcgtgacactgcactccagcctgggcaacagagtgagactttgtctcaaaaaaaaaaaaaaaaaagaaaagaaaaaaaggagacaaggagaggagaagagatggaagagtgtttaagcaaatagggctataatatcaaaaattaaaagtgtacttgaaattatagagggaaagggtaaaattattttcatttggcatgtatgtcacccacctgtgtgtaagaagctagtggcatgcagctgtactatttgctattggaagaacttggggcttaaactttgattacccagtgcctagcacaaccaagttcaggtgcccaaaaactgtttactgaacgagtgaaccactgaatgttcagttttcagcacatcaagaacgtgttaacaaaatagaaaaaaaaaaaacaaaaactaaacatttgaattactattctaaaaatatatttttaatattccaaaataatatttgaataaataatttgaaggagttgtatgttaaaaatccagcaataggccaggcgcggtggctcacgcctgtaatcccagcactttgggaggccgaggcgggtggatcatgaggtcaggagatcgagaccatcctggctaacacggtgaaaccccgtctctactaaaaatacagaaaattagccgggcgcggtggcgggcgcctgtagtcccagctactcgggaggctgaggcaggagaatggcgtgaacccgggaagcggagcttgcagtgagccaagattgcgccactgcagtctgcagtccgcagtccggcctgggcgacagagcgagactccgtctcaaaaaaaaaaaaaaatccagcaatagttgcattgggtttattaggcacactcatggcaaggtgttctaatgaaatcttacttgggagtccggatgcggtggctcacgcgtgtaatcccagcactctgggagactgagacgggcggatcacttgaggtcaggagtttgagaacagtctggccaacatggtgaaaccctgtctctactaaaaatacaaaaattagccgggcatagtggcatgtgtctgtaatcccagctactagggaggctgaggcaggagaattgtttgaacacgggaggcagaggctgcagtgagccaagattgtgccactgcactccagcctgggtgacagaacaagactccgtctcaaaaaac

SEQ ID NO: 316533 - DNA, 4001 bp, Homo sapiens
ccggtgatgagcacttgggttgtttccaacttttggctattgtgaataatgctgctatgaacatgggtgtgcaagtatccgttcaagtctctgctttcagttatttcgtgtgtatacctataagcagaattgctgcatcatatgataattctgtttaatgttcaacacatcattggtagtaaaggaggtgggaagtataggatgcatttttcatttaacgtttggccctctctactagagaaaaattaaaggtttccaaaaggatggatcttgtccacaacaataactgaaattgtaagcctttgtgaaaacagcccaagtggttcatgagagaaatgaatgttcatcaataatgtaaacactggacataaaagttaaatcaacaaagaatattcaccacccagctcactaaatccagcaaacttgggcacacaaggggcccactggagtcaatgatgttgtaatcaacagtgagcatttcggagacttataagctacatatttgtggttctcatttctcactgtgaacctttaaaaattgtttcaagtcatcggaggatggctaatgttaacagcaatacatattgaccatttgtataacattggtgtacagtgttacaaagtgctttgcatatacattatgttaacagatcctcttcaatctgcaactcctttttttttttttttaaaaaaaaagataactctttctctgtcgccctggctggcatgcagtggcacgatctcagctcactgcaacctctgcctcctgggttcaagtgattctcctgcctcagcctcccaagtagttaggattacaggcatgcaccaccacgcctagctaatttttatatttttagtagagacggggtttcaccatgttgatcaggctggcctcaaactcctgacctcaggtgatctgcctgcctcggcctcctgaagttctgagattacagacgtgagccaccgtgcccagccatgcaacttctctttaatggccagaaagtgcatttctcgaatgatgaaactaaaacccggagggtcctcatctgtgcaggcaggtgagcatacctagacacccggccctcaagcagtcacttactccactctccattttcaacccagcttcattcggaacaaggaggggacaaaagggtgggaggagaggctgctctgtggaatgaccgtacaagttactgagagatgaaacaaaagcattcattttctattaaatgtgaaagatctctcaatctctaattggtcctgcactctaaggcaacttagcagggactcaagtacaatttccatggagagaagtggtcaaatagctgaggtcaaaccctccagactccaactgcagccaagtgcttttatttcccttgtaattttctttaagaataaatgttaaacctaaaacatacccccttttggaggcgatcttggcagctggactgagtgggaagaaaaagcaccttgtactccccgaatcagcagccaaactatgcaccattgtctagaggcggtcacatgacagccatcacctgaaacttggttacttccaatccatgaaggaaacaatcactagtgtgccttaacccttccagctactgcaggcagccatgctgcagctgctctcagcagccctctctcccattccagtccccgcttaggagaaactgtgcatggcacaaatctgattgggacaaggtggcgtttggggagaagggagggacgagaaggaaaatcactgctgtcccttctaagcaaagactactctacctctcccagcacttgctgtctcgcagtttaaattaattacagctgaaaatacagggttgccatctggtttgaaaaagcaaggataagggaataaaatgaaagggttcttggtactaacctcactttaatcattgccaaagagcatgaagacagcccagcgtcctcccacaagaaagccttgggcctcacaaacttggcaagcagtctcaggcacaaaactggatgggcgggcgcttgtcagaataaaagtcctccctgaaaggagggttgcgaggtaaggggcctgcttgccccctgcactgcaataaaagtttcctatgggtcctggggtaggtcaggaactcctgggagggtttatttatagagggtgccttgccaaaacgctacacgcatcattacagttccatttggtgagaaaatagatttgctgtcagaattacagcacgcgatttcctctttctttgtttctccatcttccataacataaggcttttataaaacttcaaaataaggctaaagaaaacacaggagaggaaggttgctgcagaagtggagacgctccgaaggcacgatgcatgcaactccacagcagggctgcagccggcccctcagagaaggaatgccagaaatcccctattctctgctgcagccgcaactacagtctcactcctgcactgtaggaagcaacttccttctgcctcccttccaccagcagaaccctaggtgagaggcttttctcttaggactcaggctgccacagatggtgactccaggcactggagaagcaaaggtgccacagccatcctaggtttgtcttggtgaacttacaggtgggtgcaagaagttgctaagtctgcagatgtcttagccatacgccagcatcaagtagcccggagaagtgaagcagaagattttcagcccaatttaaatttccacctgcccactacctgagttcttttacacccaggtcagttttgcaaacaagaccctgatatacccaagcccagctgctttcagaaagtaacaccaattgaagcaccacggtatttatcagagtaaactctgatcaaccagatatagtattttataaaccagaggttctaattataaaagacaagataaaagcagattatgaaaatagcatttctgttctggtgaaaaacacatcttcaaccccaaaatgatgtgaaaattgtcttccaaatcctgccctgacagaatcactgtctatagcaacagtgtccataacattccaaatctcaggagtgtaactttctagtaaatggtacatctgtcaagccacaggaaacatctggtaaaatggttaaataaaagcagaatttaaacttttctgatttcagagcttactaatggtactcaacaagagactatcaaatactctaaaagctcaatgtgacagtgaaaaatatcctggaggggaccaggtgagaaaaagaggacaaaaaaagaagacaacccgggaaggagtgggctgcaatcccactctcgtcacgatgacgatgctcccattccaggcctgcctctgggagacagtggccatagccccctcagctccgccaaggatgggcacattcctgcccatcaccatggcagaaaccttctctggcctagttaagttcctctctacccagggctgactcccccaagcatactcatatctccccaacgcacccaacccaggaggccctcaggagaggtttggggggatggactgacgaagtgatgacacacaaacaataagcttccctccgctccacggcagacatgtgtattaaacacatacaatcattctaccatcaagacacacccaggccaggtgttacacaatacatttcagtcccttccagaacattttacgaggcttttccattaaataaaagatttaatgatttggccacatccaaattttaaaaatctatatttcaaaaatacagtaaataatgctgaaaagcaaataacattacttattttccccaacgcatttgacagagcatccttaatatgaagagtcgtaacatatcaagagaaagaagatgaatactctaatttacaaaaaagacaaggtataaacaacatcatggtcacagaagaagaaatgcaaacggccaataaggatatgaaaacatcattcaagttctctagtagcagaaaacaaacaaacaaacaaaaaaacacacaataacaatgtttctccccgagaaact

SEQ ID NO: 316534 - DNA, 4001 bp, Homo sapiens
agaaaggcaggtatcgtggagtggaactgtgggtgggcagaatcatggagagctggagggctgaggagtcaactggaggcgcattcaagcctttagatggaccctgcggcccagtcggtgagctgctaagggctgagcaggagaagcaccagagggggcctgagtgcagcctcggctgtgatgttgtgatgtcattctgcgccatctccagcaggggcacgcgctcagcttagtgacccgaggcgttccgagcctcggcgtccccatgtaaccatgtggtcacagtaagatccacccagaggactctaaatgggggacaaacagcacacaaacaaaaacaatcagagcggcgcagtgcagccctcagtgagcgccaagagaaccctgtcagccctaaaccgagtatattgattatagggtgattagctgtacaggacccagtattcgtttatggggtttttttcttcccctttattttctggctgatgatacagaatatcttaaaagcaattaaggattaaatgttcagcccattaagacaatcatggaagagaatgttctggcagagtctagatagtaggttccatccacgccacacacatcctggcgattttcaaaacgttaaaatactaaaaaccttaatactgaaaccagcctgtccataatgtcatctgtctgtggcgattcagaagacagcacaggtttctgcaatgaatgcctcaagggttatgatcccagacaccgatgtcaccagaagaccttccgcggaacggacgtcaggccaagcagtcctgagatctgctggcttctacctaaacgggacttggttcctgaatactcagttcatcagtgtcaccacacatcctcatcttcagtgtcccgctcccttctaaattcagataaagatacaattttattgttaacaacatgagtgaatggcttctctccaccccaggtgatgcttccacgggccacttcatgaagtgcatagacctgggggctcatgtcccagattcaggagagcctcagacacagtctgcctccgaatttagacgtctgtttactcaaccagcgctagttaagtccctgttctgtggaggttccagaactgcagggttacagccctgccttctcatgggcttacaatctagcagggacagaaaggcccgggaggggctgcagctcccaagtgacagctctggatccgggcaaggataaagacacccccgggtggcatggaggagcagactaaaggtcaggcgtctgcccatgtccaaagccaaagtcgtggtacataaggcactgcccacccctcgcaccttatgtcctaggggcacggcacagtcacgcagatgactcagctgcgccttaggaaatccaagcatgactatgagaccacatcacagaggaaaggggtgccagggccgccagctgccagggcagaggtaaggacggggcagccctgcacctaaatctgccatctatgctcccacagccccactgtgcgcccaccctacgcagggcagcagggagaaggggacttccaggcccactaactggaaagacagtccgtggaacacagcacagtgggcactatgggtcagacaaagacactgaaaacagcgagaaaaggcctggagaactggctggttaattttagtaaaattatacattactcacatttccagctcattttcctggttcccggagcttcaagacagacattgttttccaggccccgctcgcccggatgaatcacctcccggccactgcttcccaggcgtcatgtgctcccggggacggcagaaaaccgcacgcatcctgcccgggagatggaagtcgcctccgctcctggtcaggactgtgcccgagagagcccacggcatccccgcgaacacccaaaggactctgagtggctccgtgccaggcctatcagagccgctgaggctgcacggcacccggccccgccccgggcctcatccccatcctaggcgggcacttccactgccagctgcccacggagagaaagatggaaagaggagggagggaaagagaggcctacaacaccatcatccaggacagagctttctgagtactgaaagccacacgctctctaagctaagaaaccaagaatgtccataacatctggggaaaagtaaaccagattccaagcagtgacattgaaagaatccatcacgtgaaagaagtgcactgcgtctatttgatactcattaaaatgagtttcccaccctccaacaaacgtgctttgggatgcttagcccttagccccatcacctgacgttctgagcctgcgctgggcttcattcaccgtggactgccacaagctacactgatctgagtctgagttcctctgcctggggagggggtatgggtacaagacattttgaggatacattctggggtccccaaaggcccctgagcaccatggcatggcaggtgctcccacccagtgaaagagatgaggcccagggcagccttgggccctggcctcccaaaaaccaacatcctgaggcggcaaagcagcccgtccccatgccaggcgttgcctggcaggagtagaatgaaggctatgcagagacatcccccaagcaccagagtccaggtggagacaagagattcaaaggaggaggggccggcacagggccagtgagtgggccgggacacagccccatctccagccctttcgtcctctctctcccaccgcagcagttacaggagaatccgacatctgagaactggcaggacagccagtcgttcacacagtcttaacacatcataatgagactgctggctgggcatggtgacgtgcacctgtggtcccagctacttggaggctgaagtgggaggatcacctgggcccaggaggtggaggctacagtgagccatggtcacgccactgcactttagcctgggtgacagagcaagaccctgtctttaaataaataagattgctagcacatctttaatcttaaaaagcttcctcagaaaacagacttaatgccactgaagggtgccctgaaacctggttaaagtggtcagctgtatgctctgctaatttactacagctttttaaataataaaattttacctgaataatatagacagaacttcctcccaacctttacctgctgccccctggggtttctgatgtgcacagggcaggtcagcaccatcccagttttacagaagagatgaccaaggtggagaagatgaaggctttgcctagacatgctgcccaccacagacaccggccctgtggcatcagccgctcagggtcgtcacaccaggcccaccaagagactctccatcacctcgcagctccatcccaagctgccaggaggcctttccgacccaccagcaccatttccacccaccttcctgccccaactgcagagacacaggaaaggagcagtgcggagatgccggccaccaaggtctgtccccggacagtcctgccacgctggctttctcagtcagtaagcttctgaagcacagctcccaggggaccccggtccctggctggaccgtgcactcccgggaaggctgacactgcagcccccacgccctaatctccttggctccgcacgggtgaccacataccagatgttctaataactgtccatagagtaaataaatcattaaggtacacatagtatgtgtgagtccagttaacagcgtttgtggcaaatgacaagggagttaaggagatttcagagaaaatgactggtggcaaagacttttttctgaaaaagcaaaatttaaggaacatttaaatgttgggcataaacagtggtgagatgtcttctcccttttagtcccttcctccaacttctgttgtcctcctcacctcctccctgcttctaaatgtccccgagctcatccaaagcaccccacaacacacacacaggagtgaactcatcaccgtggcttctctccccttgtgagtgggagaattcactgcttcccagtgagcaacaagg

SEQ ID NO: 316535 - DNA, 4001 bp, Homo sapiens
tccacttccccacacccctaccctcccgcgccaggctgctggttcttattaatcacagagaagggactacaactagcaaacatacagcaccgacgatcaaagtgaaaccgattttttaatcatctaacttaaacagacgaacacatgccagcaacgtacataaatacgaatagccccagcaagcactgtcttcataacctaagacagttaaatgtctcagggtgatgaatcaaaggagacttcaagcaaaacaaaaagcgaacagccctgtgctcttccgcgaggcctgcactgggtgcagggagagtgtgcagtcctgttttggggaccgggcaggaagcacaggaagagtacggtgccccttcccgcagtccacatcacagccctccctgaggccggcggggaccgcggggtgccaggcgcgggcctcctcgcccgccccgagcctccgactcccaggacgtcctccgggagcctaggcgcttccgctcccaccggcgcctcccgagcggcccggcaaggacccgccacctcctccctcccgcagggcatcccggttctgctccgacagcccaccccaaggcccctctcaggccagccctcgcccagcccgggtcccgccccgccgaccgggtcaaccgcactcaccgcccggcggctctgggcgcgcccgcctggggccggcctggccctgcgggggacccaggggcggggacgggacctgggcacgcggggcgcaccccgagggcgcgcagacgcacaggcgggctcgcgcccgagcccccgcacgggcccccgccaaacacgcacacgcacacgcacgcgcggaccgggccggcggacgggagcgcgggagcgcgaggaatccctggaatgaggcaccggccaacctgagccgggctccgccaggccagccaggccacgccctcggtcacgcccctcacggagcaggtgggggctgagccaggtgagccgggagggagataggggcgaggcctcccgcggcagggagaggccgctttccctcccccgccagctgcgcgcccggtgccagctcgcacctcccgggccgatgccggcgcgctggggcagtgaggtttgtcggggcgggcgctcccgagaggcgccagcgggcagggcgagtggacatggcgcacactgctgtggacacggcatctcgcacgcccccgcccccgaggccccgccaggggacacagcgccgtgcaaatgtacaaacacaaacgcacatttcgtgcgcgcccaggtgcccgccgcgctccccacgcgcgcacagtaggtccctgctcccgggggacagcgcacgggacgccgacgttcacagtccaaccagacccgtcccgcggacctgctgcccttcccgccacacacaccccgccaagcgcccggagttcagccgaacctgcggcacccacgccgccctccgcttcccccggctcgcgagcagccggataagggcgcaccacccgcccgcgccggttcgccgtccacacccgctcacccccggaacgcggcgcaccttccgtcccccgcctcccgggccccgtcgccccctctcggcacccgcatgcccgagccgcgctccccgacggccgacggccacgcacctgaagggacaggtcacaccggctgcgggaggggctgctcggcgccactgcgctcagaacggccgcggcggtcccgggcgctccgacgccgctgggtttcctcccattacagcatgttgcactccagcgctgcacttcacactcgcacacgcgcacacgcacacgcgcacaactccaggcgctcggcggcgtccttcccccgcctcgcccggaggaggaagtcctagtaaatcaaaacaggctgggagggagggagatcggagtggaaagagtccccttcagccgctcacacaccagtgtttgctgtgtttggcaaactcctggcgtccacaacccggactgctctgaaatgtgcccggggaggggcagggaggaggaggtaaaacgtttctaattggcgcaggttcttatattacagcagcagggcagacatgtgaccacgaaaagaaaaggcctgtctttaattttttcctgtctttctctggggatttggtggtggggggccgggggatagaggcctgatacccgccccccgccatccccagcaacccttgccctgttgttttcttgtactgccacaattaagaaaacatttgcttaacatatccagcggctaacttcataaaataaatagagactggacttcctctggtttgctttaaaaggcttcatgttgcttgccttctggctgttctcaaacctcagtcattattaggagcccctaccgtaagggctttccctgggagagggctctgctgaaagggaatgataacaatgaaaacaaataccagcttacattcgtgctggaaaaaaaaaatgctttgcagttttcaaactgttttcccatctgttgcctcatctgatcatatcaaggaacagcacggtgtctcactggatcttagcccctgttggatatgcaaagacaggtatgcgtagttccatgtttcagtgagattaaatggtttacctaaagcaggtggaggtgttgcccgaaacttggggccccttgtgaaatgtactctcctccagtccatacagggcctctggagatgggacaacccaacttacaagtcaacctaggaataggtcccctggctttcctgattcctggataaatattcacagattaaagctcggaaggttcccagtcttcccaaaggtactcttacatagactccgttttagtccatcagtagtctcggactaggaaaagagaaatcctgagaaagactgtaaataggagattcatcctgccaaactcagacagggaatgaggaaggaatgaggactgcctgggcagattccaggaaatatggtaagacagaaaaagggttttagattcagacagaatttgaatccaaactccgcctctatttgttataggatttggggcaagttatcaaacctcagttttctcatccgtaaaacagagataatgcttcttcgaagagccggtgtggggttacaggcttcgcagagacgtttaatgaatactcacatcttccttctcttctgacttaaatccagtccaggtgggcaccttatgaacagaggaaaatgaaatgcccagacaacgcaaatgaataatgataacaataatagtgcaactgcatatttataaaaatggcccaaggtttacaaagtgttcccacgtattattatctcatttgatctttatgacaacattgccatttgtttgctgctaaatgatttccattttgggtcagtgcggaggtcctaaagctgcctctttaatttccatcactgcttggagcgaaccttactctgcaaataaatcatggggacagaagaccttttctcatggatgtgaccagtcttcgacctttgcaaggattaatctcactctttgccttacatcagcattagcgtgacttagctctggcaacatctaagcctggtcgttttagtctggctcttttagttgtgcaaaggagagacacactcaagttactgtaagaaaaaggggggttgttgtaaaggtctagggggactggaagtggaacgtggcagacacatagaatattatacagtaacctaaattaaaatgacttacagtgacctcaacaatacagatgcatcttgacaatgttaactgaaaaaattaagtcccaaaagattacatacagcataatactctatttgtaatgttaaaaataaaattaaaaataattttagtggtacatatatctgcaataaaatgatataaaaaataagtcagggccagcctggccaacatggcaaagcccatctctagtaaaaatacaaaaaaaaaatggtcaggcgtggtggctcacacctgtaatcccagcactttgggaggccaaggtgggcgaatcacgaggtcaggagttcaag

SEQ ID NO: 316536 - DNA, 4001 bp, Homo sapiens
ttaattcttacagtacgctaaatattgcacattaaaatattatcagcacaaagcttcggcatataacttatcgcaagcataatacgtgggtaggtgcagttctgaaacatgtttcgaagttaggcaatcaaattagggtccacatttccatttgatttgacatcttggcgtttttcattattattttaaaaggttttgtactaggcaatcactttgtgcctcgctgtgaattaaaataagcatagcctttcatagtaataaagcttgtgtaccttctaaactttataaagacgaatgattactttaagagaaaacttcaaactttctaagtcacatggggggagcacctaaatttttcacaaataataacccttttgttgtgctgtacattttggtctctcggacctgaccaattttctttccatttggtcacaatttgagagtaatacgaggataaagtcaacttcatccgaggccttgtggtacctaagaaaaggaatctttgtttgccaccactaattttcatatcatcacagatgtgtggacagtgttaacagtcatttacttcatacacatatgacaaatatgattttgttggagaaaggagtgaggaaaaaccctctgaatatttaccaggaaaaataaaaacttggccaatttactcagcaagatataaactagcaaatatacagtgacccataatacacctccagccaggatttcttttaaggattctggccccaaagcaaactggaactttccattttaaatgagatacctaaaacacaggcctcacgctggcctgccacactcagaaattcagtatgatcttggttggcctatactccctatttagtaattttcattttaaaaaacaaaaaaagcagtgctcatctttataccttcataaattagaaaaatatcctttctaattatctccgttatttgtgatacttcctcctccacaaagagagaagagggtgtttccaagggaaagcttcagaagcccaagcccagctaactttctgggaagccctgatgatacccccaggaacgcagcaactgcaaatcaaacctcatcaaaatggcaccagctgaccctcctctccacccagggtttctcaacacccctggcaggatgcgaggggatgaggagtcctcgggcttggacccccgaactgtggtcatcatttcatcagatgccagctgtgtagcaacaagagttgctatggaaaacaaccactacagcaacagactgaaatcactccaaaaaaggagccgtcactcattccaccagcatacactgtgacgcggaaagcaaaacccttgggttaagaacaacattcccactcccctccccagtttccatcctagtaaaaattctcgtgcttgtttgcatttttaagttcatccaacggatgcagtgcttatctttaagactgaatcactgatgtctaacatcgaaaaaaattccacaagaatcctcagaaaacactggagatttctaacccacgggtgggggtgggaccagggctggggctacaggccccatgaaggcactccaggtgtccttcaccagggactgtgacagacgcctccaccaggtcccggggagacggtggtaaatgcgtgctgtagtacttcagcatctcagcttgccggcgccggaaggagcccaggaagcacggtttgcctcatttgatggatgacgaagctgtgccccaaaacatagcgtgacttacccaagatcctccagttaacaggttagctggaggcaagaacccatggcctctgcaatcagacaacgcctcatcctaagactgtgcagcctcacacaaggcttacagcaaaggaaaagaatccgcacataaggtcagggacaggtccgttcagttatgtgcctttatgcatctttggggcccctccctagatggccttaacccaacacttgtatgttagacaagagtggtaactgttgtatgtgtggtggggttaaaattatttttgtaaaactgaagcagacatttgttctgggagataagacacttgcattgcaatcttgactcctcctttatttaggatggggtgaatttgggcacgtgcttcccctctctgggcctccctccatacaacaaggggctggactagctaatgtgtcatgttctttccagctcttagaattactgatgcaattctatgatcaacaagtgaccaaccaactaaccaacatttacaaagaaattgctacttgtgtaatggtgaactaagacagcaaaactcaaggtatgtacctcagatgttattcatcgaaaaaaacaagggtgaccctggggtcaaataaatttggaaaccgtgagattgaacaacttttacaggagtttaactacaggcctttctgtcttctaatgcatctcagtctctgagatggaaaccccgcagggctgctttccatcgcccgccacgcccccgcccacccccaatcctccacagctctgtgaattccatcttccaaagcgcccccacgcccaccccccacccccaatcctccacagctctgtgaattccatcttccaaagcgccccacgcccccgcccacccccaatcctccacagctctgtgaattccatcttccaaagcgcccccacgcccaccccccacccccaatcctccacagctctgtgaattccatcttccaaagcgcccccacgcccaccccccacccccaatcctccacagctctgtgaattccatcttccaaagcgccattctcagcatgttggcccatcctcaccccagatatccagtgactgcagacttcttctgcattcgaaaccccaactgcctttctcatttttattcctagtattcctctttatgagccctgaaaatttcagcccagtaagttaaactagactcatcaccattccacagagaacttgttcttcccccaatcttctcatttaagttcatacatcctgcaaaaccacttaaaatgcctcctccatcaggctgtcctccttgattcctccagctgaaggtcatctcctcttcctctgaacatctatagaaacttatcactctggtgcttccctccctactttattttgtgctcctggaagcaggtggcatttaattcatttaataaacctgacagtgcagagcacaactgacctactgaatcaatgaggcaaggtgacagggtgggcagtttacagagctttaggatatgttaaagatcaaagatgttatagaataaggagtgtttaaagatctatttaaaaatataagaactcttacaacaattaaaaagataacaaaaaatagaaaaggatctaaataggcatttccgaagagaagatatgaaaatagccaataagcacatggaaagatgttgtattagtctgttctcacgttgctgataaagacatacccgagactgggtaatttataaagagaaagaggcttgatggattcatagttccacatgcctggggaggcctcacaatcacggaggaagccgaaaggcatgtcttacatgatgacagacgagagaatgagaatgagagaaaggggtgttcccttataaaaccatcagatcttgtgagacttactaccacgggtacagtatggggggaaaccgcccccacgattcagttatctcccaccaggtccctcccacaacacgtgggaattatgggagctacaattcaagatgagattgggtggggacactgccaaaccatatcagatgtccaacatcgtcagccatcaaggaaatgcgaatcaataccacaaagagataccactaacacctgttaggatggctatgatcaaaagacaatacaaaagtgttagcaaggatgtggagaagctggaacacgtgtacgctgctggtagaattgtaaagtggcattgagaggtgaggccagctggacttgtaggttgggtgaggacttagagaacttttctgtcttacaagaggattgtaaaatgcaccatca

SEQ ID NO: 316537 - DNA, 4001 bp, Homo sapiens
ctctactaagaatacaaaaaattagctgggaatggtagtgcgtgcctgtaatcccagttacttgggaggctgaggcaggagaatcgcttgaaccagggagtcggagattgcagtgagccaagattgtgcaacagcactccagtctggcgacagatccagactccaactcaaaaatatatatacataaatactgaaaaactttcaaagggctgggcgcagtggcttacacctgtaatctcagcactttgggaggccaaggcgggtggatcatctgaggtcaggagttcgagaccagcctggccaaaatgacgaaacccccgtctctactaaaaaaaaaattagccaggagtggtggcgcacgcctgtaatccccgctcctcgggaggctgaggcaagagaaccacttgaccccaggtggcagatgttgcaatgagccgcaatcgcgccactgcattctagcgtgggccactgcactccagcttgcagagcaagactcccgtctcaaaaaaaaaaaaaaatttcagtgcccccatattcctaggggtaaaatcaccttttaagcatcctctcccaagactccaggtctcaacgcacgcatgtctagaacctcttacctagggttggctagttcctactccatcctgctctcttccttctccgggaagtgctccttaactgaaaccacacaaccgcaacccctccatctcccagcaggcaggtaagtcaatttcccacgccacacacggtcggctcttccggcgccaacatgaccctggcttgttcctgtctttgcatctgtcagtctccccaggaggaatgtgttctccacgagggcagggactacgcagaactggcccactggagtcatgaggactgaacagatggggtgttaaggatgcagcttttctttgaggggaaaatacacgtggggtgggggactggggggagccaccttcaaatgcaaactattcggccttataaagaatgctctgggccgggcgcggaggctcatgcccataagcccagcactttgggaggccgaggcgggcggatcacgaggtcagcagttcgagaccagcctgaccaacatggtgaaaccccgtctctactaaaaatataaaaatcagccgggcgcggtggcgcacgcctgtaatcccagctactcaggaggctgaggcaggagaatcgcttgaacccgggaggcggaggctgcagtgagtcgagatcgcgccactgcactccagcctgggcgacagagcgagactccgtctcagaaaaaaaaaaaaaaaaaaaagaatgctctgacgcttacgagcagcgtcaccctggatgtgtcctgcctcaaggggcctcagttccccgtctgcaaaatggaccccggggcggtagaggggcttcagaccgtgctatcgtccctgctgggtcgggcctaagcgccgggcccgtacctcggtagctgtggatgcggcggcccgtgccaggcggcagcgttgggtagggctgcggctcgccgtcgaagttgagccatacgggcagcacgacgcgcggactgcgattgcagaagatgacctgggagggctcgcgcgagttcaccgagcgcagcacgggccgcggccgcccggcctccatctcctcctcggcgcccagttcctccgggccggactcttccgggccggactcctcggcgcccgactcctccccgccgtcttcttcagggccgtactcttcgacgcctgcctcctccgcgcctacctcggcctcgtcccagttctccgccctccggggcattccctccgcgatccagaccacccgggccggacgccgcgggatccgcgggtcggacgcggggcggagctgcgtgcgcgctcccgagtcgacctccgtagtcttcgcgcgcgctcggtagaggatggaacgcgctcgcggaaatagccggccggaggctgtgcgcgtgcgcagaaggatcctccagcaccgtaggccgttgtaacggaggcgaggctaggccaactcgttactgtatttccactataaaattttttttcgcccctctaaggtttggtgttttttttttttttgagacagggtctcactctgtcgcccgggctggagtgcagtggcgcgagcttggctcactgcagccttgacctccctggctcaagcgatcgtctcgcctcagcctcccgagtagttggtactgtaggcgcgcaccaccatgcccgactaattatttttatttgttgtttgaaacggagtctcgctatgttgcctaggctggtctcgaactcctgggttcaagtgatcctcctgccttggcctctcaaagtgcagggattacaggccttagccactgtgcctggtggactaactgaattttttttttcttcatgtcagacgcgcaatgtgccgacgtcgtaacaaggttcgagggtggcgcatctcacacgggaacacccaatcatcacgcttataaagtacaaaaagtcaactaactgaattcttacaaggcatgggtgattagtaaagagggaaaaataattagacctactatgtgcagagcactctggtggaaattggaaaatcagatatttacttcagagcaattaaaactacaaacataaacactcattaactttgttcattttacaaatatttattaaggccctactatgtaccacctatggtgataagtgttgaaaatattgtaaaaaccggtcatgtttcctgccttcactgcacttcaataaaagcgtcatacggtaatcaatcacacaaataaaatagcaactatggccgggtgcagtggctcatgcctgtaatcccagtactttgggaggctgaagtgggctgatcacaaggtcaggagttctagaccagcctgacaacatggtgaaacctcgtctctactaaaaatacaaaaattagcctggcgtggtggtgcgcgcatgtaatcccagctacttaggaggctgaggcaggagaattgcttgaacccgggaggcggaggttgcagtgagctgagattgtgctactgcactgcagcctgggtgacagaatgagactctgtctcaaaaaaaaaaaaaaaaaaagtgcaactgtgactagtacgacaaaaagagacagggtactatagaaggctaaagatctgggggtcaaggaagatggtacacaattctgtgtaattaaatgttcaatgatgtgggatggactcaagtggagaagcagctcagaaaaagaagggttcagagagttttatattagttaaaaataatttttttttagacagtctcgctttatcacccaggctggagtgcagtggctcagtctcagctcactgcaacctccatctgccgagttcaagtgattatcgtgcctcagcctctggagtagctgggattacaggtgtgtgccaccacacccaggtaatttttgtacttttagtagagacggggtttcaccatgtttgccaggctggtcttgaactcctcacctcaggtaatctgcctgccttggttttcccaagtgctgggattacaggtgtgagccaccgtgcccagctcaaaaataaatttcaagtagaaagaaaaaaatctatcaagtgccagacactgtgctaagcatcccacgtgaattaaggctatgtcattatctccatttcacagctaaggaaacagaagggtatataagaatgtgaaggcctagcactatacgcctgtaatcccgagattttgggagcccaaggcaggtggatcacttgagttcaggagttggaaccagcctgggcaacatagcgaggtcctgtctctataaaaaatgaaagaattagccaggcatagtggcgtgcacctgtagtcccagctactcaggaggctgaagcaggaggatcacttgagcctgggaggttgaggctgcagtaagccgtgatcatgccactgcactccagcctgggcaacagagccagactctgtctcagaaaaaaaaaaaaatgtgaaaagggtagt

SEQ ID NO: 316538 - DNA, 4001 bp, Homo sapiens
tacatgggtgcacacatagggcatgagtgtgcattcatttccatgtgtagtgcacttccatgcgtagtcatgtggacacatgcatatatgtgtacatgtacatacatttgggggcacactgtgtatttgtttatccctgtaagtctagatggtgagtgcatgaaggtgggcaacagcatatatgtgtgtaggtgaacatggatattcacacatgtccatctataggtggacatacatgagggtggtgtgtgtttctgcatctgcgcatatgtttgtgtgcatgtgttcatgtatatgctatatgcatatataggttcaactgtatgaaatggaaatgatcaaatagcaatttcctatatttccaaatatattgctagtgttaatttaaaacacctgtgaagcaatttacagcgaaagatatattcctaccagcacagtaacataaaagcaaactcaaaacaacattggtgtctgctcctaggtatataccaagggaaatgaaaacatttgtccacacaaaaacttgtatacaaatgttcataaaaacagattcatagcagccaaaaagtggaaacaactcaaatgtctattaagtgatgaatggataaataaaatgtagtatattcataaaatgcaatattacttggtaataaaaagaagtaataacacatgctacaacatggataaaccatgaaaacagtgtgttaaaacaaaaagatcccgtcagggaagaccatttgttgaatgattctatttctatgacatgcccggaagaggcaaatgtatagacaaagcagatgagtggttgcctagggcaggggatgggggtgttggagggaaatggggagtggtggcaaaggggtatggggcttctttttagggtgatgaaaatgttctaaaattgtggtgatggttgcacacaactgttaaaaatcactgacatgtatatgtactttaaatgggtgaatcgtatggcgtatgagttgtatctcaataaaggtgttacccaacccctcccggcttgccccattcagggatgtggacgatggccatcccaagactgccccagccaaggcaccgcctccacggctccctcctgccccggtcgcccccgcactcacatgattcccgggcggaagtagctgcagaagcagtcggactcgtggccctgcgcctcgcggtgcagcacggtctggccccccagctcgtcctgtaggcgctgctggaaggcctccgcagcgccctgcgcttccgcacccgcctgcttcccgacccagtagtgcaggtcgctggacgccccctgcgtggccttcgggctctgggggacctagggtccgggtgtttgtgtatatgtgttgcggggaagacggaggtgcgggtggagaaggggaggatgtaccaagggccatggggagacgctaggcaggggcttccgcggagatcaggaagtgggagggaaggactaagaagcctcaacggtaaccgcccccttgtgggatgtgattctccggctctcaacttgccgcttcccagggcagagtttatgcctgtgcctcagtctccccagtgccgggccatgccacccctctcaggcagacttccccaagcgactcacgtggaggatgacatagcagtgttcctcaaaaaagttcccgtaagccccctcgggtaccggcaccatcttccggttctgggagaggagagttccctgtaacaactcaggaggcctctacccatgacacccgctggggtggggtggaagaggacgctctgagttgggggcgggagaagcctagtgtggaaaaccccacgctcttccatgtcaccaactctcctatttggtcgtgcctctcacctcagagatccatatgtggaggcctccctgcatgcctgggaggcccttgctgatgtccatcgcaggccaggcaggaatatgggacgacacaaggaacaacagccagagttctcaggctggagaccgacacctggctacctgtacaacttcattatagaacatgacttttattaggagggctctgtaaacacacaaatgtcagcacacagactatgaagactcagattctgcagcaagtgacaggctcagctgatatgagtgggttgggcagattaggcataaacacttgacaatttttttttccagttttttcgagacagggtcttgctctgccaccctagcctgcagtgcatgattcgaacacacttcactgcaacctccaccttctgggttcaagtgatcttcccgcttcagctgacaaattcttgaaacagagctgaactctgtataaacacaggctctgcaaacagccacaggctctgcaaatagcgatttagcttgctcgagtctgtgctctgtggttctgcgcgtgcagagagggagagaatgagagggcagtgaatgacagtgacatggaatgagaagtacctgggggaaggaagggaccctcacttctgtcgattttgttatgtcttggcacttcatattcaattacctgaggcttccctgcaccactccttcagaaacctgtgtgtgaggtttggtccaaaagtcacttctttctgaatctctcactcagggtgaccctggtgtgttagtccttccctcctccccctccactcccactgtgtcttatcaatagcaggaacacccttggctccaggcagaacaaggtgaggggacagagttacagaatcaggtgtggcacaataggtgtcatagagtggctcacattccttacacctttgtcagggcccctggtttggccctggtgagttcacagtacactgtggcaacacccaacatgtagccaaagaaatgtgggagcggaggaggctgtggggcaggggagcaggggcagagtgggctgtccttctagggggttagagctgggtccgtcacagctcacagctcctcccgacaccctatggaaaccataggatggttgttggctatggtctccctcaccagagcagcagattcctgaaggcaggggtttgtcttgttgtttactgtgggatcccagctgcccggcccccagcaggtactcagtaagtacttgttgaatgagtgaagtgtgctgccctgcgactggactgagtgaaaatgaatagagaagggagccgtccgtgcaccctaattgccccaagaactgttgccacagttgatggcctgttggtgtgacaatgacatgagtgacaggcagacatagtggccatgaaaaggtgatctcaagcaacagaaaacgtgaggacattgggtgacaagcaggatgtccaccagtggtggccccgtagaaggacactgagtaataggcagaaatagtgaccagtgacagttaccagaggcccaggcaggcagtgaccagaggtgcagacagaaactgtgagctgtagctcatggaagagtacaacatggtgacagagtgccagaaagactactggatggcctcagaacagtgtcaaccagggcacatgggggactggaaagtcaaactggcagccaaaaagttgggactcggctggtgtcactgggagaggcagcatcgcccccaggggtccgggagcccgtctgatatccagccccagcccgtagagccaagccctcagctgccagggctgaggtcgcactcgcatggcacctgtgttcattctctttcacctggactccagggaggaatgggtgctcaaagattgggggcctcctccctccccacagtgccacctccagcctcccaagccctcctgccctctttcctcaggggaaccccccacagtgccccctccagcctcccaaaccctcctgccctctttcctctggggaactccctttcaccaccttcccaagtgggaaccctcctatccctggtcctctcccttctcctagaagccctccttctcttccctgggggtgcacttcctccactcagggcccctttctcttccggatgcccaattccttccctggtttccctttctctccccat

SEQ ID NO: 316539 - DNA, 4001 bp, Homo sapiens
tatccaatcattatttaattttcattccttgccttgtaagtgctttgattgataatttatttatttttaccagttgtttgcttaaatacagagattcacacattcaaatttcatacagagactcccctcaatctctctgcctgtgcttctcttttccttgcaggctctcttttgaagaaactgggttgtgggttctgcgcacgggcatcctcctgtcaaagtttgctgcttgtgcccctgtggtgttatttaacacatttctctcagactgactattgtggaacacattttaaaacatcagcgagatcctgtggctccttagttccgagcgcttaccaggccctgagtgatgcctccatcacaatccttcacctctcttctggtcttctgctctccctgaaggcataccagcctccctgctattttaaaaatttattcctagacccctgctgcttttcagtctgtactggcagctccctctacttggaatgctcttccccggtattcccatggctccccacctctcttctcaatgccagtccccctccttaatactgcaaactgctcccttccccccaactcctaaacctctttactctctactcttcttcataacacttatcaccttccaaggtattgtgtctctagggtacctggaggcagttcttacatctgccctttctctacccacccattcctcccctctggctcccaacccagtgggtactgcttacttggtaagggacttccaggccaggtgccaaggaaggggaggaactggccagaccagctcatgcctctgtttgcacaggtctgggtaaaaatagcctcagctatgcacgcctctctcgcctcctctttattctagatcctgcccaggcctgagtcacttgccagctgtgcttgcccctaggcctattcttgcctgagatgggataaggcccagaggaataaggatagggaccctgacagcattagcagctctgctgcagctcgtgtgaaccttgacgcctgctgccactctgggaagccaccctgaattgaccgctggcttcttttgctttgtggtgaccctaactttcagattatttaaccccttctttgggggtaggcctgtctgtcctctgtcttgcatggggaggaattggggtggggaaggagcaaggaggaagctgaactcctgccctgggagctcccaggctaagtagggagaccagagtctcttgtaggaatgaggtagggtgtgagtggagactgcaggcagagcttagcctctctgggtggtgcagatcagaggaagggcttcgcgggaactgtgctctgaagaaatggagggtcggaggagaggtcttggactggtggtggaagaatgagtgtgtgtgtgtaacctatggtgggagagtggagagaaggtagaaagcagaaggcttgctggagctaagaccacatttgagggtaactggccaccagcggagggccatactgcggagtaagaaagtacagaactgtgcgtaacaaagaaatgtcttactcctggtctggaggagtgccaatgcatggggaagcctggggatgaggagcccttagtctgaggccagactagggctgggtcttaccctaccgtccacacggtggggctggatgttctgccatagccaagctgctctagcctggcacatgccagccactcagctgagggagtcacttccttatcctcctggtgtcagtgtgaagacgcaccacacagagttcatccatcatccagtgcccttctgattggggggaagccacagctcctttactcttgacccacgtagttcagtgattgggtagggcttatactccgctctggctccagtagtgagcacctgccccaggcctggccaatgggagtcttgccaatggtcacatgccccaacctgggccaatgagcatcagccctggggcttttgctggaactgtgggaaagaagctgcttttccactagtaagctgggaaaatgcaagcttgctgctgctgtggcatatttacctgcttgagatttgagcaaacacaaggaaatcagatccaagcgatagagatagacagatttctgatgacattgtttgagttcctgaatccagttgcaccggaagccctgtgaacttttctgtttctgttatataaatctcttctttgcttaggccagtatacgttggcttcatgttaagtgaaacagaaagagttttaatactgcaagttccaactccaactccccagtcctcaagttgttcagggacagcagaatggaagaggccatcttgggaaggaatgggaatgtacgtgtggttcgttttagcccaggacagaaagaagcacttcttttgaatctttgtgttggcctccgctcctgggcagtctctcctggacctggtgccctttctttttccttagagagatgttctgctctgtctccatagagtgagtagagccagtgtggttcctccagacctccccctcagtcctgccaggatgtgctgctccttcacagtaagggcttcctgcatccccttccacccaaccccacctgctttccatctggaagaaacactcagtgtctgtgtgcgaaaggaagacagtctttacaatcttgatgacagtgttgatctcaatttatttctttattctggggattcatttccatgtgaaatcagtcaggacagcacatgtcgagaggaagttttagatgctgaatttgtgaggatatagcttcagctacgtgggctagagatgggaagaacagcggcttaaataagacagggatttatttttttgcatagagaagccagagttggtgtggaggctcttgctgtgacatgaaaggcccagagttcttcggtctttctactccactatcctttggatgttgtctgtatcagttattgtactggtttgctctggctgccgtagccaagtaccataagtttgggggattaaacaacagaaacttattttcttgtagttctggaggccagaaagcccaaggatagggtgttagtagggttggtttctaaggactaggagaatcccatgcctctcatccagcttctggtagttgctggcaatctttggcactccttggctcgaagaagcatcatcccaatctctgctttcattttcacgttggcattctccctgtgtgtctccaaatttcccctttttataaggacatcagtcatactggtctagggcccactctaataagtttattttaactggattacctctgtaaagacatttacttcaaataatgctacattttgaggtactaggggttaggacttcaacatgtaaatttttgacaggagagccacaattcaacccatagcagttatttagtattatataagaaattgacctaaaacttagtggctttaataaattatttattatgtcttatggtttctgtcgatcaggaatttgtaagaaacttggttggacaggtttggcttgagacctgtcatgagtttgcagtcagatgtcagctagggctgtagtcatctaaaggtttatttggggtactatctattcccaaccattttctctctcacgtggctattggaaggaggccttggttcctcctccatgtagacctttccacagggctacttgagtgtccttatgtcatggcggctggttctcctgagtgacagaccccagggactgaaatggaagatagagtgccttttatgactatctgtgagagtcatacactgtcacttctgccgtattctattgatcacagaggccattcttggttgaatgtgggaggaggctacacaagggagtgaatatcaggaggtaaagacctttgtccacatggccactgctgcttctgctttccaggcagtgaagagaggcaaaggggaagaagatggcatgccccttcctagcaactgagtgatttggaagttgcacagtcacctcttctcacatcccattggccaaaacttaatcacatg

SEQ ID NO: 316540 - DNA, 4001 bp, Homo sapiens
tcctctctctgtggacccagcccctgcactgggctgtaagaaacatggggatgtaagagaccccagcccctgaccttataggatggccagaatagcccagcctgggaggtgggtagggctgaagggtggggttagagggggaagggttgagttggctggagcaatcagggaaggctgtctggaggaggagatagagttgggcactaaacgaataagatgtggaaagacagggggagggtaggcattggagggaggagacagatttgggctgtctcaggaagtgtgaagtagaagtggcctggtgtgaaaggagacctctctgaatccactctgcccctgggctcagaagcttctcgggatggaggaatggggtgacaacagtggtcccaagatccccggttcatccaagaagagtttgagtggcttgaacctggggttgggagggccagatggtggttggagaggcctgaaggcttcatgcaagttgtgccagagctgtggcctctgggacagagcttggtaagattttgagtgctcaggaggtgggtctcatggctgtcatgggtggaggtgaggctcctgccaattgtcagaggtccgctcctaggacaggcaatgagcttcccattcccagggtgctcaagacatccgctagatggaaacacagagatacctgctctggtggaggtgatggtaagggaagtgaccatgggagagaatgaactagataatcaagattcctcaccctcccccagccaacttggagtgggcatttaaggccctgcctaagcagcaactctagattactcaaagtctggggtagggagaaaatcaacctttgtctaggtctaactggtgggagacagatgtggctcttgtgtctctggacctcgctttgcccatctgtaaaatgggcttcagtagactcaatgagtgctgaggtctcccctgttctagagtgagatgatccatgcatctcctgcctcaatcagcatctgcctcccagcccaggtaagccatccacaggaacacatatcacacccacacatggggcacacgagtacacatgtatcaagggcatacacatacccacgttgagaggaagcagaagtgggaggaagagggaggccactgcttgttggcattggctccctgctcagctctctccatgtacaggcctggcccctcctgttaaccaccacccttagcccctcactgcccaccagcttccaccttggggtctggtacctttttgctttgctcagtgggagggcacacggagggatgtgcctgtcactcacctgatcccaagaaccccttctcaagtcctggggcccccagcactggttctgatgctgacagcccacaggcacctccagacggtcacagcacacaagaacggcccctcacatcctccctctcacctacggtgtaccaaaccttccatctcaatcggccgcagtacctgactctgcacccactggccgccccaccccgctgcgcacccacaaccacgacaaggaaggcaagtctggggcccactcttccccgctgcccctccactgatgctgtgcctgctccgggctgcgctgggagggactgggcacgaccaatatcccagccctcgcgtctaggttcggtctggagcggtgggaggaggcgagtcgagatgcttgatgtcccctattcctcttacacagacacgcgcacagacggcccggctcccgccatcccccacctcccccgccctccgcaacccccaggctgccgggactctgggcggccgggcgaacactcaccgccggcccaagggcccaggcgagggcgcctgccagcacgcatagccagcgggcgggcagcggacttggcgggcgcatggtctgccctgagcccgcggcgggcggccccgcgcgggcaaagagctggcgggcggcgcaccaggcgggcgatggccgggagcctggcagagtggcgctggcgctgtggccccagagctaagaggcgcagctcagggctgggggcgggccccgggggctcgtctgacgggcggcggatctagccaatggatgggtggaggcggggccgccgcgcaggtatggggcggggctggggagcccctgccagtgaggaagctctgctctctctttgccaatcccacaccttggtcttccgtcgtgagacatttataggccttcgcccctccgggctcatcacccgggaatctcgagacccgaacacattccatccttccatgcttagctcacgaccttcgcaagctcccacctctgtatccaccctcagccccatcccagggcgctcctcatgtctaccctcggagccacctcctccaggaggcctccccgccagcctccccatttcccacctgtgcgtctccgagggttcgtgcgcgcaaatccgattacgagacaggaagtgccacttatcttcccaggctgcgagctggggcccagcaagtgtccaggcgctgacagagatcgggttgtttgatcaattttcaacaaccccaattcatccttcgcgccgaagaagccaggcgagaggaagcgagggctcgaaagaggcccgactctgggttccttggtgttccctgctcccgggtgacctggtggggcgcgctcagcacctgttgggtgccctggcccttcaagcctcgggagacctgctccagggaggatgaggtgtccgcaccctcgcgggtctcgtccagggcacctccccagggaggctgggctgaagtgccagcgccctcgcgtggggagcgaggtctgctcccagcccgcaggccgactccgcagctgacctaaaacgatccacagacgtcgtcctcctcctgcattccctattttacagctggggatactggggtccagagaggggccaggaccctggccgcctgcctttggtgctgagcttccaaggggcggctgctcggccgctgggtgacaccgggtcagccccttttctcgtttattcgtccctggcatggggagcggggtcaccagctctgcgccctgggagcgcgtcttcttgtggaccaagcgcaggtggctgctagccctctttctacgggctcgagcctgcacaatcgaggctggagatgtggtcgcggcggcaggatagagtggctggcggagccgtgtgacagaaggagaggcggagttcagtggagaggcggagagggcagcgggtcccagagccctgagcagaatgtgcggctacctgaaggaggtcccgcgctaggctttggctgaacagcaggcgcgcaggagctccctgaggacccaccagggcttccctccctacagagagggaacgttgggatgctgccatggggtgggcttgaggggagtgggggaaagccgggaagggatgagtgccctggccctttcttcagggcgtacttacactttctttccactctctcttctttctcttctttcttcctcccttccagcattccatcccctgcacttgctctttttccctttcctccctctcctccttcccttcattaaagggaacctcgccaccatggagcccctccctcctttcttccatgcacatttattaatctctttctgtgtgccaggccctgtgctgtgcactgggggcacagaggtggatgggcagcatccccttgccatgaggggaacttggggagctactgtactccctgcaatttctacctccttcccgatataatcagtgaggctggacacaggcctttccttagatttgggagctgtggagatgcctctgtcctagcctttcttgggtttgtactcgatctcccaatggcgggagtgtttgaatcatcctcagccatctcctcagctatccacacccctgacggctgctgttagctcagaaatcaggggtctttgtctctccttatgaccctgtgtaccccgtctcgggtctcagttccctggcaggacagtggaattgtgtctttttcctgggaagttacttgtgctggc

SEQ ID NO: 316541 - DNA, 4001 bp, Homo sapiens
tcgcgccactgcactccagcctgggcaacacagtgagactctgtctcaaaaaaaaaaaaaaaaaaaaaaaaaaaaaaaagccagcgcagtggcttacatctgtaatcccagcactttgggaggccgaggtgggcagatcacgaggacaagagcttgagaccagcctggccaatatgctgaaaccccatctctactataaatacaaaaattatccgggcgtggtggcgcgtgcctgtagtcccagctactccggaggctgaggcaggagaatcacttgaacctgggaggcggaggttgcagtgagacaagatcgcgccactgcactctagctggggcaacagaatgagacgctgtctcaaaaaaaaagaaaaaagaaaaaaaaaaaaaaaagagttatcacaccactgcactccagcctaggctacagggcaagatcctgtatctaaaaaaacaggccaggtgtagtggctcatgtctgtaattccaacacttcgggaggctgaccagggaggatcacttgagttcaaaaccagcctgggcaacatactgagaccactgtctctataaaaaataaatgaataaaaataaaaaattttaaaactgtataataggcagaacagtaaaacactgtactcagcaactacgcaagagatactaagtacaaaatgatttccctacattccccaaattctctattatctctttaacatccaaaaatatatacccactcaaaaatgggtaatgaataaatgttatatagaaaacccaaatggtcacatcattaagaaaaatactaaatagatcctaaaatctaaatatacacatttacataaacattaaaggtaaactccagtaagctggaaaaagaaaatgcaggatgatattaccaattaacctctcattctgtacattaacgatgcattttgaacaggaagatgctactaatataaaaaattaagacatgtaaactaattaaaaggcttcatcaaaaaaacagggtaaggaaaaaccaagaccaacatgacatggccaaggacgagtcatttgtgactcaaaaatagctaaatacaaacactccaaaactatttcctcaacaaatggaaaaccagagcgctgccaccgcagtaagaggaaaccagacagaaaaccgtctaagaagtgaagttgttaagcaaacgcttctgacaccccagttgaaaactactataacccccggaaatagactccagggaagcttcgcgggcactctgaggtttgactccaggctgcgggacccgcacacctctctttccaacccttccctctttcatggggatgggaggagcgcccggaaagctccgcccccgtcgcacggtccaagaggcaggcgggtgcagggagaggtggcacgaggccgagagacgggagagcccgcccaggtgactggagctggaggcggagacacagtccgggaaggggcccgccgtatagtacggaagatggagccccgcaagcccgtacggaacagagactaggaggattggaaggaaaaagaaaacaagggaaatgaaatgcgcccctcctccaggtaggggcggacacaccccgcccccccactccgggcggaagagttactctcgggaagcttctcgtggggagtggaggaagaacgtggaggccccgcccccaggacaagaatcaggaggaggaaaagtcctgtcaggccccgggcccagcctcccggcagaccggcccgccccctcctcgccggcggcccaagcaggtgccgcccctcccccaagcccggcgcccactctgccgcccggccagccgcgcgacctgcttcctcgcgcccctcccgtagagtcgcctccctccatttcccactcaccgtccgaggcggctccgccgctgcccccccccgaccccgccagtggccacagttcacacacacacagcctcaggtcccgcactcactctccactcacacacacacacagcgcgaccacggctccacagcggcccacatattatgcgtcactcgcgcgctacgtgcaccgcgcgcgcgcgctcgcgcctacttggcgcgaggaccgcgagcaaggggcgggaagagaacgcctgcacgatcggggaaaaaaaaaaaaaaaaaaaaaaaaaaaaaaaaaaaatcgaagagccccggggacgcctgggaaatgaagttccgcgtctaggggcgggcccaccagtcccaattgacgcatgagctcttcgcctggcgcattgacttctggatttgtagtttttttggataaatgcgaactgctgagtactcattggctgcttcggaaggcggaagtgaaaagtgagggagccaatccttctaagacagtactgtaatcgcctgatactttttcagtgtcttgttctgacctgtgtgcgcaaagagcctctgttttatttggccatttgccttatcttacctagaacataccgtgatctaagaaaatatttctcataaacatatcagaaatcacagcactcattaaatcagaaggcactggttgttttttgtttgttttgttttgtttttttgagacagagtctcgctctgttgcccaggctggagtgcagtgacgatctcagctcactatgacctccgcctcccgggctcaaacagtcctcccacctcagcctccagctgagactacaggcgcatgccaccacacccagccaatttttgtttctgttttgtatgtgcgtgtttggtagagacatggttttgccgtgttggccaggctgttctcgaactcctgggctgagttctcccagcctcttttttctctgtctttttttttttttttttttgacagggtctcgctctgtcatccacgctggagtgcagtggcgcgatcacagctcactacagcctcaatcaacctcctgggctcaagctatcttctcacctcagcctcccaagtagccggggctacaggtgtgcaccaccacacccggctaatttttaaaaatttttgtagagacgaagtcccactgtgttgtccaggttggtcttgaatttctaggctcaaacgattctcctgcctcggccccccgaagtgttgggattacaggcatgagccactgcacccagcctctgtctttttgttcaagacctagcctgtaagaatcaatagatacttattgccaggttattatacgtgaggcagagaagtgaaaaatcaaaagctcatagattaaggcaggactgacctcacaggtcacttaattcaatttcttcatgttgttgggaaaaatgaggcccagagggagtgagcgacttgcccagcatcacacaaccaattaacagcagaaccagaggactccttactctgaccagcagtccctcttgtggggcatagaagataaacatgacccacagttgagcagaatctcgacctgacaagatcctacccagcgttcaaggccttatgcagctcattatctctccgggaatgctgagcaagtctccgtgcatctccatgagtcttcacggcaatactgtcacatgaatacaagacacagcaagcctgctgctatgctcaggctcgacagctagtaaggatcctgaatcctgggtcccttggtttcattccccactagatcccatttccctctttccagaaaagggaccatcctccttctcttaaatgtgtaacttggagctactgctccaagcagagattctctaatatgtgctgggagcgccacagacatgtcacctttcttcacttctttctcctgccacaacacacaggtcccttctctgtgcttctggaactctacctctgtcagtaatggccagtaccatttctttcaacttcagagcatgctgggccctgagccaagtgttccagccacactctctcatttaaccctcactaccctgccacacacacagggaagatatggttaatcacctttacagatgagaaatctggacccagagaggtagaacaaggaatggaacccacatgccattc

SEQ ID NO: 316542 - DNA, 4001 bp, Homo sapiens
ctttgactaaaaaagtataattgctattacagtaaacctaagaaattcataacagtgaaaaatccaacgcaaagctatatttccttgctaaaacacagaacacatttaataatgtcatacagcgtgaagataagtcaaatattcattcaagattcagttaagaatacaacagtttgatcttaccactatgtaccgatgacacctacagctgtggatcaagagaacatacgatctaaactctatgaaagctatcaatagatccaaagttaaacatacttcattaaattcaaaagatcttacttctcattcacatacataactgacattttgtgtcacactggttgaaatgtcaatggaatagtgagatacagctaagaatcaccaacatgtcccaatattctggaagacagaaaacatccatctgctgacaatggtccagatacgaagcaaatatattaaatataaagaaaaaatcaacatattactctgttagagctctggaaagaattttctcacaaatgcctctttgaccatataaagcccagtagttcaacgaattttttttccatttatctttattgcatattctatggaacaggccagctattgccagaggattcaatacctattctgtgcttaaatttaaccatgagcaaacccacgtcttacacaaacatatgcagattctccatccacatttatattagatatacctcaaacccacacaggcagacatagacatacacagacaattaacatgtaattgtctcccaaatgcagacatttggagtaaggtttagcaccacaagctaacatccatgcttgttttgcttgggttttggggtttttcagtaggggaaagtagagtatggtagagggtggatggtgcagaggccagaagccttcctattcattctaacaagaatctaagaagtggagggggcctgcttatttaaagaaggctccccagctagctattcctgataacccacggccatggaacctctcaccgatcctacctcctcccaccctatcctcctgtaaagcacccccattttgtacacccagacactctgagcagctgtttccctccttccccagatgccaagcacaaagaactggccaaggcacaggagtagcctcgaacttcagaggcccacctttcaccctgctgccctcactctggtgcacaacttgcacgcggagacaaactggaaccagcctcacagggtgcgcaccgatcctaagaggtggacaccccatctaagcctcaggctcaggcaccttgatatcagtccctggaggctaaaggggtccacacctgtttcccaggcccgacagaccggctacacacctgttccgcccgggagtggggaggggcatgacacccgccgcctaggctcacagtcgggggagcgggcgcgccagtccctcagcctaattgccgcacgactgtaacaggacagaatgaggcttgcaattatagtcgcaaagtagatagggaactgaggggttactggccctttgcagaaagggagagatacacaaatacatcaccggagtcactggatttagtgatacctcagccccttccaggtttggagccaataaatccctttttacttaagcccatttgaattttcacattcatttggaaccagtaagtggaaattgcccgacccagttccgggccaacgtacgacacgcccctccactcgagaatcaaccccgcccggcccgtggctcgggtccggttagcccgtcaggggctgctctgttcgctccccgaggtcccgccgctgtcgcgcggggaggagacgccgaggctcagagacctgtcgcgcgctctcctcctaccctgaatacggcccctcaatcctgtctccttccacgggcccgctctctggaaactcgttacctgagcttgctgccattccggccgtggaccgccggcccacgtgaccgcacccactgctctagcctcacgcacgcgcactacctaccactgcgggcagcgcttccgctttcctcctcgcactgctccccctcctgggcggtccgcgcctcttcaccacgcccctatttaaagggccagagatacgccgtcttcccccctacggaaaaaatgggtgattcacatcttgaggaccaagagaatggaaacgtcgaaagagtagcgcagacaaataaataacagtccttgaggtgagaggagaaagctcctcctttaagaaagtgaacttacttgcagccagcccagaagggaagttgattccctgccttttggagtttgcaaccagtaaattttttttaacttttttttttttttaaaagatgaactcagaattgcctatttattgtgtcaaataagtacaataggcacacacatactaaaataccaactattatcttgtaatatatcatcagtgttgctccccaaaatacatcttaacaccaaaaatacaggagaaacatagtctcaaataaaggaaacatctgaaaaatgaacaaaaacgtatgcttatttctcttatcgctcctgaagaaaggtgaaagctttcagaacagactggtttctagagtcatcactgtacgtaacattagccccaggacacagattttaggcctgctgggggctatataggtcaagaaaacaggaggaagaacaccagaagatactcttggaaggagatacagaaaatattcggttgggcagacatttttgagcatcagctaggttcactagacttctgggccttcagaagacccgaaggtgttgccctgtcctccaggtatttattttctaagaattcagtgtacagacataacaaaatacaaggcaggctgttttgagtaatataaagaaagacattgaaccaccattttcgcacagacagggggaaagggtgaaacactcaaggaaggatgtggtatcttgtcagggccttgaaggatttcagtagcagagagcagggagaatgcctagctgagggaagggtgggatcaaaggcagtacaaagcaagtttgggaactagttattggcctgatgtagccgtggtgtggccagtggctttcaaccttcttttaatcatccctcacagtaagaaatacatttcaggccaggtgcggtgactcatgcctgcaatcccagcactttgggaggctgaggcaggtggtcaggagttcaagaccagcctgaccaacatggagaaaccctgtctctactaaaaatacaaaaattagccaggtgtggtggcatgcacctgtggtcccagctactcgggaggctgaggcaggagaattgcttgaacccaggaggcagaggttgcagcagtgagccaagattgtgccattgcactccagcctgggtaacagagtgagactccgtctcaaaaaaaaaaaaagatacatttcagccatggcctagtataaaaacacacacagtatgcgcatatgtgtgagtgtgcattatagatagatagatagatagatagatagatagatagatatgctgaaacagtaattgcccttagagtgtacaatgcaacttggtattttctattctattctctttttttaagtgctggttactgaattcatttcagtactcagtgatgcagagcaacccatagtttgaagacactggtgtagtgtgtattagagatgtggtgggctatgaggctggaaaggctaggaccagatccaggaagacattgcacgctaagctggggtgttctgctcttctggtgagagtctccagaggaactcgagcagaggagtggcaagatgatagctgtgctttagaaggctggaaaccggcctttggttctgaatatcacatttttctagtaaagctattaaactagagactgtctacagaaggataagcaagctggtgagaccagaaagcctgtgtgacagagaacttttgaaagtatccagaggaaaagaaattagcagaagtaggggagagcagggtcataggggtgagcagtggaaa

SEQ ID NO: 316543 - DNA, 4001 bp, Homo sapiens
ccccagcccacgttcacagccctactgtacctcacttcctcacaatgaccaattgttcatcctttcaataaatacttgctgaataactgaagggaagaaaaagatggaaggaaagaaagaaaggggcttccatcccagccaaccgacacagtggagacagcacagcatcaagttttaaatatcagctcggtgacctctaattgagtcctttggcagctctcttgttctgaggagcctgtttcctcatccataaagtggggatcataataactctgtgattgtggtgaggaacaaatgaggcaatgtatgcaaagcacccaacatataagtcagtgacccctgctatgactttcatcccccataacaggaggaagggggattatcccccttccatcccccataacaggaagaagcctgcattacccactacttgggattcaaatgaggtgatactagcgattgtaaactgtaaatcactataaacatgagatattttattgtcattacccactgtaacctacttataagcatttgcttatactgttgcccctaccttccacttaactgagtcctaccctttcttgcagtcaaatgctggctctacctccttctggaacattcctggggcctcagcccagagctcactctagcctctaaccacaagcccctaacgtgctgggcttatgccagctctcaacaccactggattctgttcctcttcttcttacctggattgcaaatcccctgggcaggaatcaaagccatgtatgaatgaatcaatgaaagaaccaggtgcaagcacagcacacagcacagggctgggcttctgtcccttccccgggcactcgctgggcctcatagtgccaggttctgtgtgaggtgctgggatttggagatgctccagcggggagacagacaggcagatctgtgacaatgactccccctgtaagtgccataacgagggggcacaaaaggctggggagccaggaaacagtgcagctatttgtgggagagtcagggagggtttccctaggaatgacgtttagtggatcttaaaggacaagtaggaatttgctcaatagaagatggaaagacagagcagagagttgggaaaggacctgtcagtcagtgtggccagcggcagcggtacctggtgtatggggtcgctgggagagggatggaatggggtgagagcgagggccttggctgctaggcacaggagtctacacttgattcactggcccacgcggggccggattgaggtgtgcagcctaaaatagtaaggggccggaggggaccaccaggggagaaggctccctttgcagccccctagagagaccggtctcctgggctgtaagggttgctggcgcccccgcaagccctgtgctgcctgctgtgtctgtctcccaggctgtgaacctccgggccatgttctcccagcacctggcgcaggtcaggtgcccagcccacgactgctaaataccaggatgagccaatgaatgcacaaggcagtgcccggaggaaggcgggggacgggcggaggccgagcggatgcgggagcctgagctgcgcccggctttcaggagcgcgggtgcgggcgcgcggaactcaccctgcgcgcagcggcggggcgtcggggtccccagccccgggcccagagcgcggcagcaggcggcctgcgagcggcgccggctctgcagctggaaggagacgcgccgtccggcggcctcggcctcgaagccggacaccacctcggcctcggccagcgggtacacgaacacgcctggggagggcggcgggaggcggcgtcggaccctgcccggcgcaccccccgccgcgcccgcgccccacccgggcctcaccgtccaccggctgcggctgcgggttgcggtaggtgagccgggcccgcacgctgaggcaggggccgttggcgcaggcccggacccaggagtccgtgagcggcagcggcgtccagctggaggggcagtacaggccgggcatggcgccgggaggccggccctgcgggaacgggccggggaagctgggcgcagggtgacgggacgcccaccccgcgctccagaggccagcgcgagagtctcactccagcacccggacggggcctgccggggcgcgaggccgagcgggagctcctgagggcgacaggtggcgggggagataagggggcggcaggcgtggtggcgaggagggcatcctcacgcgttacctgggcagccgggccgcggagggttaatgattaacgcgcgcttcggcgcccagcagtcccgccgcggctcccccgggggtgggggcggtcacagctgttccaccgcccactcccaacctcgcagccacccccgtacctgccggccccccggggccccccgcggccgccagctgtcggaagcggcgcgggtggagatggaagatgctccgggaaggcggaggtttaaagggcccgaatccccccggaggcccccggccctgcgagggatcgcgggggcagggtggatggggcgccgaaagggccttggtctttctctccctggtgcctcatccgacgggggtgctggccggagtggaggggttaagggtgggaagaacgagctgggaaagcgaaaagagggggtctttgggaggcaagcccgggagaggtgtcgggccagggagagtccgtgggagccgccaggttaccgctccctaccccggcagagctgatgtgggaggagggggcacctgcagtggccgcggcccgcgcaggggatgccgcgggctggctctggggatcgccccgctccctgtggcagtctcagcctcaccgtcgcgccctccgcggagttctaggtgcccacgggatccgtgtgggtggtgccgcctctgcgctccgggtggccctcggtcccggcacctgccggccgccagttcgtgactgtggctgcagcggctctgagtcccggcaggggcgcgggccctgccggcggtggtcccgcccccgttccgagaggccgcccctccagcctgccctggccacgcctgctgctgctgcggcggggctggcgctcccccctccttcgggcgcggtaccgcctccgcgccagccgcggcagcccgagccagactgggcaccgcagtgcagggaccgcgtccccgccgccgcacggatccccgtcactgcaggaccgaggcctcagagaccccaccctttccattcttcaggaatcaggcgtcctgcaagtgccaccgacactgccgcgaccccagctatcccattaccacgacggcatcccattccccagcccaccccaccccctgccctgggttgcttcccatcgctgcagagaccctccctcctgactgcagcgaaccccccagccccccatcaccgtcaccgcaggactcttcccccaagaagctggcccctttcctttgcaaagtgctcttcatcactgcagaaaacctcccccatccctgcaggtacttttagttcatgcagccacttcagtgaccactcactccaagcagggattcctcatcactgcagcgacctcctcccacccccaagcagccggccttggcatcgctgcagtgccaaccacttctgctggggtgggagggtgtgcacaatagcgccctcagcctataaccccttggtctcttcagctgtgcgggccttgggagtgaagccttctagcctgaagagccttcttatggctgcagaccgtcccctcatagcagtgacccccacccatcaccgcagccctgaagagaaaacatctctgcttgtcaggagggccccttgttattggcagactttgcatgtgcttgacagtgttatgctgtcaaaaagtaggaaggtccggaaaacctctcccaggtcccccaaggaagagtctgagagccctggggaagtgagaggagatgaccatgtttggggatcatccatgtaagctttttggcagatgccatactgagattctgcagagagagcttgaggagagctgggg

SEQ ID NO: 316544 - DNA, 4001 bp, Homo sapiens
cagctctttcaaaagttcttcataggaaataatttcaagtcagttcaccaatctgattgctacctatgaagaacaaggtcctaagtgctgaacaccaaactctaattttgtactttgaccagtgaaaagtggaattatctatcacctgcctcattctacgtgcactggctcacattcagcctattggaacactgtttttccaaacctgctgcagttaatttacattttctccatcccatactagtacaattgccttgtaagtctttttaaaatatatatactttattgcatgcattttgggagtgggcaggcctgggaaggaagcaagcagggaacacactgcagtaataggagttttaagtcttaatgcaataaactgaaaggcctgattaactacccttactctcctaagatgtacaccaccatagagtctataatacaatcgggttactttttgagttatatttcagtcccaaggagacattctcactacctgccttggatgctggtgatacttaaatcctatcactaatgcactgaaaaacacctaatagggtgagtttagacttattaatttcactcatttcaacaaacatccagtgagtgcttaagacactgtactgatcagtgagatcaataaaaccaagatgtgaactaatcagaagactttatggcctaccaccttctgctgggattaccttactgaaggaccccttcatctaactacctttatctgacacttgatttcaacccgcagaactccatataatgctgtgttttataaagaaagcctaggtgttaattatttctacaccctttcaatcccttttcccctttgggggccaccctaagtgctaggtaaatgtttaatgaataaatgcaccaaactgccactaccacatacaatatacctgcaggcaaacacctgtaagagggcttttattccctgcatcactgaaaatattaagtggcaataactattttttaatattattattatactttaagttctaggatatatgtgcacaacgtgcaggtttgttacataggtatacgtgtgccatgctggtttgctgtacccatcaactcgtcatttacattaggtatttctcctaatgctatccctcccctagcgcccccagcccccgacaggccccggtgtgtgatgttccccgaagtggcagtaactcttaagcgtaaccgcaaacaaaagtgaattcacaaaggcataaggcacaagacacacacggtaagattagacaactctttaccacatggacaataaattacacaaacaataaagacagattcagcgatgcacacttaagatgaagaaatggtgaagaggaacttaaataccaaaacaattaaaattataatttccccacgcacattcttatgtcacttaaacctacccaggggacagctcccacataagagagggctgggggctcccaagtgcggaatcctcagcagaaaccccgcagggccgttggcgctccgccgcctcgccacgcccccgcacaagccgctcactcctccaacgcccacccccctgggaaacccctggaggcctcggctccgacgcagcgagggcagagcgcttcgaagaaagacagggcaagggggaggcaagtgggcggggaacgagcctatcccgaccccgcaagtccactcctacagaagagcggcgacaagcaatcccgggctcagaatgccgcccacgagggtcccgggcctgggccccaagggccaagcaagccgacccccgccccttcctcaagccgttagcgccgcggccccacccctcgtggccggccgcgccccgccccgttcgccccatgccgctaccccagctggtcgtggcgccgggcaccttctagctggagtgggcccggagctgccggccgcgtccggaagaccgaggaaccgggcttccatacctgcactttcctccgccctgctgtgttctgccggtgatgggccgccatcttgcatgttgacactccgacgtcacttccggaggtggctcagagcgggaggatgtcctgcccctttccctttggccaagggttagtggcggggctgaaggtaaacaggctgttgtgtttcctcggtgctgttagttgctgtgtggccggtagccatgtgatgaggtagatgcacctaaaaacaaaaccactgtgcaagtataatgctgatggggagagagccacttttcagggctgagggagcaacacgaattcacttgtgtggtcctagaccctggcttgcgctcttttccgcgccctccccgagaggcccaagcaaaacgaaagcactgaaagaattaacagtgctagacatggcgctggaccatctcctgacctttcctaggcaggcaggagaaccaagtgaaccaagtgatttactgttaagtacctaaaaatgcggagaattatgtcgtggcctcaaagggggagagatagaagtccttgcaaaggaggtggcctccatcttcagggggagcaaagaatccgtttaaattaaaaggataaaaagtggggccataaaagaacgagatcatgtcctttgtagggacatgatggagctggaggcccttatccttaagcaaactaacaaaggaacagaaaaccaaataccgcacgttctcacttataagtgggagctaaatgatgagaacacatggacacaaaagagggggacaacacacactggggcctttcggagggtggagggtgggaggagggcgaggatcaggaaaaataactaatgggtactaggcttaatacctgggtgacaaaatagcctgtacaacaaacacccgtgacacaagtttacctatataacaaacctgcacttgtacccctgaacttaaaagtttaaaaaaaaaaaacaagacaaaaagatgttataggaaggcgaaaacggtacaccagctaaaattgttcccagagacaattctagtttaaatcatctcttatactggaacagttaggtttgacttaaggtggttttcctgaccactaattataagagctgagggtgatcagaccctctctagtgaaagtgaatcctatagaactacactgtgggatatagcatatgatgtatctgctagtcatttgtggctcttgagcacttgaaatatagctagttccagttgagatatgtaattgtaaactacccccaaatttcaaagactagtttgaagaaaagaatgtaaaatatctcattaataattttttgtattgatttcatgttgaaatgatgtttgggggtatattaggctaaataaaatttattaattttgtcatggatattagaatatttaaaattacatatgtggtcacaaatttctgttgcatagtgctagtatataagtaatgcttagaaaagttgtcttgacaaatacttcttaaattaataaagaaatgtgaattagatgagtaaaaattgtgatggcagaaagcttcttaagcaaaactggcagtgataacttataggtaaattactgcatcattacaggcttattcattcactgattcatgtattcattcatttaacaaaatattatttagcatatcatatatgccaggcactatattaggtgttggggaatcagtggtgagtgcacatagtcatagaacttagagtcccaggatgagacaggaattaatacagagataagtactatgaagaaagatgattgtaagacaggaagtatcttgagtcaagagttaactaggcaaggagagggaacagtctgagcaaaggtcttgtagcaggagagagcatggaacattacaggaactgagagtcaaggcttagagtacagagaagtgaaaggagtatgcagaggccatacccagcaggatcttttagaccaatgggaagctgttgaaatacaggtagggaaataatatgtctgtattttaaaaattgcttaagtgtctattgagcacctatgatgtgcaaaatacaatacaggtatgttgctc

SEQ ID NO: 316545 - DNA, 4001 bp, Homo sapiens
gctcaaaggtctaacttttagtactggctgcacatgtgccatgggattattccattctctggctgttgagtctgctaaaatggatgaacttcattttttttttttgaaggtacacctgcaaagctcaatttcttttttagaaaaactgtctatgttcatacaagctccgaattaccttctcttctcctctttggtccattagttcctgcttttccaaccggtaatgtcaaaataagtggtctggcctttgaaatatttaacataaaatagaaataaattaaaacttgaggttgaattttccagtttcacttgggttcattcaagactaatctgcagtttggaaagaacacccacctctaaccttctgaagcagtttcaccaacacatcaactttataatgtagactctcctaataggccctagcattcaaattctttgtgttcttagcaccggaacaaaactgccacatttctgttcactatagagtcaaagctgtcataatctgctgttatgttttactgaatgtcctcaagctgtcaaaatgtttgctatgtctatcaaaatatgctaaatttacttggggcactgggcatgagcagcagcagtgaaatctttcagacaaatgaggttggttgaatagcaaatatatgaaggttgaaatgagaaaagtgtaggacagagcatgtcttgctactaaatatgataagttctattataaagaaatgattgatactattgggacattaatttatcaatacaggtggaacccaacttgttatattcttttgtggatatccaaagataaaaatgtgtgcctattacaggctaatatattgtgagcttttattatattttattaatttccaggtggtattccaaaatattttctatttcaaattagtatggatactccaagcacccacggacaatcttaagaaggccctagatcatactttagtaaacataatatagtagaaatgttggaggctcatgactacctaaattctacgtcatggaagagcacttctttctacccatatttgaaactaaaaaccactttgatgtatgctgttcattatgcatagctgcagaattcaaaattcattgactaagagagaagaaaattattcatttacagttaaattcctatggtttattttttatgcagagttaaaatgaaaaattctaattttgtttttattggcattgttccaggatttacaaaatgagtgggagactcgtccctcataagggatcttgggacaacaaagtgccagaatcagcttagaaaaggagctgtgccacttagggtgagtgagacaggaggaaattttttgcaaactgggtatgcatatttgcatttgctgagttctatgtccgtattaaatgcaagaacaattattcctggaggtcaccttagagatctggctttcttcactcacagccataattttttgtttccccaaaatatgttgatctctaagaaaaaaattttttccaacaataaatagttctttcttgatagtaatgaaattcagtgaagcaatttcaaactaaagaatattatttggcccaaagaactgaggggcaaagctaccaagcacattgtgttaaatccaggcctaaccaattatttttaattctctgctataacaattaagtgtatttttttaatgcttaaagaaaaatatctctgtgtttcattctaggctccttcatgaacaactcaaactatctggtcaataagcttcacacttacctcaaaggccttctgtatttttacaaagtcacccacgctgagttggttttcaagcaggcctgtgccatagtcttcaaatgcagttacaccttctgttctctcaggactctttggcccaagctgtgaccctatgtttaactcaagtacagctttctggcaactcataatggcttcaccttttctcagttgccttcaactatttctataaggatggatcttctttttccttcaacaggtgcctttgaaaagaaactcaacttagcaacagaattccaaaatgaaagtacaaacctttcaaggcatacgatcaggaggcaaaatgttcaagctgaggtaggaaatgaaagccctcaaccctctcacttatttgattctagagtttattttcaaaatttacagttgaatgcttttaaaatggtatttttaccccttccttatactctgtttaacctggcttgattaaaaatgtgtaaagctttccccacatttatagtaactgacacagaaaacaacttccaatcctcattttaaatgcattagaaaagcaccttcccaaaaatctctttaactaaccttgcttccattaacatgttgtagttttcaattccactttcttgtctggaagagttagatgacaaagctgcagagtttccctaccaatgaagtacttgactctgaatgccaccttcccagcaatgtggagttgtttgtttcatctgttctgatccttttgtatgtttcctggcaaccaacacaaagccaactaaaactttccctttcacttccccctctccaactgaaagtttaaatatataatgtaaatgttgaaatggttttttttgaaataaaaggacagttcattccactcattttttattaaacgacatcttgtattatttaaagacaacttttaccattatataggatatatattatgaaactatatgattagtcaaagagaaaagcatgaaattctggaattttatgttttatacacagaaaatgttttatttttatataaaaggaatctgtttcttatattctttttgtcttagtttctatgtatataaaatagagatggttcaaaaaagcttccaacttgttgaaaatgtgataaaaaaacacagcataacataatatgataaatctaatgataaaattgcttgcagtgtcattactggttcagctaataataatgaaaaggaggagaaaaagaagaaaaattaacattttttgagtattaaccatgtgccaggcactaaaactttatgttcattgtcttgtttaagcttcacaacaatcctacaaggcagatgtgatcattatccccattttactgataaagaagcaaaaagccgggcaaggtggctcacgcctgtaatccctgcactttgggaggctgaggcaggtggatggcttcagctcaggagttcgagagcagcctgggcaacatgacgagacattgtatctagtaaaaatacaaaaataatcagccgagcatggtggcgcacacctgtgatcccagctactcgggaggctgagttagaaggatcccttgaacctggggggcagaggttgcagtgagccaagattgtgccactgcactccagcctgggcaacagaatgagaccctgtctcaaaaaagaaaaaaaaaaaaagcaaagaaaatgccaaaggtcacacaaatagtaacatacggaagagaacagaatggctcccaaacttcagatactgcatgtattagtctgttttcacactgctaatgaagacatacctgagactgggtaatttataaaggaaagaggtttaattgactcataatttcacatggctggggaggcctcaaaatcatgacagaaagctaatgagggcaaagtcatgacttacatggcagtaggcaagacagcatgtgcagggtaactcccatttataaaaccatcagatctcatgagacttattcactaccaggagaacagtatggggaaaccgcccccttgagtcaattatctccacctggccacgcccttgtcatgtgaggattattacaattcaaggtgagatttgggtggggacactgcccaactgtatcactgcactttagatggatgtgcccgttgcactttattttcacttctgtaaactaaaaagttggcattacatcttctctagggtctcttccggctctaacattctctgagctggtgttcactagaggcatggtacagaacagagagaagagcat

SEQ ID NO: 316546 - DNA, 4001 bp, Homo sapiens
agctggaactacaggcatgcaccaccacgcccggttaatttttgtatgtttggtagagatggggtttcaccatgttggccaggctggtctcaaactcctgactgcaggtgatccgcccgcttcggcctcccaaagtgctgggattccaggcgtgagccacggcacccggccgagagcattttttaaaagggtgaagtgccacagccggcagttctcatcagccagagcgcagaatgagagtactgaacatggggaaggggcttggtggggtgggtgatgagcaggtgaaagatttgtaaaaaagaaaaggaggggttgagaagggtaatcttactttgaaattctacctggggcgctcaggagacggtctgccgttgaaagtcacctcagcggctggactagattagtaagaatgacaacatcgcatccttcaaaggctctgcctcggctgcactgagacacgataaaggccagtctttaaaaactgagtgatctctaaacactctgcactagtcataccaccaccgtcccgttcaagagtctgtgcctctaaggctgttcattctgtctagttcatgatccctttctcagatggatcaactctgcttatccttgaagacttcaaagaaattagtgagagacagtcaccatcaccagagtcagcacaggtcaacttttctctacaggcttggggtttctgaagttggacttgatgtggagaagctggatagcaaccaaaatgattgaagggctgtggcgctggcactggtaagaatgaaaagaattagggttactggacttggtgaaaaagacatgaggagaagggacaggcaaataataatcaaacaccatgaatcagagggtagggaaggtagccaccgttcctttgcttttactagagactaagaaatggattatacatagcaagaagcttcagaaaagatttcttactacataaaggttccaagacattggagttgaccaagggagtctgtgaaccctattattttaattactcagctcatggagttgttttgaggattacgtatataaaaatctgcgtaaatgacgtagtatacagtgcctggttcacaccgtggctcaaatgatggttattattattctcttactaagcatgctttaaaggctgtcggaaaactttggggccacctaggaaatcgtagtataatcaaataatgctgaaattcttgtgtgtgtgtgtgtgtgtgtgtgtgtgtgtgtgtgaggtaggggctcactctgtcgcccaggctggagcacagcagggcgattacggttcacctcagcctcgacctcccgggctcagcctcccaagtagctgggaccagaggcgcacgccaccaccctcggctaatttttctatttttttgtagcgacactgcctcgcaatgttgcccaagctgggatgctgaaattcttccccttccaagaatccatctataattatagcctccacgtcattctccctattggaatgtttaattgactaaaactacattgccttcatctgcttactaagcggtggatccagtaaagaccacatcttgtccaaaagacggcagcacttaattagcgctcaaatggcactcgaacgtttgggcgagggggtgttcagtcgcagccaccttactttgcgaaggcacacagggacagacgttcgctaagtgccgatacttagggagaacgagagggcctgaccaggtaaagacggcctccgctgcccaagctacacaaaaaggttggggagccaggacccggcaagcaaggagagaaaagtttcatgcgttgagctggagtctgaagcaaggacctaacggacacagggaaacgtcacaggaaagggagcccaggagagcagacgcggagccaccagaccagaaaaaggaaaaagcactggaaaacagcatcgaagtcaccggaaagcagcatcgaagccaccggcgccagcctcatacctgcgcttcccgctcccctcctcggcgcctagtgataacctcacccgccggcgcccaatcccgtcgagcgtcaggcgtgaggcggcgcagccaaacagtcacatccggggccgagaggaaccgcgaacgagctgggcgtgcgcccttgcttcgtgccctcaacccgcatggcggagccgctggcgcgccgcggagaggccgggcgagtcgggcggtttcggcgcccgcgctgagccgcggaggaggggcggaggacgcccctgcagccggtgcgtctgccctcagtgaggcggggcgcgcggcggacgcccccgggcaggggcgggagtggtggaggcgccggcggttggcactgacaggggcggtgagcgagccgctccggtctccgggcgaggcttggccttccgagcagagacggcgggaagcggcggcggcagcggcggccctagggccggctggtgaggcgatggcggcgccggccccgggggctggggcagcctcgggcggcgctggctgtagcggcggcggcgcgggcgcgggcgcgggctcgggctctggggccgcgggggccgggggccggctgcccagccgggtgctggagttggtgttctcttacctggagctgtccgagctgcggagctgcgccctggtgtgcaagcactggtaccgctgcctgcacggcgatgagaacagcgaggtgtggcggagcctgtgcgcccgcagcctggcagaagaggctctgcgcacggacatcctgtgcaacctgcccagctacaaggccaaggtgagagagccccgggccacaccgctgcccccagtcccgctccccggcgtcgttcgcggtgtttctcatccgagcttctgagtcagaagcttcgcctcaccagcccgcctttccacggctccagtcagtatcttcctcacctccccccaagataaagattctcttttctttggatcgaagttctgctccttaacccatcccacttccgtgatccacttttcaaacaactaggtagtttgcctcactcattcaacttttgacagttttccccgttaaagacagaccaccactcttgtaccttttaatgccctcatcctacttttctccccggcctccagatagacttcattatattaaataatcccggccaccttaacatgggcttagtttctaagtttctaagtttctagtttgctttcactccacgtttatctcatcttttccaagctctgatttttaaccatttgttttcattattttcccccaagttctctttagttccctccactatattggaggcttacaagtgagtgtagttctagtcatcctgctcacttacaagatacaggcttttatagaacgtccacgggcaccacctaacatactgctttgtcctgctgttattggctgtttccttgctaactttttaatagttccacattgatggtgtctctctttttctatttgtcatctaacgtgctgattacagtttcgctgcatccttcctgcatattccgcccgccttcatatacaaaataaaaatgtcaaggaacaagttgtggtacggctgaaaggactctcaggccgaataaacaaagggtcttggtcttgagttgagttgaatggttaacagctattcagtatagcagtcaatcaagatcatatataagagaagataaagtctgattgcaatgtgttaaacataatgaatgcattagtaactaaaacgataacatccccccctttttttttttttttgagacggagtgcaatggcgtgatctcggctcaccgcaacctccgccttccaggttcaagcaattgtcttgcctcagcctcccgagtagctgggattacaggcatgcgccaccatgcccggctaattttgtatttttagtagagttgtggtttcttcttgttggttaggctggcctcgaactcccgacctcaggtgatccgccctcctcggcctcccagagtgctgggattagaggcgtgagccaccgcgcgataacaccccct

SEQ ID NO: 316547 - DNA, 4001 bp, Homo sapiens
cttatcttttgcaacaacatggatggacctggaggccattaagtgaagtaatgatacagaaagtcaaaaaccacatgttctcgtaagtgggagataaacaatgtgtacacctggacgtggagagcagaatcatagacactagagccttcaaaggtgggagtggggtgagagatgggaaagtatttactaggtacaatgtatactatttgggtgagggtatactaagcccagatttcaccactatgcaatatatccctgtaataaaagtgacataaatccataaaaattacaaaaagttgctcaaaaaagattggtagtcagaagctgaattctagatgtgctttttcaactatctcattttgtaaatgtagtgtatgaatctcaaaatttaacaatagacaatttttaaaataccaaactgccaaaattaaaagaaaccgtctttttaaatatccaagttttttggccaacttggctctactacttgattttcaaagggattagtggttactcatccacagtttaattgttttgtcattttctaatgctgctgatgcgatgaggttttctgtaggatgacaagctgctgagatcacaacatctgtatggccttgtaatttctgcacaatctctttagtctgaaggttccaaatgtaaaccaggttatcctcggaaccagacacaatccactttccaccagtaactgaaaaattggcaaatatgcaatatttctcattcttatgaccagtgtatgttttcaggcacctgcctctgctataatcccatagtttaagagtgttgtccaaagttgcagtgagaatgtatttaccatttggagaaaattttacaaaagagacaggagggttatcgtcatcaacgagcgtttttaaacactgacctgatgcagcatcccagattctacagaggccatcatagctacctgacactatcaaggacccactacaattaaaatgaacagcagaaactgggtcagaatgagcagacaaagtcttgagacactttcctgttttcacctcccatatttttacagtctcatcaaaagatcccgagattataaggttggatggcggattgaagttacaacaaaagacataattactgtgccccttcagtgttttcaaacattttccagatctcacatcccataattttagagttttatcatctgaggcagaaacaagacgactggaatctgatgaccaggcaacatccgatatttccaaattatgaccatagagtgttttctcatattttccatcatatgctccccaaattatgattagcctatcagcagaagaacttgctagccattctccattaggactaaacttaactgatgacactgcttccgtgtgtcccacaagagtacatttgagagcatagtttgggttttcaggcacttccttgctctgattggccgatgaggagagggccaactgtgctttggcgtctcttgactccttggttgccatggctctgaagctccaagttagcaggtgtactaggcgttcagccctgaaccaggcagtccagtactttggctttctgcccagcaaaatgaagataaacgcacaggattttaaaatgtacagttttgaaagcttaaagtttctggacagtctttaaactgtgagacggaatcagcagcacggcttggacttcaagttttcatctttttgttaagtacttgagaaatactgttagaaggatcctgtgcgctgtcagcaagtaggacacaaatgttcggcattccgttaatacataaagccttcaaagcaggggcgacgcgaggggcactctctacagaaagtattctttcaccgccgcccccctccccaggtcgaaatgtttcggaatgctgagcagccctaccagtcaggctaggtacttgaagatgaatgaaccgccgcttttagcggatttcagaagctaaaagcctacgaagccaccgaaactggaaactctggcctgtcggctacttttgctcgtaccagcaggtgtgcactgccgcgtcaatctccaacaaagccggaaaagcagcctggcgcatgtgcaaaggaagtccctcctaccactaccgagccgagatgaccaatgggagacggccatctgcgcctgcgcaaaaaagtcgccaatgttcatttccggtctttttcgccccgcccttcaaatgcgaaagcgactgccttcttgggtgagtgcattagctgggtagggtctgtcccggacctaactggatagtgtgggaagcagtggatcgttgtttcaaaaaccatttctttttggaaattgtcacagagaaggactagatttgcggatgcctaccttagctgcaggcttaggcccacacctgacgcgtaagctgcctaaacggcagctaacgtagatccacccagacgccggaaacgggggaagctcctgctttgcatgggttccgctccctcctgtttgttgtggtgtggagccaggtggcatgtgtggcgatggagtcacggggcgggtgacagaatttatgccagattgtaaaattcctggtttaagtttcccctggaaaagtttcgtaaaggttaagaaacgtgtctgttgaggtcctttaaaagccggtgctctgctgggagtaacgagcaaacgtttgttttagcatctacggcttaagcttccatagagaagtcggtatctcaaagttgcttgaaacagaaaaggacaaagaggttggtggaatagggtaacggataaggttactcttaaggaggttttagagagctttccccagttttaggagatgattaatggtcatgaaagtgtgtaaaatatacatgctattgaagttgcaacgaaagacataattactgtgcccctttagtgttttcaaacattttccagatctcacatcctataattttagagttttatcatctgaggcagaaacaagacgactggaatctgatgaccaggcagacttttaaacaataggtttaccaaaaaactggaagccctactagtttctccaacctgttgttgctcagtaaagagtgcccgaggccgagcactcacgcctgtaatcccagcactttgggaggcccagtcgggcgggacactttaggtcgggtgtccgagaccagcctgaccaacatggcgcaaccaatactgctaaaaatacaaaaattagctgcgcgtgatggcgcacgcctgtagtcccagctactcaggaggctgaggtgggagaatggcatgaaccaggaggtggagggtgcagtaagctgagattccaccagtgcactccagcctgggcaacagtgagactccgtctcaaaaaaaaaaaaaaaaagagtgcccaagaaaagcagaaaaaacgtggcttaaaagattttactggtggctggtcacgatgcaaatgtctcatcagcgtcaagaatttaaaagcacttggaaacaatgggtatcctattgtatacttattagggataattgaaagtcttggcctttataaggcacaacaggcaccgttaggtcacctgtaataaaccgactgtagttaaaatatcattactttaagaccctaccagtctagggggaaatttaaataagaattggacaaatactttagtcttagctagtgcatattaactgtataaacacagtgaggtagtcctgagaatgaagactctaaaatggtttagagtatttatttctatacattaaattacaacggtttttagctattaaggtctccatggacctccccttgttaacacttttagaaattttttttccttcagcatatcttaaagttcagttctaactaaaccctgctgctgcttttctcttcccattagcctggattagtgatttttgctgagaagtttagaaactgcaccaattgaaaactatttccatttttattaactcaataaaaggtaacgtaaaagccccttggagcacaggagcagaatttaatcattgtttcaaataatttaaat

SEQ ID NO: 316548 - DNA, 4001 bp, Homo sapiens
agagctcaggaagaggctagagaggccgggtatggtggctcatgcctataattccagcaatttggggggctgaggcaggcgaatcacttgaggtcaggagtttgagaccagcctggccaacatggtgaggccccatctctactaaaaatacaacaattagctgggcatggtggtgggcacctgtaatcccagctactccggaggctgaggcaggagaatcacttgaacctgggaggcggaggttgcagggagccgagaccgtgccactgcactccagcctgggtgacagaggaagactgtctcaaaaacaaacaaacaaacaaacaaaaaacacacacacacagaattgtagctatataaaagtcactttggaagccacagaagtaggtgaattcacttgcagagcttcttaaactgcatttcccaagttattccccaccttaaaacccttcaataggttctccccactgcccttagggataaagtcagatcaaggcctgaaacaatgtggcctctgctcgcttgtccagcttcctttcctcccagactccattcctgctctaacttcacaagaattccctccttcccccaaaatgacagattcttccagcctcaaggcctttggcatgcttaccctcttgccaggaactcaccccttttcctagttcactcttgtggttctttgagtttctgcttcgttgttccccctcaaggagccttaggagtttagctcgcggtaggaactccgcgctccaagaacccccacaccagatcaaaactggatcatccccaccccatacacacaccctcttaggactggtggcaactcactcaaggcctgaccgccaaggccctgcctcaggacccttatacaactcagcagcaccaacatgggtcattagtggcttcatgtaatgactgttcgagaccagcctggactctgacacctcaggtcccaggcctcgcctgtcctttgcgacccggttctccttggagggacctccacacctgatttcctggacctcaaccatctcaggagggggtctcagcccctgcttccccgggcaccgccccctactcggaaaggtcttatccgccgttttccgcgacgccaccctcctcagaggatcttcacccccaccttagggggaagagactcatcccgccctcgagaggccacacccttgccctctcccggccccgccttccccaagaggccacaccccctgaggggccggggccgcctccgcctcctcctcctcctcctccctccgccccccccagctcggccccgtctccttcggagaggccaagcccccgcccatctcctagaagggagcacaccccctcaaccctcagctcccgggcctccgcctccgcctccgcgcggccgcgttcccctgcaccctcccgcggttccacccgccctttccacgcgggctgaagtttatgaagcgccgcggcggccacatcagctttgtctctcgggccccgccctcttcaggttggccctcgtccccgccatctccggggctcccttcccacctccgatcggcctcaacctgctgcccgtccttctcctcagggcaccccttttgtccctgtggcaccgcccctgggaggcgctgtttctttccccctttccaccaggcgtgcctcaagccaagcctcacccgccaacagccggtcccccacgcactccagacccgtcactgggaggagtataagctccgaggttgcccgcggccaaacgtagtcctcgagagcgtccatgtcgatcctcgaggtgctgaggcagccacggctaagaagggagctgaactctcgcgagaacgagccttcccagcgcgccgcgctgcccatcaacagcgccctcagctacaggtagcagagaccagggcgcccgcggcggttgtccaatgacgacccttcgtcccacgcaatccagctcatcattggcggggcccgcggaggggcatcccgcccctcgccccctcacgtgacgcttgcggggcgctcccagctgccagcccgctgcacctatcgcggactctgtttcgccgacccggagtttgtcgggcccggcggctcgaaccttgtggttttttatttgacggggcagatggagtcagtacacaataaataacatgaatataggaactgcgccgtatcgcggctggcggggtggggcaagacattggccagacctttagtctgcagcaggacagaaggacagccggacccctgatcttgggcaactggcgacccgcggctgggaaccggggctaactcttccctcagagttccacgcgcgcatcgcggtaggcccggtccagagcccactcgggctgtgagtcggtgcccccttctcgggcaaggcgggccatctcctgttggaacagcgcttgccgcgctcggctggggtccacattaatccagttgttggcaatccacttggtgccgcgcgtgaccaggcagcccccgtgcagcgagtagtcgtctacgtcacccacccaacctagaagaggagggtgacgtgagatcctaggctgggctggccagagcttggcctcataggcaccaagagcatgaccaaggtgggtccagctatgcattccttgtgtagcaaacacccagacctaaagcttccttggaggctcctcatctcagcccactaatgtatagtcaacactactggccctctgaaaccagctttcttgctgttgggcctgtccatatcccttcccatcctgggttagcaagggacatgtgtcccaagccccagggagtaggaaggctggggcatcagggaatgatagggatggatataacccaataagcagtacaggtcctggggcagtctgctaaagtcactaaggatggcctttgggaggcaccaggagcagaaaactatttggaaagcagccagaaacagccctccattgtggcagacgggggctgggtaaagggaagctgtactcagggcaccccccccaggcctggccataggccctcaccttgcccatcaggcaggtagttgtaccagaagactgctgtgccctgttggggcttgacacgcaggtttcccttgtcacagtgcctccgtgtgtcacggaggtccacgtcatcctgaatcagactctgtgggcagcagggtggtggggtgttcaacctgtccccactctatggccaggccagccaagggtgaccaaagggaaaccaaccagatatgcccaaggaataatttgggcccacatccttagacctggagaggtgtgtacttcacttgtctaagcccctgccagcccacaagagtaatagcccagttgacccttaccatttcatcgtaggttctgttatctgctacagggaaaacagtctcgcccccaccagtgacgttgttcaaataaaacagcactgtcatgtagctgtaaggcagggggggcactgagcaggtccccagttgtggatgctcccaggggcttacctgtgggcaggataagctgcccaggttcctgttgccagggaccaggacagactaggatgggagacaatagggcaggccagtgccaaaatgtccctagcccctccttccccgaaacccagtctcttactgtgagttgcaatggttttttggccaagatcacaggtgcacttagttaaatgccatggccctgagcaagggcctggcagggaaaggtaggctagcagaagcaacagggcgcgctgaagggctccttggggatgggaaggggctgggccagaacagccacctgaagaggaaagaactggcttgacaggggagggaggcacagcttcagcttctctaagtggaatcaagatcaacacctggaggaatgggcaggacaagctaggggcccagccttgccccttgcttcagaactcagggggcaagttttggtgtctgtgggtacatcagtctgtgttgactccagtggtcacgatgaccagtagccacccctttccagccattgggtaaa

SEQ ID NO: 316549 - DNA, 4001 bp, Homo sapiens
cttcaaattactcctccaggaccccacaatgctgaccctactaccacacctttaaatgttacttcgtcttctaaactgattcaagtgaccagaccaggacagaaatccatctactcaatgagtaacactgactcaaataactatttgtccagctaacaattccctcttccttaagaccaccactgcagaccactctgccacaaactgcaggcagatccagagccggttacataatactttctcacagccccagtggggaaaaaaactggggggataccattatagctcagtccaaactagcattacttcagataatcaaattcacaaatgaagagatatgttccaaaagaaggacaccagtctaaaaaaaaaaaaaggaaaaaggaacagctggagaaggtggagaaaaacccaagatctcaaataataataataataataataataataataataatatctgttactaggtgacaaaatcaagtctgaaaaaaccagggtccaccgaattaaaccaaacatcagcaagccttcttggggaaggtggctaagggtaaaacgaatttaatctaaactagtttttggctccaaggagctgcaagtccacaggcgtgcggtgaggagggctgacaaggacccccagggaaaaaggcaaagtgctgtgcttagattttgcgaaaagatgcaggtatggtgggtctccagatgacttgtggcaacataaaagtttcatgatcagaattggaattcaaagtggaccaaaaagtgtaatagaaaaaaaaaagtatgaaaggaaacctgaaattgttctacgatgcttgctttgttttaacggaagctcacattcaggtcaggatgggacgaccaagttcgtttgtgtgtggcaaaaaggaagttttagatgttgctgaaaagttcacttatgaacgtgggcaccaagtctgaatgagtaagagaaaggctaggagcaggaagaaaaagcaagggggctcaaaggggcacaacaaataaatcctgacagctaagaagtgcaacccacgcggtctgacggcagaaaggccgcgggaagctgaggggcaggggatgggcggagtgccagggcggaatcgaggtcacagtggagagagcacaagagagagctgacgctgccgaaggaggcagaaaagcagcccctgcagtcctgcgtcgaggccggagcagaccagcacctttgacagcctgaggagctgaaaacgctacctggtgggcccagggtgggcggaccgggcgtttaaaggtcaaggtcaaggtggggtttggcaagtgatgcatagcgctcaaaggagaccgaagacatacaaataatattataaaattatgactatcgttatcttttttttttaagaagaaaaaaataaaaggtctcctggacggctgcggggtggaggcggccctggcaggaacgcgtgcaaaataggctgggggctgaagtcgggacggagggcaggccgagggacctgtgctgggccaccggagggaggcactgagactcgggcccagggcctccgccgcactcacttgccctcctggcagtcatagagcacgatggagtcgtcgtcgctactcgagatgaccgtctcgccgttggggctgaaatcgaagcagttaatcttgtccgagttttcgcggaacaccttagcgacgcggaagctccgcaacacgctgtcggtcagcttcatggcggcggctggggaaggcagcggcggcgcagggccggggcggggcccggcggcgagcgggcgggctgccgaggggccaacccaggcggggcgggcgccgcgccggcggctagcgggaagtcggccaacagttgggccgcctcctcctcttcttcctgcttggtcgagggtcttctgcctggactgtggagcctcgccgaccgttcgtcctcacagccacctcacggacaaccggcgcgtcgccggctcattgtgtccgccattttggggcgacaggcagaagctgagggcgaggagcctcagccgcggcgcacgccgggaaagggggcggggcgggaacggcggagcaaggcggggaggcggggtggtgacgtcagcgcggccgcggcggagtgtagtggcggggcgggctgctggcagggagcggccgagacgtgcagggccttcccgggggatcggaaggttgcggatgccttgggagccgggggcccttgcgcgggattgcaacccccgcgaagactctggcgcctcctgcaggcgtcccgatcgcaggctgcgtgggagggggtactgcagggtcgggtatgctgctggaggccggttttgggggtgactcaggtgagccgctcgcaggcaagcttgaccgctagtccaccgcagcgtccgcttagacagcttcgacctctttacttttttttttttttttggagatggagtctctcgctcaggcgcgcgccaccacgcccagctaattttgtatttttggtagagacgggggttcaccatgttggccaggctggtctcgaactcctgacctcacccgcacccggcctcgttttcttaatcgaggtagactttaggtacagtaaaaatcagcctttttaggccgggcgcggtggctcacgcctttaaacccaccactttgggaggccgaggcgggatgatcgcttgagctcaggagttgagaccagcctggccaacatgacaaaaccccacctctactaaaatacaaaaaattagccgggcatgatggcgcggctgaggcacgagaattgagaaaggcggaggctgcagtgcgccgaaatcgtgccactgcattccaggctgggcgacagagcagacggtttccccccaaaaattagcctttttagtggctagttttatgttctgacacccatacacagtcatgcagtcaccaccacattcaagatttggaagagttgcactatcctgtttgtagtcaacaggattattttaaaggttctatcatataagtgattatttgccttaaaagaaagtttatctctaacaaaggaaagcagtatttgaacagaaaataggaaccaagcttcctaaccttaactttctgggcaaggggttaaactcaatgccaacctatgtggcttcacagatctgtatcttgtgtgaagctcctcaaaaggttaattgcctggggtttccaacaatgaagatggggattatttatttttgctttctttagctaaagagaaacaaaaacgaggaaaggctgtgagacatttcagtcgctattaggaaggttattatccagagacctgtgcaatggtaaaaaacaaaatggaaaccctgggacagttggggtctttctagaaagaactagaggctgtatcccaaccccctgggtaaaaggagagccaggatccttatacataaagagaagttgttctctaagggaagaggcaagttcctggctaagtctggggtataattgcctcctgacaaagagcagagcttctggctacaatttgttctggggtctggaaaaagccggtttgagtgaaacctgaatagatggcaactttccaaactgcacacaatggaagaaaaaccctccacgtcccagatcacttgctctgcttccctgtaattcctgtgcctttatttcagaagctagaaagtctgatacagcgtctgcttcgaatagtttagaaggcaacaaggacagatcgagtaccatgttctagaactgtcgggaagtgaacacacccagtaagatgatgccatattttggtccatgttaatctacaaaaataaccacagaaacagctgtaatctactgaatgttgccagccaaaataaatctttgcagggtatttttcaagtattgtacttcctataccttttccagatttcaccgttaagaccaaaccttcctcccaagacttgactttctgcattatttttggaatgcagtctttttttttttcccccatttttaagagggtcttcaaatcctcatcctgt

SEQ ID NO: 316550 - DNA, 4001 bp, Homo sapiens
tttgatgcctgtcttcgcgccttctccgatgtactgcatgtggtcctgatacaagtggcacagtttcttctgtccttgagaaagtcctgccagttggctgcagagaggctgtgctcctataatatatacttctgacatctgaacagggttattcatacctagcgacctgcaagggggggagatgtgcattcaagatttacgtgaaatctcgaggtgggccccctgaaagcatgtcagcaatacatagttttaagcacacagatgcttttttctctcctgcttgtcctcatgacaaagtatgagaagggcttcataaaactcctctgtttaaactgcactcagaaaacggaggtattgtgcagtccccatcctgccatctggctcctcagttagtattttcactcccttcctagcccctgtcaccatatacctgaaccagtatttccaaaatccactcagaaaaggaggaaacagcagtttgagggacaggcctctgacattagagaaagtgacccactttgccccacaaattggaccaatctgccttgaaaacttatgaatgctgaaagtagacacaattagatacgggtaggagatagcagttccttttgactgatggaagaacagagggacaagtatacagactggagaaaattcaccatgtttcttgacattttaaaagggctccttatgtgattgtgagggacccaagacagggtacccagtgaacagaagtcatgtttgacagtcagaaaaatgctgttcatttacagggaaaaaaatacccagaatgccgtcaaaaataatcctctggatatattacagtctatctacaaggcccctacccagaaagaaacccccacttggggacatttgactacttcaagttaacctccttttgattacatttcaagccccaatacttctgcacttggagtgtagctgtcctcctagaactctgcctaattcaaactctgtaggttaataataatctcgagtaacagaagataaaggctgaaactcacttttactacctagaggtggcaaaaagtaaattttgtagataggcttacaattactagcaaagtgaatttctgttcttttttattgcatgatgtactacaagcacacgtctgaacaagggcttcatagaaacaggcctagatttatagtttcccattccctaggagctgaagataagctttacaatattaacaagttaaaagaaaattctgatttaaaactatatataagtaaaatgtatacatatgtcttgcaataaatacacccacactcactatccagcattaaatattgccgcatcatacaaacaaatcttaaaaaaagaaaaagaagaggaagaacacgcacatagaatgaacttaccaccaagaattggcttcaattacaacctgggcgaaggagaaaaatatggccaaagccactaggaagaacttggaagacattgcacttccagccatccccaaagcaactcctgggcttaatattccaatggacttctggagagggaagaaaggagcagatgtttattgcctctcagataattttcaagcatacaagtttaaacaacggaagcatccggggtctcttaagtttactgttgattgactgcgcttctcctccgtgagttttttgatggcaagatataggcagtttctttttccaaattaatccacccacgcaacctcaccaggaaatctgatttcgctgggatcctgtgcgcggggcacgccagcgattacaaacgtgtctcaattctgttgagtcaaagccctggtgccaggcgctgcctccttcctgctcgctcgagtcccgcaccccctggcccccctctagttggtgctgtgctcagtccctcctgggtaattcactcaggaacccgctgcggccaccctccgtcctctccccaacctgggccgagcaacaagtggagccagaattaattccatgggcgagaggagcacggaggcgagtggagcgcgctgccgccagaggctgccaaggaggcggggtggccagcgcggggggtggaggatgggggcaggacgcgggagggaagggcagggggtggggggcgaggccccggggaccagcgcgcgagagtgcccagctgggaaatgcagctccgaattaacatcgtatgtttcataatcagtttacgagccgatgtggggaaagccacttccagatggggaagagcagcccggatttccttaaggacgttcttcagccagactagggaggggagaaggagatgggggccctaggggataatggagagagaggtcgggtctcccaaccaaggaaactggaaaagagtgccaccctcgcccgcgtcgcctgtggcctcttccacggactgagagaagggatggaaccctagaggaaagaagggagtctgggtctcgcttccccggggagaagatcccttccctgccctccccacagctttctcccaaattctgatttttcactctccctcccaccccacacctggcagctgccagggagggaggagatgggaggcccagagagactccagtttcccttggtcctgatctggggttgtgggccactttgccatcgcggcactgcgagcctgtcgttggaactctgccaccctgcctccagtctagcctctccagcccaactcagacttggttcggtcagtgccgaaaggtgggggtgcggggcgaggccagagcccttgcagatgagtccagacggggccagaggcgctggcttccgagccgcagctgggcgcatcgattccagggcaaagaggcccccagcggcgaaggttcccttcctgaagaatttcaggggtaggagttggccttggaagcttccgctgccgttcctccccactggtgacttctccacctgtaggcggcggcggagcgagtaggtggcgggtgcgggtgggaggagcgggttttaaaaatccccttacacgtaagtctaaccctgccgcactgcatcgcccatagcccctgaaggagccccttccacagaaaagaaaagaaaggtgagcctctttaaggcggtggaagagcctggcttggaacctgtgccgtaaaaggggcagaggggacctaggcagccctggtaaagctatggggctcaggggcgtgccaaggtttttctccgtgagccgcccctttggcctggacgcttcggggcttctcaaagaggaaatgcttatgtggtccccagcgcctgctaagcagggctccacacccaaggcccagttgtccccaaaacgctgcaaagctggggggcgcatcctggagaatggaaatctggggtttccccagctaggagagagaaggctccggctatctccccacccccgccctaagtgtcaaatttcctccaggggagggagtgggctgcaaagtctgcttctcgcgcagcccaggctgcaaagtcaactctccccaagggcagccgatgccgcgtgcacacacatcatacacattcacactcgtgcacatttacacactcacacgcgtgcatagacacacacgctgcgacatgtttccgagtcagcggcccagattggtgctggccgcgtgcactttccaagcttcgcggcgagcggggcgcgtggggcggggctcaagcagcagagaaattgataacagattcggcggattacagcggatctctttgttagagccgaagccacacaaaccgaacccactcccagcccgaagcccccagggagagtccaccagttcccagagcccaggccaactgagagcgggcccatccggtcaccaagacttgggtctccctggctccagggtagaggtaggcagagggtgtcccaaagggggatcggaaaggagagcctcacgagtcgcatctccacttaaccccgccgcttgcccggaaacaccttggccctcttccctcttcaatcccagtgcaaccgagaaaaggccccacaagtttgagacactcaaagaactcac

SEQ ID NO: 316551 - DNA, 4001 bp, Homo sapiens
gcagtgaatgtgcgaaggtggctggggggagggcaggggctgaggaggtgcgacctcaccgcaaggcccaagttacttccaaacagcgaattacccatttaaagagagaagagagaaaagagaggcgagagaggagaaggggcctcgataccagacagggattagaaagtcaaacagggccgtggggtctccagacttgaagttttttgttgttgttttttttaactttttggggggaagaggggttatttgcttccaggaaacatcttaatttcaattctaaccttattttctaagaaacttaaaatgggaaagaccagaaaaatggaaataggaatcgaagcttggaggacagataagaaaaattgtttagaaaataaaaacttatgttgcaggaagaaacgttaacttttcgtaaaagtgaactctcagtgaccctcggagtgtgtgattcggctttaacatacaactgacaattaaaacaaacaagagttcgcaaactggcccccgcctgctctcccaaagcggaggcccaagtgttttctaaaggacaaggcggactccgctcagggggccggggagcgctgtcccggagtacgggattacagccactaccaccacaactccccgcccccaccactgctgcaaagtgcctgagctcacccagtggcggctaataatgctaataacgcgaccccgctccccgcgccggggtgcgcgctggccccccgccaggcactcttaaaggcaaaggggcctgaagcgctcgagttactcggccaaggcaagcctacaatctggcctccgtcggtgcgggggggtgtcggggaaggtgtacgccgctctggagtagttggcccctagttcctctgcgggttctctcaaccaaggagtccctttccccatcccgagccccggccacacaccgtcccggtgcccgcgcagtgggcgcttggtaaatatttgttgaattgaatcattatcctgttactgaaatatacatagtaaattacactcgatgttctcagagcaaaaggaaagtcgtcagtgaaccgcactcagtttgtctactatcgctcttccccactttttctcaaaaatcaaaattgtttgcagaacgggtggtgcgaccagaagtgatctcctgggacactgaggcagtgcgcccggcgtggagggcgaaggggtaggggttcctgccagcgacgctggagttccagcttcttcaggcggttggggaaatggagggataggaagaggcgaagggaactcagttaacttccaacagggggtggggggaagtaaagaaaaaaagtggcagcgcactgaacacctaccttcatggcgagggggagggggcgcggggaggaagtcgccacccgagcgagcgcagccgaggaatccgagcggagcgaccgggttaagcctggggggacggtcaggagcagggctgcggagtcctccggcgcgcgtccggcgggcgcagtgaaccggagctgaagcgggcactggcgcccgggcctggactcccgagttggggcagagctgggatgcgcccaggaatggagggggcgcggacgcgcgcgagccggcagcaagggcagggcctggtcggggcgcaactagggagccgccggtccggcgagggcgcgcaggcaactgttccacggagaggcgctccgtttccaacgtccatcagcgacggcggtaattagggctttccaaccccaaatgtgggcgtgattgtgcaaaagaccttacgacaaataataataaaaagaaattcttcacaagagggtgaaaaaaatgtaccactactcaactgtggcccggggcgggggaaggggggcgatctgtgcgcccaggtgcccccagttcattcacaccacagattctgcaaactcttggcggctcacgcctcctgatctccagctcctcctctctgggtctgtagccgaaacgtctgcttccagacgctgatcctgcagccgcgagttagtgtggacgtctctgtacacacacagacacacaccccaacacacacacccccgctgcagctttggggccacagaacaatcaggcgcgcatggctttttctccgggagatgccgctgaaaacgcacaagtcgccatctgagctgcaagagtcagccccaaattgtgtcctttcattttagggttcggcaaaaacggggagcaaaataggtgaaagtcgccccggaacttattgctgtgcggtgagctggaggggtgcgactaacccaggggagacgcgggctccccccccccaccacgtatcccgttctttctctcttcgggttgatctctcttttccccgtttttccagggcgaagggcgaagagcagcgagtgcaccgcgggcgcgaggctggggaagggcgagagctcggagctccgcggcggcgactcagctccggcggtccatggccggcgaagctgcccacctcctcgtttggcgcccgggtccgaggggcgggagagcgggccggcgggaggcgggcggtcccgggcacaacggcggcggcggaagggctcgctgggcagctgccgcacggaccccggctctgggcggcggaggcggctccgtggagctcgcagcagatttccacgcgatcctgtgccccgcaaacagactgaccgaccgcggggacgcgtccccccctcccaccccccagcccttctggccaactgccttactctctccctccctctctccagactcctctttcccctggtgttctcagaaggaagaaaaaaaaaaaaagaaagaaagaaagaaagaaaaaagttctttaaagtttcagaactaggggcggctggaaagagagagggaaggggggggaagaaagaaaaaactcaactttgctatgcgcatgcgtggtgaggccggcctatgacaaactctgcaggattttaaagccgtactacgggctggggtgccgggaggcggggtacactctccttgtctccccttctctaagttccccatcccccgcggcatctgctgaaagagagaggtccactccgcagccgctgcctgcctgccgcctggttgtctgcgctccttccagagccaccgaccggcgggaggctgaaccccaacttccccgcctggaccccttggctcgcccgcgtatcccagaccgctcccactggggctccacggagactgctgccttgacatggaacctcatgggggacctcctcattcttacctctgggggaggatacttaagcactggggctgatggatagggttaggcgctcacctcctgcaaagtccccagagtagtagggacttgggtagtgggatgcatgattgctcatctggctccggcccagagcatgaggcgcgatgcgtggtcctgccacggagatcttggcgggtgccctcaggtgaggagattgcgaagtttggcaaaaccgggttccgggcaccggaatttctagacgcttccagatgcccgtggttttggggactccggaggggcagggttggtggatttgtgtccgctacctccagcacgccgagggccccaccccacaaacagtgcctcacactggagcgtaatagttattttccgccgtctgcattctccagctgtcaaaggtgaagacacacacacgcgcgcacacacacacacacacacacacacacacactattcaattttctccgtccattggcatgcacttgaccttaaggcgaaaaatccgtggcctaggtgttttggtgtggtggctgttttgttttgttcctccagtcctcccccacctccacccccacaccccagagggcgcaggcccaggctccagcgatgccgttccaccctccacagccccttcccattccttaattttcctagccgactggacccttccccagccctggcctccttcctggcgcgcaaagatggcagtgtgaacttcccaccaagtgccagagacagatgctcctgcttagcacctcccgcctcccacc

SEQ ID NO: 316552 - DNA, 4001 bp, Homo sapiens
ctccctccctccctgccgggcagctgggcccccgcagggccaatccggggaggccgcggcgccggcgggagggcggcccgcgggcgggcggggcggccaggggaggttattttctgctgttttccctttctgtctcccccgccacccgtgtccctcctccccgtttctaattaaaaaggagataaagccgcacgcggcccgagtcaatcggctcgagccaatcggccctactggcttcctggatgctgaatgtgcgcggggcggcggggcgcgggccaagatgaagattaaagcaggggaaaaaaaggaaagccacccagacgcgggcgaatcaataacacttaaaacacaccggcaggctggcggtactggcgcgagccccgcagccgcctctccgccgctggtcgggctggcggcccctggtcggctctgcacgcacctgctagcggccgcggccggacaacttgcgaaatccccgctccagagacgtggactggggaagtgacggggtaggggggtagtagtgacaaaacacaaagggtctgccacgcacatcccctcgccgcagcccctgcggtccacccctcctcaaaagggatggtaatgggttcactgctgggggctggaggggcagggtgtgtgagacctaccaagcgggcccttcagcgccagaacctctatccatgcccagatccccccgcccccacaccgctccgagcctcacacgcgttgtcttaagtacaaagggtgaccggctttgcacaagcagctccaggacgcgtcccgagctgccccctcccaccttccagccagagcgcccccgagccccacctccacagaaacgctaggtgaagccggagggctgctcgcgcgcccggccgcctctgctgcccagttccagggggcggggtgtcccgcctctctctagcgcttgtctccctctgtgtctcagaccgcctctcgtcccacctttgtgtgtgtttgttgggggtgggacgtgctgtccccttggcccgggaaggggctctgggagtctaagggcccctggaaattgggtggtgccaaggctccgagcggcggtttatgtttttgccagcgaatgtccttcctcctgggtacctgttccctgtttgcacggaccggccccgccagccacctggggactgcccagtctctaggaacggctgtgccgcgcctcctgagagagttcgtctcgggctccggggactgagctccccgagattggctgtggtcctggcttgatgttcctgctagacctgctgtccctatgcccgggtccgaagggtccccgggatgggctgaacctttgcagcagctagccctcccccagagtccctcaggctggagcgtccctaccggctgtctctggtcctgggggattccagactcagacgtcctcaggatggccagtccccctgcctatatctcctggggtgtcctgcggggggcctttgtgcgtccaccgctcccacaccgcacccacccggcctctcagagaagctgtggaagttggccggcagaggctcgcaggcggcacacctccctccccgggccgtgccaactttgtcgaaacacgcgcggaaagggcgcaggcagcccttacccgatccggaggtagaccatgcccaggctgagaaagaggtggcccaggcagcgccgcgctttccggttcatagtcccgattggccgccggggccgcgggccgggctgtgctgatcccgcgggccggccccggcggggcaatcaacatagcccgcccgggaggcgcgagccgaggcgtccccggggccgtctgtcggtgcgcccgtccgcgcgctccgcgcctgagcctcgccaggagcacgggagccacggagcgggaggagggagggaggagcgagcgcggcgtggggcgacgccgggctgcgcgcgagcgaccggtgcaagtgtgcgagacgcggggagtgcgggggcgctgctgcctccagcccccgcccctccctcctttcccccgtccctcccccgccccctcccccgcccgcctccccggagcgcccgcccagcgcccctgcgcccgcgggacagggccgcctgcacaaggcgcgcgctcgcgcctttccatgcgcgctcccgggggccccctccctgctccggggtgcaggtggcaggctggggagcacagcccggttggaggcggtaggagcccgctcgccccccacccgtcactaacttgcagattgcagggcgagtgggcgtccagaggctgccctcgggtggagtggaccagactcggccgagaggcctagtgccttggtctgctgccctgctccctccagcccggaacagggagctggggctgacagggcacaccccagttccccaaccccagcttcaggggagggcgccccctttcgcggagcgacgggctgactggctcagtgtatttcttccctactcccacctattcgagagtggcggcagggggtgcccaggttgggcagcctcctctgggatcctgctgttagccgacagactgagtcgggctgaggcccagttgccccgcgcggaacagcagtggggcgcctgagccgcgggagcgtgaggggcgcagctggccgctcagagcgcgctcgcggcgtcaccaggcggacgcggcgggtggtgcacctcggcctcgctcccgggaacagaatgctttgagtgccctggccgacccgagggggctaacacccttctttggtgtacacctcatccagtgagctagggggagtctaaccgtccctggaaattgggtggtgccaagactccgagcggcagtttatgtttttgccagcgaatgtccatcctccgggtacctgttccctgtttgcacggaccggtcccgcctgccacctgggggttgcccagtctctaggagcggctgcgcctgcgcctccggagagtgttcctctcgggctccagggactgagctccctgggagtggctgtggtcctggcttggtgttcctgctggacctgctgtccctatgcccaggtctggcaaatctgaactcaggtttcagctgaagacactgaggctcaaggaggtgaaggtgtttgcccagagtcaccagctagcgagtggcacaaccatatgggaaacaaagtatgcccaactgtagtaacctcctgcacccagtcctgactatccttcaagattgcctttctaaattacacacacacacacacacacacacacccgaaagccaccattcaggtattcattcatattccatattctgtgccaaccacgatagtgggcaccgtggacacaaggaagaagaaaggcaacagtctttcttcttggggccaggaaggagacagatgataagtgaacaagaacagagttgcagatagtagaccattaagcagggtgatgggagagggaatactgggtgttggagggttaattttagatctgaggaggtggcatttgaggtgaggcctgaaggacacagcatcaggggtccagcactgcaggaaggggaccagcaggtgcaaaagctcagaggtgggcatgagccccagggaggagatggtgggctgcaatagagagagagagaaggcctgagcttgaagggagatggggatacacagatccacaaagctgtgtgggcacgtcaaggagcttggatttcagtggtgtgttcagctggggacattggagggatgaagaagggggtgactgatctgatttgtgtgttcaaaagctccccgtggctgtcctaagggaacacactgtgggaatggggacaggtgagtaaagtgcgccatcaagcagaccagagaggagatgacagtaggggtccaggtgagacattggtagtttgggttagggtggtgctcttagaacatgaccacaaaattatttgacactcctcccatgaagaagtgggttctctgtgctctgcctgcgtgaatctgggtgggcttgtgatggcttccaccaataagatgtagcag

SEQ ID NO: 316553 - DNA, 4001 bp, Homo sapiens
caaactgcctggatctttgtgaaaatcggttttgtatgtcaaggaggagtttaaggcctttccgatcacctgtgttccccttttctgtgcagccatgtatcacgtggagttgctcctaaccacacctcacgtgcccctgagccctatttcctaatttcttctgggctggacttcccattctccaccggcagctccagtatcccaaactttctagtcctgctgatcctcccagcaatggggtggaaactggagggcagtgtctggtctgttttctaagaaacgtatgaattctattatctttacaaatataacatgataaaatatttttttcaatgttttttatttatctttttataaaatgaaactcctatgatcgattaaggaaggcagttatggctgggtggttcatggggttttttggagtttctttggttagttttgctttcttttttgtctttttaaccgtaagctgtttaagttgaagcgctctcagatgtttggggggaaacatcctcttaaaatgggcccttgtgcttgccttctggggaggcggtcctgagcaggggaatcataaggcatttgtgcatatgttatacgcagactgcacccaccccttccccccagcctttgcctcttgggttgttgtgctgctttccccttactttgctacatttctatagttaagttggttttacttgaatgattcatgtttagggggaaaatgaaaatctcccttaaaattggtttcaactcctcctgcaaataaaataaatgaagtggcagatgtaacaaaaaaaaaaaaaagacagcccaggcaagcagcaccttcagctgactccttccgtactctgtatttgtcatctgtgtacctgtgatgaaaggtgatttgctgggctgatgacagcagtcatcagtcatatttgtattatagaatggaaaagtttgccatatactagcaagaataagcatatgattcctcttggtatgtatgaaatgtgccctacattaaacaatgaacactgtacaaacaatatgcaagtgttatgaatgttgtctgtctcagaatggcaggctggctcaatgcagagattctgggttttggagaaaaattctacaaatcttgcttttaaatcccagttcagtctttactaatttggtaaccttaggtaagttactcaacctctctaagccttattattattattattattattattattttcagattcaacatggttgtaataatattatggcaaaattgtttgggaagattaaatgagaccacgtatgtgaagcatgtagcaaatagtaagcactaagaaataacaactactgtgattctttgactttcaaaaagcagcttttcttgactttactcttgaaaccaaaaaaaaaaggagtatcagacacatcctgattggcaaatggatttttccatctatgaaataacaagtaggatcagttctcctttgaccatagaggcaaaaaatcagtttaagaaattttagttttgactattgcttaccagaatgaccactgcatttctgagactgcaaggctgttgattctgttttgttgtgagactggccacaggcccacacagtctaggcctactcgaatatctgcctgagttgcctttcctgaagtcagttctgccaggaaggtatcagttgtggggattctttctttggcacataaaattggggttaaagatgtagaaagtgttaacatttactatggagttaattccttgcttatcttgttactctccaccccacatacagcccaccctaagtccaaatctccacgtcttactctacagaaagaaggctgaatataaagtctcctaccaaaatagatactgaatgtacatgtcttctcattatggagattttagtcactctgaggtttctctcttgagagtcgccaggatgtgagctgaaatgagtcaatataaggccttgtgtttgggagtctctggtgttgtagaggagtgtgtcataaagtgggagcctggatttcagagtccatctggagcacacatgttgtttacatctataatgacataaaaggtgatgaacaacccaaaagggttttgccaacaaacagaaatatttaccacacaacagttatgacggccaaaatattaaaacccagttagaaattaaatgaacacatttacaaagctattctcaggcacattactttatcttagatttcttagatttgggattctggcacagaaaatctaatttttcagaaaaaaagtattacattaagaatatctcctccccaccctcattttggtttggatgtttataccctccaagtctcatgttgaaatgtgacctccagtgttggaggtgggcctcttgggaggtgtttgcgtcatgggggtggatccttcataagagggttggtgctgtcctcgacataatgagtgagttctcactctatgagttcacaagagatctggttgtttaaaacaagcctagcaattcctcactgtctcttttgctccctctttgccatgtgacacatcagctccccttcaccttctgccatgattggaagcttcctgagtccccatcagaagcagatgctggcgcatgcttctcatccagcctgtggaaccatgagccaaaataaacctctttaccttataaatcaccaagcttgagtattcctttatagcaacacaagaatggactgataaacctctgagatgggctttccttctgtcaccaaggctggagtgcagtggcatgatcatggctcattgcagccttgaacttctgagctcaagcaatcctcccacctcagcctcccaaaatgctgagatcacaggcatgagccaccatgcctggccaagaatatctttttaaaaatgctgattaaagatggctgattgaacaaatgtgtttacccccaaacctctattaaattaaaaataaaaggattttaacaaattaaaagggggagaaaataatgacagcaacaaaattttaagagctaaaaaataggatactttgcatatcacgtaacaaactaagaaggctaaattctaaatcagcacaggggaaaccaagaagcaagccatttcccagggtaggctaccccaaaagcctccctcccaaatgcagtttagtgactgctgcagaagatataacagagggtctctaagccagagctaggacactaggcacgataaagactgggaatattatgctgaaagcagacagatttgaaaaaaggcttatataatgaagcactattctcagtccaaattcaacctccagaacagaggcagccagcataaggaaccattctaggaaggagaggagacatttaccttctagaaaacttgctcagaccaagaaaaaagacctaaagacaaggacatccccctcccatagaaatggcccagactgatcattctaaagacaaaaggtaacaagcttcatccatggcacagaggtgcccattagctctaaaatacaagtgaagggccagaattatcagacatctgaaaaaagcccctaccaaagaagagagagacagaacacacaaaagttaaaaaaaaaaaaacaacaacaacaaacaacgaaaaacaaaacaaaacaaaaattagagaggaaacaaagtcttgagaatatgcagggaaataaaagcttttaaaaaagctaataatatcttcagagaagtaaaaagatgttataagaacaggatgaaataaaaagaacaaaaaataactcttagaaatttgaaatataataatggaattttaaaacttagacagtttatatgataaagttgagaaactaggaaaataaagctaaaagacaaagaaaaggacaataggaaagaaaaaacaatcagaggatcagtctacaaggtacaatatttcaataaacaggagttccagaaagaaagagaacagaaaaattgatggggaggagctcataataaatcaataattcaagatttcaaaaaccaaagga

SEQ ID NO: 316554 - DNA, 4001 bp, Homo sapiens
atttcaagttccagcctggtttctcctgaggaatgtagttatcttagggtaccacaattgaaacaacctcctctagtgtttgagaatatattttcctgtggggtgtaatttgaaaatttcaactaatgtaaaattcatgacatcaaaaagctggaacaatgtgaaaggaagaagagtgacaaagcaggcttgtgatttgatggtattttaggttaacaagtttaatgtaataaaactcctaacaatttccacacgattgatttgtccagcccacaactactccaccacacagttgctaataacatcactgtgctgtgtggtcattatgtcacccagctgggagcactatggcctaccaaccactgttcacttttccagcttgcttttcccaagaagatagaaactgcagaccacctacttcaccaaaagtccctctgttccccaagcttcacagcttttctctgatttatctcggtgtcacatcccaaagggcctggctctggactatctgacttagagtggccaaggaagggactaagggtctgtgcccaagagttggcttcagtcctgcagattcaaggcaaagtcacctgtgtgttttatggtggatgaacttcaccactgcttctgatccctgcttctgatcccttacaattccaacactcagagactcactccctgcttccagctctccatatctgtgaaataaccgtggaaggacacgcaccatctctctctttctctctctctctctctctctctctctcacacacacacacacacacacacgaacacacgcgcgcgttgggcactgtgacttggtgccttcttcggctccaggctgacttacttgaggaagtacctctggccagtggccgtgaaggtcatctcccagcccgggggcagtggcagctcgtcggtcacgtcgtaggactgctggcggaggtgcgcgtgctgctgcgcggggctacccgcagcacccgcgccggtgcccagctgcagggacgcgggcgacgagtgcgagcggacatgctgggcacccccagccagtcgaggccccgggtggccgcccgacgagtcggtgctggactggcgcgagtgcgagcccgaatcaggctccttaaagaaagactccggcaggatcttcttccgccacgagctaggcttcggattcatgacagagttgaagagggcttcgaggtctgtgtctaggtcctgcgtgacgtggatcacttgctgcccaggcggcgggagcggagggggcgccgaggccggattcatcttctgcaaaaagaaggtcagatcagccttttatttaaagtcggaggaagtgggtaagagggttacagggtgagagggcgagatggtgggagaaagaatagagggaaaaggaaacgaggagacagataattgcccgcctggagatcccagacactcagcggtaagaccagcaggatgggggaggggtccctcctggcctcgagaattatgcaactttcttgaagcaaagaagttgcctggaggaggagaagatagggcgaggggtggagggaataactgcactcggggcttgctgaaccgcaggatggcaaaggaaaggtcgcacgattccaggacaggcagccccccgaaagaagttcagcccgagccaactccaccacgtctcgactccggaagcccgaggagcctggagccctggagtggtgccggatgagcgcgcgagctccagcgggcactacctgggcgggcagcgaagctgagcctgagcgcgcggcggccgccgtcccgcccgaacttgccgtcgggcctgggtcgctcgggtgagtcccgagattgcggagctggagccgaggcttggctgacaaatcccgacccgactctgtgcctggcagtctaagggcttcggctctcacatcccccgagctggcctaaggcgctagtgctgggcgaaaaggaggcgcaggagaagcagacagcgcggccgcagcagctcccggactgtcccataaacaaagtttggagcaaactcccacccccaggaaagaggcgggcccgaaagttgagctgttgaattatgtatgacctcctagtccctagccggccagcccccgctcgcccctcctcttcctcctcctcctcctcccacctcggctccagaaaaccctgggcgtgatgggtactttactgggtaagaggagacgggtgccccccacccactcctcccggccgcgcggacctctcccgctcagacctgcatctgcattcctttgagtttaccacggacttggggcgggatcaaagggaaagtggcctgagcctgtttcatcaaggggttgtggaccgaaaccaaggccgggggtggcggagggcacgcggatgaggggctcaggcctaggaagggccggtcctggacaccgcgccctcccctgcagccaggcgccgaggcctgcagcacccggagcgccgcactgacccgcgattctgcccgaaggccggcccgggtgcgccccggcgcggggagacaccaacaaggccagcttttccacgagaggctgcttagctcttgtgaccatatttggtctggcgaggaggcatcttggctgcctggctctcaattgtctgctagagcacagacggtgcccagaaagtgcctctgtcactggagatgcggcttcgccaacgggtgggttgtaaacaaacaactttcaaaccattcatcaatccttaatttcctctacgggggtgactcaggccactagagattgagaagaaaaagctgggtgttggaagagaagagcaattgcacccccctcccccgcaacatccgtgagggttgtgggaggattggaatgtccctgccgccctccggggagcctggagccgggatggaacccgagcaggtggctggaagtagagagggtgcgccagtgacccgaaaaaagccacccaccttcccaccaactagatctgggcgagggatggagaccccctgcctctagctaagggaagaaggtcaagtctggcgaaacagctgcgggaagtaggaggaggccttgcccttcagagcagctcaatttcttttctctctggttgcctctccactgaggggaaagggtggggggagatggcgaggtaagccaaattccaggaagcccctactccaccccatttgattcaaataggagtttattaagtaaatcaaacgagacaatgtaaagcacttcgcacagcaccgggctggttacgtaagtgtttgttaaataaaagagaactgtatgttcttcaagttcacgtattgtgccttaatttttttttttttttttttgagtgacgtctccctcttgtcccccaggcttgagtgcaatagctccatctcagctcactgcaacctccgcctcccgggttcaaacgattctcctgcctctgcctcccaagtagctaggattaagacgcctgccaccacgcccagctaatttttgtattttttaaaagcaaaaatggggtttcaccatgttggccaggctggtctcaaatcctgacttcaggtgatccgcccgcctcaggctcccaaagtgctgggattacaggcatgagccaccgcgcccagcctgccttaatatttttacagggtaaaataaagtcgaagttaaaatctggagctgccttggaggagaaaagtttaaggaaaagacaaggccactcatagttttgcctcggaaaaggtagaattttggggccactccctgaatggctgcatccatatccaaaacagaaccaccaaagtgagccacttcccctgttatctgtacttggaggtggctccaattccagactcctcatagactggaagaaattagggccatcttagactaaggcaggcatacacgtatcatccttttttttttttttttgagatggagtctcactctattgcccaggatggagtgcagtggcatgatcgcggctcactgcaacctctgcctccctggttcaagcaatta

SEQ ID NO: 316555 - DNA, 4001 bp, Homo sapiens
tgtttgagaatatattttcctgtggggtgtaatttgaaaatttcaactaatgtaaaattcatgacatcaaaaagctggaacaatgtgaaaggaagaagagtgacaaagcaggcttgtgatttgatggtattttaggttaacaagtttaatgtaataaaactcctaacaatttccacacgattgatttgtccagcccacaactactccaccacacagttgctaataacatcactgtgctgtgtggtcattatgtcacccagctgggagcactatggcctaccaaccactgttcacttttccagcttgcttttcccaagaagatagaaactgcagaccacctacttcaccaaaagtccctctgttccccaagcttcacagcttttctctgatttatctcggtgtcacatcccaaagggcctggctctggactatctgacttagagtggccaaggaagggactaagggtctgtgcccaagagttggcttcagtcctgcagattcaaggcaaagtcacctgtgtgttttatggtggatgaacttcaccactgcttctgatccctgcttctgatcccttacaattccaacactcagagactcactccctgcttccagctctccatatctgtgaaataaccgtggaaggacacgcaccatctctctctttctctctctctctctctctctctctctcacacacacacacacacacacacgaacacacgcgcgcgttgggcactgtgacttggtgccttcttcggctccaggctgacttacttgaggaagtacctctggccagtggccgtgaaggtcatctcccagcccgggggcagtggcagctcgtcggtcacgtcgtaggactgctggcggaggtgcgcgtgctgctgcgcggggctacccgcagcacccgcgccggtgcccagctgcagggacgcgggcgacgagtgcgagcggacatgctgggcacccccagccagtcgaggccccgggtggccgcccgacgagtcggtgctggactggcgcgagtgcgagcccgaatcaggctccttaaagaaagactccggcaggatcttcttccgccacgagctaggcttcggattcatgacagagttgaagagggcttcgaggtctgtgtctaggtcctgcgtgacgtggatcacttgctgcccaggcggcgggagcggagggggcgccgaggccggattcatcttctgcaaaaagaaggtcagatcagccttttatttaaagtcggaggaagtgggtaagagggttacagggtgagagggcgagatggtgggagaaagaatagagggaaaaggaaacgaggagacagataattgcccgcctggagatcccagacactcagcggtaagaccagcaggatgggggaggggtccctcctggcctcgagaattatgcaactttcttgaagcaaagaagttgcctggaggaggagaagatagggcgaggggtggagggaataactgcactcggggcttgctgaaccgcaggatggcaaaggaaaggtcgcacgattccaggacaggcagccccccgaaagaagttcagcccgagccaactccaccacgtctcgactccggaagcccgaggagcctggagccctggagtggtgccggatgagcgcgcgagctccagcgggcactacctgggcgggcagcgaagctgagcctgagcgcgcggcggccgccgtcccgcccgaacttgccgtcgggcctgggtcgctcgggtgagtcccgagattgcggagctggagccgaggcttggctgacaaatcccgacccgactctgtgcctggcagtctaagggcttcggctctcacatcccccgagctggcctaaggcgctagtgctgggcgaaaaggaggcgcaggagaagcagacagcgcggccgcagcagctcccggactgtcccataaacaaagtttggagcaaactcccacccccaggaaagaggcgggcccgaaagttgagctgttgaattatgtatgacctcctagtccctagccggccagcccccgctcgcccctcctcttcctcctcctcctcctcccacctcggctccagaaaaccctgggcgtgatgggtactttactgggtaagaggagacgggtgccccccacccactcctcccggccgcgcggacctctcccgctcagacctgcatctgcattcctttgagtttaccacggacttggggcgggatcaaagggaaagtggcctgagcctgtttcatcaaggggttgtggaccgaaaccaaggccgggggtggcggagggcacgcggatgaggggctcaggcctaggaagggccggtcctggacaccgcgccctcccctgcagccaggcgccgaggcctgcagcacccggagcgccgcactgacccgcgattctgcccgaaggccggcccgggtgcgccccggcgcggggagacaccaacaaggccagcttttccacgagaggctgcttagctcttgtgaccatatttggtctggcgaggaggcatcttggctgcctggctctcaattgtctgctagagcacagacggtgcccagaaagtgcctctgtcactggagatgcggcttcgccaacgggtgggttgtaaacaaacaactttcaaaccattcatcaatccttaatttcctctacgggggtgactcaggccactagagattgagaagaaaaagctgggtgttggaagagaagagcaattgcacccccctcccccgcaacatccgtgagggttgtgggaggattggaatgtccctgccgccctccggggagcctggagccgggatggaacccgagcaggtggctggaagtagagagggtgcgccagtgacccgaaaaaagccacccaccttcccaccaactagatctgggcgagggatggagaccccctgcctctagctaagggaagaaggtcaagtctggcgaaacagctgcgggaagtaggaggaggccttgcccttcagagcagctcaatttcttttctctctggttgcctctccactgaggggaaagggtggggggagatggcgaggtaagccaaattccaggaagcccctactccaccccatttgattcaaataggagtttattaagtaaatcaaacgagacaatgtaaagcacttcgcacagcaccgggctggttacgtaagtgtttgttaaataaaagagaactgtatgttcttcaagttcacgtattgtgccttaatttttttttttttttttttgagtgacgtctccctcttgtcccccaggcttgagtgcaatagctccatctcagctcactgcaacctccgcctcccgggttcaaacgattctcctgcctctgcctcccaagtagctaggattaagacgcctgccaccacgcccagctaatttttgtattttttaaaagcaaaaatggggtttcaccatgttggccaggctggtctcaaatcctgacttcaggtgatccgcccgcctcaggctcccaaagtgctgggattacaggcatgagccaccgcgcccagcctgccttaatatttttacagggtaaaataaagtcgaagttaaaatctggagctgccttggaggagaaaagtttaaggaaaagacaaggccactcatagttttgcctcggaaaaggtagaattttggggccactccctgaatggctgcatccatatccaaaacagaaccaccaaagtgagccacttcccctgttatctgtacttggaggtggctccaattccagactcctcatagactggaagaaattagggccatcttagactaaggcaggcatacacgtatcatccttttttttttttttttgagatggagtctcactctattgcccaggatggagtgcagtggcatgatcgcggctcactgcaacctctgcctccctggttcaagcaattatcctgcctcagcctcccgagtagctgggattctgtgcagcaagtcctctgcccataggactggcaaaaggaaaggg

SEQ ID NO: 316556 - DNA, 4001 bp, Homo sapiens
aaatatgttacagatcttatagactttacaagaataacaaataaatattatgatcaattttatgttaaaaaatccaacaacttaaatgaaatggatgaatttcttttaacatgcagcatatcaaaactgacatgggatgatatggcaaatgtgaatagccctacatttgttatagaaatataattaactatataaatccttaccacaaagaaaactttagaactagaggatttttctagtgatttttttaaacatttggggaagaaataacaccagttttacacaaactataagaaatagaaataaaggatggaatattttctaactccttttatgaggccagaataaccctgataccaaaattagaccaacaaattacaataagagaaaactacagaacaatattcctcgtgaacatagacagaaaaattcttaacgaaatattggcagatcaaatccagcaatacattttaaaagaataatataacatgaccaagttgagtttatcccagaaatatgagattgttttaatacatgaaaatcaatttaagtcaccatatcaatagaataaagaaaaaaactatatgatcttttctgataaatgtagaaaagcatttgacaaagctcaacaccctttgatgatataaactctcagcaaattagaaataaaagggatattggacatctataaaaatcattcattttttttgctggttattaattcatttactcaaaaatttcagaggcagtcatgttctgggcctggaagcctttggagataaaaaggaaaatgatgtcaaatctcaaacccctccaagttacattcagtgaactggctcccttttgctggttgtctctctccctccccatctctgtggcccacctcaactctaagggagtgaatttagctttctggactgtaatataatttagattgagaaagacagctctaaattatacaaccaccagtaataacaaggccttacataaagatatgtagccaaataaacctctctacttctttcagcataagaaaaatattatttatatgttaggtctactcaaagtatggttcccagatccatttttcttcttcttcttttttttttttttgagatggagtctcgttctgtcccctagtctggagtgcagtggtgtgatcttggctcactgcaagctccgtctcccagattcatgccattctcctgaatcagcctcccaagtagctaggactacaggtgcccgtcaccacacctggctatttttttgtatttttagtagagacggggtttcaccatgttagccaggatggtctcaatctcctgacctcatgatccacctgccttggcctcccaaagtgctgggattacaggtgggagccaccacgcccagccaatttttcttctttgattttttttttttttgacagggtctcgccctatcacccatgctggaatgcagtggtgtgatcacatctcaacctcctgagctcaagtgatcccctcaccttagcctcctgagtagctggtagtacagatgtgtgctaccacacctagctaattttttggggtattttttgcagagatagggtctcatcatgttaggtaaggaactcctggactcaagaaatctgccaggccaatccggaactcctggacttaagcaatctgccagccttggcctcccaaagtgctggaattacaggcatgagccactgcgcccagcccagatcagcttttctgaaaagaatgcagattcttgggaaatccctataccaaaggaataagagccttcagaggtagctcaggaatcagcatatttactagccctccaggtggttctgatgtgcagcaaagcttaagaactcctgatataggctgttacaattagaggaaaacataagtttaaaatgtttgtaaaggaactcacctgaatctacacctctttacatgcgtcttgaggcagaaatggtgcttctctgtttcatatttcacttaaagaaactgaaacacctgtcctgcccagaaggctggaggaggaggatgggaggagtctcagagagagccagggggccagagggggacagctagtgagagaggaggaaggaagaagccagtcaggcaggcagttagggtggatccttggtggaactccttcaaaccaagaacagcctgaaaatcaagctgcaagccctggataaagaaaagagcctgcatgtttgaatagaaacgcctactccatgaatccagatgaacaaattccactccttttttgaacatatatccctctccttggcacgcctttgtctcatttcacatgcttcctcccgattggtccttaccttttacctgtttaacatatacctatctttctgtgattagctgctcgccaaattttcatttgcataaagtgtaacgtcacttcagcccctgattggtcctgggccaaggtctcagtccaagctttcacttcagcccccaattggttctttacactattgtacctcttcctgagtagtgctttttccaagcctacccataaaccaatcagcacgtatttcctcattctaagcctgtaaaaacctgtgactcagacttttagctagcaaccctcttttgggtcccctctctttgctgagagcttttctgtggcttaataaatccaactctgccttcttcactctccagtgtctgtgtgccttatttttcttggtcgtgggacaagaacttggagctcaccagtggggggagtaaaagagctgtaacactccctcccactcaccaaacaacaggagtgaaacagctgcaacagtaggagacagtttttccacatccttaatgaataaagatgttgagcatctttttatatgtgtattggtcatttgtgtatctctttgtagaagtgtctattcagaacctttgccttttaaaaatttgagttattagtctttttattattaaattgtaagagttatttctacattctggatactagatccttatcagagatatgatttaaaaataatttatctcattccttgggtttctttttaattcttcataatacccttcgacacacaaatgctttacatcttctttttcttttctttcctttttttttttgaggcaggccctcactctgtcacccaggcctgaattcagtggcatgatcagctcactattgccttgaactctggagctcaagagatactctcgcctcagcctcctaagtagctaagactataggtacacagcaccacatccagctaattattttaatttttttgtagagacagggtctcactatattgcccagactaatcttggactcttggcctcaagtgatcctcctgccttgccctcccaaagctctgagattatagacctgagccaccatgcctgacctgtttttaactttcacgaaatctaatttataaattatttcttttgttgcttgtgattttgctgttgtagttaagaaatccttgcctagtcaggttatagggatttatagctatggcttagctctgaactttcagttatattccattggtctttgcatctatccttatgtcagtaccatagagttttgattacctttgtagtaagtcttgaaatcacaaatcctccaactttgttctttcttctattcaagattggagacatatagatcaatgaaatacaatggggaaagccatacatctatggtcaattgattttttgtttgtttgttttgagacaggttctcactctgttgccccgtctggagtgtagtggtgcgatcatggctcactgcagcttcaatctcccaggcctaagtgatcctcctacttcagcctcctgagtagctgggactacaggtgcacaccaacatgcctggctaatttttatagagacagggttttaccatgtttcccaggctggtcttcaactcctgggctcaagtgatctgcttgcctcagcctcccaaagtgctgggattgtcaactgatttttgacaag

SEQ ID NO: 316557 - DNA, 4001 bp, Homo sapiens
ctacccctgcaggcctcatggccaccccagctcagcctctccccggctacacccccgcccctcaatgacctaccacccctcaagcccttctctggtctctgtccatgtatgtcttatctctcttgtgacaggtgtactaacagtccccagaggccagtagggaaagaatgggaagcacgtgccccctcctgctgcccctgacccactgctctgcaccacacagggtgctaaatatagctgaggtcctggcctcagaacagcagccctgggctcagagggaggctgaggcccagccagtggggaccctcagtacccttggctcacctcatctccttcattagcctgggctcccctatcctgcctcctgggctggtgtcaggcccctgggctgcaggccagccaggtgctagaacctggacaccttccctggccaaaggagtctgcactggggggaggtactggaagtaagtggggcaggacttcctccctatggctacctcagaaggaggagagaggaaactgagacctgctgaccccatgcccaccctggcatgtccaccaaagacatcagaacctttggggaatgtgagctctgaaacctgcagcctgagtctcatcaaagctctgggtggttttctttcatttctgagctccaatgaggatcccctgcccaaggcaaacctgagcctgtctccacctctactccatcctgtcaccaccagggtggcctgagcagatggtgtgtgcacaccatcagcttcaccccacccccgcccccaggaatttccagaatctctgctaaggccacagacagttattatcatggagtccagggatgtcaggcctaaggaccctcagaggtcactcaatctaaaccccttattgttcaaatagggaaacagaggcccaaagaggggaaaggagctgtccaaggaggctcagcaaggcagtagcaaagcctgaagcatgtctcctgactcctggccttcccaccaccatctttgcctggcttgagactgctgggacaagtgtagagtcaggacagaattcataactgggaccagacttacgtggggtgagccccaagaactgtcctagagcttggtctcctagggctgggccagcctctcaggatggtccccctgctgtcctcgggtcacctcctccttggcccagctggctccatatgtctttacatctgggcaaattcagatctggtctccctcccgtgagccccccaaatctgccctgggggctttcccactgggcaagactatggacatgggcagagtccgaattccaccccaggttttaggctatgatatgtagggagctgggctccggccagcccctgggagctatccctgggccagatatgccaagagtgtcatccacaacaactaggcatggggcttgttctagcaatgcacactcaggcctacttacagccccctgcccccacctctctcctgttcctccttcctccagatcctgggcctgcctgaagcttccctgggaggaagccctgaagcctgaggcactccatacctgtattttaaaaatcacaactccaggcctttctggatcatgccagcctggcaggagcctatcctttctgctagcttcaggcctgtggcagccactctgagagctcccatggggctcacactgtctttacctcctttgtgggttctttatgtctgagacttccactcacctcctcccatgcatgcccctcaatctccttcccctactcagagccattcctaatacgtccatttcagaaggagaggggatcccagctgtgaaagccagccttgctgtggaaggatggagaggtaggttactcaccaagggtctctcttggctgatggggtgtttgtggtctgtagcagctgtggtctcagggttcgtcgttcctctggaggttcttgttcaaattggttctgttctgctggctccaacagacaccttcttgctgccctggctccaggtctctgtcccctgccagccccagcagctgcctttatcttgctggctagtgggtgggccgtggtgggggcgggtgggagaggctatgttccgagtattaagtggttcggttatttttaggtcttgtggaagtcactcttccatcctggggaatcagttacatgtcctttgggctggggaggggaaacagagggggagaagcttcattcatccaaagtctgatctggggattggggtcagtgactcagctgggttgtgaggttgggggtgtcccagactattttgagagagtgactaagaagaggcatctgacaccttggacagcttgctcccgtcttgtgagcccccatcattctactctggccctgcctctgactcttcctgacgtgtctccacccaccgtgccaggagactggaggtctcctgagggcaggctgggcacctcctcctctgttctgagcctggatacctctgagtgtgatgctcagctctctttcttccccattcccttctgcactaaagagttccttctttcttatccattccaccctgtgccccacagcacaggtcaacacagccccgatgaagctggatttggggggaagacatctgaatgaccaggcccagctcttcactgggccgagattggccaggcccagctcctcctttgcaccactacacccagttaatttttgtatttttagtagagatggggtttcaccatgttggccaggctggtctcgaactcctgacctcaggtaatccacctgcctcggcctcccaatgaatgaattccacagcaggactctatggttttcattccagattatctgagtcctttcttctcgactcttccctctgactcagggcccaggctttctgggaatggaggggaggggaagggcggcatgcagggagctgaccgtggggttatttctgaccctggagtcatcagcttcccagtcacagatggagtggcggcgggggtgggggggtcacacctgcctcctcctttgcttaccagggcgtgaggggcccaggaggcccaagagatcctggcagtcagaccagtgtggtgaaggatgtcaggggaccatctgcaaaaaactcgaaagaggtgttttgtcctaggtgggcctggcccaggctccatgcctgtgggtatgcaggtgcattctgtggcctggcacatgaggtcttccttctgactccccaaatgccctctggtaccagggggtgatgccagacattgctcactttttccatgtagtcaatgtcagtcctgcagcgtcagctgggatgggggtaaggacatctgggaaccccctcttcctggtctccctccctcttgtctcttcccctgctcttttctagccctctgcctgtcccccaggctcctggctctctctaggaagggcagggagaccgatgtaccagtgtttcagggaaagggcagccttaggtttctcaggatttctcctgggaggagctttctccctgtgggtactgaaatttcttactttctaggatagttttgagaattgaaggaattattatatgaaaagagtgcctccagccaggcacggtggctcacgcctgtaatctcagcacatttcggcaggctgaggctggtggatcacttgaggtcaggagttcgagaccagcctgaccaacatggtgaaaccttgtctctactaaaaatataaaaaattagctgggtgtggtggcacacacctgtaatcccaactacttgggaggctgaggcaggaaaattgaatctgggaggcagaagatgcagtgagctgggatcgcacccctgcactccagcctgggcgatagagcaagactctgtctcaaaaaaaaaaaaaagtgcctgagagtacttagcacatagcctatgctttagaagagccagctattatactgtatataatataaaaagagaaaagcccctaggtggaactcacttttgtactcacctcctgtgataactcatgggagaaattcct

SEQ ID NO: 316558 - DNA, 4001 bp, Homo sapiens
gctaagccctacccctgcaggcctcatggccaccccagctcagcctctccccggctacacccccgcccctcaatgacctaccacccctcaagcccttctctggtctctgtccatgtatgtcttatctctcttgtgacaggtgtactaacagtccccagaggccagtagggaaagaatgggaagcacgtgccccctcctgctgcccctgacccactgctctgcaccacacagggtgctaaatatagctgaggtcctggcctcagaacagcagccctgggctcagagggaggctgaggcccagccagtggggaccctcagtacccttggctcacctcatctccttcattagcctgggctcccctatcctgcctcctgggctggtgtcaggcccctgggctgcaggccagccaggtgctagaacctggacaccttccctggccaaaggagtctgcactggggggaggtactggaagtaagtggggcaggacttcctccctatggctacctcagaaggaggagagaggaaactgagacctgctgaccccatgcccaccctggcatgtccaccaaagacatcagaacctttggggaatgtgagctctgaaacctgcagcctgagtctcatcaaagctctgggtggttttctttcatttctgagctccaatgaggatcccctgcccaaggcaaacctgagcctgtctccacctctactccatcctgtcaccaccagggtggcctgagcagatggtgtgtgcacaccatcagcttcaccccacccccgcccccaggaatttccagaatctctgctaaggccacagacagttattatcatggagtccagggatgtcaggcctaaggaccctcagaggtcactcaatctaaaccccttattgttcaaatagggaaacagaggcccaaagaggggaaaggagctgtccaaggaggctcagcaaggcagtagcaaagcctgaagcatgtctcctgactcctggccttcccaccaccatctttgcctggcttgagactgctgggacaagtgtagagtcaggacagaattcataactgggaccagacttacgtggggtgagccccaagaactgtcctagagcttggtctcctagggctgggccagcctctcaggatggtccccctgctgtcctcgggtcacctcctccttggcccagctggctccatatgtctttacatctgggcaaattcagatctggtctccctcccgtgagccccccaaatctgccctgggggctttcccactgggcaagactatggacatgggcagagtccgaattccaccccaggttttaggctatgatatgtagggagctgggctccggccagcccctgggagctatccctgggccagatatgccaagagtgtcatccacaacaactaggcatggggcttgttctagcaatgcacactcaggcctacttacagccccctgcccccacctctctcctgttcctccttcctccagatcctgggcctgcctgaagcttccctgggaggaagccctgaagcctgaggcactccatacctgtattttaaaaatcacaactccaggcctttctggatcatgccagcctggcaggagcctatcctttctgctagcttcaggcctgtggcagccactctgagagctcccatggggctcacactgtctttacctcctttgtgggttctttatgtctgagacttccactcacctcctcccatgcatgcccctcaatctccttcccctactcagagccattcctaatacgtccatttcagaaggagaggggatcccagctgtgaaagccagccttgctgtggaaggatggagaggtaggttactcaccaagggtctctcttggctgatggggtgtttgtggtctgtagcagctgtggtctcagggttcgtcgttcctctggaggttcttgttcaaattggttctgttctgctggctccaacagacaccttcttgctgccctggctccaggtctctgtcccctgccagccccagcagctgcctttatcttgctggctagtgggtgggccgtggtgggggcgggtgggagaggctatgttccgagtattaagtggttcggttatttttaggtcttgtggaagtcactcttccatcctggggaatcagttacatgtcctttgggctggggaggggaaacagagggggagaagcttcattcatccaaagtctgatctggggattggggtcagtgactcagctgggttgtgaggttgggggtgtcccagactattttgagagagtgactaagaagaggcatctgacaccttggacagcttgctcccgtcttgtgagcccccatcattctactctggccctgcctctgactcttcctgacgtgtctccacccaccgtgccaggagactggaggtctcctgagggcaggctgggcacctcctcctctgttctgagcctggatacctctgagtgtgatgctcagctctctttcttccccattcccttctgcactaaagagttccttctttcttatccattccaccctgtgccccacagcacaggtcaacacagccccgatgaagctggatttggggggaagacatctgaatgaccaggcccagctcttcactgggccgagattggccaggcccagctcctcctttgcaccactacacccagttaatttttgtatttttagtagagatggggtttcaccatgttggccaggctggtctcgaactcctgacctcaggtaatccacctgcctcggcctcccaatgaatgaattccacagcaggactctatggttttcattccagattatctgagtcctttcttctcgactcttccctctgactcagggcccaggctttctgggaatggaggggaggggaagggcggcatgcagggagctgaccgtggggttatttctgaccctggagtcatcagcttcccagtcacagatggagtggcggcgggggtgggggggtcacacctgcctcctcctttgcttaccagggcgtgaggggcccaggaggcccaagagatcctggcagtcagaccagtgtggtgaaggatgtcaggggaccatctgcaaaaaactcgaaagaggtgttttgtcctaggtgggcctggcccaggctccatgcctgtgggtatgcaggtgcattctgtggcctggcacatgaggtcttccttctgactccccaaatgccctctggtaccagggggtgatgccagacattgctcactttttccatgtagtcaatgtcagtcctgcagcgtcagctgggatgggggtaaggacatctgggaaccccctcttcctggtctccctccctcttgtctcttcccctgctcttttctagccctctgcctgtcccccaggctcctggctctctctaggaagggcagggagaccgatgtaccagtgtttcagggaaagggcagccttaggtttctcaggatttctcctgggaggagctttctccctgtgggtactgaaatttcttactttctaggatagttttgagaattgaaggaattattatatgaaaagagtgcctccagccaggcacggtggctcacgcctgtaatctcagcacatttcggcaggctgaggctggtggatcacttgaggtcaggagttcgagaccagcctgaccaacatggtgaaaccttgtctctactaaaaatataaaaaattagctgggtgtggtggcacacacctgtaatcccaactacttgggaggctgaggcaggaaaattgaatctgggaggcagaagatgcagtgagctgggatcgcacccctgcactccagcctgggcgatagagcaagactctgtctcaaaaaaaaaaaaaagtgcctgagagtacttagcacatagcctatgctttagaagagccagctattatactgtatataatataaaaagagaaaagcccctaggtggaactcacttttgtactcacctcctgtgataactcatgggag

SEQ ID NO: 316559 - DNA, 4001 bp, Homo sapiens
atggatgatgaatttataaccggtatagaaacagaatctagtgtgatagcctttgccggttacctagtctaatctacccagttttttcaggagacccagaaattccttctacagcctgcattttgcaattatttaaaatatttactagccgggcgcagtggctcatgcctgtaatcccaacacttcgggaggccgaggcaaacggatcacctgaggtcaggagtttgagaccagcctggccaacatggcgaaaccccatctatacaaaaatacaaaaattagccggacatggtgtcaggcacctgtaacaccagctactcgggaggctgaggcaggagaatcacttgaacctaggaggcggaggtcacgccactgcactccagcctcagcgacagagtgagacactgtctcgaaaaaaataaaaaataaataaaatatttatttagcatttagccctaccaatccacgggccctgcatccacagattcaaccaaccacagatgaatatatttcgggaaaaaaaatacaaatttaaaaaatacagcatgacaactatttccatagtatccacattgtattaggtattattagtgatctagagatgatttaaagtatgtcggaggatgtgcataggttacatggaaacactaggccatttgatataaggtacttgagcatcacaggttttagtatccgcggggtatctgggaaggaccaccttagtttgctcaaggaatgtctaacttgagttttgaagaaatagaaaaaatcagccctggtaaaagccatggggggttcactctaggcagaaggaacatcaaaggaaaagactcaaggaataacttggcatatttgaggaagagaaaggaggccaataaggagggtatctggcaaggaaacaagtggtaagagaaacaggagaggtagcaagagccaaaacatgtagtatcttgtaggccaggataaaacaactggattttaagctaagagcaatggaaaaccaaggggagtttaaagcaggagcagggcatgattttttttttttttaagattatttgggttgctggatgcagagctgggaggccagtaaagaggaaactgcagtcactcaactgaaaggtgatgatgacttggacaggggctgtggtcatggaaatgaagagaagtggacaaatttgaaatacactcttgaggctgaactgactggacttgctgacggactggatgtgtggacataagaaaaaggtgggctttgctttataacaagtattgagactggaaaaacggaggaaagcatagatttaaagaggaaaaccatgagttctgcattgcccatgacaaatgtaagaagcctatcaaatatccatgaggggaagtcaggtgggatcccactgtggaactctgggtgagactcagctgaagttatcattcgggagtcagcacactgcatcactctacgtcctggtccgtccgtctgtcttcctgggacacaaataactgccttctccgagttcaaccctgaacatctgtatcctctggacaacggggagcgggaaaaaagctacgcaggagcttggatcgggcgaagctcgcgggaaaccgctctgggtgcgcaggacaaagacgcggggacagcggggagggccggccgcagcctgccgggctgcccccacggcgcggaacgcgcgcagcaacctccaccaggcctccgcgtctggactcccgccctgcctctgggcctcctccgcccaccggcggcgtctcccgcgaagcccgctgggcctcgctctcaccctcctcctcctcctcacgccgggccttgctcttggccttggatttctggctgcgcagttcgcgtccccgcggctccccgccggccgcgcgtttccgagccatgttgcttgtctgggcaaattccacttcgcgagtgacgcacccggccgcgatgcgctagaacgccggccccgccccgaggcggtgcgcttggccacgccccttcgttggaggcctagtcacgcccctaaaggaagctccaccccatacccgtggccactaaaaaactgcgggaagcaggaaagagcacaacaggtttctctctatttccggtgtattgtatcctcacgtttccggagattgacgttgctcttgtgttctcgcgagaggcgggaaagggcgcagggtttgaaacatggcggacgacgtagaccaggtaagtgtattttaaggaggtcgctcgaaggagcttcttgtactaggctgctttttccagactcaggaaaaatggccagtcgtgcctcctctctccaagtcaccatggcctaatccaccctgtcctttccgtaaccccccctccgaattttgccgtaggccctgagaccttttcctgttagaagcccacctgatgactattctcacactcttcgcttcatttttttaaatctgtagattattatccttagctacctcatggagctgtcaggattccaatagaaagccaggtaataaagttaggagttgttatcattagtgagcgcaacaattatttattcattcagcagatagagtgaacatcagctttgtatggttaggcactgttctaagggccagggacactgacatcgacatataagagatccttgccattacttggagcttatatttgcgaggagaacagataaaagtaaatataaatatgtaagacttccaggaactgtgatgtgctgtgaaggaaacaaggaactggtatgcagaataacagatggtcctagaagctttttcacctggtctttttcttcctcaaatatctttggagatcatgccacaacttaaactttctactgaaatctgacctcctcagagaggacttctgcccaaatagcactcccgctactctggttaccctgcctcatttttcttcatagagagttattttttcatattaaatgtatgcatctttgtttaatgtgaatctctccccactagaatgtaaatgccataagagcagggattttgttttgttcattcttttgtctttggggtttagaacagtgctggaaacactcaaaaaatatttgagtgaatgagttagatgatcagaggaagcctctttgagaagccaatatttaaagctacaggatgaaaagagcagacagtgggcatcccagacagaggcttaggtagcagtagggctttttcatgtgcatattcttacagtattataattatttgtatgcctctccacagtagaatgagctccttgagggtggggattgtgacttctctatcattgtaatctaacagttggttatctgatcctttaacaaacacttgttgaactgagggacatagggaccagttgagttaggttatttttttctctcatcaggccttttgaatcttcagagcctgttaccaattcagttaccttcctccactggccttgtgtacttactgaagaagctctccttgaataatctttctaactcttagcggctgcaaccatcccttccatgtgggtgaccccaagtcatcctagccctgacctctaaaaccaatgtttccagcagttctgtaataatataatattaataggaatcttttcttttcctttttttttctattcttttcttttttttggatggagtctcactctatcgcccaggctggagtgcagtggcgtgatctcagctcactgcaacctctgcctcctgggttcaagtgattctcctgtctcagcctcccaagtagctgggactacaggtgcgtgccgccacacctggctaatttttgtatttttcgtagagatggggtttcaccatgttggccaggctggtctcaaactcctaacctcaggtgatctgcctttctcagccgcccaaagtgctgggattcaagcgtgagccaccacgcccggccaataggaaccatttctaaatattaatattttctgttttcctggcactgtttttaaatgcattaactagtttaatcctcataagaac

SEQ ID NO: 316560 - DNA, 4001 bp, Homo sapiens
tgtcacatggtttgttgtaattgttttatggattttaaactttggtttctagtttctctttctgtttttacaagatgattcagagaaactgaaaacctatgctactgaggccacaccactgacttcccgtaacttacttcttctccctatccttcccgcccaggactagcttttgaatgcctgtgacttatttaggcattaccatctttaagttctacttaacagagaagctgataacctttggtctctttttaatcaaacatttttgaaaggtatcacaacaatgaaccaaattttaaaatttatttacagtgaaatttaaaaataattctcctcccagtttctatataaagctttcacaaaacctatccttagtgtccatgtcataaaactgcattaaagagattttcattcttcagtaacaaaattcctcaggatggagagaatctaagatattttcaccaaaccaaattctgtgccacagactacagaataaaaatattactgaacaaattatgtattaaatcatcacgaataacaatcgcattatttttgcactttagagataaagtgactgatatatagcaggtactgactgaaggatgcaagaaaagccaaagttggttgtctccatttctgcaatgtactggtttcctttttagccctccccgggggaaaaaaatacctctctaaacctaactcaatctatgtttcaaataaattcaagataagctaaccttggaaactttttgtagtctatttctcatctaccaaatctgattggaatccagcaacaaaaactcctttccagaagtaaactaccttcatgttcgtaaatgccgattaaaccataatttaataggctatttacaatactacccatcacaactgattcaatcagctacacaaatttcaagctttttttctgtaaagcatcagaaaagagatcaaattcattaaatgtgacaaacaccaaagtatcacccaaagtctagtttacctaatagacgactgctttctcctctctttccacagttccaatatataaactacgttttcggaatctacacattaacgttgtcctggggtcagtacatgccaaatattattagtagtattaatgttctatcaattcgtttcccaaccccctctgtcacacagtgaggcctccaaataaaaggtcctacgccccactccccagctggcccaagagttttttgttttggcaacaggggattggtgctgcttttgaaataacagaaagtaacaaaaggcatcaccaatatgaccatcagccacgtcggaaagtctaggctccgggggccgggtgggccgcgctctagatcagggaaagtaaacaaggtgactgcgtgcggaagcggctgttatcgtctgtaagtgggtctgccgctctgggtgggatgggggaacctacgaggacacccactccagcttcgcagcctctgtaaggaaaaaggcaacttgcagctccccgggaggaaaccggagaacagtaaaagcgttctttcccaggacttcatttcggagtcgcggaaggaccagcagaagcaagagctgtcagagaagccgtgaacccagcggctctgtccacacacaggcaacctgcgtccttagcccctttcggctcatccgggcgtcctcaaaccttccgtccccctccctaatgccactaatcgtccagacgacgaggggaaagaggtggctcgaaagccccagctctaaggtggagagggccgcggagccccgggtcctcggctttctgagccgttgcccctcgctcacccacctgatgctctttcaccacttcgctgagacagggataccgctctgagatccatctgtaaaacttggggactcccatttcgatcgtcaacactaatcccagtcagggccaaaccgaaaccaaacgccccgccggggctccgccgcagcctccggtcgtcgctccgcggatgacaacacaccgcccggccgaccatagagagcgcccggcgggcctagagcggcaggatccgaggccgtccgaggggcggggcttagccctccgggcctcgcgcggccggggccgcggtactgtccagtggcggtcagggaatctgcggaggtttgctggtgtgttgcaacttaggggcgaaaatgccccatgatagagttgtgctttctaagtggatttggaagtggcatgaaaaccgtacgaaggtgtgggaagggtatcgaacactgatttttgttccgcttgtctcctagggttgctaatctcagtatttttcattcagatttcgaaagatctggtgatttacttggcttagtttgttgttttgtcaataattttttttctctgaggaatttaaacttacgtttcttaatacatacgtttaaaaacgttcttttccaaattgttcaaaaaaatttcccatgtacccgccccccgcaactgttaacataagaccttggatacgaaatcatttaatgtttagttttgacattcttgcatccgggtttatcatatttttccccatcacactttcaaccgcacagcaaaggagagttctatcaacttaagtgaaattatcagttttaaatgtaagagttttccacttatttgaatgtattaacccgttactttgtatttaagtcttctggatgaaaacttacagaaaaaccttaaacatttaatactttttggattttaagatctcaggaaatgttaagtatcgctgtctttcatgaccactggattctgcattctgggactgcagtatggcagcatcacacaaattacagaatgtttatttcgttttcacattcacgcttcttggcttatattttttccctatcacactttaaaacaaagttttattaagtgaacttaatgatatgctatttatatttatatatctctcttactagactgtcacttcctggagggcaggagagggtagctctatgcacaagtctggcacaacgccttgcccacagtatttattccatataattttgttcttcaagtgaatccttacaatagctaggacttttaaaaggaaatcaatagaagttgtaaaatgaaattagacttgcttgtttcttgcaaatatagtttttgaccataagaacacatgatattctatttctccaattataatgcacagtatgtattaagaaagcagtttatttcttaataactgaatgtatattattttacatataattaatgatcagagagaaataacagttgctgagaacgtaaatttatgttgtactttagaattgaacagatacaaccacagattcataccaaatgcattacttttagattattaacatattcttttacataatttcatttcacatatatggagtccaaccaagatacatctggcatagtaagttttcatcagtagcttcctgtataaggtaatgcacatgtccttcaatagataacggcagtcctgtcactctatttcgagtcttgattacaccttgtagtcgctgctcaatgtcaagaacatgggtcttggcctaaaaagaagaaacataaaaccaaaaacagatgttaataatttggaattactacctttctttatattttgacatttaataaatgttaataccattttactgaccaataccccttttgtaagagcaaatacaggaaaagaagaaattaaacaaatacagttagcttgtgatactgatttggaggctcgcaagattgattcaacatcaactgcttggacatgtttctggactacgtgaaataccagggaattatttacacattacaattctagaaaaataattttttaaatctgctttggaagtgtttaggacttaaacatttcaatgaatattcaaataacaatgctgtactgcctaatatttacattatgttagtacatgcaaatgggtgttctaagtgagctacttggaactgtacaatttcttaagcatatctgaatgcaaaaggaagaataacgtta

SEQ ID NO: 316561 - DNA, 4001 bp, Homo sapiens
agaagagatgacaatgctatcttcaaggcggtgtttggagacctggtcaaatcccaagatctgcccagactgaccctatggccaagggccctcagttttctaccgtgaactagtgcaaagtttctcaaatattagggtcattaggatcacctgggacaggttgccaggctcctcctccagcgaggaccttcagaggtcccagggtctagggactttctcaggagaggtgaaagctgagtaaagaatggccaagggcccaagaggacactgtgggcagacagtacagcatgtataaggcccactccctacatagctaaggtatgaggtgcatgtagacaaaggaggagaggtgaagccagagaagtggaccaggctcacaacacaacagccctaccaataaactgggacttcaccccgtaggcaacaaggagctatcagagactcccgaagcctgtaggatcctggcaacagctcccctagtcactcacataatacaactcctgtctcagcatgcttccccaaccaacatcagtctccaccctttaatattacctactactccttaaaatctggcctcggatcccctctgtacaactattaggtcaaaatcaaataagcaatttgacctaggcaattcacactatgtcagaaacacatctcagacaaggagagccaggcagtgaagacagatgataaacagagatggaagctgtcatggaggcagactggtccagcctgggacaaggcggccagctgtgctctccccagatcatatctgttcctcttgagctttctcttcctcattcggaggaactccaggcttctctaaatgggttcatgacccttggaggaaggggaaaaagggacacagagaggagataagatggttcacaatgagtttgaccagatcctactgaaataccttaagagcaatgagaagtgtcactgcaacttcaacacttccagaggcctcaccaaggccctctccagttgctcaggatgactactggtgaccagtcccatcctcagaagtcaaaaactgaggaacataaacagaggtgcagactctgaaggcagtgctgaaccctgcaacgttagcaaaatgggggcgcgcggactctcctgggggctgcgcttaactgggggagaggaaaacgaggcggtcattaaaaacgcagctccactcctcagcaccagctgagggcgtctggctcccggacacgcccccgaacgagccctcccgcaggttgtgaacactacattgcaagcgggcagctcagggaagatcctacccgctagttccccggatcccctccgggagcgcaaactgacctcgcctaggatggggtgggccacccaccgggagcccccagccgcggcccgctcaccttgcacttgaagccagcggcgggcggcaggagctcccgcagcaggcccttggccacctcgcggctggcctcctcgctcacgaagtgaaggttaagcacctcgtgcgcctcgaacttggcgaggcgcagcagtgagcgcagcgcgacgcgggccttggcctgcagcgcggcattgtgctccgccttggtgaacatcatcagcaggtggtagtccaccggcccggcaccgccgccctccaagctcttggccttcgcgccgggggctggcgccacggagccccgcgctagctccagcgcgggcggcgagggcgcggcgggagccccggcgcgggcctccttcagcctcttggtggcgctggagaaggtctcccggcctgagccgaggtagtagaaggcgcagacggccagcgccgcggccagcagcagggcgcagtagtgggagcgcacagcgcccaggcgcgccatggcccgagcgcatgggagcccgcctcggaggaggcccatgcgctacgagaccgcggcgccagcggtgccagcaacgcgggagagccctcgggtacccggacgccggcggccacttagccccggcgccaggcggcggccatgaaaggggcggggccgcgccgcctggagccaatcgcgggcgccggtgcgcggaggggcggggccgggcgtgccgaaaccgctgggtcctaggttccaagggtattagaggaggggttagggtgggatccggcgcccggcgttgggagggggggattccggactccagcgtgctgagggctggcccgctgtcccggctgagaaatggcgccctacgcggcgagccccagaggatatccaagctgagtgttgaagggaatggaggcgcccgaacagaggaacttaggttagccaaaagcgaagctggaggcaccaagaggtaaaactttaatctctgcaccttttttccctcaatttcttggaggctttaagccgtctcggcctctccctgcacacgagctgcagctaggcaatttaaaccggcagctcctcccttttcccccgccctgggaggaaatggcccgggccgcacgtcgcgccggaggccgagcggagggaggctggaggatgtggccagcagggggcccccgccgcccgcacgaacctgcgaggctgctccccgagccccagcaccgcaaagccctggagggcgacattcatccacttttgttttataaacagacttttaacactttatcaagagcctccttgagggtaccagggagttttgcacgccgaggtcacgtgcccaaagtcacacagctagccagtagcaattttgaccctaggcagttgcacactgctaactagataaaaacgtactaacttcagtcttctaagaattgaggctataccagtagtttttaagtaaacacgtgcaagtgctgtgcatgctgtctaaatagacaaagaacttgagtaagtacagtaacccttcagttctttggccaagttctctgatttctgaccagagattaggtaaacggtttttcctgttatttccacattgtaaggttgcatggattatccaacctctctgcttcagaccttggcttacatgtcactacctacacaaatgatctctaaatacctcctatccagtgtctgggctaagtgccatcctcaataattctgtgagggccacctaaatatatgtactaccctagtctcatctttcttcattgcaagaacacgtgactccaagagaacagaatatacatttgttttttattaaccacaatatacccagtacctaacacggtgcctaccacattggatgagtctcaaaaatatactcaaccattgaaacagcatttttatttctagaaaatcttcctaataatttaagaatgttcaaaatatttaaccataagaataaagcaaggccaagcatggtggcttaggccgggaatggtggctcacgcctgtaatcctagcactttgggaggccgaggagggcagatcaccttaggccaggagttcgagaccagcctgcccaacatggcgaaaccccgtctctactaaaaatacaaaaaattagccagacatggtggcgggcgcctgtaatcccagctactcaggaggctgaggcagaagaatcgcttgaacctgggaggtggaggttgcagtgagccgagatcataacactgcactccagcctgggcgacaagagcaaaactctgtctcaaaaaaaaaaaaaaagtaggcagtgtggtggcggacacctgcaattccagctactcgagaggctgaggcaagagaatcgcttgaacctaggaggcagaggatgcagtgagccgagatcataacactgcactccagcctgggcgacaagagcaaaaccctgtctcaaaaaaaaaaaaaaagtaggcagtgtggtggcggacacctgcaattccagctactcgagaggctgaggcaagagaatcgcttgaacctaggaggcagaggatgcagtgagccgagattgtgcctctgtactctagcctggcgaaagagagcgagaccctgtctcaaaaaacaaacataaaaataaagcaaagctaggttcatgatggcaaaaaatcagaa

SEQ ID NO: 316562 - DNA, 4001 bp, Homo sapiens
aggtctgccgagaccaccactcctgtatttggcaaagcctcaacagtgcggtctgcgaatacaaaagtttgcgggaggaccccaaaaccaacacccccatcacacacacatgcacatcaagtacatacccaaattctggaagatctctgtcaaaatgcacactttcctcatagaagacattcaactctgcatcaacagcaacaacctttacctgaaaggcattttaaaaaaggaagtgtagaattttcctcagcttctacactggtccagggggtactaacgtcaccagatgaggccccacaccctaggagcagttcaacctagagacctccttgaaggcagggctgcctcaccgtaatcgtggtaacagaggactcatctggggtaacactcaaagatttagtaaaatgaagaaactgaggctaagtaggaacacccacatgtctcaaggaatctttgttccccaaatagccaaagccaagaccctctagaggaagatgttcacagatgagttggttcgtgcacctgacaaggaggcgggagaaagtgccagagaggaaggaatgggaagcaaggtttggaggcatctctggggatccatgtctgcagaggcctgagaccaggcaaggccatgggctattctcacaggccatgattgtggtccagagacattaatgtcccactgaagcaatctccaagcttgggagtataactcctttcctggacagatgggaaaactgaggtccagcaaggcaactcgagtcatccagagtcccacaggacgttcccccaaggactggccagaggcctgcctcccttgacccattcgagaagaggggtttgactgcaactgtgtatatttcccaagtactttaaaggaaaaggtgcccccggtcaccccatgccctctttgaaggcaaattttgatttgcttgcctgtctgcagggcgttggcagcagcacactgctcctctggccagcagtcctgggtgcacagaccaggcaagctggtgtcaacgaagggcggtcacagggtaaagtccacttgtacactatgcatttcacttttttctttttttttttttgagacagggtcccgttctgtcgcccaggctggagaccggtgacgccatcttagctcactgcaatctccacctcctgggctcaagcgatccgcttcagcctccagaaaaactgggactacaggtgtgctccaccatgcccggctaatttttgtattttctggtagagaccggggtttctccatattgcccaggctggtctcgaactcctgggctcaagcgatccactcgcctcggcctcccaaagtgctgggattaccggcaagagccaccaggcctgggccatttcaatttttaaaaaaaggttttgggctataatctgcttccaggtcactggttgtgcatgtgcgcagggctacccgcctgtctgttcccctgccttacagtagctgacttccttcggatccccgtcactgggtgcccagaacagcgcaggaacccgccgagtcctccggcccctctgggcaccgggggtcctgccgaggagcgcctgcagtttcctggggtagctgggtccaggcggggtcgaggccgcatcttgcgagcgggtggcattggcagggcatctccgggcgagggcaccggcgccccacggccgcgcgcagggcaggggcgcgggggccccgggaagcccgagaggtaggcgcgcccgcggccgggcccatgttttcccgcgtccgggtgacagcccgccccctacccccaccgaagcggaggaggcggccccgtggccctgcggccaggcgactgtacctgctgcgtgctgaagtcccagcccaggcagcagcggcgaggggcgtgctccgccatggcctttcgggtaaggctgcgcgtccgtcagtccgtccgtccgccacgcggcgtgatagtcgccgcgctccagcgcccagagacgcaggggcccgcccctagctccgcccggccggactgtggaccggagtcacgaggcgggcttgcgctctggcgccgcctgcggggctacgcgagccgggaccgcgtcctgtgcaatcgacggtgcccccacgcagcccgctttccttcgaagcgcaccccctctggttctccccatcttcatcttatgtcttcatgggccgtgccctgacaccgcctggcttcccttagaggacgcctgggccagaggtttcagctataagccggcttgtctttcagagggagcctgcctgtccttctggaggccctgggcctgccgtcctctgtggctgtatcttggcactggagcagctgtccacccatggtggtgactcaggggccacagggaaatgggccctggggttggaagcactgagtcctgacaagccctatccagatccagcaaatctgaatggttcccagtgtgtcacatcccacctgtgtatttaaactcagcggctcctgatgcccccacggggagacactccttcctggagtcaattggtattgatggtctaatgtgtgccaggcatggtaaaggggaatgagaaccagagtcagacccactccttttattcatggagctgagggcgcctgtcccaccagctacatccttcccgtccctaagactaactgctttccagaattcctccccaaacccagcatgtgagaggctcctcctacgaacttcccagcccaccagtgcccttttcatgcacttgcaatggtctgtctcccttgctgaacttgagctgcttggagtctacatgggatcctcttcactgctagaacaagaaggggccaacatacttgtcctccaagacattcacagcttattggggactcagcccctccagcagtcaccacctgtgacaatagacaaatactggatactagctagatcagaaacaattatgcaacctgctgagcacatttaatcgtcacaatgatgctgggaagtaggtactattatctccacttttaaaaaattttaaataaaggtatctaagtatctaatctaattaagattagattactgcattttaatctaatcttaactgcttgatgacttttttttttttttttgacagagtttcactcctgtcacccaggctggagtgcagtggcgtgatctccggtcactgcaacctccacctccctggttcaactgattcttctgcctcagcctcccatgtagctgggattacaggcgcacaccaccgcacccagctaatttttttttttttttgaaacggagtttcactcttgttgcccaggctggagtgcaatggcgtgatttcagctcattgaaacctctgccttctgggttcaagtgattctcctgcctcagcctcccgagtagctgagattacaggcatccgccaccacgcccagctaattttgtatttttagtagagacgaggtttctccatgtttgttaggctggtcttgaactcccgacctcaggtgttccgcctgcctcatcctctcaaagtgctgggattacaagcgtgagccactgcgtatggctctaattttgtatttttagtagagatggggtttcaccatgttggtcaggctggtctcaaactccgacctcatgtgatccacctgcctcagcctcccaaagtgctgggattacaggcgtgagtcaccgtgcctggccaatgactttttaaaaatgtatgtatatacccatataaacactgagatcaaaacagaacatttccaccactccagaagtttccttcatgacccttcctaaactcccaaggcaatcactattctgatgtctaccagtataaactcactttgaacttcgtataacttaccatcttcattttacagagtgagaaactgaggtgtagagaagttagttaacgtggcctaatgaaactgccattgcaaaattataactgagacagtgaaagagatctgacttaaccaattccatcttgcttctagcctccaagctgtcattgcttattc

SEQ ID NO: 316563 - DNA, 4001 bp, Homo sapiens
aagccctgataaaaggaccaattcaacatcttccagaaacacctcttttggctgccatgatacatgccattttggtaggagctttttctcctacctcacttgctgtttcctgcgtcctttccccaaccttcttcctctaccagacctagaggtatttgagtgtctgcgcccttttcacttctccacactctttcccctcagtgatctcacacagcaccatacctttgaatatcatctacgtacagatcactcccaattttttttttttttaagagacggggtccttcctgccttgtagccaaggctggtctagaatatctgggctcaagcgacccgcctcggtctctcaaagtgctgggatttcaggtgtgagcaccgcgcccagccactcccagatttttatctctagctctagcctctctcctccttgagttccagccctctacatccaactgcctcaacacaccgacttcataactaacatgcatctaaaatttaatacatctaaaatagaattcgtttttcccacctcaaatttctctcttccattcttcatctcagtaaacagcaccaccacctactcagttgctcaaaacaaaaatcaaaaaagcaaagattcccaccattccctcaccaatccaagtcttgttcattctaccttaaaacatttaaaaatctgtttatacttccccatctccctgccacgggcctagtccaagctactgcaaagagcacagtaactgacctcgtaggttcctccccagccctcttcctctacatagcagtcggatcatgctactcgccttctcaaaaccttcaaaggcttcccgggaaaaactaaactccttatcagggcatcatctgccctatcttttaaagagtatacacaaacaggaatatacatccaagggtagtatctctagatcgtaaaactgcgggcatttttctctggctttgcttgtatttttaaatttttctacgctgaataccctctactcattaagaaaggggaaatgatattgctgaattctatataatattataccgcattttttacatgtgagcgagaaaagggaatggaaaacgtgggtcaactctgtaactgctgaatgcttagatgaaaatactagccaacatcaaactaaaaaaaaatgatgtgtcaggcctgtaagattgctgatggcatttctcttcctctggtttctatttcttaacataatcacattcatgatggagaaaacctcattgtcttctgcagtctggccacagcccttcaagccagcctttcctgcaggagtcctcactttccgaggcttccactccgccccgcactgcccgcagctccggcgcgttggccccggccccatccctggacccccaaagcctctctgacccctcccctccatcccagggaggcccggtggggatggcgacaggttggaggggcattccaggatcctttcggtaaacccacgactttctggtgctggggccaaatcttgcctccaaggccaagagcttaacatcctaaaagctccggccgctgtggctcggggtcccgtatcccctcagcgcagcgccccgctgaagaggaagcccccaactcacgttccaattccaggctcccgcttctgcggctccccggcccgcacctgggatcctccctgccctcccctcggccccggggcctcaccgggtcccgctgccgcgctgcctgccgatgggggaggggcgcgcacgtgcccgcgccgcccccgcccaaacaatgccccggagagcggggcgcgctcccggccggtcccttcctgcgcccgccaacactcaccctttctccgggtctccggctgcagcgcgggccccgccggccgccgcgagagagcacggcgaggtgagagagcgggcgaagccccgcggagctgccccgccacaaggccccagcgacccccgcaacctgcggaagcacacggcgcggtggagcccgcccggcgcgttccgccccgcacgtcagcagctgggcgcgtcggggcgcgcgcggcggcgcgcgcggcctcggggcggagctcccagggatgagggcggggcggggcggggcggggctggtccgggctgggaccccggcccgcgagggcacttcctgggcagtgtgggcgtcgattcttgcaaaggcacagtcgtccatcactttcctgccccagaagatggcgaatttcaaccccaagtttgacagaatattcattctgccggcgtgtatgagcttccctattaatcacaatagtgactatgatgtttgtgtgtgccatctttgtgccaacccatgtgctaagtgctgggtatacaaaataacagtagttatttctagcccattttacagatgaagaaactgaggcagggaaggcttgagacttatctcagtcacactagctagtgacaatccaagtccagttttccacctaaatatcacttgaggccaacattctctttcgttgtaactctaccaccctacccaagaccctgtaatctctctgcccaagactatgaatagcctcccaactggtcttggggaacttctgttccccttcaatcccttctcactgtataacgatttactactggagctgagtggtgggtttaggaagttcacttttttttttatactttacatacatgttaccaaatttttaatgtatttaatgtttttatcaacgcataataaatataagtggtgttttgttttttgtgtttttttttttttttgagatagagtctccctctgttgccaggctggagtgcagtggcatgatcttggctcactgcagcctccgcctcccgggttcaagcgattctcctgcctcagcctcccaagtagctgggattacaaggcgcgcgccaccacgcctggctgatttttgtatttttagtagagacagggtttcaccatgttggccaggctgctctcgaactcctgaccttaggtgatccacccgcctcagcctcccaaagtgctgggattacaggcgtgaaccaccacccccaggctaattttggtttttttagacaggtctcactatcaccacagctagtctcacacttccgggctcgagagatcctcctggctgggcacggtggctcatgcctgtaatcccagcactttgggaggctgaggcgggcggatcacctgaggtcaggagttcaagaccaacctggccaacatggtgaaaccccgtctctactaaaaatacaaaaattagccaggtgtatttgggcatgcctgtaatcctaactacttgggaagctgaggcaggacagtcacttgaactcgggaggtggaggttgcagtgagccattgcactccaacatgggcaacaaaagtgaaactccatctcaaaaaaaaaaaaaactaagaaaggcttccttgaaccttaagctaagactcaagagataataggaactggggagataaacaaatttcatggagaagggggtgaggtcacaggtcaggatgagtgtgttggtgttcccctactcttagggtttaacagtgaggtggaaagcatagaaatacccagataagtgccaagaaagctagaagctgacttcccttggtgtagcttggaaggctgtccaagtctgtgagaaggctcacacagtagggcttgggagcaggccatggcgttgggaggagtctgcaatagtgctgctggagcgctgcagcttgcacatttaggtatgtcagaattccagacttctcttgttgctccctgcctggcatgcagaaagtagcatggttaagagccatggacagaccaataggcactgtgccagggggcaggtttcctaaagcagaggccttgtggtgggctgatggccagggaatggctacagaacgtagctaagaccccaaggataggcagtactgaagataccagtggagctgaagcacccctaagtcagctggtgagaggagcggggatggaggagtggggatgaaagatgagacatca

SEQ ID NO: 316564 - DNA, 4001 bp, Homo sapiens
tctataggcaggttctcttgagaacaactgagaaactttgcctttagatatcaagggacaagataccattttaaaatacttttgattaaaaataataaacaatattaaaaggcactgaatttaaggtcagaaaacctaggtagactaaattcactggatttaaagtcataagatctttgtgtgatagaaatctctgagcttcagcttatccatgtagaaaatggtaaggatcctctccccctctaatttgcaggatattaaacaaaaggtgtctgatttgtgacttgacttgtcaagctgtgggcttctataagacctccagagagctcacggttcagggaaaggggcagccttagaaactacctagagaaggcacagccttagaaactacctagagaagaaaatggagcatcaagattgtgctttacccttagcatctctgctttcatcttttttacataatgagctttagtgtttacctctctgctcaccaagttttattctactcaatgctcaattcgaaggctgcctgtatcatgaagattccctccatcgaaaccgagcttctccttgtatagaaagaccatgtttattaaactcatttgctattgtatgttaccttgtgttattttttgcatctttgtttatatagattttgtttccctaagtagcccaaatatttgagagtggtcctaccattgacctttgaaaccccagcaatcaatacagtccctatacataatgtagtgccaataataatgtgctaagtatgtaattttttttctactgcttttagttttttgcacaacctaccctacggaaaaaattaaacacgccctctttcccacttcaactaaactttttgttttcttttttccatgtttcctaacgatcttgatgagcaatcaacaaatatacattgaacactctctccctgccaggtgtcaggttaagcactgaggatcaaggtcaaccagacaggtataataccagtcttcactgaacttacactctggtgaaggaagtaggtaaaaattaaaaagcgaataaaataattgcaagaattattaagtgtcttgaaagacataaaggaactactttcaaacaattcatttgtaatacaattggtaaaattatgacaggtcagggcagccctctgtgtagactataagataagctaaattggagaaaggcagagggagtcattacatttgcataagcatacagtttgtataattttaatcctgtgtagtttcaactttactatattttttaatgagccttgttaactttagattttaagtcaagctataaaatatatataactgaaccttacatacctgagtccctctactgctgattttgggaagaaaaaataaacttccacatcttcagatttctcaggaatcgggcaccccgcaccatagcccttacttgtgaggagtagacttcaagaagtaagtgggtgcatgtgaacgcgcaggcagactaaaggctacaaaaggggatgaaatatggtttctcagggtgccaaatttttcataaggtgcaaatgacttcaaaggataaaaggggctagtatttgaaagggtcgggctgcagaaggggtacaactgatgaagtccccaatttcactgtctggggttcactcttgattcatttatccattagcattttgggctgggaagtctttggtgtataccaaaggctttcaactcctgaggccagggccccgtcctgctgcctgcaggcctggcactatgtcagcctatggcaggggctcagcaaacacttgctgggccggtgcctccagctccacccgagctgagtctgcttcccagccgcgctgcccgctctgctccccgcaccaactagcccgggcttgctgcccgctaggcggactcagagaccatcctcccctctcatccacccgcagacagacaacccacctggagaccccagcctctcgcgtcaccaccgccggatggccgcggatagctgccgggagtttccgtcttggtctccttggttaccgcgttacctcggtacccatagcaaccagaaagctgggttctgccactgtccgccggcagagggcgaaaaggagcctgcgaaatgagagagaatggtgatcacaggaaggaaaagggcggaaaaactcaacaggctctggaagctttccgccagagaggatcttggagattatgtatgtgctaaacctgagcatgtgtcatattccaagcacaagtgagagacttatatgtcatatttgattcttcctcatagcaagccagcttaaatctaaaaaaattaaggcacaaaaaatttgactatcttaatccaaaattacaaagctagcaaatggcagacctacaaattaattcaaggagtttagtctcagaactcccacatttatgctatgtttaaatgatttatcaatggctaccataggcaaagtcaatagagattccaggtctcttcaaaagtccagaactctcttttctttgtaccgaatacatgacccgtggagtctaatgggtataaaacaaaaagcaaaagcaaatatatgcacacacacacacacacacacacacacacacacacacacagttaacccacaattctcaactcaactcttccgaacaaagctgcacctgtagtgaatttatctttggcttcctaaatatgctgttttttatctccctttttaaatactgcaagtaggatgtgtggttggtactgcactgtataggcttctatgcttaaccacattgcatctgtctcggtaccagactaacaatcctaactattacagttaatgtactaatctttacaccattacttttgacattactatgcctgccaatacccatttaaaaaaaaataatgatttcacttggcatattcaattatataagattacaaccactatggataagagaagacaatggtagtcttctggttataagtctggattttggagtcaggcagattcaagattgagtgccagtactgccacaacttacctgctgtgtgaccatgagcaagtaacaatgctcagtctaactgcttaaatgagataacagtacagttagtccatacgtaatgtagtatggaagagtaaatgaaacaataaatattaagtatttagctctaagccaggcccatattgagtgcttaataaacagtaagaaacagtggtgctggtgtggctatgatggttgctattaacgtgttcatggtataactttaccacgtccttcctttaactttaatacaagaactagtttcaggtggatgtgcgatactactggttttcttgcacagactatttcccatacaggcgcgctcttcaaattaccaaagatattttcagctttcgtccatttactgatctattcatttatttatttattccacaaatatttattgaaagtccatttcctagatcccaaaaatactggagtgaagaaatcgtcaaagcccctcctattttcaaatatattttaacaggagcagaaaggcaataaacaagtataaatgcatgtcagctgctatgaagaaaactaaagccaaataaagaaatagaaactaattgagttctgttttagggtagatggccagggaagtatctgaatgcaaggaaagagaaagacatgggccactagaggaagaaacagtccagagagaacagtaaacacatgtcaattatgtcccagtaaagattattttgcaaataacttctcctcacttctacaaaggacttttactccaaaaaatgattcttacaatgcatttacttacacaatagtaaaattaaactcataaaaataatgtataaagtattcttgcactttttgaaagcattaaaagaacattatcttatatttagaaaaatagcttatgcacagttatgaaaaggcaaagcagagacaaaaactaagcctatgctaagtcacatagtaaaataaaaagtatgaagtgcttgtctttcagaatga

SEQ ID NO: 316565 - DNA, 4001 bp, Homo sapiens
cccattttttatgctctataggcaggttctcttgagaacaactgagaaactttgcctttagatatcaagggacaagataccattttaaaatacttttgattaaaaataataaacaatattaaaaggcactgaatttaaggtcagaaaacctaggtagactaaattcactggatttaaagtcataagatctttgtgtgatagaaatctctgagcttcagcttatccatgtagaaaatggtaaggatcctctccccctctaatttgcaggatattaaacaaaaggtgtctgatttgtgacttgacttgtcaagctgtgggcttctataagacctccagagagctcacggttcagggaaaggggcagccttagaaactacctagagaaggcacagccttagaaactacctagagaagaaaatggagcatcaagattgtgctttacccttagcatctctgctttcatcttttttacataatgagctttagtgtttacctctctgctcaccaagttttattctactcaatgctcaattcgaaggctgcctgtatcatgaagattccctccatcgaaaccgagcttctccttgtatagaaagaccatgtttattaaactcatttgctattgtatgttaccttgtgttattttttgcatctttgtttatatagattttgtttccctaagtagcccaaatatttgagagtggtcctaccattgacctttgaaaccccagcaatcaatacagtccctatacataatgtagtgccaataataatgtgctaagtatgtaattttttttctactgcttttagttttttgcacaacctaccctacggaaaaaattaaacacgccctctttcccacttcaactaaactttttgttttcttttttccatgtttcctaacgatcttgatgagcaatcaacaaatatacattgaacactctctccctgccaggtgtcaggttaagcactgaggatcaaggtcaaccagacaggtataataccagtcttcactgaacttacactctggtgaaggaagtaggtaaaaattaaaaagcgaataaaataattgcaagaattattaagtgtcttgaaagacataaaggaactactttcaaacaattcatttgtaatacaattggtaaaattatgacaggtcagggcagccctctgtgtagactataagataagctaaattggagaaaggcagagggagtcattacatttgcataagcatacagtttgtataattttaatcctgtgtagtttcaactttactatattttttaatgagccttgttaactttagattttaagtcaagctataaaatatatataactgaaccttacatacctgagtccctctactgctgattttgggaagaaaaaataaacttccacatcttcagatttctcaggaatcgggcaccccgcaccatagcccttacttgtgaggagtagacttcaagaagtaagtgggtgcatgtgaacgcgcaggcagactaaaggctacaaaaggggatgaaatatggtttctcagggtgccaaatttttcataaggtgcaaatgacttcaaaggataaaaggggctagtatttgaaagggtcgggctgcagaaggggtacaactgatgaagtccccaatttcactgtctggggttcactcttgattcatttatccattagcattttgggctgggaagtctttggtgtataccaaaggctttcaactcctgaggccagggccccgtcctgctgcctgcaggcctggcactatgtcagcctatggcaggggctcagcaaacacttgctgggccggtgcctccagctccacccgagctgagtctgcttcccagccgcgctgcccgctctgctccccgcaccaactagcccgggcttgctgcccgctaggcggactcagagaccatcctcccctctcatccacccgcagacagacaacccacctggagaccccagcctctcgcgtcaccaccgccggatggccgcggatagctgccgggagtttccgtcttggtctccttggttaccgcgttacctcggtacccatagcaaccagaaagctgggttctgccactgtccgccggcagagggcgaaaaggagcctgcgaaatgagagagaatggtgatcacaggaaggaaaagggcggaaaaactcaacaggctctggaagctttccgccagagaggatcttggagattatgtatgtgctaaacctgagcatgtgtcatattccaagcacaagtgagagacttatatgtcatatttgattcttcctcatagcaagccagcttaaatctaaaaaaattaaggcacaaaaaatttgactatcttaatccaaaattacaaagctagcaaatggcagacctacaaattaattcaaggagtttagtctcagaactcccacatttatgctatgtttaaatgatttatcaatggctaccataggcaaagtcaatagagattccaggtctcttcaaaagtccagaactctcttttctttgtaccgaatacatgacccgtggagtctaatgggtataaaacaaaaagcaaaagcaaatatatgcacacacacacacacacacacacacacacacacacacacagttaacccacaattctcaactcaactcttccgaacaaagctgcacctgtagtgaatttatctttggcttcctaaatatgctgttttttatctccctttttaaatactgcaagtaggatgtgtggttggtactgcactgtataggcttctatgcttaaccacattgcatctgtctcggtaccagactaacaatcctaactattacagttaatgtactaatctttacaccattacttttgacattactatgcctgccaatacccatttaaaaaaaaataatgatttcacttggcatattcaattatataagattacaaccactatggataagagaagacaatggtagtcttctggttataagtctggattttggagtcaggcagattcaagattgagtgccagtactgccacaacttacctgctgtgtgaccatgagcaagtaacaatgctcagtctaactgcttaaatgagataacagtacagttagtccatacgtaatgtagtatggaagagtaaatgaaacaataaatattaagtatttagctctaagccaggcccatattgagtgcttaataaacagtaagaaacagtggtgctggtgtggctatgatggttgctattaacgtgttcatggtataactttaccacgtccttcctttaactttaatacaagaactagtttcaggtggatgtgcgatactactggttttcttgcacagactatttcccatacaggcgcgctcttcaaattaccaaagatattttcagctttcgtccatttactgatctattcatttatttatttattccacaaatatttattgaaagtccatttcctagatcccaaaaatactggagtgaagaaatcgtcaaagcccctcctattttcaaatatattttaacaggagcagaaaggcaataaacaagtataaatgcatgtcagctgctatgaagaaaactaaagccaaataaagaaatagaaactaattgagttctgttttagggtagatggccagggaagtatctgaatgcaaggaaagagaaagacatgggccactagaggaagaaacagtccagagagaacagtaaacacatgtcaattatgtcccagtaaagattattttgcaaataacttctcctcacttctacaaaggacttttactccaaaaaatgattcttacaatgcatttacttacacaatagtaaaattaaactcataaaaataatgtataaagtattcttgcactttttgaaagcattaaaagaacattatcttatatttagaaaaatagcttatgcacagttatgaaaaggcaaagcagagacaaaaactaagcctatgctaagtcacatagtaaaataaaaagtatgaagtgctt

SEQ ID NO: 316566 - DNA, 4001 bp, Homo sapiens
ttcggccaagggtcagcagagctctaggaacctcgtagataagcatttggtcaattcagacctgctcagattaactcatactgtgcactatttcacataaaagcaaaatgtcaccaaactactttgctttacatttgagttgaaactaaaatggctcttttctacaagtctagagtcaatgttttcagaatagattctccaagcccaatttaaacaaaatggaagggatgtactgctgcaggcagctctttctcccgctggcatgcctccttctcagccctcaccttccacttcatctccaggatggccctttccacctcctccagggctcgctcccttttttccacagccctctcccgccattccactgccctttccctcctaagcacctccttttccctttggctggcccacaaagccatggtgcccacctgctccaggagcctaccccagttaccctcaatgcctgtggggagctggggcccgtggggccttggatcctggcgctgcccagcctgaccatggccactcttctccagctcctctctgtgcatgcttttcagatgcttccacagtgcagtggtgcccacgttgaccccagggccacggctcacctgcctgccacacaggcggcaggtggcatactggttgggatggtgcccagcacgagcaggagctaggtggaaatattcccatgcctcagagaaccgggtgcccttgttgtggggcattggagtgggcatagcactcacaaaagggccaaccagttctcctgtctcactaatctcttcctcctccttcatctctaagtccccttttgccttcatcattgttccctcctcttcctcgtcttcccgcctcatcatgtcacctcttctacagcgttctttatgatgtgcttagatgtgagccaaaagcttatttgaaccacaagattaaatatatatttgggaagggcctgtggtaactcttggggattcacaataatggccaaagtctggccacacctgggtggtgtgaggtttcttcctttctgcttcactggagagtcaggggtgagtcagatacaagcaaaacagcccaagagtgcattccttccatgccccagatacttacttatcctcccttgactaggccagaaagacaaaacatatcagttcctgtagcaaaggggttctctggtccaacaattacaaagctctttgatgaactcagtgttttctgcatcaaccaccacgacaggtatttttgaatattgaaaattttaggttttcttgtttctcctcctggttgtttccactgtttctgtgcttcttatttcctataattgcattttggaggcaggagaaacagcctcagggttcaggcttttcaggaccaacagagctagggcctcactgggtcttgctcaaagtaggtaaaagcaaacacaggcagatgctggtgcaggagacaatcttgcttcctaagaactgttgcaacaagcaatccagagtagacaaagcctatgaggatctggataataaagttcccaatgcaaggtcagtttgtccttagaggtgtctctcagaggccaggagtctaagaaatccaaaaagcaagctcagctgtttcagcaggaggagctgggatgcacagaggagaaggtggagcacatcttcacaaacacagcgttgcctggctgtccttagcaagcagctcaccatactccaccttctccaccaggatcacctgcaaagccaacagccaataagaccttcctgaggcaacttactccagatgttttgctctttacctcattttaaagataaataagtaaatggaaaatcatattacatttaaaaacagcccgacttctctctcctttcttgggtcatttcttaaactaatgagagctttatttaatcaagctctgcaaccgtgaacagttaggaaattccccccagccacaagtgggtacttacaagcaggcaaggctctggacttctctctgatctttcctgcgcagagtgaaagcactcctgcacaccttggatgtctattagctgactcctacccccagaaggagggcacctccagttctggtttcctcccacttctagggaagcattgtttccaggtaggtgtgtctgtgcctgttgggtttttctgcaacacttagacacagatgcaaaccttttctccaccccctccaccaccaagaaaaggatgttcctggcatatgtcatgcagcaaaacagtaagtcaagcacctacaagtcttagttctcttttttgatgactagattacctaacctctcaagtaaagcaagcgatttgaaggaggaagagtgggaaaggctgaaatattaaatgtatacacacatatatattatatatatacatacattatatataatatgcataatatatatatgtgtgtgtatacatatttagattgagaaggaaaacctaccaagaggagataggaagactctaaagaaggtatcaatagaagaagaaaaaactttgtgttataaaaggaaagatagaaatggcattgcaggccaggagccatggatcttgcctgtagtcccagcactttgggaggccgaggcaggtggatcacttgaggtcaggagatcgtggccagcttggccaacattgtgaaaccctgtctctactaaaaatgcaaaaattagccaggtgtggtggtgcacgcctgtaatcccagctacttgggaggctgaagcaagagaattgcttgaacccgggaggtggaggttgcagtaagccaagatcatgccactgcactccagcctgggcgacagagggagactctgtctcaaaaaaataaataaataaaatgaataaataaaaataaaaaaagaaagaaaagaaaaagaaatggcatagcagaaaatatgtagaggttgacagttaaattaaaatagaaaaaaaagatgggggaaaaagattcaaaataggaatgagactgggaggagttttagaacatgaaccacatttctaaaccaaatcttggaacgcaaagtctagagagagtctagaatgtttgaaatttggatcatttcagaaaatctgaacctagagaattcatgaaagtcaaatcttttcaaaatttttagacgttaaccagagttcttcagtgagccagttgccttcgtaaaataataacacccccacttactcctgatattaccatatcgtcatctttggtgggttaactaaagagaaaggaaatgaatcataagaatggttaatgtcactggattaatgcaaaactttgtatctttttctttttttaaaaaaacattttacctcctttacctttttgtctcttcctggaccaactggagataaaaatcaatctttggcatctattgaattaaactgaacactctcctttacttaataagaatgtattttagaggatctggttttgcttttaattttttagtggagagactagcatccctggcccatatatgtatccccattatctggaaaggcaagtgttgaacggatgggaatactgggagctacggtgtttgccacccagcatcttggatatgctagacaaccccctctgaaattctcttgtttcattgggatttctgtagcaatgtactgagaaatagtaaacttctgtaggatttcaccaggaaaatgttagttagcattctcgaatttggtttctcagctctataggcccagacttcttgggagtaactagtctgaggattggcacacaaatcatcacatacatttaattgttctttacatgttaactagtatattcattaattgtggaaaatatctgagaactaagaactagggctggtcatatgtaaaatatatacatctcttgatgagaaaacaagtaattataaaaggaattataattttgaagagtctcagataaaacaatgggaatccaataattctcactggatattttcaccagactgtaaaagaaagtatcatcccccaaagaacaaaca

SEQ ID NO: 316567 - DNA, 4001 bp, Homo sapiens
caagcttgatcaatgttacctatagttacaattatcatctttaacaaatcctgaagtattaaatctgagacatttgttcaacaaactaatgtctacccaaacccatccaaacaaaatgcactgattacttcattacctcataatttaatcttcgcatttgtctgtccttacaggaatttaattcagatattggtttaaagtggaaaataaatggaagaatttgattatccaatagttcgtaaacgaataaacttgatgatgtttataaaccgaaaagaactttagaaactattcagtaatttcgttattcacagacgaagtaaccaagatttgaatgaaataacttttctgtagccatattggagagtgacagcactgttcctaacaaaatttcttaaatgggactataaactattaactaattctgacagtttgaatattcattaactgtggagagtgaagatggttaagaagccaaggacacttgctatcctcccttacaactggttcccaaggagtcaagtaacttcagagctgtattttttgacaatcaaaaagtcacagtaatcgtaccttttctgcgtatatacaatgctacacagttcccaaacgcgtttttcacatcattaggggaaagattattaaaacattcagagttacgaatatcaagctgggcgccgtggctcatgcctgaaatcccaacactttgggaggccgaggcgggaggatggcttgaggccagatggagaccagcttggggaacgaggcgagacccgtgtctactcaaacaccccgcccccgcaaaaccaaacaacaaaaacagtaactgatatcttttacatttacttcttgttcttaaaaaaaaacgctcaaggcgatttctcaatcactccttatcacttctgcaaataattgtattattccttatttacgcagcagcggcaaaatttgaggaacactagcgaatgtgtccagagcagctcatactcgctcgccaaaacccaagcgcagcactaaagaaacgggagacccggcttcgggtgactcgtccccccttccaaacgtcagcacagtcgaaaacgtgcaccccgcagcctccactgccgcgagccacacgccacctccagagggccggggcctacagcctcaaggggccgcccaaggaggcggacctggcgcagcccaggcgtccggcccctccccgcggctggcccggcctccggggaagcccccttggtcccacccagggccagggcccgcccccagcttcgccggcctccttcctgtgggaagtgcggctcctttcgcgtcccccaccctctcggctccgcctggcagcagctccgccgcccagaggcgtccgagaccctccgactcgtgggtacgcataggcctcgccagcgagccttgcccaggcaacgagtcgccagcccgccccctcgccgcgggctaggtctcacctcgccaccagtacgtcttggacaagtagtgccaggtctgatgccgggtgtggtgagtgccgccgggacccaggtgcgccgcctcgatgaggtcccggcgtcgctccggctgcagcaccacctccagctccgcgaaggtcttgcggtgccgctgccgccgctggtaatacagagtcccgccgcgcaccacgtagcaggcggcagcttttcggattttacgcttgacattgccctcggtgcccggcgcatacggctcgcgctcgttcgtcaggtaacgcaggatggcccggtagctttcctcgcttgacatcgcggaccgcggctccctgagggcgcctgtcagggacaggtgaggaaaacggcccgctacctacgggcggctgcaggaggagcggcggcaccgtagggagaaacggctgcgcctttggcgagcgctcttcgacggctcccttagtccgaaggaaaagcgggcgagttggtaaccagggggaactgcacttctccagcgcgcgggatccgctggcgactgacaaaatggctgctgcaccaccggaagtgacgcaaggcaagggcggggactgagccctgattggagcgcactctcgttttctggcttgatggagccgatccagtgacgtcaggaatgcgggtggacattttggaagcgggtaggacccttcactgcagttcgagggagtctttaagcagacatcttaagtcctggcagtttctcttttcatttttcccttttccacgctttctaaggagccacgtgtagggggagctggtggacagttgagagttcagccgaaacatccagagggttaggagtccgtttttacgtttgagactcccaacatcataaaagcatattttcaggcttctggaaaaatattagtctcttgacacgggaccagagacagcccatttacatggaaatttagattccagttaacagttataaaattttcagtgcctccctcagtgatgagttattgtttctaaacttgcacctgctagctccagactactcaaggaagagtcgagattcttttggaattatcagcatttatagtcaatgttattgcgagtggaaaagggggtcggtaacactattttaaggctttatttacatatatttttacacaaacgtaggggaaaaggttctccattttgcaccaaatatatatgagggtgcaagaaggggagcggacttgagctgcgtctcccagtgcgtgctgaggatgctaatacaggtatttagctggtaatcccggagcagcgaccccggtcaccctttcctgggacgaatctgcagcgctcacaggggcccagggctgacatccctcctcggggactggggttggacactgtcgccgctttgctaaagccagaacatttcaggccgagggctccagctgcagacacggcctagtacacttctccaccggagggtctgtagtctctgggtgaggccctttgacgctcctagaagtagctgacgggcagacaggtgaatacagtaggctcgaaaacagaatcatacagccagcctctggtgttaggggcgtgtttttgtgtgtgtgcacacgcagtaattcccggatggcccggacatccttgaaagattccaggtgcggggacatgagctctcaaggcccagaagaaaaaagaaactaccaggcttgggatctacttagttgctgagtttgccactatagctcaaaggaggaatttaaaaatggagatgcacctctttcccccatggggtcgggcagtgagagcagaagaccaaatgcaccctctgcgaacccaggaggctggtctacgtgtcaggccaaccccactctcctgtcatactgtctttaaatattttggccgggcgcggtgactcacgcctgtaatcccagcactttgggaggccgaggcgggcaaatcacgaggtcaggagatggagaccatcctggctaacatggtgaaaccctgtctctactgggcctgaagtcccagctactcgggaggctgaggcaggaggatcgcttgaacccgggaagcagaggttgtagcgagccgagattgtgccactgcattccagcctgggtgacagagggagactccgtctcaaaaaaataaaaaaactaaacattttaagttaattgatatttaatattaaatatttaatatattaagtgaatacattcaaatctgcaaacaatacagctaggttgtagaagagttaaaaaaatccctccactcagtttttgccaaaacaccacctgtaagcactgagaagcctactgatgcacgcattatcctttgggccaatagaaacaaacgttttaataaaatgctttcccagtggtcaaattgtcttcctgagtaaagctaaacttgctgtagtgagaacaggtagtgtttatttctagcttcttctgggtcccaggttacctaagacccaagggtaatgacaatgggcagctccactttattaaaagccaacatttagcccagacattttattctccaaaaatcagcaagcat

SEQ ID NO: 316568 - DNA, 4001 bp, Homo sapiens
ccttgtttctgtgagcatggtaatgtacttgttatgcagaatattttgtatttaaatttgttgtgctgggtagttaaatctgccctcgcagaatatggtgttatgattagtatgctgtgttttcagtccaacaggttgtgaaataaaatctgtttcttcagagggcaggaggcagagatggcatggcaaagattagaatagaggtgaggctttcagacatctttttcagtatggaggaagccaatacaagagaagcaacaaattataagaccttatcaattgatttttgaatggtgactatgggagtaacccccaaatcttgagtgtctacatggaccctgaaggagctggtattctgattttcagtttaaagatgtagccaagatcaaagttgctaaagcccaactcctttattaaaaccaatgctttctctaaggtccatatctctatcactgttgtctaccaccaggttggaaacctcagggtcactatacaccttcctctgccttaaagccaattcatcagtaagttcttacagttctgcttccttcatattttttctcacatctgtgtttccattccaatttcactgcaatcacctactgctttttatctagctgattgtttactaactggctctccaacctctttcactcctctagtcctgtttctttgcattcactaaatctaagatgactacattagcctgacactcaaggtcagttccgtatctcttctaacttttctcatgtgtcctgtatattggccatactgtaccctcagatttcttgaatatcctccagaacatcctgggaatctacattctgggctctacatctttgctcaagttttctcttactttgaatatcccatatttcatctctgccctgttgaaatcatacttattatccttcatacttattaaatggtgtcttcatcttataactgtcttgattcctctctgccaggtaggacttcactccccacagtgaattcctccctaggtctttctccgaaatgcctaagctcttttttttcttaatcttatttcactcactcaattttatttcaataatggctatttatgtgcatatccctcttgtgagactgtaagctctctgaaggtaaggaaatgtcttagttattttagtattcctagtgttcacctattcttttcttcttccttctctcctgtcattcattcatttacatattcattttacaaatatttatgatgtacccatgatgtgccaacatgggctaaagaataaaacaggactggttccttccctcccagagtttactgccttgtctatactattaagcaatgtagcttagacaaagctgtcattcaataattgattgtggacagaatgaaatgaagctgaaattaaagtgtattttaagaacggtcatagtctgaatcccaattaagtttcctactttttatgcagcaaggtagcaaaactacctgactggctgcttttgctttaagtctgtgaggggtatttaataagagcaggactattttgctcagtaaggctaggctggccctcatgattcatttaaatatagggtcaaaacagtaatgacatatgtcacctagcagaaaaaagtgtttatttttgatattcatagacagggcctaggatactttcagatgtgtgcttcagaaaattaagaaagctttctttcaaacataaggacatagcaaaaccaccaatatattactcttttatttttaacactgcaaaaattatattgttcttcatatcaatgcccttgtttccttccctagattcgctcttgtttcctacctgacatcttgtatcacaccctcctgttgcctcagtgatcactttgggagaatattgatagcacagaggcattggagctacctctataaacaggaaatgttagcaactcaacctttttggctcacccccttatttgtcttatatcactttacttacccttataccactgggctgtttcccaactgtccagataatagagaactgctcaccatcctcagaagcaattcatgtcctgtctcaccctctctaatggttcttcggactcctttttccggagctgagaaaccctaaaacatagcacccgtttacgtctagacatgcacaggtgctgtgaattgaccccatttttgcagttcatagtttattaaggaggaaagaataagccctgtcataattagttgaaaatacattttgaggctgtataaaaagaattataaacatggcacatctgagggcaagtcttttcaagcctctgtggcgatgcactattccctggagcctttagagggcagcagcacactggctgactccagcggatttcagagaggcgaactcccgaccagaaccttcctcctggtcaccatgccaaaggttgatttgccaggctctggcctctcagtctctttcttttcagttctcattctctctctctctctctctctctctctcattctctctctctctctctcattttctctctctctctctctccaaccccttcctcctctctctctgttaaaattatacactctgatgaagtcgcccctcaaccggaaaatgaaagctccaatgaaaaagttagacaagccaacaacaacaaagaaagaaaccagggaaaaaggaaaagggggctggtgacagggaaggacttaagaataagaaaagggcagatgtttcgcaaatatatgcaaagcaaaactgggtgtaccctgaacacttccacagagaaacagaccaatcattgtgcacttcctcccgccacactggtggagctctgcattcaaaaaaagaaaaaaaaaaaaggcaaaaaagcgtggccgcaggcacccgcctttcaacggtcagttctgacattctgactgaacatctctcaattgtccaaggagaacaaaaacattttcatctcctcactgcaaacatttctgttatgagaaaaggctgcttcaagaattgggagtgtgttttaaggagactggcggccgagttagccagcagagccttctggtttttaactctcattgtgctggccccagcaagaagttttaggctgaaacatagcagtgagtaaggctgtggaggatgttggctctttcctaactagaccatattgtatgtggaaagaaatatgcattaaaacatattgatgatatggtaggtattaagcatgttaaatgcatggaaattaaccagatcggcggcatttgatgtatatatttcacactcttttgcacatattgcacacatacagtgatggcaatgctttctgcaacatatggaaaaataaatattttatctgtgtgagctcttagcagtctccagggtgttgagagtgctctcttctttcaccctatcccaattttctctcttcactgggctcccaccctctcttgcacgttaatgtgccttttacttatcagcttggtcttttcctatctggtaagtaatgtgcctgttacttatcagataggaaaaaattagttggaacctcctattggctcatgataatttagaccagtgatgcctcccccaatcttactggagtcgtaacaatttccctactcttttccccaacaatacattaaataggcttagtatctgggcaggagagaaagggtaggtggtaacaaaccaccccaataagggtggtagcggaactgcgctccactacctattagctgtatgtcctgggtagattactccgcatctctgagcctcattttcctcatctgtaaaatgggaataataatacctaccgcttagggttattgtgaggaacaaatgagataagccatgtaaagtgatttgccttgtgctggcacatggtaagagctcaataatggtagttcctctcatagggattgttagttctgtgatattcatcatgttagctttaagaagacatttccgggcaaggggtggtagctcatgcctgtaatcccagtactttgggaagtcgaggcgggc

SEQ ID NO: 316569 - DNA, 4001 bp, Homo sapiens
aagcattccacacacctccactaatatgccacgaactctccatatcccaagctttctgataggattcagttgagactacacatagcgcttttacttatgtcacacatgtgatctcaggtctcagcacgtactgacataggtagttaccatcaaacttgctcttctcataaatcctgagaaaaaaaggtaggttggaggtagaaaatggacagaatgtctctgctaacctaaacagaactagtatgtgttgctgctaaaatattccaatagctggcagcaatgatccataacattatatttgtaatataagtatacataaacactacaacagatgatctcagattgtcattgataatgatgatggctaactttttttagtatgttacttgtaccaagcattgctctatgtactatacatctcatttaatcctcatatacaaaaaaaaaaaaatattcttgggtaaagttattttcattttcattttacacaaaaggacattgagatacagaaagaaactgaataaattgattttaacatatttaacttatttaaagttaaaacatgaaattatttactaaccctttgatgtaggaccaatggctgtcactgactcttgatctgctatataaagtttcatgttttccttcttgcttaaactacaccatgatgtatcacctatgatttcctgttttggtttatttaaactcaatgacagcttaaaggtacttggaaagcaaactgaatgagggatccttccagctttttacattttttcacccctacctcaggcaatctttcacagttgtctagcccacacctttttaaactgcaatttgttttagcaactcacctttaaaaagtctttccaaagcaccaacttaaatttcataaaatcaacaactctttatatttttgaactcatattttatcagtttgcataattaaattacaattgcacattcatttggcataaacaaattcaaaaacaaacacaaatgactgtagataagcatggcagcaggtaaacagatgaacagaaacacaccattttttcagagtattctgttggccagaagcaggaataacctaagagggagtctactgtatacctaccatttcctaattataaacaatactatttaataggtatattagctttctggaagaatggatttaccatggaaaaatacaaacaaatttagcagggaggttcacaatgataccaaaattctacactagaaaagtaatacattccttcttatctttctttaattagaaattgtaggagacttcttcactgacaaaaactaagagcacaaaattccaccccaaactcaattcagcataagaagactcctacccaaagcataaacatatatactcacataaaaaataaaaaaaacttttaaaattaataaagaaattaaggttttaagaaagaaactttctccctactagagaaaaccatcacctcttggtggggaaaactgaatttaaagttcaggttcgggcagttactacttatgtgatggagtaaatcaattcacctcactgagctatagtatccttttctgaaaaaaaaaagataataataatggttctctcctcacaaaactgtagtcagaattatataaaataaaatatataaagacactctgcaaactatcaatcatcttatacatataaattgttattactggaaatcctagcttatattttggacagagaatttcagagtcaagggaagtcatttcacaaatgacaaggctgtgattcaaaagcctaaattactttcctacttacagtggcatggatgacggagcagaaatagagaattcttgattaaccaggagaagaatatcataggcatgggtgtgagatcaactggagattcaaggaagctaaagtgcccagaatgaactaatgttgtaatgtagactgtgagcagagataaaattccagaagccaaggagtgttgtacggtaagtcctggcagtgcctttggtgaggagagtaaagaagaaatagaaagattagccaaaaaaaatttcaactataccaaattagtattccatcctgcacagtaaaattttgatgcctttacaaactaaacaaagtagggaatttaagataattcccatgtttatgctgtttctttccactggtcagaataattaaccataggttaggaagttaagaaaacaataggatagacgtcagtgaagttcaagtgctttaattggattcctttgggtacagtttgtttccctttttctctgaccattaatccagcagaggaaagtgatctaacacagcaccatgacatgaagggacggaccctgagagcctgtctctctatgatgactgttcttgtgcatccaggcagcctattgaaactaacaatgcctgctgctgctgccgaagaggatcatccaaactctgaaaatgaaacacatcacacaaagggatgaaagaattcttattccacagggtttagcttgcagctggtcatgcatgccagagggatgtgccacgaggatgacaaagaagcttccaaagagaatggaaggggcagccagccggacattttgaaatacttagaaaactattcttttgaaactaaggcaataaactagacttctttatggcagaacttgagaaatatcagggtttatttcttttatctctgcaattcacccacatttaaacattcttgcgagtaaaagaaatttgaataatttctaattggttatacagttttgagggtttcccattcataagagaccatattatataattgattattttttcctccgagttgaagctctatatcaccccagagtttaaaactgtatggaagaataggtattgggcttttctgtaactgatgtagatacaatgaataataaatatgcttgttataccaagtagcatgctggttaagatcacagactttgaggtctcagtgatgtaactgacggaatactcattgcatggcatcaggtctcatgggttctaaggatctcgaatagctgtgtcaggtaagagtttgcccacaggaagtgctccaaatagaattaagagtcataagaacctgccatacagctgccattgctcttggcccctcagttggtcacagcaacgcataatccaactcttaagctgccttggatatccatgtttaaagagggtcaaaagcagcacctaaagttttgaaagacaatgctgcactggggcatcggccttttctgattaagttcactcattcatagcaatctaaaaagaacactggctctccctctctggcccttctccactactgttccaaaaagctcaccttcctctgtttacaggataaacgtgaaaggctcttttcattgcccttaacagtacacacaatagacttggcaatcatttctaccaattacatcaatgactcatatgaactctgcataaccagatgcgtgactttgtggaagttatttaatctcatttagccttagattcctcattggtcaaatgaaaataatatctgtcttatgagattgttgtgaagaataataagataatatttacctcacagtttagttataagcacaaggggtgattcaataaatgtcagtcattatcagtgtcattttctataacaggagtaacaaatagttcatgtaagaaactgaaatgagaactggaacacagtatcaaaaatattcccctatcctgtcaggatgctgtcattgattcaaacattctgtcatttatttcaggttagaacacagtttaagaaaagcattgcttcctcaaaagattatgtcaaagtgaaaataactaattgggagaaatatttcttttccatgtattcaacttgtttgttctaaataatctacttcaaactactgtaaataagttcttgttaaaagtgttttaacttttcaaatggctactaatatacgatgttttacagataaatctttggcattggagggtttccctaattgtt

SEQ ID NO: 316570 - DNA, 4001 bp, Homo sapiens
tgtcactcaactatactttgccattcacttaccatacgtcaaaaaggtggaataatactattcttacatagaggactaataagatatacttagcaaaagtaggtggttgcaaaacatttttttaaaaatcagagtgctgtatttttaaaatcttgcatagaactctggttcaatttttgagtccttccaatttctcataactctgtggtattcataataaagcaggcagatggttaagtctctgaacatatgctttaaatgccccctttgctatttctaaataatggaccaaattttgccctcaaatagtcacaggaaactttaaggaggctgcctcttgaaatctgaggacagaatgtgatccagtgggaattaaacctttaaaaaatatattttctaaactttcttatgagctctattccctataccaagacaaattacattttttaataaaataggatatagtaagagaaaaatcctaaccaatacaatattacttggctcaaggaatagattagaaggcaacatatgttttatttatttatattttaaaattctgattttctaaaacatgagagtcatctgattaatttctgtgtgattaccagattttccatttttattattattcctattactagtatcatgtagatgttatattgttaaaacatcttgcaattattaattagttaatttagtttaaattatgattatgcctttgttttaaatcaatgtttttcatagttattaaaagccaaaagcactatttttccagtcacttactttcatttcaaaaacagtttgttgtcgatgaaagcgcattttccaggttatcacagaatatgcaattcatctgcaatggatatatatattctggtaatgttgctcacataacctagctgtacttgtaagagtatctctgtttcttaatgtctatattttatacatggaattaaccttcatttgcacactcatatttctatgtatttaaatttattcctgaaagacctctgaactagtctctcctgtcttacgatgtccacaaaacttagcagtctgattaacattacagataaaaagaccacacaattgacaataaggacactttagttattatagacgtctgaagtttaagtattccaaaactataatgtccctttagaaattctcaataaggattagcttggtcctaatgaaaacagtgtttacttttaaaaataaatgcaatagttgtacccaaatatgttcgaaacactgtatgacgtgtcataatcaacaatgttgaaaataactaaagatctttaaatcaagtgataattttacacatatatccacaaatatctgaacaaaatttataattactattgggacaaaacattaacatattcttctgctaataaagacaaacaactttgagaaaatcctctctcattctcacgtctctaactttcacaataaatgcagcactgaaactaaatttccaactcagaaatacgctgagctccaataaacaagttgattttaaaaactcaccagactaacagttatgctttttcccttatctttcctttgctttcccttgttctttcactttccatgcacacacaatcacacttacctgcacaagtctgaaacatcagtctatgtattttttttgaaatgtactctgtaccgatgcatttttctgtgtttctttctaaccctcgagaatgttaagaatttaggaagagagccacagcttaagagtgcaattatttgccagtaaatactcaatttgcttgtcctgtgatttttcttctaacttgcatattcaataatccgtccctgactgcgtcacgagcacaaaaagtcttttctccaaaggagaagactttcgccaatcaaccttcagccatgccagggcacagcttgtcagggtgatttgttagctttaattaataattcctcacactggccattttcacaaataatgcagtgaggctgggaggctagattgctatgattcagacagataaaactacagtggaaaggggatggggaggggtgtgggggaattcagatgccgtttataaacacctctaatcatactctttcagtttacaatatagaggacatctcagttgaattaccacgttatgtccaccaatttgtattcagatggaaaccatatgttcctccactttatctgctagggactccctggtgccaacacagtcattgggcagacaacattcacaaaagaggtctctagcctctggattgcaaaagtttactgcagggtgaagttgagaaatcagacatatactgcacttctcagtgagcttgggtaacagtctggaaacacagaagtatgagttatgagtgtcagattttctcttatcctgctatgtgatactgggcatttcatttagccttaaaaaaaaaatctcatacctcatcctcaaatcagtttgcaacaatgactgatttgttcatgcattctatgaacatttattgactcccaaatatatgctacacactgtattaaatgctgagaattttgcttgaaagtaagacttttccatttaactgacaatccatgggcttgaacaaagccaccaaacagatagtgtgcaaataaaaataaggatttctaacagtttctgtgtggctcaaccaaataatcagtaattgacaacacacttgagtccattatgcaaaagtaatgctcggggtaaaaaagaatatacagagattaaaaaatatgtttttcaaagattaaaaaatttccctcaaagtgactagagcactaagaaacatattaatatgttcataaacaatttccaaagattcacaatcactttaggaacatacaaataaaaaaattttattaatgtccttaatcttatataagaatatatgcctgtgtttgagactgcaaatttattaatttattggatacatatttattgagcatctactctatttcaggaactgaataatattggagataagtaaagcacagcctcgttattcaagaagctcacaatttagtcaccagactctaaaagagaaaacacacatctcaactgaaaactgtaatacaatatagccagagcaatgacacaaatatacataaacatgtaggatgggcctcctagaagtgatgcatcaactatttgtaaaggttgggtagaagtaccagtggtgagaagaacattctagggagaggcaaacctttgaaccctttctcaaactgttactagaagcagagcaccagttctagaaaagatgggatttaatacatgacaatttcagataaatgtttcagatggtaaatattgcaggatttaaaaataaacttattaagaaacaaatgttccccaaaactataatgtcttgatatcatcaaaaaagcatgcagcatctctagcactggcacatagtaacatacatgtctttctcactttgtgtgtttcagttctctgaggcaaacatgaaacatgcttgacacacactgcctttctgtgttttcttgcctatttatcttcttttactatgggcaggcttctactgcttctgttttcactgtaccataagataaatcatatttgcatgactgttaaaggaaggggaaaaatctgtgtccattttgtggtcacacatctacttctagtcagatagcacatgctatatgggactaagagtgcaaatgttaaatgagaaaggaaataatactcctaaacccccaaaaagctctttcatagatagtaaatactcctagaaactatacagaattcttggtgttatttaacattttgctttatattatatttaacagtgtaaggcaacagccagaatactatttaccatagttcagtaacatctagccatttaaagaatttacaaagtttattaattcattaaatatgtatgtattgagctcctactatatactgagcacttatcagtaaatgtttgatttttattcccacaatgcttacacataataatagttaaca

SEQ ID NO: 316571 - DNA, 4001 bp, Homo sapiens
tggcgacatcaaagactccccctctttccaaaaagcaattcacttcagatgctgccacacaatcgaatgcttttatggccaccatgtttttttggtttttgtttcgtcttttgttttttccatgcttaatgaacatgccagattcttgaaatagaaagaagatgagaaaacccagtaagatggaatacctctagaaaagaaactaggcagggacctgatggtaaaggataaaaacacattccaacaggaattctacttttagggagagtatgagttattaagaaggatgtggaaggcacattttggctatgaaagctggtccgtggactcctctgccagtctcacatcagacaggatgcaaccatccccactccattccttcgacaacttcccagagcacattcaatcagtgtcccttaaattgaggacaatactatatttgggtttaatactgtgaggacagtcatttagttttcctgtggcaggatgataaatttcctgggaaccaaataaggattctcattgcattcttctgcttgatactatgaatgcagaagaataaagaagagggtgtgacaaatcatattttccaaaggtcgggtgtggggaggttccctaacgtttaaaagcaaccagttgttagcaaagtgatctttagaacagtattagcaagaatgtttgctctacatccactatagatattctctcctgcttagctaggcatgtaagtactgtgagcataatgtaaatactcagaacagaaatgcatggaaagctggtggagtgaaactccaaatgaacaattaattccactttcacttcccccatctacctccctgaatactacctccctgcccccactcacctatcttcctccccccaacaagcatgtttgctaggcatgtcaaggctgacatccatcggtggcagtatgaaacctatgcctacaggctgctcctgagcatagcctcaaggctctgccattgtccgtagagtgctctaagttgtgcccgctaaaaatcttcatcattccatttgactgtttggtagtatttctttaattgtattttttgtttgtttgttttaaaaacaccctttatttcctgcttgccttagagacaccaagaataaaatccttgacacatcaaattctggaacctcaccactcaccaggactatggttcctgatccaaggagtgacgactgagaatcagcacacagtctcttgagggtgtccaggcctggctgttaagctccctgctctgattagtttgtcgagttcacagtgttccagagtgctgaagcacagaaattagggaggggaggtggaaggaaaatcactggagcctcttacgatctaacttccactaactgggaggaaatgtcttataaataaacaacagtaagagaaacaaaaaaaaaaaaaacccatcccgtcctgccagaggaatgtacattattgtctcccgacggaaaactttacaccacaccagaatgcagccatgtctcctgaaactacctccctcaaaacagaaagaaaaagagaatcaaaaaggaaaggagaacaaaacagaacaaaaaagatttcatccccttgaattctgttgggaagttcatgtgagttcccagtagacaaactaaactaagcaatttcaacagtgtcactgttccagaattttgtgcagaggctgcttattagccaaatttcatttctgcccagatcactgctgtaccatccagacattttcagaagggaagttcagggaaggggggaagggtacgactgtggagaagaggaagaagagaggacaaaggaaaactcctgatgaaccagaatgccctagccacggccatgatagagcgagcccccacccaccacccgactactgcttgttgaggacttggtgatgcggtgtgttttatctacttactctttctgctcgggaggctgaggttcctacatttccagctcatgctggactgtaccgtaagcaacaagtgaaatgagttcagtgatctcattctagtccttcgactcctgtccacatcactaagcgactgcacagcttggcacaggccaggatgagtcagcagtctctggtcatgagaggccaggcctggaatagcaggggggtttaggtcaggagcaaaatgaagcagaaaggcagtctagatggcagggctctgttctgcaatacacagaaatactgcaggtcaaaatgaaagcgcctcatcagctctggggtgaagattgtaggactgtaaaaaaagaagcatcaagagaaaaaaaaaagctgcctaccaaacatagcaaggacaaaacagagtaccacagtcagaaaaagagggcactggtagagccctggaggataaaagatgctcattaaggtttctgaaatgtcttttcttccacatgctcccaaacttgaattaagaaatggtgacttcctatatactatcctagtattttggtactgttttcccaattcagtaagtagcaaaacaaataaaatgcaaggcactgcagttaaatagcaagaaaagcctcatatttcataaaataatatgagtctgatatctcaaaggtgtacatttgggttaatagtgtctgtatatagcctgtatgaaatggttaaagaggagtactctttaagttgagcttgggtgggggtagagaagagcttagagaaaagagagttaccagttaatgataaaacataggggaactatgacactgtgaccatatttctactcaatggggccaacatagacctccattagacctccatcaagaagtgatgctcccactaacaggacttcaaacacttctccctctgcagtagtactgtaatatagcaaggggagagggaaaataaaatagatagaaaaacaaggttcaacataaaaaaaattagtgatagacattttgtttcagaggaggcaaattgctctataagtcaactgataaaaaaaagtcttggtatctgaacagacttagagaaaccatatctagatgaagatgccaggtggagactgataactatcaggaaatggtagtaatggccataaagaaggaagaaagcaatctcaagtcacatgatgtagaataaaacagcatggaaaacagaaggagagcaacagacttcgggaacacgagtaaaatatttctttaaagtccttttaagaggagtaatgaggacccaccacatattcctaaatgttgtccctcagagatgcacagatgtatatgggtaaggaaatgtaaaataaactttcagctttcatttcagagggtattaagtcatctgaacacatatttactaactgtttaatcttgggcaaatgagctttctagcctcagtttctctctctttgaaatggaaataatattatcatcctcatggaatcattgtaagcactgaatcaatgttcattaacccttatctcagcagtacctgtcacatggtgaacattcagtaaattgcttattattcatattatttgattatcatatcatatcatctttataagtatccagtgaaagaatccccctccagtgttgttccactggattgagaggaatcaatatgaagactctagtaaaatcagttgagtaacactgcttacactgctgctttaaaaagattatttctgtctgggtatgttaaacattatacttgaagacacaggatgttgaaaatctattatgtgaaatccttgaatttgggtatctatgttgtcaaagcaacttggagcctaacagttgtccagtaactagaggcccaaaaaagaaaagaggaatttttagaagcttctccaaaagcaacaggataaaagtgttattggccttaaccgcatgatgagggctttttaccaaaggggaaaacgtagtccagttgatcatcgcagcctaattgattaattgtgggtctgaccatctggctgatgaatgctgacacccagcagtgattactgtgtaacacaattccggatgtgctctc

SEQ ID NO: 316572 - DNA, 4001 bp, Homo sapiens
ctgaggaatgttaacctcctatgtaggtcttggtggtaatggcctaagagctagttacattttttataacgtattgtaaacaccatttccctttcaactttttttctttagaaaacaagataactaatgaaaattacccaagaaatattatacatataaatagtatagtcctaacacgagctaactacaataggcaaactttactattaatataacattaaacttttaccatactagccctaataaaactctgagactattttctatcacaatgacagctgatgaatttaatgtgcctcacaaactataggaattgtgataggaagctgactctgtcctagaggccactgacaaacctgataaggctgtagcaggggtcagtctctataggaaacttgggctatatgagcatgtatgagttctgtggttaagaatctgaagcactcagtatagcaaacaaaattccaaagctgagtaccaatgtaatacgctggatcgctgtacctacttggacaagagtacatgcaacaggcacatacaatatacatctggttaaatgtaaaatcatccattgctaaagcattttaaacttctaggagaaatctactggcaatgtgttaacagcaaggacaaccaaaacaataaaataacatctctttcctaaaatttaagaacatcaagtaagtgccccttaggctgggttgtgattcctggaagtttcagcctatgagaaccatattggcgacatcaaagactccccctctttccaaaaagcaattcacttcagatgctgccacacaatcgaatgcttttatggccaccatgtttttttggtttttgtttcgtcttttgttttttccatgcttaatgaacatgccagattcttgaaatagaaagaagatgagaaaacccagtaagatggaatacctctagaaaagaaactaggcagggacctgatggtaaaggataaaaacacattccaacaggaattctacttttagggagagtatgagttattaagaaggatgtggaaggcacattttggctatgaaagctggtccgtggactcctctgccagtctcacatcagacaggatgcaaccatccccactccattccttcgacaacttcccagagcacattcaatcagtgtcccttaaattgaggacaatactatatttgggtttaatactgtgaggacagtcatttagttttcctgtggcaggatgataaatttcctgggaaccaaataaggattctcattgcattcttctgcttgatactatgaatgcagaagaataaagaagagggtgtgacaaatcatattttccaaaggtcgggtgtggggaggttccctaacgtttaaaagcaaccagttgttagcaaagtgatctttagaacagtattagcaagaatgtttgctctacatccactatagatattctctcctgcttagctaggcatgtaagtactgtgagcataatgtaaatactcagaacagaaatgcatggaaagctggtggagtgaaactccaaatgaacaattaattccactttcacttcccccatctacctccctgaatactacctccctgcccccactcacctatcttcctccccccaacaagcatgtttgctaggcatgtcaaggctgacatccatcggtggcagtatgaaacctatgcctacaggctgctcctgagcatagcctcaaggctctgccattgtccgtagagtgctctaagttgtgcccgctaaaaatcttcatcattccatttgactgtttggtagtatttctttaattgtattttttgtttgtttgttttaaaaacaccctttatttcctgcttgccttagagacaccaagaataaaatccttgacacatcaaattctggaacctcaccactcaccaggactatggttcctgatccaaggagtgacgactgagaatcagcacacagtctcttgagggtgtccaggcctggctgttaagctccctgctctgattagtttgtcgagttcacagtgttccagagtgctgaagcacagaaattagggaggggaggtggaaggaaaatcactggagcctcttacgatctaacttccactaactgggaggaaatgtcttataaataaacaacagtaagagaaacaaaaaaaaaaaaaacccatcccgtcctgccagaggaatgtacattattgtctcccgacggaaaactttacaccacaccagaatgcagccatgtctcctgaaactacctccctcaaaacagaaagaaaaagagaatcaaaaaggaaaggagaacaaaacagaacaaaaaagatttcatccccttgaattctgttgggaagttcatgtgagttcccagtagacaaactaaactaagcaatttcaacagtgtcactgttccagaattttgtgcagaggctgcttattagccaaatttcatttctgcccagatcactgctgtaccatccagacattttcagaagggaagttcagggaaggggggaagggtacgactgtggagaagaggaagaagagaggacaaaggaaaactcctgatgaaccagaatgccctagccacggccatgatagagcgagcccccacccaccacccgactactgcttgttgaggacttggtgatgcggtgtgttttatctacttactctttctgctcgggaggctgaggttcctacatttccagctcatgctggactgtaccgtaagcaacaagtgaaatgagttcagtgatctcattctagtccttcgactcctgtccacatcactaagcgactgcacagcttggcacaggccaggatgagtcagcagtctctggtcatgagaggccaggcctggaatagcaggggggtttaggtcaggagcaaaatgaagcagaaaggcagtctagatggcagggctctgttctgcaatacacagaaatactgcaggtcaaaatgaaagcgcctcatcagctctggggtgaagattgtaggactgtaaaaaaagaagcatcaagagaaaaaaaaaagctgcctaccaaacatagcaaggacaaaacagagtaccacagtcagaaaaagagggcactggtagagccctggaggataaaagatgctcattaaggtttctgaaatgtcttttcttccacatgctcccaaacttgaattaagaaatggtgacttcctatatactatcctagtattttggtactgttttcccaattcagtaagtagcaaaacaaataaaatgcaaggcactgcagttaaatagcaagaaaagcctcatatttcataaaataatatgagtctgatatctcaaaggtgtacatttgggttaatagtgtctgtatatagcctgtatgaaatggttaaagaggagtactctttaagttgagcttgggtgggggtagagaagagcttagagaaaagagagttaccagttaatgataaaacataggggaactatgacactgtgaccatatttctactcaatggggccaacatagacctccattagacctccatcaagaagtgatgctcccactaacaggacttcaaacacttctccctctgcagtagtactgtaatatagcaaggggagagggaaaataaaatagatagaaaaacaaggttcaacataaaaaaaattagtgatagacattttgtttcagaggaggcaaattgctctataagtcaactgataaaaaaaagtcttggtatctgaacagacttagagaaaccatatctagatgaagatgccaggtggagactgataactatcaggaaatggtagtaatggccataaagaaggaagaaagcaatctcaagtcacatgatgtagaataaaacagcatggaaaacagaaggagagcaacagacttcgggaacacgagtaaaatatttctttaaagtccttttaagaggagtaatgaggacccaccacatattcctaaatgttgtccctcagagatgcacagatgtatatgggtaaggaaatg

SEQ ID NO: 316573 - DNA, 4001 bp, Homo sapiens
tcttcattttaaagcaaaaaagcaaaaagtagccacatcttgactggacaaacttacagttgaccctcagtatccatgggagattggttctgggacctctctaggaaaccaaaatccacagatgctcaagtcccttacataaaatagtgtagtatttgcatttaacctaatcacattctcccacatactttaaatcatctctaggttacttataacacctaatacaagtaaatgccatgtattaataaatcgttgttacactgtattgtttagggaattgtggcaagaaaaaaactatatatattctattccatctattcccccacacccaaaatatttttgatctgcagctggttaaatccacagatgcagaacccaggcacaggaagggctgactgtatgtgaccgggagtggagggggatctatataaatatttccacaaaatagcaaagggtacttgggattgggagcatgaacagaaatgaaaacaaaccattataaatttaaagatgactggttatcacttaaatttagtgtctacagctatttatttataaaatggtaattgtgttttaaaactttcaatggcaacaagttacaacagtaacttcagaatagcgttcacttgaaaacattgggtgaatggcctctataatttttttagctgaaatgtatacaccgccacgcagtgaggaaacttgactttagcacccttttggtatttttaatagaaaaaacagtggagaagattttcacatgtctagaaaggtaacatgttcaacttaggtttggccaatgctgattctgaggacagtactacacccgcaagcttccaaactacttcctgattcattcagattttcattggagagctgtcatcctgctactgacctcattcaacccagttcggagtgagagatcagcggattaccgcgctaggtaccgtagctgtacgccatattgtgtttttcgctaatgtttagtttgtgtgtgtgcctagcatatgtttgtgcaagtgtgtttatcaatagaacttttagaaaatccctgcctcctgcctcttcagcatccttaaaaaggataacagctgggggcggggggtggggggaggacccaaaagccacacagacaggaatacattaaacagtgtacgagagacggcatttgttttaaactttcaagaaccttccaaccatttttatatcaggaatcaaaaagtgttaacatgttttaatgtttccgaagtggcccaaagaagagaaagaaggaaaggtgtgtcttcccttcccaagccccctcctctctagtcgtagaagcgaagcaggcgggggccgggagctccggcgtctggagagacatccagcggctgtggggccaggacacctcctgccccccagttctctgaagacgctccagagaccgcgagagccacggcaagcgggggagggcgaggagggagggggcagaagacaagcgggcgcctctagcagctcctgagccccggctagtccccctcagctcctcttcttggaagcagcggctccaggcgcagggagtagagagaagaaggcagaagacacgtttccagctgcgggacgtcccgcccgccccgccacccttcgaccctcccgcgcctccctcccacctccccgccgggtcgggcgaggcagccgccgggcgctaagaagggcgccgggggagggggcgcgggcggggcggggcggggcggggcgcgggggcgcgcgcgctcatccagctcagggcccgctggctcgccgctctgtaactcgctcccccaaccccaccccgctcccctccttcccagtcccgccgccccccactccaggcgcctcgcagacgcctcatccccctcggcacgcacacactcctccctctctcccgcccgtcccacaacaaattagagtttgtggcattacctcctcgcgctctttaatcttctttcctcaactcctaaacttccccccgcccctacttcttcggcagaaggcccacattggacgcttcactccgcgaaccctctatctctccccgctataggatagctctcacgccaatcttggcttcagtgagccaatgagaatgggacgcccctcgtgaggttgccgcccataaacaaaatgcactcttccttctcccctccgcccccccgtccccgcccctttcttcctcttccctcatctctgtcaccttcgattgggctaaaagaggcccaatccgctatctcaaacatccattgggacgcggaaacttcgctcagagaagtattaacaggcgattggtggacaatccttccacttcgcccacccccacaaccccctccccccgccgcaccttcaccctttctgaaaaggtcaatcgtatctcgttgttcagtgatccgggaggtggaaggctattggttcagggagcccgtcagaccggactggagtgagccatgattggtcgacacaggcgcaatcaggttaggttgcttactcctccgctcctccctccttttcctccacgccccatctcccccaccccctactgcttttactttctacgcatttctatttcctcctttatttatttatttgtgataaacttaaatgacccggcgacggaggcggtactctaggagaaggctgaggatgacgagcggcggcctggggccaattgccgagagggctgcggggtgaggggcagcggcggtggccagtgagaggcaggtgtctggagcgcgctgggcctgtggagccgggatgccccagcggaggcggcggttacccgctgtctggcgcggcgagctgcgccgggggagccgcgggagcggagaggggggtgtcgctgtcttggacagctgaggcagcgggatggaggctggatcccgggcggtgggtgggaaagccggagggagggtctggctggcggcagcgcgcaaggccgcaccgggtcacgcttgattcccgcggaatggggcgcaggttgccagaccgggtccccagtgctagggctcaaggaagaatttgttcatgcagaagatttagaaaaatactatgtaaaagagtttggagtaagcctcccttaatataaatgagatttattatcctgccggaaaaagcagattatgtttcttattactgaacgcctgaagtaccaacgactcaaccagagcccacagaattcaatatcctgggtggtaaaaggaacaaataaagcaacacggaaaattaagtgtggttcaaatgcttcaataaaatcttcgtcctcaaccatttgtcattcaacatagcactccccagagccaaattcttaccaaatattggtccagtactcaggcattggagaaaaaaatgaggctgaagtccagcaggaagcccaggatagattcctaaaaaggatttcttacaagggccaagatgggagggttggggaaatcgcttttcactatacaaagaaaaaaaaataattactgccaaactaagttgcacttttttaggcagctgatatagcaatattttgtcacaaaataagagactttatcaaaaataccatgcatgcaaagaatacactgtacttgggatttgaaaatgacattgtttctaggacatggatttgatgtataatttccaatagacttaagtcatctggattttaacccaggcttctttggaacgtacagcatgctttcacataagatgcctggttagaggtctttgacagaaactaagcaaaataaattggccctggtgaaaaaaaaaaaagtaagggccttgacctcattaatactattaaagctatcttgtgaggattatatgtatgaggctttgagaatccagaaaattactgtgtgtggtgtcaattttgaagtctgggaattgctagtgagtttggaagccaaaacacttttaaacttatatataaatcttagctaaaaagtgatattgactgggtgcagctgctcacacctgtaatcccaacactttaggaggccaagaca

SEQ ID NO: 316574 - DNA, 4001 bp, Homo sapiens
tgagctctaaggattctgatttcttctctaccagtatgtctctatctcatagaattactttgaaatagtcttaacttatcattattattgttattactttggtattgacatgttttccaaagaatgcctcttcgagatgattttagatagcaatatccactaagtttaaaaaatgttgttactttttttttaattaaagaaaaaacatgttaaatggcagcacaagtggttaaaagatggggcaaaaattatactggctgaagtgtgggactctgaacactttcattagtcagtttcacaagtaaaattgatcgcacaggtaaaaccttaatcatcttattataactttaggaacaacccacagcagctaagatgtatatttatttgttttgctagtcaccagccatcgtctgcttaaattatcaagagtgtttgtttgttggtttgtcttttttacagttgtgttaatcatggtagtctcaattagtctagcaaacacttcaactcaccaaactctatgcttcactaatgcaatctttgcaaagctggtgttaaaaggaagatttttctgaatttgccttggagatgtttttatattttctcctaggttacattttattttccccaaattaaggaagtatacaaatatagtgacttttcctaaccttgagaactttaatatgtgttgctacccgggttgctgaagaaagaatcccttagtcttaacagcctgactctgtacaaactatgtttaattactccccttctatctccactttaggtgggttcttttgcaatgaacagtgtatgtcatttaaagttggcttgctggacctgaagtgtgtcaatgtatgatctcaaataaatgaaagactgatactaaaaaaatgctaattttcttaatttattccccctgcactgaaatgtttttccttgacacacaattaaatatttttgagcctttgctaaattactgtgtggttaattttactaaatggcaggaaggttagatatttgtaaatttcctcagtgtatcattcctgattagttgaccttttctaaatatcaaatggaccagttgcagtcaattctatcaccaccatgatcagcttgcatttatccataagacatctgtttgtacaccaaaataaagttcttcactgttttagtttgcttttgaaaactggcatagacacagaacaaacggctgttaatgttacagagttttgaatttatcttaatatatgatcactactgtttaaacctaagtttcaaagaataccttttttgttgttattctgcttgtctgctattattttatctttataaatacactcttcattttacaaagtaacttcaattgctttattgactccagatagcagggataatatacccaattactttgaaaacaagactgttatcgtcacatgatttctgaataatacattaacactttttacattcatacctattctccaaaccctttttctttctcttctgccctcctttccacctgtctttcttttctttcttcatcaatgatttattgagcatcaacatgttaggcactacgctagatgctggggaatcaataatagataaactcttggtctccatgaagcttattctattgatttaaaatctttcctatctgttccaagggtcatttagagaaaatacactaatggaattcatgagaaggaaagcaaacatagagagctttcactaagttggagaaaaagtatgtcaccaacctttagctgttgcagagtaatcttcttttcgggctctggctatatcaacagttcctcttttccccaagaactggctctggaaagggcattcttcttcctctagcatgaataaccctgggtgggaatgtttagatggataccagttggatgagacccagggcagcaggaaagccctcctagaaaactcaagtgcccatattcatttggtagggctgcccgaggccttggctagagggcttctgtggacaaccacaaatgcacaggaagaattggggaaaatcagataaaggaaaaccattaaatgacacacgtacagaagggaaacagttaagaattaactcaaattaatttaaggctacaagaacaagtggtgcaatggcttagttaataagaagctagtctccaaagctagggattttgagccaaatgactaagggccttcagagctaccaagaggcagatggctggacaaagggacctatcacagagagaatcacaaatcatcatggggaccaggagtatgcactgtacaatggattggaaacagatttgttcatacatccatctacccatatatacatctgttgatgatcgattcagcaaatgcttgttgattaccactgttctaggtgatggtgctggggacacagcagtgaacatgccctcatgaagcttaaaattcagcaacatgcagggggcatgttgaaaaatcaactggaatgtagatagggattatacaaagaaaaagacaatgtttaaacttgaatctgccaagtttggctagtttctttggaataccagagcccaaagaacctaccccttcaacttttaactagtctgaggttgtgtcccttttttatctttctcttagctcagcaagaccatataagcatccacatctttaggctcaggctcatctatactgaggcctccaggcctgccctaacaggaaacatgaaacccttggatgtctgcacttgcctaggaatcagcttcttgaatttcagatttctttatgatttttgacctctaaaaattgagctcaagtccctggctttcccaggctcaatatttacgcaatgtcctttgcttaactgatatccatcaatcttcatgaccacactcaaatctctaacctgaagaattggagttgggggtgtaatagcccattcagaatgtgtaggaagcacagtcagtggacagaggtgagcaaacccaaaactgagatgggttaaacacctggaggccagatcagggactatagatcacaggcatcatagtttatggagaacacgtttcttctagaaggctctcccagaaatttttcatgctgtgttgcgatttgaagatagttttgtggtgagagtaaggggcctctttgtgaatacaatcagggaaaagactatttgttaattcagacaaaacagaagggtacaggacaaataactatctgtagaagagtgattatccttgaagagtctggaaaagctagggaataaggatttatcaccgtgtcatcagcactggcgggatggatggatggatgattgactgatcttctgtccatttggaagccatgtcctatagacatggactatcataatttcattcattcattcattctcctgtttattttattttattatgttatttttttgagatggagtctcactctgctgcccaggctggagtgcagtggtgccatgttggctcactgtaacctcgcctcccaggtttaagtgattctcctgcctcaggctctcaagtagctgggactacaggcacacaccaccatgcctagctaatttttatattttagcagtgatggggtttcaccatgttggtcaggctggtcttgaactcctgacctcaagtgatctgcccatctcggcctcccaaagtggtgggattacaggtgtgggccactgttctcagcctccttttaaaatctagatactattaatataacttgataggtaagacacaatccctttcctcttggagctcacagtctaatgggaaaaatgcaggcttatactcaactaattaaaaaactgggttgaggtttctgacagaaggttccttgggatctcagagcagaggcaatctaatgctccccaggaagctgagagaaagcattcctgaggaagtgatctttcagtgggacaagggtcacaaggatccttccaaggtaaatttttttttttgtcttcacttagctcttcctaatgggaaagatttttt

SEQ ID NO: 316575 - DNA, 4001 bp, Homo sapiens
cccaccagctgtgctggcctccacagccagatgtgctggttcccggaagcaatgcgtgcccctccccatccggctgtgccagctgcagtccaggtcactccagcctagctaagatgcaggaccagggaggtggtcaggcactctggttgccagggggtttcatgccctcaaacccttgccccaagtcaggctggggattggccaggtgccagacatctctccaggctgctcacccaagtcagagccttctacacctgaggggtaccttgcctcactgatgagaagcctcatctctctaccctgcctcagagcctccctggaaggccccatgatgaaacctggggagtccatctgcgcccccctcccatgtcaattctttctatgctgggcagcagtgggggggcccagactgagcaagggggcacaggctcatgacctctaggctcctccttttggtgagggagtgtccatgccagcctcctctgtgcacttacctcccctctttcccttggaaatagacccagagagggcgggggatctgcccaaggtcacacaggagttggtacgggagctctgggtgtcctcccacacccccttggcccgggtcatcccgaatccccaggcagggcggctccagcgcccacgtggcccaaggcccaggcgggaatccgactccctcttccccccattacccagcccgagggcggcgccgtccgggcgcaggggagcgccccccttcgccggtgcctagcaagacctcagcctcgcgcgccggcgcccccaccacaggaatttaaccccctccccaccgagagcagcgccacagcgccgcattcccggcccgcgggacccagcagatggagccgggagaccgggggaggggggaagatccctccagcccctccacccgggcccgcgggccgtgtgcctgggaggtcagagctggcaggtgggcggataagcggggggacaggcagggccctgcgtaccatggtgccgtggcgctgggggctcacagggccccgcgggatcgcgctgcccccggcggccaggccagggccgctccatgaagcgccgcgctgggggccgcccccgcgcagggccccgcgaccatggcccccgggggcgcggccaggcaggcggaggcgcagggccgcggcgagtccagcgccaagcagctgcggccccagagcctcgggcgcggcgggcggggggcgcggggcgccgattggagcccgcgcgtcagctggggccgccgtctggacgcttaaagggccaggccgcctgcgtgccggcggggggcgcggacacgcgtggtgtgcgcggtccccgtgcagcccgccctgccgcaggctgccctccacccccagccccagctccagcccccagcccgtccccactgctcatatccgagcagatagaccccggccccaccctcccgtgctgagcctcctttctgccgggaagttcgtccgggagtcaaacatcgctgccctccggttgcgccacggagggggagccaggataggaagctgccgtgaaatcaggaagctgagcgcgccgggccccggatccgaacagaaaaggcttccacccgctcccctgagggatcccacgctgagggactgaaccccgcaccccagccgcgctcaccacccccaccctctcgcctgggctgctctgacctgggggtgagtctggggtccccaactggtccagtcccccatccctatcccagggcggcgcagggctcattttgctctgtgcctccaggacttggctccagtggacccatacctacctggcggcctcatgctgcatagggccacccagggcaggagatttaaatcccaggactacaaccgcagcgatcaaatcatctaaggtgactggcccagggccaggagacagagggaccagaggagtagggaccagaggcccaggccccactgtgcccctctagccgtgtgacctgaccactgctgagtggcccccttgctcagcctctgctggggagatgcagccaggcttgcggaatgctgctctggcatggacacccgtgggggcagggggctggctctgttggcaggaggctgtaaaggaaggctgccaggctgagcaggcagcagggtggggaccacggggcactagacctggcaaggtctggatggtgactgggccaccattgtagaggagaggcctctgtggacatcccctcctcctaccccaagctcactactgcccatcctgggtcactctcatgttgcccccatcctgatattccacacccctccccacatatgtgcgcttgtgtttacatacaagtccatgtccagctgcagcagtatctcctgggtatgttgtcctactcacgagtgggcaggaactctggcgctggctcagggtgacttggttctaggtgccagaggagaaatggaggagagaccagggtattaggcaggtgctgtgaaacagcctgatggtctgtcctgtaagattgcaagggcctcctcccccacccccactctctgccagaatacgtagggcctcaggataaggctatcccagagctagggagaaaatgtctcaggggccaaacctggggcatctggaagcccctggcagctgctgcagacatcctgtacctgcatgggtgcacagacagctggcccagctcccagaggccccaggttaaggccaggccagagcagcttacatgcttctgaccagctagcccgctgagggctgccttctgcctcttcctccccagcccacttcctcatctgactcacagtggatcctagcaccggcccaggagttagttagggaggggctgtgtgcccattggttggataaggactctgaggctcagagcgggacaaatcacttaggcatcagcatcaggagccaggggaaggggaggtggggagaagggacccctccacgggctggaagaagcctggcagagagagctgcatgggacattgctaggcccactgccaagccaaagcttgacagagggtgtggccagcgtgactgaggtagtgatgctggccctatggggccttgctggggccttagctccagcagtcaagctgcagaaagggctggaggttgggtgagaagggaggggacaggtggtggggaggcactcagtctccctgaaggcctcggctgttcccctcttgcttctctggcctgcagctcatcagctggggagtcccagggcagagcctgagctctgtgagcagctgtgggcacctggcaacactggacctggcaggaaggagtggtttgaagagctgtctggtgggcccacagggctgctcagagctgaggcttgaacttgaacattaactagagcaatgagggagtgaaagggctttccagacagaaagcctgcaaaggccaggaggtggagacaatttagcatctgcagggaactagaggggatttggtgtagtggagtcaagattcctatcgatcaggagttgtctggttggtgggagtgaacaggtggagctaggcagaggcagaatttctctcttggtcctgatgaggggcatgcagtaggagcttcacttcagggaggtcaaggcaggctttctggagggagggactgagttattggggagttgactcctgggccagaaatgcatgccccaggggtgagtcaggagtctggagacgctcacccagcaagggcagagcttagtgatccttcacatatttgggattgggtcctgacaaggtcagcaaagctatgcccctgcctctagaagacagctcatgggttttctctcaatttccctaagtatctaccctcagtgctggagtgtccccaggcttagttggggaaaccagattcaaccccactgaagttagaaagaacagcccaggttgtgggtatgcgtatgtgtgtgggaacaatgcaggactgagtcagcccggagggcatggagctgtgtgtagctgagcctggggaagagggagagcagagt

SEQ ID NO: 316576 - DNA, 4001 bp, Homo sapiens
ttggatagaatgttctacatttctgttaggtccattaggtccaaagtgtagtataagttcagtgtttccttattggatttctgtctgaatgatctctcccttgttgaaagtggggtactgaaattccctactactattgtattcctgtctatttctgccttcagatctattaatatttgccttatatatttaggtagtatgatgttgggtgcatatatatttatggatgttatatcttcttgatgaactgactcttttatcattatataatgaccttgtttcatcttacagtttttgacttaaagtctattttgtctaatatgtgtagccctggcctcttttggattctgtttgcatgaaatgtctttttccacactttcagtctatatgtccttaaagctgaagtgagtctcatgggcagcatattatcagatctttctttaaaacaaatccatccagctactctatgtcttttaattggagaatttgatccactgacattcaatgtaattattgatgggtaaatagcaaacagtaagtaaggacttactattgccattttgttaaattttttctggctgttttgtgggtcctttgctcctttcttcctgtctttctctaggggctggggcatgcactgggttgggtgggtggtggcctggtcctggggtggcaaaatagtggctccttcttaggggatgagggtgagggacccaaaagcatttccctctctgggtgtctgcagtggcaatgttattggttacctcagttgtgaaagctgtcagtatcctctgtggagcagagcattagaggtcatgctgacaaacactaagaggattccgtgaaaactgcaaggtgtccatggcttccacaggggctgccatgtggtagcataagccacactgctgatactagtagcccctgcccttcttttgtatccctagccatctccaggcatttcaggtatgcccatttctgcaattattctttcagaatattgtctattatttgttccactgcattgctggatgttgttaattggactcctgagccctcccagggctattttcattcatgggtggctgtctcattggctttgtgtgtgtgtgtgtgtgtgcatgtgtgtgtgtgtgtgtgtgtgtggcagggagaggggactgatggaactgaaggctggaatcatgtagtgctccatattgctggcatgactgcctgctatatcctcttctatgttctttttaaccatgtatcagactacaaatttcatcagtcaccctttgatcacaactgtgtcattaagtcttgttagttctgaagacttgctaaaaaccttatctactttgcagtatgtgctgggcttcaagtttattctatctccaattcttatgtaatctcccttaacttgaaaataattttagtctaaaagttgtgcttcttgtcaatcattaacatccaggacacttcatcaccttcaatccctatctggggccctagtctagcctggtacctctcatctctcatgaaagatgcctttatcactgtctttaaaacaaaagacagcagatatgaattccctttggcaaatgttgatagagtgtttcactgttcttccacctaaccaacccaaaatgatgttatccacttcaaagtcagaaagtgtaagaagattccacaaccttctaatttgtggctaactttgggaaagtcatttaacctcctagtattttaattttatctgaaaaattattatttcatagagaagttatacaggtgaatttttttacattttaaaattgcatatatgcaatagagaacagtgatgggaataaaaatgcttatgtactagagaaaaacattttggagtttctcaagtacttacggagttagacttttcttttgttcctagcaaaattccatgaagaaaatagactccaaaactccagagaagggaagtgaggtctgtagtcactaaagaggcaggcgttctactgggatgaatctgaagaagttatacatcaatctagcaaatttaaaactatataatacccacatttttaaaataataaagaattatttgaaattctgatatatcactgacaaaagcataaatttggtaaaaactttgggtaggaaattttggaatttgtaataagtacttttaagacatactcatatggtaatagtatttcatcaatgttaagatgctgattttgataactacattatggttaagtaataataaaaataattctttgttttttgaaatacaccatgaagtagtaagagggatcacatccgcacttttactctgtgaagatgatattctttgttgtgttgccctctctggcactagcaactcacatcaagaatgtgggctgacattcccatggccatctgtaaactgggaaatggaggatgtcaaaaaaggttaattttatgtgtcagcttggctgggccatggtgcctaggtatttgaccaaacattattctggatattcctgtgaaggtgttttcagataagattaacactaaaattgatgaactttgagtaaagcagattaacttccataatgtgggtggttctcattcagtcggttgaaggccttaattacaaaaacactgacatcccttgagtaagaaggaattttaccagaagactgactttagactcaaactgcaactcttccctgagtctccagcccactggcctcccccatcagaaactggacttgccaagtatccacaattgcatgagatgtatccttaaatctctctttataaatatatcatgtcctattggttctgtttctctgaagaactctaagacagattctggtactgggaattgttctaaaagaacaaaatcttaaggatgcgtttcctaaattggttctgggaattctgtaattggtctctgattagatttaaagacactaataactccatttccattactaaagagagcaattttagtccatggcatgatatggcaatagaggtaagcaaaatatcaccaatggatgctcctaattaagcacttataaaagccaagatctgggcaaccatgcatatagtatcttcaaacatttttgtcaaactaatgagtataatgagattggatggttcttcctcatgttattggacaaagtgatggaaaaaaaagaaaaaggatgagctcagggactcaaatttctagctcaagttctccatcagtgatctgaaagcttctaggtctgccctgaaggggacccttatatcttgtatccatgaatcaaggggtggcaatgggagtatcactactcactattacccctagtggcccactagtaacatttttgcttcctgttcccaagatgccatgctctgtcggcctagaggtcttagttccagagggaaaaatgcttccactaggagacacaacaatgattccattgaactggaagtttaggctgaggggctccttattgatctaaatcaacaaagaagggagctgtgatggatcagttgattgatcctgacttccaaaaagaaactgggatactgcttcacaatggaagagaaacagtatgtctgcaatacaagagaaatcctttagggcatctcagtattaccacgtactgtgactaaagttaagagaaaattataataacccaaaacaggcaggagtacttaatggcccacatcactcaagaatgaaggactgggttatcagctgagatgctggctgaaggtgcaaagaaaatacaaaataggtaggggcagaaggtgccagttatgactacatgaccagttacagaaatgagaattttaattgtcatgagtagttcttccttattttattatgaatatatgtgagtataagccaaatatctttgttttcttcccctaatatcccattatcttgtaatataagatatactgactttatgtcatagtatttaagtactattaactttacatcaaagtatttgtgttacaggatatctaggaaaagggaaaac

SEQ ID NO: 316577 - DNA, 4001 bp, Homo sapiens
gcagcactttggacaccattgcaggcggaaggccccgtggttcacccacaccacgtgcaccgtcaaggggccctgctcagcggagcctggcgtgggaagaggattgggcacagcagaaggccctgcggtcaccccgcggcgggggcagctccacggcatcacagggcacaaggaagggtggggacaaggtgggcaggggaacccctgtccccactgagcaagctgtccaagctcagagaggatggcagtcaaagggaagacgggtttccagccaggagagttttgtatgaaactcaggcgtttggaacagtgagtgctgctttgagtgtcattgtgtagtgaagggaggaagtgcatacagtggtttggaagagcccactggcttctggccctggcctgcccggtcctcccatctaaggcaactgggaaacctcaacaattctgtttttccacaccttggtggcttaagaaacggggtagggccgggcgcgggggctcacgcctgtaatcccagcactttgggaggccgaggtgggctgatcatgaggtcaggagttcgagaccagcctggccaatatggtgaaaccccatctctactaaaaatacaaaaaattagctgggcgtggtagcatgctcctgtagccccagctacttgggaggctgaggcagacgaatcgcttgaacctgggaggtggagcttgcagtgagcggagattgcgccactgcactcccgcctgggcagcaaagcgagactctgtctcaacaaaaagaaaaggaaagagagaaagaaagaagaaaggaaagaaggaaagaaagaaagaaaaagaaagaaagaaaagagaaagaaagaaagaaagaaggaaggaaggaaagagagaggaagaaaggaaagaaggaaagaaagaaagaaagaaaagagaaagaaagaaagaaggaaggaaggaaagagagaggaaggaaggaaagaaagagggagagagagaggaaggaaggaaagaaagaaagagaaagaaagaaagaaaagagaagagaagaaagagtgagcgagggccagagcaatgaagacgtggggtgaaggggtccagaggctggaggagggtcagtaggaagagcactttaggaatcccccctgcaggttcccagcccttgagtgacacctccttttcccagggggctgatgcctcaccttgatgtaagatgccagggtctgagaagttgagtgaaacaagactgaagaaggtaaggacaaagagggagcctgtgataacaggaaaggcccactccccgttctgagccagccacctgcaactgagaccagaggcaggctcggtcctgagcaggggcagcccaaagcccccggcccaaggcctgtggcttgctcaggtcaggacccacagaccttcaagccagatctaaaaatccaggctccaaatacccaggcagactcataatggctccaccaaatgtcaccagcatgaccagccacccaaagctcccaaaatgcacaggcacccttgacctctgcgcctttgcacgtcggttcctggaacagaatatccccttttccctgcccgcacccttgacctctgcacctttgcacgtcggttccctcgaacagaatatccccttttccctgacctctcccccggtcttctgcactcccctgcctccatcctatcatcttctgtttccctggctgtctctttgtgggaaacctaacggcttgcctggaaaactcacgggaatgcgaagaagaggccactgaaaaagaccagcagcaccacattgaaggcagcaaagaggctagggaggaaccagggacgtgggaccagaggcaggggatggggctccttcaccagcggcgtggcatccgttaagagtgtcatggctgggcctccttcgcctccaggggaggtcagagccaccaggcttcctcccccagcccagcttccagagctccatggccacggcagcctcagagccgcagcccagggtgaaaggaaagaaggcccagtgtgacatcacagaggctgggggacctcagcagaactgtctgcagccctgctctagctgcctccggtgacaggcacttccaacagcaaaccccacccccaccccgacatgtgctggggaaccgggagttcctgcccctgagaggctgatgttgttggagaaaatatgacctggagaaacacatgggaagaaagttggtaattttcagccggcgctgtaatccctgtaatcccagcactgtgggagaccgaggcaggcagatcactcgaggtcaggagttcgagaccagcctggccaacatggtgaaaccccatctccactaaacatacaaaactagccaggagtggtggtgcacgcctgtagtcccagctactcagaaggctgaggcaggagaatcacttgaacctggaaggtggacgttgcagcgagccaagatcgcgccattgcactccaacctgggtggcagagtaaactccatctcaaaaaaaaaaaaaaaaaaagaaagaaagttgctgggtttttttgttggtttgttttgtttgtttgtttgtttttgagatagtttcgctcttgttgcccaggctggagtgtaatggcgcaatctcggctcactgcaacctctgcctcctgggttcaagcggttctcctgcctcagcctcccaagtagctgggattacaggcatgcatcaccatgcccggctcattttgtattttgtagtagagacggggtttagtcatgttggccaggctggtctcgaactcctgaccacaggtgatccacccacctcagcctcctaaagtgctgggattacaagcatgagccatattaaacttcctttataaaaggcctcaaaaagaagaaactgaggcagaaatttaaaaataaatatgcattcattcactccaagacaagtaacaagcaaggcaaaagttaaaaagaaaagaacaagttttcctctgcccagcaagctcacttcaaggacagttataagataacgctgtttaagaggccaaggccaaaagaataagctccagacacccctcgcctccagagcaaagttgaagaaaaaaaagaaagacaaattctttgactgttactcctttcccaggtttcttaagcatgattatgttttacaaatgtctgtatttagccagttcttgtttttctttcaatgcagctacaaagtcaccagctatgcaaggccacaagttatgctatagatgatgtgacctgtcatatgattaactacttttatttattggaagtctgcttataaaaaccccgctctgtctttgttcgatgctcagctttttagatgacagtccactaagccagtgcgtacctgaaataaacagtcctctcgttctctgtctcagtcttgccagtcctcagtttcctgcaacatctctactaaaaatacaaaaattagccaggtgtggtggtgcgcacctgtaatcccagctactcgggagcctgaggcacgagaatcgcttgaacctgggaggcggaggttgcagtgagccgagatctcaccattgcactccagcctgggaaacaagagtgaaactatgtctcaaaaacacagaataaaagaaaagaaaagattatgcaaaatggaagaaactaggcacaaaaagccacatattgtatggttccacttacatgaaatatccagagtagccaaatccatagagatcaaaagcagattcacagttgccagggtgtgggaggagggggactggaagagatgaggtttgttgttgttgttttgagactgagtctcactctgtcgcccgggctggagtgcaatggcaccatctcagctcactgcaatctctgcctcccgggttcaagcaattctcttgcctcagcctcccaagtagctaggattataggcacctgccaccatgcccagctaattttttttttgtagttttagtagagacggagtttcaccatgttggccagcctggtctcgaactcctga

SEQ ID NO: 316578 - DNA, 4001 bp, Homo sapiens
agactacacagtacactgtcaagtaagaacgacaaagggttcactgggtttttaatagtcaaggctggtactagactgcagaccccagggaatgcttttcatggctgtattaatgtatcaagttctaagtcaacaaattggcagttgcaatgacttttttaaccagaaataattattaatgggaaaagcaagtttccaacatccctatccttcccacattatgacttccattgacagtgatttttaaatatataattactcagaaaatggattaaaaccagattattcactgtccgacaccaaattttttcagtgatgttaaaaattctctttttggatagtaatttccatcacttggaaaataaaagccaaatacagtatgatcaatcaagagtgttgctggtcgcactgaaaactgtgaatccaggggagatacatgccttctggctggagttcctccccagaaacaaggggcaagaccagtactaacagcaggaaaatgaaatttcaacccacaaggccctctgtggtcaggtgccacccagtcccaagtagtcagtctctaaatgctgagacctctgagaaggcaggaactttctggaactattgtgttcattttaaacttacagattctgctggcttgcattttattttatactaacttgcctactatccctttaaactgcctgttctctccctcatctctctttaaacgaaaaataatatcctataaaacagagcagacagacagctgtgcactactgcgtaatccatctttctaaaatcctcacacttgacacagaagccaactctcattttagatgcttggaaatagaatcaagagcaaattctagcattctgggtggctaggttgaaagtacacatggcagttctcagaagggtgatggggccagcgtcaagaaatgctctgttcttaccgatcacacccttcatccagatcttgacaatcacacaaacaagtagccacgtggttcttttccccattccgatctatgtactcgcagcagcacaggggctccaattcaggttcttcggttttctttttcttcacaggcttcatactgcccttctgtgtcatgatttgcacctgtcaccatgaggcgtaagaagccctcagaaggtaaaggtggaaagaacacaacttacatctcgtaaataggtccacgcctctctctctctgcttaacctccaacgcctgagcaatcaaaaatgagaagagagagggggagggggtcccgttttcatcaggcttctgtggctccgcctggccacacagggggctccagggttcttggaggtctgagctgccttcaccgccccttcccagcctgggcaggcgccgtctgggcaccagccgttcctatggcgacagccgaccacgcgtccgggacagccggggcgcgggcggttgcgctcacctgcgggtgcaggctgggagggccgagcggtctccgctccaagcctgggcgctggtgggaactcagcctcggggctatagggaaaggcgaagcatatgcccgctagcagcggctgacacaccaggctccctggcagtgctcaggggtcgcggtccagcccaactggtcgggccccttgcagggtgcgcctctcccgcccccgccaatccggaggacgtgggcgggcctcgcgcaccaccccgccaggagaatgaccttggaagggaagttacctgccctctggccggaggtgcaactgcagccaaagaggcggaggggagatgggtcggcttccccggaggcacagacgcgtctcccgatctctgctacgcggagccccgggcgtgacggcaggagtctccgggacccgggctccgctcggccgctccctcgccgcagccgcccacctgtgaccacagcccgccgcggcccgggcggcgcgcccgcctccccgcgccgtcccaaccgcccctccgcccgcccggctcggtgcgccaggtccacgcgcgcttccgggtgccccgcccccggcgccggggttccccgcctgtccgcacgtgcgccgcccgcctccccgcggtgcccgcgggcgaggctcctcctcctggcccgcggccctggcgccgggaaggggaaaatcggctcccgagagcgcgtccaggaggcaggggcaggaggtgggtcccgcacctccggcctgccccgccacgccacgccccgccccgccccagaggcggcagccgggcgccgccggtgcctgcgggcggcgcgccggtgggacagcctccggagccccggggtgcggacgaggtgcggagacggaaatacgggaaacccgggaacccggaggatttccgaactacgtgagaccgtggagccgccagccttcattcagactccggcaacaggcggtgagggagctttccaccgcaaaatgttatccaagtacctcccccagtttcgctgaccttctcttaaaggcccatcactgctgccggatctgttcatttagcaacctgttcgtttcatgatttctggctagcagcctttacattggaccagcaggcctcgctagtacttttgttccagtcgtctgtgtatttgagatgaaactgccctgagatgagagtcctttttgggttttattattgcacaaaatttctttaaagagtgtgggcccatgtacacgtttcactaccgcaggctttctagttttgtttttaagtagaaaaagaagaaaaactacaactcagaaattttcaattttattaatattcaatttacgtaacaggctcaaattttattaattgaattctgcatccatacgaatttagtcttaatttataaagcaacttacttcgatactcttccttgaagtatgttataaaatacaacgtttaaataaacatcacaaaaatattgtttgtcgatcatttttgtgactttaacagagaaatcttcaagtttataatccactcattcttgcttacagccagacactacataaatccttaccaaaacaaaacaaacccaggtaggttcactgttacccctaggtatgcttcgttggaattcacccagagaaacccattttccctctaacggagtcaatactttcattctctacaggcatctcaaaaatgactataataatgccatgtggctttggggactctggagaaaaatgaaacatttaattaaaggcaatagttgttcaaacagtaagaatgtatacacagtttatatatagatagatagatggatatgtattttttccccagagaaagggctcaagagacaaaacagtaaaacacttcaactttccctaactcttgaaaaaatatctgattttaagtcagtttacaaagttcttattttaatgagccacttgtatggagacacatatgcataaaaactttttatgaaagagccaaagcttgcatctgagttaaaacttgatagtcagtacacttgtactgggacatacgtgcccctgaagtttttattaaagagctaaaatctatgtctggcttataacttaccaatcaaaacaagtcacacacatacataaagaaggaagccatacatggttactgaaaatacacaaattattttcaaccagatgtgtcacttccaccatgaaagactgctaagctgaagccaatcttagttcaagtatgcatttgatctgtcactaaatgcccagattttaacataaccttctggtttttaaaactcagaggatggttcttccttttgactgttggtattctaagtgaggaggcaagataatcccacctctgatagttaccttaagaaaaaacaactatttctttcataaagatacagcatggcagaagaccctttctgataatcatcatcaacatgcagattcaaaaagtttgactattaaatttgcatgctaaataaatgaagacattataatctttacagtacacaaacctggaaatgttatatgcctgaaaacagaacctttaaaatcagtaatgacatagaggtttc

SEQ ID NO: 316579 - DNA, 4001 bp, Homo sapiens
atatataagacatcgttcataacattatttagcaaatactgcagacccttgtccagtatggaattcccgtcaattgtgagggggggacagttcaaatacatgttctatattttaagacattggaaaatctttatataaagataactccatggtatctgaactcaggcttttcttcctgtgtctttctgatctgtccatttgctgtcacctcttaaatcctcagtctcctcagatatcctagcttctaaaatcccacttccagggtctctcctttctgagcaatctctagcacatctagaaaatatcatttataacatcagcaatctcatgttatcttatcacaacagagctcctcacataaaacccagccgtccaaccacacacaaacacatctaagtgccacaacaggtggggcacctgtgccttcattagggaggaaatccttccggcttcacctctttcagtttccctggaaggcaaagtccaaccctgcaagctgtcttccttttaggtgcccctgtggagaattacgtagagacataagaaacatctaatgtccagtctacgaagaactgatcatcaattttggagctcagcagtttaatgcttaagaatgtgagcaagcacttcctctctataaccttatcagacgacctcccaatcccactgtgcccactgatgcgaccatcatagctctaaccaccatgatctgtggttatgttggccctggagccttcatctgcccagggaacttctctgggcatagtatgttttacttgtcttgtgttctaaaggtagcacaaagcctatctatagtaggctcccaatagttatctgaaactgtatttgaacccactatctgataaataccatttttttttttttttggctgagggtcctcaaaaatggaacatcaggaaagtcatcagaattgctttaacctgccctccttgcttcaactaatttgggttaactttctcccatttatccacacggctcctttaaaacttgcaccatactttgtcagccccgccttaatgagttcctttggtgaccccagcttcaccttgcagatatcctctccgggtatccaatgcccatactcccactcggccatcgcaaggggttggggttggctttttttcgggcaactgctcacagctcccagtaatcacttccatcaagccggggtttccagttcccgctaggaagcgttggggacgtccgggcactgcgcacctcgccagtgccggttaccaagcgcctcctcccccgtctgtgggacaacgctctggtaagcacccgaggcaagaggtcccagcaaggtaatgggacagcgttcggtcacagagagtgagcgagccagcgagagatattcctgggtggaggggtggggacgccttaggactagtgtcccccattcccggacccttcccaccaagaactacctagggagggctgcatcgcctctccagccatcctagggactagagaaatggaggggagaagagcagggaaacagcacccccgggccaatcacgacgtccgcccctccttagtcggggtctctctctctctctctctctctctcacacacacacacacacacacacacacacacacgctcctaagtcaactccagctctgagcaactacgccgcacgcctctcccactgggagtcccccggcccgtgaggctcgcctcaccccagcttcttcacccctaccccagtttcccttcccaactgaccgtgaagccggaggcagttccccagtcccagaccccggtggggctcccgccgccgccgccgctgccttcccctgcagtccccaacccgggacccggcctcgggcttcggcgatggctcctcggaacgaggcgccgcggctctctggactcggccagacaccgggcggcgcgcaggagaagcccatcgagctctcccggcagtggcggcggccgcggctgcaggagcggccgccgcgcaggttgatgacgcgctgacgcggggcgggggggggtgggacgtgggggcgcggtccagaggaggggacgcgcgcagatgacgtgcggctcgtggggcagctcggcagcatggcgtccgtgacgctgagcgaggcggagaaggtgtacatcgtgcatggcgtccaggtagctacagcagcggcgttgggtcggccgccgggttcagcctggccctgcgggtcgcggcctgccctgggtttgccagtgaggaggcagccgagctgcggcgactctccgtttaccttgtgattaaacggttctgctgccggcgtttgcaattcagagctggcaacgtggacgtttttaggactgttagcgcatttgcagttttgcgggtctataagattccgaacccgggcaggaagcttgggcagtctcggaggccttttcttagtgagagagcatcggccccagggccatccattcggcgttcgcgcacagatcttgtccgagcctcagttttctcttcgaggaaatgggagtttggaggtgggcttctggcctgcttttcctcacctcgtggttaggagggcgcatgcgaggtgaacgcactttgaaaatacaaattgccgtacaaataaagggggaagggtttttaaaaagcggctaggacgcctgtaatcccagcactttgggaggccgaggcgggcggatcacgaggtcaagagaccgtcctgaccaacatggtgaaaccccgtctctgctaaaaatacaaaaaaatttagctgggcgtggtggcgcacgcctgtagtcccagctactcgggagactgaggcaggagaatcgcttgaacccgggaggcggaggttgcagtgagccgagtctcaaaaaaaaagcggctaggcagccgatagcctaagtgctgtttccattttgccaatgaagaactaagatccctaggcagctataacctaatgtcctctgtgttctatattaaatccctggttatgaccactccagaacgagggttgaaaaatgttggacctggtaacgagctaccctgtatcctcctccggctgtgtctccacttgttaacctacggtgtggtcctcctatcagagttcttcatcccatccttggcagagttctggcgacagctcctacctcttttcctcatgcctttcctctgtcagtaccaactgcaaagtcagtggtcccgtgatgtagccatcggattgaagcggccagctatcattgaagtcccacaacgtgagttaaggacatgtccatttaaaaatcgtgacctgccgttatcttctgggccctttatatatgaagaaatgccaatatttagcatattatgcctggataataaagtcagaactcacagttgcatattttagttataattcaggattaacaacagtgggacatatgtgtgtattacagggtaacatgtatgttatttgtgtgtgagggggcataaaaatgcccaaaagcagttagatatgtctttccctgctatatttttgtatacactttgttcaggtgatttttatcctcaaagtatttttttagggacacattacggataaccgttttcctctaaatttaaaaacctttggtcttctttgttaccggagcttaccatgatgtagtgactctgtcatgtgtcctattttctctcaacatttcatccctgaaagtggcactgaggcatggatatatctgtaacctcaaggttagagctttctccccagcacccttaattcccacggcagttcattagctatccagcagcagagtcccaccatggtcattagttaattttatttaccaacatatatctagctcctggcatgttatgtgggaaacagcagggatgccaaaacatggttgtgaaataaatgaaagataggagggagacaaacagagagtaaaagtgaataaaataaaaacaaaggtaatgtaagatctatgccaaggaagtggtatagttagtggaggttgaagttaaagtataccaggggccggg

SEQ ID NO: 316580 - DNA, 4001 bp, Homo sapiens
ttcgaaagcaccaaggtctccgccaaaccaggtttggcttcctgttctccgaccttttttgtttctcatttaaaaaatctatatacccagctcctcctcgtccgccctgtgtgtgtgtgtgtgttttccataatttcaagccagaaactaaaaatcagcgcacactttccctgcctgcctgccggaacctgacgcccgggatcccaccgaggctgcgtttgtgcgacctggccgctgactttcggtttgggtcccaggcccaagtgggaatgggtaggggtcctacagctgtttccgtacctgtgtgcgtccttttgtggatctttaaattctcggagcgcgcgaagaccttgccacagccagggaaggggcagggaaagggcttctcgcccgtgtgcacgcggatgtggttaaccagtttgtatttggctttgaagggcttgccctcgcgcggacactcctcccagaagcagatgtgattactctgctccgggccacctacgtgctccacggtgacgtgcgtaactagctcgtgcatggtgctgaaagttttgttgcacgactttttggggttggccagctgctcgggctcgatccacttgcagatgagctcttgcttgatgggttggcgcatgtagcggaagaaggcgccggcgccgtgatgcgcggccatgttcacgttcatgggcccgtagccgtgcagctgcggcgcagcatagtgctccgaacgcgggctggtcacctggccgtactgctccggtcgcgggtacatgtcccccgagaagccgagcctcatctgcccgttgaccacgttaggcgacgcgtggccggcagcctgctcgtgaagcccggggaagaggaggtggcccgcggcgtccgtgtggccgtgtgggcccccgaagcccccggccgatgcagcaaagaggctgtgctgtgcgctggctgccgccgccgcgtcgccaaaaccccggttgcggaacagaaagtcccgcgtggagttgaaggctgcgctggaataggagccgacgtggcccgggtgatggtgatggcccagggccgcagcagccgcgtagcctggcgcctgcgacgtgaaggccgtctggccggccgaagccagctcgtgcgaactggggttgagcttgaaggcgcccatgccgtcggcgaacgggttgatgcccaggcccacgtctcgttcggccacgtcgcccgcggagtggtggcgggacgcgccaaaggtggtcacgccgatcgctgggtactgggggccggcgtccaggagcatcgtggctgctcggggcgagccccggcctcccccgccccccccaccctcgccagccgaggagggaaaatcgggaggaggaggaggaacaagaggaggaggaagaggaggaagaagaggaggagggagggggagtcgacccacctcgcgaagtcctagcctgcaggcaatggcgcggcgcgcccgggcgctggccgggccaaacgcaaagtagccggacggctgcgggccgcgagtaacgcaggctccagcgcccgccaggcagattctgccggcccggctcgcactttctcgccgctcagtctctgccgagagggccgcgcgtcaaggctgcccggggaaaggcatggagcatctcagccccctaaaaaaaaacttcctcctggatttgtagcatagaggaatgtgagcgccagtgccgcgactgcttcgccctctctccgcctcgcgcagcgcgcccctccttacttctccactagcccctcgccctttcttttctctctctctcctttctctcacgctcgcctcctcgctccttcactctccgtttttccctctctgctttttgaaaaaaaaaaaaaaaaaagtgggtgggggggtgaagaaagaaagaaaaagccaaagaaaaggcgcaaatcatgcacaatattgtcttttgcggtttatcttcctggggagaaactttcacctcctcagccgggcggtgagcgcgagactgatagcagcaatcattcctgcagataaatgaattgaaaggacgacaccgtcccccccttgatgaatgggagcaggggggaggtgtcacgtgctgccgacgctggcgcccattggtgcgcccgcattccccccgccctcagccgccgcgccaacggagggcgcgccgaggcgccgcgcgcagctcattggcccgcccgcctcatcaatcccaggtattgtaaagcgcttgacatccccttttgacaaaccagggctgccaggagtagcaactttttttttagccaaattttttccctcttctcacggaaattttttttcttttttcttttctttctttctttttttttttttttttttttttttgccacgattacttttccttctcacagtcatatgcattcctcttcctcctttgccctcccgcaccccggcgctgcccttcccgaaaccaacttttcgctgagcgattagagacttcagacgtctccgggtgcagcaggcggggatggggctagtaaacacagcaaaggcacttccagaatgtcccgattcagcaactttcttttctttcttcccccttcccccctcccttcaagagcagcaaaagaggcttttgttatttgctccttttgaagtttgtttccctcttgctttgtccccctcctgtttataatttaagatcttgggagcacacgggcactatgctctctttacaaaaaaatgtaatttctcagtgtaaccggcagcctctgtatttctcgcttttatctaatcagacttccggcaccaccgcacccccctccccgaaaacacacacacacacacactcacacacacaggtggatgaaagcgcttaagttcccaggttattgaggtttgaattttttaatggcaaatttgaaacgttgttgccagtttcctttactttttctctctcttgcgttatttttctgttttctgcctttccgttgtctccttcgactgcccccgctaaccctgtctctcctcactcctgttccctacttgggcccctttcattcaggtaaaactgtaaatttcccaacgcgctattgttcccttgggctgcccaaagctccctagagatccccgaatactttttcggtatttaaatccccaatagataggaccaatgtaaattttgtgacattcaaaccttttctagttcacaaatcagtcacccttgtcacagttattgaaattccgcaactcgccacaccaggacggtggaaaaagcgggcgcggtctttgttgccgaccaggcttttgatcgccagagaaaatttacttaccttcagatgagtgagcagaaaaagaaataacactccctttgatttagttaggaaaatgcagacatttggattcagtgcaaacatacaacactcgcttgttttcgcgatgcggccctcgattaacctgtctttgcctagcgcaaagtctattcaacaactgcgcgtagtttctttttgtcccttccacaaagagccattgactatatattaaaatgattgttgaaaggtaggggagtatggtacttaaaagcaggaaaaaaaaatccctgtgactcaatcaattaagccgagcaacatttatgcatttcaaaaaatgcacgcggatgcggggggttgtggggacgaaggttgcatttctccgcagctctgtttaaaacccagcagtcctggccgaggctttagctgaagcgtctgcatattcattaggtctaattattttctagtaaggaaaacacaaaaagccaagagtcggaatccttcaatttaccctttgtttctaacttcatttggcttctttgcagctgaatcaaagccctaaactctttttccaaacaaagaaacctcaactcatcctttcataggcggcccggttaggaaactcaccgtgccccagcgagaggaaaatgaaaatgaatatattttttgccctgacgccagcgctgactgcacgggctggaggaaggcagggtcagcgt

SEQ ID NO: 316581 - DNA, 4001 bp, Homo sapiens
gtatatcatgtaaaccccatcatccagatcaaagtctgcttctttcatggaagccaatacatgtcaaacctcattccaatcaaattgtctggaaatgaattcaagatgaatatgtcacagaataacgtgacagtggaattgcagaaggtcaggggtggttgtttcaatgagagaatcgtcaaatattaattctggaacgtccagatgagtaggcattgagggggattagctggctgctggtgggacgttgtgtcattgatttgtgtgcaaatgtattgaacactaaggagttctaagtttcatttgaactcaagaaactccccccaaactctcaacccaacataaacaaaagacaaaacaaaacttcctacttaaaaaaaaaaaagaagaagaagaagaaaagaaaccagcaaaccaatattcaaaggaggattttaacttacttgactctttaagagtgtttcggtaaagccgtaatcgtttcctcatcaccaaggatgtcttgtatctcattttctgactttgagcctgtttgggaagaaaagagtgacagtcactagttaaacaattttacacgtctgtgtggcaacatcctgtggtttgaatgtatgaatgaaagaaggagttgatctgaagatctttcggtctttctttgaccattttcaaattttgaagctaaagaaaaggattttgccgggaacagcccatattgcaaaatgatatatctttggtgataaaaacattgaaaaattataatttcccagctaggcttttatttgaaactcctttgttgttttttgcaagcagaagtaatctctcttttagtcagtgctcaaaaatctgtagcttcccaaatttgaattaattgcgtaagaaaccttattatttttcagaagtttattaactgaaatttagtgaggtgtggtggggagagcctactgaactctgagaggttagcagctaaaatttgatttataactgttggaaccaagaggagaggaatttctttgcaggttttcaaatcctgttctgcctgtggtggtgcagaattccttagcctcacatttcccataccccagacccatttgggattcatcaccggttgactttttaaagttaatataaaatttgtcaggttaaaaaggtataattttaatcgtttggttcaaatcatccacatttcatagttgagaagggtagaaataacacctcccataagatatacacattactcatcagattcactttgtgactaaagttaccaagccattggccgccttaaatacttaaagccatcctgaggacctctgcatctgtcaggcaaggctgaggcagttgagcagccagacagaagcatctatccggcccccaccctcaatttggcctagaaagaaaaacagtcattgaaaaggtctcaggctggacaaacacagcaagtcctctgtcaatggggatgtctgcccacagaacaagcagttgtttaacttgttgaaccacaggccaaatccaagtgggactctgttatcttaaacggtatccagttctctatgcacaaagatctctctctctctctctccccctcaacgtccaaccagaattccaactggcttggcggcttttacccttccatctcccctcttttctaggtccaggcctaggaggcaggggggtagactcaccttttcccagagggtattattattttcaattctttctaaccaaaaggcattcttccccaaaggtaataagctccttccagcacaaatcaggaaagaaaggaggcctaactttgcattcctacagaagggcggcatgctgggcgtcctcgctctgaaatttcctcatggcaggatgtctggcatggaaaagtcctggttggttggcaataatagaatttactcttttgcttctgggggaaatgggtgtgaggttccctagagatccctgtccacccataaggcagccccaacccaacttctaagaggtctggatcacttctctcccaggtcctgtcagccttttgtgcactacagacccatagacatgcaaacaaatattgcagagattggactagggcaggcaacagggaccttaggaggctctctgtagcgtttccatcacacagcctacacagggaactagggtaaacatctcctttagttcaaactctgacaccacttagcaaacaagccagtcatcttgctgaaagagaggtgagagaatttgggagcaatcctggggcccgtggacctgaggtcccaaacaaccacggaatgtagaaactcagtttcgttttccccaaatgcttgctccccacatcaaccacggcctcctaattaccagtccatagcacatcctggagactttttggaatctgccctcctggccccaccttgagaagaggaacgggtgccagggagctccagtgattgatagtgccggaggagagccaagaaggtgggacagtgggtaggtgcaaaaagcaccatttttatttgggggagcctcggaagctgcaaattgtggggccgacctagccggcgcaggactacccaaggtcagaggtcagctgcagctagagacttcagttcccgagctgctccttactgactagccggcaggcgcgggaaaggcatgcccacctctccgctgcaacttgtccctggcgggcgcagagcaaaaaccctgaaagctggcagggagctctgagccagagaggaaactggccccggcctttgcccgctgcctgatttactcatctgcaccctgcacctttctggctcccctccattcgaccctcaagcgccaggagtttgctgaggctgggttgtgcaggggcctttactcattctcctgttctctagagggagaagcttgggtttcccagctcggggctgaagtaagtgtgggcagcatccgggtgcccagaatagagtttgtatcagtagatcaggctgggcatttagccctccctttgaatcacccctcccccaacctgcaggcggctgagacaggagaaaaaagagcagcatgcagtggtgtgggtcgctgcgaggacaatactgtcggaaagcggggaaaacatgaccttggaatccaaagggagtttcctgaagacggtgacggccgaagtgcaaccctccaaaagcccctccgctttcctaagactttgacatgggccattcatcaaccccaactttcagatccaacctttgagccagtcctagctttctttcacagctcagctctattccctcctcattggcccctaatttccaatgcccctgggtctaggctaggggccagaatcctaggagctgcggcctgctccccagagagctagttgctgctcttgttcgcattggagataaagaaagccaagtcccgaacccactgctggccgcgcgcagagagcagatcccagcagtcagcttcctgaggcaggaccagggtgagggagggcaaggagccgccctgaggtggactcaggcggcatctgccgtcaggttggggcggagaagttccatcgtcttgctgccatctgggctaacttggcgctttgaccctggagaggggaagcagagactctcctagccacccccttgggggcagagcagagatacctcctgtaaaggccccctcccggcacccgccttgctcatttttcgcgagggaagctctgggccacgacttccattcttgtgcccacggtggggcacccaggcaattcacaaggagagaagggaaggcaggcaggcaacaaactgctcctggttcctgtgccagtgggagccccatttgtaccccttttccctcctcctgggaagaagggatggactcatcctctgcgttgcccctttgcggaagggccccctcctccccttagtgtcagtggggtggggcctttatccacggttgggggaggggggtaggatgaaggaggagatggggcagaaagactggctgggcctcttcccccactggggtttgggtgccagtgg

SEQ ID NO: 316582 - DNA, 4001 bp, Homo sapiens
cagattcactttgtgactaaagttaccaagccattggccgccttaaatacttaaagccatcctgaggacctctgcatctgtcaggcaaggctgaggcagttgagcagccagacagaagcatctatccggcccccaccctcaatttggcctagaaagaaaaacagtcattgaaaaggtctcaggctggacaaacacagcaagtcctctgtcaatggggatgtctgcccacagaacaagcagttgtttaacttgttgaaccacaggccaaatccaagtgggactctgttatcttaaacggtatccagttctctatgcacaaagatctctctctctctctctccccctcaacgtccaaccagaattccaactggcttggcggcttttacccttccatctcccctcttttctaggtccaggcctaggaggcaggggggtagactcaccttttcccagagggtattattattttcaattctttctaaccaaaaggcattcttccccaaaggtaataagctccttccagcacaaatcaggaaagaaaggaggcctaactttgcattcctacagaagggcggcatgctgggcgtcctcgctctgaaatttcctcatggcaggatgtctggcatggaaaagtcctggttggttggcaataatagaatttactcttttgcttctgggggaaatgggtgtgaggttccctagagatccctgtccacccataaggcagccccaacccaacttctaagaggtctggatcacttctctcccaggtcctgtcagccttttgtgcactacagacccatagacatgcaaacaaatattgcagagattggactagggcaggcaacagggaccttaggaggctctctgtagcgtttccatcacacagcctacacagggaactagggtaaacatctcctttagttcaaactctgacaccacttagcaaacaagccagtcatcttgctgaaagagaggtgagagaatttgggagcaatcctggggcccgtggacctgaggtcccaaacaaccacggaatgtagaaactcagtttcgttttccccaaatgcttgctccccacatcaaccacggcctcctaattaccagtccatagcacatcctggagactttttggaatctgccctcctggccccaccttgagaagaggaacgggtgccagggagctccagtgattgatagtgccggaggagagccaagaaggtgggacagtgggtaggtgcaaaaagcaccatttttatttgggggagcctcggaagctgcaaattgtggggccgacctagccggcgcaggactacccaaggtcagaggtcagctgcagctagagacttcagttcccgagctgctccttactgactagccggcaggcgcgggaaaggcatgcccacctctccgctgcaacttgtccctggcgggcgcagagcaaaaaccctgaaagctggcagggagctctgagccagagaggaaactggccccggcctttgcccgctgcctgatttactcatctgcaccctgcacctttctggctcccctccattcgaccctcaagcgccaggagtttgctgaggctgggttgtgcaggggcctttactcattctcctgttctctagagggagaagcttgggtttcccagctcggggctgaagtaagtgtgggcagcatccgggtgcccagaatagagtttgtatcagtagatcaggctgggcatttagccctccctttgaatcacccctcccccaacctgcaggcggctgagacaggagaaaaaagagcagcatgcagtggtgtgggtcgctgcgaggacaatactgtcggaaagcggggaaaacatgaccttggaatccaaagggagtttcctgaagacggtgacggccgaagtgcaaccctccaaaagcccctccgctttcctaagactttgacatgggccattcatcaaccccaactttcagatccaacctttgagccagtcctagctttctttcacagctcagctctattccctcctcattggcccctaatttccaatgcccctgggtctaggctaggggccagaatcctaggagctgcggcctgctccccagagagctagttgctgctcttgttcgcattggagataaagaaagccaagtcccgaacccactgctggccgcgcgcagagagcagatcccagcagtcagcttcctgaggcaggaccagggtgagggagggcaaggagccgccctgaggtggactcaggcggcatctgccgtcaggttggggcggagaagttccatcgtcttgctgccatctgggctaacttggcgctttgaccctggagaggggaagcagagactctcctagccacccccttgggggcagagcagagatacctcctgtaaaggccccctcccggcacccgccttgctcatttttcgcgagggaagctctgggccacgacttccattcttgtgcccacggtggggcacccaggcaattcacaaggagagaagggaaggcaggcaggcaacaaactgctcctggttcctgtgccagtgggagccccatttgtaccccttttccctcctcctgggaagaagggatggactcatcctctgcgttgcccctttgcggaagggccccctcctccccttagtgtcagtggggtggggcctttatccacggttgggggaggggggtaggatgaaggaggagatggggcagaaagactggctgggcctcttcccccactggggtttgggtgccagtggtccccttgagggtacttgctacccggtcgctggaggtacagttctcatctgtctgccccctggactcacgcacttaccccactccacctgttgccaggatcgcctcatttctgcacatcatttcggggtggctgagaggggaccacaaacccctccaagcctctcttttgtggttccagcgaggcggtcatccttcacttctccttttccagctttcaggaagcagttagggaatgtatgatgaagcagaaatgagccgtcaggatgatattttaatggcttatatgtcacgttggtgcatgtggctttgaactggagccgttcgcgtttcctgcagagagcgccgcaaatcccacttgataacttctacaacccacaacttttttttttctcacattcactcttaccctgtatatttggatgtgtttcctaaaaataccctcttgtcaacgtccccgttggattttccacggactggagaggagaagactgacttttcttttttgaagaattattttccctctccccctcccaacagctacccttccccccttaggtcccctcccttgttgtgtgtgtgtgtgtgcgcccgcgtgtgtttcctgaaaggcgggcgaggtgggttcaatatctgttctccctagtgagaggaatacagcctctagagaaaacttctccatacagatgaggttttctaaactccaggggaagcaggatccaacttccccttgtaggtaaaaagacttagtgcctccgatatatcttttttttttccaaccaagtgtacaataatttttaaagatacctcggccctttctttacctccactcctcattccattccactcaaagttggtgggaaatgctgggctgctagactcagacttgttgatgggaacagaacaattaattttttttccgaatttatatttcccggcacaagcacaaatgctcagccaggtcccttcaggcaccgggaaatcatcccggatacccaagccgacttttgagcaagcacagcccatggaaagggcagtcccgccggccagccccaagcgagaatctagttggtgagaagaccagaaaaccagaaaggcgaggagcggcggacgctgaccctgccttcctccagcccgtgcagtcagcgctggcgtcagggcaaaaaatatattcattttcattttcctctcgctggggcacggtgagtttcctaaccgggccgcctatgaaaggatga

SEQ ID NO: 316583 - DNA, 4001 bp, Homo sapiens
gggccgacctagccggcgcaggactacccaaggtcagaggtcagctgcagctagagacttcagttcccgagctgctccttactgactagccggcaggcgcgggaaaggcatgcccacctctccgctgcaacttgtccctggcgggcgcagagcaaaaaccctgaaagctggcagggagctctgagccagagaggaaactggccccggcctttgcccgctgcctgatttactcatctgcaccctgcacctttctggctcccctccattcgaccctcaagcgccaggagtttgctgaggctgggttgtgcaggggcctttactcattctcctgttctctagagggagaagcttgggtttcccagctcggggctgaagtaagtgtgggcagcatccgggtgcccagaatagagtttgtatcagtagatcaggctgggcatttagccctccctttgaatcacccctcccccaacctgcaggcggctgagacaggagaaaaaagagcagcatgcagtggtgtgggtcgctgcgaggacaatactgtcggaaagcggggaaaacatgaccttggaatccaaagggagtttcctgaagacggtgacggccgaagtgcaaccctccaaaagcccctccgctttcctaagactttgacatgggccattcatcaaccccaactttcagatccaacctttgagccagtcctagctttctttcacagctcagctctattccctcctcattggcccctaatttccaatgcccctgggtctaggctaggggccagaatcctaggagctgcggcctgctccccagagagctagttgctgctcttgttcgcattggagataaagaaagccaagtcccgaacccactgctggccgcgcgcagagagcagatcccagcagtcagcttcctgaggcaggaccagggtgagggagggcaaggagccgccctgaggtggactcaggcggcatctgccgtcaggttggggcggagaagttccatcgtcttgctgccatctgggctaacttggcgctttgaccctggagaggggaagcagagactctcctagccacccccttgggggcagagcagagatacctcctgtaaaggccccctcccggcacccgccttgctcatttttcgcgagggaagctctgggccacgacttccattcttgtgcccacggtggggcacccaggcaattcacaaggagagaagggaaggcaggcaggcaacaaactgctcctggttcctgtgccagtgggagccccatttgtaccccttttccctcctcctgggaagaagggatggactcatcctctgcgttgcccctttgcggaagggccccctcctccccttagtgtcagtggggtggggcctttatccacggttgggggaggggggtaggatgaaggaggagatggggcagaaagactggctgggcctcttcccccactggggtttgggtgccagtggtccccttgagggtacttgctacccggtcgctggaggtacagttctcatctgtctgccccctggactcacgcacttaccccactccacctgttgccaggatcgcctcatttctgcacatcatttcggggtggctgagaggggaccacaaacccctccaagcctctcttttgtggttccagcgaggcggtcatccttcacttctccttttccagctttcaggaagcagttagggaatgtatgatgaagcagaaatgagccgtcaggatgatattttaatggcttatatgtcacgttggtgcatgtggctttgaactggagccgttcgcgtttcctgcagagagcgccgcaaatcccacttgataacttctacaacccacaacttttttttttctcacattcactcttaccctgtatatttggatgtgtttcctaaaaataccctcttgtcaacgtccccgttggattttccacggactggagaggagaagactgacttttcttttttgaagaattattttccctctccccctcccaacagctacccttccccccttaggtcccctcccttgttgtgtgtgtgtgtgtgcgcccgcgtgtgtttcctgaaaggcgggcgaggtgggttcaatatctgttctccctagtgagaggaatacagcctctagagaaaacttctccatacagatgaggttttctaaactccaggggaagcaggatccaacttccccttgtaggtaaaaagacttagtgcctccgatatatcttttttttttccaaccaagtgtacaataatttttaaagatacctcggccctttctttacctccactcctcattccattccactcaaagttggtgggaaatgctgggctgctagactcagacttgttgatgggaacagaacaattaattttttttccgaatttatatttcccggcacaagcacaaatgctcagccaggtcccttcaggcaccgggaaatcatcccggatacccaagccgacttttgagcaagcacagcccatggaaagggcagtcccgccggccagccccaagcgagaatctagttggtgagaagaccagaaaaccagaaaggcgaggagcggcggacgctgaccctgccttcctccagcccgtgcagtcagcgctggcgtcagggcaaaaaatatattcattttcattttcctctcgctggggcacggtgagtttcctaaccgggccgcctatgaaaggatgagttgaggtttctttgtttggaaaaagagtttagggctttgattcagctgcaaagaagccaaatgaagttagaaacaaagggtaaattgaaggattccgactcttggctttttgtgttttccttactagaaaataattagacctaatgaatatgcagacgcttcagctaaagcctcggccaggactgctgggttttaaacagagctgcggagaaatgcaaccttcgtccccacaaccccccgcatccgcgtgcattttttgaaatgcataaatgttgctcggcttaattgattgagtcacagggatttttttttcctgcttttaagtaccatactcccctacctttcaacaatcattttaatatatagtcaatggctctttgtggaagggacaaaaagaaactacgcgcagttgttgaatagactttgcgctaggcaaagacaggttaatcgagggccgcatcgcgaaaacaagcgagtgttgtatgtttgcactgaatccaaatgtctgcattttcctaactaaatcaaagggagtgttatttctttttctgctcactcatctgaaggtaagtaaattttctctggcgatcaaaagcctggtcggcaacaaagaccgcgcccgctttttccaccgtcctggtgtggcgagttgcggaatttcaataactgtgacaagggtgactgatttgtgaactagaaaaggtttgaatgtcacaaaatttacattggtcctatctattggggatttaaataccgaaaaagtattcggggatctctagggagctttgggcagcccaagggaacaatagcgcgttgggaaatttacagttttacctgaatgaaaggggcccaagtagggaacaggagtgaggagagacagggttagcgggggcagtcgaaggagacaacggaaaggcagaaaacagaaaaataacgcaagagagagaaaaagtaaaggaaactggcaacaacgtttcaaatttgccattaaaaaattcaaacctcaataacctgggaacttaagcgctttcatccacctgtgtgtgtgagtgtgtgtgtgtgtgtgttttcggggaggggggtgcggtggtgccggaagtctgattagataaaagcgagaaatacagaggctgccggttacactgagaaattacatttttttgtaaagagagcatagtgcccgtgtgctcccaagatcttaaattataaacaggagggggacaaagcaagagggaaacaaacttcaaaaggagcaaataacaaaagcctcttttgctgctcttgaagg

SEQ ID NO: 316584 - DNA, 4001 bp, Homo sapiens
tggagactgctgccctgcccccaggtctggtttgctggctcctgcttcacagtcaggcgcccctcttgcttctggaaagcagtgctcctggggatgaggcctaaatttcccctgcctgcagtggtcattgtgaccccaaagagaagcttgttacagctgcagttggtccgattaaaatgatggtcaatagttcaggtctcaggaactgtttttcagggttggagaaaggggtgatggtagtgtggcctacagaaacaagagtgaaatcagagttcttggagtattcagccccaggctgatgacaatcctccactgagttaaaaaacaaagctccaggaaaaaagaacacaaccaggcattcttagtaagcatctctccaaatgatgcccttcttaaagtttcagtggctcccattacctacaggataaaatctaaatgtctatgccttgcattcacagcccttcacaacctggccttacccccttcacaaccagccacaccctctaccactcaccccaagtacccatgctagaaagacagcaatggtctccaatgtgggaaatgcaggctatcccaaagggtgcaagagaaaatactaagttatttaactcctatttaatgtatgttttataatgtgcattacaatttgtatagtagtattcatgtttaaattacaaataaaccaatgtagggagtaagtgatcaaacctcttctactgatagaaatgcaaaataaagaaagtttggagctaaagctctagagacacacttagaagccacacatactctttctttgaatttttcttcttcaacttttggcaaacttgtctgtcaagaccatgaacaaaggcaactttttcttggttttcctgattgccccatcaggaagagtgctggtagcttccctttgtgtacctctcactataaccctttaactggtttatgcacaactcaccactctcaccctccaaactgctgcacggccaccaaaggaaaggaaccaaatggaatcagaaaatactagacctttttttactcaatgcacctcccctagaaagccttcctgatcacgctaggcttagagaggtggttattgtctcagtgatcccaaactacctttttcattcaaacctctagtagagcacatctcacactgtaatcgtttgtggtttacacgactgtctcccctgctttctgggaggatacaaagggcagagctgacttccagtcatctttgtacacgtgtgcacatggcacacataattgggaaatgaatgaatatgatacatttagctgacactgaagtggaggaaaactttgaacgttttaaaatcagcaccttactggtaactagggcatctgtgctgtgcttccagttcaccaagagcccagatccctgtgtctcaatctctttaaaaagacaaagaaggactttaaaataatctgtaaactctgctctaagatcccatatatgtagaaagttcaggccattctcctgcttcccatagtgttccgaatgctcagcactttaaaatctcaattggatttttgcatttccaagtcacgctccacgtttgcgattctgagcctgggtctgacccaaatatgacagttcatacagtttcctactgcaagagctgggaaaacagcgatctacctttcgtgttaaaccaggcttcagcagcgccgctcacctggccacgtctgccctgttcatcgctgtacccgcagatacccggctccgtgccacgcacgaatggtcaggggtatgagacaaagaagcggctctacatcgggcggcttctgagagtcacggggaccgcgccgcctgccgccgggaagaagcgcggtcctggccagcgtcggcgacccgagctccggccgcgcctccctccgcgtctcggcccactcgcggtggcactcggcaccgaagccggacactctactgcccgttagaccaaaaacaatggccgagccggaagcgagagaggcctcgacttccgccccctccgggatcccggaagtctcgtttgcgaaggtgggcgcgcgcgtccccgcacccgggagagctggcagggcttacttctcggctgtgcccggccacctgccgcgggcggggtcggggtctcgcgagggcccaggccactcacatcccgctctcaggccatagtcgggggatccagacgcgtcccagctctacaccttctcctccaggtgtccttgggaaagatacccaacctccaagcctgttttctcatctgaaaaaaatgcagagcataatgcgtacctcacagggctgggagcaccgcatgaggttaacagacactacatagcaaaaggcctggcatatcctgagcagtcagttataccatgtgtgatgcccaatctgaagtctcagtgaagggagcagcaagcatctcccatcttaaaaatgaagaagcatgtctagaaattgtgatattttggcccataaatgtggttaatatttcgtaagacagcaccagcattctggtgtccatgtagaggttcctagggagaccaagaagcagataaactgagaaggtgtggggacagtttgtaacctagtaggcagttgtctagcctctgggtggcaggtggtacccaggtgactttcactttgaagaatggtttgcatacagaaggaggatatgaactggtccttgttacaaacatggttgagcaggccctgtgtgttaatgaccacgggtgaagggcaaagggtgtgatgaagttaactgtgtatctttattatagcacaggagataggtcctttacagggcccaaagtaaacagtctcctggactgtctagggatggcaatatttcaaaggtgccctgggcctaaccctggccctgacatatgttcctcatatatctgtgtgagccaagatagaaacaaagacaccagaagtcctgctccagagtttccacaagcttaaaagtaatctcttggagcaatctttgtccattgatcctaatggtggtttcctgtcatcaaggtccccctctccatttggaaatctcacaaggaggttttggctatttaaaaccaggaaccccagcctctgcctgacattgatgctagacattgcctactggcaaatcaaggcctcagaagcttaggattcttgaggtggaaggcaaatcaaggccccagaagcttaggattcttgaggaggaaatctcccaaggccaggctaaatgctctcagacctgattttcaggtctccttgaccacgtgttgtcctgcagtcctggcttcctattataggagacacaaggatttggaaaccaagattgaggttttttattcttcagagctgtttcatgcacaagtggttggctttcattggctgtaaggaccaggcccatctgagcagtgtgtttagacttcagaggcacttctgtgaccaacactgtgggcctggcccgatctaccatgactgggttgggccccagtgggcaagacacttgatgatgcctcgatatagcaccttaggacacctacctttgggccaaagacaaccacagaaggcttttaggaattctgtactccaactcgatttctcttgaaaatcatcactcaagctttggtatgagagctaacaaataggtaactcaaattctacatgcctgaaacgaaacttaccatctatccgcaaccctgaagctccaacccatatccccatcactgtaaaaagtattatcattcacccagggacccaaactagaaccctgggtgtcatcccatgagctgagtgaccatggacaagttacttagcctctctgtgcatagcttccttatttggaaaatggggataataatatacttgaattgtagagttgttgtgaggattggatgagataaaatacataaagcacttagaatggtgcctgacacattgtaagtattataggtgttttctagtattgtgtttactatccttgtttcctctcagttcatcccctgtatccattaat

SEQ ID NO: 316585 - DNA, 4001 bp, Homo sapiens
aagcaatatagagttttaacatttaaaaagtcaggttctctgtaatggtattatttctcttaattgaatcaagcaaagatagtccagaaagcaaagacagatatggtcattttagaaaacggaactaagtagacaaagaacagcttttaaaaagtttaactacctaataataataattcataatgttgaaaagctactgatgtcaaattgccacaaacattctgctagttcattagtgaaaaggtgggggggggtgtcaaaacctctggataaaggaaatcagcaatataaacagaaaatcaaatgctaccaattgcctaggcatgtctggacttgttttatgaaagctcactttcacttgaggaaattctagcatgtgtctcccccagtgttatctacaggtttccctcaaaataaagatccttctcaaagaacagaggcacaaaaggcctcctaccagaggtgacagttacctgatttaaagaaaaaattcttgccaaacacagatttacccattatcacatttgatctttacaatttttaaagagtagcttgatatcccaaatttatttcttgttatatttaacaatcaacacaatgtcgactcctcaaaaaaatctatgtatgacaattgcatcaaatattagtacatttgcaaacaaaaattagtataaaatataaatcttaaaatgaataaaaccaagtcttcagtgaatgcatgaatgatggaatacagagacccaaaacatgcaactcagatctgttcaactgttgcattggtttaaaagggactaatttgaagactggcataaatattcttcaaatcttaaaaaccagtcactttgatgcttgcgatggcataaatgaaggatttatgctggttaatgtcctggtttggaaaggagctaagacgacattaaagaaaatcaaagcttcacaaggtaccctgtttaaagaaaattaattgtcatagcatacttagttttaatgattggactggggcctactcttcacatactgtgttaaagacaatctcttgtctcatttggagaaatctacagaggaaagagaatagaataaaggaacaggttaggagcacctcagcaaactaggtaagtctgtaattgggaattctggaaatgagggaaaggcagcgagcattactcagaggtcatcagaacgcagcaagaaggaatgagagggagaaaagttaaaaaaaataataataataatcacttgaggcaaggtgtatcctataaagaaggctcaaaagaacgcagaaaactggggaagaggccttggtgaattggcgaatgtttttcagtctccgctgtgacggttcctaatcctagagaactgtttacagatttgaatcaaagctacagacagttcagcgtcgcccacatccaccttacattcctaagatgtgcatgcatacacacgaacccacacacgcacctcaacccggtatggatgccatcacgaaggatggaatcccccgactcccacggggcgggggcaactgagagggccaaggcagctgcacgcacagatgatccacctggtccacgtgaaatgcctgaaacaagcaaactgataaatagaagcagcgcaagccctgtcacgtggagggcagatggaaagagcatcggaaaggaaccgctagtccccggcgctccaggggctcgtcctgaaagctccgcggctcccaatcgcccgcacttaccggaacccccgggacgcgccggcagtctccgcgccgcgtccgcccgggacgcccgcgacgcccgccctgcgcgcccggctcggcccagctcgacccagcctcttctcggagcaactttctccgccggccgccgccgagccccctccgcagccgaaggctgactgtcaaaagtcagtccaacccgacccacagggaaacagctgcaggaagtgactgcggaaccgggaggcggtggaggaggagactgagggcgccggctcggcgtcgccactgcgcatgtgcttggcggagcaggcccggcagcggtggcagcggtagcagtggcggctcccgcatccccggcgggcggcgcgtgggtcaggtgccctggccgcgagcgcaggggcgcggggttaggccggcgtggggaacaaaggcacgagtgagaggcgggagggtcccgccgccaatctcagcagacagccccgaagagcagttcagcagatgccctggaaagttaatccttggtagaagcctgggcagagcttttgcaactttcatctccagtcattgggatccaaacattgttcattctgttcctcccttagcctgctggttggcggttaaggcggctgagtggatcctttaaactgctgcaacagaacctttaaactgctgctctccccacttccgccccaggatggaggaagaagagcgtggctgcctgcccagtatcggcctccctcacacaaaacgcccccacccacccacacacacaccttccctcccctacacgaaagtgagcaggagatagaggagactttctcctgacccccagaggctcacctgcaagacaggaaggaccaggaaaagagtggccaacgctaggatgtcacatccttcataaccaacctggacatcttcaatgttaacactgagtgatgagctgaggaaattccggctctaaacttatagcgtaaattaactcgtatgaagatctgctggggtattatttttgtgtgtggcaaacgataacaaatatactactttaagagtacaggccgggcgcggtggctcacgcctgtaatcccaacactttgggaggccgaggcgggtggatcacggggtcaggagatcgagaccatcctggctaacacggtgaaacccaatctctactaaaaatacaaaaatattagccaggcgtggtggtgggcgcctgtagtcccagctactcgggaggctgaggcaggagaatggcgtgaacccgggaggcggagcttgcagtgagccgagatcgcgccgctgcactccagcctgggtgacagagcgagactccgtctcaaaaaaaaaaaaaaaaaaagtacagttcagtggcattaagtacatttgcattattgtgtggttattttttaaaacacgaattaaaatgccaaggagatctaagtatagtaagatgtgccctattagtagggaaacaactgcaggaaatcaaggctgtttctttggctgaaaaatgcaccaatccaataccaacaacaacaaaccataaaagacttcataagtacaatgaatatgaagtacaaacatatacacacagtgtacaccagccatttggggagagtaatccatcacctgaattgtttttccagctgtataggtacatttactttatgtgtcactattttaaagggctatattgtttctaaaataataaatgctgctaaaatccactctccagccccttttctatatggtctttagccagtcttagaacttcacagtccacactccttatctaggaccacaagtaggccttgcggagcctttccgatctgaccttccaccagtctcccctcatcatttcactcacacccccatccatgccccttcatttcctgcctctgtaatttagctctgtctgcatcttgaatacaaaatgctttctctcccctccccttgaattgtcaaatcctacctgtccttccaggcctcttctttcatgaggtcccacagcacttttctccgcacaccttgatgacacactatttgttgtcccacattataattacttaagagatatttcctctgccctgtaaataccttgagtccaggaaggataaatgtcttggagttttcaagttttatgtttgatagtttgatgtgttcttgtccatcaggatgaaaatctgaacaattccatgttctctgctcacatactcttctcagacagctagggcatttccttccctgcctcggggagaaagaaaaggcaaatctgatgcttgtgtaatagata

SEQ ID NO: 316586 - DNA, 4001 bp, Homo sapiens
cagctcaccaccatgtagatggggaaggtgttctggggcttgaagtcctccaccctgcagaacacagggaacaccttctgcttccacatctccactgcgatcagctcctccaccagtgttgggacctttgaagggtagggtaaaggacagggatgagatgggcctacctttgcctggcaaccctcccatccccggctcagctcaaccctgatatccccaaacactgctgggcccctaaactattccagacccatgagtatccttcctgacttctctcttgcaccttggaccttcattaccagctgctcccaacacctctgtggatgtccctcatgcttatgtgactggctcctgcccagttcccagactgccttgccctgcctgcacctgcacccttatcctctgcccgcccattcaggcatccctttcaagccagcccttctcctcatgccctccctctagtccctgtctgtggtcctccaaagctcttgtgtgccttggcctcactcctactcaggacccttcacagtgccctgttcctatcctatcccctagtatgagttccatctttcttttgcaaaggacctttcttttttttttttttttttttgagacggagtttcactcttgtcacccaggctggagtgcagtggcatgatcttggctctctgtaacctctgcctcccaggttcaagcgattctcctgcctcagcctcccgagtagctgggattacaggtgtgcaccaccatgctctgcaaatttttgtatttttagtagaggtggggtttcaccatgttggccaggctggccttgaactcctgacctcagatgatccacccgtcttggcctcccaaaatgctgggataacaggcatgagctaccatgcccggcttttttttttttttttttggtcaattgatatctcaggtcatctgctggtgacactccctggtccatgttccagccaggcatctccctggtttctaacttccccctttcatgttgggaaggctgcttccttccatgccgaagttccacctccagttaggttatctcccctccctcccgccctccccaacccctccccaccccttccccaccaccagccttacagtcaattcacagatgcctttagcatttgggccttccccttgaagcctaagctgttctaggacctacagctttctccctaatcaactcatgccctgcacccagcctggtgtgccagagtcctgtccaatagggatacaaaatgaaacatgtaacacattcctctttgtccttcagggagaacaggtgtaccaggccagaggggaagggcacacaggggactccggaggggtagagtaggtgaggtatgggggaaggcaggaaccctgcctgtgacctcggggtaccttcccatgggtgaccagcagctcctgaatgggctcgccctggctgactgtggcatcgaggatggcttgcatgttcagcttctccaggttctcatgctgctggttccacctgcctcagagggtaagtgcatgtgcgtccacgtgtgtgcattaggagtggggatgggggctggatcctactgaagcctaacctgatcctgaggggacacagggggctcaggagcagtaatactcctgtctcggaacgctctgctcccccatttgggagcccctccacactgggcagcccctcccccgagtcaggccccagctccccgactcaaggacaatgactccgggactccgcctgacccgggtgcctcacccttcggagcccatctcgcgtagcgggaagctgcgcagaccccgcaccagcacttcagcttccccgggcagcagcagttccaggtctcccatatcgaggccggggtccggcggatcctgggcagcagccggggtggggatgctgtcacattcggggacgacggaccccgacggtgccaaagtctgggacaggacagttgcgggacggttggggagcgtcagttctcgcagccatggaaacgggttagccgcgcctgcgcagtgcggcctgggccccgcccctggaggtggctcgcgcctaaatccgggcgggtctctagcccgcctcgcctacgcgactgccaatcgccatagtatttggattcccagcgctttctcgggctgtggcccacgagtctctcctgagctccagatccttgtggtctggactctgtcctcagacgccaagtccgcctgcacagggatgggggtaaccccgaccccaacagcccctcctgcggctgtggcatcttgacctacccgctgctcttcctcctccttatggcttcttggttcctctatttctcgcgtcccggctccactagttggctcctgaaatactgccagggcgcacgacttctctccatcctccctatgtccagactgtcatcacctgtcatgggtgaactgcggcagccttttctgtagacctacttccacgcttgatcctcatggacagcccggagccttaaaagtgtatatcaggccgggcgcggtggctgacacctgtaatctcagcactttgggaggccgaggcaggcggatcacttgaggtcaggagtttgagaccagcctgggcaacatggtgaaaccctgtctctactaaaagtacaaaaattagacaggtgtggtagcacacacctgtagtcccagctacatgggagactgaggcaggagaatcgcttgagcacaggaggtggagtttgcagtgaggcaagattgcaccaccgcactccagcctggacaacaaagggagaccgtctcaaaaaaaaaaaaaaagcatatagacattactcccttgcgtgagaggggctctgtggctacttctggccctcaaaatgttaggtgggatgccgcttactagcagctctgcaagatctacttcttgtcctctcctgtacctcgggacttggattctttcctctcctccttgcttccctgaacctccctcatacattccaaagaggtttttgcctcagagttttgcactttgcctggaatacttttccttcagggctcagtttacacctcagcatggcctttcttggccatttaatccagagcagtccctgcctccaacccaactcactcttgatcacatctttttttgaaattgagtctcctgtcacctaggctggagtgcagtggcatgatcttggctcactgcaacctctgcctcccaggttcaagtgattctcctgcctcagcttcctgagtagctgggattacaggtgtgcaccaccacacctggctaattttttgtatttttttttagtggagatggggtttcactatgttggccaggctgtttttgaacatctgacctcaggtgatctgcccgcttcagcctcccaaagtgctgggattataggcatgagccaccgcgcctggctacatctgcttctttctaggtttatttattattattattattattgagatggggtcttgctctgtcacccaggctggggtgcagtgatgggatcacagctaaatgtagcctccaactcgtggcctcaaatgatccccccacttcagcctcctgagtagctggggctacaggtgagtcaccgcatcaggacgatttttttttttttttttttttttttttgtaattaaccggcacttttatttgtcgattgtcggtcctgcccaccagatggcgatctagcccacggctcgtggctatttcattcactgctgggtctcccacggctggcccagaaacagcactcaataaaggctgtttgaaatggatgtctttatttacagaactaagagtcaacctctagacagtatgacaagcctcctagtaggagggactacccacagcaatgtgtccatccagtcactaccagcctcacttccagcagatgatgatgttggggtcattttcaagccgctcatccagctcatggtagctcatgcctgggtggggtggtggaggagaggtcagtggccttggcctggccaccctgccc

SEQ ID NO: 316587 - DNA, 4001 bp, Homo sapiens
tgctgggattacaggtgtgagccaccgcgcccagctgtatatagttttttcttaataaaaggtgaataatatccgggtagtttttaagagtatggttctagcccagagttccctcttggaaatctggtctggtgtgagctcagcaaatccagagagagcttggttcatttcctgacatagagatgctaatcctccctccaacctggctctagagtcgtccagtctcctaggttcccctagaccttctgataactagtcctgacctccttgcaacctaaaaccaaaacagatattctagctcctccattctgcaggcccacactttgctggctgatacgttttcttcaatgccatcatgcctgaatgagagtattctctcactggagaactccctcacagttcacttcaggaactgtgaatggcagaagatctcccaccagccacagatttatggaaccaatccagccaactaatttgagctacaaatgaagtatctaaagaagagccagcaagcatgtcttccccccgaccattaattataatcttgtgtactgcaatccaggctgaataatacggcaccaattctcctggaccagataaactgggcagtgaagaaaaccaccaagtcaattaatttccattccagcgtttgccaggatagtatttacccaacctcgggtaagtgttaatacttcaaattttctaaaatcgaagctccatagcctaaggaatccccacaggccagaccctttctcaaggtctgcttcagaggttctcatactcattggtgcacgtctaaaatgtcacagaccaaactacagactaaaatctaattctcagtgaccccaaccacggcccagacccacacttaccagatgtcatctactgaacagcccacacaggttcggaactaggccatcccggcccatctggaataactcttcagtacttaggccaatatttattaattatactacatctgtctattctattatgcattccctgcatcttctctactatttagcactccctcttgcttcaaacgcgatcctttctattcacgggaactcctatctcccttctttccttccctgagaaacgcttcagttctttccataatgaaatacctaacgtatctgcacaatgaacaccccccagaatcctcaagactcctccacagccacctccccgcattcctccacctctccggcatctttcctccggcccctcgccctgttcgcactcccactacgtttcctgcaagcattcccttttctccaacccctgcccttcccttctcccaaagagcacactccggcagcaacagtgactgaggcctgcggtgcataaagcactgcaccaggcacggtggacagagccctggtgtctccctagccttttcacacccacacccagcaccctccggcctccccgtgcaaacatcccacctcctcccctacctctgacacccgcctccagcctcggaggccgccttctcgcctccgccacccccgtcattatccctcctcaaccccccaacccaccctccgcgccctgcttcctcacgtcccccagccagccccagcgtttccctcggcctcggctggccccctggccacccccagcctcgccacggctcgctccccccggggtcaggccgttaccgccgcgcgctccccccgcgcgccgccccctccccctcccccgccctcccccgggcccgggcctgccaggccgagcgctttaccgcgggcgggcgccgagtcgcgcggtcaccgactgcaggcggcggcagctccaacctttctaggggccttgagaggaggggaaggggggaggggggagaacttttgctgtggcagcttcggcaacagctcccacccctgcgcctttctcctcttcctccccctcctcctcctcctcctcttcctccttctcttcctcctcccagagcagtagagacgcagacatgccgcagctagagcgccgccgcggtcgccgccactgccggcccggtgcattgtgggaagccccgcacacgggaagcgctccgcggcgcccgccctcgtctggcgcagagacctggctggaaagacacagcgtggcttcgattccggcgcctgcgtgtcaccagcccagggtggccgtggaagctggacccgagccgcaggccccccaggctgggcctgggaggaaagcggtttgaaaaagatcggaactgaggaactctcttagagcgggggactccctgctcctacagccttaaccaatgcccagcgcttggaaagtggaggactcggggattcgggagcgtttcaggcctggggaaatggaagggtcggggacctaggtgaaaggttatttgccagaaatgtcttggctttttcatttattctgtcttacctagcccttcgccgccacctccagtcgttggcctcttaccaccttcaaatgccaccttttccggaagatgtagccctgcgcccttgaaactggcaaaccctattagtgtctgcaagctgagatgcagggtgtgggcatagacacagatcaagagatccggccctggaccctcttgggcagaaccttgcccttctcatttcacctgaagcccaaactttgtatggcaaagacttggtaatgatctctatagagctaggattacacagttgtctcatcctttgggggccctttagccaaactgtgacctccttaatggtgccttcgtcagctaacattaggcgccctgaggtgcttctgcatactgccatcgtttacaattactcatctttgtgtacacaccctagcacaaggtcagccatataacataaaagatgctcagtgaatgttgagtaattgtgagcatctggaacttgccgtgggataaaacgcgttcattgggatttcttcataataatatgaagattccatttagcgcctctctgcaatacttaaacgtaacctttgaggggagagggaaaagaaaaggcatgaaaatatctatagagccatttctggtgttctccttcccttttccacacccgccttcccaccccttgccaactaaatgttcatttgaatagtgctttttggcaaaattccaaactcctgcattatgcacttgtgatgacactgaattagattagtgtctgcaaggttaatgttccctcaggcattaaccttagtaaatcgtgatgcctgtttagaaatagctaaggcccagaggttcagcttaatttagacacaggtaactaagagcaagagtaaaccacagctccacaatcaactctctctgtgtgctttctccattaaaaaatataaattttaataagatgaccgcacatattctgaatgttaattgcaacaaaacaatgacacaagttagagccaagggacagttatctggaggacagccttctggcaacttctagcacccgcagtggcatcaaattcagacgtcataatgaaaaacacctctggcagcaagaaagccgactctcagtattaggcagtgggaaaactaataactgaaaagggctcaaggcctggaggttacatccaatgggctaggattgattggtttgctattaggaatagatctagttctctgctcagcagcctaacaagcgatagagaaacagctgtctaaaatgggcagaacgaagagcactacagggatagtaacagcaaaagcgatggtgaggagcaagcttaggtcctttataagttaaactggaaaaacttctcagcttcaggttggctctccatgctcctcttgctcacttccctaaacaccacccgtaggtactcagcctacttacttttccttttttttttttttaactttttattttgaaataattatagactcacaagaagttgcaaaaatagtccagagtcccatgctttccccaatggtgacatcttacaaagctctagtaagacatcaaaatcagtgtcaacctaaataacagagaggctttctaaaagaaaataatgtt

SEQ ID NO: 316588 - DNA, 4001 bp, Homo sapiens
agatctttcctgtcaatacacagcccctctccgcatttttatggatgcatagatgtatcataatttattcatgccagcactgatggaatgtttgggtagttttcaatcatttcttattaccaacaatataatcatgaataatcttgggcatacatcagtttggatgtgtgtaggcatatataagaaaaattccttgaatcagaattgctgagttaaaaggtatatacatgtataattttgatattgccaatttgacctcactaggattgaaccaatttataatttatactcccatcagaaacagctgtatgggagtgcctttcctcactttcaccaatatgtttctcaaagtttgtgctcttcgccaaatttttgacttgcattttgaacgaattaatatagagtcatttgtatattttttaaagtaactattcatatattttgcccatgtttccattgaggtgttgggtcttgttaatttgtacacacttttatcacaggaaaattagtcctttgtttacaatggcagctgcaaatttttctcagtttgtcaagtgtctttgtgactatatatgccatgtgactttgcttaaagtgttttttgccatgcagtcaatcttttacgacttctgggtactgtaccacaattagaaagacctttttcactctgagcatgaagagagtcttaagtggtgtcaggactctattagtgagaaatggtgggggtgggagggctggatatcaagaaaggtcagttaggtttttctaatagtctaaacacatgacttaagttctaaacgaagtagggataaggcaattgagaaaaacttggtagtccttggtaactgatctgggggtgatggaaaggaatttttaaaaagaattttgaataattttcaaataacataaaaataacaaattcttaaacatacattttattagcttctcacaaaaggttttcaaagcagaagttaaaaaaaacaaaaggatcagaggagcgaatccactcaaggccacttagctaactgagacatgggagcaaattctgaattcagggattctaattccagaagtccaaaacaattccatctacgaagaaacttatgaaacccaaacaacccaaactgttctaaaacaacagtttccaaacaccagtccacgacaaagctttaatctggtaagctgcaaaaagagaaaaccagtaacaatcgtcgctgacaggttggcaatgagtgtgtgtgtgtgtgtgtgtgtgtgtgtgtgtgtgtgcgcgcgcgcgcgcaaaggccagcatttattctgagtttacggtcttagtactttgtgttaaaatgtattgcctgaagtaatgttggtatgggtggtttcaagtttgagtttttcaagtttgatttttaaataccattatattacaaaactaaaagactaaaaaagctaaaatcgttccaccccttaaaacaaacaaacaaaaaaatccgtcctcaagagtctgggcgccaccggtaatagggaaacctcagaatgtttctgtggattagcctcagacaagactgaggaagagcagaaaggcctgagctgggggagcaggctactgaggcagctcttctcaaagcgccagcagagtccgttagacaggagcaccggtccacaaacacacacagactcggagctgctgtcctcagtacttccctcgggccggctgcctgcccagccgaggccacgacgtcgaaccccaacacgaagctggcgacggaccatgccgggggtcagggcccgggagaggctaccgagggctgtgcagtcccagcaagctcaggcccgcgtcccgggccgccttccctgcacgcccacccgcccccgagcccaccccgctcaccgggggctcccgctgcggctccagccttgcgtaccgccgcctcggcgccaggccgctaggagatgacacaggaacgagcccttccggcagccgaggcacagaataatggccgagccgagaatactgcgacttccggttgcaccccgcccctcatcccggatctctaggaagccacatctctatggttcgtttcttttcccagaactggggaagagaggcggaactcctgagcccttgggtactagtgttccttacatcgaacaagaactggccgctgtttcagaccggaagggtgcagagatgaaagacaggacccagggtctcaggatgcctgttgcctcctaagagagttggacatttctattttgatttgcatttcaattgaggttgatagggagtgaccttcacgtctgaatgacctggtaggtgacttttctggtctcttcttgaacttatgcaattctcactataaataataacatgacttataaatcaccctcttgtgaattcgcttactgtggtgtatctcttgcccacatgatgacatattggagctatgatattaaataataatcaagttgatggtgcaaggtaatgtgcaaatggtagggacatctctcccctgaaagaagaggttattctagctgtccatcgccctgggtaaagtcaggtgtatataaaggaaactggcactctgatcctctctttggtcttcagtctcttaagtttggacttctggaactgacacccctatatgggactatggctgaaacaagtctccaaaagggcaaaggccatgtctgcatggatcccatgtatttagcacctagtacaaagctgaagccatataggttgtagatgaatgtttattcaatgagcaaggttcatgttattctgtttatgtcttttttttttttttgagatggagttttgctcttgttgcccaggctggagtgcagtggcgcaatcttggctcactgcaatctccacctcccgggttcaagcgattcttctgcctcagcctcctgagcagctgggattacaggcacgtgccaccatgcctggctattttttttttttttttttttttttagtagagacggggtttcacaatgttggccaggctggtcttgaactcctgacctcaggtgatccacccccaccttggccttctaaagtgttggaatcacaggcgtgagccaccgtgccaggcttattctgtttatttctttatgttctctcctggcattcattaaacaacatacttaaacttcagccttgattcattcattcattcaactactgagtacttgccatatgccaaatactgttctgggcactagggacatagataaagaggtaaagtctctgttctcatggggcttacatttctagtgggataaacagaaaacaaatataaaaatgtgtcaggtggtggtaaatgctaagaaatgtgaaagctgatcataagaattgggtcatttttgtcatacctaataaaagaaagtcgagaaattagctgggggaagcactcagggtacacaacattgctccaggaatgttattctctgtaagcttgactgctgaaactgcttattataagccaaaaccagttttatctatagcttctgagataagttgctgcaactctaggactaattttgcccaccgcagttgctcaccaactggagcttgtcagctccccacacccttactactgccaatgaactttctcaaagagcaatatgtaacattcctcctttttgtaaaacctctaaccttctctttgttcttcagagagagcaccactttcagttcaagccagagactatctctccgagtttgtaaactgatgttgtgaataaaactttcttttctttctttctttcttttttttttttttttttttgagatggagtctcactctgtcgcccaggctggagtgcagtggcgcgatctcgctcactgcaacctccgcctcccgggttcaaatgattctcctgtctcagattcctgagtagctgggattacaagcgcacgccaccatgcctggctaattttttgtattttagtagagatggggtttcaccgtgttgcccaggctggtctcaaactcctgagctca

SEQ ID NO: 316589 - DNA, 4001 bp, Homo sapiens
gcaaacagctttatataatgtttattgattttttcctgattaaaagttaacttacttttattgtaaaaacttaaaagcagcaaatgattaagaaaaatcatctcggtctacctccaaagagataaccactatacattttaagatttaagatatttctttcaaaggaaaatctccaaccatactactaataattatgattttacaaattcttgtttttgactttggggatacatattttcacaattatcatcatagcattttttaaaaaaggattttacaacaaaaagattttttattgccaaggatacaaaataatgtgaacaaaaggatcccaagaaaaagactgggagtctttataccaacgtgttagcagtgggtagttaactctggatggtgtaattacaggtagttttaaggttcttttcattttttttgtttgatttttacattttccatagcttccaaatgtcctgtgagataaaatattacacttaagatttaaaaaaagattactttcatgttgccattcttcatgcttattttaaatgctacacaataacctatggtgttgataaatcttcactctcattgaaaaaggatcaagtaatacagaaatatatagaattaaatatataacctacacacactacacacacacacacacacacacacaaagtacttatcagtttagatgggagtcctaacccattttctctgcatttacatacttatatgttcaccttcacacatattgcttatttttcaaaaacatactttagatcatcacagttatatactgttcagcaacctgcattgttttttaactcaatttccgtatttcacaatagtcttaacaatctttcaatacaacacatatagaactacctcattctggcatagtattctaaattgtggctatattatcatttacttaatcatattctatttatgaaccatttatttagtaaaagtttatatttccattttattaatatttaaaagtttttctttgtaaatattttttttttgctgaattattcctttagaataatcagagaattactggttcaaggatttgctggttgatatgtactgtcaaattgctttccaaaagcaccatgccaattcacacccccactaattgacagtaaccctttatcacagctaagccagcagggtttttgtttttaacctgtgagcaaaataaccttactagtttgattgcttatgaagagattgaaatttttctttctaaccccctttgaatgttttattggaaaagggtgcgaaatcttattcaatcccctgttgctgctattgaagtgatcatactcttttccccatgtcaacttactggccacttactgtatacactgaatttattaagtaatgcaatactttcattcctgtgacaaaccttaattctggaggactattctttccatcactatccgaattcaatctggtatgaaggtccttaagactagttccaccttgtgtataagactgcctacagtgagtactctcatcagacttctgatcagattctgacggacctccggtcccagacggcacagggccctctatcaaaggctccctttcaacgtcctttctctatttccaaacgtggcaatccattctttccacgtataggctcctcgcggccctgtccctgggacctatctggccccttggccggtccgtgtgcatcctctcccggaccaggccccaggtgggcagcagccgggattccgaggcggtggggaactcactgccccccgcaccccgacagacaaggctggtgtccccggggaaaggacgcaggggccgctcctagggccatggcccctgggagagcccctttttctccctcgacgttcgtgcccaccccctccgaccccactcactgtgcgcagctgagaagcccgacctgagttcactggctctgcagcaggaggctggctgaccggtacttcagcttctaccggcacgagaacaatgaccggacaggaagtgcctcgggatgggcttccggctccccaagtcgccaagccggcctctctaggaacctcggaggtgctttcctctcgatgggtgtccaatgtcgccccagaccagggatggggcagaagcgcttaggaggattgtgctgttggaagctctaagtgagcctcagggaggggcgcatcccaagcagggatgagacactcaggcgaggcgcgcacccaagagcctgaagctacacagcattaatctgtagaaagccctgataatttcccctcaaatgttttattttgaaaatatcagagtacagaagagttgaaagtatggcacattgaatacccgtattttccatgtggactcaacaatgaacattttgctatgtttgcctgatctctcaatacatatttaaaatcatttttttgaaagttgtaaacatcagaacacttcattccaaatacttcaacatgcatcccttaagattaagaatattcttcaaactaccaccaccgtcacaggtaagaaaatcaacaaaaattccctaataccatctaataaccagtcatattcaaatttcccaactgtcctaaaacatgtattttataactttttttcaaatcagtttcacacactttagttggttacagctctttagttttgggttttcgttgccattgttggtttttactttttattttgaaatgatagaatcacaggaagttgcaaagatagcacccttcacccactttcccctcatggttacatcttacataaaatgaaaaaggaaatcaacattggtacagtatgtgtgtataggtatagcacctatagatttgtgtaaccaccactgcaatcaagatacacaagtgttccatcaccacaaagacctttctggtgctaccttttaatagttccatccaaccctctccccatttttcctcccaccatccctaacctttggcaaccattaatccatttttcatctctatagttttatcattttgagaatgttatatgaatattttcatacagaatatggccttttgtgattattttcactcagcattaattcccttgaaatttatttgagttgttatggatatcaataagtcaattttattgcagagtaacaagtattccatggtaatacataaaccacaatttgttttaaccacctaaggaaggatatatgggttgcctacaggtttcgaccattacaaataaagctgctatgaacattcgtatacaggtttttgtgtgaacgcaagttttcatttctctgggataaatgctcagaagtgcaattcctgaagcatgacatatacatgtgtggttttacaagaaactgccaaattatattccagagtggctgtaccattttacattcccagcaatgtatgagatcctgtttctcttcatccttgccagcagttaccaccattaaaaaaaaaaagttaagctattctgataggtgatatctcacgattttactctgcatttccctcatgcctaatgatgttgaacatcttttcatttgcttatttgctatctatacttcagtgaaatgtctgtcttttgcttattttctaattgtatttacttattactgttaaatttggaaagttctttatgtagtttacatacaaatcccttgttggatatgatttgcaaatattttttcccaacctgtaatatcatctttgtaaaaaggtctcttacagggtaaattatcttaattttgatgaagtccaatttaacattttttttccttctaaggagcatgcttttgagtcatctgagccttcttagctcagtcctaggtcctgaagttgttggtttactgcctatggatatccaattactccaacagtatttgctgaaaaggcgatccctcctccattgaattgcttttgcccctgtcaaaaatcaattggccatttatgtgagtctatttctggttcttagtacctaacggctctctagtattatcttttaaaaac

SEQ ID NO: 316590 - DNA, 4001 bp, Homo sapiens
gcctttgaccagtacttttagactctactgctattctaattggccctacttcctcacgacgatcacataaggaattgtttcaagagggtgaaaatataaactaaaattataatctgtttcatcatccttcagtatcattactgatgctgaaattgtattttgtccaaaagacctattatctttacaagcttttccatttatgaaaatatatgcatgataaactctgttagtggccaataaacaagcttaccacctccattactacccactggaaagagatggtttttaactacagattctgcttaaatttggcaatgcaatgaaattgtttcttccaaatcattttcagctattttaagacttctcttctaatatgatacaaattataggcaaatcaaaactgtcaagacaactaaaggcatttagcttttggaacttagattccttccacacactctcaagtgtctcaaagcctaaaggaaacaaaacagagcaaatagtacatacagaaataaatttccaacaaactaatagtgccccaacctaagtttatctaaatacctctttaatctgaaagaagacgctagatttaatatttaaagcaaaccaagaaatcagagcatttgcatcttggatacatttcctagcccctctccagttgctctatcaaaccttttaatatcgcatagatgcccttaaatgatgacgccagataggacttacagaaggaaagcataacttcagagaggaggaacaaatattcagtccttatctttgacttcttcttatttagtgaaggggcttgcctcctgtactagcagtaagttgcggcgttagagtgcaaatgcacagctccaagcccacttccagtgctcaactgatagctcggatccaagcctcaacatgctttctggaaatgcaggcagctcaactgaaaacctaactgaggtttctaccgtggcacaaaactgacctgcacaaatatttgacatctccgagacctctaaaggtttcaaataatatgcattttgtgctaggctgctcctagctagacagagcactgagatgatatagagaagtgttctcagctgctcaaccacactgctcactagacaatgttttccttttccgcctcagaacaagaaaaaccagcaaatactgaatgaaatgctcatattgactaagctttcacagcatcaattgtatagaaactttgtttcacattccattaagttagctcatgacttcccacgctgcactatttctccttcacctagctaaaagagccaacttcattcaggcaaatcaaggcaaagtttacccccccgccccctccacatgtccctgtctcttttcttttccaacttaaactcatccacggctaaattaacagccccagttgtggcacaaaggaagctttgaaggctgcaccggcttggtcctccagttgccaactggaggtaggtttaatgtaacatattcttgctgcttaaagaattttttaagggcttgtctgcacggatgaagagccggacacccccagaattacatcatcagagtgaacactcaccaaaatacattatgtttctcattaatcagacagctggaatcccaccgcggtgtcttcagcatcagctctcacccaaggctggcacgtagagcagagccctttcatgctacattcggtggaaatgtccccggcgtggagagcagtgagcgccgagagcgtgcctcctccgcgggatgagcgccttgcaggctgcctttccagggctaagatccccggcggctggagagtgcgctcgggctgcctgctgcactgcccatccttactgtaatccgactcctccttgcgatgtccttgccgcgcctgtgacatcaggactgagagtactacaagcagacccctccaccccaccccaccccaccctgggttagcagccgctccacgaggtgctccgactgcctgcctggaccaaccatggctctcgggaagctttgacgagcccagagacttgggaaggggcggagtgaggggcgcgggaggctctcttaaagcgagaagagtgtcgggatccacacaggaacacacaggagaaattcaccactgtgcaggagggacgtggttaaggcgagttctgccattaacgtgtaattagacaacacttttaccccgcccctcctgtgaatgccaccattctctccaaaatttaacctcctctaccaagttaaaacggcagtacgaagagggatggtgccgtgcttgcattctctttgctgtgggcttgagggtttgttgttattttttgtgatgtttatatataagaggaataaaaggaacgccagggaccactgctagggtaatagaggttcacacttagaagtgatcacatcccagaaagctagtacttggtgaagtgtaattttttatttcttgagtgttccctgagctattatgttgatagaaagatgtgaagaaaaataactggtgataaaagtcacctctcagttgcccaggaccaaatttgctgcctcccttagtaggcaggtagaaagcacactgaggctgaaatgatctttgacctcctgaaacggagagacgattagcctgaaaggcaaccaacattgtgccatagttagagtccagtcaccaatataatatagccacacacacacacacccacccccctcccccccccaccacacacacacacaacgctctcattaaatttgagatgaacggtcaagaaaggcaaagcttagcaaagcctctggctcctccaatggtataatgaattgcagtccttatcttacatagaaaaggatattagaaagaaatccctgaaagctgtgctgattaatacttaaatgcacagcatggaaaaaataaactcatacagcaagttccgtttcctaaggactcatcactttgggaaccaatttacgtactggaacatttgaacttataaatttctatagacatttatgaaattaagaaccaaatataaacaaagaactgtagtctatggaagaatgcaattgatatatttttaatctgggcttttataaaagtgtgatagcaaagatttctacattttgatattaaaatattctatagcatttccttacgcgattctatatctcttggtggatttaatgtgcatagaaactagggggctgaagctcataataacggctttctgtgcaatcttgcataaaagcttaactgtattctacctctgtgaagagtgcaatgaacaatatcctctctcacgctagattataaagaatttggtgagtgaaagtaggtaagcaaatataaatcagaaacatcacagtgaatcttaagataaatctagggctgttcttttagaaatactcttaatttaaagccaccagaggaaaatttacatagtaaaggatattaacttttttactcccttttaaaaattaaaataaaaacaatgttacgggaaagtattgaagaaaatgcgtaaatgttttttccttttggacaaatggaaattgtccaaaagtacaattagtagttcttccctcaggcaaaagaaccatctgtggtagagcttattcatgaagcctgtaagctgccttgacctcctacatgtgctagggggcactgtagtttaatgttagtgctttgggtccatttgagttcctgtagttggaagatgcaagcattgagagttgagtttcaaataggagatttgaaacattaaaggactaccttaatcattaataacacgcttgcatttgcatgacattttacagttaaaaggcactttcacatgtcatctttattactaacaaattgagatatagaaaggtggatattacagatgtcacaaatgaagaacctgaggctcagagatgttaagcaactttcttaatgatgtgatgagtaagaaacagttgtcttactatttgtttgttgaatttatattacagttctccaacaggtttccttcttcaaataaatgtgc

SEQ ID NO: 316591 - DNA, 4001 bp, Homo sapiens
tggtatgctaaacagtgacagctgctacatagtaatataaaacaagaggcgggcacggtggctcacgcctgtaatcccagcattttgggaggctgaggcaggcagatcacctgaggtcgggagttcgagaccagcctgaccaatacggtgaaaccccgtctttacttaaaatacaaaaattagctgggcgtggtggcacacacctgtaatcccagctacttgggaggctgaggcaggagaatcacttgaacccaggaggcggaggctgcagtgagccgagtttgcaccactgcactccagcctgggcaacaagagtgaaactccgtctcaaaaataaaataaataaaataaacaaggaaaaagaaaataaatttaagaataggaaggaaaaaaagaaattcataaattcaatcttacagaacacctaacaattcgcctgagagtcacagaaatgtactctttcacattgtttctaatacaaaatcttgaaaattgcaaaatacagtgttatgttttactatagtttactctctgacatcgtagactgcttatgcactaattcttcctggataccggaagccagagaaaacctagcggtggaatacttgccatttttcatgctttttgtcagtttcctttttaagtgcatactgaggtttatcttcaaaacattctcatcttttcggcttacagtaagacttttttttttttctaaccaaaatgtgtctgcctttcattaagataacataaaagagcagcctaattctttggtccctgaatatgcacacacatgcatgcacacacacacacgcagacacacacacaacacatggaggctctctgaaactgcttaatcaaattactgctcaaaccactccctggcacttccttgcaaaacaaccaacctaatactgagtttttagttttgcactacaagccgtttgaaacagaataacattctttcctggccaccacttttaaattcggaaggagacaatactctgatctcttaggcctgtgcaagtcagagtgtgctacaatcgctgcaggttagagctctgcctttgtttaaaaactgcattttatatactagttacttcattgtgaaagataaccaccctgacaaacaagattttgctatttttctgcacaaatgtcacttcaccatttagagcttcatgcaaatgtgtctcctacagaaaataaactgcaaacacgatttcttaattatcctcgccaaaaaaaaaatgttttagtggtgtcataatgccagcactaattttagccaaaataagaacaaatgcattctacaaattcaggagattataatttttaaaaagcagtagtatggatatacttaatgtcactgaattacacacttccaaatggttaaatggtaaacgtttatgtattgtatggtaaatgttatgtgttattttggcacaatattgtttcctcacaataatactaacaggttttttaaaaagcaagagcacgctctcatttcgtaatatatatttatggatgtcagtgtgcagaattatgcacagatattttaaatgtcaggaggcctggagacagatttcaggattgcggctacttttacttttcttctactttcccgtgttatctaattgtctctgataaatacgctttatatgcagaattggatgaaacgagaaagcccggagaaacccgggctccagattctctaccccggacgcctgggaggcaaagaggttctagatacgccctcagcgtggcgggggcgggatccaccgccagacccccgccacgggcgcagcctccaggccgggccccgtccgccgcccgggcaggcccgagaatgccgcggacttcggggagccccgcgcccgcaatgccgccacccccacccccgcgccccgccaggcctctcaccgactcccgccgccgagcgacaatcggtccacccgccgccaccgcagccgcccgtcccgcgcctacctcccggcggctccagtcgcgcacgcgcgtcggcgcccggggccctccgcggcctctctaggaaactgggaggcccaacgtctctgcttctctccggctccggtgcggcgggcggcggggcttgtccaacatccctcacctccctcagttggacatttcccttccacgctcggatgcccagccgcgcctgttttcttgcatccctcctgtcgtgtctgcggggctgccctgaaggcctctttccctccagggaagaaagggatccaaagctaggggtgaaaatagggccagcagtatctagcagactggtcctggccaggagaaggggttaagggagccactcattcttcgcctgggtacacttcaaagaggggaaccagatcctacgggaagctaggtgccagaactcctgcctttccaagacgagctcatccccatcatcaccatacccaggaatacttgttcatagccagctcagaggtgcaccatactttagcttcccacggccttcactcgttttctcctgtgggtgaattctaactaggctcgcctggtgagtgaacaatgatgccattgcccaataatatgtggaatctgggaggagtaggttgggggtagggggtggaggggctgcttgaagaggaggtgaagcaacctggagaggttgcccaccccctgtaggagcaaatgtcatctattgccagtgccagagaaccttgagggtgcacagccaaagccataaggccatctgctgccattggagggcatgctacaagctgctgtcctggtagtcctctggtttgtgcttcctagtggcaggctgcaacatgttgacgattgatctttcagatgggcattgatgatgcccatctgtgccctgaggctttgctttactcatctgatccacccctttttaatgccccagtcaccaaagatggaaacagagaatagatcctgaacaccaggaagatggtgacaaggtgatagagaaacagatggcacattcaaacaaggtaagtggggagagttcacaaggggcgatttacacaaagtggacagggttaaggaaatgcaacacggagtggtgcagaatcccatggctagcaaaatttagaagctattctcacccctaggagcaggccatctgagagaaactgtggctttcagttgagggctacatccaagccatagtccagcacaaaggaagctgaggtaataaataacctgaacccagctctcttctgatctcctgccagggcttcccattggcccaactcaactggaagccagagggcaatccaggaaactcagtctcccaagtgtcacagcagggttgaggactgagactgaatatggaggggcaattggaaaatatccaacacatacaaaaaggaaaatagaaactgcttgtcaatgcctaatttgtccattaatttccactcgatataatgttcttgagtgactcagaaccacccatagtggtgagaagagttttcaagttttgtttgagaacaaaattttcccatcgtagaagagtttgagcaggttctctgtgtttgggatgtacttactggatgtttttcaacgtgataggtggttagcatggatagcacccacatttagtgtgatcaaacagatcaaccaaattggcttcaccagcacttgcaaagttcgggaagcagccactgggagtgcagctctgattttaagacctatacagcttcttgaatctcgaagttctgctaatacctgatttctccgagtgccacagcactcgagcctataaccatgaggtttcttcacttttctggtaggaggcatattcttgctagctgtacttcctgagcactgtactctttcagatcggggcagtttgcttagtaaaagccctaggtaagattctcaaattctcatgtgcatatgaatacaaatcacttgggatctggttaaactgtagattcaaattcaggaggtctggggagggaccaacgaatatttttaacaaacttccaggt

SEQ ID NO: 316592 - DNA, 4001 bp, Homo sapiens
ctcacaaccaccaccatcctgggctctctagttagagttaacttaccaagagacaggttgttaggagcacaagcaatactggcttttctcctgggggctcttctcttgaggaaaggcaggaatttgaggcactgagggaggaaaaagagccactcataaattgccagcctacttcctacaccttctagattcagggtaactcaagaacatcccatctctaaccaaatgaccattttaagttcaaatgaaagaatatcgttattatcctagaggagtatctccagtgacaaaaattagtgagttggcagacttcagagagatgtgacaatgtacaaagagggcaggtccttcctaggactaagcatctgggcgtaaaaatttctttatacgacatcaggttggagcccaatggctcccctaagtctactggaaaagccattgatttcaaaagtcaaatgctgcagggctacaatagagggcagtaggaccagtaatggactcagtcaagaggtgtggattctagtctcagctctgccaccaatttgttcaatgacctaacacaggtcactcagtctcatccatttcttatttgttaaatgaaattgaaaagctagataatatttaaagcttcttgtaatatcaacattctacaaagctttgattctatatacagatgggaaaagagcaaaaacctcaaatcaagcccttccagtccatctttgattgaatctgtttattcatttatttgaaaagtactaaatgagctagccgtgaggtgaatgggtcttgttaagaacgggctgaatcaacagcagggaaacttcctgtcagttatcctcctacaattagaattgggggaatttctcgaaaataacaagaggattgcctttgtgtaaggagtatctgctgtaagatgttaaggactcttcataagggaaaggtttcaagaaccctcctaatgcaaagaacactgtattcaaaggcaggaacctggtttcctgtctaatacatcccaatccactagcatctcttaactgacactgaacaaactgtttaattattttcaaacgtctcttttatttcctcatttggtcaaataagccagcaattattttcaagcttgcagtcaacctttaatatttagctcaaatgtgaaacttcacacctcttccttgtgggaaaattttgacttttccaaggcccttcctcgtctacattctcaaagaattttacaagtttctactgtaggactttctagtctgattacattctgtcttccaccagcaaacttacaagtatggcatgggctccaggactaggacttttgaacaagttacctaacctttttttgctccagttttttcaactgttaaatggagacgataccagtaactactttatagggttgtcgtaatgaataagtgggttactacatggcaactacttagaagaatgccagctggtaagcattcaataaatagtgcctgctgttaaagtattgagtctacatgtcttcatacggtacctattttgttgttgttagagaagaataaataatgaagggaaggcactaattcttgcatatacttacttcaacccgcacaactttgggaaacggcaaggcaggaaacagtatttacttctggaaatcagaaaactaaagtgcccagaagttcactgacatgcttaagtatgtataaatcgaacccaggtcctccgactcccagcctagggctctcgaacagcctctcctttcttcatggcaagtttgccctaggcctcgggcctccgctccacaggccctccaggaagaaaaacgccctgcttcccgagggaggagctggaatcgacccgcggcagccgggcacagcagaaaccgctcaccatgcgcttcccgcggcgctccccgcggcgctcccctctcgcaccttgcaacactcaggtccctgggtgctgccctgcggaaaggagtaagtcccggacgcgcccagccggcgtgacgtcagcagtccgcgcctcggctaataaccactaccgtctcctctctaggaaggtgggagcggcttccgctcggtggttccttcccgcacgcagctacgggtttcggtgctgcgccggttaagccggcaccagaaacaacctgcgaccccacctggcgtgcgtcttccagcacagggaaacgggatggaagtcagaagggtcgaccacaaggagctcttactgtgcatcagttcatcctgcaagtccgccacatttagcttcctatgttactgtcctttggggattctcaaggcttttcacaaaactggcttccaccttcctcacacacatcctcatctggaagaaaactgacctcttcacagaaacccctgacaccttactgacccaggatctttgttcaggtggccaaaagaaaaagttctgcaggccaggcgcggtggctcactcctgtaatcccagcactttgggaggccgaggcgggcggatcacctgaggtcaggagttcaagaccagcctgcccaacatggagaaaccctgtctctactaaaaatacaaaaatcagccgggtgtgctggtgggcgcctgtaattccagctactccggaggctgaggcgcgagaatcacttgaacctgggagggggaggttgcagtgagcagagactgagccactgcactccagcttgggtgatagagtgagactctgtctcaaaaacaaaacaaaacaaatcaaacactgctttgggctcaaatccctgattctcagtgtatgaactttgcaactttacctctctgtgcctgcttcctcacttaccaggtataataatggtaccacagggttgttgtgaggattaagtgaggttaatacgtgtgaattactaagaacatctagtattttttaaatcttcagtaaatgttaggactattgtctgtgtctcaaatcccagctccagtacctattgttctgccctgacttcactgacctttcagggcctcaaggtagcacacccatccctttctacaaaacttcagatcttgctggctctaactcaggaaatatttgcacacatgggctcatcttgacaggtaaagtccagagataaaggcatgagtggagagtaccttattcacttccaagcattcctactgatctgcaatctcaggacaatagggctgtgtgcacaccatcatatccctagtgtgcagcatatagaagtgaacacttgctgtataaattaatgagatgcagcagagaaattatccattccaggccaggcatggtggctcacacctgtaatcccagcactttgggaggccatggggggcggatcacgaggtcaggagtttgagaccagcctgaccaacatggcgaaaccccgtctctactaaagatacaaaaattagccgggcgtggtggtgtgcccctgtaatcccagctactcaggagggtgaggcaggagaatcacttgaacctgggaggcggacttgcagtgagccgagatcatgccactgcactccagcctgggtgacagagccagactccatcttaaaaaaaaaaaaaaatatccattccaatcttcagattggctgttttcccaaaatggagtcccttttggacacaaatcaggaatgctggtgccacagactgaggccatcgctatctttggctaaaaagtgaccctttgtaaaattgtcagttgacatgccatgtaacaataatgttaagtttccctctccaggtgtcacattctcagcacttctttggaatcagatagcaagttcttccctccagccctaacatctcacaggccagagaccctaggtctaattattcattccccaaacattaggcttcaaagagtctccaaatcagcagggtgtagtgtgtggaggacattaagtctggagggaggcacctgaggttactagaaaccgtaatctggagtttaatagcagtttgggctgagcttctttcaatgaggtggaaaacggatggtagggat

SEQ ID NO: 316593 - DNA, 4001 bp, Homo sapiens
ggatcatctgagctgtcagcagtttgtcaatgtcaagggtcagcaaacattttctgtaacaggccagaaagcaattttttttaggtttaatgggttaaatggaaaatatagtctctgtctcaactattcaactttgcctttgtagtctgaaaacagaaacagacaatatgtactgaatgagcttgcctgtgttttaataaaacagttttaccaaaaaaagtggcagaccaaatttggtccatatttgctgactcctaggtctataagttgcccagaaagtaatgtacaggtgcttctacaaatgcctattgtggaataatctggctgttagtgattttaagatgctaaaaagatccctctgcagatctggggaaagctgagtattatggtgaaaggtaaaaaggaaacaggctcttaatagccctatcctgctaacctattagagagctggcttcctccctctaccttgtaagcttttccccagatgccacctccttacccctcaataattagctaaaagaatctaagcaagctagatgaagtttttcaagaatttttaacaatccctccaacgagaccacattgaaatgtactcctctctgaagcccttcttggtctgcattttggcaccaaacagtgcactcacccaagctgtggcagtacactttatctcttatgcagccttgggtcacttagcaatgtgatctgggacaagttttctgttctctctgtacctcagttccctcacttaaaaactacacataggcctggcgcggtgtttcacgcctataatcccagaactttgggaggccaaggcgggtggatcacttgaggttgggagttcgcgaccagcctgaccaacactgtgaaaccccgtttctactaaaaatacaaaattagccaggtgtggtggcgcatgcctgtaatcccagctactcgggaggctgaggcaggagaatcgcttgaacccgggaggcagaggttgtggtgagcccagatcaccccgttgcactccagcctgggcaacaagagtgaaatcccgtctcaaaaaaaaaaacaaaccaaaaaccaaaaaacaaaactgtacacgcaatacgctgttgtgaagattaaatcaattagcacaaatgcttcaaatagtgcctggtatacagtaagtgctaaataaatgtagtttaaaatattaccaccaaaatctgcttatgcccttatcgtcctaaacaagactggaagcatctttacatgtggcagtctccgatgtcactcttttgtagcctagccactaaattcggggtaatgtttggcatataatggatagtaatccttcattgggaggcattaaggtttgcatacatgctatcacatacaagctgtcaactgagctttgtgaagaagcaaggaacagacttctagacagtactttagagatttctgtaccctccagaattgtaactcaggtctcaagactcccaacgagtgcactttacgctatttgccgtctcctataaaaacaggctctaaacaagtttcggagctacaggatcagccgggggaagaaactggtatctgatccccaggacctcgtttcctgacatgggtcctaggtctgtcttgatcatctatccatcactcattcactcattcattcattcactccgccattttcctaggcatctcctctgtgccgggcactgtgctgggccttggagtctgcagtgctgaggctgcaggctgggcgggccgagccgctaggagtgccctacgtccgggcagcacgcgtaggcagcaacgtggagaggaccgaggccggggctgacttcccagataaccctccagcccgccgccccagcaatggctcgccggggtcctctcttttcccctccctgggtcccaactcgctcactgtgagatccacggactctccgcggagcggcgcaggcgctcccagaggtggactggggccaggacaccagccttaacttctgaaaccggaagaatggtggcgcggccggtagtgcgtcagcagcgagctcgcgcatccattctctgattctctaggaagcgggaggaacatctctatgggaccctagaagaaggcattccctccaaacccagcctgtaactccagctttgtttcccgccaagcccagcctgtaactccagccttgcttcccgtcaagcccagtcgcgttcctgatatcccattaacaactatcttggcctgaaacacagtggctacctcaaccctcaggaaaactgtagagggagacgttagggatggaaaggatgctgggtaggagccggaatgggccatctcaacaagaaactagtatattctacctgcttaaaatagtctctattaagaaccttgagtgatcccctgttatgttagaataaaggacaaactcccaatctaggcccacacaaactgacctcaatatcaacatctcttatttggctatcatatacattctgctctaaagttactgaattcccattggccccctgaaatcccttgcctcttcctgactctagatctttttcccaggattttccctttggaatactctcccttccttctacctgctctccctaacctcagctatccaatttatcctggttcttcaaatcccaatgccaattctcacttgaccacctagactgttgcccttatgggtctttacactcacatatcactattagttattctagctctagctagccttctattcagtgcccccctaaatgcatacacttgtatttctttcgtaggtattgttaggaagatacacacaagtagcatcccacccaaggacaactgtgaaagacccaatcagttcatttttatacaactctaatcagctatatggagctattatttatcattatatctcaatgtttagcacaatgattggtagagaaggcattcaataaatacttgttgaattcgttaatcagaaacaggtgaaatttagattattggcatttttgataaactgaaaaatgaggataccatagattaaatccagaaagcaagctctctgcacatctgaaaggatgtaccacgtagctggcatattcccgtttctttggctcactctatccaattgttatctcccttggtagaatgtaagctgtatgaaggcaggggccttctctgtttcattcatactatatccctagcacctagagcatggctgacatactaggcattcaatcagtatttgatgaatgactaggtcaccatcaacttccaacaagttacaggaaatagttactccacatagatgtatactgcttgtttgagagctaaaactgctggaaaattatctttcttcccccagattacctaaagtgtacattccagagatgaatgttgcttccctgtgagaaatagaaactccttctaaattatatttacctgacccccaccaaaagagattatatgaaggtattttccattctgggcggcggggtcggggacgggttgagaggagagggaaggggaaaccggtgcagagggggaggcaccagggaaggtggtaggggcctggtgggggcatccggtggagctggggtccccaggctcagtccggaggaagcgaggctgcgctcgctgggcagtcggaggggacgggacgcaccagagggtgggtggactcgccctgtaggtgactgcgccgtccaggcccgtcctgcctggccttaggtgtcctggatgaggctgccccgtgcgcccccgatgattttataatcaatggataaagtggggaaaatgtggaataacttcaagtacaggtgtcagaatctcttcggtcatgaaggaggaagctgtagtgaaaatgttaacatgaactccgacaaatgtctgtctgtcaaagagaaaaacatcagcataggagactcaactcctcagcaccaaaaccgtcccttaagagaagatgttgccttacaactgggattaagcccttcaaataattcttcaaagagaaatcaaaatt

SEQ ID NO: 316594 - DNA, 4001 bp, Homo sapiens
aaaattatatatgaaattcaaatttccttttttttttttagagtctcattctgttacccaagctggagtgcagtcatgcgatctcggctcactgaaacctctgcctccaaggttcaagcaattcttgcgcctcagcctcagagtagctgggattacaggtgtacggcaccacacccagcttattttattttattttatttttaaagtagagatggggtgttgccatgttgaccaggctggtcttgaactcctgggctcaagagatcctcctgccttggcctcccaaagtgctgggattacaggcgtgagccactgcactcagccaaaattcaaatttcaatgtctataaagaaagttttattggaacacggcaatgctcattcgtttacctatggtctttggctgctttcacacaacagcagaccactagtcgtaacaaagaccgtgtggcctacaaagcctgaaacatttaccacctggcccttaaaagaaaacgtttgcaagaccaggtgcagtggctcacgcctataatcctagcactttgggagaccgaggcgggaggatcccttgagcccaggagttggagaccagcctgggcaacatagggagaccctgtttctaaaaaaaccaaacagaaaaaaatttgcccagccctgttctagactgttcctgttgttacatccaaagtcatttggggccgggtgtggtagctcccacctgtaatcccaacactttgggaggccgaggcaggtggatcatctggggtcaggagttcaagaccggcctggccaacatgatgaaaccccgcctctactaaaaatacaaaaaaatagccgggcgtggtggcgtgtccctgtaattccagccgcttggtaggctgaggcaggagaatcgctggaacctgggagaaagaggttgcagtgagcagagatcgcccactgcactccagcctgggctacagagcaagactctgtctccaaaaaaaaagtcttttgggccgggtggggtggctaacacctgtaatcccaacattgtgggaggccaaggtgggtggattgcttgaggccaggagttcgagaccagcctggcaaatatggcgaaatcccctctctactaaaaatacaacagccggggtggtgaggcgccgcctgtaatcccagctactccggaagctgaggcacgagaatcacttgagcctgggaaagcggaggctgcagtgagcctagatcccgccactgcactccggaccgactcaaaaaatataaaaatataatatactccgggcgcggtggctcacgcctgtaatcccagcactttgggaggccgaggtgggcggatcacgaggtctggagttcaaaaccagcctggccaacatggtgaaatccccgtctctactaaaaatacaaaaattagccaggcgtggtggagggcgcctgtaatcccagctgctcggcaggctgaggcagagaactgcttgaacccgggagacggagattgcagtgaacggagatcgcgccactgcactccagcctgggcgacagagcgagactccgtctcaaaataaatatgatataatataataatacaaaatgctgttcttcagttgcactccacacatctcaaatgctcagcagccatttatggccaatgactgccggagtgcacaagtgcaggatgcccggtgaagagtcgtggagtgagcaccgtggagactgtacgggacacctagggaggaacctggccccccaggggagtaagagccgctgtaggggtagtcagcgcctcacacagctcgcaccccacgcgcatccctggtggatacggccgacgcctgcgcggcgcctgcggctggagcaccgaatgggggaggcgatctcgcggccccgactcaccttccgcagtccagcccagtagctgctcccgcggggcccacatctgcgcgcgcacgcacgcacgaagcaaacgaggtagcagcaccgtgtgtgaaacggattagaatgcgcaccgcgggccactggcggcgccagaagaaagaagcaggactgggtgaagtgcgtcaccgcgcggcgcgcagcctgccgggaagcgtagttctcggggcgaaatgcggcttgtgcagggcgagagaaaatgctgaggcgcactttgaccttctaggtccccctcggccgcaatatttggggttgtgcttaccacaggtacccataagcaaaatatagtgttgttttccatggttgtaaacattatataaatacacttacaatgcctgctactagctcttttgcgcagttctataatgacacgtgttgacctgttcattgtgtgttcactgctgtgtggtatctaatgtagaaatacaccaggactccaattggacagactcatgcgcatccatggagagcttctcaaggacagtggttcgcaaacttgttgttgttaaaatccttttacactcttaaaaattactgaggaccccaaagagcttttgaaaccgcctttgcaaaattatacctaaggaaattatgatgttataggagttattaagaaattattttaagcagatagagaaggaaaggggtccttgggaagtttttgtttcttttaaagcagctccagaaaggtttcttgtctagcaggaaagcctgggctcctagagcaggatggcaagctttgatatggaaatacaggccattagaaactggacgcacccaaacatggcgattcccgccgtccttttctttgccctgacatgtgcctggcaacatggccaccccccacatattcccacgtgtgtagaacttcatggagccctacatttgcatattaaaaagctagggtgggagggccaggtttttggctgccacataaatgacacatctgatcaaactaatcccctgagccctatggaaaccagacaccgcctcctccagcatcctcagataagcagccacttttccgcacacggcgctttctctttgttggaatccccgctccctctgtctctgtatgggggagctgttttcgtcttccttccttctttcttgcctattaaacttttcgctccttaaaaccactccacgtgtgtctgtgttattaagcctatcagagaccaaggaccctggtgttcctccagtcatcagagccttatcaatgacagtaaaagatatcagatctaacccacctcatcttcctttcaacctctaaactgtctttgtccacttctgggcataggccaaagtagccttgggaaggaattcagtttatagcttaaataatagcccttcccaagggctaaactgttcttgtaaaatgaatgaaaggccaccagccaccaaattaggatgagaagggctggaattctaaatattaccagccattattccagaggccctaagacgcacaacttccccaattactcttttgaagcacaacttccccaattactctttttttttttttagggaaaagaacacggagtctcactctgtctaccatgctggagtgcagtggtgccatctcggctcactgcaacctccctctcctgggttcaagcgattctcctgcctcaacctcctgagtagccgggattacaagcacgcaccaccataccccgctaatatttttggattctttttttttttggttggttttttttttttttttttttttttttttgagacggagtctcgctctgtcgcccaggccggactgcggactgcagtggcgcaatctcggctcactgcaagctccgcttcccgggttcacgccattctcctgcctcagcctccccagtagctgggactacaggcgcccgccaccgcgcccggctaattttttgtatttttagtagagacggggtttcaccttgttagccaggatggtctcgatctcctgacctcatgatccacccgcctcggcctcccaaagtgctgggattacaggcgtgagccaccgcgcccggccaaggttggtttttttttttttttttttttgagcccagg

SEQ ID NO: 316595 - DNA, 4001 bp, Homo sapiens
tgctaggatggtagagcagaaagacagagcctgagagcataataggggagctgccacactagccctgtattgactcttgatacttttgtatgagagagaagcctttacctcgtttaatccactgtcatttggggtcctctttggggaatctaatcctaagtgatttctgtacttcaggcaaagcaccaggagagcacagcatacccccacagcacacttcctgacttgtaggaatgaatttttgctgaagttctcgaacagaagtggatggtccaatatccaccaaaaggacacacacattgtttttaagtccttgggatggagctttctcattacaagatacatccattacatgataaactcagctttctcattccatgatctaggacactggagaaaaatccagtaaaaccatcatctaccaccaagaaaactggagggaaaagtcctcccaatgctacatgaatttgtagccaagaaaggatatagactctcacagaggttagactgacgtcttcgcattgagctaaaggcactggcttcagctccaaactcatcattcctccaaaaatacatctccctcatcaatctacattttccacatgtttccagttctggcttcactgtaccttaactgagtggtctgcagggtaaactcctcccttggaagtgtctatttaacctcagaaatggcttttctttgtgtactgtgaacgcagactagcactcctcaaattttaatctgccctttaattttccagatcttgtaaaaatgtagattctgatttaggagatctggggagggggcctgacattttgcctaacaagagccctctgtaatgcaaaagctgctcatctccaggccacactttcagttctcatgaatgcagattcccactttctaggataattcattccttcttttccaacctacctgactctcccaaattcacctactctcgttcgtcaactcccctcgcatactgtttttacatactttattgaaggatgtaaaactaagcatgagactggccaagtcaggctactggggctgtactgaccttccatatctgttctgagtatggaaagctgaaagaaagctctgctcacctggaaccacactgtctggagcatggctgatgacccctggcttcatgcactgccctctaggtttgaaaaagtaagaacctgcggagctaagagagaaccacaatgagactgatctgtctcgtctcctacacttgccgcctcttcccctctgtctcctgccactagcattgcagatattcttggcacactagctgctgtcattcaccctctccactgattcatgggatgttgcaaatgctccctctgcatattctcctatagatctgcttggtgacactggaaactctagaaagaatatctgtaaagtaagagtcaagaactgcagtggattcgtggctgttttttaaaaaaaattcttggccccactatgaatgcattactaaacagtttgtattgaatgcttctagtgttcatggcaaaaacccaaaacaagtctctggagagaaagtaggatataacggggacccctaaacaaaccacaggctgcaggacaaaatataagtggtgacccagccccgggtgacaagggtaagacgcttaatgtcccagcgggtgatgctgaccgaagacctaaccgggatctgaacgctccaccctgggaagcaggagaccctatagtcacggctcccatcctccccatgaataccgcgacccgaggacatcaggccagctcctcggagcaggaaggtcgagggcgtctctgaagactggggactgggcccaggctctggcggcggcgcgggcccctcggcgacctctgcaagggcccaaagcctgacctccagaacaggtagccgagtcagggaagcccgggaaactcaacccgagcgctcgcaaggtggccaagacggaagcattagctggccggccgtcggtccctacagcctctctaggaagccgggaggctggcccttctctatggttcccacgaaacgaaactccaacccttcgcttcccttctccacaaccgctctgcgcctggtttgtttgttttttaattttaattttttcgtgtgttttttgaaacgggggtctcgctatgttgcgcaggctgttctcgaactcctgagctcaagctgtccgcccgcctcggcctcccaaagtgctgggaatacaggcgtgagccaccgcgcccggccgctcctgtttttctttattattttctcttatgtcttagtaccccaactacatgataaattcctccatatttaacaatttgtaacttaattaactgaattcctaattccttacctaattacttaattcctaacttaaccttctaatgaatttatagcccctgtctcccactgaatgactgtgacctaagaccatggggtatggtgtctcattgtctgcgttcctggctccactctatatggacttgctcaagttatacttaaatcgttgcctcaatttatcagttgagaatggtaaaagtttgtaatttataaattcagtgaattaactgagtcaattcatgcaacagttttgtaaaccaaaaataaaattctaagtcccccaaccaactgaatggaccacttctctcagccaaaacattccaaagaaaacctggcaatctagttcaggccatgatgggaagcaggggatcggacttgcctcgttatgcccttggaattcaggcactacggaccagcattaacattaaaacagagatcttgagactgactaaaactttttttttttttttccgagatggagtcttactctgtagcccaggctggagtacagtttcccgatctcggctcactgcaacctccgcctcccgggttcaagcaattctcctgcctcagcctcctgagtagctgggattacaggaacgtgccaacacgcccggctaatttttgtattcttagtagagacgggatttcaccatgttgaccaggctggtcttgaactagacctcgtgatcgcccgcctcggcctcccaaagtgctgggattacaggcgtgagccaccacgcccagcccaaaacaaactctttatagcaataagacatcaaattctaacctgactctagtatagtctcatgtgacagataacaggccctgaaataaactgaagtattttaccctaaaatgtatttctttgacatattttgaaatgaccctgtaaagctgtcttttgtgaagaaaatctacatcctgtaaagaatccccttcactttcaaagtgttttccttgatccagtagagaattaactaagagtttggcaccttttgaagtctggtaagaaacatttacaatcgtttctctctgaagcctgctacctggaggtttcatctgcataataagaacattggtctccaaaaccccttatcttaactcagacattcccttcaattgattccaggtctttagctaataactttttttttttttttttttttttgagacagagtcttgctctgtcgcccaggctgcagtgcagtggcgcgatctcggctcactgcaagctctgcctcccgggctcatgccattctcctgcctcagcctcctgagtagctggaactacaggcgcccgccaccatgcccagctaattttttgtatttttagtagagacggggtttcaccgtgttagccaggatggtctcgatctcctgacctcgtgatccgcccgcctcggcctcccaaagtgctgggattacaggcgtgagccaccgtgcccagtccataactctttcaactaattgccagttagaaatcttcaaaagaaaagaaaggaaaggaaaggaaaggaaaggaaaggaaaggaaaaaggaaaggaaaggaaaggaaatctttgaatccacctacgccctggaaggtgcccccacactccccacttcgagttgtccctcctttccggatggagctaatgtacatcctacatt

SEQ ID NO: 316596 - DNA, 4001 bp, Homo sapiens
aataaagtggcctagagcaggtgagacactgctaggatggtagagcagaaagacagagcctgagagcataataggggagctgccacactagccctgtattgactcttgatacttttgtatgagagagaagcctttacctcgtttaatccactgtcatttggggtcctctttggggaatctaatcctaagtgatttctgtacttcaggcaaagcaccaggagagcacagcatacccccacagcacacttcctgacttgtaggaatgaatttttgctgaagttctcgaacagaagtggatggtccaatatccaccaaaaggacacacacattgtttttaagtccttgggatggagctttctcattacaagatacatccattacatgataaactcagctttctcattccatgatctaggacactggagaaaaatccagtaaaaccatcatctaccaccaagaaaactggagggaaaagtcctcccaatgctacatgaatttgtagccaagaaaggatatagactctcacagaggttagactgacgtcttcgcattgagctaaaggcactggcttcagctccaaactcatcattcctccaaaaatacatctccctcatcaatctacattttccacatgtttccagttctggcttcactgtaccttaactgagtggtctgcagggtaaactcctcccttggaagtgtctatttaacctcagaaatggcttttctttgtgtactgtgaacgcagactagcactcctcaaattttaatctgccctttaattttccagatcttgtaaaaatgtagattctgatttaggagatctggggagggggcctgacattttgcctaacaagagccctctgtaatgcaaaagctgctcatctccaggccacactttcagttctcatgaatgcagattcccactttctaggataattcattccttcttttccaacctacctgactctcccaaattcacctactctcgttcgtcaactcccctcgcatactgtttttacatactttattgaaggatgtaaaactaagcatgagactggccaagtcaggctactggggctgtactgaccttccatatctgttctgagtatggaaagctgaaagaaagctctgctcacctggaaccacactgtctggagcatggctgatgacccctggcttcatgcactgccctctaggtttgaaaaagtaagaacctgcggagctaagagagaaccacaatgagactgatctgtctcgtctcctacacttgccgcctcttcccctctgtctcctgccactagcattgcagatattcttggcacactagctgctgtcattcaccctctccactgattcatgggatgttgcaaatgctccctctgcatattctcctatagatctgcttggtgacactggaaactctagaaagaatatctgtaaagtaagagtcaagaactgcagtggattcgtggctgttttttaaaaaaaattcttggccccactatgaatgcattactaaacagtttgtattgaatgcttctagtgttcatggcaaaaacccaaaacaagtctctggagagaaagtaggatataacggggacccctaaacaaaccacaggctgcaggacaaaatataagtggtgacccagccccgggtgacaagggtaagacgcttaatgtcccagcgggtgatgctgaccgaagacctaaccgggatctgaacgctccaccctgggaagcaggagaccctatagtcacggctcccatcctccccatgaataccgcgacccgaggacatcaggccagctcctcggagcaggaaggtcgagggcgtctctgaagactggggactgggcccaggctctggcggcggcgcgggcccctcggcgacctctgcaagggcccaaagcctgacctccagaacaggtagccgagtcagggaagcccgggaaactcaacccgagcgctcgcaaggtggccaagacggaagcattagctggccggccgtcggtccctacagcctctctaggaagccgggaggctggcccttctctatggttcccacgaaacgaaactccaacccttcgcttcccttctccacaaccgctctgcgcctggtttgtttgttttttaattttaattttttcgtgtgttttttgaaacgggggtctcgctatgttgcgcaggctgttctcgaactcctgagctcaagctgtccgcccgcctcggcctcccaaagtgctgggaatacaggcgtgagccaccgcgcccggccgctcctgtttttctttattattttctcttatgtcttagtaccccaactacatgataaattcctccatatttaacaatttgtaacttaattaactgaattcctaattccttacctaattacttaattcctaacttaaccttctaatgaatttatagcccctgtctcccactgaatgactgtgacctaagaccatggggtatggtgtctcattgtctgcgttcctggctccactctatatggacttgctcaagttatacttaaatcgttgcctcaatttatcagttgagaatggtaaaagtttgtaatttataaattcagtgaattaactgagtcaattcatgcaacagttttgtaaaccaaaaataaaattctaagtcccccaaccaactgaatggaccacttctctcagccaaaacattccaaagaaaacctggcaatctagttcaggccatgatgggaagcaggggatcggacttgcctcgttatgcccttggaattcaggcactacggaccagcattaacattaaaacagagatcttgagactgactaaaactttttttttttttttccgagatggagtcttactctgtagcccaggctggagtacagtttcccgatctcggctcactgcaacctccgcctcccgggttcaagcaattctcctgcctcagcctcctgagtagctgggattacaggaacgtgccaacacgcccggctaatttttgtattcttagtagagacgggatttcaccatgttgaccaggctggtcttgaactagacctcgtgatcgcccgcctcggcctcccaaagtgctgggattacaggcgtgagccaccacgcccagcccaaaacaaactctttatagcaataagacatcaaattctaacctgactctagtatagtctcatgtgacagataacaggccctgaaataaactgaagtattttaccctaaaatgtatttctttgacatattttgaaatgaccctgtaaagctgtcttttgtgaagaaaatctacatcctgtaaagaatccccttcactttcaaagtgttttccttgatccagtagagaattaactaagagtttggcaccttttgaagtctggtaagaaacatttacaatcgtttctctctgaagcctgctacctggaggtttcatctgcataataagaacattggtctccaaaaccccttatcttaactcagacattcccttcaattgattccaggtctttagctaataactttttttttttttttttttttttgagacagagtcttgctctgtcgcccaggctgcagtgcagtggcgcgatctcggctcactgcaagctctgcctcccgggctcatgccattctcctgcctcagcctcctgagtagctggaactacaggcgcccgccaccatgcccagctaattttttgtatttttagtagagacggggtttcaccgtgttagccaggatggtctcgatctcctgacctcgtgatccgcccgcctcggcctcccaaagtgctgggattacaggcgtgagccaccgtgcccagtccataactctttcaactaattgccagttagaaatcttcaaaagaaaagaaaggaaaggaaaggaaaggaaaggaaaggaaaggaaaaaggaaaggaaaggaaaggaaatctttgaatccacctacgccctggaaggtgcccccacactccccacttcgagttgtccctccttt

SEQ ID NO: 316597 - DNA, 4001 bp, Homo sapiens
caggtaataaaagataagcacatattatgaacaactttatgtgaataatttctacaacttagataaaatggataagttccttgaaaggcacaagttaccaaaactcatttaagctgggcgtagtgatgcatgcctgtagtcccaggtacctgggaggctgagcggggaggattgcttgagcccaatttgaggtcagcctgggcaacatagagaaaaccgttgtcaaaaaataaaaataaataaataaaaagagataaccagagtagcccctgtatctaccaaaggactcaaaactgtacttaaaaaccttatcagaaagaaaaccccatgcctagatagcttcactgttgaattctaccaaacatttaaggaagaaatgcagtcaactctacataaattcttccaaaatattaaagaggagggaatatttctcattctatggaacaaagacatcacaagaaaagaaaactgcaaatcaatacctcataaacatagatacagaaattctaaataaaattttaacaaattaaattcaatatatagtactaataaaataataatacaccatgacgaagtcggttttatcccaccgcagagttggtttaatatttgaaagaaaaatcatgtaattcaccacattaacaaagagaggctgggcacggtggctcacgcctgtaatcccagcactttgggaagccaaggtgggggaatcacgaggtcaagggatcgagaccatcctggccaacatggtgaaacctggtctctactaaaaatacaaaaattagctgggtgtggtggcgcgtgcttgtagtcccagctactcgggaggctgaggcaggagaatcgcttgaaccccagaggtggagggtgcagtgaaccaggatcgcgccactgcactccagcctgtcgatagagcaagactccatctcaaaaaaaaaaaaaaaaaaaaaccatatggtcatctaaatagacacagaaaaagcaattgtcaaaatccaacatccattcctataaaaactctcaccaaagtagtactagaagagaatgcctgataaaggacatttacaaaacaaaacaaaacaaaaaagcaagaaacctacagtgaacatcagtcttcagtgtgaaagattgaatgctttcactttaaaagcataaataagacaaagatatctgctctcaccacttctgttcaatattgaaataatgcttctagccagtgcagtaaggcaagacaaaataaaataaaaggcatccagactggaaagaaaggagtaaaactatctttactcatagatgacctatgtagaaaatacaatggaatctacaaaacagttactagaattgctatactgaagaagtaagtacttctccaagcctgcggactagggtgaaaggggtctttattggatgtaataatgcagatttccacatttcataatttttatttttaagctggcttcaaatgccaaatcccaaccaatccccccacactcactagttttctagtcttaatttgggcattctcacctctccatccctctcatagtgacagatgcacaatggaagccactggcctacacaactcaagatctgaatgcagaggtgacacctgctctctcttgacatctaaagggtgggagggagggagaggatgctcactcacctggcgccaagcggtctggaacatggctggcgtcccagcttcacacactgcctcagggttcggagaagtgaaactgaagagaaaataaagaagcaccggtgagattgatgctgcctcgcaccccgcaaatgccctctgtgctacttgggcccctctcctttccgccaactcctcaccccaaaaagcaaaggggttgcaaaaccaggcagaacaagccccaggaaaaccaatcagttacccggaccgcgaacctcttcagctcggaccgcgaatcccgcgcggcgcaggcgcagataaagcgtggaaattccacctgccgccgacaccggggaaagcttgagaccctccgccggaagtgcgttttccatgcccctcctctctaggaacctgggaagttgccagtctctgtggtttcctacccccgccgtcagcgccagtgtccctactgcctgagacaacacgggcccgagcgggcggccccaggcaggggtcctgcagcgcccacacctggtagctccttcggggcatgacgtctggccagctcaggccacagaatggttactatcctgggtattattcgtggttatctggcatttgccactctgggtgtccttccagataatgaagggaccatcgcgcccttcacatgcgccaaaactgtctggattgtgtgggtgcgctgcagtgggaaaagtgggtgtggggaaaggcgaacccattactcagaaggccgaatgtgtatggactacgtaggtccagaaacccagctgcaccacttgctagttgtgtgacctgcagcaagtttctttgccccggtttccttgtctattaaatgggtattatgatggtggtaccaacctcttgaggctgttcagggttaattcattaaattagttaattgataggtaaattatttacagttgtgcctggcacatagtatgtactcgtgagtttgtattgttttgttttccaattgtgttttttgaagacacaaaataggtgctgctgggactccaatatgtggcgtgctttagggaaatagatttttttaaggacaattttcgaagtttagcgaaagagctattaacatttggcttagagccctttcctgccctgtactgggatgtgtgtcccggcccagcctggaaacagattttagttattccttccacaggaattagatttatccaccactttcaaaacaagtcctgccatggagagtatattatgtatctactgctggataataaactactctaatgctttgtggctaaaaacaataaacattgttatcttttgacagtttctgtggacccagaattcaagagcagcttggctgggtggtactggctgagggtctctgctgaggttgcagtcaggtgtcatgtggggctgaagtcatctgaagcttgactgagtttggaggatccacctccaaggtggtttactcacatggctgtcaagtgggtgctggttgttggcaggaagcgtcagttccttcccatgtgagggttttcacaacatggcatgtagctttctcccaaagtgagcaatccaagaggccaaggccaaagcttttatgacctagttttggaaatcatgcatcatgatttcctcaatacattctcctcagattagtcatgattcagtgtgggaagagatacacaaggtttgaatgccaggatatgagaaccattgggagccattgtggggccacctagcacagagattttaactgtcacagaaacagttcattttataaaatctatagtattttcactttaaagtttatgcacagcacttgttttaaataattagatttccagaaacaatggcatgacaaggacatacatgtgcatactgtcccttcgctaaacctattaaaatgaacatttaccatgagtgggtgcacataaacgtacatacatatacaccacaaattctaaacagtattagccagtggaaaaaaacatgataaattggacttaatcaaagttaaatcttctgcttttcagaagatacttttagagaatgaaaagacaagccacagactgggagaaaataccaaaaatatttgataaaagacttgtttccaaaatatataaaggactctcaaaactcactcataagaaaataaaccaatttttaaaaataggcaaaagatttgaacagatacttcaccaaagaagatatatggaaagcaattaaatatttgaaaagatgctcaacattgttagtcattagagaaatgcaaattaaaaccgcagtgaaacagtattacacacttactagaaaagctaaaagtagagacaacatcaagtgtaggcaaagatgtatc

SEQ ID NO: 316598 - DNA, 4001 bp, Homo sapiens
tagccagtgaccagaaaaaaagagagaatacacaaatcattaatattagtaataaaagaagtgacatcactgcaggtaataaaagataagcacatattatgaacaactttatgtgaataatttctacaacttagataaaatggataagttccttgaaaggcacaagttaccaaaactcatttaagctgggcgtagtgatgcatgcctgtagtcccaggtacctgggaggctgagcggggaggattgcttgagcccaatttgaggtcagcctgggcaacatagagaaaaccgttgtcaaaaaataaaaataaataaataaaaagagataaccagagtagcccctgtatctaccaaaggactcaaaactgtacttaaaaaccttatcagaaagaaaaccccatgcctagatagcttcactgttgaattctaccaaacatttaaggaagaaatgcagtcaactctacataaattcttccaaaatattaaagaggagggaatatttctcattctatggaacaaagacatcacaagaaaagaaaactgcaaatcaatacctcataaacatagatacagaaattctaaataaaattttaacaaattaaattcaatatatagtactaataaaataataatacaccatgacgaagtcggttttatcccaccgcagagttggtttaatatttgaaagaaaaatcatgtaattcaccacattaacaaagagaggctgggcacggtggctcacgcctgtaatcccagcactttgggaagccaaggtgggggaatcacgaggtcaagggatcgagaccatcctggccaacatggtgaaacctggtctctactaaaaatacaaaaattagctgggtgtggtggcgcgtgcttgtagtcccagctactcgggaggctgaggcaggagaatcgcttgaaccccagaggtggagggtgcagtgaaccaggatcgcgccactgcactccagcctgtcgatagagcaagactccatctcaaaaaaaaaaaaaaaaaaaaaccatatggtcatctaaatagacacagaaaaagcaattgtcaaaatccaacatccattcctataaaaactctcaccaaagtagtactagaagagaatgcctgataaaggacatttacaaaacaaaacaaaacaaaaaagcaagaaacctacagtgaacatcagtcttcagtgtgaaagattgaatgctttcactttaaaagcataaataagacaaagatatctgctctcaccacttctgttcaatattgaaataatgcttctagccagtgcagtaaggcaagacaaaataaaataaaaggcatccagactggaaagaaaggagtaaaactatctttactcatagatgacctatgtagaaaatacaatggaatctacaaaacagttactagaattgctatactgaagaagtaagtacttctccaagcctgcggactagggtgaaaggggtctttattggatgtaataatgcagatttccacatttcataatttttatttttaagctggcttcaaatgccaaatcccaaccaatccccccacactcactagttttctagtcttaatttgggcattctcacctctccatccctctcatagtgacagatgcacaatggaagccactggcctacacaactcaagatctgaatgcagaggtgacacctgctctctcttgacatctaaagggtgggagggagggagaggatgctcactcacctggcgccaagcggtctggaacatggctggcgtcccagcttcacacactgcctcagggttcggagaagtgaaactgaagagaaaataaagaagcaccggtgagattgatgctgcctcgcaccccgcaaatgccctctgtgctacttgggcccctctcctttccgccaactcctcaccccaaaaagcaaaggggttgcaaaaccaggcagaacaagccccaggaaaaccaatcagttacccggaccgcgaacctcttcagctcggaccgcgaatcccgcgcggcgcaggcgcagataaagcgtggaaattccacctgccgccgacaccggggaaagcttgagaccctccgccggaagtgcgttttccatgcccctcctctctaggaacctgggaagttgccagtctctgtggtttcctacccccgccgtcagcgccagtgtccctactgcctgagacaacacgggcccgagcgggcggccccaggcaggggtcctgcagcgcccacacctggtagctccttcggggcatgacgtctggccagctcaggccacagaatggttactatcctgggtattattcgtggttatctggcatttgccactctgggtgtccttccagataatgaagggaccatcgcgcccttcacatgcgccaaaactgtctggattgtgtgggtgcgctgcagtgggaaaagtgggtgtggggaaaggcgaacccattactcagaaggccgaatgtgtatggactacgtaggtccagaaacccagctgcaccacttgctagttgtgtgacctgcagcaagtttctttgccccggtttccttgtctattaaatgggtattatgatggtggtaccaacctcttgaggctgttcagggttaattcattaaattagttaattgataggtaaattatttacagttgtgcctggcacatagtatgtactcgtgagtttgtattgttttgttttccaattgtgttttttgaagacacaaaataggtgctgctgggactccaatatgtggcgtgctttagggaaatagatttttttaaggacaattttcgaagtttagcgaaagagctattaacatttggcttagagccctttcctgccctgtactgggatgtgtgtcccggcccagcctggaaacagattttagttattccttccacaggaattagatttatccaccactttcaaaacaagtcctgccatggagagtatattatgtatctactgctggataataaactactctaatgctttgtggctaaaaacaataaacattgttatcttttgacagtttctgtggacccagaattcaagagcagcttggctgggtggtactggctgagggtctctgctgaggttgcagtcaggtgtcatgtggggctgaagtcatctgaagcttgactgagtttggaggatccacctccaaggtggtttactcacatggctgtcaagtgggtgctggttgttggcaggaagcgtcagttccttcccatgtgagggttttcacaacatggcatgtagctttctcccaaagtgagcaatccaagaggccaaggccaaagcttttatgacctagttttggaaatcatgcatcatgatttcctcaatacattctcctcagattagtcatgattcagtgtgggaagagatacacaaggtttgaatgccaggatatgagaaccattgggagccattgtggggccacctagcacagagattttaactgtcacagaaacagttcattttataaaatctatagtattttcactttaaagtttatgcacagcacttgttttaaataattagatttccagaaacaatggcatgacaaggacatacatgtgcatactgtcccttcgctaaacctattaaaatgaacatttaccatgagtgggtgcacataaacgtacatacatatacaccacaaattctaaacagtattagccagtggaaaaaaacatgataaattggacttaatcaaagttaaatcttctgcttttcagaagatacttttagagaatgaaaagacaagccacagactgggagaaaataccaaaaatatttgataaaagacttgtttccaaaatatataaaggactctcaaaactcactcataagaaaataaaccaatttttaaaaataggcaaaagatttgaacagatacttcaccaaagaagatatatggaaagcaattaaatatttgaaaagatgctcaacattgttagtcattagagaaatgcaaattaaaaccgca

SEQ ID NO: 316599 - DNA, 4001 bp, Homo sapiens
cgtctcaaaaacaaaaaaaataaaaggacaacacttaatatcttcttaattgaccaacacctttctaccatcaatttgccactaagggctaggaaaatctttttaatatgtaaatccaaccatgtcatccccctgcttaaaattcttcagtgccttcccaatgaaccagtacagaaaccactgtcctcaccatgacctataatacaggtatctatttcttccatctcatattgaaccactttctctgaccccttccagtttctagagtacatccagctttctctgcaacttcagagtccttgcatctagcatttagaaaatgtatattaaagcaacaatactagtctctctgggatacatacaatacaatttgtgggcaatctctccaataaagaatttctgatttcaagctagtgcggtggctcatgcctataatcccagcactttgggaagccgaagcgggtggatcacctgagctcaggagttcaagaccagcctggccaacgtggtgtaaaccccgtctctactaaaaatacaaaaattagccacacgtggcggcgcacatctgtaatcccagctacttaggaggctgaggtatgggaatcacttgaacccaggaggcagaggctgcagtgagccgatatcatagtgccactacactccagcttgggcgacagagtgagactccgtctcacaaaaaatgagtctgatttcagtaggtgactttcatttctagaacacgatctggatttccacattcagaaagaatttcttggtataggtcccctttcttccatttaaatctatacatccaaactcatcactctctatacacaaaactttcatttccccagcacatatttacatctgccatagccctggagatagatacaaaggggaaaacacagcttggccaagttaggccttcctcatcctttcctgattatctgatagctaatgtgagtaaaaaaacataaacaaacaaacaaaaaaactgaaagaagctcagctcacctgaggccaagttgtttggagcatggcggatgtcccctggcttcatgcactgtcttctgggtttggacaagcaagatcctcaagagctaagagaaaaagagccatgagtgctaaggaccctgtcgtccaccacctacagcaacctatggccctcccagtttccacatttccagcactggatgcacggagattctactaggactccctctaattgttctcacgctgatagccccaaacttcttatgaattgttctgcctagtcttcaggacaatcttccacctgcctgctcagtccgaagagctttttttgagcccattcgtacgggtaaactgagggacccaagagccctgtccctattgtgttgggtctctacaaacgtaaagagtctttacagaatgcttacagggacgatgacgtggacccaaaagaaagaacctcaggagaagagggactggggtggctgaatgcggattaagggtaaaatactcagcgtcccagtgggtgatgctgaccggagaccccacccaaccgtgatcttaacactccacccaagaaaacaggcaaccccaaacatcagaaacgtcagtaccgggagccagaggctgtcagggcaagttctttagggcagaaaagaggatcaggcctcggtggcaaagggctggacacgggctctagaagcccgagcagccaccttgacggcttcggcgaggcccagatgcccacggtccgggtgaaggaggggcgggccgccattgggaccaagttcaggggtagtgggggctgacgagccgccaggggcagcgaggaagccggcaccgggcggacctggcacgtagaactcgctgaaacccacgctctgcagaacgccgaggagctggtcactaactaaaggccgagccggaagggcgagtgcacgcccagggtccctctaggcccccggaggccgccatctcggtcgccccgtggccagacccgccccgcctttcatggctggccccgccctgcggaagaggcgaggttgcggcgaccggctgggctgagaggccggcggcgggcgtggaactgtggcgctctaagcccggctttctccggcagccgtcggcatcgcctctggctggagtgtcacggactgatacagcctggctctaccgagacctcgccctctaggcacaagtgggcccccagttcacgggctgcgcctcagctgttggccgccttggccccgtggctcacctgaagcctgggccgtgcaggtgaggggagaatggcgcctgctttgtcatctctaagaggcccaagcccaggatcttgcttgggtcctcagctgggcagtcctcagggaaaccatggtttccactcgccgttttagccctctcccttccaaggacctagatgtgcgtagaaccttttaggacagattcatttaacaaccaaaacacccgtggctacatacagttgctaggcatcctgtatacacaggacatgtcctatattaaatgatcttgtcctgtgttgactttgggaggacaccctaaatgtcttatatttagctttttccaataaattacaaaaactcgtagttacagctatttttctgctcagtaactggcacttaaataaaatgttaacaccagctgaaatatatatatctcatacttccataaataatgatctggacagacctttatggtctgttctgttagttggactgcaggaagaaaaaacagtgaagaggggaggctgctaattaaaagaacttacttttcatattcaggaaaggaaaagactgttttttgaccaaagtcccaagtcactaacaagtacttgccattaatttacataattttagatcagtacacgtactctgaaaatcaaccagtacacaacagcctcactccaagcttctgaacatgagccagtcagtgataaacacttcccgaagccagccagtggcagctctacccagctcattggcaagtacctcactactgtgcccttccttctggacaggagcctttctccagtatcaaagtggttgctaagatggacagactttgttttttttttttttgcttgttttttgtttgtttgtttttttgagacggagtctcgctctgtcgcccaggctggagtgcaatggcgcaatctcggctcactgcaagctctgccttctgggttcacgccattctccttcctcagcctcccgagtagctgggactacaggcaccccgccaccacgcccagctaattttttgtatttttagtagagacgggttttcaccgtgttagccaggatggtgtcgatctcctgaccttgtgatccgtgcacctcggcctcccaaagtgctggggattacaggcgtgagccaccgcgcccggcccagactttgttttactttaatcacgctgataacttctcctgaacacagttccagataccaggctcctcaccaccaagcatttccatgctataaaggggaattggtctcccaccactaaaagataaaaaatgatcctggatatctagatatattgctttattacaggggtcccacttcttggatttgttattcctttcttaagaattagactgacttatgaagtcctattatggagagtatcttaggtatctactgctgcataacaaatcaccctaaaaccttatggctgaaaacaaaacacacttattatctcttaaagtttctatgaatcagtgaacatagtcagtcagtcctaaaaagagaaaaaggaaaaaaaaaaaaggttctgtggatgaggaattcgggagtggcttggctggatggtactggcttgggatctctcatgagggtctagtcaggtgtcacctgggactgcagtcacttgaaagttggactgaggctggggatttgcctcaaaggtaactcactcacatggttggcacatagatgccagctattagtgtgaaacttcccttcctgcgccgggtgcagtggctcagacctgt

SEQ ID NO: 316600 - DNA, 4001 bp, Homo sapiens
gacaacaggcgcccggctaattttttgtatttttagtacagacggggtttcaccgtgttagccaggatgttctcgatctcctgacctcgtgatctgcccgcctcggcctcccaaggtgctgggattacaggcgtgagccaccgcgcccggccttttcagtttattaagcattttcctaacccttattctatttcatcttcaaaatggtcctgtgcggtacatggaggagttactatcaaacccatttacatttttactgatgtggaaacagccttagtgaaagttaagtcaactaataagtgggagaaccagagatgaaaatgcatgcacatcttgcttccagttcttagctaccagttgggagaaggggaacagaatagcctaaagaaacagacaaccatgaaatgtacagaaatgataccaatatataaaatacctcacctcgccgggtgcagtggttcacgcctgtaatcccagcactttgggaggccgaggcgaacagatcacctgaggtcgggaattcaagactagcctgaccaacatggggaaaccccgtctcgactgaaaatacaaaattagccgggcgtggtggcacatgcctgtaatctgagctactcgggaggctgaggcatgagaatcgcttgaatccgggaggcggaggttgtggtgacccgagatcacatcattgtcctccagcctgggtaacaggagtgaaactctgtctaaaaaagaaagaaagaaagaaaaaagaataaaatcaaacgcctcacctaacaatgtaaacaatcattccttgagtaaccatctcaattcactgcattcaaaaatcaaaaagagaagagctattacgattcatatagcccaaagcttcacacttcatgttctaaatactctaaaagtatcagggagaacactgaaaacactcagccgaacatgttaagtagtctcttgttatttcagaatgcatctcaagttctttgcaacttgaagaataaaagtaagaaaaggaaaccaagcgtggtattaaaatcaacgttgcaagctggcctggattcaggctgttaggtgagaggaggaggcacacggatcaggaagggtctgactcctacttagggccgaacgataaccaaatgtctatcggacttcctttcagcacaatggtgatgcctactcaagaccaaaaatgctaaccatccttcattttagcaatcatttttatgtgccttttgtgtgcataacagccttgaaaaaacttagctttctactcaaggatgtcataaacatttgctcactagtcttcttagcaggaagattctgaatcacaagcaacctatcacagtcccccctccctctgaaatacaaacgacatatgtaacacgtgtcactgcagaaaaatcagaaaaatgtttaaaaattttttatatcacctagaaaccaacatctttccacctgtcatttttttcaaccaacaagaaagtctatgcacaaaatagaatacatacaacaggcagtcagcaatcatcaaatagataaacgtttcaaaaggcctttcatgcaatgtatattcttcctaattgctgtaagacgtctttacagtaaataactccatttttaacgagtttaaaaagagttaagctttctttttcgttctcattaaaataagcatatgctttaaattgtaaaagaattgaaacaaaaacatgttgcaggagagcctgaactagaatccactacatgtccaacgtggaggcagtctttactgcaatatcacacggtcactaaatacttgattcgctatttttcagtccggcataaatctttctcttcgaaaaaaacaaaaaaggcataaactgcttcaaatgattcgtttccctagacagtacttaaagacaaaaccaaaaaagggggtttctaagcaccgtcacacgagtgaggcgactctcaggctggaggctttgggcgccagcatcgacgcctgctctccgcggctacaactcgttgcgcgagcccggggattcgccgccggaggtcacgaagccgccgggcagggccgcagcgccagcgaggacccaggatcgtcccgagcccggacgcagccagacaaatgcccgtcggaggcgcagggcagaagtccctgggacttagccgcctccaccccggcgccacgcaccagcttcgcccgggcccagaagccggcgccaaggagacttccaagccccgacaccaaaggttccgtaaagacaacggcagcagggggccgaggggagcccggccaaggcgtcctgcgcagggggtggaactgccttcgggatgggggaggggaacgccatcccgccatataacgaaggcagagtttccgtataaagggagctccggtctctcccgccctctcccgttagaagatgcgcccgcacgcccgcgtcccctggagcagtccagcgcccgacccacccgctcctccctcacactcaccagtcagtcccccgaggccctcccggccggcccacgcagaggcggcggcggccgagagcgcaggcggaggggccgcgcggtccttcccgcggacgcacggcggcgggcagcgctgctccggccctagcgctcccggacgctgtgctgggccgacccctctccctccccgcgcgccccacgccctgagcgccaggcccctggcctaggctccgcggccgcactgccctggccgccacgctccgcgcctgcgccgcgcacctcaggggcccgccgagagggcggggaggtgacgaggtgaggtgggggcagggagcgggctgcgcgaacgcaccgcacacgcggcctgggagggaccaccggcccgcagccccgggggaggcccagcggcccgcgccccctgccggaggccttgcgccgccgcagtctccttctgggcggggaagagcccctcccgagccccgagggcgatcccaccctctaggattactccacgccaggcggccagcgaatttatcccgcccgcctccaccgccccttcaagccctggggaactgggagaaacgtggcgcgcagcggcacctttcccacgctgctcctcaagggaaaggacgcgagtggtcttgcccaggttaggcaaggcagatggcatctcagaccccgaagtgtgccagccgcctgttggggacagagaggccgaggacctcgtcacggttttactgaggccacaccagagaaccacctagggctaggatgctgccctcagggcaagagggtgaaacctgaagactgcgagtcgttgttgagtttcacccgattccttggctcgagaaatagtggaatgaatgaggagttaagggggactggactcgacgatttaagtcctttctcgactttgactttctttgagcagctgtagaaatgattaaattacacgagcataaataaatttgtgaacatggttccataaatgatctctgtgcaagtgtggtgatatgtttaattcagtccttttgacaatgagttgaggtttttagtcacattttacaaaatggaaaagtaaatgtgtgagaagctaaagactgggtcttaattcattttggtagcctaaacccctgaggttcaaacggttaagaggatgactgagagccatgtggattatcaggtacccaaggtcactcggatagttagggctgcaatgatgtctctttgttcacgtccactgctttttctgacaaccacatgccaatcaaccaatcaatcgctggaaagtaataatcacagactttactctgatcccttcaccatcccccaggagataaagctatatttgaaagagacactacttgtttgtgaggctcagtttttatgacctcctaagttttatgtgcgtactcagctcaaataaatgctcacgaatgctagtatggcccgaattaaagttcgaagaaatgtagagacatttttaaatcctagaatagttagtatctagcacagaaccgggaatcggtggaaaccacaagggggtgtca

SEQ ID NO: 316601 - DNA, 4001 bp, Homo sapiens
atagttttatttatgccattttctctttctacagatacctctactaagaagacagaagacttactttcatcatctgaatcaaatccaaagagtgtctgacatttcttttgtgcaagatgagcctcaagtgcttctgcattacagtaggtggtcaggcatttgccacatcttaatcttttcactgattttttatacacgttatcttgatcagaacaggcatctactctatcagtcagaaattttctgcgttttggcatactaagataccgttcatcaaggtaactgggaggcaatggtctgacgtatggttttgttaaaattaagccatatgaagtatgttcacttgtcagatttggtttggaaggtgcctgagatactggcaaggtgttgtgttcttgtggtacaacactgggcaaaatggaaccattttctgtcctgattctgtttgtatcaattttcaaagcaggatctgatgaaactaaaggtgtttgctctatttcactgtgtccattgactatatcactactactacaattattttcagaatttggctctatgtcaggcatcttttggtctatcaagcttatatttgaaacagtgtcatcagaacgttcgtttccattctgaactaaactgtctgttttcttttccatactttctatacatgtctttggttctgtagactctttccttgatttgctagtagaaactggcagactaatagtttgtttctcattactagatgagtctttttcctgattaggatttgagtctgtctgaacatcccaaagaattgtttcacttggttgtgcagatgactctggtgttttacttaaatagtgttgagcttcatgttcatacagcagaggaagatcttcaaaaagctcatggcattctggaaaactacactgagcctgaaatatcctgtgactttttgtgtgctgggcaagctggaacggcagcttaaacgactcgttgcaattaaaatgcaaacaaaaatacacatttggatagctatgtctattaaggtggtctataaaatgttgagaatcttcaaattgcctttgacaaaatttgcattttcctttgctccacttcattactgtttgtcgcacatttaaatcggttggatgtacggtcattgcatgtttatttagaaacccaattcttttaaatatccggacacaaccaagagcaggacacttaaagtttccttcttgatctgtggcatatatgtcttttggatggcacacagttccattgattttatgaattactgaagtttcttgattcaggtcataatcatcttcttcataatcaccttcttcatcctcttcctcctcataatcatccccacattcagttaaaggcttgaaaacattatttaaagaattattaggactgccattttcaataacattttcaataacatcttctggtacacttatgggaatttcaatgaattcagccacatgctcagggatgacttctttgtttccttcactagaagcagtaagtgtctccacttccaaatccttactatcagaattcccattttcaaatgaaatggaagaactagaacaatttatttcttccaaagcagtgacttcctgatcatcctgttgagctgcagcaatttgctgcctctgtatcttcttaacatgattcttcaaatgcttctgcataagtcctctgtttctaaatttcctaccacatattacacatgcaaaactgccttttttctgatgagcctgggcatgccttacaatgtgaccacctaaaaattccttgttacataacatacaacgatgccttgggacattgtgatctactttggaagtactgagagctgtaagatttttcttcgtattaatatgacctttaggctgcactccagatacatcatcaggatcagtctctccagtgctctgatctgtaagagagtcaaacccttcatccaaaccttgctgttcctccgtcctttttagattacctgcattattttccagtgtgctttcatttagaaatctaactgctgatttatcactcaataatgctacacagtttttcttaatcattacgaagttccaaaattcagggtcaaaaaacaatccctttttcaaaattggaagcaattcaaaacgaacacgattttgaacactacttgtgccttcattatattcttcatctggacgtttgtaaagctcttcaacagtacgatacgcttctaaggagcgctccagaaaaaatattgagagtgcacaaatcctgaggatctccaaatcatttggcaaaaaatgtgcaattgttttataaattagacatttagttttgggatcatcatgaaggtcgagttgtagagcacaaccacatatttcaacacaaatttgcaagccttcttcttcaacctgtaaaaagaaaaatattagtgctaaatactttttttccaaaaaaatggttatactagtctatctttaaaaaacacaactcttaaaatgaaagctgaataaacatagtattccaatgtccaattttccatatttagtagccttgtttaactcttttaaatatatacctttctctttttcttaaacttgaaaataatctggaatagatagcattttagcttctaatttatttaattttcacatttgacaagcccactatccataatacaaaatggacttatggtgattcataaacttatggtgattaagatttcttctagacccccatttattattgtaggtacaaatctcatattctttgagagaagggtcaaaattatgtgtattttaacagatttatcaattttccacatcaagaaataaactaggcttaaaaaaactgcttatgggaacttttattatagtgctatatgaaaaaatattacttattttgcttattaagtaatgttatttatccaaataaggggggaaatgtggcacacataaagaaggcagttataatctttccaaatctaataaggtatataagcctcagaataatgagccccctggaagttatctgaacagtactcaagctttgaaacattcactgatgactcaaggataattgcatcagcttttacttgggaatctattgtcgacccatcttagttataatagtgtctctagtggtttggaataatctaaaggcttattttgattggaggagacaccataataatgtctttaacatcatatatatgtatatatatcatactgcctacatatggtatagtatagattacagggaggaatactaccttgccagcctcacgttttcttagtcctttacatgctgtgtaaccctgaagaactacttacagttcccacaggcagactttaacttggcacatccgattttcactttatccagctagtaaattcctactgatcctcctattcattctttgagaatcagttctaatctgaaggtttttctccccacttatcctggtctctgccctgaggtacagttaaaattccccattctttccaccaagaataacttatctttaaaaacatttcaattttgttttataaatatctgtgtatgtgtatgtcctcaccccccaactgtgaattcctaaattacaggtgacagtgtctcattttttatgtctccctatggttagcataaaagttggtacatagtaacctctgaataaatgtttgcagaatgagtgaaaatcagacctattccatttacttagtttgctcctataaatccatcatttacaacttggaatcctttctgaattccaactactgatttctaaatgtcaattataattagactttactacctagatttttcagatacagcaaatcaaaatccattcattcaaaacagaattcgttttctttctccatacttctatctacatccttttttttttttttttttttttttgagacagagtctcgcactgtcacccaggctggagtagaatggcatgatctcagctcactgcaacctctgcctcccgggttcaa

SEQ ID NO: 316602 - DNA, 4001 bp, Homo sapiens
ctataaaatagagtttgccttatactggaattgcttgtgtgtatgtctgtgtccatcctcaaatatatacattaagctctatgccctcagagagcagttcccatgagatttgcctgtagataccacatggtgtctgacacagagagggctcagtcagcattgtttgatttgaaatggtaaattaaacaagtttaagattctaacacctggagtgcacatagggatgctgagagccaaatccacacatcactactaccatccctcctctacatgtttgtcctttttgtgcttcatattatctgggaaacaccataatggtgtatttgcattcttggcaattctgtctcaacagagtcatcccagggactaaattccctaagagattgacctggtcccactattcagagactctcagtatgtcagagctggaaggaacctcccagtctatccagtcttatatccaaatgtacagaaggaaaacttggaacttagaggaaagctgggactcaaatccaagtcccatgacacccaattttgagttctactacatcacccttattcccatctgaaacaaaactctactcctcaaggtccagaggccccctgcccacttcagtgcttttctcctgtttgataaataccactgagagaagctccctttcaaccctggtgcccacaagcaggattcctgtgcccagactaacttcacaatctaggcctcacctgcccaggagagaatggaatgactcacccatattcctgtgcacagcagcctcaatccaaaggatctgcacagcacagatcttgcctgatctcctccttgagttcagtgaagaagttcctaagagggtcttgagtcactgtaaacagatataaatgactgagttctctgagccctgaattccaagtggacactcagggcagtgtcccatctttgggtaacttcccttcctatagaactgtgggcagtaagaaggatcatttccagtgtaaagatgagggaatgaagctcccagggattgaacgacttgcccaaggtcctatagctagtgagtgattaaaaagccttctgtgtcttcaggaaatcctaattccatcacaccacagcctccccttttcacctgctccattgatatctaaaagcttccatattctcatctaactgcaaaatacaatgcagtggagaacttccttgcaatccagctttccacagaaagtctgcacaagggggatgagagggagaactttgctgagtcaagtgtctttaggaagacagaaagaaacaagtctttaaaagagcactagaaaaagaatgttccttttttctgtttacccatttcttaggattactaagcctcaaatatgttttgtgtttccccctccagatccccaggctctgcttctaacccttgaagtttgtttcatttctcccctactagaatttagttctgtcctgtacacaaccataaccccaggacctagcacactactgggttagtgctcaataaatatttgttgaatgaatcaatgaatgaatgagtaaccttgggcaagactccgtcctcttctctgggccccaggttcctcactggtaacgggagggatattggactggtgatttgagtcaaatactcaggggctgtggagtcctgagagcctaggcgggactcgaccgctactacccggaaggcccactgcctaggagcggggacgacacagtgctgtcaccacggccagcctggtccaagcgagcagctacgaggagtcagagactggacccaagacaaaggggcagcactgaacgagagaaaggggaggcccacaacgaccccttggctgccgcgcccatctcagcagcgggcagccgcagaggagccctggcctcctggcttgcgtctcccacacgctcccagaacccggcccgaccccccacgccagactgtagagcacccctcaccgaaagcgccagacccacatcttgaacaaagcgcagaaggaactgcgtcagcaactcccagctaactcccagcctgtccctccggcccttctaggcttcgtgaggtttccacatctctgtgcccgcgggctggagtccccccgcccctcagaagccccgcgcggtcggccgacgctctggccctgcctcccttccgggctttgccctatcattggatggaagggcttggcgacttcagccaatgtgaggagggccctggaagtggtggaagctgggcagggggcttggttagggcggaaagagaccgagcatctgggtggccaggctgccagcctcaggctgagactccctaaagttacacccccagctccggttgctgagcagagaggtcatctttccttccacagatctgggtcattcagcctcaaagccaggatcagctatggtttattggcagcatatgaaaagacgttttgggtgcctactatgtcactcactgttccaggcgctgcggatacagtagtgaagaaaatgaactctctgccccattgagtttacattcaagtcaaggagacaatgataaataaatatgtagaacgtagcagtaaggggagagagggagtaaggggagagagggagatagtggtgggactattttacagatgacagggagggcagagacaggaagtgggcaattgaagcatgtggctatctggggaaagagtattcccatagtgggccattaggagcaaaattctttaatcaggagtggggtggagaggtgcacatttaggatcttgtagactatgataagggctttggatttgctctgcataacagctggagggcttggggacagaggaacgacatgatctaactttttttcccttaccacatattcaaagacttgttagctatgagacatgaaagaagccaagaagcctgttactataaattctgtgaattctttgctgtctgtccttagccattctaacataaaccttgcatgaattttgctctttgacttatatttttagtttgctttggctgtcttgttgagaacggtctgaaggtgggtaagagtagaatcagggagattaagaggccattacaatattccagatgaggactgatagtggcttggacaggcttagaagtgatgcaggtagtgagaaatggttctgcatatattttgaaggcatggcctgcatgatttgctaatgaattgaatgttggttactgatgactccatggttattgatctgagcaactagcatgggatggtcttttagaaatcgagtagcttgaaaggaacaggtttagggagagggattaatagttttgttttggatgtgttaaagatgccaattaaacatccaagatgaaatgccaaacaggcagttggaataggagtctggacttccgtgaagagatcacagctaaagacataaatttggaagttgtcaggacaggatgagacaatctagggaatgatttatctaagaaggagtctgagaatcaagcttttgaagtacttcgtcaattgacaaatattcagtatttaatattgttgagtacttaaagtataccaggagctttcttctccattggctcatgtaggtggcacaactccgccacattgtatagagattgaaaaagagattcagacaaaagtcctccacaagttcacaccctcagttgatgtgggacgtagaactcgggacactctcctgaagagcacaagactactgccactacatcaagaaacttaaaaagaataggctgggtgtggtggctcacgcctgtaatcccaccactttgggaggctgaggcgggtggatcacctgaggtcaggagttcgaaaccagcctggccaacatggtgaaaccccgtctctactaaatattacaaaaattagctgggcatggtggcaggcgcctgtaatcccagctactcaggagtctgaggcaggagaatcgcttgaactcgggagctggagattgaagtgagccaagatcacgccattgtactccagcctggaaga

SEQ ID NO: 316603 - DNA, 4001 bp, Homo sapiens
aaagggagagacccttacccagggaagccacagccccataattctccagcatcacatccctgtacagggctctctgagcagggcccaggccgatccattcgttctcagagaagtagacggccacatcctcgaaggtcactgactcctgaaacaacatgtgtttaaatgccctaggacaaccccaggaccaggccaagaggaaggggagacagggcatcaaaaggtactgtgggggtgcctgtggggattctggattctgaatgtctacaggaactctatcagcagaagatttttgcctcctatgtacaaagagacaaggcatcagccatcaattttctcatgtctcttcatctttatttcagcaaacattttctcctctttttcatgagtctgcaaaagttttcttgtttcatccttataccccaaaccacatctgtgctctaggtcccatcctctctccacaatgtgtcctccttcagaggtcacccacccttgataacaactatcatttattaagcctgtgccaagcacttgacatatattctttgttatgtctcatagcctactatcagatccgttttttagaagaggaaactgagactcggagggattaacttcccccaaagttccagaactgagacagaacccaggcctgtttgactctggctcttgcctgttatgccacactgccttccgtccccattcctgccatccctgctgcccctgtataggactcttcctcctttgtcctccccagtcactgccaccagccacagaggcagctagggctcctcagaacattcaggttgctctgaacactgtactcaacagggcagatcctcgttgtgactttactccctgcacccccaccacccgcaacactctcacaaagatcccacctcacttgcttacccacgtcccaatctccatgtccccattttctatatctctaggagtctcagctcctgcaccttctttctctcatcctcttaagaaacaaatactgctgacctccagccgttgggacttcccgtaattctcagccactgcctccttcagggtctcagtctccacactgtggaggagcccattctggtccactgcacttcagtccttgcgcactagaaagtctccacagctatttatccagcactccagggctccaaggctttggctggctcaactttgtctgcctaatagagtccacattcctctgcactacagacaattccattcactactcacagacccagctttcctggccaggatcatcagccaccaccactctcatctccgatcctctcaccattgcattgggaaaccaaactctttcctcaccctgttctgtgtccttgcacctgcggctactcttgcctgaatatccagttcttccttcctgctcctgcattgcaaattccttttcaacctaatacccagctcaaacataaccagctctgtaaaggcagctctgaaattctggccattcatcgcccccgacagcactctgtgcgctctgccccagcagtcggctcaaccccgtgccgctgcacgtctgctctccttgaggctcaggtccaggggtgtcgactccgctgtgctgcctgtccctcgaggcccctcactctgggttgtacccccatttcccagccgccgcaccaccccgtctccgggcctagaacccagggcagggccaagactgcttccaggctccggccccgcactcacccggcgcgcccggggcagcgcgggctgtcccgggagcagctcgaggacaaggccgaggcgtgtcccgctcgccagcgccacggccgccatagcccaggtcgccctctgggaaagcgagggcgcgccagaccggaccagaggctgttggggtcgcggaagagcgctctgcacctgggcaggcctgacacggctaccctgcgccctgcagccaccggagtaagaccccgactccactccctgcccgccccacgcccgactccccgtgctccacacccgccaggccccagcatccgggaggccggggctcgggccgctccggttgctctaggacggcggagggcgccgcatctctgtggtcctcctttctcgctcggggagggaggggagagcggtccggttctcctggagacacggacgatcccagggaccgctaccggggtaggggtgcaggcggctggggaggaatccttcccctgcgctctaggccaccccttcctctccagctcgctgcaccctaggtggacagatatttgctgataggaggtagcgggtacttcactagactgcacctgctcttttatctctccttttaccagtttttgcattcccagagcagacctgtattttatgtcttttaacattctcatctttgtgcctctaacatgcgcccgatgtctagcacctcctggggagttatttctttaactgccaaggaatatttgtagaattgtccacgaaaagtcaaactgtaaaatatttgaagggatttatcctgagccaaatatgagtgaccatggcccgtgccacagccccaggagatcctgagaacatgtgcccaacgtggtcgggctacaacttggttttacacattttaggaagacataagacatcaattaatacatgtaagatgtacgttggttcggtatggaaaggtgggacaactggaagaggaggctttcaggacataggtggattcaaagattttctgagtggcaattggttgaaagagttaagttattgtataaagacttagaatcaatagaaagggatgtctcagttaagataagggcttgtggagaccaaagttttatcatgcagatggagcctgtagcaggcttcagagaatagactgcaaatgtttctcatcattatcacactaccggatagtctgtgagacttaaagaggctgttctatcagtcttaaggtctgtgttgatgttaatgctggtcagctggtcctgaatttcaaaaggtaggggagcataatgagccatgtccaactcctccttcccattatggcctgaaccagtttttcacgttaactttggaatgcccttagccaagaggagagatccattcatatggtcagagggctttgaattttatttttggcttacggaataaaagaatgaataaatgttgaaccagtttttcagttgaagaaagtaaggcccaaagagagaaaatggcttacctaacattatgcaacatgccaggaaattaaattttttaagaagtgtgaaaataaagattattcaaatgagaacaaagactattattcagagcttgctatatatgacaagagagtcagccctcatcacttgcattcagcagactgaaagtcaggcagaagagtggggaaagcttcacagtggaaaaaaggaatggcttcaggtattcccttattggaagttgctggcatggggaaactacaggcgggctaactagaagcagggaatcttatgtaattggtagggggaaatttttggctttctctgtttggtcctaagttggaagtagtatgggaaaaagtagggaatctgatagtttttaatcaaattgctaccccatctctacaaaaataaaaaaagaaagaaagaaagaaataaagaaaaatagccagctcctggctactcagaagtctgagatgggaggatcacttgagcctgagaagtcaaggctgcagtgagctgtgattgcaccattgcactccagcaagaacctggaaagaagaaagagaagaagagaaaagagaagagaaggaaagaggaaggaaggaaaggagggagggaaagaaagaaagagtgggagggagagagggaaagaaagaagagacgaaggaaggaagggaaggagggaaagagagagagagaaagaaagaaaaagagagagaaagaaaaagaaaggaaggaaggagaagggaagaaggaaggaaggaaaaggaagggaggaaggaaggagggaaggaaggagggaagggagggagagaggaagga

SEQ ID NO: 316604 - DNA, 4001 bp, Homo sapiens
ctgaatgtctacaggaactctatcagcagaagatttttgcctcctatgtacaaagagacaaggcatcagccatcaattttctcatgtctcttcatctttatttcagcaaacattttctcctctttttcatgagtctgcaaaagttttcttgtttcatccttataccccaaaccacatctgtgctctaggtcccatcctctctccacaatgtgtcctccttcagaggtcacccacccttgataacaactatcatttattaagcctgtgccaagcacttgacatatattctttgttatgtctcatagcctactatcagatccgttttttagaagaggaaactgagactcggagggattaacttcccccaaagttccagaactgagacagaacccaggcctgtttgactctggctcttgcctgttatgccacactgccttccgtccccattcctgccatccctgctgcccctgtataggactcttcctcctttgtcctccccagtcactgccaccagccacagaggcagctagggctcctcagaacattcaggttgctctgaacactgtactcaacagggcagatcctcgttgtgactttactccctgcacccccaccacccgcaacactctcacaaagatcccacctcacttgcttacccacgtcccaatctccatgtccccattttctatatctctaggagtctcagctcctgcaccttctttctctcatcctcttaagaaacaaatactgctgacctccagccgttgggacttcccgtaattctcagccactgcctccttcagggtctcagtctccacactgtggaggagcccattctggtccactgcacttcagtccttgcgcactagaaagtctccacagctatttatccagcactccagggctccaaggctttggctggctcaactttgtctgcctaatagagtccacattcctctgcactacagacaattccattcactactcacagacccagctttcctggccaggatcatcagccaccaccactctcatctccgatcctctcaccattgcattgggaaaccaaactctttcctcaccctgttctgtgtccttgcacctgcggctactcttgcctgaatatccagttcttccttcctgctcctgcattgcaaattccttttcaacctaatacccagctcaaacataaccagctctgtaaaggcagctctgaaattctggccattcatcgcccccgacagcactctgtgcgctctgccccagcagtcggctcaaccccgtgccgctgcacgtctgctctccttgaggctcaggtccaggggtgtcgactccgctgtgctgcctgtccctcgaggcccctcactctgggttgtacccccatttcccagccgccgcaccaccccgtctccgggcctagaacccagggcagggccaagactgcttccaggctccggccccgcactcacccggcgcgcccggggcagcgcgggctgtcccgggagcagctcgaggacaaggccgaggcgtgtcccgctcgccagcgccacggccgccatagcccaggtcgccctctgggaaagcgagggcgcgccagaccggaccagaggctgttggggtcgcggaagagcgctctgcacctgggcaggcctgacacggctaccctgcgccctgcagccaccggagtaagaccccgactccactccctgcccgccccacgcccgactccccgtgctccacacccgccaggccccagcatccgggaggccggggctcgggccgctccggttgctctaggacggcggagggcgccgcatctctgtggtcctcctttctcgctcggggagggaggggagagcggtccggttctcctggagacacggacgatcccagggaccgctaccggggtaggggtgcaggcggctggggaggaatccttcccctgcgctctaggccaccccttcctctccagctcgctgcaccctaggtggacagatatttgctgataggaggtagcgggtacttcactagactgcacctgctcttttatctctccttttaccagtttttgcattcccagagcagacctgtattttatgtcttttaacattctcatctttgtgcctctaacatgcgcccgatgtctagcacctcctggggagttatttctttaactgccaaggaatatttgtagaattgtccacgaaaagtcaaactgtaaaatatttgaagggatttatcctgagccaaatatgagtgaccatggcccgtgccacagccccaggagatcctgagaacatgtgcccaacgtggtcgggctacaacttggttttacacattttaggaagacataagacatcaattaatacatgtaagatgtacgttggttcggtatggaaaggtgggacaactggaagaggaggctttcaggacataggtggattcaaagattttctgagtggcaattggttgaaagagttaagttattgtataaagacttagaatcaatagaaagggatgtctcagttaagataagggcttgtggagaccaaagttttatcatgcagatggagcctgtagcaggcttcagagaatagactgcaaatgtttctcatcattatcacactaccggatagtctgtgagacttaaagaggctgttctatcagtcttaaggtctgtgttgatgttaatgctggtcagctggtcctgaatttcaaaaggtaggggagcataatgagccatgtccaactcctccttcccattatggcctgaaccagtttttcacgttaactttggaatgcccttagccaagaggagagatccattcatatggtcagagggctttgaattttatttttggcttacggaataaaagaatgaataaatgttgaaccagtttttcagttgaagaaagtaaggcccaaagagagaaaatggcttacctaacattatgcaacatgccaggaaattaaattttttaagaagtgtgaaaataaagattattcaaatgagaacaaagactattattcagagcttgctatatatgacaagagagtcagccctcatcacttgcattcagcagactgaaagtcaggcagaagagtggggaaagcttcacagtggaaaaaaggaatggcttcaggtattcccttattggaagttgctggcatggggaaactacaggcgggctaactagaagcagggaatcttatgtaattggtagggggaaatttttggctttctctgtttggtcctaagttggaagtagtatgggaaaaagtagggaatctgatagtttttaatcaaattgctaccccatctctacaaaaataaaaaaagaaagaaagaaagaaataaagaaaaatagccagctcctggctactcagaagtctgagatgggaggatcacttgagcctgagaagtcaaggctgcagtgagctgtgattgcaccattgcactccagcaagaacctggaaagaagaaagagaagaagagaaaagagaagagaaggaaagaggaaggaaggaaaggagggagggaaagaaagaaagagtgggagggagagagggaaagaaagaagagacgaaggaaggaagggaaggagggaaagagagagagagaaagaaagaaaaagagagagaaagaaaaagaaaggaaggaaggagaagggaagaaggaaggaaggaaaaggaagggaggaaggaaggagggaaggaaggagggaagggagggagagaggaaggaaggagaagggaagaaggaaggaaggaaaagggagggaggaaggaaggaaggagggaaggaaggaaggaggggagggagggagggaggaaggaaggaagagatcaaatcccagctgtttggggtcaattgctaccagggttattgttttgattagtggactggttgccacagatagtgatttagtggtttgacttcctagagtggttaccatagaaaatgggttggcttcctggactggttgctacagattgtgtga

SEQ ID NO: 316605 - DNA, 4001 bp, Homo sapiens
tcagaggaaaatttgcactcaacttagacaactctaagctcttacaacctgtctatatctacaggtcagctttatcttatttatgtatatttccttcaacctgagttttacttatttccacttttcttttttaattcacagacacccataaactcagaaaatacagtgtaaaacaaagtgaagaacaaataaacaactcaccagagatttattcttttcttgtagctcttggaaacagccagagaacactggaaacatagctgagagagaaggcaaatgacgtgaattaaggagagaactggtgtggtgtggtcccagattcttctgcccaacactctagacacattacctggaaaagccctcctccctcctgaaaaagaaaaacttccccatgggagaagagtccttcaagcctcattaggggcagcaaagactcaagataagatacatctacaagtacattaattggtagacattagatgcacaatttattttgaataaaaatatgtattacctactaatttagcaacaatattacctaaagatacaatctaataatttaatacaaagaaacattataagttcactaaaataaatgttatagaaatatactgggctgtattaactattttcctattaatatgtggattccacaaataacttcatatgagtgttcccatgacagtacatcttgcttttctatacctgaacatcatggaaagtgcatcttgcaacccagcaattttggcctacaattacttttttttaaatgtacataatatgtatttcctgcagtacaccattctactcatgtttcccaataacacctttccctgtatccaagccctcatattatgctctgacaataaattgggcttttccatctgacttgtccagtgaatggacaatggaaaatgtgatgcaaatatccattggttcttgcctttttggacacagtcatattgtgaggaggtctggagctaccctggtggagacacagggcctagccaagagtcaccacaaaccgccagattgtgaaggaaactatcttaaaccaaccaggctcagtcaacccaccatgtgaccaaggcctcttttgtgatccaggcaacataaatatatcaactacccagctgaacccaccacaccaaaatgcagatccacagaacttcaaacaaataaaatggtggttgttttttataagccagtaaggtttaattagttccttaaacagcaagtattaactgttacacctaagtgaacagaattcaatatgtttttaacaaaattacgtagggggagaaagtcttaaattacaaatcaaatacaatcgatagaacttcacaatctaatgctaaagctaaatttggtgatggactaggtttaatatatctcaaacgctggaaacaacgaggaaaggttgaaggaatgggactgtgtttggagagtattttaatcttctcaggtatgacaggtcactcctgtaccccagaccacactttcaggccccttcaaataaggaatatttcctaggtccttgcctgttcttctcagccgaattcacctcaaccttctgaaagttcgtccaaacctaccactgtcacctagtctttgcaaatcttgtgcattctagggagtagaattaatatttcccgagcgaggaaaactgggatcttcacctgtgaccttttatcctcctctgaagcaccagtgggaggttagaccagagggctgttctttcaagtgcgcttcttattcatagggaaccctccctttcaaaccttataacacacggttaagactgaagtacccttaaggctgaagaccatcatccagtaccccatctccctcgcggcatcagtgagttcttccctggaaactaggtctcgtataaacttctgtaaacgcaacccaggaggactaggcaggtcacacagtgaaggagggaaccagaaacttcacttgctaaagagacaccgggaaacccaactaatacaaacgcccagtttaagactcgaggcgcacgcgtttcgcactactcctctgggaatggggaacgtctcccgagaactgtgtgttcgcactgggacagatgggcaaactgagcgtcatgcgggttggtaaccggctccctcagcggcaggacaggagcgcggcctgcagactccgggcccagggccaccggcctcgcctacccgctcctgcgcctctagaacccgcttcactgccgggaccccacgcctgtcctcccagcccccgccagggtccgcggcctgcacctgcacttcaggccctgcccgcccgcgatgcgcccacgcgtctgctcccacaactggggaacactggtccggccccccgggatcccccgggcccacgggttcctcttcgccctcgcaccgacccgcagggacatagaaccaagccccaggctggcccagctacaagaccgcctctgggtgccgcacttccggaggaaaatggcggagtgggcggggcggcgcatgcgcagagagaaaagctggttcccaaggtccttgatggtaacatcattggaaggtgacactacatttcccatgaggctctgcggtccccggttaggaacccaagccggacattctgttttgcccagcagtgagtccagttacccagagacccggacttaatggatcaggactggtccctacccaggtgacacagatgtggcattctggttctttattaaatcctggtttcacagcctggcacattgtgaaaataatggagaaatttcaatagaggccaattggtctatgctattaatgagtaactttttttttttttttttttttgagacggagtctcactctgtcacccaggctggagagcaatggtgcgatctcggctcactgcaacctccgcttcccgggttcaagcgattctcctgcctcagcctcctgagtagctgggattacaggtgcgcgccaccacactcacctaatttttgtatttttagtagagacggggtttcaccatgttggtcaggctggtctcgaactcttgacctcgtgatccgccctcctcggcctcccaaagtgctgggattacaggcgtgagccactgcgcccagccctcaagtctattttttataaatgcattcgaaagcatgaaaaaaatcatgtctctattttactttaaaattttaaaaacacaactaatgaatatggtaattctcttccaatccgttatcttttctctcactaaactaatttataagccttcaatttacacagttacaaaaaatgctctagtgcatatactgggataaaataacagggtcataagacaggtgcactccataatctttgtgacaacttacacttccagtgtctgataaatatttgcccataaactcccacgtttcatccatccaccaatcaatcaaatctagctatctttatttatttattgtgagaaagacctgaactttgcctttccttccctgatttctgccacaaactaggcaaggatttctgcctaggggtttctcagagctccggccaccaccgaggttcctaacagggaaacgcaagcttgaatgctcagggttgatgtgggagtgcgtgtgaaacggggttggggtgaaagggcagtgaagtttgtaggtgggcagatgagggtgtgaagggctttcaggtaagaggcacgcaggagactgggagaggcagcgaaagcacctcacgcctcagatcaccagaagacgcttccaccagtgccgtgacagtttgccaatgccacggcagcacgggaagtccccaccccttgccatggaaacagctggaagttactgcccatttctagctatttctgaataacccgccccttaattagcatgccattaaaagtgaattataaaaatgactgcaagccacccccaggctgctactctgggagcacaacccacggagggctccctgccctgcaggagtggacgcagggctgtaacaccgccagtgcctccgtag

SEQ ID NO: 316606 - DNA, 4001 bp, Homo sapiens
atgcacaatttattttgaataaaaatatgtattacctactaatttagcaacaatattacctaaagatacaatctaataatttaatacaaagaaacattataagttcactaaaataaatgttatagaaatatactgggctgtattaactattttcctattaatatgtggattccacaaataacttcatatgagtgttcccatgacagtacatcttgcttttctatacctgaacatcatggaaagtgcatcttgcaacccagcaattttggcctacaattacttttttttaaatgtacataatatgtatttcctgcagtacaccattctactcatgtttcccaataacacctttccctgtatccaagccctcatattatgctctgacaataaattgggcttttccatctgacttgtccagtgaatggacaatggaaaatgtgatgcaaatatccattggttcttgcctttttggacacagtcatattgtgaggaggtctggagctaccctggtggagacacagggcctagccaagagtcaccacaaaccgccagattgtgaaggaaactatcttaaaccaaccaggctcagtcaacccaccatgtgaccaaggcctcttttgtgatccaggcaacataaatatatcaactacccagctgaacccaccacaccaaaatgcagatccacagaacttcaaacaaataaaatggtggttgttttttataagccagtaaggtttaattagttccttaaacagcaagtattaactgttacacctaagtgaacagaattcaatatgtttttaacaaaattacgtagggggagaaagtcttaaattacaaatcaaatacaatcgatagaacttcacaatctaatgctaaagctaaatttggtgatggactaggtttaatatatctcaaacgctggaaacaacgaggaaaggttgaaggaatgggactgtgtttggagagtattttaatcttctcaggtatgacaggtcactcctgtaccccagaccacactttcaggccccttcaaataaggaatatttcctaggtccttgcctgttcttctcagccgaattcacctcaaccttctgaaagttcgtccaaacctaccactgtcacctagtctttgcaaatcttgtgcattctagggagtagaattaatatttcccgagcgaggaaaactgggatcttcacctgtgaccttttatcctcctctgaagcaccagtgggaggttagaccagagggctgttctttcaagtgcgcttcttattcatagggaaccctccctttcaaaccttataacacacggttaagactgaagtacccttaaggctgaagaccatcatccagtaccccatctccctcgcggcatcagtgagttcttccctggaaactaggtctcgtataaacttctgtaaacgcaacccaggaggactaggcaggtcacacagtgaaggagggaaccagaaacttcacttgctaaagagacaccgggaaacccaactaatacaaacgcccagtttaagactcgaggcgcacgcgtttcgcactactcctctgggaatggggaacgtctcccgagaactgtgtgttcgcactgggacagatgggcaaactgagcgtcatgcgggttggtaaccggctccctcagcggcaggacaggagcgcggcctgcagactccgggcccagggccaccggcctcgcctacccgctcctgcgcctctagaacccgcttcactgccgggaccccacgcctgtcctcccagcccccgccagggtccgcggcctgcacctgcacttcaggccctgcccgcccgcgatgcgcccacgcgtctgctcccacaactggggaacactggtccggccccccgggatcccccgggcccacgggttcctcttcgccctcgcaccgacccgcagggacatagaaccaagccccaggctggcccagctacaagaccgcctctgggtgccgcacttccggaggaaaatggcggagtgggcggggcggcgcatgcgcagagagaaaagctggttcccaaggtccttgatggtaacatcattggaaggtgacactacatttcccatgaggctctgcggtccccggttaggaacccaagccggacattctgttttgcccagcagtgagtccagttacccagagacccggacttaatggatcaggactggtccctacccaggtgacacagatgtggcattctggttctttattaaatcctggtttcacagcctggcacattgtgaaaataatggagaaatttcaatagaggccaattggtctatgctattaatgagtaactttttttttttttttttttttgagacggagtctcactctgtcacccaggctggagagcaatggtgcgatctcggctcactgcaacctccgcttcccgggttcaagcgattctcctgcctcagcctcctgagtagctgggattacaggtgcgcgccaccacactcacctaatttttgtatttttagtagagacggggtttcaccatgttggtcaggctggtctcgaactcttgacctcgtgatccgccctcctcggcctcccaaagtgctgggattacaggcgtgagccactgcgcccagccctcaagtctattttttataaatgcattcgaaagcatgaaaaaaatcatgtctctattttactttaaaattttaaaaacacaactaatgaatatggtaattctcttccaatccgttatcttttctctcactaaactaatttataagccttcaatttacacagttacaaaaaatgctctagtgcatatactgggataaaataacagggtcataagacaggtgcactccataatctttgtgacaacttacacttccagtgtctgataaatatttgcccataaactcccacgtttcatccatccaccaatcaatcaaatctagctatctttatttatttattgtgagaaagacctgaactttgcctttccttccctgatttctgccacaaactaggcaaggatttctgcctaggggtttctcagagctccggccaccaccgaggttcctaacagggaaacgcaagcttgaatgctcagggttgatgtgggagtgcgtgtgaaacggggttggggtgaaagggcagtgaagtttgtaggtgggcagatgagggtgtgaagggctttcaggtaagaggcacgcaggagactgggagaggcagcgaaagcacctcacgcctcagatcaccagaagacgcttccaccagtgccgtgacagtttgccaatgccacggcagcacgggaagtccccaccccttgccatggaaacagctggaagttactgcccatttctagctatttctgaataacccgccccttaattagcatgccattaaaagtgaattataaaaatgactgcaagccacccccaggctgctactctgggagcacaacccacggagggctccctgccctgcaggagtggacgcagggctgtaacaccgccagtgcctccgtagagctgctttcttccaccacaggcttgcttttggattccttcctgagcgacgccaagaacctgcccttcctcagtgtgactcttgcctaaaacctatccctggttttctcttttcctaagcatgccctgacttgttctttcatctcctcggatcttgcaattgctcctcagtgactctattctgcagatccagaaaactcaaccttaatcttcccagagccctgttgtctccaatatcggaatctctagccttgctttctcagacgcctagattacaggcctctctcttgaacacctattggtatggtatctggggatcctttaaatacacgatgattggcaggggttacatagcggaaatcagtgcctgacaatttgccttccaggatatggactgtcattccctctcttggtgggcctcagtctcttatccataaaagtagagattgtaatactcatttgaattgcagatacctcaac

SEQ ID NO: 316607 - DNA, 4001 bp, Homo sapiens
ttacattcctcaggagtacaatgttttagaacaaagaatgcattcaataaatctttacagagttaatctttacagaggacaattctcctgtagacaggagtgaatacatataaaggacaaataacgaggcaaggcctttgtacctttcagccatctgcaaaatgaagaactgaattcaaattttgataggcatggctttcagagaagtctgacagaagctatgcatgaatttctttttttctcttttacagttcccttcttacttaaaaaaaaaaaatcctgaagtggcttagtgatataaactatggagagaggtgtgggtggttcttttaagtgcacaataaccaacaggtctccctcctggaaaaattctcagatgctgaggaagatatttcctgtggccaaaagattttcttcactagtttttgtcaaaatgtcttttcgcagtttaagttctctgacgttgactgatgtgggcccacttgcaaaaggccttcccacatatctcatagagtttatctctggaaggaattcttcaatgccaagtgaggatgagctgcaggtcacagctttcctactgccactgaattcagagtgcttctcctcagtgtggctctctatgtatcaaagaaaaaaaaaaaaagaaaacccacaaattcccacatcatttgcactcaaaggttttttcctccagagtggatcttactctgttgggcaaaagcagagtggtagccaaagtcctttctatgttcaaggcactcataaggtttctctccagtgtgactccttgtatgtcgagtgagggaatagctgtagtaaaaacctttcccacattctttgcactcgtagggctttcctgcagtgtgggtcatactatgtcggaagaaaacagagcggtaggtgaaggtcttcccgcactcactgcacttgcagggcttctctccagtgtgaatcttcatgtgccgggttaaggaagagttgtagtaaaaggtttttccacattctttgcacccaaagagtttttctccagtgtgggtcacacgatgctggatgaagacagagtgatagctgaaggtctttccacactcgctgcactcatagggcttctctccagtgtgaatctggcggtagcacaggaggtgcgacctgcggttgaagaccttcccgcactccacgcacttacagggcttctcccctgtgtgaatcctcatgggtcgaacgaagtcgaccttttcaggaaaggcttttccacactcctggcattcataaggcttcaccccagtgtgaatctgctgatgtcgaacaaggaggctgtttttgttaaacacgctcccacattccttgcatttgtaggtcttcccctcacgaaccaaagtgtctttacttggtccctgggagtcacattcatggagattgtctcctgtggagacctgctcctgtaaaacctgtgagtgcagaccatcacctgtccccaacccatcgcgtttagggctcatcttcctccagaaggtctccgtgtgggagactgcagccaaactcaagtgcccttctgcatttccaactgtgtccggaattggtgggttcttggtctcactgacttcaagaatgaagccgcggacccttgtggtgagtgttacagctcttaaggtggcgcgtctagagtttgttccttctgatgttcggatgtgttcggagtttcttccttctggcgggttcgtggtctcgctggctcaggagtgaagctgcagaccttcgtggtgagtgttacagctcttaaggcttaaggcggcgcgtctggagttgttcgttcctcccggtgggctcgtggtctcgctggcttcaggagtgaagctgcagacgtttgcggtgagtgttacagctggtaaaagcagtgtggacccaaagagtgagaagtagcaagatttattgcaaagagcgaaagaacaaagcttccacagtgtggaaagggaccccagcgggttgccactgctggctccggcagcctgctttcattctcttatctggccccacccacatcctgctgattggtagaggcctggtctgttttgacagggcgctgattggtgtgtttacaattcctgagctagacacaaaggttctccacgtccccactagattagctagacacagagtgtggacataaaggttctctaagtccccaccagagtagctagatacagagtgtccattggtgcattcacaaaccctgagctagacacagggtgctgattggtgtgtttacaaaccttgagctagatacagagtgccgattggtgtatttacaatccctgagctagacataaaggttctccaaggccccaccagagtagctagatacagagtgtagattggtgcattcacaaaccctgagctagacacagggtgctgattggtgtgtttacaaaccttgagctagatacagagtgctgatcagtgtatttacaatccctgagctagacataaaggttctccaaggccccaccagagtagctaggtacagagtgtccattggtgcattcacaaaccctgagctagacacagggtgctgattggtgtatttacaatccctgagctacacataaaggttctccatgtccccaccagactcagaagcccagctggcttcacccagtggatcccgcaccggggctgcaggtggagctgcctgccagtcctgcgccatgcacccgcactcctcagcccttgggtggtcgatgggactgggtgccgtggagcagggggcggcgctcatcggggaggatcgggccgtacaggagcccacggagggggtgggaggctcaggcatggcgggctgcaggtcccgagccctgccccacgggaaggcagctaaggcccagcaagaaatcgagtgcagcgccggtgggctggcactgctgggggacccagtacaccctccgcagccgctggcccgggtgctaagcccctcattgcctggggccggcagggccggccggctgctccgagtgtggggcccgccaagcccatgcccactctgaactccaactggcccgcaagtgccgcgtgcagcccgggttcccgctctttcctctccctccacacctccctgcaagctgagggagccggctccggccttggccagcccagaaaggggctcccacagtgcagcagtgggctgaagggctcctcaagtgccgccaaagtgggagcccaggcagaggaggcgccgagagcgagcgagggctgtgaggactgccagcacgctgtcacctctcacaaccactctttccctcactcacctcaacctggaggaacttctggctccctgagttagtctttccaggagcaaggctccctaggacaaggctggctggctttggcttttactttgtcacctggacagcagctttagcaaaggtattttctgctcttttatcactgcttcagctagtaggtcaactgtggtttgcatgcccccgtgacgagtggtctgcaggtctctggtgtcacctcccagtacggggtcctctggggctggtccagctgctcccacttcttccaggttaagatcatggacatgtcctgcaccactgcctcggatgtcgctgcaatggagcaagacaaaagccacgcggcacctgcatccgcatatgcagagagtacttccgactacagataccagagagccgcgtgcagcctccgccagccgaactacaagtctcagaggcctcagtttcattttttaattcctgggaatttaaccctcaattattctaaatggaagttgatgccggttgggtcggggcgacctgcaagcttgcgcacaaacgtgcacataagaacatacatgtaaggaacctgttcatgcagggcgtggagagagtgtgtcccacttatcacttaattttacccgctgaccccacgataaactgtaccaaggggctggccattaaagtcaatccagtcaaaatactcagtgtggagaagacatggaaattcag

SEQ ID NO: 316608 - DNA, 4001 bp, Homo sapiens
gacaattggctaggcaaataaaaatagtaagtaaaatcacacaaaaaataaagaaacttaaaaaacaaagctaaaaggctgggtgcggtggctcacgcctgtaatcccagctctttgggaggccaaggtgggtggatcacaaggtcaggagttcaagaccaacctaaccaagatggtgaaatcccatctctactttaaaaaaaaaaaaagccagatgtggtggcaggcgcctgtaatctcagatactcgggaggctgaggcagagaattgcttgaacccaggaggcagaggctgcagtgatccaagattgtgccactgcactccagcctgggtgacacagagtgagactctgtctcaaaaaaaaaaaagaaaaaaaccataaagactctaagaaccctggtgtaaccaagaatttcttaagacaacaaaatgaaaagagtgaatatatttgaatacatcaatatgaaaaaaatctctgtccaaaagaaaagcaaaagaaaaaaacaccaaacacaaaccactaatagatgtggaaatgtaatagccaacaggaaggatagtttgaaagtccacagtaaaactaaaaagacatattccttacgctacaggaatttaacttgtaagaatctgccctgaaaaacacttgcacgggtattcagacatttacacaggtatttactaaaatattctctgtaataacataatactggatttaacctacttgtccatcaatatggctaaataaaagtagcatttttataggatgaaataccatacagcacctaaaaggaacatactagatccttatgcatcaccatgactgttccactattcaccaggtggccaggctgtgctgccaagattaaaaggccatccaaggaagggatagcacatgatttgaggtcgctgaggacagataccaaccacatcaggccccaagaggtacagcgtatacttacagcaaaaggagaaacagggaacaagatccagcctcctgcaatgcaaagagcccccacacccagcagatccactccacagctatagggctggtgtgatgcacacaccccacttagtaaggaagaaagatctcaatccaccctccccactcctatggggtgtgaaatacagaaggctgagagaatgaatgaaggccactgacttaagagattaaacacaacaaaggagtacacatgaagcctgaaacactgaaagacacaaggcattaaatgcagcagcacaggctgtgagggctctaactctgcaaggaaatgttccaggctcaaggtcactcttacattcttaacttggcaatgggctatttaaaaaaaaaaaaaagacattaaaaactgtcaattcttcttgtctcccagtttagatattccttctttcattaatttaacaaacaccttctaggagcacctactatttcccatacactaaggtaacagcagttaataaagcaaacagaaagcactgccctggcaaggggcttatgggaagataaccaataaacaaatacatgctatgttagacggcgacaggtgccaggaagtgaaataagacaagaaaaagggagaagtctatgccagatgttttcaatgtcaggagacctggagactaagatttccggacggtggctactttcacttttcttccacttatctaattgtctctaataagtacgctttattcgcataattgggtgaaaagataaagccagaagaaaccgggaattttccagattctctgccccagacgcccggggggcgaagaggtatgccctcggcgcggccgggcgggatccacggccagacccccgccccgggtgcagcctccaggcccggcctcacctgccactctcgcacgcacagccgcccccgctccgcaccccgcgccccgccgggccgctcaccgactccgccgccgagagacaatcatccaaacgccgccaccgcagccgaccgccccgcgcctacctcccagcttccccagttgcgcacgcgcgtcgcctccccgggccctctgcggcctctctaggaaactgggagggccaacatctctgcttctccctgggcccagggccgctggcggcgggcggcgggcggcgggcggcgggcggcgggcggcgggcggcggggcttgtccagcatccttcgcctccttccgcggacacttgtcttccacgctctgatgcccaggcgcgctccagaactctatcggctttggcgtattatcctacatccctcccatcggttctgcacggctgccctggaggcctcttttccttcagggaagaaagggatccaaagctagcggtgaaaatagagccagcggcctggcgcggtggctcacgcctgtaatcccagaactttgggaagccgaggtgggcggatcacgaggtcaggagatcggtggctaacacggtgaaaccccgtgtctactaaaaataaaaaaaaagtagctgggtgtggtggcgcggcgcctgtaatcgcagctacttcggcggctgaggcaggagaatcgtttgaacctgggaggcggaggttgcagtgagccgagatcgtgccactgcactccagcctgggagacagagccagactccgtctcaaaaaacaaacaaacaaaaaaatagggccagcacatccccaaacataaaacccttgaatggagaaattcccaaacaaggcaataagcccagcactggccgtgagagtttattatccccttttaagtaaatgctacaagccctaggcgcacttttgcaactgttcaagggtcatcaggctgcacatgactgaccaagacactcagttgcccactttggatggagctacagctttgtgggaaaaacagataatagaaattacacaaatacatcaatgtcaagtggttacgaacactgttgaaatgtaacagagttatttaattgacagcgactgatgataatgcttgtattttttctggtacttttctgtatacttccggtagctcataacacactggctgccatgcattgatttgagttgcccaaggaaatagagtcagtaactggaatagccactgaatccaaatcttttggtcttttcactactgtgcttcataaaagctctcccgtcccacgtccctgtagagggagagttggggatagcatggctcctagctgagatcccagaagctaggggtagaaggttgtgggcaggatagtgaggagggcaagattccaaggaaaactaaaatccctgcccaggaacggttaccacctgggaaagcaggaatgacccaacgcatcaaggcccagagtgtactcaaagaacaacaggttaggatgagggtcaaaactcagaccagaaagagcattagctgagcttggtggtgcacgcctgtagtcctagctactgtggaggcagaggcggaaggatcgcttgggccggggaggtcgaggctgcagtgagctatgattggggcagtgtactccagcttgggcgacagagcgagacccaaggaaggaagggaggaagggagggagggaagtgagaaagagagaaaaggaatgaaagagagaaggaagaaagagagagaacgagaaagagcaggctgcttcttgggctacaacctggagaggctgtgtaacattatgagttggagaagcaggtacaaaatagtaaaaacttctataaagtagactaacagcatgtggcagaacagtgggtttttaaaggtgggaacaagagaaccaaacaatagcaaaaatagattgattaacatcaggttacttttcttttaaggattaaagcagagggggccttccttatgctgactggggttaactgggccctttctgaatggttgctatgaatctcctgtttgcaggaaaaactggtctgttaggggattcacatacttctataaaatttcagtttgattatgtggcatttagcattaggaattccttcatttatttatttatttattttgagacggagcctccctctgtcacccag

SEQ ID NO: 316609 - DNA, 4001 bp, Homo sapiens
ctgcaggtaccttttccctatttgctatactacggtaggtcaaggaaagctttctggaagaagtgacttgtaatccataactccatgggtgagaaacacaaaccgggtgaagagagcagggaacagtgtcaccagcaggaggaacagcatgtgcttcatcactctttcatgatatagcctctactttcagcacatctgctccactcacctcttggacatttttgatcccatacggctggcttgctcctgccccatcctggccttgactattccttttagcttagttccttccccacttgaactggtctatctcaagggtctaattttttagtccaaggtgagaatttgttgtgctagctcattcagtcttaggttggctgcataaggtggagtaatggtggcataggttaggtaatatgaaataaaatgacacttctcctcttttagcaggagcttaaggtggcagtctccaataaaaggcatgttgttttggtacataatgctgacatttatagtccagtatgcacctaccttcccaccttcagtctgtatgtcaatgcaggactcaatgaacactcatatatgatcagtaagttagcttaggcaaagctatgctgtggtaaaaaataatgctaaaatctcaatggcttcaaacaaacattttgtgcatgttacatggccaacactaactggcttaggatctgctgtattccacaccttctcactccaggacacaagcttaaggagagtccttatccgggacatgctgctctcctgggataaggaaaagagaaagatggtggaaccatatgactgctcttaaagcttatgtttggaaggggcattcattacttctgttcacattccattgctcaaagcaattccatggccaagcctaaggtccatgtggaggaaggatactctttccataggaagcggcagtaaatattttgaacaaatgaacattcttgcatagtttattacagccggtatcatttgtcccattttgcagtgagaaaactaaggctaaaagaggtaatttgatcaaggtcataggttagaattcagctctgaatggcttcaaatttggtccaggcaagctcttttcagatttttttttttttaacactatgtaggcacctggaattgtaatttactcaggggcacaaccacttctcttcaactccagaagcttctccgtgcatctctagagctaaaccacccatgaaatcttcctggaaggatgtgaagctagaaaggggttgggctcggggaactgtccctttgagagctgacttttccatttagtaattttttttaactcttgaagtatttatctgcttgatgggtttgtagatcctttggacggagatcacctatcatctatcaccttttgttttgtctgtgtgtgtgtgagagagagagtctgagttcctcaaagcttttttctaggtaatttttgatacttcagattacaatggatatctatattcacaaaaaatattagtgggatagaaagagtatctttaggtaggaagaggggcgcagaagttacagccaacacagagaatccttcaatgtttgtaaatatctgttaatttcccttgcctctggagcagttttcccggtttcagagcctctgctcctaggtgcacgtgcagtgtggtagcaatggataggttttgacttgccaggtttatgcgtgccattcagggcaggggattagggttaggccagtgagtgacctaggacactcaatttaaggaagcactcgcacaaacctgagagttcgcgcgcctcaccccagcccagccgtgtgtctgttaagcatttatcataatcctgctgcatgaaaatgcccggcgagcttacctgtgaggatcacctgccactcccctcctccgccagacaacgcggagggcctccctgagctgtgactttgctccgccggtgataatttccaggttactgtgtaggagcgtctggcgcagcatcgtgtgcggaagaccgagagagggagtgtgcgtgtgagcctgtcaggccgggcgggtccatatccgggtggaccgggtgggtggggctgcccctccctccaggtcccgaggtggataaggggtggggagtgacgtgcagagattccctttcgccccttcggatccaagagagggtggcagaaggaatgcgtgggtgacttggcgtggatttagggcgtgcccaccctgcagatcggcctcctagagtgtcccgagggcctgagaggccgcagggacacgaaggaagagaaggaggaacccgaagagggctcgcctagccggccacccgctccgaacttgcccgggaaactagtgcggagggaggggccgggccctggccgcggcgggaggaggggcggccgcagctgcatccagccccgttggcttccttcccagctctccttcgcctcctcctcctcttcctcctgtatgagtcaggcatttcccggggatttggagcaggcacgcgcggcccgggcgtccggagctgtagcagcagcagcagccgccgtgccggggccgccaccgcggcgggcacccgcgtcccgggcgcccacggaccatggagagggcagtccagggcacagacggcggcgggggtagcaacagcagcagccgcagcagcagccgtgctacctcggcgggctcctcgccctcctgctctctggcgggccggggggtctccagccggtcggcggcggccgggctcggcggcgggggaagccgcagcagcccgggctctgtggccgctagcccgtccgggggaggcggccgcaggagggagccggcgctcgagggcgtgctcagcaaatacaccaacctcctccagggctggcagaacaggtaacgcgccagccgcccgcgccaccgcgcgccgctgtgtgtgtgtgtgtgtgtgtgcgtgcgtgtgtgtatgtgtgtctgtgtatgtgtgtgcgcgcgcgattgtgccttcagcgaacccagtgatgcctcccaacggtgcccttcctgcgtccctgctcccctccaggtggggttctcaggatggggcgcgccgtggctccaccccgggaccgcaccgcagtggcggggagggaggcgagagccctggttttcttctatgctggcacctgcagagactggagtggtggcaggaggatcgtgctggtccccgtgctctgcttgtccgcggtttcccgcacgcctgaagaatgactgggaaagggaggcagaaggggcgtgctttgtgccggggtgaaaaagcgttagcacgtccgctccgattacagtaattctctaagtaacagttcattttaaagtttggtgtttcagaacaccaccaccatcaacaaaaaacctgccacttgtcatcctgggcgactgtgcatactcctgccccagtttgtgccttgcagcctccgatgtttgtaatggaagttttgtttaaaaacagaaagaggccgggcgcggtggctcacctctgtaatcccagtactttgggaggccgaggcgggcagatcacgaagtcaggagttcgagaccagcctcgccaacatggtgaaaacccgtctctactaaaaacaaaaaaaattagccgggcgtggcggcgcgcctgtaattccagctactccggaggctgaggcaggagaatcgcttgaaccccggaggcagaggttgcagtgagccgagatcgcgccattgcaatctagccggggcgacagtgcgagactccgactcaaaaaaaataaataaataaaataaaataaaataaaataataaaaagaaagaaaaaataccctcccccttttaatattagtagcaatttacattattatcattatttcctcttcaggtcccatttgaagtttcctgctcacttcccccttgcagttgagaagcctagttatggacacgtggaaggatggggctgtcgaggaaaggggctcaggaggcacttggaatggtggtagtgtgtgtgatctgcca

SEQ ID NO: 316610 - DNA, 4001 bp, Homo sapiens
aagaaagaagcctgaataagcaatacactccactgcacccacatttattccatgctccatgctccaccacttccttctcatgatgggtcccaagaactcctggaagacattggaaactctagacccacactgttgtccccaacacagaggtgtatcctaagaaattacagaatcaggaatttaagttggtgagttattttgtggttctgaaatgctttctagctaacatatatttttcacaggagaaaataacatttactgaatgtacactttgcacaaagaaggcactttgtgccagataactttcctatagctgctcatttatattttttataatgatgggtgaggttacaattattactgcatgtacagagaaaagaatgagtctcagaaggtttaaatgacgtgaaaatgaagtggaggaactagaattcaaccctaagtctttctgatagtaaagtttgttgaacaagctacctaaatttcatctgttattaaatttaagattttctttattgccatttatcatcagctgttttctttagctttttactttgtgtatcttttaatagatctgttcatttataatgagtaaacaattttgatgtaattaatacaattttctttatagatatattttataatggggcattatgagaaataaaattatttttaaaaaagagacagagagaattgtttatttctcattgtgaaaacagcaaaaaaattattattgactaaactagacacatttgtgttggccaaaaataaatgaaaaactcatgttaattgaaacagctcactgagaacaagtagtaaactcttagccttaaagctttaaatcacatctcaggttgtcccaaaaaggcatgacactgtcctactctccttaacaaaacctacagcactttcatagtgattaataccctaaccattttttaatgaatacgaggtggaagtagaaggcagctttctttaacagaaaatatattgatttttatgttagcaggtatagattcagataaatcccttctcagccattctgtagatttgtcatttaaaaatcaagataatggccaggcgtggtggctcacgcccgtaatcccagcactctgggaggccgaggcgggtggatcatgaggtcaggagatcgagatcatcctggctaatacggtgaaacaccgtctctagtaaaaatacaaaaaattagccgggcgtggtggcgggagcctgtagtcccagctactcgggaggctgaggcaggagaatggggtgaacccaggaggcggagcttacagtgagctgagatctcgccactgcactccagcctgggctacagagcaagactccgtctcagaaaaaaaaaaaaaaaaaaaaatcaagatgatgatcatagactttacaaagtataagtgcataaagtatagtatagtttggacatacagaaggcattgaaaacttagtttcaaggccaccacatattgatgtgcaggtcgtaccctccacaagggcatccaatgcaggaaaacaatgtctaggtctgaacttctttggactagccatgtactctagagctaagctacaatacaaagtgtctcatgggctagtgacatccctaattggttgaatctctatttgagttacaatgatatttgtgctgatctgtgttttaatattaaggcacattaggcaaggaattttaaaaggacacccatatctcttataaaggcagtatccctattttgaatctctatagtcttggcagggcttacgacattttcaagccttctttatagttcaactgtaagttaaaacaaactgatgaactattatcttgcaaatttcccatcctcaaccttaccttcatcatttcccctgcacatggaaaacctgagcatcatcttgccatagcaagcttggagatgctattttagcacagtccctaaatacttttctgaaattgaattgtatgggattgggggattatgttaacaccctttacattcctcaaaaacatatcatcctggctgctcaggctccctagatcttaggcaggtgcaattccagacatgtgtattttagctctgatctggttataaaggtttagtggagtttcttttcagaatgtagaacctgattctgtggtttactctggaataatctaaggtgcttgctgtcccactgtggctccagcaaactcttgacagagaatctgagcagaagcatttttcaccttctccaccacatctaagtgcagcaaccaatgtctctgcttggattttaatagtggtttacaagaatgccttgtctaatacatccaataatacaaaatattaataccacagtctgagatgataatggccttgaagatatgtgtgcaaaagagttttgtatgtgtttcttatttagaatcttcataagtttaaattgatgggaatggggaggagaaggaggattataagtaaaatgttgaattttaagaaattcagaagtgtttgtgtaaaaaaagagacatctgtatctcataaactgttactaatagaaaaggaagtcatatgctaagtgatttgctgtcaaatatgtcaatatttctcatactaaattttctttttaaaatgacttcttccaacatataaatctctaatttctttgcttagaattaaatttggagtcagaaaaatataatgcacttttaattcctcctcaattttatattaattggtatagttctgtcacaaacattggtctttagattttaatataaaataatctttgtttaatctttttattgagatctgttactgtatgtaccaggcactgtgctatgtttaatattcaactaattacatagatttaatttttactcatgttaaaaatgtgaaaaccaaagcttaaatattttaattgactcgcacagggtcacagacatagtaaatggcaatgcagaattcaaaaatgagcttgacatttggaattattacattattctctttgacttgattggaggttttcaaataaaattaatgtcctactaattttcagaaagtaaattatattaataatgtatgcttaagatatgctctgaattaaataattcagatgattgagacaaaatattttttaatatctacataattttcatgactctatttcattaggcagtgagtgcataaagaacattgttcttggccaggcgcggtggctcacgcctataatctcagcactttgggaggccgaggcgggtgtatcacgaggtcaggagatcgagaccatcctggctaacacggtgaaaccacgtctcttctaaaaaaatacaaaaaaattagccgggcgtggtggcgggtgccttagtcccagttactcgggaggctgagtcagaagaatgccttgaacccgggaggcggagcttgcagtgagccgagatcacgccactgcactccagcctgggtgacagagcgagactccgtctcaagacaaaaagaaaaagaatattgttcttttcaaaaattgatttaatgtaatacttataagttttaagagctgactgtgtaccagagtgttttaaatacttttatatgtgttttctaactatgagataggcaatttattctccctatactggggaatgagaaaactaaggcacagtaatctgaagtaatttgcccaatgctaagcagacagccactgttagaatcaggattcacgcccggagcaatgactacagaaacaaccctcaactattatgtggcaccgccttccagaaaatgatgcatataatgctaaatcaaatggaaatttggcaatttcttggtaaatttgatcagtattgctttattcttgtgtatactgatcaaataattattgaatgtttatatgtgtctggtactctccagggagtggggggatgctgaggtacagcaatcagaaaaatttttattgcatatctgcatagaacttacattctaacttctaagtcagaaggaaccaaaatctacaagtaa

SEQ ID NO: 316611 - DNA, 4001 bp, Homo sapiens
aatcctttcttgcccttctggaggaaccctatccctgtgaaagcagggaaagctgcccatcctggtgaagagctcactgtgttggagtcctacattcccaacaactgcaggtcaacacacaggagaaagaacaggcagtggacttttttttttttttttttttgagacggtgtctcgctctgtcgccccggctggaatgcagtggcgcgatctcggctcactgcaagctccgtctctggggttcacaccattctcctgcctcagcctcccgagtagctgggactacaggcgcccgctaccacgcccggctaattttttgtagttttaatagagacggggtttcaccgtgttagccaggatggtctcgatctcctgacctcgtaatccgcccgcctcggcctcccaaagtgctgggattacaggcgtgagccaccgcgcccagccaccagcagtggactttatccacaaggctcggcctctgtctcttcatctgtaaaagaggacagtttttaaccttcacagacggctaatttttaaaacttcacaaaactgtgaggttcaacggaaatcaaagtgcaaaaggcaaaaaaagccaggatgtgcgcacacctgtggctatcctcccagcgtgttaaggtcctgaatctggccacattcatctctgctcctctagcacggagtgtgcaccccgtaaacaaatgacgagactgaggaaaataaagacctgacacatagctccgtgccactctgtgaagatgcgtgccgctttcatcaagcacaagcaggttaaggatatctgttgccgccacctttgggaagcgcagctgtggtgatctgcgctacctgccatcggaatccctgcggcagggcagggccaagatctcaaatcgaatgacatggaaggagctagaatacaaatcccgaagagcctgcgtccccggcttgctaaggtctggcaggcccctctgtggggcggacgtggcaccccagacctgcctgcaacaccgcgcagcccgcccgcccccgagagcgcggttaccgggaaagtcacacttgtaagggcgctcgggctcgaagtggctgcgctggtgggagctgagcttggcgtgcgtggggaagcgctcggcgcacacctcgcacttgaacaggctctcctgctcgtggcccttcatgtgcgccttgaggttatagaccgtagtgaacttcttgccacagccgcccactggacagccgaagggccgcagcttgtcgtgcgactgcaggtgccgcttgagcttgtaggacgttgtgaaggcccaaccacagccctccagtgggcacttgaagggccgccggccctgaccgccgccgtgcgtgagcaggtgcaccttgagctggtgcttcttggcgaaggccagcgcgcactgcggctcggggcagcggtagccgggcgtgctggggccggaggcctggggcgcgcggcggggagcggcggcgcccgcggttgcggggccgggcggcgcagacagcgcgaggacgccgcggtcgagacgcaccagcaggtcctggctgctgatggtgacggcgcccgccggggctacgccagggccggggggggcggccgggccgctggggccctgctcggggcggctcgccaggttgacacgggagccaggctcggcctcctgtgatccggcagcctcggcggcagcgccgccgtgcggcacttccagcagcaccaagaaagagtcgccgtcgctgtcgtcctcggcgggcggcgggcttggcccggaggcctccccgggccgcgccccgggcccgccatcttcagggccccgcaccagtagcaggcggcggcgcgcggggctcgcgccgagcggcgctggggctcggcggagcgggccggggccgccgccatgttgccctccgcgcgcagtcggggcggggagcagcgccgggaggtccatcttggtcccagcgacggcgtcggagcagcttcggacgcagagctgcccgcgccccgcccaggtgtgcgtgcgccgccccgggacgcgatccgcgccaagccccggcgtagagtccggctcggaaccgcgcgtgcgcggacgccgccgggcgatgcgcgaggcctgctgggctgacgtgacgtgaggctgggctgcggggcgccggaggcggaggcgggggcggggcgccgggaccgactagggcggggcgcggggtcggggggcggggcgcggggtcggggggcggggcgcggggtcggggggcggggcgcggggtcggggggcggggcgcggggtcggggggcggggcgcggggtcggggggcggagcgccggcacctacgagggcgagcggcggggcacgggaccgacaggggacggggtgaggctcccaacgctgagcgattccttctcgttcccgctggcgtggaagacgaggcttgtcttgacttcgaatcgtattaatatttcagacacttaacaggcaacctctcgtaggcattgactgcgtcccaggggctgtacctgtccgagctgattaagcgtgcgcggtcacccaggggtgaggaaacagggacggcgagctcgagtcactcggcagccggcagatccaggattcgaacctgtccaacaggccggacgcctacccccagctcacttaagtgcaagctcgcctgccgccgctggcgcacagacctcgtttgctttggcccaggtccttgctcggcacacggggcctccctgatacgcaggacccctgcctgtatttccaactgtatttcctactaaacttggcacaacctcactctgcaacagcttaattacttactgtttccggtcctcaccctcccccacctcaccgtacacctccgcattcaatctggactcctccacttcaacttcaccaccactcagatccaaacccgcactttattcctgggtacctgaaaaataactactagctggtcatcggtctccctccgctccactcgctcccatccacggggcaccgttttatgatctaaaaattgcacatcaaattatgctcacctccaccttgctcccgaaggcgcctatggccttgctagtctaccctcccctacctgtttgccctcacttcccgccactctcccgctgccccccccacccctcccccgcaccccacctctttttcccagttcatccagcaagccaagctggttccagcctcagagacttggcgcagctgatctctgattcctctgggaggactctgcgccccttctgatccaaagcacatgcttacccagtcccgtattcccacctctgtctgatctgtttgctcttagagctctcatcacccgttgttttgttgagttccttccctgctccttcactgtctctccctctctggaatgtaggctcctggagcccaggaactgtgtcctattcactgtgtgtgcccaggaagactcttggtgcatatttgttaaatacatgaatgctttattattaagagtatttttttaagtaacacaaattataatattaaaaagaataggatacatctattatatatatcagtttatgccgaaaacatattgttcctagaccattcagtagaggaaagaatagtcatttcaataatggcggcactgggacaactggatctccacatgcaaaagaaccaatttggacgtgtatctctcatcagaggcaaaaattaactcaaattagagcaaaagcctacacgtaagacataaaactatttgaagaaaagtaggtgtaaatctatgtgaccctggattagggaatagtttcttagatataatattgaaagcacaagaaagaaaaatagataacttggacttcatcaaaattaaaaacttactcaggtaaaaggacaccaataagacagtgaaaagacaactcagaatgggagaagggtgtgcaaatcgaatatctgataaggatctactatctggaatatataaagaactcttagcaagaagacaaacagtccacttttttaaaaggc

SEQ ID NO: 316612 - DNA, 4001 bp, Homo sapiens
ttggttagtattcaatgactgagtatttggtcattgaatgaccaaatgggtcaatggctttagaatatttatgaatggaccttagaatatttctttaatattctttatcaatgggccttagaatatttcttatgaaaataagccaataaaattatgttaagtattgatacttacccagcactcggagaatactgaagtgctctcttcatcatctcttctccaaattggatggtctttccattttctacagtgattacggcagtcttaaaaggaaacatgtttggatttggtaagccaccagccaaggagatcatcgattttggtcctctgctcaatatgtcagctacaatacacatggaagagaagaaacaatttcattgaagattgttataagcggatagttaagcatgcattatagtcaataaaactataaagtttaacgatttctagtgatagagtgtgctatggtctaaatgttggtgctcccccagattcatacttggaagttaatactaatgtgatagttttaacaggtggggtctctagaggtgattaggtcaggagggatccaccctcctgaatgggattggtgcacttataaaagagggctgagggaatgcccttggcccttctgccacgtgaggacataggttctcccttctaccacgtgaggatgcagcaagatggctctgtctataaggaagggctctcaccatggtgacacagaagctgctggcactttgatcttagacttcctagcttccagaactgtgagaaataattctattgttcataaattacccagtttgtggtattttgttatagcagcctgaatggactaagacaaaagctagtctaaaataaacatacagaataactttttctaggcacctcacttgtggagggactaaagaatgaaggtgaccaaagagaaggcagagggatcagaaagacagcaaagggccacaatagcagaagccctcctccacttagccccgacctgtctgtgagcttcatggcccacccctctcccatttacctggccctctccactgtacacccatctgcacgctgtgcatgccccttctcagcttcccaggaagagcctttcttgatagcacgccccctcccttccaaggccgtgccccacagcagtctgcgcctctctctactgttgctcctactctgctccagcagaaatacccgccttccgtttcagcccgagttctttgagaacaaaggctgtgtctatttcatttctgcacgcagagcctggctcaccgcgagcgtgcacaggggtacgcatggatgcaaccaagcggtggcttgctagggaaccctccttagaggctgtgcgaggaatgccccaccccaaaggagagatggtcaccccgtttctcactcatggtccggatgggagaagggtttctggctgcgctcgctgccgtgatgaaccgtgcgtaattcatgtcttctgacagccaagcatcaagcttcttcttcagtggttgaggactagaaaaaccaaagagcctcgtcaagtcctgcctgctaactcctcactctggcaacgccaccgcgagatgtgtccccccgctgcgtctggcttcccgcgcgcggtgcccggagaacgccgccgaaactccccggctggacgctgcgttcggtctcccggtcctaaacgggtctggggctgtgtggcgagcccggcaaagtccacgccgcacgcgctcctgcggccgccagggcccaggccggttttgccccgccgcgggcctcgccgcgccccctcccgccccgcgccgtggcctatggccgcccgcggcgcgcgcctccccgtcccggatcatcgccctcagagcgcagggcgcggggtagcccaggcgcgaggcgcttgcagccccaggccaatgactcttgacctcgccgctgggaatcaccgcaacccggcgtccgcgttggccggcctaggcgccggcccagaggctagcccaggggctgaccgaggggaccggaagtgcccgtgatcctaatcctcgggaaccatctggcggcgacttgggtccactgcagggggctcccgagctgcgcccagccgggagcggccccaccctcgttcccgcgcgctccgctggcctcctctcagtcactgggactgtgcattttgcccgctcagaccatggctatgctaaatacccatctttcgttagtgaaactctgggcactctcctgggaagcatcccggcgaccaagacgaatttcaacatcactttctcgaagatctcagcattttggagtgacgatggagttctgacaaaaatttttgaaaaatcactctgagtctcttcaattttagtgtctaccctcacattgaatttctgacctttcgttaaataagaattatgttggaagtgaatatccggatctttttgggtctagcaccttgcctttttttttcttacaaaataacccttcttactccccacctccctcaacttttctgcaatttctccttcctgaatcaccaaaatggaatgtacaaggtttaatgtgagcacttaatgagggaagggtttcagacaacctctctttgactttaaaaaattctttaatggttattaaaatgaatgaacagattcattcattcagcacaaatttactgagtacttcctagatgattattgactcactgccaaatggctctcttttaagtttacctaataggttggtcaaggagccactgcttttatctaggtcctggcagcaaaaggctgagataacccagtaaaatctttgtgctagcagctaaataacaaaaaggaagtattgagaggtgacagcctgctggcagccctcgcagccctcgctcactcttggcgcctcctcggcctcagcgctcactctgaccgcgcttgaggggcccttcagcccgccgctgcactgtgggagccccttcctgggatagcggaggccggagccggctccctcagcctgcggggaggtgtgtagggagaggcacgggcgggaaccagggctgtgcgggcgcttgcgagccagctagagttccgggtgggcgtgggcttggcgggccggcactcagagcggcgggccggctccgccagacccgggtagtgaggggcttagcacccgggccagcagctgcggagggtgtgcccagtctcccagcaatgccggctcaccggcgctaccttcgaattctcgccaggcctcagctgcctcccagcggggtgggactcggacccgcagccagccatgcctgagcctccccaccacccacccgtgggctcctgcgctgcccgagcctccctgacgagtgccgccccctgctccacagcacccggtcccatttaccgcccaagggctgaggagtgcgggctcacagcccgggactggcaggcagctccacctgtggccccagtgccggctccactgggggaagccagctgggctcctgagtctagaggagacttggagaacctttatgtctagctaagggattgtgaacacaccaatcagcaccctgtgtctagctcagggtttgtggatgcaccaatgggcactctgtatctagctaatctgatggggacttggagaatctttatgtctagctaagggattgtgaatacaccaatcagcactctgtatctaactcatggtttgtaaatgcaccaatcaacactctgtatctagctcagggtttgtaaatacaccaattagcactctgtatctaactaatctagtggggacttggagaacttttgtgtgtagctcagggattgtaaacgcaccaatcagcaccctgtcaaaatggaccaatcagctctgaaaaacaggccaattggctctctgtaaaatggaccaatcagcaggatgtggatggggccagataagagaataaaagcaggctgcctcagccaccagcggtaacccgcttggatacttttgcagcgtgtggtggttttgttttctcgcagtttgca

SEQ ID NO: 316613 - DNA, 4001 bp, Homo sapiens
atacttacccagcactcggagaatactgaagtgctctcttcatcatctcttctccaaattggatggtctttccattttctacagtgattacggcagtcttaaaaggaaacatgtttggatttggtaagccaccagccaaggagatcatcgattttggtcctctgctcaatatgtcagctacaatacacatggaagagaagaaacaatttcattgaagattgttataagcggatagttaagcatgcattatagtcaataaaactataaagtttaacgatttctagtgatagagtgtgctatggtctaaatgttggtgctcccccagattcatacttggaagttaatactaatgtgatagttttaacaggtggggtctctagaggtgattaggtcaggagggatccaccctcctgaatgggattggtgcacttataaaagagggctgagggaatgcccttggcccttctgccacgtgaggacataggttctcccttctaccacgtgaggatgcagcaagatggctctgtctataaggaagggctctcaccatggtgacacagaagctgctggcactttgatcttagacttcctagcttccagaactgtgagaaataattctattgttcataaattacccagtttgtggtattttgttatagcagcctgaatggactaagacaaaagctagtctaaaataaacatacagaataactttttctaggcacctcacttgtggagggactaaagaatgaaggtgaccaaagagaaggcagagggatcagaaagacagcaaagggccacaatagcagaagccctcctccacttagccccgacctgtctgtgagcttcatggcccacccctctcccatttacctggccctctccactgtacacccatctgcacgctgtgcatgccccttctcagcttcccaggaagagcctttcttgatagcacgccccctcccttccaaggccgtgccccacagcagtctgcgcctctctctactgttgctcctactctgctccagcagaaatacccgccttccgtttcagcccgagttctttgagaacaaaggctgtgtctatttcatttctgcacgcagagcctggctcaccgcgagcgtgcacaggggtacgcatggatgcaaccaagcggtggcttgctagggaaccctccttagaggctgtgcgaggaatgccccaccccaaaggagagatggtcaccccgtttctcactcatggtccggatgggagaagggtttctggctgcgctcgctgccgtgatgaaccgtgcgtaattcatgtcttctgacagccaagcatcaagcttcttcttcagtggttgaggactagaaaaaccaaagagcctcgtcaagtcctgcctgctaactcctcactctggcaacgccaccgcgagatgtgtccccccgctgcgtctggcttcccgcgcgcggtgcccggagaacgccgccgaaactccccggctggacgctgcgttcggtctcccggtcctaaacgggtctggggctgtgtggcgagcccggcaaagtccacgccgcacgcgctcctgcggccgccagggcccaggccggttttgccccgccgcgggcctcgccgcgccccctcccgccccgcgccgtggcctatggccgcccgcggcgcgcgcctccccgtcccggatcatcgccctcagagcgcagggcgcggggtagcccaggcgcgaggcgcttgcagccccaggccaatgactcttgacctcgccgctgggaatcaccgcaacccggcgtccgcgttggccggcctaggcgccggcccagaggctagcccaggggctgaccgaggggaccggaagtgcccgtgatcctaatcctcgggaaccatctggcggcgacttgggtccactgcagggggctcccgagctgcgcccagccgggagcggccccaccctcgttcccgcgcgctccgctggcctcctctcagtcactgggactgtgcattttgcccgctcagaccatggctatgctaaatacccatctttcgttagtgaaactctgggcactctcctgggaagcatcccggcgaccaagacgaatttcaacatcactttctcgaagatctcagcattttggagtgacgatggagttctgacaaaaatttttgaaaaatcactctgagtctcttcaattttagtgtctaccctcacattgaatttctgacctttcgttaaataagaattatgttggaagtgaatatccggatctttttgggtctagcaccttgcctttttttttcttacaaaataacccttcttactccccacctccctcaacttttctgcaatttctccttcctgaatcaccaaaatggaatgtacaaggtttaatgtgagcacttaatgagggaagggtttcagacaacctctctttgactttaaaaaattctttaatggttattaaaatgaatgaacagattcattcattcagcacaaatttactgagtacttcctagatgattattgactcactgccaaatggctctcttttaagtttacctaataggttggtcaaggagccactgcttttatctaggtcctggcagcaaaaggctgagataacccagtaaaatctttgtgctagcagctaaataacaaaaaggaagtattgagaggtgacagcctgctggcagccctcgcagccctcgctcactcttggcgcctcctcggcctcagcgctcactctgaccgcgcttgaggggcccttcagcccgccgctgcactgtgggagccccttcctgggatagcggaggccggagccggctccctcagcctgcggggaggtgtgtagggagaggcacgggcgggaaccagggctgtgcgggcgcttgcgagccagctagagttccgggtgggcgtgggcttggcgggccggcactcagagcggcgggccggctccgccagacccgggtagtgaggggcttagcacccgggccagcagctgcggagggtgtgcccagtctcccagcaatgccggctcaccggcgctaccttcgaattctcgccaggcctcagctgcctcccagcggggtgggactcggacccgcagccagccatgcctgagcctccccaccacccacccgtgggctcctgcgctgcccgagcctccctgacgagtgccgccccctgctccacagcacccggtcccatttaccgcccaagggctgaggagtgcgggctcacagcccgggactggcaggcagctccacctgtggccccagtgccggctccactgggggaagccagctgggctcctgagtctagaggagacttggagaacctttatgtctagctaagggattgtgaacacaccaatcagcaccctgtgtctagctcagggtttgtggatgcaccaatgggcactctgtatctagctaatctgatggggacttggagaatctttatgtctagctaagggattgtgaatacaccaatcagcactctgtatctaactcatggtttgtaaatgcaccaatcaacactctgtatctagctcagggtttgtaaatacaccaattagcactctgtatctaactaatctagtggggacttggagaacttttgtgtgtagctcagggattgtaaacgcaccaatcagcaccctgtcaaaatggaccaatcagctctgaaaaacaggccaattggctctctgtaaaatggaccaatcagcaggatgtggatggggccagataagagaataaaagcaggctgcctcagccaccagcggtaacccgcttggatacttttgcagcgtgtggtggttttgttttctcgcagtttgcaataaatcttgctgctgctgactctttgggtccacattgcttttatgagttgtaacactcaccgcgaaggtgtgcagtttctctcctgaggccgtggagaccacgcacccacagggaggagtaaacaaatccagccgagctgtcttaagagctgtaacactcaccgc

SEQ ID NO: 316614 - DNA, 4001 bp, Homo sapiens
gtttgtttcacctggacatcttctcatttttttggactcagctctaatggtatttccttctagaagccttcttggtcatttgcgattgagaagcaatcactgaggagtgttaaacattcaatatcctttctgttcttaattatcctttgaaaacctttccccagaccttcctaaccattgaatactcatttggttagtattcaatgactgagtatttggtcattgaatgaccaaatgggtcaatggctttagaatatttatgaatggaccttagaatatttctttaatattctttatcaatgggccttagaatatttcttatgaaaataagccaataaaattatgttaagtattgatacttacccagcactcggagaatactgaagtgctctcttcatcatctcttctccaaattggatggtctttccattttctacagtgattacggcagtcttaaaaggaaacatgtttggatttggtaagccaccagccaaggagatcatcgattttggtcctctgctcaatatgtcagctacaatacacatggaagagaagaaacaatttcattgaagattgttataagcggatagttaagcatgcattatagtcaataaaactataaagtttaacgatttctagtgatagagtgtgctatggtctaaatgttggtgctcccccagattcatacttggaagttaatactaatgtgatagttttaacaggtggggtctctagaggtgattaggtcaggagggatccaccctcctgaatgggattggtgcacttataaaagagggctgagggaatgcccttggcccttctgccacgtgaggacataggttctcccttctaccacgtgaggatgcagcaagatggctctgtctataaggaagggctctcaccatggtgacacagaagctgctggcactttgatcttagacttcctagcttccagaactgtgagaaataattctattgttcataaattacccagtttgtggtattttgttatagcagcctgaatggactaagacaaaagctagtctaaaataaacatacagaataactttttctaggcacctcacttgtggagggactaaagaatgaaggtgaccaaagagaaggcagagggatcagaaagacagcaaagggccacaatagcagaagccctcctccacttagccccgacctgtctgtgagcttcatggcccacccctctcccatttacctggccctctccactgtacacccatctgcacgctgtgcatgccccttctcagcttcccaggaagagcctttcttgatagcacgccccctcccttccaaggccgtgccccacagcagtctgcgcctctctctactgttgctcctactctgctccagcagaaatacccgccttccgtttcagcccgagttctttgagaacaaaggctgtgtctatttcatttctgcacgcagagcctggctcaccgcgagcgtgcacaggggtacgcatggatgcaaccaagcggtggcttgctagggaaccctccttagaggctgtgcgaggaatgccccaccccaaaggagagatggtcaccccgtttctcactcatggtccggatgggagaagggtttctggctgcgctcgctgccgtgatgaaccgtgcgtaattcatgtcttctgacagccaagcatcaagcttcttcttcagtggttgaggactagaaaaaccaaagagcctcgtcaagtcctgcctgctaactcctcactctggcaacgccaccgcgagatgtgtccccccgctgcgtctggcttcccgcgcgcggtgcccggagaacgccgccgaaactccccggctggacgctgcgttcggtctcccggtcctaaacgggtctggggctgtgtggcgagcccggcaaagtccacgccgcacgcgctcctgcggccgccagggcccaggccggttttgccccgccgcgggcctcgccgcgccccctcccgccccgcgccgtggcctatggccgcccgcggcgcgcgcctccccgtcccggatcatcgccctcagagcgcagggcgcggggtagcccaggcgcgaggcgcttgcagccccaggccaatgactcttgacctcgccgctgggaatcaccgcaacccggcgtccgcgttggccggcctaggcgccggcccagaggctagcccaggggctgaccgaggggaccggaagtgcccgtgatcctaatcctcgggaaccatctggcggcgacttgggtccactgcagggggctcccgagctgcgcccagccgggagcggccccaccctcgttcccgcgcgctccgctggcctcctctcagtcactgggactgtgcattttgcccgctcagaccatggctatgctaaatacccatctttcgttagtgaaactctgggcactctcctgggaagcatcccggcgaccaagacgaatttcaacatcactttctcgaagatctcagcattttggagtgacgatggagttctgacaaaaatttttgaaaaatcactctgagtctcttcaattttagtgtctaccctcacattgaatttctgacctttcgttaaataagaattatgttggaagtgaatatccggatctttttgggtctagcaccttgcctttttttttcttacaaaataacccttcttactccccacctccctcaacttttctgcaatttctccttcctgaatcaccaaaatggaatgtacaaggtttaatgtgagcacttaatgagggaagggtttcagacaacctctctttgactttaaaaaattctttaatggttattaaaatgaatgaacagattcattcattcagcacaaatttactgagtacttcctagatgattattgactcactgccaaatggctctcttttaagtttacctaataggttggtcaaggagccactgcttttatctaggtcctggcagcaaaaggctgagataacccagtaaaatctttgtgctagcagctaaataacaaaaaggaagtattgagaggtgacagcctgctggcagccctcgcagccctcgctcactcttggcgcctcctcggcctcagcgctcactctgaccgcgcttgaggggcccttcagcccgccgctgcactgtgggagccccttcctgggatagcggaggccggagccggctccctcagcctgcggggaggtgtgtagggagaggcacgggcgggaaccagggctgtgcgggcgcttgcgagccagctagagttccgggtgggcgtgggcttggcgggccggcactcagagcggcgggccggctccgccagacccgggtagtgaggggcttagcacccgggccagcagctgcggagggtgtgcccagtctcccagcaatgccggctcaccggcgctaccttcgaattctcgccaggcctcagctgcctcccagcggggtgggactcggacccgcagccagccatgcctgagcctccccaccacccacccgtgggctcctgcgctgcccgagcctccctgacgagtgccgccccctgctccacagcacccggtcccatttaccgcccaagggctgaggagtgcgggctcacagcccgggactggcaggcagctccacctgtggccccagtgccggctccactgggggaagccagctgggctcctgagtctagaggagacttggagaacctttatgtctagctaagggattgtgaacacaccaatcagcaccctgtgtctagctcagggtttgtggatgcaccaatgggcactctgtatctagctaatctgatggggacttggagaatctttatgtctagctaagggattgtgaatacaccaatcagcactctgtatctaactcatggtttgtaaatgcaccaatcaacactctgtatctagctcagggtttgtaaatacaccaattagcactctgtatctaactaatctagtggggacttggagaacttttgtgtgtagctcagggattgtaaacgcaccaa

SEQ ID NO: 316615 - DNA, 4001 bp, Homo sapiens
ccttaaaggtgaaagttatttttttccctctctgaactctgttttccatattttaaagcaattaagacttaccaagtagcctgcttcagtaaagtttttgtttgtttttgtgacagtctcgctctgttccccaggctggaatgcaatggcgtgatctcggctcactgcaacctctgcctcccagattcaagcgattctcccacctcaagctcccgagtagctgggattacaagtgcgcgctaccatgtccaactaatttttgtttttgttatttttttttaagtagacacagggtttctccatgttggccaggttggttttgaactcctgacctaagtgatccacctaccttggcctcccaaaatgttaggattacaggcggagccaccgcgcccggccgagtcaagttttcttttctttctttttttttttttaatttattcacacctatttgaattgatttcctgactcaaaattttcatttatatcaactaattaacatcaattaggaaaaagaaatcctaaagagagtaaaatgaaccaataactgccaagacccataagtttgaaaatgctgtgatttctaaatatacagtttaaacatataaggcaactttagtacttacattatttatttttagtaggcatttctataaatattagctctttttaatgcacaagatacaattttaagctttcctcagacatacaatgatcattatgtaaatataagggaggctttctgcagcaggcgcttaaattatgaggaatgagttcatttcgcaacatacaggtagcgcagaagggtacctacacatctatacgataattaagatgtttctttccattttcccaatggttgctacagacatttaaggtaaaatccattcttcttgtctcaggttttcattttcattcattgaatcacaaataacattctctgcagtagagaatactaaacttattaatgcccaaatgtttgagaccttaaaaaggaaaaaaaggccgggcgcggtggctcacgcctgtaatcccagcactttgggaggccgaggcgggtggatcatgaggtcaggagatcgagaccatcctggctaacaaggtgaaaccccgtctctactaaaaatacaaaaaattagccgggcgcggtggcgggcgcctgtagtcccagctactcgggaggctgaggcaggagaatggcgtcaacccgggaagcggagcttgcagtgagccgagattgcgccactgcagtccgcagtccggcctgggcgacagagcgagactccgtctcaaaaaaaaaaaaaaaaaaaaaaaggaaaaaaaaaagcaaactctggtaagcagattttacatgtaaaaggaataaatttacttgctacaactgtagaagctgctatttagtcaacaaagatcttaagagtgtcagcaaattcaattgctatggggcctctctctaggccactggctgttttaaaaatggataaataatctagaaactttattttcccaattccccggcttctaaatttacggtatgcaacgagtaacaatgcaatttacagcttcctaaacatttcttcattgctcttcgaaaccactctagggggtagctgagcgcggagcacacttatttccatttgaatggaggggcggaggctagtgacgcaggagtgtacacacaggtcagggttagtctgcaccacaccagcacgccagaccccgatgtatcaaatccgaggtcaggcagtggtcctgaagctgagcaaatgtatgtggaagcaggctcaggcctagcggcacttcgcctccttcacacagacccccgccggacaccgcgccctgccgcgactcacttagcaagtctcgcggattaggtttgatcgcattcggccctttcccggatagctcgtcgcggatacttctcacagcgaagcagcagctcccagaagccgtaaagctatcccagagcgaggcaccatacgtaaatcttccgcgtcgctacgtgacgtcagtgcgagcgaccccgggccggctgcgtggagctggcgctgcctctcctgaagccgaggcgctaacttgagtgaagaggtctataggctttttcacttttggttatctgctcaggcgctccttggggtcgcgcatggtctcggacagggtttgcaaggacttcggagctaaccagtttggagccataaccctttcgtacttgccaaaaaactctgggcaagactcttgaattttgagccgcagtattctcgttcataaggtgagaataaaaacatcacctagggttgatgtgaagagagatgaaatcattgtgaaataggagagttattgctttcaaccaatgacattttctggaaacgtgctggagatatggctgcagcagtgacgcctgcaaacgacgttcctgtcatcatgatgctgacattttaattgggaagcagattgaaacgataactaaggaatttgacaggagcatttagtaggacctgtaaagaaattaaagcaggtccgaggtggagttttgtaaactatatgcctgaatagaactttctgtttccaagggaattgttacagttggagacatgtcaattattacaataagcgtcaagggcaataacagaggtgttttaaagctactgtctggtggcagaataatcgggatttttttgtttggggggttttagccgggggagggactgcgaagacagctctgcatcaaaacagtacgtgagaaaaaagcataggacgctctcgcagccgtagttgttggtgacaagaaactgtgcttctaatctaagcaaaaaatatctccacatgccaactatacttttccaagatgtaccatggactactcaaactaacacagccttatttatgtatttaggttggaagtgggcaaaagtgtatcttgtctatgtttctatgtttctacgttgggatgacaccatcatccacccagccagacagttatcaaccttcccactttcttaacctcttacatccgattagaccctatgtcctctagttctcagtcttgagaccagcacccagctggctacatcagaattgccggtggtgatgttttagaagattccaaattcctggactccatccccggaggttcatcccctagttttctagtgaggggcctagaacctgcgttttttaagtgtcatgttcatcgccattactgctactttagttcaggtcttcttggtcagctttttcctaaaacgttttcagttttgtttgcctctgattgactctgaattgctgccaaaatgatgttttattattccagtatcatcatccaactctctgatattaatgataccttttttaaagtttttcttcccttgcagtatctatttccctcaagtttcctttttttttcttctgttgattttgtgctctatctttcacattagaggctttcctaggatgtctggtggtccttatctgctcatatgtaagtgggggtatatttaaaagttgattggaagctgttgagcccatgggacgtttgttgaaaatcaagtgggagaggaggggtatggaggctgcggtatgtctcagaatttagtacaattttcacttaattctctttgttttaggtgcctgatgtcctccattacagagaccccgttttactcctgagcaataaaaaaaggcttcagaataaggcgggggccgggggtggcataaaggatataacactctcctaaatgaacttccagtccttttaggtaccctcttcacttctacttcctgaagccagtttcttagttttttagggggttctgtgatacaaatagaattgcttgttggttttgctcactgggggtttagaattcaggtttttcaagtcaactgagccctttgctattgattccagaatttcatttccattattccttttctttaatccttaagggtgtatgactttaaaaatcctgttactgtcattttcagggagtcttagggagcaaatg

SEQ ID NO: 316616 - DNA, 4001 bp, Homo sapiens
agaaaacctaggcacagtaaagcttggagaggaagattatagttaacaggctcctgcaaacaaagaaggatttgcggatatttcagattcgaagacaaaagtgttcaaaattgacactagaacaatgaccctcagtgtcattcttacagctgagaggaaaaaaggaagtgaggaatacttagaagcatttacagtctaaagccaaaataattgtaacgctgtgtaaaagcatttcaaagactgctgttaactaatgatgtttagtatcacatgaaatagtctaacccatgcttattgtagtttattagtcttacaaaacacgtagaagttaggagtggtacacggctctgatttcaaagagttttaagtttaagacatttagaagaactctaacttaatattgttttctccccctctctcccaattgttagatgctcttccaacaaacaaacaaacaaaaaaactcccttttttaaaataggggagaactaagttctcaaaaagctcacaaaccccaaacagcttttggttcaaatacaggttctgagcctttggttacactaacaaagtattagtgtcaggtggctggtatacaatgaatattctcagaatatgggacaaactactgcaacataaatgccactatcataaatgactagttagcagtcctgttgggaaagagtaaaaaaataaaacatgttatttggacagttcttcctcttatagatttttaccatcaaaaaagagaaaataagcttatgtagttaatgggaggtgggaattcggctttggctgtcattcattcacaatacgtattaaatgcctacaatgtacgaagccctgaagagataataaaggtattctgagtaaagacatcaaccttgatctcaatgagtattagatacaataaaaggaaaaacgggtaaggggagaaagtgcctagtgctacaaaagcgtaccaaaaaaactataggatttctactgggaaactacttgggacaaccccagtcatagctgcgtacacgctgttctgagaaaagcagagtgacatgtgggcatcatttctataaagcctgggagtggacagcgagtattcgacttcatggcggcaagatgccatgactcattccactcaacaaaacgtggaagccacgacttcccacaaccaaatatgcacatgtgacaatatatccattttgggtgctggaggagtgtgggggtactagagagtgctgtaagttctaaaggtgccttcctctccagcaggtttagcttcagggcgggagtggggtaaagggggagtggagactacggcatctaggtccattctcgaagtccctcgcgggtgtggcaggcaacagcggcgacagccgggtcggctggaggggaagaccgaggcgcccccaagctctcggcgtcgcccgcgctccatcagttccagctgtcccgcaggaaccgctgccacgcgctgctgctgtctccgccacctaaggcctaaccaaaggctctcggagaacgtccctacattctttccaacctggcagatggcagctaacggccaaacctctccgggctattcacgtacctggagaaaacgatccccttgcggaggggagcacagaggccaaatcagctcttgccttcacttttcagccacacagcgtgttctcacggccaccggccaaaatggcggtgcccagccgccgcacgcgcaagccataggacgtagtgcgcgcgcgcgacatagagcgtgaggcggaaccctggaggtaggtagggagatatgacgtcattgagctgcgacccttgttcaacgccgttggcgaagccagctgctggaggtgccgagaatctgagtttcggcaagcagccaggtctggaaactgtgagtgtgtgggcttttctccgacgtcgagcgtggtcctagcgtaaacagatgcattcgcctctccggtttcaatctttttttacgtttgcgctttcctcaaggccggtgggtcaggagtggagccttagtcattctaacgctggaggtgtcagtaggaccaacagagtctggtgccgacacggcttactgttgcgcgctcttctaggcctcaacttcctctcaactgtgtggtcagttcagggccgggaatccaatcttttccgagctccatattttatccacttggtggcgtccagtcccaagtccggcagttgaattctgccctaaagatgggctttatttctatctttttttaggtaacaggacattcagttagtaatgatggttgcaggttgaatagtctcgccctagatctcacctaacttgcaggcaagtgacaactagttcataactgaacctattcatctgtttattcattcagtaaattacttattgagcgtttaagcctcaggccttgccaaagtttacagtccgttgtgtctgccgttatttagtaagtatcaagtgcttgtgtgccgattaaagaacaacttcggatacaatgggaggtgtcaaggaaacggtatgcagaactattgcacctattttgaatagcatatataacaatgttcagtagcagtaactgcgctaccaaagcagttttacatattgttcacgatccagtattgaagtgttttttcacatatgaatagacttagtaaaattaacaaaagatgtgaaagatgaggtcaacctttttagaatgggccagttattcacttcaaaatcttgaagccattttcctgaccttatcttctatggtaagagcatatgtaagtgaacttttaacatttttttcttatttttgtgctttttgggacagtgtcttgctctgttacgcaggctggagtgcagtagcacgatctcggctcactgcaacctccgcctcccagttcaggtgatcctcctgtctcagcccccctgggactacaggtgtgtgccgccacaccaggctgattttttggaatttttttagagacagggtttcaccatattccaggctggtctcgaactcctgggctcaagcaatccacctgccttggcctcccaaactgctgggattacaggtgtgagccaccgggctgggtcttaaataaaacttttgacagctagagggcaggtatgactgttctctgcatcactcaatgaatatttaaaatgaggatcttagtggggtgatgggatcacacctgtaatcccagctacttgggaggctgaggtgggaggatcgcttgaagcaaggtgttcaagaccagcctgggtaacatagctagatcctgtctctaaaaaaaaaggaattaagtaaataaaatgaggatcaatatttatatattcctagaataaaagtatttcagtctgacttttctagggctaaaagtcatttgaattttcaggcacagaattatagaactgcatagcattgtagaagtaaaaatcatcaagtgaacctctttaacaggagaggaaataaagcccagacctactcaaagtctaggctgattaaaggagatactgaagccaaaactttgattctgtgctcttttgactactatagctcactgctttgcatatctggtcatatgaaacaaaacctgaattcctaagatttttatttatttaaaaatagagatggggtcttgccatgttgtccaggctggtcttgaactcctgggctcacatgatcctcctgtctcagcctcccaaagtgttgggattacaggtgtgagccaccatgcccagcccctaagatttaaattacagtgatttaattatattaactgcattcttcagaataaatgattaatgtcagggtatatgagttccattaaatttttcttggtaaaaaacttttgtagaaagatgcccagttcctgatacaatgtgtgcattcttgttttctacatagaatattttaaaaatgactacaccaaacaagacacctcctggtgctgaccccaagcagttggaaaggactggaacagtacgggaaattgggtcacaagctgtttggtca

SEQ ID NO: 316617 - DNA, 4001 bp, Homo sapiens
atggcttcagcatcttcactagaacaacaaaattggctggacacagtggctcacacctgtaatcccagcactttaggaggccgagatgggaggatcgcatgagcccaggaattcgagaccagcctgggcaacataatgagatcccgtttctataaaaaaatagaacaaaatttacaacctacctactctgtctctgtcacatttttccaactaagaaagatacaagcttctactctaggagaacgcccatgcatgtgtgggaaagattctatttccaggatagggttccttttattcattttgtgaagctgtgtctcctgtcaactcctggccaccattctccttttctccccacttttttcccattgctttcttctcccctcaactggggacacaataggtatatttcctcgccattctcttttttcctcttggcttgtttcttttgggttaaatgcaactttcagataactgtaaattgtttgggacaaggaacatactgcatttaaagaacactaccaggcctgttacaggaggataaaatacattctattccctatgcaaactgattttcaacaatgtaatagattcatatgccttataatcttcaattctgaatgataggagaaagaaatcagctattttttctggcatgcattattattattattattattattattattagagacagagtttcgctcttgtcacccaggctggagtacaatggcgcggtcttagctcactgcaaatgctgcctcctgggtttaagcgattctcctgcctcagccttccaagtagctgggattacaggcgtgtgacaccacgcccagctaattgttgtatttttagtaaagacagggtttcaccatgttggccaggcttgtctcgaactcctgacctcagatgatccacttgcctcggtctcccaaaatgctgggattacaggcatgattacaccgcacctgttatatatatatatatatttttttttttggccacatatatatatatatatatatattttttgagacggagtctcgcactgtcgccgcacccggccatattttcaatttaagctgaaatgttcaaagtgaccaccagccacaccagatgaggcatgatataggcagttaatacaaaaattacaaaaggatttctggctctgctccaagtggcctatataatctaaggagaagcccaacatcctctctcacttaggggtaatctggcttaccacacctaggatctgcttaacagaaaccccaaagcacagagatagccatcaaagtaggtacagccaggaaaaggatgttgtctgattgtcttctcaggtgctcaacataaatcatgtgttcagccaaatacccttatcctgcctacaatgcccaaccccttccaaaaatgcaaaaaactgacagagtttgagccctttttactcaaagtgtggtccatagaggtcagctgagatgtgcagaatcagaggcccaccccaggccccctgagttctgcagagcctgcgtttcagcaagatctccaggtgatacatatgcaagttagtgtatgagaagtaccaatttaagtgacacatttgttaaagcacatatcaaaaaagaatcaagattttctacgaagtatgaagattggaaaaaacaaaaacaaacaactcacctcagttatgatgtgtgacgctggaagcaaagcagcccaaatctcagtgcagagacagtggtaatacgaagaagatttctacacttaggagttttcctagacagacttcaaccaggacccacgcctactaaacagacgagtatcagtccaggaactttccttcctgcctgctcttggggcaggagaaagaatgagagaggaaacttggcagcccccaaagtagatcctgcagctaccagggaacattgaggctttccgagtaaactagcctcgaggaaatgtcccgagtgaaattaacagctctcctatctccttgggttccttttttctccactactagctgattatgaaccacatttctttctcgatcactgggattcaaacaaaagacctaatggttccagtcagcgtgggatcctcttctggcattcctagcaaggggctagaagaagggggaaagttacatgtcagagagatatttttgtatctttctctttgtgccgcggaattctgatgacagcatctccaacacaaacagcaactttattttcgaaatggaaggataaaaaccaattctagcaaatggctttgctctgtgcgtaaacttcctgtgcttttttaaccctgatgtaactgagggtctcctctcacaggccctgccttctagcacacacaaaaaaacaaccaagcaggactatgacataatttgaaaaggaagcgaattaaaccaaaacaaagagttaggtttcaatgcaaaggcccaccagaaatctaaagaggaccgagaagctgtatacttggagcatgctatacttttcatgttattctttcctaaaccaaaagtaaaataggaagtcaagactgtgctaaataggcatttctctctctctctctctctctctgtgtgtgtgtgtgtgtgtgtgtgtgtgtgtgtattttaaatagagacggggtcttgttatattggccagggtggtctcgaactcctggcctccagcaatcctcccacctcagcctcccaaagtgttgggatcacaggcatgaaccaccaaacctggcttttttttttttttttcttaggcaagatctcactttgtcacccaggctggagttaaataggcatttcatattctgaaaacatgatagatgtcaaaagaaaaaatatgacatttactaagtgcttctaattccactgtttactggccttgaaaagcttcttaagccaagccttccccaacaataaaatagtgataacaataataccttccttacagagttgtcatgataaatttcatgagattcacaaaataccgattactgaatttgtcttgctgttaagttctgtttatatttaagtcactatcctgattattcactgtgttgtgcagtacctaggacaaattaggcattttgtaaatatttattgaaatgaaatgaacgtttaaaaaatcttgaagttgttaagaaattccatttatctatttttataaatttattttaatatggtaaaatatgtataacataaaattagccatttgaaacattttaagagttcaagtcagtagcattaattacattcacaatgttgtgtcaccgtcactgtttctaagacttttttgtcaccccaaacagatactctgtaatcattaagcaataactccgtcagggattttttttttctgtttaattttaaatttttatttcttgtaggtacatagtaggtgtatatatttatggggtacatgagatattttcatacaggcacacaatgtgtggtaatctcatcagggtaaatggggtatccaccacctcaaacatttatcctttgtattataagcaatccaattatacttttttcattttatttatttatttatttattttttttgagatggggtctcactctaatgcccaggctggagtgcagcagtatgatctcagctcactgcaacctccacctccagggttcaagcaatcctcctgcctcagcctcccaagtagctgggattacaggtgtgtgccaccacatgtgactaatgtgtttttgttatttttaagtggacaattaaattatttttgactacagtcacattgtcgtgctagcaaatactaggtcttaattattttttctaattattttttgtacccatgaaccatcccacttccccccacctccccaatacttttcccagcctctggtaaccattcttccactctctatctctatgagttcaattgttttaatttttagctcccacaaataagtaagaacatgttacgtttgtgtctctgtgcttggcttgtttcacttaacataattaccttcagtt

SEQ ID NO: 316618 - DNA, 4001 bp, Homo sapiens
tttgggaggccaaggcaggaggatcactagaggtcaggagttcgagaccagcctggccaacatgaaacctgtctctactaaaaatacaaaaaattatctgggcatggtggcaggcgcctataatcccagctactcaggaggctgaggcaggagaatcgctagaacctgggaggcaaaggttgcaatgagctgagatcgtgccactgcactccagtctgggcaataaagcaagactcagtctcaaaaaaaagtattgacatcatgtacccaatatgacatactgagatggaaactttacttctgtgacatttttccccaaaatgcagaacattcatctaatcatgacactaaacatcaagcaaacacaaattgaggggcattctacaaattaactgaccgggtcttcttcactagtgtcaaggtccatgaaaaaacaatgaaaggctgaggaactgtcacagatcagagaaaattaaggatatttagcagttaaatgcaaagtgagatcatcgattggatcctgggcagaaaaaggacagtggaaagacaagtgaaatccaaataaagtctgtagtttagttcattgtattatagtagcatgcccatgttattagttttggcccttgttatgcatgatattatgggaactctctgtactattttttgcaaattttcagtaactctcaaattatttcacaattaaaagttattataaaataaataataaaataaccaacatctttcaatgtttataatggaagggtaatgttagacttaacatgccatctttgtcgttgaaacctttctcatcaagatctcatcaagatctatacaatccagtcaaagctgtactctgaaagcactgttttgtaaagaatatcaataaaaaacatctcttccttactactctggtgtatttatttatgactagctgacattcaaatgataagagagctgtaagatcctcctaaaaaccaagctttaggggatatctctaggactgagaagggagtaagagcactcaactatccacagaaaattacaaaagggagttcaataattctttagcaaaccatccaaagctttaaagggattgaccaataatttgtcatttacctattcccaattgtcattgaccaattcctatattggtcaacccctttaaaatattaacatcaacaaatgtttcctccacctatagtaacttctgtgctcagtgggtttttatccttccaatatcaactttaatttcatacatttggagaaaggccaagagtttttaccaacccacacttaacacactatgggacccagaatcagtttgcaccagggcatcattttctgaaaaaccactttgaactgtcagttttaaactgcatacccactttcaaatgaaactgcgaaaggctaaaaaactcagtcgtctcgtttgaacggttaccgattttctaacaaatatatacacaacgcccaccaacctttccagacacacactctcagcgaaactggttttacaatttactcactcagcttaatagagctcggtcttaaccaaaggctcaggatctcaggatgcgtgcgctcggaggcagcgctttaacaattaaggatgtaaatgttgggatgagtcacccggaccttccaaacaaactctaaagcagcagtttccacttaacaagaccaccaagcatgtgcacggtgcgttcctaaatcctacccagttcctccacaggctgcctccttgccgcgtctctcaatctcagtgggagtggcgggcactgcctcttccctcctgcgcgcccggaaccttttgagtgggcacagcacgcagcccgcgcgcggcacaaccccttcccccaaccacacccggcgcgcccgagcgctcccctcgcgcggcggccggcgtgggaggcgctgcggctggaggtcacgatgggagccggcgggtggccgcctggggagacccggacatccaggggacgagctcaggcagcgctgacacgaacttcctaagccgcgcttcgggctgtggaccgccagagctgaacgcagtggcccctccccagcgccccgggtttccccaggtcggggttcgcgggcgggggtgaggcgtggccccgactgccgggccgcgataagcgccctgcgacccggctgaaagcgcacacgtgtcctgccgcgctgagccgccagcaggactggtaccaccgccctccctcggggctagggtcaccctgccgtgacacgcagggacaagccaaacactcccgcctccgggatcgaacggaatgaaccagagtgattaactacgagaatcaccaggcgctcattgggctgatcagtacctcgtctgacctagctgggtttggtcgccgtcactggccggagcgccgaagcaccggggacgctgacgcacaggttgcccagtcacaagcgctgctcgcacccagagcaagttaaatgggtggtttctggtgaatgggattctgagaaagtggatgcttgcgccccagggcctaaaaaaatcaggcactgaatctaacccaaggaaggaaaggggagaaacttactgaatgaaaatattaccatagtttaaatgttattctttacactcctgtgactgacatacttctgtgcaatattccgatggtgtggaaaggctagaaagtgattgcgcatgttcaggaaacgggccatcaggctttgtgagtgtagccatcccaacatctacctgctgcatctaccctaggaaattagtacctgcatgcagatattttctggtttgcatttacaaacaaaaatcatagtatcatttaagttgtttaaatcaacactaggaataactattaatggttcacccaatgcaggaaagttttagctaggaagcctagataagaaaattgactatacataattttttaaaaagaattttaaatataccataccgcatgctttttaaaagaattttaaggtatatattcatgatgcgcccaaacatttgggtaaaattattcttttgaattaatttctgtcagtttcaagacccttaaaggcccatatagaaatacatgttagtcatacttcattttaagacaaaattaaggccagcacggtggctcatgcctgtaatcccagcactttgggaggctgacgcaggcagatcacttgaggccaggagttcgagaccagcctggccaacatggtgaaaccctgcctctactaaaaatacaaaagttagctgggtgtggtggcgaggctgtaatcccagctactcgcgaggctaaggaacaagaagcgcttgaacacaggaggcagaggttgcaaatgacccgagatcccaccactgcactccagcctgggccacagagtgagactctgtctcaagaaaaaaaaaaaaattaagataaagttttcagacctggccgttaacgactgtttgcaaaaactgaaaaatctccgaaaaataaattttattttaattttctttttagctcacccagataagtgaaaagaataaaattttatgataccagaaaaaatgaaaacatttccagcaagatctgaaggcactacaggaggagactgaacaaaaatggagaaaacacacacgaaactgatatgaagcacatttttaaaaatggatacttagttgaatatagcattctgtaattatgcaaagtaaaaacaaatcaaaaccctatacatagaggccaggcacggtggctcacgcctgtaatcctagtactttgggaggccgaggcaggtggatcacctgatatcaggacttcaagagcagcctggccaacatggtgaaacccttctctactaaaaatacaaaaattagccgggcatggtggctcatgcctgtaatcccagctacccaggaggctgaggcaggagaattgctggagccagggaggcagaggctgcagtgagccaagatcatgtcactgcactctagcctgggtgacaacgtgagactccatctcaaaaaaaaaaaa

SEQ ID NO: 316619 - DNA, 4001 bp, Homo sapiens
catgctgtctgctctcccccactgtgtgggtggaatgcctgctgtgcgcatcatcggctggggacagggctgggcaggggcgacaggtggcccggagagcacacattgccagttccaaagggctggattgattcagagggtctgagctgagctggccacccagcaatgaccatcccaaactaccgagggcctcccaggtgtggggctcttcatgttgtaccttgtcccctccaggcaaccaatgctactgctcttacaggtcaggaagccaagctctggaaggtgccacctatgcctaagaccaccaggcagtcaccatggttcaaaccccagtctctgcccccaactgccccagtgcccccacaccccttctcgtcagatgcagaggagagatgccagcactgcttctgaggctctccctgatgacaggggggaccacaggtatcaattatggccacaagaagcataaaattactctgtgtgcacccagccattatccccacctgccattagataaatgtgtctggaggttctgccaagtctcagggtgccctgctccccagccactcccagataactaggttggccatttcagaaatcctcttccaaagggttctgcctctgacctccccaaccgcctgccattgctctcagctactcccaaaggctcccggcaacgccgtccctccttccttggattggagggggagggagacaatctccccagggaggggagtccctggcccttagcccccgcccccttctaggcctacagcccacaggaagctcttactaaattcacattctctccccagtccgatctccctcaggggaagcggctgtccccattggtttctgcaccatggccaagggccatactgcagtccctggcgcgacaggcttagaggaaagagcacaagagtcagtgagcccggggttcgaatccccgcccccccttcctgagccaagcaagtgactcaagcctggtgcgcctcgggtcacaccctgaaaaatggggtgacagcccttccctgccgggaatgcaacgacaagccctcagcccggtgcgggccccaggaggctctcagatccgggcatcctcaggccgcctccagggctcaccgccaagggctccagttctaggtctcagtttccccaacagcacaaggcgcggctgggctccagcgctgtgggatttttccagccccgcacagaggctgtcagatcccggagggtgggtgcggcgggaaaggcaggggtgcgacgcgcaggggcgaggggctggagacgcgcagagatcgggtcggggccgggtctgacacatgcgggctccgggtccccagatctgctgcggagagtcctgggcgccgagggtcggcctgacgcccccaacccaggcgctgccagagcggcgcaagggcggcgcccccagctgcaaagccccgcctatcatctcacctctgcgtgcctaggtctgctggggccccggcccttcgcccggaccccaggcccccgcgcggaccctgaccgctttctgcagcctggaacaacccggacccccgtgagaagcaaagaaggggcgccttccagacatcctggcgcagccacgccggccggcgcgctgggaaaggatccccggcccgcgccactgagctacgcgctccgggcgcagggcagagggctgcgctctggcccctcggggctgcaaaatcctggagcaaaagttgggtggagccgctgggtgattttccccggcgttgcaggtgcagcctccgaatgccacccagcccttgcggcgccgcgagccagcgcggggacccgttggtccctcggtccccagcacccacctgcactcatctcagcagccgctcggagtcggggcggcccggcgctgcgacagccagaccctcgggcccgcaggtgccgcgcccgcgctatcctccgcccgcccgccggctccgcgcccgctccttgcgcacacgccaggcagcgccgccgcagccccacggcgcgcaggccacgcccgtgccacgcccactctcacgcccctcctggcggccccgccccgcgcccccgctgccgcccgggagcaccctgggaagtgtaggcacctcgacgccaccgctccgcctggctccccagctgcggggcgatcggactacaagtcccagcacgcttcgcggccagcgcaggcgcagacgggcgacggcggctgaggcctttcgcaatcgttcttagatctctgcagagctgtcgccacggcctgaggggcgacgtggggactgccgctcacggaatccgggagtcgctaggagagcggcgcagggaaaagcgagcttggtgcagctcttcttgagtagtcgagctacaaggcgcctgaagaccttctgggccaactcttctttaccagtttacagagagggaaactgaggcgggggcggtgctcgggcaggattagcccgcatccgtcggcgaggcttgcactggtggggattcgtgcgcaggtttcctgcctccgggcttgggctgtccgcgcctcgccacccaccccaggctcccgtcgctcctcgccggctggcgcccagctggggggtgcaccgggagaggtggcgcggctcacttcggcgcagtccccggccccagcctccacggtgaccggctaccctgtgacatcaggcgcccagcacagggcctggacgcgggtgcaggagagggagtcagggaacggggaggagcaggggtccccactgtgtgcctggtgcgacaaaaggcgagctgcagagaggtcgggaggagccggcaaacacaaggatgcccaccaggcgcggagggcctgggctggaggagcatttaggatgcagaatcgcgggaacctggcatggagagagaggccaaggacttttggcttgggccagggctgtttggagatgctttcaacaagtggaagaagattgggcacagaaaatgtagactgaatggaacactgaggcaggagcaggtactcctccccctccctcagcagcagccatctcccccaagaggggccaggatgggaggccaggagtacagtggctcagtgggggagctgaagtcctggggaaccagccaagccccacacaccctagaaatccaggaggcccagctaggtgattctgcccgcagccgcagggttcccatgccagtccactgggatcttgtgccatgtaattgagggggcgccagatctaaggatcagtgaactaatgtgtgccatgacccagtgtgagttgagatcaataaatgtctttgctttgctattattattctctgtggctaacatagggcctggcacagagcaggcagtctgcaaatatctgttgaataaacggagagaaggatagaggggaggggagagtgctggcacctggcactcctggatcatagcctgagaggtaggccaggcacccacctgccgtaggtacaccctgctgccacttgccctctaaggagctctcggtcaggctcccccgcagcctctgtttcctccctctgtttccaaaggctcctgagaacctcccaggggtgccatgatttcccccacacagcctggtgaggacggcagggagccctcacacctctctgccaagaccctgtgagccagagggtggatgtgggtgccccattccagactggttccagagcccaggacaaggggctggggagccttaacagttctcaacctggaagggcctcggggccatgtggttccaacatcttctttcacaagggcagaaaccaaggcccaaagacatactgcctcaagtcacccagcaagttagtgacagggtggggcttgagccaggtcttttctttccttcctgctccgtgtctgctgaactgggacttcagcgaatctgctggttgaattgaatcgattgaaacagacttggttctctgtccatggtactacaggccaggtgtgacctcaggcaacttgcttgccctctgtgtgcctcagtttc

SEQ ID NO: 316620 - DNA, 4001 bp, Homo sapiens
tttgtgtgtgtctatgtgctttgtgtgtgtatgtatctgtgtatctgagtgtgtctgtgtcatctgtgtctttctgtgtgtttgtgtgtctgcatgtgtctatgtatgtctacaatctgtgtctgtgtgtgtacgtctgtgtgtgtatgtgtgtggcctgtgtgtctgtctgtgctgtgtctgtcttgtgtgtgtgaccgcgtgtgtctgtgttttgtcctgtgtctctgtgtccacgtgtgttgtctgtgggttgtgcatgtgtgtgtatatctcgtgtgtgtctgtggatgtgtgtatctgcacgtgtgcaaaatctgaaaggatgacttctagatgccagcagtagttagctgtgggggtggcactatgaatgttttggcttattttatgataaacaggtattccttttgagtgagagaagttggggacttgagaagtcgctatcacctctacccatcagaaatgctgtatttatttggaaacacggtttgttttctcccagtgacgagagtcatccgtgcttcctgccccaagacagacaggaggaagcaaagaacaaatgtcccgcaattgcaagaatgatgttcaactggtccctgacccagggcagagagagcctcggcaccccctttcctgccagcctcccctgtggcagggatctgtcacctgcgtctctgtgaacccagcatctagcccagggtggaacacacagtgaggccaggaagggtctagaagggagtggttgactggggaaggaaagagaggaggggcagagggagggaaggaggaggggaggagtaaagggaggaggaattgattcgcagaaccagggggacgctgggcttcttgttaccggggagacggcccctgcacagactgcacgaggcacaccggtccagacctcagccctgacagggttaacagagggtggggctggaaacaggcacccccactcccgcccacctcttcaggaggtgttgacagggcgagggagggatggggttcctggaaggtggggctctgaacacatggccagtggcttctcctcatccacacctcctccctttatgcagccctggtctagaggctggtcacaccgctgtccccgtggattcgccagctgagtcccagctccctctgtgggggcagcgccatccgtccccagcagctggctctgccacagttgctgccaggcgccacccacctctgctgccccagcccagtgcctcccccatccctagccagccatcccggcccaggagtgggacacagatatcagcccctcccatgcccccacaggaccccagcaaggagccggctcatcaggacagacacccagagatgggtgggatgcaggccaacatgcatgagggtgctgcacgtttaggagaaactgagggagagacggggaaggaaaaccccactgtcaccaccaaatgcacatttcgcgggcaggcgggcactgcgggcgccagcacttaggatggcaccatgcccaccacacgcagacacagcacaggcgagggctcggctggcagtgggagcctgggatgctctgtgcttgggtcctgcagagggaagccaggggcactgccaagcgccttagggggcaaaacgggggtgggggaacaggtggctccgaggtctcacacctgactgctctgtccccaaaaacccacccacccgcagcccctcctggcccctgtgagcccccatcagccccttggagttgcgggccaggtttcctacctgcacagcttctgggcaccagagcccagtctgacggccctgcttgagtgccgtgctccctggaacgtgtgcctgcgagggtggacaccctcaccttcagccaacagtctgtcacctgctcctgctgcgccctgggagtccactgtcacccagcggggcaccggcacactgggccgagcatcaggcagtgccaccgcggcggcggcagctccccttctgcggagccaggcttgtccccgcccgcagttcccaccttgcacccggggaggatgctcagagctgtgcagagcccgccgactcagccacgccgccacagactcgcctccccggcagaggcgaaaacaaaagcattaatcttccccaggaggccctttctcctccacagcagaggaggaggaaaaaacccagacctgttttgctcctgttcctcgaattaggatggttccttcccgatgaaccagggcgcaccccaaattctgtatttggcattaaatatcagggatgcttacattgcagacatgggacgcttgcctcccaatccatcaaggggagggggggctgcctgatgaaacccactttgctcgcccagtgcggagcgtgcctgaggcagagcagccccagtttgggtggggtctgcccccgaccccaggccagggcctctctggtgtgggggctgctgcccatgggtgtcagaaacgcggggcaggtgaggctcctgcaccagcagcagcaacagccgcagctgactgcacccaagatacaccccactttaggccaccagatgttccaacgtggctatgctattaagccaaaaatgcaaacctgcatctgtgcaccaggagaagacaaagggttgggggaaacctgcgcaccccgggctccagtctggctctgccaccgactctcagtggctgatggccgggcacgtgggtggatccagctggacgcccaggtgagtggtgggaggcagtgtgtatgtggcggagggagagtgcctgcatgtggtgttggcctggctgagcatcagagccaccagcgcataagaggagcagggtcagggacagcacctgagtggggaacgcaggccctgcaaggcccctggggaagtagggaggggtcggtaagaggaggcttaaaggccttagggtttcctgcacacaaagcccccggatctgcagaagagcagggagagtacaggtggaggagcacagagagggtctctgagaggcagtggggccggtgcgaagggagaggagaggctgagtctctgcagtggggacttccataccaggctgctgtttttaacgggagagatgaacactctctaaaacgccactggaggggaagccctggcaggtaaggtggggaagatgggaggagacaggatcaagcacggcagagggggcgatggccagagcggctggacccaggcacaggcgtggtaggggtgggggtggtgtgcgggaagcagcagggcaagggagagagtcaggatagaaatggggtctcatagagagtgagccacccaggccgtcctcgctgaggtctggctgccaactctttgtcaagcagaagacaaggccgctgtgtgggcagggagcgcagtccaggacagtgtggaaggtctgggctgttcttcgcggagaacggaaacgtggctttggactgccaggcagtgcatcaggccaggctccatcctatcctgcaggctcctccagagccctcaccacctcctacagggtggggtgtgccagcaagggctgagcaaggggaggggtgagggagggagaggccacggccccaggagaaggggagagaggagagggccaggcaggacgtcgtccctgggatgcatcactggctgtaaatatcagatatgatcgccacccaggaaaatacttataggacagacagaacatctgcagccttatgtgatccacccgcacagaaggcacaaagaccctaaatagataagcaggcaacatttacaacagataactgaaatacaagaattaggaatggctacaaatgacaaaaggttgggcatggtggctcacgcctgtaaccccggcattttgggaggctgaggtaggcagatcacctgaggtcgggagttcgagaccagcctgccaacatggtgacattctatctctaccaaaaatacaaaaatcagccaggcgtggtggctcacgcctgtaatcccagctacttgggaggctgaagcaggagaatggcttgaacccaggagg

SEQ ID NO: 316621 - DNA, 4001 bp, Homo sapiens
atgggccttatactgtaatcttttccactcccactgctgttaaaagttgcaggtgttgtgtcttagatccatcacagtcagctaacactggcagctcaggacaagtagaccagccagcaggacacagatcttcctacccggctgattcggagacgagaccaagctgttgctgaggacgacagccctgctctggtcactccggaggctgaccagtctacacacggctgaagcttgaagaaacaacaagcccggctctagtcacgcactggcagctgaatagtctacgcatggccgaagcttgaggacttgtcaagcaagtaaacgtagttaaaaatcttaagactaatagttttcctgtaatactgttttcctattgttctgtcactgtattcaatctttttcccaggtaaggacctcttttgtccttgctggatacaaatatgctgtatattgttttgttattgttaccccccataaccatgctagaagaaacacctatataaggtgtccccattgtacacatactacttagtcaggaaacccagacccgtccagcccagcaacaattccgagtctttaagtcattctttaaacacataaaccagaagttacaagagcctcctcctttagcaaaacaaacaaacaacctatttgctcagctggctgaaaacattgccagcagcctagacgtttcttcatgttatgtttataaaaaggctaacatgagagaccaatggccttgagaagcaaaagatttaatgcctcaagattactttaactctttccccaagcagatgccaagttcaagcatttggctcttaaaaactcctattattaagaaatactgtgttgcttgctaggaaaaaagcttttaagacccagtaaaaaaactaacctgcttaggacatgacaaagttggcacatgtgcctgtactggtttaacacaggtttgatcctaggtctttatttaaaagatagtttccagctataagagaatttaaaaccctcactgcaagtgtattacataaaacactatcactctgtctcccaaagagactcaaagtaaaaataaaagcgagaactcccactaatttgtgaaaattctcaaaggaagggataaggagaccactactactcctgctgccctcctccctgccaccttgcctagttcataagacaggaggaaaagagagaaagcaaaaagttagaaagaaacaaaagtcagataaatagccagacaaccttggcaccaccacgtggccctaggagttaaaaaaaataataataataacatcaacccccgacctaaactacttgtgttatctgtaaattccagacattgtatgaaaaaagcattgcaaaactttctgttctgttagctgattcatgtagcccccagtcacgtttcccatgcttgctcaatttatcacgaccctttcacgtggacccttaaagtcgtaagcctttaaacaggccaagaatttcttttttggggagctcagctcttaagacgcaagtctgccgatgctcccggccgaataaacctctttcttctttaatccggtgtctgaggagttttgtctgtggcttgtcctgctacagtaggtgacagatgactttcatccctcatgggacaacgttacatcattcttatgaaacagccatggctgcactcagacttaggaaggcactggctgtaatgccagcactaaaagcaaaccagaacccaagtggagaaaagttagctttcataagaggactcatcttttacgttcacaaacttaggctccctgacttttatcggtaatcagtactgaggacaatgcgttccacacccgctggctggctgatgtttgattctgtaactataccacgcccagaattctctcaaaagggaataaaacacaggtcaaattcctcacccacacactccacagttcaacccctgccagggaaaccaaaagcaggaaaggatctccagcggcgccattctcatttccggtcccagcaccccgcctccatgacgtcaacgcgccgcgccaccgggctgcgtcatctcggcgcgccgctgccagggctgtacacctgctggctgccatggctgaggtgggccgtaccgggatcagctacccaggcgcgcttctcccacagggcttctgggctgcggtcgaagtgtggctggagaggccgcaggtggcaaacaaacggctttgcggcgcccgcctggaggcccgctggagcgccgccctgccctgcgcggaggcccgcggccccgggactagcgcaggctcggagcagaaggagcggggtccgggacccggccagggttcccccggagggggcccgggtcccaggtcgctatcaggacccgagcagggcacggcatgttgcgaacttgaggaggcccagggccagtgccagcaagaggaggcacagagggaagccgcctcagtgcccctgagggactccgggcaccccggccatgctgaaggaagggagggcgacttccccgccgcagatctggattcgctttgggaggatttctcccaaagtctcgcccgtggcaattcggagttgctggccttcctcaccagctccggggcgggatcgcagccagaggcgcagcgtgagctcgacgtggttctcagaaccgtcatcccgaaaactagcccacattgcccccttacaactcccaggagggaaatagtcgtgcaaggtaagagtgttttgatagtggacggatatgattagataaaaaagcattcatagaacctcgggtcaatgaaaaagtcctaagggtactagttcctctgcgatgtcctagggaggttgttaggtgtttcatagttttttgagtgggcgcatagaaatgtgtgtccttagtacagaagatgggataattgattggggtggtgtctggaaggcttcaaagagacagtgaaggactagctggatattgcgtaatacctaggagtttagcaggtaaagctgtaggtgtaaaagtgttggggaccagcctcaacaccacccgtagggtactcaaagtccggtggcgacgaaggaatgagacgagacaggttaagagtgcataaagattgggggccagggggccaattgcaaaatggaggctgccaaagcctgggagctctggtctccacactattgagtacaatcacttagatctaagaagcggacgttcggggcgaaagggtgaaagggagacagtgcatcatacatgtcatctatagcagtggcggtttaaatgaatctcctttgtgctcaaacagcgttatctttaacttgtcggagaataaccagtgggagcgtgcttaactaggagcctgcatgtctgaccacattgtagtgattcaaaggagtgtctttctccttgaacacagtgtttataggtaagacagtaggtctcgcccagagcatgggaacatcatgacaataagaaggctttcctcctcagaggcctcttgtggctttccacaacttattgtctcatatttttatggccagtttatacaggcatgccataagccttttccccaacataaagagagctatttatgctgagacaaataactgtgaaagagcatagagactggatggatgggaacctactagtcctcagcgttcgttaaatctctggcatttatttttactgcccgtgaccttgacacttcagcctcagccactcttacctgaaactttattcagcagcatgtgtttcgtattgccactgtaacaaattactgcaaattcattggtcagtacaaaaaattgattgtctcagttctgtaggttaggaatccccattggctctgctggtttctccgctgtgggtctctctcacgaggccaaaatcaaacagcctgccggctgggctcttatttggaggttctgggaaggaatctgttctcaggctcattcagttcgttggtagaatccaattttttatgtaggactggggtccttgttcccttgctggctgtcag

SEQ ID NO: 316622 - DNA, 4001 bp, Homo sapiens
aggacccatgactaggactggtagagacggtttcaggacaaggtgccctctctccccgaggctgttccaaatacaggggctgagagcacctcatactatgacagccttggtaagacttaactaggaaggctgaaggagaattttgggacactttcatcttatattgggacaggaatcttatattgggcttggaattaaaagacataacataaatgtatacacaaaatagtggataacagagtagcagtaagtgcaaaatgaattctgacagggagcatttgctcttagggagggttgcatggagaaggcacagctgagctggtccttgacaaatgagaatcatctgggaaaatgagctatccttcatgccccagggacagagacaaggctactagaagtgcctcctgacctcagggctcgcactttcgcacattaatctggaacaaacgatagggctcaagcggataggataggataggataggaaaggggaaggaagatgtttggggaaatgggcttagttatgagtttgttaggagccactgtgcttaagcacttgccgtgtgtcaggtgctgtgctacgggactgcgcacagggctaaatgcgtcctcgtcacagtccttactgcacggggttgttactgccttcagctcaaagatcaggaaactgtacaggagtcaaatgtcctgccctagttccacatgagaacaggatgagtgcctgggtctgaagccaaagcccacagacctcaagagctgagcacatcagcccagtcgtgcgtgggtgttcaagtctaaacagagggcataggtgacactgacaatgacaagccacgatgcacaatgctttttttttgttttgttttttgagacagagtctcactttgtcgcccaggctggagtgcagtggtgtgatctcggctcactgcaagctccgccttctgggttcacgccattctcccacctcagcctccggagtagctggaacttcaggcacccgccaccacgcctggctaattttttttttgtatttttagtagagacggggtttcaccgtgttggccaggatggtctcgatctcccgactttgtgatctgcccgccttggcctcccaaagtgctgggattacaggtgtgagccaccgcgcccagctgcacaatgctttaagagcccaggattcaaacccagatttccaacaacagatgaacggatcaaaatgtagtctatacaatggaacattatccaacctttaaaaagaaggaaatttggatacatgccatgacatggatgaagcaaaggacaaatactacatgatctcacttctaggaggtacctagaatcagcaaattcacagagacagaaagcagcagagaggttactgggggctgggcagggggaggaggaatgagcgttattgctgaacgggcacagagtttcaattcgggatgacgaaacattctggaactagatggtggtaatggttatacaaccctatgaatgtacttcaaaccactgtgtaactgtatacttaaaaatgattagcatgacaaattttatgttatatatattttaccacaataaaaaaagtttaattatttttaaaaattgcttaagtggatacaaatggacaaaagagaagtaattttgagcctgagaatgaatggcaaaacactgaagagacactgggaggaggagacaggagggtgatttgtgagcaaccggcccaaccttccagggtcctcagggccctccttcatgtgggaggaggcggcggttccacaactacccagaaatcctacacaatcccctctatgagaagcaatcagtccttcctctgaactccaggacttctttatttgtaacccctgtgtggtacttagcacctcctgtcttacacttacagcgaatggtacttagtacctatgtagatgcttcttcctctccccggccagggtctcctcccatctgtctttatatgcccttggttcttaacacagtcccgagccaaggacaggtgcttaacaaacatctactgagtcatgaatgaccctctgtgattctgaccgtgtcagaccctctgtgattctgactgtgtctctgcagcaagtcccttgaggatatattcatagaacagtgattctccaaaaagaaagggggtattaagcattttccaacttcagtagtctccttctacccgccaccagactcctacaccgcacaccagaaaggagtagagaacatctcctggctgactgggggaaaaagaaaagggtgcgagccactgatgtaaaggggacataaaaatattctcttgctcttattttgatcatgttttatatttctcaaattgtttcacttatgtagaatgtcagcccaagactgccatcaactctaagggctactgtctttagaagacgctgagatacagtgagatttggacagacgactgatgattcatttaaaacaaatcaaggctgccccgggggaagggaagagatcaaataagtacttttcttaagtaaaacagcaaatatcagaaaggcttgagcccagagccccataccagggctggactccaacttctgtgagttttctatgacagaaaagagaatcttccaaaccagggaaacagacaagactcaagcacaagatccagagtcccacgcgagggctctagtgaggagaatgctcccagaaacacagagctagtgggcggccacctgagatgtacggaatgctgacaacaggatatgcccaacattctccagagcaaacaaaacaaaacaaaacaaaacatatagctctcctcccttctctcttcacacacagctgcaaagatctgtcatgtacatccacttgagaaaatgatgattatagttaggacatgccccatgacgatatccaggtcatgtacagcctttgcgtgggacagcagggctaaattttggcggtacatatttaagagggcaagtttccattcaaaaaatttcctatgagaagaaagatgattccacttgtcttccaatactgattgaataaggctaagcaactgttgtagatatgtcacaatgaggcagataagtttactgataagagctagagaaggcagccaacttgggcagatagcctccgtcaacagctttgtggcagcggatggagacaaaaagatccgctttttaggctgacgcaatccttctgcaaagagcaagacagaaaaggcttgtgtagactaaacttctcactcatgaactggatcaatacggcatgttatttcagctgatgttcagcacaggaagagtcggaattgtgtctctatgaccgcaagttgaagaacatgacagcatgttctaagggtattaggcaagacaagcacggcctgttattacgaaagctaaagaaggaaataaaaggctttttgccactgaaataatccagaagactcttcaccttactggactcagctaaccacaaagtaagccctgaagcaagagaccacaccaggagaagagagcacaactgaacagcagagaggatcaaatgtcctttcacagtagccagagctggccccaagctatgcaggcactttcctcctccgagggccatggatggagaggaagctccacttgtttgagaaactgcacgcagagaaggtacctagatcctggggtcctctcaggtgctctgcccaaagtcaggatcttcccatcttcccgtggtgactatggaaataaacagaatatgaacatgtaaggctgggcacagtggctcacgcctgtaatcccagcacttagagaggccgaggcgggtggatcacgaggtcaggagatcaagaccatcctggctcacacggtgaaaccccgtctctactaaaaatacaaaaaaattagccatgcatggtggtgggctcctgtagtcccagctactcgggaggctgaggcaggagaatggcatgaacccgggaggcggagcttgcagtgagccaagatcgtgccactgctctcc

SEQ ID NO: 316623 - DNA, 4001 bp, Homo sapiens
ctttcattaaccatattaaaaagattttactcaagaagaattcttcccataaaaactcaaataagtagatttaagtttctattttcttctttgctactacgtctctgctctcgtccatccacctaatcaaaaacactcgactctcattgtcaaggctaatgggaatatgagtgaaggggaagtacaagcccaaaccacctaagggccatcagtttctatttcttccaacagatctcagaacaagttcccaaactggttaaacacaccaatgtaaatttcaccttctgtactcctcacacgacaacagtggcaatataaatgctgggaaacccatagttggctatctggtaagatgagtttcttttacactccccaagacattatagccaaaagaaacaaacagataaattggtgtgcataaactttaaaccaaccaccagatatctaaagagggaatacagcacagtgttggaaagaaagtacagaatagtatttgagatcctagatgcagccggacgcggtggctcatgcctgtaatcccagcactttgggaagccgaggcgggtggatcacctgaggtcaagagtttgagatcagcctggctaacacggtgaaactccatctcttcaaaaaatacaaaaattagccaggtgtggtggtggacacctgtaatcccagctactcaggagggtgaggcaggagaatcgcctgaatccaggaggcagagggttgcagtgagccgggatcgtgccactgcactccaatctgggcaacaaagtgagaccccgtctcaaaaaagaaaaaaaaaaaaaaagaccctagatgctagagccaaattctgcctccctggcatatgagctgtatgatttgggacatatgacctcccttccctgtgcctcagtttcctcatctgtaaatggagacggaaatagcaccttatctcgcagggcttttctgactgctaaatgactcacataaagaggtaagaatgatctcacacacgttagaaagtgctcaaaaatattagattttatgattatttcctctaccaacgctctgtgattcatcctgagtgcagaacaagtaaagcacgcaggtaaaaacactgcctacaaggagtgttcagacaaaattaagaagcttctgcacagcaaaagaaactaccatcagagtgaacaggcaacctacagaatgggagaaaatttttgcaatctgtccatctgacaaagggctaatatccagaatctacaaagaacccaaacaaatttacaagaaaaaaaacaaaaatttacaagaaaaacaacaaacaagtgggcaaaggatatgaacagacacttctcaaaagaagacatttatgccaccaacagacacgtgaaaaaatgctcatcatcactggtcatcagagaaatgcattgtggttttgatttgcatctctttttctttgttaaaatacagaaattttctgctaaaatttaaatttaaatgaaattaattttaaatttaatggtctctgttttacaggccattaatactaccagaaccaacataatgtatttgctctgctcattcaatctctgctacaatgaatccatgtaagtgtactcactcacacacacacacacaaacacacacacgaaatttcaaggtttaccatgacagcaaagaaagaacagataagcagatttcttcaggccatggttctggaaagaaggcaccagcacttaacaaaaccactcaccatctgtgccaccaacagctgactactaggtgacaccccactgcagacacagaagagggcaatgagcctggaagtgggcgggggttagcagggctcagctgcgctcccccagcctaccaaggtctctcagggcacaagtcacatgccgagccccacgctgctgcccactgggctaaaggtaactagcagacaaaatccacacttgacttctcaggagagcagagggtggaggataggccaatgggcagccagcagcaaagtcaccccactgctccacccatgggcagggacaggcatcagtgagtgttgctgccaggaccggttctgaaaacagacactgttttctttctgctcagcttcccaataagagacaacgggcatatattttttaaaccactgaaatgaaggataggatgccgggtggtatgtctaaccaaggtaaggcataccaagaaagaaacagattgcccagagcatgctgacagcagatttattctagacgaatacataggaattgagctactcccgtcactgcatatctgagcacctagtgtgagccaggctttggccaggcgctgggaagacagtgttgatgacctggtctaggctttcagtgggctaaccttctagcagggaagataaaaatcaaacaagcaaggtctgcaaggcacgggggaaggcctttctgaggaagggatgtacaccaggcgggataagcagacaaatcaagtccatgtcctattgacactgagtgttcagatttcagaaacagtattgcaactccacaacctcaaagcagccttgggaatataatgtgcaaacttgccttgccctcaaatccttccacctctagttgtcttcatcaccctgcagcactccaggcctgaataggaagtactcaccccgacacacactgccatgcctttctctcttctctccccaaagctcctagagtaactcccataaaacctagattgtgtgaatttgcaggtgctgttcaacaggatcacatccctgagtgagaatcttaaataattcctctgtaaacaaatacagtcagacacaggggattaatttgtctattttaagcatcagcagtagccatgctatagactgctttacaccaagaaagtttattaaatctaagaaagaacactttaaaaaaaaaacttcagaaaattatatatttagtagcatgtgtacaagaacatttcattagatactaatctataatactaagggtttgaatccagccaaattcctatatttagtgggtgataatgacaaactatagcagtttaattcatgcctcttaaatggcagccaggtaacaagctgcaagccaacttcactgaacaaactgattaatgctatacataggaaaactatagtctatgcataaagaactaagacaatagctcatttagatatgtgtgaagaacaactcttaaacagacactgatagcattataaatcttttcccttctattaactgctattaaggaaaaggcacttggggtatttaaaaatggaggtacacctacatccaaagaaaatcaggcacaagaaatagtctttcaacgctgtatgtgaacataagcattagactaaggggtctctaagaaggactaagactcatacacttgctaacaaatggtaaaactcagacagattgtattcttattccagtagtgttctggtttgaatatttctttattctttcaaaatcaaatttccatataaacatctaaggaaatttatagcctgggcatgtaaatcatgccgctgtttgccaaaaatataattcaattggcttaaaggcttaaggagccagtatttcccagctgggaacacataaggctactgacagccagcttctccttcctctacagccactcctgtgcaccctcctccccactcttacagaaagtgggtttgctcagctgggttttctgtaaacctggagtctaaaaccacagaaggatggggaaggtaacaatggccaaggaaatctgggcacaagcccagtgtaaagatccagcacaggagattcctttaaatagacctgggcagagacaggcatagcgaggcagggtgatggaaactgaactgcacggactgtcagaaaccaaaatcctggtacccgtctacccaaactttggatagaactaaaaatgcaattagcatttacttagtgttttggaaaggctttcatatccagtgtcttatctgaacatcacaaaagcaaactgatgaggaagaa

SEQ ID NO: 316624 - DNA, 4001 bp, Homo sapiens
gaagggtaattttttgttttgttttgttttttacagagtcctgctctgttgcccagtctggagtgcagtggcgggatctcagctcatcacaacttctgcctcctgagttcaagcgattctcctggctcagcctctcgagtagctgggactagagatgcatgccaccacgcctggctaattatttgtatttttagtagagatagggtttctccatgttggtcaggctggtctcgaactcctgacctcaaatgatctgcccgcctcggtctcccaaagtgctgggattacagtgagccaccacgcctgtctgggtaatttttttttaagtattctgtttacagtaaattcagaaaacagaagtctttaatatgtctgttttaaaggggagaggtataaggtgtgcggctaacaagtttatttttctagtcgcagaatttggactcgtgaaagattttagtctaatgcagtttgttcacaaatataaggaggggggcctcagactagggaggtgttttccgagttgagtcagaacaagaaagtaagtctcccaagacctggtccttttccactatatcacactgcactgtctggctccaatctgatggcgagcaatggttccttaaaaagctccatcttctcaagcctacccagcacagacctacaactcaaactttaagttttagccagcctaaccttccacgtccacttgaaaaaagaaaaaaaagaaagaaacaatcaaccggaagcctttgatttttttgctagcaagaagccaataattgttttctttgggacaatcacaggttaagttgtgaaatgggtggcagaaactgcaagatttaaccagtttctctcaacgctaatcaaaggtcaagaaaataaaagacagggcagtgagagtcgcgggactttagacactcctgcaccaagaagcttaaaagtcttagccagggcactagagaacgcttttagaatggtcactcttaattatgctccataaccttgaaattggactgagtggggaaggggtttccacactctcacaacgcaccgactgggggaacgcctgtccccagactcgaatccacgtgtccattcaagtcatctaccgccactctccgtctacgctgccaggtgacagacatcatctttgcttctcaatttcaaaaaatgccagcactccttagatcaatgactccacggccaagtgcaagggccacgggcactcctctggagtcaccgagagaatgtctgcctctggcagcggcctctgagctgcctgtgggcctcgtgccgccgcgctgcgtggggccggcatctcagcgggcgcgagtgcagtctcgccccacgcgcggtccgaacgcccgcgagcccggcctctgggcaggcgggggccgcggacgagggcaacgtcagcggcccagctgggccacctcctcccagccgaagcgcggcctccggctgcttcgccgggccggtccccgccgccgcacacacaagggtcggtcccgcgcgcatccccggccgcgcaccagccccgcgcccgcgccgcccgcgactcagacacaggaagctgcggcagcacgggcaccccggaggcctccggctgccgagggaagcggggccgcgggcaggaggccggaaaggcggcgcggccccacgagcctggggtggctcacgcgcctccgcggcggccgctgctccgggctcggccctgaagggcaacgtcagccggcgcctcggccggggcccgggcaccgccgcgggagcaggcgcggctccgcacggcgggcgcactcacctcctccgtggaccggccgctccgccgccggctgtcactgcagcccactccctgccccgcgccggctctggatgctatttaaggcgccgctggcgccgccgcctcggcccgctggttgcgcccccgccaccgccgcggctgagccaggatgctgctggtgcgctcgccgcgccggccccgccctcccgcggccccgccccgcccgcaggccccgcccccggcaggccccgccccgccgagcgcccggccgccctcctgtctgggcgcgcgtggctggcgggtggccggcggtcgagaggctgcggcgggcgaacgccgctggagtcgcccagactgcctcggatttcataatgaatctgaggaaggacaaagggtacattggaccgcctcagctcagaggccccgcggaccctgggccccgcgatgcccgaggggcgggcggcgccctccggatcctgcaccctcagcccgtgccccgctggcctcctggcaggccgggcagaattctgctgcgagggccctggaggcaagggccttcctctccgtttttccttgacactgacgggcgcggccccacagggtttcccccacgctccctggccggaagaccttttctgtctggtgtctgcagagcctgacgtgggcagcgcccgcagctcgcgccggtgcaggggagctgagggccgactgcgcgctgcaccacggcggccacctgctgtgcggttctgagggcttccgcggttctgagggcttccgcgtccctgccatgcccatcttggggcttcagaagccaacacgatggttttcgggctcacatcccaaaggctgctcttccttttagcacctgggacctaccaggaacctcaacctctaacaacattggtccccgttaccgtggagtttgcgcccagcgttcgctggagggccgtttgaagaatgattgttgtcgtaaaggcctttgataataatagatactgtttacccagtgcttgatgccaggcattgctacaaacactgcgtacacattattctatttaatcttcataacccagtgaggtaggtactgtcattactgtcctttcacagaagaggaagctggggcacagaggttaaatgctagtgagagcagtaccacacttggcactcaggctgcccccagagtgtgggcacaaccaacgcagggctatgcctgggctgcaggcaggggaaactgaccgtggttcgctccaggcctcagccacactgcagttcactcccacaaataactgaaggactttccctgggtgtctcccacagtgtgctgggcgcagtggtgcagtggggtgaggacaacgcacacaccagcaacctctctagcagctcagtccttttagatctccatcttccagatctagaaaaaatggactccacgttcgttttcactggttcccgcttggctaatccctggtttttctgtccagatctcgcctccccatccgtgattttgtcatctttgcctctcctttttcctcttctccaaccggtccctcagccccagaacctctgcaggcacctcccaagttctgtggtctattgttttcaagggctgctggaacgaagtaccacacactaagtggcttcaacaaccgaaatgtatggtctgtcctggttctggagactagaagtacaaaatcacggcgtgggagggctggctgcttccgaggcccatgaaagagcatgtgtgcccggccactctgacttgcagatgcccatcttctccctatgtctcctcacaccatcttccctgtggtgtgtgtgtgcaaatcccttctttctataaggacaccagtcatactggactagggcccacccgaattgcctcattttaacttgatgacctctgtaatcatgaggtaatgtccaagtaaggtcccattctaagatacctgaatgcccaggcacggtggttcatgcctgtaatcccagcactttgggaggccgaggcaggcagatcaactgaggtcaggagttcaagaccagcctggccaacatggtgaaaccctgtctctactaaaaataaaaaaattagcggggcatggtggtgcgtacctgtagtcccagctactcgggaggctgaggcagaagaattgtttgaacccagggaggtggaggttgcaatgagccaagatcacgccactgcattccagcctgggagacagag

SEQ ID NO: 316625 - DNA, 4001 bp, Homo sapiens
ttgtctattttaagcatcagcagtagccatgctatagactgctttacaccaagaaagtttattaaatctaagaaagaacactttaaaaaaaaaacttcagaaaattatatatttagtagcatgtgtacaagaacatttcattagatactaatctataatactaagggtttgaatccagccaaattcctatatttagtgggtgataatgacaaactatagcagtttaattcatgcctcttaaatggcagccaggtaacaagctgcaagccaacttcactgaacaaactgattaatgctatacataggaaaactatagtctatgcataaagaactaagacaatagctcatttagatatgtgtgaagaacaactcttaaacagacactgatagcattataaatcttttcccttctattaactgctattaaggaaaaggcacttggggtatttaaaaatggaggtacacctacatccaaagaaaatcaggcacaagaaatagtctttcaacgctgtatgtgaacataagcattagactaaggggtctctaagaaggactaagactcatacacttgctaacaaatggtaaaactcagacagattgtattcttattccagtagtgttctggtttgaatatttctttattctttcaaaatcaaatttccatataaacatctaaggaaatttatagcctgggcatgtaaatcatgccgctgtttgccaaaaatataattcaattggcttaaaggcttaaggagccagtatttcccagctgggaacacataaggctactgacagccagcttctccttcctctacagccactcctgtgcaccctcctccccactcttacagaaagtgggtttgctcagctgggttttctgtaaacctggagtctaaaaccacagaaggatggggaaggtaacaatggccaaggaaatctgggcacaagcccagtgtaaagatccagcacaggagattcctttaaatagacctgggcagagacaggcatagcgaggcagggtgatggaaactgaactgcacggactgtcagaaaccaaaatcctggtacccgtctacccaaactttggatagaactaaaaatgcaattagcatttacttagtgttttggaaaggctttcatatccagtgtcttatctgaacatcacaaaagcaaactgatgaggaagaaaccaaggccagagacttataagccttccccaggatgttagtcaagaacgggacaccaaccaatgtgactctaaatccaacctatgctaataattcttaactatgctaagccactgaccctctcccctgagaacacacataactatcacaagtctcctttagcccaacccaggttaggaaccatgaggtcaggtttctaaagtccttccagtactcacactcccaggtattatgacagctccctcctgaggtccacctaaatgctcaatgtcttacaaaaacgttagcatttattgtatcaccctggcctctgaacacgtggtgagttcaaggcccactatacacaaaggttcacctcttcaccattttatttgtaccatgaaaatagtggctcagggccagaggtgactcacaaggacatcattctcttgaagatacacatacacaaacatacacacacacacacacacactgcccctgcaactctgcaaacttttacttacattaacattgtattctcttcatgtcatttagaaaccaaaaaccgggtggtctggatgtttctctccttctaaagttcctcaagctttcatcaagatgaataatggcagtttgatggaatacttcactaggaatgcagccctcaaacaaacccacataaatgacacccttgcccctgcagtggcaaattaagaaagcctgacatctttccttaacgcagcaacccaagctggcaagatgctgccattccgtgccccgcctcctccccttgtacaataggctatttacagaggctgaaagcgccccctttgtcattcactagctgggcagagctcaggcttcagggaggaacaagagagcagcagccaggccatttgctgctctttcaaagcaccactccaaacctgttggattcgtgctccttaaccctggcttggcaaattccctaaagttagatttgcttaagccattcccttttgaaccaaaagagcagtcaggctctccctagagagagggaggtacggcagctcaaaagagatgccagtctcccagctggagaggaaagcagaggttgctgtccaaaccctatcccactgatctccctgactgtggtcactgctctgggcccatctcctcactctgagcatcaggagaaagatttggggtaactttgggatcccataacaaacatgcaagtggttccacagggagtcagttattcccacccactgccttgtggctttttcttcccaattaagtataataaatcttaaacccacttaattttcattaaagtgatcttatagatcaccaattgaatttcctaaggatgtaaaaagaagaaacaaagcagatgccctgattttattaatctgacttattgaaatattcaagtccagctgaatacttctacacttaaaccactccctgcccatccccttataaagttatcagagaaagagtgagacacaaagctttgaactgttaaccagtaaaatgaggaccatacctcaaccattcacattggtcacaaatatcatatatgccccccaaaataaagagatctcaaacacaatatgtcgaatttgaacagataaatttttaggatgcagggtcaaatatcttatagcagtttctgtattcattaaactacatctccagttaaatcacatgaagaactaaattactttagaaatactgttttaaattcacatttcattaggccgggcgcggtggctcacacctgtaatcccagcactttgggaggccgaggcgggcagatcacgaggtcaggagatcaagaccatcctggctaacacggtgaaactccatctctactaaaaatacaaaaaaaaaattagccaggcgtggtggcaggcgcctgtagtcccagctacttgggaggctgaggcaggagaatggtgtgaacctgggaagcggagcttgcagtaagctgagatcgcgccactgcactccagcctgggcgacagagcgagactctgtctcaaaaaaaataaaaataaaataaacaaataaaccacatttcattaatatgttatttgagttctttgaatatgcatcttcaaacagggtttggggcatctctacagccactttttgaggcatcgaatggttttctgtggcatacattcacattttcctcttccactgaagttgttgaaattgaagcagtttttgaagtcatgtatgtgctactagtgaaaaaattctcccaagtcacaagaacacatttgaatgatattagaacaggagaaattttgtcctatgggtccacatttatctaactaaacctcatactctatttatagctttttaaactgatttttaaatgcactttttacagtaacaaccaacatttgcctttgtaagctgaaaccctaagaaataattacccagctagcattacatttgctgtagaaaaagtctaattcagctagttgacctgtacaaggacccatgactaggactggtagagacggtttcaggacaaggtgccctctctccccgaggctgttccaaatacaggggctgagagcacctcatactatgacagccttggtaagacttaactaggaaggctgaaggagaattttgggacactttcatcttatattgggacaggaatcttatattgggcttggaattaaaagacataacataaatgtatacacaaaatagtggataacagagtagcagtaagtgcaaaatgaattctgacagggagcatttgctcttagggagggttgcatggagaaggcacagctgagctggtccttgacaaatgagaatcat

SEQ ID NO: 316626 - DNA, 4001 bp, Homo sapiens
atagtccatgagactaatttccattcagctagcgacacataagaaaattacaattcaatgattataaaactttggtatatgtgagttatttgtagaggctgcaaaggctaaagaagtgtgaacataaacatttaagtattcttgtgaaaacatacaatcagttacctaactccaatattagaagaaagaactaaacttagcacaattattttgctatacttttcgttttgtttttgagacaaatacaattttacacttgcctgttgtcacagtttccttaaggtcaagctgaactcgctgcatttgtgcaaactggtgcaaggctgacacaggatttatctctccacgtttgtatttcattataaattccttaggtattttttttggaggaaggacaggatttgaaatagatgaaagattcttggaaagcaacggctctggaaaattacctaaaaacaaatgttatacttgtcaatttggtttaaaacaaacaaacaaaaatgagcaaaagcaataaatcctccccgaaatggaaggttgtcccagatacacttcatcatatgtttttcttaagtttctactaaacaattttggcacacatgacaagcaccacatgttattgcatctatcgagtactaagactattttgcaaaaaggtaatatcaacatgtcattattaagtgatatcaagggtcatggaattttagtgatgtcagggtctccagaaaccaagaaatttttacagataatatcactaaggcctagaatacagaaagacacagatctgggactaaaacgtagcttctggctcccatccactcattttctcactggattccaccgaattttaaagtatgtttgcccctgctttatacttaacactacgctaagtgctatgtggaatacagaccagtgtaagtccagtatcttcccttgcgcctcacctcagaaaggcaagccacacttgaaggggggggtttgaacagtcaaggtggtaacagatggttaaacgagcggcacaggtaaagagctctacaggcctcctccaaatgttgagtcagatgccagctccaggtacacggccacgggtaaatgtctatacaaccacgaaacctttaaaccagagactcgacagaacttactggccatcctagaatcttaaagaactgactcattgttacaaatgaaaaaagtcgtacccgttacttgcgtaaccttggatgccatcttggacaggccgtaactttctgaggaccatcctgtgggtgtagttatcgtctttgtcgctggttgaactggcaggttctttttcagcatctgggcaaagctggggacctgcgaactctgaaaccaatgattgttgctagccattttctcacctagaggtcacgataaaattggcagaaaacaagacaaaacgctatgtaaactgaaaatatttactccaaaccccacccccccattatttccataaatggccttggcacatattcagatgactagagtcaaatccctcttgaactgatctcacgactgctttttgagttttcatagacacggacctcttctctcctgaatcccttccctaaacctctgctacaaaggaggaaagaaggaacagagagaggtccctgtaaaagaccttaaaactactcaggagttagggaagatattagcaaggtcaggaaaaaagaaaaaaagaaaaaaaaatcagctcgtaggtggcctcctgagtcctggcccaacccctacccaccaaagttgtccttcctgccctctatgtgggaagacgggcagctgctgctgcgcctcaggccgggggctcgcaggcggccgccgccgccgttgctcccacctcccagcctcaacctctcgcttcaggccgctctgcgcgaggttcacagggtcagggccgcatctttcaaaagaggcctcgcgtcgcccctgcaggacccgggcttgcgcccccgcgccctgcttcgtccaatcactaaccgtctcggaggccggcgctcttgcccccgcgcttgcgccagcgtcgtgcagccgagctccgcgtcttgcgtcacctagggaagagacgccgaccatcgcaggcgttcgaggcctgggtgactctgttctccgaacacaaggaccgggtccaactggccgccttacccttctggagaagccaggtaaaatcgcgcagttcagcctcctcccttactgtcccgtgcccccctacagccctgacagagcactgtagggatgattatttatactgcagttgtctatgcctggggcctccttccccagagcggttgaaggctgcccaaggggtacctgcgtgagggttgtttcaagaaaatccctcatttcatccacaatcgcaatctgagaaggtgcccatggggaaggcttggcctccactgtggccttcctgtttacagaaaaactacctcacacgtcctgaagcttggccagtgagcgaacaatcatgaaaacagatggagtctttgagagcaaatggctctgctatccggatgacaaatccagtgtggatgttttcaattctttgctctcctaaaggttgaaggaggccctactcgaggtgttaggtgatagttcgtggaaaataagaatactaagtcacccaacaaatttcggcatgtaaacaaaaagtaatccaaaggatggagtaactttgttataacaaaatttcagtgtccatctacctttttatagggataagttttctcagtaattaagtcagatgtaaatctttttttttaaaaaaaagaaggaagccaggcatggtggtgggcactggtattcccagatactggagaggctgaggcaggaggaccaattgagcccaggagatcaagtccagcctgggcaacattagtgagactgccatctctttaaaaaagaaagaaaaagaaaaaggaaaagaacaaatagacgtaatttgcatccggaagtagatgggcttattggaagaaaagtcccatccccctcgttaagcagtgcattttcaataaaaatatttttctttagtggttattaaaatgtgtgttcattatgttgcttcgatcaagtgcccattaatgatctcaatgataatctagaattttttttttttttttttttttttttttttttttttttttgagacggagtctcgctctgtcgcccaggctggagtgcagtggcgggatctcggctcactgcaagctccgcctcccgggttcacgccattctcctgcctcagcctcccaagtagctgggactacaggcgcccgccactacgcccggctaattttttgtatttttagtagagacggggtttcaccgttttagccgggatggtctcgatctcctgacctcgtgatccgcccgcctcggcctcccaaagtgctgggattacaggcgtgagccaccgcgcccggcctagaatttttaattaacatttagagacttctggttacaggaaattaaaaaattcaaatgtcaagaagtaaaaggatgataatacaacttctaagtacattaggatcaaatttgaggagagacatgcaatggaaataaaagctcgagtgaaaggaatgaggtacaaatttccctactgcatacacaaatatataaattatgttttattttgaagtaattttagatttacaaaggaattgtaaagatagtatagtctttccattccttccatccactttccccaatattatcttacataactgtcaactaaagacaaagaaatcaggcttttaaagaattaaagttagttttgttcagtcttaggattgcaacccaggagagtctttcagaggatttctgtttcactgcaccaaagccatgtttcagcccatagcttatatgtcacgtgatgtggatgttcagcatgtgctcagaagttacagtagagcaacatctcatcaaagtttgggtgggagaggagtacattggttatagattacagaggcataataattattcctgtcaga

SEQ ID NO: 316627 - DNA, 4001 bp, Homo sapiens
atttggtttaaaacaaacaaacaaaaatgagcaaaagcaataaatcctccccgaaatggaaggttgtcccagatacacttcatcatatgtttttcttaagtttctactaaacaattttggcacacatgacaagcaccacatgttattgcatctatcgagtactaagactattttgcaaaaaggtaatatcaacatgtcattattaagtgatatcaagggtcatggaattttagtgatgtcagggtctccagaaaccaagaaatttttacagataatatcactaaggcctagaatacagaaagacacagatctgggactaaaacgtagcttctggctcccatccactcattttctcactggattccaccgaattttaaagtatgtttgcccctgctttatacttaacactacgctaagtgctatgtggaatacagaccagtgtaagtccagtatcttcccttgcgcctcacctcagaaaggcaagccacacttgaaggggggggtttgaacagtcaaggtggtaacagatggttaaacgagcggcacaggtaaagagctctacaggcctcctccaaatgttgagtcagatgccagctccaggtacacggccacgggtaaatgtctatacaaccacgaaacctttaaaccagagactcgacagaacttactggccatcctagaatcttaaagaactgactcattgttacaaatgaaaaaagtcgtacccgttacttgcgtaaccttggatgccatcttggacaggccgtaactttctgaggaccatcctgtgggtgtagttatcgtctttgtcgctggttgaactggcaggttctttttcagcatctgggcaaagctggggacctgcgaactctgaaaccaatgattgttgctagccattttctcacctagaggtcacgataaaattggcagaaaacaagacaaaacgctatgtaaactgaaaatatttactccaaaccccacccccccattatttccataaatggccttggcacatattcagatgactagagtcaaatccctcttgaactgatctcacgactgctttttgagttttcatagacacggacctcttctctcctgaatcccttccctaaacctctgctacaaaggaggaaagaaggaacagagagaggtccctgtaaaagaccttaaaactactcaggagttagggaagatattagcaaggtcaggaaaaaagaaaaaaagaaaaaaaaatcagctcgtaggtggcctcctgagtcctggcccaacccctacccaccaaagttgtccttcctgccctctatgtgggaagacgggcagctgctgctgcgcctcaggccgggggctcgcaggcggccgccgccgccgttgctcccacctcccagcctcaacctctcgcttcaggccgctctgcgcgaggttcacagggtcagggccgcatctttcaaaagaggcctcgcgtcgcccctgcaggacccgggcttgcgcccccgcgccctgcttcgtccaatcactaaccgtctcggaggccggcgctcttgcccccgcgcttgcgccagcgtcgtgcagccgagctccgcgtcttgcgtcacctagggaagagacgccgaccatcgcaggcgttcgaggcctgggtgactctgttctccgaacacaaggaccgggtccaactggccgccttacccttctggagaagccaggtaaaatcgcgcagttcagcctcctcccttactgtcccgtgcccccctacagccctgacagagcactgtagggatgattatttatactgcagttgtctatgcctggggcctccttccccagagcggttgaaggctgcccaaggggtacctgcgtgagggttgtttcaagaaaatccctcatttcatccacaatcgcaatctgagaaggtgcccatggggaaggcttggcctccactgtggccttcctgtttacagaaaaactacctcacacgtcctgaagcttggccagtgagcgaacaatcatgaaaacagatggagtctttgagagcaaatggctctgctatccggatgacaaatccagtgtggatgttttcaattctttgctctcctaaaggttgaaggaggccctactcgaggtgttaggtgatagttcgtggaaaataagaatactaagtcacccaacaaatttcggcatgtaaacaaaaagtaatccaaaggatggagtaactttgttataacaaaatttcagtgtccatctacctttttatagggataagttttctcagtaattaagtcagatgtaaatctttttttttaaaaaaaagaaggaagccaggcatggtggtgggcactggtattcccagatactggagaggctgaggcaggaggaccaattgagcccaggagatcaagtccagcctgggcaacattagtgagactgccatctctttaaaaaagaaagaaaaagaaaaaggaaaagaacaaatagacgtaatttgcatccggaagtagatgggcttattggaagaaaagtcccatccccctcgttaagcagtgcattttcaataaaaatatttttctttagtggttattaaaatgtgtgttcattatgttgcttcgatcaagtgcccattaatgatctcaatgataatctagaattttttttttttttttttttttttttttttttttttttttgagacggagtctcgctctgtcgcccaggctggagtgcagtggcgggatctcggctcactgcaagctccgcctcccgggttcacgccattctcctgcctcagcctcccaagtagctgggactacaggcgcccgccactacgcccggctaattttttgtatttttagtagagacggggtttcaccgttttagccgggatggtctcgatctcctgacctcgtgatccgcccgcctcggcctcccaaagtgctgggattacaggcgtgagccaccgcgcccggcctagaatttttaattaacatttagagacttctggttacaggaaattaaaaaattcaaatgtcaagaagtaaaaggatgataatacaacttctaagtacattaggatcaaatttgaggagagacatgcaatggaaataaaagctcgagtgaaaggaatgaggtacaaatttccctactgcatacacaaatatataaattatgttttattttgaagtaattttagatttacaaaggaattgtaaagatagtatagtctttccattccttccatccactttccccaatattatcttacataactgtcaactaaagacaaagaaatcaggcttttaaagaattaaagttagttttgttcagtcttaggattgcaacccaggagagtctttcagaggatttctgtttcactgcaccaaagccatgtttcagcccatagcttatatgtcacgtgatgtggatgttcagcatgtgctcagaagttacagtagagcaacatctcatcaaagtttgggtgggagaggagtacattggttatagattacagaggcataataattattcctgtcagacattatctcatgtacaggaaaagacaaaggctaggatcattgaacttcttttctagaaatgcagtgattcaggcaagagacatgggaacctgttctctatcctgctttcctgcttatcatcttcaggatattccttctggctgcactcagtcactgagtcagggagttgtgaagttatgctcacaagcagagtgagcaaacatggcttcatcacagcaagagtggactctggctggccagaggcagatgtttgctactttgtctcatgtaactgtggcacattgatggaaactaataaattaacattagtacaacactactgactatacaacacactttatttggatttcaccagtttttcaaccaatgtccattttctgttccaggattcaggttgccatattgcatttagtggtcatatctcctaagtatcccatggtctgtgatagtttttcagcccttctttatttttca

SEQ ID NO: 316628 - DNA, 4001 bp, Homo sapiens
tttagaaagtaagcctactttcttaggaaatattgcatacttttaatgggcagcaaagactggcaaaatagggaaccattaagtttaaggtagaaagtaaaactgttagtagaagcctccatcaagtttcaacttctgctttcagcttaggaaagtaggattttgacattgggttagtagaaaaatagttgcatgatactggtttgttgagatggaagagatatttgacttgttcagatcttttatgtatgaataggtaacatgattcatgatgacgcaggctcataatgagaggttgttgaagggctaatttttaaagcatgaaatgcctatatatgcataaattctcagataagagatttgattaacaaagatttggttaagtgatacagtattgtgtcaatttctgaaagtcaacgtggcagacagaataagaaaatgactcctaaaatgcccagatgtgcatgttcttgtataaccctctcccttgaatataagtaggatctttgaatatgataaatgtcacttgagtgattggattatgtaacacagaaaaggtgaaagggttttgccgctgtaactgagatctctaattagttgactttgactcaaaagggacattattctggatgggcactgacttaatcaggtgaaagccataaaagcaaaagaatctctagctagccttaaagagaaacagctgtattgaaagctgccagtaaagagggggagcctctaaaaggagaggaccttgatgctacaaccacaagtaactaaattctaccaacattaatgagcttggaagagaactttgagctccagaagagaactgcaacgtggctaatgccttgatttcggcttgtgagaccctgaacaaaggacctagttaagccttacccaaactcctcatccacagaaactgtggtgtgataaatgtgtgttgctttttgcgcctaactctgtgctaatttaatatctagccacagaaaatgaatacatttggaaacccattgttggctatagtgaatgagacccaaagaatcatctctaaaatctcctggttactaactagaaaaattctgaatggttatgatctttcagaaaagagaaatttacctccttgggatatattatgcttcagatgatacactttactttgagaaaaaattttagtccccatcagaaagtttatagactattagagataaaacaagtaattagatggatggagtcagtcctagagctcagctaaactttagaatgccacaaagtatggtagaatatagggaaatgtaagttccttgaggccctggttaaagacttttaaaaattaagacaatatctcaataagccctaagtcataattaccagtgtacgttatcgaatttctcagaagaaagcaaacatatgactctgaattaaacagattctaaaggaacagaaaacagatttacagctgtaaaatatgcaatttcattatgcaccaaagacaaaataatatttgaatttgttactacagagaagtgggagatcattattcaatttatactcctgagattctgaacaaatttatatcactgccctgtgtttttttttctttttcttttttttaaatttagagaagtactacaaggaatagtacaaagtttcatgattcatttctcaattaggttttcatctattgattttagtgctttgttaggccttggttttagagggtatggggcaagtttgggcagatatttggagggtttagtctgaaactgataggttcagcctaaacagtattacaaaatcagtttaatctatgcccagaagtatgactacttctttgaccttcaatttgtgtaaagagtacaggtaaggcaaggtttaaatagctataacctgcttgtgatcgagggcgtcctcaggaaatgtgcaggaacaggccatcaggagagcttttattttataggagatactcacaccaccccatttggttagtggatgtgatgtcacaaaggaggaaagaatgtttctcaattaagagtctgagggcgacagttatgcactggggcatgcaaagtgtttgaggtttattagcggtacccggcacctgatagttattcagtcccagggagaagttaggtaacaatgtcaagatgtatgacagatgtcacagggcctatcaatcaaaatgttgaggtttttttctttaataattagagaactttgcctttatgcaatgaagggacattgagcgatttattcccccttgcagaaacttcaataattatcccatttgtatttgttcccttttgtttcctagctgtaagagtgaaattatttttcctatactctttcagtttaaagtgtacaaaaccgtctttttcaagagtactctagggtttaacaactatagtgtttttacttgaatcccaaagtaaacagcatctttttgaaattctcaacgtatagaccattgttgcagctgtttttttcatttatttttaattttttaatgattaaatccttaaagaagagttgcaaagcttgtagagttttcatatatgcttcatctagcttcccctaatgttaacatcttgaataaccatgatacatttattaaaagtaaaaaattaccattggtataatactattaactaagttacagacttcattaggatttgcctgtattttcccctaatttttttttcatttccaggatccagtccaggttaccacattactaagtcatcgtatccccttagtttcctccagtttgtgacagtttgtcagtttttccttgttgttcattaccaatatactttggaaggtattttgtagaatggcccttgatatgggtttctgtggttctcacagtgcaactgaggtatggattttgtgaagaatatcatttaaagcctttttctaatatgtcagggaaacttgatatcaacatgatttgttattggagatggcttactttgacaccatggctaagttagcgactgatagatttctccactggaaagctgccttttgtctcttttcctgctctattcattagaagcttcttaacaaatctaacccaccctcaagctccaccatggagagaggagtatcagagaatttacaggcatatgtttcaactaccatagtacttaataaatattttggggagatattttcagacctgttgacttgttatttctgccattcttctacattcaccatttgtaaagaagcttttccctttcttcatcaattaatttatttgattatttataacagtatgggcacgtgtttatttgatctaatggatgtaattcaataatgacattgtttattttgttactcaagttgttctagggttgtcttgggagattttttgaggtttcaggataactcttggatcactttgacatgccctatgtatttatctgtatgtttatgtatttatcagcccttgcttgctttctagcaccagaggatgctccagaatcatttgtatttttcctgcccaagccccatattttctccaaatatgaccaaagaaatcagtcatttctctaaatatgattgcagaatcatatttagaatccatgatataaacaacagtggtgctcattgctatagaactatcattgcttgtttactttttctggaaagagagagaaagttatatgtacatatgcacacgtttatatgtatttctgtatttacttatatttatgcatattaaaagaaacaagaactcaatcttttatttccaattgtaactcatggccacagtggtcattctagcctctcccacttgctcatttgtaatttcctttttcgatataaagaatttggttcccattccattccatgtagtgaactgtctacattttgtttacttacttgtacaactttaggagttgtagttccagaatggctaaatttaccctgtgagatcaaaattaccagctaaaataaagtgcttatgtaaagttctttctgcctttaattttatg

SEQ ID NO: 316629 - DNA, 4001 bp, Homo sapiens
agaatctccacaccatcagaagagtactgggattttagatattagcaaaaggcctaacagtatctttcacattaggagataattattttaaagcagattgaataacagaagtcatcagaggatttacccaaagcaggaaagattgtaagagaaaaatttccatgctctgtacttcattgttctcttctatgtagcattcttgccttctgttgtactcaaatgtgctcctcctaaatgctacagaagttgatgattttatttcattcatctccatatcatcttacagcccctccatcatcttccaagtacatatcagtggcttgtacaaagacagtaataaactgatgcttgaaatgtccaactgcaggagaatttttacctcactataatttagccccaggaaagtgggaccttcctccagaaagaggaagagaagaacagaaatgtttccggactacagattattttttttaaccaccagtgggaaacatttcagaaacaatattttgcttagctcacttcattcccttactttcaacttaagataagagtgacatctgagaacaaagcttacctatttgcaccatttcttcattaccagcctggaaaggagggggaaagcaagaaaaagaaagttactgggtttcatcttatcaccttgtgagttttatttctaccattaatggtttccaagagctaactaatcaggagatgctagagactgggattggtgcctaaagcctgcaccttggtttgtagaaggttccatgagccaattccataacaatttggggaagggagttgtttgccccttttcattttaatttaacacttatgaagccagcaaaaatacatacagactctcaatgctctcttctgaaatgtcgtactgggtctggattagaaaagaaagtatgaatttaacaggccaaaatacacctaacagggggcctgattaatcagatttaaggtcaggaatcaactagacaattctctactttttaccctatggtcgttcagaccaggccgaccggagaagctacaaaaactaacagagaaattctgtacccaaagtcccatcggcccagtgctgatatgatttactacaaacagctcccctggcggagccttctcaaggactcttctgagagcatcgggcttcaccttgagcctccaaagggttgggggcagggccgaaaagaaacagagctgcactcaacttagctttaaaaagaggaggagttgtgcagagggggaggggagaaggcggccggcgcctgcagcctctgcccaggaaaacggagggcaggaaacgtctccagcccccctccccaactgtcaaatcctagcccggccgtggtactcccaggacacgtgtctactggatctctccctgtccggcccaaggacttcctgaaacccccgcctccggctgcccgaaaaaaccgtgagtcagttcggaggagagaaagctccaggaacccgactctggcggcagcagccagagcgctgggatcccggacccagcgtccagaacttcattcaagcgcccagaccgccctccagaaaggggaagcccagatggcccggcgaggatgggaactggctgcggtttgtcactaggaattgttacgaatgtcgcagactggtgaagccctaggtgtgacaagactgggctcccggagtgggagtcgtaacctcccgtgcaactcaaccctctacccccaaaagcccgcacgctgcgcccagccctcaaaacaccgtttctgaacgcaaaagataacagggaagggtgggaggagaaggaggaaagagaggagggtagagaggggaggaacttttcgggaaaaggttgggtttgagtttttttttattgttattattttccacttacttgtccatcagctgaagtcctaacctctaccagagcggctgctatcaaccaaagtgacaggagaaccatcacgagtcgagttcactttccaactactgggcaaagcaaatgcccagagcaaacccaccccccccgcccaaaataagtttctttaagaaaaaaaggaaaagggaaaaaatgcgaaatagaaaaaaatgatcttctgtgctttgcttcaatgaaaatgaaatttgagctctgagactggccccctctgctctgcagttttttccacttcaccttctcaccccgtcctcccaacacagagtgtgcaggagcgagaaggtgctgtaagcgggcacaggctaagcctgggagagggggaagggacgaggggctttccaactatctctgcccaaagcagctttttcgaggcttttcgagcaccattggtccctaaggttagcgcggagaatgcttgggttccccggagcacagcagggggaagtattagcgagagagacgagcgagcgggagcgggagaaagaggcagggagagggcgactccgccgcacacgcagaggtgggggcgggaggagcgaaggggaggaggagaaggcaggcggaggaggtgggaggagtgggccgctcgccggctcctgttgctcgcagcgcggcagtctgctggctgctggcgacccgcggggcgctaataaggcgtccggagctccccggactgcccctcccgccgtggcgcccacgtcatgcggggcccgaacccgcgccccccgcaccgtgtcaggattggagaccgctcgggggctggtgtggcccgggctcgacctcccaccctggagcctctccttctccgcctagggcgagaggaggggagggtccaggggcgccaccggtcccgactggcgggacgcgcgttgagttaattataggaagggggagggtccgagggctggtcctgggctgtaggaaattcacctcctccaacctccactgttctcccagccagagaattctccccgaagagaagccctggaacctccagatcttaaccacgcggtgatctcccttccaggcaccagtcacctcccacgttttggcagggggtgtccttctttgtaagctcttgtttaggctttattcgtttatattagttttaaaagataccacgtcctttccttgactcacccggatgcttccgtttatcactagagtacacaggcctcagcgactcttcctcacacccagattaagttatcaaatgatttctgcccgctgtggcctggcgcttcctgaggggaaatgacaccaacctgagagtttgctggaatcctagcccaggcccacctcccaggcgtagacacctgtgggtgctttccagaaagcagacaggaggaaaaggaaatagctccaacctccactgaccggtccacgagccaggagtgagtagacacaaatttagatacgaacttcaagacttcaactggacagtcttgaagaggcctgcccacaataaaacgagctagtgtttatcttgttatgagatgcaagataagtcatagttcttgttcttttttaaaagcaatgtgagtttggagggtttcctataacttcgattcattgtttattcctggagaggtaacgtgatggttgtgcctttaacttaagcatggaaagatttggtgttcactgatgttttatctgctaagtcttctcaaaatcatatatcgaggacatttacatatacaaatgagaaactaggtaactaaatggccccacctagtaaaacaggatattaggtcaattagttattaattggaattagaattagaccccagcactgaagtatctctaaattacttttttccttcaattaaagcctgtagcatttttgtaacttgtcattaactagctatccaggagtgatttgctacattttacaccgagtttgtctattcattaaaaagaagtaaccctaagcattccataaatgaaaaatctgtcaatttacactgacaagtaaaagaacactagagatacacattaggagatctaggttctagacccagctaacagctgtcttaccttgacaagtcagaataaacctctattt

SEQ ID NO: 316630 - DNA, 4001 bp, Homo sapiens
agcaataagtaaatattttgttatctttcaaagcatttcagtatttacttttcttattcaattcaaagactataagaactaaaaactaaaaatcatgtaaataaacagtttttatggcaaaatcagtaacacaaaactgaacaccaaacaaaaccttctcagtatatcagataacatcaaaagaattaaggggaaaaatgaccagcttgtacgaagtatattttagaaggaaaactatctcacaattcggggactggctagagtttagactcacatcactcagcgactctccgaaactttaaaacctaaagacaccacaagtagaaaactaacaaatcataccagctgtccataccattgtaaaccacatcgaaactctgaaaagcagttttgactgcccaaatcatccacttcctgaaaagacaactttactattctagttttctccactgtcaaaatcaaaggagtatattaaaattttaacgtaggccaggcgcggtggctcacgcctgtaatcccagcacttttggaggcctaggcggacggatcacgaggtcaagagactgagaccatcctggccaacatggtgaaaccccgtctctactaaaaatacaaaaattagctgggcgtggtggcgcgcgcctgtagtcccagctactcgggaggctgaggtaggagaattgcttgaacctgggaggcggagattgcagtgactggagatcgcgccactgtactccagcctggcgacagagcgagactccgtctcaaaaaaaaaaggtatcatcgcgggcctttgtccattcaaggctccaaagtttacaaactcactttcatacaattcacaccctctgcctgaaatgccctcctctctctggtgcctgttgaactcctactcatccactccaagcttgttttcactaggcgcctctactcatagacacagtcgacctatcagcattctatttcctatccccattaagatctcagtcaatttttcacacaaaaaatctttctttaacttaccagtaatgcatacagctatcagctatgtctttggtctttggagatatgacaattgctttttgtctttctaaacataaattatgctcaaaccaacaacagtttcaggcgaaccaaaatacgtttttcaaggtgggtatgcataaagtgaatgcaaattacctcccaactatcttgagccattacaagagcaaagataaaagtcatcctaacagggaaaggccctctgacatctcccaaaaaacgaaaataaaagattaagaaaaaagaaaagagagggagggcaaaggtgaccaacagccccatcgctgataaagttccacgattatctctcgagcgtccgtcggcagatatggcttttctcttttggcagaagccgtcgtttttaaatacgagagccgacagatgcgtccgtacacaaaccttgcagccaccagcgctgcggaccgcggaaccggtctcacaagcaggatgctgaccagcgtccagccagggtcgtcctcctccgcccccacccctgcagcccacaagccggccaggaacgagcggcccgggaaaagcctagtccccggggtcctatcccgatgaaagatctgcggcgccctcgctccccggctcggcccaggccgaaggccccgcggggacccctccaagacgccctcggcgccgcagcggcctccccgcccccgaggctgcccgggccgccgcaggccccgcggcccccgcccgccgcaaccgcggcccagttccccgcgcccccgccgccgcctcagcccgaaccgggcccccgccgcccccgctagctagcctcacctcagaagcgaatcgtgggcagcgcgcgggattccggggtcccagtgcggccaccgcccgtcggctccggctccggctccgcccccgtcccctggcccgcagcagcggcccgccaggcctctccgcccctcagcccctccgctcgcccccaccgcccgacctgggtgcggcctgcggcgctgcagcccaacaacgcgccgtcccataggccaagccgcgcagcactgccgagcaacgtaccctgcgattggcgggacccatgaggggcgggtcccctgcgggcagggcgattggactcgccaggcccgcctcggggcgaccccgccggggcctgcggaggcccagggtcccgcgcggagtacaccccggccggcagcttcgggcgccaggtcatggcttcacggtggccaggtagactgcggcgagcccctgccgggtccgctggacacggtttcattgtgattgacctccgccggaggggctgtcggagcccagggaccctgccctcccgccgccgcccagcgcactcccccagcagacgggccctgccccgcgtagccccgccttgtgcagtccccaggccgagttttggggcccgggtggggtcaaggcagcagggcctgtgggccccgataaggctccacagaggacaactgcctggcccccgggcccggcctgcgggtgctgaggagaccagcgagcaccagccacctccgcacgaccagggagtgagcctgcggggctttggcaggaccagcctcagaccagcaccttcccgcacactgtccctcctgctggcgcatctgacacccaaaaaaacaagcagcgagacaaatgggcacggctgcttgtcctcttgacacccatagaaagcttaggtccagagctgggcagtggcagaagagtgtggaatccagacctccctgctcagcaggagcctctgtgacattgccccaacaagggtcagggatactgtctggatggaagccagcgacccctgttctaaccatttctgttggacgttggcttttccaagacgatttttctgacaagatcacaattctgtctcattcacttctgcttcccatagttaatcactagggaaacgcaaatcaaaaccactgtgggataccacttaacattcattaggatggcagttgaagaagcagggagttgggcgcagtggcttcagcctaaaatcccagcacttagggaggcagaaacaggaggatagcctgagcccaggagttggcagacttgactggacaacataaggagaccctgttctctacaaaaacgagaagaaaacaaaaagtttcaaggggggagaaggaggaagaagaggaaaaaaagaaaataagtgttggcaaagatgcggagaaattggaaccctttgtgcatcgctgacgggaatgtaaaatggtgtggctgctgtggaaaaccgtagagtggttcctcaaaaaattaaacataattaccacataatccagcaattccacttctggatatataccccaaagaaatgaaaacagctatttgtaccatgttcatagcagcattatgcagagaaggaaattctatttattggggttttgtgccttttttttttttttttttttttttttggagtcagggtctctgtcgcccaggctgcagtgcagtgttgcaaccatggctcactgcagccttgacctcctaggctcaagggatcctcctgcctcagcctcccaagtagctgggactaccagcacgtgccaacatgcctggctaatttttgttattttttgtagagacgggatctcactatgttgccagggctggtctcaaactcctaggctcaagcaatcttcccaaatccaaactcagcctcccaaagtgctgggattacaggcataaacccataaaccacgatgcctggccaaaagaaaggaaattctgacgcatgctacaacatggatgaacactgaagacatgctatgtgaaataacccaatcacaaaaagataaatgtatgattccacttgtatgaggtgtctagagtagtcaaattcagagagacaggaggtagaatggtggttgcaaagggctggaggaatggggatttagtgtttaatgggtacagagtttaagcttggggtgatgaaaaagttctggagatggatggtggtg

SEQ ID NO: 316631 - DNA, 4001 bp, Homo sapiens
agaattctgacaattttaacactggctggatatttgaaagtattaaggaattattcattttctgtgatagtggtactcatgtttaccttttgtttaagtctttaagatatacatattgaactatttaacggttaaaggatatctaggactgcggggatatgatgaagcaagattgactgttgaaactggttgagaaaaggggtttatactattctctctacatatgtgtatatgttaagaggtaaacatggaaggaaagaaaggaagggcagtcaatctaactctaagtttcaagcaataagtaaatattttgttatctttcaaagcatttcagtatttacttttcttattcaattcaaagactataagaactaaaaactaaaaatcatgtaaataaacagtttttatggcaaaatcagtaacacaaaactgaacaccaaacaaaaccttctcagtatatcagataacatcaaaagaattaaggggaaaaatgaccagcttgtacgaagtatattttagaaggaaaactatctcacaattcggggactggctagagtttagactcacatcactcagcgactctccgaaactttaaaacctaaagacaccacaagtagaaaactaacaaatcataccagctgtccataccattgtaaaccacatcgaaactctgaaaagcagttttgactgcccaaatcatccacttcctgaaaagacaactttactattctagttttctccactgtcaaaatcaaaggagtatattaaaattttaacgtaggccaggcgcggtggctcacgcctgtaatcccagcacttttggaggcctaggcggacggatcacgaggtcaagagactgagaccatcctggccaacatggtgaaaccccgtctctactaaaaatacaaaaattagctgggcgtggtggcgcgcgcctgtagtcccagctactcgggaggctgaggtaggagaattgcttgaacctgggaggcggagattgcagtgactggagatcgcgccactgtactccagcctggcgacagagcgagactccgtctcaaaaaaaaaaggtatcatcgcgggcctttgtccattcaaggctccaaagtttacaaactcactttcatacaattcacaccctctgcctgaaatgccctcctctctctggtgcctgttgaactcctactcatccactccaagcttgttttcactaggcgcctctactcatagacacagtcgacctatcagcattctatttcctatccccattaagatctcagtcaatttttcacacaaaaaatctttctttaacttaccagtaatgcatacagctatcagctatgtctttggtctttggagatatgacaattgctttttgtctttctaaacataaattatgctcaaaccaacaacagtttcaggcgaaccaaaatacgtttttcaaggtgggtatgcataaagtgaatgcaaattacctcccaactatcttgagccattacaagagcaaagataaaagtcatcctaacagggaaaggccctctgacatctcccaaaaaacgaaaataaaagattaagaaaaaagaaaagagagggagggcaaaggtgaccaacagccccatcgctgataaagttccacgattatctctcgagcgtccgtcggcagatatggcttttctcttttggcagaagccgtcgtttttaaatacgagagccgacagatgcgtccgtacacaaaccttgcagccaccagcgctgcggaccgcggaaccggtctcacaagcaggatgctgaccagcgtccagccagggtcgtcctcctccgcccccacccctgcagcccacaagccggccaggaacgagcggcccgggaaaagcctagtccccggggtcctatcccgatgaaagatctgcggcgccctcgctccccggctcggcccaggccgaaggccccgcggggacccctccaagacgccctcggcgccgcagcggcctccccgcccccgaggctgcccgggccgccgcaggccccgcggcccccgcccgccgcaaccgcggcccagttccccgcgcccccgccgccgcctcagcccgaaccgggcccccgccgcccccgctagctagcctcacctcagaagcgaatcgtgggcagcgcgcgggattccggggtcccagtgcggccaccgcccgtcggctccggctccggctccgcccccgtcccctggcccgcagcagcggcccgccaggcctctccgcccctcagcccctccgctcgcccccaccgcccgacctgggtgcggcctgcggcgctgcagcccaacaacgcgccgtcccataggccaagccgcgcagcactgccgagcaacgtaccctgcgattggcgggacccatgaggggcgggtcccctgcgggcagggcgattggactcgccaggcccgcctcggggcgaccccgccggggcctgcggaggcccagggtcccgcgcggagtacaccccggccggcagcttcgggcgccaggtcatggcttcacggtggccaggtagactgcggcgagcccctgccgggtccgctggacacggtttcattgtgattgacctccgccggaggggctgtcggagcccagggaccctgccctcccgccgccgcccagcgcactcccccagcagacgggccctgccccgcgtagccccgccttgtgcagtccccaggccgagttttggggcccgggtggggtcaaggcagcagggcctgtgggccccgataaggctccacagaggacaactgcctggcccccgggcccggcctgcgggtgctgaggagaccagcgagcaccagccacctccgcacgaccagggagtgagcctgcggggctttggcaggaccagcctcagaccagcaccttcccgcacactgtccctcctgctggcgcatctgacacccaaaaaaacaagcagcgagacaaatgggcacggctgcttgtcctcttgacacccatagaaagcttaggtccagagctgggcagtggcagaagagtgtggaatccagacctccctgctcagcaggagcctctgtgacattgccccaacaagggtcagggatactgtctggatggaagccagcgacccctgttctaaccatttctgttggacgttggcttttccaagacgatttttctgacaagatcacaattctgtctcattcacttctgcttcccatagttaatcactagggaaacgcaaatcaaaaccactgtgggataccacttaacattcattaggatggcagttgaagaagcagggagttgggcgcagtggcttcagcctaaaatcccagcacttagggaggcagaaacaggaggatagcctgagcccaggagttggcagacttgactggacaacataaggagaccctgttctctacaaaaacgagaagaaaacaaaaagtttcaaggggggagaaggaggaagaagaggaaaaaaagaaaataagtgttggcaaagatgcggagaaattggaaccctttgtgcatcgctgacgggaatgtaaaatggtgtggctgctgtggaaaaccgtagagtggttcctcaaaaaattaaacataattaccacataatccagcaattccacttctggatatataccccaaagaaatgaaaacagctatttgtaccatgttcatagcagcattatgcagagaaggaaattctatttattggggttttgtgccttttttttttttttttttttttttttggagtcagggtctctgtcgcccaggctgcagtgcagtgttgcaaccatggctcactgcagccttgacctcctaggctcaagggatcctcctgcctcagcctcccaagtagctgggactaccagcacgtgccaacatgcctggctaatttttgttattttttgtagagacgggatctcactatgttgccagggctggtctcaaactcctaggctcaagcaatcttcccaaatccaaactcagcctcccaaa

SEQ ID NO: 316632 - DNA, 4001 bp, Homo sapiens
tcatagcctaactctctcttataaatgagaacatatgatgtttggttctccatttctgaattacttagaataatggtctccagctccatccaagttgctgcaaaggccattattttattttattctgtttaatggctgagtagtattccatggtatatgcacaccatattttctttatctactcgtttgtcgatgggcatttaggtcagttctgtattttgtaattgcaaattgtgctgctataaacaacatgcattattttaaaatctcataaggatgctaccaggacagtactattgaattattggctttattttacagctgaaataattgaggatccattgactcagtgattaactaatttctctaaagtctcaaagctggctttccagagaataaagatgaatctagccttatgttttcactactcggtgtcagtaaaaagttagcaaaaagttaaatagcaacaataataatagtggctaatagttattgacttatttctacatcccaaatacaattttaagttctttatagtattcatttattgaattatcacaacacaactactttatgaaatagatgttagtattgtcactatttagcatttgaggaaaatataatgcaggatgtataaacataaatgaaatgctgacaacaaactaagttattgatgttgtgcccaagaggggaggcaattgtctatttcatcagttattattttcattaatatgattggtttatacttttgctgtaggaactcattatttcttttaagttgagtttggtaaatttaatttttttgctaattgttttctatgtggaatgtacatattaatcagtaatgaatgaaagtaaagtgaggtggaataagaacagtaacaatgggccacccatgtgatttccaaccagtcttattgatatgaacctgttttgtcacagagtgtatagagaagcctcagagcctttaaactgagttatcatagtgagatattttactgtgtaatacactcctaacacaaaaaaggactggaaatagttgcacaaatttttgtaattaggcaattaaaatatcaattgattatattgtattaccacatgtatttttgtgcacctataaacacattgaacaattaagatatttatggaaggcaaaaccaaatatctgtgttcctagtgctaataagtgattcaaattgtattattaattttctgtaaaaccatattgacttttatatggggaagatactgttccataggattactctggaaattgcctgaattgtgtcctactagacccttttaaatcagaatttgaatgttgatgttgtcttgattaaccttgatgattctaatgctgtgagaccaatgagcattttgtaaactattttatgttaaggttaaaagggtatttcaaagtcttctaaatcaaatcctctcataaaactttcatcagacttaactttcttgtattcacaaaaaatataaatacaaatagtaatacatttaaattatggtaccttaatataaagaaaacttcttgatgaaagacatttctaactttggctttacaaattaatcatgattagcttggaataaattatcgctttaccgcaaatgtctttaatgtgggaaataaacacttcatagatacagattctatacattctttttgaaggtatttaggaatagcttatttccactgtagttcagtatacattacatattatagcatatattgcatatcatatttcagtgtatcatttctaatttagatatgaattttaaatgattcatcaaatactgtattactttctttgttatattgatgagaatatagttccaacagtaatatattttttgcttacttttcctgctgtgctcatgttgattctgtcttctctgcagaccaggagactggtgagtccttgtggatttcttccctgctcaagtgcataaagcaggtgtattgcataggtatttatttattttttttgcttgaataacacccgattccagttccacacatgatctaggtctttaagccacacccattagattattcacagactgtcaaatcataaagaagagggcaatgaaccagcaatcaatacattgatttttccaatttcaaataagattttgttttcattaggttaaatattaagttaaagtgataaagcttaatcattttctcttctcctcactttattcctcatctgtcaaatttcttgtttctcctctcttagtcccacagtggtcattcaaagttctgttttccctttatctgcattaagctccagctttgaatccaaacggtgcagttaggaaggaggaagagcaaagaagccgggcaaataaagatgacagccaggagccagaggaatgtgtttggctcaggactccccttctcttcatagagaatcagatactcaatcacagcaaaggtgctcaccctgctaagcatttttgctccacctcaaaccaatcagcattgactgagcccctctgtgtgtcaggcactaagctgggtccagtggatggcagtgataaataagacattacctctatctgtaccagaggcagtatggggcaaaggtgatggcatgctttttgggacctggcagaccctattccttactagctctgtgtactggcacttattatttcacttttttttttgccttagtttgtttacctgtaagatgaagaagaataataccattttaaatgactgtttagtgaatatagcaccattttaaaggactgtttagtgaatatagcaccattttaaaggactgtttagtgaataaatgatataatctatgtaaagcactcatcatagagtttaacaggtaggagcaccctactaaatgctagctacaattattattcataaaaggaagctcacagtctatggggaaaagatacacaggcagccaagtctacatatcagcctggctgggaagtgcgctatcacagggatcagttagtgctttggggacagagacagaggtactattcagaatgaaggcctcaggggaggcattatagatgaacaggtatttgaggtagattttaaataattgtgggaaattcagacaaatcctcactggatcatttctattgccctttgatcaatgtaactagtctacacatggctgtccaagattatgagtttaatttttcttttatccacacttggaggcattgcacaggcagctgtttaatcagatgcagtctgtcaacatgaacatgtcaacataaaggacatatctctctagaattgtaaagggaacatttcagtaagctttaactacgtaggcactgagactcacaccaagactgagaaacattcacccaatagagaagcaaggaaggtcctacgatttcagttgcttctgaaatgtatcaaggtaagaatatagccccagatctgatgttcagcattcaaggcttcgtaatatggcttcaaccttctcatctatctactcctccccattctccaatacagggcgtatgtgctttagaagcttgtatctccctggtcccccaaagaggaatctatttaacattcaagcccttgctcatcatgctctttctcttcttttctgtccctctggcccattcaaatcctacccaaaatttgagatgcaggacaaggtcaccctcgtggaggtatattaactccatctcactgttgtgctttatgtctctgcatccctgtcatgctagcatctctcctgtggttttgggtctgttcccttttgtcgccctctatatttagtgtagagatcagtctcctaatttctactggaaatttctagtcagggatgttcttaaatttcatttatatcatcaactatacctagctccatgtatactgtaggtgtttaatgagtgattgttgaattcttatgctcatttatgttaggacaggcactgttctatgagcagtcccataatccagaagatccgatgtctcctctttaagggtttac

SEQ ID NO: 316633 - DNA, 4001 bp, Homo sapiens
acttgtttcctactcatttgaaacttagctttggcagcctgttttgtaatctaatttatgtgtagagacttctttcagcttagatttgagccaaatattatagagattagagttggtggtgtgtgtgtgtgcacgtgtgtgtgtgtgtatacactcagacccacgcatgtatattttaaaactggagaaacagtgtgcttggatttctgtttagcagagcttatccatagatgttcttaaaaataaagttcagcatatatttctagtgcttggcagtgtactgtaaaacccatcttcgttgtggtaaagcatgtataattcgcagagccctttctagaaagaaccaacataattgcaaatataatttaaaaattcaattgagatttatttttctgccaattcattttcattatttatttgtcaaaattttcaactttgtaggatgttcaacatggtcaatgccaaaataaataccagaatacttagacagaaggtactaatagtaggaagattcttattatgaggtgcttatgatgtgacaggcacattgtgacctgtgctgggtaaattacatgcattatttttatcttaaaatttattcattgattaatttttaatttcaatagtttttggggtgcagatggtttttggttacacggataagttctttagtggtgatttctgatattttggtgcacccctcacacaagcagtgtagactgaacccaatatgtagtcttttatgtcttattcctcctactgcccttttccctcagtccccaaagtccattatatcattctcatcctttgtgtcctcatagtttagctaccacttttaagtgagaacattggatatttggtgttccattcatgagttactttacttagaataacgtcctctagctccatcaaccagtcttattgatatgagcctgtttgtcacacaatgcagagagaagcctcagaacctttaaattgaattatcatagtgagatattttacagtgtggtacactcctaacacaaaaaaaggactggacatagttgcacaggtttatgtaattaaacaattaaaaaaatcaattgattatattgaatgaccacatgcacctgtaaacacattgagcaaataagtacaaatttatagaagaaaaaaccaaatatctgtattcctagtgctaagtgattcaaattgtattattattcaaattgtatcattgattttctgtaaaaccatattaacttttaaatggggaagatactgttccataggatttttgtggaaattccctgaattgtatcataatggaccccttttaatcagaatttgcatgttgatgtcttgcttaaccttgatgattctaatgctgtgaaatcaatgagtattttgtaagatattttatagtaaggttaaaggatatttcagtcttctgagtcaaattcctctcatcaaacttctgtcagacaactttcctgtgttcataaaaaatttgaataaaaataataacacatttgaattatggtttcttattataaagataacttgccattaaagacttttctaactttagatttacaaatcagtcatgattagcttggaataaactatcattttactgtaaatttatttaatgtaggaaataaagactaatagacacaggttctatacattcctgttaaaggtacttaagaatagcttatttccactgcagttcagtatacattacatattgaggtgtatattgcatatcatatttcagcatatcatttctaatttagatatgaattttaaattattcatcaaatactgtattcctttctttgttatattgatgagaatatattaccaacagtaatatattttttgcttacttttcctgctgtgctcatgtcgtttctgtcttctctgcccaccagcagactgtgagtctttgtggatttcttctctgcttgagtgcataaagcagatatattgcacagatatttattttgtttgcttgtgtaacatccaattccaattccacacgtgatctatgtctttaagccacacccactggattattcccagactgtcaaaacagataaaagggtactgaaccagcaatcaaaatattgacttccaaattctagataagattttgttttcattagtttaaatattaagttaaagtgataaattgtaatcactttctcttttcctcacttcccacccccccccggcctctggaattccttgtttctcttctttcaatcccacataggtcgttctgccttgtattccctttgtctgcactaagctgcaactttgaatgcacatggggtggcgaggaaggaagaagagtaagaaaacaggaaaaacgaagtaggatagagagagcagcctctttgtctttacagcagagaatcagacacccaattagtcacagcaaaggggatcactgtgcctggcaattctgctccactcaaaactagtatgtatggactgaacacctccctgtgtcaggcactaagctgggtccagtggagtagcagtgatgaataagacatgacctctgcctgtgccaagaggcagtatggggcagcggtgatggcatggcttgtgggaccaggccaacccagttccttacttgttctgtgtacttggacttattatttcactgaattttttttgccttaatttccttatctgtgagatgaagatgaataatggcgtcattttaaaggactgtttgtgaataaatgaaataatccttgtaaagcactcatcatggagttttgcagataggagcaccctcctaaatgttagctacaattattattcatgaaagaaagctcacagtttatagtgaaaagacacgcaggaaaccaagtctacatatcagcctggctgggaagtgccctatcacaggggtcagttaatgctttgggaacagagacagagttgctattcagaatgaaggactcaggggaggcattgtagaggaacaggcatttgtggcagattttaaataattgtgagaaatggagcaaaatcctcactggatcatttccattaccctttgatcaatgtagctagtatcctcatggctttccaagcataggagtttgatttttcttttatccacacttggaggcgtcataaaactatacaggcaactatttaattagatatagtctgtcaatatgaacatgttagcatagaggacatatttctctaaaattgccaagggaacatttcagtaagctttaattatgtaggcactgagactcacaccaagactgagaaacattcacccaatagaaagcaaaggaggtcctatgattttagttgcttctagtttggaaaggtatgacggaaagaagatagccccagataacctggctttagccttctcatccaactattcctcaccattctccaatacagggcctatgctctttagaagcatgtatctctgtggtcctccaaagaggaatccattcctcattcaagctcttgctcatcatgctttttctcttcttttctgtccctctggcccattcaaatcctccccaaactttgagatctaggacaaggtcgcccttgtggagatatgttaacgccatctcacagtcatgcttcacttctttccatccctgtcatactagcatccctcctgtggttttagggcccattctcttttgtggcctttatatttagtgtagagatcagtctcctaagttctactggaaatttctggtcagagatgttcttgaatttcatttaaatcttcaactgtacctagtttcatgtgtacaataggtgtttaatgaaagattgttgaattcttgtgctcctttatgttaggacacgcactgttctatgagcagtcccataatccagaagatctggtgtctcctctttaagggattacagattagcagtgggattggctgtggtcaggtagagaagacagagaaccctcctgtgaagcaggaagtggtgagtgccaggagaaagtt

SEQ ID NO: 316634 - DNA, 4001 bp, Homo sapiens
gagaatcacttgaacccgggaggcagaggttgcagtgagccgagatcaccattgcactccaacctgggcaatagaaagatactccatctccaaacaaaaaaacgaatgaaaaaattaatgtagcctcacgttttctgtactccgtggtagtaaatatcaaaaagttataaagcaacaataataacagtggctaatatttattgacttatttttatttaccaggtactattctaagtgcttttcactattaatttactgaattctcacaactaccttatgaaatagacattagtattgtcacaatttaggattgaggaaaataaaatgcaggacgggtaaacataaatgaaatgctgtcaaaaagctaagttattgatgttgcactcaagaggggaggattatctatttcatcagttattattttcattaatgattggtttatacttttgctctatgaactcattatttcttttaagtcgagtttagtaaatggtaaatttaaattttcttttttctaattattttctatgaggaatgtaaatattaatcaataatgaatgaaagtaaagtaaagtgaagtggtgtaagaacagtaccaatgggccactcatgtgatttccaaccagtcttattgacatgagcctgttttgtcgcacagcataaaggtaagcctcagaacctttaaactgaattatcatagtgaggtgttttattgtgtgatacactcctagcacaacaaatggctggaaatagttgcacagatttttttaaattaggcaattaataatatcaattgattatattgaatgaccacatgcatttctgtgcacctgtaaacacattgaaaaataagtataaatttatagaagaaaaaacaaatatttgtgttctgagtgctaataagtgattcaaattgcattattatttttctgtaagatcatattgacttttatataggggagatactgttccataagatttctgtggaaattgcctgaattgtgtcataatgggccccctttaaacggaatttgaatgtgatgtcttgcttaaccttgatgattctaatgctgtgagatcaatgagtattttgtaagatattttatagtaagattaaaagtatatttcaaaatcttctcaaatccctctcataaaagttttgtcagacttcttgtgttcacaaaaaatatgaatacaaataataacacatttaaattatgctttcttaatataaagatagcttctgattaaagacttttctaactttaggtttacaaatcagtcatgattagcttggaataaactatcactttacggcaaatttatttaatgtaggaaataaagacaatagatacagattctatatattctttttgaaggtatttaggaatagcttatttccactgtagttcagtatacattacatattatagcatatattgcatatcatattccagtgtatcatttctaatttagatatgaattttaaattattcatcatctaatttagatatgaattttaaattttaaattattcattattaatactgtattcctttatttgttatattgaagagaatatattatcaacagtaatatattttttgcttacttttcctgctgtgctcatattgattctgtcttctctgcagaccaggaggctggtgagtacttgtggatttcttctctgcttgagtgcataaagcaggtatgttgcacaggtatttattttgtttgctcatataacacccaattccaactacacacgtgatctaggtttttaagccacacccgtcgtattcttctcagactatcaaatcataaagaaatgggcaccgaaccagcactcaaaaccttgacttttccaatttcagataagattttgctatcattcggttaaatattaagttaaaacgatacattttaattactttctctcttcctcctctctcaagttcctgcttctcttctctcaaacccacaggggtcattcagagttcagttttccctttggggtcattcagaattccgttttccctttgtctgcactaagctgcaattttgaatccacatggtgcagttacgaaggaggagtagggaaattggataaacaaagtggaacagagagagctaggagccagaggagtgtgtttgatacagcactctcctctttatagcagaaaatcagacaccccatcagtcacagcaaaggggctcactgtgccttgcatttctagtccactcaataacaatcagcattgattgagcatctccctgtgtcaggcactaagctggggctgatggggtggcagtgataaataaaacttgactcttacctctgctgagaggcagtatagggaagcggttatgacacagcctttgggatcagacagactattccttagcagctctgtatacttggacttattagttgactgttctttgccttagtttcctcgtctttaaggtgagaatgaatagtattgtgtccagaagctgcagaccttcgcagtgagtgtcagagctcttaaaggtgacatgtccagagttgttcattcctcccagtggcttcatggtctcactgacttcaggagtgaagctgcagaccttcacagtgagtgttacagctcttaaacatggcacgtccagagttgtttgttcctcctggtgggttcatggccttgctggcttcaggagtgaagctgcagacctttgccatgagtgttacagctcataaaggtagcatggacccaaagagtgggcagcagcaagatttattgcgaagagcaaaagaagaaagcttccatggcatggaaggggacctgagtgggttgctgctgctgtcttgggtggccagcttttattcccttatttggccccccccaccccatgtcctgctgattggtccattttacagagcgctgattggtccattttacagagtgctgattggtccgtttttacagagtgctgattggtgcatttacaaacctttagctagacacagagcactgattggtgcatttttacagagtgctgattggtgcgtttacaaacctttagctagacacagagcactgattagtgcatttttacagagtgctgattgttgtgtttacaaacttttagctagacacagagcactgattggtgtgtttacaatcctttagctagacagaaaagttctccaagtccctacctgacccagaagtccagctggcttcacctctcaatagacagaaagagagagagaggaagagacagagacaaaaagggagtcagaaagagagagacagagagaggaagagagacaaagagggagtcagagagaaagaaagtaagagacaaagtcaaagacagagagggagagacagacaaaaaagggagtcagaaagagagagacaaagaagaagtcaaagagaaagagagaagtagtaaagaaaaaatagtgtactctattcctttaaaagccagggtaaatttaaaacctataattgataattgaaggtcctctctgtaaccctataacactccaataccattttgttgtcagtgtaaacaagggagtagcccgacagcactgaggccactgacaacctgtagccttcctatcaaaaatctttaaaccaacaagtttcctaacaggggatctaaatcttaattaattaccatacaaagttcctaccagatctaggaggagctcagaacaggacaatagatgtttcctccagggtgattaagggaaaaagacacaatgggtattcagtaggtaataaggaaactcttgtagaagcagagttaggaaaattgcctaataattggtctgttcgaacgtgggagttgttttgcactcagccaaaccttaaagtacttacagtatcaggaaggagccatctataccaactctaagttaatatggactgaacgaggtcttattaatagcaaagaataattgaaatcccaaacttacaagtttttcaacaaaagtaaagtttgctaaa

SEQ ID NO: 316635 - DNA, 4001 bp, Homo sapiens
caggttttttcttctgtcttgttttcgatcaaattgtctatcttccttttaataacactttcaaataattagcaattggaaagcaaaaagaaaacctaactaattcaaatccaaagtgaattcctttgtctgattcttagggtaaatgattaatgttaagatcaattaaattttaagcccattatttgaaaattactaaaataatggatgatttattcctttttgggataatgcctgtttttgactgaatctaaaaatacagcttccctgtactagaaactccaaggcctctgaatcatagcacagaggattgacctgacagaagccaggtctccacttggggccctgtctgttcccacccaaggaaagtctccacttacctgaatgcgaacttcatgagccttggggggagctacttcaacctcttcaatgcaaaggggcttgcctgcttcccaggcgatggctgctttgcatttaataacctgaaagagagaaagaaaaggaagagggagatagagatagagattttgacagggttgggggtaggagagaggagatcatgagaaaaaattagaatatattgatactgtaatttcatgacaaagagttaaagagtttgtagctggatcttatagatattattttaaagacaagggatcttaaagaaaaataagaagttaaattctacattatagtcattacattttttatttcttgaaaaaaaaacaggtgtattaaagtttaccttgatataatgtctcaagtttttccctctataacagagagaatagatttatggagtttgaataaggtagatggcctataaaaatctattgagtgaactgtttgaaatcacctctgaattacctgagtcagataattgctggagaatagatgtgttttacatctctgcaactcgaagtgtggtcctcggacaagcatttattcacatcacttgggaatttgttagagatgaaagccctgcctcaaatccactaaatcaaaatctgcatttgaacaatatccccagagaattcattaaaagtctgagaaatgaggcttacatcattattaaatttatctgtaggatataaattaaataaaaatttcatctaattgtaagaatttgggtaaagatgaatgaacagaaattaaatatttaggattctataaccccaattttttctagcctcaaattatatttttaatttcaaatataagcaacattgaaagaaagtagaaagaaacaaacctataatcttctgttctaacactactatgcttacatttggtatacttttcccaaagtctttgaccacattaatgtatatttttcaatagttacataattttgaattatgtttttgaatattatttattttgtttcaaatgaagtatatattaattaacaggaagtttcaaaatgccaaggcctatcaagtttttaaagacaaaaaatagaataagattcatctgtaagctcatcacccactttatgcttttgatgcagattcttcgagtatccccaaataagatacattgtccatagtattttgtaatatactttttctactattaatatactgtgaacattttcccatattctcctgcaacattatttgtaacatatgcatattatattttatggttacagcacagttacttaaatctctcttcttttggccatttaaataatattaatattaactgaacacccttctaataaacattttggcaatccacagttaatttccctagaataaattcctggcataggggtcactcatatccttttgatcaactgtaagtcactgcttcctgagttcctgaaggaagctccttttagccaaacatacaaggacacagaaaagcacaaactgaacaaagatacagcttacttgcttactttgcccttggtgcccatttttctttgggaaactgtgttggaagtttctttctgagttaagaaagcttcaaactcctacccagggagttccgtgtcctataatgagctgtctttgaataaataccattcatgttgcttaattctccaatcacttccttttctcctttgttgctgtaattcacagccctgccggcctcttaccacatcatttgtactattggacttcagctgcaaacctcattgctcccagtgagctccaagattttttaaattcttttttcttttattgaaaaatataaaataatagagaaaagcccattaaacatataaagatgaattaacaaataattatgaagtaaaggaaatttctactcctcagaatcgcccatttaacttacctgttcttctccttcacaaccctgataatcacttccttgcatatttagtggtttactacctatttaagcttctctatccaatagtttaatctagcaaagcctttttatgaatggaatcatagtgtatgtattgtttcatgtcttttttctcccctctactctatgtgagaatcattcacattgcctgtggctgtagcttattttcattactctagaatattccagtgtatgaattgaacataatttattcatccattttcctttttgctgttttttttcctctttgcttatgatgaattagtggttacatacaaattcttttcatgtacttggttgcacatatgcttgagttgccttaaagaaaattcagagctgatattcagccagtacccactatgaaggccatgccaattatcaaaatattgaagtatttttattcagcttggtaaaaagtcactatcccaaatccccaagttccccttcaactctgttgcagccctgggggcccctatttagtcactgctaaggagctactctttttgtcccacctgatgtgtgagtccatcaaccagccctgatggttctgggtctctggctgtccccctaaaacagagtagtccctggaaccccagtagataaatacctagtgtccatctgacctcctgtggctgtggcctccagtgctgtgggtcagaactcccctggagtcacatgtatatggccatttgtgagaaatggagtttcctttctgtactggttgttaaatattttttgactaggagtggaattaaagtcttcaactttaataggcaaggccaaggaatttcacagaatggcttcacctaccagcagcagtgtatgagagtcctcgttgctccacatcctcacccatgcttggaattggcagactttaaaaatcttcttaatctggtcgtgtgtaaagatatctaattctgtttttaatttgtattgatctgattattaataaggataagcaccagtcctgtactggagtcagctcatactgattttgttgtgcttattctattaactactgagagatgtttagaaatcattatgattactctaattatcattacacgttgtatgtgtgtactgaagtatcataggtacttcacaaatatgtacaattctttctgtacatattaaaattaaaaataaaaatgaataaataacaataaaattattttaaataataactaaaaataaaaagaaacaaaaatacatcattattatgagtttgttaatttctgagagtacttttttttactttacatatcttgaagcttgatattacgtgcatgcaagtattctgtgttccatgtgttttaagaaatttaatgacatttttactatctttccctggcagtgtgttttcattatctacattatttcttttaatagtcccctagtattccaccatctcttaaatatttcagttgttctattaaacttttagaaagcgtaatttatactcgtttccactttttcactaaccacatttcactcaacttgtttgatttccatctccttgttctattgaaactgttttccccaatgcaatgcatgagttttttttagtttgctctgattggaacatctactgtggccaactaaccccttatatttccttaaggtgtgtctccaggttcctatcttgcatccccactctttct

SEQ ID NO: 316636 - DNA, 4001 bp, Homo sapiens
aattagccaggggaggtggcagtcgcctgtagtcacagctaccggggaggctgaggcaggagaacggcgtgaacccaggaggcggagcttgtagtgagccgagatcgcgccactgcactccagcctgggtgacagagcaagactgcgtctcaaaaaaaaaaaaaaaaaaaaaaaaagaatatgaagtccctaacacaatccttggcacagcatagctttgcaaaataagttagtagttattggtagcaacagaacaaacggttgagggaaaggagaggtgaactacatagagatataaaaaatggcctctgtaggccgggtgcaggggctcacgcctgtaatcccagcactttgggaggccgagatgggcggatcacctgaggtcaggagttggagaccagcctggccactatggcgaaaccccgtctctactaaaaatacaaaaataccgagcatggtgacgggcgccggtaatcccagctactcgggaggctgagacaggagaatcgcttgaacccgggaggcaaaggttgcagtgacccaagatcgcgctatcgcactccagcctgggaaacaaagagcgaaactccgtctgaactggcgggggaggggggggggagggaaatggcctctgtaaattggtgaggttggaaatgtggaaatgatcgtttttaaaattaaattgcagatattaaatctcatagtacaaagaatcagacactgcattagaacctttttcatttcaatgtgccataaatttcaactccacaagtcagattcagaatactaacaattaagttatgcaacataggaatccaaagaaacaagaatactaaatttgatggcctgctcccctttaaaaaatgtcttaatggagcctaaccttttccttttactgacaattctaagcaaaacaaagccccactctaaatccgcgggaaatggccctacttcaacatttgaactatagtaacaattataatctttcaccttctctgaataaagacactcagtaataaggaaaagcaactaccagtttaagtctgaaagactgtttagagtttatttctttcaaactccaatatgtttaaggccatttgtcttactagaaaatgtccaaaattgcaaaacattaaaataatcagcaactttagactgagtatgttattcgtaatttctgcctttctttactgtctaatttgtattttatgaatttgtcatagaggagcagacctgggtcggaatcccagctcgccatcgttggtgtgaccaagcacaaccaacctcaaacctcagtttttggtaagatggggataacacctcgcagaggtgtttgttacgtgaggactagagggaatataaatctcttggtatttaagtgctcgaaaatgtttctgaaagggacgtaggggtctttccaaaatacactccttggaggcacaataattaaggcgtaggctcaattatgcaacacaagcaacctaggagttagaagcacgggatctggctgcagctctgccaagtatgcaagctgcaagaatgacccagagcgagttacttaatttcgtgtaagaagcaatgcgtggccgctcctaagccatttccactgggataccgacctgaccagcccctgccccccactctccggctctcccacccccccaccccgttccgactgtcccagaagcagcaaagaaagctgcttcccaactgaagagccgagacaaagcttccttctctttctgcccctctgagccgctcgctgggggcccagtttcagaaccaagagccagatcccgtcttgggcgccgagcctcgcgcgcccccgaggatagcagcctagtcccatgccatgcactccctcccttggactcagggccctccgctcaacgggccctacctcgttcgccatgttcacggattctggtcggcgcggggggctgacatccggggtgggccgcgcagcgacggaggcatgggcgtggcgagcgcctagcgaggggggcggggcgtggggggggcttgcaatggctccaaccggaagggcggtgctcgagctgtggtgcgtgccgctaagttgtgcgttccagggtgcactcgccggcgaggctgcacggcgccggtttcattgctaaaatccgacggacttgttgcagaactcgttttttttgtcgggaaagggcttccccgtgtaactttacagcagttatcgtagataagacttgcaaattacagatgtggacggtgagggaacgggaatttcactgaaagcgcctgagaaccagtaagagacctgcaacagctttgtgctccactggcgaatgcttcctcccctaatacacattatgtgtgcttggagacacaaggagtaagatacagcccctcaagggactcgtcatagggagaggacacagctttgggaataaaggggccacaaaggaggagagaggagtttgctgaaacttcccaagctcccattccagcagttcctgaagggtaggtaggattttggggagacagtagaacgtgggcagagaactttggaaggaggagatgaggagaacaaaaagtctcctgatcctggacagttttttgtgttaagagtgggccagagtgtagagagagagaatgtagtatttgtcggtttactctttctttgtttgtttgagacggagtctcgcactgtcgcccaggctggagtgcagtggcgcgatctcgggtcactgcaacctccgcctcctaggttcaagtgattctcgtgcctcagcctcctgagtagttgggatcacaggcacacgccaccacgctggctcaattttgtatttttagtagagattgggagtgggggcagggggttggtctcaccatgtatgccagtctggtcttgaactcctaacctcaagtgattcacccacctcagcctcccaaagtgctgggattacgggcatgagccaccgcacctggcctgccagtttactcttaaactctgttgtaaacgctgaattttgttaaaatagctctgtcagacacactgctcttttctgtctttcagtctttttcttggctcttttccgggtacatatggtaagattgtccaaagtctttccgtcctttcactccactctctcactcacactttggcttttaacgtctatttatggaaagatgactaccagattattatctccaatcaggatggctcccctaaactccagacttggacatgtaactgcctactggatttctgtctccattaggatatctcacaatcgaatgcaactcctaaaactcctattaatattttctccttatagggactctttcctctgtgtgttgacactctccacatacttaccctagccagaaacatgagagtcacaacttctccctctccctcggtccctgcattcagtttgtcaccaagccctaaatatctctctggtcttgtgcctctctctccccactgctgctgtattagttcaggctttcataatttcttacaggattactgaaagagcctcccatctgatttctttgatgccaggcccttgaatctaatacttaaaaaggaatgccctgttagtgatctttccaaaacgtaacatcaatcaatgccatttcctattttccttcaataatttttgaatgagttaggctataaataaataaataaataaataaataaataccattcttctatttaaaaatattcaagggagaacaaatggataaaatccaaactctttaggccactcaggctctgaattacttccttctgtatatacctctatccttatttcctgctctcctgccaaatttcacaccaacatttaaggaacattcgtagttccttaaagggactatgctttttcttgattccaggcctttgtgtatgtcaatacttctgcttggaatgcagcaagcaatttctagtgggaaaaaaaaaagacttggcagagagttttcttttccctattgcagatatattgtctattttctgg

SEQ ID NO: 316637 - DNA, 4001 bp, Homo sapiens
aggatgttcttgatctcctgacctcgtgatccgcccaccttggcctcccaaagtgctgggattacaggcgtgagccaccacgcccggccatgtttgtaccttttcacccacttctcatcatcctctccactcacccttcccagtctctgttatctattttcccactctctacctccatgtgttcaaatttttagctcccacgtatgcgtaagaacatgtgatatttgtctttttgtgcctggcttatttcacttaagataatgatcttcagttctatccctgttgctgcagatgacaggatctcattcttttttacggctgaatagtactccattgtgtatatgtaccgcattttgtttatccattcatctgttgatggatacttaacgttgattctatatctttgctattgttaatagtgctgcaataaacaggcaagttcaggtatacctttaatatactattttcctgtgggtaggtacccagtagtgggattgcaggtgtcatactttttatattactatgaataaagtggcctggtggctgtttcagggtaggaatggcattacagtgtgggagttatttgtgatcctaagcatgggaaaaatcagttttggggtggaagggtgagttatggagcaacgaatggaggcaatcatcaaatggtgtctcttggcagattgaggttggagaagttgttggtggcaaggtagttcttaaaggttctgatttcaggccaccactgttgtcactataaattctctttctgtgtggtcttatctatttttgcagattcaaccactacctttatgtgagtaaactatatttatgggacatatttctccctaagttataggctaatgtattcatttgctgtttgaaggtactggaggtatctcaaactcaacatgttaaaacatgaacatatcattatttcttcttcccatctccaccttccaccacgctctagtggacaaaacactcaatatattcctccctctgctacctctattcaactagcagccatgcgatgtgttcactcacccaagtagaaacctgggaagtagcctcaatttttctgtccctcaatcttcacagtctaaatttttctaggatatgtgtcttttctccactgctgctagtactaaaaaagctttctgctttatctctttcttgcttttaccaccttcgaaatcacctttataccattgccatttgaaatataatcctaatcacaccaatctcctatctaaaaatgatgttgttaccatttgcttacctggatccgctgacatcaggattttctctctgtcagtctctccaaccttatttcctgtcactttgtgtttcaggctttacctttcagcccccaaacatattctgaagcttcttgcatgggatattttctcagtctctgtattactccttatgttgttttatctgcctgcacacacttctcctttacctggtgaattcatatttctccagtgatttccccttcggtatcacctctgggaagccaagctgggttatgagcttttccttgaggctcccattctctttctactttactatccttgtatattgctttataattgctcttttataattattgtctctctgtgagatccttggagaaggggatatatctttgactctggaaattctgataaagggcttggacattacttattgaagagatgaaagaactgagggaagtcaaaagggaattaaggaaaaaggagaggaggaggagagatactatgattatgacagcctctcacctttaggagcccagagactagctgggtgatgagatgttggtaaagagatgagcacacaaactgacaaagatatgacacaacataaagaataagactgcacctacttggcctgtagtactcatgctgattttctccaccgcagatgaatttattgagaaagggagatcctgtagcaactttcactgtagaaagtacaaaggtacacaggcgactggtagatcagaaggctgggtcctgagctttctctgtagtctggtaattattaaacaggaaaagtaggctctcccgctgcttgatggaagttcctaagtgtaatctgaaataggctcatctcagtgaaagagcacaaaaggtgaaaatgcaaactatttttttctcccttaatcaaacaggtcccctcttattatccatttttttgagttttaaatttggacttttaaatgtccaaacttaaaatttctaacagagtgtacaaaagtatttcttttctgttgttttcaaaatacaaaaatggtcatatttgtctctaaacttgagtaattctttcaggtttctgaatgtaggccccttgttgacagataaggatggtgtcagattttctctagtagtttatcaagagctcctcactctttggtttgcagagctggttactcagaggaagtgaaactaatttgcatacagggcctaccaacttggatttggaccctagaaaatctccgtgtgtggacctgggtcttgacccaaggcccaaggatcttgatgaagaatggagataaaatacatttccaataaaaggcaacaccagtgggcagggtttagctagaagacaagagagaataagtaaatgcttgttctgtgtcaaatgatacaatcatatgatttttcatttttagcatgttgatatggtagattacattgattaattttcaaatgttgaaccagccttgcatacctggaaaaaaatcacacttgatgtataattcttttttatatatcagtcactggattcactttgctaacattctgttaaagatttttgtgtctatattcatgagagttattaatgttagttttcttctttttttggcaccatctttggttttggtgtcacagtaatattaattttataaaatgaacttggaagtattttcacctcttctattttatggaggagattgtgtagaactgttattcattttcattttttctttttaaagataggttcttgctttgtcacctaggctgaagtgcagtggtgtgatcatagctcattgcagtctcaacttcccagcttcaactgatcctcccacctcagcctcctgagtagctggaactacacatgtgtgtcactaagcccagctaattgttgtattttttgtagaggtggggtctcattatgttgcccagactggtctggagcttctgggctcaagtgatccacccaccttggccttccaaagtgctgggattacaggcatgtgccaccattcccaacctatgttaattctttaaatgtttggtagaatctcctttttgagatgtcttaagttataaattaaattaccttaataattataaggttatacaaataatctatttcttatttcatgagttttcatactttgcaattttgaggaattgatcaactttacctaaattgtcaaatttatctgtgtagagttgttaatagtgttattcccttattatctttttgatgtctgcagtgtctgcagccatattgttttattctttttttttgaggtagagtttcactcttgtcgcccaggctgcagtgcagtgctgtgatctctgctcactgcaacctccgcctcccgggttcaagtgattttcctgcctcagcctcccgagtaggtgggataacaggcgtccgccaccatgaccagctagtttttgtatttttttagtagaggcggggttttgttatgttgaccaggctggtcttgaactcttgactgcaggtgatccacccgccttggcctcccaaagtgctgggattacaggcatgagccaccacgccaggccattttattcttaatattagttatttgtgtcttctttttttcttagtttattaattttgttgaacttttcagcgctcttgtttcttccatttttctcttctgtttcattaatttctgttcttatttttcttatttcgtttcttctgtttgttttgggtttgttttgctttatttc

SEQ ID NO: 316638 - DNA, 4001 bp, Homo sapiens
gaattgtgtctccctccaaattcgtatgttgaagtcctaaccccccgtacctcagaaggtgactgtatttggagatggggtctttcaagaagtaattaatttaaaatgtggtaatcagggtggaacctgatccaatatggctggtgtctttattagaaggggagattaggaaaagggaagatcatgtgaagacagcgagaagagggtcatccacaagccaaggacacaggcctcagaagaaaccaaccctgatgacaccttaatctcagaattgcagccttcagatgtacaagaaaacaaatttctgctgtttaagccacccagtctgtgatattttgttatggaagccctaggaaactaatacagttatcttttacttttttaatgaaaaagaaaacatttattataaagagaaaaaatcaatcccaatgtaaagggaaactcctttcaagagctacactggaacactacagaaagttgggaaatatataatccttaggcaaaccacactattgcatgaccatatatcaaaatcatataacttttatactctttatatattatatactgtattattaattggaaagtgctgccttgaggctactttctccatcatcagaaatgttcttacagtggatgaatatcgacttcctagaaatagtgtaaccagacctgaagcatctgttgggtggtaaaagttgcaaatttttaagattcctttcagttctaagattcattaatatccatgggtagagttgctagtttctgtagtgcaaaattaacttcccaagtaatctagttttgctggatttctgacccaaattaggatggttttattccagttctatccaattctagtaaaacttatttcaaattctaacatcatagagtctcctgacttgtcacattacccagacttctcatgtcatctttatttttccaaaaccttaagcaagctaaatgcaaaattgttcaagttaaaacaaaacaaacaaaaaaatttagtcctttaagcaattatgtacccatttaaagtaaggaaatatactgacctattttcaaataaaaaaaaacaaagcaaagctgtttctaaagttaataccaactctgctaactctgttgtttttagaacgataaacatactttaccaataatatagtcttgattttaaagaatttttaaatatatattttgataaaaattacatttgtaagaaacctaaaattcatgacactttcttggccattttgcatcccagaattagcattttccattcttaatggcaggaacgtttcttccaacatctgggcatgagaccctggtttcccattgaactactgcagcgagtgcagcacatgctactgagacgattgaagtgtccttgtggaaacatttggcttcctggagcaattgcccagctatccggaaatcaaattatgaataatgccaatataaatcaatttctctattttccaccaatgtcttgctgacattggatatactatttccaacttacccctgcttccactgacattctctgaaacaccatatccagtgtttccctcactgtatgcctgctcaccaagcatttcattcctcaaggaatatctccaagtgtttaattactttaatggattcaaagttctaagtatcagcctcacatcattaggtcatgatgaggaggggacagaaatgttccacttacttttccagcagtgcccatcctgtctttgtcttggatctgtatttctgcaaacatagactttttctgactgatgctcagttcactctgttgtatataacagcagcttgtgccttcacatagatagtctggcttcagagttccaccttcagcaatatgactcacagccgtcacaactttgcaatggtctgcaagccctaccctttgcagaccaacttataaaaagaaatacagtaactactatgatcaaaccaagaggagggatctaacaaaaacaagataatcaaagctattgaaaagggctgaaagcattcctatccaccttattttgaaggatataaaaacgggttaggttacttcacttcaacacaatcatgaaaaatgtattgggtgtttaagtgcaagctgctttgcctaggcatggctgattttagagatgcgtgtgtacatctctacttcttaatgctctacttcattctgcaaagacttgatgtggtttctggaattaaatataaatgaaaacagagccaaggaaatgtaaaataattgcaacagtaggtcaagtttgggcaagagaagttgagatgatataaaatatcaatatggatgactatggtttctaagtattttaggtgtagaaagttaagtgaaactttctgtgtctgcacttagagaaattatcatctgactccaaatcccattaaccacagagttgcctcatatggttgtacagtttgtttacggcaccaatgtaacacagtgcaggggctcaagagaaattgaaatccagcctgcatactggctatcgaatgccagagggttttcatctacttgggcaagtacctaggtcttcttgagtagctgtttaaccattacagaccattatttcttaatataagttgcaatggctccagaagcttctggatctattatttgataggagaatgtccagtatagatgttatttttgacagtagatggtcagcatactggtacaccagatggtcagcatactggtacaccatcacctccaagaaaactttacacaaaggatattttacttttgttaagtgatccagtgaagcaggttttctaagtcttcagacaaagctgttcaagctatgaagtccagaacctggactcttaacaacccagagatgaaatttgctaagagtttatttttcagatacaaacaaaagtttcttttcaaaaataagtatacattttttccacacatctctctttcaatataacatagtaaatgtacatccaatttaacatatattatgtcaaattcagaatttgtaattagaatttgttactacaactcattaaccaaatcaaatccaccaggaaaaaccattgccagttgatttggcttgtgagtaagcaccattgctttagcagtagtgctgaagaactccagtatgtttgctggcactataagacaaagttaaacaggtgtggacaaggacaggtattcttagtctcgactttcaaacaaaaacttgtttacttatgaacaaaagaaaatgagttcaaacatgggtggtgacagcataaatgcaaaagcgctgaattgataaactccctcttaagggcttggcaaaactttgtatcatattaatctaaaatttttttacaaaaaataatgtatcatgtgaggcttaatatctgaataagtcttatggtcctaatccagtctccatgaaacttgattggatgataaagtgccaaaagctgaatcttggaaggtaataaaaaaaatgggtcagtttggatatatagcagctaagtcttaattttaggtttagagaatttaacagatgacttctttcttctaaacaccatatttctatgaaattctggggccagaaccctcagggtactcaatctcctagttactgtgagcctggtcctactcccaaagtttacaaaagcctttaatgattacctcaaagcacccatgcaactgtaatttcctcaggtcaagatacaggggaacttagaggaactttgaaaagtgtactacaggaatatgggctttggaattagagtcacttggttcagggcctggagccttgcttgaatatgtatgacttcagcttccatattcataaaataagactaatgataaccacattgcatgggtgtcctgaggactggtagtgagggtcagaaagcactgaagtatactgcctgattcataatcagtagcagatgtcattattattaacttgactccagttggctgcttggattattattattattatggattgtttgctcaaatatttaaa

SEQ ID NO: 316639 - DNA, 4001 bp, Homo sapiens
ccatttttaaaggctacctcgaagaaatattaattttagaaaaacctctctatatagcagatgtcatcacagcactatttacaaaggaaaatacataaacaataatagaggaatgatgaaataaattgtgctaaatgcagaaattagacatttaaaaatgtttataaattgttataaattgaaaaatgtttaagatggaaaaataggataaaatatttgtatattgtatgagtacagctacataaactatggatggaaaaatagaaggaaacacacacacaaaaatggtagtttggggatgtgatattatgattgatttttttccttcatattttctgaccttccaaattttctagaataatcattggtatgggatgaattgtgtctccctccaaattcgtatgttgaagtcctaaccccccgtacctcagaaggtgactgtatttggagatggggtctttcaagaagtaattaatttaaaatgtggtaatcagggtggaacctgatccaatatggctggtgtctttattagaaggggagattaggaaaagggaagatcatgtgaagacagcgagaagagggtcatccacaagccaaggacacaggcctcagaagaaaccaaccctgatgacaccttaatctcagaattgcagccttcagatgtacaagaaaacaaatttctgctgtttaagccacccagtctgtgatattttgttatggaagccctaggaaactaatacagttatcttttacttttttaatgaaaaagaaaacatttattataaagagaaaaaatcaatcccaatgtaaagggaaactcctttcaagagctacactggaacactacagaaagttgggaaatatataatccttaggcaaaccacactattgcatgaccatatatcaaaatcatataacttttatactctttatatattatatactgtattattaattggaaagtgctgccttgaggctactttctccatcatcagaaatgttcttacagtggatgaatatcgacttcctagaaatagtgtaaccagacctgaagcatctgttgggtggtaaaagttgcaaatttttaagattcctttcagttctaagattcattaatatccatgggtagagttgctagtttctgtagtgcaaaattaacttcccaagtaatctagttttgctggatttctgacccaaattaggatggttttattccagttctatccaattctagtaaaacttatttcaaattctaacatcatagagtctcctgacttgtcacattacccagacttctcatgtcatctttatttttccaaaaccttaagcaagctaaatgcaaaattgttcaagttaaaacaaaacaaacaaaaaaatttagtcctttaagcaattatgtacccatttaaagtaaggaaatatactgacctattttcaaataaaaaaaaacaaagcaaagctgtttctaaagttaataccaactctgctaactctgttgtttttagaacgataaacatactttaccaataatatagtcttgattttaaagaatttttaaatatatattttgataaaaattacatttgtaagaaacctaaaattcatgacactttcttggccattttgcatcccagaattagcattttccattcttaatggcaggaacgtttcttccaacatctgggcatgagaccctggtttcccattgaactactgcagcgagtgcagcacatgctactgagacgattgaagtgtccttgtggaaacatttggcttcctggagcaattgcccagctatccggaaatcaaattatgaataatgccaatataaatcaatttctctattttccaccaatgtcttgctgacattggatatactatttccaacttacccctgcttccactgacattctctgaaacaccatatccagtgtttccctcactgtatgcctgctcaccaagcatttcattcctcaaggaatatctccaagtgtttaattactttaatggattcaaagttctaagtatcagcctcacatcattaggtcatgatgaggaggggacagaaatgttccacttacttttccagcagtgcccatcctgtctttgtcttggatctgtatttctgcaaacatagactttttctgactgatgctcagttcactctgttgtatataacagcagcttgtgccttcacatagatagtctggcttcagagttccaccttcagcaatatgactcacagccgtcacaactttgcaatggtctgcaagccctaccctttgcagaccaacttataaaaagaaatacagtaactactatgatcaaaccaagaggagggatctaacaaaaacaagataatcaaagctattgaaaagggctgaaagcattcctatccaccttattttgaaggatataaaaacgggttaggttacttcacttcaacacaatcatgaaaaatgtattgggtgtttaagtgcaagctgctttgcctaggcatggctgattttagagatgcgtgtgtacatctctacttcttaatgctctacttcattctgcaaagacttgatgtggtttctggaattaaatataaatgaaaacagagccaaggaaatgtaaaataattgcaacagtaggtcaagtttgggcaagagaagttgagatgatataaaatatcaatatggatgactatggtttctaagtattttaggtgtagaaagttaagtgaaactttctgtgtctgcacttagagaaattatcatctgactccaaatcccattaaccacagagttgcctcatatggttgtacagtttgtttacggcaccaatgtaacacagtgcaggggctcaagagaaattgaaatccagcctgcatactggctatcgaatgccagagggttttcatctacttgggcaagtacctaggtcttcttgagtagctgtttaaccattacagaccattatttcttaatataagttgcaatggctccagaagcttctggatctattatttgataggagaatgtccagtatagatgttatttttgacagtagatggtcagcatactggtacaccagatggtcagcatactggtacaccatcacctccaagaaaactttacacaaaggatattttacttttgttaagtgatccagtgaagcaggttttctaagtcttcagacaaagctgttcaagctatgaagtccagaacctggactcttaacaacccagagatgaaatttgctaagagtttatttttcagatacaaacaaaagtttcttttcaaaaataagtatacattttttccacacatctctctttcaatataacatagtaaatgtacatccaatttaacatatattatgtcaaattcagaatttgtaattagaatttgttactacaactcattaaccaaatcaaatccaccaggaaaaaccattgccagttgatttggcttgtgagtaagcaccattgctttagcagtagtgctgaagaactccagtatgtttgctggcactataagacaaagttaaacaggtgtggacaaggacaggtattcttagtctcgactttcaaacaaaaacttgtttacttatgaacaaaagaaaatgagttcaaacatgggtggtgacagcataaatgcaaaagcgctgaattgataaactccctcttaagggcttggcaaaactttgtatcatattaatctaaaatttttttacaaaaaataatgtatcatgtgaggcttaatatctgaataagtcttatggtcctaatccagtctccatgaaacttgattggatgataaagtgccaaaagctgaatcttggaaggtaataaaaaaaatgggtcagtttggatatatagcagctaagtcttaattttaggtttagagaatttaacagatgacttctttcttctaaacaccatatttctatgaaattctggggccagaaccctcagggtactcaatctcctagttactgtgagcctggtcctactc

SEQ ID NO: 316640 - DNA, 4001 bp, Homo sapiens
acccccagcccccaagctcaaggactgactgcggcacccaacattagattacaaaggtttatttagaaaatagtttggttgttttggctgttgtttttggcaaacatttaaatactttcagtaatcaaagattgtcggtgctttctccttgccccctggcagccaccccccgactaggtcctggagaagtcagcccttggtcagacggggatggggagtggtagtgtctttggggggctccttgcttgcccatttagggggctacctctgccactgctctctaaaaccctgacctcacagccacacctcggcagggctcccagagctggatccaggcagggagccccagaagcagccccttgctgaggggggaaggcaaaggggtctccccctctctcctccccactccctggagcccggctatctctctgccaagctcctgccctgccgcaccctcccctgcgccctggaggccaatccatccccgggtctctgggaaagctcccccgtccgggccgccccttctgcccagccccgagcgcggagctgtccaggattcccagacgggtgcgagtcactgcctgaagccccttctcctccgtcggaagaggatgtgcttaaaggatcgccggaaatcctggttgaagaccgtgtagatgaccgggttgagcgagctgttgcagtagccgatccagaagaagaacttgaagagcgggccgggcacctggcaggcctcgcggcagatgccgtacaggctgtagctgaagaagaaggggaaccagcagagcacgaacacgcccatgaccacagccagcacaaaggtgaagcgcttctcgcgcgcctgggccaccttgcggcggcacacgctgctgcgcgcccggcgccggcgcgacaggaagaactcgacggagcgcgagctggcgcgcgacaggcggccaccgggccccggggacctggaggcggtcagcgcccccgactcagccgcccccggccccgccccctgcccgtccgcaccgcccgcgcccccctccgcgcccgctcgccgccgcccgccccgccgcaacgcgccccggcgccgccgcctctcggccgctgcgctgctctcgtccggctccacgtcggcgggcgggggcgcgcagtgcccgttctcgcctgcgcctgccgccgcgcccagcccgttttcggtagtcggggacgcaccgtcggggcccacgggggcgcgcttctcgctgagcgtgcgcgtgcgcagcttggccactcggtagatgcgcgcgtagaccaggcccatgatgaggcagggcgcgaagaaggagccgatgcaggaggacaggatgtaccaggtctcgtcgttgaggccgcactgcgggtaggcggcgccgtcgggctggcggtagagcgagaccagcggcgggaaggagatgacggccgagatgagccacacggccacgatggtggccttgacgcggcgtggtgtgcgcttcaggttgtactcgacggcctgcgtcaccgaccagtagcggtccaggctgatggcacacagatgcacgatcgacgaggtgcaaaacagcacatcgagcgccaggtacacgccgcaccacacctgcccgaagtaccagtaggccatgagctcgttggccaacgagaagggcatgaccagcgtggccaccaggatgtcggccgaggccagcgacaccaggaagaggttctgtggcgcgcgcagcgcccggctggtcagcacggcgatcaccaccagcacgttgcccaccacggtgaagacgatgaggaagcccaccacggcagccagccctgccaccgcgcccgccgagtactggccgcgcggcggcccccaggaagcccccgaggcattggcaaccccgccgctgcccctctcgcccgcgccgctcgcattggggcccgccgctgccgccaccgccagcgccgccgccagcgccggggacgccatggtcctcccgcgagctacgccgtccctcctggagccggggcgcagccgcggcagctcgggcgccccccagccggggtcggcgcccgcatcgccgcctgctgctcgggcgcgcccgccggggaccgcggcgcccagcagccggccctcggccgtggtggctccgcgggcggcgcgccggagagcgtggctgccgggctccccgcagctgccgagcgtgtaagtgcagagcaggaggcgcccggagcgagcggcgacgcggctgcggggggaggggggcaggtcccggggtcctcgcgcggccccgccctcggcccggctcacggggagcgccccggcgtcgagcccacggcgacgcggcgcccgagcgggcgtgcctgagcggccccgcggtcccggagcccagccggggcgcaggcgacaggcggcggcggcccgggcgctccgcctcccatccggccggctagggctcggcgcgccggggcgccggccgccgctcctccgggcccccgcgcccgcgcgctccctccgtctccaactttactttcccgggcggggcgccggcgccgccgcgagtcctccggctgctcccgggcgcgggcgccccccgcggtccacgcttggccgtgcggccgccgcctcgctcgccggagctgcgccgccgccgccgccgccgccctgcgctgggcgcgagtgcggccgcctgcgatcggcttccaacttgggtcgagttgcgcagcggggcgggcgcgcggggcggggcgggccgcgggccctggggagctggccgggaaccggagcccgcggccgcctggtcgaacctgcccgcgcggcgccggggaggagtccggggcggcggcgcggggcgcgcgctcggcgagggcgccccctccagggccgcctgcagcctgcgggacggggccgagcggcggccggcctgggtggtgagttccagaagctgctctttctaagactggagcctccttcgcctcccccggcgcaggcatgggcgcaggcgggggcgcgcacacgcgcgcgcgcagcacgggcggctcggggtccatggcctgatggcagagcaacctctcgcagcctgggggaggacgcgacgctacctgcgtgcgcacaggtcctgccgagctcagggtccggaccagatcctggatcggcgctccccgtcagagccacctccgcacccaccccggcctcagttccctcggcccacttcccagcgctgctggagcatgaatcataactaacggcggtgtctgtggaagccctgggcaagctcccaagctctgcacccatgttagcagtgattgaagtttaatccttaggctctcaggccctgcttttaaaggatggagaggtgttcaaagtcaccacctctgacaaacacccagaacggagctgcctggatgatggagctttttgcaagggtgggctcaggggagagcggccgttgaggtagcccccgtgcaccctcgcccccgtccgcgcacctccattctgcagatgtgcactgccacgtgcactgccactctgtggcccatgttgggtgctggcttctgcctccaggcagcctggggtctgtgggagagggacttccagggacgaggtgatccaggaggagagctggagttctcaggcctgacgtttctctgctaggaccgaagggacgacccttctcccaaacgtccagaaacgaaccccagctggctggcctctccctgcatgggcccgcaggagagagggagggaaggtctgtccatcctgtggctagaaccggcggggaaggggcgcttctgagtgcccgggaggtcatcatgaagagcggctggagtgactgccctacccccgggatgcctatccatgcccgtggcctggggcagcttctctctgagctcctgaagggcgccagctttagcctcagagcctgtcgtgttctctgctgctcagccctactggggagcatgtctgtctccgcagagacactgccaggagctacggcttcgttcttcaccatgtttgtcaccagcag

SEQ ID NO: 316641 - DNA, 4001 bp, Homo sapiens
gaaaaaggagctcgcatttacccgcatgcacaaactgcgcctgcccacctctatcagagcatttttcaagctgtgctacagttaaccatgtattacccaaagccaatctgtcctggcagatcataagctcttaaagaccaggacttcaggagaacaagcaaagcttcagagagaagggagccacctcaacagagtccatagcaatgggtcggcatgagctgatgactggaggtgcggcgtagagtgggggtctggggcagcggagggcagagaaagcaaaagggcccgcatgacacgctagagggctaggagccacagctgcggtaattagctcagttttgtcttgtatgcctgttacttaaacaccatctcttgttcagaaagaacttcaggttgggtatttggactccttgagccttctgctgtttgtctccgggatctttaactctcctaaaaggggaaaactgtccagttcgattttgcttcctgggacataacaggtttttcaaaagtttgatgaaagcattcactaaggagtgattccactttctttggtggctgagaaatacagcgtctgaggggcagcatcaggtcttcccatcaagctgaggtcggagtctccccacccacggacctcaccctcgctctcccctcataaatctgacctctaactgtaactgccttggcctcattccgtgggtgtggatgctcctgcttgaaacgcattttccagcccgccaaattcttgggagagtttcttccactctccaggcgctgagagctacaaagttcaatctggctttccagattttttttttcttcccattactaacggaagaaatcaagaagctccgggcagtagggccctgctccctccaatcagagcccagcccggggccagagcaggaagcgcggcggtgggacgcgcggtgacagccccgcgccccccggggcccgccggccaggggagaggacggtgcggccgctgcgcgacagctccgggcccgcgcctctcgcttccacccgccgggcaggtgagaggataaatcacggggcggggcagtgcgcccccaccaaccgcgccccccgcgcacggacccccattacactcgcgtcccaggcggggtcgacccagacgagccacggggcggcgcagagccccactcgcagggcggccgggacccacgcgcgtgggtccacgcaacaacctataggtgacaaaacactcaggaagccgtcatgcggggccaagaaagagcccccatccagagtcacggaccccctcgtccgagggtccgcgcagtcccctcggtaagtcggacgaagcagtctcgctacgggggagggcggcggagcctcccactcttggtgacccggaccccgccccacgagtgggtcttcgcagggccccctctgacgcacacggggaccagccacgccgcgggggcaccgggcaggagccagcgcccgggtccacgcagtcccctccgggcagacgcggggagctggggagcagtggggaccggcccccacccgcaggacgaccgggacccccgcgcgggcccacgcggcgtcgcagcaggcgcggagcccccggtaccacccgaggccgagacaaagcccaggcgcacggaccccggaccctgcggagccccgctcggagcttccacgcccggggcagagacccccgccgggtccggagaccctgccgccagtcgcgccgtctcacctcaggccgccacctcgcagcgctcgctcctcgccgcggcgcctgggccgactggagcgcagctgaacagccgacagagccgcagccgccttaacaatggagccccggggcggggccgccgccgccgcctcagcccgtgtaccccgctcgagatccggctcggctcgcggagctgcagccggcgtggggctgcggccgggacagacaccacgcaggcgcacacggccccgcccgccgcccgccgtcccgcccccagcggagccgggcgcccagggcccgccccccggccaatgggaagcgagctgcgcggagtgggcggggcctgagggaacaaagggaggttgggcggggcggtgctgggactgggcttgcggggtcccgcgggaggacccgcctcaaagagccggcccgatcatcgcctcctagaatacccagctcaacgtctacctggagtcggctctacaggacgcgctcatctcaaacccagagctcaggcttttagggcagagagcgagagaaaggcttgctttacagaaagggaaactgaggtccaaggaataggattgcctgccgctcgaagaaacgtaatcccattcactcgttcatcttgtagtcattcagcaaacatttggaagcacgtatggcgggcgttaggagtgaagtagggccgggcacggtggctcacacctgtaatcccagcactttgggaggccgaggcaggtggatcacttgaggtcaggagttcgaaaccagcctggccaacaagatgaaaccccgtctctactaaaaatacaaaaactttgccgattgtggtggcgcgtacctgtagtcccagctactggggaggctgaggcaggagaatcgcttgaacccaggaggtggaggttgcagtgagccgagatcgtgccactgcgtgcactccagcctgggcgacagagtgagactctgtctccaaaaaaaaaatttttttttaaagatgtgaagtagaagcgaacttaggccctccctgaaggagctcggccaaggagtacctgagatgtctctgcatctctttaaggcctgataaaggaaccaggagcaagcaagcactaatcacttcgctttcctgcctcagagctttcacgtgtttgctgttccccacctgaaatgccaagtaccaatgtatttatttatttctagaaatggggtctccctatgttgcccaggctggtctcaaactcctggcctcaagctatcgtctcatctcagcctctcaaagtgttgggattacaggcatgaactactgtccccaaccctgatcatctttaaaacctctttcctcatcttatttgagcttcctgcatcatgtgacccccacacacttggtttttctgtacctccatagctgctcctctgtgggtcccagggacccacccccttctctgcccaacttgtacatgtctgggctcaggccaaatgcccttccattcacagtgggcactgctacaggaaatctcatgcccttctgggcttcacaaaccatccacatgctctgctgcctgccagagacatccatccaagtcagatgcccagccctgacctctcccaaaggcctagctggacaccagggaggcatctcaaattttctgcgggccaaaacagagtgctttatcagtgccccaacctgctcatccacattcttgtgattctcagtaaacagcccctccatccacctagctgctcaggtgaaaatctcaaatcctcctccagtccttcctccccaaacctctcacgcagccctctgccttcctaggacgctgagcacccctcactcccagcgccagctggggtgctgtctgagtggctgcctcccacttggcatgaagtgtgacctcttgcccagtgcagtgactcacgcctgtaatcccagcactttgggaggccaaggggggcagatcacttgaggccaggagtctgggaccagcctggccaatatggtgaaactaaaatacaacaattagccaggcatggtaacacgtgcctataatcccagctacccaggaggctgaggcaggaaaattgcttgaacctaggaggcggaggttgcagtgagccaaagtcacgccgctgcactccagcctgggcaacagagcgagactctatcacaagttaaaaaaaaaaaaagaagtgtgacctctctaaggcaaggcagtgtcccactctgattcacttccatgtgcaaaacaggacctgcgccctgaaggcactcactcagggatgctgctgggatggg

SEQ ID NO: 316642 - DNA, 4001 bp, Homo sapiens
aatctctatttgtctcaaagtgaccaaatctatcccaaattatttccttggttctttctctccataaaaatggcttaattccagtgagtttctctagttttacgtactacttatgtattttgttgctttctctcatctccccttggatcattttcctttagttctcaccactgcttttctccatatttatcttcaaatattcaagtacaatacttcccaacatccacaagagacaacaccttgaaattaaagcaagcaaaccatccagaattttccattctcctgtgaatctacttccggaatatccactcaagtaatccttcccactaaagatgaaaggcgagctaaggaaatacattagacagaggaagtaaacactgaaacagggccatgcctaggtattcttcggccccaaagaaaaaaaactagactctgggtccaaaggtctttttcgtgacttttatccccacccagaggccaacaccacgcaggtctgagagaggtaacccacggccacctaccttctacacacaccgcacgaccttgctctgaaataatcttgcacaagcaaaattctccacgcctctcagactcctacctaacgtttctgtgcttcagtttctgagctcttctcactttgcaactgtcccagggaacactgggtcttcgccttaatttacaagtttgcactgaaggttttaaatcagtctgatttccccgtggtgagtcacaccccgcaacgtgcaccaagggggagggtgtttaaaattatctccggctccacccttaaaacaaatcacttggctgcaaggcctttccccctaacagagactggttcaagggagattcggacacatctccacctccaaagccaagtgccttcccgggatgatctgcataacaatttgcgggtgctggtggtggagaagctccgggaagagaaaactagccggacggtatcgaaccgcccgcaggcccgtcgcagctccattaatgcaactaccattacactaaggtaacgtgtgattcacactctccaccttctctcccctctcattcgctggctccggcgctcgcaccgtcggagggtggggttgcgacggccacagaggatgggacacccgagggaaaaaagcattatcaagagaaattaaccagtcccatactaaagacgcctctccctctgtccctgaagttaagtctcagaaggtggctccaactcctccccggaggctacggaccaccgacacacgcctccctcctgctctcagcgagacgcggcgggaagccctcatctctctccacgacaggcacagggaagggtcccggggtgcaggagagaagaaccccacttttccccgccccctccccccgagaaacttctgggactcattacgcaactcaagtagcaggtcccaacaacgggacagctctccgcaaaacgcggggtgcacaggcaaacgtctgacttgggggctgcgcgtgagggaggagcatgggtctcttcccatgtccccgtcccctgtttttctacgcgctacctgccgcgggatcgcaagtagggcggtgagagctctgagccctagcccgttctccccgagggctcccaccggaaaagtgggaacgccagcgacttgagtcagcgtgctgggaagccggcagagaggcggggagagcctcggcttccgagaagtccgcggcggcggcgtcgggggccgggcggatcgacccccagccctgggtggcgcagggctgcgctcaccttccagacccttccgtcctctagtcccgggtcgggcgccctcgtcacctccgccctcccctgacctgttgcggtgggaaagggcgcaagtgcggacgacgcaggggagcgcctcctcccggggctcggctgcggaaccgcggaggcaaaggtgcagctgcggccgcaacgcgcgcaggcggcggccgagtgcgcaggggccgcgcgcgcccgtcgctcgctagctggctggcaagctcagcacgccggctgcccgggacgccccgaggccacgccctccgcgcgaggccccgcccccacccccacctcccgagctgcggtaccgggttccgccccggcccgcgccctctagctggcgccacccaagcggcaagggacgtcgcggccctcccgggattggtgggaggatcgtgggggagcggcagctcaggacggaatacggcaatgaccgccccggtcgcgagggtgaccctgccccgggctgctgtgggggcgcaagaaccctttcactttacggcgagattaagctcagggtcaagttctgagcaaaaagtgtcaaggagcctttttgcaacctcctataatattgaaacagattctgtgccctttaaaggagataataactaacatctggggagcgctttacaatttagaaaaggcctttcacacacaggcctgtttcatcttcacaacaatcttataaaacagatatattgttcccatttcccaaataatgaaacggaagcgccgaaaagtaagtattgtgctcaatgtcacaggctactaagtggcatgggaaaccaggtctcctgaatctagcctccgggtttctgctctccaccagcccaacctcagaaaattctaataggtgcagggggctttggcaaatagacccatgggaagaaggggaaacttatgtctagttaagtcgctgcccgattcctgctgtaaacataccaaggaaagcaacaggctgtcttcattgtgttgtcgcaccttccttcctgaaagggacgcagaaagattacatcaaatggcccagatgagatttcgccgacagtattttatggtttaaaatgggtgaaattatttggatgaagaaaagcgccttacttaaatttaatatgatgtgtaatgtaaattggtataatgtgtgaaaataagcccctccctgccttctctgccttttctctttttaattttgtttgtctctactgctctgctcaactcttttattgtccacataattgaaaacctaattgatggatatttgcatttccaaattaaacctttggctacttgacttaatttcccatggattgttttccaaaatataactcttcgccctactccatatcctcccatcgggagattggtttacctagacagctaaaataattaaggtgtccctgatgaaacctggtggtgtatctatctaagatgaaagttctggtcatccctgagcaggatgggacaggagtcatctcttacaaagtgtttgtacaccttttaaaggtttctaacagagactgatctctattctaatcaataacaagtattttaacgtttttgctatataatgaatacatttcattgtgaaatatatattagcatggtaatattttataatctgaaaacttttaccacttctatctaaaatgttttccttttttgtgttctttttgtgtcatcccatagtatctcctatagggctcttcaaactgtggtcaacttagtaaatgatgttgacagtggaagtgtgatcattttattttcctgcctttggaattgaagattgtaattttgcaaaaattttgttgaagatgatgtagctttggttcagagagtaagtcattccatttatatcaatattcttaaggcaatgtgctaggtgacgagccatattgatgacaaagacagagctcctattttcatgacattccagtgtggtggcagaaacaagcaagtaaataattccagtacacacttctgttgatttatttcgtgaatggtgactggctatttaaaaagactaaatcaaattaattttctgataatgaataaaaaaggatagccatgccagtgagttattattattttttaagttgcctttctctctcttctgctggtcatcttatataaatagtcaataagaaggctattttaaaaagtgattacactatatctactttaaaaaattttttatatctactttttaaatttcagacataaacaaaag

SEQ ID NO: 316643 - DNA, 4001 bp, Homo sapiens
aacttcttagatcaaggtatcttaatcttaattttctgccatggacctctgtagcagtctgacaataacagcactatcagaaaaatgtttttaaatacattaaataaaatacataagaatacaaaggtaccagattatatagacaagcacctattaaaatatttaaaagaaatcaatggtacagtagtgtttttctttactactgaattaagcaagataaagcagttccttaatttcctgagtggagagcacaaaaggtgtttgaagacatctgcaacaattgtattaagattatgaaaagacatatagtttctattgtgataacatcacaaggactggtactatagttttatctctagtcctacttaaaaaaaaaaaaaacactaaatttcagctagaggttaacaaaaatagagacacaacttgtgtttctcatccaagttctactacttggccccagattaagaaccactttcttaaaactcaataaaatggaagcagaggataaaccactgtgttgagaagaagaaatataaaaagcaggtagcacataggaggtactttatacagagaagctctttccttcctagaaagttctatttcgtaggaaaaaaacattgtctcatccagcccaaacatgaacatttaacatccatttctctccatgatctgagtcttcagacgtgttaagtcttctgagacctcccaaaatcactgttctacatcaaatatcagcttgaagaaccctactactttaaatatgtgagaccaaactgctttctagcaaaacacagttgaaagagaatgtatatataactcctaagtctcccttagcaccaactgctgtcaaaactaaaataaaatcgcacagaacagtttggatctcataataatcactaatgccttgtcatcactcttcttcaacgctcattacaaaaacagtaacaaaccatggaaagacggggcttcaggttcttacaatagcgctcctctgacagcaactgcagttcattatcctctctccccttcaccaccccggcgcgttcccggtctttgcctactcagcagattcacgtaagcggggccgttttatgtggaatcgtacattctagcagtaaaattttcactcaccaggcaaattctcacccaccctctccaaggtgaactatgttttacattaatcgtatttctaaacttcccctcgagacaacagcaagaaatccagaaaaccgaggggtaggcgcacaaagaatctaaatggaaatttgggcaagggcggacaagtgaaatcaacttaatgtcccggaaaataacagttctgggggaagaagggggctatctaactttaatcttcactttaactccatccctctctccgctgtgcagaaattgtccagcatgttctccaaactgctttttatctgacatttagtcaagccacagcctcgggaatgatgagaaggcaatgacaaagctgcttcctgtccgtctccttccccgcaccctgccctcccccgcaaccttcagctcccctcgccacgaacgcgtttgaaaagtttctccggtgcacggcttaccttgactgggctgccataattcagcttatagagccaggggtcttccgtccatgagcgccttcaccccgcgggccctgctgccagcgccgcgctcaccatttggcggagccgggcggggacgcgtcccggcgcggcgccccgatgttacgggactacctgctctcgagccccgggcgtcctcggcgcagccccgggctcggcccgtattggctcgcgctaatcctgatggacatccgggcactggggcctctgcggcgatctgcacttcagacgagcccggggagcgccgcgtccgaatccggggcaagcgagcgcccccggcgcagtttctgagaagggaaagccagcgggcccccacgctcgaagaccgccggcgcccaacgcctgcccagcaacagcacaacgcgggccacagttagaaaggaaaagaaattgcctctgggctcacttgaagttgtccgagtccgccgggataccccctgtcaagaaagttgcggtggtacggcccgcctacttaaatgggcagggcgctcggcggccctagccaaaggcaggcggcaagcggcaggcagggtcgggtagggggcagagcctgggcgccgacaagccctgctggtccccggccgagccccgcctgcgggctcctcgagagtgctctcttgccaggttctaactacgtacagacacccaccgctggaatacacagtacccagccgctcagaactccagctccaatttgaatatttgttgaatatggggcccccagaggcggcagtgagcaggaacaagaccgcggcagtaaaccacgttcgctacttttgatccttccagtgcttgagctcaagaaacgggcatacttggtgttactccgctttcagttttgatttccttacatagagacaaatatttacaaaacagcccgccttttttggactacacgtagattacaggaaaaatagtacctcattttggtcttaagcaatgaagggattgacaagaagcaaacaaaaaacttgagcatgcaatatagtaagtcctatacgaagcacaaacgaaatcacttcctactcagaggaccatggaaagcgtttaagccgtgcctcaaaagcaggaaaatacttggatgagcaaggatggagggaggttgtgcttcagcatctcatagggaccagcacaccggaggagctgaagactcttagatgaatactgaataactgcctgcactgtggactctccgttcttctacctagaatcatgacaacattgcccgtctcataaagagatagtccagattgtattactaaatcgtcgtgaaatacaaacatgttaatgcctggcactaaaacgacaatgctgggagggaggcccaaggcacctctatcaagggttctcaaagtgtgtttactagattcctgggagtccccaagaccctctcagaggtcagaactatttttagaataacacaaagacattgtcttttcactgtgctgacatttgcactgatggtgcaaaagcaattatggggaaactgctggcgccttcgcactaaccaaagcagtgacagcaaatgaaactagtagtcactgcattcttcactaccacacgttatttttttttaagcgtttcctttatgattgtcgttaatgaagcaagcagtcagaattattacgttcattaaatcttgacccttgagcatgggtctttttgatgttctttgtgataaaatgggaagtacccaggaagcagtccactgcacacttaagtacaatggctgtctagaagaaaagcacttgtgtaattgagttgcaagctgagctagcttttttttcatggactaccatttttacttgaaagaacaattcacaaactgtagttattctgacttgggtatctggcagacattaaaaatgaacaaagttgagcctgtttctttgaggaaaacaattgacagtacttattgccaatgatgaaatttgagctttcaagcattttggaagactttttgcatctgccacataatcttgccagcttcgccaatacttaaagactttcctgatgagatcagagtgacagtgatgaaagttatatgagaagatctgccttagttttgaaatgaccaatggtataacagaatcatacatgggtaggccaggtgcagtggctcacgcctgtaatcccagcactttgggaggctaaggcaggcagatcgcttaagctcaggagtttgataccagagcctggacaacatggtgagaccccatttctaccaaaaacacaaaaaattagctgagcatagtggcacgcatctctgatcccagatacttgggaggtggaagttgcagtgagctgagattgtgccactgcaccccagcctgggtgacagagtaagactctctctcaaacaaaaaccaaaatcatgcatgg
